United States Patent Application Publication US 2005/0255487 A1 - sequence listing, part 48

SEQ ID NO: 1312822 - RNA, 19 nt, Homo sapiens
  misc_RNA (1)...(19): siRNA sense strand
ccaaggcugcucuguuucu

SEQ ID NO: 1312823 - RNA, 19 nt, Homo sapiens
  misc_RNA (1)...(19): siRNA sense strand
guacuugcugcugucgaua

SEQ ID NO: 1312824 - RNA, 19 nt, Homo sapiens
  misc_RNA (1)...(19): siRNA sense strand
gguaguaugaagcuugaca

SEQ ID NO: 1312825 - RNA, 19 nt, Homo sapiens
  misc_RNA (1)...(19): siRNA sense strand
gauauuggggcuugccuuu

SEQ ID NO: 1312826 - RNA, 19 nt, Homo sapiens
  misc_RNA (1)...(19): siRNA sense strand
gaagacaucuccaugaauu

SEQ ID NO: 1312827 - RNA, 19 nt, Homo sapiens
  misc_RNA (1)...(19): siRNA sense strand
caccaaggcugcucuguuu

SEQ ID NO: 1312828 - RNA, 19 nt, Homo sapiens
  misc_RNA (1)...(19): siRNA sense strand
ggaauuacacugucacuug

SEQ ID NO: 1312829 - RNA, 19 nt, Homo sapiens
  misc_RNA (1)...(19): siRNA sense strand
gaacuugggcugcaucaau

SEQ ID NO: 1312830 - RNA, 19 nt, Homo sapiens
  misc_RNA (1)...(19): siRNA sense strand
caucaaugcucaaggaaag

SEQ ID NO: 1312831 - RNA, 19 nt, Homo sapiens
  misc_RNA (1)...(19): siRNA sense strand
gcaccaaggcugcucuguu

SEQ ID NO: 1312832 - RNA, 19 nt, Homo sapiens
  misc_RNA (1)...(19): siRNA sense strand
gaaaggaagacaucuccau

SEQ ID NO: 1312833 - RNA, 19 nt, Homo sapiens
  misc_RNA (1)...(19): siRNA sense strand
aggaagacaucuccaugaa

SEQ ID NO: 1312834 - RNA, 19 nt, Homo sapiens
  misc_RNA (1)...(19): siRNA sense strand
agaaggugcuggugacugu

SEQ ID NO: 1312835 - RNA, 19 nt, Homo sapiens
  misc_RNA (1)...(19): siRNA sense strand
gcguuuccaugucacguaa

SEQ ID NO: 1312836 - RNA, 19 nt, Homo sapiens
  misc_RNA (1)...(19): siRNA sense strand
ggaagacaucuccaugaau

SEQ ID NO: 1312837 - RNA, 19 nt, Homo sapiens
  misc_RNA (1)...(19): siRNA sense strand
cauccaccaugugcaguaa

SEQ ID NO: 1312838 - RNA, 19 nt, Homo sapiens
  misc_RNA (1)...(19): siRNA sense strand
caaggcugcucuguuucuu

SEQ ID NO: 1312839 - RNA, 19 nt, Homo sapiens
  misc_RNA (1)...(19): siRNA sense strand
ccagcgcguuuccauguca

SEQ ID NO: 1312840 - RNA, 19 nt, Homo sapiens
  misc_RNA (1)...(19): siRNA sense strand
aggcugcucuguuucuuuc

SEQ ID NO: 1312841 - RNA, 19 nt, Homo sapiens
  misc_RNA (1)...(19): siRNA sense strand
ucaaggaaaggaagacauc

SEQ ID NO: 1312842 - RNA, 19 nt, Homo sapiens
  misc_RNA (1)...(19): siRNA sense strand
aaggaagacaucuccauga

SEQ ID NO: 1312843 - RNA, 19 nt, Homo sapiens
  misc_RNA (1)...(19): siRNA sense strand
ugaauuccguucccaucca

SEQ ID NO: 1312844 - RNA, 19 nt, Homo sapiens
  misc_RNA (1)...(19): siRNA sense strand
aacuugggcugcaucaaug

SEQ ID NO: 1312845 - RNA, 19 nt, Homo sapiens
  misc_RNA (1)...(19): siRNA sense strand
ccaaggcugcucuguuucu

SEQ ID NO: 1312846 - RNA, 19 nt, Homo sapiens
  misc_RNA (1)...(19): siRNA sense strand
gugauuaucucuaugacua

SEQ ID NO: 1312847 - RNA, 19 nt, Homo sapiens
  misc_RNA (1)...(19): siRNA sense strand
gaauuguucuauuggcauu

SEQ ID NO: 1312848 - RNA, 19 nt, Homo sapiens
  misc_RNA (1)...(19): siRNA sense strand
guuuagaucugcuagguau

SEQ ID NO: 1312849 - RNA, 19 nt, Homo sapiens
  misc_RNA (1)...(19): siRNA sense strand
aauugaagcuaucugcaua

SEQ ID NO: 1312850 - RNA, 19 nt, Homo sapiens
  misc_RNA (1)...(19): siRNA sense strand
uaucaugagcucaaguuua

SEQ ID NO: 1312851 - RNA, 19 nt, Homo sapiens
  misc_RNA (1)...(19): siRNA sense strand
cacagugccuggaagaauu

SEQ ID NO: 1312852 - RNA, 19 nt, Homo sapiens
  misc_RNA (1)...(19): siRNA sense strand
uuacuugucuucauuugug

SEQ ID NO: 1312853 - RNA, 19 nt, Homo sapiens
  misc_RNA (1)...(19): siRNA sense strand
acaguuggcuauggagaua

SEQ ID NO: 1312854 - RNA, 19 nt, Homo sapiens
  misc_RNA (1)...(19): siRNA sense strand
aaacguugcuaccgagaga

SEQ ID NO: 1312855 - RNA, 19 nt, Homo sapiens
  misc_RNA (1)...(19): siRNA sense strand
gagcucaaguuuagaucug

SEQ ID NO: 1312856 - RNA, 19 nt, Homo sapiens
  misc_RNA (1)...(19): siRNA sense strand
ucaguggaauuguucuauu

SEQ ID NO: 1312857 - RNA, 19 nt, Homo sapiens
  misc_RNA (1)...(19): siRNA sense strand
gagguucauugucuccaaa

SEQ ID NO: 1312858 - RNA, 19 nt, Homo sapiens
  misc_RNA (1)...(19): siRNA sense strand
caguggaauuguucuauug

SEQ ID NO: 1312859 - RNA, 19 nt, Homo sapiens
  misc_RNA (1)...(19): siRNA sense strand
ggugggugauuaucucuau

SEQ ID NO: 1312860 - RNA, 19 nt, Homo sapiens
  misc_RNA (1)...(19): siRNA sense strand
cguauuacaucucuguguu

SEQ ID NO: 1312861 - RNA, 19 nt, Homo sapiens
  misc_RNA (1)...(19): siRNA sense strand
gaggguacuuagaaugaug

SEQ ID NO: 1312862 - RNA, 19 nt, Homo sapiens
  misc_RNA (1)...(19): siRNA sense strand
gagagaugguuauguuacu

SEQ ID NO: 1312863 - RNA, 19 nt, Homo sapiens
  misc_RNA (1)...(19): siRNA sense strand
ugugcgagcucuccuucua

SEQ ID NO: 1312864 - RNA, 19 nt, Homo sapiens
  misc_RNA (1)...(19): siRNA sense strand
gcaaucacgccguauuaca

SEQ ID NO: 1312865 - RNA, 19 nt, Homo sapiens
  misc_RNA (1)...(19): siRNA sense strand
caaggacuuuaccagcauu

SEQ ID NO: 1312866 - RNA, 19 nt, Homo sapiens
  misc_RNA (1)...(19): siRNA sense strand
gcgcaacgaguacuucuuc

SEQ ID NO: 1312867 - RNA, 19 nt, Homo sapiens
  misc_RNA (1)...(19): siRNA sense strand
ggaggaguuuguguuguca

SEQ ID NO: 1312868 - RNA, 19 nt, Homo sapiens
  misc_RNA (1)...(19): siRNA sense strand
uggcaaucacgccguauua

SEQ ID NO: 1312869 - RNA, 19 nt, Homo sapiens
  misc_RNA (1)...(19): siRNA sense strand
gggagcugcugaaggacuu

SEQ ID NO: 1312870 - RNA, 19 nt, Homo sapiens
  misc_RNA (1)...(19): siRNA sense strand
uggcauuaccuaucacuuu

SEQ ID NO: 1312871 - RNA, 19 nt, Homo sapiens
  misc_RNA (1)...(19): siRNA sense strand
cuauuggcauuaccuauca

SEQ ID NO: 1312872 - RNA, 19 nt, Homo sapiens
  misc_RNA (1)...(19): siRNA sense strand
uuucucagcuucuugaaca

SEQ ID NO: 1312873 - RNA, 19 nt, Homo sapiens
  misc_RNA (1)...(19): siRNA sense strand
gagaugguuauguuacuug

SEQ ID NO: 1312874 - RNA, 19 nt, Homo sapiens
  misc_RNA (1)...(19): siRNA sense strand
uauuacaucucuguguuga

SEQ ID NO: 1312875 - RNA, 19 nt, Homo sapiens
  misc_RNA (1)...(19): siRNA sense strand
gagccucuccacugaauuc

SEQ ID NO: 1312876 - RNA, 19 nt, Homo sapiens
  misc_RNA (1)...(19): siRNA sense strand
aucaugagcucaaguuuag

SEQ ID NO: 1312877 - RNA, 19 nt, Homo sapiens
  misc_RNA (1)...(19): siRNA sense strand
ggcauuaccuaucacuuuu

SEQ ID NO: 1312878 - RNA, 19 nt, Homo sapiens
  misc_RNA (1)...(19): siRNA sense strand
accgagagaugguuauguu

SEQ ID NO: 1312879 - RNA, 19 nt, Homo sapiens
  misc_RNA (1)...(19): siRNA sense strand
gacuacaguuggcuaugga

SEQ ID NO: 1312880 - RNA, 19 nt, Homo sapiens
  misc_RNA (1)...(19): siRNA sense strand
gaucugcuagguauaguag

SEQ ID NO: 1312881 - RNA, 19 nt, Homo sapiens
  misc_RNA (1)...(19): siRNA sense strand
ggcuggaccuggaaacauc

SEQ ID NO: 1312882 - RNA, 19 nt, Homo sapiens
  misc_RNA (1)...(19): siRNA sense strand
ccgagugcaucgugagguu

SEQ ID NO: 1312883 - RNA, 19 nt, Homo sapiens
  misc_RNA (1)...(19): siRNA sense strand
auagcuuugugcaguguua

SEQ ID NO: 1312884 - RNA, 19 nt, Homo sapiens
  misc_RNA (1)...(19): siRNA sense strand
ugacuacaguuggcuaugg

SEQ ID NO: 1312885 - RNA, 19 nt, Homo sapiens
  misc_RNA (1)...(19): siRNA sense strand
gauuaucucuaugacuaca

SEQ ID NO: 1312886 - RNA, 19 nt, Homo sapiens
  misc_RNA (1)...(19): siRNA sense strand
acacucgguuugacucuca

SEQ ID NO: 1312887 - RNA, 19 nt, Homo sapiens
  misc_RNA (1)...(19): siRNA sense strand
cuuagaaugaugaggauuu

SEQ ID NO: 1312888 - RNA, 19 nt, Homo sapiens
  misc_RNA (1)...(19): siRNA sense strand
gcaacgaguacuucuucga

SEQ ID NO: 1312889 - RNA, 19 nt, Homo sapiens
  misc_RNA (1)...(19): siRNA sense strand
gcuggugggugauuaucuc

SEQ ID NO: 1312890 - RNA, 19 nt, Homo sapiens
  misc_RNA (1)...(19): siRNA sense strand
acaaggacuuuaccagcau

SEQ ID NO: 1312891 - RNA, 19 nt, Homo sapiens
  misc_RNA (1)...(19): siRNA sense strand
aaacauccaacaaggacuu

SEQ ID NO: 1312892 - RNA, 19 nt, Homo sapiens
  misc_RNA (1)...(19): siRNA sense strand
caaucacgccguauuacau

SEQ ID NO: 1312893 - RNA, 19 nt, Homo sapiens
  misc_RNA (1)...(19): siRNA sense strand
ccgagagaugguuauguua

SEQ ID NO: 1312894 - RNA, 19 nt, Homo sapiens
  misc_RNA (1)...(19): siRNA sense strand
gcuugcccgucacuucauu

SEQ ID NO: 1312895 - RNA, 19 nt, Homo sapiens
  misc_RNA (1)...(19): siRNA sense strand
uaucuaccauagcuuugug

SEQ ID NO: 1312896 - RNA, 19 nt, Homo sapiens
  misc_RNA (1)...(19): siRNA sense strand
ucacagugccuggaagaau

SEQ ID NO: 1312897 - RNA, 19 nt, Homo sapiens
  misc_RNA (1)...(19): siRNA sense strand
gcacuuucucagcuucuug

SEQ ID NO: 1312898 - RNA, 19 nt, Homo sapiens
  misc_RNA (1)...(19): siRNA sense strand
ggcaaucuuuagugcacuu

SEQ ID NO: 1312899 - RNA, 19 nt, Homo sapiens
  misc_RNA (1)...(19): siRNA sense strand
guauuacaucucuguguug

SEQ ID NO: 1312900 - RNA, 19 nt, Homo sapiens
  misc_RNA (1)...(19): siRNA sense strand
uggaggaguuuguguuguc

SEQ ID NO: 1312901 - RNA, 19 nt, Homo sapiens
  misc_RNA (1)...(19): siRNA sense strand
agagaugguuauguuacuu

SEQ ID NO: 1312902 - RNA, 19 nt, Homo sapiens
  misc_RNA (1)...(19): siRNA sense strand
gggcuggagucaccuugag

SEQ ID NO: 1312903 - RNA, 19 nt, Homo sapiens
  misc_RNA (1)...(19): siRNA sense strand
ugagguucauugucuccaa

SEQ ID NO: 1312904 - RNA, 19 nt, Homo sapiens
  misc_RNA (1)...(19): siRNA sense strand
ucugcuagguauaguagga

SEQ ID NO: 1312905 - RNA, 19 nt, Homo sapiens
  misc_RNA (1)...(19): siRNA sense strand
guuaucaugagcucaaguu

SEQ ID NO: 1312906 - RNA, 19 nt, Homo sapiens
  misc_RNA (1)...(19): siRNA sense strand
uaagcuugcccgucacuuc

SEQ ID NO: 1312907 - RNA, 19 nt, Homo sapiens
  misc_RNA (1)...(19): siRNA sense strand
cgagagaugguuauguuac

SEQ ID NO: 1312908 - RNA, 19 nt, Homo sapiens
  misc_RNA (1)...(19): siRNA sense strand
uaauugaagcuaucugcau

SEQ ID NO: 1312909 - RNA, 19 nt, Homo sapiens
  misc_RNA (1)...(19): siRNA sense strand
uugaggguacuuagaauga

SEQ ID NO: 1312910 - RNA, 19 nt, Homo sapiens
  misc_RNA (1)...(19): siRNA sense strand
caugagcucaaguuuagau

SEQ ID NO: 1312911 - RNA, 19 nt, Homo sapiens
  misc_RNA (1)...(19): siRNA sense strand
cugcauagguugguucacu

SEQ ID NO: 1312912 - RNA, 19 nt, Homo sapiens
  misc_RNA (1)...(19): siRNA sense strand
uaucacagugccuggaaga

SEQ ID NO: 1312913 - RNA, 19 nt, Homo sapiens
  misc_RNA (1)...(19): siRNA sense strand
ugaggguacuuagaaugau

SEQ ID NO: 1312914 - RNA, 19 nt, Homo sapiens
  misc_RNA (1)...(19): siRNA sense strand
agugugaguuugucaagag

SEQ ID NO: 1312915 - RNA, 19 nt, Homo sapiens
  misc_RNA (1)...(19): siRNA sense strand
ccauagcuuugugcagugu

SEQ ID NO: 1312916 - RNA, 19 nt, Homo sapiens
  misc_RNA (1)...(19): siRNA sense strand
gugauuaucucuaugacua

SEQ ID NO: 1312917 - RNA, 19 nt, Homo sapiens
  misc_RNA (1)...(19): siRNA sense strand
gaauuguucuauuggcauu

SEQ ID NO: 1312918 - RNA, 19 nt, Homo sapiens
  misc_RNA (1)...(19): siRNA sense strand
guuuagaucugcuagguau

SEQ ID NO: 1312919 - RNA, 19 nt, Homo sapiens
  misc_RNA (1)...(19): siRNA sense strand
aauugaagcuaucugcaua

SEQ ID NO: 1312920 - RNA, 19 nt, Homo sapiens
  misc_RNA (1)...(19): siRNA sense strand
uaucaugagcucaaguuua

SEQ ID NO: 1312921 - RNA, 19 nt, Homo sapiens
  misc_RNA (1)...(19): siRNA sense strand
cacagugccuggaagaauu

SEQ ID NO: 1312922 - RNA, 19 nt, Homo sapiens
  misc_RNA (1)...(19): siRNA sense strand
uuacuugucuucauuugug

SEQ ID NO: 1312923 - RNA, 19 nt, Homo sapiens
  misc_RNA (1)...(19): siRNA sense strand
acaguuggcuauggagaua

SEQ ID NO: 1312924 - RNA, 19 nt, Homo sapiens
  misc_RNA (1)...(19): siRNA sense strand
aaacguugcuaccgagaga

SEQ ID NO: 1312925 - RNA, 19 nt, Homo sapiens
  misc_RNA (1)...(19): siRNA sense strand
gagcucaaguuuagaucug

SEQ ID NO: 1312926 - RNA, 19 nt, Homo sapiens
  misc_RNA (1)...(19): siRNA sense strand
ucaguggaauuguucuauu

SEQ ID NO: 1312927 - RNA, 19 nt, Homo sapiens
  misc_RNA (1)...(19): siRNA sense strand
gagguucauugucuccaaa

SEQ ID NO: 1312928 - RNA, 19 nt, Homo sapiens
  misc_RNA (1)...(19): siRNA sense strand
caguggaauuguucuauug

SEQ ID NO: 1312929 - RNA, 19 nt, Homo sapiens
  misc_RNA (1)...(19): siRNA sense strand
ggugggugauuaucucuau

SEQ ID NO: 1312930 - RNA, 19 nt, Homo sapiens
  misc_RNA (1)...(19): siRNA sense strand
cguauuacaucucuguguu

SEQ ID NO: 1312931 - RNA, 19 nt, Homo sapiens
  misc_RNA (1)...(19): siRNA sense strand
gaggguacuuagaaugaug

SEQ ID NO: 1312932 - RNA, 19 nt, Homo sapiens
  misc_RNA (1)...(19): siRNA sense strand
gagagaugguuauguuacu

SEQ ID NO: 1312933 - RNA, 19 nt, Homo sapiens
  misc_RNA (1)...(19): siRNA sense strand
ugugcgagcucuccuucua

SEQ ID NO: 1312934 - RNA, 19 nt, Homo sapiens
  misc_RNA (1)...(19): siRNA sense strand
gcaaucacgccguauuaca

SEQ ID NO: 1312935 - RNA, 19 nt, Homo sapiens
  misc_RNA (1)...(19): siRNA sense strand
caaggacuuuaccagcauu

SEQ ID NO: 1312936 - RNA, 19 nt, Homo sapiens
  misc_RNA (1)...(19): siRNA sense strand
gcgcaacgaguacuucuuc

SEQ ID NO: 1312937 - RNA, 19 nt, Homo sapiens
  misc_RNA (1)...(19): siRNA sense strand
ggaggaguuuguguuguca

SEQ ID NO: 1312938 - RNA, 19 nt, Homo sapiens
  misc_RNA (1)...(19): siRNA sense strand
uggcaaucacgccguauua

SEQ ID NO: 1312939 - RNA, 19 nt, Homo sapiens
  misc_RNA (1)...(19): siRNA sense strand
gggagcugcugaaggacuu

SEQ ID NO: 1312940 - RNA, 19 nt, Homo sapiens
  misc_RNA (1)...(19): siRNA sense strand
uggcauuaccuaucacuuu

SEQ ID NO: 1312941 - RNA, 19 nt, Homo sapiens
  misc_RNA (1)...(19): siRNA sense strand
cuauuggcauuaccuauca

SEQ ID NO: 1312942 - RNA, 19 nt, Homo sapiens
  misc_RNA (1)...(19): siRNA sense strand
uuucucagcuucuugaaca

SEQ ID NO: 1312943 - RNA, 19 nt, Homo sapiens
  misc_RNA (1)...(19): siRNA sense strand
gagaugguuauguuacuug

SEQ ID NO: 1312944 - RNA, 19 nt, Homo sapiens
  misc_RNA (1)...(19): siRNA sense strand
uauuacaucucuguguuga

SEQ ID NO: 1312945 - RNA, 19 nt, Homo sapiens
  misc_RNA (1)...(19): siRNA sense strand
gagccucuccacugaauuc

SEQ ID NO: 1312946 - RNA, 19 nt, Homo sapiens
  misc_RNA (1)...(19): siRNA sense strand
aucaugagcucaaguuuag

SEQ ID NO: 1312947 - RNA, 19 nt, Homo sapiens
  misc_RNA (1)...(19): siRNA sense strand
ggcauuaccuaucacuuuu

SEQ ID NO: 1312948 - RNA, 19 nt, Homo sapiens
  misc_RNA (1)...(19): siRNA sense strand
accgagagaugguuauguu

SEQ ID NO: 1312949 - RNA, 19 nt, Homo sapiens
  misc_RNA (1)...(19): siRNA sense strand
gacuacaguuggcuaugga

SEQ ID NO: 1312950 - RNA, 19 nt, Homo sapiens
  misc_RNA (1)...(19): siRNA sense strand
gaucugcuagguauaguag

SEQ ID NO: 1312951 - RNA, 19 nt, Homo sapiens
  misc_RNA (1)...(19): siRNA sense strand
ggcuggaccuggaaacauc

SEQ ID NO: 1312952 - RNA, 19 nt, Homo sapiens
  misc_RNA (1)...(19): siRNA sense strand
ccgagugcaucgugagguu

SEQ ID NO: 1312953 - RNA, 19 nt, Homo sapiens
  misc_RNA (1)...(19): siRNA sense strand
auagcuuugugcaguguua

SEQ ID NO: 1312954 - RNA, 19 nt, Homo sapiens
  misc_RNA (1)...(19): siRNA sense strand
ugacuacaguuggcuaugg

SEQ ID NO: 1312955 - RNA, 19 nt, Homo sapiens
  misc_RNA (1)...(19): siRNA sense strand
gauuaucucuaugacuaca

SEQ ID NO: 1312956 - RNA, 19 nt, Homo sapiens
  misc_RNA (1)...(19): siRNA sense strand
acacucgguuugacucuca

SEQ ID NO: 1312957 - RNA, 19 nt, Homo sapiens
  misc_RNA (1)...(19): siRNA sense strand
cuuagaaugaugaggauuu

SEQ ID NO: 1312958 - RNA, 19 nt, Homo sapiens
  misc_RNA (1)...(19): siRNA sense strand
gcaacgaguacuucuucga

SEQ ID NO: 1312959 - RNA, 19 nt, Homo sapiens
  misc_RNA (1)...(19): siRNA sense strand
gcuggugggugauuaucuc

SEQ ID NO: 1312960 - RNA, 19 nt, Homo sapiens
  misc_RNA (1)...(19): siRNA sense strand
acaaggacuuuaccagcau

SEQ ID NO: 1312961 - RNA, 19 nt, Homo sapiens
  misc_RNA (1)...(19): siRNA sense strand
aaacauccaacaaggacuu

SEQ ID NO: 1312962 - RNA, 19 nt, Homo sapiens
  misc_RNA (1)...(19): siRNA sense strand
caaucacgccguauuacau

SEQ ID NO: 1312963 - RNA, 19 nt, Homo sapiens
  misc_RNA (1)...(19): siRNA sense strand
ccgagagaugguuauguua

SEQ ID NO: 1312964 - RNA, 19 nt, Homo sapiens
  misc_RNA (1)...(19): siRNA sense strand
gcuugcccgucacuucauu

SEQ ID NO: 1312965 - RNA, 19 nt, Homo sapiens
  misc_RNA (1)...(19): siRNA sense strand
uaucuaccauagcuuugug

SEQ ID NO: 1312966 - RNA, 19 nt, Homo sapiens
  misc_RNA (1)...(19): siRNA sense strand
ucacagugccuggaagaau

SEQ ID NO: 1312967 - RNA, 19 nt, Homo sapiens
  misc_RNA (1)...(19): siRNA sense strand
gcacuuucucagcuucuug

SEQ ID NO: 1312968 - RNA, 19 nt, Homo sapiens
  misc_RNA (1)...(19): siRNA sense strand
ggcaaucuuuagugcacuu

SEQ ID NO: 1312969 - RNA, 19 nt, Homo sapiens
  misc_RNA (1)...(19): siRNA sense strand
guauuacaucucuguguug

SEQ ID NO: 1312970 - RNA, 19 nt, Homo sapiens
  misc_RNA (1)...(19): siRNA sense strand
uggaggaguuuguguuguc

SEQ ID NO: 1312971 - RNA, 19 nt, Homo sapiens
  misc_RNA (1)...(19): siRNA sense strand
agagaugguuauguuacuu

SEQ ID NO: 1312972 - RNA, 19 nt, Homo sapiens
  misc_RNA (1)...(19): siRNA sense strand
gggcuggagucaccuugag

SEQ ID NO: 1312973 - RNA, 19 nt, Homo sapiens
  misc_RNA (1)...(19): siRNA sense strand
ugagguucauugucuccaa

SEQ ID NO: 1312974 - RNA, 19 nt, Homo sapiens
  misc_RNA (1)...(19): siRNA sense strand
ucugcuagguauaguagga

SEQ ID NO: 1312975 - RNA, 19 nt, Homo sapiens
  misc_RNA (1)...(19): siRNA sense strand
guuaucaugagcucaaguu

SEQ ID NO: 1312976 - RNA, 19 nt, Homo sapiens
  misc_RNA (1)...(19): siRNA sense strand
uaagcuugcccgucacuuc

SEQ ID NO: 1312977 - RNA, 19 nt, Homo sapiens
  misc_RNA (1)...(19): siRNA sense strand
cgagagaugguuauguuac

SEQ ID NO: 1312978 - RNA, 19 nt, Homo sapiens
  misc_RNA (1)...(19): siRNA sense strand
uaauugaagcuaucugcau

SEQ ID NO: 1312979 - RNA, 19 nt, Homo sapiens
  misc_RNA (1)...(19): siRNA sense strand
uugaggguacuuagaauga

SEQ ID NO: 1312980 - RNA, 19 nt, Homo sapiens
  misc_RNA (1)...(19): siRNA sense strand
caugagcucaaguuuagau

SEQ ID NO: 1312981 - RNA, 19 nt, Homo sapiens
  misc_RNA (1)...(19): siRNA sense strand
cugcauagguugguucacu

SEQ ID NO: 1312982 - RNA, 19 nt, Homo sapiens
  misc_RNA (1)...(19): siRNA sense strand
uaucacagugccuggaaga

SEQ ID NO: 1312983 - RNA, 19 nt, Homo sapiens
  misc_RNA (1)...(19): siRNA sense strand
ugaggguacuuagaaugau

SEQ ID NO: 1312984 - RNA, 19 nt, Homo sapiens
  misc_RNA (1)...(19): siRNA sense strand
agugugaguuugucaagag

SEQ ID NO: 1312985 - RNA, 19 nt, Homo sapiens
  misc_RNA (1)...(19): siRNA sense strand
ccauagcuuugugcagugu

SEQ ID NO: 1312986 - RNA, 19 nt, Homo sapiens
  misc_RNA (1)...(19): siRNA sense strand
gaagauucguguggacauu

SEQ ID NO: 1312987 - RNA, 19 nt, Homo sapiens
  misc_RNA (1)...(19): siRNA sense strand
ccaaucagcuggccagagu

SEQ ID NO: 1312988 - RNA, 19 nt, Homo sapiens
  misc_RNA (1)...(19): siRNA sense strand
ucccaaaucugaaggacuu

SEQ ID NO: 1312989 - RNA, 19 nt, Homo sapiens
  misc_RNA (1)...(19): siRNA sense strand
ugaccuccaccguauauuu

SEQ ID NO: 1312990 - RNA, 19 nt, Homo sapiens
  misc_RNA (1)...(19): siRNA sense strand
gaaacugaagccagaauac

SEQ ID NO: 1312991 - RNA, 19 nt, Homo sapiens
  misc_RNA (1)...(19): siRNA sense strand
cagaauacuuggaggaacu

SEQ ID NO: 1312992 - RNA, 19 nt, Homo sapiens
  misc_RNA (1)...(19): siRNA sense strand
gaccuccaccguauauuug

SEQ ID NO: 1312993 - RNA, 19 nt, Homo sapiens
  misc_RNA (1)...(19): siRNA sense strand
gacagaagaggagaagauu

SEQ ID NO: 1312994 - RNA, 19 nt, Homo sapiens
  misc_RNA (1)...(19): siRNA sense strand
agaaacugaagccagaaua

SEQ ID NO: 1312995 - RNA, 19 nt, Homo sapiens
  misc_RNA (1)...(19): siRNA sense strand
agacagaagaggagaagau

SEQ ID NO: 1312996 - RNA, 19 nt, Homo sapiens
  misc_RNA (1)...(19): siRNA sense strand
gagaaacugaagccagaau

SEQ ID NO: 1312997 - RNA, 19 nt, Homo sapiens
  misc_RNA (1)...(19): siRNA sense strand
caagcugggccuggacuuu

SEQ ID NO: 1312998 - RNA, 19 nt, Homo sapiens
  misc_RNA (1)...(19): siRNA sense strand
uauuugagcccaacugcuu

SEQ ID NO: 1312999 - RNA, 19 nt, Homo sapiens
  misc_RNA (1)...(19): siRNA sense strand
cagaagaggagaagauucg

SEQ ID NO: 1313000 - RNA, 19 nt, Homo sapiens
  misc_RNA (1)...(19): siRNA sense strand
ggagacagaagaggagaag

SEQ ID NO: 1313001 - RNA, 19 nt, Homo sapiens
  misc_RNA (1)...(19): siRNA sense strand
gccagaauacuuggaggaa

SEQ ID NO: 1313002 - RNA, 19 nt, Homo sapiens
  misc_RNA (1)...(19): siRNA sense strand
gaagauucguguggacauu

SEQ ID NO: 1313003 - RNA, 19 nt, Homo sapiens
  misc_RNA (1)...(19): siRNA sense strand
ccaaucagcuggccagagu

SEQ ID NO: 1313004 - RNA, 19 nt, Homo sapiens
  misc_RNA (1)...(19): siRNA sense strand
ggacuucaucucccgcuuu

SEQ ID NO: 1313005 - RNA, 19 nt, Homo sapiens
  misc_RNA (1)...(19): siRNA sense strand
ucccaaaucugaaggacuu

SEQ ID NO: 1313006 - RNA, 19 nt, Homo sapiens
  misc_RNA (1)...(19): siRNA sense strand
ugaccuccaccguauauuu

SEQ ID NO: 1313007 - RNA, 19 nt, Homo sapiens
  misc_RNA (1)...(19): siRNA sense strand
gaaacugaagccagaauac

SEQ ID NO: 1313008 - RNA, 19 nt, Homo sapiens
  misc_RNA (1)...(19): siRNA sense strand
gacuucaucucccgcuuug

SEQ ID NO: 1313009 - RNA, 19 nt, Homo sapiens
  misc_RNA (1)...(19): siRNA sense strand
cagaauacuuggaggaacu

SEQ ID NO: 1313010 - RNA, 19 nt, Homo sapiens
  misc_RNA (1)...(19): siRNA sense strand
gaccuccaccguauauuug

SEQ ID NO: 1313011 - RNA, 19 nt, Homo sapiens
  misc_RNA (1)...(19): siRNA sense strand
gacagaagaggagaagauu

SEQ ID NO: 1313012 - RNA, 19 nt, Homo sapiens
  misc_RNA (1)...(19): siRNA sense strand
agaaacugaagccagaaua

SEQ ID NO: 1313013 - RNA, 19 nt, Homo sapiens
  misc_RNA (1)...(19): siRNA sense strand
agacagaagaggagaagau

SEQ ID NO: 1313014 - RNA, 19 nt, Homo sapiens
  misc_RNA (1)...(19): siRNA sense strand
gagaaacugaagccagaau

SEQ ID NO: 1313015 - RNA, 19 nt, Homo sapiens
  misc_RNA (1)...(19): siRNA sense strand
caagcugggccuggacuuu

SEQ ID NO: 1313016 - RNA, 19 nt, Homo sapiens
  misc_RNA (1)...(19): siRNA sense strand
uauuugagcccaacugcuu

SEQ ID NO: 1313017 - RNA, 19 nt, Homo sapiens
  misc_RNA (1)...(19): siRNA sense strand
cagaagaggagaagauucg

SEQ ID NO: 1313018 - RNA, 19 nt, Homo sapiens
  misc_RNA (1)...(19): siRNA sense strand
ggagacagaagaggagaag

SEQ ID NO: 1313019 - RNA, 19 nt, Homo sapiens
  misc_RNA (1)...(19): siRNA sense strand
gccagaauacuuggaggaa

SEQ ID NO: 1313020 - RNA, 19 nt, Homo sapiens
  misc_RNA (1)...(19): siRNA sense strand
gaagauucguguggacauu

SEQ ID NO: 1313021 - RNA, 19 nt, Homo sapiens
  misc_RNA (1)...(19): siRNA sense strand
ccaaucagcuggccagagu

SEQ ID NO: 1313022 - RNA, 19 nt, Homo sapiens
  misc_RNA (1)...(19): siRNA sense strand
gacagaagaggagaagauu

SEQ ID NO: 1313023 - RNA, 19 nt, Homo sapiens
  misc_RNA (1)...(19): siRNA sense strand
agacagaagaggagaagau

SEQ ID NO: 1313024 - RNA, 19 nt, Homo sapiens
  misc_RNA (1)...(19): siRNA sense strand
caagcugggccuggacuuu

SEQ ID NO: 1313025 - RNA, 19 nt, Homo sapiens
  misc_RNA (1)...(19): siRNA sense strand
cagaagaggagaagauucg

SEQ ID NO: 1313026 - RNA, 19 nt, Homo sapiens
  misc_RNA (1)...(19): siRNA sense strand
ggagacagaagaggagaag

SEQ ID NO: 1313027 - RNA, 19 nt, Homo sapiens
  misc_RNA (1)...(19): siRNA sense strand
gaacaauacugcauuagaa

SEQ ID NO: 1313028 - RNA, 19 nt, Homo sapiens
  misc_RNA (1)...(19): siRNA sense strand
ggaagaagacaacgaauaa

SEQ ID NO: 1313029 - RNA, 19 nt, Homo sapiens
  misc_RNA (1)...(19): siRNA sense strand
ggauaaagcuguguccaaa

SEQ ID NO: 1313030 - RNA, 19 nt, Homo sapiens
  misc_RNA (1)...(19): siRNA sense strand
ucacagagcagauagauuu

SEQ ID NO: 1313031 - RNA, 19 nt, Homo sapiens
  misc_RNA (1)...(19): siRNA sense strand
ggauggagaugcaguaaau

SEQ ID NO: 1313032 - RNA, 19 nt, Homo sapiens
  misc_RNA (1)...(19): siRNA sense strand
ucaagaaucugacgugaug

SEQ ID NO: 1313033 - RNA, 19 nt, Homo sapiens
  misc_RNA (1)...(19): siRNA sense strand
gaagcuauuucagcaagua

SEQ ID NO: 1313034 - RNA, 19 nt, Homo sapiens
  misc_RNA (1)...(19): siRNA sense strand
gaaagaggcagacugaaau

SEQ ID NO: 1313035 - RNA, 19 nt, Homo sapiens
  misc_RNA (1)...(19): siRNA sense strand
gaaagaacaauacugcauu

SEQ ID NO: 1313036 - RNA, 19 nt, Homo sapiens
  misc_RNA (1)...(19): siRNA sense strand
gaaauacaaacgcuagaaa

SEQ ID NO: 1313037 - RNA, 19 nt, Homo sapiens
  misc_RNA (1)...(19): siRNA sense strand
gagaauggaugauaguagu

SEQ ID NO: 1313038 - RNA, 19 nt, Homo sapiens
  misc_RNA (1)...(19): siRNA sense strand
caagaagaauccuggcauu

SEQ ID NO: 1313039 - RNA, 19 nt, Homo sapiens
  misc_RNA (1)...(19): siRNA sense strand
gagcaaaucauccuagaga

SEQ ID NO: 1313040 - RNA, 19 nt, Homo sapiens
  misc_RNA (1)...(19): siRNA sense strand
gaggcagacugaaauagaa

SEQ ID NO: 1313041 - RNA, 19 nt, Homo sapiens
  misc_RNA (1)...(19): siRNA sense strand
gcaaaucauccuagagaaa

SEQ ID NO: 1313042 - RNA, 19 nt, Homo sapiens
  misc_RNA (1)...(19): siRNA sense strand
gggagaaugugcugcuaaa

SEQ ID NO: 1313043 - RNA, 19 nt, Homo sapiens
  misc_RNA (1)...(19): siRNA sense strand
gaagaauccuggcauugca

SEQ ID NO: 1313044 - RNA, 19 nt, Homo sapiens
  misc_RNA (1)...(19): siRNA sense strand
gaaauugaggugucuguug

SEQ ID NO: 1313045 - RNA, 19 nt, Homo sapiens
  misc_RNA (1)...(19): siRNA sense strand
uacaaacgcuagaaaguga

SEQ ID NO: 1313046 - RNA, 19 nt, Homo sapiens
  misc_RNA (1)...(19): siRNA sense strand
gaggaugaguucagaguca

SEQ ID NO: 1313047 - RNA, 19 nt, Homo sapiens
  misc_RNA (1)...(19): siRNA sense strand
gcaaacaauuucagcugau

SEQ ID NO: 1313048 - RNA, 19 nt, Homo sapiens
  misc_RNA (1)...(19): siRNA sense strand
ccaauccucuguucacgaa

SEQ ID NO: 1313049 - RNA, 19 nt, Homo sapiens
  misc_RNA (1)...(19): siRNA sense strand
gcaggcaccuccucacauc

SEQ ID NO: 1313050 - RNA, 19 nt, Homo sapiens
  misc_RNA (1)...(19): siRNA sense strand
gauggaacguacaauggaa

SEQ ID NO: 1313051 - RNA, 19 nt, Homo sapiens
  misc_RNA (1)...(19): siRNA sense strand
gaaaagggauguauuacca

SEQ ID NO: 1313052 - RNA, 19 nt, Homo sapiens
  misc_RNA (1)...(19): siRNA sense strand
ccaaagugcuucgggagaa

SEQ ID NO: 1313053 - RNA, 19 nt, Homo sapiens
  misc_RNA (1)...(19): siRNA sense strand
agaaugugcugcuaaagga

SEQ ID NO: 1313054 - RNA, 19 nt, Homo sapiens
  misc_RNA (1)...(19): siRNA sense strand
ggaggaagaagacaacgaa

SEQ ID NO: 1313055 - RNA, 19 nt, Homo sapiens
  misc_RNA (1)...(19): siRNA sense strand
ggaaacagcggacuuuguc

SEQ ID NO: 1313056 - RNA, 19 nt, Homo sapiens
  misc_RNA (1)...(19): siRNA sense strand
gcgcaagcaugauugacaa

SEQ ID NO: 1313057 - RNA, 19 nt, Homo sapiens
  misc_RNA (1)...(19): siRNA sense strand
gcccagacaugacuaucaa

SEQ ID NO: 1313058 - RNA, 19 nt, Homo sapiens
  misc_RNA (1)...(19): siRNA sense strand
aaagaaagaggcagacuga

SEQ ID NO: 1313059 - RNA, 19 nt, Homo sapiens
  misc_RNA (1)...(19): siRNA sense strand
ucacuguggucaaggauga

SEQ ID NO: 1313060 - RNA, 19 nt, Homo sapiens
  misc_RNA (1)...(19): siRNA sense strand
auaauggccuccuuacuga

SEQ ID NO: 1313061 - RNA, 19 nt, Homo sapiens
  misc_RNA (1)...(19): siRNA sense strand
ggcugaggauggagaauuu

SEQ ID NO: 1313062 - RNA, 19 nt, Homo sapiens
  misc_RNA (1)...(19): siRNA sense strand
aaagggauguauuaccaaa

SEQ ID NO: 1313063 - RNA, 19 nt, Homo sapiens
  misc_RNA (1)...(19): siRNA sense strand
agaaagaggcagacugaaa

SEQ ID NO: 1313064 - RNA, 19 nt, Homo sapiens
  misc_RNA (1)...(19): siRNA sense strand
ugaagcgacuguagaggaa

SEQ ID NO: 1313065 - RNA, 19 nt, Homo sapiens
  misc_RNA (1)...(19): siRNA sense strand
cagacaagccacugacuaa

SEQ ID NO: 1313066 - RNA, 19 nt, Homo sapiens
  misc_RNA (1)...(19): siRNA sense strand
gagacccuauccaaugauu

SEQ ID NO: 1313067 - RNA, 19 nt, Homo sapiens
  misc_RNA (1)...(19): siRNA sense strand
gcgagagaauggaugauag

SEQ ID NO: 1313068 - RNA, 19 nt, Homo sapiens
  misc_RNA (1)...(19): siRNA sense strand
uagagaaacugaaggaaac

SEQ ID NO: 1313069 - RNA, 19 nt, Homo sapiens
  misc_RNA (1)...(19): siRNA sense strand
auaaugauguugccagaga

SEQ ID NO: 1313070 - RNA, 19 nt, Homo sapiens
  misc_RNA (1)...(19): siRNA sense strand
gaaacugaaggaaacagaa

SEQ ID NO: 1313071 - RNA, 19 nt, Homo sapiens
  misc_RNA (1)...(19): siRNA sense strand
gaggcuggagcaagaaaua

SEQ ID NO: 1313072 - RNA, 19 nt, Homo sapiens
  misc_RNA (1)...(19): siRNA sense strand
caaagugcuucgggagaaa

SEQ ID NO: 1313073 - RNA, 19 nt, Homo sapiens
  misc_RNA (1)...(19): siRNA sense strand
cauaauggccuccuuacug

SEQ ID NO: 1313074 - RNA, 19 nt, Homo sapiens
  misc_RNA (1)...(19): siRNA sense strand
agacaugacuaucaagaag

SEQ ID NO: 1313075 - RNA, 19 nt, Homo sapiens
  misc_RNA (1)...(19): siRNA sense strand
gggcacagcaggaacaguu

SEQ ID NO: 1313076 - RNA, 19 nt, Homo sapiens
  misc_RNA (1)...(19): siRNA sense strand
caaacaauuucagcugaug

SEQ ID NO: 1313077 - RNA, 19 nt, Homo sapiens
  misc_RNA (1)...(19): siRNA sense strand
ucacugcccuccagaacau

SEQ ID NO: 1313078 - RNA, 19 nt, Homo sapiens
  misc_RNA (1)...(19): siRNA sense strand
gcaacuugaagauaacauu

SEQ ID NO: 1313079 - RNA, 19 nt, Homo sapiens
  misc_RNA (1)...(19): siRNA sense strand
gaaggcgucuccaagucau

SEQ ID NO: 1313080 - RNA, 19 nt, Homo sapiens
  misc_RNA (1)...(19): siRNA sense strand
gaugaugaccaugggauuu

SEQ ID NO: 1313081 - RNA, 19 nt, Homo sapiens
  misc_RNA (1)...(19): siRNA sense strand
gaacgcgcaagcaugauug

SEQ ID NO: 1313082 - RNA, 19 nt, Homo sapiens
  misc_RNA (1)...(19): siRNA sense strand
ugacgagcaugagaaagaa

SEQ ID NO: 1313083 - RNA, 19 nt, Homo sapiens
  misc_RNA (1)...(19): siRNA sense strand
gccaggccgucaagaagaa

SEQ ID NO: 1313084 - RNA, 19 nt, Homo sapiens
  misc_RNA (1)...(19): siRNA sense strand
aaacgugggcccuuaucua

SEQ ID NO: 1313085 - RNA, 19 nt, Homo sapiens
  misc_RNA (1)...(19): siRNA sense strand
aaagaggcagacugaaaua

SEQ ID NO: 1313086 - RNA, 19 nt, Homo sapiens
  misc_RNA (1)...(19): siRNA sense strand
gagagaauggaugauagua

SEQ ID NO: 1313087 - RNA, 19 nt, Homo sapiens
  misc_RNA (1)...(19): siRNA sense strand
gcauggacaacaucaguga

SEQ ID NO: 1313088 - RNA, 19 nt, Homo sapiens
  misc_RNA (1)...(19): siRNA sense strand
acaaccagcucacgguguu

SEQ ID NO: 1313089 - RNA, 19 nt, Homo sapiens
  misc_RNA (1)...(19): siRNA sense strand
gaacguacaauggaacauc

SEQ ID NO: 1313090 - RNA, 19 nt, Homo sapiens
  misc_RNA (1)...(19): siRNA sense strand
cuagagaaacugaaggaaa

SEQ ID NO: 1313091 - RNA, 19 nt, Homo sapiens
  misc_RNA (1)...(19): siRNA sense strand
ggaugacgagcaugagaaa

SEQ ID NO: 1313092 - RNA, 19 nt, Homo sapiens
  misc_RNA (1)...(19): siRNA sense strand
uagccgagcagguggauaa

SEQ ID NO: 1313093 - RNA, 19 nt, Homo sapiens
  misc_RNA (1)...(19): siRNA sense strand
acucuggucuggacgaauu

SEQ ID NO: 1313094 - RNA, 19 nt, Homo sapiens
  misc_RNA (1)...(19): siRNA sense strand
aauuucagcugauggagaa

SEQ ID NO: 1313095 - RNA, 19 nt, Homo sapiens
  misc_RNA (1)...(19): siRNA sense strand
gagaagggcacagcaggaa

SEQ ID NO: 1313096 - RNA, 19 nt, Homo sapiens
  misc_RNA (1)...(19): siRNA sense strand
gcuaaaggaaggugaguca

SEQ ID NO: 1313097 - RNA, 19 nt, Homo sapiens
  misc_RNA (1)...(19): siRNA sense strand
caaaacugcuccagggaaa

SEQ ID NO: 1313098 - RNA, 19 nt, Homo sapiens
  misc_RNA (1)...(19): siRNA sense strand
ggauguauuaccaaagauu

SEQ ID NO: 1313099 - RNA, 19 nt, Homo sapiens
  misc_RNA (1)...(19): siRNA sense strand
ccaaugcccuccaggaaaa

SEQ ID NO: 1313100 - RNA, 19 nt, Homo sapiens
  misc_RNA (1)...(19): siRNA sense strand
gcagccaggccgucaagaa

SEQ ID NO: 1313101 - RNA, 19 nt, Homo sapiens
  misc_RNA (1)...(19): siRNA sense strand
ggauggaacguacaaugga

SEQ ID NO: 1313102 - RNA, 19 nt, Homo sapiens
  misc_RNA (1)...(19): siRNA sense strand
aaacugaaggaaacagaaa

SEQ ID NO: 1313103 - RNA, 19 nt, Homo sapiens
  misc_RNA (1)...(19): siRNA sense strand
cagcuugcagccugacuua

SEQ ID NO: 1313104 - RNA, 19 nt, Homo sapiens
  misc_RNA (1)...(19): siRNA sense strand
ccaaugauuucagcaugga

SEQ ID NO: 1313105 - RNA, 19 nt, Homo sapiens
  misc_RNA (1)...(19): siRNA sense strand
gaagggcacagcaggaaca

SEQ ID NO: 1313106 - RNA, 19 nt, Homo sapiens
  misc_RNA (1)...(19): siRNA sense strand
gagaaugugcugcuaaagg

SEQ ID NO: 1313107 - RNA, 19 nt, Homo sapiens
  misc_RNA (1)...(19): siRNA sense strand
ggagucgggugggagaaug

SEQ ID NO: 1313108 - RNA, 19 nt, Homo sapiens
  misc_RNA (1)...(19): siRNA sense strand
gacaagccacugacuaauc

SEQ ID NO: 1313109 - RNA, 19 nt, Homo sapiens
  misc_RNA (1)...(19): siRNA sense strand
gccagaacccacugaaaga

SEQ ID NO: 1313110 - RNA, 19 nt, Homo sapiens
  misc_RNA (1)...(19): siRNA sense strand
ccaagucauuuagugauca

SEQ ID NO: 1313111 - RNA, 19 nt, Homo sapiens
  misc_RNA (1)...(19): siRNA sense strand
aggaagaagacaacgaaua

SEQ ID NO: 1313112 - RNA, 19 nt, Homo sapiens
  misc_RNA (1)...(19): siRNA sense strand
agggauguauuaccaaaga

SEQ ID NO: 1313113 - RNA, 19 nt, Homo sapiens
  misc_RNA (1)...(19): siRNA sense strand
gaccaucccuccgcuuucu

SEQ ID NO: 1313114 - RNA, 19 nt, Homo sapiens
  misc_RNA (1)...(19): siRNA sense strand
ccaggaaacagcggacuuu

SEQ ID NO: 1313115 - RNA, 19 nt, Homo sapiens
  misc_RNA (1)...(19): siRNA sense strand
cagcgagccuucuaaacgu

SEQ ID NO: 1313116 - RNA, 19 nt, Homo sapiens
  misc_RNA (1)...(19): siRNA sense strand
ggaggcggcagucugaaga

SEQ ID NO: 1313117 - RNA, 19 nt, Homo sapiens
  misc_RNA (1)...(19): siRNA sense strand
guacaaggagcgcaaagag

SEQ ID NO: 1313118 - RNA, 19 nt, Homo sapiens
  misc_RNA (1)...(19): siRNA sense strand
acaucgagcucaguaauag

SEQ ID NO: 1313119 - RNA, 19 nt, Homo sapiens
  misc_RNA (1)...(19): siRNA sense strand
caaagagcaaaucauccua

SEQ ID NO: 1313120 - RNA, 19 nt, Homo sapiens
  misc_RNA (1)...(19): siRNA sense strand
gggaagaggagcugaagag

SEQ ID NO: 1313121 - RNA, 19 nt, Homo sapiens
  misc_RNA (1)...(19): siRNA sense strand
ccaaugagacaaccaaugc

SEQ ID NO: 1313122 - RNA, 19 nt, Homo sapiens
  misc_RNA (1)...(19): siRNA sense strand
caacuugaagauaacauuc

SEQ ID NO: 1313123 - RNA, 19 nt, Homo sapiens
  misc_RNA (1)...(19): siRNA sense strand
cuacagcgagccuucuaaa

SEQ ID NO: 1313124 - RNA, 19 nt, Homo sapiens
  misc_RNA (1)...(19): siRNA sense strand
agagaaaagggauguauua

SEQ ID NO: 1313125 - RNA, 19 nt, Homo sapiens
  misc_RNA (1)...(19): siRNA sense strand
gacccuauccaaugauuuc

SEQ ID NO: 1313126 - RNA, 19 nt, Homo sapiens
  misc_RNA (1)...(19): siRNA sense strand
cucaagaucugucaauguc

SEQ ID NO: 1313127 - RNA, 19 nt, Homo sapiens
  misc_RNA (1)...(19): siRNA sense strand
gaacaauacugcauuagaa

SEQ ID NO: 1313128 - RNA, 19 nt, Homo sapiens
  misc_RNA (1)...(19): siRNA sense strand
ggaagaagacaacgaauaa

SEQ ID NO: 1313129 - RNA, 19 nt, Homo sapiens
  misc_RNA (1)...(19): siRNA sense strand
ggauaaagcuguguccaaa

SEQ ID NO: 1313130 - RNA, 19 nt, Homo sapiens
  misc_RNA (1)...(19): siRNA sense strand
ucacagagcagauagauuu

SEQ ID NO: 1313131 - RNA, 19 nt, Homo sapiens
  misc_RNA (1)...(19): siRNA sense strand
ggauggagaugcaguaaau

SEQ ID NO: 1313132 - RNA, 19 nt, Homo sapiens
  misc_RNA (1)...(19): siRNA sense strand
ucaagaaucugacgugaug

SEQ ID NO: 1313133 - RNA, 19 nt, Homo sapiens
  misc_RNA (1)...(19): siRNA sense strand
gaagcuauuucagcaagua

SEQ ID NO: 1313134 - RNA, 19 nt, Homo sapiens
  misc_RNA (1)...(19): siRNA sense strand
gaaagaggcagacugaaau

SEQ ID NO: 1313135 - RNA, 19 nt, Homo sapiens
  misc_RNA (1)...(19): siRNA sense strand
gaaagaacaauacugcauu

SEQ ID NO: 1313136 - RNA, 19 nt, Homo sapiens
  misc_RNA (1)...(19): siRNA sense strand
gaaauacaaacgcuagaaa

SEQ ID NO: 1313137 - RNA, 19 nt, Homo sapiens
  misc_RNA (1)...(19): siRNA sense strand
gagaauggaugauaguagu

SEQ ID NO: 1313138 - RNA, 19 nt, Homo sapiens
  misc_RNA (1)...(19): siRNA sense strand
caagaagaauccuggcauu

SEQ ID NO: 1313139 - RNA, 19 nt, Homo sapiens
  misc_RNA (1)...(19): siRNA sense strand
gagcaaaucauccuagaga

SEQ ID NO: 1313140 - RNA, 19 nt, Homo sapiens
  misc_RNA (1)...(19): siRNA sense strand
gaggcagacugaaauagaa

SEQ ID NO: 1313141 - RNA, 19 nt, Homo sapiens
  misc_RNA (1)...(19): siRNA sense strand
gcaaaucauccuagagaaa

SEQ ID NO: 1313142 - RNA, 19 nt, Homo sapiens
  misc_RNA (1)...(19): siRNA sense strand
gggagaaugugcugcuaaa

SEQ ID NO: 1313143 - RNA, 19 nt, Homo sapiens
  misc_RNA (1)...(19): siRNA sense strand
gaagaauccuggcauugca

SEQ ID NO: 1313144 - RNA, 19 nt, Homo sapiens
  misc_RNA (1)...(19): siRNA sense strand
gaaauugaggugucuguug

SEQ ID NO: 1313145 - RNA, 19 nt, Homo sapiens
  misc_RNA (1)...(19): siRNA sense strand
uacaaacgcuagaaaguga

SEQ ID NO: 1313146 - RNA, 19 nt, Homo sapiens
  misc_RNA (1)...(19): siRNA sense strand
gaggaugaguucagaguca

SEQ ID NO: 1313147 - RNA, 19 nt, Homo sapiens
  misc_RNA (1)...(19): siRNA sense strand
gcaaacaauuucagcugau

SEQ ID NO: 1313148 - RNA, 19 nt, Homo sapiens
  misc_RNA (1)...(19): siRNA sense strand
ccaauccucuguucacgaa

SEQ ID NO: 1313149 - RNA, 19 nt, Homo sapiens
  misc_RNA (1)...(19): siRNA sense strand
gcaggcaccuccucacauc

SEQ ID NO: 1313150 - RNA, 19 nt, Homo sapiens
  misc_RNA (1)...(19): siRNA sense strand
gauggaacguacaauggaa

SEQ ID NO: 1313151 - RNA, 19 nt, Homo sapiens
  misc_RNA (1)...(19): siRNA sense strand
gaaaagggauguauuacca

SEQ ID NO: 1313152 - RNA, 19 nt, Homo sapiens
  misc_RNA (1)...(19): siRNA sense strand
ccaaagugcuucgggagaa

SEQ ID NO: 1313153 - RNA, 19 nt, Homo sapiens
  misc_RNA (1)...(19): siRNA sense strand
agaaugugcugcuaaagga

SEQ ID NO: 1313154 - RNA, 19 nt, Homo sapiens
  misc_RNA (1)...(19): siRNA sense strand
ggaggaagaagacaacgaa

SEQ ID NO: 1313155 - RNA, 19 nt, Homo sapiens
  misc_RNA (1)...(19): siRNA sense strand
ggaaacagcggacuuuguc

SEQ ID NO: 1313156 - RNA, 19 nt, Homo sapiens
  misc_RNA (1)...(19): siRNA sense strand
gcgcaagcaugauugacaa

SEQ ID NO: 1313157 - RNA, 19 nt, Homo sapiens
  misc_RNA (1)...(19): siRNA sense strand
gcccagacaugacuaucaa

SEQ ID NO: 1313158 - RNA, 19 nt, Homo sapiens
  misc_RNA (1)...(19): siRNA sense strand
aaagaaagaggcagacuga

SEQ ID NO: 1313159 - RNA, 19 nt, Homo sapiens
  misc_RNA (1)...(19): siRNA sense strand
ucacuguggucaaggauga

SEQ ID NO: 1313160 - RNA, 19 nt, Homo sapiens
  misc_RNA (1)...(19): siRNA sense strand
auaauggccuccuuacuga

SEQ ID NO: 1313161 - RNA, 19 nt, Homo sapiens
  misc_RNA (1)...(19): siRNA sense strand
ggcugaggauggagaauuu

SEQ ID NO: 1313162 - RNA, 19 nt, Homo sapiens
  misc_RNA (1)...(19): siRNA sense strand
aaagggauguauuaccaaa

SEQ ID NO: 1313163 - RNA, 19 nt, Homo sapiens
  misc_RNA (1)...(19): siRNA sense strand
agaaagaggcagacugaaa

SEQ ID NO: 1313164 - RNA, 19 nt, Homo sapiens
  misc_RNA (1)...(19): siRNA sense strand
ugaagcgacuguagaggaa

SEQ ID NO: 1313165 - RNA, 19 nt, Homo sapiens
  misc_RNA (1)...(19): siRNA sense strand
cagacaagccacugacuaa

SEQ ID NO: 1313166 - RNA, 19 nt, Homo sapiens
  misc_RNA (1)...(19): siRNA sense strand
gagacccuauccaaugauu

SEQ ID NO: 1313167 - RNA, 19 nt, Homo sapiens
  misc_RNA (1)...(19): siRNA sense strand
gcgagagaauggaugauag

SEQ ID NO: 1313168 - RNA, 19 nt, Homo sapiens
  misc_RNA (1)...(19): siRNA sense strand
uagagaaacugaaggaaac

SEQ ID NO: 1313169 - RNA, 19 nt, Homo sapiens
  misc_RNA (1)...(19): siRNA sense strand
auaaugauguugccagaga

SEQ ID NO: 1313170 - RNA, 19 nt, Homo sapiens
  misc_RNA (1)...(19): siRNA sense strand
gaaacugaaggaaacagaa

SEQ ID NO: 1313171 - RNA, 19 nt, Homo sapiens
  misc_RNA (1)...(19): siRNA sense strand
gaggcuggagcaagaaaua

SEQ ID NO: 1313172 - RNA, 19 nt, Homo sapiens
  misc_RNA (1)...(19): siRNA sense strand
caaagugcuucgggagaaa

SEQ ID NO: 1313173 - RNA, 19 nt, Homo sapiens
  misc_RNA (1)...(19): siRNA sense strand
cauaauggccuccuuacug

SEQ ID NO: 1313174 - RNA, 19 nt, Homo sapiens
  misc_RNA (1)...(19): siRNA sense strand
agacaugacuaucaagaag

SEQ ID NO: 1313175 - RNA, 19 nt, Homo sapiens
  misc_RNA (1)...(19): siRNA sense strand
gggcacagcaggaacaguu

SEQ ID NO: 1313176 - RNA, 19 nt, Homo sapiens
  misc_RNA (1)...(19): siRNA sense strand
caaacaauuucagcugaug

SEQ ID NO: 1313177 - RNA, 19 nt, Homo sapiens
  misc_RNA (1)...(19): siRNA sense strand
ucacugcccuccagaacau

SEQ ID NO: 1313178 - RNA, 19 nt, Homo sapiens
  misc_RNA (1)...(19): siRNA sense strand
gcaacuugaagauaacauu

SEQ ID NO: 1313179 - RNA, 19 nt, Homo sapiens
  misc_RNA (1)...(19): siRNA sense strand
gaaggcgucuccaagucau

SEQ ID NO: 1313180 - RNA, 19 nt, Homo sapiens
  misc_RNA (1)...(19): siRNA sense strand
gaugaugaccaugggauuu

SEQ ID NO: 1313181 - RNA, 19 nt, Homo sapiens
  misc_RNA (1)...(19): siRNA sense strand
gaacgcgcaagcaugauug

SEQ ID NO: 1313182 - RNA, 19 nt, Homo sapiens
  misc_RNA (1)...(19): siRNA sense strand
ugacgagcaugagaaagaa

SEQ ID NO: 1313183 - RNA, 19 nt, Homo sapiens
  misc_RNA (1)...(19): siRNA sense strand
gccaggccgucaagaagaa

SEQ ID NO: 1313184 - RNA, 19 nt, Homo sapiens
  misc_RNA (1)...(19): siRNA sense strand
aaacgugggcccuuaucua

SEQ ID NO: 1313185 - RNA, 19 nt, Homo sapiens
  misc_RNA (1)...(19): siRNA sense strand
aaagaggcagacugaaaua

SEQ ID NO: 1313186 - RNA, 19 nt, Homo sapiens
  misc_RNA (1)...(19): siRNA sense strand
gagagaauggaugauagua

SEQ ID NO: 1313187 - RNA, 19 nt, Homo sapiens
  misc_RNA (1)...(19): siRNA sense strand
gcauggacaacaucaguga

SEQ ID NO: 1313188 - RNA, 19 nt, Homo sapiens
  misc_RNA (1)...(19): siRNA sense strand
acaaccagcucacgguguu

SEQ ID NO: 1313189 - RNA, 19 nt, Homo sapiens
  misc_RNA (1)...(19): siRNA sense strand
gaacguacaauggaacauc

SEQ ID NO: 1313190 - RNA, 19 nt, Homo sapiens
  misc_RNA (1)...(19): siRNA sense strand
cuagagaaacugaaggaaa

SEQ ID NO: 1313191 - RNA, 19 nt, Homo sapiens
  misc_RNA (1)...(19): siRNA sense strand
ggaugacgagcaugagaaa

SEQ ID NO: 1313192 - RNA, 19 nt, Homo sapiens
  misc_RNA (1)...(19): siRNA sense strand
uagccgagcagguggauaa

SEQ ID NO: 1313193 - RNA, 19 nt, Homo sapiens
  misc_RNA (1)...(19): siRNA sense strand
acucuggucuggacgaauu

SEQ ID NO: 1313194 - RNA, 19 nt, Homo sapiens
  misc_RNA (1)...(19): siRNA sense strand
aauuucagcugauggagaa

SEQ ID NO: 1313195 - RNA, 19 nt, Homo sapiens
  misc_RNA (1)...(19): siRNA sense strand
gagaagggcacagcaggaa

SEQ ID NO: 1313196 - RNA, 19 nt, Homo sapiens
  misc_RNA (1)...(19): siRNA sense strand
gcuaaaggaaggugaguca

SEQ ID NO: 1313197 - RNA, 19 nt, Homo sapiens
  misc_RNA (1)...(19): siRNA sense strand
caaaacugcuccagggaaa

SEQ ID NO: 1313198 - RNA, 19 nt, Homo sapiens
  misc_RNA (1)...(19): siRNA sense strand
ggauguauuaccaaagauu

SEQ ID NO: 1313199 - RNA, 19 nt, Homo sapiens
  misc_RNA (1)...(19): siRNA sense strand
ccaaugcccuccaggaaaa

SEQ ID NO: 1313200 - RNA, 19 nt, Homo sapiens
  misc_RNA (1)...(19): siRNA sense strand
gcagccaggccgucaagaa

SEQ ID NO: 1313201 - RNA, 19 nt, Homo sapiens
  misc_RNA (1)...(19): siRNA sense strand
ggauggaacguacaaugga

SEQ ID NO: 1313202 - RNA, 19 nt, Homo sapiens
  misc_RNA (1)...(19): siRNA sense strand
aaacugaaggaaacagaaa

SEQ ID NO: 1313203 - RNA, 19 nt, Homo sapiens
  misc_RNA (1)...(19): siRNA sense strand
cagcuugcagccugacuua

SEQ ID NO: 1313204 - RNA, 19 nt, Homo sapiens
  misc_RNA (1)...(19): siRNA sense strand
ccaaugauuucagcaugga

SEQ ID NO: 1313205 - RNA, 19 nt, Homo sapiens
  misc_RNA (1)...(19): siRNA sense strand
gaagggcacagcaggaaca

SEQ ID NO: 1313206 - RNA, 19 nt, Homo sapiens
  misc_RNA (1)...(19): siRNA sense strand
gagaaugugcugcuaaagg

SEQ ID NO: 1313207 - RNA, 19 nt, Homo sapiens
  misc_RNA (1)...(19): siRNA sense strand
ggagucgggugggagaaug

SEQ ID NO: 1313208 - RNA, 19 nt, Homo sapiens
  misc_RNA (1)...(19): siRNA sense strand
gacaagccacugacuaauc

SEQ ID NO: 1313209 - RNA, 19 nt, Homo sapiens
  misc_RNA (1)...(19): siRNA sense strand
gccagaacccacugaaaga

SEQ ID NO: 1313210 - RNA, 19 nt, Homo sapiens
  misc_RNA (1)...(19): siRNA sense strand
ccaagucauuuagugauca

SEQ ID NO: 1313211 - RNA, 19 nt, Homo sapiens
  misc_RNA (1)...(19): siRNA sense strand
aggaagaagacaacgaaua

SEQ ID NO: 1313212 - RNA, 19 nt, Homo sapiens
  misc_RNA (1)...(19): siRNA sense strand
agggauguauuaccaaaga

SEQ ID NO: 1313213 - RNA, 19 nt, Homo sapiens
  misc_RNA (1)...(19): siRNA sense strand
gaccaucccuccgcuuucu

SEQ ID NO: 1313214 - RNA, 19 nt, Homo sapiens
  misc_RNA (1)...(19): siRNA sense strand
ccaggaaacagcggacuuu

SEQ ID NO: 1313215 - RNA, 19 nt, Homo sapiens
  misc_RNA (1)...(19): siRNA sense strand
cagcgagccuucuaaacgu

SEQ ID NO: 1313216 - RNA, 19 nt, Homo sapiens
  misc_RNA (1)...(19): siRNA sense strand
ggaggcggcagucugaaga

SEQ ID NO: 1313217 - RNA, 19 nt, Homo sapiens
  misc_RNA (1)...(19): siRNA sense strand
guacaaggagcgcaaagag

SEQ ID NO: 1313218 - RNA, 19 nt, Homo sapiens
  misc_RNA (1)...(19): siRNA sense strand
acaucgagcucaguaauag

SEQ ID NO: 1313219 - RNA, 19 nt, Homo sapiens
  misc_RNA (1)...(19): siRNA sense strand
caaagagcaaaucauccua

SEQ ID NO: 1313220 - RNA, 19 nt, Homo sapiens
  misc_RNA (1)...(19): siRNA sense strand
gggaagaggagcugaagag

SEQ ID NO: 1313221 - RNA, 19 nt, Homo sapiens
  misc_RNA (1)...(19): siRNA sense strand
ccaaugagacaaccaaugc

SEQ ID NO: 1313222 - RNA, 19 nt, Homo sapiens
  misc_RNA (1)...(19): siRNA sense strand
caacuugaagauaacauuc

SEQ ID NO: 1313223 - RNA, 19 nt, Homo sapiens
  misc_RNA (1)...(19): siRNA sense strand
cuacagcgagccuucuaaa

SEQ ID NO: 1313224 - RNA, 19 nt, Homo sapiens
  misc_RNA (1)...(19): siRNA sense strand
agagaaaagggauguauua

SEQ ID NO: 1313225 - RNA, 19 nt, Homo sapiens
  misc_RNA (1)...(19): siRNA sense strand
gacccuauccaaugauuuc

SEQ ID NO: 1313226 - RNA, 19 nt, Homo sapiens
  misc_RNA (1)...(19): siRNA sense strand
cucaagaucugucaauguc

SEQ ID NO: 1313227 - RNA, 19 nt, Homo sapiens
  misc_RNA (1)...(19): siRNA sense strand
gaagaagacccauuugaua

SEQ ID NO: 1313228 - RNA, 19 nt, Homo sapiens
  misc_RNA (1)...(19): siRNA sense strand
gauggaguuucuucaguua

SEQ ID NO: 1313229 - RNA, 19 nt, Homo sapiens
  misc_RNA (1)...(19): siRNA sense strand
gaagaaaggagagaauauu

SEQ ID NO: 1313230 - RNA, 19 nt, Homo sapiens
  misc_RNA (1)...(19): siRNA sense strand
ucagagaaguacaguauga

SEQ ID NO: 1313231 - RNA, 19 nt, Homo sapiens
  misc_RNA (1)...(19): siRNA sense strand
gcaccaguguucagaagaa

SEQ ID NO: 1313232 - RNA, 19 nt, Homo sapiens
  misc_RNA (1)...(19): siRNA sense strand
ugagugggcugaagagauu

SEQ ID NO: 1313233 - RNA, 19 nt, Homo sapiens
  misc_RNA (1)...(19): siRNA sense strand
gagagaauauugagcagau

SEQ ID NO: 1313234 - RNA, 19 nt, Homo sapiens
  misc_RNA (1)...(19): siRNA sense strand
gaugaugucccauuuaaga

SEQ ID NO: 1313235 - RNA, 19 nt, Homo sapiens
  misc_RNA (1)...(19): siRNA sense strand
ugaaagacauuaaggaagu

SEQ ID NO: 1313236 - RNA, 19 nt, Homo sapiens
  misc_RNA (1)...(19): siRNA sense strand
ucaguuaccuugaugaugu

SEQ ID NO: 1313237 - RNA, 19 nt, Homo sapiens
  misc_RNA (1)...(19): siRNA sense strand
gaaguugggugcagauuuu

SEQ ID NO: 1313238 - RNA, 19 nt, Homo sapiens
  misc_RNA (1)...(19): siRNA sense strand
aggaagagcugagaaauau

SEQ ID NO: 1313239 - RNA, 19 nt, Homo sapiens
  misc_RNA (1)...(19): siRNA sense strand
gaagagcugagaaauauuc

SEQ ID NO: 1313240 - RNA, 19 nt, Homo sapiens
  misc_RNA (1)...(19): siRNA sense strand
uaaaguuggucuaccuauu

SEQ ID NO: 1313241 - RNA, 19 nt, Homo sapiens
  misc_RNA (1)...(19): siRNA sense strand
cauuauggcucaguuauug

SEQ ID NO: 1313242 - RNA, 19 nt, Homo sapiens
  misc_RNA (1)...(19): siRNA sense strand
gaaagacauuaaggaaguu

SEQ ID NO: 1313243 - RNA, 19 nt, Homo sapiens
  misc_RNA (1)...(19): siRNA sense strand
gaagacccauuugauaauc

SEQ ID NO: 1313244 - RNA, 19 nt, Homo sapiens
  misc_RNA (1)...(19): siRNA sense strand
gcaguaagcaauaucaaau

SEQ ID NO: 1313245 - RNA, 19 nt, Homo sapiens
  misc_RNA (1)...(19): siRNA sense strand
ucagagccaugaagaagaa

SEQ ID NO: 1313246 - RNA, 19 nt, Homo sapiens
  misc_RNA (1)...(19): siRNA sense strand
aaaaugagcuucuccaaga

SEQ ID NO: 1313247 - RNA, 19 nt, Homo sapiens
  misc_RNA (1)...(19): siRNA sense strand
guacgaguguguccucaga

SEQ ID NO: 1313248 - RNA, 19 nt, Homo sapiens
  misc_RNA (1)...(19): siRNA sense strand
acaaugccaccuccuauua

SEQ ID NO: 1313249 - RNA, 19 nt, Homo sapiens
  misc_RNA (1)...(19): siRNA sense strand
gaagcuaaagugaauucua

SEQ ID NO: 1313250 - RNA, 19 nt, Homo sapiens
  misc_RNA (1)...(19): siRNA sense strand
ggacaaugcuuuggaagac

SEQ ID NO: 1313251 - RNA, 19 nt, Homo sapiens
  misc_RNA (1)...(19): siRNA sense strand
aagaagacccauuugauaa

SEQ ID NO: 1313252 - RNA, 19 nt, Homo sapiens
  misc_RNA (1)...(19): siRNA sense strand
gggcaacccuagauuucaa

SEQ ID NO: 1313253 - RNA, 19 nt, Homo sapiens
  misc_RNA (1)...(19): siRNA sense strand
gacaggagacaaauucaaa

SEQ ID NO: 1313254 - RNA, 19 nt, Homo sapiens
  misc_RNA (1)...(19): siRNA sense strand
caauggcuuuauaaccuua

SEQ ID NO: 1313255 - RNA, 19 nt, Homo sapiens
  misc_RNA (1)...(19): siRNA sense strand
uuucaagccucuucauaaa

SEQ ID NO: 1313256 - RNA, 19 nt, Homo sapiens
  misc_RNA (1)...(19): siRNA sense strand
gaacgggcaacccuagauu

SEQ ID NO: 1313257 - RNA, 19 nt, Homo sapiens
  misc_RNA (1)...(19): siRNA sense strand
ggaaucaucaccuccaaau

SEQ ID NO: 1313258 - RNA, 19 nt, Homo sapiens
  misc_RNA (1)...(19): siRNA sense strand
uuaaggagaugggcuuuga

SEQ ID NO: 1313259 - RNA, 19 nt, Homo sapiens
  misc_RNA (1)...(19): siRNA sense strand
gaagaagaaaggagagaau

SEQ ID NO: 1313260 - RNA, 19 nt, Homo sapiens
  misc_RNA (1)...(19): siRNA sense strand
ggaagcagaagcuaaagug

SEQ ID NO: 1313261 - RNA, 19 nt, Homo sapiens
  misc_RNA (1)...(19): siRNA sense strand
gagcaaauuuaaggagaug

SEQ ID NO: 1313262 - RNA, 19 nt, Homo sapiens
  misc_RNA (1)...(19): siRNA sense strand
uugaugaugucccauuuaa

SEQ ID NO: 1313263 - RNA, 19 nt, Homo sapiens
  misc_RNA (1)...(19): siRNA sense strand
uaagacaggagacaaauuc

SEQ ID NO: 1313264 - RNA, 19 nt, Homo sapiens
  misc_RNA (1)...(19): siRNA sense strand
gcugaaagacauuaaggaa

SEQ ID NO: 1313265 - RNA, 19 nt, Homo sapiens
  misc_RNA (1)...(19): siRNA sense strand
gaaaggagagaauauugag

SEQ ID NO: 1313266 - RNA, 19 nt, Homo sapiens
  misc_RNA (1)...(19): siRNA sense strand
gcaauggcacguuccagaa

SEQ ID NO: 1313267 - RNA, 19 nt, Homo sapiens
  misc_RNA (1)...(19): siRNA sense strand
cauaaaggcggauuucaau

SEQ ID NO: 1313268 - RNA, 19 nt, Homo sapiens
  misc_RNA (1)...(19): siRNA sense strand
ccaggacaaugcuuuggaa

SEQ ID NO: 1313269 - RNA, 19 nt, Homo sapiens
  misc_RNA (1)...(19): siRNA sense strand
gaaucaucaccuccaaaua

SEQ ID NO: 1313270 - RNA, 19 nt, Homo sapiens
  misc_RNA (1)...(19): siRNA sense strand
ccagaugccuucccucucu

SEQ ID NO: 1313271 - RNA, 19 nt, Homo sapiens
  misc_RNA (1)...(19): siRNA sense strand
gaaggaagagcugagaaau

SEQ ID NO: 1313272 - RNA, 19 nt, Homo sapiens
  misc_RNA (1)...(19): siRNA sense strand
gaagcagagugcaaaauug

SEQ ID NO: 1313273 - RNA, 19 nt, Homo sapiens
  misc_RNA (1)...(19): siRNA sense strand
ugauggaguuucuucaguu

SEQ ID NO: 1313274 - RNA, 19 nt, Homo sapiens
  misc_RNA (1)...(19): siRNA sense strand
gaugacagcaaucagaaga

SEQ ID NO: 1313275 - RNA, 19 nt, Homo sapiens
  misc_RNA (1)...(19): siRNA sense strand
gauuucaagccucuucaua

SEQ ID NO: 1313276 - RNA, 19 nt, Homo sapiens
  misc_RNA (1)...(19): siRNA sense strand
ggaaccacuggacccauua

SEQ ID NO: 1313277 - RNA, 19 nt, Homo sapiens
  misc_RNA (1)...(19): siRNA sense strand
aaacuugacucugaugaca

SEQ ID NO: 1313278 - RNA, 19 nt, Homo sapiens
  misc_RNA (1)...(19): siRNA sense strand
ccaauggcuuuauaaccuu

SEQ ID NO: 1313279 - RNA, 19 nt, Homo sapiens
  misc_RNA (1)...(19): siRNA sense strand
gggcugaagagauuaagaa

SEQ ID NO: 1313280 - RNA, 19 nt, Homo sapiens
  misc_RNA (1)...(19): siRNA sense strand
cuaaagccuuccacccaaa

SEQ ID NO: 1313281 - RNA, 19 nt, Homo sapiens
  misc_RNA (1)...(19): siRNA sense strand
gaagcagaagcuaaaguga

SEQ ID NO: 1313282 - RNA, 19 nt, Homo sapiens
  misc_RNA (1)...(19): siRNA sense strand
caaugccaccuccuauuaa

SEQ ID NO: 1313283 - RNA, 19 nt, Homo sapiens
  misc_RNA (1)...(19): siRNA sense strand
ucauaaacccaauggcuuu

SEQ ID NO: 1313284 - RNA, 19 nt, Homo sapiens
  misc_RNA (1)...(19): siRNA sense strand
ugaagaagacccauuugau

SEQ ID NO: 1313285 - RNA, 19 nt, Homo sapiens
  misc_RNA (1)...(19): siRNA sense strand
aaaguuggucuaccuauug

SEQ ID NO: 1313286 - RNA, 19 nt, Homo sapiens
  misc_RNA (1)...(19): siRNA sense strand
aaggaagagcugagaaaua

SEQ ID NO: 1313287 - RNA, 19 nt, Homo sapiens
  misc_RNA (1)...(19): siRNA sense strand
gugaagaagacccauuuga

SEQ ID NO: 1313288 - RNA, 19 nt, Homo sapiens
  misc_RNA (1)...(19): siRNA sense strand
gauucucgacuaucucuuu

SEQ ID NO: 1313289 - RNA, 19 nt, Homo sapiens
  misc_RNA (1)...(19): siRNA sense strand
ggacaguggcacagagaug

SEQ ID NO: 1313290 - RNA, 19 nt, Homo sapiens
  misc_RNA (1)...(19): siRNA sense strand
gacuaucucuuugcacaug

SEQ ID NO: 1313291 - RNA, 19 nt, Homo sapiens
  misc_RNA (1)...(19): siRNA sense strand
caguaugacuucucuuugg

SEQ ID NO: 1313292 - RNA, 19 nt, Homo sapiens
  misc_RNA (1)...(19): siRNA sense strand
ggaguuucuucaguuaaug

SEQ ID NO: 1313293 - RNA, 19 nt, Homo sapiens
  misc_RNA (1)...(19): siRNA sense strand
uuuauaaccuuaccacagu

SEQ ID NO: 1313294 - RNA, 19 nt, Homo sapiens
  misc_RNA (1)...(19): siRNA sense strand
cagcccaccucacauaaag

SEQ ID NO: 1313295 - RNA, 19 nt, Homo sapiens
  misc_RNA (1)...(19): siRNA sense strand
cagcaguagugccacgaaa

SEQ ID NO: 1313296 - RNA, 19 nt, Homo sapiens
  misc_RNA (1)...(19): siRNA sense strand
caacucgggucagcaguag

SEQ ID NO: 1313297 - RNA, 19 nt, Homo sapiens
  misc_RNA (1)...(19): siRNA sense strand
gcagguugucagagaagua

SEQ ID NO: 1313298 - RNA, 19 nt, Homo sapiens
  misc_RNA (1)...(19): siRNA sense strand
aagaaaagaugauggaguu

SEQ ID NO: 1313299 - RNA, 19 nt, Homo sapiens
  misc_RNA (1)...(19): siRNA sense strand
agaaaggagagaauauuga

SEQ ID NO: 1313300 - RNA, 19 nt, Homo sapiens
  misc_RNA (1)...(19): siRNA sense strand
gcaguagugccacgaaaca

SEQ ID NO: 1313301 - RNA, 19 nt, Homo sapiens
  misc_RNA (1)...(19): siRNA sense strand
gcacaacagcauccucaca

SEQ ID NO: 1313302 - RNA, 19 nt, Homo sapiens
  misc_RNA (1)...(19): siRNA sense strand
gcuaaagugaauucuaaga

SEQ ID NO: 1313303 - RNA, 19 nt, Homo sapiens
  misc_RNA (1)...(19): siRNA sense strand
ugucagagaaguacaguau

SEQ ID NO: 1313304 - RNA, 19 nt, Homo sapiens
  misc_RNA (1)...(19): siRNA sense strand
uaugacuucucuuuggaaa

SEQ ID NO: 1313305 - RNA, 19 nt, Homo sapiens
  misc_RNA (1)...(19): siRNA sense strand
ggaaaugcaccaguguuca

SEQ ID NO: 1313306 - RNA, 19 nt, Homo sapiens
  misc_RNA (1)...(19): siRNA sense strand
ugacagcaaucagaagaca

SEQ ID NO: 1313307 - RNA, 19 nt, Homo sapiens
  misc_RNA (1)...(19): siRNA sense strand
ggaagcagagugcaaaauu

SEQ ID NO: 1313308 - RNA, 19 nt, Homo sapiens
  misc_RNA (1)...(19): siRNA sense strand
gaaaagaaaaccauugagu

SEQ ID NO: 1313309 - RNA, 19 nt, Homo sapiens
  misc_RNA (1)...(19): siRNA sense strand
caaaacaccagcuaaaguu

SEQ ID NO: 1313310 - RNA, 19 nt, Homo sapiens
  misc_RNA (1)...(19): siRNA sense strand
gaugggcuuugagcugaaa

SEQ ID NO: 1313311 - RNA, 19 nt, Homo sapiens
  misc_RNA (1)...(19): siRNA sense strand
gaaaugcaccaguguucag

SEQ ID NO: 1313312 - RNA, 19 nt, Homo sapiens
  misc_RNA (1)...(19): siRNA sense strand
ccacaaugccaccuccuau

SEQ ID NO: 1313313 - RNA, 19 nt, Homo sapiens
  misc_RNA (1)...(19): siRNA sense strand
agcagaagcuaaagugaau

SEQ ID NO: 1313314 - RNA, 19 nt, Homo sapiens
  misc_RNA (1)...(19): siRNA sense strand
ggacuuucaguuaccuuga

SEQ ID NO: 1313315 - RNA, 19 nt, Homo sapiens
  misc_RNA (1)...(19): siRNA sense strand
uugagcagauucucgacua

SEQ ID NO: 1313316 - RNA, 19 nt, Homo sapiens
  misc_RNA (1)...(19): siRNA sense strand
aagaagaaaggagagaaua

SEQ ID NO: 1313317 - RNA, 19 nt, Homo sapiens
  misc_RNA (1)...(19): siRNA sense strand
ggaagagcugagaaauauu

SEQ ID NO: 1313318 - RNA, 19 nt, Homo sapiens
  misc_RNA (1)...(19): siRNA sense strand
ucucagcccaccucacaua

SEQ ID NO: 1313319 - RNA, 19 nt, Homo sapiens
  misc_RNA (1)...(19): siRNA sense strand
agaaggaagagcugagaaa

SEQ ID NO: 1313320 - RNA, 19 nt, Homo sapiens
  misc_RNA (1)...(19): siRNA sense strand
caacaaugaccaggacaau

SEQ ID NO: 1313321 - RNA, 19 nt, Homo sapiens
  misc_RNA (1)...(19): siRNA sense strand
aagaaaggagagaauauug

SEQ ID NO: 1313322 - RNA, 19 nt, Homo sapiens
  misc_RNA (1)...(19): siRNA sense strand
aaucaucaccuccaaauac

SEQ ID NO: 1313323 - RNA, 19 nt, Homo sapiens
  misc_RNA (1)...(19): siRNA sense strand
guuugcagguugucagaga

SEQ ID NO: 1313324 - RNA, 19 nt, Homo sapiens
  misc_RNA (1)...(19): siRNA sense strand
uggaguuucuucaguuaau

SEQ ID NO: 1313325 - RNA, 19 nt, Homo sapiens
  misc_RNA (1)...(19): siRNA sense strand
agaagaaaggagagaauau

SEQ ID NO: 1313326 - RNA, 19 nt, Homo sapiens
  misc_RNA (1)...(19): siRNA sense strand
aauggcacguuccagaauu

SEQ ID NO: 1313327 - RNA, 19 nt, Homo sapiens
  misc_RNA (1)...(19): siRNA sense strand
cagaagaaauuaccaguua

SEQ ID NO: 1313328 - RNA, 19 nt, Homo sapiens
  misc_RNA (1)...(19): siRNA sense strand
ggacaacucauuaauguua

SEQ ID NO: 1313329 - RNA, 19 nt, Homo sapiens
  misc_RNA (1)...(19): siRNA sense strand
gaacaaagaugauccugau

SEQ ID NO: 1313330 - RNA, 19 nt, Homo sapiens
  misc_RNA (1)...(19): siRNA sense strand
gaucaaacgugacaaguug

SEQ ID NO: 1313331 - RNA, 19 nt, Homo sapiens
  misc_RNA (1)...(19): siRNA sense strand
gacaggagcuucucaauca

SEQ ID NO: 1313332 - RNA, 19 nt, Homo sapiens
  misc_RNA (1)...(19): siRNA sense strand
ggacagccauuaccacuga

SEQ ID NO: 1313333 - RNA, 19 nt, Homo sapiens
  misc_RNA (1)...(19): siRNA sense strand
cacagaaggugaagaaaua

SEQ ID NO: 1313334 - RNA, 19 nt, Homo sapiens
  misc_RNA (1)...(19): siRNA sense strand
ccaaacaugugggcuauua

SEQ ID NO: 1313335 - RNA, 19 nt, Homo sapiens
  misc_RNA (1)...(19): siRNA sense strand
gaaggaaauugaaaggaaa

SEQ ID NO: 1313336 - RNA, 19 nt, Homo sapiens
  misc_RNA (1)...(19): siRNA sense strand
caucuaagcugucagaaau

SEQ ID NO: 1313337 - RNA, 19 nt, Homo sapiens
  misc_RNA (1)...(19): siRNA sense strand
aaacucagcuggcuacuau

SEQ ID NO: 1313338 - RNA, 19 nt, Homo sapiens
  misc_RNA (1)...(19): siRNA sense strand
gaacaagaauggaagaaac

SEQ ID NO: 1313339 - RNA, 19 nt, Homo sapiens
  misc_RNA (1)...(19): siRNA sense strand
aaagaaagauaaccacuug

SEQ ID NO: 1313340 - RNA, 19 nt, Homo sapiens
  misc_RNA (1)...(19): siRNA sense strand
ggauaaggauacuuugaaa

SEQ ID NO: 1313341 - RNA, 19 nt, Homo sapiens
  misc_RNA (1)...(19): siRNA sense strand
gaacagcuuuauaagauca

SEQ ID NO: 1313342 - RNA, 19 nt, Homo sapiens
  misc_RNA (1)...(19): siRNA sense strand
gaauagagaacaagaagaa

SEQ ID NO: 1313343 - RNA, 19 nt, Homo sapiens
  misc_RNA (1)...(19): siRNA sense strand
ccucaugggucaucuuaua

SEQ ID NO: 1313344 - RNA, 19 nt, Homo sapiens
  misc_RNA (1)...(19): siRNA sense strand
caaacuaugucaaaccaaa

SEQ ID NO: 1313345 - RNA, 19 nt, Homo sapiens
  misc_RNA (1)...(19): siRNA sense strand
guggauaucucucagguuu

SEQ ID NO: 1313346 - RNA, 19 nt, Homo sapiens
  misc_RNA (1)...(19): siRNA sense strand
ggagauagaaguggaauuu

SEQ ID NO: 1313347 - RNA, 19 nt, Homo sapiens
  misc_RNA (1)...(19): siRNA sense strand
gaauuaugccaaagacuua

SEQ ID NO: 1313348 - RNA, 19 nt, Homo sapiens
  misc_RNA (1)...(19): siRNA sense strand
gaaagcaaauugauuccau

SEQ ID NO: 1313349 - RNA, 19 nt, Homo sapiens
  misc_RNA (1)...(19): siRNA sense strand
ucagguaacuucagcauau

SEQ ID NO: 1313350 - RNA, 19 nt, Homo sapiens
  misc_RNA (1)...(19): siRNA sense strand
agaagaaauugucagguua

SEQ ID NO: 1313351 - RNA, 19 nt, Homo sapiens
  misc_RNA (1)...(19): siRNA sense strand
caagaguucuccauagcua

SEQ ID NO: 1313352 - RNA, 19 nt, Homo sapiens
  misc_RNA (1)...(19): siRNA sense strand
ggaagaaacaacuugaauu

SEQ ID NO: 1313353 - RNA, 19 nt, Homo sapiens
  misc_RNA (1)...(19): siRNA sense strand
ugaaggaaauugaaaggaa

SEQ ID NO: 1313354 - RNA, 19 nt, Homo sapiens
  misc_RNA (1)...(19): siRNA sense strand
gaagaaauugucagguuaa

SEQ ID NO: 1313355 - RNA, 19 nt, Homo sapiens
  misc_RNA (1)...(19): siRNA sense strand
aacaggaacuucaggaaua

SEQ ID NO: 1313356 - RNA, 19 nt, Homo sapiens
  misc_RNA (1)...(19): siRNA sense strand
gagaaacaacguaaggaua

SEQ ID NO: 1313357 - RNA, 19 nt, Homo sapiens
  misc_RNA (1)...(19): siRNA sense strand
gaacucugccuucauauca

SEQ ID NO: 1313358 - RNA, 19 nt, Homo sapiens
  misc_RNA (1)...(19): siRNA sense strand
caaaggaucaagagaguuu

SEQ ID NO: 1313359 - RNA, 19 nt, Homo sapiens
  misc_RNA (1)...(19): siRNA sense strand
uaucagaccuaaacaagga

SEQ ID NO: 1313360 - RNA, 19 nt, Homo sapiens
  misc_RNA (1)...(19): siRNA sense strand
gaaccacuuucuucaaauc

SEQ ID NO: 1313361 - RNA, 19 nt, Homo sapiens
  misc_RNA (1)...(19): siRNA sense strand
gaccaaccuuccucccuua

SEQ ID NO: 1313362 - RNA, 19 nt, Homo sapiens
  misc_RNA (1)...(19): siRNA sense strand
gaagauggaucagcaagag

SEQ ID NO: 1313363 - RNA, 19 nt, Homo sapiens
  misc_RNA (1)...(19): siRNA sense strand
agacagggcuauauucaug

SEQ ID NO: 1313364 - RNA, 19 nt, Homo sapiens
  misc_RNA (1)...(19): siRNA sense strand
ggaagaaccagaagcuuug

SEQ ID NO: 1313365 - RNA, 19 nt, Homo sapiens
  misc_RNA (1)...(19): siRNA sense strand
ggugaauuauagagcauua

SEQ ID NO: 1313366 - RNA, 19 nt, Homo sapiens
  misc_RNA (1)...(19): siRNA sense strand
guaaggauaaggauacuuu

SEQ ID NO: 1313367 - RNA, 19 nt, Homo sapiens
  misc_RNA (1)...(19): siRNA sense strand
ggacugcaaagaaagauaa

SEQ ID NO: 1313368 - RNA, 19 nt, Homo sapiens
  misc_RNA (1)...(19): siRNA sense strand
ggagagugguggacaggaa

SEQ ID NO: 1313369 - RNA, 19 nt, Homo sapiens
  misc_RNA (1)...(19): siRNA sense strand
gaugguuucccaaaucuua

SEQ ID NO: 1313370 - RNA, 19 nt, Homo sapiens
  misc_RNA (1)...(19): siRNA sense strand
cagugugacuuggaaauua

SEQ ID NO: 1313371 - RNA, 19 nt, Homo sapiens
  misc_RNA (1)...(19): siRNA sense strand
ucagggaacucacccaaga

SEQ ID NO: 1313372 - RNA, 19 nt, Homo sapiens
  misc_RNA (1)...(19): siRNA sense strand
gggaagaaccagaagcuuu

SEQ ID NO: 1313373 - RNA, 19 nt, Homo sapiens
  misc_RNA (1)...(19): siRNA sense strand
gaggaugguuucccaaauc

SEQ ID NO: 1313374 - RNA, 19 nt, Homo sapiens
  misc_RNA (1)...(19): siRNA sense strand
acaguuagaugcucuugaa

SEQ ID NO: 1313375 - RNA, 19 nt, Homo sapiens
  misc_RNA (1)...(19): siRNA sense strand
gccaaagacuuaaagaaca

SEQ ID NO: 1313376 - RNA, 19 nt, Homo sapiens
  misc_RNA (1)...(19): siRNA sense strand
aagaagaaauugucagguu

SEQ ID NO: 1313377 - RNA, 19 nt, Homo sapiens
  misc_RNA (1)...(19): siRNA sense strand
caaccuuccucccuuaaug

SEQ ID NO: 1313378 - RNA, 19 nt, Homo sapiens
  misc_RNA (1)...(19): siRNA sense strand
gagauauaauucagguuga

SEQ ID NO: 1313379 - RNA, 19 nt, Homo sapiens
  misc_RNA (1)...(19): siRNA sense strand
gaggaaagcaaauugauuc

SEQ ID NO: 1313380 - RNA, 19 nt, Homo sapiens
  misc_RNA (1)...(19): siRNA sense strand
gaaauugucagguuaaacu

SEQ ID NO: 1313381 - RNA, 19 nt, Homo sapiens
  misc_RNA (1)...(19): siRNA sense strand
ggaggugcauggaggaaga

SEQ ID NO: 1313382 - RNA, 19 nt, Homo sapiens
  misc_RNA (1)...(19): siRNA sense strand
agaaacaacguaaggauaa

SEQ ID NO: 1313383 - RNA, 19 nt, Homo sapiens
  misc_RNA (1)...(19): siRNA sense strand
gagagaaaccuacaacaca

SEQ ID NO: 1313384 - RNA, 19 nt, Homo sapiens
  misc_RNA (1)...(19): siRNA sense strand
cauaacaggugaucaagca

SEQ ID NO: 1313385 - RNA, 19 nt, Homo sapiens
  misc_RNA (1)...(19): siRNA sense strand
gcugaaauaugggcuuuau

SEQ ID NO: 1313386 - RNA, 19 nt, Homo sapiens
  misc_RNA (1)...(19): siRNA sense strand
uagcaagucuggagcauca

SEQ ID NO: 1313387 - RNA, 19 nt, Homo sapiens
  misc_RNA (1)...(19): siRNA sense strand
guaugcagcuguaaauaag

SEQ ID NO: 1313388 - RNA, 19 nt, Homo sapiens
  misc_RNA (1)...(19): siRNA sense strand
gauaaccacuugaacuucu

SEQ ID NO: 1313389 - RNA, 19 nt, Homo sapiens
  misc_RNA (1)...(19): siRNA sense strand
ggaagaauuaugccaaaga

SEQ ID NO: 1313390 - RNA, 19 nt, Homo sapiens
  misc_RNA (1)...(19): siRNA sense strand
aaacaaggaugggaagaug

SEQ ID NO: 1313391 - RNA, 19 nt, Homo sapiens
  misc_RNA (1)...(19): siRNA sense strand
gugguucucccuccuauua

SEQ ID NO: 1313392 - RNA, 19 nt, Homo sapiens
  misc_RNA (1)...(19): siRNA sense strand
gcaaggaaaagaaaacuua

SEQ ID NO: 1313393 - RNA, 19 nt, Homo sapiens
  misc_RNA (1)...(19): siRNA sense strand
gaagaauuaugccaaagac

SEQ ID NO: 1313394 - RNA, 19 nt, Homo sapiens
  misc_RNA (1)...(19): siRNA sense strand
ggaggaaagcaaauugauu

SEQ ID NO: 1313395 - RNA, 19 nt, Homo sapiens
  misc_RNA (1)...(19): siRNA sense strand
cgcagucucugauugauuu

SEQ ID NO: 1313396 - RNA, 19 nt, Homo sapiens
  misc_RNA (1)...(19): siRNA sense strand
ggaaagcaaagcaaggaaa

SEQ ID NO: 1313397 - RNA, 19 nt, Homo sapiens
  misc_RNA (1)...(19): siRNA sense strand
gcaaugcaccuuacugaca

SEQ ID NO: 1313398 - RNA, 19 nt, Homo sapiens
  misc_RNA (1)...(19): siRNA sense strand
agacugagcuggaaguucu

SEQ ID NO: 1313399 - RNA, 19 nt, Homo sapiens
  misc_RNA (1)...(19): siRNA sense strand
caaagaugauccugauugg

SEQ ID NO: 1313400 - RNA, 19 nt, Homo sapiens
  misc_RNA (1)...(19): siRNA sense strand
caacguaaggauaaggaua

SEQ ID NO: 1313401 - RNA, 19 nt, Homo sapiens
  misc_RNA (1)...(19): siRNA sense strand
gcaguuagcccuugaacag

SEQ ID NO: 1313402 - RNA, 19 nt, Homo sapiens
  misc_RNA (1)...(19): siRNA sense strand
ugaaauaugggcuuuauca

SEQ ID NO: 1313403 - RNA, 19 nt, Homo sapiens
  misc_RNA (1)...(19): siRNA sense strand
gcaccaggacaguuaauau

SEQ ID NO: 1313404 - RNA, 19 nt, Homo sapiens
  misc_RNA (1)...(19): siRNA sense strand
cagcaaauaaugaagauga

SEQ ID NO: 1313405 - RNA, 19 nt, Homo sapiens
  misc_RNA (1)...(19): siRNA sense strand
gcuaaaagcagaagaguuu

SEQ ID NO: 1313406 - RNA, 19 nt, Homo sapiens
  misc_RNA (1)...(19): siRNA sense strand
ggaucuguaucaccuauuc

SEQ ID NO: 1313407 - RNA, 19 nt, Homo sapiens
  misc_RNA (1)...(19): siRNA sense strand
gaaucuucaucuugaguug

SEQ ID NO: 1313408 - RNA, 19 nt, Homo sapiens
  misc_RNA (1)...(19): siRNA sense strand
gaacguaaagcccagaaag

SEQ ID NO: 1313409 - RNA, 19 nt, Homo sapiens
  misc_RNA (1)...(19): siRNA sense strand
cagcaagaguucuccauag

SEQ ID NO: 1313410 - RNA, 19 nt, Homo sapiens
  misc_RNA (1)...(19): siRNA sense strand
gaaaagacagggcuauauu

SEQ ID NO: 1313411 - RNA, 19 nt, Homo sapiens
  misc_RNA (1)...(19): siRNA sense strand
cuucaggaauaucagaaua

SEQ ID NO: 1313412 - RNA, 19 nt, Homo sapiens
  misc_RNA (1)...(19): siRNA sense strand
caagcaacuucaacaggaa

SEQ ID NO: 1313413 - RNA, 19 nt, Homo sapiens
  misc_RNA (1)...(19): siRNA sense strand
ggaaaucaagcaacuucaa

SEQ ID NO: 1313414 - RNA, 19 nt, Homo sapiens
  misc_RNA (1)...(19): siRNA sense strand
ggagagacaacgagaggaa

SEQ ID NO: 1313415 - RNA, 19 nt, Homo sapiens
  misc_RNA (1)...(19): siRNA sense strand
acagagagaauuacaagaa

SEQ ID NO: 1313416 - RNA, 19 nt, Homo sapiens
  misc_RNA (1)...(19): siRNA sense strand
gaagaugagcucaguuucu

SEQ ID NO: 1313417 - RNA, 19 nt, Homo sapiens
  misc_RNA (1)...(19): siRNA sense strand
uguggaaccuggagauuug

SEQ ID NO: 1313418 - RNA, 19 nt, Homo sapiens
  misc_RNA (1)...(19): siRNA sense strand
gcaagaaaauuggugguuu

SEQ ID NO: 1313419 - RNA, 19 nt, Homo sapiens
  misc_RNA (1)...(19): siRNA sense strand
gcaaggaaccaugaugaga

SEQ ID NO: 1313420 - RNA, 19 nt, Homo sapiens
  misc_RNA (1)...(19): siRNA sense strand
gaaacaacguaaggauaag

SEQ ID NO: 1313421 - RNA, 19 nt, Homo sapiens
  misc_RNA (1)...(19): siRNA sense strand
gaauggagggccaaacaug

SEQ ID NO: 1313422 - RNA, 19 nt, Homo sapiens
  misc_RNA (1)...(19): siRNA sense strand
gaacuucaggaauaucaga

SEQ ID NO: 1313423 - RNA, 19 nt, Homo sapiens
  misc_RNA (1)...(19): siRNA sense strand
uuugaaagcugaggagaaa

SEQ ID NO: 1313424 - RNA, 19 nt, Homo sapiens
  misc_RNA (1)...(19): siRNA sense strand
ggaaagcugaggagaaaca

SEQ ID NO: 1313425 - RNA, 19 nt, Homo sapiens
  misc_RNA (1)...(19): siRNA sense strand
cuacaacacacagcaguua

SEQ ID NO: 1313426 - RNA, 19 nt, Homo sapiens
  misc_RNA (1)...(19): siRNA sense strand
gaacugagagaaaccuaca

SEQ ID NO: 1313427 - RNA, 19 nt, Homo sapiens
  misc_RNA (1)...(19): siRNA sense strand
cagaagaaauuaccaguua

SEQ ID NO: 1313428 - RNA, 19 nt, Homo sapiens
  misc_RNA (1)...(19): siRNA sense strand
ggacaacucauuaauguua

SEQ ID NO: 1313429 - RNA, 19 nt, Homo sapiens
  misc_RNA (1)...(19): siRNA sense strand
gaacaaagaugauccugau

SEQ ID NO: 1313430 - RNA, 19 nt, Homo sapiens
  misc_RNA (1)...(19): siRNA sense strand
gaucaaacgugacaaguug

SEQ ID NO: 1313431 - RNA, 19 nt, Homo sapiens
  misc_RNA (1)...(19): siRNA sense strand
gacaggagcuucucaauca

SEQ ID NO: 1313432 - RNA, 19 nt, Homo sapiens
  misc_RNA (1)...(19): siRNA sense strand
ggacagccauuaccacuga

SEQ ID NO: 1313433 - RNA, 19 nt, Homo sapiens
  misc_RNA (1)...(19): siRNA sense strand
cacagaaggugaagaaaua

SEQ ID NO: 1313434 - RNA, 19 nt, Homo sapiens
  misc_RNA (1)...(19): siRNA sense strand
ccaaacaugugggcuauua

SEQ ID NO: 1313435 - RNA, 19 nt, Homo sapiens
  misc_RNA (1)...(19): siRNA sense strand
gaaggaaauugaaaggaaa

SEQ ID NO: 1313436 - RNA, 19 nt, Homo sapiens
  misc_RNA (1)...(19): siRNA sense strand
caucuaagcugucagaaau

SEQ ID NO: 1313437 - RNA, 19 nt, Homo sapiens
  misc_RNA (1)...(19): siRNA sense strand
aaacucagcuggcuacuau

SEQ ID NO: 1313438 - RNA, 19 nt, Homo sapiens
  misc_RNA (1)...(19): siRNA sense strand
gaacaagaauggaagaaac

SEQ ID NO: 1313439 - RNA, 19 nt, Homo sapiens
  misc_RNA (1)...(19): siRNA sense strand
aaagaaagauaaccacuug

SEQ ID NO: 1313440 - RNA, 19 nt, Homo sapiens
  misc_RNA (1)...(19): siRNA sense strand
ggauaaggauacuuugaaa

SEQ ID NO: 1313441 - RNA, 19 nt, Homo sapiens
  misc_RNA (1)...(19): siRNA sense strand
gaacagcuuuauaagauca

SEQ ID NO: 1313442 - RNA, 19 nt, Homo sapiens
  misc_RNA (1)...(19): siRNA sense strand
gaauagagaacaagaagaa

SEQ ID NO: 1313443 - RNA, 19 nt, Homo sapiens
  misc_RNA (1)...(19): siRNA sense strand
ccucaugggucaucuuaua

SEQ ID NO: 1313444 - RNA, 19 nt, Homo sapiens
  misc_RNA (1)...(19): siRNA sense strand
caaacuaugucaaaccaaa

SEQ ID NO: 1313445 - RNA, 19 nt, Homo sapiens
  misc_RNA (1)...(19): siRNA sense strand
guggauaucucucagguuu

SEQ ID NO: 1313446 - RNA, 19 nt, Homo sapiens
  misc_RNA (1)...(19): siRNA sense strand
ggagauagaaguggaauuu

SEQ ID NO: 1313447 - RNA, 19 nt, Homo sapiens
  misc_RNA (1)...(19): siRNA sense strand
gaauuaugccaaagacuua

SEQ ID NO: 1313448 - RNA, 19 nt, Homo sapiens
  misc_RNA (1)...(19): siRNA sense strand
gaaagcaaauugauuccau

SEQ ID NO: 1313449 - RNA, 19 nt, Homo sapiens
  misc_RNA (1)...(19): siRNA sense strand
ucagguaacuucagcauau

SEQ ID NO: 1313450 - RNA, 19 nt, Homo sapiens
  misc_RNA (1)...(19): siRNA sense strand
agaagaaauugucagguua

SEQ ID NO: 1313451 - RNA, 19 nt, Homo sapiens
  misc_RNA (1)...(19): siRNA sense strand
caagaguucuccauagcua

SEQ ID NO: 1313452 - RNA, 19 nt, Homo sapiens
  misc_RNA (1)...(19): siRNA sense strand
ggaagaaacaacuugaauu

SEQ ID NO: 1313453 - RNA, 19 nt, Homo sapiens
  misc_RNA (1)...(19): siRNA sense strand
ugaaggaaauugaaaggaa

SEQ ID NO: 1313454 - RNA, 19 nt, Homo sapiens
  misc_RNA (1)...(19): siRNA sense strand
gaagaaauugucagguuaa

SEQ ID NO: 1313455 - RNA, 19 nt, Homo sapiens
  misc_RNA (1)...(19): siRNA sense strand
aacaggaacuucaggaaua

SEQ ID NO: 1313456 - RNA, 19 nt, Homo sapiens
  misc_RNA (1)...(19): siRNA sense strand
gagaaacaacguaaggaua

SEQ ID NO: 1313457 - RNA, 19 nt, Homo sapiens
  misc_RNA (1)...(19): siRNA sense strand
gaacucugccuucauauca

SEQ ID NO: 1313458 - RNA, 19 nt, Homo sapiens
  misc_RNA (1)...(19): siRNA sense strand
caaaggaucaagagaguuu

SEQ ID NO: 1313459 - RNA, 19 nt, Homo sapiens
  misc_RNA (1)...(19): siRNA sense strand
uaucagaccuaaacaagga

SEQ ID NO: 1313460 - RNA, 19 nt, Homo sapiens
  misc_RNA (1)...(19): siRNA sense strand
gaaccacuuucuucaaauc

SEQ ID NO: 1313461 - RNA, 19 nt, Homo sapiens
  misc_RNA (1)...(19): siRNA sense strand
gaccaaccuuccucccuua

SEQ ID NO: 1313462 - RNA, 19 nt, Homo sapiens
  misc_RNA (1)...(19): siRNA sense strand
gaagauggaucagcaagag

SEQ ID NO: 1313463 - RNA, 19 nt, Homo sapiens
  misc_RNA (1)...(19): siRNA sense strand
agacagggcuauauucaug

SEQ ID NO: 1313464 - RNA, 19 nt, Homo sapiens
  misc_RNA (1)...(19): siRNA sense strand
ggaagaaccagaagcuuug

SEQ ID NO: 1313465 - RNA, 19 nt, Homo sapiens
  misc_RNA (1)...(19): siRNA sense strand
ggugaauuauagagcauua

SEQ ID NO: 1313466 - RNA, 19 nt, Homo sapiens
  misc_RNA (1)...(19): siRNA sense strand
guaaggauaaggauacuuu

SEQ ID NO: 1313467 - RNA, 19 nt, Homo sapiens
  misc_RNA (1)...(19): siRNA sense strand
ggacugcaaagaaagauaa

SEQ ID NO: 1313468 - RNA, 19 nt, Homo sapiens
  misc_RNA (1)...(19): siRNA sense strand
ggagagugguggacaggaa

SEQ ID NO: 1313469 - RNA, 19 nt, Homo sapiens
  misc_RNA (1)...(19): siRNA sense strand
gaugguuucccaaaucuua

SEQ ID NO: 1313470 - RNA, 19 nt, Homo sapiens
  misc_RNA (1)...(19): siRNA sense strand
cagugugacuuggaaauua

SEQ ID NO: 1313471 - RNA, 19 nt, Homo sapiens
  misc_RNA (1)...(19): siRNA sense strand
ucagggaacucacccaaga

SEQ ID NO: 1313472 - RNA, 19 nt, Homo sapiens
  misc_RNA (1)...(19): siRNA sense strand
gggaagaaccagaagcuuu

SEQ ID NO: 1313473 - RNA, 19 nt, Homo sapiens
  misc_RNA (1)...(19): siRNA sense strand
gaggaugguuucccaaauc

SEQ ID NO: 1313474 - RNA, 19 nt, Homo sapiens
  misc_RNA (1)...(19): siRNA sense strand
acaguuagaugcucuugaa

SEQ ID NO: 1313475 - RNA, 19 nt, Homo sapiens
  misc_RNA (1)...(19): siRNA sense strand
gccaaagacuuaaagaaca

SEQ ID NO: 1313476 - RNA, 19 nt, Homo sapiens
  misc_RNA (1)...(19): siRNA sense strand
aagaagaaauugucagguu

SEQ ID NO: 1313477 - RNA, 19 nt, Homo sapiens
  misc_RNA (1)...(19): siRNA sense strand
caaccuuccucccuuaaug

SEQ ID NO: 1313478 - RNA, 19 nt, Homo sapiens
  misc_RNA (1)...(19): siRNA sense strand
gagauauaauucagguuga

SEQ ID NO: 1313479 - RNA, 19 nt, Homo sapiens
  misc_RNA (1)...(19): siRNA sense strand
gaggaaagcaaauugauuc

SEQ ID NO: 1313480 - RNA, 19 nt, Homo sapiens
  misc_RNA (1)...(19): siRNA sense strand
gaaauugucagguuaaacu

SEQ ID NO: 1313481 - RNA, 19 nt, Homo sapiens
  misc_RNA (1)...(19): siRNA sense strand
ggaggugcauggaggaaga

SEQ ID NO: 1313482 - RNA, 19 nt, Homo sapiens
  misc_RNA (1)...(19): siRNA sense strand
agaaacaacguaaggauaa

SEQ ID NO: 1313483 - RNA, 19 nt, Homo sapiens
  misc_RNA (1)...(19): siRNA sense strand
gagagaaaccuacaacaca

SEQ ID NO: 1313484 - RNA, 19 nt, Homo sapiens
  misc_RNA (1)...(19): siRNA sense strand
cauaacaggugaucaagca

SEQ ID NO: 1313485 - RNA, 19 nt, Homo sapiens
  misc_RNA (1)...(19): siRNA sense strand
gcugaaauaugggcuuuau

SEQ ID NO: 1313486 - RNA, 19 nt, Homo sapiens
  misc_RNA (1)...(19): siRNA sense strand
uagcaagucuggagcauca

SEQ ID NO: 1313487 - RNA, 19 nt, Homo sapiens
  misc_RNA (1)...(19): siRNA sense strand
guaugcagcuguaaauaag

SEQ ID NO: 1313488 - RNA, 19 nt, Homo sapiens
  misc_RNA (1)...(19): siRNA sense strand
gauaaccacuugaacuucu

SEQ ID NO: 1313489 - RNA, 19 nt, Homo sapiens
  misc_RNA (1)...(19): siRNA sense strand
ggaagaauuaugccaaaga

SEQ ID NO: 1313490 - RNA, 19 nt, Homo sapiens
  misc_RNA (1)...(19): siRNA sense strand
aaacaaggaugggaagaug

SEQ ID NO: 1313491 - RNA, 19 nt, Homo sapiens
  misc_RNA (1)...(19): siRNA sense strand
gugguucucccuccuauua

SEQ ID NO: 1313492 - RNA, 19 nt, Homo sapiens
  misc_RNA (1)...(19): siRNA sense strand
gcaaggaaaagaaaacuua

SEQ ID NO: 1313493 - RNA, 19 nt, Homo sapiens
  misc_RNA (1)...(19): siRNA sense strand
gaagaauuaugccaaagac

SEQ ID NO: 1313494 - RNA, 19 nt, Homo sapiens
  misc_RNA (1)...(19): siRNA sense strand
ggaggaaagcaaauugauu

SEQ ID NO: 1313495 - RNA, 19 nt, Homo sapiens
  misc_RNA (1)...(19): siRNA sense strand
cgcagucucugauugauuu

SEQ ID NO: 1313496 - RNA, 19 nt, Homo sapiens
  misc_RNA (1)...(19): siRNA sense strand
ggaaagcaaagcaaggaaa

SEQ ID NO: 1313497 - RNA, 19 nt, Homo sapiens
  misc_RNA (1)...(19): siRNA sense strand
gcaaugcaccuuacugaca

SEQ ID NO: 1313498 - RNA, 19 nt, Homo sapiens
  misc_RNA (1)...(19): siRNA sense strand
agacugagcuggaaguucu

SEQ ID NO: 1313499 - RNA, 19 nt, Homo sapiens
  misc_RNA (1)...(19): siRNA sense strand
caaagaugauccugauugg

SEQ ID NO: 1313500 - RNA, 19 nt, Homo sapiens
  misc_RNA (1)...(19): siRNA sense strand
caacguaaggauaaggaua

SEQ ID NO: 1313501 - RNA, 19 nt, Homo sapiens
  misc_RNA (1)...(19): siRNA sense strand
gcaguuagcccuugaacag

SEQ ID NO: 1313502 - RNA, 19 nt, Homo sapiens
  misc_RNA (1)...(19): siRNA sense strand
ugaaauaugggcuuuauca

SEQ ID NO: 1313503 - RNA, 19 nt, Homo sapiens
  misc_RNA (1)...(19): siRNA sense strand
gcaccaggacaguuaauau

SEQ ID NO: 1313504 - RNA, 19 nt, Homo sapiens
  misc_RNA (1)...(19): siRNA sense strand
cagcaaauaaugaagauga

SEQ ID NO: 1313505 - RNA, 19 nt, Homo sapiens
  misc_RNA (1)...(19): siRNA sense strand
gcuaaaagcagaagaguuu

SEQ ID NO: 1313506 - RNA, 19 nt, Homo sapiens
  misc_RNA (1)...(19): siRNA sense strand
ggaucuguaucaccuauuc

SEQ ID NO: 1313507 - RNA, 19 nt, Homo sapiens
  misc_RNA (1)...(19): siRNA sense strand
gaaucuucaucuugaguug

SEQ ID NO: 1313508 - RNA, 19 nt, Homo sapiens
  misc_RNA (1)...(19): siRNA sense strand
gaacguaaagcccagaaag

SEQ ID NO: 1313509 - RNA, 19 nt, Homo sapiens
  misc_RNA (1)...(19): siRNA sense strand
cagcaagaguucuccauag

SEQ ID NO: 1313510 - RNA, 19 nt, Homo sapiens
  misc_RNA (1)...(19): siRNA sense strand
gaaaagacagggcuauauu

SEQ ID NO: 1313511 - RNA, 19 nt, Homo sapiens
  misc_RNA (1)...(19): siRNA sense strand
cuucaggaauaucagaaua

SEQ ID NO: 1313512 - RNA, 19 nt, Homo sapiens
  misc_RNA (1)...(19): siRNA sense strand
caagcaacuucaacaggaa

SEQ ID NO: 1313513 - RNA, 19 nt, Homo sapiens
  misc_RNA (1)...(19): siRNA sense strand
ggaaaucaagcaacuucaa

SEQ ID NO: 1313514 - RNA, 19 nt, Homo sapiens
  misc_RNA (1)...(19): siRNA sense strand
ggagagacaacgagaggaa

SEQ ID NO: 1313515 - RNA, 19 nt, Homo sapiens
  misc_RNA (1)...(19): siRNA sense strand
acagagagaauuacaagaa

SEQ ID NO: 1313516 - RNA, 19 nt, Homo sapiens
  misc_RNA (1)...(19): siRNA sense strand
gaagaugagcucaguuucu

SEQ ID NO: 1313517 - RNA, 19 nt, Homo sapiens
  misc_RNA (1)...(19): siRNA sense strand
uguggaaccuggagauuug

SEQ ID NO: 1313518 - RNA, 19 nt, Homo sapiens
  misc_RNA (1)...(19): siRNA sense strand
gcaagaaaauuggugguuu

SEQ ID NO: 1313519 - RNA, 19 nt, Homo sapiens
  misc_RNA (1)...(19): siRNA sense strand
gcaaggaaccaugaugaga

SEQ ID NO: 1313520 - RNA, 19 nt, Homo sapiens
  misc_RNA (1)...(19): siRNA sense strand
gaaacaacguaaggauaag

SEQ ID NO: 1313521 - RNA, 19 nt, Homo sapiens
  misc_RNA (1)...(19): siRNA sense strand
gaauggagggccaaacaug

SEQ ID NO: 1313522 - RNA, 19 nt, Homo sapiens
  misc_RNA (1)...(19): siRNA sense strand
gaacuucaggaauaucaga

SEQ ID NO: 1313523 - RNA, 19 nt, Homo sapiens
  misc_RNA (1)...(19): siRNA sense strand
uuugaaagcugaggagaaa

SEQ ID NO: 1313524 - RNA, 19 nt, Homo sapiens
  misc_RNA (1)...(19): siRNA sense strand
ggaaagcugaggagaaaca

SEQ ID NO: 1313525 - RNA, 19 nt, Homo sapiens
  misc_RNA (1)...(19): siRNA sense strand
cuacaacacacagcaguua

SEQ ID NO: 1313526 - RNA, 19 nt, Homo sapiens
  misc_RNA (1)...(19): siRNA sense strand
gaacugagagaaaccuaca

SEQ ID NO: 1313527 - RNA, 19 nt, Homo sapiens
  misc_RNA (1)...(19): siRNA sense strand
cagaagaaauuaccaguua

SEQ ID NO: 1313528 - RNA, 19 nt, Homo sapiens
  misc_RNA (1)...(19): siRNA sense strand
ggacaacucauuaauguua

SEQ ID NO: 1313529 - RNA, 19 nt, Homo sapiens
  misc_RNA (1)...(19): siRNA sense strand
gaacaaagaugauccugau

SEQ ID NO: 1313530 - RNA, 19 nt, Homo sapiens
  misc_RNA (1)...(19): siRNA sense strand
gaucaaacgugacaaguug

SEQ ID NO: 1313531 - RNA, 19 nt, Homo sapiens
  misc_RNA (1)...(19): siRNA sense strand
gacaggagcuucucaauca

SEQ ID NO: 1313532 - RNA, 19 nt, Homo sapiens
  misc_RNA (1)...(19): siRNA sense strand
ggacagccauuaccacuga

SEQ ID NO: 1313533 - RNA, 19 nt, Homo sapiens
  misc_RNA (1)...(19): siRNA sense strand
cacagaaggugaagaaaua

SEQ ID NO: 1313534 - RNA, 19 nt, Homo sapiens
  misc_RNA (1)...(19): siRNA sense strand
ccaaacaugugggcuauua

SEQ ID NO: 1313535 - RNA, 19 nt, Homo sapiens
  misc_RNA (1)...(19): siRNA sense strand
gaaggaaauugaaaggaaa

SEQ ID NO: 1313536 - RNA, 19 nt, Homo sapiens
  misc_RNA (1)...(19): siRNA sense strand
caucuaagcugucagaaau

SEQ ID NO: 1313537 - RNA, 19 nt, Homo sapiens
  misc_RNA (1)...(19): siRNA sense strand
aaacucagcuggcuacuau

SEQ ID NO: 1313538 - RNA, 19 nt, Homo sapiens
  misc_RNA (1)...(19): siRNA sense strand
gaacaagaauggaagaaac

SEQ ID NO: 1313539 - RNA, 19 nt, Homo sapiens
  misc_RNA (1)...(19): siRNA sense strand
aaagaaagauaaccacuug

SEQ ID NO: 1313540 - RNA, 19 nt, Homo sapiens
  misc_RNA (1)...(19): siRNA sense strand
ggauaaggauacuuugaaa

SEQ ID NO: 1313541 - RNA, 19 nt, Homo sapiens
  misc_RNA (1)...(19): siRNA sense strand
gaacagcuuuauaagauca

SEQ ID NO: 1313542 - RNA, 19 nt, Homo sapiens
  misc_RNA (1)...(19): siRNA sense strand
gaauagagaacaagaagaa

SEQ ID NO: 1313543 - RNA, 19 nt, Homo sapiens
  misc_RNA (1)...(19): siRNA sense strand
ccucaugggucaucuuaua

SEQ ID NO: 1313544 - RNA, 19 nt, Homo sapiens
  misc_RNA (1)...(19): siRNA sense strand
caaacuaugucaaaccaaa

SEQ ID NO: 1313545 - RNA, 19 nt, Homo sapiens
  misc_RNA (1)...(19): siRNA sense strand
guggauaucucucagguuu

SEQ ID NO: 1313546 - RNA, 19 nt, Homo sapiens
  misc_RNA (1)...(19): siRNA sense strand
ggagauagaaguggaauuu

SEQ ID NO: 1313547 - RNA, 19 nt, Homo sapiens
  misc_RNA (1)...(19): siRNA sense strand
gaauuaugccaaagacuua

SEQ ID NO: 1313548 - RNA, 19 nt, Homo sapiens
  misc_RNA (1)...(19): siRNA sense strand
gaaagcaaauugauuccau

SEQ ID NO: 1313549 - RNA, 19 nt, Homo sapiens
  misc_RNA (1)...(19): siRNA sense strand
ucagguaacuucagcauau

SEQ ID NO: 1313550 - RNA, 19 nt, Homo sapiens
  misc_RNA (1)...(19): siRNA sense strand
agaagaaauugucagguua

SEQ ID NO: 1313551 - RNA, 19 nt, Homo sapiens
  misc_RNA (1)...(19): siRNA sense strand
caagaguucuccauagcua

SEQ ID NO: 1313552 - RNA, 19 nt, Homo sapiens
  misc_RNA (1)...(19): siRNA sense strand
ggaagaaacaacuugaauu

SEQ ID NO: 1313553 - RNA, 19 nt, Homo sapiens
  misc_RNA (1)...(19): siRNA sense strand
ugaaggaaauugaaaggaa

SEQ ID NO: 1313554 - RNA, 19 nt, Homo sapiens
  misc_RNA (1)...(19): siRNA sense strand
gaagaaauugucagguuaa

SEQ ID NO: 1313555 - RNA, 19 nt, Homo sapiens
  misc_RNA (1)...(19): siRNA sense strand
aacaggaacuucaggaaua

SEQ ID NO: 1313556 - RNA, 19 nt, Homo sapiens
  misc_RNA (1)...(19): siRNA sense strand
gagaaacaacguaaggaua

SEQ ID NO: 1313557 - RNA, 19 nt, Homo sapiens
  misc_RNA (1)...(19): siRNA sense strand
gaacucugccuucauauca

SEQ ID NO: 1313558 - RNA, 19 nt, Homo sapiens
  misc_RNA (1)...(19): siRNA sense strand
caaaggaucaagagaguuu

SEQ ID NO: 1313559 - RNA, 19 nt, Homo sapiens
  misc_RNA (1)...(19): siRNA sense strand
uaucagaccuaaacaagga

SEQ ID NO: 1313560 - RNA, 19 nt, Homo sapiens
  misc_RNA (1)...(19): siRNA sense strand
gaaccacuuucuucaaauc

SEQ ID NO: 1313561 - RNA, 19 nt, Homo sapiens
  misc_RNA (1)...(19): siRNA sense strand
gaccaaccuuccucccuua

SEQ ID NO: 1313562 - RNA, 19 nt, Homo sapiens
  misc_RNA (1)...(19): siRNA sense strand
gaagauggaucagcaagag

SEQ ID NO: 1313563 - RNA, 19 nt, Homo sapiens
  misc_RNA (1)...(19): siRNA sense strand
agacagggcuauauucaug

SEQ ID NO: 1313564 - RNA, 19 nt, Homo sapiens
  misc_RNA (1)...(19): siRNA sense strand
ggaagaaccagaagcuuug

SEQ ID NO: 1313565 - RNA, 19 nt, Homo sapiens
  misc_RNA (1)...(19): siRNA sense strand
ggugaauuauagagcauua

SEQ ID NO: 1313566 - RNA, 19 nt, Homo sapiens
  misc_RNA (1)...(19): siRNA sense strand
guaaggauaaggauacuuu

SEQ ID NO: 1313567 - RNA, 19 nt, Homo sapiens
  misc_RNA (1)...(19): siRNA sense strand
ggacugcaaagaaagauaa

SEQ ID NO: 1313568 - RNA, 19 nt, Homo sapiens
  misc_RNA (1)...(19): siRNA sense strand
ggagagugguggacaggaa

SEQ ID NO: 1313569 - RNA, 19 nt, Homo sapiens
  misc_RNA (1)...(19): siRNA sense strand
gaugguuucccaaaucuua

SEQ ID NO: 1313570 - RNA, 19 nt, Homo sapiens
  misc_RNA (1)...(19): siRNA sense strand
cagugugacuuggaaauua

SEQ ID NO: 1313571 - RNA, 19 nt, Homo sapiens
  misc_RNA (1)...(19): siRNA sense strand
ucagggaacucacccaaga

SEQ ID NO: 1313572 - RNA, 19 nt, Homo sapiens
  misc_RNA (1)...(19): siRNA sense strand
gggaagaaccagaagcuuu

SEQ ID NO: 1313573 - RNA, 19 nt, Homo sapiens
  misc_RNA (1)...(19): siRNA sense strand
gaggaugguuucccaaauc

SEQ ID NO: 1313574 - RNA, 19 nt, Homo sapiens
  misc_RNA (1)...(19): siRNA sense strand
acaguuagaugcucuugaa

SEQ ID NO: 1313575 - RNA, 19 nt, Homo sapiens
  misc_RNA (1)...(19): siRNA sense strand
gccaaagacuuaaagaaca

SEQ ID NO: 1313576 - RNA, 19 nt, Homo sapiens
  misc_RNA (1)...(19): siRNA sense strand
aagaagaaauugucagguu

SEQ ID NO: 1313577 - RNA, 19 nt, Homo sapiens
  misc_RNA (1)...(19): siRNA sense strand
caaccuuccucccuuaaug

SEQ ID NO: 1313578 - RNA, 19 nt, Homo sapiens
  misc_RNA (1)...(19): siRNA sense strand
gagauauaauucagguuga

SEQ ID NO: 1313579 - RNA, 19 nt, Homo sapiens
  misc_RNA (1)...(19): siRNA sense strand
gaggaaagcaaauugauuc

SEQ ID NO: 1313580 - RNA, 19 nt, Homo sapiens
  misc_RNA (1)...(19): siRNA sense strand
gaaauugucagguuaaacu

SEQ ID NO: 1313581 - RNA, 19 nt, Homo sapiens
  misc_RNA (1)...(19): siRNA sense strand
ggaggugcauggaggaaga

SEQ ID NO: 1313582 - RNA, 19 nt, Homo sapiens
  misc_RNA (1)...(19): siRNA sense strand
agaaacaacguaaggauaa

SEQ ID NO: 1313583 - RNA, 19 nt, Homo sapiens
  misc_RNA (1)...(19): siRNA sense strand
gagagaaaccuacaacaca

SEQ ID NO: 1313584 - RNA, 19 nt, Homo sapiens
  misc_RNA (1)...(19): siRNA sense strand
cauaacaggugaucaagca

SEQ ID NO: 1313585 - RNA, 19 nt, Homo sapiens
  misc_RNA (1)...(19): siRNA sense strand
gcugaaauaugggcuuuau

SEQ ID NO: 1313586 - RNA, 19 nt, Homo sapiens
  misc_RNA (1)...(19): siRNA sense strand
uagcaagucuggagcauca

SEQ ID NO: 1313587 - RNA, 19 nt, Homo sapiens
  misc_RNA (1)...(19): siRNA sense strand
guaugcagcuguaaauaag

SEQ ID NO: 1313588 - RNA, 19 nt, Homo sapiens
  misc_RNA (1)...(19): siRNA sense strand
gauaaccacuugaacuucu

SEQ ID NO: 1313589 - RNA, 19 nt, Homo sapiens
  misc_RNA (1)...(19): siRNA sense strand
ggaagaauuaugccaaaga

SEQ ID NO: 1313590 - RNA, 19 nt, Homo sapiens
  misc_RNA (1)...(19): siRNA sense strand
aaacaaggaugggaagaug

SEQ ID NO: 1313591 - RNA, 19 nt, Homo sapiens
  misc_RNA (1)...(19): siRNA sense strand
gugguucucccuccuauua

SEQ ID NO: 1313592 - RNA, 19 nt, Homo sapiens
  misc_RNA (1)...(19): siRNA sense strand
gcaaggaaaagaaaacuua

SEQ ID NO: 1313593 - RNA, 19 nt, Homo sapiens
  misc_RNA (1)...(19): siRNA sense strand
gaagaauuaugccaaagac

SEQ ID NO: 1313594 - RNA, 19 nt, Homo sapiens
  misc_RNA (1)...(19): siRNA sense strand
ggaggaaagcaaauugauu

SEQ ID NO: 1313595 - RNA, 19 nt, Homo sapiens
  misc_RNA (1)...(19): siRNA sense strand
cgcagucucugauugauuu

SEQ ID NO: 1313596 - RNA, 19 nt, Homo sapiens
  misc_RNA (1)...(19): siRNA sense strand
ggaaagcaaagcaaggaaa

SEQ ID NO: 1313597 - RNA, 19 nt, Homo sapiens
  misc_RNA (1)...(19): siRNA sense strand
gcaaugcaccuuacugaca

SEQ ID NO: 1313598 - RNA, 19 nt, Homo sapiens
  misc_RNA (1)...(19): siRNA sense strand
agacugagcuggaaguucu

SEQ ID NO: 1313599 - RNA, 19 nt, Homo sapiens
  misc_RNA (1)...(19): siRNA sense strand
caaagaugauccugauugg

SEQ ID NO: 1313600 - RNA, 19 nt, Homo sapiens
  misc_RNA (1)...(19): siRNA sense strand
caacguaaggauaaggaua

SEQ ID NO: 1313601 - RNA, 19 nt, Homo sapiens
  misc_RNA (1)...(19): siRNA sense strand
gcaguuagcccuugaacag

SEQ ID NO: 1313602 - RNA, 19 nt, Homo sapiens
  misc_RNA (1)...(19): siRNA sense strand
ugaaauaugggcuuuauca

SEQ ID NO: 1313603 - RNA, 19 nt, Homo sapiens
  misc_RNA (1)...(19): siRNA sense strand
gcaccaggacaguuaauau

SEQ ID NO: 1313604 - RNA, 19 nt, Homo sapiens
  misc_RNA (1)...(19): siRNA sense strand
cagcaaauaaugaagauga

SEQ ID NO: 1313605 - RNA, 19 nt, Homo sapiens
  misc_RNA (1)...(19): siRNA sense strand
gcuaaaagcagaagaguuu

SEQ ID NO: 1313606 - RNA, 19 nt, Homo sapiens
  misc_RNA (1)...(19): siRNA sense strand
ggaucuguaucaccuauuc

SEQ ID NO: 1313607 - RNA, 19 nt, Homo sapiens
  misc_RNA (1)...(19): siRNA sense strand
gaaucuucaucuugaguug

SEQ ID NO: 1313608 - RNA, 19 nt, Homo sapiens
  misc_RNA (1)...(19): siRNA sense strand
gaacguaaagcccagaaag

SEQ ID NO: 1313609 - RNA, 19 nt, Homo sapiens
  misc_RNA (1)...(19): siRNA sense strand
cagcaagaguucuccauag

SEQ ID NO: 1313610 - RNA, 19 nt, Homo sapiens
  misc_RNA (1)...(19): siRNA sense strand
gaaaagacagggcuauauu

SEQ ID NO: 1313611 - RNA, 19 nt, Homo sapiens
  misc_RNA (1)...(19): siRNA sense strand
cuucaggaauaucagaaua

SEQ ID NO: 1313612 - RNA, 19 nt, Homo sapiens
  misc_RNA (1)...(19): siRNA sense strand
caagcaacuucaacaggaa

SEQ ID NO: 1313613 - RNA, 19 nt, Homo sapiens
  misc_RNA (1)...(19): siRNA sense strand
ggaaaucaagcaacuucaa

SEQ ID NO: 1313614 - RNA, 19 nt, Homo sapiens
  misc_RNA (1)...(19): siRNA sense strand
ggagagacaacgagaggaa

SEQ ID NO: 1313615 - RNA, 19 nt, Homo sapiens
  misc_RNA (1)...(19): siRNA sense strand
acagagagaauuacaagaa

SEQ ID NO: 1313616 - RNA, 19 nt, Homo sapiens
  misc_RNA (1)...(19): siRNA sense strand
gaagaugagcucaguuucu

SEQ ID NO: 1313617 - RNA, 19 nt, Homo sapiens
  misc_RNA (1)...(19): siRNA sense strand
uguggaaccuggagauuug

SEQ ID NO: 1313618 - RNA, 19 nt, Homo sapiens
  misc_RNA (1)...(19): siRNA sense strand
gcaagaaaauuggugguuu

SEQ ID NO: 1313619 - RNA, 19 nt, Homo sapiens
  misc_RNA (1)...(19): siRNA sense strand
gcaaggaaccaugaugaga

SEQ ID NO: 1313620 - RNA, 19 nt, Homo sapiens
  misc_RNA (1)...(19): siRNA sense strand
gaaacaacguaaggauaag

SEQ ID NO: 1313621 - RNA, 19 nt, Homo sapiens
  misc_RNA (1)...(19): siRNA sense strand
gaauggagggccaaacaug

SEQ ID NO: 1313622 - RNA, 19 nt, Homo sapiens
  misc_RNA (1)...(19): siRNA sense strand
gaacuucaggaauaucaga

SEQ ID NO: 1313623 - RNA, 19 nt, Homo sapiens
  misc_RNA (1)...(19): siRNA sense strand
uuugaaagcugaggagaaa

SEQ ID NO: 1313624 - RNA, 19 nt, Homo sapiens
  misc_RNA (1)...(19): siRNA sense strand
ggaaagcugaggagaaaca

SEQ ID NO: 1313625 - RNA, 19 nt, Homo sapiens
  misc_RNA (1)...(19): siRNA sense strand
cuacaacacacagcaguua

SEQ ID NO: 1313626 - RNA, 19 nt, Homo sapiens
  misc_RNA (1)...(19): siRNA sense strand
gaacugagagaaaccuaca

SEQ ID NO: 1313627 - RNA, 19 nt, Homo sapiens
  misc_RNA (1)...(19): siRNA sense strand
ugagggcaauccuguguua

SEQ ID NO: 1313628 - RNA, 19 nt, Homo sapiens
  misc_RNA (1)...(19): siRNA sense strand
aaugagggcuuaauauuca

SEQ ID NO: 1313629 - RNA, 19 nt, Homo sapiens
  misc_RNA (1)...(19): siRNA sense strand
ccaaugagggcuuaauauu

SEQ ID NO: 1313630 - RNA, 19 nt, Homo sapiens
  misc_RNA (1)...(19): siRNA sense strand
caaugagggcuuaauauuc

SEQ ID NO: 1313631 - RNA, 19 nt, Homo sapiens
  misc_RNA (1)...(19): siRNA sense strand
cggaagauguggacagcaa

SEQ ID NO: 1313632 - RNA, 19 nt, Homo sapiens
  misc_RNA (1)...(19): siRNA sense strand
ggauguggccggaagaugu

SEQ ID NO: 1313633 - RNA, 19 nt, Homo sapiens
  misc_RNA (1)...(19): siRNA sense strand
agauguugcuucucauuug

SEQ ID NO: 1313634 - RNA, 19 nt, Homo sapiens
  misc_RNA (1)...(19): siRNA sense strand
gaagauguggacagcaaga

SEQ ID NO: 1313635 - RNA, 19 nt, Homo sapiens
  misc_RNA (1)...(19): siRNA sense strand
guacccuucuccagauguu

SEQ ID NO: 1313636 - RNA, 19 nt, Homo sapiens
  misc_RNA (1)...(19): siRNA sense strand
gaaauaccagcuccaucug

SEQ ID NO: 1313637 - RNA, 19 nt, Homo sapiens
  misc_RNA (1)...(19): siRNA sense strand
cagguacccuucuccagau

SEQ ID NO: 1313638 - RNA, 19 nt, Homo sapiens
  misc_RNA (1)...(19): siRNA sense strand
agaaauaccagcuccaucu

SEQ ID NO: 1313639 - RNA, 19 nt, Homo sapiens
  misc_RNA (1)...(19): siRNA sense strand
cuccagauguugcuucuca

SEQ ID NO: 1313640 - RNA, 19 nt, Homo sapiens
  misc_RNA (1)...(19): siRNA sense strand
cagauguugcuucucauuu

SEQ ID NO: 1313641 - RNA, 19 nt, Homo sapiens
  misc_RNA (1)...(19): siRNA sense strand
acaguuggauggguucaga

SEQ ID NO: 1313642 - RNA, 19 nt, Homo sapiens
  misc_RNA (1)...(19): siRNA sense strand
gauguugcuucucauuugc

SEQ ID NO: 1313643 - RNA, 19 nt, Homo sapiens
  misc_RNA (1)...(19): siRNA sense strand
ccagauguugcuucucauu

SEQ ID NO: 1313644 - RNA, 19 nt, Homo sapiens
  misc_RNA (1)...(19): siRNA sense strand
gcaugcagguacccuucuc

SEQ ID NO: 1313645 - RNA, 19 nt, Homo sapiens
  misc_RNA (1)...(19): siRNA sense strand
gauguggccggaagaugug

SEQ ID NO: 1313646 - RNA, 19 nt, Homo sapiens
  misc_RNA (1)...(19): siRNA sense strand
cuccaaugagggcuuaaua

SEQ ID NO: 1313647 - RNA, 19 nt, Homo sapiens
  misc_RNA (1)...(19): siRNA sense strand
ggguucagaggcacagaaa

SEQ ID NO: 1313648 - RNA, 19 nt, Homo sapiens
  misc_RNA (1)...(19): siRNA sense strand
acacauggaugguggagua

SEQ ID NO: 1313649 - RNA, 19 nt, Homo sapiens
  misc_RNA (1)...(19): siRNA sense strand
ggcuugagcucaccaccua

SEQ ID NO: 1313650 - RNA, 19 nt, Homo sapiens
  misc_RNA (1)...(19): siRNA sense strand
gcucaccaccuaccucuuu

SEQ ID NO: 1313651 - RNA, 19 nt, Homo sapiens
  misc_RNA (1)...(19): siRNA sense strand
ggccuucucucgucugauc

SEQ ID NO: 1313652 - RNA, 19 nt, Homo sapiens
  misc_RNA (1)...(19): siRNA sense strand
ucuauacucuucgcuccua

SEQ ID NO: 1313653 - RNA, 19 nt, Homo sapiens
  misc_RNA (1)...(19): siRNA sense strand
gcaguggguguucgugaau

SEQ ID NO: 1313654 - RNA, 19 nt, Homo sapiens
  misc_RNA (1)...(19): siRNA sense strand
ggacuuccucacccucuuc

SEQ ID NO: 1313655 - RNA, 19 nt, Homo sapiens
  misc_RNA (1)...(19): siRNA sense strand
ugcaguggguguucgugaa

SEQ ID NO: 1313656 - RNA, 19 nt, Homo sapiens
  misc_RNA (1)...(19): siRNA sense strand
acacauggaugguggagua

SEQ ID NO: 1313657 - RNA, 19 nt, Homo sapiens
  misc_RNA (1)...(19): siRNA sense strand
ggcuugagcucaccaccua

SEQ ID NO: 1313658 - RNA, 19 nt, Homo sapiens
  misc_RNA (1)...(19): siRNA sense strand
gcucaccaccuaccucuuu

SEQ ID NO: 1313659 - RNA, 19 nt, Homo sapiens
  misc_RNA (1)...(19): siRNA sense strand
ggccuucucucgucugauc

SEQ ID NO: 1313660 - RNA, 19 nt, Homo sapiens
  misc_RNA (1)...(19): siRNA sense strand
ucuauacucuucgcuccua

SEQ ID NO: 1313661 - RNA, 19 nt, Homo sapiens
  misc_RNA (1)...(19): siRNA sense strand
gcaguggguguucgugaau

SEQ ID NO: 1313662 - RNA, 19 nt, Homo sapiens
  misc_RNA (1)...(19): siRNA sense strand
ggacuuccucacccucuuc

SEQ ID NO: 1313663 - RNA, 19 nt, Homo sapiens
  misc_RNA (1)...(19): siRNA sense strand
ugcaguggguguucgugaa

SEQ ID NO: 1313664 - RNA, 19 nt, Homo sapiens
  misc_RNA (1)...(19): siRNA sense strand
acacauggaugguggagua

SEQ ID NO: 1313665 - RNA, 19 nt, Homo sapiens
  misc_RNA (1)...(19): siRNA sense strand
ggcuugagcucaccaccua

SEQ ID NO: 1313666 - RNA, 19 nt, Homo sapiens
  misc_RNA (1)...(19): siRNA sense strand
gcucaccaccuaccucuuu

SEQ ID NO: 1313667 - RNA, 19 nt, Homo sapiens
  misc_RNA (1)...(19): siRNA sense strand
ggccuucucucgucugauc

SEQ ID NO: 1313668 - RNA, 19 nt, Homo sapiens
  misc_RNA (1)...(19): siRNA sense strand
ucuauacucuucgcuccua

SEQ ID NO: 1313669 - RNA, 19 nt, Homo sapiens
  misc_RNA (1)...(19): siRNA sense strand
gcaguggguguucgugaau

SEQ ID NO: 1313670 - RNA, 19 nt, Homo sapiens
  misc_RNA (1)...(19): siRNA sense strand
ggacuuccucacccucuuc

SEQ ID NO: 1313671 - RNA, 19 nt, Homo sapiens
  misc_RNA (1)...(19): siRNA sense strand
ugcaguggguguucgugaa

SEQ ID NO: 1313672 - RNA, 19 nt, Homo sapiens
  misc_RNA (1)...(19): siRNA sense strand
ggccuucucucgucugauc

SEQ ID NO: 1313673 - RNA, 19 nt, Homo sapiens
  misc_RNA (1)...(19): siRNA sense strand
gcaguggguguucgugaau

SEQ ID NO: 1313674 - RNA, 19 nt, Homo sapiens
  misc_RNA (1)...(19): siRNA sense strand
ugcaguggguguucgugaa

SEQ ID NO: 1313675 - RNA, 19 nt, Homo sapiens
  misc_RNA (1)...(19): siRNA sense strand
acacauggaugguggagua

SEQ ID NO: 1313676 - RNA, 19 nt, Homo sapiens
  misc_RNA (1)...(19): siRNA sense strand
ggcuugagcucaccaccua

SEQ ID NO: 1313677 - RNA, 19 nt, Homo sapiens
  misc_RNA (1)...(19): siRNA sense strand
gcucaccaccuaccucuuu

SEQ ID NO: 1313678 - RNA, 19 nt, Homo sapiens
  misc_RNA (1)...(19): siRNA sense strand
ggccuucucucgucugauc

SEQ ID NO: 1313679 - RNA, 19 nt, Homo sapiens
  misc_RNA (1)...(19): siRNA sense strand
ucuauacucuucgcuccua

SEQ ID NO: 1313680 - RNA, 19 nt, Homo sapiens
  misc_RNA (1)...(19): siRNA sense strand
gcaguggguguucgugaau

SEQ ID NO: 1313681 - RNA, 19 nt, Homo sapiens
  misc_RNA (1)...(19): siRNA sense strand
ggacuuccucacccucuuc

SEQ ID NO: 1313682 - RNA, 19 nt, Homo sapiens
  misc_RNA (1)...(19): siRNA sense strand
ugcaguggguguucgugaa

SEQ ID NO: 1313683 - RNA, 19 nt, Homo sapiens
  misc_RNA (1)...(19): siRNA sense strand
acacauggaugguggagua

SEQ ID NO: 1313684 - RNA, 19 nt, Homo sapiens
  misc_RNA (1)...(19): siRNA sense strand
ggcuugagcucaccaccua

SEQ ID NO: 1313685 - RNA, 19 nt, Homo sapiens
  misc_RNA (1)...(19): siRNA sense strand
gcucaccaccuaccucuuu

SEQ ID NO: 1313686 - RNA, 19 nt, Homo sapiens
  misc_RNA (1)...(19): siRNA sense strand
ggccuucucucgucugauc

SEQ ID NO: 1313687 - RNA, 19 nt, Homo sapiens
  misc_RNA (1)...(19): siRNA sense strand
ucuauacucuucgcuccua

SEQ ID NO: 1313688 - RNA, 19 nt, Homo sapiens
  misc_RNA (1)...(19): siRNA sense strand
gcaguggguguucgugaau

SEQ ID NO: 1313689 - RNA, 19 nt, Homo sapiens
  misc_RNA (1)...(19): siRNA sense strand
ggacuuccucacccucuuc

SEQ ID NO: 1313690 - RNA, 19 nt, Homo sapiens
  misc_RNA (1)...(19): siRNA sense strand
ugcaguggguguucgugaa

SEQ ID NO: 1313691 - RNA, 19 nt, Homo sapiens
  misc_RNA (1)...(19): siRNA sense strand
acacauggaugguggagua

SEQ ID NO: 1313692 - RNA, 19 nt, Homo sapiens
  misc_RNA (1)...(19): siRNA sense strand
ggcuugagcucaccaccua

SEQ ID NO: 1313693 - RNA, 19 nt, Homo sapiens
  misc_RNA (1)...(19): siRNA sense strand
gcucaccaccuaccucuuu

SEQ ID NO: 1313694 - RNA, 19 nt, Homo sapiens
  misc_RNA (1)...(19): siRNA sense strand
ggccuucucucgucugauc

SEQ ID NO: 1313695 - RNA, 19 nt, Homo sapiens
  misc_RNA (1)...(19): siRNA sense strand
ucuauacucuucgcuccua

SEQ ID NO: 1313696 - RNA, 19 nt, Homo sapiens
  misc_RNA (1)...(19): siRNA sense strand
gcaguggguguucgugaau

SEQ ID NO: 1313697 - RNA, 19 nt, Homo sapiens
  misc_RNA (1)...(19): siRNA sense strand
ggacuuccucacccucuuc

SEQ ID NO: 1313698 - RNA, 19 nt, Homo sapiens
  misc_RNA (1)...(19): siRNA sense strand
ugcaguggguguucgugaa

SEQ ID NO: 1313699 - RNA, 19 nt, Homo sapiens
  misc_RNA (1)...(19): siRNA sense strand
ggccuucucucgucugauc

SEQ ID NO: 1313700 - RNA, 19 nt, Homo sapiens
  misc_RNA (1)...(19): siRNA sense strand
gcaguggguguucgugaau

SEQ ID NO: 1313701 - RNA, 19 nt, Homo sapiens
  misc_RNA (1)...(19): siRNA sense strand
ugcaguggguguucgugaa

SEQ ID NO: 1313702 - RNA, 19 nt, Homo sapiens
  misc_RNA (1)...(19): siRNA sense strand
acacauggaugguggagua

SEQ ID NO: 1313703 - RNA, 19 nt, Homo sapiens
  misc_RNA (1)...(19): siRNA sense strand
ggcuugagcucaccaccua

SEQ ID NO: 1313704 - RNA, 19 nt, Homo sapiens
  misc_RNA (1)...(19): siRNA sense strand
gcucaccaccuaccucuuu

SEQ ID NO: 1313705 - RNA, 19 nt, Homo sapiens
  misc_RNA (1)...(19): siRNA sense strand
ggccuucucucgucugauc

SEQ ID NO: 1313706 - RNA, 19 nt, Homo sapiens
  misc_RNA (1)...(19): siRNA sense strand
ucuauacucuucgcuccua

SEQ ID NO: 1313707 - RNA, 19 nt, Homo sapiens
  misc_RNA (1)...(19): siRNA sense strand
gcaguggguguucgugaau

SEQ ID NO: 1313708 - RNA, 19 nt, Homo sapiens
  misc_RNA (1)...(19): siRNA sense strand
ggacuuccucacccucuuc

SEQ ID NO: 1313709 - RNA, 19 nt, Homo sapiens
  misc_RNA (1)...(19): siRNA sense strand
ugcaguggguguucgugaa

SEQ ID NO: 1313710 - RNA, 19 nt, Homo sapiens
  misc_RNA (1)...(19): siRNA sense strand
acacauggaugguggagua

SEQ ID NO: 1313711 - RNA, 19 nt, Homo sapiens
  misc_RNA (1)...(19): siRNA sense strand
ggcuugagcucaccaccua

SEQ ID NO: 1313712 - RNA, 19 nt, Homo sapiens
  misc_RNA (1)...(19): siRNA sense strand
gcucaccaccuaccucuuu

SEQ ID NO: 1313713 - RNA, 19 nt, Homo sapiens
  misc_RNA (1)...(19): siRNA sense strand
ggccuucucucgucugauc

SEQ ID NO: 1313714 - RNA, 19 nt, Homo sapiens
  misc_RNA (1)...(19): siRNA sense strand
ucuauacucuucgcuccua

SEQ ID NO: 1313715 - RNA, 19 nt, Homo sapiens
  misc_RNA (1)...(19): siRNA sense strand
gcaguggguguucgugaau

SEQ ID NO: 1313716 - RNA, 19 nt, Homo sapiens
  misc_RNA (1)...(19): siRNA sense strand
ggacuuccucacccucuuc

SEQ ID NO: 1313717 - RNA, 19 nt, Homo sapiens
  misc_RNA (1)...(19): siRNA sense strand
ugcaguggguguucgugaa

SEQ ID NO: 1313718 - RNA, 19 nt, Homo sapiens
  misc_RNA (1)...(19): siRNA sense strand
acacauggaugguggagua

SEQ ID NO: 1313719 - RNA, 19 nt, Homo sapiens
  misc_RNA (1)...(19): siRNA sense strand
ggcuugagcucaccaccua

SEQ ID NO: 1313720 - RNA, 19 nt, Homo sapiens
  misc_RNA (1)...(19): siRNA sense strand
gcucaccaccuaccucuuu

SEQ ID NO: 1313721 - RNA, 19 nt, Homo sapiens
  misc_RNA (1)...(19): siRNA sense strand
ggccuucucucgucugauc

SEQ ID NO: 1313722 - RNA, 19 nt, Homo sapiens
  misc_RNA (1)...(19): siRNA sense strand
ucuauacucuucgcuccua

SEQ ID NO: 1313723 - RNA, 19 nt, Homo sapiens
  misc_RNA (1)...(19): siRNA sense strand
gcaguggguguucgugaau

SEQ ID NO: 1313724 - RNA, 19 nt, Homo sapiens
  misc_RNA (1)...(19): siRNA sense strand
ggacuuccucacccucuuc

SEQ ID NO: 1313725 - RNA, 19 nt, Homo sapiens
  misc_RNA (1)...(19): siRNA sense strand
ugcaguggguguucgugaa

SEQ ID NO: 1313726 - RNA, 19 nt, Homo sapiens
  misc_RNA (1)...(19): siRNA sense strand
ggccuucucucgucugauc

SEQ ID NO: 1313727 - RNA, 19 nt, Homo sapiens
  misc_RNA (1)...(19): siRNA sense strand
gcaguggguguucgugaau

SEQ ID NO: 1313728 - RNA, 19 nt, Homo sapiens
  misc_RNA (1)...(19): siRNA sense strand
ugcaguggguguucgugaa

SEQ ID NO: 1313729 - RNA, 19 nt, Homo sapiens
  misc_RNA (1)...(19): siRNA sense strand
acacauggaugguggagua

SEQ ID NO: 1313730 - RNA, 19 nt, Homo sapiens
  misc_RNA (1)...(19): siRNA sense strand
ggcuugagcucaccaccua

SEQ ID NO: 1313731 - RNA, 19 nt, Homo sapiens
  misc_RNA (1)...(19): siRNA sense strand
gcucaccaccuaccucuuu

SEQ ID NO: 1313732 - RNA, 19 nt, Homo sapiens
  misc_RNA (1)...(19): siRNA sense strand
ggccuucucucgucugauc

SEQ ID NO: 1313733 - RNA, 19 nt, Homo sapiens
  misc_RNA (1)...(19): siRNA sense strand
ucuauacucuucgcuccua

SEQ ID NO: 1313734 - RNA, 19 nt, Homo sapiens
  misc_RNA (1)...(19): siRNA sense strand
gcaguggguguucgugaau

SEQ ID NO: 1313735 - RNA, 19 nt, Homo sapiens
  misc_RNA (1)...(19): siRNA sense strand
ggacuuccucacccucuuc

SEQ ID NO: 1313736 - RNA, 19 nt, Homo sapiens
  misc_RNA (1)...(19): siRNA sense strand
ugcaguggguguucgugaa

SEQ ID NO: 1313737 - RNA, 19 nt, Homo sapiens
  misc_RNA (1)...(19): siRNA sense strand
acacauggaugguggagua

SEQ ID NO: 1313738 - RNA, 19 nt, Homo sapiens
  misc_RNA (1)...(19): siRNA sense strand
ggcuugagcucaccaccua

SEQ ID NO: 1313739 - RNA, 19 nt, Homo sapiens
  misc_RNA (1)...(19): siRNA sense strand
gcucaccaccuaccucuuu

SEQ ID NO: 1313740 - RNA, 19 nt, Homo sapiens
  misc_RNA (1)...(19): siRNA sense strand
ggccuucucucgucugauc

SEQ ID NO: 1313741 - RNA, 19 nt, Homo sapiens
  misc_RNA (1)...(19): siRNA sense strand
ucuauacucuucgcuccua

SEQ ID NO: 1313742 - RNA, 19 nt, Homo sapiens
  misc_RNA (1)...(19): siRNA sense strand
gcaguggguguucgugaau

SEQ ID NO: 1313743 - RNA, 19 nt, Homo sapiens
  misc_RNA (1)...(19): siRNA sense strand
ggacuuccucacccucuuc

SEQ ID NO: 1313744 - RNA, 19 nt, Homo sapiens
  misc_RNA (1)...(19): siRNA sense strand
ugcaguggguguucgugaa

SEQ ID NO: 1313745 - RNA, 19 nt, Homo sapiens
  misc_RNA (1)...(19): siRNA sense strand
acacauggaugguggagua

SEQ ID NO: 1313746 - RNA, 19 nt, Homo sapiens
  misc_RNA (1)...(19): siRNA sense strand
ggcuugagcucaccaccua

SEQ ID NO: 1313747 - RNA, 19 nt, Homo sapiens
  misc_RNA (1)...(19): siRNA sense strand
gcucaccaccuaccucuuu

SEQ ID NO: 1313748 - RNA, 19 nt, Homo sapiens
  misc_RNA (1)...(19): siRNA sense strand
ggccuucucucgucugauc

SEQ ID NO: 1313749 - RNA, 19 nt, Homo sapiens
  misc_RNA (1)...(19): siRNA sense strand
ucuauacucuucgcuccua

SEQ ID NO: 1313750 - RNA, 19 nt, Homo sapiens
  misc_RNA (1)...(19): siRNA sense strand
gcaguggguguucgugaau

SEQ ID NO: 1313751 - RNA, 19 nt, Homo sapiens
  misc_RNA (1)...(19): siRNA sense strand
ggacuuccucacccucuuc

SEQ ID NO: 1313752 - RNA, 19 nt, Homo sapiens
  misc_RNA (1)...(19): siRNA sense strand
ugcaguggguguucgugaa

SEQ ID NO: 1313753 - RNA, 19 nt, Homo sapiens
  misc_RNA (1)...(19): siRNA sense strand
ggccuucucucgucugauc

SEQ ID NO: 1313754 - RNA, 19 nt, Homo sapiens
  misc_RNA (1)...(19): siRNA sense strand
gcaguggguguucgugaau

SEQ ID NO: 1313755 - RNA, 19 nt, Homo sapiens
  misc_RNA (1)...(19): siRNA sense strand
ugcaguggguguucgugaa

SEQ ID NO: 1313756 - RNA, 19 nt, Homo sapiens
  misc_RNA (1)...(19): siRNA sense strand
gcacacgccugcuggaugu

SEQ ID NO: 1313757 - RNA, 19 nt, Homo sapiens
  misc_RNA (1)...(19): siRNA sense strand
gaagaagacaguccuagga

SEQ ID NO: 1313758 - RNA, 19 nt, Homo sapiens
  misc_RNA (1)...(19): siRNA sense strand
gcacugggaccauaccaaa

SEQ ID NO: 1313759 - RNA, 19 nt, Homo sapiens
  misc_RNA (1)...(19): siRNA sense strand
uagcugugcuggcgucuuu

SEQ ID NO: 1313760 - RNA, 19 nt, Homo sapiens
  misc_RNA (1)...(19): siRNA sense strand
uagagucaguaccagguua

SEQ ID NO: 1313761 - RNA, 19 nt, Homo sapiens
  misc_RNA (1)...(19): siRNA sense strand
uggaggaggugaucacaga

SEQ ID NO: 1313762 - RNA, 19 nt, Homo sapiens
  misc_RNA (1)...(19): siRNA sense strand
gaccauaccaaaggagaua

SEQ ID NO: 1313763 - RNA, 19 nt, Homo sapiens
  misc_RNA (1)...(19): siRNA sense strand
gccaagcagccgacuauga

SEQ ID NO: 1313764 - RNA, 19 nt, Homo sapiens
  misc_RNA (1)...(19): siRNA sense strand
gccaguaccggauuaaugu

SEQ ID NO: 1313765 - RNA, 19 nt, Homo sapiens
  misc_RNA (1)...(19): siRNA sense strand
gcacugaugagggcaccua

SEQ ID NO: 1313766 - RNA, 19 nt, Homo sapiens
  misc_RNA (1)...(19): siRNA sense strand
gacccuggauggugcacuu

SEQ ID NO: 1313767 - RNA, 19 nt, Homo sapiens
  misc_RNA (1)...(19): siRNA sense strand
ucaaguuccguuugcagua

SEQ ID NO: 1313768 - RNA, 19 nt, Homo sapiens
  misc_RNA (1)...(19): siRNA sense strand
ccaagcagccgacuaugag

SEQ ID NO: 1313769 - RNA, 19 nt, Homo sapiens
  misc_RNA (1)...(19): siRNA sense strand
ccagccagaucagcgguuu

SEQ ID NO: 1313770 - RNA, 19 nt, Homo sapiens
  misc_RNA (1)...(19): siRNA sense strand
uggagccaguaccggauua

SEQ ID NO: 1313771 - RNA, 19 nt, Homo sapiens
  misc_RNA (1)...(19): siRNA sense strand
caaguuccguuugcaguac

SEQ ID NO: 1313772 - RNA, 19 nt, Homo sapiens
  misc_RNA (1)...(19): siRNA sense strand
gaggaggugaucacagaug

SEQ ID NO: 1313773 - RNA, 19 nt, Homo sapiens
  misc_RNA (1)...(19): siRNA sense strand
gagcuugcagagcaucuug

SEQ ID NO: 1313774 - RNA, 19 nt, Homo sapiens
  misc_RNA (1)...(19): siRNA sense strand
cuuugggaauccuuucuuu

SEQ ID NO: 1313775 - RNA, 19 nt, Homo sapiens
  misc_RNA (1)...(19): siRNA sense strand
cccgcuaccucaccuccua

SEQ ID NO: 1313776 - RNA, 19 nt, Homo sapiens
  misc_RNA (1)...(19): siRNA sense strand
ccacacccucggcuacuug

SEQ ID NO: 1313777 - RNA, 19 nt, Homo sapiens
  misc_RNA (1)...(19): siRNA sense strand
acucugggcuagggcauga

SEQ ID NO: 1313778 - RNA, 19 nt, Homo sapiens
  misc_RNA (1)...(19): siRNA sense strand
uccgagcacugggaccaua

SEQ ID NO: 1313779 - RNA, 19 nt, Homo sapiens
  misc_RNA (1)...(19): siRNA sense strand
uaaugugacugaggugaac

SEQ ID NO: 1313780 - RNA, 19 nt, Homo sapiens
  misc_RNA (1)...(19): siRNA sense strand
ggagccaguaccggauuaa

SEQ ID NO: 1313781 - RNA, 19 nt, Homo sapiens
  misc_RNA (1)...(19): siRNA sense strand
aggcagacagcacugauga

SEQ ID NO: 1313782 - RNA, 19 nt, Homo sapiens
  misc_RNA (1)...(19): siRNA sense strand
ggaccauaccaaaggagau

SEQ ID NO: 1313783 - RNA, 19 nt, Homo sapiens
  misc_RNA (1)...(19): siRNA sense strand
guagagucaguaccagguu

SEQ ID NO: 1313784 - RNA, 19 nt, Homo sapiens
  misc_RNA (1)...(19): siRNA sense strand
gcacacgccugcuggaugu

SEQ ID NO: 1313785 - RNA, 19 nt, Homo sapiens
  misc_RNA (1)...(19): siRNA sense strand
gaagaagacaguccuagga

SEQ ID NO: 1313786 - RNA, 19 nt, Homo sapiens
  misc_RNA (1)...(19): siRNA sense strand
gcacugggaccauaccaaa

SEQ ID NO: 1313787 - RNA, 19 nt, Homo sapiens
  misc_RNA (1)...(19): siRNA sense strand
uagcugugcuggcgucuuu

SEQ ID NO: 1313788 - RNA, 19 nt, Homo sapiens
  misc_RNA (1)...(19): siRNA sense strand
uagagucaguaccagguua

SEQ ID NO: 1313789 - RNA, 19 nt, Homo sapiens
  misc_RNA (1)...(19): siRNA sense strand
uggaggaggugaucacaga

SEQ ID NO: 1313790 - RNA, 19 nt, Homo sapiens
  misc_RNA (1)...(19): siRNA sense strand
gaccauaccaaaggagaua

SEQ ID NO: 1313791 - RNA, 19 nt, Homo sapiens
  misc_RNA (1)...(19): siRNA sense strand
gccaagcagccgacuauga

SEQ ID NO: 1313792 - RNA, 19 nt, Homo sapiens
  misc_RNA (1)...(19): siRNA sense strand
gccaguaccggauuaaugu

SEQ ID NO: 1313793 - RNA, 19 nt, Homo sapiens
  misc_RNA (1)...(19): siRNA sense strand
gcacugaugagggcaccua

SEQ ID NO: 1313794 - RNA, 19 nt, Homo sapiens
  misc_RNA (1)...(19): siRNA sense strand
gacccuggauggugcacuu

SEQ ID NO: 1313795 - RNA, 19 nt, Homo sapiens
  misc_RNA (1)...(19): siRNA sense strand
ucaaguuccguuugcagua

SEQ ID NO: 1313796 - RNA, 19 nt, Homo sapiens
  misc_RNA (1)...(19): siRNA sense strand
ccaagcagccgacuaugag

SEQ ID NO: 1313797 - RNA, 19 nt, Homo sapiens
  misc_RNA (1)...(19): siRNA sense strand
ccagccagaucagcgguuu

SEQ ID NO: 1313798 - RNA, 19 nt, Homo sapiens
  misc_RNA (1)...(19): siRNA sense strand
uggagccaguaccggauua

SEQ ID NO: 1313799 - RNA, 19 nt, Homo sapiens
  misc_RNA (1)...(19): siRNA sense strand
caaguuccguuugcaguac

SEQ ID NO: 1313800 - RNA, 19 nt, Homo sapiens
  misc_RNA (1)...(19): siRNA sense strand
gaggaggugaucacagaug

SEQ ID NO: 1313801 - RNA, 19 nt, Homo sapiens
  misc_RNA (1)...(19): siRNA sense strand
gagcuugcagagcaucuug

SEQ ID NO: 1313802 - RNA, 19 nt, Homo sapiens
  misc_RNA (1)...(19): siRNA sense strand
cuuugggaauccuuucuuu

SEQ ID NO: 1313803 - RNA, 19 nt, Homo sapiens
  misc_RNA (1)...(19): siRNA sense strand
cccgcuaccucaccuccua

SEQ ID NO: 1313804 - RNA, 19 nt, Homo sapiens
  misc_RNA (1)...(19): siRNA sense strand
ccacacccucggcuacuug

SEQ ID NO: 1313805 - RNA, 19 nt, Homo sapiens
  misc_RNA (1)...(19): siRNA sense strand
acucugggcuagggcauga

SEQ ID NO: 1313806 - RNA, 19 nt, Homo sapiens
  misc_RNA (1)...(19): siRNA sense strand
uccgagcacugggaccaua

SEQ ID NO: 1313807 - RNA, 19 nt, Homo sapiens
  misc_RNA (1)...(19): siRNA sense strand
uaaugugacugaggugaac

SEQ ID NO: 1313808 - RNA, 19 nt, Homo sapiens
  misc_RNA (1)...(19): siRNA sense strand
ggagccaguaccggauuaa

SEQ ID NO: 1313809 - RNA, 19 nt, Homo sapiens
  misc_RNA (1)...(19): siRNA sense strand
aggcagacagcacugauga

SEQ ID NO: 1313810 - RNA, 19 nt, Homo sapiens
  misc_RNA (1)...(19): siRNA sense strand
ggaccauaccaaaggagau

SEQ ID NO: 1313811 - RNA, 19 nt, Homo sapiens
  misc_RNA (1)...(19): siRNA sense strand
guagagucaguaccagguu

SEQ ID NO: 1313812 - RNA, 19 nt, Homo sapiens
  misc_RNA (1)...(19): siRNA sense strand
ccacagcuaucaccuuuga

SEQ ID NO: 1313813 - RNA, 19 nt, Homo sapiens
  misc_RNA (1)...(19): siRNA sense strand
cugcauggcuccaaaauua

SEQ ID NO: 1313814 - RNA, 19 nt, Homo sapiens
  misc_RNA (1)...(19): siRNA sense strand
cccaacaccuucaauguga

SEQ ID NO: 1313815 - RNA, 19 nt, Homo sapiens
  misc_RNA (1)...(19): siRNA sense strand
ggccugacccugagucuuu

SEQ ID NO: 1313816 - RNA, 19 nt, Homo sapiens
  misc_RNA (1)...(19): siRNA sense strand
uacaaggucuccauaagug

SEQ ID NO: 1313817 - RNA, 19 nt, Homo sapiens
  misc_RNA (1)...(19): siRNA sense strand
caagaaccgcugccacauu

SEQ ID NO: 1313818 - RNA, 19 nt, Homo sapiens
  misc_RNA (1)...(19): siRNA sense strand
guacaaggucuccauaagu

SEQ ID NO: 1313819 - RNA, 19 nt, Homo sapiens
  misc_RNA (1)...(19): siRNA sense strand
aagaaccgcugccacauuc

SEQ ID NO: 1313820 - RNA, 19 nt, Homo sapiens
  misc_RNA (1)...(19): siRNA sense strand
ugccacagcuaucaccuuu

SEQ ID NO: 1313821 - RNA, 19 nt, Homo sapiens
  misc_RNA (1)...(19): siRNA sense strand
gaagccugauccuccagaa

SEQ ID NO: 1313822 - RNA, 19 nt, Homo sapiens
  misc_RNA (1)...(19): siRNA sense strand
caaguacaaggucuccaua

SEQ ID NO: 1313823 - RNA, 19 nt, Homo sapiens
  misc_RNA (1)...(19): siRNA sense strand
ccaaaauuauggucuguga

SEQ ID NO: 1313824 - RNA, 19 nt, Homo sapiens
  misc_RNA (1)...(19): siRNA sense strand
ggacccagcccucaagaac

SEQ ID NO: 1313825 - RNA, 19 nt, Homo sapiens
  misc_RNA (1)...(19): siRNA sense strand
gaaggacccagcccucaag

SEQ ID NO: 1313826 - RNA, 19 nt, Homo sapiens
  misc_RNA (1)...(19): siRNA sense strand
ggaaggaguacauuaucca

SEQ ID NO: 1313827 - RNA, 19 nt, Homo sapiens
  misc_RNA (1)...(19): siRNA sense strand
ugacguggcggguaaaugg

SEQ ID NO: 1313828 - RNA, 19 nt, Homo sapiens
  misc_RNA (1)...(19): siRNA sense strand
cagcacacaccaucacaga

SEQ ID NO: 1313829 - RNA, 19 nt, Homo sapiens
  misc_RNA (1)...(19): siRNA sense strand
gggaaggaguacauuaucc

SEQ ID NO: 1313830 - RNA, 19 nt, Homo sapiens
  misc_RNA (1)...(19): siRNA sense strand
ccagcagucucuugaucug

SEQ ID NO: 1313831 - RNA, 19 nt, Homo sapiens
  misc_RNA (1)...(19): siRNA sense strand
caccuguucuccaccauca

SEQ ID NO: 1313832 - RNA, 19 nt, Homo sapiens
  misc_RNA (1)...(19): siRNA sense strand
uaucaccuuugacgaguuc

SEQ ID NO: 1313833 - RNA, 19 nt, Homo sapiens
  misc_RNA (1)...(19): siRNA sense strand
ccaccuacauucccaacac

SEQ ID NO: 1313834 - RNA, 19 nt, Homo sapiens
  misc_RNA (1)...(19): siRNA sense strand
gccgggaaggaguacauua

SEQ ID NO: 1313835 - RNA, 19 nt, Homo sapiens
  misc_RNA (1)...(19): siRNA sense strand
cuccauaagugucagcaau

SEQ ID NO: 1313836 - RNA, 19 nt, Homo sapiens
  misc_RNA (1)...(19): siRNA sense strand
ggccugcugugcugugcuu

SEQ ID NO: 1313837 - RNA, 19 nt, Homo sapiens
  misc_RNA (1)...(19): siRNA sense strand
caaugugacugugcugcau

SEQ ID NO: 1313838 - RNA, 19 nt, Homo sapiens
  misc_RNA (1)...(19): siRNA sense strand
ccacaaugccacagcuauc

SEQ ID NO: 1313839 - RNA, 19 nt, Homo sapiens
  misc_RNA (1)...(19): siRNA sense strand
aguacaaggucuccauaag

SEQ ID NO: 1313840 - RNA, 19 nt, Homo sapiens
  misc_RNA (1)...(19): siRNA sense strand
aaauuauggucugugagaa

SEQ ID NO: 1313841 - RNA, 19 nt, Homo sapiens
  misc_RNA (1)...(19): siRNA sense strand
gcacagcacacaccaucac

SEQ ID NO: 1313842 - RNA, 19 nt, Homo sapiens
  misc_RNA (1)...(19): siRNA sense strand
ccugggcucugacgugaca

SEQ ID NO: 1313843 - RNA, 19 nt, Homo sapiens
  misc_RNA (1)...(19): siRNA sense strand
cuaccacgaagaucuguga

SEQ ID NO: 1313844 - RNA, 19 nt, Homo sapiens
  misc_RNA (1)...(19): siRNA sense strand
ccaccuaccacgaagaucu

SEQ ID NO: 1313845 - RNA, 19 nt, Homo sapiens
  misc_RNA (1)...(19): siRNA sense strand
ucuccaccaucaaguacaa

SEQ ID NO: 1313846 - RNA, 19 nt, Homo sapiens
  misc_RNA (1)...(19): siRNA sense strand
ccgggaaggaguacauuau

SEQ ID NO: 1313847 - RNA, 19 nt, Homo sapiens
  misc_RNA (1)...(19): siRNA sense strand
ccauaagugucagcaaugc

SEQ ID NO: 1313848 - RNA, 19 nt, Homo sapiens
  misc_RNA (1)...(19): siRNA sense strand
gacgugacacugccaugug

SEQ ID NO: 1313849 - RNA, 19 nt, Homo sapiens
  misc_RNA (1)...(19): siRNA sense strand
uuugacgaguucaccauug

SEQ ID NO: 1313850 - RNA, 19 nt, Homo sapiens
  misc_RNA (1)...(19): siRNA sense strand
ccacagcuaucaccuuuga

SEQ ID NO: 1313851 - RNA, 19 nt, Homo sapiens
  misc_RNA (1)...(19): siRNA sense strand
cugcauggcuccaaaauua

SEQ ID NO: 1313852 - RNA, 19 nt, Homo sapiens
  misc_RNA (1)...(19): siRNA sense strand
cccaacaccuucaauguga

SEQ ID NO: 1313853 - RNA, 19 nt, Homo sapiens
  misc_RNA (1)...(19): siRNA sense strand
ggccugacccugagucuuu

SEQ ID NO: 1313854 - RNA, 19 nt, Homo sapiens
  misc_RNA (1)...(19): siRNA sense strand
uacaaggucuccauaagug

SEQ ID NO: 1313855 - RNA, 19 nt, Homo sapiens
  misc_RNA (1)...(19): siRNA sense strand
caagaaccgcugccacauu

SEQ ID NO: 1313856 - RNA, 19 nt, Homo sapiens
  misc_RNA (1)...(19): siRNA sense strand
guacaaggucuccauaagu

SEQ ID NO: 1313857 - RNA, 19 nt, Homo sapiens
  misc_RNA (1)...(19): siRNA sense strand
aagaaccgcugccacauuc

SEQ ID NO: 1313858 - RNA, 19 nt, Homo sapiens
  misc_RNA (1)...(19): siRNA sense strand
ugccacagcuaucaccuuu

SEQ ID NO: 1313859 - RNA, 19 nt, Homo sapiens
  misc_RNA (1)...(19): siRNA sense strand
gaagccugauccuccagaa

SEQ ID NO: 1313860 - RNA, 19 nt, Homo sapiens
  misc_RNA (1)...(19): siRNA sense strand
caaguacaaggucuccaua

SEQ ID NO: 1313861 - RNA, 19 nt, Homo sapiens
  misc_RNA (1)...(19): siRNA sense strand
ccaaaauuauggucuguga

SEQ ID NO: 1313862 - RNA, 19 nt, Homo sapiens
  misc_RNA (1)...(19): siRNA sense strand
ggacccagcccucaagaac

SEQ ID NO: 1313863 - RNA, 19 nt, Homo sapiens
  misc_RNA (1)...(19): siRNA sense strand
gaaggacccagcccucaag

SEQ ID NO: 1313864 - RNA, 19 nt, Homo sapiens
  misc_RNA (1)...(19): siRNA sense strand
ggaaggaguacauuaucca

SEQ ID NO: 1313865 - RNA, 19 nt, Homo sapiens
  misc_RNA (1)...(19): siRNA sense strand
ugacguggcggguaaaugg

SEQ ID NO: 1313866 - RNA, 19 nt, Homo sapiens
  misc_RNA (1)...(19): siRNA sense strand
cagcacacaccaucacaga

SEQ ID NO: 1313867 - RNA, 19 nt, Homo sapiens
  misc_RNA (1)...(19): siRNA sense strand
gggaaggaguacauuaucc

SEQ ID NO: 1313868 - RNA, 19 nt, Homo sapiens
  misc_RNA (1)...(19): siRNA sense strand
ccagcagucucuugaucug

SEQ ID NO: 1313869 - RNA, 19 nt, Homo sapiens
  misc_RNA (1)...(19): siRNA sense strand
caccuguucuccaccauca

SEQ ID NO: 1313870 - RNA, 19 nt, Homo sapiens
  misc_RNA (1)...(19): siRNA sense strand
uaucaccuuugacgaguuc

SEQ ID NO: 1313871 - RNA, 19 nt, Homo sapiens
  misc_RNA (1)...(19): siRNA sense strand
ccaccuacauucccaacac

SEQ ID NO: 1313872 - RNA, 19 nt, Homo sapiens
  misc_RNA (1)...(19): siRNA sense strand
gccgggaaggaguacauua

SEQ ID NO: 1313873 - RNA, 19 nt, Homo sapiens
  misc_RNA (1)...(19): siRNA sense strand
cuccauaagugucagcaau

SEQ ID NO: 1313874 - RNA, 19 nt, Homo sapiens
  misc_RNA (1)...(19): siRNA sense strand
ggccugcugugcugugcuu

SEQ ID NO: 1313875 - RNA, 19 nt, Homo sapiens
  misc_RNA (1)...(19): siRNA sense strand
caaugugacugugcugcau

SEQ ID NO: 1313876 - RNA, 19 nt, Homo sapiens
  misc_RNA (1)...(19): siRNA sense strand
ccacaaugccacagcuauc

SEQ ID NO: 1313877 - RNA, 19 nt, Homo sapiens
  misc_RNA (1)...(19): siRNA sense strand
aguacaaggucuccauaag

SEQ ID NO: 1313878 - RNA, 19 nt, Homo sapiens
  misc_RNA (1)...(19): siRNA sense strand
aaauuauggucugugagaa

SEQ ID NO: 1313879 - RNA, 19 nt, Homo sapiens
  misc_RNA (1)...(19): siRNA sense strand
gcacagcacacaccaucac

SEQ ID NO: 1313880 - RNA, 19 nt, Homo sapiens
  misc_RNA (1)...(19): siRNA sense strand
ccugggcucugacgugaca

SEQ ID NO: 1313881 - RNA, 19 nt, Homo sapiens
  misc_RNA (1)...(19): siRNA sense strand
cuaccacgaagaucuguga

SEQ ID NO: 1313882 - RNA, 19 nt, Homo sapiens
  misc_RNA (1)...(19): siRNA sense strand
ccaccuaccacgaagaucu

SEQ ID NO: 1313883 - RNA, 19 nt, Homo sapiens
  misc_RNA (1)...(19): siRNA sense strand
ucuccaccaucaaguacaa

SEQ ID NO: 1313884 - RNA, 19 nt, Homo sapiens
  misc_RNA (1)...(19): siRNA sense strand
ccgggaaggaguacauuau

SEQ ID NO: 1313885 - RNA, 19 nt, Homo sapiens
  misc_RNA (1)...(19): siRNA sense strand
ccauaagugucagcaaugc

SEQ ID NO: 1313886 - RNA, 19 nt, Homo sapiens
  misc_RNA (1)...(19): siRNA sense strand
gacgugacacugccaugug

SEQ ID NO: 1313887 - RNA, 19 nt, Homo sapiens
  misc_RNA (1)...(19): siRNA sense strand
uuugacgaguucaccauug

SEQ ID NO: 1313888 - RNA, 19 nt, Homo sapiens
  misc_RNA (1)...(19): siRNA sense strand
gaacacagcuucuauuuag

SEQ ID NO: 1313889 - RNA, 19 nt, Homo sapiens
  misc_RNA (1)...(19): siRNA sense strand
gaaauguucuccaaagaua

SEQ ID NO: 1313890 - RNA, 19 nt, Homo sapiens
  misc_RNA (1)...(19): siRNA sense strand
gacaauagcugaacaagaa

SEQ ID NO: 1313891 - RNA, 19 nt, Homo sapiens
  misc_RNA (1)...(19): siRNA sense strand
acaaagagauggcauuaua

SEQ ID NO: 1313892 - RNA, 19 nt, Homo sapiens
  misc_RNA (1)...(19): siRNA sense strand
uagcacagcugcagacuua

SEQ ID NO: 1313893 - RNA, 19 nt, Homo sapiens
  misc_RNA (1)...(19): siRNA sense strand
caaguaagcucuuuauuag

SEQ ID NO: 1313894 - RNA, 19 nt, Homo sapiens
  misc_RNA (1)...(19): siRNA sense strand
gcagacagaugguaugaaa

SEQ ID NO: 1313895 - RNA, 19 nt, Homo sapiens
  misc_RNA (1)...(19): siRNA sense strand
guucgaaacugauauagua

SEQ ID NO: 1313896 - RNA, 19 nt, Homo sapiens
  misc_RNA (1)...(19): siRNA sense strand
gaagaacaguuggaagaua

SEQ ID NO: 1313897 - RNA, 19 nt, Homo sapiens
  misc_RNA (1)...(19): siRNA sense strand
acaaaggaaucaucacuua

SEQ ID NO: 1313898 - RNA, 19 nt, Homo sapiens
  misc_RNA (1)...(19): siRNA sense strand
caggaaagccuacaaauuu

SEQ ID NO: 1313899 - RNA, 19 nt, Homo sapiens
  misc_RNA (1)...(19): siRNA sense strand
gaagagaaaucauaaagac

SEQ ID NO: 1313900 - RNA, 19 nt, Homo sapiens
  misc_RNA (1)...(19): siRNA sense strand
gaaguuaacuaucaagagu

SEQ ID NO: 1313901 - RNA, 19 nt, Homo sapiens
  misc_RNA (1)...(19): siRNA sense strand
gaagagcuuuccaaacuga

SEQ ID NO: 1313902 - RNA, 19 nt, Homo sapiens
  misc_RNA (1)...(19): siRNA sense strand
gaagaacuaggacuaauuu

SEQ ID NO: 1313903 - RNA, 19 nt, Homo sapiens
  misc_RNA (1)...(19): siRNA sense strand
gaagaagaauuugguguug

SEQ ID NO: 1313904 - RNA, 19 nt, Homo sapiens
  misc_RNA (1)...(19): siRNA sense strand
gaacaaguuucauugagau

SEQ ID NO: 1313905 - RNA, 19 nt, Homo sapiens
  misc_RNA (1)...(19): siRNA sense strand
aaacugaacugucuagaau

SEQ ID NO: 1313906 - RNA, 19 nt, Homo sapiens
  misc_RNA (1)...(19): siRNA sense strand
caaguuaucuucucugcaa

SEQ ID NO: 1313907 - RNA, 19 nt, Homo sapiens
  misc_RNA (1)...(19): siRNA sense strand
gcagauagaugguuuacag

SEQ ID NO: 1313908 - RNA, 19 nt, Homo sapiens
  misc_RNA (1)...(19): siRNA sense strand
gaagaaguagcuaagguua

SEQ ID NO: 1313909 - RNA, 19 nt, Homo sapiens
  misc_RNA (1)...(19): siRNA sense strand
caacagaacucauggaaaa

SEQ ID NO: 1313910 - RNA, 19 nt, Homo sapiens
  misc_RNA (1)...(19): siRNA sense strand
uaacccagcucacugcuaa

SEQ ID NO: 1313911 - RNA, 19 nt, Homo sapiens
  misc_RNA (1)...(19): siRNA sense strand
gaaaugacucuucaaauca

SEQ ID NO: 1313912 - RNA, 19 nt, Homo sapiens
  misc_RNA (1)...(19): siRNA sense strand
gggcagagcuggaugagau

SEQ ID NO: 1313913 - RNA, 19 nt, Homo sapiens
  misc_RNA (1)...(19): siRNA sense strand
gaacaagaaacacaaagaa

SEQ ID NO: 1313914 - RNA, 19 nt, Homo sapiens
  misc_RNA (1)...(19): siRNA sense strand
ccagcucacugcuaauuua

SEQ ID NO: 1313915 - RNA, 19 nt, Homo sapiens
  misc_RNA (1)...(19): siRNA sense strand
cagaaaggaacuagaauua

SEQ ID NO: 1313916 - RNA, 19 nt, Homo sapiens
  misc_RNA (1)...(19): siRNA sense strand
ggaaaugggugagguuguu

SEQ ID NO: 1313917 - RNA, 19 nt, Homo sapiens
  misc_RNA (1)...(19): siRNA sense strand
acagagagcuggaagaaau

SEQ ID NO: 1313918 - RNA, 19 nt, Homo sapiens
  misc_RNA (1)...(19): siRNA sense strand
gaacauggaaaggaaauuu

SEQ ID NO: 1313919 - RNA, 19 nt, Homo sapiens
  misc_RNA (1)...(19): siRNA sense strand
agaacaagaccacuuauua

SEQ ID NO: 1313920 - RNA, 19 nt, Homo sapiens
  misc_RNA (1)...(19): siRNA sense strand
gaacaagaccacuuauuag

SEQ ID NO: 1313921 - RNA, 19 nt, Homo sapiens
  misc_RNA (1)...(19): siRNA sense strand
gacaguggaugugaaauuu

SEQ ID NO: 1313922 - RNA, 19 nt, Homo sapiens
  misc_RNA (1)...(19): siRNA sense strand
cagaauggcugaaucacaa

SEQ ID NO: 1313923 - RNA, 19 nt, Homo sapiens
  misc_RNA (1)...(19): siRNA sense strand
ggaagcagcaugagauuga

SEQ ID NO: 1313924 - RNA, 19 nt, Homo sapiens
  misc_RNA (1)...(19): siRNA sense strand
agaaaugacucuucaaauc

SEQ ID NO: 1313925 - RNA, 19 nt, Homo sapiens
  misc_RNA (1)...(19): siRNA sense strand
gaacaggaaagccuacaaa

SEQ ID NO: 1313926 - RNA, 19 nt, Homo sapiens
  misc_RNA (1)...(19): siRNA sense strand
acaagaagcugaauuagag

SEQ ID NO: 1313927 - RNA, 19 nt, Homo sapiens
  misc_RNA (1)...(19): siRNA sense strand
guagagagcuagaaaucau

SEQ ID NO: 1313928 - RNA, 19 nt, Homo sapiens
  misc_RNA (1)...(19): siRNA sense strand
gaaagaaacugaacaaaac

SEQ ID NO: 1313929 - RNA, 19 nt, Homo sapiens
  misc_RNA (1)...(19): siRNA sense strand
gaaaugaggguuaccuaug

SEQ ID NO: 1313930 - RNA, 19 nt, Homo sapiens
  misc_RNA (1)...(19): siRNA sense strand
ggaaacaaauaucguuaag

SEQ ID NO: 1313931 - RNA, 19 nt, Homo sapiens
  misc_RNA (1)...(19): siRNA sense strand
gcagauagugcaaaugaaa

SEQ ID NO: 1313932 - RNA, 19 nt, Homo sapiens
  misc_RNA (1)...(19): siRNA sense strand
caacagauccucacucauc

SEQ ID NO: 1313933 - RNA, 19 nt, Homo sapiens
  misc_RNA (1)...(19): siRNA sense strand
aggaaagccuacaaauuua

SEQ ID NO: 1313934 - RNA, 19 nt, Homo sapiens
  misc_RNA (1)...(19): siRNA sense strand
gauccagaauuacaagauu

SEQ ID NO: 1313935 - RNA, 19 nt, Homo sapiens
  misc_RNA (1)...(19): siRNA sense strand
guacuuaaaucagaacaga

SEQ ID NO: 1313936 - RNA, 19 nt, Homo sapiens
  misc_RNA (1)...(19): siRNA sense strand
gaacagauucagagagcua

SEQ ID NO: 1313937 - RNA, 19 nt, Homo sapiens
  misc_RNA (1)...(19): siRNA sense strand
ggcaauaaaugaacugaau

SEQ ID NO: 1313938 - RNA, 19 nt, Homo sapiens
  misc_RNA (1)...(19): siRNA sense strand
agaaacagcacucauagua

SEQ ID NO: 1313939 - RNA, 19 nt, Homo sapiens
  misc_RNA (1)...(19): siRNA sense strand
gaacuggaaagugaaauuu

SEQ ID NO: 1313940 - RNA, 19 nt, Homo sapiens
  misc_RNA (1)...(19): siRNA sense strand
aggcagagauccacuguuu

SEQ ID NO: 1313941 - RNA, 19 nt, Homo sapiens
  misc_RNA (1)...(19): siRNA sense strand
gcaguguccuuggugaaua

SEQ ID NO: 1313942 - RNA, 19 nt, Homo sapiens
  misc_RNA (1)...(19): siRNA sense strand
acagaaacauggugagauu

SEQ ID NO: 1313943 - RNA, 19 nt, Homo sapiens
  misc_RNA (1)...(19): siRNA sense strand
gagcuucauuugcaaagaa

SEQ ID NO: 1313944 - RNA, 19 nt, Homo sapiens
  misc_RNA (1)...(19): siRNA sense strand
aagaagagcuuuccaaacu

SEQ ID NO: 1313945 - RNA, 19 nt, Homo sapiens
  misc_RNA (1)...(19): siRNA sense strand
agaaacaggugaugaagga

SEQ ID NO: 1313946 - RNA, 19 nt, Homo sapiens
  misc_RNA (1)...(19): siRNA sense strand
gauagaugguuuacagaau

SEQ ID NO: 1313947 - RNA, 19 nt, Homo sapiens
  misc_RNA (1)...(19): siRNA sense strand
agaaguagcuaagguuauu

SEQ ID NO: 1313948 - RNA, 19 nt, Homo sapiens
  misc_RNA (1)...(19): siRNA sense strand
gaauucuggugauuacauu

SEQ ID NO: 1313949 - RNA, 19 nt, Homo sapiens
  misc_RNA (1)...(19): siRNA sense strand
gaucaaggaacuucagaaa

SEQ ID NO: 1313950 - RNA, 19 nt, Homo sapiens
  misc_RNA (1)...(19): siRNA sense strand
caaguuucauugagaugua

SEQ ID NO: 1313951 - RNA, 19 nt, Homo sapiens
  misc_RNA (1)...(19): siRNA sense strand
gcaaaagaaccaagaaaua

SEQ ID NO: 1313952 - RNA, 19 nt, Homo sapiens
  misc_RNA (1)...(19): siRNA sense strand
guaugaaacuugaauuugg

SEQ ID NO: 1313953 - RNA, 19 nt, Homo sapiens
  misc_RNA (1)...(19): siRNA sense strand
caaaguaacagaagaauac

SEQ ID NO: 1313954 - RNA, 19 nt, Homo sapiens
  misc_RNA (1)...(19): siRNA sense strand
aaauaugacuguuggagaa

SEQ ID NO: 1313955 - RNA, 19 nt, Homo sapiens
  misc_RNA (1)...(19): siRNA sense strand
ggaagaacuaggacuaauu

SEQ ID NO: 1313956 - RNA, 19 nt, Homo sapiens
  misc_RNA (1)...(19): siRNA sense strand
guuaaugaauguggcaaua

SEQ ID NO: 1313957 - RNA, 19 nt, Homo sapiens
  misc_RNA (1)...(19): siRNA sense strand
ggaagaagaauuugguguu

SEQ ID NO: 1313958 - RNA, 19 nt, Homo sapiens
  misc_RNA (1)...(19): siRNA sense strand
gauggaagcccaacgcauu

SEQ ID NO: 1313959 - RNA, 19 nt, Homo sapiens
  misc_RNA (1)...(19): siRNA sense strand
ucagagagcuagacagaca

SEQ ID NO: 1313960 - RNA, 19 nt, Homo sapiens
  misc_RNA (1)...(19): siRNA sense strand
caagaccacuuauuagaag

SEQ ID NO: 1313961 - RNA, 19 nt, Homo sapiens
  misc_RNA (1)...(19): siRNA sense strand
ugaagaacaagaccacuua

SEQ ID NO: 1313962 - RNA, 19 nt, Homo sapiens
  misc_RNA (1)...(19): siRNA sense strand
gaacaaggagcacaagaca

SEQ ID NO: 1313963 - RNA, 19 nt, Homo sapiens
  misc_RNA (1)...(19): siRNA sense strand
ugacugcaguucagaggua

SEQ ID NO: 1313964 - RNA, 19 nt, Homo sapiens
  misc_RNA (1)...(19): siRNA sense strand
caguggaugugaaauuuaa

SEQ ID NO: 1313965 - RNA, 19 nt, Homo sapiens
  misc_RNA (1)...(19): siRNA sense strand
gaaauuaucacaggaucaa

SEQ ID NO: 1313966 - RNA, 19 nt, Homo sapiens
  misc_RNA (1)...(19): siRNA sense strand
gaggaaacaaauaucguua

SEQ ID NO: 1313967 - RNA, 19 nt, Homo sapiens
  misc_RNA (1)...(19): siRNA sense strand
caacaaaguaacagaagaa

SEQ ID NO: 1313968 - RNA, 19 nt, Homo sapiens
  misc_RNA (1)...(19): siRNA sense strand
gaauaaauccaacuacagu

SEQ ID NO: 1313969 - RNA, 19 nt, Homo sapiens
  misc_RNA (1)...(19): siRNA sense strand
aaacaaagagauggcauua

SEQ ID NO: 1313970 - RNA, 19 nt, Homo sapiens
  misc_RNA (1)...(19): siRNA sense strand
caaacugaaggaagauuua

SEQ ID NO: 1313971 - RNA, 19 nt, Homo sapiens
  misc_RNA (1)...(19): siRNA sense strand
ccgccaagcuuaccuguug

SEQ ID NO: 1313972 - RNA, 19 nt, Homo sapiens
  misc_RNA (1)...(19): siRNA sense strand
gaaagaacucaauguacuu

SEQ ID NO: 1313973 - RNA, 19 nt, Homo sapiens
  misc_RNA (1)...(19): siRNA sense strand
ucagaaagaacucaaugua

SEQ ID NO: 1313974 - RNA, 19 nt, Homo sapiens
  misc_RNA (1)...(19): siRNA sense strand
gagaagaaaguaagcaaga

SEQ ID NO: 1313975 - RNA, 19 nt, Homo sapiens
  misc_RNA (1)...(19): siRNA sense strand
caagagaaagaacaaguuu

SEQ ID NO: 1313976 - RNA, 19 nt, Homo sapiens
  misc_RNA (1)...(19): siRNA sense strand
gaaaauacauacuccuguu

SEQ ID NO: 1313977 - RNA, 19 nt, Homo sapiens
  misc_RNA (1)...(19): siRNA sense strand
gaaauacucagacaagaag

SEQ ID NO: 1313978 - RNA, 19 nt, Homo sapiens
  misc_RNA (1)...(19): siRNA sense strand
gcacacucuucucaacaaa

SEQ ID NO: 1313979 - RNA, 19 nt, Homo sapiens
  misc_RNA (1)...(19): siRNA sense strand
uaaccaagcgagagaaauu

SEQ ID NO: 1313980 - RNA, 19 nt, Homo sapiens
  misc_RNA (1)...(19): siRNA sense strand
gaagcugccauuaaacaaa

SEQ ID NO: 1313981 - RNA, 19 nt, Homo sapiens
  misc_RNA (1)...(19): siRNA sense strand
ggcagugucugaagaaugu

SEQ ID NO: 1313982 - RNA, 19 nt, Homo sapiens
  misc_RNA (1)...(19): siRNA sense strand
ggaucaguuucuaaaguaa

SEQ ID NO: 1313983 - RNA, 19 nt, Homo sapiens
  misc_RNA (1)...(19): siRNA sense strand
caccaugauuugaauauug

SEQ ID NO: 1313984 - RNA, 19 nt, Homo sapiens
  misc_RNA (1)...(19): siRNA sense strand
caacaagcaagaagagaaa

SEQ ID NO: 1313985 - RNA, 19 nt, Homo sapiens
  misc_RNA (1)...(19): siRNA sense strand
caaagagauggcauuauaa

SEQ ID NO: 1313986 - RNA, 19 nt, Homo sapiens
  misc_RNA (1)...(19): siRNA sense strand
uugaagaccuuguugaaga

SEQ ID NO: 1313987 - RNA, 19 nt, Homo sapiens
  misc_RNA (1)...(19): siRNA sense strand
ucagcuaaaugaagagauu

SEQ ID NO: 1313988 - RNA, 19 nt, Homo sapiens
  misc_RNA (1)...(19): siRNA sense strand
gaacacagcuucuauuuag

SEQ ID NO: 1313989 - RNA, 19 nt, Homo sapiens
  misc_RNA (1)...(19): siRNA sense strand
gaaauguucuccaaagaua

SEQ ID NO: 1313990 - RNA, 19 nt, Homo sapiens
  misc_RNA (1)...(19): siRNA sense strand
gacaauagcugaacaagaa

SEQ ID NO: 1313991 - RNA, 19 nt, Homo sapiens
  misc_RNA (1)...(19): siRNA sense strand
acaaagagauggcauuaua

SEQ ID NO: 1313992 - RNA, 19 nt, Homo sapiens
  misc_RNA (1)...(19): siRNA sense strand
uagcacagcugcagacuua

SEQ ID NO: 1313993 - RNA, 19 nt, Homo sapiens
  misc_RNA (1)...(19): siRNA sense strand
caaguaagcucuuuauuag

SEQ ID NO: 1313994 - RNA, 19 nt, Homo sapiens
  misc_RNA (1)...(19): siRNA sense strand
gcagacagaugguaugaaa

SEQ ID NO: 1313995 - RNA, 19 nt, Homo sapiens
  misc_RNA (1)...(19): siRNA sense strand
guucgaaacugauauagua

SEQ ID NO: 1313996 - RNA, 19 nt, Homo sapiens
  misc_RNA (1)...(19): siRNA sense strand
gaagaacaguuggaagaua

SEQ ID NO: 1313997 - RNA, 19 nt, Homo sapiens
  misc_RNA (1)...(19): siRNA sense strand
acaaaggaaucaucacuua

SEQ ID NO: 1313998 - RNA, 19 nt, Homo sapiens
  misc_RNA (1)...(19): siRNA sense strand
caggaaagccuacaaauuu

SEQ ID NO: 1313999 - RNA, 19 nt, Homo sapiens
  misc_RNA (1)...(19): siRNA sense strand
gaagagaaaucauaaagac

SEQ ID NO: 1314000 - RNA, 19 nt, Homo sapiens
  misc_RNA (1)...(19): siRNA sense strand
gaaguuaacuaucaagagu

SEQ ID NO: 1314001 - RNA, 19 nt, Homo sapiens
  misc_RNA (1)...(19): siRNA sense strand
gaagagcuuuccaaacuga

SEQ ID NO: 1314002 - RNA, 19 nt, Homo sapiens
  misc_RNA (1)...(19): siRNA sense strand
gaagaacuaggacuaauuu

SEQ ID NO: 1314003 - RNA, 19 nt, Homo sapiens
  misc_RNA (1)...(19): siRNA sense strand
gaagaagaauuugguguug

SEQ ID NO: 1314004 - RNA, 19 nt, Homo sapiens
  misc_RNA (1)...(19): siRNA sense strand
gaacaaguuucauugagau

SEQ ID NO: 1314005 - RNA, 19 nt, Homo sapiens
  misc_RNA (1)...(19): siRNA sense strand
aaacugaacugucuagaau

SEQ ID NO: 1314006 - RNA, 19 nt, Homo sapiens
  misc_RNA (1)...(19): siRNA sense strand
caaguuaucuucucugcaa

SEQ ID NO: 1314007 - RNA, 19 nt, Homo sapiens
  misc_RNA (1)...(19): siRNA sense strand
gcagauagaugguuuacag

SEQ ID NO: 1314008 - RNA, 19 nt, Homo sapiens
  misc_RNA (1)...(19): siRNA sense strand
gaagaaguagcuaagguua

SEQ ID NO: 1314009 - RNA, 19 nt, Homo sapiens
  misc_RNA (1)...(19): siRNA sense strand
caacagaacucauggaaaa

SEQ ID NO: 1314010 - RNA, 19 nt, Homo sapiens
  misc_RNA (1)...(19): siRNA sense strand
uaacccagcucacugcuaa

SEQ ID NO: 1314011 - RNA, 19 nt, Homo sapiens
  misc_RNA (1)...(19): siRNA sense strand
gaaaugacucuucaaauca

SEQ ID NO: 1314012 - RNA, 19 nt, Homo sapiens
  misc_RNA (1)...(19): siRNA sense strand
gggcagagcuggaugagau

SEQ ID NO: 1314013 - RNA, 19 nt, Homo sapiens
  misc_RNA (1)...(19): siRNA sense strand
gaacaagaaacacaaagaa

SEQ ID NO: 1314014 - RNA, 19 nt, Homo sapiens
  misc_RNA (1)...(19): siRNA sense strand
ccagcucacugcuaauuua

SEQ ID NO: 1314015 - RNA, 19 nt, Homo sapiens
  misc_RNA (1)...(19): siRNA sense strand
cagaaaggaacuagaauua

SEQ ID NO: 1314016 - RNA, 19 nt, Homo sapiens
  misc_RNA (1)...(19): siRNA sense strand
ggaaaugggugagguuguu

SEQ ID NO: 1314017 - RNA, 19 nt, Homo sapiens
  misc_RNA (1)...(19): siRNA sense strand
acagagagcuggaagaaau

SEQ ID NO: 1314018 - RNA, 19 nt, Homo sapiens
  misc_RNA (1)...(19): siRNA sense strand
gaacauggaaaggaaauuu

SEQ ID NO: 1314019 - RNA, 19 nt, Homo sapiens
  misc_RNA (1)...(19): siRNA sense strand
agaacaagaccacuuauua

SEQ ID NO: 1314020 - RNA, 19 nt, Homo sapiens
  misc_RNA (1)...(19): siRNA sense strand
gaacaagaccacuuauuag

SEQ ID NO: 1314021 - RNA, 19 nt, Homo sapiens
  misc_RNA (1)...(19): siRNA sense strand
gacaguggaugugaaauuu

SEQ ID NO: 1314022 - RNA, 19 nt, Homo sapiens
  misc_RNA (1)...(19): siRNA sense strand
cagaauggcugaaucacaa

SEQ ID NO: 1314023 - RNA, 19 nt, Homo sapiens
  misc_RNA (1)...(19): siRNA sense strand
ggaagcagcaugagauuga

SEQ ID NO: 1314024 - RNA, 19 nt, Homo sapiens
  misc_RNA (1)...(19): siRNA sense strand
agaaaugacucuucaaauc

SEQ ID NO: 1314025 - RNA, 19 nt, Homo sapiens
  misc_RNA (1)...(19): siRNA sense strand
gaacaggaaagccuacaaa

SEQ ID NO: 1314026 - RNA, 19 nt, Homo sapiens
  misc_RNA (1)...(19): siRNA sense strand
acaagaagcugaauuagag

SEQ ID NO: 1314027 - RNA, 19 nt, Homo sapiens
  misc_RNA (1)...(19): siRNA sense strand
guagagagcuagaaaucau

SEQ ID NO: 1314028 - RNA, 19 nt, Homo sapiens
  misc_RNA (1)...(19): siRNA sense strand
gaaagaaacugaacaaaac

SEQ ID NO: 1314029 - RNA, 19 nt, Homo sapiens
  misc_RNA (1)...(19): siRNA sense strand
gaaaugaggguuaccuaug

SEQ ID NO: 1314030 - RNA, 19 nt, Homo sapiens
  misc_RNA (1)...(19): siRNA sense strand
ggaaacaaauaucguuaag

SEQ ID NO: 1314031 - RNA, 19 nt, Homo sapiens
  misc_RNA (1)...(19): siRNA sense strand
gcagauagugcaaaugaaa

SEQ ID NO: 1314032 - RNA, 19 nt, Homo sapiens
  misc_RNA (1)...(19): siRNA sense strand
caacagauccucacucauc

SEQ ID NO: 1314033 - RNA, 19 nt, Homo sapiens
  misc_RNA (1)...(19): siRNA sense strand
aggaaagccuacaaauuua

SEQ ID NO: 1314034 - RNA, 19 nt, Homo sapiens
  misc_RNA (1)...(19): siRNA sense strand
gauccagaauuacaagauu

SEQ ID NO: 1314035 - RNA, 19 nt, Homo sapiens
  misc_RNA (1)...(19): siRNA sense strand
guacuuaaaucagaacaga

SEQ ID NO: 1314036 - RNA, 19 nt, Homo sapiens
  misc_RNA (1)...(19): siRNA sense strand
gaacagauucagagagcua

SEQ ID NO: 1314037 - RNA, 19 nt, Homo sapiens
  misc_RNA (1)...(19): siRNA sense strand
ggcaauaaaugaacugaau

SEQ ID NO: 1314038 - RNA, 19 nt, Homo sapiens
  misc_RNA (1)...(19): siRNA sense strand
agaaacagcacucauagua

SEQ ID NO: 1314039 - RNA, 19 nt, Homo sapiens
  misc_RNA (1)...(19): siRNA sense strand
gaacuggaaagugaaauuu

SEQ ID NO: 1314040 - RNA, 19 nt, Homo sapiens
  misc_RNA (1)...(19): siRNA sense strand
aggcagagauccacuguuu

SEQ ID NO: 1314041 - RNA, 19 nt, Homo sapiens
  misc_RNA (1)...(19): siRNA sense strand
gcaguguccuuggugaaua

SEQ ID NO: 1314042 - RNA, 19 nt, Homo sapiens
  misc_RNA (1)...(19): siRNA sense strand
acagaaacauggugagauu

SEQ ID NO: 1314043 - RNA, 19 nt, Homo sapiens
  misc_RNA (1)...(19): siRNA sense strand
gagcuucauuugcaaagaa

SEQ ID NO: 1314044 - RNA, 19 nt, Homo sapiens
  misc_RNA (1)...(19): siRNA sense strand
aagaagagcuuuccaaacu

SEQ ID NO: 1314045 - RNA, 19 nt, Homo sapiens
  misc_RNA (1)...(19): siRNA sense strand
agaaacaggugaugaagga

SEQ ID NO: 1314046 - RNA, 19 nt, Homo sapiens
  misc_RNA (1)...(19): siRNA sense strand
gauagaugguuuacagaau

SEQ ID NO: 1314047 - RNA, 19 nt, Homo sapiens
  misc_RNA (1)...(19): siRNA sense strand
agaaguagcuaagguuauu

SEQ ID NO: 1314048 - RNA, 19 nt, Homo sapiens
  misc_RNA (1)...(19): siRNA sense strand
gaauucuggugauuacauu

SEQ ID NO: 1314049 - RNA, 19 nt, Homo sapiens
  misc_RNA (1)...(19): siRNA sense strand
gaucaaggaacuucagaaa

SEQ ID NO: 1314050 - RNA, 19 nt, Homo sapiens
  misc_RNA (1)...(19): siRNA sense strand
caaguuucauugagaugua

SEQ ID NO: 1314051 - RNA, 19 nt, Homo sapiens
  misc_RNA (1)...(19): siRNA sense strand
gcaaaagaaccaagaaaua

SEQ ID NO: 1314052 - RNA, 19 nt, Homo sapiens
  misc_RNA (1)...(19): siRNA sense strand
guaugaaacuugaauuugg

SEQ ID NO: 1314053 - RNA, 19 nt, Homo sapiens
  misc_RNA (1)...(19): siRNA sense strand
caaaguaacagaagaauac

SEQ ID NO: 1314054 - RNA, 19 nt, Homo sapiens
  misc_RNA (1)...(19): siRNA sense strand
aaauaugacuguuggagaa

SEQ ID NO: 1314055 - RNA, 19 nt, Homo sapiens
  misc_RNA (1)...(19): siRNA sense strand
ggaagaacuaggacuaauu

SEQ ID NO: 1314056 - RNA, 19 nt, Homo sapiens
  misc_RNA (1)...(19): siRNA sense strand
guuaaugaauguggcaaua

SEQ ID NO: 1314057 - RNA, 19 nt, Homo sapiens
  misc_RNA (1)...(19): siRNA sense strand
ggaagaagaauuugguguu

SEQ ID NO: 1314058 - RNA, 19 nt, Homo sapiens
  misc_RNA (1)...(19): siRNA sense strand
gauggaagcccaacgcauu

SEQ ID NO: 1314059 - RNA, 19 nt, Homo sapiens
  misc_RNA (1)...(19): siRNA sense strand
ucagagagcuagacagaca

SEQ ID NO: 1314060 - RNA, 19 nt, Homo sapiens
  misc_RNA (1)...(19): siRNA sense strand
caagaccacuuauuagaag

SEQ ID NO: 1314061 - RNA, 19 nt, Homo sapiens
  misc_RNA (1)...(19): siRNA sense strand
ugaagaacaagaccacuua

SEQ ID NO: 1314062 - RNA, 19 nt, Homo sapiens
  misc_RNA (1)...(19): siRNA sense strand
gaacaaggagcacaagaca

SEQ ID NO: 1314063 - RNA, 19 nt, Homo sapiens
  misc_RNA (1)...(19): siRNA sense strand
ugacugcaguucagaggua

SEQ ID NO: 1314064 - RNA, 19 nt, Homo sapiens
  misc_RNA (1)...(19): siRNA sense strand
caguggaugugaaauuuaa

SEQ ID NO: 1314065 - RNA, 19 nt, Homo sapiens
  misc_RNA (1)...(19): siRNA sense strand
gaaauuaucacaggaucaa

SEQ ID NO: 1314066 - RNA, 19 nt, Homo sapiens
  misc_RNA (1)...(19): siRNA sense strand
gaggaaacaaauaucguua

SEQ ID NO: 1314067 - RNA, 19 nt, Homo sapiens
  misc_RNA (1)...(19): siRNA sense strand
caacaaaguaacagaagaa

SEQ ID NO: 1314068 - RNA, 19 nt, Homo sapiens
  misc_RNA (1)...(19): siRNA sense strand
gaauaaauccaacuacagu

SEQ ID NO: 1314069 - RNA, 19 nt, Homo sapiens
  misc_RNA (1)...(19): siRNA sense strand
aaacaaagagauggcauua

SEQ ID NO: 1314070 - RNA, 19 nt, Homo sapiens
  misc_RNA (1)...(19): siRNA sense strand
caaacugaaggaagauuua

SEQ ID NO: 1314071 - RNA, 19 nt, Homo sapiens
  misc_RNA (1)...(19): siRNA sense strand
ccgccaagcuuaccuguug

SEQ ID NO: 1314072 - RNA, 19 nt, Homo sapiens
  misc_RNA (1)...(19): siRNA sense strand
gaaagaacucaauguacuu

SEQ ID NO: 1314073 - RNA, 19 nt, Homo sapiens
  misc_RNA (1)...(19): siRNA sense strand
ucagaaagaacucaaugua

SEQ ID NO: 1314074 - RNA, 19 nt, Homo sapiens
  misc_RNA (1)...(19): siRNA sense strand
gagaagaaaguaagcaaga

SEQ ID NO: 1314075 - RNA, 19 nt, Homo sapiens
  misc_RNA (1)...(19): siRNA sense strand
caagagaaagaacaaguuu

SEQ ID NO: 1314076 - RNA, 19 nt, Homo sapiens
  misc_RNA (1)...(19): siRNA sense strand
gaaaauacauacuccuguu

SEQ ID NO: 1314077 - RNA, 19 nt, Homo sapiens
  misc_RNA (1)...(19): siRNA sense strand
gaaauacucagacaagaag

SEQ ID NO: 1314078 - RNA, 19 nt, Homo sapiens
  misc_RNA (1)...(19): siRNA sense strand
gcacacucuucucaacaaa

SEQ ID NO: 1314079 - RNA, 19 nt, Homo sapiens
  misc_RNA (1)...(19): siRNA sense strand
uaaccaagcgagagaaauu

SEQ ID NO: 1314080 - RNA, 19 nt, Homo sapiens
  misc_RNA (1)...(19): siRNA sense strand
gaagcugccauuaaacaaa

SEQ ID NO: 1314081 - RNA, 19 nt, Homo sapiens
  misc_RNA (1)...(19): siRNA sense strand
ggcagugucugaagaaugu

SEQ ID NO: 1314082 - RNA, 19 nt, Homo sapiens
  misc_RNA (1)...(19): siRNA sense strand
ggaucaguuucuaaaguaa

SEQ ID NO: 1314083 - RNA, 19 nt, Homo sapiens
  misc_RNA (1)...(19): siRNA sense strand
caccaugauuugaauauug

SEQ ID NO: 1314084 - RNA, 19 nt, Homo sapiens
  misc_RNA (1)...(19): siRNA sense strand
caacaagcaagaagagaaa

SEQ ID NO: 1314085 - RNA, 19 nt, Homo sapiens
  misc_RNA (1)...(19): siRNA sense strand
caaagagauggcauuauaa

SEQ ID NO: 1314086 - RNA, 19 nt, Homo sapiens
  misc_RNA (1)...(19): siRNA sense strand
uugaagaccuuguugaaga

SEQ ID NO: 1314087 - RNA, 19 nt, Homo sapiens
  misc_RNA (1)...(19): siRNA sense strand
ucagcuaaaugaagagauu

SEQ ID NO: 1314088 - RNA, 19 nt, Homo sapiens
  misc_RNA (1)...(19): siRNA sense strand
gaacacagcuucuauuuag

SEQ ID NO: 1314089 - RNA, 19 nt, Homo sapiens
  misc_RNA (1)...(19): siRNA sense strand
gaaauguucuccaaagaua

SEQ ID NO: 1314090 - RNA, 19 nt, Homo sapiens
  misc_RNA (1)...(19): siRNA sense strand
gacaauagcugaacaagaa

SEQ ID NO: 1314091 - RNA, 19 nt, Homo sapiens
  misc_RNA (1)...(19): siRNA sense strand
acaaagagauggcauuaua

SEQ ID NO: 1314092 - RNA, 19 nt, Homo sapiens
  misc_RNA (1)...(19): siRNA sense strand
uagcacagcugcagacuua

SEQ ID NO: 1314093 - RNA, 19 nt, Homo sapiens
  misc_RNA (1)...(19): siRNA sense strand
caaguaagcucuuuauuag

SEQ ID NO: 1314094 - RNA, 19 nt, Homo sapiens
  misc_RNA (1)...(19): siRNA sense strand
gcagacagaugguaugaaa

SEQ ID NO: 1314095 - RNA, 19 nt, Homo sapiens
  misc_RNA (1)...(19): siRNA sense strand
guucgaaacugauauagua

SEQ ID NO: 1314096 - RNA, 19 nt, Homo sapiens
  misc_RNA (1)...(19): siRNA sense strand
gaagaacaguuggaagaua

SEQ ID NO: 1314097 - RNA, 19 nt, Homo sapiens
  misc_RNA (1)...(19): siRNA sense strand
acaaaggaaucaucacuua

SEQ ID NO: 1314098 - RNA, 19 nt, Homo sapiens
  misc_RNA (1)...(19): siRNA sense strand
caggaaagccuacaaauuu

SEQ ID NO: 1314099 - RNA, 19 nt, Homo sapiens
  misc_RNA (1)...(19): siRNA sense strand
gaagagaaaucauaaagac

SEQ ID NO: 1314100 - RNA, 19 nt, Homo sapiens
  misc_RNA (1)...(19): siRNA sense strand
gaaguuaacuaucaagagu

SEQ ID NO: 1314101 - RNA, 19 nt, Homo sapiens
  misc_RNA (1)...(19): siRNA sense strand
gaagagcuuuccaaacuga

SEQ ID NO: 1314102 - RNA, 19 nt, Homo sapiens
  misc_RNA (1)...(19): siRNA sense strand
gaagaacuaggacuaauuu

SEQ ID NO: 1314103 - RNA, 19 nt, Homo sapiens
  misc_RNA (1)...(19): siRNA sense strand
gaagaagaauuugguguug

SEQ ID NO: 1314104 - RNA, 19 nt, Homo sapiens
  misc_RNA (1)...(19): siRNA sense strand
gaacaaguuucauugagau

SEQ ID NO: 1314105 - RNA, 19 nt, Homo sapiens
  misc_RNA (1)...(19): siRNA sense strand
aaacugaacugucuagaau

SEQ ID NO: 1314106 - RNA, 19 nt, Homo sapiens
  misc_RNA (1)...(19): siRNA sense strand
caaguuaucuucucugcaa

SEQ ID NO: 1314107 - RNA, 19 nt, Homo sapiens
  misc_RNA (1)...(19): siRNA sense strand
gcagauagaugguuuacag

SEQ ID NO: 1314108 - RNA, 19 nt, Homo sapiens
  misc_RNA (1)...(19): siRNA sense strand
gaagaaguagcuaagguua

SEQ ID NO: 1314109 - RNA, 19 nt, Homo sapiens
  misc_RNA (1)...(19): siRNA sense strand
caacagaacucauggaaaa

SEQ ID NO: 1314110 - RNA, 19 nt, Homo sapiens
  misc_RNA (1)...(19): siRNA sense strand
uaacccagcucacugcuaa

SEQ ID NO: 1314111 - RNA, 19 nt, Homo sapiens
  misc_RNA (1)...(19): siRNA sense strand
gaaaugacucuucaaauca

SEQ ID NO: 1314112 - RNA, 19 nt, Homo sapiens
  misc_RNA (1)...(19): siRNA sense strand
gggcagagcuggaugagau

SEQ ID NO: 1314113 - RNA, 19 nt, Homo sapiens
  misc_RNA (1)...(19): siRNA sense strand
gaacaagaaacacaaagaa

SEQ ID NO: 1314114 - RNA, 19 nt, Homo sapiens
  misc_RNA (1)...(19): siRNA sense strand
ccagcucacugcuaauuua

SEQ ID NO: 1314115 - RNA, 19 nt, Homo sapiens
  misc_RNA (1)...(19): siRNA sense strand
cagaaaggaacuagaauua

SEQ ID NO: 1314116 - RNA, 19 nt, Homo sapiens
  misc_RNA (1)...(19): siRNA sense strand
ggaaaugggugagguuguu

SEQ ID NO: 1314117 - RNA, 19 nt, Homo sapiens
  misc_RNA (1)...(19): siRNA sense strand
acagagagcuggaagaaau

SEQ ID NO: 1314118 - RNA, 19 nt, Homo sapiens
  misc_RNA (1)...(19): siRNA sense strand
gaacauggaaaggaaauuu

SEQ ID NO: 1314119 - RNA, 19 nt, Homo sapiens
  misc_RNA (1)...(19): siRNA sense strand
agaacaagaccacuuauua

SEQ ID NO: 1314120 - RNA, 19 nt, Homo sapiens
  misc_RNA (1)...(19): siRNA sense strand
gaacaagaccacuuauuag

SEQ ID NO: 1314121 - RNA, 19 nt, Homo sapiens
  misc_RNA (1)...(19): siRNA sense strand
gacaguggaugugaaauuu

SEQ ID NO: 1314122 - RNA, 19 nt, Homo sapiens
  misc_RNA (1)...(19): siRNA sense strand
cagaauggcugaaucacaa

SEQ ID NO: 1314123 - RNA, 19 nt, Homo sapiens
  misc_RNA (1)...(19): siRNA sense strand
ggaagcagcaugagauuga

SEQ ID NO: 1314124 - RNA, 19 nt, Homo sapiens
  misc_RNA (1)...(19): siRNA sense strand
agaaaugacucuucaaauc

SEQ ID NO: 1314125 - RNA, 19 nt, Homo sapiens
  misc_RNA (1)...(19): siRNA sense strand
gaacaggaaagccuacaaa

SEQ ID NO: 1314126 - RNA, 19 nt, Homo sapiens
  misc_RNA (1)...(19): siRNA sense strand
acaagaagcugaauuagag

SEQ ID NO: 1314127 - RNA, 19 nt, Homo sapiens
  misc_RNA (1)...(19): siRNA sense strand
guagagagcuagaaaucau

SEQ ID NO: 1314128 - RNA, 19 nt, Homo sapiens
  misc_RNA (1)...(19): siRNA sense strand
gaaagaaacugaacaaaac

SEQ ID NO: 1314129 - RNA, 19 nt, Homo sapiens
  misc_RNA (1)...(19): siRNA sense strand
gaaaugaggguuaccuaug

SEQ ID NO: 1314130 - RNA, 19 nt, Homo sapiens
  misc_RNA (1)...(19): siRNA sense strand
ggaaacaaauaucguuaag

SEQ ID NO: 1314131 - RNA, 19 nt, Homo sapiens
  misc_RNA (1)...(19): siRNA sense strand
gcagauagugcaaaugaaa

SEQ ID NO: 1314132 - RNA, 19 nt, Homo sapiens
  misc_RNA (1)...(19): siRNA sense strand
caacagauccucacucauc

SEQ ID NO: 1314133 - RNA, 19 nt, Homo sapiens
  misc_RNA (1)...(19): siRNA sense strand
aggaaagccuacaaauuua

SEQ ID NO: 1314134 - RNA, 19 nt, Homo sapiens
  misc_RNA (1)...(19): siRNA sense strand
gauccagaauuacaagauu

SEQ ID NO: 1314135 - RNA, 19 nt, Homo sapiens
  misc_RNA (1)...(19): siRNA sense strand
guacuuaaaucagaacaga

SEQ ID NO: 1314136 - RNA, 19 nt, Homo sapiens
  misc_RNA (1)...(19): siRNA sense strand
gaacagauucagagagcua

SEQ ID NO: 1314137 - RNA, 19 nt, Homo sapiens
  misc_RNA (1)...(19): siRNA sense strand
ggcaauaaaugaacugaau

SEQ ID NO: 1314138 - RNA, 19 nt, Homo sapiens
  misc_RNA (1)...(19): siRNA sense strand
agaaacagcacucauagua

SEQ ID NO: 1314139 - RNA, 19 nt, Homo sapiens
  misc_RNA (1)...(19): siRNA sense strand
gaacuggaaagugaaauuu

SEQ ID NO: 1314140 - RNA, 19 nt, Homo sapiens
  misc_RNA (1)...(19): siRNA sense strand
aggcagagauccacuguuu

SEQ ID NO: 1314141 - RNA, 19 nt, Homo sapiens
  misc_RNA (1)...(19): siRNA sense strand
gcaguguccuuggugaaua

SEQ ID NO: 1314142 - RNA, 19 nt, Homo sapiens
  misc_RNA (1)...(19): siRNA sense strand
acagaaacauggugagauu

SEQ ID NO: 1314143 - RNA, 19 nt, Homo sapiens
  misc_RNA (1)...(19): siRNA sense strand
gagcuucauuugcaaagaa

SEQ ID NO: 1314144 - RNA, 19 nt, Homo sapiens
  misc_RNA (1)...(19): siRNA sense strand
aagaagagcuuuccaaacu

SEQ ID NO: 1314145 - RNA, 19 nt, Homo sapiens
  misc_RNA (1)...(19): siRNA sense strand
agaaacaggugaugaagga

SEQ ID NO: 1314146 - RNA, 19 nt, Homo sapiens
  misc_RNA (1)...(19): siRNA sense strand
gauagaugguuuacagaau

SEQ ID NO: 1314147 - RNA, 19 nt, Homo sapiens
  misc_RNA (1)...(19): siRNA sense strand
agaaguagcuaagguuauu

SEQ ID NO: 1314148 - RNA, 19 nt, Homo sapiens
  misc_RNA (1)...(19): siRNA sense strand
gaauucuggugauuacauu

SEQ ID NO: 1314149 - RNA, 19 nt, Homo sapiens
  misc_RNA (1)...(19): siRNA sense strand
gaucaaggaacuucagaaa

SEQ ID NO: 1314150 - RNA, 19 nt, Homo sapiens
  misc_RNA (1)...(19): siRNA sense strand
caaguuucauugagaugua

SEQ ID NO: 1314151 - RNA, 19 nt, Homo sapiens
  misc_RNA (1)...(19): siRNA sense strand
gcaaaagaaccaagaaaua

SEQ ID NO: 1314152 - RNA, 19 nt, Homo sapiens
  misc_RNA (1)...(19): siRNA sense strand
guaugaaacuugaauuugg

SEQ ID NO: 1314153 - RNA, 19 nt, Homo sapiens
  misc_RNA (1)...(19): siRNA sense strand
caaaguaacagaagaauac

SEQ ID NO: 1314154 - RNA, 19 nt, Homo sapiens
  misc_RNA (1)...(19): siRNA sense strand
aaauaugacuguuggagaa

SEQ ID NO: 1314155 - RNA, 19 nt, Homo sapiens
  misc_RNA (1)...(19): siRNA sense strand
ggaagaacuaggacuaauu

SEQ ID NO: 1314156 - RNA, 19 nt, Homo sapiens
  misc_RNA (1)...(19): siRNA sense strand
guuaaugaauguggcaaua

SEQ ID NO: 1314157 - RNA, 19 nt, Homo sapiens
  misc_RNA (1)...(19): siRNA sense strand
ggaagaagaauuugguguu

SEQ ID NO: 1314158 - RNA, 19 nt, Homo sapiens
  misc_RNA (1)...(19): siRNA sense strand
gauggaagcccaacgcauu

SEQ ID NO: 1314159 - RNA, 19 nt, Homo sapiens
  misc_RNA (1)...(19): siRNA sense strand
ucagagagcuagacagaca

SEQ ID NO: 1314160 - RNA, 19 nt, Homo sapiens
  misc_RNA (1)...(19): siRNA sense strand
caagaccacuuauuagaag

SEQ ID NO: 1314161 - RNA, 19 nt, Homo sapiens
  misc_RNA (1)...(19): siRNA sense strand
ugaagaacaagaccacuua

SEQ ID NO: 1314162 - RNA, 19 nt, Homo sapiens
  misc_RNA (1)...(19): siRNA sense strand
gaacaaggagcacaagaca

SEQ ID NO: 1314163 - RNA, 19 nt, Homo sapiens
  misc_RNA (1)...(19): siRNA sense strand
ugacugcaguucagaggua

SEQ ID NO: 1314164 - RNA, 19 nt, Homo sapiens
  misc_RNA (1)...(19): siRNA sense strand
caguggaugugaaauuuaa

SEQ ID NO: 1314165 - RNA, 19 nt, Homo sapiens
  misc_RNA (1)...(19): siRNA sense strand
gaaauuaucacaggaucaa

SEQ ID NO: 1314166 - RNA, 19 nt, Homo sapiens
  misc_RNA (1)...(19): siRNA sense strand
gaggaaacaaauaucguua

SEQ ID NO: 1314167 - RNA, 19 nt, Homo sapiens
  misc_RNA (1)...(19): siRNA sense strand
caacaaaguaacagaagaa

SEQ ID NO: 1314168 - RNA, 19 nt, Homo sapiens
  misc_RNA (1)...(19): siRNA sense strand
gaauaaauccaacuacagu

SEQ ID NO: 1314169 - RNA, 19 nt, Homo sapiens
  misc_RNA (1)...(19): siRNA sense strand
aaacaaagagauggcauua

SEQ ID NO: 1314170 - RNA, 19 nt, Homo sapiens
  misc_RNA (1)...(19): siRNA sense strand
caaacugaaggaagauuua

SEQ ID NO: 1314171 - RNA, 19 nt, Homo sapiens
  misc_RNA (1)...(19): siRNA sense strand
ccgccaagcuuaccuguug

SEQ ID NO: 1314172 - RNA, 19 nt, Homo sapiens
  misc_RNA (1)...(19): siRNA sense strand
gaaagaacucaauguacuu

SEQ ID NO: 1314173 - RNA, 19 nt, Homo sapiens
  misc_RNA (1)...(19): siRNA sense strand
ucagaaagaacucaaugua

SEQ ID NO: 1314174 - RNA, 19 nt, Homo sapiens
  misc_RNA (1)...(19): siRNA sense strand
gagaagaaaguaagcaaga

SEQ ID NO: 1314175 - RNA, 19 nt, Homo sapiens
  misc_RNA (1)...(19): siRNA sense strand
caagagaaagaacaaguuu

SEQ ID NO: 1314176 - RNA, 19 nt, Homo sapiens
  misc_RNA (1)...(19): siRNA sense strand
gaaaauacauacuccuguu

SEQ ID NO: 1314177 - RNA, 19 nt, Homo sapiens
  misc_RNA (1)...(19): siRNA sense strand
gaaauacucagacaagaag

SEQ ID NO: 1314178 - RNA, 19 nt, Homo sapiens
  misc_RNA (1)...(19): siRNA sense strand
gcacacucuucucaacaaa

SEQ ID NO: 1314179 - RNA, 19 nt, Homo sapiens
  misc_RNA (1)...(19): siRNA sense strand
uaaccaagcgagagaaauu

SEQ ID NO: 1314180 - RNA, 19 nt, Homo sapiens
  misc_RNA (1)...(19): siRNA sense strand
gaagcugccauuaaacaaa

SEQ ID NO: 1314181 - RNA, 19 nt, Homo sapiens
  misc_RNA (1)...(19): siRNA sense strand
ggcagugucugaagaaugu

SEQ ID NO: 1314182 - RNA, 19 nt, Homo sapiens
  misc_RNA (1)...(19): siRNA sense strand
ggaucaguuucuaaaguaa

SEQ ID NO: 1314183 - RNA, 19 nt, Homo sapiens
  misc_RNA (1)...(19): siRNA sense strand
caccaugauuugaauauug

SEQ ID NO: 1314184 - RNA, 19 nt, Homo sapiens
  misc_RNA (1)...(19): siRNA sense strand
caacaagcaagaagagaaa

SEQ ID NO: 1314185 - RNA, 19 nt, Homo sapiens
  misc_RNA (1)...(19): siRNA sense strand
caaagagauggcauuauaa

SEQ ID NO: 1314186 - RNA, 19 nt, Homo sapiens
  misc_RNA (1)...(19): siRNA sense strand
uugaagaccuuguugaaga

SEQ ID NO: 1314187 - RNA, 19 nt, Homo sapiens
  misc_RNA (1)...(19): siRNA sense strand
ucagcuaaaugaagagauu

SEQ ID NO: 1314188 - RNA, 19 nt, Homo sapiens
  misc_RNA (1)...(19): siRNA sense strand
gaacacagcuucuauuuag

SEQ ID NO: 1314189 - RNA, 19 nt, Homo sapiens
  misc_RNA (1)...(19): siRNA sense strand
gaaauguucuccaaagaua

SEQ ID NO: 1314190 - RNA, 19 nt, Homo sapiens
  misc_RNA (1)...(19): siRNA sense strand
gacaauagcugaacaagaa

SEQ ID NO: 1314191 - RNA, 19 nt, Homo sapiens
  misc_RNA (1)...(19): siRNA sense strand
acaaagagauggcauuaua

SEQ ID NO: 1314192 - RNA, 19 nt, Homo sapiens
  misc_RNA (1)...(19): siRNA sense strand
uagcacagcugcagacuua

SEQ ID NO: 1314193 - RNA, 19 nt, Homo sapiens
  misc_RNA (1)...(19): siRNA sense strand
caaguaagcucuuuauuag

SEQ ID NO: 1314194 - RNA, 19 nt, Homo sapiens
  misc_RNA (1)...(19): siRNA sense strand
gcagacagaugguaugaaa

SEQ ID NO: 1314195 - RNA, 19 nt, Homo sapiens
  misc_RNA (1)...(19): siRNA sense strand
guucgaaacugauauagua

SEQ ID NO: 1314196 - RNA, 19 nt, Homo sapiens
  misc_RNA (1)...(19): siRNA sense strand
gaagaacaguuggaagaua

SEQ ID NO: 1314197 - RNA, 19 nt, Homo sapiens
  misc_RNA (1)...(19): siRNA sense strand
acaaaggaaucaucacuua

SEQ ID NO: 1314198 - RNA, 19 nt, Homo sapiens
  misc_RNA (1)...(19): siRNA sense strand
caggaaagccuacaaauuu

SEQ ID NO: 1314199 - RNA, 19 nt, Homo sapiens
  misc_RNA (1)...(19): siRNA sense strand
gaagagaaaucauaaagac

SEQ ID NO: 1314200 - RNA, 19 nt, Homo sapiens
  misc_RNA (1)...(19): siRNA sense strand
gaaguuaacuaucaagagu

SEQ ID NO: 1314201 - RNA, 19 nt, Homo sapiens
  misc_RNA (1)...(19): siRNA sense strand
gaagagcuuuccaaacuga

SEQ ID NO: 1314202 - RNA, 19 nt, Homo sapiens
  misc_RNA (1)...(19): siRNA sense strand
gaagaacuaggacuaauuu

SEQ ID NO: 1314203 - RNA, 19 nt, Homo sapiens
  misc_RNA (1)...(19): siRNA sense strand
gaagaagaauuugguguug

SEQ ID NO: 1314204 - RNA, 19 nt, Homo sapiens
  misc_RNA (1)...(19): siRNA sense strand
gaacaaguuucauugagau

SEQ ID NO: 1314205 - RNA, 19 nt, Homo sapiens
  misc_RNA (1)...(19): siRNA sense strand
aaacugaacugucuagaau

SEQ ID NO: 1314206 - RNA, 19 nt, Homo sapiens
  misc_RNA (1)...(19): siRNA sense strand
caaguuaucuucucugcaa

SEQ ID NO: 1314207 - RNA, 19 nt, Homo sapiens
  misc_RNA (1)...(19): siRNA sense strand
gcagauagaugguuuacag

SEQ ID NO: 1314208 - RNA, 19 nt, Homo sapiens
  misc_RNA (1)...(19): siRNA sense strand
gaagaaguagcuaagguua

SEQ ID NO: 1314209 - RNA, 19 nt, Homo sapiens
  misc_RNA (1)...(19): siRNA sense strand
caacagaacucauggaaaa

SEQ ID NO: 1314210 - RNA, 19 nt, Homo sapiens
  misc_RNA (1)...(19): siRNA sense strand
uaacccagcucacugcuaa

SEQ ID NO: 1314211 - RNA, 19 nt, Homo sapiens
  misc_RNA (1)...(19): siRNA sense strand
gaaaugacucuucaaauca

SEQ ID NO: 1314212 - RNA, 19 nt, Homo sapiens
  misc_RNA (1)...(19): siRNA sense strand
gggcagagcuggaugagau

SEQ ID NO: 1314213 - RNA, 19 nt, Homo sapiens
  misc_RNA (1)...(19): siRNA sense strand
gaacaagaaacacaaagaa

SEQ ID NO: 1314214 - RNA, 19 nt, Homo sapiens
  misc_RNA (1)...(19): siRNA sense strand
ccagcucacugcuaauuua

SEQ ID NO: 1314215 - RNA, 19 nt, Homo sapiens
  misc_RNA (1)...(19): siRNA sense strand
cagaaaggaacuagaauua

SEQ ID NO: 1314216 - RNA, 19 nt, Homo sapiens
  misc_RNA (1)...(19): siRNA sense strand
ggaaaugggugagguuguu

SEQ ID NO: 1314217 - RNA, 19 nt, Homo sapiens
  misc_RNA (1)...(19): siRNA sense strand
acagagagcuggaagaaau

SEQ ID NO: 1314218 - RNA, 19 nt, Homo sapiens
  misc_RNA (1)...(19): siRNA sense strand
gaacauggaaaggaaauuu

SEQ ID NO: 1314219 - RNA, 19 nt, Homo sapiens
  misc_RNA (1)...(19): siRNA sense strand
agaacaagaccacuuauua

SEQ ID NO: 1314220 - RNA, 19 nt, Homo sapiens
  misc_RNA (1)...(19): siRNA sense strand
gaacaagaccacuuauuag

SEQ ID NO: 1314221 - RNA, 19 nt, Homo sapiens
  misc_RNA (1)...(19): siRNA sense strand
gacaguggaugugaaauuu

SEQ ID NO: 1314222 - RNA, 19 nt, Homo sapiens
  misc_RNA (1)...(19): siRNA sense strand
cagaauggcugaaucacaa

SEQ ID NO: 1314223 - RNA, 19 nt, Homo sapiens
  misc_RNA (1)...(19): siRNA sense strand
ggaagcagcaugagauuga

SEQ ID NO: 1314224 - RNA, 19 nt, Homo sapiens
  misc_RNA (1)...(19): siRNA sense strand
agaaaugacucuucaaauc

SEQ ID NO: 1314225 - RNA, 19 nt, Homo sapiens
  misc_RNA (1)...(19): siRNA sense strand
gaacaggaaagccuacaaa

SEQ ID NO: 1314226 - RNA, 19 nt, Homo sapiens
  misc_RNA (1)...(19): siRNA sense strand
acaagaagcugaauuagag

SEQ ID NO: 1314227 - RNA, 19 nt, Homo sapiens
  misc_RNA (1)...(19): siRNA sense strand
guagagagcuagaaaucau

SEQ ID NO: 1314228 - RNA, 19 nt, Homo sapiens
  misc_RNA (1)...(19): siRNA sense strand
gaaagaaacugaacaaaac

SEQ ID NO: 1314229 - RNA, 19 nt, Homo sapiens
  misc_RNA (1)...(19): siRNA sense strand
gaaaugaggguuaccuaug

SEQ ID NO: 1314230 - RNA, 19 nt, Homo sapiens
  misc_RNA (1)...(19): siRNA sense strand
ggaaacaaauaucguuaag

SEQ ID NO: 1314231 - RNA, 19 nt, Homo sapiens
  misc_RNA (1)...(19): siRNA sense strand
gcagauagugcaaaugaaa

SEQ ID NO: 1314232 - RNA, 19 nt, Homo sapiens
  misc_RNA (1)...(19): siRNA sense strand
caacagauccucacucauc

SEQ ID NO: 1314233 - RNA, 19 nt, Homo sapiens
  misc_RNA (1)...(19): siRNA sense strand
aggaaagccuacaaauuua

SEQ ID NO: 1314234 - RNA, 19 nt, Homo sapiens
  misc_RNA (1)...(19): siRNA sense strand
gauccagaauuacaagauu

SEQ ID NO: 1314235 - RNA, 19 nt, Homo sapiens
  misc_RNA (1)...(19): siRNA sense strand
guacuuaaaucagaacaga

SEQ ID NO: 1314236 - RNA, 19 nt, Homo sapiens
  misc_RNA (1)...(19): siRNA sense strand
gaacagauucagagagcua

SEQ ID NO: 1314237 - RNA, 19 nt, Homo sapiens
  misc_RNA (1)...(19): siRNA sense strand
ggcaauaaaugaacugaau

SEQ ID NO: 1314238 - RNA, 19 nt, Homo sapiens
  misc_RNA (1)...(19): siRNA sense strand
agaaacagcacucauagua

SEQ ID NO: 1314239 - RNA, 19 nt, Homo sapiens
  misc_RNA (1)...(19): siRNA sense strand
gaacuggaaagugaaauuu

SEQ ID NO: 1314240 - RNA, 19 nt, Homo sapiens
  misc_RNA (1)...(19): siRNA sense strand
aggcagagauccacuguuu

SEQ ID NO: 1314241 - RNA, 19 nt, Homo sapiens
  misc_RNA (1)...(19): siRNA sense strand
gcaguguccuuggugaaua

SEQ ID NO: 1314242 - RNA, 19 nt, Homo sapiens
  misc_RNA (1)...(19): siRNA sense strand
acagaaacauggugagauu

SEQ ID NO: 1314243 - RNA, 19 nt, Homo sapiens
  misc_RNA (1)...(19): siRNA sense strand
gagcuucauuugcaaagaa

SEQ ID NO: 1314244 - RNA, 19 nt, Homo sapiens
  misc_RNA (1)...(19): siRNA sense strand
aagaagagcuuuccaaacu

SEQ ID NO: 1314245 - RNA, 19 nt, Homo sapiens
  misc_RNA (1)...(19): siRNA sense strand
agaaacaggugaugaagga

SEQ ID NO: 1314246 - RNA, 19 nt, Homo sapiens
  misc_RNA (1)...(19): siRNA sense strand
gauagaugguuuacagaau

SEQ ID NO: 1314247 - RNA, 19 nt, Homo sapiens
  misc_RNA (1)...(19): siRNA sense strand
agaaguagcuaagguuauu

SEQ ID NO: 1314248 - RNA, 19 nt, Homo sapiens
  misc_RNA (1)...(19): siRNA sense strand
gaauucuggugauuacauu

SEQ ID NO: 1314249 - RNA, 19 nt, Homo sapiens
  misc_RNA (1)...(19): siRNA sense strand
gaucaaggaacuucagaaa

SEQ ID NO: 1314250 - RNA, 19 nt, Homo sapiens
  misc_RNA (1)...(19): siRNA sense strand
caaguuucauugagaugua

SEQ ID NO: 1314251 - RNA, 19 nt, Homo sapiens
  misc_RNA (1)...(19): siRNA sense strand
gcaaaagaaccaagaaaua

SEQ ID NO: 1314252 - RNA, 19 nt, Homo sapiens
  misc_RNA (1)...(19): siRNA sense strand
guaugaaacuugaauuugg

SEQ ID NO: 1314253 - RNA, 19 nt, Homo sapiens
  misc_RNA (1)...(19): siRNA sense strand
caaaguaacagaagaauac

SEQ ID NO: 1314254 - RNA, 19 nt, Homo sapiens
  misc_RNA (1)...(19): siRNA sense strand
aaauaugacuguuggagaa

SEQ ID NO: 1314255 - RNA, 19 nt, Homo sapiens
  misc_RNA (1)...(19): siRNA sense strand
ggaagaacuaggacuaauu

SEQ ID NO: 1314256 - RNA, 19 nt, Homo sapiens
  misc_RNA (1)...(19): siRNA sense strand
guuaaugaauguggcaaua

SEQ ID NO: 1314257 - RNA, 19 nt, Homo sapiens
  misc_RNA (1)...(19): siRNA sense strand
ggaagaagaauuugguguu

SEQ ID NO: 1314258 - RNA, 19 nt, Homo sapiens
  misc_RNA (1)...(19): siRNA sense strand
gauggaagcccaacgcauu

SEQ ID NO: 1314259 - RNA, 19 nt, Homo sapiens
  misc_RNA (1)...(19): siRNA sense strand
ucagagagcuagacagaca

SEQ ID NO: 1314260 - RNA, 19 nt, Homo sapiens
  misc_RNA (1)...(19): siRNA sense strand
caagaccacuuauuagaag

SEQ ID NO: 1314261 - RNA, 19 nt, Homo sapiens
  misc_RNA (1)...(19): siRNA sense strand
ugaagaacaagaccacuua

SEQ ID NO: 1314262 - RNA, 19 nt, Homo sapiens
  misc_RNA (1)...(19): siRNA sense strand
gaacaaggagcacaagaca

SEQ ID NO: 1314263 - RNA, 19 nt, Homo sapiens
  misc_RNA (1)...(19): siRNA sense strand
ugacugcaguucagaggua

SEQ ID NO: 1314264 - RNA, 19 nt, Homo sapiens
  misc_RNA (1)...(19): siRNA sense strand
caguggaugugaaauuuaa

SEQ ID NO: 1314265 - RNA, 19 nt, Homo sapiens
  misc_RNA (1)...(19): siRNA sense strand
gaaauuaucacaggaucaa

SEQ ID NO: 1314266 - RNA, 19 nt, Homo sapiens
  misc_RNA (1)...(19): siRNA sense strand
gaggaaacaaauaucguua

SEQ ID NO: 1314267 - RNA, 19 nt, Homo sapiens
  misc_RNA (1)...(19): siRNA sense strand
caacaaaguaacagaagaa

SEQ ID NO: 1314268 - RNA, 19 nt, Homo sapiens
  misc_RNA (1)...(19): siRNA sense strand
gaauaaauccaacuacagu

SEQ ID NO: 1314269 - RNA, 19 nt, Homo sapiens
  misc_RNA (1)...(19): siRNA sense strand
aaacaaagagauggcauua

SEQ ID NO: 1314270 - RNA, 19 nt, Homo sapiens
  misc_RNA (1)...(19): siRNA sense strand
caaacugaaggaagauuua

SEQ ID NO: 1314271 - RNA, 19 nt, Homo sapiens
  misc_RNA (1)...(19): siRNA sense strand
ccgccaagcuuaccuguug

SEQ ID NO: 1314272 - RNA, 19 nt, Homo sapiens
  misc_RNA (1)...(19): siRNA sense strand
gaaagaacucaauguacuu

SEQ ID NO: 1314273 - RNA, 19 nt, Homo sapiens
  misc_RNA (1)...(19): siRNA sense strand
ucagaaagaacucaaugua

SEQ ID NO: 1314274 - RNA, 19 nt, Homo sapiens
  misc_RNA (1)...(19): siRNA sense strand
gagaagaaaguaagcaaga

SEQ ID NO: 1314275 - RNA, 19 nt, Homo sapiens
  misc_RNA (1)...(19): siRNA sense strand
caagagaaagaacaaguuu

SEQ ID NO: 1314276 - RNA, 19 nt, Homo sapiens
  misc_RNA (1)...(19): siRNA sense strand
gaaaauacauacuccuguu

SEQ ID NO: 1314277 - RNA, 19 nt, Homo sapiens
  misc_RNA (1)...(19): siRNA sense strand
gaaauacucagacaagaag

SEQ ID NO: 1314278 - RNA, 19 nt, Homo sapiens
  misc_RNA (1)...(19): siRNA sense strand
gcacacucuucucaacaaa

SEQ ID NO: 1314279 - RNA, 19 nt, Homo sapiens
  misc_RNA (1)...(19): siRNA sense strand
uaaccaagcgagagaaauu

SEQ ID NO: 1314280 - RNA, 19 nt, Homo sapiens
  misc_RNA (1)...(19): siRNA sense strand
gaagcugccauuaaacaaa

SEQ ID NO: 1314281 - RNA, 19 nt, Homo sapiens
  misc_RNA (1)...(19): siRNA sense strand
ggcagugucugaagaaugu

SEQ ID NO: 1314282 - RNA, 19 nt, Homo sapiens
  misc_RNA (1)...(19): siRNA sense strand
ggaucaguuucuaaaguaa

SEQ ID NO: 1314283 - RNA, 19 nt, Homo sapiens
  misc_RNA (1)...(19): siRNA sense strand
caccaugauuugaauauug

SEQ ID NO: 1314284 - RNA, 19 nt, Homo sapiens
  misc_RNA (1)...(19): siRNA sense strand
caacaagcaagaagagaaa

SEQ ID NO: 1314285 - RNA, 19 nt, Homo sapiens
  misc_RNA (1)...(19): siRNA sense strand
caaagagauggcauuauaa

SEQ ID NO: 1314286 - RNA, 19 nt, Homo sapiens
  misc_RNA (1)...(19): siRNA sense strand
uugaagaccuuguugaaga

SEQ ID NO: 1314287 - RNA, 19 nt, Homo sapiens
  misc_RNA (1)...(19): siRNA sense strand
ucagcuaaaugaagagauu

SEQ ID NO: 1314288 - RNA, 19 nt, Homo sapiens
  misc_RNA (1)...(19): siRNA sense strand
ggaaugcagugugcuguua

SEQ ID NO: 1314289 - RNA, 19 nt, Homo sapiens
  misc_RNA (1)...(19): siRNA sense strand
gcagugugcuguuacaacu

SEQ ID NO: 1314290 - RNA, 19 nt, Homo sapiens
  misc_RNA (1)...(19): siRNA sense strand
gacagcaguucgaggaaug

SEQ ID NO: 1314291 - RNA, 19 nt, Homo sapiens
  misc_RNA (1)...(19): siRNA sense strand
gaggaaugcccuuggaaug

SEQ ID NO: 1314292 - RNA, 19 nt, Homo sapiens
  misc_RNA (1)...(19): siRNA sense strand
gcgaagugauggugaacau

SEQ ID NO: 1314293 - RNA, 19 nt, Homo sapiens
  misc_RNA (1)...(19): siRNA sense strand
ugaacaugcugaacucacu

SEQ ID NO: 1314294 - RNA, 19 nt, Homo sapiens
  misc_RNA (1)...(19): siRNA sense strand
agacagcaguucgaggaau

SEQ ID NO: 1314295 - RNA, 19 nt, Homo sapiens
  misc_RNA (1)...(19): siRNA sense strand
cgaggaaugcccuuggaau

SEQ ID NO: 1314296 - RNA, 19 nt, Homo sapiens
  misc_RNA (1)...(19): siRNA sense strand
gagacagcaguucgaggaa

SEQ ID NO: 1314297 - RNA, 19 nt, Homo sapiens
  misc_RNA (1)...(19): siRNA sense strand
cuacgagcgcgaagugaug

SEQ ID NO: 1314298 - RNA, 19 nt, Homo sapiens
  misc_RNA (1)...(19): siRNA sense strand
gauggagacagcaguucga

SEQ ID NO: 1314299 - RNA, 19 nt, Homo sapiens
  misc_RNA (1)...(19): siRNA sense strand
ggaaugcagugugcuguua

SEQ ID NO: 1314300 - RNA, 19 nt, Homo sapiens
  misc_RNA (1)...(19): siRNA sense strand
gcagugugcuguuacaacu

SEQ ID NO: 1314301 - RNA, 19 nt, Homo sapiens
  misc_RNA (1)...(19): siRNA sense strand
gacagcaguucgaggaaug

SEQ ID NO: 1314302 - RNA, 19 nt, Homo sapiens
  misc_RNA (1)...(19): siRNA sense strand
gaggaaugcccuuggaaug

SEQ ID NO: 1314303 - RNA, 19 nt, Homo sapiens
  misc_RNA (1)...(19): siRNA sense strand
gcgaagugauggugaacau

SEQ ID NO: 1314304 - RNA, 19 nt, Homo sapiens
  misc_RNA (1)...(19): siRNA sense strand
ugaacaugcugaacucacu

SEQ ID NO: 1314305 - RNA, 19 nt, Homo sapiens
  misc_RNA (1)...(19): siRNA sense strand
agacagcaguucgaggaau

SEQ ID NO: 1314306 - RNA, 19 nt, Homo sapiens
  misc_RNA (1)...(19): siRNA sense strand
cgaggaaugcccuuggaau

SEQ ID NO: 1314307 - RNA, 19 nt, Homo sapiens
  misc_RNA (1)...(19): siRNA sense strand
gagacagcaguucgaggaa

SEQ ID NO: 1314308 - RNA, 19 nt, Homo sapiens
  misc_RNA (1)...(19): siRNA sense strand
cuacgagcgcgaagugaug

SEQ ID NO: 1314309 - RNA, 19 nt, Homo sapiens
  misc_RNA (1)...(19): siRNA sense strand
ggaaugcagugugcuguua

SEQ ID NO: 1314310 - RNA, 19 nt, Homo sapiens
  misc_RNA (1)...(19): siRNA sense strand
gcagugugcuguuacaacu

SEQ ID NO: 1314311 - RNA, 19 nt, Homo sapiens
  misc_RNA (1)...(19): siRNA sense strand
gacagcaguucgaggaaug

SEQ ID NO: 1314312 - RNA, 19 nt, Homo sapiens
  misc_RNA (1)...(19): siRNA sense strand
gaggaaugcccuuggaaug

SEQ ID NO: 1314313 - RNA, 19 nt, Homo sapiens
  misc_RNA (1)...(19): siRNA sense strand
gcgaagugauggugaacau

SEQ ID NO: 1314314 - RNA, 19 nt, Homo sapiens
  misc_RNA (1)...(19): siRNA sense strand
ugagaccuaucccgacuau

SEQ ID NO: 1314315 - RNA, 19 nt, Homo sapiens
  misc_RNA (1)...(19): siRNA sense strand
uguuauccauccugaguuu

SEQ ID NO: 1314316 - RNA, 19 nt, Homo sapiens
  misc_RNA (1)...(19): siRNA sense strand
ugaacaugcugaacucacu

SEQ ID NO: 1314317 - RNA, 19 nt, Homo sapiens
  misc_RNA (1)...(19): siRNA sense strand
agacagcaguucgaggaau

SEQ ID NO: 1314318 - RNA, 19 nt, Homo sapiens
  misc_RNA (1)...(19): siRNA sense strand
cgaggaaugcccuuggaau

SEQ ID NO: 1314319 - RNA, 19 nt, Homo sapiens
  misc_RNA (1)...(19): siRNA sense strand
aaccuuagaugggacacaa

SEQ ID NO: 1314320 - RNA, 19 nt, Homo sapiens
  misc_RNA (1)...(19): siRNA sense strand
auccugaguuugugucuga

SEQ ID NO: 1314321 - RNA, 19 nt, Homo sapiens
  misc_RNA (1)...(19): siRNA sense strand
gagacagcaguucgaggaa

SEQ ID NO: 1314322 - RNA, 19 nt, Homo sapiens
  misc_RNA (1)...(19): siRNA sense strand
uuagaugggacacaaguca

SEQ ID NO: 1314323 - RNA, 19 nt, Homo sapiens
  misc_RNA (1)...(19): siRNA sense strand
cuacgagcgcgaagugaug

SEQ ID NO: 1314324 - RNA, 19 nt, Homo sapiens
  misc_RNA (1)...(19): siRNA sense strand
agaccuaucccgacuaucg

SEQ ID NO: 1314325 - RNA, 19 nt, Homo sapiens
  misc_RNA (1)...(19): siRNA sense strand
cauauccgaaccuuagaug

SEQ ID NO: 1314326 - RNA, 19 nt, Homo sapiens
  misc_RNA (1)...(19): siRNA sense strand
gaaggaaucaacacagaaa

SEQ ID NO: 1314327 - RNA, 19 nt, Homo sapiens
  misc_RNA (1)...(19): siRNA sense strand
ggacugggcuguguuccaa

SEQ ID NO: 1314328 - RNA, 19 nt, Homo sapiens
  misc_RNA (1)...(19): siRNA sense strand
gcacugcccuuuccuucug

SEQ ID NO: 1314329 - RNA, 19 nt, Homo sapiens
  misc_RNA (1)...(19): siRNA sense strand
ggaccaagagcaucaaaga

SEQ ID NO: 1314330 - RNA, 19 nt, Homo sapiens
  misc_RNA (1)...(19): siRNA sense strand
ccagagggauggagagaug

SEQ ID NO: 1314331 - RNA, 19 nt, Homo sapiens
  misc_RNA (1)...(19): siRNA sense strand
cagaaggaaucaacacaga

SEQ ID NO: 1314332 - RNA, 19 nt, Homo sapiens
  misc_RNA (1)...(19): siRNA sense strand
ccacaaccuuccugcaaug

SEQ ID NO: 1314333 - RNA, 19 nt, Homo sapiens
  misc_RNA (1)...(19): siRNA sense strand
ggccugagcuucgcccaaa

SEQ ID NO: 1314334 - RNA, 19 nt, Homo sapiens
  misc_RNA (1)...(19): siRNA sense strand
ggaaggaggccaugcuuac

SEQ ID NO: 1314335 - RNA, 19 nt, Homo sapiens
  misc_RNA (1)...(19): siRNA sense strand
cuacaaggauccgagcauu

SEQ ID NO: 1314336 - RNA, 19 nt, Homo sapiens
  misc_RNA (1)...(19): siRNA sense strand
acaccaagcugaagaagac

SEQ ID NO: 1314337 - RNA, 19 nt, Homo sapiens
  misc_RNA (1)...(19): siRNA sense strand
ggaccaagaaccucugugu

SEQ ID NO: 1314338 - RNA, 19 nt, Homo sapiens
  misc_RNA (1)...(19): siRNA sense strand
guacugcgcccuccaugga

SEQ ID NO: 1314339 - RNA, 19 nt, Homo sapiens
  misc_RNA (1)...(19): siRNA sense strand
gcgaacugcuggcuucuac

SEQ ID NO: 1314340 - RNA, 19 nt, Homo sapiens
  misc_RNA (1)...(19): siRNA sense strand
cauuacaggaggccaaaua

SEQ ID NO: 1314341 - RNA, 19 nt, Homo sapiens
  misc_RNA (1)...(19): siRNA sense strand
guggccaucucaagaguga

SEQ ID NO: 1314342 - RNA, 19 nt, Homo sapiens
  misc_RNA (1)...(19): siRNA sense strand
gaagaagacauggcucaca

SEQ ID NO: 1314343 - RNA, 19 nt, Homo sapiens
  misc_RNA (1)...(19): siRNA sense strand
gaacccagcgaggaaguga

SEQ ID NO: 1314344 - RNA, 19 nt, Homo sapiens
  misc_RNA (1)...(19): siRNA sense strand
cauccuacccacccacuaa

SEQ ID NO: 1314345 - RNA, 19 nt, Homo sapiens
  misc_RNA (1)...(19): siRNA sense strand
gaggacagcccaggcauuc

SEQ ID NO: 1314346 - RNA, 19 nt, Homo sapiens
  misc_RNA (1)...(19): siRNA sense strand
acacaucgauagggaacaa

SEQ ID NO: 1314347 - RNA, 19 nt, Homo sapiens
  misc_RNA (1)...(19): siRNA sense strand
ggacaugcucccacuugug

SEQ ID NO: 1314348 - RNA, 19 nt, Homo sapiens
  misc_RNA (1)...(19): siRNA sense strand
cagcgucacucagcacuuc

SEQ ID NO: 1314349 - RNA, 19 nt, Homo sapiens
  misc_RNA (1)...(19): siRNA sense strand
caacauccuggacagcauu

SEQ ID NO: 1314350 - RNA, 19 nt, Homo sapiens
  misc_RNA (1)...(19): siRNA sense strand
gcagccaggucagcacugu

SEQ ID NO: 1314351 - RNA, 19 nt, Homo sapiens
  misc_RNA (1)...(19): siRNA sense strand
gcaagggcuuuuacuacaa

SEQ ID NO: 1314352 - RNA, 19 nt, Homo sapiens
  misc_RNA (1)...(19): siRNA sense strand
aacggaagauccaggagaa

SEQ ID NO: 1314353 - RNA, 19 nt, Homo sapiens
  misc_RNA (1)...(19): siRNA sense strand
gcccucugccuucagcuua

SEQ ID NO: 1314354 - RNA, 19 nt, Homo sapiens
  misc_RNA (1)...(19): siRNA sense strand
cagauggacugggcugugu

SEQ ID NO: 1314355 - RNA, 19 nt, Homo sapiens
  misc_RNA (1)...(19): siRNA sense strand
gcucaaugccaaaguugug

SEQ ID NO: 1314356 - RNA, 19 nt, Homo sapiens
  misc_RNA (1)...(19): siRNA sense strand
gcacagucagcgucacuca

SEQ ID NO: 1314357 - RNA, 19 nt, Homo sapiens
  misc_RNA (1)...(19): siRNA sense strand
gagcugagcacugcaaugc

SEQ ID NO: 1314358 - RNA, 19 nt, Homo sapiens
  misc_RNA (1)...(19): siRNA sense strand
caacuccagcucugaggaa

SEQ ID NO: 1314359 - RNA, 19 nt, Homo sapiens
  misc_RNA (1)...(19): siRNA sense strand
gcauagugguggccaucuc

SEQ ID NO: 1314360 - RNA, 19 nt, Homo sapiens
  misc_RNA (1)...(19): siRNA sense strand
ggacagcccaggcauucca

SEQ ID NO: 1314361 - RNA, 19 nt, Homo sapiens
  misc_RNA (1)...(19): siRNA sense strand
cagcgaacccagcgaggaa

SEQ ID NO: 1314362 - RNA, 19 nt, Homo sapiens
  misc_RNA (1)...(19): siRNA sense strand
gaagacacagccaccaacu

SEQ ID NO: 1314363 - RNA, 19 nt, Homo sapiens
  misc_RNA (1)...(19): siRNA sense strand
aaagugcccucugccuuca

SEQ ID NO: 1314364 - RNA, 19 nt, Homo sapiens
  misc_RNA (1)...(19): siRNA sense strand
gccuggcucucccugcaaa

SEQ ID NO: 1314365 - RNA, 19 nt, Homo sapiens
  misc_RNA (1)...(19): siRNA sense strand
uggaaggaggccaugcuua

SEQ ID NO: 1314366 - RNA, 19 nt, Homo sapiens
  misc_RNA (1)...(19): siRNA sense strand
acucggagcaguuugaaug

SEQ ID NO: 1314367 - RNA, 19 nt, Homo sapiens
  misc_RNA (1)...(19): siRNA sense strand
gcacucggagcaguuugaa

SEQ ID NO: 1314368 - RNA, 19 nt, Homo sapiens
  misc_RNA (1)...(19): siRNA sense strand
caccauggacucuucaaca

SEQ ID NO: 1314369 - RNA, 19 nt, Homo sapiens
  misc_RNA (1)...(19): siRNA sense strand
cugcaaaacuggcucaaug

SEQ ID NO: 1314370 - RNA, 19 nt, Homo sapiens
  misc_RNA (1)...(19): siRNA sense strand
gcagcaagggcuuuuacua

SEQ ID NO: 1314371 - RNA, 19 nt, Homo sapiens
  misc_RNA (1)...(19): siRNA sense strand
ccaacauccuggacagcau

SEQ ID NO: 1314372 - RNA, 19 nt, Homo sapiens
  misc_RNA (1)...(19): siRNA sense strand
gcagaaaggaccccaagau

SEQ ID NO: 1314373 - RNA, 19 nt, Homo sapiens
  misc_RNA (1)...(19): siRNA sense strand
aagagggacugcgcuggaa

SEQ ID NO: 1314374 - RNA, 19 nt, Homo sapiens
  misc_RNA (1)...(19): siRNA sense strand
cgauagggaacaaggaugu

SEQ ID NO: 1314375 - RNA, 19 nt, Homo sapiens
  misc_RNA (1)...(19): siRNA sense strand
gacagcaugaugagcagaa

SEQ ID NO: 1314376 - RNA, 19 nt, Homo sapiens
  misc_RNA (1)...(19): siRNA sense strand
gccaggcgaugggaaccuu

SEQ ID NO: 1314377 - RNA, 19 nt, Homo sapiens
  misc_RNA (1)...(19): siRNA sense strand
ggaagauccaggagaaagc

SEQ ID NO: 1314378 - RNA, 19 nt, Homo sapiens
  misc_RNA (1)...(19): siRNA sense strand
uccacaaccuuccugcaau

SEQ ID NO: 1314379 - RNA, 19 nt, Homo sapiens
  misc_RNA (1)...(19): siRNA sense strand
agaaggaaucaacacagaa

SEQ ID NO: 1314380 - RNA, 19 nt, Homo sapiens
  misc_RNA (1)...(19): siRNA sense strand
agaacggcaucgugagaca

SEQ ID NO: 1314381 - RNA, 19 nt, Homo sapiens
  misc_RNA (1)...(19): siRNA sense strand
agagaacggcaucgugaga

SEQ ID NO: 1314382 - RNA, 19 nt, Homo sapiens
  misc_RNA (1)...(19): siRNA sense strand
gacauuacaggaggccaaa

SEQ ID NO: 1314383 - RNA, 19 nt, Homo sapiens
  misc_RNA (1)...(19): siRNA sense strand
ggccaugagcgaauacaca

SEQ ID NO: 1314384 - RNA, 19 nt, Homo sapiens
  misc_RNA (1)...(19): siRNA sense strand
gcagcaggaggaagacaca

SEQ ID NO: 1314385 - RNA, 19 nt, Homo sapiens
  misc_RNA (1)...(19): siRNA sense strand
gggagaggaaggucaacug

SEQ ID NO: 1314386 - RNA, 19 nt, Homo sapiens
  misc_RNA (1)...(19): siRNA sense strand
ggugcgggacacaucgaua

SEQ ID NO: 1314387 - RNA, 19 nt, Homo sapiens
  misc_RNA (1)...(19): siRNA sense strand
gauggacugggcuguguuc

SEQ ID NO: 1314388 - RNA, 19 nt, Homo sapiens
  misc_RNA (1)...(19): siRNA sense strand
aacucaaccuggcuuccua

SEQ ID NO: 1314389 - RNA, 19 nt, Homo sapiens
  misc_RNA (1)...(19): siRNA sense strand
gucugccacuuccggagua

SEQ ID NO: 1314390 - RNA, 19 nt, Homo sapiens
  misc_RNA (1)...(19): siRNA sense strand
gaccaagagcaucaaagag

SEQ ID NO: 1314391 - RNA, 19 nt, Homo sapiens
  misc_RNA (1)...(19): siRNA sense strand
caacacccacuggcgaugu

SEQ ID NO: 1314392 - RNA, 19 nt, Homo sapiens
  misc_RNA (1)...(19): siRNA sense strand
gaaggaaucaacacagaaa

SEQ ID NO: 1314393 - RNA, 19 nt, Homo sapiens
  misc_RNA (1)...(19): siRNA sense strand
ggacugggcuguguuccaa

SEQ ID NO: 1314394 - RNA, 19 nt, Homo sapiens
  misc_RNA (1)...(19): siRNA sense strand
gcacugcccuuuccuucug

SEQ ID NO: 1314395 - RNA, 19 nt, Homo sapiens
  misc_RNA (1)...(19): siRNA sense strand
ggaccaagagcaucaaaga

SEQ ID NO: 1314396 - RNA, 19 nt, Homo sapiens
  misc_RNA (1)...(19): siRNA sense strand
ccagagggauggagagaug

SEQ ID NO: 1314397 - RNA, 19 nt, Homo sapiens
  misc_RNA (1)...(19): siRNA sense strand
cagaaggaaucaacacaga

SEQ ID NO: 1314398 - RNA, 19 nt, Homo sapiens
  misc_RNA (1)...(19): siRNA sense strand
ccacaaccuuccugcaaug

SEQ ID NO: 1314399 - RNA, 19 nt, Homo sapiens
  misc_RNA (1)...(19): siRNA sense strand
ggccugagcuucgcccaaa

SEQ ID NO: 1314400 - RNA, 19 nt, Homo sapiens
  misc_RNA (1)...(19): siRNA sense strand
ggaaggaggccaugcuuac

SEQ ID NO: 1314401 - RNA, 19 nt, Homo sapiens
  misc_RNA (1)...(19): siRNA sense strand
cuacaaggauccgagcauu

SEQ ID NO: 1314402 - RNA, 19 nt, Homo sapiens
  misc_RNA (1)...(19): siRNA sense strand
acaccaagcugaagaagac

SEQ ID NO: 1314403 - RNA, 19 nt, Homo sapiens
  misc_RNA (1)...(19): siRNA sense strand
ggaccaagaaccucugugu

SEQ ID NO: 1314404 - RNA, 19 nt, Homo sapiens
  misc_RNA (1)...(19): siRNA sense strand
guacugcgcccuccaugga

SEQ ID NO: 1314405 - RNA, 19 nt, Homo sapiens
  misc_RNA (1)...(19): siRNA sense strand
gcgaacugcuggcuucuac

SEQ ID NO: 1314406 - RNA, 19 nt, Homo sapiens
  misc_RNA (1)...(19): siRNA sense strand
cauuacaggaggccaaaua

SEQ ID NO: 1314407 - RNA, 19 nt, Homo sapiens
  misc_RNA (1)...(19): siRNA sense strand
guggccaucucaagaguga

SEQ ID NO: 1314408 - RNA, 19 nt, Homo sapiens
  misc_RNA (1)...(19): siRNA sense strand
gaagaagacauggcucaca

SEQ ID NO: 1314409 - RNA, 19 nt, Homo sapiens
  misc_RNA (1)...(19): siRNA sense strand
gaacccagcgaggaaguga

SEQ ID NO: 1314410 - RNA, 19 nt, Homo sapiens
  misc_RNA (1)...(19): siRNA sense strand
cauccuacccacccacuaa

SEQ ID NO: 1314411 - RNA, 19 nt, Homo sapiens
  misc_RNA (1)...(19): siRNA sense strand
gaggacagcccaggcauuc

SEQ ID NO: 1314412 - RNA, 19 nt, Homo sapiens
  misc_RNA (1)...(19): siRNA sense strand
acacaucgauagggaacaa

SEQ ID NO: 1314413 - RNA, 19 nt, Homo sapiens
  misc_RNA (1)...(19): siRNA sense strand
ggacaugcucccacuugug

SEQ ID NO: 1314414 - RNA, 19 nt, Homo sapiens
  misc_RNA (1)...(19): siRNA sense strand
cagcgucacucagcacuuc

SEQ ID NO: 1314415 - RNA, 19 nt, Homo sapiens
  misc_RNA (1)...(19): siRNA sense strand
caacauccuggacagcauu

SEQ ID NO: 1314416 - RNA, 19 nt, Homo sapiens
  misc_RNA (1)...(19): siRNA sense strand
gcagccaggucagcacugu

SEQ ID NO: 1314417 - RNA, 19 nt, Homo sapiens
  misc_RNA (1)...(19): siRNA sense strand
gcaagggcuuuuacuacaa

SEQ ID NO: 1314418 - RNA, 19 nt, Homo sapiens
  misc_RNA (1)...(19): siRNA sense strand
aacggaagauccaggagaa

SEQ ID NO: 1314419 - RNA, 19 nt, Homo sapiens
  misc_RNA (1)...(19): siRNA sense strand
gcccucugccuucagcuua

SEQ ID NO: 1314420 - RNA, 19 nt, Homo sapiens
  misc_RNA (1)...(19): siRNA sense strand
cagauggacugggcugugu

SEQ ID NO: 1314421 - RNA, 19 nt, Homo sapiens
  misc_RNA (1)...(19): siRNA sense strand
gcucaaugccaaaguugug

SEQ ID NO: 1314422 - RNA, 19 nt, Homo sapiens
  misc_RNA (1)...(19): siRNA sense strand
gcacagucagcgucacuca

SEQ ID NO: 1314423 - RNA, 19 nt, Homo sapiens
  misc_RNA (1)...(19): siRNA sense strand
gagcugagcacugcaaugc

SEQ ID NO: 1314424 - RNA, 19 nt, Homo sapiens
  misc_RNA (1)...(19): siRNA sense strand
caacuccagcucugaggaa

SEQ ID NO: 1314425 - RNA, 19 nt, Homo sapiens
  misc_RNA (1)...(19): siRNA sense strand
gcauagugguggccaucuc

SEQ ID NO: 1314426 - RNA, 19 nt, Homo sapiens
  misc_RNA (1)...(19): siRNA sense strand
ggacagcccaggcauucca

SEQ ID NO: 1314427 - RNA, 19 nt, Homo sapiens
  misc_RNA (1)...(19): siRNA sense strand
cagcgaacccagcgaggaa

SEQ ID NO: 1314428 - RNA, 19 nt, Homo sapiens
  misc_RNA (1)...(19): siRNA sense strand
gaagacacagccaccaacu

SEQ ID NO: 1314429 - RNA, 19 nt, Homo sapiens
  misc_RNA (1)...(19): siRNA sense strand
aaagugcccucugccuuca

SEQ ID NO: 1314430 - RNA, 19 nt, Homo sapiens
  misc_RNA (1)...(19): siRNA sense strand
gccuggcucucccugcaaa

SEQ ID NO: 1314431 - RNA, 19 nt, Homo sapiens
  misc_RNA (1)...(19): siRNA sense strand
uggaaggaggccaugcuua

SEQ ID NO: 1314432 - RNA, 19 nt, Homo sapiens
  misc_RNA (1)...(19): siRNA sense strand
acucggagcaguuugaaug

SEQ ID NO: 1314433 - RNA, 19 nt, Homo sapiens
  misc_RNA (1)...(19): siRNA sense strand
gcacucggagcaguuugaa

SEQ ID NO: 1314434 - RNA, 19 nt, Homo sapiens
  misc_RNA (1)...(19): siRNA sense strand
caccauggacucuucaaca

SEQ ID NO: 1314435 - RNA, 19 nt, Homo sapiens
  misc_RNA (1)...(19): siRNA sense strand
cugcaaaacuggcucaaug

SEQ ID NO: 1314436 - RNA, 19 nt, Homo sapiens
  misc_RNA (1)...(19): siRNA sense strand
gcagcaagggcuuuuacua

SEQ ID NO: 1314437 - RNA, 19 nt, Homo sapiens
  misc_RNA (1)...(19): siRNA sense strand
ccaacauccuggacagcau

SEQ ID NO: 1314438 - RNA, 19 nt, Homo sapiens
  misc_RNA (1)...(19): siRNA sense strand
gcagaaaggaccccaagau

SEQ ID NO: 1314439 - RNA, 19 nt, Homo sapiens
  misc_RNA (1)...(19): siRNA sense strand
aagagggacugcgcuggaa

SEQ ID NO: 1314440 - RNA, 19 nt, Homo sapiens
  misc_RNA (1)...(19): siRNA sense strand
cgauagggaacaaggaugu

SEQ ID NO: 1314441 - RNA, 19 nt, Homo sapiens
  misc_RNA (1)...(19): siRNA sense strand
gacagcaugaugagcagaa

SEQ ID NO: 1314442 - RNA, 19 nt, Homo sapiens
  misc_RNA (1)...(19): siRNA sense strand
gccaggcgaugggaaccuu

SEQ ID NO: 1314443 - RNA, 19 nt, Homo sapiens
  misc_RNA (1)...(19): siRNA sense strand
ggaagauccaggagaaagc

SEQ ID NO: 1314444 - RNA, 19 nt, Homo sapiens
  misc_RNA (1)...(19): siRNA sense strand
uccacaaccuuccugcaau

SEQ ID NO: 1314445 - RNA, 19 nt, Homo sapiens
  misc_RNA (1)...(19): siRNA sense strand
agaaggaaucaacacagaa

SEQ ID NO: 1314446 - RNA, 19 nt, Homo sapiens
  misc_RNA (1)...(19): siRNA sense strand
agaacggcaucgugagaca

SEQ ID NO: 1314447 - RNA, 19 nt, Homo sapiens
  misc_RNA (1)...(19): siRNA sense strand
agagaacggcaucgugaga

SEQ ID NO: 1314448 - RNA, 19 nt, Homo sapiens
  misc_RNA (1)...(19): siRNA sense strand
gacauuacaggaggccaaa

SEQ ID NO: 1314449 - RNA, 19 nt, Homo sapiens
  misc_RNA (1)...(19): siRNA sense strand
ggccaugagcgaauacaca

SEQ ID NO: 1314450 - RNA, 19 nt, Homo sapiens
  misc_RNA (1)...(19): siRNA sense strand
gcagcaggaggaagacaca

SEQ ID NO: 1314451 - RNA, 19 nt, Homo sapiens
  misc_RNA (1)...(19): siRNA sense strand
gggagaggaaggucaacug

SEQ ID NO: 1314452 - RNA, 19 nt, Homo sapiens
  misc_RNA (1)...(19): siRNA sense strand
ggugcgggacacaucgaua

SEQ ID NO: 1314453 - RNA, 19 nt, Homo sapiens
  misc_RNA (1)...(19): siRNA sense strand
gauggacugggcuguguuc

SEQ ID NO: 1314454 - RNA, 19 nt, Homo sapiens
  misc_RNA (1)...(19): siRNA sense strand
aacucaaccuggcuuccua

SEQ ID NO: 1314455 - RNA, 19 nt, Homo sapiens
  misc_RNA (1)...(19): siRNA sense strand
gucugccacuuccggagua

SEQ ID NO: 1314456 - RNA, 19 nt, Homo sapiens
  misc_RNA (1)...(19): siRNA sense strand
gaccaagagcaucaaagag

SEQ ID NO: 1314457 - RNA, 19 nt, Homo sapiens
  misc_RNA (1)...(19): siRNA sense strand
caacacccacuggcgaugu

SEQ ID NO: 1314458 - RNA, 19 nt, Homo sapiens
  misc_RNA (1)...(19): siRNA sense strand
ggaaugcagugugcuguua

SEQ ID NO: 1314459 - RNA, 19 nt, Homo sapiens
  misc_RNA (1)...(19): siRNA sense strand
gcagugugcuguuacaacu

SEQ ID NO: 1314460 - RNA, 19 nt, Homo sapiens
  misc_RNA (1)...(19): siRNA sense strand
gacagcaguucgaggaaug

SEQ ID NO: 1314461 - RNA, 19 nt, Homo sapiens
  misc_RNA (1)...(19): siRNA sense strand
gaggaaugcccuuggaaug

SEQ ID NO: 1314462 - RNA, 19 nt, Homo sapiens
  misc_RNA (1)...(19): siRNA sense strand
gcgaagugauggugaacau

SEQ ID NO: 1314463 - RNA, 19 nt, Homo sapiens
  misc_RNA (1)...(19): siRNA sense strand
ugaacaugcugaacucacu

SEQ ID NO: 1314464 - RNA, 19 nt, Homo sapiens
  misc_RNA (1)...(19): siRNA sense strand
agacagcaguucgaggaau

SEQ ID NO: 1314465 - RNA, 19 nt, Homo sapiens
  misc_RNA (1)...(19): siRNA sense strand
cgaggaaugcccuuggaau

SEQ ID NO: 1314466 - RNA, 19 nt, Homo sapiens
  misc_RNA (1)...(19): siRNA sense strand
gagacagcaguucgaggaa

SEQ ID NO: 1314467 - RNA, 19 nt, Homo sapiens
  misc_RNA (1)...(19): siRNA sense strand
cuacgagcgcgaagugaug

SEQ ID NO: 1314468 - RNA, 19 nt, Homo sapiens
  misc_RNA (1)...(19): siRNA sense strand
gauggagacagcaguucga

SEQ ID NO: 1314469 - RNA, 19 nt, Homo sapiens
  misc_RNA (1)...(19): siRNA sense strand
ggaaugcagugugcuguua

SEQ ID NO: 1314470 - RNA, 19 nt, Homo sapiens
  misc_RNA (1)...(19): siRNA sense strand
gcagugugcuguuacaacu

SEQ ID NO: 1314471 - RNA, 19 nt, Homo sapiens
  misc_RNA (1)...(19): siRNA sense strand
gacagcaguucgaggaaug

SEQ ID NO: 1314472 - RNA, 19 nt, Homo sapiens
  misc_RNA (1)...(19): siRNA sense strand
gaggaaugcccuuggaaug

SEQ ID NO: 1314473 - RNA, 19 nt, Homo sapiens
  misc_RNA (1)...(19): siRNA sense strand
gcgaagugauggugaacau

SEQ ID NO: 1314474 - RNA, 19 nt, Homo sapiens
  misc_RNA (1)...(19): siRNA sense strand
ugaacaugcugaacucacu

SEQ ID NO: 1314475 - RNA, 19 nt, Homo sapiens
  misc_RNA (1)...(19): siRNA sense strand
agacagcaguucgaggaau

SEQ ID NO: 1314476 - RNA, 19 nt, Homo sapiens
  misc_RNA (1)...(19): siRNA sense strand
cgaggaaugcccuuggaau

SEQ ID NO: 1314477 - RNA, 19 nt, Homo sapiens
  misc_RNA (1)...(19): siRNA sense strand
gagacagcaguucgaggaa

SEQ ID NO: 1314478 - RNA, 19 nt, Homo sapiens
  misc_RNA (1)...(19): siRNA sense strand
cuacgagcgcgaagugaug

SEQ ID NO: 1314479 - RNA, 19 nt, Homo sapiens
  misc_RNA (1)...(19): siRNA sense strand
ggaaugcagugugcuguua

SEQ ID NO: 1314480 - RNA, 19 nt, Homo sapiens
  misc_RNA (1)...(19): siRNA sense strand
gcagugugcuguuacaacu

SEQ ID NO: 1314481 - RNA, 19 nt, Homo sapiens
  misc_RNA (1)...(19): siRNA sense strand
gacagcaguucgaggaaug

SEQ ID NO: 1314482 - RNA, 19 nt, Homo sapiens
  misc_RNA (1)...(19): siRNA sense strand
gaggaaugcccuuggaaug

SEQ ID NO: 1314483 - RNA, 19 nt, Homo sapiens
  misc_RNA (1)...(19): siRNA sense strand
gcgaagugauggugaacau

SEQ ID NO: 1314484 - RNA, 19 nt, Homo sapiens
  misc_RNA (1)...(19): siRNA sense strand
ugagaccuaucccgacuau

SEQ ID NO: 1314485 - RNA, 19 nt, Homo sapiens
  misc_RNA (1)...(19): siRNA sense strand
uguuauccauccugaguuu

SEQ ID NO: 1314486 - RNA, 19 nt, Homo sapiens
  misc_RNA (1)...(19): siRNA sense strand
ugaacaugcugaacucacu

SEQ ID NO: 1314487 - RNA, 19 nt, Homo sapiens
  misc_RNA (1)...(19): siRNA sense strand
agacagcaguucgaggaau

SEQ ID NO: 1314488 - RNA, 19 nt, Homo sapiens
  misc_RNA (1)...(19): siRNA sense strand
cgaggaaugcccuuggaau

SEQ ID NO: 1314489 - RNA, 19 nt, Homo sapiens
  misc_RNA (1)...(19): siRNA sense strand
aaccuuagaugggacacaa

SEQ ID NO: 1314490 - RNA, 19 nt, Homo sapiens
  misc_RNA (1)...(19): siRNA sense strand
auccugaguuugugucuga

SEQ ID NO: 1314491 - RNA, 19 nt, Homo sapiens
  misc_RNA (1)...(19): siRNA sense strand
gagacagcaguucgaggaa

SEQ ID NO: 1314492 - RNA, 19 nt, Homo sapiens
  misc_RNA (1)...(19): siRNA sense strand
uuagaugggacacaaguca

SEQ ID NO: 1314493 - RNA, 19 nt, Homo sapiens
  misc_RNA (1)...(19): siRNA sense strand
cuacgagcgcgaagugaug

SEQ ID NO: 1314494 - RNA, 19 nt, Homo sapiens
  misc_RNA (1)...(19): siRNA sense strand
agaccuaucccgacuaucg

SEQ ID NO: 1314495 - RNA, 19 nt, Homo sapiens
  misc_RNA (1)...(19): siRNA sense strand
cauauccgaaccuuagaug

SEQ ID NO: 1314496 - RNA, 19 nt, Homo sapiens
  misc_RNA (1)...(19): siRNA sense strand
ggaaugcagugugcuguua

SEQ ID NO: 1314497 - RNA, 19 nt, Homo sapiens
  misc_RNA (1)...(19): siRNA sense strand
gcagugugcuguuacaacu

SEQ ID NO: 1314498 - RNA, 19 nt, Homo sapiens
  misc_RNA (1)...(19): siRNA sense strand
gacagcaguucgaggaaug

SEQ ID NO: 1314499 - RNA, 19 nt, Homo sapiens
  misc_RNA (1)...(19): siRNA sense strand
gaggaaugcccuuggaaug

SEQ ID NO: 1314500 - RNA, 19 nt, Homo sapiens
  misc_RNA (1)...(19): siRNA sense strand
gcgaagugauggugaacau

SEQ ID NO: 1314501 - RNA, 19 nt, Homo sapiens
  misc_RNA (1)...(19): siRNA sense strand
ugaacaugcugaacucacu

SEQ ID NO: 1314502 - RNA, 19 nt, Homo sapiens
  misc_RNA (1)...(19): siRNA sense strand
agacagcaguucgaggaau

SEQ ID NO: 1314503 - RNA, 19 nt, Homo sapiens
  misc_RNA (1)...(19): siRNA sense strand
cgaggaaugcccuuggaau

SEQ ID NO: 1314504 - RNA, 19 nt, Homo sapiens
  misc_RNA (1)...(19): siRNA sense strand
gagacagcaguucgaggaa

SEQ ID NO: 1314505 - RNA, 19 nt, Homo sapiens
  misc_RNA (1)...(19): siRNA sense strand
cuacgagcgcgaagugaug

SEQ ID NO: 1314506 - RNA, 19 nt, Homo sapiens
  misc_RNA (1)...(19): siRNA sense strand
gauggagacagcaguucga

SEQ ID NO: 1314507 - RNA, 19 nt, Homo sapiens
  misc_RNA (1)...(19): siRNA sense strand
ggaaugcagugugcuguua

SEQ ID NO: 1314508 - RNA, 19 nt, Homo sapiens
  misc_RNA (1)...(19): siRNA sense strand
gcagugugcuguuacaacu

SEQ ID NO: 1314509 - RNA, 19 nt, Homo sapiens
  misc_RNA (1)...(19): siRNA sense strand
gacagcaguucgaggaaug

SEQ ID NO: 1314510 - RNA, 19 nt, Homo sapiens
  misc_RNA (1)...(19): siRNA sense strand
gaggaaugcccuuggaaug

SEQ ID NO: 1314511 - RNA, 19 nt, Homo sapiens
  misc_RNA (1)...(19): siRNA sense strand
gcgaagugauggugaacau

SEQ ID NO: 1314512 - RNA, 19 nt, Homo sapiens
  misc_RNA (1)...(19): siRNA sense strand
ugaacaugcugaacucacu

SEQ ID NO: 1314513 - RNA, 19 nt, Homo sapiens
  misc_RNA (1)...(19): siRNA sense strand
agacagcaguucgaggaau

SEQ ID NO: 1314514 - RNA, 19 nt, Homo sapiens
  misc_RNA (1)...(19): siRNA sense strand
cgaggaaugcccuuggaau

SEQ ID NO: 1314515 - RNA, 19 nt, Homo sapiens
  misc_RNA (1)...(19): siRNA sense strand
gagacagcaguucgaggaa

SEQ ID NO: 1314516 - RNA, 19 nt, Homo sapiens
  misc_RNA (1)...(19): siRNA sense strand
cuacgagcgcgaagugaug

SEQ ID NO: 1314517 - RNA, 19 nt, Homo sapiens
  misc_RNA (1)...(19): siRNA sense strand
ggaaugcagugugcuguua

SEQ ID NO: 1314518 - RNA, 19 nt, Homo sapiens
  misc_RNA (1)...(19): siRNA sense strand
gcagugugcuguuacaacu

SEQ ID NO: 1314519 - RNA, 19 nt, Homo sapiens
  misc_RNA (1)...(19): siRNA sense strand
gacagcaguucgaggaaug

SEQ ID NO: 1314520 - RNA, 19 nt, Homo sapiens
  misc_RNA (1)...(19): siRNA sense strand
gaggaaugcccuuggaaug

SEQ ID NO: 1314521 - RNA, 19 nt, Homo sapiens
  misc_RNA (1)...(19): siRNA sense strand
gcgaagugauggugaacau

SEQ ID NO: 1314522 - RNA, 19 nt, Homo sapiens
  misc_RNA (1)...(19): siRNA sense strand
ugagaccuaucccgacuau

SEQ ID NO: 1314523 - RNA, 19 nt, Homo sapiens
  misc_RNA (1)...(19): siRNA sense strand
uguuauccauccugaguuu

SEQ ID NO: 1314524 - RNA, 19 nt, Homo sapiens
  misc_RNA (1)...(19): siRNA sense strand
ugaacaugcugaacucacu

SEQ ID NO: 1314525 - RNA, 19 nt, Homo sapiens
  misc_RNA (1)...(19): siRNA sense strand
agacagcaguucgaggaau

SEQ ID NO: 1314526 - RNA, 19 nt, Homo sapiens
  misc_RNA (1)...(19): siRNA sense strand
cgaggaaugcccuuggaau

SEQ ID NO: 1314527 - RNA, 19 nt, Homo sapiens
  misc_RNA (1)...(19): siRNA sense strand
aaccuuagaugggacacaa

SEQ ID NO: 1314528 - RNA, 19 nt, Homo sapiens
  misc_RNA (1)...(19): siRNA sense strand
auccugaguuugugucuga

SEQ ID NO: 1314529 - RNA, 19 nt, Homo sapiens
  misc_RNA (1)...(19): siRNA sense strand
gagacagcaguucgaggaa

SEQ ID NO: 1314530 - RNA, 19 nt, Homo sapiens
  misc_RNA (1)...(19): siRNA sense strand
uuagaugggacacaaguca

SEQ ID NO: 1314531 - RNA, 19 nt, Homo sapiens
  misc_RNA (1)...(19): siRNA sense strand
cuacgagcgcgaagugaug

SEQ ID NO: 1314532 - RNA, 19 nt, Homo sapiens
  misc_RNA (1)...(19): siRNA sense strand
agaccuaucccgacuaucg

SEQ ID NO: 1314533 - RNA, 19 nt, Homo sapiens
  misc_RNA (1)...(19): siRNA sense strand
cauauccgaaccuuagaug

SEQ ID NO: 1314534 - RNA, 19 nt, Homo sapiens
  misc_RNA (1)...(19): siRNA sense strand
gcacauaaaucagaagugu

SEQ ID NO: 1314535 - RNA, 19 nt, Homo sapiens
  misc_RNA (1)...(19): siRNA sense strand
gauccaagguuaugugguu

SEQ ID NO: 1314536 - RNA, 19 nt, Homo sapiens
  misc_RNA (1)...(19): siRNA sense strand
gcggacggauccaagguua

SEQ ID NO: 1314537 - RNA, 19 nt, Homo sapiens
  misc_RNA (1)...(19): siRNA sense strand
caaccacacucaggccuuu

SEQ ID NO: 1314538 - RNA, 19 nt, Homo sapiens
  misc_RNA (1)...(19): siRNA sense strand
uggaggcccuucaguauga

SEQ ID NO: 1314539 - RNA, 19 nt, Homo sapiens
  misc_RNA (1)...(19): siRNA sense strand
ucccauggauguugugaaa

SEQ ID NO: 1314540 - RNA, 19 nt, Homo sapiens
  misc_RNA (1)...(19): siRNA sense strand
aagguuaugugguuucuug

SEQ ID NO: 1314541 - RNA, 19 nt, Homo sapiens
  misc_RNA (1)...(19): siRNA sense strand
guacaguccucacccugau

SEQ ID NO: 1314542 - RNA, 19 nt, Homo sapiens
  misc_RNA (1)...(19): siRNA sense strand
cagugcagcuguucuggaa

SEQ ID NO: 1314543 - RNA, 19 nt, Homo sapiens
  misc_RNA (1)...(19): siRNA sense strand
ccucagggcuaugugauug

SEQ ID NO: 1314544 - RNA, 19 nt, Homo sapiens
  misc_RNA (1)...(19): siRNA sense strand
gaaacugcagccugacuug

SEQ ID NO: 1314545 - RNA, 19 nt, Homo sapiens
  misc_RNA (1)...(19): siRNA sense strand
cagccaggccugcacauaa

SEQ ID NO: 1314546 - RNA, 19 nt, Homo sapiens
  misc_RNA (1)...(19): siRNA sense strand
ggacggauccaagguuaug

SEQ ID NO: 1314547 - RNA, 19 nt, Homo sapiens
  misc_RNA (1)...(19): siRNA sense strand
caucgugacucccuuguac

SEQ ID NO: 1314548 - RNA, 19 nt, Homo sapiens
  misc_RNA (1)...(19): siRNA sense strand
acauaaaucagaaguguga

SEQ ID NO: 1314549 - RNA, 19 nt, Homo sapiens
  misc_RNA (1)...(19): siRNA sense strand
gagaacaucaggcccuuuc

SEQ ID NO: 1314550 - RNA, 19 nt, Homo sapiens
  misc_RNA (1)...(19): siRNA sense strand
ugccuacucucaagaaaug

SEQ ID NO: 1314551 - RNA, 19 nt, Homo sapiens
  misc_RNA (1)...(19): siRNA sense strand
caaccucuccugccucaug

SEQ ID NO: 1314552 - RNA, 19 nt, Homo sapiens
  misc_RNA (1)...(19): siRNA sense strand
cccaccagcuucacucuga

SEQ ID NO: 1314553 - RNA, 19 nt, Homo sapiens
  misc_RNA (1)...(19): siRNA sense strand
ggaaacugcagccugacuu

SEQ ID NO: 1314554 - RNA, 19 nt, Homo sapiens
  misc_RNA (1)...(19): siRNA sense strand
ccauggauguugugaaacu

SEQ ID NO: 1314555 - RNA, 19 nt, Homo sapiens
  misc_RNA (1)...(19): siRNA sense strand
gcacgccacccaucaccaa

SEQ ID NO: 1314556 - RNA, 19 nt, Homo sapiens
  misc_RNA (1)...(19): siRNA sense strand
agccaggccugcacauaaa

SEQ ID NO: 1314557 - RNA, 19 nt, Homo sapiens
  misc_RNA (1)...(19): siRNA sense strand
ccuggaggauggaacagaa

SEQ ID NO: 1314558 - RNA, 19 nt, Homo sapiens
  misc_RNA (1)...(19): siRNA sense strand
ggcagcagcgucugucuga

SEQ ID NO: 1314559 - RNA, 19 nt, Homo sapiens
  misc_RNA (1)...(19): siRNA sense strand
gcaacaagaccuggaggau

SEQ ID NO: 1314560 - RNA, 19 nt, Homo sapiens
  misc_RNA (1)...(19): siRNA sense strand
gcaacagccugcagauccu

SEQ ID NO: 1314561 - RNA, 19 nt, Homo sapiens
  misc_RNA (1)...(19): siRNA sense strand
ccccagagcugcaucuaaa

SEQ ID NO: 1314562 - RNA, 19 nt, Homo sapiens
  misc_RNA (1)...(19): siRNA sense strand
ccuuucagcucuaugagau

SEQ ID NO: 1314563 - RNA, 19 nt, Homo sapiens
  misc_RNA (1)...(19): siRNA sense strand
gaacaucaggcccuuucag

SEQ ID NO: 1314564 - RNA, 19 nt, Homo sapiens
  misc_RNA (1)...(19): siRNA sense strand
ggccuacacccugcagaua

SEQ ID NO: 1314565 - RNA, 19 nt, Homo sapiens
  misc_RNA (1)...(19): siRNA sense strand
ggaggaggaugaaaagaag

SEQ ID NO: 1314566 - RNA, 19 nt, Homo sapiens
  misc_RNA (1)...(19): siRNA sense strand
ggaccaacgcucagaacca

SEQ ID NO: 1314567 - RNA, 19 nt, Homo sapiens
  misc_RNA (1)...(19): siRNA sense strand
ggacccggagccacagauu

SEQ ID NO: 1314568 - RNA, 19 nt, Homo sapiens
  misc_RNA (1)...(19): siRNA sense strand
cagcagcgucugucugaug

SEQ ID NO: 1314569 - RNA, 19 nt, Homo sapiens
  misc_RNA (1)...(19): siRNA sense strand
uaaagcacauuggcaagac

SEQ ID NO: 1314570 - RNA, 19 nt, Homo sapiens
  misc_RNA (1)...(19): siRNA sense strand
ggccugcacauaaaucaga

SEQ ID NO: 1314571 - RNA, 19 nt, Homo sapiens
  misc_RNA (1)...(19): siRNA sense strand
cuaaagcacauuggcaaga

SEQ ID NO: 1314572 - RNA, 19 nt, Homo sapiens
  misc_RNA (1)...(19): siRNA sense strand
cugcuguuguaccagaaua

SEQ ID NO: 1314573 - RNA, 19 nt, Homo sapiens
  misc_RNA (1)...(19): siRNA sense strand
acccaggaaucuaucauca

SEQ ID NO: 1314574 - RNA, 19 nt, Homo sapiens
  misc_RNA (1)...(19): siRNA sense strand
gccuggagcugagaacuac

SEQ ID NO: 1314575 - RNA, 19 nt, Homo sapiens
  misc_RNA (1)...(19): siRNA sense strand
ccuuggaggcccuucagua

SEQ ID NO: 1314576 - RNA, 19 nt, Homo sapiens
  misc_RNA (1)...(19): siRNA sense strand
ggagaacaucaggcccuuu

SEQ ID NO: 1314577 - RNA, 19 nt, Homo sapiens
  misc_RNA (1)...(19): siRNA sense strand
ucccauaacagcucagaga

SEQ ID NO: 1314578 - RNA, 19 nt, Homo sapiens
  misc_RNA (1)...(19): siRNA sense strand
uaugccuacucucaagaaa

SEQ ID NO: 1314579 - RNA, 19 nt, Homo sapiens
  misc_RNA (1)...(19): siRNA sense strand
cuuggaggcccuucaguau

SEQ ID NO: 1314580 - RNA, 19 nt, Homo sapiens
  misc_RNA (1)...(19): siRNA sense strand
uuucagcucuaugagauca

SEQ ID NO: 1314581 - RNA, 19 nt, Homo sapiens
  misc_RNA (1)...(19): siRNA sense strand
ccuuguggccuauaacuca

SEQ ID NO: 1314582 - RNA, 19 nt, Homo sapiens
  misc_RNA (1)...(19): siRNA sense strand
ccaagguuaugugguuucu

SEQ ID NO: 1314583 - RNA, 19 nt, Homo sapiens
  misc_RNA (1)...(19): siRNA sense strand
gcacauaaaucagaagugu

SEQ ID NO: 1314584 - RNA, 19 nt, Homo sapiens
  misc_RNA (1)...(19): siRNA sense strand
gauccaagguuaugugguu

SEQ ID NO: 1314585 - RNA, 19 nt, Homo sapiens
  misc_RNA (1)...(19): siRNA sense strand
gcggacggauccaagguua

SEQ ID NO: 1314586 - RNA, 19 nt, Homo sapiens
  misc_RNA (1)...(19): siRNA sense strand
caaccacacucaggccuuu

SEQ ID NO: 1314587 - RNA, 19 nt, Homo sapiens
  misc_RNA (1)...(19): siRNA sense strand
uggaggcccuucaguauga

SEQ ID NO: 1314588 - RNA, 19 nt, Homo sapiens
  misc_RNA (1)...(19): siRNA sense strand
ucccauggauguugugaaa

SEQ ID NO: 1314589 - RNA, 19 nt, Homo sapiens
  misc_RNA (1)...(19): siRNA sense strand
aagguuaugugguuucuug

SEQ ID NO: 1314590 - RNA, 19 nt, Homo sapiens
  misc_RNA (1)...(19): siRNA sense strand
guacaguccucacccugau

SEQ ID NO: 1314591 - RNA, 19 nt, Homo sapiens
  misc_RNA (1)...(19): siRNA sense strand
cagugcagcuguucuggaa

SEQ ID NO: 1314592 - RNA, 19 nt, Homo sapiens
  misc_RNA (1)...(19): siRNA sense strand
ccucagggcuaugugauug

SEQ ID NO: 1314593 - RNA, 19 nt, Homo sapiens
  misc_RNA (1)...(19): siRNA sense strand
gaaacugcagccugacuug

SEQ ID NO: 1314594 - RNA, 19 nt, Homo sapiens
  misc_RNA (1)...(19): siRNA sense strand
cagccaggccugcacauaa

SEQ ID NO: 1314595 - RNA, 19 nt, Homo sapiens
  misc_RNA (1)...(19): siRNA sense strand
ggacggauccaagguuaug

SEQ ID NO: 1314596 - RNA, 19 nt, Homo sapiens
  misc_RNA (1)...(19): siRNA sense strand
caucgugacucccuuguac

SEQ ID NO: 1314597 - RNA, 19 nt, Homo sapiens
  misc_RNA (1)...(19): siRNA sense strand
acauaaaucagaaguguga

SEQ ID NO: 1314598 - RNA, 19 nt, Homo sapiens
  misc_RNA (1)...(19): siRNA sense strand
gagaacaucaggcccuuuc

SEQ ID NO: 1314599 - RNA, 19 nt, Homo sapiens
  misc_RNA (1)...(19): siRNA sense strand
ugccuacucucaagaaaug

SEQ ID NO: 1314600 - RNA, 19 nt, Homo sapiens
  misc_RNA (1)...(19): siRNA sense strand
caaccucuccugccucaug

SEQ ID NO: 1314601 - RNA, 19 nt, Homo sapiens
  misc_RNA (1)...(19): siRNA sense strand
cccaccagcuucacucuga

SEQ ID NO: 1314602 - RNA, 19 nt, Homo sapiens
  misc_RNA (1)...(19): siRNA sense strand
ggaaacugcagccugacuu

SEQ ID NO: 1314603 - RNA, 19 nt, Homo sapiens
  misc_RNA (1)...(19): siRNA sense strand
ccauggauguugugaaacu

SEQ ID NO: 1314604 - RNA, 19 nt, Homo sapiens
  misc_RNA (1)...(19): siRNA sense strand
gcacgccacccaucaccaa

SEQ ID NO: 1314605 - RNA, 19 nt, Homo sapiens
  misc_RNA (1)...(19): siRNA sense strand
agccaggccugcacauaaa

SEQ ID NO: 1314606 - RNA, 19 nt, Homo sapiens
  misc_RNA (1)...(19): siRNA sense strand
ccuggaggauggaacagaa

SEQ ID NO: 1314607 - RNA, 19 nt, Homo sapiens
  misc_RNA (1)...(19): siRNA sense strand
ggcagcagcgucugucuga

SEQ ID NO: 1314608 - RNA, 19 nt, Homo sapiens
  misc_RNA (1)...(19): siRNA sense strand
gcaacaagaccuggaggau

SEQ ID NO: 1314609 - RNA, 19 nt, Homo sapiens
  misc_RNA (1)...(19): siRNA sense strand
gcaacagccugcagauccu

SEQ ID NO: 1314610 - RNA, 19 nt, Homo sapiens
  misc_RNA (1)...(19): siRNA sense strand
ccccagagcugcaucuaaa

SEQ ID NO: 1314611 - RNA, 19 nt, Homo sapiens
  misc_RNA (1)...(19): siRNA sense strand
ccuuucagcucuaugagau

SEQ ID NO: 1314612 - RNA, 19 nt, Homo sapiens
  misc_RNA (1)...(19): siRNA sense strand
gaacaucaggcccuuucag

SEQ ID NO: 1314613 - RNA, 19 nt, Homo sapiens
  misc_RNA (1)...(19): siRNA sense strand
ggccuacacccugcagaua

SEQ ID NO: 1314614 - RNA, 19 nt, Homo sapiens
  misc_RNA (1)...(19): siRNA sense strand
ggaggaggaugaaaagaag

SEQ ID NO: 1314615 - RNA, 19 nt, Homo sapiens
  misc_RNA (1)...(19): siRNA sense strand
ggaccaacgcucagaacca

SEQ ID NO: 1314616 - RNA, 19 nt, Homo sapiens
  misc_RNA (1)...(19): siRNA sense strand
ggacccggagccacagauu

SEQ ID NO: 1314617 - RNA, 19 nt, Homo sapiens
  misc_RNA (1)...(19): siRNA sense strand
cagcagcgucugucugaug

SEQ ID NO: 1314618 - RNA, 19 nt, Homo sapiens
  misc_RNA (1)...(19): siRNA sense strand
uaaagcacauuggcaagac

SEQ ID NO: 1314619 - RNA, 19 nt, Homo sapiens
  misc_RNA (1)...(19): siRNA sense strand
ggccugcacauaaaucaga

SEQ ID NO: 1314620 - RNA, 19 nt, Homo sapiens
  misc_RNA (1)...(19): siRNA sense strand
cuaaagcacauuggcaaga

SEQ ID NO: 1314621 - RNA, 19 nt, Homo sapiens
  misc_RNA (1)...(19): siRNA sense strand
cugcuguuguaccagaaua

SEQ ID NO: 1314622 - RNA, 19 nt, Homo sapiens
  misc_RNA (1)...(19): siRNA sense strand
acccaggaaucuaucauca

SEQ ID NO: 1314623 - RNA, 19 nt, Homo sapiens
  misc_RNA (1)...(19): siRNA sense strand
gccuggagcugagaacuac

SEQ ID NO: 1314624 - RNA, 19 nt, Homo sapiens
  misc_RNA (1)...(19): siRNA sense strand
ccuuggaggcccuucagua

SEQ ID NO: 1314625 - RNA, 19 nt, Homo sapiens
  misc_RNA (1)...(19): siRNA sense strand
ggagaacaucaggcccuuu

SEQ ID NO: 1314626 - RNA, 19 nt, Homo sapiens
  misc_RNA (1)...(19): siRNA sense strand
ucccauaacagcucagaga

SEQ ID NO: 1314627 - RNA, 19 nt, Homo sapiens
  misc_RNA (1)...(19): siRNA sense strand
uaugccuacucucaagaaa

SEQ ID NO: 1314628 - RNA, 19 nt, Homo sapiens
  misc_RNA (1)...(19): siRNA sense strand
cuuggaggcccuucaguau

SEQ ID NO: 1314629 - RNA, 19 nt, Homo sapiens
  misc_RNA (1)...(19): siRNA sense strand
uuucagcucuaugagauca

SEQ ID NO: 1314630 - RNA, 19 nt, Homo sapiens
  misc_RNA (1)...(19): siRNA sense strand
ccuuguggccuauaacuca

SEQ ID NO: 1314631 - RNA, 19 nt, Homo sapiens
  misc_RNA (1)...(19): siRNA sense strand
ccaagguuaugugguuucu

SEQ ID NO: 1314632 - RNA, 19 nt, Homo sapiens
  misc_RNA (1)...(19): siRNA sense strand
gcacauaaaucagaagugu

SEQ ID NO: 1314633 - RNA, 19 nt, Homo sapiens
  misc_RNA (1)...(19): siRNA sense strand
gauccaagguuaugugguu

SEQ ID NO: 1314634 - RNA, 19 nt, Homo sapiens
  misc_RNA (1)...(19): siRNA sense strand
gcggacggauccaagguua

SEQ ID NO: 1314635 - RNA, 19 nt, Homo sapiens
  misc_RNA (1)...(19): siRNA sense strand
caaccacacucaggccuuu

SEQ ID NO: 1314636 - RNA, 19 nt, Homo sapiens
  misc_RNA (1)...(19): siRNA sense strand
uggaggcccuucaguauga

SEQ ID NO: 1314637 - RNA, 19 nt, Homo sapiens
  misc_RNA (1)...(19): siRNA sense strand
ucccauggauguugugaaa

SEQ ID NO: 1314638 - RNA, 19 nt, Homo sapiens
  misc_RNA (1)...(19): siRNA sense strand
aagguuaugugguuucuug

SEQ ID NO: 1314639 - RNA, 19 nt, Homo sapiens
  misc_RNA (1)...(19): siRNA sense strand
guacaguccucacccugau

SEQ ID NO: 1314640 - RNA, 19 nt, Homo sapiens
  misc_RNA (1)...(19): siRNA sense strand
cagugcagcuguucuggaa

SEQ ID NO: 1314641 - RNA, 19 nt, Homo sapiens
  misc_RNA (1)...(19): siRNA sense strand
ccucagggcuaugugauug

SEQ ID NO: 1314642 - RNA, 19 nt, Homo sapiens
  misc_RNA (1)...(19): siRNA sense strand
gaaacugcagccugacuug

SEQ ID NO: 1314643 - RNA, 19 nt, Homo sapiens
  misc_RNA (1)...(19): siRNA sense strand
cagccaggccugcacauaa

SEQ ID NO: 1314644 - RNA, 19 nt, Homo sapiens
  misc_RNA (1)...(19): siRNA sense strand
ggacggauccaagguuaug

SEQ ID NO: 1314645 - RNA, 19 nt, Homo sapiens
  misc_RNA (1)...(19): siRNA sense strand
caucgugacucccuuguac

SEQ ID NO: 1314646 - RNA, 19 nt, Homo sapiens
  misc_RNA (1)...(19): siRNA sense strand
acauaaaucagaaguguga

SEQ ID NO: 1314647 - RNA, 19 nt, Homo sapiens
  misc_RNA (1)...(19): siRNA sense strand
gagaacaucaggcccuuuc

SEQ ID NO: 1314648 - RNA, 19 nt, Homo sapiens
  misc_RNA (1)...(19): siRNA sense strand
ugccuacucucaagaaaug

SEQ ID NO: 1314649 - RNA, 19 nt, Homo sapiens
  misc_RNA (1)...(19): siRNA sense strand
caaccucuccugccucaug

SEQ ID NO: 1314650 - RNA, 19 nt, Homo sapiens
  misc_RNA (1)...(19): siRNA sense strand
cccaccagcuucacucuga

SEQ ID NO: 1314651 - RNA, 19 nt, Homo sapiens
  misc_RNA (1)...(19): siRNA sense strand
ggaaacugcagccugacuu

SEQ ID NO: 1314652 - RNA, 19 nt, Homo sapiens
  misc_RNA (1)...(19): siRNA sense strand
ccauggauguugugaaacu

SEQ ID NO: 1314653 - RNA, 19 nt, Homo sapiens
  misc_RNA (1)...(19): siRNA sense strand
gcacgccacccaucaccaa

SEQ ID NO: 1314654 - RNA, 19 nt, Homo sapiens
  misc_RNA (1)...(19): siRNA sense strand
agccaggccugcacauaaa

SEQ ID NO: 1314655 - RNA, 19 nt, Homo sapiens
  misc_RNA (1)...(19): siRNA sense strand
ccuggaggauggaacagaa

SEQ ID NO: 1314656 - RNA, 19 nt, Homo sapiens
  misc_RNA (1)...(19): siRNA sense strand
ggcagcagcgucugucuga

SEQ ID NO: 1314657 - RNA, 19 nt, Homo sapiens
  misc_RNA (1)...(19): siRNA sense strand
gcaacaagaccuggaggau

SEQ ID NO: 1314658 - RNA, 19 nt, Homo sapiens
  misc_RNA (1)...(19): siRNA sense strand
gcaacagccugcagauccu

SEQ ID NO: 1314659 - RNA, 19 nt, Homo sapiens
  misc_RNA (1)...(19): siRNA sense strand
ccccagagcugcaucuaaa

SEQ ID NO: 1314660 - RNA, 19 nt, Homo sapiens
  misc_RNA (1)...(19): siRNA sense strand
ccuuucagcucuaugagau

SEQ ID NO: 1314661 - RNA, 19 nt, Homo sapiens
  misc_RNA (1)...(19): siRNA sense strand
gaacaucaggcccuuucag

SEQ ID NO: 1314662 - RNA, 19 nt, Homo sapiens
  misc_RNA (1)...(19): siRNA sense strand
ggccuacacccugcagaua

SEQ ID NO: 1314663 - RNA, 19 nt, Homo sapiens
  misc_RNA (1)...(19): siRNA sense strand
ggaggaggaugaaaagaag

SEQ ID NO: 1314664 - RNA, 19 nt, Homo sapiens
  misc_RNA (1)...(19): siRNA sense strand
ggaccaacgcucagaacca

SEQ ID NO: 1314665 - RNA, 19 nt, Homo sapiens
  misc_RNA (1)...(19): siRNA sense strand
ggacccggagccacagauu

SEQ ID NO: 1314666 - RNA, 19 nt, Homo sapiens
  misc_RNA (1)...(19): siRNA sense strand
cagcagcgucugucugaug

SEQ ID NO: 1314667 - RNA, 19 nt, Homo sapiens
  misc_RNA (1)...(19): siRNA sense strand
uaaagcacauuggcaagac

SEQ ID NO: 1314668 - RNA, 19 nt, Homo sapiens
  misc_RNA (1)...(19): siRNA sense strand
ggccugcacauaaaucaga

SEQ ID NO: 1314669 - RNA, 19 nt, Homo sapiens
  misc_RNA (1)...(19): siRNA sense strand
cuaaagcacauuggcaaga

SEQ ID NO: 1314670 - RNA, 19 nt, Homo sapiens
  misc_RNA (1)...(19): siRNA sense strand
cugcuguuguaccagaaua

SEQ ID NO: 1314671 - RNA, 19 nt, Homo sapiens
  misc_RNA (1)...(19): siRNA sense strand
acccaggaaucuaucauca

SEQ ID NO: 1314672 - RNA, 19 nt, Homo sapiens
  misc_RNA (1)...(19): siRNA sense strand
gccuggagcugagaacuac

SEQ ID NO: 1314673 - RNA, 19 nt, Homo sapiens
  misc_RNA (1)...(19): siRNA sense strand
ccuuggaggcccuucagua

SEQ ID NO: 1314674 - RNA, 19 nt, Homo sapiens
  misc_RNA (1)...(19): siRNA sense strand
ggagaacaucaggcccuuu

SEQ ID NO: 1314675 - RNA, 19 nt, Homo sapiens
  misc_RNA (1)...(19): siRNA sense strand
ucccauaacagcucagaga

SEQ ID NO: 1314676 - RNA, 19 nt, Homo sapiens
  misc_RNA (1)...(19): siRNA sense strand
uaugccuacucucaagaaa

SEQ ID NO: 1314677 - RNA, 19 nt, Homo sapiens
  misc_RNA (1)...(19): siRNA sense strand
cuuggaggcccuucaguau

SEQ ID NO: 1314678 - RNA, 19 nt, Homo sapiens
  misc_RNA (1)...(19): siRNA sense strand
uuucagcucuaugagauca

SEQ ID NO: 1314679 - RNA, 19 nt, Homo sapiens
  misc_RNA (1)...(19): siRNA sense strand
ccuuguggccuauaacuca

SEQ ID NO: 1314680 - RNA, 19 nt, Homo sapiens
  misc_RNA (1)...(19): siRNA sense strand
ccaagguuaugugguuucu

SEQ ID NO: 1314681 - RNA, 19 nt, Homo sapiens
  misc_RNA (1)...(19): siRNA sense strand
gcacauaaaucagaagugu

SEQ ID NO: 1314682 - RNA, 19 nt, Homo sapiens
  misc_RNA (1)...(19): siRNA sense strand
gauccaagguuaugugguu

SEQ ID NO: 1314683 - RNA, 19 nt, Homo sapiens
  misc_RNA (1)...(19): siRNA sense strand
gcggacggauccaagguua

SEQ ID NO: 1314684 - RNA, 19 nt, Homo sapiens
  misc_RNA (1)...(19): siRNA sense strand
caggcgaucugcauacuuu

SEQ ID NO: 1314685 - RNA, 19 nt, Homo sapiens
  misc_RNA (1)...(19): siRNA sense strand
caaccacacucaggccuuu

SEQ ID NO: 1314686 - RNA, 19 nt, Homo sapiens
  misc_RNA (1)...(19): siRNA sense strand
uccuauaacuucaguauug

SEQ ID NO: 1314687 - RNA, 19 nt, Homo sapiens
  misc_RNA (1)...(19): siRNA sense strand
uggaggcccuucaguauga

SEQ ID NO: 1314688 - RNA, 19 nt, Homo sapiens
  misc_RNA (1)...(19): siRNA sense strand
ucccauggauguugugaaa

SEQ ID NO: 1314689 - RNA, 19 nt, Homo sapiens
  misc_RNA (1)...(19): siRNA sense strand
aagguuaugugguuucuug

SEQ ID NO: 1314690 - RNA, 19 nt, Homo sapiens
  misc_RNA (1)...(19): siRNA sense strand
guacaguccucacccugau

SEQ ID NO: 1314691 - RNA, 19 nt, Homo sapiens
  misc_RNA (1)...(19): siRNA sense strand
cagugcagcuguucuggaa

SEQ ID NO: 1314692 - RNA, 19 nt, Homo sapiens
  misc_RNA (1)...(19): siRNA sense strand
ccucagggcuaugugauug

SEQ ID NO: 1314693 - RNA, 19 nt, Homo sapiens
  misc_RNA (1)...(19): siRNA sense strand
gaaacugcagccugacuug

SEQ ID NO: 1314694 - RNA, 19 nt, Homo sapiens
  misc_RNA (1)...(19): siRNA sense strand
cagccaggccugcacauaa

SEQ ID NO: 1314695 - RNA, 19 nt, Homo sapiens
  misc_RNA (1)...(19): siRNA sense strand
ggacggauccaagguuaug

SEQ ID NO: 1314696 - RNA, 19 nt, Homo sapiens
  misc_RNA (1)...(19): siRNA sense strand
caucgugacucccuuguac

SEQ ID NO: 1314697 - RNA, 19 nt, Homo sapiens
  misc_RNA (1)...(19): siRNA sense strand
acauaaaucagaaguguga

SEQ ID NO: 1314698 - RNA, 19 nt, Homo sapiens
  misc_RNA (1)...(19): siRNA sense strand
gagaacaucaggcccuuuc

SEQ ID NO: 1314699 - RNA, 19 nt, Homo sapiens
  misc_RNA (1)...(19): siRNA sense strand
ugccuacucucaagaaaug

SEQ ID NO: 1314700 - RNA, 19 nt, Homo sapiens
  misc_RNA (1)...(19): siRNA sense strand
caaccucuccugccucaug

SEQ ID NO: 1314701 - RNA, 19 nt, Homo sapiens
  misc_RNA (1)...(19): siRNA sense strand
cccaccagcuucacucuga

SEQ ID NO: 1314702 - RNA, 19 nt, Homo sapiens
  misc_RNA (1)...(19): siRNA sense strand
ggaaacugcagccugacuu

SEQ ID NO: 1314703 - RNA, 19 nt, Homo sapiens
  misc_RNA (1)...(19): siRNA sense strand
ccauggauguugugaaacu

SEQ ID NO: 1314704 - RNA, 19 nt, Homo sapiens
  misc_RNA (1)...(19): siRNA sense strand
gcacgccacccaucaccaa

SEQ ID NO: 1314705 - RNA, 19 nt, Homo sapiens
  misc_RNA (1)...(19): siRNA sense strand
agccaggccugcacauaaa

SEQ ID NO: 1314706 - RNA, 19 nt, Homo sapiens
  misc_RNA (1)...(19): siRNA sense strand
ccuggaggauggaacagaa

SEQ ID NO: 1314707 - RNA, 19 nt, Homo sapiens
  misc_RNA (1)...(19): siRNA sense strand
ggcagcagcgucugucuga

SEQ ID NO: 1314708 - RNA, 19 nt, Homo sapiens
  misc_RNA (1)...(19): siRNA sense strand
gcaacaagaccuggaggau

SEQ ID NO: 1314709 - RNA, 19 nt, Homo sapiens
  misc_RNA (1)...(19): siRNA sense strand
gcaacagccugcagauccu

SEQ ID NO: 1314710 - RNA, 19 nt, Homo sapiens
  misc_RNA (1)...(19): siRNA sense strand
ccccagagcugcaucuaaa

SEQ ID NO: 1314711 - RNA, 19 nt, Homo sapiens
  misc_RNA (1)...(19): siRNA sense strand
ccuuucagcucuaugagau

SEQ ID NO: 1314712 - RNA, 19 nt, Homo sapiens
  misc_RNA (1)...(19): siRNA sense strand
gaacaucaggcccuuucag

SEQ ID NO: 1314713 - RNA, 19 nt, Homo sapiens
  misc_RNA (1)...(19): siRNA sense strand
ggccuacacccugcagaua

SEQ ID NO: 1314714 - RNA, 19 nt, Homo sapiens
  misc_RNA (1)...(19): siRNA sense strand
ggaggaggaugaaaagaag

SEQ ID NO: 1314715 - RNA, 19 nt, Homo sapiens
  misc_RNA (1)...(19): siRNA sense strand
ggaccaacgcucagaacca

SEQ ID NO: 1314716 - RNA, 19 nt, Homo sapiens
  misc_RNA (1)...(19): siRNA sense strand
gaucugcauacuuuaagga

SEQ ID NO: 1314717 - RNA, 19 nt, Homo sapiens
  misc_RNA (1)...(19): siRNA sense strand
ggacccggagccacagauu

SEQ ID NO: 1314718 - RNA, 19 nt, Homo sapiens
  misc_RNA (1)...(19): siRNA sense strand
ccuauaacuucaguauugu

SEQ ID NO: 1314719 - RNA, 19 nt, Homo sapiens
  misc_RNA (1)...(19): siRNA sense strand
ccaauggccuuuugugcuu

SEQ ID NO: 1314720 - RNA, 19 nt, Homo sapiens
  misc_RNA (1)...(19): siRNA sense strand
ggcgaucugcauacuuuaa

SEQ ID NO: 1314721 - RNA, 19 nt, Homo sapiens
  misc_RNA (1)...(19): siRNA sense strand
cagcagcgucugucugaug

SEQ ID NO: 1314722 - RNA, 19 nt, Homo sapiens
  misc_RNA (1)...(19): siRNA sense strand
uaaagcacauuggcaagac

SEQ ID NO: 1314723 - RNA, 19 nt, Homo sapiens
  misc_RNA (1)...(19): siRNA sense strand
ggccugcacauaaaucaga

SEQ ID NO: 1314724 - RNA, 19 nt, Homo sapiens
  misc_RNA (1)...(19): siRNA sense strand
cuaaagcacauuggcaaga

SEQ ID NO: 1314725 - RNA, 19 nt, Homo sapiens
  misc_RNA (1)...(19): siRNA sense strand
gugcuuguuuccuauaacu

SEQ ID NO: 1314726 - RNA, 19 nt, Homo sapiens
  misc_RNA (1)...(19): siRNA sense strand
cugcuguuguaccagaaua

SEQ ID NO: 1314727 - RNA, 19 nt, Homo sapiens
  misc_RNA (1)...(19): siRNA sense strand
acccaggaaucuaucauca

SEQ ID NO: 1314728 - RNA, 19 nt, Homo sapiens
  misc_RNA (1)...(19): siRNA sense strand
gccuggagcugagaacuac

SEQ ID NO: 1314729 - RNA, 19 nt, Homo sapiens
  misc_RNA (1)...(19): siRNA sense strand
ccuuggaggcccuucagua

SEQ ID NO: 1314730 - RNA, 19 nt, Homo sapiens
  misc_RNA (1)...(19): siRNA sense strand
ggagaacaucaggcccuuu

SEQ ID NO: 1314731 - RNA, 19 nt, Homo sapiens
  misc_RNA (1)...(19): siRNA sense strand
ucccauaacagcucagaga

SEQ ID NO: 1314732 - RNA, 19 nt, Homo sapiens
  misc_RNA (1)...(19): siRNA sense strand
uaugccuacucucaagaaa

SEQ ID NO: 1314733 - RNA, 19 nt, Homo sapiens
  misc_RNA (1)...(19): siRNA sense strand
gcuuguuuccuauaacuuc

SEQ ID NO: 1314734 - RNA, 19 nt, Homo sapiens
  misc_RNA (1)...(19): siRNA sense strand
cuuggaggcccuucaguau

SEQ ID NO: 1314735 - RNA, 19 nt, Homo sapiens
  misc_RNA (1)...(19): siRNA sense strand
uuucagcucuaugagauca

SEQ ID NO: 1314736 - RNA, 19 nt, Homo sapiens
  misc_RNA (1)...(19): siRNA sense strand
ccuuguggccuauaacuca

SEQ ID NO: 1314737 - RNA, 19 nt, Homo sapiens
  misc_RNA (1)...(19): siRNA sense strand
ccaagguuaugugguuucu

SEQ ID NO: 1314738 - RNA, 19 nt, Homo sapiens
  misc_RNA (1)...(19): siRNA sense strand
gaaaugaaguuguaguuga

SEQ ID NO: 1314739 - RNA, 19 nt, Homo sapiens
  misc_RNA (1)...(19): siRNA sense strand
gaacaaauacagaugguaa

SEQ ID NO: 1314740 - RNA, 19 nt, Homo sapiens
  misc_RNA (1)...(19): siRNA sense strand
gguaauagacucuggaaua

SEQ ID NO: 1314741 - RNA, 19 nt, Homo sapiens
  misc_RNA (1)...(19): siRNA sense strand
ggaaagaucaaguggcuua

SEQ ID NO: 1314742 - RNA, 19 nt, Homo sapiens
  misc_RNA (1)...(19): siRNA sense strand
caacaucacugcaggaaau

SEQ ID NO: 1314743 - RNA, 19 nt, Homo sapiens
  misc_RNA (1)...(19): siRNA sense strand
ugaacaaacucaagcagua

SEQ ID NO: 1314744 - RNA, 19 nt, Homo sapiens
  misc_RNA (1)...(19): siRNA sense strand
gaacugugaugcucuuuca

SEQ ID NO: 1314745 - RNA, 19 nt, Homo sapiens
  misc_RNA (1)...(19): siRNA sense strand
gaagacaucuacaaauugg

SEQ ID NO: 1314746 - RNA, 19 nt, Homo sapiens
  misc_RNA (1)...(19): siRNA sense strand
gaagauaucugugaagacu

SEQ ID NO: 1314747 - RNA, 19 nt, Homo sapiens
  misc_RNA (1)...(19): siRNA sense strand
caauucaucugccaaugua

SEQ ID NO: 1314748 - RNA, 19 nt, Homo sapiens
  misc_RNA (1)...(19): siRNA sense strand
gaaaccauaggcaaucuua

SEQ ID NO: 1314749 - RNA, 19 nt, Homo sapiens
  misc_RNA (1)...(19): siRNA sense strand
guaauagacucuggaauag

SEQ ID NO: 1314750 - RNA, 19 nt, Homo sapiens
  misc_RNA (1)...(19): siRNA sense strand
cagaugauauugaugaaga

SEQ ID NO: 1314751 - RNA, 19 nt, Homo sapiens
  misc_RNA (1)...(19): siRNA sense strand
ugaagacucugauauagau

SEQ ID NO: 1314752 - RNA, 19 nt, Homo sapiens
  misc_RNA (1)...(19): siRNA sense strand
gaaauccaccaauugauga

SEQ ID NO: 1314753 - RNA, 19 nt, Homo sapiens
  misc_RNA (1)...(19): siRNA sense strand
ucaaguggcuuaccuuauc

SEQ ID NO: 1314754 - RNA, 19 nt, Homo sapiens
  misc_RNA (1)...(19): siRNA sense strand
gaucaaguggcuuaccuua

SEQ ID NO: 1314755 - RNA, 19 nt, Homo sapiens
  misc_RNA (1)...(19): siRNA sense strand
gaacauuugguuucaauuc

SEQ ID NO: 1314756 - RNA, 19 nt, Homo sapiens
  misc_RNA (1)...(19): siRNA sense strand
guaguugaauuaaggaaga

SEQ ID NO: 1314757 - RNA, 19 nt, Homo sapiens
  misc_RNA (1)...(19): siRNA sense strand
cauaggcaaucuuauagaa

SEQ ID NO: 1314758 - RNA, 19 nt, Homo sapiens
  misc_RNA (1)...(19): siRNA sense strand
gagaugacaauccuucuuu

SEQ ID NO: 1314759 - RNA, 19 nt, Homo sapiens
  misc_RNA (1)...(19): siRNA sense strand
ucaauuaagugcaguucaa

SEQ ID NO: 1314760 - RNA, 19 nt, Homo sapiens
  misc_RNA (1)...(19): siRNA sense strand
caaauuggccuaugagauc

SEQ ID NO: 1314761 - RNA, 19 nt, Homo sapiens
  misc_RNA (1)...(19): siRNA sense strand
caaaauaccucucuagaag

SEQ ID NO: 1314762 - RNA, 19 nt, Homo sapiens
  misc_RNA (1)...(19): siRNA sense strand
aauagacucuggaauaguu

SEQ ID NO: 1314763 - RNA, 19 nt, Homo sapiens
  misc_RNA (1)...(19): siRNA sense strand
gaucgaaauccaccaauug

SEQ ID NO: 1314764 - RNA, 19 nt, Homo sapiens
  misc_RNA (1)...(19): siRNA sense strand
caaaaugcuucaagugaua

SEQ ID NO: 1314765 - RNA, 19 nt, Homo sapiens
  misc_RNA (1)...(19): siRNA sense strand
gcagguacaggcaguaauu

SEQ ID NO: 1314766 - RNA, 19 nt, Homo sapiens
  misc_RNA (1)...(19): siRNA sense strand
gagaagacaacgaaaugaa

SEQ ID NO: 1314767 - RNA, 19 nt, Homo sapiens
  misc_RNA (1)...(19): siRNA sense strand
gaaaucagcagcagguaca

SEQ ID NO: 1314768 - RNA, 19 nt, Homo sapiens
  misc_RNA (1)...(19): siRNA sense strand
ugucauaagucuuggaguu

SEQ ID NO: 1314769 - RNA, 19 nt, Homo sapiens
  misc_RNA (1)...(19): siRNA sense strand
caacagaaggguuccaguu

SEQ ID NO: 1314770 - RNA, 19 nt, Homo sapiens
  misc_RNA (1)...(19): siRNA sense strand
accaacggcucaagaauuu

SEQ ID NO: 1314771 - RNA, 19 nt, Homo sapiens
  misc_RNA (1)...(19): siRNA sense strand
ggaaaccauucaggagauu

SEQ ID NO: 1314772 - RNA, 19 nt, Homo sapiens
  misc_RNA (1)...(19): siRNA sense strand
ucuagaagcuauuguucaa

SEQ ID NO: 1314773 - RNA, 19 nt, Homo sapiens
  misc_RNA (1)...(19): siRNA sense strand
ugacacaucccaaagagaa

SEQ ID NO: 1314774 - RNA, 19 nt, Homo sapiens
  misc_RNA (1)...(19): siRNA sense strand
gcaaugaacaaauacagau

SEQ ID NO: 1314775 - RNA, 19 nt, Homo sapiens
  misc_RNA (1)...(19): siRNA sense strand
cuucauaaguccaucuauu

SEQ ID NO: 1314776 - RNA, 19 nt, Homo sapiens
  misc_RNA (1)...(19): siRNA sense strand
ucuggaauauugcccauuu

SEQ ID NO: 1314777 - RNA, 19 nt, Homo sapiens
  misc_RNA (1)...(19): siRNA sense strand
agaugacaauccuucuuua

SEQ ID NO: 1314778 - RNA, 19 nt, Homo sapiens
  misc_RNA (1)...(19): siRNA sense strand
gcucaagaauuucaagaac

SEQ ID NO: 1314779 - RNA, 19 nt, Homo sapiens
  misc_RNA (1)...(19): siRNA sense strand
cagaaggguuccaguuuua

SEQ ID NO: 1314780 - RNA, 19 nt, Homo sapiens
  misc_RNA (1)...(19): siRNA sense strand
ggagaaaauugaacaacuu

SEQ ID NO: 1314781 - RNA, 19 nt, Homo sapiens
  misc_RNA (1)...(19): siRNA sense strand
ugaaagagaugacaauccu

SEQ ID NO: 1314782 - RNA, 19 nt, Homo sapiens
  misc_RNA (1)...(19): siRNA sense strand
ugaagacccuagccuuguu

SEQ ID NO: 1314783 - RNA, 19 nt, Homo sapiens
  misc_RNA (1)...(19): siRNA sense strand
gaagacaacgaaaugaagu

SEQ ID NO: 1314784 - RNA, 19 nt, Homo sapiens
  misc_RNA (1)...(19): siRNA sense strand
cgaaauccaccaauugaug

SEQ ID NO: 1314785 - RNA, 19 nt, Homo sapiens
  misc_RNA (1)...(19): siRNA sense strand
guucuucucuucagaugau

SEQ ID NO: 1314786 - RNA, 19 nt, Homo sapiens
  misc_RNA (1)...(19): siRNA sense strand
caauccuucuuuacaguuu

SEQ ID NO: 1314787 - RNA, 19 nt, Homo sapiens
  misc_RNA (1)...(19): siRNA sense strand
gaucaguucuucucuucag

SEQ ID NO: 1314788 - RNA, 19 nt, Homo sapiens
  misc_RNA (1)...(19): siRNA sense strand
uggcuuaccuuauccaaca

SEQ ID NO: 1314789 - RNA, 19 nt, Homo sapiens
  misc_RNA (1)...(19): siRNA sense strand
ucagacugcugcacuuaga

SEQ ID NO: 1314790 - RNA, 19 nt, Homo sapiens
  misc_RNA (1)...(19): siRNA sense strand
guugugaaaccuuuacuuu

SEQ ID NO: 1314791 - RNA, 19 nt, Homo sapiens
  misc_RNA (1)...(19): siRNA sense strand
gacaauccuucuuuacagu

SEQ ID NO: 1314792 - RNA, 19 nt, Homo sapiens
  misc_RNA (1)...(19): siRNA sense strand
aaccauaggcaaucuuaua

SEQ ID NO: 1314793 - RNA, 19 nt, Homo sapiens
  misc_RNA (1)...(19): siRNA sense strand
guaaauauacugguagaca

SEQ ID NO: 1314794 - RNA, 19 nt, Homo sapiens
  misc_RNA (1)...(19): siRNA sense strand
gaacuucugaacaaacuca

SEQ ID NO: 1314795 - RNA, 19 nt, Homo sapiens
  misc_RNA (1)...(19): siRNA sense strand
ugacaauccuucuuuacag

SEQ ID NO: 1314796 - RNA, 19 nt, Homo sapiens
  misc_RNA (1)...(19): siRNA sense strand
auaaguccaucuauuccua

SEQ ID NO: 1314797 - RNA, 19 nt, Homo sapiens
  misc_RNA (1)...(19): siRNA sense strand
gaacaaacucaagcaguag

SEQ ID NO: 1314798 - RNA, 19 nt, Homo sapiens
  misc_RNA (1)...(19): siRNA sense strand
guacaggcaguaauugaug

SEQ ID NO: 1314799 - RNA, 19 nt, Homo sapiens
  misc_RNA (1)...(19): siRNA sense strand
ugaucgaaauccaccaauu

SEQ ID NO: 1314800 - RNA, 19 nt, Homo sapiens
  misc_RNA (1)...(19): siRNA sense strand
ugaagacaucuacaaauug

SEQ ID NO: 1314801 - RNA, 19 nt, Homo sapiens
  misc_RNA (1)...(19): siRNA sense strand
gcagaaaccauaggcaauc

SEQ ID NO: 1314802 - RNA, 19 nt, Homo sapiens
  misc_RNA (1)...(19): siRNA sense strand
uguaaaagaugcacaaguu

SEQ ID NO: 1314803 - RNA, 19 nt, Homo sapiens
  misc_RNA (1)...(19): siRNA sense strand
gcaaaauaccucucuagaa

SEQ ID NO: 1314804 - RNA, 19 nt, Homo sapiens
  misc_RNA (1)...(19): siRNA sense strand
ucuacaaauuggccuauga

SEQ ID NO: 1314805 - RNA, 19 nt, Homo sapiens
  misc_RNA (1)...(19): siRNA sense strand
agaaauguuacuuggguua

SEQ ID NO: 1314806 - RNA, 19 nt, Homo sapiens
  misc_RNA (1)...(19): siRNA sense strand
aauaguuccucauuugguu

SEQ ID NO: 1314807 - RNA, 19 nt, Homo sapiens
  misc_RNA (1)...(19): siRNA sense strand
uuacuuggguuauggucaa

SEQ ID NO: 1314808 - RNA, 19 nt, Homo sapiens
  misc_RNA (1)...(19): siRNA sense strand
gaaugucugugagcaagca

SEQ ID NO: 1314809 - RNA, 19 nt, Homo sapiens
  misc_RNA (1)...(19): siRNA sense strand
cggaacauuugguuucaau

SEQ ID NO: 1314810 - RNA, 19 nt, Homo sapiens
  misc_RNA (1)...(19): siRNA sense strand
gaaauguuacuuggguuau

SEQ ID NO: 1314811 - RNA, 19 nt, Homo sapiens
  misc_RNA (1)...(19): siRNA sense strand
caacggcucaagaauuuca

SEQ ID NO: 1314812 - RNA, 19 nt, Homo sapiens
  misc_RNA (1)...(19): siRNA sense strand
gaauaguuccucauuuggu

SEQ ID NO: 1314813 - RNA, 19 nt, Homo sapiens
  misc_RNA (1)...(19): siRNA sense strand
gugaagacucugauauaga

SEQ ID NO: 1314814 - RNA, 19 nt, Homo sapiens
  misc_RNA (1)...(19): siRNA sense strand
gauaaccaaggaauucaau

SEQ ID NO: 1314815 - RNA, 19 nt, Homo sapiens
  misc_RNA (1)...(19): siRNA sense strand
ugugaagacucugauauag

SEQ ID NO: 1314816 - RNA, 19 nt, Homo sapiens
  misc_RNA (1)...(19): siRNA sense strand
ggcauugggaaauaucaua

SEQ ID NO: 1314817 - RNA, 19 nt, Homo sapiens
  misc_RNA (1)...(19): siRNA sense strand
acaugaagauaucugugaa

SEQ ID NO: 1314818 - RNA, 19 nt, Homo sapiens
  misc_RNA (1)...(19): siRNA sense strand
cgaaaugaaguuguaguug

SEQ ID NO: 1314819 - RNA, 19 nt, Homo sapiens
  misc_RNA (1)...(19): siRNA sense strand
uuaaagagaaggaauguac

SEQ ID NO: 1314820 - RNA, 19 nt, Homo sapiens
  misc_RNA (1)...(19): siRNA sense strand
ucgauggacuaaguaauau

SEQ ID NO: 1314821 - RNA, 19 nt, Homo sapiens
  misc_RNA (1)...(19): siRNA sense strand
cucgauggacuaaguaaua

SEQ ID NO: 1314822 - RNA, 19 nt, Homo sapiens
  misc_RNA (1)...(19): siRNA sense strand
ccaccaggaaguuaaaguu

SEQ ID NO: 1314823 - RNA, 19 nt, Homo sapiens
  misc_RNA (1)...(19): siRNA sense strand
caagugauaaccaaggaau

SEQ ID NO: 1314824 - RNA, 19 nt, Homo sapiens
  misc_RNA (1)...(19): siRNA sense strand
cuucagaugauauugauga

SEQ ID NO: 1314825 - RNA, 19 nt, Homo sapiens
  misc_RNA (1)...(19): siRNA sense strand
guucagacugcugcacuua

SEQ ID NO: 1314826 - RNA, 19 nt, Homo sapiens
  misc_RNA (1)...(19): siRNA sense strand
caaauacagaugguaauag

SEQ ID NO: 1314827 - RNA, 19 nt, Homo sapiens
  misc_RNA (1)...(19): siRNA sense strand
ggguuauggucaacuuaug

SEQ ID NO: 1314828 - RNA, 19 nt, Homo sapiens
  misc_RNA (1)...(19): siRNA sense strand
ccuuuacuuuccuucauaa

SEQ ID NO: 1314829 - RNA, 19 nt, Homo sapiens
  misc_RNA (1)...(19): siRNA sense strand
gugugggcauugggaaaua

SEQ ID NO: 1314830 - RNA, 19 nt, Homo sapiens
  misc_RNA (1)...(19): siRNA sense strand
caaccaacggcucaagaau

SEQ ID NO: 1314831 - RNA, 19 nt, Homo sapiens
  misc_RNA (1)...(19): siRNA sense strand
gaaagagaugacaauccuu

SEQ ID NO: 1314832 - RNA, 19 nt, Homo sapiens
  misc_RNA (1)...(19): siRNA sense strand
gccaaucuuguaccaauga

SEQ ID NO: 1314833 - RNA, 19 nt, Homo sapiens
  misc_RNA (1)...(19): siRNA sense strand
ugcuggcaaugaacaaaua

SEQ ID NO: 1314834 - RNA, 19 nt, Homo sapiens
  misc_RNA (1)...(19): siRNA sense strand
uuacugaugcuggcaauga

SEQ ID NO: 1314835 - RNA, 19 nt, Homo sapiens
  misc_RNA (1)...(19): siRNA sense strand
uggaaaccauucaggagau

SEQ ID NO: 1314836 - RNA, 19 nt, Homo sapiens
  misc_RNA (1)...(19): siRNA sense strand
ucauaagucuuggaguugu

SEQ ID NO: 1314837 - RNA, 19 nt, Homo sapiens
  misc_RNA (1)...(19): siRNA sense strand
ccaaugcugugccacuuuu

SEQ ID NO: 1314838 - RNA, 19 nt, Homo sapiens
  misc_RNA (1)...(19): siRNA sense strand
gaacacagcuucuauuuag

SEQ ID NO: 1314839 - RNA, 19 nt, Homo sapiens
  misc_RNA (1)...(19): siRNA sense strand
gaaauguucuccaaagaua

SEQ ID NO: 1314840 - RNA, 19 nt, Homo sapiens
  misc_RNA (1)...(19): siRNA sense strand
gacaauagcugaacaagaa

SEQ ID NO: 1314841 - RNA, 19 nt, Homo sapiens
  misc_RNA (1)...(19): siRNA sense strand
acaaagagauggcauuaua

SEQ ID NO: 1314842 - RNA, 19 nt, Homo sapiens
  misc_RNA (1)...(19): siRNA sense strand
uagcacagcugcagacuua

SEQ ID NO: 1314843 - RNA, 19 nt, Homo sapiens
  misc_RNA (1)...(19): siRNA sense strand
caaguaagcucuuuauuag

SEQ ID NO: 1314844 - RNA, 19 nt, Homo sapiens
  misc_RNA (1)...(19): siRNA sense strand
gcagacagaugguaugaaa

SEQ ID NO: 1314845 - RNA, 19 nt, Homo sapiens
  misc_RNA (1)...(19): siRNA sense strand
guucgaaacugauauagua

SEQ ID NO: 1314846 - RNA, 19 nt, Homo sapiens
  misc_RNA (1)...(19): siRNA sense strand
gaagaacaguuggaagaua

SEQ ID NO: 1314847 - RNA, 19 nt, Homo sapiens
  misc_RNA (1)...(19): siRNA sense strand
acaaaggaaucaucacuua

SEQ ID NO: 1314848 - RNA, 19 nt, Homo sapiens
  misc_RNA (1)...(19): siRNA sense strand
caggaaagccuacaaauuu

SEQ ID NO: 1314849 - RNA, 19 nt, Homo sapiens
  misc_RNA (1)...(19): siRNA sense strand
gaagagaaaucauaaagac

SEQ ID NO: 1314850 - RNA, 19 nt, Homo sapiens
  misc_RNA (1)...(19): siRNA sense strand
gaaguuaacuaucaagagu

SEQ ID NO: 1314851 - RNA, 19 nt, Homo sapiens
  misc_RNA (1)...(19): siRNA sense strand
gaagagcuuuccaaacuga

SEQ ID NO: 1314852 - RNA, 19 nt, Homo sapiens
  misc_RNA (1)...(19): siRNA sense strand
gaagaacuaggacuaauuu

SEQ ID NO: 1314853 - RNA, 19 nt, Homo sapiens
  misc_RNA (1)...(19): siRNA sense strand
gaagaagaauuugguguug

SEQ ID NO: 1314854 - RNA, 19 nt, Homo sapiens
  misc_RNA (1)...(19): siRNA sense strand
gaacaaguuucauugagau

SEQ ID NO: 1314855 - RNA, 19 nt, Homo sapiens
  misc_RNA (1)...(19): siRNA sense strand
aaacugaacugucuagaau

SEQ ID NO: 1314856 - RNA, 19 nt, Homo sapiens
  misc_RNA (1)...(19): siRNA sense strand
caaguuaucuucucugcaa

SEQ ID NO: 1314857 - RNA, 19 nt, Homo sapiens
  misc_RNA (1)...(19): siRNA sense strand
gcagauagaugguuuacag

SEQ ID NO: 1314858 - RNA, 19 nt, Homo sapiens
  misc_RNA (1)...(19): siRNA sense strand
gaagaaguagcuaagguua

SEQ ID NO: 1314859 - RNA, 19 nt, Homo sapiens
  misc_RNA (1)...(19): siRNA sense strand
caacagaacucauggaaaa

SEQ ID NO: 1314860 - RNA, 19 nt, Homo sapiens
  misc_RNA (1)...(19): siRNA sense strand
uaacccagcucacugcuaa

SEQ ID NO: 1314861 - RNA, 19 nt, Homo sapiens
  misc_RNA (1)...(19): siRNA sense strand
gaaaugacucuucaaauca

SEQ ID NO: 1314862 - RNA, 19 nt, Homo sapiens
  misc_RNA (1)...(19): siRNA sense strand
gggcagagcuggaugagau

SEQ ID NO: 1314863 - RNA, 19 nt, Homo sapiens
  misc_RNA (1)...(19): siRNA sense strand
gaacaagaaacacaaagaa

SEQ ID NO: 1314864 - RNA, 19 nt, Homo sapiens
  misc_RNA (1)...(19): siRNA sense strand
ccagcucacugcuaauuua

SEQ ID NO: 1314865 - RNA, 19 nt, Homo sapiens
  misc_RNA (1)...(19): siRNA sense strand
cagaaaggaacuagaauua

SEQ ID NO: 1314866 - RNA, 19 nt, Homo sapiens
  misc_RNA (1)...(19): siRNA sense strand
ggaaaugggugagguuguu

SEQ ID NO: 1314867 - RNA, 19 nt, Homo sapiens
  misc_RNA (1)...(19): siRNA sense strand
acagagagcuggaagaaau

SEQ ID NO: 1314868 - RNA, 19 nt, Homo sapiens
  misc_RNA (1)...(19): siRNA sense strand
gaacauggaaaggaaauuu

SEQ ID NO: 1314869 - RNA, 19 nt, Homo sapiens
  misc_RNA (1)...(19): siRNA sense strand
agaacaagaccacuuauua

SEQ ID NO: 1314870 - RNA, 19 nt, Homo sapiens
  misc_RNA (1)...(19): siRNA sense strand
gaacaagaccacuuauuag

SEQ ID NO: 1314871 - RNA, 19 nt, Homo sapiens
  misc_RNA (1)...(19): siRNA sense strand
gacaguggaugugaaauuu

SEQ ID NO: 1314872 - RNA, 19 nt, Homo sapiens
  misc_RNA (1)...(19): siRNA sense strand
cagaauggcugaaucacaa

SEQ ID NO: 1314873 - RNA, 19 nt, Homo sapiens
  misc_RNA (1)...(19): siRNA sense strand
ggaagcagcaugagauuga

SEQ ID NO: 1314874 - RNA, 19 nt, Homo sapiens
  misc_RNA (1)...(19): siRNA sense strand
agaaaugacucuucaaauc

SEQ ID NO: 1314875 - RNA, 19 nt, Homo sapiens
  misc_RNA (1)...(19): siRNA sense strand
gaacaggaaagccuacaaa

SEQ ID NO: 1314876 - RNA, 19 nt, Homo sapiens
  misc_RNA (1)...(19): siRNA sense strand
acaagaagcugaauuagag

SEQ ID NO: 1314877 - RNA, 19 nt, Homo sapiens
  misc_RNA (1)...(19): siRNA sense strand
guagagagcuagaaaucau

SEQ ID NO: 1314878 - RNA, 19 nt, Homo sapiens
  misc_RNA (1)...(19): siRNA sense strand
gaaagaaacugaacaaaac

SEQ ID NO: 1314879 - RNA, 19 nt, Homo sapiens
  misc_RNA (1)...(19): siRNA sense strand
gaaaugaggguuaccuaug

SEQ ID NO: 1314880 - RNA, 19 nt, Homo sapiens
  misc_RNA (1)...(19): siRNA sense strand
ggaaacaaauaucguuaag

SEQ ID NO: 1314881 - RNA, 19 nt, Homo sapiens
  misc_RNA (1)...(19): siRNA sense strand
gcagauagugcaaaugaaa

SEQ ID NO: 1314882 - RNA, 19 nt, Homo sapiens
  misc_RNA (1)...(19): siRNA sense strand
caacagauccucacucauc

SEQ ID NO: 1314883 - RNA, 19 nt, Homo sapiens
  misc_RNA (1)...(19): siRNA sense strand
aggaaagccuacaaauuua

SEQ ID NO: 1314884 - RNA, 19 nt, Homo sapiens
  misc_RNA (1)...(19): siRNA sense strand
gauccagaauuacaagauu

SEQ ID NO: 1314885 - RNA, 19 nt, Homo sapiens
  misc_RNA (1)...(19): siRNA sense strand
guacuuaaaucagaacaga

SEQ ID NO: 1314886 - RNA, 19 nt, Homo sapiens
  misc_RNA (1)...(19): siRNA sense strand
gaacagauucagagagcua

SEQ ID NO: 1314887 - RNA, 19 nt, Homo sapiens
  misc_RNA (1)...(19): siRNA sense strand
ggcaauaaaugaacugaau

SEQ ID NO: 1314888 - RNA, 19 nt, Homo sapiens
  misc_RNA (1)...(19): siRNA sense strand
agaaacagcacucauagua

SEQ ID NO: 1314889 - RNA, 19 nt, Homo sapiens
  misc_RNA (1)...(19): siRNA sense strand
gaacuggaaagugaaauuu

SEQ ID NO: 1314890 - RNA, 19 nt, Homo sapiens
  misc_RNA (1)...(19): siRNA sense strand
aggcagagauccacuguuu

SEQ ID NO: 1314891 - RNA, 19 nt, Homo sapiens
  misc_RNA (1)...(19): siRNA sense strand
gcaguguccuuggugaaua

SEQ ID NO: 1314892 - RNA, 19 nt, Homo sapiens
  misc_RNA (1)...(19): siRNA sense strand
acagaaacauggugagauu

SEQ ID NO: 1314893 - RNA, 19 nt, Homo sapiens
  misc_RNA (1)...(19): siRNA sense strand
gagcuucauuugcaaagaa

SEQ ID NO: 1314894 - RNA, 19 nt, Homo sapiens
  misc_RNA (1)...(19): siRNA sense strand
aagaagagcuuuccaaacu

SEQ ID NO: 1314895 - RNA, 19 nt, Homo sapiens
  misc_RNA (1)...(19): siRNA sense strand
agaaacaggugaugaagga

SEQ ID NO: 1314896 - RNA, 19 nt, Homo sapiens
  misc_RNA (1)...(19): siRNA sense strand
gauagaugguuuacagaau

SEQ ID NO: 1314897 - RNA, 19 nt, Homo sapiens
  misc_RNA (1)...(19): siRNA sense strand
agaaguagcuaagguuauu

SEQ ID NO: 1314898 - RNA, 19 nt, Homo sapiens
  misc_RNA (1)...(19): siRNA sense strand
gaauucuggugauuacauu

SEQ ID NO: 1314899 - RNA, 19 nt, Homo sapiens
  misc_RNA (1)...(19): siRNA sense strand
gaucaaggaacuucagaaa

SEQ ID NO: 1314900 - RNA, 19 nt, Homo sapiens
  misc_RNA (1)...(19): siRNA sense strand
caaguuucauugagaugua

SEQ ID NO: 1314901 - RNA, 19 nt, Homo sapiens
  misc_RNA (1)...(19): siRNA sense strand
gcaaaagaaccaagaaaua

SEQ ID NO: 1314902 - RNA, 19 nt, Homo sapiens
  misc_RNA (1)...(19): siRNA sense strand
guaugaaacuugaauuugg

SEQ ID NO: 1314903 - RNA, 19 nt, Homo sapiens
  misc_RNA (1)...(19): siRNA sense strand
caaaguaacagaagaauac

SEQ ID NO: 1314904 - RNA, 19 nt, Homo sapiens
  misc_RNA (1)...(19): siRNA sense strand
aaauaugacuguuggagaa

SEQ ID NO: 1314905 - RNA, 19 nt, Homo sapiens
  misc_RNA (1)...(19): siRNA sense strand
ggaagaacuaggacuaauu

SEQ ID NO: 1314906 - RNA, 19 nt, Homo sapiens
  misc_RNA (1)...(19): siRNA sense strand
guuaaugaauguggcaaua

SEQ ID NO: 1314907 - RNA, 19 nt, Homo sapiens
  misc_RNA (1)...(19): siRNA sense strand
ggaagaagaauuugguguu

SEQ ID NO: 1314908 - RNA, 19 nt, Homo sapiens
  misc_RNA (1)...(19): siRNA sense strand
gauggaagcccaacgcauu

SEQ ID NO: 1314909 - RNA, 19 nt, Homo sapiens
  misc_RNA (1)...(19): siRNA sense strand
ucagagagcuagacagaca

SEQ ID NO: 1314910 - RNA, 19 nt, Homo sapiens
  misc_RNA (1)...(19): siRNA sense strand
caagaccacuuauuagaag

SEQ ID NO: 1314911 - RNA, 19 nt, Homo sapiens
  misc_RNA (1)...(19): siRNA sense strand
ugaagaacaagaccacuua

SEQ ID NO: 1314912 - RNA, 19 nt, Homo sapiens
  misc_RNA (1)...(19): siRNA sense strand
gaacaaggagcacaagaca

SEQ ID NO: 1314913 - RNA, 19 nt, Homo sapiens
  misc_RNA (1)...(19): siRNA sense strand
ugacugcaguucagaggua

SEQ ID NO: 1314914 - RNA, 19 nt, Homo sapiens
  misc_RNA (1)...(19): siRNA sense strand
caguggaugugaaauuuaa

SEQ ID NO: 1314915 - RNA, 19 nt, Homo sapiens
  misc_RNA (1)...(19): siRNA sense strand
gaaauuaucacaggaucaa

SEQ ID NO: 1314916 - RNA, 19 nt, Homo sapiens
  misc_RNA (1)...(19): siRNA sense strand
gaggaaacaaauaucguua

SEQ ID NO: 1314917 - RNA, 19 nt, Homo sapiens
  misc_RNA (1)...(19): siRNA sense strand
caacaaaguaacagaagaa

SEQ ID NO: 1314918 - RNA, 19 nt, Homo sapiens
  misc_RNA (1)...(19): siRNA sense strand
gaauaaauccaacuacagu

SEQ ID NO: 1314919 - RNA, 19 nt, Homo sapiens
  misc_RNA (1)...(19): siRNA sense strand
aaacaaagagauggcauua

SEQ ID NO: 1314920 - RNA, 19 nt, Homo sapiens
  misc_RNA (1)...(19): siRNA sense strand
caaacugaaggaagauuua

SEQ ID NO: 1314921 - RNA, 19 nt, Homo sapiens
  misc_RNA (1)...(19): siRNA sense strand
ccgccaagcuuaccuguug

SEQ ID NO: 1314922 - RNA, 19 nt, Homo sapiens
  misc_RNA (1)...(19): siRNA sense strand
gaaagaacucaauguacuu

SEQ ID NO: 1314923 - RNA, 19 nt, Homo sapiens
  misc_RNA (1)...(19): siRNA sense strand
ucagaaagaacucaaugua

SEQ ID NO: 1314924 - RNA, 19 nt, Homo sapiens
  misc_RNA (1)...(19): siRNA sense strand
gagaagaaaguaagcaaga

SEQ ID NO: 1314925 - RNA, 19 nt, Homo sapiens
  misc_RNA (1)...(19): siRNA sense strand
caagagaaagaacaaguuu

SEQ ID NO: 1314926 - RNA, 19 nt, Homo sapiens
  misc_RNA (1)...(19): siRNA sense strand
gaaaauacauacuccuguu

SEQ ID NO: 1314927 - RNA, 19 nt, Homo sapiens
  misc_RNA (1)...(19): siRNA sense strand
gaaauacucagacaagaag

SEQ ID NO: 1314928 - RNA, 19 nt, Homo sapiens
  misc_RNA (1)...(19): siRNA sense strand
gcacacucuucucaacaaa

SEQ ID NO: 1314929 - RNA, 19 nt, Homo sapiens
  misc_RNA (1)...(19): siRNA sense strand
uaaccaagcgagagaaauu

SEQ ID NO: 1314930 - RNA, 19 nt, Homo sapiens
  misc_RNA (1)...(19): siRNA sense strand
gaagcugccauuaaacaaa

SEQ ID NO: 1314931 - RNA, 19 nt, Homo sapiens
  misc_RNA (1)...(19): siRNA sense strand
ggcagugucugaagaaugu

SEQ ID NO: 1314932 - RNA, 19 nt, Homo sapiens
  misc_RNA (1)...(19): siRNA sense strand
ggaucaguuucuaaaguaa

SEQ ID NO: 1314933 - RNA, 19 nt, Homo sapiens
  misc_RNA (1)...(19): siRNA sense strand
caccaugauuugaauauug

SEQ ID NO: 1314934 - RNA, 19 nt, Homo sapiens
  misc_RNA (1)...(19): siRNA sense strand
caacaagcaagaagagaaa

SEQ ID NO: 1314935 - RNA, 19 nt, Homo sapiens
  misc_RNA (1)...(19): siRNA sense strand
caaagagauggcauuauaa

SEQ ID NO: 1314936 - RNA, 19 nt, Homo sapiens
  misc_RNA (1)...(19): siRNA sense strand
uugaagaccuuguugaaga

SEQ ID NO: 1314937 - RNA, 19 nt, Homo sapiens
  misc_RNA (1)...(19): siRNA sense strand
ucagcuaaaugaagagauu

SEQ ID NO: 1314938 - RNA, 19 nt, Homo sapiens
  misc_RNA (1)...(19): siRNA sense strand
gaacacagcuucuauuuag

SEQ ID NO: 1314939 - RNA, 19 nt, Homo sapiens
  misc_RNA (1)...(19): siRNA sense strand
gaaauguucuccaaagaua

SEQ ID NO: 1314940 - RNA, 19 nt, Homo sapiens
  misc_RNA (1)...(19): siRNA sense strand
gacaauagcugaacaagaa

SEQ ID NO: 1314941 - RNA, 19 nt, Homo sapiens
  misc_RNA (1)...(19): siRNA sense strand
acaaagagauggcauuaua

SEQ ID NO: 1314942 - RNA, 19 nt, Homo sapiens
  misc_RNA (1)...(19): siRNA sense strand
uagcacagcugcagacuua

SEQ ID NO: 1314943 - RNA, 19 nt, Homo sapiens
  misc_RNA (1)...(19): siRNA sense strand
caaguaagcucuuuauuag

SEQ ID NO: 1314944 - RNA, 19 nt, Homo sapiens
  misc_RNA (1)...(19): siRNA sense strand
gcagacagaugguaugaaa

SEQ ID NO: 1314945 - RNA, 19 nt, Homo sapiens
  misc_RNA (1)...(19): siRNA sense strand
guucgaaacugauauagua

SEQ ID NO: 1314946 - RNA, 19 nt, Homo sapiens
  misc_RNA (1)...(19): siRNA sense strand
gaagaacaguuggaagaua

SEQ ID NO: 1314947 - RNA, 19 nt, Homo sapiens
  misc_RNA (1)...(19): siRNA sense strand
acaaaggaaucaucacuua

SEQ ID NO: 1314948 - RNA, 19 nt, Homo sapiens
  misc_RNA (1)...(19): siRNA sense strand
caggaaagccuacaaauuu

SEQ ID NO: 1314949 - RNA, 19 nt, Homo sapiens
  misc_RNA (1)...(19): siRNA sense strand
gaagagaaaucauaaagac

SEQ ID NO: 1314950 - RNA, 19 nt, Homo sapiens
  misc_RNA (1)...(19): siRNA sense strand
gaaguuaacuaucaagagu

SEQ ID NO: 1314951 - RNA, 19 nt, Homo sapiens
  misc_RNA (1)...(19): siRNA sense strand
gaagagcuuuccaaacuga

SEQ ID NO: 1314952 - RNA, 19 nt, Homo sapiens
  misc_RNA (1)...(19): siRNA sense strand
gaagaacuaggacuaauuu

SEQ ID NO: 1314953 - RNA, 19 nt, Homo sapiens
  misc_RNA (1)...(19): siRNA sense strand
gaagaagaauuugguguug

SEQ ID NO: 1314954 - RNA, 19 nt, Homo sapiens
  misc_RNA (1)...(19): siRNA sense strand
gaacaaguuucauugagau

SEQ ID NO: 1314955 - RNA, 19 nt, Homo sapiens
  misc_RNA (1)...(19): siRNA sense strand
aaacugaacugucuagaau

SEQ ID NO: 1314956 - RNA, 19 nt, Homo sapiens
  misc_RNA (1)...(19): siRNA sense strand
caaguuaucuucucugcaa

SEQ ID NO: 1314957 - RNA, 19 nt, Homo sapiens
  misc_RNA (1)...(19): siRNA sense strand
gcagauagaugguuuacag

SEQ ID NO: 1314958 - RNA, 19 nt, Homo sapiens
  misc_RNA (1)...(19): siRNA sense strand
gaagaaguagcuaagguua

SEQ ID NO: 1314959 - RNA, 19 nt, Homo sapiens
  misc_RNA (1)...(19): siRNA sense strand
caacagaacucauggaaaa

SEQ ID NO: 1314960 - RNA, 19 nt, Homo sapiens
  misc_RNA (1)...(19): siRNA sense strand
uaacccagcucacugcuaa

SEQ ID NO: 1314961 - RNA, 19 nt, Homo sapiens
  misc_RNA (1)...(19): siRNA sense strand
gaaaugacucuucaaauca

SEQ ID NO: 1314962 - RNA, 19 nt, Homo sapiens
  misc_RNA (1)...(19): siRNA sense strand
gggcagagcuggaugagau

SEQ ID NO: 1314963 - RNA, 19 nt, Homo sapiens
  misc_RNA (1)...(19): siRNA sense strand
gaacaagaaacacaaagaa

SEQ ID NO: 1314964 - RNA, 19 nt, Homo sapiens
  misc_RNA (1)...(19): siRNA sense strand
ccagcucacugcuaauuua

SEQ ID NO: 1314965 - RNA, 19 nt, Homo sapiens
  misc_RNA (1)...(19): siRNA sense strand
cagaaaggaacuagaauua

SEQ ID NO: 1314966 - RNA, 19 nt, Homo sapiens
  misc_RNA (1)...(19): siRNA sense strand
ggaaaugggugagguuguu

SEQ ID NO: 1314967 - RNA, 19 nt, Homo sapiens
  misc_RNA (1)...(19): siRNA sense strand
acagagagcuggaagaaau

SEQ ID NO: 1314968 - RNA, 19 nt, Homo sapiens
  misc_RNA (1)...(19): siRNA sense strand
gaacauggaaaggaaauuu

SEQ ID NO: 1314969 - RNA, 19 nt, Homo sapiens
  misc_RNA (1)...(19): siRNA sense strand
agaacaagaccacuuauua

SEQ ID NO: 1314970 - RNA, 19 nt, Homo sapiens
  misc_RNA (1)...(19): siRNA sense strand
gaacaagaccacuuauuag

SEQ ID NO: 1314971 - RNA, 19 nt, Homo sapiens
  misc_RNA (1)...(19): siRNA sense strand
gacaguggaugugaaauuu

SEQ ID NO: 1314972 - RNA, 19 nt, Homo sapiens
  misc_RNA (1)...(19): siRNA sense strand
cagaauggcugaaucacaa

SEQ ID NO: 1314973 - RNA, 19 nt, Homo sapiens
  misc_RNA (1)...(19): siRNA sense strand
ggaagcagcaugagauuga

SEQ ID NO: 1314974 - RNA, 19 nt, Homo sapiens
  misc_RNA (1)...(19): siRNA sense strand
agaaaugacucuucaaauc

SEQ ID NO: 1314975 - RNA, 19 nt, Homo sapiens
  misc_RNA (1)...(19): siRNA sense strand
gaacaggaaagccuacaaa

SEQ ID NO: 1314976 - RNA, 19 nt, Homo sapiens
  misc_RNA (1)...(19): siRNA sense strand
acaagaagcugaauuagag

SEQ ID NO: 1314977 - RNA, 19 nt, Homo sapiens
  misc_RNA (1)...(19): siRNA sense strand
guagagagcuagaaaucau

SEQ ID NO: 1314978 - RNA, 19 nt, Homo sapiens
  misc_RNA (1)...(19): siRNA sense strand
gaaagaaacugaacaaaac

SEQ ID NO: 1314979 - RNA, 19 nt, Homo sapiens
  misc_RNA (1)...(19): siRNA sense strand
gaaaugaggguuaccuaug

SEQ ID NO: 1314980 - RNA, 19 nt, Homo sapiens
  misc_RNA (1)...(19): siRNA sense strand
ggaaacaaauaucguuaag

SEQ ID NO: 1314981 - RNA, 19 nt, Homo sapiens
  misc_RNA (1)...(19): siRNA sense strand
gcagauagugcaaaugaaa

SEQ ID NO: 1314982 - RNA, 19 nt, Homo sapiens
  misc_RNA (1)...(19): siRNA sense strand
caacagauccucacucauc

SEQ ID NO: 1314983 - RNA, 19 nt, Homo sapiens
  misc_RNA (1)...(19): siRNA sense strand
aggaaagccuacaaauuua

SEQ ID NO: 1314984 - RNA, 19 nt, Homo sapiens
  misc_RNA (1)...(19): siRNA sense strand
gauccagaauuacaagauu

SEQ ID NO: 1314985 - RNA, 19 nt, Homo sapiens
  misc_RNA (1)...(19): siRNA sense strand
guacuuaaaucagaacaga

SEQ ID NO: 1314986 - RNA, 19 nt, Homo sapiens
  misc_RNA (1)...(19): siRNA sense strand
gaacagauucagagagcua

SEQ ID NO: 1314987 - RNA, 19 nt, Homo sapiens
  misc_RNA (1)...(19): siRNA sense strand
ggcaauaaaugaacugaau

SEQ ID NO: 1314988 - RNA, 19 nt, Homo sapiens
  misc_RNA (1)...(19): siRNA sense strand
agaaacagcacucauagua

SEQ ID NO: 1314989 - RNA, 19 nt, Homo sapiens
  misc_RNA (1)...(19): siRNA sense strand
gaacuggaaagugaaauuu

SEQ ID NO: 1314990 - RNA, 19 nt, Homo sapiens
  misc_RNA (1)...(19): siRNA sense strand
aggcagagauccacuguuu

SEQ ID NO: 1314991 - RNA, 19 nt, Homo sapiens
  misc_RNA (1)...(19): siRNA sense strand
gcaguguccuuggugaaua

SEQ ID NO: 1314992 - RNA, 19 nt, Homo sapiens
  misc_RNA (1)...(19): siRNA sense strand
acagaaacauggugagauu

SEQ ID NO: 1314993 - RNA, 19 nt, Homo sapiens
  misc_RNA (1)...(19): siRNA sense strand
gagcuucauuugcaaagaa

SEQ ID NO: 1314994 - RNA, 19 nt, Homo sapiens
  misc_RNA (1)...(19): siRNA sense strand
aagaagagcuuuccaaacu

SEQ ID NO: 1314995 - RNA, 19 nt, Homo sapiens
  misc_RNA (1)...(19): siRNA sense strand
agaaacaggugaugaagga

SEQ ID NO: 1314996 - RNA, 19 nt, Homo sapiens
  misc_RNA (1)...(19): siRNA sense strand
gauagaugguuuacagaau

SEQ ID NO: 1314997 - RNA, 19 nt, Homo sapiens
  misc_RNA (1)...(19): siRNA sense strand
agaaguagcuaagguuauu

SEQ ID NO: 1314998 - RNA, 19 nt, Homo sapiens
  misc_RNA (1)...(19): siRNA sense strand
gaauucuggugauuacauu

SEQ ID NO: 1314999 - RNA, 19 nt, Homo sapiens
  misc_RNA (1)...(19): siRNA sense strand
gaucaaggaacuucagaaa

SEQ ID NO: 1315000 - RNA, 19 nt, Homo sapiens
  misc_RNA (1)...(19): siRNA sense strand
caaguuucauugagaugua

SEQ ID NO: 1315001 - RNA, 19 nt, Homo sapiens
  misc_RNA (1)...(19): siRNA sense strand
gcaaaagaaccaagaaaua

SEQ ID NO: 1315002 - RNA, 19 nt, Homo sapiens
  misc_RNA (1)...(19): siRNA sense strand
guaugaaacuugaauuugg

SEQ ID NO: 1315003 - RNA, 19 nt, Homo sapiens
  misc_RNA (1)...(19): siRNA sense strand
caaaguaacagaagaauac

SEQ ID NO: 1315004 - RNA, 19 nt, Homo sapiens
  misc_RNA (1)...(19): siRNA sense strand
aaauaugacuguuggagaa

SEQ ID NO: 1315005 - RNA, 19 nt, Homo sapiens
  misc_RNA (1)...(19): siRNA sense strand
ggaagaacuaggacuaauu

SEQ ID NO: 1315006 - RNA, 19 nt, Homo sapiens
  misc_RNA (1)...(19): siRNA sense strand
guuaaugaauguggcaaua

SEQ ID NO: 1315007 - RNA, 19 nt, Homo sapiens
  misc_RNA (1)...(19): siRNA sense strand
ggaagaagaauuugguguu

SEQ ID NO: 1315008 - RNA, 19 nt, Homo sapiens
  misc_RNA (1)...(19): siRNA sense strand
gauggaagcccaacgcauu

SEQ ID NO: 1315009 - RNA, 19 nt, Homo sapiens
  misc_RNA (1)...(19): siRNA sense strand
ucagagagcuagacagaca

SEQ ID NO: 1315010 - RNA, 19 nt, Homo sapiens
  misc_RNA (1)...(19): siRNA sense strand
caagaccacuuauuagaag

SEQ ID NO: 1315011 - RNA, 19 nt, Homo sapiens
  misc_RNA (1)...(19): siRNA sense strand
ugaagaacaagaccacuua

SEQ ID NO: 1315012 - RNA, 19 nt, Homo sapiens
  misc_RNA (1)...(19): siRNA sense strand
gaacaaggagcacaagaca

SEQ ID NO: 1315013 - RNA, 19 nt, Homo sapiens
  misc_RNA (1)...(19): siRNA sense strand
ugacugcaguucagaggua

SEQ ID NO: 1315014 - RNA, 19 nt, Homo sapiens
  misc_RNA (1)...(19): siRNA sense strand
caguggaugugaaauuuaa

SEQ ID NO: 1315015 - RNA, 19 nt, Homo sapiens
  misc_RNA (1)...(19): siRNA sense strand
gaaauuaucacaggaucaa

SEQ ID NO: 1315016 - RNA, 19 nt, Homo sapiens
  misc_RNA (1)...(19): siRNA sense strand
gaggaaacaaauaucguua

SEQ ID NO: 1315017 - RNA, 19 nt, Homo sapiens
  misc_RNA (1)...(19): siRNA sense strand
caacaaaguaacagaagaa

SEQ ID NO: 1315018 - RNA, 19 nt, Homo sapiens
  misc_RNA (1)...(19): siRNA sense strand
gaauaaauccaacuacagu

SEQ ID NO: 1315019 - RNA, 19 nt, Homo sapiens
  misc_RNA (1)...(19): siRNA sense strand
aaacaaagagauggcauua

SEQ ID NO: 1315020 - RNA, 19 nt, Homo sapiens
  misc_RNA (1)...(19): siRNA sense strand
caaacugaaggaagauuua

SEQ ID NO: 1315021 - RNA, 19 nt, Homo sapiens
  misc_RNA (1)...(19): siRNA sense strand
ccgccaagcuuaccuguug

SEQ ID NO: 1315022 - RNA, 19 nt, Homo sapiens
  misc_RNA (1)...(19): siRNA sense strand
gaaagaacucaauguacuu

SEQ ID NO: 1315023 - RNA, 19 nt, Homo sapiens
  misc_RNA (1)...(19): siRNA sense strand
ucagaaagaacucaaugua

SEQ ID NO: 1315024 - RNA, 19 nt, Homo sapiens
  misc_RNA (1)...(19): siRNA sense strand
gagaagaaaguaagcaaga

SEQ ID NO: 1315025 - RNA, 19 nt, Homo sapiens
  misc_RNA (1)...(19): siRNA sense strand
caagagaaagaacaaguuu

SEQ ID NO: 1315026 - RNA, 19 nt, Homo sapiens
  misc_RNA (1)...(19): siRNA sense strand
gaaaauacauacuccuguu

SEQ ID NO: 1315027 - RNA, 19 nt, Homo sapiens
  misc_RNA (1)...(19): siRNA sense strand
gaaauacucagacaagaag

SEQ ID NO: 1315028 - RNA, 19 nt, Homo sapiens
  misc_RNA (1)...(19): siRNA sense strand
gcacacucuucucaacaaa

SEQ ID NO: 1315029 - RNA, 19 nt, Homo sapiens
  misc_RNA (1)...(19): siRNA sense strand
uaaccaagcgagagaaauu

SEQ ID NO: 1315030 - RNA, 19 nt, Homo sapiens
  misc_RNA (1)...(19): siRNA sense strand
gaagcugccauuaaacaaa

SEQ ID NO: 1315031 - RNA, 19 nt, Homo sapiens
  misc_RNA (1)...(19): siRNA sense strand
ggcagugucugaagaaugu

SEQ ID NO: 1315032 - RNA, 19 nt, Homo sapiens
  misc_RNA (1)...(19): siRNA sense strand
ggaucaguuucuaaaguaa

SEQ ID NO: 1315033 - RNA, 19 nt, Homo sapiens
  misc_RNA (1)...(19): siRNA sense strand
caccaugauuugaauauug

SEQ ID NO: 1315034 - RNA, 19 nt, Homo sapiens
  misc_RNA (1)...(19): siRNA sense strand
caacaagcaagaagagaaa

SEQ ID NO: 1315035 - RNA, 19 nt, Homo sapiens
  misc_RNA (1)...(19): siRNA sense strand
caaagagauggcauuauaa

SEQ ID NO: 1315036 - RNA, 19 nt, Homo sapiens
  misc_RNA (1)...(19): siRNA sense strand
uugaagaccuuguugaaga

SEQ ID NO: 1315037 - RNA, 19 nt, Homo sapiens
  misc_RNA (1)...(19): siRNA sense strand
ucagcuaaaugaagagauu

SEQ ID NO: 1315038 - RNA, 19 nt, Homo sapiens
  misc_RNA (1)...(19): siRNA sense strand
gaacacagcuucuauuuag

SEQ ID NO: 1315039 - RNA, 19 nt, Homo sapiens
  misc_RNA (1)...(19): siRNA sense strand
gaaauguucuccaaagaua

SEQ ID NO: 1315040 - RNA, 19 nt, Homo sapiens
  misc_RNA (1)...(19): siRNA sense strand
gacaauagcugaacaagaa

SEQ ID NO: 1315041 - RNA, 19 nt, Homo sapiens
  misc_RNA (1)...(19): siRNA sense strand
acaaagagauggcauuaua

SEQ ID NO: 1315042 - RNA, 19 nt, Homo sapiens
  misc_RNA (1)...(19): siRNA sense strand
uagcacagcugcagacuua

SEQ ID NO: 1315043 - RNA, 19 nt, Homo sapiens
  misc_RNA (1)...(19): siRNA sense strand
caaguaagcucuuuauuag

SEQ ID NO: 1315044 - RNA, 19 nt, Homo sapiens
  misc_RNA (1)...(19): siRNA sense strand
gcagacagaugguaugaaa

SEQ ID NO: 1315045 - RNA, 19 nt, Homo sapiens
  misc_RNA (1)...(19): siRNA sense strand
guucgaaacugauauagua

SEQ ID NO: 1315046 - RNA, 19 nt, Homo sapiens
  misc_RNA (1)...(19): siRNA sense strand
gaagaacaguuggaagaua

SEQ ID NO: 1315047 - RNA, 19 nt, Homo sapiens
  misc_RNA (1)...(19): siRNA sense strand
acaaaggaaucaucacuua

SEQ ID NO: 1315048 - RNA, 19 nt, Homo sapiens
  misc_RNA (1)...(19): siRNA sense strand
caggaaagccuacaaauuu

SEQ ID NO: 1315049 - RNA, 19 nt, Homo sapiens
  misc_RNA (1)...(19): siRNA sense strand
gaagagaaaucauaaagac

SEQ ID NO: 1315050 - RNA, 19 nt, Homo sapiens
  misc_RNA (1)...(19): siRNA sense strand
gaaguuaacuaucaagagu

SEQ ID NO: 1315051 - RNA, 19 nt, Homo sapiens
  misc_RNA (1)...(19): siRNA sense strand
gaagagcuuuccaaacuga

SEQ ID NO: 1315052 - RNA, 19 nt, Homo sapiens
  misc_RNA (1)...(19): siRNA sense strand
gaagaacuaggacuaauuu

SEQ ID NO: 1315053 - RNA, 19 nt, Homo sapiens
  misc_RNA (1)...(19): siRNA sense strand
gaagaagaauuugguguug

SEQ ID NO: 1315054 - RNA, 19 nt, Homo sapiens
  misc_RNA (1)...(19): siRNA sense strand
gaacaaguuucauugagau

SEQ ID NO: 1315055 - RNA, 19 nt, Homo sapiens
  misc_RNA (1)...(19): siRNA sense strand
aaacugaacugucuagaau

SEQ ID NO: 1315056 - RNA, 19 nt, Homo sapiens
  misc_RNA (1)...(19): siRNA sense strand
caaguuaucuucucugcaa

SEQ ID NO: 1315057 - RNA, 19 nt, Homo sapiens
  misc_RNA (1)...(19): siRNA sense strand
gcagauagaugguuuacag

SEQ ID NO: 1315058 - RNA, 19 nt, Homo sapiens
  misc_RNA (1)...(19): siRNA sense strand
gaagaaguagcuaagguua

SEQ ID NO: 1315059 - RNA, 19 nt, Homo sapiens
  misc_RNA (1)...(19): siRNA sense strand
caacagaacucauggaaaa

SEQ ID NO: 1315060 - RNA, 19 nt, Homo sapiens
  misc_RNA (1)...(19): siRNA sense strand
uaacccagcucacugcuaa

SEQ ID NO: 1315061 - RNA, 19 nt, Homo sapiens
  misc_RNA (1)...(19): siRNA sense strand
gaaaugacucuucaaauca

SEQ ID NO: 1315062 - RNA, 19 nt, Homo sapiens
  misc_RNA (1)...(19): siRNA sense strand
gggcagagcuggaugagau

SEQ ID NO: 1315063 - RNA, 19 nt, Homo sapiens
  misc_RNA (1)...(19): siRNA sense strand
gaacaagaaacacaaagaa

SEQ ID NO: 1315064 - RNA, 19 nt, Homo sapiens
  misc_RNA (1)...(19): siRNA sense strand
ccagcucacugcuaauuua

SEQ ID NO: 1315065 - RNA, 19 nt, Homo sapiens
  misc_RNA (1)...(19): siRNA sense strand
cagaaaggaacuagaauua

SEQ ID NO: 1315066 - RNA, 19 nt, Homo sapiens
  misc_RNA (1)...(19): siRNA sense strand
ggaaaugggugagguuguu

SEQ ID NO: 1315067 - RNA, 19 nt, Homo sapiens
  misc_RNA (1)...(19): siRNA sense strand
acagagagcuggaagaaau

SEQ ID NO: 1315068 - RNA, 19 nt, Homo sapiens
  misc_RNA (1)...(19): siRNA sense strand
gaacauggaaaggaaauuu

SEQ ID NO: 1315069 - RNA, 19 nt, Homo sapiens
  misc_RNA (1)...(19): siRNA sense strand
agaacaagaccacuuauua

SEQ ID NO: 1315070 - RNA, 19 nt, Homo sapiens
  misc_RNA (1)...(19): siRNA sense strand
gaacaagaccacuuauuag

SEQ ID NO: 1315071 - RNA, 19 nt, Homo sapiens
  misc_RNA (1)...(19): siRNA sense strand
gacaguggaugugaaauuu

SEQ ID NO: 1315072 - RNA, 19 nt, Homo sapiens
  misc_RNA (1)...(19): siRNA sense strand
cagaauggcugaaucacaa

SEQ ID NO: 1315073 - RNA, 19 nt, Homo sapiens
  misc_RNA (1)...(19): siRNA sense strand
ggaagcagcaugagauuga

SEQ ID NO: 1315074 - RNA, 19 nt, Homo sapiens
  misc_RNA (1)...(19): siRNA sense strand
agaaaugacucuucaaauc

SEQ ID NO: 1315075 - RNA, 19 nt, Homo sapiens
  misc_RNA (1)...(19): siRNA sense strand
gaacaggaaagccuacaaa

SEQ ID NO: 1315076 - RNA, 19 nt, Homo sapiens
  misc_RNA (1)...(19): siRNA sense strand
acaagaagcugaauuagag

SEQ ID NO: 1315077 - RNA, 19 nt, Homo sapiens
  misc_RNA (1)...(19): siRNA sense strand
guagagagcuagaaaucau

SEQ ID NO: 1315078 - RNA, 19 nt, Homo sapiens
  misc_RNA (1)...(19): siRNA sense strand
gaaagaaacugaacaaaac

SEQ ID NO: 1315079 - RNA, 19 nt, Homo sapiens
  misc_RNA (1)...(19): siRNA sense strand
gaaaugaggguuaccuaug

SEQ ID NO: 1315080 - RNA, 19 nt, Homo sapiens
  misc_RNA (1)...(19): siRNA sense strand
ggaaacaaauaucguuaag

SEQ ID NO: 1315081 - RNA, 19 nt, Homo sapiens
  misc_RNA (1)...(19): siRNA sense strand
gcagauagugcaaaugaaa

SEQ ID NO: 1315082 - RNA, 19 nt, Homo sapiens
  misc_RNA (1)...(19): siRNA sense strand
caacagauccucacucauc

SEQ ID NO: 1315083 - RNA, 19 nt, Homo sapiens
  misc_RNA (1)...(19): siRNA sense strand
aggaaagccuacaaauuua

SEQ ID NO: 1315084 - RNA, 19 nt, Homo sapiens
  misc_RNA (1)...(19): siRNA sense strand
gauccagaauuacaagauu

SEQ ID NO: 1315085 - RNA, 19 nt, Homo sapiens
  misc_RNA (1)...(19): siRNA sense strand
guacuuaaaucagaacaga

SEQ ID NO: 1315086 - RNA, 19 nt, Homo sapiens
  misc_RNA (1)...(19): siRNA sense strand
gaacagauucagagagcua

SEQ ID NO: 1315087 - RNA, 19 nt, Homo sapiens
  misc_RNA (1)...(19): siRNA sense strand
ggcaauaaaugaacugaau

SEQ ID NO: 1315088 - RNA, 19 nt, Homo sapiens
  misc_RNA (1)...(19): siRNA sense strand
agaaacagcacucauagua

SEQ ID NO: 1315089 - RNA, 19 nt, Homo sapiens
  misc_RNA (1)...(19): siRNA sense strand
gaacuggaaagugaaauuu

SEQ ID NO: 1315090 - RNA, 19 nt, Homo sapiens
  misc_RNA (1)...(19): siRNA sense strand
aggcagagauccacuguuu

SEQ ID NO: 1315091 - RNA, 19 nt, Homo sapiens
  misc_RNA (1)...(19): siRNA sense strand
gcaguguccuuggugaaua

SEQ ID NO: 1315092 - RNA, 19 nt, Homo sapiens
  misc_RNA (1)...(19): siRNA sense strand
acagaaacauggugagauu

SEQ ID NO: 1315093 - RNA, 19 nt, Homo sapiens
  misc_RNA (1)...(19): siRNA sense strand
gagcuucauuugcaaagaa

SEQ ID NO: 1315094 - RNA, 19 nt, Homo sapiens
  misc_RNA (1)...(19): siRNA sense strand
aagaagagcuuuccaaacu

SEQ ID NO: 1315095 - RNA, 19 nt, Homo sapiens
  misc_RNA (1)...(19): siRNA sense strand
agaaacaggugaugaagga

SEQ ID NO: 1315096 - RNA, 19 nt, Homo sapiens
  misc_RNA (1)...(19): siRNA sense strand
gauagaugguuuacagaau

SEQ ID NO: 1315097 - RNA, 19 nt, Homo sapiens
  misc_RNA (1)...(19): siRNA sense strand
agaaguagcuaagguuauu

SEQ ID NO: 1315098 - RNA, 19 nt, Homo sapiens
  misc_RNA (1)...(19): siRNA sense strand
gaauucuggugauuacauu

SEQ ID NO: 1315099 - RNA, 19 nt, Homo sapiens
  misc_RNA (1)...(19): siRNA sense strand
gaucaaggaacuucagaaa

SEQ ID NO: 1315100 - RNA, 19 nt, Homo sapiens
  misc_RNA (1)...(19): siRNA sense strand
caaguuucauugagaugua

SEQ ID NO: 1315101 - RNA, 19 nt, Homo sapiens
  misc_RNA (1)...(19): siRNA sense strand
gcaaaagaaccaagaaaua

SEQ ID NO: 1315102 - RNA, 19 nt, Homo sapiens
  misc_RNA (1)...(19): siRNA sense strand
guaugaaacuugaauuugg

SEQ ID NO: 1315103 - RNA, 19 nt, Homo sapiens
  misc_RNA (1)...(19): siRNA sense strand
caaaguaacagaagaauac

SEQ ID NO: 1315104 - RNA, 19 nt, Homo sapiens
  misc_RNA (1)...(19): siRNA sense strand
aaauaugacuguuggagaa

SEQ ID NO: 1315105 - RNA, 19 nt, Homo sapiens
  misc_RNA (1)...(19): siRNA sense strand
ggaagaacuaggacuaauu

SEQ ID NO: 1315106 - RNA, 19 nt, Homo sapiens
  misc_RNA (1)...(19): siRNA sense strand
guuaaugaauguggcaaua

SEQ ID NO: 1315107 - RNA, 19 nt, Homo sapiens
  misc_RNA (1)...(19): siRNA sense strand
ggaagaagaauuugguguu

SEQ ID NO: 1315108 - RNA, 19 nt, Homo sapiens
  misc_RNA (1)...(19): siRNA sense strand
gauggaagcccaacgcauu

SEQ ID NO: 1315109 - RNA, 19 nt, Homo sapiens
  misc_RNA (1)...(19): siRNA sense strand
ucagagagcuagacagaca

SEQ ID NO: 1315110 - RNA, 19 nt, Homo sapiens
  misc_RNA (1)...(19): siRNA sense strand
caagaccacuuauuagaag

SEQ ID NO: 1315111 - RNA, 19 nt, Homo sapiens
  misc_RNA (1)...(19): siRNA sense strand
ugaagaacaagaccacuua

SEQ ID NO: 1315112 - RNA, 19 nt, Homo sapiens
  misc_RNA (1)...(19): siRNA sense strand
gaacaaggagcacaagaca

SEQ ID NO: 1315113 - RNA, 19 nt, Homo sapiens
  misc_RNA (1)...(19): siRNA sense strand
ugacugcaguucagaggua

SEQ ID NO: 1315114 - RNA, 19 nt, Homo sapiens
  misc_RNA (1)...(19): siRNA sense strand
caguggaugugaaauuuaa

SEQ ID NO: 1315115 - RNA, 19 nt, Homo sapiens
  misc_RNA (1)...(19): siRNA sense strand
gaaauuaucacaggaucaa

SEQ ID NO: 1315116 - RNA, 19 nt, Homo sapiens
  misc_RNA (1)...(19): siRNA sense strand
gaggaaacaaauaucguua

SEQ ID NO: 1315117 - RNA, 19 nt, Homo sapiens
  misc_RNA (1)...(19): siRNA sense strand
caacaaaguaacagaagaa

SEQ ID NO: 1315118 - RNA, 19 nt, Homo sapiens
  misc_RNA (1)...(19): siRNA sense strand
gaauaaauccaacuacagu

SEQ ID NO: 1315119 - RNA, 19 nt, Homo sapiens
  misc_RNA (1)...(19): siRNA sense strand
aaacaaagagauggcauua

SEQ ID NO: 1315120 - RNA, 19 nt, Homo sapiens
  misc_RNA (1)...(19): siRNA sense strand
caaacugaaggaagauuua

SEQ ID NO: 1315121 - RNA, 19 nt, Homo sapiens
  misc_RNA (1)...(19): siRNA sense strand
ccgccaagcuuaccuguug

SEQ ID NO: 1315122 - RNA, 19 nt, Homo sapiens
  misc_RNA (1)...(19): siRNA sense strand
gaaagaacucaauguacuu

SEQ ID NO: 1315123 - RNA, 19 nt, Homo sapiens
  misc_RNA (1)...(19): siRNA sense strand
ucagaaagaacucaaugua

SEQ ID NO: 1315124 - RNA, 19 nt, Homo sapiens
  misc_RNA (1)...(19): siRNA sense strand
gagaagaaaguaagcaaga

SEQ ID NO: 1315125 - RNA, 19 nt, Homo sapiens
  misc_RNA (1)...(19): siRNA sense strand
caagagaaagaacaaguuu

SEQ ID NO: 1315126 - RNA, 19 nt, Homo sapiens
  misc_RNA (1)...(19): siRNA sense strand
gaaaauacauacuccuguu

SEQ ID NO: 1315127 - RNA, 19 nt, Homo sapiens
  misc_RNA (1)...(19): siRNA sense strand
gaaauacucagacaagaag

SEQ ID NO: 1315128 - RNA, 19 nt, Homo sapiens
  misc_RNA (1)...(19): siRNA sense strand
gcacacucuucucaacaaa

SEQ ID NO: 1315129 - RNA, 19 nt, Homo sapiens
  misc_RNA (1)...(19): siRNA sense strand
uaaccaagcgagagaaauu

SEQ ID NO: 1315130 - RNA, 19 nt, Homo sapiens
  misc_RNA (1)...(19): siRNA sense strand
gaagcugccauuaaacaaa

SEQ ID NO: 1315131 - RNA, 19 nt, Homo sapiens
  misc_RNA (1)...(19): siRNA sense strand
ggcagugucugaagaaugu

SEQ ID NO: 1315132 - RNA, 19 nt, Homo sapiens
  misc_RNA (1)...(19): siRNA sense strand
ggaucaguuucuaaaguaa

SEQ ID NO: 1315133 - RNA, 19 nt, Homo sapiens
  misc_RNA (1)...(19): siRNA sense strand
caccaugauuugaauauug

SEQ ID NO: 1315134 - RNA, 19 nt, Homo sapiens
  misc_RNA (1)...(19): siRNA sense strand
caacaagcaagaagagaaa

SEQ ID NO: 1315135 - RNA, 19 nt, Homo sapiens
  misc_RNA (1)...(19): siRNA sense strand
caaagagauggcauuauaa

SEQ ID NO: 1315136 - RNA, 19 nt, Homo sapiens
  misc_RNA (1)...(19): siRNA sense strand
uugaagaccuuguugaaga

SEQ ID NO: 1315137 - RNA, 19 nt, Homo sapiens
  misc_RNA (1)...(19): siRNA sense strand
ucagcuaaaugaagagauu

SEQ ID NO: 1315138 - RNA, 19 nt, Homo sapiens
  misc_RNA (1)...(19): siRNA sense strand
gaacacagcuucuauuuag

SEQ ID NO: 1315139 - RNA, 19 nt, Homo sapiens
  misc_RNA (1)...(19): siRNA sense strand
gaaauguucuccaaagaua

SEQ ID NO: 1315140 - RNA, 19 nt, Homo sapiens
  misc_RNA (1)...(19): siRNA sense strand
gacaauagcugaacaagaa

SEQ ID NO: 1315141 - RNA, 19 nt, Homo sapiens
  misc_RNA (1)...(19): siRNA sense strand
acaaagagauggcauuaua

SEQ ID NO: 1315142 - RNA, 19 nt, Homo sapiens
  misc_RNA (1)...(19): siRNA sense strand
uagcacagcugcagacuua

SEQ ID NO: 1315143 - RNA, 19 nt, Homo sapiens
  misc_RNA (1)...(19): siRNA sense strand
caaguaagcucuuuauuag

SEQ ID NO: 1315144 - RNA, 19 nt, Homo sapiens
  misc_RNA (1)...(19): siRNA sense strand
gcagacagaugguaugaaa

SEQ ID NO: 1315145 - RNA, 19 nt, Homo sapiens
  misc_RNA (1)...(19): siRNA sense strand
guucgaaacugauauagua

SEQ ID NO: 1315146 - RNA, 19 nt, Homo sapiens
  misc_RNA (1)...(19): siRNA sense strand
gaagaacaguuggaagaua

SEQ ID NO: 1315147 - RNA, 19 nt, Homo sapiens
  misc_RNA (1)...(19): siRNA sense strand
acaaaggaaucaucacuua

SEQ ID NO: 1315148 - RNA, 19 nt, Homo sapiens
  misc_RNA (1)...(19): siRNA sense strand
caggaaagccuacaaauuu

SEQ ID NO: 1315149 - RNA, 19 nt, Homo sapiens
  misc_RNA (1)...(19): siRNA sense strand
gaagagaaaucauaaagac

SEQ ID NO: 1315150 - RNA, 19 nt, Homo sapiens
  misc_RNA (1)...(19): siRNA sense strand
gaaguuaacuaucaagagu

SEQ ID NO: 1315151 - RNA, 19 nt, Homo sapiens
  misc_RNA (1)...(19): siRNA sense strand
gaagagcuuuccaaacuga

SEQ ID NO: 1315152 - RNA, 19 nt, Homo sapiens
  misc_RNA (1)...(19): siRNA sense strand
gaagaacuaggacuaauuu

SEQ ID NO: 1315153 - RNA, 19 nt, Homo sapiens
  misc_RNA (1)...(19): siRNA sense strand
gaagaagaauuugguguug

SEQ ID NO: 1315154 - RNA, 19 nt, Homo sapiens
  misc_RNA (1)...(19): siRNA sense strand
gaacaaguuucauugagau

SEQ ID NO: 1315155 - RNA, 19 nt, Homo sapiens
  misc_RNA (1)...(19): siRNA sense strand
aaacugaacugucuagaau

SEQ ID NO: 1315156 - RNA, 19 nt, Homo sapiens
  misc_RNA (1)...(19): siRNA sense strand
caaguuaucuucucugcaa

SEQ ID NO: 1315157 - RNA, 19 nt, Homo sapiens
  misc_RNA (1)...(19): siRNA sense strand
gcagauagaugguuuacag

SEQ ID NO: 1315158 - RNA, 19 nt, Homo sapiens
  misc_RNA (1)...(19): siRNA sense strand
gaagaaguagcuaagguua

SEQ ID NO: 1315159 - RNA, 19 nt, Homo sapiens
  misc_RNA (1)...(19): siRNA sense strand
caacagaacucauggaaaa

SEQ ID NO: 1315160 - RNA, 19 nt, Homo sapiens
  misc_RNA (1)...(19): siRNA sense strand
uaacccagcucacugcuaa

SEQ ID NO: 1315161 - RNA, 19 nt, Homo sapiens
  misc_RNA (1)...(19): siRNA sense strand
gaaaugacucuucaaauca

SEQ ID NO: 1315162 - RNA, 19 nt, Homo sapiens
  misc_RNA (1)...(19): siRNA sense strand
gggcagagcuggaugagau

SEQ ID NO: 1315163 - RNA, 19 nt, Homo sapiens
  misc_RNA (1)...(19): siRNA sense strand
gaacaagaaacacaaagaa

SEQ ID NO: 1315164 - RNA, 19 nt, Homo sapiens
  misc_RNA (1)...(19): siRNA sense strand
ccagcucacugcuaauuua

SEQ ID NO: 1315165 - RNA, 19 nt, Homo sapiens
  misc_RNA (1)...(19): siRNA sense strand
cagaaaggaacuagaauua

SEQ ID NO: 1315166 - RNA, 19 nt, Homo sapiens
  misc_RNA (1)...(19): siRNA sense strand
ggaaaugggugagguuguu

SEQ ID NO: 1315167 - RNA, 19 nt, Homo sapiens
  misc_RNA (1)...(19): siRNA sense strand
acagagagcuggaagaaau

SEQ ID NO: 1315168 - RNA, 19 nt, Homo sapiens
  misc_RNA (1)...(19): siRNA sense strand
gaacauggaaaggaaauuu

SEQ ID NO: 1315169 - RNA, 19 nt, Homo sapiens
  misc_RNA (1)...(19): siRNA sense strand
agaacaagaccacuuauua

SEQ ID NO: 1315170 - RNA, 19 nt, Homo sapiens
  misc_RNA (1)...(19): siRNA sense strand
gaacaagaccacuuauuag

SEQ ID NO: 1315171 - RNA, 19 nt, Homo sapiens
  misc_RNA (1)...(19): siRNA sense strand
gacaguggaugugaaauuu

SEQ ID NO: 1315172 - RNA, 19 nt, Homo sapiens
  misc_RNA (1)...(19): siRNA sense strand
cagaauggcugaaucacaa

SEQ ID NO: 1315173 - RNA, 19 nt, Homo sapiens
  misc_RNA (1)...(19): siRNA sense strand
ggaagcagcaugagauuga

SEQ ID NO: 1315174 - RNA, 19 nt, Homo sapiens
  misc_RNA (1)...(19): siRNA sense strand
agaaaugacucuucaaauc

SEQ ID NO: 1315175 - RNA, 19 nt, Homo sapiens
  misc_RNA (1)...(19): siRNA sense strand
gaacaggaaagccuacaaa

SEQ ID NO: 1315176 - RNA, 19 nt, Homo sapiens
  misc_RNA (1)...(19): siRNA sense strand
acaagaagcugaauuagag

SEQ ID NO: 1315177 - RNA, 19 nt, Homo sapiens
  misc_RNA (1)...(19): siRNA sense strand
guagagagcuagaaaucau

SEQ ID NO: 1315178 - RNA, 19 nt, Homo sapiens
  misc_RNA (1)...(19): siRNA sense strand
gaaagaaacugaacaaaac

SEQ ID NO: 1315179 - RNA, 19 nt, Homo sapiens
  misc_RNA (1)...(19): siRNA sense strand
gaaaugaggguuaccuaug

SEQ ID NO: 1315180 - RNA, 19 nt, Homo sapiens
  misc_RNA (1)...(19): siRNA sense strand
ggaaacaaauaucguuaag

SEQ ID NO: 1315181 - RNA, 19 nt, Homo sapiens
  misc_RNA (1)...(19): siRNA sense strand
gcagauagugcaaaugaaa

SEQ ID NO: 1315182 - RNA, 19 nt, Homo sapiens
  misc_RNA (1)...(19): siRNA sense strand
caacagauccucacucauc

SEQ ID NO: 1315183 - RNA, 19 nt, Homo sapiens
  misc_RNA (1)...(19): siRNA sense strand
aggaaagccuacaaauuua

SEQ ID NO: 1315184 - RNA, 19 nt, Homo sapiens
  misc_RNA (1)...(19): siRNA sense strand
gauccagaauuacaagauu

SEQ ID NO: 1315185 - RNA, 19 nt, Homo sapiens
  misc_RNA (1)...(19): siRNA sense strand
guacuuaaaucagaacaga

SEQ ID NO: 1315186 - RNA, 19 nt, Homo sapiens
  misc_RNA (1)...(19): siRNA sense strand
gaacagauucagagagcua

SEQ ID NO: 1315187 - RNA, 19 nt, Homo sapiens
  misc_RNA (1)...(19): siRNA sense strand
ggcaauaaaugaacugaau

SEQ ID NO: 1315188 - RNA, 19 nt, Homo sapiens
  misc_RNA (1)...(19): siRNA sense strand
agaaacagcacucauagua

SEQ ID NO: 1315189 - RNA, 19 nt, Homo sapiens
  misc_RNA (1)...(19): siRNA sense strand
gaacuggaaagugaaauuu

SEQ ID NO: 1315190 - RNA, 19 nt, Homo sapiens
  misc_RNA (1)...(19): siRNA sense strand
aggcagagauccacuguuu

SEQ ID NO: 1315191 - RNA, 19 nt, Homo sapiens
  misc_RNA (1)...(19): siRNA sense strand
gcaguguccuuggugaaua

SEQ ID NO: 1315192 - RNA, 19 nt, Homo sapiens
  misc_RNA (1)...(19): siRNA sense strand
acagaaacauggugagauu

SEQ ID NO: 1315193 - RNA, 19 nt, Homo sapiens
  misc_RNA (1)...(19): siRNA sense strand
gagcuucauuugcaaagaa

SEQ ID NO: 1315194 - RNA, 19 nt, Homo sapiens
  misc_RNA (1)...(19): siRNA sense strand
aagaagagcuuuccaaacu

SEQ ID NO: 1315195 - RNA, 19 nt, Homo sapiens
  misc_RNA (1)...(19): siRNA sense strand
agaaacaggugaugaagga

SEQ ID NO: 1315196 - RNA, 19 nt, Homo sapiens
  misc_RNA (1)...(19): siRNA sense strand
gauagaugguuuacagaau

SEQ ID NO: 1315197 - RNA, 19 nt, Homo sapiens
  misc_RNA (1)...(19): siRNA sense strand
agaaguagcuaagguuauu

SEQ ID NO: 1315198 - RNA, 19 nt, Homo sapiens
  misc_RNA (1)...(19): siRNA sense strand
gaauucuggugauuacauu

SEQ ID NO: 1315199 - RNA, 19 nt, Homo sapiens
  misc_RNA (1)...(19): siRNA sense strand
gaucaaggaacuucagaaa

SEQ ID NO: 1315200 - RNA, 19 nt, Homo sapiens
  misc_RNA (1)...(19): siRNA sense strand
caaguuucauugagaugua

SEQ ID NO: 1315201 - RNA, 19 nt, Homo sapiens
  misc_RNA (1)...(19): siRNA sense strand
gcaaaagaaccaagaaaua

SEQ ID NO: 1315202 - RNA, 19 nt, Homo sapiens
  misc_RNA (1)...(19): siRNA sense strand
guaugaaacuugaauuugg

SEQ ID NO: 1315203 - RNA, 19 nt, Homo sapiens
  misc_RNA (1)...(19): siRNA sense strand
caaaguaacagaagaauac

SEQ ID NO: 1315204 - RNA, 19 nt, Homo sapiens
  misc_RNA (1)...(19): siRNA sense strand
aaauaugacuguuggagaa

SEQ ID NO: 1315205 - RNA, 19 nt, Homo sapiens
  misc_RNA (1)...(19): siRNA sense strand
ggaagaacuaggacuaauu

SEQ ID NO: 1315206 - RNA, 19 nt, Homo sapiens
  misc_RNA (1)...(19): siRNA sense strand
guuaaugaauguggcaaua

SEQ ID NO: 1315207 - RNA, 19 nt, Homo sapiens
  misc_RNA (1)...(19): siRNA sense strand
ggaagaagaauuugguguu

SEQ ID NO: 1315208 - RNA, 19 nt, Homo sapiens
  misc_RNA (1)...(19): siRNA sense strand
gauggaagcccaacgcauu

SEQ ID NO: 1315209 - RNA, 19 nt, Homo sapiens
  misc_RNA (1)...(19): siRNA sense strand
ucagagagcuagacagaca

SEQ ID NO: 1315210 - RNA, 19 nt, Homo sapiens
  misc_RNA (1)...(19): siRNA sense strand
caagaccacuuauuagaag

SEQ ID NO: 1315211 - RNA, 19 nt, Homo sapiens
  misc_RNA (1)...(19): siRNA sense strand
ugaagaacaagaccacuua

SEQ ID NO: 1315212 - RNA, 19 nt, Homo sapiens
  misc_RNA (1)...(19): siRNA sense strand
gaacaaggagcacaagaca

SEQ ID NO: 1315213 - RNA, 19 nt, Homo sapiens
  misc_RNA (1)...(19): siRNA sense strand
ugacugcaguucagaggua

SEQ ID NO: 1315214 - RNA, 19 nt, Homo sapiens
  misc_RNA (1)...(19): siRNA sense strand
caguggaugugaaauuuaa

SEQ ID NO: 1315215 - RNA, 19 nt, Homo sapiens
  misc_RNA (1)...(19): siRNA sense strand
gaaauuaucacaggaucaa

SEQ ID NO: 1315216 - RNA, 19 nt, Homo sapiens
  misc_RNA (1)...(19): siRNA sense strand
gaggaaacaaauaucguua

SEQ ID NO: 1315217 - RNA, 19 nt, Homo sapiens
  misc_RNA (1)...(19): siRNA sense strand
caacaaaguaacagaagaa

SEQ ID NO: 1315218 - RNA, 19 nt, Homo sapiens
  misc_RNA (1)...(19): siRNA sense strand
gaauaaauccaacuacagu

SEQ ID NO: 1315219 - RNA, 19 nt, Homo sapiens
  misc_RNA (1)...(19): siRNA sense strand
aaacaaagagauggcauua

SEQ ID NO: 1315220 - RNA, 19 nt, Homo sapiens
  misc_RNA (1)...(19): siRNA sense strand
caaacugaaggaagauuua

SEQ ID NO: 1315221 - RNA, 19 nt, Homo sapiens
  misc_RNA (1)...(19): siRNA sense strand
ccgccaagcuuaccuguug

SEQ ID NO: 1315222 - RNA, 19 nt, Homo sapiens
  misc_RNA (1)...(19): siRNA sense strand
gaaagaacucaauguacuu

SEQ ID NO: 1315223 - RNA, 19 nt, Homo sapiens
  misc_RNA (1)...(19): siRNA sense strand
ucagaaagaacucaaugua

SEQ ID NO: 1315224 - RNA, 19 nt, Homo sapiens
  misc_RNA (1)...(19): siRNA sense strand
gagaagaaaguaagcaaga

SEQ ID NO: 1315225 - RNA, 19 nt, Homo sapiens
  misc_RNA (1)...(19): siRNA sense strand
caagagaaagaacaaguuu

SEQ ID NO: 1315226 - RNA, 19 nt, Homo sapiens
  misc_RNA (1)...(19): siRNA sense strand
gaaaauacauacuccuguu

SEQ ID NO: 1315227 - RNA, 19 nt, Homo sapiens
  misc_RNA (1)...(19): siRNA sense strand
gaaauacucagacaagaag

SEQ ID NO: 1315228 - RNA, 19 nt, Homo sapiens
  misc_RNA (1)...(19): siRNA sense strand
gcacacucuucucaacaaa

SEQ ID NO: 1315229 - RNA, 19 nt, Homo sapiens
  misc_RNA (1)...(19): siRNA sense strand
uaaccaagcgagagaaauu

SEQ ID NO: 1315230 - RNA, 19 nt, Homo sapiens
  misc_RNA (1)...(19): siRNA sense strand
gaagcugccauuaaacaaa

SEQ ID NO: 1315231 - RNA, 19 nt, Homo sapiens
  misc_RNA (1)...(19): siRNA sense strand
ggcagugucugaagaaugu

SEQ ID NO: 1315232 - RNA, 19 nt, Homo sapiens
  misc_RNA (1)...(19): siRNA sense strand
ggaucaguuucuaaaguaa

SEQ ID NO: 1315233 - RNA, 19 nt, Homo sapiens
  misc_RNA (1)...(19): siRNA sense strand
caccaugauuugaauauug

SEQ ID NO: 1315234 - RNA, 19 nt, Homo sapiens
  misc_RNA (1)...(19): siRNA sense strand
caacaagcaagaagagaaa

SEQ ID NO: 1315235 - RNA, 19 nt, Homo sapiens
  misc_RNA (1)...(19): siRNA sense strand
caaagagauggcauuauaa

SEQ ID NO: 1315236 - RNA, 19 nt, Homo sapiens
  misc_RNA (1)...(19): siRNA sense strand
uugaagaccuuguugaaga

SEQ ID NO: 1315237 - RNA, 19 nt, Homo sapiens
  misc_RNA (1)...(19): siRNA sense strand
ucagcuaaaugaagagauu

SEQ ID NO: 1315238 - RNA, 19 nt, Homo sapiens
  misc_RNA (1)...(19): siRNA sense strand
ccaaucaccugcugcuuua

SEQ ID NO: 1315239 - RNA, 19 nt, Homo sapiens
  misc_RNA (1)...(19): siRNA sense strand
ugaagcaucuggaccaaau

SEQ ID NO: 1315240 - RNA, 19 nt, Homo sapiens
  misc_RNA (1)...(19): siRNA sense strand
gcaucuggaccaaauauuu

SEQ ID NO: 1315241 - RNA, 19 nt, Homo sapiens
  misc_RNA (1)...(19): siRNA sense strand
ggucagggauuccaugaag

SEQ ID NO: 1315242 - RNA, 19 nt, Homo sapiens
  misc_RNA (1)...(19): siRNA sense strand
gcuuuaacgugaucaauag

SEQ ID NO: 1315243 - RNA, 19 nt, Homo sapiens
  misc_RNA (1)...(19): siRNA sense strand
cuggagagcuacacaagaa

SEQ ID NO: 1315244 - RNA, 19 nt, Homo sapiens
  misc_RNA (1)...(19): siRNA sense strand
cauccaaugucccaaggaa

SEQ ID NO: 1315245 - RNA, 19 nt, Homo sapiens
  misc_RNA (1)...(19): siRNA sense strand
acacaagaaucaccaacau

SEQ ID NO: 1315246 - RNA, 19 nt, Homo sapiens
  misc_RNA (1)...(19): siRNA sense strand
gggauuccaugaagcaucu

SEQ ID NO: 1315247 - RNA, 19 nt, Homo sapiens
  misc_RNA (1)...(19): siRNA sense strand
ccaaggaagcugugaucuu

SEQ ID NO: 1315248 - RNA, 19 nt, Homo sapiens
  misc_RNA (1)...(19): siRNA sense strand
gaagcaucuggaccaaaua

SEQ ID NO: 1315249 - RNA, 19 nt, Homo sapiens
  misc_RNA (1)...(19): siRNA sense strand
gcucagccagauucaguuu

SEQ ID NO: 1315250 - RNA, 19 nt, Homo sapiens
  misc_RNA (1)...(19): siRNA sense strand
ggacuugcucagccagauu

SEQ ID NO: 1315251 - RNA, 19 nt, Homo sapiens
  misc_RNA (1)...(19): siRNA sense strand
uuaacgugaucaauaggaa

SEQ ID NO: 1315252 - RNA, 19 nt, Homo sapiens
  misc_RNA (1)...(19): siRNA sense strand
agagaugggucagggauuc

SEQ ID NO: 1315253 - RNA, 19 nt, Homo sapiens
  misc_RNA (1)...(19): siRNA sense strand
ggagagcuacacaagaauc

SEQ ID NO: 1315254 - RNA, 19 nt, Homo sapiens
  misc_RNA (1)...(19): siRNA sense strand
caucuggaccaaauauuuc

SEQ ID NO: 1315255 - RNA, 19 nt, Homo sapiens
  misc_RNA (1)...(19): siRNA sense strand
gagagcuacacaagaauca

SEQ ID NO: 1315256 - RNA, 19 nt, Homo sapiens
  misc_RNA (1)...(19): siRNA sense strand
uaacgugaucaauaggaaa

SEQ ID NO: 1315257 - RNA, 19 nt, Homo sapiens
  misc_RNA (1)...(19): siRNA sense strand
uccaaucaccugcugcuuu

SEQ ID NO: 1315258 - RNA, 19 nt, Homo sapiens
  misc_RNA (1)...(19): siRNA sense strand
gagagaugggucagggauu

SEQ ID NO: 1315259 - RNA, 19 nt, Homo sapiens
  misc_RNA (1)...(19): siRNA sense strand
gaaucaccaacauccaaug

SEQ ID NO: 1315260 - RNA, 19 nt, Homo sapiens
  misc_RNA (1)...(19): siRNA sense strand
caugaagcaucuggaccaa

SEQ ID NO: 1315261 - RNA, 19 nt, Homo sapiens
  misc_RNA (1)...(19): siRNA sense strand
gcuggagagcuacacaaga

SEQ ID NO: 1315262 - RNA, 19 nt, Homo sapiens
  misc_RNA (1)...(19): siRNA sense strand
gauucaguuuccauuccaa

SEQ ID NO: 1315263 - RNA, 19 nt, Homo sapiens
  misc_RNA (1)...(19): siRNA sense strand
ugcuuuaacgugaucaaua

SEQ ID NO: 1315264 - RNA, 19 nt, Homo sapiens
  misc_RNA (1)...(19): siRNA sense strand
cagauucaguuuccauucc

SEQ ID NO: 1315265 - RNA, 19 nt, Homo sapiens
  misc_RNA (1)...(19): siRNA sense strand
aagaaucaccaacauccaa

SEQ ID NO: 1315266 - RNA, 19 nt, Homo sapiens
  misc_RNA (1)...(19): siRNA sense strand
ucaguuuccauuccaauca

SEQ ID NO: 1315267 - RNA, 19 nt, Homo sapiens
  misc_RNA (1)...(19): siRNA sense strand
gggacuugcucagccagau

SEQ ID NO: 1315268 - RNA, 19 nt, Homo sapiens
  misc_RNA (1)...(19): siRNA sense strand
ccagauucaguuuccauuc

SEQ ID NO: 1315269 - RNA, 19 nt, Homo sapiens
  misc_RNA (1)...(19): siRNA sense strand
aaagggaacucaauuaugu

SEQ ID NO: 1315270 - RNA, 19 nt, Homo sapiens
  misc_RNA (1)...(19): siRNA sense strand
gaaggacaccaguuucuuu

SEQ ID NO: 1315271 - RNA, 19 nt, Homo sapiens
  misc_RNA (1)...(19): siRNA sense strand
gaaggcagcgcuccaagaa

SEQ ID NO: 1315272 - RNA, 19 nt, Homo sapiens
  misc_RNA (1)...(19): siRNA sense strand
ucaauuauguggccaggaa

SEQ ID NO: 1315273 - RNA, 19 nt, Homo sapiens
  misc_RNA (1)...(19): siRNA sense strand
gcauguggcuugaucaucu

SEQ ID NO: 1315274 - RNA, 19 nt, Homo sapiens
  misc_RNA (1)...(19): siRNA sense strand
ccaagaaggacaccaguuu

SEQ ID NO: 1315275 - RNA, 19 nt, Homo sapiens
  misc_RNA (1)...(19): siRNA sense strand
ucacuggacuccucccaaa

SEQ ID NO: 1315276 - RNA, 19 nt, Homo sapiens
  misc_RNA (1)...(19): siRNA sense strand
gcaggccagcugaccauua

SEQ ID NO: 1315277 - RNA, 19 nt, Homo sapiens
  misc_RNA (1)...(19): siRNA sense strand
gagagcauguggcuugauc

SEQ ID NO: 1315278 - RNA, 19 nt, Homo sapiens
  misc_RNA (1)...(19): siRNA sense strand
uggcggaggugaaggacua

SEQ ID NO: 1315279 - RNA, 19 nt, Homo sapiens
  misc_RNA (1)...(19): siRNA sense strand
caggccagcugaccauuau

SEQ ID NO: 1315280 - RNA, 19 nt, Homo sapiens
  misc_RNA (1)...(19): siRNA sense strand
ccaagaggaagcaggcaua

SEQ ID NO: 1315281 - RNA, 19 nt, Homo sapiens
  misc_RNA (1)...(19): siRNA sense strand
agaggaagcaggcauagaa

SEQ ID NO: 1315282 - RNA, 19 nt, Homo sapiens
  misc_RNA (1)...(19): siRNA sense strand
ggacaccaguuucuuugcu

SEQ ID NO: 1315283 - RNA, 19 nt, Homo sapiens
  misc_RNA (1)...(19): siRNA sense strand
gaggaugacuuggaaacag

SEQ ID NO: 1315284 - RNA, 19 nt, Homo sapiens
  misc_RNA (1)...(19): siRNA sense strand
ccaguuucuuugcuccaua

SEQ ID NO: 1315285 - RNA, 19 nt, Homo sapiens
  misc_RNA (1)...(19): siRNA sense strand
ccaguuggcucaguucaag

SEQ ID NO: 1315286 - RNA, 19 nt, Homo sapiens
  misc_RNA (1)...(19): siRNA sense strand
gagggagacccaagaggaa

SEQ ID NO: 1315287 - RNA, 19 nt, Homo sapiens
  misc_RNA (1)...(19): siRNA sense strand
ggaagcaggcauagaagca

SEQ ID NO: 1315288 - RNA, 19 nt, Homo sapiens
  misc_RNA (1)...(19): siRNA sense strand
ucaaaagggaacucaauua

SEQ ID NO: 1315289 - RNA, 19 nt, Homo sapiens
  misc_RNA (1)...(19): siRNA sense strand
caagaaggacaccaguuuc

SEQ ID NO: 1315290 - RNA, 19 nt, Homo sapiens
  misc_RNA (1)...(19): siRNA sense strand
aggagaggaugacuuggaa

SEQ ID NO: 1315291 - RNA, 19 nt, Homo sapiens
  misc_RNA (1)...(19): siRNA sense strand
ggaacaagccuaaaacagu

SEQ ID NO: 1315292 - RNA, 19 nt, Homo sapiens
  misc_RNA (1)...(19): siRNA sense strand
caaaagggaacucaauuau

SEQ ID NO: 1315293 - RNA, 19 nt, Homo sapiens
  misc_RNA (1)...(19): siRNA sense strand
ggccagcugaccauuauug

SEQ ID NO: 1315294 - RNA, 19 nt, Homo sapiens
  misc_RNA (1)...(19): siRNA sense strand
caaaggccauguggaacca

SEQ ID NO: 1315295 - RNA, 19 nt, Homo sapiens
  misc_RNA (1)...(19): siRNA sense strand
caaaguggacaacaaugca

SEQ ID NO: 1315296 - RNA, 19 nt, Homo sapiens
  misc_RNA (1)...(19): siRNA sense strand
uuccgaagaugccucauuc

SEQ ID NO: 1315297 - RNA, 19 nt, Homo sapiens
  misc_RNA (1)...(19): siRNA sense strand
caggagaggaugacuugga

SEQ ID NO: 1315298 - RNA, 19 nt, Homo sapiens
  misc_RNA (1)...(19): siRNA sense strand
ucccaaaggccauguggaa

SEQ ID NO: 1315299 - RNA, 19 nt, Homo sapiens
  misc_RNA (1)...(19): siRNA sense strand
gaugaaggcagcgcuccaa

SEQ ID NO: 1315300 - RNA, 19 nt, Homo sapiens
  misc_RNA (1)...(19): siRNA sense strand
ggagaggaugacuuggaaa

SEQ ID NO: 1315301 - RNA, 19 nt, Homo sapiens
  misc_RNA (1)...(19): siRNA sense strand
gagaggaugacuuggaaac

SEQ ID NO: 1315302 - RNA, 19 nt, Homo sapiens
  misc_RNA (1)...(19): siRNA sense strand
ggacuaugacguggagauc

SEQ ID NO: 1315303 - RNA, 19 nt, Homo sapiens
  misc_RNA (1)...(19): siRNA sense strand
ugaaggcagcgcuccaaga

SEQ ID NO: 1315304 - RNA, 19 nt, Homo sapiens
  misc_RNA (1)...(19): siRNA sense strand
gagcauguggcuugaucau

SEQ ID NO: 1315305 - RNA, 19 nt, Homo sapiens
  misc_RNA (1)...(19): siRNA sense strand
cauguggcuugaucaucuu

SEQ ID NO: 1315306 - RNA, 19 nt, Homo sapiens
  misc_RNA (1)...(19): siRNA sense strand
ccaaaguggacaacaaugc

SEQ ID NO: 1315307 - RNA, 19 nt, Homo sapiens
  misc_RNA (1)...(19): siRNA sense strand
gaggaagcaggcauagaag

SEQ ID NO: 1315308 - RNA, 19 nt, Homo sapiens
  misc_RNA (1)...(19): siRNA sense strand
uggcucaguucaaggagau

SEQ ID NO: 1315309 - RNA, 19 nt, Homo sapiens
  misc_RNA (1)...(19): siRNA sense strand
aaagggaacucaauuaugu

SEQ ID NO: 1315310 - RNA, 19 nt, Homo sapiens
  misc_RNA (1)...(19): siRNA sense strand
gaaggacaccaguuucuuu

SEQ ID NO: 1315311 - RNA, 19 nt, Homo sapiens
  misc_RNA (1)...(19): siRNA sense strand
gaaggcagcgcuccaagaa

SEQ ID NO: 1315312 - RNA, 19 nt, Homo sapiens
  misc_RNA (1)...(19): siRNA sense strand
ucaauuauguggccaggaa

SEQ ID NO: 1315313 - RNA, 19 nt, Homo sapiens
  misc_RNA (1)...(19): siRNA sense strand
gcauguggcuugaucaucu

SEQ ID NO: 1315314 - RNA, 19 nt, Homo sapiens
  misc_RNA (1)...(19): siRNA sense strand
ccaagaaggacaccaguuu

SEQ ID NO: 1315315 - RNA, 19 nt, Homo sapiens
  misc_RNA (1)...(19): siRNA sense strand
ucacuggacuccucccaaa

SEQ ID NO: 1315316 - RNA, 19 nt, Homo sapiens
  misc_RNA (1)...(19): siRNA sense strand
gcaggccagcugaccauua

SEQ ID NO: 1315317 - RNA, 19 nt, Homo sapiens
  misc_RNA (1)...(19): siRNA sense strand
gagagcauguggcuugauc

SEQ ID NO: 1315318 - RNA, 19 nt, Homo sapiens
  misc_RNA (1)...(19): siRNA sense strand
uggcggaggugaaggacua

SEQ ID NO: 1315319 - RNA, 19 nt, Homo sapiens
  misc_RNA (1)...(19): siRNA sense strand
caggccagcugaccauuau

SEQ ID NO: 1315320 - RNA, 19 nt, Homo sapiens
  misc_RNA (1)...(19): siRNA sense strand
ccaagaggaagcaggcaua

SEQ ID NO: 1315321 - RNA, 19 nt, Homo sapiens
  misc_RNA (1)...(19): siRNA sense strand
agaggaagcaggcauagaa

SEQ ID NO: 1315322 - RNA, 19 nt, Homo sapiens
  misc_RNA (1)...(19): siRNA sense strand
ggacaccaguuucuuugcu

SEQ ID NO: 1315323 - RNA, 19 nt, Homo sapiens
  misc_RNA (1)...(19): siRNA sense strand
gaggaugacuuggaaacag

SEQ ID NO: 1315324 - RNA, 19 nt, Homo sapiens
  misc_RNA (1)...(19): siRNA sense strand
ccaguuucuuugcuccaua

SEQ ID NO: 1315325 - RNA, 19 nt, Homo sapiens
  misc_RNA (1)...(19): siRNA sense strand
ccaguuggcucaguucaag

SEQ ID NO: 1315326 - RNA, 19 nt, Homo sapiens
  misc_RNA (1)...(19): siRNA sense strand
gagggagacccaagaggaa

SEQ ID NO: 1315327 - RNA, 19 nt, Homo sapiens
  misc_RNA (1)...(19): siRNA sense strand
ggaagcaggcauagaagca

SEQ ID NO: 1315328 - RNA, 19 nt, Homo sapiens
  misc_RNA (1)...(19): siRNA sense strand
ucaaaagggaacucaauua

SEQ ID NO: 1315329 - RNA, 19 nt, Homo sapiens
  misc_RNA (1)...(19): siRNA sense strand
caagaaggacaccaguuuc

SEQ ID NO: 1315330 - RNA, 19 nt, Homo sapiens
  misc_RNA (1)...(19): siRNA sense strand
aggagaggaugacuuggaa

SEQ ID NO: 1315331 - RNA, 19 nt, Homo sapiens
  misc_RNA (1)...(19): siRNA sense strand
ggaacaagccuaaaacagu

SEQ ID NO: 1315332 - RNA, 19 nt, Homo sapiens
  misc_RNA (1)...(19): siRNA sense strand
caaaagggaacucaauuau

SEQ ID NO: 1315333 - RNA, 19 nt, Homo sapiens
  misc_RNA (1)...(19): siRNA sense strand
ggccagcugaccauuauug

SEQ ID NO: 1315334 - RNA, 19 nt, Homo sapiens
  misc_RNA (1)...(19): siRNA sense strand
caaaggccauguggaacca

SEQ ID NO: 1315335 - RNA, 19 nt, Homo sapiens
  misc_RNA (1)...(19): siRNA sense strand
caaaguggacaacaaugca

SEQ ID NO: 1315336 - RNA, 19 nt, Homo sapiens
  misc_RNA (1)...(19): siRNA sense strand
uuccgaagaugccucauuc

SEQ ID NO: 1315337 - RNA, 19 nt, Homo sapiens
  misc_RNA (1)...(19): siRNA sense strand
caggagaggaugacuugga

SEQ ID NO: 1315338 - RNA, 19 nt, Homo sapiens
  misc_RNA (1)...(19): siRNA sense strand
ucccaaaggccauguggaa

SEQ ID NO: 1315339 - RNA, 19 nt, Homo sapiens
  misc_RNA (1)...(19): siRNA sense strand
gaugaaggcagcgcuccaa

SEQ ID NO: 1315340 - RNA, 19 nt, Homo sapiens
  misc_RNA (1)...(19): siRNA sense strand
ggagaggaugacuuggaaa

SEQ ID NO: 1315341 - RNA, 19 nt, Homo sapiens
  misc_RNA (1)...(19): siRNA sense strand
gagaggaugacuuggaaac

SEQ ID NO: 1315342 - RNA, 19 nt, Homo sapiens
  misc_RNA (1)...(19): siRNA sense strand
ggacuaugacguggagauc

SEQ ID NO: 1315343 - RNA, 19 nt, Homo sapiens
  misc_RNA (1)...(19): siRNA sense strand
ugaaggcagcgcuccaaga

SEQ ID NO: 1315344 - RNA, 19 nt, Homo sapiens
  misc_RNA (1)...(19): siRNA sense strand
gagcauguggcuugaucau

SEQ ID NO: 1315345 - RNA, 19 nt, Homo sapiens
  misc_RNA (1)...(19): siRNA sense strand
cauguggcuugaucaucuu

SEQ ID NO: 1315346 - RNA, 19 nt, Homo sapiens
  misc_RNA (1)...(19): siRNA sense strand
ccaaaguggacaacaaugc

SEQ ID NO: 1315347 - RNA, 19 nt, Homo sapiens
  misc_RNA (1)...(19): siRNA sense strand
gaggaagcaggcauagaag

SEQ ID NO: 1315348 - RNA, 19 nt, Homo sapiens
  misc_RNA (1)...(19): siRNA sense strand
uggcucaguucaaggagau

SEQ ID NO: 1315349 - RNA, 19 nt, Homo sapiens
  misc_RNA (1)...(19): siRNA sense strand
aaagggaacucaauuaugu

SEQ ID NO: 1315350 - RNA, 19 nt, Homo sapiens
  misc_RNA (1)...(19): siRNA sense strand
gaaggacaccaguuucuuu

SEQ ID NO: 1315351 - RNA, 19 nt, Homo sapiens
  misc_RNA (1)...(19): siRNA sense strand
gaaggcagcgcuccaagaa

SEQ ID NO: 1315352 - RNA, 19 nt, Homo sapiens
  misc_RNA (1)...(19): siRNA sense strand
ucaauuauguggccaggaa

SEQ ID NO: 1315353 - RNA, 19 nt, Homo sapiens
  misc_RNA (1)...(19): siRNA sense strand
gcauguggcuugaucaucu

SEQ ID NO: 1315354 - RNA, 19 nt, Homo sapiens
  misc_RNA (1)...(19): siRNA sense strand
ccaagaaggacaccaguuu

SEQ ID NO: 1315355 - RNA, 19 nt, Homo sapiens
  misc_RNA (1)...(19): siRNA sense strand
ucacuggacuccucccaaa

SEQ ID NO: 1315356 - RNA, 19 nt, Homo sapiens
  misc_RNA (1)...(19): siRNA sense strand
gcaggccagcugaccauua

SEQ ID NO: 1315357 - RNA, 19 nt, Homo sapiens
  misc_RNA (1)...(19): siRNA sense strand
gagagcauguggcuugauc

SEQ ID NO: 1315358 - RNA, 19 nt, Homo sapiens
  misc_RNA (1)...(19): siRNA sense strand
uggcggaggugaaggacua

SEQ ID NO: 1315359 - RNA, 19 nt, Homo sapiens
  misc_RNA (1)...(19): siRNA sense strand
caggccagcugaccauuau

SEQ ID NO: 1315360 - RNA, 19 nt, Homo sapiens
  misc_RNA (1)...(19): siRNA sense strand
ccaagaggaagcaggcaua

SEQ ID NO: 1315361 - RNA, 19 nt, Homo sapiens
  misc_RNA (1)...(19): siRNA sense strand
agaggaagcaggcauagaa

SEQ ID NO: 1315362 - RNA, 19 nt, Homo sapiens
  misc_RNA (1)...(19): siRNA sense strand
ggacaccaguuucuuugcu

SEQ ID NO: 1315363 - RNA, 19 nt, Homo sapiens
  misc_RNA (1)...(19): siRNA sense strand
gaggaugacuuggaaacag

SEQ ID NO: 1315364 - RNA, 19 nt, Homo sapiens
  misc_RNA (1)...(19): siRNA sense strand
ccaguuucuuugcuccaua

SEQ ID NO: 1315365 - RNA, 19 nt, Homo sapiens
  misc_RNA (1)...(19): siRNA sense strand
ccaguuggcucaguucaag

SEQ ID NO: 1315366 - RNA, 19 nt, Homo sapiens
  misc_RNA (1)...(19): siRNA sense strand
gagggagacccaagaggaa

SEQ ID NO: 1315367 - RNA, 19 nt, Homo sapiens
  misc_RNA (1)...(19): siRNA sense strand
ggaagcaggcauagaagca

SEQ ID NO: 1315368 - RNA, 19 nt, Homo sapiens
  misc_RNA (1)...(19): siRNA sense strand
ucaaaagggaacucaauua

SEQ ID NO: 1315369 - RNA, 19 nt, Homo sapiens
  misc_RNA (1)...(19): siRNA sense strand
caagaaggacaccaguuuc

SEQ ID NO: 1315370 - RNA, 19 nt, Homo sapiens
  misc_RNA (1)...(19): siRNA sense strand
aggagaggaugacuuggaa

SEQ ID NO: 1315371 - RNA, 19 nt, Homo sapiens
  misc_RNA (1)...(19): siRNA sense strand
ggaacaagccuaaaacagu

SEQ ID NO: 1315372 - RNA, 19 nt, Homo sapiens
  misc_RNA (1)...(19): siRNA sense strand
caaaagggaacucaauuau

SEQ ID NO: 1315373 - RNA, 19 nt, Homo sapiens
  misc_RNA (1)...(19): siRNA sense strand
ggccagcugaccauuauug

SEQ ID NO: 1315374 - RNA, 19 nt, Homo sapiens
  misc_RNA (1)...(19): siRNA sense strand
caaaggccauguggaacca

SEQ ID NO: 1315375 - RNA, 19 nt, Homo sapiens
  misc_RNA (1)...(19): siRNA sense strand
caaaguggacaacaaugca

SEQ ID NO: 1315376 - RNA, 19 nt, Homo sapiens
  misc_RNA (1)...(19): siRNA sense strand
uuccgaagaugccucauuc

SEQ ID NO: 1315377 - RNA, 19 nt, Homo sapiens
  misc_RNA (1)...(19): siRNA sense strand
caggagaggaugacuugga

SEQ ID NO: 1315378 - RNA, 19 nt, Homo sapiens
  misc_RNA (1)...(19): siRNA sense strand
ucccaaaggccauguggaa

SEQ ID NO: 1315379 - RNA, 19 nt, Homo sapiens
  misc_RNA (1)...(19): siRNA sense strand
gaugaaggcagcgcuccaa

SEQ ID NO: 1315380 - RNA, 19 nt, Homo sapiens
  misc_RNA (1)...(19): siRNA sense strand
ggagaggaugacuuggaaa

SEQ ID NO: 1315381 - RNA, 19 nt, Homo sapiens
  misc_RNA (1)...(19): siRNA sense strand
gagaggaugacuuggaaac

SEQ ID NO: 1315382 - RNA, 19 nt, Homo sapiens
  misc_RNA (1)...(19): siRNA sense strand
ggacuaugacguggagauc

SEQ ID NO: 1315383 - RNA, 19 nt, Homo sapiens
  misc_RNA (1)...(19): siRNA sense strand
ugaaggcagcgcuccaaga

SEQ ID NO: 1315384 - RNA, 19 nt, Homo sapiens
  misc_RNA (1)...(19): siRNA sense strand
gagcauguggcuugaucau

SEQ ID NO: 1315385 - RNA, 19 nt, Homo sapiens
  misc_RNA (1)...(19): siRNA sense strand
cauguggcuugaucaucuu

SEQ ID NO: 1315386 - RNA, 19 nt, Homo sapiens
  misc_RNA (1)...(19): siRNA sense strand
ccaaaguggacaacaaugc

SEQ ID NO: 1315387 - RNA, 19 nt, Homo sapiens
  misc_RNA (1)...(19): siRNA sense strand
gaggaagcaggcauagaag

SEQ ID NO: 1315388 - RNA, 19 nt, Homo sapiens
  misc_RNA (1)...(19): siRNA sense strand
uggcucaguucaaggagau

SEQ ID NO: 1315389 - RNA, 19 nt, Homo sapiens
  misc_RNA (1)...(19): siRNA sense strand
aaagggaacucaauuaugu

SEQ ID NO: 1315390 - RNA, 19 nt, Homo sapiens
  misc_RNA (1)...(19): siRNA sense strand
gaaggacaccaguuucuuu

SEQ ID NO: 1315391 - RNA, 19 nt, Homo sapiens
  misc_RNA (1)...(19): siRNA sense strand
gaaggcagcgcuccaagaa

SEQ ID NO: 1315392 - RNA, 19 nt, Homo sapiens
  misc_RNA (1)...(19): siRNA sense strand
ucaauuauguggccaggaa

SEQ ID NO: 1315393 - RNA, 19 nt, Homo sapiens
  misc_RNA (1)...(19): siRNA sense strand
gcauguggcuugaucaucu

SEQ ID NO: 1315394 - RNA, 19 nt, Homo sapiens
  misc_RNA (1)...(19): siRNA sense strand
ccaagaaggacaccaguuu

SEQ ID NO: 1315395 - RNA, 19 nt, Homo sapiens
  misc_RNA (1)...(19): siRNA sense strand
ucacuggacuccucccaaa

SEQ ID NO: 1315396 - RNA, 19 nt, Homo sapiens
  misc_RNA (1)...(19): siRNA sense strand
gcaggccagcugaccauua

SEQ ID NO: 1315397 - RNA, 19 nt, Homo sapiens
  misc_RNA (1)...(19): siRNA sense strand
gagagcauguggcuugauc

SEQ ID NO: 1315398 - RNA, 19 nt, Homo sapiens
  misc_RNA (1)...(19): siRNA sense strand
uggcggaggugaaggacua

SEQ ID NO: 1315399 - RNA, 19 nt, Homo sapiens
  misc_RNA (1)...(19): siRNA sense strand
caggccagcugaccauuau

SEQ ID NO: 1315400 - RNA, 19 nt, Homo sapiens
  misc_RNA (1)...(19): siRNA sense strand
ccaagaggaagcaggcaua

SEQ ID NO: 1315401 - RNA, 19 nt, Homo sapiens
  misc_RNA (1)...(19): siRNA sense strand
agaggaagcaggcauagaa

SEQ ID NO: 1315402 - RNA, 19 nt, Homo sapiens
  misc_RNA (1)...(19): siRNA sense strand
ggacaccaguuucuuugcu

SEQ ID NO: 1315403 - RNA, 19 nt, Homo sapiens
  misc_RNA (1)...(19): siRNA sense strand
gaggaugacuuggaaacag

SEQ ID NO: 1315404 - RNA, 19 nt, Homo sapiens
  misc_RNA (1)...(19): siRNA sense strand
ccaguuucuuugcuccaua

SEQ ID NO: 1315405 - RNA, 19 nt, Homo sapiens
  misc_RNA (1)...(19): siRNA sense strand
ccaguuggcucaguucaag

SEQ ID NO: 1315406 - RNA, 19 nt, Homo sapiens
  misc_RNA (1)...(19): siRNA sense strand
gagggagacccaagaggaa

SEQ ID NO: 1315407 - RNA, 19 nt, Homo sapiens
  misc_RNA (1)...(19): siRNA sense strand
ggaagcaggcauagaagca

SEQ ID NO: 1315408 - RNA, 19 nt, Homo sapiens
  misc_RNA (1)...(19): siRNA sense strand
ucaaaagggaacucaauua

SEQ ID NO: 1315409 - RNA, 19 nt, Homo sapiens
  misc_RNA (1)...(19): siRNA sense strand
caagaaggacaccaguuuc

SEQ ID NO: 1315410 - RNA, 19 nt, Homo sapiens
  misc_RNA (1)...(19): siRNA sense strand
aggagaggaugacuuggaa

SEQ ID NO: 1315411 - RNA, 19 nt, Homo sapiens
  misc_RNA (1)...(19): siRNA sense strand
ggaacaagccuaaaacagu

SEQ ID NO: 1315412 - RNA, 19 nt, Homo sapiens
  misc_RNA (1)...(19): siRNA sense strand
caaaagggaacucaauuau

SEQ ID NO: 1315413 - RNA, 19 nt, Homo sapiens
  misc_RNA (1)...(19): siRNA sense strand
ggccagcugaccauuauug

SEQ ID NO: 1315414 - RNA, 19 nt, Homo sapiens
  misc_RNA (1)...(19): siRNA sense strand
caaaggccauguggaacca

SEQ ID NO: 1315415 - RNA, 19 nt, Homo sapiens
  misc_RNA (1)...(19): siRNA sense strand
caaaguggacaacaaugca

SEQ ID NO: 1315416 - RNA, 19 nt, Homo sapiens
  misc_RNA (1)...(19): siRNA sense strand
uuccgaagaugccucauuc

SEQ ID NO: 1315417 - RNA, 19 nt, Homo sapiens
  misc_RNA (1)...(19): siRNA sense strand
caggagaggaugacuugga

SEQ ID NO: 1315418 - RNA, 19 nt, Homo sapiens
  misc_RNA (1)...(19): siRNA sense strand
ucccaaaggccauguggaa

SEQ ID NO: 1315419 - RNA, 19 nt, Homo sapiens
  misc_RNA (1)...(19): siRNA sense strand
gaugaaggcagcgcuccaa

SEQ ID NO: 1315420 - RNA, 19 nt, Homo sapiens
  misc_RNA (1)...(19): siRNA sense strand
ggagaggaugacuuggaaa

SEQ ID NO: 1315421 - RNA, 19 nt, Homo sapiens
  misc_RNA (1)...(19): siRNA sense strand
gagaggaugacuuggaaac

SEQ ID NO: 1315422 - RNA, 19 nt, Homo sapiens
  misc_RNA (1)...(19): siRNA sense strand
ggacuaugacguggagauc

SEQ ID NO: 1315423 - RNA, 19 nt, Homo sapiens
  misc_RNA (1)...(19): siRNA sense strand
ugaaggcagcgcuccaaga

SEQ ID NO: 1315424 - RNA, 19 nt, Homo sapiens
  misc_RNA (1)...(19): siRNA sense strand
gagcauguggcuugaucau

SEQ ID NO: 1315425 - RNA, 19 nt, Homo sapiens
  misc_RNA (1)...(19): siRNA sense strand
cauguggcuugaucaucuu

SEQ ID NO: 1315426 - RNA, 19 nt, Homo sapiens
  misc_RNA (1)...(19): siRNA sense strand
ccaaaguggacaacaaugc

SEQ ID NO: 1315427 - RNA, 19 nt, Homo sapiens
  misc_RNA (1)...(19): siRNA sense strand
gaggaagcaggcauagaag

SEQ ID NO: 1315428 - RNA, 19 nt, Homo sapiens
  misc_RNA (1)...(19): siRNA sense strand
uggcucaguucaaggagau

SEQ ID NO: 1315429 - RNA, 19 nt, Homo sapiens
  misc_RNA (1)...(19): siRNA sense strand
aaagggaacucaauuaugu

SEQ ID NO: 1315430 - RNA, 19 nt, Homo sapiens
  misc_RNA (1)...(19): siRNA sense strand
gaaggacaccaguuucuuu

SEQ ID NO: 1315431 - RNA, 19 nt, Homo sapiens
  misc_RNA (1)...(19): siRNA sense strand
gaaggcagcgcuccaagaa

SEQ ID NO: 1315432 - RNA, 19 nt, Homo sapiens
  misc_RNA (1)...(19): siRNA sense strand
ucaauuauguggccaggaa

SEQ ID NO: 1315433 - RNA, 19 nt, Homo sapiens
  misc_RNA (1)...(19): siRNA sense strand
gcauguggcuugaucaucu

SEQ ID NO: 1315434 - RNA, 19 nt, Homo sapiens
  misc_RNA (1)...(19): siRNA sense strand
ccaagaaggacaccaguuu

SEQ ID NO: 1315435 - RNA, 19 nt, Homo sapiens
  misc_RNA (1)...(19): siRNA sense strand
ucacuggacuccucccaaa

SEQ ID NO: 1315436 - RNA, 19 nt, Homo sapiens
  misc_RNA (1)...(19): siRNA sense strand
gcaggccagcugaccauua

SEQ ID NO: 1315437 - RNA, 19 nt, Homo sapiens
  misc_RNA (1)...(19): siRNA sense strand
gagagcauguggcuugauc

SEQ ID NO: 1315438 - RNA, 19 nt, Homo sapiens
  misc_RNA (1)...(19): siRNA sense strand
uggcggaggugaaggacua

SEQ ID NO: 1315439 - RNA, 19 nt, Homo sapiens
  misc_RNA (1)...(19): siRNA sense strand
caggccagcugaccauuau

SEQ ID NO: 1315440 - RNA, 19 nt, Homo sapiens
  misc_RNA (1)...(19): siRNA sense strand
ccaagaggaagcaggcaua

SEQ ID NO: 1315441 - RNA, 19 nt, Homo sapiens
  misc_RNA (1)...(19): siRNA sense strand
agaggaagcaggcauagaa

SEQ ID NO: 1315442 - RNA, 19 nt, Homo sapiens
  misc_RNA (1)...(19): siRNA sense strand
ggacaccaguuucuuugcu

SEQ ID NO: 1315443 - RNA, 19 nt, Homo sapiens
  misc_RNA (1)...(19): siRNA sense strand
gaggaugacuuggaaacag

SEQ ID NO: 1315444 - RNA, 19 nt, Homo sapiens
  misc_RNA (1)...(19): siRNA sense strand
ccaguuucuuugcuccaua

SEQ ID NO: 1315445 - RNA, 19 nt, Homo sapiens
  misc_RNA (1)...(19): siRNA sense strand
ccaguuggcucaguucaag

SEQ ID NO: 1315446 - RNA, 19 nt, Homo sapiens
  misc_RNA (1)...(19): siRNA sense strand
gagggagacccaagaggaa

SEQ ID NO: 1315447 - RNA, 19 nt, Homo sapiens
  misc_RNA (1)...(19): siRNA sense strand
ggaagcaggcauagaagca

SEQ ID NO: 1315448 - RNA, 19 nt, Homo sapiens
  misc_RNA (1)...(19): siRNA sense strand
ucaaaagggaacucaauua

SEQ ID NO: 1315449 - RNA, 19 nt, Homo sapiens
  misc_RNA (1)...(19): siRNA sense strand
caagaaggacaccaguuuc

SEQ ID NO: 1315450 - RNA, 19 nt, Homo sapiens
  misc_RNA (1)...(19): siRNA sense strand
aggagaggaugacuuggaa

SEQ ID NO: 1315451 - RNA, 19 nt, Homo sapiens
  misc_RNA (1)...(19): siRNA sense strand
ggaacaagccuaaaacagu

SEQ ID NO: 1315452 - RNA, 19 nt, Homo sapiens
  misc_RNA (1)...(19): siRNA sense strand
caaaagggaacucaauuau

SEQ ID NO: 1315453 - RNA, 19 nt, Homo sapiens
  misc_RNA (1)...(19): siRNA sense strand
ggccagcugaccauuauug

SEQ ID NO: 1315454 - RNA, 19 nt, Homo sapiens
  misc_RNA (1)...(19): siRNA sense strand
caaaggccauguggaacca

SEQ ID NO: 1315455 - RNA, 19 nt, Homo sapiens
  misc_RNA (1)...(19): siRNA sense strand
caaaguggacaacaaugca

SEQ ID NO: 1315456 - RNA, 19 nt, Homo sapiens
  misc_RNA (1)...(19): siRNA sense strand
uuccgaagaugccucauuc

SEQ ID NO: 1315457 - RNA, 19 nt, Homo sapiens
  misc_RNA (1)...(19): siRNA sense strand
caggagaggaugacuugga

SEQ ID NO: 1315458 - RNA, 19 nt, Homo sapiens
  misc_RNA (1)...(19): siRNA sense strand
ucccaaaggccauguggaa

SEQ ID NO: 1315459 - RNA, 19 nt, Homo sapiens
  misc_RNA (1)...(19): siRNA sense strand
gaugaaggcagcgcuccaa

SEQ ID NO: 1315460 - RNA, 19 nt, Homo sapiens
  misc_RNA (1)...(19): siRNA sense strand
ggagaggaugacuuggaaa

SEQ ID NO: 1315461 - RNA, 19 nt, Homo sapiens
  misc_RNA (1)...(19): siRNA sense strand
gagaggaugacuuggaaac

SEQ ID NO: 1315462 - RNA, 19 nt, Homo sapiens
  misc_RNA (1)...(19): siRNA sense strand
ggacuaugacguggagauc

SEQ ID NO: 1315463 - RNA, 19 nt, Homo sapiens
  misc_RNA (1)...(19): siRNA sense strand
ugaaggcagcgcuccaaga

SEQ ID NO: 1315464 - RNA, 19 nt, Homo sapiens
  misc_RNA (1)...(19): siRNA sense strand
gagcauguggcuugaucau

SEQ ID NO: 1315465 - RNA, 19 nt, Homo sapiens
  misc_RNA (1)...(19): siRNA sense strand
cauguggcuugaucaucuu

SEQ ID NO: 1315466 - RNA, 19 nt, Homo sapiens
  misc_RNA (1)...(19): siRNA sense strand
ccaaaguggacaacaaugc

SEQ ID NO: 1315467 - RNA, 19 nt, Homo sapiens
  misc_RNA (1)...(19): siRNA sense strand
gaggaagcaggcauagaag

SEQ ID NO: 1315468 - RNA, 19 nt, Homo sapiens
  misc_RNA (1)...(19): siRNA sense strand
uggcucaguucaaggagau

SEQ ID NO: 1315469 - RNA, 19 nt, Homo sapiens
  misc_RNA (1)...(19): siRNA sense strand
aaagggaacucaauuaugu

SEQ ID NO: 1315470 - RNA, 19 nt, Homo sapiens
  misc_RNA (1)...(19): siRNA sense strand
gaaggacaccaguuucuuu

SEQ ID NO: 1315471 - RNA, 19 nt, Homo sapiens
  misc_RNA (1)...(19): siRNA sense strand
gaaggcagcgcuccaagaa

SEQ ID NO: 1315472 - RNA, 19 nt, Homo sapiens
  misc_RNA (1)...(19): siRNA sense strand
ucaauuauguggccaggaa

SEQ ID NO: 1315473 - RNA, 19 nt, Homo sapiens
  misc_RNA (1)...(19): siRNA sense strand
gcauguggcuugaucaucu

SEQ ID NO: 1315474 - RNA, 19 nt, Homo sapiens
  misc_RNA (1)...(19): siRNA sense strand
ccaagaaggacaccaguuu

SEQ ID NO: 1315475 - RNA, 19 nt, Homo sapiens
  misc_RNA (1)...(19): siRNA sense strand
ucacuggacuccucccaaa

SEQ ID NO: 1315476 - RNA, 19 nt, Homo sapiens
  misc_RNA (1)...(19): siRNA sense strand
gcaggccagcugaccauua

SEQ ID NO: 1315477 - RNA, 19 nt, Homo sapiens
  misc_RNA (1)...(19): siRNA sense strand
gagagcauguggcuugauc

SEQ ID NO: 1315478 - RNA, 19 nt, Homo sapiens
  misc_RNA (1)...(19): siRNA sense strand
uggcggaggugaaggacua

SEQ ID NO: 1315479 - RNA, 19 nt, Homo sapiens
  misc_RNA (1)...(19): siRNA sense strand
caggccagcugaccauuau

SEQ ID NO: 1315480 - RNA, 19 nt, Homo sapiens
  misc_RNA (1)...(19): siRNA sense strand
ccaagaggaagcaggcaua

SEQ ID NO: 1315481 - RNA, 19 nt, Homo sapiens
  misc_RNA (1)...(19): siRNA sense strand
agaggaagcaggcauagaa

SEQ ID NO: 1315482 - RNA, 19 nt, Homo sapiens
  misc_RNA (1)...(19): siRNA sense strand
ggacaccaguuucuuugcu

SEQ ID NO: 1315483 - RNA, 19 nt, Homo sapiens
  misc_RNA (1)...(19): siRNA sense strand
gaggaugacuuggaaacag

SEQ ID NO: 1315484 - RNA, 19 nt, Homo sapiens
  misc_RNA (1)...(19): siRNA sense strand
ccaguuucuuugcuccaua

SEQ ID NO: 1315485 - RNA, 19 nt, Homo sapiens
  misc_RNA (1)...(19): siRNA sense strand
ccaguuggcucaguucaag

SEQ ID NO: 1315486 - RNA, 19 nt, Homo sapiens
  misc_RNA (1)...(19): siRNA sense strand
gagggagacccaagaggaa

SEQ ID NO: 1315487 - RNA, 19 nt, Homo sapiens
  misc_RNA (1)...(19): siRNA sense strand
ggaagcaggcauagaagca

SEQ ID NO: 1315488 - RNA, 19 nt, Homo sapiens
  misc_RNA (1)...(19): siRNA sense strand
ucaaaagggaacucaauua

SEQ ID NO: 1315489 - RNA, 19 nt, Homo sapiens
  misc_RNA (1)...(19): siRNA sense strand
caagaaggacaccaguuuc

SEQ ID NO: 1315490 - RNA, 19 nt, Homo sapiens
  misc_RNA (1)...(19): siRNA sense strand
aggagaggaugacuuggaa

SEQ ID NO: 1315491 - RNA, 19 nt, Homo sapiens
  misc_RNA (1)...(19): siRNA sense strand
ggaacaagccuaaaacagu

SEQ ID NO: 1315492 - RNA, 19 nt, Homo sapiens
  misc_RNA (1)...(19): siRNA sense strand
caaaagggaacucaauuau

SEQ ID NO: 1315493 - RNA, 19 nt, Homo sapiens
  misc_RNA (1)...(19): siRNA sense strand
ggccagcugaccauuauug

SEQ ID NO: 1315494 - RNA, 19 nt, Homo sapiens
  misc_RNA (1)...(19): siRNA sense strand
caaaggccauguggaacca

SEQ ID NO: 1315495 - RNA, 19 nt, Homo sapiens
  misc_RNA (1)...(19): siRNA sense strand
caaaguggacaacaaugca

SEQ ID NO: 1315496 - RNA, 19 nt, Homo sapiens
  misc_RNA (1)...(19): siRNA sense strand
uuccgaagaugccucauuc

SEQ ID NO: 1315497 - RNA, 19 nt, Homo sapiens
  misc_RNA (1)...(19): siRNA sense strand
caggagaggaugacuugga

SEQ ID NO: 1315498 - RNA, 19 nt, Homo sapiens
  misc_RNA (1)...(19): siRNA sense strand
ucccaaaggccauguggaa

SEQ ID NO: 1315499 - RNA, 19 nt, Homo sapiens
  misc_RNA (1)...(19): siRNA sense strand
gaugaaggcagcgcuccaa

SEQ ID NO: 1315500 - RNA, 19 nt, Homo sapiens
  misc_RNA (1)...(19): siRNA sense strand
ggagaggaugacuuggaaa

SEQ ID NO: 1315501 - RNA, 19 nt, Homo sapiens
  misc_RNA (1)...(19): siRNA sense strand
gagaggaugacuuggaaac

SEQ ID NO: 1315502 - RNA, 19 nt, Homo sapiens
  misc_RNA (1)...(19): siRNA sense strand
ggacuaugacguggagauc

SEQ ID NO: 1315503 - RNA, 19 nt, Homo sapiens
  misc_RNA (1)...(19): siRNA sense strand
ugaaggcagcgcuccaaga

SEQ ID NO: 1315504 - RNA, 19 nt, Homo sapiens
  misc_RNA (1)...(19): siRNA sense strand
gagcauguggcuugaucau

SEQ ID NO: 1315505 - RNA, 19 nt, Homo sapiens
  misc_RNA (1)...(19): siRNA sense strand
cauguggcuugaucaucuu

SEQ ID NO: 1315506 - RNA, 19 nt, Homo sapiens
  misc_RNA (1)...(19): siRNA sense strand
ccaaaguggacaacaaugc

SEQ ID NO: 1315507 - RNA, 19 nt, Homo sapiens
  misc_RNA (1)...(19): siRNA sense strand
gaggaagcaggcauagaag

SEQ ID NO: 1315508 - RNA, 19 nt, Homo sapiens
  misc_RNA (1)...(19): siRNA sense strand
uggcucaguucaaggagau

SEQ ID NO: 1315509 - RNA, 19 nt, Homo sapiens
  misc_RNA (1)...(19): siRNA sense strand
gcaaauagcagaaaccaaa

SEQ ID NO: 1315510 - RNA, 19 nt, Homo sapiens
  misc_RNA (1)...(19): siRNA sense strand
ugaaacagcugaaggaaga

SEQ ID NO: 1315511 - RNA, 19 nt, Homo sapiens
  misc_RNA (1)...(19): siRNA sense strand
ggacccagcugacacauca

SEQ ID NO: 1315512 - RNA, 19 nt, Homo sapiens
  misc_RNA (1)...(19): siRNA sense strand
ggacuuggagcuuagguua

SEQ ID NO: 1315513 - RNA, 19 nt, Homo sapiens
  misc_RNA (1)...(19): siRNA sense strand
ucaauguccugaaagauaa

SEQ ID NO: 1315514 - RNA, 19 nt, Homo sapiens
  misc_RNA (1)...(19): siRNA sense strand
gagcuuagguuagaagaga

SEQ ID NO: 1315515 - RNA, 19 nt, Homo sapiens
  misc_RNA (1)...(19): siRNA sense strand
cauggaggcuucuuacuug

SEQ ID NO: 1315516 - RNA, 19 nt, Homo sapiens
  misc_RNA (1)...(19): siRNA sense strand
ggaugucaauguccugaaa

SEQ ID NO: 1315517 - RNA, 19 nt, Homo sapiens
  misc_RNA (1)...(19): siRNA sense strand
gaaggcuacugcacucuau

SEQ ID NO: 1315518 - RNA, 19 nt, Homo sapiens
  misc_RNA (1)...(19): siRNA sense strand
gagaguggcguuagcagua

SEQ ID NO: 1315519 - RNA, 19 nt, Homo sapiens
  misc_RNA (1)...(19): siRNA sense strand
gauuugaacugcagaccaa

SEQ ID NO: 1315520 - RNA, 19 nt, Homo sapiens
  misc_RNA (1)...(19): siRNA sense strand
agacucaguuggcuacuuu

SEQ ID NO: 1315521 - RNA, 19 nt, Homo sapiens
  misc_RNA (1)...(19): siRNA sense strand
ccaaugagcccacuuucuu

SEQ ID NO: 1315522 - RNA, 19 nt, Homo sapiens
  misc_RNA (1)...(19): siRNA sense strand
uugcagagcugaaggagaa

SEQ ID NO: 1315523 - RNA, 19 nt, Homo sapiens
  misc_RNA (1)...(19): siRNA sense strand
aggaagaguuugagaggua

SEQ ID NO: 1315524 - RNA, 19 nt, Homo sapiens
  misc_RNA (1)...(19): siRNA sense strand
gaaggagaaagaggcauua

SEQ ID NO: 1315525 - RNA, 19 nt, Homo sapiens
  misc_RNA (1)...(19): siRNA sense strand
gaacagauggaaggauuug

SEQ ID NO: 1315526 - RNA, 19 nt, Homo sapiens
  misc_RNA (1)...(19): siRNA sense strand
gucaauguccugaaagaua

SEQ ID NO: 1315527 - RNA, 19 nt, Homo sapiens
  misc_RNA (1)...(19): siRNA sense strand
ggagaaagaggcauuagag

SEQ ID NO: 1315528 - RNA, 19 nt, Homo sapiens
  misc_RNA (1)...(19): siRNA sense strand
gcaaggagguggagaucac

SEQ ID NO: 1315529 - RNA, 19 nt, Homo sapiens
  misc_RNA (1)...(19): siRNA sense strand
gaacaagacacuggcucua

SEQ ID NO: 1315530 - RNA, 19 nt, Homo sapiens
  misc_RNA (1)...(19): siRNA sense strand
gcauggaggcuucuuacuu

SEQ ID NO: 1315531 - RNA, 19 nt, Homo sapiens
  misc_RNA (1)...(19): siRNA sense strand
gaaacaggacuuagaggau

SEQ ID NO: 1315532 - RNA, 19 nt, Homo sapiens
  misc_RNA (1)...(19): siRNA sense strand
gaucaacuccgucagcaau

SEQ ID NO: 1315533 - RNA, 19 nt, Homo sapiens
  misc_RNA (1)...(19): siRNA sense strand
ggagaaacaagugauaaug

SEQ ID NO: 1315534 - RNA, 19 nt, Homo sapiens
  misc_RNA (1)...(19): siRNA sense strand
uggcagcccuggagaauca

SEQ ID NO: 1315535 - RNA, 19 nt, Homo sapiens
  misc_RNA (1)...(19): siRNA sense strand
ugaaagauaagauggagaa

SEQ ID NO: 1315536 - RNA, 19 nt, Homo sapiens
  misc_RNA (1)...(19): siRNA sense strand
ucagcaaucucagguagaa

SEQ ID NO: 1315537 - RNA, 19 nt, Homo sapiens
  misc_RNA (1)...(19): siRNA sense strand
gaggagaaacaagugauaa

SEQ ID NO: 1315538 - RNA, 19 nt, Homo sapiens
  misc_RNA (1)...(19): siRNA sense strand
ugaaggagaaguauauuuc

SEQ ID NO: 1315539 - RNA, 19 nt, Homo sapiens
  misc_RNA (1)...(19): siRNA sense strand
ggagaaguuugggaugaau

SEQ ID NO: 1315540 - RNA, 19 nt, Homo sapiens
  misc_RNA (1)...(19): siRNA sense strand
gagcugaaggagaaguaua

SEQ ID NO: 1315541 - RNA, 19 nt, Homo sapiens
  misc_RNA (1)...(19): siRNA sense strand
cugaacagauggaaggauu

SEQ ID NO: 1315542 - RNA, 19 nt, Homo sapiens
  misc_RNA (1)...(19): siRNA sense strand
ucacaucacugaggaagca

SEQ ID NO: 1315543 - RNA, 19 nt, Homo sapiens
  misc_RNA (1)...(19): siRNA sense strand
cgccaggacuuggagcuua

SEQ ID NO: 1315544 - RNA, 19 nt, Homo sapiens
  misc_RNA (1)...(19): siRNA sense strand
gacccaagcauuacaacuu

SEQ ID NO: 1315545 - RNA, 19 nt, Homo sapiens
  misc_RNA (1)...(19): siRNA sense strand
uagccugacccaagcauua

SEQ ID NO: 1315546 - RNA, 19 nt, Homo sapiens
  misc_RNA (1)...(19): siRNA sense strand
uagcugugcucaccgagaa

SEQ ID NO: 1315547 - RNA, 19 nt, Homo sapiens
  misc_RNA (1)...(19): siRNA sense strand
cuauagagacccagaagaa

SEQ ID NO: 1315548 - RNA, 19 nt, Homo sapiens
  misc_RNA (1)...(19): siRNA sense strand
cuacugcacucuauuacca

SEQ ID NO: 1315549 - RNA, 19 nt, Homo sapiens
  misc_RNA (1)...(19): siRNA sense strand
caaugagcccacuuucuuu

SEQ ID NO: 1315550 - RNA, 19 nt, Homo sapiens
  misc_RNA (1)...(19): siRNA sense strand
cgaggugucugagcugcua

SEQ ID NO: 1315551 - RNA, 19 nt, Homo sapiens
  misc_RNA (1)...(19): siRNA sense strand
gagccaaucuggaguaccu

SEQ ID NO: 1315552 - RNA, 19 nt, Homo sapiens
  misc_RNA (1)...(19): siRNA sense strand
guggagaucacaucacuga

SEQ ID NO: 1315553 - RNA, 19 nt, Homo sapiens
  misc_RNA (1)...(19): siRNA sense strand
uuugagagguacaagauga

SEQ ID NO: 1315554 - RNA, 19 nt, Homo sapiens
  misc_RNA (1)...(19): siRNA sense strand
gaccggugcuccacucaca

SEQ ID NO: 1315555 - RNA, 19 nt, Homo sapiens
  misc_RNA (1)...(19): siRNA sense strand
ucugugaccuggagauaau

SEQ ID NO: 1315556 - RNA, 19 nt, Homo sapiens
  misc_RNA (1)...(19): siRNA sense strand
gagcauaugcagcugaaca

SEQ ID NO: 1315557 - RNA, 19 nt, Homo sapiens
  misc_RNA (1)...(19): siRNA sense strand
aaagaugaaacaggacuua

SEQ ID NO: 1315558 - RNA, 19 nt, Homo sapiens
  misc_RNA (1)...(19): siRNA sense strand
gagcccagguuguccucaa

SEQ ID NO: 1315559 - RNA, 19 nt, Homo sapiens
  misc_RNA (1)...(19): siRNA sense strand
aggaggagcugcacaagca

SEQ ID NO: 1315560 - RNA, 19 nt, Homo sapiens
  misc_RNA (1)...(19): siRNA sense strand
ucaaggugcugucgguauc

SEQ ID NO: 1315561 - RNA, 19 nt, Homo sapiens
  misc_RNA (1)...(19): siRNA sense strand
aaagcaagaauaccaaaga

SEQ ID NO: 1315562 - RNA, 19 nt, Homo sapiens
  misc_RNA (1)...(19): siRNA sense strand
gauggaaggauuugaacug

SEQ ID NO: 1315563 - RNA, 19 nt, Homo sapiens
  misc_RNA (1)...(19): siRNA sense strand
gagugaccaugccuugaug

SEQ ID NO: 1315564 - RNA, 19 nt, Homo sapiens
  misc_RNA (1)...(19): siRNA sense strand
gccacuagcuuggauacug

SEQ ID NO: 1315565 - RNA, 19 nt, Homo sapiens
  misc_RNA (1)...(19): siRNA sense strand
gagcccacuuucuuucugu

SEQ ID NO: 1315566 - RNA, 19 nt, Homo sapiens
  misc_RNA (1)...(19): siRNA sense strand
aagauaagauggagaagcu

SEQ ID NO: 1315567 - RNA, 19 nt, Homo sapiens
  misc_RNA (1)...(19): siRNA sense strand
uggaggagcugaaaaguga

SEQ ID NO: 1315568 - RNA, 19 nt, Homo sapiens
  misc_RNA (1)...(19): siRNA sense strand
gaugagagcccagguuguc

SEQ ID NO: 1315569 - RNA, 19 nt, Homo sapiens
  misc_RNA (1)...(19): siRNA sense strand
gagaaacaagugauaaugc

SEQ ID NO: 1315570 - RNA, 19 nt, Homo sapiens
  misc_RNA (1)...(19): siRNA sense strand
gaugugguccgugccuaua

SEQ ID NO: 1315571 - RNA, 19 nt, Homo sapiens
  misc_RNA (1)...(19): siRNA sense strand
gaugaaacaggacuuagag

SEQ ID NO: 1315572 - RNA, 19 nt, Homo sapiens
  misc_RNA (1)...(19): siRNA sense strand
auaugcagcugaacagaug

SEQ ID NO: 1315573 - RNA, 19 nt, Homo sapiens
  misc_RNA (1)...(19): siRNA sense strand
cagcaggaaaugagaaaga

SEQ ID NO: 1315574 - RNA, 19 nt, Homo sapiens
  misc_RNA (1)...(19): siRNA sense strand
aagcaagaauaccaaagau

SEQ ID NO: 1315575 - RNA, 19 nt, Homo sapiens
  misc_RNA (1)...(19): siRNA sense strand
gcagguugcggccaggaaa

SEQ ID NO: 1315576 - RNA, 19 nt, Homo sapiens
  misc_RNA (1)...(19): siRNA sense strand
ucaaauauccgaggugucu

SEQ ID NO: 1315577 - RNA, 19 nt, Homo sapiens
  misc_RNA (1)...(19): siRNA sense strand
ccauuuccaggcucaguua

SEQ ID NO: 1315578 - RNA, 19 nt, Homo sapiens
  misc_RNA (1)...(19): siRNA sense strand
aggcacggcucaaggaugu

SEQ ID NO: 1315579 - RNA, 19 nt, Homo sapiens
  misc_RNA (1)...(19): siRNA sense strand
cugcagagccacaucgaaa

SEQ ID NO: 1315580 - RNA, 19 nt, Homo sapiens
  misc_RNA (1)...(19): siRNA sense strand
gagaaguuugggaugaauu

SEQ ID NO: 1315581 - RNA, 19 nt, Homo sapiens
  misc_RNA (1)...(19): siRNA sense strand
ugaaggagaaagaggcauu

SEQ ID NO: 1315582 - RNA, 19 nt, Homo sapiens
  misc_RNA (1)...(19): siRNA sense strand
caagaugagagcccagguu

SEQ ID NO: 1315583 - RNA, 19 nt, Homo sapiens
  misc_RNA (1)...(19): siRNA sense strand
ggaccaccaccuccaaagu

SEQ ID NO: 1315584 - RNA, 19 nt, Homo sapiens
  misc_RNA (1)...(19): siRNA sense strand
gagcagggagggagccaau

SEQ ID NO: 1315585 - RNA, 19 nt, Homo sapiens
  misc_RNA (1)...(19): siRNA sense strand
agaaguuugggaugaauuu

SEQ ID NO: 1315586 - RNA, 19 nt, Homo sapiens
  misc_RNA (1)...(19): siRNA sense strand
gcaaucucagguagaagaa

SEQ ID NO: 1315587 - RNA, 19 nt, Homo sapiens
  misc_RNA (1)...(19): siRNA sense strand
aaagccugcugaaggagaa

SEQ ID NO: 1315588 - RNA, 19 nt, Homo sapiens
  misc_RNA (1)...(19): siRNA sense strand
ggacuugcuggagacuaua

SEQ ID NO: 1315589 - RNA, 19 nt, Homo sapiens
  misc_RNA (1)...(19): siRNA sense strand
ccucgcagguguccagcuu

SEQ ID NO: 1315590 - RNA, 19 nt, Homo sapiens
  misc_RNA (1)...(19): siRNA sense strand
ggagguggagaucacauca

SEQ ID NO: 1315591 - RNA, 19 nt, Homo sapiens
  misc_RNA (1)...(19): siRNA sense strand
gcucugugaccuggagaua

SEQ ID NO: 1315592 - RNA, 19 nt, Homo sapiens
  misc_RNA (1)...(19): siRNA sense strand
acagauggaaggauuugaa

SEQ ID NO: 1315593 - RNA, 19 nt, Homo sapiens
  misc_RNA (1)...(19): siRNA sense strand
agaggagaaacaagugaua

SEQ ID NO: 1315594 - RNA, 19 nt, Homo sapiens
  misc_RNA (1)...(19): siRNA sense strand
gcagggagggagccaaucu

SEQ ID NO: 1315595 - RNA, 19 nt, Homo sapiens
  misc_RNA (1)...(19): siRNA sense strand
cgagaaagccaagcagaag

SEQ ID NO: 1315596 - RNA, 19 nt, Homo sapiens
  misc_RNA (1)...(19): siRNA sense strand
aaucucagguagaagaaca

SEQ ID NO: 1315597 - RNA, 19 nt, Homo sapiens
  misc_RNA (1)...(19): siRNA sense strand
gaccaguucuuuggcuaca

SEQ ID NO: 1315598 - RNA, 19 nt, Homo sapiens
  misc_RNA (1)...(19): siRNA sense strand
ggacuuggaacuggagcaa

SEQ ID NO: 1315599 - RNA, 19 nt, Homo sapiens
  misc_RNA (1)...(19): siRNA sense strand
ugugguccgugccuauaaa

SEQ ID NO: 1315600 - RNA, 19 nt, Homo sapiens
  misc_RNA (1)...(19): siRNA sense strand
aggcuacugcacucuauua

SEQ ID NO: 1315601 - RNA, 19 nt, Homo sapiens
  misc_RNA (1)...(19): siRNA sense strand
ggccucaccuuuccugacu

SEQ ID NO: 1315602 - RNA, 19 nt, Homo sapiens
  misc_RNA (1)...(19): siRNA sense strand
ccaguucuuuggcuacagu

SEQ ID NO: 1315603 - RNA, 19 nt, Homo sapiens
  misc_RNA (1)...(19): siRNA sense strand
gaccaccaccuccaaaguc

SEQ ID NO: 1315604 - RNA, 19 nt, Homo sapiens
  misc_RNA (1)...(19): siRNA sense strand
caaucuggaguaccucaaa

SEQ ID NO: 1315605 - RNA, 19 nt, Homo sapiens
  misc_RNA (1)...(19): siRNA sense strand
gaugguaaccugggaaagg

SEQ ID NO: 1315606 - RNA, 19 nt, Homo sapiens
  misc_RNA (1)...(19): siRNA sense strand
gccaggacuuggagcuuag

SEQ ID NO: 1315607 - RNA, 19 nt, Homo sapiens
  misc_RNA (1)...(19): siRNA sense strand
cuacuuugaccaguucuuu

SEQ ID NO: 1315608 - RNA, 19 nt, Homo sapiens
  misc_RNA (1)...(19): siRNA sense strand
gaccagcuggccauucaga

SEQ ID NO: 1315609 - RNA, 19 nt, Homo sapiens
  misc_RNA (1)...(19): siRNA sense strand
gaagucugaucaccaguuu

SEQ ID NO: 1315610 - RNA, 19 nt, Homo sapiens
  misc_RNA (1)...(19): siRNA sense strand
caaaggugcuggaguuaau

SEQ ID NO: 1315611 - RNA, 19 nt, Homo sapiens
  misc_RNA (1)...(19): siRNA sense strand
gacagaaucuacccaguga

SEQ ID NO: 1315612 - RNA, 19 nt, Homo sapiens
  misc_RNA (1)...(19): siRNA sense strand
gggcacagcugcuauccaa

SEQ ID NO: 1315613 - RNA, 19 nt, Homo sapiens
  misc_RNA (1)...(19): siRNA sense strand
gacaauaaguacaagcaaa

SEQ ID NO: 1315614 - RNA, 19 nt, Homo sapiens
  misc_RNA (1)...(19): siRNA sense strand
gggaggaggugacaucaau

SEQ ID NO: 1315615 - RNA, 19 nt, Homo sapiens
  misc_RNA (1)...(19): siRNA sense strand
ggucuagggacaauaagua

SEQ ID NO: 1315616 - RNA, 19 nt, Homo sapiens
  misc_RNA (1)...(19): siRNA sense strand
gcagagacaaggccaguau

SEQ ID NO: 1315617 - RNA, 19 nt, Homo sapiens
  misc_RNA (1)...(19): siRNA sense strand
ccggauggcuggagcuauu

SEQ ID NO: 1315618 - RNA, 19 nt, Homo sapiens
  misc_RNA (1)...(19): siRNA sense strand
ggaguuaaucuuauucuag

SEQ ID NO: 1315619 - RNA, 19 nt, Homo sapiens
  misc_RNA (1)...(19): siRNA sense strand
ggugcuggaguuaaucuua

SEQ ID NO: 1315620 - RNA, 19 nt, Homo sapiens
  misc_RNA (1)...(19): siRNA sense strand
gugcuggaguuaaucuuau

SEQ ID NO: 1315621 - RNA, 19 nt, Homo sapiens
  misc_RNA (1)...(19): siRNA sense strand
gaggauuucucugaagcaa

SEQ ID NO: 1315622 - RNA, 19 nt, Homo sapiens
  misc_RNA (1)...(19): siRNA sense strand
ggaagucugaucaccaguu

SEQ ID NO: 1315623 - RNA, 19 nt, Homo sapiens
  misc_RNA (1)...(19): siRNA sense strand
ugaggcaucuggacaugug

SEQ ID NO: 1315624 - RNA, 19 nt, Homo sapiens
  misc_RNA (1)...(19): siRNA sense strand
gagacuaugugcuaaucca

SEQ ID NO: 1315625 - RNA, 19 nt, Homo sapiens
  misc_RNA (1)...(19): siRNA sense strand
ccaggagccagcaacauuu

SEQ ID NO: 1315626 - RNA, 19 nt, Homo sapiens
  misc_RNA (1)...(19): siRNA sense strand
gcuggagacuaugugcuaa

SEQ ID NO: 1315627 - RNA, 19 nt, Homo sapiens
  misc_RNA (1)...(19): siRNA sense strand
ggacaauaaguacaagcaa

SEQ ID NO: 1315628 - RNA, 19 nt, Homo sapiens
  misc_RNA (1)...(19): siRNA sense strand
uguuacaucuugugggaaa

SEQ ID NO: 1315629 - RNA, 19 nt, Homo sapiens
  misc_RNA (1)...(19): siRNA sense strand
gcacagcugcuauccaacu

SEQ ID NO: 1315630 - RNA, 19 nt, Homo sapiens
  misc_RNA (1)...(19): siRNA sense strand
ccaaaggugcuggaguuaa

SEQ ID NO: 1315631 - RNA, 19 nt, Homo sapiens
  misc_RNA (1)...(19): siRNA sense strand
gcugcuggauucaauuaca

SEQ ID NO: 1315632 - RNA, 19 nt, Homo sapiens
  misc_RNA (1)...(19): siRNA sense strand
ugaggucuagggacaauaa

SEQ ID NO: 1315633 - RNA, 19 nt, Homo sapiens
  misc_RNA (1)...(19): siRNA sense strand
gcaagaucguccuggaacu

SEQ ID NO: 1315634 - RNA, 19 nt, Homo sapiens
  misc_RNA (1)...(19): siRNA sense strand
guacauggaggccaacaag

SEQ ID NO: 1315635 - RNA, 19 nt, Homo sapiens
  misc_RNA (1)...(19): siRNA sense strand
gugaaguccuccugaaggu

SEQ ID NO: 1315636 - RNA, 19 nt, Homo sapiens
  misc_RNA (1)...(19): siRNA sense strand
ccaguuugcugaggucuag

SEQ ID NO: 1315637 - RNA, 19 nt, Homo sapiens
  misc_RNA (1)...(19): siRNA sense strand
gucgauggguucucuaugg

SEQ ID NO: 1315638 - RNA, 19 nt, Homo sapiens
  misc_RNA (1)...(19): siRNA sense strand
uccaggaggcccauaagua

SEQ ID NO: 1315639 - RNA, 19 nt, Homo sapiens
  misc_RNA (1)...(19): siRNA sense strand
gggagaagaacgucaacug

SEQ ID NO: 1315640 - RNA, 19 nt, Homo sapiens
  misc_RNA (1)...(19): siRNA sense strand
gauggucgauggguucucu

SEQ ID NO: 1315641 - RNA, 19 nt, Homo sapiens
  misc_RNA (1)...(19): siRNA sense strand
ccaggaggcccauaaguac

SEQ ID NO: 1315642 - RNA, 19 nt, Homo sapiens
  misc_RNA (1)...(19): siRNA sense strand
aaaugcuggugaaugcuuu

SEQ ID NO: 1315643 - RNA, 19 nt, Homo sapiens
  misc_RNA (1)...(19): siRNA sense strand
caaaugcuggugaaugcuu

SEQ ID NO: 1315644 - RNA, 19 nt, Homo sapiens
  misc_RNA (1)...(19): siRNA sense strand
gcugaggucuagggacaau

SEQ ID NO: 1315645 - RNA, 19 nt, Homo sapiens
  misc_RNA (1)...(19): siRNA sense strand
gauccuacugggagaagaa

SEQ ID NO: 1315646 - RNA, 19 nt, Homo sapiens
  misc_RNA (1)...(19): siRNA sense strand
acauggaggccaacaagaa

SEQ ID NO: 1315647 - RNA, 19 nt, Homo sapiens
  misc_RNA (1)...(19): siRNA sense strand
gagcaaauucugccucacu

SEQ ID NO: 1315648 - RNA, 19 nt, Homo sapiens
  misc_RNA (1)...(19): siRNA sense strand
cggaaaaccucuacgugaa

SEQ ID NO: 1315649 - RNA, 19 nt, Homo sapiens
  misc_RNA (1)...(19): siRNA sense strand
acaagaacauaggcaagau

SEQ ID NO: 1315650 - RNA, 19 nt, Homo sapiens
  misc_RNA (1)...(19): siRNA sense strand
gcaaauucugccucacuuc

SEQ ID NO: 1315651 - RNA, 19 nt, Homo sapiens
  misc_RNA (1)...(19): siRNA sense strand
cugaagcaacgcugaaauu

SEQ ID NO: 1315652 - RNA, 19 nt, Homo sapiens
  misc_RNA (1)...(19): siRNA sense strand
agagacaaggccaguauga

SEQ ID NO: 1315653 - RNA, 19 nt, Homo sapiens
  misc_RNA (1)...(19): siRNA sense strand
caaauucugccucacuucu

SEQ ID NO: 1315654 - RNA, 19 nt, Homo sapiens
  misc_RNA (1)...(19): siRNA sense strand
uuccagcuguuacaucuug

SEQ ID NO: 1315655 - RNA, 19 nt, Homo sapiens
  misc_RNA (1)...(19): siRNA sense strand
ggacuuaaugcagagacaa

SEQ ID NO: 1315656 - RNA, 19 nt, Homo sapiens
  misc_RNA (1)...(19): siRNA sense strand
ugaagcaacgcugaaauuc

SEQ ID NO: 1315657 - RNA, 19 nt, Homo sapiens
  misc_RNA (1)...(19): siRNA sense strand
gaggaggugacaucaaugg

SEQ ID NO: 1315658 - RNA, 19 nt, Homo sapiens
  misc_RNA (1)...(19): siRNA sense strand
ggaggccaacaagaacaua

SEQ ID NO: 1315659 - RNA, 19 nt, Homo sapiens
  misc_RNA (1)...(19): siRNA sense strand
uguucaggcuggagacuau

SEQ ID NO: 1315660 - RNA, 19 nt, Homo sapiens
  misc_RNA (1)...(19): siRNA sense strand
ggaggcccauaaguacaug

SEQ ID NO: 1315661 - RNA, 19 nt, Homo sapiens
  misc_RNA (1)...(19): siRNA sense strand
gaaauccaggaggcccaua

SEQ ID NO: 1315662 - RNA, 19 nt, Homo sapiens
  misc_RNA (1)...(19): siRNA sense strand
caauaaguacaagcaaaug

SEQ ID NO: 1315663 - RNA, 19 nt, Homo sapiens
  misc_RNA (1)...(19): siRNA sense strand
ggcuggagacuaugugcua

SEQ ID NO: 1315664 - RNA, 19 nt, Homo sapiens
  misc_RNA (1)...(19): siRNA sense strand
uccaggagccagcaacauu

SEQ ID NO: 1315665 - RNA, 19 nt, Homo sapiens
  misc_RNA (1)...(19): siRNA sense strand
cuagggacaauaaguacaa

SEQ ID NO: 1315666 - RNA, 19 nt, Homo sapiens
  misc_RNA (1)...(19): siRNA sense strand
gguucucuauggucugaug

SEQ ID NO: 1315667 - RNA, 19 nt, Homo sapiens
  misc_RNA (1)...(19): siRNA sense strand
cugcuggauucaauuacaa

SEQ ID NO: 1315668 - RNA, 19 nt, Homo sapiens
  misc_RNA (1)...(19): siRNA sense strand
ggaggaggugacaucaaug

SEQ ID NO: 1315669 - RNA, 19 nt, Homo sapiens
  misc_RNA (1)...(19): siRNA sense strand
caagaacauaggcaagauc

SEQ ID NO: 1315670 - RNA, 19 nt, Homo sapiens
  misc_RNA (1)...(19): siRNA sense strand
caucuugugggaaauguuc

SEQ ID NO: 1315671 - RNA, 19 nt, Homo sapiens
  misc_RNA (1)...(19): siRNA sense strand
uuuaagcgaggaagucuga

SEQ ID NO: 1315672 - RNA, 19 nt, Homo sapiens
  misc_RNA (1)...(19): siRNA sense strand
caagaucguccuggaacug

SEQ ID NO: 1315673 - RNA, 19 nt, Homo sapiens
  misc_RNA (1)...(19): siRNA sense strand
gggacaauaaguacaagca

SEQ ID NO: 1315674 - RNA, 19 nt, Homo sapiens
  misc_RNA (1)...(19): siRNA sense strand
gaagucugaucaccaguuu

SEQ ID NO: 1315675 - RNA, 19 nt, Homo sapiens
  misc_RNA (1)...(19): siRNA sense strand
caaaggugcuggaguuaau

SEQ ID NO: 1315676 - RNA, 19 nt, Homo sapiens
  misc_RNA (1)...(19): siRNA sense strand
gacagaaucuacccaguga

SEQ ID NO: 1315677 - RNA, 19 nt, Homo sapiens
  misc_RNA (1)...(19): siRNA sense strand
gggcacagcugcuauccaa

SEQ ID NO: 1315678 - RNA, 19 nt, Homo sapiens
  misc_RNA (1)...(19): siRNA sense strand
gacaauaaguacaagcaaa

SEQ ID NO: 1315679 - RNA, 19 nt, Homo sapiens
  misc_RNA (1)...(19): siRNA sense strand
gggaggaggugacaucaau

SEQ ID NO: 1315680 - RNA, 19 nt, Homo sapiens
  misc_RNA (1)...(19): siRNA sense strand
ggucuagggacaauaagua

SEQ ID NO: 1315681 - RNA, 19 nt, Homo sapiens
  misc_RNA (1)...(19): siRNA sense strand
gcagagacaaggccaguau

SEQ ID NO: 1315682 - RNA, 19 nt, Homo sapiens
  misc_RNA (1)...(19): siRNA sense strand
ccggauggcuggagcuauu

SEQ ID NO: 1315683 - RNA, 19 nt, Homo sapiens
  misc_RNA (1)...(19): siRNA sense strand
ggaguuaaucuuauucuag

SEQ ID NO: 1315684 - RNA, 19 nt, Homo sapiens
  misc_RNA (1)...(19): siRNA sense strand
ggugcuggaguuaaucuua

SEQ ID NO: 1315685 - RNA, 19 nt, Homo sapiens
  misc_RNA (1)...(19): siRNA sense strand
gugcuggaguuaaucuuau

SEQ ID NO: 1315686 - RNA, 19 nt, Homo sapiens
  misc_RNA (1)...(19): siRNA sense strand
gaggauuucucugaagcaa

SEQ ID NO: 1315687 - RNA, 19 nt, Homo sapiens
  misc_RNA (1)...(19): siRNA sense strand
ggaagucugaucaccaguu

SEQ ID NO: 1315688 - RNA, 19 nt, Homo sapiens
  misc_RNA (1)...(19): siRNA sense strand
ugaggcaucuggacaugug

SEQ ID NO: 1315689 - RNA, 19 nt, Homo sapiens
  misc_RNA (1)...(19): siRNA sense strand
gagacuaugugcuaaucca

SEQ ID NO: 1315690 - RNA, 19 nt, Homo sapiens
  misc_RNA (1)...(19): siRNA sense strand
ccaggagccagcaacauuu

SEQ ID NO: 1315691 - RNA, 19 nt, Homo sapiens
  misc_RNA (1)...(19): siRNA sense strand
gcuggagacuaugugcuaa

SEQ ID NO: 1315692 - RNA, 19 nt, Homo sapiens
  misc_RNA (1)...(19): siRNA sense strand
ggacaauaaguacaagcaa

SEQ ID NO: 1315693 - RNA, 19 nt, Homo sapiens
  misc_RNA (1)...(19): siRNA sense strand
uguuacaucuugugggaaa

SEQ ID NO: 1315694 - RNA, 19 nt, Homo sapiens
  misc_RNA (1)...(19): siRNA sense strand
gcacagcugcuauccaacu

SEQ ID NO: 1315695 - RNA, 19 nt, Homo sapiens
  misc_RNA (1)...(19): siRNA sense strand
ccaaaggugcuggaguuaa

SEQ ID NO: 1315696 - RNA, 19 nt, Homo sapiens
  misc_RNA (1)...(19): siRNA sense strand
gcugcuggauucaauuaca

SEQ ID NO: 1315697 - RNA, 19 nt, Homo sapiens
  misc_RNA (1)...(19): siRNA sense strand
ugaggucuagggacaauaa

SEQ ID NO: 1315698 - RNA, 19 nt, Homo sapiens
  misc_RNA (1)...(19): siRNA sense strand
gcaagaucguccuggaacu

SEQ ID NO: 1315699 - RNA, 19 nt, Homo sapiens
  misc_RNA (1)...(19): siRNA sense strand
guacauggaggccaacaag

SEQ ID NO: 1315700 - RNA, 19 nt, Homo sapiens
  misc_RNA (1)...(19): siRNA sense strand
gugaaguccuccugaaggu

SEQ ID NO: 1315701 - RNA, 19 nt, Homo sapiens
  misc_RNA (1)...(19): siRNA sense strand
ccaguuugcugaggucuag

SEQ ID NO: 1315702 - RNA, 19 nt, Homo sapiens
  misc_RNA (1)...(19): siRNA sense strand
gucgauggguucucuaugg

SEQ ID NO: 1315703 - RNA, 19 nt, Homo sapiens
  misc_RNA (1)...(19): siRNA sense strand
uccaggaggcccauaagua

SEQ ID NO: 1315704 - RNA, 19 nt, Homo sapiens
  misc_RNA (1)...(19): siRNA sense strand
gggagaagaacgucaacug

SEQ ID NO: 1315705 - RNA, 19 nt, Homo sapiens
  misc_RNA (1)...(19): siRNA sense strand
gauggucgauggguucucu

SEQ ID NO: 1315706 - RNA, 19 nt, Homo sapiens
  misc_RNA (1)...(19): siRNA sense strand
ccaggaggcccauaaguac

SEQ ID NO: 1315707 - RNA, 19 nt, Homo sapiens
  misc_RNA (1)...(19): siRNA sense strand
aaaugcuggugaaugcuuu

SEQ ID NO: 1315708 - RNA, 19 nt, Homo sapiens
  misc_RNA (1)...(19): siRNA sense strand
caaaugcuggugaaugcuu

SEQ ID NO: 1315709 - RNA, 19 nt, Homo sapiens
  misc_RNA (1)...(19): siRNA sense strand
gcugaggucuagggacaau

SEQ ID NO: 1315710 - RNA, 19 nt, Homo sapiens
  misc_RNA (1)...(19): siRNA sense strand
gauccuacugggagaagaa

SEQ ID NO: 1315711 - RNA, 19 nt, Homo sapiens
  misc_RNA (1)...(19): siRNA sense strand
acauggaggccaacaagaa

SEQ ID NO: 1315712 - RNA, 19 nt, Homo sapiens
  misc_RNA (1)...(19): siRNA sense strand
gagcaaauucugccucacu

SEQ ID NO: 1315713 - RNA, 19 nt, Homo sapiens
  misc_RNA (1)...(19): siRNA sense strand
cggaaaaccucuacgugaa

SEQ ID NO: 1315714 - RNA, 19 nt, Homo sapiens
  misc_RNA (1)...(19): siRNA sense strand
acaagaacauaggcaagau

SEQ ID NO: 1315715 - RNA, 19 nt, Homo sapiens
  misc_RNA (1)...(19): siRNA sense strand
gcaaauucugccucacuuc

SEQ ID NO: 1315716 - RNA, 19 nt, Homo sapiens
  misc_RNA (1)...(19): siRNA sense strand
cugaagcaacgcugaaauu

SEQ ID NO: 1315717 - RNA, 19 nt, Homo sapiens
  misc_RNA (1)...(19): siRNA sense strand
agagacaaggccaguauga

SEQ ID NO: 1315718 - RNA, 19 nt, Homo sapiens
  misc_RNA (1)...(19): siRNA sense strand
caaauucugccucacuucu

SEQ ID NO: 1315719 - RNA, 19 nt, Homo sapiens
  misc_RNA (1)...(19): siRNA sense strand
uuccagcuguuacaucuug

SEQ ID NO: 1315720 - RNA, 19 nt, Homo sapiens
  misc_RNA (1)...(19): siRNA sense strand
ggacuuaaugcagagacaa

SEQ ID NO: 1315721 - RNA, 19 nt, Homo sapiens
  misc_RNA (1)...(19): siRNA sense strand
ugaagcaacgcugaaauuc

SEQ ID NO: 1315722 - RNA, 19 nt, Homo sapiens
  misc_RNA (1)...(19): siRNA sense strand
gaggaggugacaucaaugg

SEQ ID NO: 1315723 - RNA, 19 nt, Homo sapiens
  misc_RNA (1)...(19): siRNA sense strand
ggaggccaacaagaacaua

SEQ ID NO: 1315724 - RNA, 19 nt, Homo sapiens
  misc_RNA (1)...(19): siRNA sense strand
uguucaggcuggagacuau

SEQ ID NO: 1315725 - RNA, 19 nt, Homo sapiens
  misc_RNA (1)...(19): siRNA sense strand
ggaggcccauaaguacaug

SEQ ID NO: 1315726 - RNA, 19 nt, Homo sapiens
  misc_RNA (1)...(19): siRNA sense strand
gaaauccaggaggcccaua

SEQ ID NO: 1315727 - RNA, 19 nt, Homo sapiens
  misc_RNA (1)...(19): siRNA sense strand
caauaaguacaagcaaaug

SEQ ID NO: 1315728 - RNA, 19 nt, Homo sapiens
  misc_RNA (1)...(19): siRNA sense strand
ggcuggagacuaugugcua

SEQ ID NO: 1315729 - RNA, 19 nt, Homo sapiens
  misc_RNA (1)...(19): siRNA sense strand
uccaggagccagcaacauu

SEQ ID NO: 1315730 - RNA, 19 nt, Homo sapiens
  misc_RNA (1)...(19): siRNA sense strand
cuagggacaauaaguacaa

SEQ ID NO: 1315731 - RNA, 19 nt, Homo sapiens
  misc_RNA (1)...(19): siRNA sense strand
gguucucuauggucugaug

SEQ ID NO: 1315732 - RNA, 19 nt, Homo sapiens
  misc_RNA (1)...(19): siRNA sense strand
cugcuggauucaauuacaa

SEQ ID NO: 1315733 - RNA, 19 nt, Homo sapiens
  misc_RNA (1)...(19): siRNA sense strand
ggaggaggugacaucaaug

SEQ ID NO: 1315734 - RNA, 19 nt, Homo sapiens
  misc_RNA (1)...(19): siRNA sense strand
caagaacauaggcaagauc

SEQ ID NO: 1315735 - RNA, 19 nt, Homo sapiens
  misc_RNA (1)...(19): siRNA sense strand
caucuugugggaaauguuc

SEQ ID NO: 1315736 - RNA, 19 nt, Homo sapiens
  misc_RNA (1)...(19): siRNA sense strand
uuuaagcgaggaagucuga

SEQ ID NO: 1315737 - RNA, 19 nt, Homo sapiens
  misc_RNA (1)...(19): siRNA sense strand
caagaucguccuggaacug

SEQ ID NO: 1315738 - RNA, 19 nt, Homo sapiens
  misc_RNA (1)...(19): siRNA sense strand
gggacaauaaguacaagca

SEQ ID NO: 1315739 - RNA, 19 nt, Homo sapiens
  misc_RNA (1)...(19): siRNA sense strand
gaggaaagcuuuauuguau

SEQ ID NO: 1315740 - RNA, 19 nt, Homo sapiens
  misc_RNA (1)...(19): siRNA sense strand
gaaugugucuggaggauua

SEQ ID NO: 1315741 - RNA, 19 nt, Homo sapiens
  misc_RNA (1)...(19): siRNA sense strand
gcaaugacgucuguaagua

SEQ ID NO: 1315742 - RNA, 19 nt, Homo sapiens
  misc_RNA (1)...(19): siRNA sense strand
ggacuuaccuuccaagcuu

SEQ ID NO: 1315743 - RNA, 19 nt, Homo sapiens
  misc_RNA (1)...(19): siRNA sense strand
caaggaagcuggaaaggau

SEQ ID NO: 1315744 - RNA, 19 nt, Homo sapiens
  misc_RNA (1)...(19): siRNA sense strand
ggacacaacgggaaacuuu

SEQ ID NO: 1315745 - RNA, 19 nt, Homo sapiens
  misc_RNA (1)...(19): siRNA sense strand
ggaaagcuuuauuguauuc

SEQ ID NO: 1315746 - RNA, 19 nt, Homo sapiens
  misc_RNA (1)...(19): siRNA sense strand
caacuggccugacaaauac

SEQ ID NO: 1315747 - RNA, 19 nt, Homo sapiens
  misc_RNA (1)...(19): siRNA sense strand
cgacugugcugguaugauu

SEQ ID NO: 1315748 - RNA, 19 nt, Homo sapiens
  misc_RNA (1)...(19): siRNA sense strand
ccaacuggccugacaaaua

SEQ ID NO: 1315749 - RNA, 19 nt, Homo sapiens
  misc_RNA (1)...(19): siRNA sense strand
gggaaaagaucguauuaaa

SEQ ID NO: 1315750 - RNA, 19 nt, Homo sapiens
  misc_RNA (1)...(19): siRNA sense strand
ggaaggcaaugacgucugu

SEQ ID NO: 1315751 - RNA, 19 nt, Homo sapiens
  misc_RNA (1)...(19): siRNA sense strand
gcaccugguuucccaaaug

SEQ ID NO: 1315752 - RNA, 19 nt, Homo sapiens
  misc_RNA (1)...(19): siRNA sense strand
gagcaucgcugugugaaca

SEQ ID NO: 1315753 - RNA, 19 nt, Homo sapiens
  misc_RNA (1)...(19): siRNA sense strand
gaaugggcaugacugcaaa

SEQ ID NO: 1315754 - RNA, 19 nt, Homo sapiens
  misc_RNA (1)...(19): siRNA sense strand
uccgauggcucuaucaaua

SEQ ID NO: 1315755 - RNA, 19 nt, Homo sapiens
  misc_RNA (1)...(19): siRNA sense strand
ggaucucccuucaguuuga

SEQ ID NO: 1315756 - RNA, 19 nt, Homo sapiens
  misc_RNA (1)...(19): siRNA sense strand
caaagaugccggucagauu

SEQ ID NO: 1315757 - RNA, 19 nt, Homo sapiens
  misc_RNA (1)...(19): siRNA sense strand
gggaagaacugugacaagu

SEQ ID NO: 1315758 - RNA, 19 nt, Homo sapiens
  misc_RNA (1)...(19): siRNA sense strand
gcuacuggcuccacgagaa

SEQ ID NO: 1315759 - RNA, 19 nt, Homo sapiens
  misc_RNA (1)...(19): siRNA sense strand
ggaagagagugcccugauc

SEQ ID NO: 1315760 - RNA, 19 nt, Homo sapiens
  misc_RNA (1)...(19): siRNA sense strand
ugugugaccuucauagaaa

SEQ ID NO: 1315761 - RNA, 19 nt, Homo sapiens
  misc_RNA (1)...(19): siRNA sense strand
gcccacuucuucucagaua

SEQ ID NO: 1315762 - RNA, 19 nt, Homo sapiens
  misc_RNA (1)...(19): siRNA sense strand
ggagagacauacgacuuug

SEQ ID NO: 1315763 - RNA, 19 nt, Homo sapiens
  misc_RNA (1)...(19): siRNA sense strand
caacaugucaccaucauca

SEQ ID NO: 1315764 - RNA, 19 nt, Homo sapiens
  misc_RNA (1)...(19): siRNA sense strand
gaaggaguaucccacaaac

SEQ ID NO: 1315765 - RNA, 19 nt, Homo sapiens
  misc_RNA (1)...(19): siRNA sense strand
gcaguauguuucucagguu

SEQ ID NO: 1315766 - RNA, 19 nt, Homo sapiens
  misc_RNA (1)...(19): siRNA sense strand
cccggaagcuguacaaaug

SEQ ID NO: 1315767 - RNA, 19 nt, Homo sapiens
  misc_RNA (1)...(19): siRNA sense strand
gaugaggaaagcuuuauug

SEQ ID NO: 1315768 - RNA, 19 nt, Homo sapiens
  misc_RNA (1)...(19): siRNA sense strand
gaguguaccuggaacaucu

SEQ ID NO: 1315769 - RNA, 19 nt, Homo sapiens
  misc_RNA (1)...(19): siRNA sense strand
ccaacuauccggaugacua

SEQ ID NO: 1315770 - RNA, 19 nt, Homo sapiens
  misc_RNA (1)...(19): siRNA sense strand
ugaggaaagcuuuauugua

SEQ ID NO: 1315771 - RNA, 19 nt, Homo sapiens
  misc_RNA (1)...(19): siRNA sense strand
cgauggcucuaucaauaaa

SEQ ID NO: 1315772 - RNA, 19 nt, Homo sapiens
  misc_RNA (1)...(19): siRNA sense strand
gaaaucgagcuccaacaga

SEQ ID NO: 1315773 - RNA, 19 nt, Homo sapiens
  misc_RNA (1)...(19): siRNA sense strand
ccacaggccauauccauug

SEQ ID NO: 1315774 - RNA, 19 nt, Homo sapiens
  misc_RNA (1)...(19): siRNA sense strand
gaagagcaggcaucugaga

SEQ ID NO: 1315775 - RNA, 19 nt, Homo sapiens
  misc_RNA (1)...(19): siRNA sense strand
guauuaaacuucacaucca

SEQ ID NO: 1315776 - RNA, 19 nt, Homo sapiens
  misc_RNA (1)...(19): siRNA sense strand
gggagagacauacgacuuu

SEQ ID NO: 1315777 - RNA, 19 nt, Homo sapiens
  misc_RNA (1)...(19): siRNA sense strand
gcacaggugggcuugaaga

SEQ ID NO: 1315778 - RNA, 19 nt, Homo sapiens
  misc_RNA (1)...(19): siRNA sense strand
ugaaguguuugaacuggaa

SEQ ID NO: 1315779 - RNA, 19 nt, Homo sapiens
  misc_RNA (1)...(19): siRNA sense strand
gauaagaagaugugugaag

SEQ ID NO: 1315780 - RNA, 19 nt, Homo sapiens
  misc_RNA (1)...(19): siRNA sense strand
agacauugccuuagaugaa

SEQ ID NO: 1315781 - RNA, 19 nt, Homo sapiens
  misc_RNA (1)...(19): siRNA sense strand
cgaaggaguaucccacaaa

SEQ ID NO: 1315782 - RNA, 19 nt, Homo sapiens
  misc_RNA (1)...(19): siRNA sense strand
caggucaggaguauaauuu

SEQ ID NO: 1315783 - RNA, 19 nt, Homo sapiens
  misc_RNA (1)...(19): siRNA sense strand
uuaaugaguuugagaucga

SEQ ID NO: 1315784 - RNA, 19 nt, Homo sapiens
  misc_RNA (1)...(19): siRNA sense strand
cggaacaccuucucaagag

SEQ ID NO: 1315785 - RNA, 19 nt, Homo sapiens
  misc_RNA (1)...(19): siRNA sense strand
ggucaggaguauaauuucu

SEQ ID NO: 1315786 - RNA, 19 nt, Homo sapiens
  misc_RNA (1)...(19): siRNA sense strand
ggacggaugaggaaagcuu

SEQ ID NO: 1315787 - RNA, 19 nt, Homo sapiens
  misc_RNA (1)...(19): siRNA sense strand
ggaguaucccacaaacaaa

SEQ ID NO: 1315788 - RNA, 19 nt, Homo sapiens
  misc_RNA (1)...(19): siRNA sense strand
cagcacaggugggcuugaa

SEQ ID NO: 1315789 - RNA, 19 nt, Homo sapiens
  misc_RNA (1)...(19): siRNA sense strand
ccauauccauugggaagaa

SEQ ID NO: 1315790 - RNA, 19 nt, Homo sapiens
  misc_RNA (1)...(19): siRNA sense strand
gcucugggccauuagaaga

SEQ ID NO: 1315791 - RNA, 19 nt, Homo sapiens
  misc_RNA (1)...(19): siRNA sense strand
gacauugccuuagaugaag

SEQ ID NO: 1315792 - RNA, 19 nt, Homo sapiens
  misc_RNA (1)...(19): siRNA sense strand
ggagggaguguaccuggaa

SEQ ID NO: 1315793 - RNA, 19 nt, Homo sapiens
  misc_RNA (1)...(19): siRNA sense strand
gacuguggaugaaguuugu

SEQ ID NO: 1315794 - RNA, 19 nt, Homo sapiens
  misc_RNA (1)...(19): siRNA sense strand
gcaccaaggaagcuggaaa

SEQ ID NO: 1315795 - RNA, 19 nt, Homo sapiens
  misc_RNA (1)...(19): siRNA sense strand
caguauguuucucagguuu

SEQ ID NO: 1315796 - RNA, 19 nt, Homo sapiens
  misc_RNA (1)...(19): siRNA sense strand
ccggaucucccuucaguuu

SEQ ID NO: 1315797 - RNA, 19 nt, Homo sapiens
  misc_RNA (1)...(19): siRNA sense strand
ccgauaagaagauguguga

SEQ ID NO: 1315798 - RNA, 19 nt, Homo sapiens
  misc_RNA (1)...(19): siRNA sense strand
agaugaagaugacuugaag

SEQ ID NO: 1315799 - RNA, 19 nt, Homo sapiens
  misc_RNA (1)...(19): siRNA sense strand
gggagacauugccuuagau

SEQ ID NO: 1315800 - RNA, 19 nt, Homo sapiens
  misc_RNA (1)...(19): siRNA sense strand
ggggagacaugaacaaaga

SEQ ID NO: 1315801 - RNA, 19 nt, Homo sapiens
  misc_RNA (1)...(19): siRNA sense strand
gaaaggacggaugaggaaa

SEQ ID NO: 1315802 - RNA, 19 nt, Homo sapiens
  misc_RNA (1)...(19): siRNA sense strand
ugaaacucaccuuuaauga

SEQ ID NO: 1315803 - RNA, 19 nt, Homo sapiens
  misc_RNA (1)...(19): siRNA sense strand
gccuguggcgguuucauua

SEQ ID NO: 1315804 - RNA, 19 nt, Homo sapiens
  misc_RNA (1)...(19): siRNA sense strand
cacgacagcugugcauaug

SEQ ID NO: 1315805 - RNA, 19 nt, Homo sapiens
  misc_RNA (1)...(19): siRNA sense strand
uugaagagcaggcaucuga

SEQ ID NO: 1315806 - RNA, 19 nt, Homo sapiens
  misc_RNA (1)...(19): siRNA sense strand
gaagagccacaaccucaag

SEQ ID NO: 1315807 - RNA, 19 nt, Homo sapiens
  misc_RNA (1)...(19): siRNA sense strand
uaccggaucucccuucagu

SEQ ID NO: 1315808 - RNA, 19 nt, Homo sapiens
  misc_RNA (1)...(19): siRNA sense strand
gaagccggaggaugugaaa

SEQ ID NO: 1315809 - RNA, 19 nt, Homo sapiens
  misc_RNA (1)...(19): siRNA sense strand
cgacagcugugcauaugac

SEQ ID NO: 1315810 - RNA, 19 nt, Homo sapiens
  misc_RNA (1)...(19): siRNA sense strand
ggcuguugcuccuauguug

SEQ ID NO: 1315811 - RNA, 19 nt, Homo sapiens
  misc_RNA (1)...(19): siRNA sense strand
agaaaggacggaugaggaa

SEQ ID NO: 1315812 - RNA, 19 nt, Homo sapiens
  misc_RNA (1)...(19): siRNA sense strand
cccugcacaugaagaaaua

SEQ ID NO: 1315813 - RNA, 19 nt, Homo sapiens
  misc_RNA (1)...(19): siRNA sense strand
ugacauuccggaccuuuga

SEQ ID NO: 1315814 - RNA, 19 nt, Homo sapiens
  misc_RNA (1)...(19): siRNA sense strand
auaagaagaugugugaagu

SEQ ID NO: 1315815 - RNA, 19 nt, Homo sapiens
  misc_RNA (1)...(19): siRNA sense strand
ggagacaugaacaaagaug

SEQ ID NO: 1315816 - RNA, 19 nt, Homo sapiens
  misc_RNA (1)...(19): siRNA sense strand
gcucagucagggagacaua

SEQ ID NO: 1315817 - RNA, 19 nt, Homo sapiens
  misc_RNA (1)...(19): siRNA sense strand
ggaugaggaaagcuuuauu

SEQ ID NO: 1315818 - RNA, 19 nt, Homo sapiens
  misc_RNA (1)...(19): siRNA sense strand
aaagaugccggucagauuc

SEQ ID NO: 1315819 - RNA, 19 nt, Homo sapiens
  misc_RNA (1)...(19): siRNA sense strand
ggagacauugccuuagaug

SEQ ID NO: 1315820 - RNA, 19 nt, Homo sapiens
  misc_RNA (1)...(19): siRNA sense strand
gagagacauacgacuuuga

SEQ ID NO: 1315821 - RNA, 19 nt, Homo sapiens
  misc_RNA (1)...(19): siRNA sense strand
gugauucccugaugauucg

SEQ ID NO: 1315822 - RNA, 19 nt, Homo sapiens
  misc_RNA (1)...(19): siRNA sense strand
gacuuaccuuccaagcuuu

SEQ ID NO: 1315823 - RNA, 19 nt, Homo sapiens
  misc_RNA (1)...(19): siRNA sense strand
aagaugacuugaagcuguu

SEQ ID NO: 1315824 - RNA, 19 nt, Homo sapiens
  misc_RNA (1)...(19): siRNA sense strand
aggaugcccugcacaugaa

SEQ ID NO: 1315825 - RNA, 19 nt, Homo sapiens
  misc_RNA (1)...(19): siRNA sense strand
ggugauucccugaugauuc

SEQ ID NO: 1315826 - RNA, 19 nt, Homo sapiens
  misc_RNA (1)...(19): siRNA sense strand
caacaugcgcguggaguuc

SEQ ID NO: 1315827 - RNA, 19 nt, Homo sapiens
  misc_RNA (1)...(19): siRNA sense strand
ccgauggcucuaucaauaa

SEQ ID NO: 1315828 - RNA, 19 nt, Homo sapiens
  misc_RNA (1)...(19): siRNA sense strand
ggaggauuacgguuucaga

SEQ ID NO: 1315829 - RNA, 19 nt, Homo sapiens
  misc_RNA (1)...(19): siRNA sense strand
ggacacuggcaccaaggaa

SEQ ID NO: 1315830 - RNA, 19 nt, Homo sapiens
  misc_RNA (1)...(19): siRNA sense strand
ccaaggaagcuggaaagga

SEQ ID NO: 1315831 - RNA, 19 nt, Homo sapiens
  misc_RNA (1)...(19): siRNA sense strand
ccaggaaugugccuaugac

SEQ ID NO: 1315832 - RNA, 19 nt, Homo sapiens
  misc_RNA (1)...(19): siRNA sense strand
guaccuggaacaucucuuc

SEQ ID NO: 1315833 - RNA, 19 nt, Homo sapiens
  misc_RNA (1)...(19): siRNA sense strand
gagacauugccuuagauga

SEQ ID NO: 1315834 - RNA, 19 nt, Homo sapiens
  misc_RNA (1)...(19): siRNA sense strand
ggcaaugacgucuguaagu

SEQ ID NO: 1315835 - RNA, 19 nt, Homo sapiens
  misc_RNA (1)...(19): siRNA sense strand
gcuacaagugugccuguga

SEQ ID NO: 1315836 - RNA, 19 nt, Homo sapiens
  misc_RNA (1)...(19): siRNA sense strand
gaagcuguuucacauugac

SEQ ID NO: 1315837 - RNA, 19 nt, Homo sapiens
  misc_RNA (1)...(19): siRNA sense strand
aaucuacucugcaggugau

SEQ ID NO: 1315838 - RNA, 19 nt, Homo sapiens
  misc_RNA (1)...(19): siRNA sense strand
gauacaccagcaccaaguu

SEQ ID NO: 1315839 - RNA, 19 nt, Homo sapiens
  misc_RNA (1)...(19): siRNA sense strand
gaacacagcuucuauuuag

SEQ ID NO: 1315840 - RNA, 19 nt, Homo sapiens
  misc_RNA (1)...(19): siRNA sense strand
gaaauguucuccaaagaua

SEQ ID NO: 1315841 - RNA, 19 nt, Homo sapiens
  misc_RNA (1)...(19): siRNA sense strand
gacaauagcugaacaagaa

SEQ ID NO: 1315842 - RNA, 19 nt, Homo sapiens
  misc_RNA (1)...(19): siRNA sense strand
acaaagagauggcauuaua

SEQ ID NO: 1315843 - RNA, 19 nt, Homo sapiens
  misc_RNA (1)...(19): siRNA sense strand
uagcacagcugcagacuua

SEQ ID NO: 1315844 - RNA, 19 nt, Homo sapiens
  misc_RNA (1)...(19): siRNA sense strand
caaguaagcucuuuauuag

SEQ ID NO: 1315845 - RNA, 19 nt, Homo sapiens
  misc_RNA (1)...(19): siRNA sense strand
gcagacagaugguaugaaa

SEQ ID NO: 1315846 - RNA, 19 nt, Homo sapiens
  misc_RNA (1)...(19): siRNA sense strand
guucgaaacugauauagua

SEQ ID NO: 1315847 - RNA, 19 nt, Homo sapiens
  misc_RNA (1)...(19): siRNA sense strand
gaagaacaguuggaagaua

SEQ ID NO: 1315848 - RNA, 19 nt, Homo sapiens
  misc_RNA (1)...(19): siRNA sense strand
acaaaggaaucaucacuua

SEQ ID NO: 1315849 - RNA, 19 nt, Homo sapiens
  misc_RNA (1)...(19): siRNA sense strand
caggaaagccuacaaauuu

SEQ ID NO: 1315850 - RNA, 19 nt, Homo sapiens
  misc_RNA (1)...(19): siRNA sense strand
gaagagaaaucauaaagac

SEQ ID NO: 1315851 - RNA, 19 nt, Homo sapiens
  misc_RNA (1)...(19): siRNA sense strand
gaaguuaacuaucaagagu

SEQ ID NO: 1315852 - RNA, 19 nt, Homo sapiens
  misc_RNA (1)...(19): siRNA sense strand
gaagagcuuuccaaacuga

SEQ ID NO: 1315853 - RNA, 19 nt, Homo sapiens
  misc_RNA (1)...(19): siRNA sense strand
gaagaacuaggacuaauuu

SEQ ID NO: 1315854 - RNA, 19 nt, Homo sapiens
  misc_RNA (1)...(19): siRNA sense strand
gaagaagaauuugguguug

SEQ ID NO: 1315855 - RNA, 19 nt, Homo sapiens
  misc_RNA (1)...(19): siRNA sense strand
gaacaaguuucauugagau

SEQ ID NO: 1315856 - RNA, 19 nt, Homo sapiens
  misc_RNA (1)...(19): siRNA sense strand
aaacugaacugucuagaau

SEQ ID NO: 1315857 - RNA, 19 nt, Homo sapiens
  misc_RNA (1)...(19): siRNA sense strand
caaguuaucuucucugcaa

SEQ ID NO: 1315858 - RNA, 19 nt, Homo sapiens
  misc_RNA (1)...(19): siRNA sense strand
gcagauagaugguuuacag

SEQ ID NO: 1315859 - RNA, 19 nt, Homo sapiens
  misc_RNA (1)...(19): siRNA sense strand
gaagaaguagcuaagguua

SEQ ID NO: 1315860 - RNA, 19 nt, Homo sapiens
  misc_RNA (1)...(19): siRNA sense strand
caacagaacucauggaaaa

SEQ ID NO: 1315861 - RNA, 19 nt, Homo sapiens
  misc_RNA (1)...(19): siRNA sense strand
uaacccagcucacugcuaa

SEQ ID NO: 1315862 - RNA, 19 nt, Homo sapiens
  misc_RNA (1)...(19): siRNA sense strand
gaaaugacucuucaaauca

SEQ ID NO: 1315863 - RNA, 19 nt, Homo sapiens
  misc_RNA (1)...(19): siRNA sense strand
gggcagagcuggaugagau

SEQ ID NO: 1315864 - RNA, 19 nt, Homo sapiens
  misc_RNA (1)...(19): siRNA sense strand
gaacaagaaacacaaagaa

SEQ ID NO: 1315865 - RNA, 19 nt, Homo sapiens
  misc_RNA (1)...(19): siRNA sense strand
ccagcucacugcuaauuua

SEQ ID NO: 1315866 - RNA, 19 nt, Homo sapiens
  misc_RNA (1)...(19): siRNA sense strand
cagaaaggaacuagaauua

SEQ ID NO: 1315867 - RNA, 19 nt, Homo sapiens
  misc_RNA (1)...(19): siRNA sense strand
ggaaaugggugagguuguu

SEQ ID NO: 1315868 - RNA, 19 nt, Homo sapiens
  misc_RNA (1)...(19): siRNA sense strand
acagagagcuggaagaaau

SEQ ID NO: 1315869 - RNA, 19 nt, Homo sapiens
  misc_RNA (1)...(19): siRNA sense strand
gaacauggaaaggaaauuu

SEQ ID NO: 1315870 - RNA, 19 nt, Homo sapiens
  misc_RNA (1)...(19): siRNA sense strand
agaacaagaccacuuauua

SEQ ID NO: 1315871 - RNA, 19 nt, Homo sapiens
  misc_RNA (1)...(19): siRNA sense strand
gaacaagaccacuuauuag

SEQ ID NO: 1315872 - RNA, 19 nt, Homo sapiens
  misc_RNA (1)...(19): siRNA sense strand
gacaguggaugugaaauuu

SEQ ID NO: 1315873 - RNA, 19 nt, Homo sapiens
  misc_RNA (1)...(19): siRNA sense strand
cagaauggcugaaucacaa

SEQ ID NO: 1315874 - RNA, 19 nt, Homo sapiens
  misc_RNA (1)...(19): siRNA sense strand
ggaagcagcaugagauuga

SEQ ID NO: 1315875 - RNA, 19 nt, Homo sapiens
  misc_RNA (1)...(19): siRNA sense strand
agaaaugacucuucaaauc

SEQ ID NO: 1315876 - RNA, 19 nt, Homo sapiens
  misc_RNA (1)...(19): siRNA sense strand
gaacaggaaagccuacaaa

SEQ ID NO: 1315877 - RNA, 19 nt, Homo sapiens
  misc_RNA (1)...(19): siRNA sense strand
acaagaagcugaauuagag

SEQ ID NO: 1315878 - RNA, 19 nt, Homo sapiens
  misc_RNA (1)...(19): siRNA sense strand
guagagagcuagaaaucau

SEQ ID NO: 1315879 - RNA, 19 nt, Homo sapiens
  misc_RNA (1)...(19): siRNA sense strand
gaaagaaacugaacaaaac

SEQ ID NO: 1315880 - RNA, 19 nt, Homo sapiens
  misc_RNA (1)...(19): siRNA sense strand
gaaaugaggguuaccuaug

SEQ ID NO: 1315881 - RNA, 19 nt, Homo sapiens
  misc_RNA (1)...(19): siRNA sense strand
ggaaacaaauaucguuaag

SEQ ID NO: 1315882 - RNA, 19 nt, Homo sapiens
  misc_RNA (1)...(19): siRNA sense strand
gcagauagugcaaaugaaa

SEQ ID NO: 1315883 - RNA, 19 nt, Homo sapiens
  misc_RNA (1)...(19): siRNA sense strand
caacagauccucacucauc

SEQ ID NO: 1315884 - RNA, 19 nt, Homo sapiens
  misc_RNA (1)...(19): siRNA sense strand
aggaaagccuacaaauuua

SEQ ID NO: 1315885 - RNA, 19 nt, Homo sapiens
  misc_RNA (1)...(19): siRNA sense strand
gauccagaauuacaagauu

SEQ ID NO: 1315886 - RNA, 19 nt, Homo sapiens
  misc_RNA (1)...(19): siRNA sense strand
guacuuaaaucagaacaga

SEQ ID NO: 1315887 - RNA, 19 nt, Homo sapiens
  misc_RNA (1)...(19): siRNA sense strand
gaacagauucagagagcua

SEQ ID NO: 1315888 - RNA, 19 nt, Homo sapiens
  misc_RNA (1)...(19): siRNA sense strand
ggcaauaaaugaacugaau

SEQ ID NO: 1315889 - RNA, 19 nt, Homo sapiens
  misc_RNA (1)...(19): siRNA sense strand
agaaacagcacucauagua

SEQ ID NO: 1315890 - RNA, 19 nt, Homo sapiens
  misc_RNA (1)...(19): siRNA sense strand
gaacuggaaagugaaauuu

SEQ ID NO: 1315891 - RNA, 19 nt, Homo sapiens
  misc_RNA (1)...(19): siRNA sense strand
aggcagagauccacuguuu

SEQ ID NO: 1315892 - RNA, 19 nt, Homo sapiens
  misc_RNA (1)...(19): siRNA sense strand
gcaguguccuuggugaaua

SEQ ID NO: 1315893 - RNA, 19 nt, Homo sapiens
  misc_RNA (1)...(19): siRNA sense strand
acagaaacauggugagauu

SEQ ID NO: 1315894 - RNA, 19 nt, Homo sapiens
  misc_RNA (1)...(19): siRNA sense strand
gagcuucauuugcaaagaa

SEQ ID NO: 1315895 - RNA, 19 nt, Homo sapiens
  misc_RNA (1)...(19): siRNA sense strand
aagaagagcuuuccaaacu

SEQ ID NO: 1315896 - RNA, 19 nt, Homo sapiens
  misc_RNA (1)...(19): siRNA sense strand
agaaacaggugaugaagga

SEQ ID NO: 1315897 - RNA, 19 nt, Homo sapiens
  misc_RNA (1)...(19): siRNA sense strand
gauagaugguuuacagaau

SEQ ID NO: 1315898 - RNA, 19 nt, Homo sapiens
  misc_RNA (1)...(19): siRNA sense strand
agaaguagcuaagguuauu

SEQ ID NO: 1315899 - RNA, 19 nt, Homo sapiens
  misc_RNA (1)...(19): siRNA sense strand
gaauucuggugauuacauu

SEQ ID NO: 1315900 - RNA, 19 nt, Homo sapiens
  misc_RNA (1)...(19): siRNA sense strand
gaucaaggaacuucagaaa

SEQ ID NO: 1315901 - RNA, 19 nt, Homo sapiens
  misc_RNA (1)...(19): siRNA sense strand
caaguuucauugagaugua

SEQ ID NO: 1315902 - RNA, 19 nt, Homo sapiens
  misc_RNA (1)...(19): siRNA sense strand
gcaaaagaaccaagaaaua

SEQ ID NO: 1315903 - RNA, 19 nt, Homo sapiens
  misc_RNA (1)...(19): siRNA sense strand
guaugaaacuugaauuugg

SEQ ID NO: 1315904 - RNA, 19 nt, Homo sapiens
  misc_RNA (1)...(19): siRNA sense strand
caaaguaacagaagaauac

SEQ ID NO: 1315905 - RNA, 19 nt, Homo sapiens
  misc_RNA (1)...(19): siRNA sense strand
aaauaugacuguuggagaa

SEQ ID NO: 1315906 - RNA, 19 nt, Homo sapiens
  misc_RNA (1)...(19): siRNA sense strand
ggaagaacuaggacuaauu

SEQ ID NO: 1315907 - RNA, 19 nt, Homo sapiens
  misc_RNA (1)...(19): siRNA sense strand
guuaaugaauguggcaaua

SEQ ID NO: 1315908 - RNA, 19 nt, Homo sapiens
  misc_RNA (1)...(19): siRNA sense strand
ggaagaagaauuugguguu

SEQ ID NO: 1315909 - RNA, 19 nt, Homo sapiens
  misc_RNA (1)...(19): siRNA sense strand
gauggaagcccaacgcauu

SEQ ID NO: 1315910 - RNA, 19 nt, Homo sapiens
  misc_RNA (1)...(19): siRNA sense strand
ucagagagcuagacagaca

SEQ ID NO: 1315911 - RNA, 19 nt, Homo sapiens
  misc_RNA (1)...(19): siRNA sense strand
caagaccacuuauuagaag

SEQ ID NO: 1315912 - RNA, 19 nt, Homo sapiens
  misc_RNA (1)...(19): siRNA sense strand
ugaagaacaagaccacuua

SEQ ID NO: 1315913 - RNA, 19 nt, Homo sapiens
  misc_RNA (1)...(19): siRNA sense strand
gaacaaggagcacaagaca

SEQ ID NO: 1315914 - RNA, 19 nt, Homo sapiens
  misc_RNA (1)...(19): siRNA sense strand
ugacugcaguucagaggua

SEQ ID NO: 1315915 - RNA, 19 nt, Homo sapiens
  misc_RNA (1)...(19): siRNA sense strand
caguggaugugaaauuuaa

SEQ ID NO: 1315916 - RNA, 19 nt, Homo sapiens
  misc_RNA (1)...(19): siRNA sense strand
gaaauuaucacaggaucaa

SEQ ID NO: 1315917 - RNA, 19 nt, Homo sapiens
  misc_RNA (1)...(19): siRNA sense strand
gaggaaacaaauaucguua

SEQ ID NO: 1315918 - RNA, 19 nt, Homo sapiens
  misc_RNA (1)...(19): siRNA sense strand
caacaaaguaacagaagaa

SEQ ID NO: 1315919 - RNA, 19 nt, Homo sapiens
  misc_RNA (1)...(19): siRNA sense strand
gaauaaauccaacuacagu

SEQ ID NO: 1315920 - RNA, 19 nt, Homo sapiens
  misc_RNA (1)...(19): siRNA sense strand
aaacaaagagauggcauua

SEQ ID NO: 1315921 - RNA, 19 nt, Homo sapiens
  misc_RNA (1)...(19): siRNA sense strand
caaacugaaggaagauuua

SEQ ID NO: 1315922 - RNA, 19 nt, Homo sapiens
  misc_RNA (1)...(19): siRNA sense strand
ccgccaagcuuaccuguug

SEQ ID NO: 1315923 - RNA, 19 nt, Homo sapiens
  misc_RNA (1)...(19): siRNA sense strand
gaaagaacucaauguacuu

SEQ ID NO: 1315924 - RNA, 19 nt, Homo sapiens
  misc_RNA (1)...(19): siRNA sense strand
ucagaaagaacucaaugua

SEQ ID NO: 1315925 - RNA, 19 nt, Homo sapiens
  misc_RNA (1)...(19): siRNA sense strand
gagaagaaaguaagcaaga

SEQ ID NO: 1315926 - RNA, 19 nt, Homo sapiens
  misc_RNA (1)...(19): siRNA sense strand
caagagaaagaacaaguuu

SEQ ID NO: 1315927 - RNA, 19 nt, Homo sapiens
  misc_RNA (1)...(19): siRNA sense strand
gaaaauacauacuccuguu

SEQ ID NO: 1315928 - RNA, 19 nt, Homo sapiens
  misc_RNA (1)...(19): siRNA sense strand
gaaauacucagacaagaag

SEQ ID NO: 1315929 - RNA, 19 nt, Homo sapiens
  misc_RNA (1)...(19): siRNA sense strand
gcacacucuucucaacaaa

SEQ ID NO: 1315930 - RNA, 19 nt, Homo sapiens
  misc_RNA (1)...(19): siRNA sense strand
uaaccaagcgagagaaauu

SEQ ID NO: 1315931 - RNA, 19 nt, Homo sapiens
  misc_RNA (1)...(19): siRNA sense strand
gaagcugccauuaaacaaa

SEQ ID NO: 1315932 - RNA, 19 nt, Homo sapiens
  misc_RNA (1)...(19): siRNA sense strand
ggcagugucugaagaaugu

SEQ ID NO: 1315933 - RNA, 19 nt, Homo sapiens
  misc_RNA (1)...(19): siRNA sense strand
ggaucaguuucuaaaguaa

SEQ ID NO: 1315934 - RNA, 19 nt, Homo sapiens
  misc_RNA (1)...(19): siRNA sense strand
caccaugauuugaauauug

SEQ ID NO: 1315935 - RNA, 19 nt, Homo sapiens
  misc_RNA (1)...(19): siRNA sense strand
caacaagcaagaagagaaa

SEQ ID NO: 1315936 - RNA, 19 nt, Homo sapiens
  misc_RNA (1)...(19): siRNA sense strand
caaagagauggcauuauaa

SEQ ID NO: 1315937 - RNA, 19 nt, Homo sapiens
  misc_RNA (1)...(19): siRNA sense strand
uugaagaccuuguugaaga

SEQ ID NO: 1315938 - RNA, 19 nt, Homo sapiens
  misc_RNA (1)...(19): siRNA sense strand
ucagcuaaaugaagagauu

SEQ ID NO: 1315939 - RNA, 19 nt, Homo sapiens
  misc_RNA (1)...(19): siRNA sense strand
gaacacagcuucuauuuag

SEQ ID NO: 1315940 - RNA, 19 nt, Homo sapiens
  misc_RNA (1)...(19): siRNA sense strand
gaaauguucuccaaagaua

SEQ ID NO: 1315941 - RNA, 19 nt, Homo sapiens
  misc_RNA (1)...(19): siRNA sense strand
gacaauagcugaacaagaa

SEQ ID NO: 1315942 - RNA, 19 nt, Homo sapiens
  misc_RNA (1)...(19): siRNA sense strand
acaaagagauggcauuaua

SEQ ID NO: 1315943 - RNA, 19 nt, Homo sapiens
  misc_RNA (1)...(19): siRNA sense strand
uagcacagcugcagacuua

SEQ ID NO: 1315944 - RNA, 19 nt, Homo sapiens
  misc_RNA (1)...(19): siRNA sense strand
caaguaagcucuuuauuag

SEQ ID NO: 1315945 - RNA, 19 nt, Homo sapiens
  misc_RNA (1)...(19): siRNA sense strand
gcagacagaugguaugaaa

SEQ ID NO: 1315946 - RNA, 19 nt, Homo sapiens
  misc_RNA (1)...(19): siRNA sense strand
guucgaaacugauauagua

SEQ ID NO: 1315947 - RNA, 19 nt, Homo sapiens
  misc_RNA (1)...(19): siRNA sense strand
gaagaacaguuggaagaua

SEQ ID NO: 1315948 - RNA, 19 nt, Homo sapiens
  misc_RNA (1)...(19): siRNA sense strand
acaaaggaaucaucacuua

SEQ ID NO: 1315949 - RNA, 19 nt, Homo sapiens
  misc_RNA (1)...(19): siRNA sense strand
caggaaagccuacaaauuu

SEQ ID NO: 1315950 - RNA, 19 nt, Homo sapiens
  misc_RNA (1)...(19): siRNA sense strand
gaagagaaaucauaaagac

SEQ ID NO: 1315951 - RNA, 19 nt, Homo sapiens
  misc_RNA (1)...(19): siRNA sense strand
gaaguuaacuaucaagagu

SEQ ID NO: 1315952 - RNA, 19 nt, Homo sapiens
  misc_RNA (1)...(19): siRNA sense strand
gaagagcuuuccaaacuga

SEQ ID NO: 1315953 - RNA, 19 nt, Homo sapiens
  misc_RNA (1)...(19): siRNA sense strand
gaagaacuaggacuaauuu

SEQ ID NO: 1315954 - RNA, 19 nt, Homo sapiens
  misc_RNA (1)...(19): siRNA sense strand
gaagaagaauuugguguug

SEQ ID NO: 1315955 - RNA, 19 nt, Homo sapiens
  misc_RNA (1)...(19): siRNA sense strand
gaacaaguuucauugagau

SEQ ID NO: 1315956 - RNA, 19 nt, Homo sapiens
  misc_RNA (1)...(19): siRNA sense strand
aaacugaacugucuagaau

SEQ ID NO: 1315957 - RNA, 19 nt, Homo sapiens
  misc_RNA (1)...(19): siRNA sense strand
caaguuaucuucucugcaa

SEQ ID NO: 1315958 - RNA, 19 nt, Homo sapiens
  misc_RNA (1)...(19): siRNA sense strand
gcagauagaugguuuacag

SEQ ID NO: 1315959 - RNA, 19 nt, Homo sapiens
  misc_RNA (1)...(19): siRNA sense strand
gaagaaguagcuaagguua

SEQ ID NO: 1315960 - RNA, 19 nt, Homo sapiens
  misc_RNA (1)...(19): siRNA sense strand
caacagaacucauggaaaa

SEQ ID NO: 1315961 - RNA, 19 nt, Homo sapiens
  misc_RNA (1)...(19): siRNA sense strand
uaacccagcucacugcuaa

SEQ ID NO: 1315962 - RNA, 19 nt, Homo sapiens
  misc_RNA (1)...(19): siRNA sense strand
gaaaugacucuucaaauca

SEQ ID NO: 1315963 - RNA, 19 nt, Homo sapiens
  misc_RNA (1)...(19): siRNA sense strand
gggcagagcuggaugagau

SEQ ID NO: 1315964 - RNA, 19 nt, Homo sapiens
  misc_RNA (1)...(19): siRNA sense strand
gaacaagaaacacaaagaa

SEQ ID NO: 1315965 - RNA, 19 nt, Homo sapiens
  misc_RNA (1)...(19): siRNA sense strand
ccagcucacugcuaauuua

SEQ ID NO: 1315966 - RNA, 19 nt, Homo sapiens
  misc_RNA (1)...(19): siRNA sense strand
cagaaaggaacuagaauua

SEQ ID NO: 1315967 - RNA, 19 nt, Homo sapiens
  misc_RNA (1)...(19): siRNA sense strand
ggaaaugggugagguuguu

SEQ ID NO: 1315968 - RNA, 19 nt, Homo sapiens
  misc_RNA (1)...(19): siRNA sense strand
acagagagcuggaagaaau

SEQ ID NO: 1315969 - RNA, 19 nt, Homo sapiens
  misc_RNA (1)...(19): siRNA sense strand
gaacauggaaaggaaauuu

SEQ ID NO: 1315970 - RNA, 19 nt, Homo sapiens
  misc_RNA (1)...(19): siRNA sense strand
agaacaagaccacuuauua

SEQ ID NO: 1315971 - RNA, 19 nt, Homo sapiens
  misc_RNA (1)...(19): siRNA sense strand
gaacaagaccacuuauuag

SEQ ID NO: 1315972 - RNA, 19 nt, Homo sapiens
  misc_RNA (1)...(19): siRNA sense strand
gacaguggaugugaaauuu

SEQ ID NO: 1315973 - RNA, 19 nt, Homo sapiens
  misc_RNA (1)...(19): siRNA sense strand
cagaauggcugaaucacaa

SEQ ID NO: 1315974 - RNA, 19 nt, Homo sapiens
  misc_RNA (1)...(19): siRNA sense strand
ggaagcagcaugagauuga

SEQ ID NO: 1315975 - RNA, 19 nt, Homo sapiens
  misc_RNA (1)...(19): siRNA sense strand
agaaaugacucuucaaauc

SEQ ID NO: 1315976 - RNA, 19 nt, Homo sapiens
  misc_RNA (1)...(19): siRNA sense strand
gaacaggaaagccuacaaa

SEQ ID NO: 1315977 - RNA, 19 nt, Homo sapiens
  misc_RNA (1)...(19): siRNA sense strand
acaagaagcugaauuagag

SEQ ID NO: 1315978 - RNA, 19 nt, Homo sapiens
  misc_RNA (1)...(19): siRNA sense strand
guagagagcuagaaaucau

SEQ ID NO: 1315979 - RNA, 19 nt, Homo sapiens
  misc_RNA (1)...(19): siRNA sense strand
gaaagaaacugaacaaaac

SEQ ID NO: 1315980 - RNA, 19 nt, Homo sapiens
  misc_RNA (1)...(19): siRNA sense strand
gaaaugaggguuaccuaug

SEQ ID NO: 1315981 - RNA, 19 nt, Homo sapiens
  misc_RNA (1)...(19): siRNA sense strand
ggaaacaaauaucguuaag

SEQ ID NO: 1315982 - RNA, 19 nt, Homo sapiens
  misc_RNA (1)...(19): siRNA sense strand
gcagauagugcaaaugaaa

SEQ ID NO: 1315983 - RNA, 19 nt, Homo sapiens
  misc_RNA (1)...(19): siRNA sense strand
caacagauccucacucauc

SEQ ID NO: 1315984 - RNA, 19 nt, Homo sapiens
  misc_RNA (1)...(19): siRNA sense strand
aggaaagccuacaaauuua

SEQ ID NO: 1315985 - RNA, 19 nt, Homo sapiens
  misc_RNA (1)...(19): siRNA sense strand
gauccagaauuacaagauu

SEQ ID NO: 1315986 - RNA, 19 nt, Homo sapiens
  misc_RNA (1)...(19): siRNA sense strand
guacuuaaaucagaacaga

SEQ ID NO: 1315987 - RNA, 19 nt, Homo sapiens
  misc_RNA (1)...(19): siRNA sense strand
gaacagauucagagagcua

SEQ ID NO: 1315988 - RNA, 19 nt, Homo sapiens
  misc_RNA (1)...(19): siRNA sense strand
ggcaauaaaugaacugaau

SEQ ID NO: 1315989 - RNA, 19 nt, Homo sapiens
  misc_RNA (1)...(19): siRNA sense strand
agaaacagcacucauagua

SEQ ID NO: 1315990 - RNA, 19 nt, Homo sapiens
  misc_RNA (1)...(19): siRNA sense strand
gaacuggaaagugaaauuu

SEQ ID NO: 1315991 - RNA, 19 nt, Homo sapiens
  misc_RNA (1)...(19): siRNA sense strand
aggcagagauccacuguuu

SEQ ID NO: 1315992 - RNA, 19 nt, Homo sapiens
  misc_RNA (1)...(19): siRNA sense strand
gcaguguccuuggugaaua

SEQ ID NO: 1315993 - RNA, 19 nt, Homo sapiens
  misc_RNA (1)...(19): siRNA sense strand
acagaaacauggugagauu

SEQ ID NO: 1315994 - RNA, 19 nt, Homo sapiens
  misc_RNA (1)...(19): siRNA sense strand
gagcuucauuugcaaagaa

SEQ ID NO: 1315995 - RNA, 19 nt, Homo sapiens
  misc_RNA (1)...(19): siRNA sense strand
aagaagagcuuuccaaacu

SEQ ID NO: 1315996 - RNA, 19 nt, Homo sapiens
  misc_RNA (1)...(19): siRNA sense strand
agaaacaggugaugaagga

SEQ ID NO: 1315997 - RNA, 19 nt, Homo sapiens
  misc_RNA (1)...(19): siRNA sense strand
gauagaugguuuacagaau

SEQ ID NO: 1315998 - RNA, 19 nt, Homo sapiens
  misc_RNA (1)...(19): siRNA sense strand
agaaguagcuaagguuauu

SEQ ID NO: 1315999 - RNA, 19 nt, Homo sapiens
  misc_RNA (1)...(19): siRNA sense strand
gaauucuggugauuacauu

SEQ ID NO: 1316000 - RNA, 19 nt, Homo sapiens
  misc_RNA (1)...(19): siRNA sense strand
gaucaaggaacuucagaaa

SEQ ID NO: 1316001 - RNA, 19 nt, Homo sapiens
  misc_RNA (1)...(19): siRNA sense strand
caaguuucauugagaugua

SEQ ID NO: 1316002 - RNA, 19 nt, Homo sapiens
  misc_RNA (1)...(19): siRNA sense strand
gcaaaagaaccaagaaaua

SEQ ID NO: 1316003 - RNA, 19 nt, Homo sapiens
  misc_RNA (1)...(19): siRNA sense strand
guaugaaacuugaauuugg

SEQ ID NO: 1316004 - RNA, 19 nt, Homo sapiens
  misc_RNA (1)...(19): siRNA sense strand
caaaguaacagaagaauac

SEQ ID NO: 1316005 - RNA, 19 nt, Homo sapiens
  misc_RNA (1)...(19): siRNA sense strand
aaauaugacuguuggagaa

SEQ ID NO: 1316006 - RNA, 19 nt, Homo sapiens
  misc_RNA (1)...(19): siRNA sense strand
ggaagaacuaggacuaauu

SEQ ID NO: 1316007 - RNA, 19 nt, Homo sapiens
  misc_RNA (1)...(19): siRNA sense strand
guuaaugaauguggcaaua

SEQ ID NO: 1316008 - RNA, 19 nt, Homo sapiens
  misc_RNA (1)...(19): siRNA sense strand
ggaagaagaauuugguguu

SEQ ID NO: 1316009 - RNA, 19 nt, Homo sapiens
  misc_RNA (1)...(19): siRNA sense strand
gauggaagcccaacgcauu

SEQ ID NO: 1316010 - RNA, 19 nt, Homo sapiens
  misc_RNA (1)...(19): siRNA sense strand
ucagagagcuagacagaca

SEQ ID NO: 1316011 - RNA, 19 nt, Homo sapiens
  misc_RNA (1)...(19): siRNA sense strand
caagaccacuuauuagaag

SEQ ID NO: 1316012 - RNA, 19 nt, Homo sapiens
  misc_RNA (1)...(19): siRNA sense strand
ugaagaacaagaccacuua

SEQ ID NO: 1316013 - RNA, 19 nt, Homo sapiens
  misc_RNA (1)...(19): siRNA sense strand
gaacaaggagcacaagaca

SEQ ID NO: 1316014 - RNA, 19 nt, Homo sapiens
  misc_RNA (1)...(19): siRNA sense strand
ugacugcaguucagaggua

SEQ ID NO: 1316015 - RNA, 19 nt, Homo sapiens
  misc_RNA (1)...(19): siRNA sense strand
caguggaugugaaauuuaa

SEQ ID NO: 1316016 - RNA, 19 nt, Homo sapiens
  misc_RNA (1)...(19): siRNA sense strand
gaaauuaucacaggaucaa

SEQ ID NO: 1316017 - RNA, 19 nt, Homo sapiens
  misc_RNA (1)...(19): siRNA sense strand
gaggaaacaaauaucguua

SEQ ID NO: 1316018 - RNA, 19 nt, Homo sapiens
  misc_RNA (1)...(19): siRNA sense strand
caacaaaguaacagaagaa

SEQ ID NO: 1316019 - RNA, 19 nt, Homo sapiens
  misc_RNA (1)...(19): siRNA sense strand
gaauaaauccaacuacagu

SEQ ID NO: 1316020 - RNA, 19 nt, Homo sapiens
  misc_RNA (1)...(19): siRNA sense strand
aaacaaagagauggcauua

SEQ ID NO: 1316021 - RNA, 19 nt, Homo sapiens
  misc_RNA (1)...(19): siRNA sense strand
caaacugaaggaagauuua

SEQ ID NO: 1316022 - RNA, 19 nt, Homo sapiens
  misc_RNA (1)...(19): siRNA sense strand
ccgccaagcuuaccuguug

SEQ ID NO: 1316023 - RNA, 19 nt, Homo sapiens
  misc_RNA (1)...(19): siRNA sense strand
gaaagaacucaauguacuu

SEQ ID NO: 1316024 - RNA, 19 nt, Homo sapiens
  misc_RNA (1)...(19): siRNA sense strand
ucagaaagaacucaaugua

SEQ ID NO: 1316025 - RNA, 19 nt, Homo sapiens
  misc_RNA (1)...(19): siRNA sense strand
gagaagaaaguaagcaaga

SEQ ID NO: 1316026 - RNA, 19 nt, Homo sapiens
  misc_RNA (1)...(19): siRNA sense strand
caagagaaagaacaaguuu

SEQ ID NO: 1316027 - RNA, 19 nt, Homo sapiens
  misc_RNA (1)...(19): siRNA sense strand
gaaaauacauacuccuguu

SEQ ID NO: 1316028 - RNA, 19 nt, Homo sapiens
  misc_RNA (1)...(19): siRNA sense strand
gaaauacucagacaagaag

SEQ ID NO: 1316029 - RNA, 19 nt, Homo sapiens
  misc_RNA (1)...(19): siRNA sense strand
gcacacucuucucaacaaa

SEQ ID NO: 1316030 - RNA, 19 nt, Homo sapiens
  misc_RNA (1)...(19): siRNA sense strand
uaaccaagcgagagaaauu

SEQ ID NO: 1316031 - RNA, 19 nt, Homo sapiens
  misc_RNA (1)...(19): siRNA sense strand
gaagcugccauuaaacaaa

SEQ ID NO: 1316032 - RNA, 19 nt, Homo sapiens
  misc_RNA (1)...(19): siRNA sense strand
ggcagugucugaagaaugu

SEQ ID NO: 1316033 - RNA, 19 nt, Homo sapiens
  misc_RNA (1)...(19): siRNA sense strand
ggaucaguuucuaaaguaa

SEQ ID NO: 1316034 - RNA, 19 nt, Homo sapiens
  misc_RNA (1)...(19): siRNA sense strand
caccaugauuugaauauug

SEQ ID NO: 1316035 - RNA, 19 nt, Homo sapiens
  misc_RNA (1)...(19): siRNA sense strand
caacaagcaagaagagaaa

SEQ ID NO: 1316036 - RNA, 19 nt, Homo sapiens
  misc_RNA (1)...(19): siRNA sense strand
caaagagauggcauuauaa

SEQ ID NO: 1316037 - RNA, 19 nt, Homo sapiens
  misc_RNA (1)...(19): siRNA sense strand
uugaagaccuuguugaaga

SEQ ID NO: 1316038 - RNA, 19 nt, Homo sapiens
  misc_RNA (1)...(19): siRNA sense strand
ucagcuaaaugaagagauu

SEQ ID NO: 1316039 - RNA, 19 nt, Homo sapiens
  misc_RNA (1)...(19): siRNA sense strand
gaacacagcuucuauuuag

SEQ ID NO: 1316040 - RNA, 19 nt, Homo sapiens
  misc_RNA (1)...(19): siRNA sense strand
gaaauguucuccaaagaua

SEQ ID NO: 1316041 - RNA, 19 nt, Homo sapiens
  misc_RNA (1)...(19): siRNA sense strand
gacaauagcugaacaagaa

SEQ ID NO: 1316042 - RNA, 19 nt, Homo sapiens
  misc_RNA (1)...(19): siRNA sense strand
acaaagagauggcauuaua

SEQ ID NO: 1316043 - RNA, 19 nt, Homo sapiens
  misc_RNA (1)...(19): siRNA sense strand
uagcacagcugcagacuua

SEQ ID NO: 1316044 - RNA, 19 nt, Homo sapiens
  misc_RNA (1)...(19): siRNA sense strand
caaguaagcucuuuauuag

SEQ ID NO: 1316045 - RNA, 19 nt, Homo sapiens
  misc_RNA (1)...(19): siRNA sense strand
gcagacagaugguaugaaa

SEQ ID NO: 1316046 - RNA, 19 nt, Homo sapiens
  misc_RNA (1)...(19): siRNA sense strand
guucgaaacugauauagua

SEQ ID NO: 1316047 - RNA, 19 nt, Homo sapiens
  misc_RNA (1)...(19): siRNA sense strand
gaagaacaguuggaagaua

SEQ ID NO: 1316048 - RNA, 19 nt, Homo sapiens
  misc_RNA (1)...(19): siRNA sense strand
acaaaggaaucaucacuua

SEQ ID NO: 1316049 - RNA, 19 nt, Homo sapiens
  misc_RNA (1)...(19): siRNA sense strand
caggaaagccuacaaauuu

SEQ ID NO: 1316050 - RNA, 19 nt, Homo sapiens
  misc_RNA (1)...(19): siRNA sense strand
gaagagaaaucauaaagac

SEQ ID NO: 1316051 - RNA, 19 nt, Homo sapiens
  misc_RNA (1)...(19): siRNA sense strand
gaaguuaacuaucaagagu

SEQ ID NO: 1316052 - RNA, 19 nt, Homo sapiens
  misc_RNA (1)...(19): siRNA sense strand
gaagagcuuuccaaacuga

SEQ ID NO: 1316053 - RNA, 19 nt, Homo sapiens
  misc_RNA (1)...(19): siRNA sense strand
gaagaacuaggacuaauuu

SEQ ID NO: 1316054 - RNA, 19 nt, Homo sapiens
  misc_RNA (1)...(19): siRNA sense strand
gaagaagaauuugguguug

SEQ ID NO: 1316055 - RNA, 19 nt, Homo sapiens
  misc_RNA (1)...(19): siRNA sense strand
gaacaaguuucauugagau

SEQ ID NO: 1316056 - RNA, 19 nt, Homo sapiens
  misc_RNA (1)...(19): siRNA sense strand
aaacugaacugucuagaau

SEQ ID NO: 1316057 - RNA, 19 nt, Homo sapiens
  misc_RNA (1)...(19): siRNA sense strand
caaguuaucuucucugcaa

SEQ ID NO: 1316058 - RNA, 19 nt, Homo sapiens
  misc_RNA (1)...(19): siRNA sense strand
gcagauagaugguuuacag

SEQ ID NO: 1316059 - RNA, 19 nt, Homo sapiens
  misc_RNA (1)...(19): siRNA sense strand
gaagaaguagcuaagguua

SEQ ID NO: 1316060 - RNA, 19 nt, Homo sapiens
  misc_RNA (1)...(19): siRNA sense strand
caacagaacucauggaaaa

SEQ ID NO: 1316061 - RNA, 19 nt, Homo sapiens
  misc_RNA (1)...(19): siRNA sense strand
uaacccagcucacugcuaa

SEQ ID NO: 1316062 - RNA, 19 nt, Homo sapiens
  misc_RNA (1)...(19): siRNA sense strand
gaaaugacucuucaaauca

SEQ ID NO: 1316063 - RNA, 19 nt, Homo sapiens
  misc_RNA (1)...(19): siRNA sense strand
gggcagagcuggaugagau

SEQ ID NO: 1316064 - RNA, 19 nt, Homo sapiens
  misc_RNA (1)...(19): siRNA sense strand
gaacaagaaacacaaagaa

SEQ ID NO: 1316065 - RNA, 19 nt, Homo sapiens
  misc_RNA (1)...(19): siRNA sense strand
ccagcucacugcuaauuua

SEQ ID NO: 1316066 - RNA, 19 nt, Homo sapiens
  misc_RNA (1)...(19): siRNA sense strand
cagaaaggaacuagaauua

SEQ ID NO: 1316067 - RNA, 19 nt, Homo sapiens
  misc_RNA (1)...(19): siRNA sense strand
ggaaaugggugagguuguu

SEQ ID NO: 1316068 - RNA, 19 nt, Homo sapiens
  misc_RNA (1)...(19): siRNA sense strand
acagagagcuggaagaaau

SEQ ID NO: 1316069 - RNA, 19 nt, Homo sapiens
  misc_RNA (1)...(19): siRNA sense strand
gaacauggaaaggaaauuu

SEQ ID NO: 1316070 - RNA, 19 nt, Homo sapiens
  misc_RNA (1)...(19): siRNA sense strand
agaacaagaccacuuauua

SEQ ID NO: 1316071 - RNA, 19 nt, Homo sapiens
  misc_RNA (1)...(19): siRNA sense strand
gaacaagaccacuuauuag

SEQ ID NO: 1316072 - RNA, 19 nt, Homo sapiens
  misc_RNA (1)...(19): siRNA sense strand
gacaguggaugugaaauuu

SEQ ID NO: 1316073 - RNA, 19 nt, Homo sapiens
  misc_RNA (1)...(19): siRNA sense strand
cagaauggcugaaucacaa

SEQ ID NO: 1316074 - RNA, 19 nt, Homo sapiens
  misc_RNA (1)...(19): siRNA sense strand
ggaagcagcaugagauuga

SEQ ID NO: 1316075 - RNA, 19 nt, Homo sapiens
  misc_RNA (1)...(19): siRNA sense strand
agaaaugacucuucaaauc

SEQ ID NO: 1316076 - RNA, 19 nt, Homo sapiens
  misc_RNA (1)...(19): siRNA sense strand
gaacaggaaagccuacaaa

SEQ ID NO: 1316077 - RNA, 19 nt, Homo sapiens
  misc_RNA (1)...(19): siRNA sense strand
acaagaagcugaauuagag

SEQ ID NO: 1316078 - RNA, 19 nt, Homo sapiens
  misc_RNA (1)...(19): siRNA sense strand
guagagagcuagaaaucau

SEQ ID NO: 1316079 - RNA, 19 nt, Homo sapiens
  misc_RNA (1)...(19): siRNA sense strand
gaaagaaacugaacaaaac

SEQ ID NO: 1316080 - RNA, 19 nt, Homo sapiens
  misc_RNA (1)...(19): siRNA sense strand
gaaaugaggguuaccuaug

SEQ ID NO: 1316081 - RNA, 19 nt, Homo sapiens
  misc_RNA (1)...(19): siRNA sense strand
ggaaacaaauaucguuaag

SEQ ID NO: 1316082 - RNA, 19 nt, Homo sapiens
  misc_RNA (1)...(19): siRNA sense strand
gcagauagugcaaaugaaa

SEQ ID NO: 1316083 - RNA, 19 nt, Homo sapiens
  misc_RNA (1)...(19): siRNA sense strand
caacagauccucacucauc

SEQ ID NO: 1316084 - RNA, 19 nt, Homo sapiens
  misc_RNA (1)...(19): siRNA sense strand
aggaaagccuacaaauuua

SEQ ID NO: 1316085 - RNA, 19 nt, Homo sapiens
  misc_RNA (1)...(19): siRNA sense strand
gauccagaauuacaagauu

SEQ ID NO: 1316086 - RNA, 19 nt, Homo sapiens
  misc_RNA (1)...(19): siRNA sense strand
guacuuaaaucagaacaga

SEQ ID NO: 1316087 - RNA, 19 nt, Homo sapiens
  misc_RNA (1)...(19): siRNA sense strand
gaacagauucagagagcua

SEQ ID NO: 1316088 - RNA, 19 nt, Homo sapiens
  misc_RNA (1)...(19): siRNA sense strand
ggcaauaaaugaacugaau

SEQ ID NO: 1316089 - RNA, 19 nt, Homo sapiens
  misc_RNA (1)...(19): siRNA sense strand
agaaacagcacucauagua

SEQ ID NO: 1316090 - RNA, 19 nt, Homo sapiens
  misc_RNA (1)...(19): siRNA sense strand
gaacuggaaagugaaauuu

SEQ ID NO: 1316091 - RNA, 19 nt, Homo sapiens
  misc_RNA (1)...(19): siRNA sense strand
aggcagagauccacuguuu

SEQ ID NO: 1316092 - RNA, 19 nt, Homo sapiens
  misc_RNA (1)...(19): siRNA sense strand
gcaguguccuuggugaaua

SEQ ID NO: 1316093 - RNA, 19 nt, Homo sapiens
  misc_RNA (1)...(19): siRNA sense strand
acagaaacauggugagauu

SEQ ID NO: 1316094 - RNA, 19 nt, Homo sapiens
  misc_RNA (1)...(19): siRNA sense strand
gagcuucauuugcaaagaa

SEQ ID NO: 1316095 - RNA, 19 nt, Homo sapiens
  misc_RNA (1)...(19): siRNA sense strand
aagaagagcuuuccaaacu

SEQ ID NO: 1316096 - RNA, 19 nt, Homo sapiens
  misc_RNA (1)...(19): siRNA sense strand
agaaacaggugaugaagga

SEQ ID NO: 1316097 - RNA, 19 nt, Homo sapiens
  misc_RNA (1)...(19): siRNA sense strand
gauagaugguuuacagaau

SEQ ID NO: 1316098 - RNA, 19 nt, Homo sapiens
  misc_RNA (1)...(19): siRNA sense strand
agaaguagcuaagguuauu

SEQ ID NO: 1316099 - RNA, 19 nt, Homo sapiens
  misc_RNA (1)...(19): siRNA sense strand
gaauucuggugauuacauu

SEQ ID NO: 1316100 - RNA, 19 nt, Homo sapiens
  misc_RNA (1)...(19): siRNA sense strand
gaucaaggaacuucagaaa

SEQ ID NO: 1316101 - RNA, 19 nt, Homo sapiens
  misc_RNA (1)...(19): siRNA sense strand
caaguuucauugagaugua

SEQ ID NO: 1316102 - RNA, 19 nt, Homo sapiens
  misc_RNA (1)...(19): siRNA sense strand
gcaaaagaaccaagaaaua

SEQ ID NO: 1316103 - RNA, 19 nt, Homo sapiens
  misc_RNA (1)...(19): siRNA sense strand
guaugaaacuugaauuugg

SEQ ID NO: 1316104 - RNA, 19 nt, Homo sapiens
  misc_RNA (1)...(19): siRNA sense strand
caaaguaacagaagaauac

SEQ ID NO: 1316105 - RNA, 19 nt, Homo sapiens
  misc_RNA (1)...(19): siRNA sense strand
aaauaugacuguuggagaa

SEQ ID NO: 1316106 - RNA, 19 nt, Homo sapiens
  misc_RNA (1)...(19): siRNA sense strand
ggaagaacuaggacuaauu

SEQ ID NO: 1316107 - RNA, 19 nt, Homo sapiens
  misc_RNA (1)...(19): siRNA sense strand
guuaaugaauguggcaaua

SEQ ID NO: 1316108 - RNA, 19 nt, Homo sapiens
  misc_RNA (1)...(19): siRNA sense strand
ggaagaagaauuugguguu

SEQ ID NO: 1316109 - RNA, 19 nt, Homo sapiens
  misc_RNA (1)...(19): siRNA sense strand
gauggaagcccaacgcauu

SEQ ID NO: 1316110 - RNA, 19 nt, Homo sapiens
  misc_RNA (1)...(19): siRNA sense strand
ucagagagcuagacagaca

SEQ ID NO: 1316111 - RNA, 19 nt, Homo sapiens
  misc_RNA (1)...(19): siRNA sense strand
caagaccacuuauuagaag

SEQ ID NO: 1316112 - RNA, 19 nt, Homo sapiens
  misc_RNA (1)...(19): siRNA sense strand
ugaagaacaagaccacuua

SEQ ID NO: 1316113 - RNA, 19 nt, Homo sapiens
  misc_RNA (1)...(19): siRNA sense strand
gaacaaggagcacaagaca

SEQ ID NO: 1316114 - RNA, 19 nt, Homo sapiens
  misc_RNA (1)...(19): siRNA sense strand
ugacugcaguucagaggua

SEQ ID NO: 1316115 - RNA, 19 nt, Homo sapiens
  misc_RNA (1)...(19): siRNA sense strand
caguggaugugaaauuuaa

SEQ ID NO: 1316116 - RNA, 19 nt, Homo sapiens
  misc_RNA (1)...(19): siRNA sense strand
gaaauuaucacaggaucaa

SEQ ID NO: 1316117 - RNA, 19 nt, Homo sapiens
  misc_RNA (1)...(19): siRNA sense strand
gaggaaacaaauaucguua

SEQ ID NO: 1316118 - RNA, 19 nt, Homo sapiens
  misc_RNA (1)...(19): siRNA sense strand
caacaaaguaacagaagaa

SEQ ID NO: 1316119 - RNA, 19 nt, Homo sapiens
  misc_RNA (1)...(19): siRNA sense strand
gaauaaauccaacuacagu

SEQ ID NO: 1316120 - RNA, 19 nt, Homo sapiens
  misc_RNA (1)...(19): siRNA sense strand
aaacaaagagauggcauua

SEQ ID NO: 1316121 - RNA, 19 nt, Homo sapiens
  misc_RNA (1)...(19): siRNA sense strand
caaacugaaggaagauuua

SEQ ID NO: 1316122 - RNA, 19 nt, Homo sapiens
  misc_RNA (1)...(19): siRNA sense strand
ccgccaagcuuaccuguug

SEQ ID NO: 1316123 - RNA, 19 nt, Homo sapiens
  misc_RNA (1)...(19): siRNA sense strand
gaaagaacucaauguacuu

SEQ ID NO: 1316124 - RNA, 19 nt, Homo sapiens
  misc_RNA (1)...(19): siRNA sense strand
ucagaaagaacucaaugua

SEQ ID NO: 1316125 - RNA, 19 nt, Homo sapiens
  misc_RNA (1)...(19): siRNA sense strand
gagaagaaaguaagcaaga

SEQ ID NO: 1316126 - RNA, 19 nt, Homo sapiens
  misc_RNA (1)...(19): siRNA sense strand
caagagaaagaacaaguuu

SEQ ID NO: 1316127 - RNA, 19 nt, Homo sapiens
  misc_RNA (1)...(19): siRNA sense strand
gaaaauacauacuccuguu

SEQ ID NO: 1316128 - RNA, 19 nt, Homo sapiens
  misc_RNA (1)...(19): siRNA sense strand
gaaauacucagacaagaag

SEQ ID NO: 1316129 - RNA, 19 nt, Homo sapiens
  misc_RNA (1)...(19): siRNA sense strand
gcacacucuucucaacaaa

SEQ ID NO: 1316130 - RNA, 19 nt, Homo sapiens
  misc_RNA (1)...(19): siRNA sense strand
uaaccaagcgagagaaauu

SEQ ID NO: 1316131 - RNA, 19 nt, Homo sapiens
  misc_RNA (1)...(19): siRNA sense strand
gaagcugccauuaaacaaa

SEQ ID NO: 1316132 - RNA, 19 nt, Homo sapiens
  misc_RNA (1)...(19): siRNA sense strand
ggcagugucugaagaaugu

SEQ ID NO: 1316133 - RNA, 19 nt, Homo sapiens
  misc_RNA (1)...(19): siRNA sense strand
ggaucaguuucuaaaguaa

SEQ ID NO: 1316134 - RNA, 19 nt, Homo sapiens
  misc_RNA (1)...(19): siRNA sense strand
caccaugauuugaauauug

SEQ ID NO: 1316135 - RNA, 19 nt, Homo sapiens
  misc_RNA (1)...(19): siRNA sense strand
caacaagcaagaagagaaa

SEQ ID NO: 1316136 - RNA, 19 nt, Homo sapiens
  misc_RNA (1)...(19): siRNA sense strand
caaagagauggcauuauaa

SEQ ID NO: 1316137 - RNA, 19 nt, Homo sapiens
  misc_RNA (1)...(19): siRNA sense strand
uugaagaccuuguugaaga

SEQ ID NO: 1316138 - RNA, 19 nt, Homo sapiens
  misc_RNA (1)...(19): siRNA sense strand
ucagcuaaaugaagagauu

SEQ ID NO: 1316139 - RNA, 19 nt, Homo sapiens
  misc_RNA (1)...(19): siRNA sense strand
gaacacagcuucuauuuag

SEQ ID NO: 1316140 - RNA, 19 nt, Homo sapiens
  misc_RNA (1)...(19): siRNA sense strand
gaaauguucuccaaagaua

SEQ ID NO: 1316141 - RNA, 19 nt, Homo sapiens
  misc_RNA (1)...(19): siRNA sense strand
gacaauagcugaacaagaa

SEQ ID NO: 1316142 - RNA, 19 nt, Homo sapiens
  misc_RNA (1)...(19): siRNA sense strand
acaaagagauggcauuaua

SEQ ID NO: 1316143 - RNA, 19 nt, Homo sapiens
  misc_RNA (1)...(19): siRNA sense strand
uagcacagcugcagacuua

SEQ ID NO: 1316144 - RNA, 19 nt, Homo sapiens
  misc_RNA (1)...(19): siRNA sense strand
caaguaagcucuuuauuag

SEQ ID NO: 1316145 - RNA, 19 nt, Homo sapiens
  misc_RNA (1)...(19): siRNA sense strand
gcagacagaugguaugaaa

SEQ ID NO: 1316146 - RNA, 19 nt, Homo sapiens
  misc_RNA (1)...(19): siRNA sense strand
guucgaaacugauauagua

SEQ ID NO: 1316147 - RNA, 19 nt, Homo sapiens
  misc_RNA (1)...(19): siRNA sense strand
gaagaacaguuggaagaua

SEQ ID NO: 1316148 - RNA, 19 nt, Homo sapiens
  misc_RNA (1)...(19): siRNA sense strand
acaaaggaaucaucacuua

SEQ ID NO: 1316149 - RNA, 19 nt, Homo sapiens
  misc_RNA (1)...(19): siRNA sense strand
caggaaagccuacaaauuu

SEQ ID NO: 1316150 - RNA, 19 nt, Homo sapiens
  misc_RNA (1)...(19): siRNA sense strand
gaagagaaaucauaaagac

SEQ ID NO: 1316151 - RNA, 19 nt, Homo sapiens
  misc_RNA (1)...(19): siRNA sense strand
gaaguuaacuaucaagagu

SEQ ID NO: 1316152 - RNA, 19 nt, Homo sapiens
  misc_RNA (1)...(19): siRNA sense strand
gaagagcuuuccaaacuga

SEQ ID NO: 1316153 - RNA, 19 nt, Homo sapiens
  misc_RNA (1)...(19): siRNA sense strand
gaagaacuaggacuaauuu

SEQ ID NO: 1316154 - RNA, 19 nt, Homo sapiens
  misc_RNA (1)...(19): siRNA sense strand
gaagaagaauuugguguug

SEQ ID NO: 1316155 - RNA, 19 nt, Homo sapiens
  misc_RNA (1)...(19): siRNA sense strand
gaacaaguuucauugagau

SEQ ID NO: 1316156 - RNA, 19 nt, Homo sapiens
  misc_RNA (1)...(19): siRNA sense strand
aaacugaacugucuagaau

SEQ ID NO: 1316157 - RNA, 19 nt, Homo sapiens
  misc_RNA (1)...(19): siRNA sense strand
caaguuaucuucucugcaa

SEQ ID NO: 1316158 - RNA, 19 nt, Homo sapiens
  misc_RNA (1)...(19): siRNA sense strand
gcagauagaugguuuacag

SEQ ID NO: 1316159 - RNA, 19 nt, Homo sapiens
  misc_RNA (1)...(19): siRNA sense strand
gaagaaguagcuaagguua

SEQ ID NO: 1316160 - RNA, 19 nt, Homo sapiens
  misc_RNA (1)...(19): siRNA sense strand
caacagaacucauggaaaa

SEQ ID NO: 1316161 - RNA, 19 nt, Homo sapiens
  misc_RNA (1)...(19): siRNA sense strand
uaacccagcucacugcuaa

SEQ ID NO: 1316162 - RNA, 19 nt, Homo sapiens
  misc_RNA (1)...(19): siRNA sense strand
gaaaugacucuucaaauca

SEQ ID NO: 1316163 - RNA, 19 nt, Homo sapiens
  misc_RNA (1)...(19): siRNA sense strand
gggcagagcuggaugagau

SEQ ID NO: 1316164 - RNA, 19 nt, Homo sapiens
  misc_RNA (1)...(19): siRNA sense strand
gaacaagaaacacaaagaa

SEQ ID NO: 1316165 - RNA, 19 nt, Homo sapiens
  misc_RNA (1)...(19): siRNA sense strand
ccagcucacugcuaauuua

SEQ ID NO: 1316166 - RNA, 19 nt, Homo sapiens
  misc_RNA (1)...(19): siRNA sense strand
cagaaaggaacuagaauua

SEQ ID NO: 1316167 - RNA, 19 nt, Homo sapiens
  misc_RNA (1)...(19): siRNA sense strand
ggaaaugggugagguuguu

SEQ ID NO: 1316168 - RNA, 19 nt, Homo sapiens
  misc_RNA (1)...(19): siRNA sense strand
acagagagcuggaagaaau

SEQ ID NO: 1316169 - RNA, 19 nt, Homo sapiens
  misc_RNA (1)...(19): siRNA sense strand
gaacauggaaaggaaauuu

SEQ ID NO: 1316170 - RNA, 19 nt, Homo sapiens
  misc_RNA (1)...(19): siRNA sense strand
agaacaagaccacuuauua

SEQ ID NO: 1316171 - RNA, 19 nt, Homo sapiens
  misc_RNA (1)...(19): siRNA sense strand
gaacaagaccacuuauuag

SEQ ID NO: 1316172 - RNA, 19 nt, Homo sapiens
  misc_RNA (1)...(19): siRNA sense strand
gacaguggaugugaaauuu

SEQ ID NO: 1316173 - RNA, 19 nt, Homo sapiens
  misc_RNA (1)...(19): siRNA sense strand
cagaauggcugaaucacaa

SEQ ID NO: 1316174 - RNA, 19 nt, Homo sapiens
  misc_RNA (1)...(19): siRNA sense strand
ggaagcagcaugagauuga

SEQ ID NO: 1316175 - RNA, 19 nt, Homo sapiens
  misc_RNA (1)...(19): siRNA sense strand
agaaaugacucuucaaauc

SEQ ID NO: 1316176 - RNA, 19 nt, Homo sapiens
  misc_RNA (1)...(19): siRNA sense strand
gaacaggaaagccuacaaa

SEQ ID NO: 1316177 - RNA, 19 nt, Homo sapiens
  misc_RNA (1)...(19): siRNA sense strand
acaagaagcugaauuagag

SEQ ID NO: 1316178 - RNA, 19 nt, Homo sapiens
  misc_RNA (1)...(19): siRNA sense strand
guagagagcuagaaaucau

SEQ ID NO: 1316179 - RNA, 19 nt, Homo sapiens
  misc_RNA (1)...(19): siRNA sense strand
gaaagaaacugaacaaaac

SEQ ID NO: 1316180 - RNA, 19 nt, Homo sapiens
  misc_RNA (1)...(19): siRNA sense strand
gaaaugaggguuaccuaug

SEQ ID NO: 1316181 - RNA, 19 nt, Homo sapiens
  misc_RNA (1)...(19): siRNA sense strand
ggaaacaaauaucguuaag

SEQ ID NO: 1316182 - RNA, 19 nt, Homo sapiens
  misc_RNA (1)...(19): siRNA sense strand
gcagauagugcaaaugaaa

SEQ ID NO: 1316183 - RNA, 19 nt, Homo sapiens
  misc_RNA (1)...(19): siRNA sense strand
caacagauccucacucauc

SEQ ID NO: 1316184 - RNA, 19 nt, Homo sapiens
  misc_RNA (1)...(19): siRNA sense strand
aggaaagccuacaaauuua

SEQ ID NO: 1316185 - RNA, 19 nt, Homo sapiens
  misc_RNA (1)...(19): siRNA sense strand
gauccagaauuacaagauu

SEQ ID NO: 1316186 - RNA, 19 nt, Homo sapiens
  misc_RNA (1)...(19): siRNA sense strand
guacuuaaaucagaacaga

SEQ ID NO: 1316187 - RNA, 19 nt, Homo sapiens
  misc_RNA (1)...(19): siRNA sense strand
gaacagauucagagagcua

SEQ ID NO: 1316188 - RNA, 19 nt, Homo sapiens
  misc_RNA (1)...(19): siRNA sense strand
ggcaauaaaugaacugaau

SEQ ID NO: 1316189 - RNA, 19 nt, Homo sapiens
  misc_RNA (1)...(19): siRNA sense strand
agaaacagcacucauagua

SEQ ID NO: 1316190 - RNA, 19 nt, Homo sapiens
  misc_RNA (1)...(19): siRNA sense strand
gaacuggaaagugaaauuu

SEQ ID NO: 1316191 - RNA, 19 nt, Homo sapiens
  misc_RNA (1)...(19): siRNA sense strand
aggcagagauccacuguuu

SEQ ID NO: 1316192 - RNA, 19 nt, Homo sapiens
  misc_RNA (1)...(19): siRNA sense strand
gcaguguccuuggugaaua

SEQ ID NO: 1316193 - RNA, 19 nt, Homo sapiens
  misc_RNA (1)...(19): siRNA sense strand
acagaaacauggugagauu

SEQ ID NO: 1316194 - RNA, 19 nt, Homo sapiens
  misc_RNA (1)...(19): siRNA sense strand
gagcuucauuugcaaagaa

SEQ ID NO: 1316195 - RNA, 19 nt, Homo sapiens
  misc_RNA (1)...(19): siRNA sense strand
aagaagagcuuuccaaacu

SEQ ID NO: 1316196 - RNA, 19 nt, Homo sapiens
  misc_RNA (1)...(19): siRNA sense strand
agaaacaggugaugaagga

SEQ ID NO: 1316197 - RNA, 19 nt, Homo sapiens
  misc_RNA (1)...(19): siRNA sense strand
gauagaugguuuacagaau

SEQ ID NO: 1316198 - RNA, 19 nt, Homo sapiens
  misc_RNA (1)...(19): siRNA sense strand
agaaguagcuaagguuauu

SEQ ID NO: 1316199 - RNA, 19 nt, Homo sapiens
  misc_RNA (1)...(19): siRNA sense strand
gaauucuggugauuacauu

SEQ ID NO: 1316200 - RNA, 19 nt, Homo sapiens
  misc_RNA (1)...(19): siRNA sense strand
gaucaaggaacuucagaaa

SEQ ID NO: 1316201 - RNA, 19 nt, Homo sapiens
  misc_RNA (1)...(19): siRNA sense strand
caaguuucauugagaugua

SEQ ID NO: 1316202 - RNA, 19 nt, Homo sapiens
  misc_RNA (1)...(19): siRNA sense strand
gcaaaagaaccaagaaaua

SEQ ID NO: 1316203 - RNA, 19 nt, Homo sapiens
  misc_RNA (1)...(19): siRNA sense strand
guaugaaacuugaauuugg

SEQ ID NO: 1316204 - RNA, 19 nt, Homo sapiens
  misc_RNA (1)...(19): siRNA sense strand
caaaguaacagaagaauac

SEQ ID NO: 1316205 - RNA, 19 nt, Homo sapiens
  misc_RNA (1)...(19): siRNA sense strand
aaauaugacuguuggagaa

SEQ ID NO: 1316206 - RNA, 19 nt, Homo sapiens
  misc_RNA (1)...(19): siRNA sense strand
ggaagaacuaggacuaauu

SEQ ID NO: 1316207 - RNA, 19 nt, Homo sapiens
  misc_RNA (1)...(19): siRNA sense strand
guuaaugaauguggcaaua

SEQ ID NO: 1316208 - RNA, 19 nt, Homo sapiens
  misc_RNA (1)...(19): siRNA sense strand
ggaagaagaauuugguguu

SEQ ID NO: 1316209 - RNA, 19 nt, Homo sapiens
  misc_RNA (1)...(19): siRNA sense strand
gauggaagcccaacgcauu

SEQ ID NO: 1316210 - RNA, 19 nt, Homo sapiens
  misc_RNA (1)...(19): siRNA sense strand
ucagagagcuagacagaca

SEQ ID NO: 1316211 - RNA, 19 nt, Homo sapiens
  misc_RNA (1)...(19): siRNA sense strand
caagaccacuuauuagaag

SEQ ID NO: 1316212 - RNA, 19 nt, Homo sapiens
  misc_RNA (1)...(19): siRNA sense strand
ugaagaacaagaccacuua

SEQ ID NO: 1316213 - RNA, 19 nt, Homo sapiens
  misc_RNA (1)...(19): siRNA sense strand
gaacaaggagcacaagaca

SEQ ID NO: 1316214 - RNA, 19 nt, Homo sapiens
  misc_RNA (1)...(19): siRNA sense strand
ugacugcaguucagaggua

SEQ ID NO: 1316215 - RNA, 19 nt, Homo sapiens
  misc_RNA (1)...(19): siRNA sense strand
caguggaugugaaauuuaa

SEQ ID NO: 1316216 - RNA, 19 nt, Homo sapiens
  misc_RNA (1)...(19): siRNA sense strand
gaaauuaucacaggaucaa

SEQ ID NO: 1316217 - RNA, 19 nt, Homo sapiens
  misc_RNA (1)...(19): siRNA sense strand
gaggaaacaaauaucguua

SEQ ID NO: 1316218 - RNA, 19 nt, Homo sapiens
  misc_RNA (1)...(19): siRNA sense strand
caacaaaguaacagaagaa

SEQ ID NO: 1316219 - RNA, 19 nt, Homo sapiens
  misc_RNA (1)...(19): siRNA sense strand
gaauaaauccaacuacagu

SEQ ID NO: 1316220 - RNA, 19 nt, Homo sapiens
  misc_RNA (1)...(19): siRNA sense strand
aaacaaagagauggcauua

SEQ ID NO: 1316221 - RNA, 19 nt, Homo sapiens
  misc_RNA (1)...(19): siRNA sense strand
caaacugaaggaagauuua

SEQ ID NO: 1316222 - RNA, 19 nt, Homo sapiens
  misc_RNA (1)...(19): siRNA sense strand
ccgccaagcuuaccuguug

SEQ ID NO: 1316223 - RNA, 19 nt, Homo sapiens
  misc_RNA (1)...(19): siRNA sense strand
gaaagaacucaauguacuu

SEQ ID NO: 1316224 - RNA, 19 nt, Homo sapiens
  misc_RNA (1)...(19): siRNA sense strand
ucagaaagaacucaaugua

SEQ ID NO: 1316225 - RNA, 19 nt, Homo sapiens
  misc_RNA (1)...(19): siRNA sense strand
gagaagaaaguaagcaaga

SEQ ID NO: 1316226 - RNA, 19 nt, Homo sapiens
  misc_RNA (1)...(19): siRNA sense strand
caagagaaagaacaaguuu

SEQ ID NO: 1316227 - RNA, 19 nt, Homo sapiens
  misc_RNA (1)...(19): siRNA sense strand
gaaaauacauacuccuguu

SEQ ID NO: 1316228 - RNA, 19 nt, Homo sapiens
  misc_RNA (1)...(19): siRNA sense strand
gaaauacucagacaagaag

SEQ ID NO: 1316229 - RNA, 19 nt, Homo sapiens
  misc_RNA (1)...(19): siRNA sense strand
gcacacucuucucaacaaa

SEQ ID NO: 1316230 - RNA, 19 nt, Homo sapiens
  misc_RNA (1)...(19): siRNA sense strand
uaaccaagcgagagaaauu

SEQ ID NO: 1316231 - RNA, 19 nt, Homo sapiens
  misc_RNA (1)...(19): siRNA sense strand
gaagcugccauuaaacaaa

SEQ ID NO: 1316232 - RNA, 19 nt, Homo sapiens
  misc_RNA (1)...(19): siRNA sense strand
ggcagugucugaagaaugu

SEQ ID NO: 1316233 - RNA, 19 nt, Homo sapiens
  misc_RNA (1)...(19): siRNA sense strand
ggaucaguuucuaaaguaa

SEQ ID NO: 1316234 - RNA, 19 nt, Homo sapiens
  misc_RNA (1)...(19): siRNA sense strand
caccaugauuugaauauug

SEQ ID NO: 1316235 - RNA, 19 nt, Homo sapiens
  misc_RNA (1)...(19): siRNA sense strand
caacaagcaagaagagaaa

SEQ ID NO: 1316236 - RNA, 19 nt, Homo sapiens
  misc_RNA (1)...(19): siRNA sense strand
caaagagauggcauuauaa

SEQ ID NO: 1316237 - RNA, 19 nt, Homo sapiens
  misc_RNA (1)...(19): siRNA sense strand
uugaagaccuuguugaaga

SEQ ID NO: 1316238 - RNA, 19 nt, Homo sapiens
  misc_RNA (1)...(19): siRNA sense strand
ucagcuaaaugaagagauu

SEQ ID NO: 1316239 - RNA, 19 nt, Homo sapiens
  misc_RNA (1)...(19): siRNA sense strand
ucaaugagaucgugaguau

SEQ ID NO: 1316240 - RNA, 19 nt, Homo sapiens
  misc_RNA (1)...(19): siRNA sense strand
gaaaguucauguaucuaga

SEQ ID NO: 1316241 - RNA, 19 nt, Homo sapiens
  misc_RNA (1)...(19): siRNA sense strand
ggacagaagcucacaacga

SEQ ID NO: 1316242 - RNA, 19 nt, Homo sapiens
  misc_RNA (1)...(19): siRNA sense strand
gcaaauauggacaggacua

SEQ ID NO: 1316243 - RNA, 19 nt, Homo sapiens
  misc_RNA (1)...(19): siRNA sense strand
ucauguaucuagaagguaa

SEQ ID NO: 1316244 - RNA, 19 nt, Homo sapiens
  misc_RNA (1)...(19): siRNA sense strand
gccaacaggugucaacaug

SEQ ID NO: 1316245 - RNA, 19 nt, Homo sapiens
  misc_RNA (1)...(19): siRNA sense strand
gcaagucuuuacuguggaa

SEQ ID NO: 1316246 - RNA, 19 nt, Homo sapiens
  misc_RNA (1)...(19): siRNA sense strand
gaagauugaggaccacuug

SEQ ID NO: 1316247 - RNA, 19 nt, Homo sapiens
  misc_RNA (1)...(19): siRNA sense strand
gauaaagugggucaacaaa

SEQ ID NO: 1316248 - RNA, 19 nt, Homo sapiens
  misc_RNA (1)...(19): siRNA sense strand
acacgaugcugauaaagug

SEQ ID NO: 1316249 - RNA, 19 nt, Homo sapiens
  misc_RNA (1)...(19): siRNA sense strand
guugagcucuggaaaguuc

SEQ ID NO: 1316250 - RNA, 19 nt, Homo sapiens
  misc_RNA (1)...(19): siRNA sense strand
ggaaaguucauguaucuag

SEQ ID NO: 1316251 - RNA, 19 nt, Homo sapiens
  misc_RNA (1)...(19): siRNA sense strand
gauuguggcuguguuuguu

SEQ ID NO: 1316252 - RNA, 19 nt, Homo sapiens
  misc_RNA (1)...(19): siRNA sense strand
caaggucggugauuguaca

SEQ ID NO: 1316253 - RNA, 19 nt, Homo sapiens
  misc_RNA (1)...(19): siRNA sense strand
ccagagggauggucaaggu

SEQ ID NO: 1316254 - RNA, 19 nt, Homo sapiens
  misc_RNA (1)...(19): siRNA sense strand
ggaaugaccuccuuuucug

SEQ ID NO: 1316255 - RNA, 19 nt, Homo sapiens
  misc_RNA (1)...(19): siRNA sense strand
caucauaggagucacaguu

SEQ ID NO: 1316256 - RNA, 19 nt, Homo sapiens
  misc_RNA (1)...(19): siRNA sense strand
guucauguaucuagaaggu

SEQ ID NO: 1316257 - RNA, 19 nt, Homo sapiens
  misc_RNA (1)...(19): siRNA sense strand
gacaccauaucucagaaga

SEQ ID NO: 1316258 - RNA, 19 nt, Homo sapiens
  misc_RNA (1)...(19): siRNA sense strand
ccacugagacucugagaca

SEQ ID NO: 1316259 - RNA, 19 nt, Homo sapiens
  misc_RNA (1)...(19): siRNA sense strand
ucagaagacgguagagauu

SEQ ID NO: 1316260 - RNA, 19 nt, Homo sapiens
  misc_RNA (1)...(19): siRNA sense strand
uguacacgaugcugauaaa

SEQ ID NO: 1316261 - RNA, 19 nt, Homo sapiens
  misc_RNA (1)...(19): siRNA sense strand
ucacuggaaugaccuccuu

SEQ ID NO: 1316262 - RNA, 19 nt, Homo sapiens
  misc_RNA (1)...(19): siRNA sense strand
gaaggugaucccacugaga

SEQ ID NO: 1316263 - RNA, 19 nt, Homo sapiens
  misc_RNA (1)...(19): siRNA sense strand
gauugaggaccacuuguug

SEQ ID NO: 1316264 - RNA, 19 nt, Homo sapiens
  misc_RNA (1)...(19): siRNA sense strand
cuauagcacucacuggaau

SEQ ID NO: 1316265 - RNA, 19 nt, Homo sapiens
  misc_RNA (1)...(19): siRNA sense strand
agauaaagguggcuaaagc

SEQ ID NO: 1316266 - RNA, 19 nt, Homo sapiens
  misc_RNA (1)...(19): siRNA sense strand
gcucuggaaaguucaugua

SEQ ID NO: 1316267 - RNA, 19 nt, Homo sapiens
  misc_RNA (1)...(19): siRNA sense strand
cagacuuggugcccuuuga

SEQ ID NO: 1316268 - RNA, 19 nt, Homo sapiens
  misc_RNA (1)...(19): siRNA sense strand
cuggaaaguucauguaucu

SEQ ID NO: 1316269 - RNA, 19 nt, Homo sapiens
  misc_RNA (1)...(19): siRNA sense strand
gugcuucgaugacuuugca

SEQ ID NO: 1316270 - RNA, 19 nt, Homo sapiens
  misc_RNA (1)...(19): siRNA sense strand
cgaugacuuugcagacuug

SEQ ID NO: 1316271 - RNA, 19 nt, Homo sapiens
  misc_RNA (1)...(19): siRNA sense strand
ggucaaggucggugauugu

SEQ ID NO: 1316272 - RNA, 19 nt, Homo sapiens
  misc_RNA (1)...(19): siRNA sense strand
gacagugcuucgaugacuu

SEQ ID NO: 1316273 - RNA, 19 nt, Homo sapiens
  misc_RNA (1)...(19): siRNA sense strand
gaucacccaacaagaccua

SEQ ID NO: 1316274 - RNA, 19 nt, Homo sapiens
  misc_RNA (1)...(19): siRNA sense strand
gcucugaucacccaacaag

SEQ ID NO: 1316275 - RNA, 19 nt, Homo sapiens
  misc_RNA (1)...(19): siRNA sense strand
ccugagaugugccggaagu

SEQ ID NO: 1316276 - RNA, 19 nt, Homo sapiens
  misc_RNA (1)...(19): siRNA sense strand
ggaaccggcagaagcugaa

SEQ ID NO: 1316277 - RNA, 19 nt, Homo sapiens
  misc_RNA (1)...(19): siRNA sense strand
uaaagugggucaacaaaac

SEQ ID NO: 1316278 - RNA, 19 nt, Homo sapiens
  misc_RNA (1)...(19): siRNA sense strand
ugagacagugcuucgauga

SEQ ID NO: 1316279 - RNA, 19 nt, Homo sapiens
  misc_RNA (1)...(19): siRNA sense strand
cagaagacgguagagauug

SEQ ID NO: 1316280 - RNA, 19 nt, Homo sapiens
  misc_RNA (1)...(19): siRNA sense strand
ggaaguugggccucaugga

SEQ ID NO: 1316281 - RNA, 19 nt, Homo sapiens
  misc_RNA (1)...(19): siRNA sense strand
gagauaaagguggcuaaag

SEQ ID NO: 1316282 - RNA, 19 nt, Homo sapiens
  misc_RNA (1)...(19): siRNA sense strand
caggugaaguggagcuaag

SEQ ID NO: 1316283 - RNA, 19 nt, Homo sapiens
  misc_RNA (1)...(19): siRNA sense strand
caaauauggacaggacuau

SEQ ID NO: 1316284 - RNA, 19 nt, Homo sapiens
  misc_RNA (1)...(19): siRNA sense strand
ugauaaagugggucaacaa

SEQ ID NO: 1316285 - RNA, 19 nt, Homo sapiens
  misc_RNA (1)...(19): siRNA sense strand
ccacagggacaccuuguac

SEQ ID NO: 1316286 - RNA, 19 nt, Homo sapiens
  misc_RNA (1)...(19): siRNA sense strand
ucgaugacuuugcagacuu

SEQ ID NO: 1316287 - RNA, 19 nt, Homo sapiens
  misc_RNA (1)...(19): siRNA sense strand
guuugcaagucuuuacugu

SEQ ID NO: 1316288 - RNA, 19 nt, Homo sapiens
  misc_RNA (1)...(19): siRNA sense strand
agaaaguccuuccuuaccu

SEQ ID NO: 1316289 - RNA, 19 nt, Homo sapiens
  misc_RNA (1)...(19): siRNA sense strand
aaauauggacaggacuaua

SEQ ID NO: 1316290 - RNA, 19 nt, Homo sapiens
  misc_RNA (1)...(19): siRNA sense strand
gauaaagguggcuaaagcu

SEQ ID NO: 1316291 - RNA, 19 nt, Homo sapiens
  misc_RNA (1)...(19): siRNA sense strand
cauggacaaugagauaaag

SEQ ID NO: 1316292 - RNA, 19 nt, Homo sapiens
  misc_RNA (1)...(19): siRNA sense strand
agacagugcuucgaugacu

SEQ ID NO: 1316293 - RNA, 19 nt, Homo sapiens
  misc_RNA (1)...(19): siRNA sense strand
agaagacgguagagauugc

SEQ ID NO: 1316294 - RNA, 19 nt, Homo sapiens
  misc_RNA (1)...(19): siRNA sense strand
ucuggaaaguucauguauc

SEQ ID NO: 1316295 - RNA, 19 nt, Homo sapiens
  misc_RNA (1)...(19): siRNA sense strand
aauauggacaggacuauag

SEQ ID NO: 1316296 - RNA, 19 nt, Homo sapiens
  misc_RNA (1)...(19): siRNA sense strand
aguccuuccuuaccugaaa

SEQ ID NO: 1316297 - RNA, 19 nt, Homo sapiens
  misc_RNA (1)...(19): siRNA sense strand
ugagauaaagguggcuaaa

SEQ ID NO: 1316298 - RNA, 19 nt, Homo sapiens
  misc_RNA (1)...(19): siRNA sense strand
acagugcuucgaugacuuu

SEQ ID NO: 1316299 - RNA, 19 nt, Homo sapiens
  misc_RNA (1)...(19): siRNA sense strand
gcagagccaacagguguca

SEQ ID NO: 1316300 - RNA, 19 nt, Homo sapiens
  misc_RNA (1)...(19): siRNA sense strand
agaagguaaugcagacucu

SEQ ID NO: 1316301 - RNA, 19 nt, Homo sapiens
  misc_RNA (1)...(19): siRNA sense strand
uugccaagcagaagauuga

SEQ ID NO: 1316302 - RNA, 19 nt, Homo sapiens
  misc_RNA (1)...(19): siRNA sense strand
ggacaccauaucucagaag

SEQ ID NO: 1316303 - RNA, 19 nt, Homo sapiens
  misc_RNA (1)...(19): siRNA sense strand
gaaccggcagaagcugaaa

SEQ ID NO: 1316304 - RNA, 19 nt, Homo sapiens
  misc_RNA (1)...(19): siRNA sense strand
uguacacccuggagugaca

SEQ ID NO: 1316305 - RNA, 19 nt, Homo sapiens
  misc_RNA (1)...(19): siRNA sense strand
gggacaccuuguacacgau

SEQ ID NO: 1316306 - RNA, 19 nt, Homo sapiens
  misc_RNA (1)...(19): siRNA sense strand
gucaaggucggugauugua

SEQ ID NO: 1316307 - RNA, 19 nt, Homo sapiens
  misc_RNA (1)...(19): siRNA sense strand
cagccguagucuugauugu

SEQ ID NO: 1316308 - RNA, 19 nt, Homo sapiens
  misc_RNA (1)...(19): siRNA sense strand
gcagccguagucuugauug

SEQ ID NO: 1316309 - RNA, 19 nt, Homo sapiens
  misc_RNA (1)...(19): siRNA sense strand
ucaaugagaucgugaguau

SEQ ID NO: 1316310 - RNA, 19 nt, Homo sapiens
  misc_RNA (1)...(19): siRNA sense strand
gaaaguucauguaucuaga

SEQ ID NO: 1316311 - RNA, 19 nt, Homo sapiens
  misc_RNA (1)...(19): siRNA sense strand
ggacagaagcucacaacga

SEQ ID NO: 1316312 - RNA, 19 nt, Homo sapiens
  misc_RNA (1)...(19): siRNA sense strand
gcaaauauggacaggacua

SEQ ID NO: 1316313 - RNA, 19 nt, Homo sapiens
  misc_RNA (1)...(19): siRNA sense strand
ucauguaucuagaagguaa

SEQ ID NO: 1316314 - RNA, 19 nt, Homo sapiens
  misc_RNA (1)...(19): siRNA sense strand
gccaacaggugucaacaug

SEQ ID NO: 1316315 - RNA, 19 nt, Homo sapiens
  misc_RNA (1)...(19): siRNA sense strand
gcaagucuuuacuguggaa

SEQ ID NO: 1316316 - RNA, 19 nt, Homo sapiens
  misc_RNA (1)...(19): siRNA sense strand
gaagauugaggaccacuug

SEQ ID NO: 1316317 - RNA, 19 nt, Homo sapiens
  misc_RNA (1)...(19): siRNA sense strand
gauaaagugggucaacaaa

SEQ ID NO: 1316318 - RNA, 19 nt, Homo sapiens
  misc_RNA (1)...(19): siRNA sense strand
acacgaugcugauaaagug

SEQ ID NO: 1316319 - RNA, 19 nt, Homo sapiens
  misc_RNA (1)...(19): siRNA sense strand
guugagcucuggaaaguuc

SEQ ID NO: 1316320 - RNA, 19 nt, Homo sapiens
  misc_RNA (1)...(19): siRNA sense strand
ggaaaguucauguaucuag

SEQ ID NO: 1316321 - RNA, 19 nt, Homo sapiens
  misc_RNA (1)...(19): siRNA sense strand
gauuguggcuguguuuguu

SEQ ID NO: 1316322 - RNA, 19 nt, Homo sapiens
  misc_RNA (1)...(19): siRNA sense strand
caaggucggugauuguaca

SEQ ID NO: 1316323 - RNA, 19 nt, Homo sapiens
  misc_RNA (1)...(19): siRNA sense strand
ccagagggauggucaaggu

SEQ ID NO: 1316324 - RNA, 19 nt, Homo sapiens
  misc_RNA (1)...(19): siRNA sense strand
ggaaugaccuccuuuucug

SEQ ID NO: 1316325 - RNA, 19 nt, Homo sapiens
  misc_RNA (1)...(19): siRNA sense strand
caucauaggagucacaguu

SEQ ID NO: 1316326 - RNA, 19 nt, Homo sapiens
  misc_RNA (1)...(19): siRNA sense strand
guucauguaucuagaaggu

SEQ ID NO: 1316327 - RNA, 19 nt, Homo sapiens
  misc_RNA (1)...(19): siRNA sense strand
gacaccauaucucagaaga

SEQ ID NO: 1316328 - RNA, 19 nt, Homo sapiens
  misc_RNA (1)...(19): siRNA sense strand
ccacugagacucugagaca

SEQ ID NO: 1316329 - RNA, 19 nt, Homo sapiens
  misc_RNA (1)...(19): siRNA sense strand
ucagaagacgguagagauu

SEQ ID NO: 1316330 - RNA, 19 nt, Homo sapiens
  misc_RNA (1)...(19): siRNA sense strand
uguacacgaugcugauaaa

SEQ ID NO: 1316331 - RNA, 19 nt, Homo sapiens
  misc_RNA (1)...(19): siRNA sense strand
ucacuggaaugaccuccuu

SEQ ID NO: 1316332 - RNA, 19 nt, Homo sapiens
  misc_RNA (1)...(19): siRNA sense strand
gaaggugaucccacugaga

SEQ ID NO: 1316333 - RNA, 19 nt, Homo sapiens
  misc_RNA (1)...(19): siRNA sense strand
gauugaggaccacuuguug

SEQ ID NO: 1316334 - RNA, 19 nt, Homo sapiens
  misc_RNA (1)...(19): siRNA sense strand
cuauagcacucacuggaau

SEQ ID NO: 1316335 - RNA, 19 nt, Homo sapiens
  misc_RNA (1)...(19): siRNA sense strand
agauaaagguggcuaaagc

SEQ ID NO: 1316336 - RNA, 19 nt, Homo sapiens
  misc_RNA (1)...(19): siRNA sense strand
gcucuggaaaguucaugua

SEQ ID NO: 1316337 - RNA, 19 nt, Homo sapiens
  misc_RNA (1)...(19): siRNA sense strand
cagacuuggugcccuuuga

SEQ ID NO: 1316338 - RNA, 19 nt, Homo sapiens
  misc_RNA (1)...(19): siRNA sense strand
cuggaaaguucauguaucu

SEQ ID NO: 1316339 - RNA, 19 nt, Homo sapiens
  misc_RNA (1)...(19): siRNA sense strand
gugcuucgaugacuuugca

SEQ ID NO: 1316340 - RNA, 19 nt, Homo sapiens
  misc_RNA (1)...(19): siRNA sense strand
cgaugacuuugcagacuug

SEQ ID NO: 1316341 - RNA, 19 nt, Homo sapiens
  misc_RNA (1)...(19): siRNA sense strand
ggucaaggucggugauugu

SEQ ID NO: 1316342 - RNA, 19 nt, Homo sapiens
  misc_RNA (1)...(19): siRNA sense strand
gacagugcuucgaugacuu

SEQ ID NO: 1316343 - RNA, 19 nt, Homo sapiens
  misc_RNA (1)...(19): siRNA sense strand
gaucacccaacaagaccua

SEQ ID NO: 1316344 - RNA, 19 nt, Homo sapiens
  misc_RNA (1)...(19): siRNA sense strand
gcucugaucacccaacaag

SEQ ID NO: 1316345 - RNA, 19 nt, Homo sapiens
  misc_RNA (1)...(19): siRNA sense strand
ccugagaugugccggaagu

SEQ ID NO: 1316346 - RNA, 19 nt, Homo sapiens
  misc_RNA (1)...(19): siRNA sense strand
ggaaccggcagaagcugaa

SEQ ID NO: 1316347 - RNA, 19 nt, Homo sapiens
  misc_RNA (1)...(19): siRNA sense strand
uaaagugggucaacaaaac

SEQ ID NO: 1316348 - RNA, 19 nt, Homo sapiens
  misc_RNA (1)...(19): siRNA sense strand
ugagacagugcuucgauga

SEQ ID NO: 1316349 - RNA, 19 nt, Homo sapiens
  misc_RNA (1)...(19): siRNA sense strand
cagaagacgguagagauug

SEQ ID NO: 1316350 - RNA, 19 nt, Homo sapiens
  misc_RNA (1)...(19): siRNA sense strand
ggaaguugggccucaugga

SEQ ID NO: 1316351 - RNA, 19 nt, Homo sapiens
  misc_RNA (1)...(19): siRNA sense strand
gagauaaagguggcuaaag

SEQ ID NO: 1316352 - RNA, 19 nt, Homo sapiens
  misc_RNA (1)...(19): siRNA sense strand
caggugaaguggagcuaag

SEQ ID NO: 1316353 - RNA, 19 nt, Homo sapiens
  misc_RNA (1)...(19): siRNA sense strand
caaauauggacaggacuau

SEQ ID NO: 1316354 - RNA, 19 nt, Homo sapiens
  misc_RNA (1)...(19): siRNA sense strand
ugauaaagugggucaacaa

SEQ ID NO: 1316355 - RNA, 19 nt, Homo sapiens
  misc_RNA (1)...(19): siRNA sense strand
ccacagggacaccuuguac

SEQ ID NO: 1316356 - RNA, 19 nt, Homo sapiens
  misc_RNA (1)...(19): siRNA sense strand
ucgaugacuuugcagacuu

SEQ ID NO: 1316357 - RNA, 19 nt, Homo sapiens
  misc_RNA (1)...(19): siRNA sense strand
guuugcaagucuuuacugu

SEQ ID NO: 1316358 - RNA, 19 nt, Homo sapiens
  misc_RNA (1)...(19): siRNA sense strand
agaaaguccuuccuuaccu

SEQ ID NO: 1316359 - RNA, 19 nt, Homo sapiens
  misc_RNA (1)...(19): siRNA sense strand
aaauauggacaggacuaua

SEQ ID NO: 1316360 - RNA, 19 nt, Homo sapiens
  misc_RNA (1)...(19): siRNA sense strand
gauaaagguggcuaaagcu

SEQ ID NO: 1316361 - RNA, 19 nt, Homo sapiens
  misc_RNA (1)...(19): siRNA sense strand
cauggacaaugagauaaag

SEQ ID NO: 1316362 - RNA, 19 nt, Homo sapiens
  misc_RNA (1)...(19): siRNA sense strand
agacagugcuucgaugacu

SEQ ID NO: 1316363 - RNA, 19 nt, Homo sapiens
  misc_RNA (1)...(19): siRNA sense strand
agaagacgguagagauugc

SEQ ID NO: 1316364 - RNA, 19 nt, Homo sapiens
  misc_RNA (1)...(19): siRNA sense strand
ucuggaaaguucauguauc

SEQ ID NO: 1316365 - RNA, 19 nt, Homo sapiens
  misc_RNA (1)...(19): siRNA sense strand
aauauggacaggacuauag

SEQ ID NO: 1316366 - RNA, 19 nt, Homo sapiens
  misc_RNA (1)...(19): siRNA sense strand
aguccuuccuuaccugaaa

SEQ ID NO: 1316367 - RNA, 19 nt, Homo sapiens
  misc_RNA (1)...(19): siRNA sense strand
ugagauaaagguggcuaaa

SEQ ID NO: 1316368 - RNA, 19 nt, Homo sapiens
  misc_RNA (1)...(19): siRNA sense strand
acagugcuucgaugacuuu

SEQ ID NO: 1316369 - RNA, 19 nt, Homo sapiens
  misc_RNA (1)...(19): siRNA sense strand
gcagagccaacagguguca

SEQ ID NO: 1316370 - RNA, 19 nt, Homo sapiens
  misc_RNA (1)...(19): siRNA sense strand
agaagguaaugcagacucu

SEQ ID NO: 1316371 - RNA, 19 nt, Homo sapiens
  misc_RNA (1)...(19): siRNA sense strand
uugccaagcagaagauuga

SEQ ID NO: 1316372 - RNA, 19 nt, Homo sapiens
  misc_RNA (1)...(19): siRNA sense strand
ggacaccauaucucagaag

SEQ ID NO: 1316373 - RNA, 19 nt, Homo sapiens
  misc_RNA (1)...(19): siRNA sense strand
gaaccggcagaagcugaaa

SEQ ID NO: 1316374 - RNA, 19 nt, Homo sapiens
  misc_RNA (1)...(19): siRNA sense strand
uguacacccuggagugaca

SEQ ID NO: 1316375 - RNA, 19 nt, Homo sapiens
  misc_RNA (1)...(19): siRNA sense strand
gggacaccuuguacacgau

SEQ ID NO: 1316376 - RNA, 19 nt, Homo sapiens
  misc_RNA (1)...(19): siRNA sense strand
gucaaggucggugauugua

SEQ ID NO: 1316377 - RNA, 19 nt, Homo sapiens
  misc_RNA (1)...(19): siRNA sense strand
cagccguagucuugauugu

SEQ ID NO: 1316378 - RNA, 19 nt, Homo sapiens
  misc_RNA (1)...(19): siRNA sense strand
gcagccguagucuugauug

SEQ ID NO: 1316379 - RNA, 19 nt, Homo sapiens
  misc_RNA (1)...(19): siRNA sense strand
cagaggagcuugagaaugu

SEQ ID NO: 1316380 - RNA, 19 nt, Homo sapiens
  misc_RNA (1)...(19): siRNA sense strand
gaaaagaacuaguauggaa

SEQ ID NO: 1316381 - RNA, 19 nt, Homo sapiens
  misc_RNA (1)...(19): siRNA sense strand
guaauuaucugcagcaagu

SEQ ID NO: 1316382 - RNA, 19 nt, Homo sapiens
  misc_RNA (1)...(19): siRNA sense strand
guucgcaucuuaccacaua

SEQ ID NO: 1316383 - RNA, 19 nt, Homo sapiens
  misc_RNA (1)...(19): siRNA sense strand
aaacagcacuugcccuuga

SEQ ID NO: 1316384 - RNA, 19 nt, Homo sapiens
  misc_RNA (1)...(19): siRNA sense strand
ggaaauagaaauuggagaa

SEQ ID NO: 1316385 - RNA, 19 nt, Homo sapiens
  misc_RNA (1)...(19): siRNA sense strand
caaucgaccucaggaaaua

SEQ ID NO: 1316386 - RNA, 19 nt, Homo sapiens
  misc_RNA (1)...(19): siRNA sense strand
ugagaauguucgcaucuua

SEQ ID NO: 1316387 - RNA, 19 nt, Homo sapiens
  misc_RNA (1)...(19): siRNA sense strand
gcaccuucguguugaguaa

SEQ ID NO: 1316388 - RNA, 19 nt, Homo sapiens
  misc_RNA (1)...(19): siRNA sense strand
gaaauuggagaaucugguu

SEQ ID NO: 1316389 - RNA, 19 nt, Homo sapiens
  misc_RNA (1)...(19): siRNA sense strand
gacaucaacucacugaagu

SEQ ID NO: 1316390 - RNA, 19 nt, Homo sapiens
  misc_RNA (1)...(19): siRNA sense strand
guccuugucuuugguuaua

SEQ ID NO: 1316391 - RNA, 19 nt, Homo sapiens
  misc_RNA (1)...(19): siRNA sense strand
gcaaucgaccucaggaaau

SEQ ID NO: 1316392 - RNA, 19 nt, Homo sapiens
  misc_RNA (1)...(19): siRNA sense strand
agaaagacaucaacucacu

SEQ ID NO: 1316393 - RNA, 19 nt, Homo sapiens
  misc_RNA (1)...(19): siRNA sense strand
ggugggagccaguaauuau

SEQ ID NO: 1316394 - RNA, 19 nt, Homo sapiens
  misc_RNA (1)...(19): siRNA sense strand
gaaguaggucuuuuagaua

SEQ ID NO: 1316395 - RNA, 19 nt, Homo sapiens
  misc_RNA (1)...(19): siRNA sense strand
gcaaggaaaagaacuagua

SEQ ID NO: 1316396 - RNA, 19 nt, Homo sapiens
  misc_RNA (1)...(19): siRNA sense strand
caucuuaccacauacaguu

SEQ ID NO: 1316397 - RNA, 19 nt, Homo sapiens
  misc_RNA (1)...(19): siRNA sense strand
ccacauacaguucuuuaca

SEQ ID NO: 1316398 - RNA, 19 nt, Homo sapiens
  misc_RNA (1)...(19): siRNA sense strand
gcggagcaccuucguguug

SEQ ID NO: 1316399 - RNA, 19 nt, Homo sapiens
  misc_RNA (1)...(19): siRNA sense strand
ugaaguaggucuuuuagau

SEQ ID NO: 1316400 - RNA, 19 nt, Homo sapiens
  misc_RNA (1)...(19): siRNA sense strand
ucaacucacugaaguaggu

SEQ ID NO: 1316401 - RNA, 19 nt, Homo sapiens
  misc_RNA (1)...(19): siRNA sense strand
acauacaguucuuuacaug

SEQ ID NO: 1316402 - RNA, 19 nt, Homo sapiens
  misc_RNA (1)...(19): siRNA sense strand
gaagagugucguggccaua

SEQ ID NO: 1316403 - RNA, 19 nt, Homo sapiens
  misc_RNA (1)...(19): siRNA sense strand
caaacaaugccaaguccuu

SEQ ID NO: 1316404 - RNA, 19 nt, Homo sapiens
  misc_RNA (1)...(19): siRNA sense strand
ggaauuguagugacuccaa

SEQ ID NO: 1316405 - RNA, 19 nt, Homo sapiens
  misc_RNA (1)...(19): siRNA sense strand
ccaaugggaucagguagca

SEQ ID NO: 1316406 - RNA, 19 nt, Homo sapiens
  misc_RNA (1)...(19): siRNA sense strand
gguuauaauugcuguaagg

SEQ ID NO: 1316407 - RNA, 19 nt, Homo sapiens
  misc_RNA (1)...(19): siRNA sense strand
uagcagaggagcuugagaa

SEQ ID NO: 1316408 - RNA, 19 nt, Homo sapiens
  misc_RNA (1)...(19): siRNA sense strand
gcuuuauuauucccucaaa

SEQ ID NO: 1316409 - RNA, 19 nt, Homo sapiens
  misc_RNA (1)...(19): siRNA sense strand
aaagacaucaacucacuga

SEQ ID NO: 1316410 - RNA, 19 nt, Homo sapiens
  misc_RNA (1)...(19): siRNA sense strand
gggaucagguagcaaucga

SEQ ID NO: 1316411 - RNA, 19 nt, Homo sapiens
  misc_RNA (1)...(19): siRNA sense strand
uuagaaagacaucaacuca

SEQ ID NO: 1316412 - RNA, 19 nt, Homo sapiens
  misc_RNA (1)...(19): siRNA sense strand
gcagaggagcuugagaaug

SEQ ID NO: 1316413 - RNA, 19 nt, Homo sapiens
  misc_RNA (1)...(19): siRNA sense strand
uaccacauacaguucuuua

SEQ ID NO: 1316414 - RNA, 19 nt, Homo sapiens
  misc_RNA (1)...(19): siRNA sense strand
cacauacaguucuuuacau

SEQ ID NO: 1316415 - RNA, 19 nt, Homo sapiens
  misc_RNA (1)...(19): siRNA sense strand
uuagauaacccugaacuuc

SEQ ID NO: 1316416 - RNA, 19 nt, Homo sapiens
  misc_RNA (1)...(19): siRNA sense strand
guaaggugggagccaguaa

SEQ ID NO: 1316417 - RNA, 19 nt, Homo sapiens
  misc_RNA (1)...(19): siRNA sense strand
cggagcaccuucguguuga

SEQ ID NO: 1316418 - RNA, 19 nt, Homo sapiens
  misc_RNA (1)...(19): siRNA sense strand
ggagugugugcgcagagua

SEQ ID NO: 1316419 - RNA, 19 nt, Homo sapiens
  misc_RNA (1)...(19): siRNA sense strand
cauaagagagcaaggaaaa

SEQ ID NO: 1316420 - RNA, 19 nt, Homo sapiens
  misc_RNA (1)...(19): siRNA sense strand
uugcuugguucgcguggua

SEQ ID NO: 1316421 - RNA, 19 nt, Homo sapiens
  misc_RNA (1)...(19): siRNA sense strand
ggaggggcauugcuugguu

SEQ ID NO: 1316422 - RNA, 19 nt, Homo sapiens
  misc_RNA (1)...(19): siRNA sense strand
gagaauguucgcaucuuac

SEQ ID NO: 1316423 - RNA, 19 nt, Homo sapiens
  misc_RNA (1)...(19): siRNA sense strand
gccauaagagagcaaggaa

SEQ ID NO: 1316424 - RNA, 19 nt, Homo sapiens
  misc_RNA (1)...(19): siRNA sense strand
agaaucugguuuugcuuua

SEQ ID NO: 1316425 - RNA, 19 nt, Homo sapiens
  misc_RNA (1)...(19): siRNA sense strand
gagaaucugguuuugcuuu

SEQ ID NO: 1316426 - RNA, 19 nt, Homo sapiens
  misc_RNA (1)...(19): siRNA sense strand
agacaucaacucacugaag

SEQ ID NO: 1316427 - RNA, 19 nt, Homo sapiens
  misc_RNA (1)...(19): siRNA sense strand
gaccucaggaaauagaaau

SEQ ID NO: 1316428 - RNA, 19 nt, Homo sapiens
  misc_RNA (1)...(19): siRNA sense strand
gagugugugcgcagaguau

SEQ ID NO: 1316429 - RNA, 19 nt, Homo sapiens
  misc_RNA (1)...(19): siRNA sense strand
ccucaggaaauagaaauug

SEQ ID NO: 1316430 - RNA, 19 nt, Homo sapiens
  misc_RNA (1)...(19): siRNA sense strand
agauaacccugaacuucgu

SEQ ID NO: 1316431 - RNA, 19 nt, Homo sapiens
  misc_RNA (1)...(19): siRNA sense strand
caucaacucacugaaguag

SEQ ID NO: 1316432 - RNA, 19 nt, Homo sapiens
  misc_RNA (1)...(19): siRNA sense strand
ccauaagagagcaaggaaa

SEQ ID NO: 1316433 - RNA, 19 nt, Homo sapiens
  misc_RNA (1)...(19): siRNA sense strand
gagaagcuauuccccaaac

SEQ ID NO: 1316434 - RNA, 19 nt, Homo sapiens
  misc_RNA (1)...(19): siRNA sense strand
ggagcaccuucguguugag

SEQ ID NO: 1316435 - RNA, 19 nt, Homo sapiens
  misc_RNA (1)...(19): siRNA sense strand
gggagugugugcgcagagu

SEQ ID NO: 1316436 - RNA, 19 nt, Homo sapiens
  misc_RNA (1)...(19): siRNA sense strand
ugucuuugguuauaauugc

SEQ ID NO: 1316437 - RNA, 19 nt, Homo sapiens
  misc_RNA (1)...(19): siRNA sense strand
gagugucguggccauaaga

SEQ ID NO: 1316438 - RNA, 19 nt, Homo sapiens
  misc_RNA (1)...(19): siRNA sense strand
cagaggagcuugagaaugu

SEQ ID NO: 1316439 - RNA, 19 nt, Homo sapiens
  misc_RNA (1)...(19): siRNA sense strand
gaaaagaacuaguauggaa

SEQ ID NO: 1316440 - RNA, 19 nt, Homo sapiens
  misc_RNA (1)...(19): siRNA sense strand
guaauuaucugcagcaagu

SEQ ID NO: 1316441 - RNA, 19 nt, Homo sapiens
  misc_RNA (1)...(19): siRNA sense strand
guucgcaucuuaccacaua

SEQ ID NO: 1316442 - RNA, 19 nt, Homo sapiens
  misc_RNA (1)...(19): siRNA sense strand
aaacagcacuugcccuuga

SEQ ID NO: 1316443 - RNA, 19 nt, Homo sapiens
  misc_RNA (1)...(19): siRNA sense strand
ggaaauagaaauuggagaa

SEQ ID NO: 1316444 - RNA, 19 nt, Homo sapiens
  misc_RNA (1)...(19): siRNA sense strand
caaucgaccucaggaaaua

SEQ ID NO: 1316445 - RNA, 19 nt, Homo sapiens
  misc_RNA (1)...(19): siRNA sense strand
ugagaauguucgcaucuua

SEQ ID NO: 1316446 - RNA, 19 nt, Homo sapiens
  misc_RNA (1)...(19): siRNA sense strand
gcaccuucguguugaguaa

SEQ ID NO: 1316447 - RNA, 19 nt, Homo sapiens
  misc_RNA (1)...(19): siRNA sense strand
gaaauuggagaaucugguu

SEQ ID NO: 1316448 - RNA, 19 nt, Homo sapiens
  misc_RNA (1)...(19): siRNA sense strand
gacaucaacucacugaagu

SEQ ID NO: 1316449 - RNA, 19 nt, Homo sapiens
  misc_RNA (1)...(19): siRNA sense strand
guccuugucuuugguuaua

SEQ ID NO: 1316450 - RNA, 19 nt, Homo sapiens
  misc_RNA (1)...(19): siRNA sense strand
gcaaucgaccucaggaaau

SEQ ID NO: 1316451 - RNA, 19 nt, Homo sapiens
  misc_RNA (1)...(19): siRNA sense strand
agaaagacaucaacucacu

SEQ ID NO: 1316452 - RNA, 19 nt, Homo sapiens
  misc_RNA (1)...(19): siRNA sense strand
ggugggagccaguaauuau

SEQ ID NO: 1316453 - RNA, 19 nt, Homo sapiens
  misc_RNA (1)...(19): siRNA sense strand
gaaguaggucuuuuagaua

SEQ ID NO: 1316454 - RNA, 19 nt, Homo sapiens
  misc_RNA (1)...(19): siRNA sense strand
gcaaggaaaagaacuagua

SEQ ID NO: 1316455 - RNA, 19 nt, Homo sapiens
  misc_RNA (1)...(19): siRNA sense strand
caucuuaccacauacaguu

SEQ ID NO: 1316456 - RNA, 19 nt, Homo sapiens
  misc_RNA (1)...(19): siRNA sense strand
ccacauacaguucuuuaca

SEQ ID NO: 1316457 - RNA, 19 nt, Homo sapiens
  misc_RNA (1)...(19): siRNA sense strand
gcggagcaccuucguguug

SEQ ID NO: 1316458 - RNA, 19 nt, Homo sapiens
  misc_RNA (1)...(19): siRNA sense strand
ugaaguaggucuuuuagau

SEQ ID NO: 1316459 - RNA, 19 nt, Homo sapiens
  misc_RNA (1)...(19): siRNA sense strand
ucaacucacugaaguaggu

SEQ ID NO: 1316460 - RNA, 19 nt, Homo sapiens
  misc_RNA (1)...(19): siRNA sense strand
acauacaguucuuuacaug

SEQ ID NO: 1316461 - RNA, 19 nt, Homo sapiens
  misc_RNA (1)...(19): siRNA sense strand
gaagagugucguggccaua

SEQ ID NO: 1316462 - RNA, 19 nt, Homo sapiens
  misc_RNA (1)...(19): siRNA sense strand
caaacaaugccaaguccuu

SEQ ID NO: 1316463 - RNA, 19 nt, Homo sapiens
  misc_RNA (1)...(19): siRNA sense strand
ggaauuguagugacuccaa

SEQ ID NO: 1316464 - RNA, 19 nt, Homo sapiens
  misc_RNA (1)...(19): siRNA sense strand
ccaaugggaucagguagca

SEQ ID NO: 1316465 - RNA, 19 nt, Homo sapiens
  misc_RNA (1)...(19): siRNA sense strand
gguuauaauugcuguaagg

SEQ ID NO: 1316466 - RNA, 19 nt, Homo sapiens
  misc_RNA (1)...(19): siRNA sense strand
uagcagaggagcuugagaa

SEQ ID NO: 1316467 - RNA, 19 nt, Homo sapiens
  misc_RNA (1)...(19): siRNA sense strand
gcuuuauuauucccucaaa

SEQ ID NO: 1316468 - RNA, 19 nt, Homo sapiens
  misc_RNA (1)...(19): siRNA sense strand
aaagacaucaacucacuga

SEQ ID NO: 1316469 - RNA, 19 nt, Homo sapiens
  misc_RNA (1)...(19): siRNA sense strand
gggaucagguagcaaucga

SEQ ID NO: 1316470 - RNA, 19 nt, Homo sapiens
  misc_RNA (1)...(19): siRNA sense strand
uuagaaagacaucaacuca

SEQ ID NO: 1316471 - RNA, 19 nt, Homo sapiens
  misc_RNA (1)...(19): siRNA sense strand
gcagaggagcuugagaaug

SEQ ID NO: 1316472 - RNA, 19 nt, Homo sapiens
  misc_RNA (1)...(19): siRNA sense strand
uaccacauacaguucuuua

SEQ ID NO: 1316473 - RNA, 19 nt, Homo sapiens
  misc_RNA (1)...(19): siRNA sense strand
cacauacaguucuuuacau

SEQ ID NO: 1316474 - RNA, 19 nt, Homo sapiens
  misc_RNA (1)...(19): siRNA sense strand
uuagauaacccugaacuuc

SEQ ID NO: 1316475 - RNA, 19 nt, Homo sapiens
  misc_RNA (1)...(19): siRNA sense strand
guaaggugggagccaguaa

SEQ ID NO: 1316476 - RNA, 19 nt, Homo sapiens
  misc_RNA (1)...(19): siRNA sense strand
cggagcaccuucguguuga

SEQ ID NO: 1316477 - RNA, 19 nt, Homo sapiens
  misc_RNA (1)...(19): siRNA sense strand
ggagugugugcgcagagua

SEQ ID NO: 1316478 - RNA, 19 nt, Homo sapiens
  misc_RNA (1)...(19): siRNA sense strand
cauaagagagcaaggaaaa

SEQ ID NO: 1316479 - RNA, 19 nt, Homo sapiens
  misc_RNA (1)...(19): siRNA sense strand
uugcuugguucgcguggua

SEQ ID NO: 1316480 - RNA, 19 nt, Homo sapiens
  misc_RNA (1)...(19): siRNA sense strand
ggaggggcauugcuugguu

SEQ ID NO: 1316481 - RNA, 19 nt, Homo sapiens
  misc_RNA (1)...(19): siRNA sense strand
gagaauguucgcaucuuac

SEQ ID NO: 1316482 - RNA, 19 nt, Homo sapiens
  misc_RNA (1)...(19): siRNA sense strand
gccauaagagagcaaggaa

SEQ ID NO: 1316483 - RNA, 19 nt, Homo sapiens
  misc_RNA (1)...(19): siRNA sense strand
agaaucugguuuugcuuua

SEQ ID NO: 1316484 - RNA, 19 nt, Homo sapiens
  misc_RNA (1)...(19): siRNA sense strand
gagaaucugguuuugcuuu

SEQ ID NO: 1316485 - RNA, 19 nt, Homo sapiens
  misc_RNA (1)...(19): siRNA sense strand
agacaucaacucacugaag

SEQ ID NO: 1316486 - RNA, 19 nt, Homo sapiens
  misc_RNA (1)...(19): siRNA sense strand
gaccucaggaaauagaaau

SEQ ID NO: 1316487 - RNA, 19 nt, Homo sapiens
  misc_RNA (1)...(19): siRNA sense strand
gagugugugcgcagaguau

SEQ ID NO: 1316488 - RNA, 19 nt, Homo sapiens
  misc_RNA (1)...(19): siRNA sense strand
ccucaggaaauagaaauug

SEQ ID NO: 1316489 - RNA, 19 nt, Homo sapiens
  misc_RNA (1)...(19): siRNA sense strand
agauaacccugaacuucgu

SEQ ID NO: 1316490 - RNA, 19 nt, Homo sapiens
  misc_RNA (1)...(19): siRNA sense strand
caucaacucacugaaguag

SEQ ID NO: 1316491 - RNA, 19 nt, Homo sapiens
  misc_RNA (1)...(19): siRNA sense strand
ccauaagagagcaaggaaa

SEQ ID NO: 1316492 - RNA, 19 nt, Homo sapiens
  misc_RNA (1)...(19): siRNA sense strand
gagaagcuauuccccaaac

SEQ ID NO: 1316493 - RNA, 19 nt, Homo sapiens
  misc_RNA (1)...(19): siRNA sense strand
ggagcaccuucguguugag

SEQ ID NO: 1316494 - RNA, 19 nt, Homo sapiens
  misc_RNA (1)...(19): siRNA sense strand
gggagugugugcgcagagu

SEQ ID NO: 1316495 - RNA, 19 nt, Homo sapiens
  misc_RNA (1)...(19): siRNA sense strand
ugucuuugguuauaauugc

SEQ ID NO: 1316496 - RNA, 19 nt, Homo sapiens
  misc_RNA (1)...(19): siRNA sense strand
gagugucguggccauaaga

SEQ ID NO: 1316497 - RNA, 19 nt, Homo sapiens
  misc_RNA (1)...(19): siRNA sense strand
gaagggaucacaucauuga

SEQ ID NO: 1316498 - RNA, 19 nt, Homo sapiens
  misc_RNA (1)...(19): siRNA sense strand
aaagauccauggagaaauu

SEQ ID NO: 1316499 - RNA, 19 nt, Homo sapiens
  misc_RNA (1)...(19): siRNA sense strand
acaaacagcucaucguaga

SEQ ID NO: 1316500 - RNA, 19 nt, Homo sapiens
  misc_RNA (1)...(19): siRNA sense strand
acagaagaauucccucuaa

SEQ ID NO: 1316501 - RNA, 19 nt, Homo sapiens
  misc_RNA (1)...(19): siRNA sense strand
ccaccaggaugaagacaaa

SEQ ID NO: 1316502 - RNA, 19 nt, Homo sapiens
  misc_RNA (1)...(19): siRNA sense strand
cggaagggaucacaucauu

SEQ ID NO: 1316503 - RNA, 19 nt, Homo sapiens
  misc_RNA (1)...(19): siRNA sense strand
cuucaucgaugccaaauau

SEQ ID NO: 1316504 - RNA, 19 nt, Homo sapiens
  misc_RNA (1)...(19): siRNA sense strand
ggacaucugcgcaguggaa

SEQ ID NO: 1316505 - RNA, 19 nt, Homo sapiens
  misc_RNA (1)...(19): siRNA sense strand
cgaauucucugaucucaac

SEQ ID NO: 1316506 - RNA, 19 nt, Homo sapiens
  misc_RNA (1)...(19): siRNA sense strand
ggacacgugcucagagauu

SEQ ID NO: 1316507 - RNA, 19 nt, Homo sapiens
  misc_RNA (1)...(19): siRNA sense strand
gaacuacaaggccuacaug

SEQ ID NO: 1316508 - RNA, 19 nt, Homo sapiens
  misc_RNA (1)...(19): siRNA sense strand
gacaagcccuggguguuug

SEQ ID NO: 1316509 - RNA, 19 nt, Homo sapiens
  misc_RNA (1)...(19): siRNA sense strand
cagaagaauucccucuaau

SEQ ID NO: 1316510 - RNA, 19 nt, Homo sapiens
  misc_RNA (1)...(19): siRNA sense strand
gacacgugcucagagauuu

SEQ ID NO: 1316511 - RNA, 19 nt, Homo sapiens
  misc_RNA (1)...(19): siRNA sense strand
agacaaacagcucaucgua

SEQ ID NO: 1316512 - RNA, 19 nt, Homo sapiens
  misc_RNA (1)...(19): siRNA sense strand
gcaacuuuauggccaaucu

SEQ ID NO: 1316513 - RNA, 19 nt, Homo sapiens
  misc_RNA (1)...(19): siRNA sense strand
ucucugaucucaaccuugu

SEQ ID NO: 1316514 - RNA, 19 nt, Homo sapiens
  misc_RNA (1)...(19): siRNA sense strand
ugacaagcccuggguguuu

SEQ ID NO: 1316515 - RNA, 19 nt, Homo sapiens
  misc_RNA (1)...(19): siRNA sense strand
aguguuaacuccuugcauu

SEQ ID NO: 1316516 - RNA, 19 nt, Homo sapiens
  misc_RNA (1)...(19): siRNA sense strand
gcacugaccaagacguaug

SEQ ID NO: 1316517 - RNA, 19 nt, Homo sapiens
  misc_RNA (1)...(19): siRNA sense strand
uaauugaucagaccuucua

SEQ ID NO: 1316518 - RNA, 19 nt, Homo sapiens
  misc_RNA (1)...(19): siRNA sense strand
gacagaagaauucccucua

SEQ ID NO: 1316519 - RNA, 19 nt, Homo sapiens
  misc_RNA (1)...(19): siRNA sense strand
gguggauucucuguggaua

SEQ ID NO: 1316520 - RNA, 19 nt, Homo sapiens
  misc_RNA (1)...(19): siRNA sense strand
ggacggaagggaucacauc

SEQ ID NO: 1316521 - RNA, 19 nt, Homo sapiens
  misc_RNA (1)...(19): siRNA sense strand
ggagaaauugacauuaaag

SEQ ID NO: 1316522 - RNA, 19 nt, Homo sapiens
  misc_RNA (1)...(19): siRNA sense strand
ggaagggaucacaucauug

SEQ ID NO: 1316523 - RNA, 19 nt, Homo sapiens
  misc_RNA (1)...(19): siRNA sense strand
caaauggguacaugacaga

SEQ ID NO: 1316524 - RNA, 19 nt, Homo sapiens
  misc_RNA (1)...(19): siRNA sense strand
ucauugggcugcaguaugc

SEQ ID NO: 1316525 - RNA, 19 nt, Homo sapiens
  misc_RNA (1)...(19): siRNA sense strand
ggaacuggaagaccaauac

SEQ ID NO: 1316526 - RNA, 19 nt, Homo sapiens
  misc_RNA (1)...(19): siRNA sense strand
guggacacgugcucagaga

SEQ ID NO: 1316527 - RNA, 19 nt, Homo sapiens
  misc_RNA (1)...(19): siRNA sense strand
ccagaugguucgacugcau

SEQ ID NO: 1316528 - RNA, 19 nt, Homo sapiens
  misc_RNA (1)...(19): siRNA sense strand
ucguagagcucguggucaa

SEQ ID NO: 1316529 - RNA, 19 nt, Homo sapiens
  misc_RNA (1)...(19): siRNA sense strand
ugacgugcguguccagaag

SEQ ID NO: 1316530 - RNA, 19 nt, Homo sapiens
  misc_RNA (1)...(19): siRNA sense strand
ccauggagaaauugacauu

SEQ ID NO: 1316531 - RNA, 19 nt, Homo sapiens
  misc_RNA (1)...(19): siRNA sense strand
uggauucucuguggauaug

SEQ ID NO: 1316532 - RNA, 19 nt, Homo sapiens
  misc_RNA (1)...(19): siRNA sense strand
gcaguggaagcgcuacaug

SEQ ID NO: 1316533 - RNA, 19 nt, Homo sapiens
  misc_RNA (1)...(19): siRNA sense strand
ugacaaccagcaugacuuc

SEQ ID NO: 1316534 - RNA, 19 nt, Homo sapiens
  misc_RNA (1)...(19): siRNA sense strand
gauucucuguggauaugga

SEQ ID NO: 1316535 - RNA, 19 nt, Homo sapiens
  misc_RNA (1)...(19): siRNA sense strand
cauggagaaauugacauua

SEQ ID NO: 1316536 - RNA, 19 nt, Homo sapiens
  misc_RNA (1)...(19): siRNA sense strand
cagaugguucgacugcaua

SEQ ID NO: 1316537 - RNA, 19 nt, Homo sapiens
  misc_RNA (1)...(19): siRNA sense strand
guuaacuccuugcauucug

SEQ ID NO: 1316538 - RNA, 19 nt, Homo sapiens
  misc_RNA (1)...(19): siRNA sense strand
gugcguguccagaagauug

SEQ ID NO: 1316539 - RNA, 19 nt, Homo sapiens
  misc_RNA (1)...(19): siRNA sense strand
gucuacaacuucugugaca

SEQ ID NO: 1316540 - RNA, 19 nt, Homo sapiens
  misc_RNA (1)...(19): siRNA sense strand
gccgaauucucugaucuca

SEQ ID NO: 1316541 - RNA, 19 nt, Homo sapiens
  misc_RNA (1)...(19): siRNA sense strand
gggaacuggaagaccaaua

SEQ ID NO: 1316542 - RNA, 19 nt, Homo sapiens
  misc_RNA (1)...(19): siRNA sense strand
uccagaagauugggcagaa

SEQ ID NO: 1316543 - RNA, 19 nt, Homo sapiens
  misc_RNA (1)...(19): siRNA sense strand
cuaccgcaguuuggucauu

SEQ ID NO: 1316544 - RNA, 19 nt, Homo sapiens
  misc_RNA (1)...(19): siRNA sense strand
ugcauucugucuacaacuu

SEQ ID NO: 1316545 - RNA, 19 nt, Homo sapiens
  misc_RNA (1)...(19): siRNA sense strand
caugaggacgucaguguca

SEQ ID NO: 1316546 - RNA, 19 nt, Homo sapiens
  misc_RNA (1)...(19): siRNA sense strand
ggagacuaccgcaguuugg

SEQ ID NO: 1316547 - RNA, 19 nt, Homo sapiens
  misc_RNA (1)...(19): siRNA sense strand
gaacuggaagaccaauacu

SEQ ID NO: 1316548 - RNA, 19 nt, Homo sapiens
  misc_RNA (1)...(19): siRNA sense strand
gaagauugggcagaacuac

SEQ ID NO: 1316549 - RNA, 19 nt, Homo sapiens
  misc_RNA (1)...(19): siRNA sense strand
uccaggacaucgcaagugu

SEQ ID NO: 1316550 - RNA, 19 nt, Homo sapiens
  misc_RNA (1)...(19): siRNA sense strand
gcugcaguaugcuggaauc

SEQ ID NO: 1316551 - RNA, 19 nt, Homo sapiens
  misc_RNA (1)...(19): siRNA sense strand
gggcugcaguaugcuggaa

SEQ ID NO: 1316552 - RNA, 19 nt, Homo sapiens
  misc_RNA (1)...(19): siRNA sense strand
ugguucgacugcauaagaa

SEQ ID NO: 1316553 - RNA, 19 nt, Homo sapiens
  misc_RNA (1)...(19): siRNA sense strand
gaugggcaaggucaagguu

SEQ ID NO: 1316554 - RNA, 19 nt, Homo sapiens
  misc_RNA (1)...(19): siRNA sense strand
gcaaggacggaagggauca

SEQ ID NO: 1316555 - RNA, 19 nt, Homo sapiens
  misc_RNA (1)...(19): siRNA sense strand
ggucucugaagccggauuu

SEQ ID NO: 1316556 - RNA, 19 nt, Homo sapiens
  misc_RNA (1)...(19): siRNA sense strand
gagcucguggucaacaaga

SEQ ID NO: 1316557 - RNA, 19 nt, Homo sapiens
  misc_RNA (1)...(19): siRNA sense strand
uuaacuccuugcauucugu

SEQ ID NO: 1316558 - RNA, 19 nt, Homo sapiens
  misc_RNA (1)...(19): siRNA sense strand
uaccgcaguuuggucauug

SEQ ID NO: 1316559 - RNA, 19 nt, Homo sapiens
  misc_RNA (1)...(19): siRNA sense strand
gacggaagggaucacauca

SEQ ID NO: 1316560 - RNA, 19 nt, Homo sapiens
  misc_RNA (1)...(19): siRNA sense strand
gcucguggucaacaagaug

SEQ ID NO: 1316561 - RNA, 19 nt, Homo sapiens
  misc_RNA (1)...(19): siRNA sense strand
agauugggcagaacuacaa

SEQ ID NO: 1316562 - RNA, 19 nt, Homo sapiens
  misc_RNA (1)...(19): siRNA sense strand
gcaccuuucaggccuugga

SEQ ID NO: 1316563 - RNA, 19 nt, Homo sapiens
  misc_RNA (1)...(19): siRNA sense strand
gaagggaucacaucauuga

SEQ ID NO: 1316564 - RNA, 19 nt, Homo sapiens
  misc_RNA (1)...(19): siRNA sense strand
aaagauccauggagaaauu

SEQ ID NO: 1316565 - RNA, 19 nt, Homo sapiens
  misc_RNA (1)...(19): siRNA sense strand
acaaacagcucaucguaga

SEQ ID NO: 1316566 - RNA, 19 nt, Homo sapiens
  misc_RNA (1)...(19): siRNA sense strand
acagaagaauucccucuaa

SEQ ID NO: 1316567 - RNA, 19 nt, Homo sapiens
  misc_RNA (1)...(19): siRNA sense strand
ccaccaggaugaagacaaa

SEQ ID NO: 1316568 - RNA, 19 nt, Homo sapiens
  misc_RNA (1)...(19): siRNA sense strand
cggaagggaucacaucauu

SEQ ID NO: 1316569 - RNA, 19 nt, Homo sapiens
  misc_RNA (1)...(19): siRNA sense strand
cuucaucgaugccaaauau

SEQ ID NO: 1316570 - RNA, 19 nt, Homo sapiens
  misc_RNA (1)...(19): siRNA sense strand
ggacaucugcgcaguggaa

SEQ ID NO: 1316571 - RNA, 19 nt, Homo sapiens
  misc_RNA (1)...(19): siRNA sense strand
cgaauucucugaucucaac

SEQ ID NO: 1316572 - RNA, 19 nt, Homo sapiens
  misc_RNA (1)...(19): siRNA sense strand
ggacacgugcucagagauu

SEQ ID NO: 1316573 - RNA, 19 nt, Homo sapiens
  misc_RNA (1)...(19): siRNA sense strand
gaacuacaaggccuacaug

SEQ ID NO: 1316574 - RNA, 19 nt, Homo sapiens
  misc_RNA (1)...(19): siRNA sense strand
gacaagcccuggguguuug

SEQ ID NO: 1316575 - RNA, 19 nt, Homo sapiens
  misc_RNA (1)...(19): siRNA sense strand
cagaagaauucccucuaau

SEQ ID NO: 1316576 - RNA, 19 nt, Homo sapiens
  misc_RNA (1)...(19): siRNA sense strand
gacacgugcucagagauuu

SEQ ID NO: 1316577 - RNA, 19 nt, Homo sapiens
  misc_RNA (1)...(19): siRNA sense strand
agacaaacagcucaucgua

SEQ ID NO: 1316578 - RNA, 19 nt, Homo sapiens
  misc_RNA (1)...(19): siRNA sense strand
gcaacuuuauggccaaucu

SEQ ID NO: 1316579 - RNA, 19 nt, Homo sapiens
  misc_RNA (1)...(19): siRNA sense strand
ucucugaucucaaccuugu

SEQ ID NO: 1316580 - RNA, 19 nt, Homo sapiens
  misc_RNA (1)...(19): siRNA sense strand
ugacaagcccuggguguuu

SEQ ID NO: 1316581 - RNA, 19 nt, Homo sapiens
  misc_RNA (1)...(19): siRNA sense strand
aguguuaacuccuugcauu

SEQ ID NO: 1316582 - RNA, 19 nt, Homo sapiens
  misc_RNA (1)...(19): siRNA sense strand
gcacugaccaagacguaug

SEQ ID NO: 1316583 - RNA, 19 nt, Homo sapiens
  misc_RNA (1)...(19): siRNA sense strand
uaauugaucagaccuucua

SEQ ID NO: 1316584 - RNA, 19 nt, Homo sapiens
  misc_RNA (1)...(19): siRNA sense strand
gacagaagaauucccucua

SEQ ID NO: 1316585 - RNA, 19 nt, Homo sapiens
  misc_RNA (1)...(19): siRNA sense strand
gguggauucucuguggaua

SEQ ID NO: 1316586 - RNA, 19 nt, Homo sapiens
  misc_RNA (1)...(19): siRNA sense strand
ggacggaagggaucacauc

SEQ ID NO: 1316587 - RNA, 19 nt, Homo sapiens
  misc_RNA (1)...(19): siRNA sense strand
ggagaaauugacauuaaag

SEQ ID NO: 1316588 - RNA, 19 nt, Homo sapiens
  misc_RNA (1)...(19): siRNA sense strand
ggaagggaucacaucauug

SEQ ID NO: 1316589 - RNA, 19 nt, Homo sapiens
  misc_RNA (1)...(19): siRNA sense strand
caaauggguacaugacaga

SEQ ID NO: 1316590 - RNA, 19 nt, Homo sapiens
  misc_RNA (1)...(19): siRNA sense strand
ucauugggcugcaguaugc

SEQ ID NO: 1316591 - RNA, 19 nt, Homo sapiens
  misc_RNA (1)...(19): siRNA sense strand
ggaacuggaagaccaauac

SEQ ID NO: 1316592 - RNA, 19 nt, Homo sapiens
  misc_RNA (1)...(19): siRNA sense strand
guggacacgugcucagaga

SEQ ID NO: 1316593 - RNA, 19 nt, Homo sapiens
  misc_RNA (1)...(19): siRNA sense strand
ccagaugguucgacugcau

SEQ ID NO: 1316594 - RNA, 19 nt, Homo sapiens
  misc_RNA (1)...(19): siRNA sense strand
ucguagagcucguggucaa

SEQ ID NO: 1316595 - RNA, 19 nt, Homo sapiens
  misc_RNA (1)...(19): siRNA sense strand
ugacgugcguguccagaag

SEQ ID NO: 1316596 - RNA, 19 nt, Homo sapiens
  misc_RNA (1)...(19): siRNA sense strand
ccauggagaaauugacauu

SEQ ID NO: 1316597 - RNA, 19 nt, Homo sapiens
  misc_RNA (1)...(19): siRNA sense strand
uggauucucuguggauaug

SEQ ID NO: 1316598 - RNA, 19 nt, Homo sapiens
  misc_RNA (1)...(19): siRNA sense strand
gcaguggaagcgcuacaug

SEQ ID NO: 1316599 - RNA, 19 nt, Homo sapiens
  misc_RNA (1)...(19): siRNA sense strand
ugacaaccagcaugacuuc

SEQ ID NO: 1316600 - RNA, 19 nt, Homo sapiens
  misc_RNA (1)...(19): siRNA sense strand
gauucucuguggauaugga

SEQ ID NO: 1316601 - RNA, 19 nt, Homo sapiens
  misc_RNA (1)...(19): siRNA sense strand
cauggagaaauugacauua

SEQ ID NO: 1316602 - RNA, 19 nt, Homo sapiens
  misc_RNA (1)...(19): siRNA sense strand
cagaugguucgacugcaua

SEQ ID NO: 1316603 - RNA, 19 nt, Homo sapiens
  misc_RNA (1)...(19): siRNA sense strand
guuaacuccuugcauucug

SEQ ID NO: 1316604 - RNA, 19 nt, Homo sapiens
  misc_RNA (1)...(19): siRNA sense strand
gugcguguccagaagauug

SEQ ID NO: 1316605 - RNA, 19 nt, Homo sapiens
  misc_RNA (1)...(19): siRNA sense strand
gucuacaacuucugugaca

SEQ ID NO: 1316606 - RNA, 19 nt, Homo sapiens
  misc_RNA (1)...(19): siRNA sense strand
gccgaauucucugaucuca

SEQ ID NO: 1316607 - RNA, 19 nt, Homo sapiens
  misc_RNA (1)...(19): siRNA sense strand
gggaacuggaagaccaaua

SEQ ID NO: 1316608 - RNA, 19 nt, Homo sapiens
  misc_RNA (1)...(19): siRNA sense strand
uccagaagauugggcagaa

SEQ ID NO: 1316609 - RNA, 19 nt, Homo sapiens
  misc_RNA (1)...(19): siRNA sense strand
cuaccgcaguuuggucauu

SEQ ID NO: 1316610 - RNA, 19 nt, Homo sapiens
  misc_RNA (1)...(19): siRNA sense strand
ugcauucugucuacaacuu

SEQ ID NO: 1316611 - RNA, 19 nt, Homo sapiens
  misc_RNA (1)...(19): siRNA sense strand
caugaggacgucaguguca

SEQ ID NO: 1316612 - RNA, 19 nt, Homo sapiens
  misc_RNA (1)...(19): siRNA sense strand
ggagacuaccgcaguuugg

SEQ ID NO: 1316613 - RNA, 19 nt, Homo sapiens
  misc_RNA (1)...(19): siRNA sense strand
gaacuggaagaccaauacu

SEQ ID NO: 1316614 - RNA, 19 nt, Homo sapiens
  misc_RNA (1)...(19): siRNA sense strand
gaagauugggcagaacuac

SEQ ID NO: 1316615 - RNA, 19 nt, Homo sapiens
  misc_RNA (1)...(19): siRNA sense strand
uccaggacaucgcaagugu

SEQ ID NO: 1316616 - RNA, 19 nt, Homo sapiens
  misc_RNA (1)...(19): siRNA sense strand
gcugcaguaugcuggaauc

SEQ ID NO: 1316617 - RNA, 19 nt, Homo sapiens
  misc_RNA (1)...(19): siRNA sense strand
gggcugcaguaugcuggaa

SEQ ID NO: 1316618 - RNA, 19 nt, Homo sapiens
  misc_RNA (1)...(19): siRNA sense strand
ugguucgacugcauaagaa

SEQ ID NO: 1316619 - RNA, 19 nt, Homo sapiens
  misc_RNA (1)...(19): siRNA sense strand
gaugggcaaggucaagguu

SEQ ID NO: 1316620 - RNA, 19 nt, Homo sapiens
  misc_RNA (1)...(19): siRNA sense strand
gcaaggacggaagggauca

SEQ ID NO: 1316621 - RNA, 19 nt, Homo sapiens
  misc_RNA (1)...(19): siRNA sense strand
ggucucugaagccggauuu

SEQ ID NO: 1316622 - RNA, 19 nt, Homo sapiens
  misc_RNA (1)...(19): siRNA sense strand
gagcucguggucaacaaga

SEQ ID NO: 1316623 - RNA, 19 nt, Homo sapiens
  misc_RNA (1)...(19): siRNA sense strand
uuaacuccuugcauucugu

SEQ ID NO: 1316624 - RNA, 19 nt, Homo sapiens
  misc_RNA (1)...(19): siRNA sense strand
uaccgcaguuuggucauug

SEQ ID NO: 1316625 - RNA, 19 nt, Homo sapiens
  misc_RNA (1)...(19): siRNA sense strand
gacggaagggaucacauca

SEQ ID NO: 1316626 - RNA, 19 nt, Homo sapiens
  misc_RNA (1)...(19): siRNA sense strand
gcucguggucaacaagaug

SEQ ID NO: 1316627 - RNA, 19 nt, Homo sapiens
  misc_RNA (1)...(19): siRNA sense strand
agauugggcagaacuacaa

SEQ ID NO: 1316628 - RNA, 19 nt, Homo sapiens
  misc_RNA (1)...(19): siRNA sense strand
gcaccuuucaggccuugga

SEQ ID NO: 1316629 - RNA, 19 nt, Homo sapiens
  misc_RNA (1)...(19): siRNA sense strand
ggacaaagcgaaagaagaa

SEQ ID NO: 1316630 - RNA, 19 nt, Homo sapiens
  misc_RNA (1)...(19): siRNA sense strand
agaaacagccuaccucaua

SEQ ID NO: 1316631 - RNA, 19 nt, Homo sapiens
  misc_RNA (1)...(19): siRNA sense strand
gaaacauaauucacgugua

SEQ ID NO: 1316632 - RNA, 19 nt, Homo sapiens
  misc_RNA (1)...(19): siRNA sense strand
ggagagagaccauuugaau

SEQ ID NO: 1316633 - RNA, 19 nt, Homo sapiens
  misc_RNA (1)...(19): siRNA sense strand
acccagagcucacaccuua

SEQ ID NO: 1316634 - RNA, 19 nt, Homo sapiens
  misc_RNA (1)...(19): siRNA sense strand
gaaacagccuaccucauag

SEQ ID NO: 1316635 - RNA, 19 nt, Homo sapiens
  misc_RNA (1)...(19): siRNA sense strand
gggaggaccuucaaugauc

SEQ ID NO: 1316636 - RNA, 19 nt, Homo sapiens
  misc_RNA (1)...(19): siRNA sense strand
gauggagucugcucaggaa

SEQ ID NO: 1316637 - RNA, 19 nt, Homo sapiens
  misc_RNA (1)...(19): siRNA sense strand
ggagagaggcccuaugugu

SEQ ID NO: 1316638 - RNA, 19 nt, Homo sapiens
  misc_RNA (1)...(19): siRNA sense strand
guacuaaacagauuacguu

SEQ ID NO: 1316639 - RNA, 19 nt, Homo sapiens
  misc_RNA (1)...(19): siRNA sense strand
gggaaaggauuuguucaga

SEQ ID NO: 1316640 - RNA, 19 nt, Homo sapiens
  misc_RNA (1)...(19): siRNA sense strand
agaguuagcuccaaauucu

SEQ ID NO: 1316641 - RNA, 19 nt, Homo sapiens
  misc_RNA (1)...(19): siRNA sense strand
gcgcuaagcccuacaagug

SEQ ID NO: 1316642 - RNA, 19 nt, Homo sapiens
  misc_RNA (1)...(19): siRNA sense strand
caaaauuccuccuagaaaa

SEQ ID NO: 1316643 - RNA, 19 nt, Homo sapiens
  misc_RNA (1)...(19): siRNA sense strand
ggauguggcuguggacuuc

SEQ ID NO: 1316644 - RNA, 19 nt, Homo sapiens
  misc_RNA (1)...(19): siRNA sense strand
agacuacacuggaaaauaa

SEQ ID NO: 1316645 - RNA, 19 nt, Homo sapiens
  misc_RNA (1)...(19): siRNA sense strand
guggugcucuugacacaaa

SEQ ID NO: 1316646 - RNA, 19 nt, Homo sapiens
  misc_RNA (1)...(19): siRNA sense strand
caccagagaacccacaaua

SEQ ID NO: 1316647 - RNA, 19 nt, Homo sapiens
  misc_RNA (1)...(19): siRNA sense strand
cgacacagaggaccgagua

SEQ ID NO: 1316648 - RNA, 19 nt, Homo sapiens
  misc_RNA (1)...(19): siRNA sense strand
gauugugccuuguccucua

SEQ ID NO: 1316649 - RNA, 19 nt, Homo sapiens
  misc_RNA (1)...(19): siRNA sense strand
auaaagaguuagcuccaaa

SEQ ID NO: 1316650 - RNA, 19 nt, Homo sapiens
  misc_RNA (1)...(19): siRNA sense strand
ucagagcucuucccucaca

SEQ ID NO: 1316651 - RNA, 19 nt, Homo sapiens
  misc_RNA (1)...(19): siRNA sense strand
ccauaugcaugcaacaaau

SEQ ID NO: 1316652 - RNA, 19 nt, Homo sapiens
  misc_RNA (1)...(19): siRNA sense strand
gaagaagcacuuugacaac

SEQ ID NO: 1316653 - RNA, 19 nt, Homo sapiens
  misc_RNA (1)...(19): siRNA sense strand
caucagaagagcugugaaa

SEQ ID NO: 1316654 - RNA, 19 nt, Homo sapiens
  misc_RNA (1)...(19): siRNA sense strand
agaagaagcacuuugacaa

SEQ ID NO: 1316655 - RNA, 19 nt, Homo sapiens
  misc_RNA (1)...(19): siRNA sense strand
ccagagcucacaccuuauu

SEQ ID NO: 1316656 - RNA, 19 nt, Homo sapiens
  misc_RNA (1)...(19): siRNA sense strand
ccuauaugcugaagaugga

SEQ ID NO: 1316657 - RNA, 19 nt, Homo sapiens
  misc_RNA (1)...(19): siRNA sense strand
gcaaacaguggugcucuug

SEQ ID NO: 1316658 - RNA, 19 nt, Homo sapiens
  misc_RNA (1)...(19): siRNA sense strand
ugccuuguccucuacauua

SEQ ID NO: 1316659 - RNA, 19 nt, Homo sapiens
  misc_RNA (1)...(19): siRNA sense strand
gcucccaccucaucagaca

SEQ ID NO: 1316660 - RNA, 19 nt, Homo sapiens
  misc_RNA (1)...(19): siRNA sense strand
ggacucacacuggcgcuaa

SEQ ID NO: 1316661 - RNA, 19 nt, Homo sapiens
  misc_RNA (1)...(19): siRNA sense strand
cagugaaugugguaaaaua

SEQ ID NO: 1316662 - RNA, 19 nt, Homo sapiens
  misc_RNA (1)...(19): siRNA sense strand
gcaaacaguggcgcucuug

SEQ ID NO: 1316663 - RNA, 19 nt, Homo sapiens
  misc_RNA (1)...(19): siRNA sense strand
cagagaacccacaauagga

SEQ ID NO: 1316664 - RNA, 19 nt, Homo sapiens
  misc_RNA (1)...(19): siRNA sense strand
ucacacagcaucagagagu

SEQ ID NO: 1316665 - RNA, 19 nt, Homo sapiens
  misc_RNA (1)...(19): siRNA sense strand
ggcccuauaugcugaagau

SEQ ID NO: 1316666 - RNA, 19 nt, Homo sapiens
  misc_RNA (1)...(19): siRNA sense strand
guggcgcucuugacacaaa

SEQ ID NO: 1316667 - RNA, 19 nt, Homo sapiens
  misc_RNA (1)...(19): siRNA sense strand
ccagagaacccacaauagg

SEQ ID NO: 1316668 - RNA, 19 nt, Homo sapiens
  misc_RNA (1)...(19): siRNA sense strand
gaacccacaauaggacaaa

SEQ ID NO: 1316669 - RNA, 19 nt, Homo sapiens
  misc_RNA (1)...(19): siRNA sense strand
caaggaaggcaaugguugu

SEQ ID NO: 1316670 - RNA, 19 nt, Homo sapiens
  misc_RNA (1)...(19): siRNA sense strand
cuacaagugucaggacugu

SEQ ID NO: 1316671 - RNA, 19 nt, Homo sapiens
  misc_RNA (1)...(19): siRNA sense strand
ucaagacugugggaaagga

SEQ ID NO: 1316672 - RNA, 19 nt, Homo sapiens
  misc_RNA (1)...(19): siRNA sense strand
gaaggcaaugguuguagga

SEQ ID NO: 1316673 - RNA, 19 nt, Homo sapiens
  misc_RNA (1)...(19): siRNA sense strand
gugggaggaccuucaauga

SEQ ID NO: 1316674 - RNA, 19 nt, Homo sapiens
  misc_RNA (1)...(19): siRNA sense strand
ccagauccaggcccuauau

SEQ ID NO: 1316675 - RNA, 19 nt, Homo sapiens
  misc_RNA (1)...(19): siRNA sense strand
ggcaaacaguggugcucuu

SEQ ID NO: 1316676 - RNA, 19 nt, Homo sapiens
  misc_RNA (1)...(19): siRNA sense strand
aggcaaugguuguaggaaa

SEQ ID NO: 1316677 - RNA, 19 nt, Homo sapiens
  misc_RNA (1)...(19): siRNA sense strand
caguggcgcucuugacaca

SEQ ID NO: 1316678 - RNA, 19 nt, Homo sapiens
  misc_RNA (1)...(19): siRNA sense strand
gugggagacuacacuggaa

SEQ ID NO: 1316679 - RNA, 19 nt, Homo sapiens
  misc_RNA (1)...(19): siRNA sense strand
uaggugcacugccugugaa

SEQ ID NO: 1316680 - RNA, 19 nt, Homo sapiens
  misc_RNA (1)...(19): siRNA sense strand
gcuccaaauucugacauuc

SEQ ID NO: 1316681 - RNA, 19 nt, Homo sapiens
  misc_RNA (1)...(19): siRNA sense strand
aaagaguuagcuccaaauu

SEQ ID NO: 1316682 - RNA, 19 nt, Homo sapiens
  misc_RNA (1)...(19): siRNA sense strand
aaacaguggugcucuugac

SEQ ID NO: 1316683 - RNA, 19 nt, Homo sapiens
  misc_RNA (1)...(19): siRNA sense strand
ccagagcucccaccucauc

SEQ ID NO: 1316684 - RNA, 19 nt, Homo sapiens
  misc_RNA (1)...(19): siRNA sense strand
ucggaguacuaaacagauu

SEQ ID NO: 1316685 - RNA, 19 nt, Homo sapiens
  misc_RNA (1)...(19): siRNA sense strand
ccacaaaauuccuccuaga

SEQ ID NO: 1316686 - RNA, 19 nt, Homo sapiens
  misc_RNA (1)...(19): siRNA sense strand
ggcaaacaguggcgcucuu

SEQ ID NO: 1316687 - RNA, 19 nt, Homo sapiens
  misc_RNA (1)...(19): siRNA sense strand
cggaguacuaaacagauua

SEQ ID NO: 1316688 - RNA, 19 nt, Homo sapiens
  misc_RNA (1)...(19): siRNA sense strand
ggcaaugguuguaggaaaa

SEQ ID NO: 1316689 - RNA, 19 nt, Homo sapiens
  misc_RNA (1)...(19): siRNA sense strand
aauaaagaguuagcuccaa

SEQ ID NO: 1316690 - RNA, 19 nt, Homo sapiens
  misc_RNA (1)...(19): siRNA sense strand
caaagcgaaagaagaaaca

SEQ ID NO: 1316691 - RNA, 19 nt, Homo sapiens
  misc_RNA (1)...(19): siRNA sense strand
acaauaggacaaagcgaaa

SEQ ID NO: 1316692 - RNA, 19 nt, Homo sapiens
  misc_RNA (1)...(19): siRNA sense strand
gcaugcaacaaauguggaa

SEQ ID NO: 1316693 - RNA, 19 nt, Homo sapiens
  misc_RNA (1)...(19): siRNA sense strand
cagaagaagcacuuugaca

SEQ ID NO: 1316694 - RNA, 19 nt, Homo sapiens
  misc_RNA (1)...(19): siRNA sense strand
agagaggcccuaugugugu

SEQ ID NO: 1316695 - RNA, 19 nt, Homo sapiens
  misc_RNA (1)...(19): siRNA sense strand
ccaggaaguccaagacaca

SEQ ID NO: 1316696 - RNA, 19 nt, Homo sapiens
  misc_RNA (1)...(19): siRNA sense strand
caaacaguggugcucuuga

SEQ ID NO: 1316697 - RNA, 19 nt, Homo sapiens
  misc_RNA (1)...(19): siRNA sense strand
gagacuacacuggaaaaua

SEQ ID NO: 1316698 - RNA, 19 nt, Homo sapiens
  misc_RNA (1)...(19): siRNA sense strand
gagcucccaccucaucaga

SEQ ID NO: 1316699 - RNA, 19 nt, Homo sapiens
  misc_RNA (1)...(19): siRNA sense strand
aaugaucgcucagccaucu

SEQ ID NO: 1316700 - RNA, 19 nt, Homo sapiens
  misc_RNA (1)...(19): siRNA sense strand
cuaugugugucaagacugu

SEQ ID NO: 1316701 - RNA, 19 nt, Homo sapiens
  misc_RNA (1)...(19): siRNA sense strand
ggcccuaugugugucaaga

SEQ ID NO: 1316702 - RNA, 19 nt, Homo sapiens
  misc_RNA (1)...(19): siRNA sense strand
uuccggcaguuccguuaua

SEQ ID NO: 1316703 - RNA, 19 nt, Homo sapiens
  misc_RNA (1)...(19): siRNA sense strand
uagagggugugaccuggau

SEQ ID NO: 1316704 - RNA, 19 nt, Homo sapiens
  misc_RNA (1)...(19): siRNA sense strand
ugucaagacugugggaaag

SEQ ID NO: 1316705 - RNA, 19 nt, Homo sapiens
  misc_RNA (1)...(19): siRNA sense strand
uaaagaguuagcuccaaau

SEQ ID NO: 1316706 - RNA, 19 nt, Homo sapiens
  misc_RNA (1)...(19): siRNA sense strand
caaacaguggcgcucuuga

SEQ ID NO: 1316707 - RNA, 19 nt, Homo sapiens
  misc_RNA (1)...(19): siRNA sense strand
caguggugcucuugacaca

SEQ ID NO: 1316708 - RNA, 19 nt, Homo sapiens
  misc_RNA (1)...(19): siRNA sense strand
ccggaacccaagauacuuu

SEQ ID NO: 1316709 - RNA, 19 nt, Homo sapiens
  misc_RNA (1)...(19): siRNA sense strand
cuaaggcacgcuccaagga

SEQ ID NO: 1316710 - RNA, 19 nt, Homo sapiens
  misc_RNA (1)...(19): siRNA sense strand
ccggagagaggcccuaugu

SEQ ID NO: 1316711 - RNA, 19 nt, Homo sapiens
  misc_RNA (1)...(19): siRNA sense strand
cgaguaccgcgaugugaug

SEQ ID NO: 1316712 - RNA, 19 nt, Homo sapiens
  misc_RNA (1)...(19): siRNA sense strand
gauccaggcccuauaugcu

SEQ ID NO: 1316713 - RNA, 19 nt, Homo sapiens
  misc_RNA (1)...(19): siRNA sense strand
aaucgcagcacccagagaa

SEQ ID NO: 1316714 - RNA, 19 nt, Homo sapiens
  misc_RNA (1)...(19): siRNA sense strand
cuggaugucugaggaggaa

SEQ ID NO: 1316715 - RNA, 19 nt, Homo sapiens
  misc_RNA (1)...(19): siRNA sense strand
cauaugcaugcaacaaaug

SEQ ID NO: 1316716 - RNA, 19 nt, Homo sapiens
  misc_RNA (1)...(19): siRNA sense strand
gccugaaaguacaagaauc

SEQ ID NO: 1316717 - RNA, 19 nt, Homo sapiens
  misc_RNA (1)...(19): siRNA sense strand
cagcaucagagaguucauu

SEQ ID NO: 1316718 - RNA, 19 nt, Homo sapiens
  misc_RNA (1)...(19): siRNA sense strand
gccaaggaaggcaaugguu

SEQ ID NO: 1316719 - RNA, 19 nt, Homo sapiens
  misc_RNA (1)...(19): siRNA sense strand
gccuuguccucuacauuag

SEQ ID NO: 1316720 - RNA, 19 nt, Homo sapiens
  misc_RNA (1)...(19): siRNA sense strand
gacaaagcgaaagaagaaa

SEQ ID NO: 1316721 - RNA, 19 nt, Homo sapiens
  misc_RNA (1)...(19): siRNA sense strand
caccucaucagacaucaga

SEQ ID NO: 1316722 - RNA, 19 nt, Homo sapiens
  misc_RNA (1)...(19): siRNA sense strand
cuaggugcacugccuguga

SEQ ID NO: 1316723 - RNA, 19 nt, Homo sapiens
  misc_RNA (1)...(19): siRNA sense strand
ggaguacuaaacagauuac

SEQ ID NO: 1316724 - RNA, 19 nt, Homo sapiens
  misc_RNA (1)...(19): siRNA sense strand
ucagaagagcugugaaagg

SEQ ID NO: 1316725 - RNA, 19 nt, Homo sapiens
  misc_RNA (1)...(19): siRNA sense strand
gccagagguuccggcaguu

SEQ ID NO: 1316726 - RNA, 19 nt, Homo sapiens
  misc_RNA (1)...(19): siRNA sense strand
ggacaaagcgaaagaagaa

SEQ ID NO: 1316727 - RNA, 19 nt, Homo sapiens
  misc_RNA (1)...(19): siRNA sense strand
agaaacagccuaccucaua

SEQ ID NO: 1316728 - RNA, 19 nt, Homo sapiens
  misc_RNA (1)...(19): siRNA sense strand
gaaacauaauucacgugua

SEQ ID NO: 1316729 - RNA, 19 nt, Homo sapiens
  misc_RNA (1)...(19): siRNA sense strand
ggagagagaccauuugaau

SEQ ID NO: 1316730 - RNA, 19 nt, Homo sapiens
  misc_RNA (1)...(19): siRNA sense strand
acccagagcucacaccuua

SEQ ID NO: 1316731 - RNA, 19 nt, Homo sapiens
  misc_RNA (1)...(19): siRNA sense strand
gaaacagccuaccucauag

SEQ ID NO: 1316732 - RNA, 19 nt, Homo sapiens
  misc_RNA (1)...(19): siRNA sense strand
gggaggaccuucaaugauc

SEQ ID NO: 1316733 - RNA, 19 nt, Homo sapiens
  misc_RNA (1)...(19): siRNA sense strand
gauggagucugcucaggaa

SEQ ID NO: 1316734 - RNA, 19 nt, Homo sapiens
  misc_RNA (1)...(19): siRNA sense strand
ggagagaggcccuaugugu

SEQ ID NO: 1316735 - RNA, 19 nt, Homo sapiens
  misc_RNA (1)...(19): siRNA sense strand
guacuaaacagauuacguu

SEQ ID NO: 1316736 - RNA, 19 nt, Homo sapiens
  misc_RNA (1)...(19): siRNA sense strand
gggaaaggauuuguucaga

SEQ ID NO: 1316737 - RNA, 19 nt, Homo sapiens
  misc_RNA (1)...(19): siRNA sense strand
agaguuagcuccaaauucu

SEQ ID NO: 1316738 - RNA, 19 nt, Homo sapiens
  misc_RNA (1)...(19): siRNA sense strand
gcgcuaagcccuacaagug

SEQ ID NO: 1316739 - RNA, 19 nt, Homo sapiens
  misc_RNA (1)...(19): siRNA sense strand
caaaauuccuccuagaaaa

SEQ ID NO: 1316740 - RNA, 19 nt, Homo sapiens
  misc_RNA (1)...(19): siRNA sense strand
ggauguggcuguggacuuc

SEQ ID NO: 1316741 - RNA, 19 nt, Homo sapiens
  misc_RNA (1)...(19): siRNA sense strand
agacuacacuggaaaauaa

SEQ ID NO: 1316742 - RNA, 19 nt, Homo sapiens
  misc_RNA (1)...(19): siRNA sense strand
guggugcucuugacacaaa

SEQ ID NO: 1316743 - RNA, 19 nt, Homo sapiens
  misc_RNA (1)...(19): siRNA sense strand
caccagagaacccacaaua

SEQ ID NO: 1316744 - RNA, 19 nt, Homo sapiens
  misc_RNA (1)...(19): siRNA sense strand
cgacacagaggaccgagua

SEQ ID NO: 1316745 - RNA, 19 nt, Homo sapiens
  misc_RNA (1)...(19): siRNA sense strand
gauugugccuuguccucua

SEQ ID NO: 1316746 - RNA, 19 nt, Homo sapiens
  misc_RNA (1)...(19): siRNA sense strand
auaaagaguuagcuccaaa

SEQ ID NO: 1316747 - RNA, 19 nt, Homo sapiens
  misc_RNA (1)...(19): siRNA sense strand
ucagagcucuucccucaca

SEQ ID NO: 1316748 - RNA, 19 nt, Homo sapiens
  misc_RNA (1)...(19): siRNA sense strand
ccauaugcaugcaacaaau

SEQ ID NO: 1316749 - RNA, 19 nt, Homo sapiens
  misc_RNA (1)...(19): siRNA sense strand
gaagaagcacuuugacaac

SEQ ID NO: 1316750 - RNA, 19 nt, Homo sapiens
  misc_RNA (1)...(19): siRNA sense strand
caucagaagagcugugaaa

SEQ ID NO: 1316751 - RNA, 19 nt, Homo sapiens
  misc_RNA (1)...(19): siRNA sense strand
agaagaagcacuuugacaa

SEQ ID NO: 1316752 - RNA, 19 nt, Homo sapiens
  misc_RNA (1)...(19): siRNA sense strand
ccagagcucacaccuuauu

SEQ ID NO: 1316753 - RNA, 19 nt, Homo sapiens
  misc_RNA (1)...(19): siRNA sense strand
ccuauaugcugaagaugga

SEQ ID NO: 1316754 - RNA, 19 nt, Homo sapiens
  misc_RNA (1)...(19): siRNA sense strand
gcaaacaguggugcucuug

SEQ ID NO: 1316755 - RNA, 19 nt, Homo sapiens
  misc_RNA (1)...(19): siRNA sense strand
ugccuuguccucuacauua

SEQ ID NO: 1316756 - RNA, 19 nt, Homo sapiens
  misc_RNA (1)...(19): siRNA sense strand
gcucccaccucaucagaca

SEQ ID NO: 1316757 - RNA, 19 nt, Homo sapiens
  misc_RNA (1)...(19): siRNA sense strand
ggacucacacuggcgcuaa

SEQ ID NO: 1316758 - RNA, 19 nt, Homo sapiens
  misc_RNA (1)...(19): siRNA sense strand
cagugaaugugguaaaaua

SEQ ID NO: 1316759 - RNA, 19 nt, Homo sapiens
  misc_RNA (1)...(19): siRNA sense strand
gcaaacaguggcgcucuug

SEQ ID NO: 1316760 - RNA, 19 nt, Homo sapiens
  misc_RNA (1)...(19): siRNA sense strand
cagagaacccacaauagga

SEQ ID NO: 1316761 - RNA, 19 nt, Homo sapiens
  misc_RNA (1)...(19): siRNA sense strand
ggcccuauaugcugaagau

SEQ ID NO: 1316762 - RNA, 19 nt, Homo sapiens
  misc_RNA (1)...(19): siRNA sense strand
ucacacagcaucagagagu

SEQ ID NO: 1316763 - RNA, 19 nt, Homo sapiens
  misc_RNA (1)...(19): siRNA sense strand
uaaauuggauccucuuccu

SEQ ID NO: 1316764 - RNA, 19 nt, Homo sapiens
  misc_RNA (1)...(19): siRNA sense strand
guggcgcucuugacacaaa

SEQ ID NO: 1316765 - RNA, 19 nt, Homo sapiens
  misc_RNA (1)...(19): siRNA sense strand
ccagagaacccacaauagg

SEQ ID NO: 1316766 - RNA, 19 nt, Homo sapiens
  misc_RNA (1)...(19): siRNA sense strand
ccagcuggacccuaaauug

SEQ ID NO: 1316767 - RNA, 19 nt, Homo sapiens
  misc_RNA (1)...(19): siRNA sense strand
gaacccacaauaggacaaa

SEQ ID NO: 1316768 - RNA, 19 nt, Homo sapiens
  misc_RNA (1)...(19): siRNA sense strand
gcuggacccuaaauuggau

SEQ ID NO: 1316769 - RNA, 19 nt, Homo sapiens
  misc_RNA (1)...(19): siRNA sense strand
cuacaagugucaggacugu

SEQ ID NO: 1316770 - RNA, 19 nt, Homo sapiens
  misc_RNA (1)...(19): siRNA sense strand
ucaagacugugggaaagga

SEQ ID NO: 1316771 - RNA, 19 nt, Homo sapiens
  misc_RNA (1)...(19): siRNA sense strand
gaaggcaaugguuguagga

SEQ ID NO: 1316772 - RNA, 19 nt, Homo sapiens
  misc_RNA (1)...(19): siRNA sense strand
caaggaaggcaaugguugu

SEQ ID NO: 1316773 - RNA, 19 nt, Homo sapiens
  misc_RNA (1)...(19): siRNA sense strand
ccagauccaggcccuauau

SEQ ID NO: 1316774 - RNA, 19 nt, Homo sapiens
  misc_RNA (1)...(19): siRNA sense strand
gugggaggaccuucaauga

SEQ ID NO: 1316775 - RNA, 19 nt, Homo sapiens
  misc_RNA (1)...(19): siRNA sense strand
ggcaaacaguggugcucuu

SEQ ID NO: 1316776 - RNA, 19 nt, Homo sapiens
  misc_RNA (1)...(19): siRNA sense strand
aggcaaugguuguaggaaa

SEQ ID NO: 1316777 - RNA, 19 nt, Homo sapiens
  misc_RNA (1)...(19): siRNA sense strand
caguggcgcucuugacaca

SEQ ID NO: 1316778 - RNA, 19 nt, Homo sapiens
  misc_RNA (1)...(19): siRNA sense strand
uaggugcacugccugugaa

SEQ ID NO: 1316779 - RNA, 19 nt, Homo sapiens
  misc_RNA (1)...(19): siRNA sense strand
gcuccaaauucugacauuc

SEQ ID NO: 1316780 - RNA, 19 nt, Homo sapiens
  misc_RNA (1)...(19): siRNA sense strand
aaagaguuagcuccaaauu

SEQ ID NO: 1316781 - RNA, 19 nt, Homo sapiens
  misc_RNA (1)...(19): siRNA sense strand
gugggagacuacacuggaa

SEQ ID NO: 1316782 - RNA, 19 nt, Homo sapiens
  misc_RNA (1)...(19): siRNA sense strand
aaacaguggugcucuugac

SEQ ID NO: 1316783 - RNA, 19 nt, Homo sapiens
  misc_RNA (1)...(19): siRNA sense strand
ccagagcucccaccucauc

SEQ ID NO: 1316784 - RNA, 19 nt, Homo sapiens
  misc_RNA (1)...(19): siRNA sense strand
ucggaguacuaaacagauu

SEQ ID NO: 1316785 - RNA, 19 nt, Homo sapiens
  misc_RNA (1)...(19): siRNA sense strand
ccacaaaauuccuccuaga

SEQ ID NO: 1316786 - RNA, 19 nt, Homo sapiens
  misc_RNA (1)...(19): siRNA sense strand
ggcaaacaguggcgcucuu

SEQ ID NO: 1316787 - RNA, 19 nt, Homo sapiens
  misc_RNA (1)...(19): siRNA sense strand
cggaguacuaaacagauua

SEQ ID NO: 1316788 - RNA, 19 nt, Homo sapiens
  misc_RNA (1)...(19): siRNA sense strand
ggcaaugguuguaggaaaa

SEQ ID NO: 1316789 - RNA, 19 nt, Homo sapiens
  misc_RNA (1)...(19): siRNA sense strand
aauaaagaguuagcuccaa

SEQ ID NO: 1316790 - RNA, 19 nt, Homo sapiens
  misc_RNA (1)...(19): siRNA sense strand
caaagcgaaagaagaaaca

SEQ ID NO: 1316791 - RNA, 19 nt, Homo sapiens
  misc_RNA (1)...(19): siRNA sense strand
acaauaggacaaagcgaaa

SEQ ID NO: 1316792 - RNA, 19 nt, Homo sapiens
  misc_RNA (1)...(19): siRNA sense strand
gcaugcaacaaauguggaa

SEQ ID NO: 1316793 - RNA, 19 nt, Homo sapiens
  misc_RNA (1)...(19): siRNA sense strand
cagaagaagcacuuugaca

SEQ ID NO: 1316794 - RNA, 19 nt, Homo sapiens
  misc_RNA (1)...(19): siRNA sense strand
agagaggcccuaugugugu

SEQ ID NO: 1316795 - RNA, 19 nt, Homo sapiens
  misc_RNA (1)...(19): siRNA sense strand
ccaggaaguccaagacaca

SEQ ID NO: 1316796 - RNA, 19 nt, Homo sapiens
  misc_RNA (1)...(19): siRNA sense strand
caaacaguggugcucuuga

SEQ ID NO: 1316797 - RNA, 19 nt, Homo sapiens
  misc_RNA (1)...(19): siRNA sense strand
gagacuacacuggaaaaua

SEQ ID NO: 1316798 - RNA, 19 nt, Homo sapiens
  misc_RNA (1)...(19): siRNA sense strand
gagcucccaccucaucaga

SEQ ID NO: 1316799 - RNA, 19 nt, Homo sapiens
  misc_RNA (1)...(19): siRNA sense strand
aaugaucgcucagccaucu

SEQ ID NO: 1316800 - RNA, 19 nt, Homo sapiens
  misc_RNA (1)...(19): siRNA sense strand
cuaugugugucaagacugu

SEQ ID NO: 1316801 - RNA, 19 nt, Homo sapiens
  misc_RNA (1)...(19): siRNA sense strand
ggcccuaugugugucaaga

SEQ ID NO: 1316802 - RNA, 19 nt, Homo sapiens
  misc_RNA (1)...(19): siRNA sense strand
uagagggugugaccuggau

SEQ ID NO: 1316803 - RNA, 19 nt, Homo sapiens
  misc_RNA (1)...(19): siRNA sense strand
ugucaagacugugggaaag

SEQ ID NO: 1316804 - RNA, 19 nt, Homo sapiens
  misc_RNA (1)...(19): siRNA sense strand
uuccggcaguuccguuaua

SEQ ID NO: 1316805 - RNA, 19 nt, Homo sapiens
  misc_RNA (1)...(19): siRNA sense strand
uaaagaguuagcuccaaau

SEQ ID NO: 1316806 - RNA, 19 nt, Homo sapiens
  misc_RNA (1)...(19): siRNA sense strand
cagcuggacccuaaauugg

SEQ ID NO: 1316807 - RNA, 19 nt, Homo sapiens
  misc_RNA (1)...(19): siRNA sense strand
caaacaguggcgcucuuga

SEQ ID NO: 1316808 - RNA, 19 nt, Homo sapiens
  misc_RNA (1)...(19): siRNA sense strand
caguggugcucuugacaca

SEQ ID NO: 1316809 - RNA, 19 nt, Homo sapiens
  misc_RNA (1)...(19): siRNA sense strand
gcugagaguccccuaauga

SEQ ID NO: 1316810 - RNA, 19 nt, Homo sapiens
  misc_RNA (1)...(19): siRNA sense strand
ccggaacccaagauacuuu

SEQ ID NO: 1316811 - RNA, 19 nt, Homo sapiens
  misc_RNA (1)...(19): siRNA sense strand
cuaaggcacgcuccaagga

SEQ ID NO: 1316812 - RNA, 19 nt, Homo sapiens
  misc_RNA (1)...(19): siRNA sense strand
ccggagagaggcccuaugu

SEQ ID NO: 1316813 - RNA, 19 nt, Homo sapiens
  misc_RNA (1)...(19): siRNA sense strand
cgaguaccgcgaugugaug

SEQ ID NO: 1316814 - RNA, 19 nt, Homo sapiens
  misc_RNA (1)...(19): siRNA sense strand
gauccaggcccuauaugcu

SEQ ID NO: 1316815 - RNA, 19 nt, Homo sapiens
  misc_RNA (1)...(19): siRNA sense strand
aaucgcagcacccagagaa

SEQ ID NO: 1316816 - RNA, 19 nt, Homo sapiens
  misc_RNA (1)...(19): siRNA sense strand
cuggaugucugaggaggaa

SEQ ID NO: 1316817 - RNA, 19 nt, Homo sapiens
  misc_RNA (1)...(19): siRNA sense strand
cauaugcaugcaacaaaug

SEQ ID NO: 1316818 - RNA, 19 nt, Homo sapiens
  misc_RNA (1)...(19): siRNA sense strand
gccugaaaguacaagaauc

SEQ ID NO: 1316819 - RNA, 19 nt, Homo sapiens
  misc_RNA (1)...(19): siRNA sense strand
cagcaucagagaguucauu

SEQ ID NO: 1316820 - RNA, 19 nt, Homo sapiens
  misc_RNA (1)...(19): siRNA sense strand
gccaaggaaggcaaugguu

SEQ ID NO: 1316821 - RNA, 19 nt, Homo sapiens
  misc_RNA (1)...(19): siRNA sense strand
ucagaagagcugugaaagg

SEQ ID NO: 1316822 - RNA, 19 nt, Homo sapiens
  misc_RNA (1)...(19): siRNA sense strand
gacaaagcgaaagaagaaa

SEQ ID NO: 1316823 - RNA, 19 nt, Homo sapiens
  misc_RNA (1)...(19): siRNA sense strand
gccagagguuccggcaguu

SEQ ID NO: 1316824 - RNA, 19 nt, Homo sapiens
  misc_RNA (1)...(19): siRNA sense strand
caccucaucagacaucaga

SEQ ID NO: 1316825 - RNA, 19 nt, Homo sapiens
  misc_RNA (1)...(19): siRNA sense strand
ggaguacuaaacagauuac

SEQ ID NO: 1316826 - RNA, 19 nt, Homo sapiens
  misc_RNA (1)...(19): siRNA sense strand
ggacaaagcgaaagaagaa

SEQ ID NO: 1316827 - RNA, 19 nt, Homo sapiens
  misc_RNA (1)...(19): siRNA sense strand
agaaacagccuaccucaua

SEQ ID NO: 1316828 - RNA, 19 nt, Homo sapiens
  misc_RNA (1)...(19): siRNA sense strand
gaaacauaauucacgugua

SEQ ID NO: 1316829 - RNA, 19 nt, Homo sapiens
  misc_RNA (1)...(19): siRNA sense strand
ggagagagaccauuugaau

SEQ ID NO: 1316830 - RNA, 19 nt, Homo sapiens
  misc_RNA (1)...(19): siRNA sense strand
acccagagcucacaccuua

SEQ ID NO: 1316831 - RNA, 19 nt, Homo sapiens
  misc_RNA (1)...(19): siRNA sense strand
gaaacagccuaccucauag

SEQ ID NO: 1316832 - RNA, 19 nt, Homo sapiens
  misc_RNA (1)...(19): siRNA sense strand
gggaggaccuucaaugauc

SEQ ID NO: 1316833 - RNA, 19 nt, Homo sapiens
  misc_RNA (1)...(19): siRNA sense strand
gauggagucugcucaggaa

SEQ ID NO: 1316834 - RNA, 19 nt, Homo sapiens
  misc_RNA (1)...(19): siRNA sense strand
ggagagaggcccuaugugu

SEQ ID NO: 1316835 - RNA, 19 nt, Homo sapiens
  misc_RNA (1)...(19): siRNA sense strand
guacuaaacagauuacguu

SEQ ID NO: 1316836 - RNA, 19 nt, Homo sapiens
  misc_RNA (1)...(19): siRNA sense strand
gggaaaggauuuguucaga

SEQ ID NO: 1316837 - RNA, 19 nt, Homo sapiens
  misc_RNA (1)...(19): siRNA sense strand
agaguuagcuccaaauucu

SEQ ID NO: 1316838 - RNA, 19 nt, Homo sapiens
  misc_RNA (1)...(19): siRNA sense strand
gcgcuaagcccuacaagug

SEQ ID NO: 1316839 - RNA, 19 nt, Homo sapiens
  misc_RNA (1)...(19): siRNA sense strand
caaaauuccuccuagaaaa

SEQ ID NO: 1316840 - RNA, 19 nt, Homo sapiens
  misc_RNA (1)...(19): siRNA sense strand
ggauguggcuguggacuuc

SEQ ID NO: 1316841 - RNA, 19 nt, Homo sapiens
  misc_RNA (1)...(19): siRNA sense strand
agacuacacuggaaaauaa

SEQ ID NO: 1316842 - RNA, 19 nt, Homo sapiens
  misc_RNA (1)...(19): siRNA sense strand
guggugcucuugacacaaa

SEQ ID NO: 1316843 - RNA, 19 nt, Homo sapiens
  misc_RNA (1)...(19): siRNA sense strand
caccagagaacccacaaua

SEQ ID NO: 1316844 - RNA, 19 nt, Homo sapiens
  misc_RNA (1)...(19): siRNA sense strand
cgacacagaggaccgagua

SEQ ID NO: 1316845 - RNA, 19 nt, Homo sapiens
  misc_RNA (1)...(19): siRNA sense strand
gauugugccuuguccucua

SEQ ID NO: 1316846 - RNA, 19 nt, Homo sapiens
  misc_RNA (1)...(19): siRNA sense strand
auaaagaguuagcuccaaa

SEQ ID NO: 1316847 - RNA, 19 nt, Homo sapiens
  misc_RNA (1)...(19): siRNA sense strand
ucagagcucuucccucaca

SEQ ID NO: 1316848 - RNA, 19 nt, Homo sapiens
  misc_RNA (1)...(19): siRNA sense strand
ccauaugcaugcaacaaau

SEQ ID NO: 1316849 - RNA, 19 nt, Homo sapiens
  misc_RNA (1)...(19): siRNA sense strand
gaagaagcacuuugacaac

SEQ ID NO: 1316850 - RNA, 19 nt, Homo sapiens
  misc_RNA (1)...(19): siRNA sense strand
caucagaagagcugugaaa

SEQ ID NO: 1316851 - RNA, 19 nt, Homo sapiens
  misc_RNA (1)...(19): siRNA sense strand
agaagaagcacuuugacaa

SEQ ID NO: 1316852 - RNA, 19 nt, Homo sapiens
  misc_RNA (1)...(19): siRNA sense strand
ccagagcucacaccuuauu

SEQ ID NO: 1316853 - RNA, 19 nt, Homo sapiens
  misc_RNA (1)...(19): siRNA sense strand
ccuauaugcugaagaugga

SEQ ID NO: 1316854 - RNA, 19 nt, Homo sapiens
  misc_RNA (1)...(19): siRNA sense strand
gcaaacaguggugcucuug

SEQ ID NO: 1316855 - RNA, 19 nt, Homo sapiens
  misc_RNA (1)...(19): siRNA sense strand
ugccuuguccucuacauua

SEQ ID NO: 1316856 - RNA, 19 nt, Homo sapiens
  misc_RNA (1)...(19): siRNA sense strand
gcucccaccucaucagaca

SEQ ID NO: 1316857 - RNA, 19 nt, Homo sapiens
  misc_RNA (1)...(19): siRNA sense strand
ggacucacacuggcgcuaa

SEQ ID NO: 1316858 - RNA, 19 nt, Homo sapiens
  misc_RNA (1)...(19): siRNA sense strand
cagugaaugugguaaaaua

SEQ ID NO: 1316859 - RNA, 19 nt, Homo sapiens
  misc_RNA (1)...(19): siRNA sense strand
gcaaacaguggcgcucuug

SEQ ID NO: 1316860 - RNA, 19 nt, Homo sapiens
  misc_RNA (1)...(19): siRNA sense strand
cagagaacccacaauagga

SEQ ID NO: 1316861 - RNA, 19 nt, Homo sapiens
  misc_RNA (1)...(19): siRNA sense strand
ggcccuauaugcugaagau

SEQ ID NO: 1316862 - RNA, 19 nt, Homo sapiens
  misc_RNA (1)...(19): siRNA sense strand
ucacacagcaucagagagu

SEQ ID NO: 1316863 - RNA, 19 nt, Homo sapiens
  misc_RNA (1)...(19): siRNA sense strand
uaaauuggauccucuuccu

SEQ ID NO: 1316864 - RNA, 19 nt, Homo sapiens
  misc_RNA (1)...(19): siRNA sense strand
guggcgcucuugacacaaa

SEQ ID NO: 1316865 - RNA, 19 nt, Homo sapiens
  misc_RNA (1)...(19): siRNA sense strand
ccagagaacccacaauagg

SEQ ID NO: 1316866 - RNA, 19 nt, Homo sapiens
  misc_RNA (1)...(19): siRNA sense strand
ccagcuggacccuaaauug

SEQ ID NO: 1316867 - RNA, 19 nt, Homo sapiens
  misc_RNA (1)...(19): siRNA sense strand
gaacccacaauaggacaaa

SEQ ID NO: 1316868 - RNA, 19 nt, Homo sapiens
  misc_RNA (1)...(19): siRNA sense strand
gcuggacccuaaauuggau

SEQ ID NO: 1316869 - RNA, 19 nt, Homo sapiens
  misc_RNA (1)...(19): siRNA sense strand
cuacaagugucaggacugu

SEQ ID NO: 1316870 - RNA, 19 nt, Homo sapiens
  misc_RNA (1)...(19): siRNA sense strand
ucaagacugugggaaagga

SEQ ID NO: 1316871 - RNA, 19 nt, Homo sapiens
  misc_RNA (1)...(19): siRNA sense strand
gaaggcaaugguuguagga

SEQ ID NO: 1316872 - RNA, 19 nt, Homo sapiens
  misc_RNA (1)...(19): siRNA sense strand
caaggaaggcaaugguugu

SEQ ID NO: 1316873 - RNA, 19 nt, Homo sapiens
  misc_RNA (1)...(19): siRNA sense strand
ccagauccaggcccuauau

SEQ ID NO: 1316874 - RNA, 19 nt, Homo sapiens
  misc_RNA (1)...(19): siRNA sense strand
gugggaggaccuucaauga

SEQ ID NO: 1316875 - RNA, 19 nt, Homo sapiens
  misc_RNA (1)...(19): siRNA sense strand
ggcaaacaguggugcucuu

SEQ ID NO: 1316876 - RNA, 19 nt, Homo sapiens
  misc_RNA (1)...(19): siRNA sense strand
aggcaaugguuguaggaaa

SEQ ID NO: 1316877 - RNA, 19 nt, Homo sapiens
  misc_RNA (1)...(19): siRNA sense strand
caguggcgcucuugacaca

SEQ ID NO: 1316878 - RNA, 19 nt, Homo sapiens
  misc_RNA (1)...(19): siRNA sense strand
uaggugcacugccugugaa

SEQ ID NO: 1316879 - RNA, 19 nt, Homo sapiens
  misc_RNA (1)...(19): siRNA sense strand
gcuccaaauucugacauuc

SEQ ID NO: 1316880 - RNA, 19 nt, Homo sapiens
  misc_RNA (1)...(19): siRNA sense strand
aaagaguuagcuccaaauu

SEQ ID NO: 1316881 - RNA, 19 nt, Homo sapiens
  misc_RNA (1)...(19): siRNA sense strand
gugggagacuacacuggaa

SEQ ID NO: 1316882 - RNA, 19 nt, Homo sapiens
  misc_RNA (1)...(19): siRNA sense strand
aaacaguggugcucuugac

SEQ ID NO: 1316883 - RNA, 19 nt, Homo sapiens
  misc_RNA (1)...(19): siRNA sense strand
ccagagcucccaccucauc

SEQ ID NO: 1316884 - RNA, 19 nt, Homo sapiens
  misc_RNA (1)...(19): siRNA sense strand
ucggaguacuaaacagauu

SEQ ID NO: 1316885 - RNA, 19 nt, Homo sapiens
  misc_RNA (1)...(19): siRNA sense strand
ccacaaaauuccuccuaga

SEQ ID NO: 1316886 - RNA, 19 nt, Homo sapiens
  misc_RNA (1)...(19): siRNA sense strand
ggcaaacaguggcgcucuu

SEQ ID NO: 1316887 - RNA, 19 nt, Homo sapiens
  misc_RNA (1)...(19): siRNA sense strand
cggaguacuaaacagauua

SEQ ID NO: 1316888 - RNA, 19 nt, Homo sapiens
  misc_RNA (1)...(19): siRNA sense strand
ggcaaugguuguaggaaaa

SEQ ID NO: 1316889 - RNA, 19 nt, Homo sapiens
  misc_RNA (1)...(19): siRNA sense strand
aauaaagaguuagcuccaa

SEQ ID NO: 1316890 - RNA, 19 nt, Homo sapiens
  misc_RNA (1)...(19): siRNA sense strand
caaagcgaaagaagaaaca

SEQ ID NO: 1316891 - RNA, 19 nt, Homo sapiens
  misc_RNA (1)...(19): siRNA sense strand
acaauaggacaaagcgaaa

SEQ ID NO: 1316892 - RNA, 19 nt, Homo sapiens
  misc_RNA (1)...(19): siRNA sense strand
gcaugcaacaaauguggaa

SEQ ID NO: 1316893 - RNA, 19 nt, Homo sapiens
  misc_RNA (1)...(19): siRNA sense strand
cagaagaagcacuuugaca

SEQ ID NO: 1316894 - RNA, 19 nt, Homo sapiens
  misc_RNA (1)...(19): siRNA sense strand
agagaggcccuaugugugu

SEQ ID NO: 1316895 - RNA, 19 nt, Homo sapiens
  misc_RNA (1)...(19): siRNA sense strand
ccaggaaguccaagacaca

SEQ ID NO: 1316896 - RNA, 19 nt, Homo sapiens
  misc_RNA (1)...(19): siRNA sense strand
caaacaguggugcucuuga

SEQ ID NO: 1316897 - RNA, 19 nt, Homo sapiens
  misc_RNA (1)...(19): siRNA sense strand
gagacuacacuggaaaaua

SEQ ID NO: 1316898 - RNA, 19 nt, Homo sapiens
  misc_RNA (1)...(19): siRNA sense strand
gagcucccaccucaucaga

SEQ ID NO: 1316899 - RNA, 19 nt, Homo sapiens
  misc_RNA (1)...(19): siRNA sense strand
aaugaucgcucagccaucu

SEQ ID NO: 1316900 - RNA, 19 nt, Homo sapiens
  misc_RNA (1)...(19): siRNA sense strand
cuaugugugucaagacugu

SEQ ID NO: 1316901 - RNA, 19 nt, Homo sapiens
  misc_RNA (1)...(19): siRNA sense strand
ggcccuaugugugucaaga

SEQ ID NO: 1316902 - RNA, 19 nt, Homo sapiens
  misc_RNA (1)...(19): siRNA sense strand
uagagggugugaccuggau

SEQ ID NO: 1316903 - RNA, 19 nt, Homo sapiens
  misc_RNA (1)...(19): siRNA sense strand
ugucaagacugugggaaag

SEQ ID NO: 1316904 - RNA, 19 nt, Homo sapiens
  misc_RNA (1)...(19): siRNA sense strand
uuccggcaguuccguuaua

SEQ ID NO: 1316905 - RNA, 19 nt, Homo sapiens
  misc_RNA (1)...(19): siRNA sense strand
uaaagaguuagcuccaaau

SEQ ID NO: 1316906 - RNA, 19 nt, Homo sapiens
  misc_RNA (1)...(19): siRNA sense strand
cagcuggacccuaaauugg

SEQ ID NO: 1316907 - RNA, 19 nt, Homo sapiens
  misc_RNA (1)...(19): siRNA sense strand
caaacaguggcgcucuuga

SEQ ID NO: 1316908 - RNA, 19 nt, Homo sapiens
  misc_RNA (1)...(19): siRNA sense strand
caguggugcucuugacaca

SEQ ID NO: 1316909 - RNA, 19 nt, Homo sapiens
  misc_RNA (1)...(19): siRNA sense strand
gcugagaguccccuaauga

SEQ ID NO: 1316910 - RNA, 19 nt, Homo sapiens
  misc_RNA (1)...(19): siRNA sense strand
ccggaacccaagauacuuu

SEQ ID NO: 1316911 - RNA, 19 nt, Homo sapiens
  misc_RNA (1)...(19): siRNA sense strand
cuaaggcacgcuccaagga

SEQ ID NO: 1316912 - RNA, 19 nt, Homo sapiens
  misc_RNA (1)...(19): siRNA sense strand
ccggagagaggcccuaugu

SEQ ID NO: 1316913 - RNA, 19 nt, Homo sapiens
  misc_RNA (1)...(19): siRNA sense strand
cgaguaccgcgaugugaug

SEQ ID NO: 1316914 - RNA, 19 nt, Homo sapiens
  misc_RNA (1)...(19): siRNA sense strand
gauccaggcccuauaugcu

SEQ ID NO: 1316915 - RNA, 19 nt, Homo sapiens
  misc_RNA (1)...(19): siRNA sense strand
aaucgcagcacccagagaa

SEQ ID NO: 1316916 - RNA, 19 nt, Homo sapiens
  misc_RNA (1)...(19): siRNA sense strand
cuggaugucugaggaggaa

SEQ ID NO: 1316917 - RNA, 19 nt, Homo sapiens
  misc_RNA (1)...(19): siRNA sense strand
cauaugcaugcaacaaaug

SEQ ID NO: 1316918 - RNA, 19 nt, Homo sapiens
  misc_RNA (1)...(19): siRNA sense strand
gccugaaaguacaagaauc

SEQ ID NO: 1316919 - RNA, 19 nt, Homo sapiens
  misc_RNA (1)...(19): siRNA sense strand
cagcaucagagaguucauu

SEQ ID NO: 1316920 - RNA, 19 nt, Homo sapiens
  misc_RNA (1)...(19): siRNA sense strand
gccaaggaaggcaaugguu

SEQ ID NO: 1316921 - RNA, 19 nt, Homo sapiens
  misc_RNA (1)...(19): siRNA sense strand
ucagaagagcugugaaagg

SEQ ID NO: 1316922 - RNA, 19 nt, Homo sapiens
  misc_RNA (1)...(19): siRNA sense strand
gacaaagcgaaagaagaaa

SEQ ID NO: 1316923 - RNA, 19 nt, Homo sapiens
  misc_RNA (1)...(19): siRNA sense strand
gccagagguuccggcaguu

SEQ ID NO: 1316924 - RNA, 19 nt, Homo sapiens
  misc_RNA (1)...(19): siRNA sense strand
caccucaucagacaucaga

SEQ ID NO: 1316925 - RNA, 19 nt, Homo sapiens
  misc_RNA (1)...(19): siRNA sense strand
ggaguacuaaacagauuac

SEQ ID NO: 1316926 - RNA, 19 nt, Homo sapiens
  misc_RNA (1)...(19): siRNA sense strand
gcacauauuucuuccguaa

SEQ ID NO: 1316927 - RNA, 19 nt, Homo sapiens
  misc_RNA (1)...(19): siRNA sense strand
caacagaaaucgaguacuu

SEQ ID NO: 1316928 - RNA, 19 nt, Homo sapiens
  misc_RNA (1)...(19): siRNA sense strand
gcaaagagagaaaccaaua

SEQ ID NO: 1316929 - RNA, 19 nt, Homo sapiens
  misc_RNA (1)...(19): siRNA sense strand
gaaaagagaugaacguuau

SEQ ID NO: 1316930 - RNA, 19 nt, Homo sapiens
  misc_RNA (1)...(19): siRNA sense strand
gcuaauggcuuauuuccaa

SEQ ID NO: 1316931 - RNA, 19 nt, Homo sapiens
  misc_RNA (1)...(19): siRNA sense strand
gaaaucgaguacuuaauuc

SEQ ID NO: 1316932 - RNA, 19 nt, Homo sapiens
  misc_RNA (1)...(19): siRNA sense strand
gagaagugguuugauguuu

SEQ ID NO: 1316933 - RNA, 19 nt, Homo sapiens
  misc_RNA (1)...(19): siRNA sense strand
caaagaggauuacugaagu

SEQ ID NO: 1316934 - RNA, 19 nt, Homo sapiens
  misc_RNA (1)...(19): siRNA sense strand
guccauaucuccacacuga

SEQ ID NO: 1316935 - RNA, 19 nt, Homo sapiens
  misc_RNA (1)...(19): siRNA sense strand
gaagguaguuaaugacaag

SEQ ID NO: 1316936 - RNA, 19 nt, Homo sapiens
  misc_RNA (1)...(19): siRNA sense strand
gaaauauagauuccgcuua

SEQ ID NO: 1316937 - RNA, 19 nt, Homo sapiens
  misc_RNA (1)...(19): siRNA sense strand
ggaaaucaauacuggagau

SEQ ID NO: 1316938 - RNA, 19 nt, Homo sapiens
  misc_RNA (1)...(19): siRNA sense strand
gagaggugauggugagauu

SEQ ID NO: 1316939 - RNA, 19 nt, Homo sapiens
  misc_RNA (1)...(19): siRNA sense strand
gaagugguuugauguuugu

SEQ ID NO: 1316940 - RNA, 19 nt, Homo sapiens
  misc_RNA (1)...(19): siRNA sense strand
gaggugauggugagauuua

SEQ ID NO: 1316941 - RNA, 19 nt, Homo sapiens
  misc_RNA (1)...(19): siRNA sense strand
ucagagaagugguuugaug

SEQ ID NO: 1316942 - RNA, 19 nt, Homo sapiens
  misc_RNA (1)...(19): siRNA sense strand
cacagaagaugaacaagga

SEQ ID NO: 1316943 - RNA, 19 nt, Homo sapiens
  misc_RNA (1)...(19): siRNA sense strand
ggaagguaguuaaugacaa

SEQ ID NO: 1316944 - RNA, 19 nt, Homo sapiens
  misc_RNA (1)...(19): siRNA sense strand
guucacaucuggacaugga

SEQ ID NO: 1316945 - RNA, 19 nt, Homo sapiens
  misc_RNA (1)...(19): siRNA sense strand
gaaaucaauacuggagaua

SEQ ID NO: 1316946 - RNA, 19 nt, Homo sapiens
  misc_RNA (1)...(19): siRNA sense strand
gcccaggccuucuccaaga

SEQ ID NO: 1316947 - RNA, 19 nt, Homo sapiens
  misc_RNA (1)...(19): siRNA sense strand
ggugagauuuagcacauau

SEQ ID NO: 1316948 - RNA, 19 nt, Homo sapiens
  misc_RNA (1)...(19): siRNA sense strand
ggacuggucagacaggaaa

SEQ ID NO: 1316949 - RNA, 19 nt, Homo sapiens
  misc_RNA (1)...(19): siRNA sense strand
gcgcuggccuucaggaugu

SEQ ID NO: 1316950 - RNA, 19 nt, Homo sapiens
  misc_RNA (1)...(19): siRNA sense strand
caagguggccguccaugaa

SEQ ID NO: 1316951 - RNA, 19 nt, Homo sapiens
  misc_RNA (1)...(19): siRNA sense strand
gaccgaagacagaaguuaa

SEQ ID NO: 1316952 - RNA, 19 nt, Homo sapiens
  misc_RNA (1)...(19): siRNA sense strand
agaagugguuugauguuug

SEQ ID NO: 1316953 - RNA, 19 nt, Homo sapiens
  misc_RNA (1)...(19): siRNA sense strand
aaucaauacuggagauaug

SEQ ID NO: 1316954 - RNA, 19 nt, Homo sapiens
  misc_RNA (1)...(19): siRNA sense strand
ccaaagaggauuacugaag

SEQ ID NO: 1316955 - RNA, 19 nt, Homo sapiens
  misc_RNA (1)...(19): siRNA sense strand
gauaugacagugacaagga

SEQ ID NO: 1316956 - RNA, 19 nt, Homo sapiens
  misc_RNA (1)...(19): siRNA sense strand
gacaggaaagcaauucaaa

SEQ ID NO: 1316957 - RNA, 19 nt, Homo sapiens
  misc_RNA (1)...(19): siRNA sense strand
aaagaggauuacugaaguu

SEQ ID NO: 1316958 - RNA, 19 nt, Homo sapiens
  misc_RNA (1)...(19): siRNA sense strand
gauccauaaugcaaccaaa

SEQ ID NO: 1316959 - RNA, 19 nt, Homo sapiens
  misc_RNA (1)...(19): siRNA sense strand
acuggaagguaguuaauga

SEQ ID NO: 1316960 - RNA, 19 nt, Homo sapiens
  misc_RNA (1)...(19): siRNA sense strand
cgaagacagaaguuaauuu

SEQ ID NO: 1316961 - RNA, 19 nt, Homo sapiens
  misc_RNA (1)...(19): siRNA sense strand
gguacuggcuuuaugaaaa

SEQ ID NO: 1316962 - RNA, 19 nt, Homo sapiens
  misc_RNA (1)...(19): siRNA sense strand
cuacaggacgggauccaua

SEQ ID NO: 1316963 - RNA, 19 nt, Homo sapiens
  misc_RNA (1)...(19): siRNA sense strand
ucuccacacugaacaugua

SEQ ID NO: 1316964 - RNA, 19 nt, Homo sapiens
  misc_RNA (1)...(19): siRNA sense strand
gaucaggcccucacagaag

SEQ ID NO: 1316965 - RNA, 19 nt, Homo sapiens
  misc_RNA (1)...(19): siRNA sense strand
ggaaaagagaugaacguua

SEQ ID NO: 1316966 - RNA, 19 nt, Homo sapiens
  misc_RNA (1)...(19): siRNA sense strand
caaagagagaaaccaauau

SEQ ID NO: 1316967 - RNA, 19 nt, Homo sapiens
  misc_RNA (1)...(19): siRNA sense strand
gaguuggacuggucagaca

SEQ ID NO: 1316968 - RNA, 19 nt, Homo sapiens
  misc_RNA (1)...(19): siRNA sense strand
acagaaaucgaguacuuaa

SEQ ID NO: 1316969 - RNA, 19 nt, Homo sapiens
  misc_RNA (1)...(19): siRNA sense strand
aaagagagaaaccaauaug

SEQ ID NO: 1316970 - RNA, 19 nt, Homo sapiens
  misc_RNA (1)...(19): siRNA sense strand
acauauuucuuccguaaca

SEQ ID NO: 1316971 - RNA, 19 nt, Homo sapiens
  misc_RNA (1)...(19): siRNA sense strand
ggaucaggcccucacagaa

SEQ ID NO: 1316972 - RNA, 19 nt, Homo sapiens
  misc_RNA (1)...(19): siRNA sense strand
gaaaaucgaaacaauagga

SEQ ID NO: 1316973 - RNA, 19 nt, Homo sapiens
  misc_RNA (1)...(19): siRNA sense strand
ggaaagcaauucaaaagcu

SEQ ID NO: 1316974 - RNA, 19 nt, Homo sapiens
  misc_RNA (1)...(19): siRNA sense strand
cuaauggcuuauuuccaaa

SEQ ID NO: 1316975 - RNA, 19 nt, Homo sapiens
  misc_RNA (1)...(19): siRNA sense strand
gacaaggacaaacaacaga

SEQ ID NO: 1316976 - RNA, 19 nt, Homo sapiens
  misc_RNA (1)...(19): siRNA sense strand
guauuugcauuugauguca

SEQ ID NO: 1316977 - RNA, 19 nt, Homo sapiens
  misc_RNA (1)...(19): siRNA sense strand
ggagauaugacagugacaa

SEQ ID NO: 1316978 - RNA, 19 nt, Homo sapiens
  misc_RNA (1)...(19): siRNA sense strand
gcauacaacuccauuuucu

SEQ ID NO: 1316979 - RNA, 19 nt, Homo sapiens
  misc_RNA (1)...(19): siRNA sense strand
guccugggcuugccucaca

SEQ ID NO: 1316980 - RNA, 19 nt, Homo sapiens
  misc_RNA (1)...(19): siRNA sense strand
ggucagacaggaaagcaau

SEQ ID NO: 1316981 - RNA, 19 nt, Homo sapiens
  misc_RNA (1)...(19): siRNA sense strand
ugaccgaagacagaaguua

SEQ ID NO: 1316982 - RNA, 19 nt, Homo sapiens
  misc_RNA (1)...(19): siRNA sense strand
agagagaaaccaauaugga

SEQ ID NO: 1316983 - RNA, 19 nt, Homo sapiens
  misc_RNA (1)...(19): siRNA sense strand
ggagccugccuuugaguug

SEQ ID NO: 1316984 - RNA, 19 nt, Homo sapiens
  misc_RNA (1)...(19): siRNA sense strand
aaagcuaucccaaauugau

SEQ ID NO: 1316985 - RNA, 19 nt, Homo sapiens
  misc_RNA (1)...(19): siRNA sense strand
cagaagaugaacaaggaaa

SEQ ID NO: 1316986 - RNA, 19 nt, Homo sapiens
  misc_RNA (1)...(19): siRNA sense strand
gcccugagcagccaacugu

SEQ ID NO: 1316987 - RNA, 19 nt, Homo sapiens
  misc_RNA (1)...(19): siRNA sense strand
gcugguacuggcuuuauga

SEQ ID NO: 1316988 - RNA, 19 nt, Homo sapiens
  misc_RNA (1)...(19): siRNA sense strand
cauuugauacugcguuuga

SEQ ID NO: 1316989 - RNA, 19 nt, Homo sapiens
  misc_RNA (1)...(19): siRNA sense strand
auuccuggcuuccugcuaa

SEQ ID NO: 1316990 - RNA, 19 nt, Homo sapiens
  misc_RNA (1)...(19): siRNA sense strand
guacuggcuuuaugaaaau

SEQ ID NO: 1316991 - RNA, 19 nt, Homo sapiens
  misc_RNA (1)...(19): siRNA sense strand
gcuuauuacuccuaugcau

SEQ ID NO: 1316992 - RNA, 19 nt, Homo sapiens
  misc_RNA (1)...(19): siRNA sense strand
gcuuccugcuaauggcuua

SEQ ID NO: 1316993 - RNA, 19 nt, Homo sapiens
  misc_RNA (1)...(19): siRNA sense strand
ugacuggauucgcaaagag

SEQ ID NO: 1316994 - RNA, 19 nt, Homo sapiens
  misc_RNA (1)...(19): siRNA sense strand
caaggacaaacaacagaau

SEQ ID NO: 1316995 - RNA, 19 nt, Homo sapiens
  misc_RNA (1)...(19): siRNA sense strand
cauacuggaagguaguuaa

SEQ ID NO: 1316996 - RNA, 19 nt, Homo sapiens
  misc_RNA (1)...(19): siRNA sense strand
ccucacagaagaugaacaa

SEQ ID NO: 1316997 - RNA, 19 nt, Homo sapiens
  misc_RNA (1)...(19): siRNA sense strand
ucaagguggccguccauga

SEQ ID NO: 1316998 - RNA, 19 nt, Homo sapiens
  misc_RNA (1)...(19): siRNA sense strand
cagagaagugguuugaugu

SEQ ID NO: 1316999 - RNA, 19 nt, Homo sapiens
  misc_RNA (1)...(19): siRNA sense strand
cuuauuacuccuaugcaua

SEQ ID NO: 1317000 - RNA, 19 nt, Homo sapiens
  misc_RNA (1)...(19): siRNA sense strand
gcaguaauaccacaaaauc

SEQ ID NO: 1317001 - RNA, 19 nt, Homo sapiens
  misc_RNA (1)...(19): siRNA sense strand
ggagucccuuguauuugca

SEQ ID NO: 1317002 - RNA, 19 nt, Homo sapiens
  misc_RNA (1)...(19): siRNA sense strand
gacgggauccauaaugcaa

SEQ ID NO: 1317003 - RNA, 19 nt, Homo sapiens
  misc_RNA (1)...(19): siRNA sense strand
aaucccaacacacaacaua

SEQ ID NO: 1317004 - RNA, 19 nt, Homo sapiens
  misc_RNA (1)...(19): siRNA sense strand
ggccuggaaucccaacaca

SEQ ID NO: 1317005 - RNA, 19 nt, Homo sapiens
  misc_RNA (1)...(19): siRNA sense strand
gagauuuagcacauauuuc

SEQ ID NO: 1317006 - RNA, 19 nt, Homo sapiens
  misc_RNA (1)...(19): siRNA sense strand
acacaacauagaugccuuu

SEQ ID NO: 1317007 - RNA, 19 nt, Homo sapiens
  misc_RNA (1)...(19): siRNA sense strand
uuaaugacaaggacaaaca

SEQ ID NO: 1317008 - RNA, 19 nt, Homo sapiens
  misc_RNA (1)...(19): siRNA sense strand
caaugcauacuggaaggua

SEQ ID NO: 1317009 - RNA, 19 nt, Homo sapiens
  misc_RNA (1)...(19): siRNA sense strand
auagaugccuuuguucaca

SEQ ID NO: 1317010 - RNA, 19 nt, Homo sapiens
  misc_RNA (1)...(19): siRNA sense strand
gggcaucagccuucucaag

SEQ ID NO: 1317011 - RNA, 19 nt, Homo sapiens
  misc_RNA (1)...(19): siRNA sense strand
uacaggacgggauccauaa

SEQ ID NO: 1317012 - RNA, 19 nt, Homo sapiens
  misc_RNA (1)...(19): siRNA sense strand
auacugcguuugacuggau

SEQ ID NO: 1317013 - RNA, 19 nt, Homo sapiens
  misc_RNA (1)...(19): siRNA sense strand
ucaaaggcaaugcauacug

SEQ ID NO: 1317014 - RNA, 19 nt, Homo sapiens
  misc_RNA (1)...(19): siRNA sense strand
ggacgggauccauaaugca

SEQ ID NO: 1317015 - RNA, 19 nt, Homo sapiens
  misc_RNA (1)...(19): siRNA sense strand
gguggccguccaugaaauu

SEQ ID NO: 1317016 - RNA, 19 nt, Homo sapiens
  misc_RNA (1)...(19): siRNA sense strand
ggaaucccaacacacaaca

SEQ ID NO: 1317017 - RNA, 19 nt, Homo sapiens
  misc_RNA (1)...(19): siRNA sense strand
ucacaucuggacauggaaa

SEQ ID NO: 1317018 - RNA, 19 nt, Homo sapiens
  misc_RNA (1)...(19): siRNA sense strand
ggacaaacaacagaauucc

SEQ ID NO: 1317019 - RNA, 19 nt, Homo sapiens
  misc_RNA (1)...(19): siRNA sense strand
caaaaucauccuuucagaa

SEQ ID NO: 1317020 - RNA, 19 nt, Homo sapiens
  misc_RNA (1)...(19): siRNA sense strand
cgacgacgagcacuucaca

SEQ ID NO: 1317021 - RNA, 19 nt, Homo sapiens
  misc_RNA (1)...(19): siRNA sense strand
aacagaaaucgaguacuua

SEQ ID NO: 1317022 - RNA, 19 nt, Homo sapiens
  misc_RNA (1)...(19): siRNA sense strand
uccauaaugcaaccaaauu

SEQ ID NO: 1317023 - RNA, 19 nt, Homo sapiens
  misc_RNA (1)...(19): siRNA sense strand
ugacaaggacaaacaacag

SEQ ID NO: 1317024 - RNA, 19 nt, Homo sapiens
  misc_RNA (1)...(19): siRNA sense strand
gcauacuggaagguaguua

SEQ ID NO: 1317025 - RNA, 19 nt, Homo sapiens
  misc_RNA (1)...(19): siRNA sense strand
ccgaagacagaaguuaauu

SEQ ID NO: 1317026 - RNA, 19 nt, Homo sapiens
  misc_RNA (1)...(19): siRNA sense strand
cagcuacccugaacaguaa

SEQ ID NO: 1317027 - RNA, 19 nt, Homo sapiens
  misc_RNA (1)...(19): siRNA sense strand
ccaacaaccuggugcacua

SEQ ID NO: 1317028 - RNA, 19 nt, Homo sapiens
  misc_RNA (1)...(19): siRNA sense strand
gcacuacucguccuucgaa

SEQ ID NO: 1317029 - RNA, 19 nt, Homo sapiens
  misc_RNA (1)...(19): siRNA sense strand
gugcaggugugguucaaga

SEQ ID NO: 1317030 - RNA, 19 nt, Homo sapiens
  misc_RNA (1)...(19): siRNA sense strand
auacccagcuggacacuga

SEQ ID NO: 1317031 - RNA, 19 nt, Homo sapiens
  misc_RNA (1)...(19): siRNA sense strand
gcagucagccagugaguca

SEQ ID NO: 1317032 - RNA, 19 nt, Homo sapiens
  misc_RNA (1)...(19): siRNA sense strand
gagcuucaccugagucugu

SEQ ID NO: 1317033 - RNA, 19 nt, Homo sapiens
  misc_RNA (1)...(19): siRNA sense strand
gugagaggcuggccaugug

SEQ ID NO: 1317034 - RNA, 19 nt, Homo sapiens
  misc_RNA (1)...(19): siRNA sense strand
aggaacagcuccagaagca

SEQ ID NO: 1317035 - RNA, 19 nt, Homo sapiens
  misc_RNA (1)...(19): siRNA sense strand
gaaggaacagcuccagaag

SEQ ID NO: 1317036 - RNA, 19 nt, Homo sapiens
  misc_RNA (1)...(19): siRNA sense strand
gggccaaguuccggaagaa

SEQ ID NO: 1317037 - RNA, 19 nt, Homo sapiens
  misc_RNA (1)...(19): siRNA sense strand
ucgauacgcugcccaacug

SEQ ID NO: 1317038 - RNA, 19 nt, Homo sapiens
  misc_RNA (1)...(19): siRNA sense strand
agaaggaacagcuccagaa

SEQ ID NO: 1317039 - RNA, 19 nt, Homo sapiens
  misc_RNA (1)...(19): siRNA sense strand
ccacaagcaucgagaaccu

SEQ ID NO: 1317040 - RNA, 19 nt, Homo sapiens
  misc_RNA (1)...(19): siRNA sense strand
gcaauuccgccagcacaug

SEQ ID NO: 1317041 - RNA, 19 nt, Homo sapiens
  misc_RNA (1)...(19): siRNA sense strand
gaagacucacuacccagau

SEQ ID NO: 1317042 - RNA, 19 nt, Homo sapiens
  misc_RNA (1)...(19): siRNA sense strand
cuacccagauguggugaug

SEQ ID NO: 1317043 - RNA, 19 nt, Homo sapiens
  misc_RNA (1)...(19): siRNA sense strand
gagucugucugagcaguca

SEQ ID NO: 1317044 - RNA, 19 nt, Homo sapiens
  misc_RNA (1)...(19): siRNA sense strand
aggccuggcuccugcauca

SEQ ID NO: 1317045 - RNA, 19 nt, Homo sapiens
  misc_RNA (1)...(19): siRNA sense strand
ucacucagcgccauguaca

SEQ ID NO: 1317046 - RNA, 19 nt, Homo sapiens
  misc_RNA (1)...(19): siRNA sense strand
aagacucacuacccagaug

SEQ ID NO: 1317047 - RNA, 19 nt, Homo sapiens
  misc_RNA (1)...(19): siRNA sense strand
cuaccggccuucagugcau

SEQ ID NO: 1317048 - RNA, 19 nt, Homo sapiens
  misc_RNA (1)...(19): siRNA sense strand
gauguggugaugcgugaga

SEQ ID NO: 1317049 - RNA, 19 nt, Homo sapiens
  misc_RNA (1)...(19): siRNA sense strand
caucuuggaggcccguuau

SEQ ID NO: 1317050 - RNA, 19 nt, Homo sapiens
  misc_RNA (1)...(19): siRNA sense strand
cagcuacccugaacaguaa

SEQ ID NO: 1317051 - RNA, 19 nt, Homo sapiens
  misc_RNA (1)...(19): siRNA sense strand
ccaacaaccuggugcacua

SEQ ID NO: 1317052 - RNA, 19 nt, Homo sapiens
  misc_RNA (1)...(19): siRNA sense strand
gcacuacucguccuucgaa

SEQ ID NO: 1317053 - RNA, 19 nt, Homo sapiens
  misc_RNA (1)...(19): siRNA sense strand
gugcaggugugguucaaga

SEQ ID NO: 1317054 - RNA, 19 nt, Homo sapiens
  misc_RNA (1)...(19): siRNA sense strand
auacccagcuggacacuga

SEQ ID NO: 1317055 - RNA, 19 nt, Homo sapiens
  misc_RNA (1)...(19): siRNA sense strand
gcagucagccagugaguca

SEQ ID NO: 1317056 - RNA, 19 nt, Homo sapiens
  misc_RNA (1)...(19): siRNA sense strand
gagcuucaccugagucugu

SEQ ID NO: 1317057 - RNA, 19 nt, Homo sapiens
  misc_RNA (1)...(19): siRNA sense strand
gugagaggcuggccaugug

SEQ ID NO: 1317058 - RNA, 19 nt, Homo sapiens
  misc_RNA (1)...(19): siRNA sense strand
aggaacagcuccagaagca

SEQ ID NO: 1317059 - RNA, 19 nt, Homo sapiens
  misc_RNA (1)...(19): siRNA sense strand
gaaggaacagcuccagaag

SEQ ID NO: 1317060 - RNA, 19 nt, Homo sapiens
  misc_RNA (1)...(19): siRNA sense strand
gggccaaguuccggaagaa

SEQ ID NO: 1317061 - RNA, 19 nt, Homo sapiens
  misc_RNA (1)...(19): siRNA sense strand
ucgauacgcugcccaacug

SEQ ID NO: 1317062 - RNA, 19 nt, Homo sapiens
  misc_RNA (1)...(19): siRNA sense strand
agaaggaacagcuccagaa

SEQ ID NO: 1317063 - RNA, 19 nt, Homo sapiens
  misc_RNA (1)...(19): siRNA sense strand
ccacaagcaucgagaaccu

SEQ ID NO: 1317064 - RNA, 19 nt, Homo sapiens
  misc_RNA (1)...(19): siRNA sense strand
gcaauuccgccagcacaug

SEQ ID NO: 1317065 - RNA, 19 nt, Homo sapiens
  misc_RNA (1)...(19): siRNA sense strand
gaagacucacuacccagau

SEQ ID NO: 1317066 - RNA, 19 nt, Homo sapiens
  misc_RNA (1)...(19): siRNA sense strand
cuacccagauguggugaug

SEQ ID NO: 1317067 - RNA, 19 nt, Homo sapiens
  misc_RNA (1)...(19): siRNA sense strand
gagucugucugagcaguca

SEQ ID NO: 1317068 - RNA, 19 nt, Homo sapiens
  misc_RNA (1)...(19): siRNA sense strand
aggccuggcuccugcauca

SEQ ID NO: 1317069 - RNA, 19 nt, Homo sapiens
  misc_RNA (1)...(19): siRNA sense strand
ucacucagcgccauguaca

SEQ ID NO: 1317070 - RNA, 19 nt, Homo sapiens
  misc_RNA (1)...(19): siRNA sense strand
aagacucacuacccagaug

SEQ ID NO: 1317071 - RNA, 19 nt, Homo sapiens
  misc_RNA (1)...(19): siRNA sense strand
cuaccggccuucagugcau

SEQ ID NO: 1317072 - RNA, 19 nt, Homo sapiens
  misc_RNA (1)...(19): siRNA sense strand
gauguggugaugcgugaga

SEQ ID NO: 1317073 - RNA, 19 nt, Homo sapiens
  misc_RNA (1)...(19): siRNA sense strand
caucuuggaggcccguuau

SEQ ID NO: 1317074 - RNA, 19 nt, Homo sapiens
  misc_RNA (1)...(19): siRNA sense strand
ggaaacaucugcuggauaa

SEQ ID NO: 1317075 - RNA, 19 nt, Homo sapiens
  misc_RNA (1)...(19): siRNA sense strand
ggaaggaauuguuacuuga

SEQ ID NO: 1317076 - RNA, 19 nt, Homo sapiens
  misc_RNA (1)...(19): siRNA sense strand
gucaaagaauguaccaaua

SEQ ID NO: 1317077 - RNA, 19 nt, Homo sapiens
  misc_RNA (1)...(19): siRNA sense strand
caaagaauguaccaauaag

SEQ ID NO: 1317078 - RNA, 19 nt, Homo sapiens
  misc_RNA (1)...(19): siRNA sense strand
ugacaggaaggaauuguua

SEQ ID NO: 1317079 - RNA, 19 nt, Homo sapiens
  misc_RNA (1)...(19): siRNA sense strand
gauaugacaggaaggaauu

SEQ ID NO: 1317080 - RNA, 19 nt, Homo sapiens
  misc_RNA (1)...(19): siRNA sense strand
gaaggaauuguuacuugaa

SEQ ID NO: 1317081 - RNA, 19 nt, Homo sapiens
  misc_RNA (1)...(19): siRNA sense strand
gaaagccaaaugucaaaga

SEQ ID NO: 1317082 - RNA, 19 nt, Homo sapiens
  misc_RNA (1)...(19): siRNA sense strand
guacggugcuacugucugu

SEQ ID NO: 1317083 - RNA, 19 nt, Homo sapiens
  misc_RNA (1)...(19): siRNA sense strand
ggaauuguuacuugaagaa

SEQ ID NO: 1317084 - RNA, 19 nt, Homo sapiens
  misc_RNA (1)...(19): siRNA sense strand
aaagccaaaugucaaagaa

SEQ ID NO: 1317085 - RNA, 19 nt, Homo sapiens
  misc_RNA (1)...(19): siRNA sense strand
aggaaggaauuguuacuug

SEQ ID NO: 1317086 - RNA, 19 nt, Homo sapiens
  misc_RNA (1)...(19): siRNA sense strand
gaauguaccaauaaguguu

SEQ ID NO: 1317087 - RNA, 19 nt, Homo sapiens
  misc_RNA (1)...(19): siRNA sense strand
gcucaugacauucuucugu

SEQ ID NO: 1317088 - RNA, 19 nt, Homo sapiens
  misc_RNA (1)...(19): siRNA sense strand
gggaaagccaaaugucaaa

SEQ ID NO: 1317089 - RNA, 19 nt, Homo sapiens
  misc_RNA (1)...(19): siRNA sense strand
cgaaaccaguggagauuac

SEQ ID NO: 1317090 - RNA, 19 nt, Homo sapiens
  misc_RNA (1)...(19): siRNA sense strand
ccaaaugucaaagaaugua

SEQ ID NO: 1317091 - RNA, 19 nt, Homo sapiens
  misc_RNA (1)...(19): siRNA sense strand
guaccaauaaguguucuaa

SEQ ID NO: 1317092 - RNA, 19 nt, Homo sapiens
  misc_RNA (1)...(19): siRNA sense strand
agccaaaugucaaagaaug

SEQ ID NO: 1317093 - RNA, 19 nt, Homo sapiens
  misc_RNA (1)...(19): siRNA sense strand
accaauaaguguucuaaag

SEQ ID NO: 1317094 - RNA, 19 nt, Homo sapiens
  misc_RNA (1)...(19): siRNA sense strand
ugggagaaaugaggaagaa

SEQ ID NO: 1317095 - RNA, 19 nt, Homo sapiens
  misc_RNA (1)...(19): siRNA sense strand
cucaugacauucuucugua

SEQ ID NO: 1317096 - RNA, 19 nt, Homo sapiens
  misc_RNA (1)...(19): siRNA sense strand
ggagaaaugaggaagaaaa

SEQ ID NO: 1317097 - RNA, 19 nt, Homo sapiens
  misc_RNA (1)...(19): siRNA sense strand
gaaaugaggaagaaaagau

SEQ ID NO: 1317098 - RNA, 19 nt, Homo sapiens
  misc_RNA (1)...(19): siRNA sense strand
gaccuauuguggaaacauc

SEQ ID NO: 1317099 - RNA, 19 nt, Homo sapiens
  misc_RNA (1)...(19): siRNA sense strand
aagaauguaccaauaagug

SEQ ID NO: 1317100 - RNA, 19 nt, Homo sapiens
  misc_RNA (1)...(19): siRNA sense strand
ccucaugaagcucuggaua

SEQ ID NO: 1317101 - RNA, 19 nt, Homo sapiens
  misc_RNA (1)...(19): siRNA sense strand
ugucaaagaauguaccaau

SEQ ID NO: 1317102 - RNA, 19 nt, Homo sapiens
  misc_RNA (1)...(19): siRNA sense strand
ccaauaaguguucuaaagc

SEQ ID NO: 1317103 - RNA, 19 nt, Homo sapiens
  misc_RNA (1)...(19): siRNA sense strand
guggaaacaucugcuggau

SEQ ID NO: 1317104 - RNA, 19 nt, Homo sapiens
  misc_RNA (1)...(19): siRNA sense strand
aaagauaugacaggaagga

SEQ ID NO: 1317105 - RNA, 19 nt, Homo sapiens
  misc_RNA (1)...(19): siRNA sense strand
uggaaacaucugcuggaua

SEQ ID NO: 1317106 - RNA, 19 nt, Homo sapiens
  misc_RNA (1)...(19): siRNA sense strand
ucgaaaccaguggagauua

SEQ ID NO: 1317107 - RNA, 19 nt, Homo sapiens
  misc_RNA (1)...(19): siRNA sense strand
gaagaaugcuggggaaagc

SEQ ID NO: 1317108 - RNA, 19 nt, Homo sapiens
  misc_RNA (1)...(19): siRNA sense strand
acaugcugcuggaccuauu

SEQ ID NO: 1317109 - RNA, 19 nt, Homo sapiens
  misc_RNA (1)...(19): siRNA sense strand
aggaauuguuacuugaaga

SEQ ID NO: 1317110 - RNA, 19 nt, Homo sapiens
  misc_RNA (1)...(19): siRNA sense strand
aaacaucugcuggauaaac

SEQ ID NO: 1317111 - RNA, 19 nt, Homo sapiens
  misc_RNA (1)...(19): siRNA sense strand
ugucugugcugggagaaau

SEQ ID NO: 1317112 - RNA, 19 nt, Homo sapiens
  misc_RNA (1)...(19): siRNA sense strand
aaggaauuguuacuugaag

SEQ ID NO: 1317113 - RNA, 19 nt, Homo sapiens
  misc_RNA (1)...(19): siRNA sense strand
aaccaguggagauuacuaa

SEQ ID NO: 1317114 - RNA, 19 nt, Homo sapiens
  misc_RNA (1)...(19): siRNA sense strand
aaaccaguggagauuacua

SEQ ID NO: 1317115 - RNA, 19 nt, Homo sapiens
  misc_RNA (1)...(19): siRNA sense strand
ggaaagccaaaugucaaag

SEQ ID NO: 1317116 - RNA, 19 nt, Homo sapiens
  misc_RNA (1)...(19): siRNA sense strand
ggaaacaucugcuuagaca

SEQ ID NO: 1317117 - RNA, 19 nt, Homo sapiens
  misc_RNA (1)...(19): siRNA sense strand
gagaaaagguguacuaaaa

SEQ ID NO: 1317118 - RNA, 19 nt, Homo sapiens
  misc_RNA (1)...(19): siRNA sense strand
ggguacagccuccauauaa

SEQ ID NO: 1317119 - RNA, 19 nt, Homo sapiens
  misc_RNA (1)...(19): siRNA sense strand
guucaucucuggaguugug

SEQ ID NO: 1317120 - RNA, 19 nt, Homo sapiens
  misc_RNA (1)...(19): siRNA sense strand
ccauauaaguacugugaga

SEQ ID NO: 1317121 - RNA, 19 nt, Homo sapiens
  misc_RNA (1)...(19): siRNA sense strand
ggaagcuucuggaacaaag

SEQ ID NO: 1317122 - RNA, 19 nt, Homo sapiens
  misc_RNA (1)...(19): siRNA sense strand
aauaaugacuuguguacgu

SEQ ID NO: 1317123 - RNA, 19 nt, Homo sapiens
  misc_RNA (1)...(19): siRNA sense strand
gaccuacuguggaaacauc

SEQ ID NO: 1317124 - RNA, 19 nt, Homo sapiens
  misc_RNA (1)...(19): siRNA sense strand
gguacagccuccauauaag

SEQ ID NO: 1317125 - RNA, 19 nt, Homo sapiens
  misc_RNA (1)...(19): siRNA sense strand
guggaaacaucugcuuaga

SEQ ID NO: 1317126 - RNA, 19 nt, Homo sapiens
  misc_RNA (1)...(19): siRNA sense strand
guacagccuccauauaagu

SEQ ID NO: 1317127 - RNA, 19 nt, Homo sapiens
  misc_RNA (1)...(19): siRNA sense strand
cugggaagcuucuggaaca

SEQ ID NO: 1317128 - RNA, 19 nt, Homo sapiens
  misc_RNA (1)...(19): siRNA sense strand
gaagagccccuuaaaucaa

SEQ ID NO: 1317129 - RNA, 19 nt, Homo sapiens
  misc_RNA (1)...(19): siRNA sense strand
caacgaagagccccuuaaa

SEQ ID NO: 1317130 - RNA, 19 nt, Homo sapiens
  misc_RNA (1)...(19): siRNA sense strand
gauaugauaagagaaacug

SEQ ID NO: 1317131 - RNA, 19 nt, Homo sapiens
  misc_RNA (1)...(19): siRNA sense strand
ugacuuguguacguccaaa

SEQ ID NO: 1317132 - RNA, 19 nt, Homo sapiens
  misc_RNA (1)...(19): siRNA sense strand
aaacaucugcuuagacaac

SEQ ID NO: 1317133 - RNA, 19 nt, Homo sapiens
  misc_RNA (1)...(19): siRNA sense strand
uguguacguccaaaucaua

SEQ ID NO: 1317134 - RNA, 19 nt, Homo sapiens
  misc_RNA (1)...(19): siRNA sense strand
gggaagcuucuggaacaaa

SEQ ID NO: 1317135 - RNA, 19 nt, Homo sapiens
  misc_RNA (1)...(19): siRNA sense strand
aagaucccuuucuagauau

SEQ ID NO: 1317136 - RNA, 19 nt, Homo sapiens
  misc_RNA (1)...(19): siRNA sense strand
uacagccuccauauaagua

SEQ ID NO: 1317137 - RNA, 19 nt, Homo sapiens
  misc_RNA (1)...(19): siRNA sense strand
cauauaaguacugugagaa

SEQ ID NO: 1317138 - RNA, 19 nt, Homo sapiens
  misc_RNA (1)...(19): siRNA sense strand
gaagcuucuggaacaaaga

SEQ ID NO: 1317139 - RNA, 19 nt, Homo sapiens
  misc_RNA (1)...(19): siRNA sense strand
cgaagagccccuuaaauca

SEQ ID NO: 1317140 - RNA, 19 nt, Homo sapiens
  misc_RNA (1)...(19): siRNA sense strand
ccccuuaaaucaaugcuaa

SEQ ID NO: 1317141 - RNA, 19 nt, Homo sapiens
  misc_RNA (1)...(19): siRNA sense strand
cuccauauaaguacuguga

SEQ ID NO: 1317142 - RNA, 19 nt, Homo sapiens
  misc_RNA (1)...(19): siRNA sense strand
gaaacaucugcuuagacaa

SEQ ID NO: 1317143 - RNA, 19 nt, Homo sapiens
  misc_RNA (1)...(19): siRNA sense strand
uggguacagccuccauaua

SEQ ID NO: 1317144 - RNA, 19 nt, Homo sapiens
  misc_RNA (1)...(19): siRNA sense strand
gagcauggcuuacauacua

SEQ ID NO: 1317145 - RNA, 19 nt, Homo sapiens
  misc_RNA (1)...(19): siRNA sense strand
guaaauggcuuccaaacug

SEQ ID NO: 1317146 - RNA, 19 nt, Homo sapiens
  misc_RNA (1)...(19): siRNA sense strand
gauaagaccgugaugauaa

SEQ ID NO: 1317147 - RNA, 19 nt, Homo sapiens
  misc_RNA (1)...(19): siRNA sense strand
ccacaaugcuucacaauuc

SEQ ID NO: 1317148 - RNA, 19 nt, Homo sapiens
  misc_RNA (1)...(19): siRNA sense strand
gaccaaaguuuaccuaaug

SEQ ID NO: 1317149 - RNA, 19 nt, Homo sapiens
  misc_RNA (1)...(19): siRNA sense strand
caaaucagaccaaaguuua

SEQ ID NO: 1317150 - RNA, 19 nt, Homo sapiens
  misc_RNA (1)...(19): siRNA sense strand
gaacuaucauuaccauugu

SEQ ID NO: 1317151 - RNA, 19 nt, Homo sapiens
  misc_RNA (1)...(19): siRNA sense strand
gagcaucaguuuucauuua

SEQ ID NO: 1317152 - RNA, 19 nt, Homo sapiens
  misc_RNA (1)...(19): siRNA sense strand
ugaaaccaaucccagaaua

SEQ ID NO: 1317153 - RNA, 19 nt, Homo sapiens
  misc_RNA (1)...(19): siRNA sense strand
agaagguuauccugaauua

SEQ ID NO: 1317154 - RNA, 19 nt, Homo sapiens
  misc_RNA (1)...(19): siRNA sense strand
gggcaaagcuuucccuucu

SEQ ID NO: 1317155 - RNA, 19 nt, Homo sapiens
  misc_RNA (1)...(19): siRNA sense strand
ggaacuaucauuaccauug

SEQ ID NO: 1317156 - RNA, 19 nt, Homo sapiens
  misc_RNA (1)...(19): siRNA sense strand
cuauggagguggugaaauu

SEQ ID NO: 1317157 - RNA, 19 nt, Homo sapiens
  misc_RNA (1)...(19): siRNA sense strand
ggaguucccucaguuugaa

SEQ ID NO: 1317158 - RNA, 19 nt, Homo sapiens
  misc_RNA (1)...(19): siRNA sense strand
gcagaagguuauccugaau

SEQ ID NO: 1317159 - RNA, 19 nt, Homo sapiens
  misc_RNA (1)...(19): siRNA sense strand
ggauaagaccgugaugaua

SEQ ID NO: 1317160 - RNA, 19 nt, Homo sapiens
  misc_RNA (1)...(19): siRNA sense strand
gaaaccaaucccagaauau

SEQ ID NO: 1317161 - RNA, 19 nt, Homo sapiens
  misc_RNA (1)...(19): siRNA sense strand
gauagaauccgaggcauug

SEQ ID NO: 1317162 - RNA, 19 nt, Homo sapiens
  misc_RNA (1)...(19): siRNA sense strand
gaaccaccugcuccaaaua

SEQ ID NO: 1317163 - RNA, 19 nt, Homo sapiens
  misc_RNA (1)...(19): siRNA sense strand
aaacaaggaagcaugaauu

SEQ ID NO: 1317164 - RNA, 19 nt, Homo sapiens
  misc_RNA (1)...(19): siRNA sense strand
ugacauauuugaggauaga

SEQ ID NO: 1317165 - RNA, 19 nt, Homo sapiens
  misc_RNA (1)...(19): siRNA sense strand
ucagaacacucaugucuac

SEQ ID NO: 1317166 - RNA, 19 nt, Homo sapiens
  misc_RNA (1)...(19): siRNA sense strand
gaaccgagcaggccuggau

SEQ ID NO: 1317167 - RNA, 19 nt, Homo sapiens
  misc_RNA (1)...(19): siRNA sense strand
ggaggacagugaagacagu

SEQ ID NO: 1317168 - RNA, 19 nt, Homo sapiens
  misc_RNA (1)...(19): siRNA sense strand
acagagagacugcuccuuu

SEQ ID NO: 1317169 - RNA, 19 nt, Homo sapiens
  misc_RNA (1)...(19): siRNA sense strand
caucaccagccaccuaaua

SEQ ID NO: 1317170 - RNA, 19 nt, Homo sapiens
  misc_RNA (1)...(19): siRNA sense strand
gcugagagaggaagaguau

SEQ ID NO: 1317171 - RNA, 19 nt, Homo sapiens
  misc_RNA (1)...(19): siRNA sense strand
cagagagacugcuccuuuc

SEQ ID NO: 1317172 - RNA, 19 nt, Homo sapiens
  misc_RNA (1)...(19): siRNA sense strand
gaaugaugcagauugaguu

SEQ ID NO: 1317173 - RNA, 19 nt, Homo sapiens
  misc_RNA (1)...(19): siRNA sense strand
ccaaacugcaauugacaua

SEQ ID NO: 1317174 - RNA, 19 nt, Homo sapiens
  misc_RNA (1)...(19): siRNA sense strand
cguaaucaauggcugguau

SEQ ID NO: 1317175 - RNA, 19 nt, Homo sapiens
  misc_RNA (1)...(19): siRNA sense strand
ucaggugguucccuuguga

SEQ ID NO: 1317176 - RNA, 19 nt, Homo sapiens
  misc_RNA (1)...(19): siRNA sense strand
acagcuggcccaagaauaa

SEQ ID NO: 1317177 - RNA, 19 nt, Homo sapiens
  misc_RNA (1)...(19): siRNA sense strand
ccagaagaauugcggaaag

SEQ ID NO: 1317178 - RNA, 19 nt, Homo sapiens
  misc_RNA (1)...(19): siRNA sense strand
ucagagguauccagcaugu

SEQ ID NO: 1317179 - RNA, 19 nt, Homo sapiens
  misc_RNA (1)...(19): siRNA sense strand
agacaaaucagaccaaagu

SEQ ID NO: 1317180 - RNA, 19 nt, Homo sapiens
  misc_RNA (1)...(19): siRNA sense strand
acaaaucagaccaaaguuu

SEQ ID NO: 1317181 - RNA, 19 nt, Homo sapiens
  misc_RNA (1)...(19): siRNA sense strand
gaugagcauggcuuacaua

SEQ ID NO: 1317182 - RNA, 19 nt, Homo sapiens
  misc_RNA (1)...(19): siRNA sense strand
ggccaugacucagacaaau

SEQ ID NO: 1317183 - RNA, 19 nt, Homo sapiens
  misc_RNA (1)...(19): siRNA sense strand
ccugugcucuucccaaaug

SEQ ID NO: 1317184 - RNA, 19 nt, Homo sapiens
  misc_RNA (1)...(19): siRNA sense strand
ccacaucaccagccaccua

SEQ ID NO: 1317185 - RNA, 19 nt, Homo sapiens
  misc_RNA (1)...(19): siRNA sense strand
gaugcugccucccaaucuu

SEQ ID NO: 1317186 - RNA, 19 nt, Homo sapiens
  misc_RNA (1)...(19): siRNA sense strand
gaugcagauugaguucaua

SEQ ID NO: 1317187 - RNA, 19 nt, Homo sapiens
  misc_RNA (1)...(19): siRNA sense strand
aaaccaaucccagaauauu

SEQ ID NO: 1317188 - RNA, 19 nt, Homo sapiens
  misc_RNA (1)...(19): siRNA sense strand
ucagacaaaucagaccaaa

SEQ ID NO: 1317189 - RNA, 19 nt, Homo sapiens
  misc_RNA (1)...(19): siRNA sense strand
ggaugagcauggcuuacau

SEQ ID NO: 1317190 - RNA, 19 nt, Homo sapiens
  misc_RNA (1)...(19): siRNA sense strand
gaugauaaucguagcaauc

SEQ ID NO: 1317191 - RNA, 19 nt, Homo sapiens
  misc_RNA (1)...(19): siRNA sense strand
gggauaagaccgugaugau

SEQ ID NO: 1317192 - RNA, 19 nt, Homo sapiens
  misc_RNA (1)...(19): siRNA sense strand
caauuccuccggagacuuu

SEQ ID NO: 1317193 - RNA, 19 nt, Homo sapiens
  misc_RNA (1)...(19): siRNA sense strand
gcauuccuguggagguuga

SEQ ID NO: 1317194 - RNA, 19 nt, Homo sapiens
  misc_RNA (1)...(19): siRNA sense strand
agaccaaaguuuaccuaau

SEQ ID NO: 1317195 - RNA, 19 nt, Homo sapiens
  misc_RNA (1)...(19): siRNA sense strand
ccaccugcuccaaauauaa

SEQ ID NO: 1317196 - RNA, 19 nt, Homo sapiens
  misc_RNA (1)...(19): siRNA sense strand
ggacagugaagacaguuuc

SEQ ID NO: 1317197 - RNA, 19 nt, Homo sapiens
  misc_RNA (1)...(19): siRNA sense strand
cagaagaauugcggaaagu

SEQ ID NO: 1317198 - RNA, 19 nt, Homo sapiens
  misc_RNA (1)...(19): siRNA sense strand
agaaccaccugcuccaaau

SEQ ID NO: 1317199 - RNA, 19 nt, Homo sapiens
  misc_RNA (1)...(19): siRNA sense strand
ggauggagcgcuaccuuag

SEQ ID NO: 1317200 - RNA, 19 nt, Homo sapiens
  misc_RNA (1)...(19): siRNA sense strand
ggugaaauucgugaacuuu

SEQ ID NO: 1317201 - RNA, 19 nt, Homo sapiens
  misc_RNA (1)...(19): siRNA sense strand
cccugaaacuugcaaauca

SEQ ID NO: 1317202 - RNA, 19 nt, Homo sapiens
  misc_RNA (1)...(19): siRNA sense strand
gagcgcuaccuuagggaua

SEQ ID NO: 1317203 - RNA, 19 nt, Homo sapiens
  misc_RNA (1)...(19): siRNA sense strand
gaaccauacccaagucagu

SEQ ID NO: 1317204 - RNA, 19 nt, Homo sapiens
  misc_RNA (1)...(19): siRNA sense strand
gaagaauugcggaaagucu

SEQ ID NO: 1317205 - RNA, 19 nt, Homo sapiens
  misc_RNA (1)...(19): siRNA sense strand
ccgaggcauugauaucauu

SEQ ID NO: 1317206 - RNA, 19 nt, Homo sapiens
  misc_RNA (1)...(19): siRNA sense strand
ugcagaagguuauccugaa

SEQ ID NO: 1317207 - RNA, 19 nt, Homo sapiens
  misc_RNA (1)...(19): siRNA sense strand
gucuacagcuggcccaaga

SEQ ID NO: 1317208 - RNA, 19 nt, Homo sapiens
  misc_RNA (1)...(19): siRNA sense strand
ggaagaggaaucagaacca

SEQ ID NO: 1317209 - RNA, 19 nt, Homo sapiens
  misc_RNA (1)...(19): siRNA sense strand
gcugaaaccaaucccagaa

SEQ ID NO: 1317210 - RNA, 19 nt, Homo sapiens
  misc_RNA (1)...(19): siRNA sense strand
cuccauggaacuaucauua

SEQ ID NO: 1317211 - RNA, 19 nt, Homo sapiens
  misc_RNA (1)...(19): siRNA sense strand
ugagagaggaagaguaugu

SEQ ID NO: 1317212 - RNA, 19 nt, Homo sapiens
  misc_RNA (1)...(19): siRNA sense strand
ccaccuggcuucagaacac

SEQ ID NO: 1317213 - RNA, 19 nt, Homo sapiens
  misc_RNA (1)...(19): siRNA sense strand
auaagaccgugaugauaau

SEQ ID NO: 1317214 - RNA, 19 nt, Homo sapiens
  misc_RNA (1)...(19): siRNA sense strand
agaauccgaggcauugaua

SEQ ID NO: 1317215 - RNA, 19 nt, Homo sapiens
  misc_RNA (1)...(19): siRNA sense strand
gugcccaccuggcuucaga

SEQ ID NO: 1317216 - RNA, 19 nt, Homo sapiens
  misc_RNA (1)...(19): siRNA sense strand
aucaauggcugguaucuca

SEQ ID NO: 1317217 - RNA, 19 nt, Homo sapiens
  misc_RNA (1)...(19): siRNA sense strand
cagaaccaccugcuccaaa

SEQ ID NO: 1317218 - RNA, 19 nt, Homo sapiens
  misc_RNA (1)...(19): siRNA sense strand
gcaaucagccccaaauaca

SEQ ID NO: 1317219 - RNA, 19 nt, Homo sapiens
  misc_RNA (1)...(19): siRNA sense strand
gcagauugaguucauaaaa

SEQ ID NO: 1317220 - RNA, 19 nt, Homo sapiens
  misc_RNA (1)...(19): siRNA sense strand
cgaggaugagcauggcuua

SEQ ID NO: 1317221 - RNA, 19 nt, Homo sapiens
  misc_RNA (1)...(19): siRNA sense strand
ucagaaccauacccaaguc

SEQ ID NO: 1317222 - RNA, 19 nt, Homo sapiens
  misc_RNA (1)...(19): siRNA sense strand
aacaaggaagcaugaauuu

SEQ ID NO: 1317223 - RNA, 19 nt, Homo sapiens
  misc_RNA (1)...(19): siRNA sense strand
cgaggcauugauaucauua

SEQ ID NO: 1317224 - RNA, 19 nt, Homo sapiens
  misc_RNA (1)...(19): siRNA sense strand
cgaaugaugcagauugagu

SEQ ID NO: 1317225 - RNA, 19 nt, Homo sapiens
  misc_RNA (1)...(19): siRNA sense strand
ccaugacucagacaaauca

SEQ ID NO: 1317226 - RNA, 19 nt, Homo sapiens
  misc_RNA (1)...(19): siRNA sense strand
ucacucaacccugaaacuu

SEQ ID NO: 1317227 - RNA, 19 nt, Homo sapiens
  misc_RNA (1)...(19): siRNA sense strand
gguaaauggcuuccaaacu

SEQ ID NO: 1317228 - RNA, 19 nt, Homo sapiens
  misc_RNA (1)...(19): siRNA sense strand
cagaagguuauccugaauu

SEQ ID NO: 1317229 - RNA, 19 nt, Homo sapiens
  misc_RNA (1)...(19): siRNA sense strand
gaagguuauccugaauuau

SEQ ID NO: 1317230 - RNA, 19 nt, Homo sapiens
  misc_RNA (1)...(19): siRNA sense strand
ugaugcagauugaguucau

SEQ ID NO: 1317231 - RNA, 19 nt, Homo sapiens
  misc_RNA (1)...(19): siRNA sense strand
aagguuauccugaauuauc

SEQ ID NO: 1317232 - RNA, 19 nt, Homo sapiens
  misc_RNA (1)...(19): siRNA sense strand
uggauggagcgcuaccuua

SEQ ID NO: 1317233 - RNA, 19 nt, Homo sapiens
  misc_RNA (1)...(19): siRNA sense strand
ucccugugcucuucccaaa

SEQ ID NO: 1317234 - RNA, 19 nt, Homo sapiens
  misc_RNA (1)...(19): siRNA sense strand
auacaaacaggacguggaa

SEQ ID NO: 1317235 - RNA, 19 nt, Homo sapiens
  misc_RNA (1)...(19): siRNA sense strand
ucaccugccugcgcacuca

SEQ ID NO: 1317236 - RNA, 19 nt, Homo sapiens
  misc_RNA (1)...(19): siRNA sense strand
aagcauuccuguggagguu

SEQ ID NO: 1317237 - RNA, 19 nt, Homo sapiens
  misc_RNA (1)...(19): siRNA sense strand
ggcaaagcuuucccuucug

SEQ ID NO: 1317238 - RNA, 19 nt, Homo sapiens
  misc_RNA (1)...(19): siRNA sense strand
gaggcauugauaucauuaa

SEQ ID NO: 1317239 - RNA, 19 nt, Homo sapiens
  misc_RNA (1)...(19): siRNA sense strand
caaccauagacacgggaua

SEQ ID NO: 1317240 - RNA, 19 nt, Homo sapiens
  misc_RNA (1)...(19): siRNA sense strand
gaucugccaaccauagaca

SEQ ID NO: 1317241 - RNA, 19 nt, Homo sapiens
  misc_RNA (1)...(19): siRNA sense strand
cacaucaccagccaccuaa

SEQ ID NO: 1317242 - RNA, 19 nt, Homo sapiens
  misc_RNA (1)...(19): siRNA sense strand
ucccaaaugcuaagaagga

SEQ ID NO: 1317243 - RNA, 19 nt, Homo sapiens
  misc_RNA (1)...(19): siRNA sense strand
caaacugcaauugacauau

SEQ ID NO: 1317244 - RNA, 19 nt, Homo sapiens
  misc_RNA (1)...(19): siRNA sense strand
gagcauggcuuacauacua

SEQ ID NO: 1317245 - RNA, 19 nt, Homo sapiens
  misc_RNA (1)...(19): siRNA sense strand
guaaauggcuuccaaacug

SEQ ID NO: 1317246 - RNA, 19 nt, Homo sapiens
  misc_RNA (1)...(19): siRNA sense strand
gauaagaccgugaugauaa

SEQ ID NO: 1317247 - RNA, 19 nt, Homo sapiens
  misc_RNA (1)...(19): siRNA sense strand
ccacaaugcuucacaauuc

SEQ ID NO: 1317248 - RNA, 19 nt, Homo sapiens
  misc_RNA (1)...(19): siRNA sense strand
gaccaaaguuuaccuaaug

SEQ ID NO: 1317249 - RNA, 19 nt, Homo sapiens
  misc_RNA (1)...(19): siRNA sense strand
caaaucagaccaaaguuua

SEQ ID NO: 1317250 - RNA, 19 nt, Homo sapiens
  misc_RNA (1)...(19): siRNA sense strand
gaacuaucauuaccauugu

SEQ ID NO: 1317251 - RNA, 19 nt, Homo sapiens
  misc_RNA (1)...(19): siRNA sense strand
gagcaucaguuuucauuua

SEQ ID NO: 1317252 - RNA, 19 nt, Homo sapiens
  misc_RNA (1)...(19): siRNA sense strand
ugaaaccaaucccagaaua

SEQ ID NO: 1317253 - RNA, 19 nt, Homo sapiens
  misc_RNA (1)...(19): siRNA sense strand
agaagguuauccugaauua

SEQ ID NO: 1317254 - RNA, 19 nt, Homo sapiens
  misc_RNA (1)...(19): siRNA sense strand
gggcaaagcuuucccuucu

SEQ ID NO: 1317255 - RNA, 19 nt, Homo sapiens
  misc_RNA (1)...(19): siRNA sense strand
ggaacuaucauuaccauug

SEQ ID NO: 1317256 - RNA, 19 nt, Homo sapiens
  misc_RNA (1)...(19): siRNA sense strand
cuauggagguggugaaauu

SEQ ID NO: 1317257 - RNA, 19 nt, Homo sapiens
  misc_RNA (1)...(19): siRNA sense strand
ggaguucccucaguuugaa

SEQ ID NO: 1317258 - RNA, 19 nt, Homo sapiens
  misc_RNA (1)...(19): siRNA sense strand
gcagaagguuauccugaau

SEQ ID NO: 1317259 - RNA, 19 nt, Homo sapiens
  misc_RNA (1)...(19): siRNA sense strand
ggauaagaccgugaugaua

SEQ ID NO: 1317260 - RNA, 19 nt, Homo sapiens
  misc_RNA (1)...(19): siRNA sense strand
gaaaccaaucccagaauau

SEQ ID NO: 1317261 - RNA, 19 nt, Homo sapiens
  misc_RNA (1)...(19): siRNA sense strand
gauagaauccgaggcauug

SEQ ID NO: 1317262 - RNA, 19 nt, Homo sapiens
  misc_RNA (1)...(19): siRNA sense strand
gaaccaccugcuccaaaua

SEQ ID NO: 1317263 - RNA, 19 nt, Homo sapiens
  misc_RNA (1)...(19): siRNA sense strand
aaacaaggaagcaugaauu

SEQ ID NO: 1317264 - RNA, 19 nt, Homo sapiens
  misc_RNA (1)...(19): siRNA sense strand
ugacauauuugaggauaga

SEQ ID NO: 1317265 - RNA, 19 nt, Homo sapiens
  misc_RNA (1)...(19): siRNA sense strand
ucagaacacucaugucuac

SEQ ID NO: 1317266 - RNA, 19 nt, Homo sapiens
  misc_RNA (1)...(19): siRNA sense strand
gaaccgagcaggccuggau

SEQ ID NO: 1317267 - RNA, 19 nt, Homo sapiens
  misc_RNA (1)...(19): siRNA sense strand
ggaggacagugaagacagu

SEQ ID NO: 1317268 - RNA, 19 nt, Homo sapiens
  misc_RNA (1)...(19): siRNA sense strand
acagagagacugcuccuuu

SEQ ID NO: 1317269 - RNA, 19 nt, Homo sapiens
  misc_RNA (1)...(19): siRNA sense strand
caucaccagccaccuaaua

SEQ ID NO: 1317270 - RNA, 19 nt, Homo sapiens
  misc_RNA (1)...(19): siRNA sense strand
gcugagagaggaagaguau

SEQ ID NO: 1317271 - RNA, 19 nt, Homo sapiens
  misc_RNA (1)...(19): siRNA sense strand
cagagagacugcuccuuuc

SEQ ID NO: 1317272 - RNA, 19 nt, Homo sapiens
  misc_RNA (1)...(19): siRNA sense strand
gaaugaugcagauugaguu

SEQ ID NO: 1317273 - RNA, 19 nt, Homo sapiens
  misc_RNA (1)...(19): siRNA sense strand
ccaaacugcaauugacaua

SEQ ID NO: 1317274 - RNA, 19 nt, Homo sapiens
  misc_RNA (1)...(19): siRNA sense strand
cguaaucaauggcugguau

SEQ ID NO: 1317275 - RNA, 19 nt, Homo sapiens
  misc_RNA (1)...(19): siRNA sense strand
ucaggugguucccuuguga

SEQ ID NO: 1317276 - RNA, 19 nt, Homo sapiens
  misc_RNA (1)...(19): siRNA sense strand
acagcuggcccaagaauaa

SEQ ID NO: 1317277 - RNA, 19 nt, Homo sapiens
  misc_RNA (1)...(19): siRNA sense strand
ccagaagaauugcggaaag

SEQ ID NO: 1317278 - RNA, 19 nt, Homo sapiens
  misc_RNA (1)...(19): siRNA sense strand
ucagagguauccagcaugu

SEQ ID NO: 1317279 - RNA, 19 nt, Homo sapiens
  misc_RNA (1)...(19): siRNA sense strand
agacaaaucagaccaaagu

SEQ ID NO: 1317280 - RNA, 19 nt, Homo sapiens
  misc_RNA (1)...(19): siRNA sense strand
acaaaucagaccaaaguuu

SEQ ID NO: 1317281 - RNA, 19 nt, Homo sapiens
  misc_RNA (1)...(19): siRNA sense strand
gaugagcauggcuuacaua

SEQ ID NO: 1317282 - RNA, 19 nt, Homo sapiens
  misc_RNA (1)...(19): siRNA sense strand
ggccaugacucagacaaau

SEQ ID NO: 1317283 - RNA, 19 nt, Homo sapiens
  misc_RNA (1)...(19): siRNA sense strand
ccugugcucuucccaaaug

SEQ ID NO: 1317284 - RNA, 19 nt, Homo sapiens
  misc_RNA (1)...(19): siRNA sense strand
ccacaucaccagccaccua

SEQ ID NO: 1317285 - RNA, 19 nt, Homo sapiens
  misc_RNA (1)...(19): siRNA sense strand
gaugcugccucccaaucuu

SEQ ID NO: 1317286 - RNA, 19 nt, Homo sapiens
  misc_RNA (1)...(19): siRNA sense strand
gaugcagauugaguucaua

SEQ ID NO: 1317287 - RNA, 19 nt, Homo sapiens
  misc_RNA (1)...(19): siRNA sense strand
aaaccaaucccagaauauu

SEQ ID NO: 1317288 - RNA, 19 nt, Homo sapiens
  misc_RNA (1)...(19): siRNA sense strand
ucagacaaaucagaccaaa

SEQ ID NO: 1317289 - RNA, 19 nt, Homo sapiens
  misc_RNA (1)...(19): siRNA sense strand
ggaugagcauggcuuacau

SEQ ID NO: 1317290 - RNA, 19 nt, Homo sapiens
  misc_RNA (1)...(19): siRNA sense strand
gaugauaaucguagcaauc

SEQ ID NO: 1317291 - RNA, 19 nt, Homo sapiens
  misc_RNA (1)...(19): siRNA sense strand
gggauaagaccgugaugau

SEQ ID NO: 1317292 - RNA, 19 nt, Homo sapiens
  misc_RNA (1)...(19): siRNA sense strand
caauuccuccggagacuuu

SEQ ID NO: 1317293 - RNA, 19 nt, Homo sapiens
  misc_RNA (1)...(19): siRNA sense strand
gcauuccuguggagguuga

SEQ ID NO: 1317294 - RNA, 19 nt, Homo sapiens
  misc_RNA (1)...(19): siRNA sense strand
agaccaaaguuuaccuaau

SEQ ID NO: 1317295 - RNA, 19 nt, Homo sapiens
  misc_RNA (1)...(19): siRNA sense strand
ccaccugcuccaaauauaa

SEQ ID NO: 1317296 - RNA, 19 nt, Homo sapiens
  misc_RNA (1)...(19): siRNA sense strand
ggacagugaagacaguuuc

SEQ ID NO: 1317297 - RNA, 19 nt, Homo sapiens
  misc_RNA (1)...(19): siRNA sense strand
cagaagaauugcggaaagu

SEQ ID NO: 1317298 - RNA, 19 nt, Homo sapiens
  misc_RNA (1)...(19): siRNA sense strand
agaaccaccugcuccaaau

SEQ ID NO: 1317299 - RNA, 19 nt, Homo sapiens
  misc_RNA (1)...(19): siRNA sense strand
ggauggagcgcuaccuuag

SEQ ID NO: 1317300 - RNA, 19 nt, Homo sapiens
  misc_RNA (1)...(19): siRNA sense strand
ggugaaauucgugaacuuu

SEQ ID NO: 1317301 - RNA, 19 nt, Homo sapiens
  misc_RNA (1)...(19): siRNA sense strand
cccugaaacuugcaaauca

SEQ ID NO: 1317302 - RNA, 19 nt, Homo sapiens
  misc_RNA (1)...(19): siRNA sense strand
gagcgcuaccuuagggaua

SEQ ID NO: 1317303 - RNA, 19 nt, Homo sapiens
  misc_RNA (1)...(19): siRNA sense strand
gaaccauacccaagucagu

SEQ ID NO: 1317304 - RNA, 19 nt, Homo sapiens
  misc_RNA (1)...(19): siRNA sense strand
gaagaauugcggaaagucu

SEQ ID NO: 1317305 - RNA, 19 nt, Homo sapiens
  misc_RNA (1)...(19): siRNA sense strand
ccgaggcauugauaucauu

SEQ ID NO: 1317306 - RNA, 19 nt, Homo sapiens
  misc_RNA (1)...(19): siRNA sense strand
ugcagaagguuauccugaa

SEQ ID NO: 1317307 - RNA, 19 nt, Homo sapiens
  misc_RNA (1)...(19): siRNA sense strand
gucuacagcuggcccaaga

SEQ ID NO: 1317308 - RNA, 19 nt, Homo sapiens
  misc_RNA (1)...(19): siRNA sense strand
ggaagaggaaucagaacca

SEQ ID NO: 1317309 - RNA, 19 nt, Homo sapiens
  misc_RNA (1)...(19): siRNA sense strand
gcugaaaccaaucccagaa

SEQ ID NO: 1317310 - RNA, 19 nt, Homo sapiens
  misc_RNA (1)...(19): siRNA sense strand
cuccauggaacuaucauua

SEQ ID NO: 1317311 - RNA, 19 nt, Homo sapiens
  misc_RNA (1)...(19): siRNA sense strand
ugagagaggaagaguaugu

SEQ ID NO: 1317312 - RNA, 19 nt, Homo sapiens
  misc_RNA (1)...(19): siRNA sense strand
ccaccuggcuucagaacac

SEQ ID NO: 1317313 - RNA, 19 nt, Homo sapiens
  misc_RNA (1)...(19): siRNA sense strand
auaagaccgugaugauaau

SEQ ID NO: 1317314 - RNA, 19 nt, Homo sapiens
  misc_RNA (1)...(19): siRNA sense strand
agaauccgaggcauugaua

SEQ ID NO: 1317315 - RNA, 19 nt, Homo sapiens
  misc_RNA (1)...(19): siRNA sense strand
gugcccaccuggcuucaga

SEQ ID NO: 1317316 - RNA, 19 nt, Homo sapiens
  misc_RNA (1)...(19): siRNA sense strand
aucaauggcugguaucuca

SEQ ID NO: 1317317 - RNA, 19 nt, Homo sapiens
  misc_RNA (1)...(19): siRNA sense strand
cagaaccaccugcuccaaa

SEQ ID NO: 1317318 - RNA, 19 nt, Homo sapiens
  misc_RNA (1)...(19): siRNA sense strand
gcaaucagccccaaauaca

SEQ ID NO: 1317319 - RNA, 19 nt, Homo sapiens
  misc_RNA (1)...(19): siRNA sense strand
gcagauugaguucauaaaa

SEQ ID NO: 1317320 - RNA, 19 nt, Homo sapiens
  misc_RNA (1)...(19): siRNA sense strand
cgaggaugagcauggcuua

SEQ ID NO: 1317321 - RNA, 19 nt, Homo sapiens
  misc_RNA (1)...(19): siRNA sense strand
ucagaaccauacccaaguc

SEQ ID NO: 1317322 - RNA, 19 nt, Homo sapiens
  misc_RNA (1)...(19): siRNA sense strand
aacaaggaagcaugaauuu

SEQ ID NO: 1317323 - RNA, 19 nt, Homo sapiens
  misc_RNA (1)...(19): siRNA sense strand
cgaggcauugauaucauua

SEQ ID NO: 1317324 - RNA, 19 nt, Homo sapiens
  misc_RNA (1)...(19): siRNA sense strand
cgaaugaugcagauugagu

SEQ ID NO: 1317325 - RNA, 19 nt, Homo sapiens
  misc_RNA (1)...(19): siRNA sense strand
ccaugacucagacaaauca

SEQ ID NO: 1317326 - RNA, 19 nt, Homo sapiens
  misc_RNA (1)...(19): siRNA sense strand
ucacucaacccugaaacuu

SEQ ID NO: 1317327 - RNA, 19 nt, Homo sapiens
  misc_RNA (1)...(19): siRNA sense strand
gguaaauggcuuccaaacu

SEQ ID NO: 1317328 - RNA, 19 nt, Homo sapiens
  misc_RNA (1)...(19): siRNA sense strand
cagaagguuauccugaauu

SEQ ID NO: 1317329 - RNA, 19 nt, Homo sapiens
  misc_RNA (1)...(19): siRNA sense strand
gaagguuauccugaauuau

SEQ ID NO: 1317330 - RNA, 19 nt, Homo sapiens
  misc_RNA (1)...(19): siRNA sense strand
ugaugcagauugaguucau

SEQ ID NO: 1317331 - RNA, 19 nt, Homo sapiens
  misc_RNA (1)...(19): siRNA sense strand
aagguuauccugaauuauc

SEQ ID NO: 1317332 - RNA, 19 nt, Homo sapiens
  misc_RNA (1)...(19): siRNA sense strand
uggauggagcgcuaccuua

SEQ ID NO: 1317333 - RNA, 19 nt, Homo sapiens
  misc_RNA (1)...(19): siRNA sense strand
ucccugugcucuucccaaa

SEQ ID NO: 1317334 - RNA, 19 nt, Homo sapiens
  misc_RNA (1)...(19): siRNA sense strand
auacaaacaggacguggaa

SEQ ID NO: 1317335 - RNA, 19 nt, Homo sapiens
  misc_RNA (1)...(19): siRNA sense strand
ucaccugccugcgcacuca

SEQ ID NO: 1317336 - RNA, 19 nt, Homo sapiens
  misc_RNA (1)...(19): siRNA sense strand
aagcauuccuguggagguu

SEQ ID NO: 1317337 - RNA, 19 nt, Homo sapiens
  misc_RNA (1)...(19): siRNA sense strand
ggcaaagcuuucccuucug

SEQ ID NO: 1317338 - RNA, 19 nt, Homo sapiens
  misc_RNA (1)...(19): siRNA sense strand
gaggcauugauaucauuaa

SEQ ID NO: 1317339 - RNA, 19 nt, Homo sapiens
  misc_RNA (1)...(19): siRNA sense strand
caaccauagacacgggaua

SEQ ID NO: 1317340 - RNA, 19 nt, Homo sapiens
  misc_RNA (1)...(19): siRNA sense strand
gaucugccaaccauagaca

SEQ ID NO: 1317341 - RNA, 19 nt, Homo sapiens
  misc_RNA (1)...(19): siRNA sense strand
cacaucaccagccaccuaa

SEQ ID NO: 1317342 - RNA, 19 nt, Homo sapiens
  misc_RNA (1)...(19): siRNA sense strand
ucccaaaugcuaagaagga

SEQ ID NO: 1317343 - RNA, 19 nt, Homo sapiens
  misc_RNA (1)...(19): siRNA sense strand
caaacugcaauugacauau

SEQ ID NO: 1317344 - RNA, 19 nt, Homo sapiens
  misc_RNA (1)...(19): siRNA sense strand
gaaauuggcucuucuugga

SEQ ID NO: 1317345 - RNA, 19 nt, Homo sapiens
  misc_RNA (1)...(19): siRNA sense strand
gcacauugcucccauaugg

SEQ ID NO: 1317346 - RNA, 19 nt, Homo sapiens
  misc_RNA (1)...(19): siRNA sense strand
gaagauggcagcuggacua

SEQ ID NO: 1317347 - RNA, 19 nt, Homo sapiens
  misc_RNA (1)...(19): siRNA sense strand
caacaacacccagaugaua

SEQ ID NO: 1317348 - RNA, 19 nt, Homo sapiens
  misc_RNA (1)...(19): siRNA sense strand
aaacugagaugaucauuac

SEQ ID NO: 1317349 - RNA, 19 nt, Homo sapiens
  misc_RNA (1)...(19): siRNA sense strand
caacauaaacggacucaau

SEQ ID NO: 1317350 - RNA, 19 nt, Homo sapiens
  misc_RNA (1)...(19): siRNA sense strand
gaauauacuucuagcacau

SEQ ID NO: 1317351 - RNA, 19 nt, Homo sapiens
  misc_RNA (1)...(19): siRNA sense strand
gcaaaaggcuucagagaca

SEQ ID NO: 1317352 - RNA, 19 nt, Homo sapiens
  misc_RNA (1)...(19): siRNA sense strand
ggacauuaaugcugaagag

SEQ ID NO: 1317353 - RNA, 19 nt, Homo sapiens
  misc_RNA (1)...(19): siRNA sense strand
caaacugagaugaucauua

SEQ ID NO: 1317354 - RNA, 19 nt, Homo sapiens
  misc_RNA (1)...(19): siRNA sense strand
gcgcauguuuccuuucuug

SEQ ID NO: 1317355 - RNA, 19 nt, Homo sapiens
  misc_RNA (1)...(19): siRNA sense strand
gaaagugaaagaggaaauu

SEQ ID NO: 1317356 - RNA, 19 nt, Homo sapiens
  misc_RNA (1)...(19): siRNA sense strand
gcaggcgcauguuuccuuu

SEQ ID NO: 1317357 - RNA, 19 nt, Homo sapiens
  misc_RNA (1)...(19): siRNA sense strand
agacaucaguuccuaugaa

SEQ ID NO: 1317358 - RNA, 19 nt, Homo sapiens
  misc_RNA (1)...(19): siRNA sense strand
ccacuacaauguguucgua

SEQ ID NO: 1317359 - RNA, 19 nt, Homo sapiens
  misc_RNA (1)...(19): siRNA sense strand
cauuaaugcugaagaguau

SEQ ID NO: 1317360 - RNA, 19 nt, Homo sapiens
  misc_RNA (1)...(19): siRNA sense strand
caagcccgcuauuauaaug

SEQ ID NO: 1317361 - RNA, 19 nt, Homo sapiens
  misc_RNA (1)...(19): siRNA sense strand
ccuagcaacuccaguaaug

SEQ ID NO: 1317362 - RNA, 19 nt, Homo sapiens
  misc_RNA (1)...(19): siRNA sense strand
ccucaagcccgcuauuaua

SEQ ID NO: 1317363 - RNA, 19 nt, Homo sapiens
  misc_RNA (1)...(19): siRNA sense strand
aagaucagcucuccaagga

SEQ ID NO: 1317364 - RNA, 19 nt, Homo sapiens
  misc_RNA (1)...(19): siRNA sense strand
uaacaaaggcgcaaauaac

SEQ ID NO: 1317365 - RNA, 19 nt, Homo sapiens
  misc_RNA (1)...(19): siRNA sense strand
gacccaaccuuuccugcaa

SEQ ID NO: 1317366 - RNA, 19 nt, Homo sapiens
  misc_RNA (1)...(19): siRNA sense strand
gacaucaguuccuaugaau

SEQ ID NO: 1317367 - RNA, 19 nt, Homo sapiens
  misc_RNA (1)...(19): siRNA sense strand
gcucccauauggcauuaaa

SEQ ID NO: 1317368 - RNA, 19 nt, Homo sapiens
  misc_RNA (1)...(19): siRNA sense strand
cauaaagugugaggacauu

SEQ ID NO: 1317369 - RNA, 19 nt, Homo sapiens
  misc_RNA (1)...(19): siRNA sense strand
gauggcagcuggacuacca

SEQ ID NO: 1317370 - RNA, 19 nt, Homo sapiens
  misc_RNA (1)...(19): siRNA sense strand
gauagucuuacaauccuua

SEQ ID NO: 1317371 - RNA, 19 nt, Homo sapiens
  misc_RNA (1)...(19): siRNA sense strand
uaaagugugaggacauuaa

SEQ ID NO: 1317372 - RNA, 19 nt, Homo sapiens
  misc_RNA (1)...(19): siRNA sense strand
cgauauuacucaacuaaag

SEQ ID NO: 1317373 - RNA, 19 nt, Homo sapiens
  misc_RNA (1)...(19): siRNA sense strand
gagagaaccgugccacaga

SEQ ID NO: 1317374 - RNA, 19 nt, Homo sapiens
  misc_RNA (1)...(19): siRNA sense strand
cacccagagucuccuaaua

SEQ ID NO: 1317375 - RNA, 19 nt, Homo sapiens
  misc_RNA (1)...(19): siRNA sense strand
gacaaagcguccaagaagu

SEQ ID NO: 1317376 - RNA, 19 nt, Homo sapiens
  misc_RNA (1)...(19): siRNA sense strand
gcauauuguugaaguuaca

SEQ ID NO: 1317377 - RNA, 19 nt, Homo sapiens
  misc_RNA (1)...(19): siRNA sense strand
uaacaugcagggcaacaaa

SEQ ID NO: 1317378 - RNA, 19 nt, Homo sapiens
  misc_RNA (1)...(19): siRNA sense strand
ggagaaagugaaagaggaa

SEQ ID NO: 1317379 - RNA, 19 nt, Homo sapiens
  misc_RNA (1)...(19): siRNA sense strand
cauauggcauuaaauccuu

SEQ ID NO: 1317380 - RNA, 19 nt, Homo sapiens
  misc_RNA (1)...(19): siRNA sense strand
ccaaggagaaagugaaaga

SEQ ID NO: 1317381 - RNA, 19 nt, Homo sapiens
  misc_RNA (1)...(19): siRNA sense strand
ccaccaaacugagaugauc

SEQ ID NO: 1317382 - RNA, 19 nt, Homo sapiens
  misc_RNA (1)...(19): siRNA sense strand
gaaaauucacccuccauaa

SEQ ID NO: 1317383 - RNA, 19 nt, Homo sapiens
  misc_RNA (1)...(19): siRNA sense strand
ccacuguguucucugaaga

SEQ ID NO: 1317384 - RNA, 19 nt, Homo sapiens
  misc_RNA (1)...(19): siRNA sense strand
gcugaagaguauaguaaag

SEQ ID NO: 1317385 - RNA, 19 nt, Homo sapiens
  misc_RNA (1)...(19): siRNA sense strand
aaacaccgauauuacucaa

SEQ ID NO: 1317386 - RNA, 19 nt, Homo sapiens
  misc_RNA (1)...(19): siRNA sense strand
agacaaagcguccaagaag

SEQ ID NO: 1317387 - RNA, 19 nt, Homo sapiens
  misc_RNA (1)...(19): siRNA sense strand
gagaugaucauuacgaaac

SEQ ID NO: 1317388 - RNA, 19 nt, Homo sapiens
  misc_RNA (1)...(19): siRNA sense strand
aauuggcucuucuuggaua

SEQ ID NO: 1317389 - RNA, 19 nt, Homo sapiens
  misc_RNA (1)...(19): siRNA sense strand
ugucaacacuuuaccucaa

SEQ ID NO: 1317390 - RNA, 19 nt, Homo sapiens
  misc_RNA (1)...(19): siRNA sense strand
gcaaagccgacaauaacau

SEQ ID NO: 1317391 - RNA, 19 nt, Homo sapiens
  misc_RNA (1)...(19): siRNA sense strand
aaacagggcaggcgcaugu

SEQ ID NO: 1317392 - RNA, 19 nt, Homo sapiens
  misc_RNA (1)...(19): siRNA sense strand
ugagacaggagauuucauu

SEQ ID NO: 1317393 - RNA, 19 nt, Homo sapiens
  misc_RNA (1)...(19): siRNA sense strand
acaaagcguccaagaaguu

SEQ ID NO: 1317394 - RNA, 19 nt, Homo sapiens
  misc_RNA (1)...(19): siRNA sense strand
cgaaggcggcugucuccua

SEQ ID NO: 1317395 - RNA, 19 nt, Homo sapiens
  misc_RNA (1)...(19): siRNA sense strand
caacaaacuagacaucagu

SEQ ID NO: 1317396 - RNA, 19 nt, Homo sapiens
  misc_RNA (1)...(19): siRNA sense strand
gaccaacggccuccuuuca

SEQ ID NO: 1317397 - RNA, 19 nt, Homo sapiens
  misc_RNA (1)...(19): siRNA sense strand
ccacugcccacuacaaugu

SEQ ID NO: 1317398 - RNA, 19 nt, Homo sapiens
  misc_RNA (1)...(19): siRNA sense strand
gaugauagucuuacaaucc

SEQ ID NO: 1317399 - RNA, 19 nt, Homo sapiens
  misc_RNA (1)...(19): siRNA sense strand
uaacaacaacacccagaug

SEQ ID NO: 1317400 - RNA, 19 nt, Homo sapiens
  misc_RNA (1)...(19): siRNA sense strand
gaucauaaccccuuugcaa

SEQ ID NO: 1317401 - RNA, 19 nt, Homo sapiens
  misc_RNA (1)...(19): siRNA sense strand
caaagcguccaagaaguuu

SEQ ID NO: 1317402 - RNA, 19 nt, Homo sapiens
  misc_RNA (1)...(19): siRNA sense strand
caaagccgacaauaacaug

SEQ ID NO: 1317403 - RNA, 19 nt, Homo sapiens
  misc_RNA (1)...(19): siRNA sense strand
ucucuagauuccaaugauu

SEQ ID NO: 1317404 - RNA, 19 nt, Homo sapiens
  misc_RNA (1)...(19): siRNA sense strand
ucagagacaacuaugauuc

SEQ ID NO: 1317405 - RNA, 19 nt, Homo sapiens
  misc_RNA (1)...(19): siRNA sense strand
gcguggaggacuugaauga

SEQ ID NO: 1317406 - RNA, 19 nt, Homo sapiens
  misc_RNA (1)...(19): siRNA sense strand
gaaccgugccacagaccaa

SEQ ID NO: 1317407 - RNA, 19 nt, Homo sapiens
  misc_RNA (1)...(19): siRNA sense strand
acauuaaugcugaagagua

SEQ ID NO: 1317408 - RNA, 19 nt, Homo sapiens
  misc_RNA (1)...(19): siRNA sense strand
caaauuccaccgccaccaa

SEQ ID NO: 1317409 - RNA, 19 nt, Homo sapiens
  misc_RNA (1)...(19): siRNA sense strand
ccaacaaacuagacaucag

SEQ ID NO: 1317410 - RNA, 19 nt, Homo sapiens
  misc_RNA (1)...(19): siRNA sense strand
guggcaaagccgacaauaa

SEQ ID NO: 1317411 - RNA, 19 nt, Homo sapiens
  misc_RNA (1)...(19): siRNA sense strand
uagcaacuccaguaaugaa

SEQ ID NO: 1317412 - RNA, 19 nt, Homo sapiens
  misc_RNA (1)...(19): siRNA sense strand
cuuacaauccuuacacaaa

SEQ ID NO: 1317413 - RNA, 19 nt, Homo sapiens
  misc_RNA (1)...(19): siRNA sense strand
ggaugagacaggagauuuc

SEQ ID NO: 1317414 - RNA, 19 nt, Homo sapiens
  misc_RNA (1)...(19): siRNA sense strand
auaacaaaggcgcaaauaa

SEQ ID NO: 1317415 - RNA, 19 nt, Homo sapiens
  misc_RNA (1)...(19): siRNA sense strand
caucaguuccuaugaaucu

SEQ ID NO: 1317416 - RNA, 19 nt, Homo sapiens
  misc_RNA (1)...(19): siRNA sense strand
cagaugauagucuuacaau

SEQ ID NO: 1317417 - RNA, 19 nt, Homo sapiens
  misc_RNA (1)...(19): siRNA sense strand
gguacggcguucaauccuu

SEQ ID NO: 1317418 - RNA, 19 nt, Homo sapiens
  misc_RNA (1)...(19): siRNA sense strand
uggcaaagccgacaauaac

SEQ ID NO: 1317419 - RNA, 19 nt, Homo sapiens
  misc_RNA (1)...(19): siRNA sense strand
gggaggguauuaugcuuuu

SEQ ID NO: 1317420 - RNA, 19 nt, Homo sapiens
  misc_RNA (1)...(19): siRNA sense strand
uuccaaugauucaggagua

SEQ ID NO: 1317421 - RNA, 19 nt, Homo sapiens
  misc_RNA (1)...(19): siRNA sense strand
cucaagcccgcuauuauaa

SEQ ID NO: 1317422 - RNA, 19 nt, Homo sapiens
  misc_RNA (1)...(19): siRNA sense strand
caaaggcgcaaauaacaac

SEQ ID NO: 1317423 - RNA, 19 nt, Homo sapiens
  misc_RNA (1)...(19): siRNA sense strand
aauaacaaaggcgcaaaua

SEQ ID NO: 1317424 - RNA, 19 nt, Homo sapiens
  misc_RNA (1)...(19): siRNA sense strand
gaugagacaggagauuuca

SEQ ID NO: 1317425 - RNA, 19 nt, Homo sapiens
  misc_RNA (1)...(19): siRNA sense strand
gaagaguauaguaaagaca

SEQ ID NO: 1317426 - RNA, 19 nt, Homo sapiens
  misc_RNA (1)...(19): siRNA sense strand
ugaagaguauaguaaagac

SEQ ID NO: 1317427 - RNA, 19 nt, Homo sapiens
  misc_RNA (1)...(19): siRNA sense strand
cugagaugaucauuacgaa

SEQ ID NO: 1317428 - RNA, 19 nt, Homo sapiens
  misc_RNA (1)...(19): siRNA sense strand
gcagcuggacuaccaugga

SEQ ID NO: 1317429 - RNA, 19 nt, Homo sapiens
  misc_RNA (1)...(19): siRNA sense strand
cagagacaacuaugauuca

SEQ ID NO: 1317430 - RNA, 19 nt, Homo sapiens
  misc_RNA (1)...(19): siRNA sense strand
acacccagaugauagucuu

SEQ ID NO: 1317431 - RNA, 19 nt, Homo sapiens
  misc_RNA (1)...(19): siRNA sense strand
acaccgauauuacucaacu

SEQ ID NO: 1317432 - RNA, 19 nt, Homo sapiens
  misc_RNA (1)...(19): siRNA sense strand
ccaaugauucaggaguaua

SEQ ID NO: 1317433 - RNA, 19 nt, Homo sapiens
  misc_RNA (1)...(19): siRNA sense strand
uagacaaagcguccaagaa

SEQ ID NO: 1317434 - RNA, 19 nt, Homo sapiens
  misc_RNA (1)...(19): siRNA sense strand
gaggaaauuggcucuucuu

SEQ ID NO: 1317435 - RNA, 19 nt, Homo sapiens
  misc_RNA (1)...(19): siRNA sense strand
guuccuaugaaucugaaua

SEQ ID NO: 1317436 - RNA, 19 nt, Homo sapiens
  misc_RNA (1)...(19): siRNA sense strand
gacugcauauuguugaagu

SEQ ID NO: 1317437 - RNA, 19 nt, Homo sapiens
  misc_RNA (1)...(19): siRNA sense strand
caauaacaaaggcgcaaau

SEQ ID NO: 1317438 - RNA, 19 nt, Homo sapiens
  misc_RNA (1)...(19): siRNA sense strand
aaaauucacccuccauaaa

SEQ ID NO: 1317439 - RNA, 19 nt, Homo sapiens
  misc_RNA (1)...(19): siRNA sense strand
ugucacgccuguccagcaa

SEQ ID NO: 1317440 - RNA, 19 nt, Homo sapiens
  misc_RNA (1)...(19): siRNA sense strand
cugcauauuguugaaguua

SEQ ID NO: 1317441 - RNA, 19 nt, Homo sapiens
  misc_RNA (1)...(19): siRNA sense strand
acaaaggcgcaaauaacaa

SEQ ID NO: 1317442 - RNA, 19 nt, Homo sapiens
  misc_RNA (1)...(19): siRNA sense strand
aacaaaggcgcaaauaaca

SEQ ID NO: 1317443 - RNA, 19 nt, Homo sapiens
  misc_RNA (1)...(19): siRNA sense strand
aaauucacccuccauaaag

SEQ ID NO: 1317444 - RNA, 19 nt, Homo sapiens
  misc_RNA (1)...(19): siRNA sense strand
ggacagcgaugaugacuuu

SEQ ID NO: 1317445 - RNA, 19 nt, Homo sapiens
  misc_RNA (1)...(19): siRNA sense strand
gaaggacggcuaccgguua

SEQ ID NO: 1317446 - RNA, 19 nt, Homo sapiens
  misc_RNA (1)...(19): siRNA sense strand
gaugaugacuuugacaugu

SEQ ID NO: 1317447 - RNA, 19 nt, Homo sapiens
  misc_RNA (1)...(19): siRNA sense strand
gcagaucaaccaagauuug

SEQ ID NO: 1317448 - RNA, 19 nt, Homo sapiens
  misc_RNA (1)...(19): siRNA sense strand
gagcagaucaaccaagauu

SEQ ID NO: 1317449 - RNA, 19 nt, Homo sapiens
  misc_RNA (1)...(19): siRNA sense strand
caaccaagauuugaacauc

SEQ ID NO: 1317450 - RNA, 19 nt, Homo sapiens
  misc_RNA (1)...(19): siRNA sense strand
gaccagagcccugaugaga

SEQ ID NO: 1317451 - RNA, 19 nt, Homo sapiens
  misc_RNA (1)...(19): siRNA sense strand
ccagagcccugaugagaag

SEQ ID NO: 1317452 - RNA, 19 nt, Homo sapiens
  misc_RNA (1)...(19): siRNA sense strand
acuuugacaugucuagaua

SEQ ID NO: 1317453 - RNA, 19 nt, Homo sapiens
  misc_RNA (1)...(19): siRNA sense strand
caagaagaacaaugucaug

SEQ ID NO: 1317454 - RNA, 19 nt, Homo sapiens
  misc_RNA (1)...(19): siRNA sense strand
aaaggcuacuccucacuug

SEQ ID NO: 1317455 - RNA, 19 nt, Homo sapiens
  misc_RNA (1)...(19): siRNA sense strand
cugagcagaucaaccaaga

SEQ ID NO: 1317456 - RNA, 19 nt, Homo sapiens
  misc_RNA (1)...(19): siRNA sense strand
uaaaggcuacuccucacuu

SEQ ID NO: 1317457 - RNA, 19 nt, Homo sapiens
  misc_RNA (1)...(19): siRNA sense strand
acacggacagcgaugauga

SEQ ID NO: 1317458 - RNA, 19 nt, Homo sapiens
  misc_RNA (1)...(19): siRNA sense strand
ccaagaagaacaaugucau

SEQ ID NO: 1317459 - RNA, 19 nt, Homo sapiens
  misc_RNA (1)...(19): siRNA sense strand
ucaaccagcaacccaagaa

SEQ ID NO: 1317460 - RNA, 19 nt, Homo sapiens
  misc_RNA (1)...(19): siRNA sense strand
ggacggcuaccgguuagau

SEQ ID NO: 1317461 - RNA, 19 nt, Homo sapiens
  misc_RNA (1)...(19): siRNA sense strand
gcgaugaugacuuugacau

SEQ ID NO: 1317462 - RNA, 19 nt, Homo sapiens
  misc_RNA (1)...(19): siRNA sense strand
caagaagacuacacuuuaa

SEQ ID NO: 1317463 - RNA, 19 nt, Homo sapiens
  misc_RNA (1)...(19): siRNA sense strand
gaaaauggcuuuggaaauu

SEQ ID NO: 1317464 - RNA, 19 nt, Homo sapiens
  misc_RNA (1)...(19): siRNA sense strand
ggaggaggauggacuguaa

SEQ ID NO: 1317465 - RNA, 19 nt, Homo sapiens
  misc_RNA (1)...(19): siRNA sense strand
gaaguccaguuccuugaua

SEQ ID NO: 1317466 - RNA, 19 nt, Homo sapiens
  misc_RNA (1)...(19): siRNA sense strand
ggacagagaucaugacaac

SEQ ID NO: 1317467 - RNA, 19 nt, Homo sapiens
  misc_RNA (1)...(19): siRNA sense strand
gcaaagguguucaguuuca

SEQ ID NO: 1317468 - RNA, 19 nt, Homo sapiens
  misc_RNA (1)...(19): siRNA sense strand
ucaagaagacuacacuuua

SEQ ID NO: 1317469 - RNA, 19 nt, Homo sapiens
  misc_RNA (1)...(19): siRNA sense strand
gguauaagcucaguggauu

SEQ ID NO: 1317470 - RNA, 19 nt, Homo sapiens
  misc_RNA (1)...(19): siRNA sense strand
gaacugcgcagaagaagau

SEQ ID NO: 1317471 - RNA, 19 nt, Homo sapiens
  misc_RNA (1)...(19): siRNA sense strand
gguauucucugaaaucugu

SEQ ID NO: 1317472 - RNA, 19 nt, Homo sapiens
  misc_RNA (1)...(19): siRNA sense strand
ugaaaucugugguuaugaa

SEQ ID NO: 1317473 - RNA, 19 nt, Homo sapiens
  misc_RNA (1)...(19): siRNA sense strand
gcagauuguucagagauuu

SEQ ID NO: 1317474 - RNA, 19 nt, Homo sapiens
  misc_RNA (1)...(19): siRNA sense strand
guucagagauuuucaauga

SEQ ID NO: 1317475 - RNA, 19 nt, Homo sapiens
  misc_RNA (1)...(19): siRNA sense strand
gaagggaacugcgcagaag

SEQ ID NO: 1317476 - RNA, 19 nt, Homo sapiens
  misc_RNA (1)...(19): siRNA sense strand
ccagagcccagcagaauuu

SEQ ID NO: 1317477 - RNA, 19 nt, Homo sapiens
  misc_RNA (1)...(19): siRNA sense strand
gauaaaggagaugagaaua

SEQ ID NO: 1317478 - RNA, 19 nt, Homo sapiens
  misc_RNA (1)...(19): siRNA sense strand
gaggauggacuguaauuca

SEQ ID NO: 1317479 - RNA, 19 nt, Homo sapiens
  misc_RNA (1)...(19): siRNA sense strand
cagucuggcuggugguuua

SEQ ID NO: 1317480 - RNA, 19 nt, Homo sapiens
  misc_RNA (1)...(19): siRNA sense strand
acagagaucaugacaacua

SEQ ID NO: 1317481 - RNA, 19 nt, Homo sapiens
  misc_RNA (1)...(19): siRNA sense strand
gcuagucaccaaagaauga

SEQ ID NO: 1317482 - RNA, 19 nt, Homo sapiens
  misc_RNA (1)...(19): siRNA sense strand
uaaaggagaugagaauacu

SEQ ID NO: 1317483 - RNA, 19 nt, Homo sapiens
  misc_RNA (1)...(19): siRNA sense strand
ucucugaaaucugugguua

SEQ ID NO: 1317484 - RNA, 19 nt, Homo sapiens
  misc_RNA (1)...(19): siRNA sense strand
gaggauggaaagacuauga

SEQ ID NO: 1317485 - RNA, 19 nt, Homo sapiens
  misc_RNA (1)...(19): siRNA sense strand
gaaaucugugguuaugaaa

SEQ ID NO: 1317486 - RNA, 19 nt, Homo sapiens
  misc_RNA (1)...(19): siRNA sense strand
uggcauggguggugguauu

SEQ ID NO: 1317487 - RNA, 19 nt, Homo sapiens
  misc_RNA (1)...(19): siRNA sense strand
guggugguauucucugaaa

SEQ ID NO: 1317488 - RNA, 19 nt, Homo sapiens
  misc_RNA (1)...(19): siRNA sense strand
ugagaauacugucguugau

SEQ ID NO: 1317489 - RNA, 19 nt, Homo sapiens
  misc_RNA (1)...(19): siRNA sense strand
ucugaaaucugugguuaug

SEQ ID NO: 1317490 - RNA, 19 nt, Homo sapiens
  misc_RNA (1)...(19): siRNA sense strand
aaaccugaaugguguauac

SEQ ID NO: 1317491 - RNA, 19 nt, Homo sapiens
  misc_RNA (1)...(19): siRNA sense strand
cagagaucaugacaacuau

SEQ ID NO: 1317492 - RNA, 19 nt, Homo sapiens
  misc_RNA (1)...(19): siRNA sense strand
gguguucaguuucauccuu

SEQ ID NO: 1317493 - RNA, 19 nt, Homo sapiens
  misc_RNA (1)...(19): siRNA sense strand
aaauagccguuaugcacaa

SEQ ID NO: 1317494 - RNA, 19 nt, Homo sapiens
  misc_RNA (1)...(19): siRNA sense strand
ggagaaugaaguccaguuc

SEQ ID NO: 1317495 - RNA, 19 nt, Homo sapiens
  misc_RNA (1)...(19): siRNA sense strand
gaagcaagaggcaguaugc

SEQ ID NO: 1317496 - RNA, 19 nt, Homo sapiens
  misc_RNA (1)...(19): siRNA sense strand
gaggcaguaugcagauugu

SEQ ID NO: 1317497 - RNA, 19 nt, Homo sapiens
  misc_RNA (1)...(19): siRNA sense strand
ggauggaaagacuaugaaa

SEQ ID NO: 1317498 - RNA, 19 nt, Homo sapiens
  misc_RNA (1)...(19): siRNA sense strand
gcaguaugcagauuguuca

SEQ ID NO: 1317499 - RNA, 19 nt, Homo sapiens
  misc_RNA (1)...(19): siRNA sense strand
agaauacugucguugaucu

SEQ ID NO: 1317500 - RNA, 19 nt, Homo sapiens
  misc_RNA (1)...(19): siRNA sense strand
ugauaaaggagaugagaau

SEQ ID NO: 1317501 - RNA, 19 nt, Homo sapiens
  misc_RNA (1)...(19): siRNA sense strand
gaaugaaguccaguuccuu

SEQ ID NO: 1317502 - RNA, 19 nt, Homo sapiens
  misc_RNA (1)...(19): siRNA sense strand
ggaagcaagaggcaguaug

SEQ ID NO: 1317503 - RNA, 19 nt, Homo sapiens
  misc_RNA (1)...(19): siRNA sense strand
gaauuucuacgaguugaau

SEQ ID NO: 1317504 - RNA, 19 nt, Homo sapiens
  misc_RNA (1)...(19): siRNA sense strand
uagccguuaugcacaauau

SEQ ID NO: 1317505 - RNA, 19 nt, Homo sapiens
  misc_RNA (1)...(19): siRNA sense strand
gggcuagucaccaaagaau

SEQ ID NO: 1317506 - RNA, 19 nt, Homo sapiens
  misc_RNA (1)...(19): siRNA sense strand
gaauuucaaaguuggagau

SEQ ID NO: 1317507 - RNA, 19 nt, Homo sapiens
  misc_RNA (1)...(19): siRNA sense strand
guauaagcucaguggauuu

SEQ ID NO: 1317508 - RNA, 19 nt, Homo sapiens
  misc_RNA (1)...(19): siRNA sense strand
gcacgugggacagagauca

SEQ ID NO: 1317509 - RNA, 19 nt, Homo sapiens
  misc_RNA (1)...(19): siRNA sense strand
ggauggacuguaauucaga

SEQ ID NO: 1317510 - RNA, 19 nt, Homo sapiens
  misc_RNA (1)...(19): siRNA sense strand
ggaacugcgcagaagaaga

SEQ ID NO: 1317511 - RNA, 19 nt, Homo sapiens
  misc_RNA (1)...(19): siRNA sense strand
ucagagauuuucaaugaug

SEQ ID NO: 1317512 - RNA, 19 nt, Homo sapiens
  misc_RNA (1)...(19): siRNA sense strand
ggugguauucucugaaauc

SEQ ID NO: 1317513 - RNA, 19 nt, Homo sapiens
  misc_RNA (1)...(19): siRNA sense strand
ucaaacagcaacaggucaa

SEQ ID NO: 1317514 - RNA, 19 nt, Homo sapiens
  misc_RNA (1)...(19): siRNA sense strand
uaacagaggauggaaagac

SEQ ID NO: 1317515 - RNA, 19 nt, Homo sapiens
  misc_RNA (1)...(19): siRNA sense strand
agcaacaggucaagaucaa

SEQ ID NO: 1317516 - RNA, 19 nt, Homo sapiens
  misc_RNA (1)...(19): siRNA sense strand
ccugaaugguguauacuac

SEQ ID NO: 1317517 - RNA, 19 nt, Homo sapiens
  misc_RNA (1)...(19): siRNA sense strand
ugaagggaacugcgcagaa

SEQ ID NO: 1317518 - RNA, 19 nt, Homo sapiens
  misc_RNA (1)...(19): siRNA sense strand
caagaggcaguaugcagau

SEQ ID NO: 1317519 - RNA, 19 nt, Homo sapiens
  misc_RNA (1)...(19): siRNA sense strand
ggguggugguauucucuga

SEQ ID NO: 1317520 - RNA, 19 nt, Homo sapiens
  misc_RNA (1)...(19): siRNA sense strand
ucuacgaguugaauauugg

SEQ ID NO: 1317521 - RNA, 19 nt, Homo sapiens
  misc_RNA (1)...(19): siRNA sense strand
caaagguguucaguuucau

SEQ ID NO: 1317522 - RNA, 19 nt, Homo sapiens
  misc_RNA (1)...(19): siRNA sense strand
cagcaacaggucaagauca

SEQ ID NO: 1317523 - RNA, 19 nt, Homo sapiens
  misc_RNA (1)...(19): siRNA sense strand
gaauacugucguugaucuu

SEQ ID NO: 1317524 - RNA, 19 nt, Homo sapiens
  misc_RNA (1)...(19): siRNA sense strand
cucaagaagacuacacuuu

SEQ ID NO: 1317525 - RNA, 19 nt, Homo sapiens
  misc_RNA (1)...(19): siRNA sense strand
cagaggauggaaagacuau

SEQ ID NO: 1317526 - RNA, 19 nt, Homo sapiens
  misc_RNA (1)...(19): siRNA sense strand
gagaauacugucguugauc

SEQ ID NO: 1317527 - RNA, 19 nt, Homo sapiens
  misc_RNA (1)...(19): siRNA sense strand
aaguccaguuccuugauaa

SEQ ID NO: 1317528 - RNA, 19 nt, Homo sapiens
  misc_RNA (1)...(19): siRNA sense strand
ggaaagacuaugaaaaugg

SEQ ID NO: 1317529 - RNA, 19 nt, Homo sapiens
  misc_RNA (1)...(19): siRNA sense strand
ggcaguaugcagauuguuc

SEQ ID NO: 1317530 - RNA, 19 nt, Homo sapiens
  misc_RNA (1)...(19): siRNA sense strand
uaaaacagacaaugggauu

SEQ ID NO: 1317531 - RNA, 19 nt, Homo sapiens
  misc_RNA (1)...(19): siRNA sense strand
ggaggauggacuguaauuc

SEQ ID NO: 1317532 - RNA, 19 nt, Homo sapiens
  misc_RNA (1)...(19): siRNA sense strand
ggguauaagcucaguggau

SEQ ID NO: 1317533 - RNA, 19 nt, Homo sapiens
  misc_RNA (1)...(19): siRNA sense strand
agaaugaaguccaguuccu

SEQ ID NO: 1317534 - RNA, 19 nt, Homo sapiens
  misc_RNA (1)...(19): siRNA sense strand
gcaaaccugaaugguguau

SEQ ID NO: 1317535 - RNA, 19 nt, Homo sapiens
  misc_RNA (1)...(19): siRNA sense strand
ugcagauuguucagagauu

SEQ ID NO: 1317536 - RNA, 19 nt, Homo sapiens
  misc_RNA (1)...(19): siRNA sense strand
agaugagaauacugucguu

SEQ ID NO: 1317537 - RNA, 19 nt, Homo sapiens
  misc_RNA (1)...(19): siRNA sense strand
gauggaaagacuaugaaaa

SEQ ID NO: 1317538 - RNA, 19 nt, Homo sapiens
  misc_RNA (1)...(19): siRNA sense strand
aaacagcaacaggucaaga

SEQ ID NO: 1317539 - RNA, 19 nt, Homo sapiens
  misc_RNA (1)...(19): siRNA sense strand
ugauggcagugaaaacuuu

SEQ ID NO: 1317540 - RNA, 19 nt, Homo sapiens
  misc_RNA (1)...(19): siRNA sense strand
caagaagacuacacuuuaa

SEQ ID NO: 1317541 - RNA, 19 nt, Homo sapiens
  misc_RNA (1)...(19): siRNA sense strand
gaaaauggcuuuggaaauu

SEQ ID NO: 1317542 - RNA, 19 nt, Homo sapiens
  misc_RNA (1)...(19): siRNA sense strand
ggaggaggauggacuguaa

SEQ ID NO: 1317543 - RNA, 19 nt, Homo sapiens
  misc_RNA (1)...(19): siRNA sense strand
gaaguccaguuccuugaua

SEQ ID NO: 1317544 - RNA, 19 nt, Homo sapiens
  misc_RNA (1)...(19): siRNA sense strand
ggacagagaucaugacaac

SEQ ID NO: 1317545 - RNA, 19 nt, Homo sapiens
  misc_RNA (1)...(19): siRNA sense strand
gcaaagguguucaguuuca

SEQ ID NO: 1317546 - RNA, 19 nt, Homo sapiens
  misc_RNA (1)...(19): siRNA sense strand
ucaagaagacuacacuuua

SEQ ID NO: 1317547 - RNA, 19 nt, Homo sapiens
  misc_RNA (1)...(19): siRNA sense strand
gguauaagcucaguggauu

SEQ ID NO: 1317548 - RNA, 19 nt, Homo sapiens
  misc_RNA (1)...(19): siRNA sense strand
gaacugcgcagaagaagau

SEQ ID NO: 1317549 - RNA, 19 nt, Homo sapiens
  misc_RNA (1)...(19): siRNA sense strand
gguauucucugaaaucugu

SEQ ID NO: 1317550 - RNA, 19 nt, Homo sapiens
  misc_RNA (1)...(19): siRNA sense strand
ugaaaucugugguuaugaa

SEQ ID NO: 1317551 - RNA, 19 nt, Homo sapiens
  misc_RNA (1)...(19): siRNA sense strand
gcagauuguucagagauuu

SEQ ID NO: 1317552 - RNA, 19 nt, Homo sapiens
  misc_RNA (1)...(19): siRNA sense strand
guucagagauuuucaauga

SEQ ID NO: 1317553 - RNA, 19 nt, Homo sapiens
  misc_RNA (1)...(19): siRNA sense strand
gaagggaacugcgcagaag

SEQ ID NO: 1317554 - RNA, 19 nt, Homo sapiens
  misc_RNA (1)...(19): siRNA sense strand
ccagagcccagcagaauuu

SEQ ID NO: 1317555 - RNA, 19 nt, Homo sapiens
  misc_RNA (1)...(19): siRNA sense strand
gauaaaggagaugagaaua

SEQ ID NO: 1317556 - RNA, 19 nt, Homo sapiens
  misc_RNA (1)...(19): siRNA sense strand
gaggauggacuguaauuca

SEQ ID NO: 1317557 - RNA, 19 nt, Homo sapiens
  misc_RNA (1)...(19): siRNA sense strand
cagucuggcuggugguuua

SEQ ID NO: 1317558 - RNA, 19 nt, Homo sapiens
  misc_RNA (1)...(19): siRNA sense strand
acagagaucaugacaacua

SEQ ID NO: 1317559 - RNA, 19 nt, Homo sapiens
  misc_RNA (1)...(19): siRNA sense strand
gcuagucaccaaagaauga

SEQ ID NO: 1317560 - RNA, 19 nt, Homo sapiens
  misc_RNA (1)...(19): siRNA sense strand
uaaaggagaugagaauacu

SEQ ID NO: 1317561 - RNA, 19 nt, Homo sapiens
  misc_RNA (1)...(19): siRNA sense strand
ucucugaaaucugugguua

SEQ ID NO: 1317562 - RNA, 19 nt, Homo sapiens
  misc_RNA (1)...(19): siRNA sense strand
gaggauggaaagacuauga

SEQ ID NO: 1317563 - RNA, 19 nt, Homo sapiens
  misc_RNA (1)...(19): siRNA sense strand
gaaaucugugguuaugaaa

SEQ ID NO: 1317564 - RNA, 19 nt, Homo sapiens
  misc_RNA (1)...(19): siRNA sense strand
uggcauggguggugguauu

SEQ ID NO: 1317565 - RNA, 19 nt, Homo sapiens
  misc_RNA (1)...(19): siRNA sense strand
guggugguauucucugaaa

SEQ ID NO: 1317566 - RNA, 19 nt, Homo sapiens
  misc_RNA (1)...(19): siRNA sense strand
ugagaauacugucguugau

SEQ ID NO: 1317567 - RNA, 19 nt, Homo sapiens
  misc_RNA (1)...(19): siRNA sense strand
ucugaaaucugugguuaug

SEQ ID NO: 1317568 - RNA, 19 nt, Homo sapiens
  misc_RNA (1)...(19): siRNA sense strand
aaaccugaaugguguauac

SEQ ID NO: 1317569 - RNA, 19 nt, Homo sapiens
  misc_RNA (1)...(19): siRNA sense strand
cagagaucaugacaacuau

SEQ ID NO: 1317570 - RNA, 19 nt, Homo sapiens
  misc_RNA (1)...(19): siRNA sense strand
gguguucaguuucauccuu

SEQ ID NO: 1317571 - RNA, 19 nt, Homo sapiens
  misc_RNA (1)...(19): siRNA sense strand
aaauagccguuaugcacaa

SEQ ID NO: 1317572 - RNA, 19 nt, Homo sapiens
  misc_RNA (1)...(19): siRNA sense strand
ggagaaugaaguccaguuc

SEQ ID NO: 1317573 - RNA, 19 nt, Homo sapiens
  misc_RNA (1)...(19): siRNA sense strand
gaagcaagaggcaguaugc

SEQ ID NO: 1317574 - RNA, 19 nt, Homo sapiens
  misc_RNA (1)...(19): siRNA sense strand
gaggcaguaugcagauugu

SEQ ID NO: 1317575 - RNA, 19 nt, Homo sapiens
  misc_RNA (1)...(19): siRNA sense strand
ggauggaaagacuaugaaa

SEQ ID NO: 1317576 - RNA, 19 nt, Homo sapiens
  misc_RNA (1)...(19): siRNA sense strand
gcaguaugcagauuguuca

SEQ ID NO: 1317577 - RNA, 19 nt, Homo sapiens
  misc_RNA (1)...(19): siRNA sense strand
agaauacugucguugaucu

SEQ ID NO: 1317578 - RNA, 19 nt, Homo sapiens
  misc_RNA (1)...(19): siRNA sense strand
ugauaaaggagaugagaau

SEQ ID NO: 1317579 - RNA, 19 nt, Homo sapiens
  misc_RNA (1)...(19): siRNA sense strand
gaaugaaguccaguuccuu

SEQ ID NO: 1317580 - RNA, 19 nt, Homo sapiens
  misc_RNA (1)...(19): siRNA sense strand
ggaagcaagaggcaguaug

SEQ ID NO: 1317581 - RNA, 19 nt, Homo sapiens
  misc_RNA (1)...(19): siRNA sense strand
gaauuucuacgaguugaau

SEQ ID NO: 1317582 - RNA, 19 nt, Homo sapiens
  misc_RNA (1)...(19): siRNA sense strand
uagccguuaugcacaauau

SEQ ID NO: 1317583 - RNA, 19 nt, Homo sapiens
  misc_RNA (1)...(19): siRNA sense strand
gggcuagucaccaaagaau

SEQ ID NO: 1317584 - RNA, 19 nt, Homo sapiens
  misc_RNA (1)...(19): siRNA sense strand
gaauuucaaaguuggagau

SEQ ID NO: 1317585 - RNA, 19 nt, Homo sapiens
  misc_RNA (1)...(19): siRNA sense strand
guauaagcucaguggauuu

SEQ ID NO: 1317586 - RNA, 19 nt, Homo sapiens
  misc_RNA (1)...(19): siRNA sense strand
gcacgugggacagagauca

SEQ ID NO: 1317587 - RNA, 19 nt, Homo sapiens
  misc_RNA (1)...(19): siRNA sense strand
ggauggacuguaauucaga

SEQ ID NO: 1317588 - RNA, 19 nt, Homo sapiens
  misc_RNA (1)...(19): siRNA sense strand
ggaacugcgcagaagaaga

SEQ ID NO: 1317589 - RNA, 19 nt, Homo sapiens
  misc_RNA (1)...(19): siRNA sense strand
ucagagauuuucaaugaug

SEQ ID NO: 1317590 - RNA, 19 nt, Homo sapiens
  misc_RNA (1)...(19): siRNA sense strand
ggugguauucucugaaauc

SEQ ID NO: 1317591 - RNA, 19 nt, Homo sapiens
  misc_RNA (1)...(19): siRNA sense strand
ucaaacagcaacaggucaa

SEQ ID NO: 1317592 - RNA, 19 nt, Homo sapiens
  misc_RNA (1)...(19): siRNA sense strand
uaacagaggauggaaagac

SEQ ID NO: 1317593 - RNA, 19 nt, Homo sapiens
  misc_RNA (1)...(19): siRNA sense strand
agcaacaggucaagaucaa

SEQ ID NO: 1317594 - RNA, 19 nt, Homo sapiens
  misc_RNA (1)...(19): siRNA sense strand
ccugaaugguguauacuac

SEQ ID NO: 1317595 - RNA, 19 nt, Homo sapiens
  misc_RNA (1)...(19): siRNA sense strand
ugaagggaacugcgcagaa

SEQ ID NO: 1317596 - RNA, 19 nt, Homo sapiens
  misc_RNA (1)...(19): siRNA sense strand
caagaggcaguaugcagau

SEQ ID NO: 1317597 - RNA, 19 nt, Homo sapiens
  misc_RNA (1)...(19): siRNA sense strand
ggguggugguauucucuga

SEQ ID NO: 1317598 - RNA, 19 nt, Homo sapiens
  misc_RNA (1)...(19): siRNA sense strand
ucuacgaguugaauauugg

SEQ ID NO: 1317599 - RNA, 19 nt, Homo sapiens
  misc_RNA (1)...(19): siRNA sense strand
caaagguguucaguuucau

SEQ ID NO: 1317600 - RNA, 19 nt, Homo sapiens
  misc_RNA (1)...(19): siRNA sense strand
cagcaacaggucaagauca

SEQ ID NO: 1317601 - RNA, 19 nt, Homo sapiens
  misc_RNA (1)...(19): siRNA sense strand
gaauacugucguugaucuu

SEQ ID NO: 1317602 - RNA, 19 nt, Homo sapiens
  misc_RNA (1)...(19): siRNA sense strand
cucaagaagacuacacuuu

SEQ ID NO: 1317603 - RNA, 19 nt, Homo sapiens
  misc_RNA (1)...(19): siRNA sense strand
cagaggauggaaagacuau

SEQ ID NO: 1317604 - RNA, 19 nt, Homo sapiens
  misc_RNA (1)...(19): siRNA sense strand
gagaauacugucguugauc

SEQ ID NO: 1317605 - RNA, 19 nt, Homo sapiens
  misc_RNA (1)...(19): siRNA sense strand
aaguccaguuccuugauaa

SEQ ID NO: 1317606 - RNA, 19 nt, Homo sapiens
  misc_RNA (1)...(19): siRNA sense strand
ggaaagacuaugaaaaugg

SEQ ID NO: 1317607 - RNA, 19 nt, Homo sapiens
  misc_RNA (1)...(19): siRNA sense strand
ggcaguaugcagauuguuc

SEQ ID NO: 1317608 - RNA, 19 nt, Homo sapiens
  misc_RNA (1)...(19): siRNA sense strand
uaaaacagacaaugggauu

SEQ ID NO: 1317609 - RNA, 19 nt, Homo sapiens
  misc_RNA (1)...(19): siRNA sense strand
ggaggauggacuguaauuc

SEQ ID NO: 1317610 - RNA, 19 nt, Homo sapiens
  misc_RNA (1)...(19): siRNA sense strand
ggguauaagcucaguggau

SEQ ID NO: 1317611 - RNA, 19 nt, Homo sapiens
  misc_RNA (1)...(19): siRNA sense strand
agaaugaaguccaguuccu

SEQ ID NO: 1317612 - RNA, 19 nt, Homo sapiens
  misc_RNA (1)...(19): siRNA sense strand
gcaaaccugaaugguguau

SEQ ID NO: 1317613 - RNA, 19 nt, Homo sapiens
  misc_RNA (1)...(19): siRNA sense strand
ugcagauuguucagagauu

SEQ ID NO: 1317614 - RNA, 19 nt, Homo sapiens
  misc_RNA (1)...(19): siRNA sense strand
agaugagaauacugucguu

SEQ ID NO: 1317615 - RNA, 19 nt, Homo sapiens
  misc_RNA (1)...(19): siRNA sense strand
gauggaaagacuaugaaaa

SEQ ID NO: 1317616 - RNA, 19 nt, Homo sapiens
  misc_RNA (1)...(19): siRNA sense strand
aaacagcaacaggucaaga

SEQ ID NO: 1317617 - RNA, 19 nt, Homo sapiens
  misc_RNA (1)...(19): siRNA sense strand
ugauggcagugaaaacuuu

SEQ ID NO: 1317618 - RNA, 19 nt, Homo sapiens
  misc_RNA (1)...(19): siRNA sense strand
gcaauuacuuucugguuaa

SEQ ID NO: 1317619 - RNA, 19 nt, Homo sapiens
  misc_RNA (1)...(19): siRNA sense strand
caaagaggauuucaacaga

SEQ ID NO: 1317620 - RNA, 19 nt, Homo sapiens
  misc_RNA (1)...(19): siRNA sense strand
gcaaguguuucuuaacuga

SEQ ID NO: 1317621 - RNA, 19 nt, Homo sapiens
  misc_RNA (1)...(19): siRNA sense strand
ggauuaacgucucgcaauu

SEQ ID NO: 1317622 - RNA, 19 nt, Homo sapiens
  misc_RNA (1)...(19): siRNA sense strand
gcaccagccucuagucuca

SEQ ID NO: 1317623 - RNA, 19 nt, Homo sapiens
  misc_RNA (1)...(19): siRNA sense strand
gagauccgguguccuuauu

SEQ ID NO: 1317624 - RNA, 19 nt, Homo sapiens
  misc_RNA (1)...(19): siRNA sense strand
gaaacugcuuuauccaaau

SEQ ID NO: 1317625 - RNA, 19 nt, Homo sapiens
  misc_RNA (1)...(19): siRNA sense strand
auacgaaacucaaagagaa

SEQ ID NO: 1317626 - RNA, 19 nt, Homo sapiens
  misc_RNA (1)...(19): siRNA sense strand
caacagaaacugcuuuauc

SEQ ID NO: 1317627 - RNA, 19 nt, Homo sapiens
  misc_RNA (1)...(19): siRNA sense strand
caucuacaaugcggauuua

SEQ ID NO: 1317628 - RNA, 19 nt, Homo sapiens
  misc_RNA (1)...(19): siRNA sense strand
gcaugaaggagucacauuu

SEQ ID NO: 1317629 - RNA, 19 nt, Homo sapiens
  misc_RNA (1)...(19): siRNA sense strand
agaaacugcuuuauccaaa

SEQ ID NO: 1317630 - RNA, 19 nt, Homo sapiens
  misc_RNA (1)...(19): siRNA sense strand
cgcaauuacuuucugguua

SEQ ID NO: 1317631 - RNA, 19 nt, Homo sapiens
  misc_RNA (1)...(19): siRNA sense strand
ggaaccagccgagaaauug

SEQ ID NO: 1317632 - RNA, 19 nt, Homo sapiens
  misc_RNA (1)...(19): siRNA sense strand
gaaaucggaucugcgaaca

SEQ ID NO: 1317633 - RNA, 19 nt, Homo sapiens
  misc_RNA (1)...(19): siRNA sense strand
gaacccaggcucaguaaca

SEQ ID NO: 1317634 - RNA, 19 nt, Homo sapiens
  misc_RNA (1)...(19): siRNA sense strand
gauuaacgucucgcaauua

SEQ ID NO: 1317635 - RNA, 19 nt, Homo sapiens
  misc_RNA (1)...(19): siRNA sense strand
gaagaacagagucguggaa

SEQ ID NO: 1317636 - RNA, 19 nt, Homo sapiens
  misc_RNA (1)...(19): siRNA sense strand
gaauuucuccuguuucauc

SEQ ID NO: 1317637 - RNA, 19 nt, Homo sapiens
  misc_RNA (1)...(19): siRNA sense strand
aaagaggauuucaacagaa

SEQ ID NO: 1317638 - RNA, 19 nt, Homo sapiens
  misc_RNA (1)...(19): siRNA sense strand
guaccgcugcucagaauuu

SEQ ID NO: 1317639 - RNA, 19 nt, Homo sapiens
  misc_RNA (1)...(19): siRNA sense strand
ccaggacgaugaauuuaag

SEQ ID NO: 1317640 - RNA, 19 nt, Homo sapiens
  misc_RNA (1)...(19): siRNA sense strand
ccaauucuuugauucacuu

SEQ ID NO: 1317641 - RNA, 19 nt, Homo sapiens
  misc_RNA (1)...(19): siRNA sense strand
ccgguguccuuauuacaua

SEQ ID NO: 1317642 - RNA, 19 nt, Homo sapiens
  misc_RNA (1)...(19): siRNA sense strand
cagcaaguguuucuuaacu

SEQ ID NO: 1317643 - RNA, 19 nt, Homo sapiens
  misc_RNA (1)...(19): siRNA sense strand
uaacggaaccagccgagaa

SEQ ID NO: 1317644 - RNA, 19 nt, Homo sapiens
  misc_RNA (1)...(19): siRNA sense strand
cuacaaugcggauuuaaug

SEQ ID NO: 1317645 - RNA, 19 nt, Homo sapiens
  misc_RNA (1)...(19): siRNA sense strand
uaacgucucgcaauuacuu

SEQ ID NO: 1317646 - RNA, 19 nt, Homo sapiens
  misc_RNA (1)...(19): siRNA sense strand
cccgugacguccaguauuu

SEQ ID NO: 1317647 - RNA, 19 nt, Homo sapiens
  misc_RNA (1)...(19): siRNA sense strand
ggcauccaauucuuugauu

SEQ ID NO: 1317648 - RNA, 19 nt, Homo sapiens
  misc_RNA (1)...(19): siRNA sense strand
gaaauuugucugcaugaag

SEQ ID NO: 1317649 - RNA, 19 nt, Homo sapiens
  misc_RNA (1)...(19): siRNA sense strand
gaaaggcuaccgcgaagag

SEQ ID NO: 1317650 - RNA, 19 nt, Homo sapiens
  misc_RNA (1)...(19): siRNA sense strand
ggguaccgcugcucagaau

SEQ ID NO: 1317651 - RNA, 19 nt, Homo sapiens
  misc_RNA (1)...(19): siRNA sense strand
ugaaauuugucugcaugaa

SEQ ID NO: 1317652 - RNA, 19 nt, Homo sapiens
  misc_RNA (1)...(19): siRNA sense strand
gcauccaauucuuugauuc

SEQ ID NO: 1317653 - RNA, 19 nt, Homo sapiens
  misc_RNA (1)...(19): siRNA sense strand
caagccuucugcucuguga

SEQ ID NO: 1317654 - RNA, 19 nt, Homo sapiens
  misc_RNA (1)...(19): siRNA sense strand
gauccgguguccuuauuac

SEQ ID NO: 1317655 - RNA, 19 nt, Homo sapiens
  misc_RNA (1)...(19): siRNA sense strand
cgugaauacuagucaaaga

SEQ ID NO: 1317656 - RNA, 19 nt, Homo sapiens
  misc_RNA (1)...(19): siRNA sense strand
cuucagcaaguguuucuua

SEQ ID NO: 1317657 - RNA, 19 nt, Homo sapiens
  misc_RNA (1)...(19): siRNA sense strand
gaugucaccuggauaaccu

SEQ ID NO: 1317658 - RNA, 19 nt, Homo sapiens
  misc_RNA (1)...(19): siRNA sense strand
caugaaggagucacauuug

SEQ ID NO: 1317659 - RNA, 19 nt, Homo sapiens
  misc_RNA (1)...(19): siRNA sense strand
ucaccuggauaaccuguca

SEQ ID NO: 1317660 - RNA, 19 nt, Homo sapiens
  misc_RNA (1)...(19): siRNA sense strand
ggagauccgguguccuuau

SEQ ID NO: 1317661 - RNA, 19 nt, Homo sapiens
  misc_RNA (1)...(19): siRNA sense strand
ucaaagaggauuucaacag

SEQ ID NO: 1317662 - RNA, 19 nt, Homo sapiens
  misc_RNA (1)...(19): siRNA sense strand
guacauacgaaacucaaag

SEQ ID NO: 1317663 - RNA, 19 nt, Homo sapiens
  misc_RNA (1)...(19): siRNA sense strand
augaaggagucacauuuga

SEQ ID NO: 1317664 - RNA, 19 nt, Homo sapiens
  misc_RNA (1)...(19): siRNA sense strand
cagaaacugcuuuauccaa

SEQ ID NO: 1317665 - RNA, 19 nt, Homo sapiens
  misc_RNA (1)...(19): siRNA sense strand
caaugcggauuuaaugaac

SEQ ID NO: 1317666 - RNA, 19 nt, Homo sapiens
  misc_RNA (1)...(19): siRNA sense strand
gaucaucugggaggaauuc

SEQ ID NO: 1317667 - RNA, 19 nt, Homo sapiens
  misc_RNA (1)...(19): siRNA sense strand
cauacgaaacucaaagaga

SEQ ID NO: 1317668 - RNA, 19 nt, Homo sapiens
  misc_RNA (1)...(19): siRNA sense strand
acaaugcggauuuaaugaa

SEQ ID NO: 1317669 - RNA, 19 nt, Homo sapiens
  misc_RNA (1)...(19): siRNA sense strand
ucacgugaauacuagucaa

SEQ ID NO: 1317670 - RNA, 19 nt, Homo sapiens
  misc_RNA (1)...(19): siRNA sense strand
caaccuucagcaaguguuu

SEQ ID NO: 1317671 - RNA, 19 nt, Homo sapiens
  misc_RNA (1)...(19): siRNA sense strand
ggaauucaccccagaggaa

SEQ ID NO: 1317672 - RNA, 19 nt, Homo sapiens
  misc_RNA (1)...(19): siRNA sense strand
aacagaaacugcuuuaucc

SEQ ID NO: 1317673 - RNA, 19 nt, Homo sapiens
  misc_RNA (1)...(19): siRNA sense strand
gacaagccuucugcucugu

SEQ ID NO: 1317674 - RNA, 19 nt, Homo sapiens
  misc_RNA (1)...(19): siRNA sense strand
gaaccagccgagaaauugg

SEQ ID NO: 1317675 - RNA, 19 nt, Homo sapiens
  misc_RNA (1)...(19): siRNA sense strand
aaucggaucugcgaacagu

SEQ ID NO: 1317676 - RNA, 19 nt, Homo sapiens
  misc_RNA (1)...(19): siRNA sense strand
guggaacccaggcucagua

SEQ ID NO: 1317677 - RNA, 19 nt, Homo sapiens
  misc_RNA (1)...(19): siRNA sense strand
acacaaccuucagcaagug

SEQ ID NO: 1317678 - RNA, 19 nt, Homo sapiens
  misc_RNA (1)...(19): siRNA sense strand
ugggaugucaccuggauaa

SEQ ID NO: 1317679 - RNA, 19 nt, Homo sapiens
  misc_RNA (1)...(19): siRNA sense strand
uaacugacaagaagaacag

SEQ ID NO: 1317680 - RNA, 19 nt, Homo sapiens
  misc_RNA (1)...(19): siRNA sense strand
aacacaaccuucagcaagu

SEQ ID NO: 1317681 - RNA, 19 nt, Homo sapiens
  misc_RNA (1)...(19): siRNA sense strand
acuccaggacgaugaauuu

SEQ ID NO: 1317682 - RNA, 19 nt, Homo sapiens
  misc_RNA (1)...(19): siRNA sense strand
aagcugggacugccaagaa

SEQ ID NO: 1317683 - RNA, 19 nt, Homo sapiens
  misc_RNA (1)...(19): siRNA sense strand
uucagcaaguguuucuuaa

SEQ ID NO: 1317684 - RNA, 19 nt, Homo sapiens
  misc_RNA (1)...(19): siRNA sense strand
cggaaccagccgagaaauu

SEQ ID NO: 1317685 - RNA, 19 nt, Homo sapiens
  misc_RNA (1)...(19): siRNA sense strand
gcucaguaacaacgaaugu

SEQ ID NO: 1317686 - RNA, 19 nt, Homo sapiens
  misc_RNA (1)...(19): siRNA sense strand
gaggguaccgcugcucaga

SEQ ID NO: 1317687 - RNA, 19 nt, Homo sapiens
  misc_RNA (1)...(19): siRNA sense strand
cauccaauucuuugauuca

SEQ ID NO: 1317688 - RNA, 19 nt, Homo sapiens
  misc_RNA (1)...(19): siRNA sense strand
caagaaaacacaaccuuca

SEQ ID NO: 1317689 - RNA, 19 nt, Homo sapiens
  misc_RNA (1)...(19): siRNA sense strand
uacaaugcggauuuaauga

SEQ ID NO: 1317690 - RNA, 19 nt, Homo sapiens
  misc_RNA (1)...(19): siRNA sense strand
ggaaaggcuaccgcgaaga

SEQ ID NO: 1317691 - RNA, 19 nt, Homo sapiens
  misc_RNA (1)...(19): siRNA sense strand
gggagauccgguguccuua

SEQ ID NO: 1317692 - RNA, 19 nt, Homo sapiens
  misc_RNA (1)...(19): siRNA sense strand
gcggauuuaaugaacugua

SEQ ID NO: 1317693 - RNA, 19 nt, Homo sapiens
  misc_RNA (1)...(19): siRNA sense strand
uccaggacgaugaauuuaa

SEQ ID NO: 1317694 - RNA, 19 nt, Homo sapiens
  misc_RNA (1)...(19): siRNA sense strand
cggauuuaaugaacuguac

SEQ ID NO: 1317695 - RNA, 19 nt, Homo sapiens
  misc_RNA (1)...(19): siRNA sense strand
ucaucuacaaugcggauuu

SEQ ID NO: 1317696 - RNA, 19 nt, Homo sapiens
  misc_RNA (1)...(19): siRNA sense strand
ugugggaugucaccuggau

SEQ ID NO: 1317697 - RNA, 19 nt, Homo sapiens
  misc_RNA (1)...(19): siRNA sense strand
gcaauuacuuucugguuaa

SEQ ID NO: 1317698 - RNA, 19 nt, Homo sapiens
  misc_RNA (1)...(19): siRNA sense strand
caaagaggauuucaacaga

SEQ ID NO: 1317699 - RNA, 19 nt, Homo sapiens
  misc_RNA (1)...(19): siRNA sense strand
gcaaguguuucuuaacuga

SEQ ID NO: 1317700 - RNA, 19 nt, Homo sapiens
  misc_RNA (1)...(19): siRNA sense strand
ggauuaacgucucgcaauu

SEQ ID NO: 1317701 - RNA, 19 nt, Homo sapiens
  misc_RNA (1)...(19): siRNA sense strand
gcaccagccucuagucuca

SEQ ID NO: 1317702 - RNA, 19 nt, Homo sapiens
  misc_RNA (1)...(19): siRNA sense strand
gagauccgguguccuuauu

SEQ ID NO: 1317703 - RNA, 19 nt, Homo sapiens
  misc_RNA (1)...(19): siRNA sense strand
gaaacugcuuuauccaaau

SEQ ID NO: 1317704 - RNA, 19 nt, Homo sapiens
  misc_RNA (1)...(19): siRNA sense strand
auacgaaacucaaagagaa

SEQ ID NO: 1317705 - RNA, 19 nt, Homo sapiens
  misc_RNA (1)...(19): siRNA sense strand
caacagaaacugcuuuauc

SEQ ID NO: 1317706 - RNA, 19 nt, Homo sapiens
  misc_RNA (1)...(19): siRNA sense strand
caucuacaaugcggauuua

SEQ ID NO: 1317707 - RNA, 19 nt, Homo sapiens
  misc_RNA (1)...(19): siRNA sense strand
gcaugaaggagucacauuu

SEQ ID NO: 1317708 - RNA, 19 nt, Homo sapiens
  misc_RNA (1)...(19): siRNA sense strand
agaaacugcuuuauccaaa

SEQ ID NO: 1317709 - RNA, 19 nt, Homo sapiens
  misc_RNA (1)...(19): siRNA sense strand
cgcaauuacuuucugguua

SEQ ID NO: 1317710 - RNA, 19 nt, Homo sapiens
  misc_RNA (1)...(19): siRNA sense strand
ggaaccagccgagaaauug

SEQ ID NO: 1317711 - RNA, 19 nt, Homo sapiens
  misc_RNA (1)...(19): siRNA sense strand
gaaaucggaucugcgaaca

SEQ ID NO: 1317712 - RNA, 19 nt, Homo sapiens
  misc_RNA (1)...(19): siRNA sense strand
gaacccaggcucaguaaca

SEQ ID NO: 1317713 - RNA, 19 nt, Homo sapiens
  misc_RNA (1)...(19): siRNA sense strand
gauuaacgucucgcaauua

SEQ ID NO: 1317714 - RNA, 19 nt, Homo sapiens
  misc_RNA (1)...(19): siRNA sense strand
gaagaacagagucguggaa

SEQ ID NO: 1317715 - RNA, 19 nt, Homo sapiens
  misc_RNA (1)...(19): siRNA sense strand
gaauuucuccuguuucauc

SEQ ID NO: 1317716 - RNA, 19 nt, Homo sapiens
  misc_RNA (1)...(19): siRNA sense strand
aaagaggauuucaacagaa

SEQ ID NO: 1317717 - RNA, 19 nt, Homo sapiens
  misc_RNA (1)...(19): siRNA sense strand
guaccgcugcucagaauuu

SEQ ID NO: 1317718 - RNA, 19 nt, Homo sapiens
  misc_RNA (1)...(19): siRNA sense strand
ccaggacgaugaauuuaag

SEQ ID NO: 1317719 - RNA, 19 nt, Homo sapiens
  misc_RNA (1)...(19): siRNA sense strand
ccaauucuuugauucacuu

SEQ ID NO: 1317720 - RNA, 19 nt, Homo sapiens
  misc_RNA (1)...(19): siRNA sense strand
ccgguguccuuauuacaua

SEQ ID NO: 1317721 - RNA, 19 nt, Homo sapiens
  misc_RNA (1)...(19): siRNA sense strand
cagcaaguguuucuuaacu

SEQ ID NO: 1317722 - RNA, 19 nt, Homo sapiens
  misc_RNA (1)...(19): siRNA sense strand
uaacggaaccagccgagaa

SEQ ID NO: 1317723 - RNA, 19 nt, Homo sapiens
  misc_RNA (1)...(19): siRNA sense strand
cuacaaugcggauuuaaug

SEQ ID NO: 1317724 - RNA, 19 nt, Homo sapiens
  misc_RNA (1)...(19): siRNA sense strand
uaacgucucgcaauuacuu

SEQ ID NO: 1317725 - RNA, 19 nt, Homo sapiens
  misc_RNA (1)...(19): siRNA sense strand
cccgugacguccaguauuu

SEQ ID NO: 1317726 - RNA, 19 nt, Homo sapiens
  misc_RNA (1)...(19): siRNA sense strand
ggcauccaauucuuugauu

SEQ ID NO: 1317727 - RNA, 19 nt, Homo sapiens
  misc_RNA (1)...(19): siRNA sense strand
gaaauuugucugcaugaag

SEQ ID NO: 1317728 - RNA, 19 nt, Homo sapiens
  misc_RNA (1)...(19): siRNA sense strand
gaaaggcuaccgcgaagag

SEQ ID NO: 1317729 - RNA, 19 nt, Homo sapiens
  misc_RNA (1)...(19): siRNA sense strand
ggguaccgcugcucagaau

SEQ ID NO: 1317730 - RNA, 19 nt, Homo sapiens
  misc_RNA (1)...(19): siRNA sense strand
ugaaauuugucugcaugaa

SEQ ID NO: 1317731 - RNA, 19 nt, Homo sapiens
  misc_RNA (1)...(19): siRNA sense strand
gcauccaauucuuugauuc

SEQ ID NO: 1317732 - RNA, 19 nt, Homo sapiens
  misc_RNA (1)...(19): siRNA sense strand
caagccuucugcucuguga

SEQ ID NO: 1317733 - RNA, 19 nt, Homo sapiens
  misc_RNA (1)...(19): siRNA sense strand
gauccgguguccuuauuac

SEQ ID NO: 1317734 - RNA, 19 nt, Homo sapiens
  misc_RNA (1)...(19): siRNA sense strand
cgugaauacuagucaaaga

SEQ ID NO: 1317735 - RNA, 19 nt, Homo sapiens
  misc_RNA (1)...(19): siRNA sense strand
cuucagcaaguguuucuua

SEQ ID NO: 1317736 - RNA, 19 nt, Homo sapiens
  misc_RNA (1)...(19): siRNA sense strand
gaugucaccuggauaaccu

SEQ ID NO: 1317737 - RNA, 19 nt, Homo sapiens
  misc_RNA (1)...(19): siRNA sense strand
caugaaggagucacauuug

SEQ ID NO: 1317738 - RNA, 19 nt, Homo sapiens
  misc_RNA (1)...(19): siRNA sense strand
ucaccuggauaaccuguca

SEQ ID NO: 1317739 - RNA, 19 nt, Homo sapiens
  misc_RNA (1)...(19): siRNA sense strand
ggagauccgguguccuuau

SEQ ID NO: 1317740 - RNA, 19 nt, Homo sapiens
  misc_RNA (1)...(19): siRNA sense strand
ucaaagaggauuucaacag

SEQ ID NO: 1317741 - RNA, 19 nt, Homo sapiens
  misc_RNA (1)...(19): siRNA sense strand
guacauacgaaacucaaag

SEQ ID NO: 1317742 - RNA, 19 nt, Homo sapiens
  misc_RNA (1)...(19): siRNA sense strand
augaaggagucacauuuga

SEQ ID NO: 1317743 - RNA, 19 nt, Homo sapiens
  misc_RNA (1)...(19): siRNA sense strand
cagaaacugcuuuauccaa

SEQ ID NO: 1317744 - RNA, 19 nt, Homo sapiens
  misc_RNA (1)...(19): siRNA sense strand
caaugcggauuuaaugaac

SEQ ID NO: 1317745 - RNA, 19 nt, Homo sapiens
  misc_RNA (1)...(19): siRNA sense strand
gaucaucugggaggaauuc

SEQ ID NO: 1317746 - RNA, 19 nt, Homo sapiens
  misc_RNA (1)...(19): siRNA sense strand
cauacgaaacucaaagaga

SEQ ID NO: 1317747 - RNA, 19 nt, Homo sapiens
  misc_RNA (1)...(19): siRNA sense strand
acaaugcggauuuaaugaa

SEQ ID NO: 1317748 - RNA, 19 nt, Homo sapiens
  misc_RNA (1)...(19): siRNA sense strand
ucacgugaauacuagucaa

SEQ ID NO: 1317749 - RNA, 19 nt, Homo sapiens
  misc_RNA (1)...(19): siRNA sense strand
caaccuucagcaaguguuu

SEQ ID NO: 1317750 - RNA, 19 nt, Homo sapiens
  misc_RNA (1)...(19): siRNA sense strand
ggaauucaccccagaggaa

SEQ ID NO: 1317751 - RNA, 19 nt, Homo sapiens
  misc_RNA (1)...(19): siRNA sense strand
aacagaaacugcuuuaucc

SEQ ID NO: 1317752 - RNA, 19 nt, Homo sapiens
  misc_RNA (1)...(19): siRNA sense strand
gacaagccuucugcucugu

SEQ ID NO: 1317753 - RNA, 19 nt, Homo sapiens
  misc_RNA (1)...(19): siRNA sense strand
gaaccagccgagaaauugg

SEQ ID NO: 1317754 - RNA, 19 nt, Homo sapiens
  misc_RNA (1)...(19): siRNA sense strand
aaucggaucugcgaacagu

SEQ ID NO: 1317755 - RNA, 19 nt, Homo sapiens
  misc_RNA (1)...(19): siRNA sense strand
guggaacccaggcucagua

SEQ ID NO: 1317756 - RNA, 19 nt, Homo sapiens
  misc_RNA (1)...(19): siRNA sense strand
acacaaccuucagcaagug

SEQ ID NO: 1317757 - RNA, 19 nt, Homo sapiens
  misc_RNA (1)...(19): siRNA sense strand
ugggaugucaccuggauaa

SEQ ID NO: 1317758 - RNA, 19 nt, Homo sapiens
  misc_RNA (1)...(19): siRNA sense strand
uaacugacaagaagaacag

SEQ ID NO: 1317759 - RNA, 19 nt, Homo sapiens
  misc_RNA (1)...(19): siRNA sense strand
aacacaaccuucagcaagu

SEQ ID NO: 1317760 - RNA, 19 nt, Homo sapiens
  misc_RNA (1)...(19): siRNA sense strand
acuccaggacgaugaauuu

SEQ ID NO: 1317761 - RNA, 19 nt, Homo sapiens
  misc_RNA (1)...(19): siRNA sense strand
aagcugggacugccaagaa

SEQ ID NO: 1317762 - RNA, 19 nt, Homo sapiens
  misc_RNA (1)...(19): siRNA sense strand
uucagcaaguguuucuuaa

SEQ ID NO: 1317763 - RNA, 19 nt, Homo sapiens
  misc_RNA (1)...(19): siRNA sense strand
cggaaccagccgagaaauu

SEQ ID NO: 1317764 - RNA, 19 nt, Homo sapiens
  misc_RNA (1)...(19): siRNA sense strand
gcucaguaacaacgaaugu

SEQ ID NO: 1317765 - RNA, 19 nt, Homo sapiens
  misc_RNA (1)...(19): siRNA sense strand
gaggguaccgcugcucaga

SEQ ID NO: 1317766 - RNA, 19 nt, Homo sapiens
  misc_RNA (1)...(19): siRNA sense strand
cauccaauucuuugauuca

SEQ ID NO: 1317767 - RNA, 19 nt, Homo sapiens
  misc_RNA (1)...(19): siRNA sense strand
caagaaaacacaaccuuca

SEQ ID NO: 1317768 - RNA, 19 nt, Homo sapiens
  misc_RNA (1)...(19): siRNA sense strand
uacaaugcggauuuaauga

SEQ ID NO: 1317769 - RNA, 19 nt, Homo sapiens
  misc_RNA (1)...(19): siRNA sense strand
ggaaaggcuaccgcgaaga

SEQ ID NO: 1317770 - RNA, 19 nt, Homo sapiens
  misc_RNA (1)...(19): siRNA sense strand
gggagauccgguguccuua

SEQ ID NO: 1317771 - RNA, 19 nt, Homo sapiens
  misc_RNA (1)...(19): siRNA sense strand
gcggauuuaaugaacugua

SEQ ID NO: 1317772 - RNA, 19 nt, Homo sapiens
  misc_RNA (1)...(19): siRNA sense strand
uccaggacgaugaauuuaa

SEQ ID NO: 1317773 - RNA, 19 nt, Homo sapiens
  misc_RNA (1)...(19): siRNA sense strand
cggauuuaaugaacuguac

SEQ ID NO: 1317774 - RNA, 19 nt, Homo sapiens
  misc_RNA (1)...(19): siRNA sense strand
ucaucuacaaugcggauuu

SEQ ID NO: 1317775 - RNA, 19 nt, Homo sapiens
  misc_RNA (1)...(19): siRNA sense strand
ugugggaugucaccuggau

SEQ ID NO: 1317776 - RNA, 19 nt, Homo sapiens
  misc_RNA (1)...(19): siRNA sense strand
gcaauuacuuucugguuaa

SEQ ID NO: 1317777 - RNA, 19 nt, Homo sapiens
  misc_RNA (1)...(19): siRNA sense strand
caaagaggauuucaacaga

SEQ ID NO: 1317778 - RNA, 19 nt, Homo sapiens
  misc_RNA (1)...(19): siRNA sense strand
gcaaguguuucuuaacuga

SEQ ID NO: 1317779 - RNA, 19 nt, Homo sapiens
  misc_RNA (1)...(19): siRNA sense strand
ggauuaacgucucgcaauu

SEQ ID NO: 1317780 - RNA, 19 nt, Homo sapiens
  misc_RNA (1)...(19): siRNA sense strand
ugaaggaaauuaccugaga

SEQ ID NO: 1317781 - RNA, 19 nt, Homo sapiens
  misc_RNA (1)...(19): siRNA sense strand
gcaccagccucuagucuca

SEQ ID NO: 1317782 - RNA, 19 nt, Homo sapiens
  misc_RNA (1)...(19): siRNA sense strand
gagauccgguguccuuauu

SEQ ID NO: 1317783 - RNA, 19 nt, Homo sapiens
  misc_RNA (1)...(19): siRNA sense strand
gaaacugcuuuauccaaau

SEQ ID NO: 1317784 - RNA, 19 nt, Homo sapiens
  misc_RNA (1)...(19): siRNA sense strand
auacgaaacucaaagagaa

SEQ ID NO: 1317785 - RNA, 19 nt, Homo sapiens
  misc_RNA (1)...(19): siRNA sense strand
caacagaaacugcuuuauc

SEQ ID NO: 1317786 - RNA, 19 nt, Homo sapiens
  misc_RNA (1)...(19): siRNA sense strand
caucuacaaugcggauuua

SEQ ID NO: 1317787 - RNA, 19 nt, Homo sapiens
  misc_RNA (1)...(19): siRNA sense strand
gcaugaaggagucacauuu

SEQ ID NO: 1317788 - RNA, 19 nt, Homo sapiens
  misc_RNA (1)...(19): siRNA sense strand
agaaacugcuuuauccaaa

SEQ ID NO: 1317789 - RNA, 19 nt, Homo sapiens
  misc_RNA (1)...(19): siRNA sense strand
cgcaauuacuuucugguua

SEQ ID NO: 1317790 - RNA, 19 nt, Homo sapiens
  misc_RNA (1)...(19): siRNA sense strand
ggaaccagccgagaaauug

SEQ ID NO: 1317791 - RNA, 19 nt, Homo sapiens
  misc_RNA (1)...(19): siRNA sense strand
gcugugaaccuuuauauca

SEQ ID NO: 1317792 - RNA, 19 nt, Homo sapiens
  misc_RNA (1)...(19): siRNA sense strand
gaaaucggaucugcgaaca

SEQ ID NO: 1317793 - RNA, 19 nt, Homo sapiens
  misc_RNA (1)...(19): siRNA sense strand
gaacccaggcucaguaaca

SEQ ID NO: 1317794 - RNA, 19 nt, Homo sapiens
  misc_RNA (1)...(19): siRNA sense strand
gauuaacgucucgcaauua

SEQ ID NO: 1317795 - RNA, 19 nt, Homo sapiens
  misc_RNA (1)...(19): siRNA sense strand
gaagaacagagucguggaa

SEQ ID NO: 1317796 - RNA, 19 nt, Homo sapiens
  misc_RNA (1)...(19): siRNA sense strand
gaauuucuccuguuucauc

SEQ ID NO: 1317797 - RNA, 19 nt, Homo sapiens
  misc_RNA (1)...(19): siRNA sense strand
aaagaggauuucaacagaa

SEQ ID NO: 1317798 - RNA, 19 nt, Homo sapiens
  misc_RNA (1)...(19): siRNA sense strand
guaccgcugcucagaauuu

SEQ ID NO: 1317799 - RNA, 19 nt, Homo sapiens
  misc_RNA (1)...(19): siRNA sense strand
ccaggacgaugaauuuaag

SEQ ID NO: 1317800 - RNA, 19 nt, Homo sapiens
  misc_RNA (1)...(19): siRNA sense strand
ccaauucuuugauucacuu

SEQ ID NO: 1317801 - RNA, 19 nt, Homo sapiens
  misc_RNA (1)...(19): siRNA sense strand
ccgguguccuuauuacaua

SEQ ID NO: 1317802 - RNA, 19 nt, Homo sapiens
  misc_RNA (1)...(19): siRNA sense strand
cagcaaguguuucuuaacu

SEQ ID NO: 1317803 - RNA, 19 nt, Homo sapiens
  misc_RNA (1)...(19): siRNA sense strand
ggaauggcauggacaucuc

SEQ ID NO: 1317804 - RNA, 19 nt, Homo sapiens
  misc_RNA (1)...(19): siRNA sense strand
uaacggaaccagccgagaa

SEQ ID NO: 1317805 - RNA, 19 nt, Homo sapiens
  misc_RNA (1)...(19): siRNA sense strand
cuacaaugcggauuuaaug

SEQ ID NO: 1317806 - RNA, 19 nt, Homo sapiens
  misc_RNA (1)...(19): siRNA sense strand
uaacgucucgcaauuacuu

SEQ ID NO: 1317807 - RNA, 19 nt, Homo sapiens
  misc_RNA (1)...(19): siRNA sense strand
cccgugacguccaguauuu

SEQ ID NO: 1317808 - RNA, 19 nt, Homo sapiens
  misc_RNA (1)...(19): siRNA sense strand
ggcauccaauucuuugauu

SEQ ID NO: 1317809 - RNA, 19 nt, Homo sapiens
  misc_RNA (1)...(19): siRNA sense strand
gaaauuugucugcaugaag

SEQ ID NO: 1317810 - RNA, 19 nt, Homo sapiens
  misc_RNA (1)...(19): siRNA sense strand
gaaaggcuaccgcgaagag

SEQ ID NO: 1317811 - RNA, 19 nt, Homo sapiens
  misc_RNA (1)...(19): siRNA sense strand
ggguaccgcugcucagaau

SEQ ID NO: 1317812 - RNA, 19 nt, Homo sapiens
  misc_RNA (1)...(19): siRNA sense strand
ugaaauuugucugcaugaa

SEQ ID NO: 1317813 - RNA, 19 nt, Homo sapiens
  misc_RNA (1)...(19): siRNA sense strand
gcauccaauucuuugauuc

SEQ ID NO: 1317814 - RNA, 19 nt, Homo sapiens
  misc_RNA (1)...(19): siRNA sense strand
caagccuucugcucuguga

SEQ ID NO: 1317815 - RNA, 19 nt, Homo sapiens
  misc_RNA (1)...(19): siRNA sense strand
gauccgguguccuuauuac

SEQ ID NO: 1317816 - RNA, 19 nt, Homo sapiens
  misc_RNA (1)...(19): siRNA sense strand
cgugaauacuagucaaaga

SEQ ID NO: 1317817 - RNA, 19 nt, Homo sapiens
  misc_RNA (1)...(19): siRNA sense strand
cuucagcaaguguuucuua

SEQ ID NO: 1317818 - RNA, 19 nt, Homo sapiens
  misc_RNA (1)...(19): siRNA sense strand
gaugucaccuggauaaccu

SEQ ID NO: 1317819 - RNA, 19 nt, Homo sapiens
  misc_RNA (1)...(19): siRNA sense strand
caugaaggagucacauuug

SEQ ID NO: 1317820 - RNA, 19 nt, Homo sapiens
  misc_RNA (1)...(19): siRNA sense strand
augaugcugugaaccuuua

SEQ ID NO: 1317821 - RNA, 19 nt, Homo sapiens
  misc_RNA (1)...(19): siRNA sense strand
ucaccuggauaaccuguca

SEQ ID NO: 1317822 - RNA, 19 nt, Homo sapiens
  misc_RNA (1)...(19): siRNA sense strand
ggagauccgguguccuuau

SEQ ID NO: 1317823 - RNA, 19 nt, Homo sapiens
  misc_RNA (1)...(19): siRNA sense strand
ucaaagaggauuucaacag

SEQ ID NO: 1317824 - RNA, 19 nt, Homo sapiens
  misc_RNA (1)...(19): siRNA sense strand
guacauacgaaacucaaag

SEQ ID NO: 1317825 - RNA, 19 nt, Homo sapiens
  misc_RNA (1)...(19): siRNA sense strand
ggaacuguuuucuugauga

SEQ ID NO: 1317826 - RNA, 19 nt, Homo sapiens
  misc_RNA (1)...(19): siRNA sense strand
augaaggagucacauuuga

SEQ ID NO: 1317827 - RNA, 19 nt, Homo sapiens
  misc_RNA (1)...(19): siRNA sense strand
gaugaugcugugaaccuuu

SEQ ID NO: 1317828 - RNA, 19 nt, Homo sapiens
  misc_RNA (1)...(19): siRNA sense strand
cagaaacugcuuuauccaa

SEQ ID NO: 1317829 - RNA, 19 nt, Homo sapiens
  misc_RNA (1)...(19): siRNA sense strand
caaugcggauuuaaugaac

SEQ ID NO: 1317830 - RNA, 19 nt, Homo sapiens
  misc_RNA (1)...(19): siRNA sense strand
gaucaucugggaggaauuc

SEQ ID NO: 1317831 - RNA, 19 nt, Homo sapiens
  misc_RNA (1)...(19): siRNA sense strand
cauacgaaacucaaagaga

SEQ ID NO: 1317832 - RNA, 19 nt, Homo sapiens
  misc_RNA (1)...(19): siRNA sense strand
acaaugcggauuuaaugaa

SEQ ID NO: 1317833 - RNA, 19 nt, Homo sapiens
  misc_RNA (1)...(19): siRNA sense strand
ucacgugaauacuagucaa

SEQ ID NO: 1317834 - RNA, 19 nt, Homo sapiens
  misc_RNA (1)...(19): siRNA sense strand
caaccuucagcaaguguuu

SEQ ID NO: 1317835 - RNA, 19 nt, Homo sapiens
  misc_RNA (1)...(19): siRNA sense strand
ggaauucaccccagaggaa

SEQ ID NO: 1317836 - RNA, 19 nt, Homo sapiens
  misc_RNA (1)...(19): siRNA sense strand
aacagaaacugcuuuaucc

SEQ ID NO: 1317837 - RNA, 19 nt, Homo sapiens
  misc_RNA (1)...(19): siRNA sense strand
gacaagccuucugcucugu

SEQ ID NO: 1317838 - RNA, 19 nt, Homo sapiens
  misc_RNA (1)...(19): siRNA sense strand
aaucggaucugcgaacagu

SEQ ID NO: 1317839 - RNA, 19 nt, Homo sapiens
  misc_RNA (1)...(19): siRNA sense strand
gaaccagccgagaaauugg

SEQ ID NO: 1317840 - RNA, 19 nt, Homo sapiens
  misc_RNA (1)...(19): siRNA sense strand
guggaacccaggcucagua

SEQ ID NO: 1317841 - RNA, 19 nt, Homo sapiens
  misc_RNA (1)...(19): siRNA sense strand
acacaaccuucagcaagug

SEQ ID NO: 1317842 - RNA, 19 nt, Homo sapiens
  misc_RNA (1)...(19): siRNA sense strand
ugggaugucaccuggauaa

SEQ ID NO: 1317843 - RNA, 19 nt, Homo sapiens
  misc_RNA (1)...(19): siRNA sense strand
uaacugacaagaagaacag

SEQ ID NO: 1317844 - RNA, 19 nt, Homo sapiens
  misc_RNA (1)...(19): siRNA sense strand
aagcugggacugccaagaa

SEQ ID NO: 1317845 - RNA, 19 nt, Homo sapiens
  misc_RNA (1)...(19): siRNA sense strand
gaugcugugaaccuuuaua

SEQ ID NO: 1317846 - RNA, 19 nt, Homo sapiens
  misc_RNA (1)...(19): siRNA sense strand
acuccaggacgaugaauuu

SEQ ID NO: 1317847 - RNA, 19 nt, Homo sapiens
  misc_RNA (1)...(19): siRNA sense strand
aacacaaccuucagcaagu

SEQ ID NO: 1317848 - RNA, 19 nt, Homo sapiens
  misc_RNA (1)...(19): siRNA sense strand
uucagcaaguguuucuuaa

SEQ ID NO: 1317849 - RNA, 19 nt, Homo sapiens
  misc_RNA (1)...(19): siRNA sense strand
gaacuguuuucuugaugau

SEQ ID NO: 1317850 - RNA, 19 nt, Homo sapiens
  misc_RNA (1)...(19): siRNA sense strand
cggaaccagccgagaaauu

SEQ ID NO: 1317851 - RNA, 19 nt, Homo sapiens
  misc_RNA (1)...(19): siRNA sense strand
gcucaguaacaacgaaugu

SEQ ID NO: 1317852 - RNA, 19 nt, Homo sapiens
  misc_RNA (1)...(19): siRNA sense strand
gaggguaccgcugcucaga

SEQ ID NO: 1317853 - RNA, 19 nt, Homo sapiens
  misc_RNA (1)...(19): siRNA sense strand
cauccaauucuuugauuca

SEQ ID NO: 1317854 - RNA, 19 nt, Homo sapiens
  misc_RNA (1)...(19): siRNA sense strand
caagaaaacacaaccuuca

SEQ ID NO: 1317855 - RNA, 19 nt, Homo sapiens
  misc_RNA (1)...(19): siRNA sense strand
uacaaugcggauuuaauga

SEQ ID NO: 1317856 - RNA, 19 nt, Homo sapiens
  misc_RNA (1)...(19): siRNA sense strand
ggaaaggcuaccgcgaaga

SEQ ID NO: 1317857 - RNA, 19 nt, Homo sapiens
  misc_RNA (1)...(19): siRNA sense strand
gggagauccgguguccuua

SEQ ID NO: 1317858 - RNA, 19 nt, Homo sapiens
  misc_RNA (1)...(19): siRNA sense strand
gcggauuuaaugaacugua

SEQ ID NO: 1317859 - RNA, 19 nt, Homo sapiens
  misc_RNA (1)...(19): siRNA sense strand
uccaggacgaugaauuuaa

SEQ ID NO: 1317860 - RNA, 19 nt, Homo sapiens
  misc_RNA (1)...(19): siRNA sense strand
cggauuuaaugaacuguac

SEQ ID NO: 1317861 - RNA, 19 nt, Homo sapiens
  misc_RNA (1)...(19): siRNA sense strand
ucaucuacaaugcggauuu

SEQ ID NO: 1317862 - RNA, 19 nt, Homo sapiens
  misc_RNA (1)...(19): siRNA sense strand
ugaugaugcugugaaccuu

SEQ ID NO: 1317863 - RNA, 19 nt, Homo sapiens
  misc_RNA (1)...(19): siRNA sense strand
cugugaaccuuuauaucau

SEQ ID NO: 1317864 - RNA, 19 nt, Homo sapiens
  misc_RNA (1)...(19): siRNA sense strand
ugugggaugucaccuggau

SEQ ID NO: 1317865 - RNA, 19 nt, Homo sapiens
  misc_RNA (1)...(19): siRNA sense strand
gcaauuacuuucugguuaa

SEQ ID NO: 1317866 - RNA, 19 nt, Homo sapiens
  misc_RNA (1)...(19): siRNA sense strand
caaagaggauuucaacaga

SEQ ID NO: 1317867 - RNA, 19 nt, Homo sapiens
  misc_RNA (1)...(19): siRNA sense strand
gcaaguguuucuuaacuga

SEQ ID NO: 1317868 - RNA, 19 nt, Homo sapiens
  misc_RNA (1)...(19): siRNA sense strand
ggauuaacgucucgcaauu

SEQ ID NO: 1317869 - RNA, 19 nt, Homo sapiens
  misc_RNA (1)...(19): siRNA sense strand
gcaccagccucuagucuca

SEQ ID NO: 1317870 - RNA, 19 nt, Homo sapiens
  misc_RNA (1)...(19): siRNA sense strand
gagauccgguguccuuauu

SEQ ID NO: 1317871 - RNA, 19 nt, Homo sapiens
  misc_RNA (1)...(19): siRNA sense strand
gaaacugcuuuauccaaau

SEQ ID NO: 1317872 - RNA, 19 nt, Homo sapiens
  misc_RNA (1)...(19): siRNA sense strand
auacgaaacucaaagagaa

SEQ ID NO: 1317873 - RNA, 19 nt, Homo sapiens
  misc_RNA (1)...(19): siRNA sense strand
caacagaaacugcuuuauc

SEQ ID NO: 1317874 - RNA, 19 nt, Homo sapiens
  misc_RNA (1)...(19): siRNA sense strand
caucuacaaugcggauuua

SEQ ID NO: 1317875 - RNA, 19 nt, Homo sapiens
  misc_RNA (1)...(19): siRNA sense strand
gcaugaaggagucacauuu

SEQ ID NO: 1317876 - RNA, 19 nt, Homo sapiens
  misc_RNA (1)...(19): siRNA sense strand
agaaacugcuuuauccaaa

SEQ ID NO: 1317877 - RNA, 19 nt, Homo sapiens
  misc_RNA (1)...(19): siRNA sense strand
cgcaauuacuuucugguua

SEQ ID NO: 1317878 - RNA, 19 nt, Homo sapiens
  misc_RNA (1)...(19): siRNA sense strand
ggaaccagccgagaaauug

SEQ ID NO: 1317879 - RNA, 19 nt, Homo sapiens
  misc_RNA (1)...(19): siRNA sense strand
gaaaucggaucugcgaaca

SEQ ID NO: 1317880 - RNA, 19 nt, Homo sapiens
  misc_RNA (1)...(19): siRNA sense strand
gaacccaggcucaguaaca

SEQ ID NO: 1317881 - RNA, 19 nt, Homo sapiens
  misc_RNA (1)...(19): siRNA sense strand
gauuaacgucucgcaauua

SEQ ID NO: 1317882 - RNA, 19 nt, Homo sapiens
  misc_RNA (1)...(19): siRNA sense strand
gaagaacagagucguggaa

SEQ ID NO: 1317883 - RNA, 19 nt, Homo sapiens
  misc_RNA (1)...(19): siRNA sense strand
gaauuucuccuguuucauc

SEQ ID NO: 1317884 - RNA, 19 nt, Homo sapiens
  misc_RNA (1)...(19): siRNA sense strand
aaagaggauuucaacagaa

SEQ ID NO: 1317885 - RNA, 19 nt, Homo sapiens
  misc_RNA (1)...(19): siRNA sense strand
guaccgcugcucagaauuu

SEQ ID NO: 1317886 - RNA, 19 nt, Homo sapiens
  misc_RNA (1)...(19): siRNA sense strand
ccaggacgaugaauuuaag

SEQ ID NO: 1317887 - RNA, 19 nt, Homo sapiens
  misc_RNA (1)...(19): siRNA sense strand
ccaauucuuugauucacuu

SEQ ID NO: 1317888 - RNA, 19 nt, Homo sapiens
  misc_RNA (1)...(19): siRNA sense strand
ccgguguccuuauuacaua

SEQ ID NO: 1317889 - RNA, 19 nt, Homo sapiens
  misc_RNA (1)...(19): siRNA sense strand
cagcaaguguuucuuaacu

SEQ ID NO: 1317890 - RNA, 19 nt, Homo sapiens
  misc_RNA (1)...(19): siRNA sense strand
uaacggaaccagccgagaa

SEQ ID NO: 1317891 - RNA, 19 nt, Homo sapiens
  misc_RNA (1)...(19): siRNA sense strand
cuacaaugcggauuuaaug

SEQ ID NO: 1317892 - RNA, 19 nt, Homo sapiens
  misc_RNA (1)...(19): siRNA sense strand
uaacgucucgcaauuacuu

SEQ ID NO: 1317893 - RNA, 19 nt, Homo sapiens
  misc_RNA (1)...(19): siRNA sense strand
cccgugacguccaguauuu

SEQ ID NO: 1317894 - RNA, 19 nt, Homo sapiens
  misc_RNA (1)...(19): siRNA sense strand
ggcauccaauucuuugauu

SEQ ID NO: 1317895 - RNA, 19 nt, Homo sapiens
  misc_RNA (1)...(19): siRNA sense strand
gaaauuugucugcaugaag

SEQ ID NO: 1317896 - RNA, 19 nt, Homo sapiens
  misc_RNA (1)...(19): siRNA sense strand
ggguaccgcugcucagaau

SEQ ID NO: 1317897 - RNA, 19 nt, Homo sapiens
  misc_RNA (1)...(19): siRNA sense strand
ugaaauuugucugcaugaa

SEQ ID NO: 1317898 - RNA, 19 nt, Homo sapiens
  misc_RNA (1)...(19): siRNA sense strand
gcauccaauucuuugauuc

SEQ ID NO: 1317899 - RNA, 19 nt, Homo sapiens
  misc_RNA (1)...(19): siRNA sense strand
caagccuucugcucuguga

SEQ ID NO: 1317900 - RNA, 19 nt, Homo sapiens
  misc_RNA (1)...(19): siRNA sense strand
gauccgguguccuuauuac

SEQ ID NO: 1317901 - RNA, 19 nt, Homo sapiens
  misc_RNA (1)...(19): siRNA sense strand
cgugaauacuagucaaaga

SEQ ID NO: 1317902 - RNA, 19 nt, Homo sapiens
  misc_RNA (1)...(19): siRNA sense strand
cuucagcaaguguuucuua

SEQ ID NO: 1317903 - RNA, 19 nt, Homo sapiens
  misc_RNA (1)...(19): siRNA sense strand
gaugucaccuggauaaccu

SEQ ID NO: 1317904 - RNA, 19 nt, Homo sapiens
  misc_RNA (1)...(19): siRNA sense strand
caugaaggagucacauuug

SEQ ID NO: 1317905 - RNA, 19 nt, Homo sapiens
  misc_RNA (1)...(19): siRNA sense strand
ucaccuggauaaccuguca

SEQ ID NO: 1317906 - RNA, 19 nt, Homo sapiens
  misc_RNA (1)...(19): siRNA sense strand
ggagauccgguguccuuau

SEQ ID NO: 1317907 - RNA, 19 nt, Homo sapiens
  misc_RNA (1)...(19): siRNA sense strand
ucaaagaggauuucaacag

SEQ ID NO: 1317908 - RNA, 19 nt, Homo sapiens
  misc_RNA (1)...(19): siRNA sense strand
guacauacgaaacucaaag

SEQ ID NO: 1317909 - RNA, 19 nt, Homo sapiens
  misc_RNA (1)...(19): siRNA sense strand
augaaggagucacauuuga

SEQ ID NO: 1317910 - RNA, 19 nt, Homo sapiens
  misc_RNA (1)...(19): siRNA sense strand
cagaaacugcuuuauccaa

SEQ ID NO: 1317911 - RNA, 19 nt, Homo sapiens
  misc_RNA (1)...(19): siRNA sense strand
caaugcggauuuaaugaac

SEQ ID NO: 1317912 - RNA, 19 nt, Homo sapiens
  misc_RNA (1)...(19): siRNA sense strand
cauacgaaacucaaagaga

SEQ ID NO: 1317913 - RNA, 19 nt, Homo sapiens
  misc_RNA (1)...(19): siRNA sense strand
acaaugcggauuuaaugaa

SEQ ID NO: 1317914 - RNA, 19 nt, Homo sapiens
  misc_RNA (1)...(19): siRNA sense strand
ucacgugaauacuagucaa

SEQ ID NO: 1317915 - RNA, 19 nt, Homo sapiens
  misc_RNA (1)...(19): siRNA sense strand
caaccuucagcaaguguuu

SEQ ID NO: 1317916 - RNA, 19 nt, Homo sapiens
  misc_RNA (1)...(19): siRNA sense strand
aacagaaacugcuuuaucc

SEQ ID NO: 1317917 - RNA, 19 nt, Homo sapiens
  misc_RNA (1)...(19): siRNA sense strand
gacaagccuucugcucugu

SEQ ID NO: 1317918 - RNA, 19 nt, Homo sapiens
  misc_RNA (1)...(19): siRNA sense strand
gaaccagccgagaaauugg

SEQ ID NO: 1317919 - RNA, 19 nt, Homo sapiens
  misc_RNA (1)...(19): siRNA sense strand
aaucggaucugcgaacagu

SEQ ID NO: 1317920 - RNA, 19 nt, Homo sapiens
  misc_RNA (1)...(19): siRNA sense strand
guggaacccaggcucagua

SEQ ID NO: 1317921 - RNA, 19 nt, Homo sapiens
  misc_RNA (1)...(19): siRNA sense strand
acacaaccuucagcaagug

SEQ ID NO: 1317922 - RNA, 19 nt, Homo sapiens
  misc_RNA (1)...(19): siRNA sense strand
ugggaugucaccuggauaa

SEQ ID NO: 1317923 - RNA, 19 nt, Homo sapiens
  misc_RNA (1)...(19): siRNA sense strand
uaacugacaagaagaacag

SEQ ID NO: 1317924 - RNA, 19 nt, Homo sapiens
  misc_RNA (1)...(19): siRNA sense strand
aacacaaccuucagcaagu

SEQ ID NO: 1317925 - RNA, 19 nt, Homo sapiens
  misc_RNA (1)...(19): siRNA sense strand
acuccaggacgaugaauuu

SEQ ID NO: 1317926 - RNA, 19 nt, Homo sapiens
  misc_RNA (1)...(19): siRNA sense strand
aagcugggacugccaagaa

SEQ ID NO: 1317927 - RNA, 19 nt, Homo sapiens
  misc_RNA (1)...(19): siRNA sense strand
uucagcaaguguuucuuaa

SEQ ID NO: 1317928 - RNA, 19 nt, Homo sapiens
  misc_RNA (1)...(19): siRNA sense strand
cggaaccagccgagaaauu

SEQ ID NO: 1317929 - RNA, 19 nt, Homo sapiens
  misc_RNA (1)...(19): siRNA sense strand
gcucaguaacaacgaaugu

SEQ ID NO: 1317930 - RNA, 19 nt, Homo sapiens
  misc_RNA (1)...(19): siRNA sense strand
gaggguaccgcugcucaga

SEQ ID NO: 1317931 - RNA, 19 nt, Homo sapiens
  misc_RNA (1)...(19): siRNA sense strand
cauccaauucuuugauuca

SEQ ID NO: 1317932 - RNA, 19 nt, Homo sapiens
  misc_RNA (1)...(19): siRNA sense strand
caagaaaacacaaccuuca

SEQ ID NO: 1317933 - RNA, 19 nt, Homo sapiens
  misc_RNA (1)...(19): siRNA sense strand
uacaaugcggauuuaauga

SEQ ID NO: 1317934 - RNA, 19 nt, Homo sapiens
  misc_RNA (1)...(19): siRNA sense strand
gggagauccgguguccuua

SEQ ID NO: 1317935 - RNA, 19 nt, Homo sapiens
  misc_RNA (1)...(19): siRNA sense strand
gcggauuuaaugaacugua

SEQ ID NO: 1317936 - RNA, 19 nt, Homo sapiens
  misc_RNA (1)...(19): siRNA sense strand
ucaucuacaaugcggauuu

SEQ ID NO: 1317937 - RNA, 19 nt, Homo sapiens
  misc_RNA (1)...(19): siRNA sense strand
uccaggacgaugaauuuaa

SEQ ID NO: 1317938 - RNA, 19 nt, Homo sapiens
  misc_RNA (1)...(19): siRNA sense strand
cggauuuaaugaacuguac

SEQ ID NO: 1317939 - RNA, 19 nt, Homo sapiens
  misc_RNA (1)...(19): siRNA sense strand
ugugggaugucaccuggau

SEQ ID NO: 1317940 - RNA, 19 nt, Homo sapiens
  misc_RNA (1)...(19): siRNA sense strand
gcaauuacuuucugguuaa

SEQ ID NO: 1317941 - RNA, 19 nt, Homo sapiens
  misc_RNA (1)...(19): siRNA sense strand
caaagaggauuucaacaga

SEQ ID NO: 1317942 - RNA, 19 nt, Homo sapiens
  misc_RNA (1)...(19): siRNA sense strand
gcaaguguuucuuaacuga

SEQ ID NO: 1317943 - RNA, 19 nt, Homo sapiens
  misc_RNA (1)...(19): siRNA sense strand
ggauuaacgucucgcaauu

SEQ ID NO: 1317944 - RNA, 19 nt, Homo sapiens
  misc_RNA (1)...(19): siRNA sense strand
gcaccagccucuagucuca

SEQ ID NO: 1317945 - RNA, 19 nt, Homo sapiens
  misc_RNA (1)...(19): siRNA sense strand
gagauccgguguccuuauu

SEQ ID NO: 1317946 - RNA, 19 nt, Homo sapiens
  misc_RNA (1)...(19): siRNA sense strand
gaaacugcuuuauccaaau

SEQ ID NO: 1317947 - RNA, 19 nt, Homo sapiens
  misc_RNA (1)...(19): siRNA sense strand
auacgaaacucaaagagaa

SEQ ID NO: 1317948 - RNA, 19 nt, Homo sapiens
  misc_RNA (1)...(19): siRNA sense strand
caacagaaacugcuuuauc

SEQ ID NO: 1317949 - RNA, 19 nt, Homo sapiens
  misc_RNA (1)...(19): siRNA sense strand
caucuacaaugcggauuua

SEQ ID NO: 1317950 - RNA, 19 nt, Homo sapiens
  misc_RNA (1)...(19): siRNA sense strand
gcaugaaggagucacauuu

SEQ ID NO: 1317951 - RNA, 19 nt, Homo sapiens
  misc_RNA (1)...(19): siRNA sense strand
agaaacugcuuuauccaaa

SEQ ID NO: 1317952 - RNA, 19 nt, Homo sapiens
  misc_RNA (1)...(19): siRNA sense strand
cgcaauuacuuucugguua

SEQ ID NO: 1317953 - RNA, 19 nt, Homo sapiens
  misc_RNA (1)...(19): siRNA sense strand
ggaaccagccgagaaauug

SEQ ID NO: 1317954 - RNA, 19 nt, Homo sapiens
  misc_RNA (1)...(19): siRNA sense strand
gaaaucggaucugcgaaca

SEQ ID NO: 1317955 - RNA, 19 nt, Homo sapiens
  misc_RNA (1)...(19): siRNA sense strand
gaacccaggcucaguaaca

SEQ ID NO: 1317956 - RNA, 19 nt, Homo sapiens
  misc_RNA (1)...(19): siRNA sense strand
gauuaacgucucgcaauua

SEQ ID NO: 1317957 - RNA, 19 nt, Homo sapiens
  misc_RNA (1)...(19): siRNA sense strand
gaagaacagagucguggaa

SEQ ID NO: 1317958 - RNA, 19 nt, Homo sapiens
  misc_RNA (1)...(19): siRNA sense strand
gaauuucuccuguuucauc

SEQ ID NO: 1317959 - RNA, 19 nt, Homo sapiens
  misc_RNA (1)...(19): siRNA sense strand
aaagaggauuucaacagaa

SEQ ID NO: 1317960 - RNA, 19 nt, Homo sapiens
  misc_RNA (1)...(19): siRNA sense strand
guaccgcugcucagaauuu

SEQ ID NO: 1317961 - RNA, 19 nt, Homo sapiens
  misc_RNA (1)...(19): siRNA sense strand
ccaggacgaugaauuuaag

SEQ ID NO: 1317962 - RNA, 19 nt, Homo sapiens
  misc_RNA (1)...(19): siRNA sense strand
ccaauucuuugauucacuu

SEQ ID NO: 1317963 - RNA, 19 nt, Homo sapiens
  misc_RNA (1)...(19): siRNA sense strand
ccgguguccuuauuacaua

SEQ ID NO: 1317964 - RNA, 19 nt, Homo sapiens
  misc_RNA (1)...(19): siRNA sense strand
cagcaaguguuucuuaacu

SEQ ID NO: 1317965 - RNA, 19 nt, Homo sapiens
  misc_RNA (1)...(19): siRNA sense strand
uaacggaaccagccgagaa

SEQ ID NO: 1317966 - RNA, 19 nt, Homo sapiens
  misc_RNA (1)...(19): siRNA sense strand
cuacaaugcggauuuaaug

SEQ ID NO: 1317967 - RNA, 19 nt, Homo sapiens
  misc_RNA (1)...(19): siRNA sense strand
uaacgucucgcaauuacuu

SEQ ID NO: 1317968 - RNA, 19 nt, Homo sapiens
  misc_RNA (1)...(19): siRNA sense strand
cccgugacguccaguauuu

SEQ ID NO: 1317969 - RNA, 19 nt, Homo sapiens
  misc_RNA (1)...(19): siRNA sense strand
ggcauccaauucuuugauu

SEQ ID NO: 1317970 - RNA, 19 nt, Homo sapiens
  misc_RNA (1)...(19): siRNA sense strand
gaaauuugucugcaugaag

SEQ ID NO: 1317971 - RNA, 19 nt, Homo sapiens
  misc_RNA (1)...(19): siRNA sense strand
ggguaccgcugcucagaau

SEQ ID NO: 1317972 - RNA, 19 nt, Homo sapiens
  misc_RNA (1)...(19): siRNA sense strand
ugaaauuugucugcaugaa

SEQ ID NO: 1317973 - RNA, 19 nt, Homo sapiens
  misc_RNA (1)...(19): siRNA sense strand
gcauccaauucuuugauuc

SEQ ID NO: 1317974 - RNA, 19 nt, Homo sapiens
  misc_RNA (1)...(19): siRNA sense strand
caagccuucugcucuguga

SEQ ID NO: 1317975 - RNA, 19 nt, Homo sapiens
  misc_RNA (1)...(19): siRNA sense strand
gauccgguguccuuauuac

SEQ ID NO: 1317976 - RNA, 19 nt, Homo sapiens
  misc_RNA (1)...(19): siRNA sense strand
cgugaauacuagucaaaga

SEQ ID NO: 1317977 - RNA, 19 nt, Homo sapiens
  misc_RNA (1)...(19): siRNA sense strand
cuucagcaaguguuucuua

SEQ ID NO: 1317978 - RNA, 19 nt, Homo sapiens
  misc_RNA (1)...(19): siRNA sense strand
gaugucaccuggauaaccu

SEQ ID NO: 1317979 - RNA, 19 nt, Homo sapiens
  misc_RNA (1)...(19): siRNA sense strand
caugaaggagucacauuug

SEQ ID NO: 1317980 - RNA, 19 nt, Homo sapiens
  misc_RNA (1)...(19): siRNA sense strand
ucaccuggauaaccuguca

SEQ ID NO: 1317981 - RNA, 19 nt, Homo sapiens
  misc_RNA (1)...(19): siRNA sense strand
ggagauccgguguccuuau

SEQ ID NO: 1317982 - RNA, 19 nt, Homo sapiens
  misc_RNA (1)...(19): siRNA sense strand
ucaaagaggauuucaacag

SEQ ID NO: 1317983 - RNA, 19 nt, Homo sapiens
  misc_RNA (1)...(19): siRNA sense strand
guacauacgaaacucaaag

SEQ ID NO: 1317984 - RNA, 19 nt, Homo sapiens
  misc_RNA (1)...(19): siRNA sense strand
augaaggagucacauuuga

SEQ ID NO: 1317985 - RNA, 19 nt, Homo sapiens
  misc_RNA (1)...(19): siRNA sense strand
cagaaacugcuuuauccaa

SEQ ID NO: 1317986 - RNA, 19 nt, Homo sapiens
  misc_RNA (1)...(19): siRNA sense strand
caaugcggauuuaaugaac

SEQ ID NO: 1317987 - RNA, 19 nt, Homo sapiens
  misc_RNA (1)...(19): siRNA sense strand
cauacgaaacucaaagaga

SEQ ID NO: 1317988 - RNA, 19 nt, Homo sapiens
  misc_RNA (1)...(19): siRNA sense strand
acaaugcggauuuaaugaa

SEQ ID NO: 1317989 - RNA, 19 nt, Homo sapiens
  misc_RNA (1)...(19): siRNA sense strand
ucacgugaauacuagucaa

SEQ ID NO: 1317990 - RNA, 19 nt, Homo sapiens
  misc_RNA (1)...(19): siRNA sense strand
caaccuucagcaaguguuu

SEQ ID NO: 1317991 - RNA, 19 nt, Homo sapiens
  misc_RNA (1)...(19): siRNA sense strand
aacagaaacugcuuuaucc

SEQ ID NO: 1317992 - RNA, 19 nt, Homo sapiens
  misc_RNA (1)...(19): siRNA sense strand
gacaagccuucugcucugu

SEQ ID NO: 1317993 - RNA, 19 nt, Homo sapiens
  misc_RNA (1)...(19): siRNA sense strand
gaaccagccgagaaauugg

SEQ ID NO: 1317994 - RNA, 19 nt, Homo sapiens
  misc_RNA (1)...(19): siRNA sense strand
aaucggaucugcgaacagu

SEQ ID NO: 1317995 - RNA, 19 nt, Homo sapiens
  misc_RNA (1)...(19): siRNA sense strand
guggaacccaggcucagua

SEQ ID NO: 1317996 - RNA, 19 nt, Homo sapiens
  misc_RNA (1)...(19): siRNA sense strand
acacaaccuucagcaagug

SEQ ID NO: 1317997 - RNA, 19 nt, Homo sapiens
  misc_RNA (1)...(19): siRNA sense strand
ugggaugucaccuggauaa

SEQ ID NO: 1317998 - RNA, 19 nt, Homo sapiens
  misc_RNA (1)...(19): siRNA sense strand
uaacugacaagaagaacag

SEQ ID NO: 1317999 - RNA, 19 nt, Homo sapiens
  misc_RNA (1)...(19): siRNA sense strand
aacacaaccuucagcaagu

SEQ ID NO: 1318000 - RNA, 19 nt, Homo sapiens
  misc_RNA (1)...(19): siRNA sense strand
acuccaggacgaugaauuu

SEQ ID NO: 1318001 - RNA, 19 nt, Homo sapiens
  misc_RNA (1)...(19): siRNA sense strand
aagcugggacugccaagaa

SEQ ID NO: 1318002 - RNA, 19 nt, Homo sapiens
  misc_RNA (1)...(19): siRNA sense strand
uucagcaaguguuucuuaa

SEQ ID NO: 1318003 - RNA, 19 nt, Homo sapiens
  misc_RNA (1)...(19): siRNA sense strand
cggaaccagccgagaaauu

SEQ ID NO: 1318004 - RNA, 19 nt, Homo sapiens
  misc_RNA (1)...(19): siRNA sense strand
gcucaguaacaacgaaugu

SEQ ID NO: 1318005 - RNA, 19 nt, Homo sapiens
  misc_RNA (1)...(19): siRNA sense strand
gaggguaccgcugcucaga

SEQ ID NO: 1318006 - RNA, 19 nt, Homo sapiens
  misc_RNA (1)...(19): siRNA sense strand
cauccaauucuuugauuca

SEQ ID NO: 1318007 - RNA, 19 nt, Homo sapiens
  misc_RNA (1)...(19): siRNA sense strand
caagaaaacacaaccuuca

SEQ ID NO: 1318008 - RNA, 19 nt, Homo sapiens
  misc_RNA (1)...(19): siRNA sense strand
uacaaugcggauuuaauga

SEQ ID NO: 1318009 - RNA, 19 nt, Homo sapiens
  misc_RNA (1)...(19): siRNA sense strand
gggagauccgguguccuua

SEQ ID NO: 1318010 - RNA, 19 nt, Homo sapiens
  misc_RNA (1)...(19): siRNA sense strand
gcggauuuaaugaacugua

SEQ ID NO: 1318011 - RNA, 19 nt, Homo sapiens
  misc_RNA (1)...(19): siRNA sense strand
ucaucuacaaugcggauuu

SEQ ID NO: 1318012 - RNA, 19 nt, Homo sapiens
  misc_RNA (1)...(19): siRNA sense strand
uccaggacgaugaauuuaa

SEQ ID NO: 1318013 - RNA, 19 nt, Homo sapiens
  misc_RNA (1)...(19): siRNA sense strand
cggauuuaaugaacuguac

SEQ ID NO: 1318014 - RNA, 19 nt, Homo sapiens
  misc_RNA (1)...(19): siRNA sense strand
ugugggaugucaccuggau

SEQ ID NO: 1318015 - RNA, 19 nt, Homo sapiens
  misc_RNA (1)...(19): siRNA sense strand
gcaauuacuuucugguuaa

SEQ ID NO: 1318016 - RNA, 19 nt, Homo sapiens
  misc_RNA (1)...(19): siRNA sense strand
caaagaggauuucaacaga

SEQ ID NO: 1318017 - RNA, 19 nt, Homo sapiens
  misc_RNA (1)...(19): siRNA sense strand
gcaaguguuucuuaacuga

SEQ ID NO: 1318018 - RNA, 19 nt, Homo sapiens
  misc_RNA (1)...(19): siRNA sense strand
ggauuaacgucucgcaauu

SEQ ID NO: 1318019 - RNA, 19 nt, Homo sapiens
  misc_RNA (1)...(19): siRNA sense strand
gcaccagccucuagucuca

SEQ ID NO: 1318020 - RNA, 19 nt, Homo sapiens
  misc_RNA (1)...(19): siRNA sense strand
gagauccgguguccuuauu

SEQ ID NO: 1318021 - RNA, 19 nt, Homo sapiens
  misc_RNA (1)...(19): siRNA sense strand
gaaacugcuuuauccaaau

SEQ ID NO: 1318022 - RNA, 19 nt, Homo sapiens
  misc_RNA (1)...(19): siRNA sense strand
auacgaaacucaaagagaa

SEQ ID NO: 1318023 - RNA, 19 nt, Homo sapiens
  misc_RNA (1)...(19): siRNA sense strand
caacagaaacugcuuuauc

SEQ ID NO: 1318024 - RNA, 19 nt, Homo sapiens
  misc_RNA (1)...(19): siRNA sense strand
caucuacaaugcggauuua

SEQ ID NO: 1318025 - RNA, 19 nt, Homo sapiens
  misc_RNA (1)...(19): siRNA sense strand
gcaugaaggagucacauuu

SEQ ID NO: 1318026 - RNA, 19 nt, Homo sapiens
  misc_RNA (1)...(19): siRNA sense strand
agaaacugcuuuauccaaa

SEQ ID NO: 1318027 - RNA, 19 nt, Homo sapiens
  misc_RNA (1)...(19): siRNA sense strand
cgcaauuacuuucugguua

SEQ ID NO: 1318028 - RNA, 19 nt, Homo sapiens
  misc_RNA (1)...(19): siRNA sense strand
ggaaccagccgagaaauug

SEQ ID NO: 1318029 - RNA, 19 nt, Homo sapiens
  misc_RNA (1)...(19): siRNA sense strand
gaaaucggaucugcgaaca

SEQ ID NO: 1318030 - RNA, 19 nt, Homo sapiens
  misc_RNA (1)...(19): siRNA sense strand
gaacccaggcucaguaaca

SEQ ID NO: 1318031 - RNA, 19 nt, Homo sapiens
  misc_RNA (1)...(19): siRNA sense strand
gauuaacgucucgcaauua

SEQ ID NO: 1318032 - RNA, 19 nt, Homo sapiens
  misc_RNA (1)...(19): siRNA sense strand
gaagaacagagucguggaa

SEQ ID NO: 1318033 - RNA, 19 nt, Homo sapiens
  misc_RNA (1)...(19): siRNA sense strand
gaauuucuccuguuucauc

SEQ ID NO: 1318034 - RNA, 19 nt, Homo sapiens
  misc_RNA (1)...(19): siRNA sense strand
aaagaggauuucaacagaa

SEQ ID NO: 1318035 - RNA, 19 nt, Homo sapiens
  misc_RNA (1)...(19): siRNA sense strand
guaccgcugcucagaauuu

SEQ ID NO: 1318036 - RNA, 19 nt, Homo sapiens
  misc_RNA (1)...(19): siRNA sense strand
ccaggacgaugaauuuaag

SEQ ID NO: 1318037 - RNA, 19 nt, Homo sapiens
  misc_RNA (1)...(19): siRNA sense strand
ccaauucuuugauucacuu

SEQ ID NO: 1318038 - RNA, 19 nt, Homo sapiens
  misc_RNA (1)...(19): siRNA sense strand
ccgguguccuuauuacaua

SEQ ID NO: 1318039 - RNA, 19 nt, Homo sapiens
  misc_RNA (1)...(19): siRNA sense strand
cagcaaguguuucuuaacu

SEQ ID NO: 1318040 - RNA, 19 nt, Homo sapiens
  misc_RNA (1)...(19): siRNA sense strand
uaacggaaccagccgagaa

SEQ ID NO: 1318041 - RNA, 19 nt, Homo sapiens
  misc_RNA (1)...(19): siRNA sense strand
cuacaaugcggauuuaaug

SEQ ID NO: 1318042 - RNA, 19 nt, Homo sapiens
  misc_RNA (1)...(19): siRNA sense strand
uaacgucucgcaauuacuu

SEQ ID NO: 1318043 - RNA, 19 nt, Homo sapiens
  misc_RNA (1)...(19): siRNA sense strand
cccgugacguccaguauuu

SEQ ID NO: 1318044 - RNA, 19 nt, Homo sapiens
  misc_RNA (1)...(19): siRNA sense strand
ggcauccaauucuuugauu

SEQ ID NO: 1318045 - RNA, 19 nt, Homo sapiens
  misc_RNA (1)...(19): siRNA sense strand
gaaauuugucugcaugaag

SEQ ID NO: 1318046 - RNA, 19 nt, Homo sapiens
  misc_RNA (1)...(19): siRNA sense strand
ggguaccgcugcucagaau

SEQ ID NO: 1318047 - RNA, 19 nt, Homo sapiens
  misc_RNA (1)...(19): siRNA sense strand
ugaaauuugucugcaugaa

SEQ ID NO: 1318048 - RNA, 19 nt, Homo sapiens
  misc_RNA (1)...(19): siRNA sense strand
gcauccaauucuuugauuc

SEQ ID NO: 1318049 - RNA, 19 nt, Homo sapiens
  misc_RNA (1)...(19): siRNA sense strand
caagccuucugcucuguga

SEQ ID NO: 1318050 - RNA, 19 nt, Homo sapiens
  misc_RNA (1)...(19): siRNA sense strand
gauccgguguccuuauuac

SEQ ID NO: 1318051 - RNA, 19 nt, Homo sapiens
  misc_RNA (1)...(19): siRNA sense strand
cgugaauacuagucaaaga

SEQ ID NO: 1318052 - RNA, 19 nt, Homo sapiens
  misc_RNA (1)...(19): siRNA sense strand
cuucagcaaguguuucuua

SEQ ID NO: 1318053 - RNA, 19 nt, Homo sapiens
  misc_RNA (1)...(19): siRNA sense strand
gaugucaccuggauaaccu

SEQ ID NO: 1318054 - RNA, 19 nt, Homo sapiens
  misc_RNA (1)...(19): siRNA sense strand
caugaaggagucacauuug

SEQ ID NO: 1318055 - RNA, 19 nt, Homo sapiens
  misc_RNA (1)...(19): siRNA sense strand
ucaccuggauaaccuguca

SEQ ID NO: 1318056 - RNA, 19 nt, Homo sapiens
  misc_RNA (1)...(19): siRNA sense strand
ggagauccgguguccuuau

SEQ ID NO: 1318057 - RNA, 19 nt, Homo sapiens
  misc_RNA (1)...(19): siRNA sense strand
ucaaagaggauuucaacag

SEQ ID NO: 1318058 - RNA, 19 nt, Homo sapiens
  misc_RNA (1)...(19): siRNA sense strand
guacauacgaaacucaaag

SEQ ID NO: 1318059 - RNA, 19 nt, Homo sapiens
  misc_RNA (1)...(19): siRNA sense strand
augaaggagucacauuuga

SEQ ID NO: 1318060 - RNA, 19 nt, Homo sapiens
  misc_RNA (1)...(19): siRNA sense strand
cagaaacugcuuuauccaa

SEQ ID NO: 1318061 - RNA, 19 nt, Homo sapiens
  misc_RNA (1)...(19): siRNA sense strand
caaugcggauuuaaugaac

SEQ ID NO: 1318062 - RNA, 19 nt, Homo sapiens
  misc_RNA (1)...(19): siRNA sense strand
cauacgaaacucaaagaga

SEQ ID NO: 1318063 - RNA, 19 nt, Homo sapiens
  misc_RNA (1)...(19): siRNA sense strand
acaaugcggauuuaaugaa

SEQ ID NO: 1318064 - RNA, 19 nt, Homo sapiens
  misc_RNA (1)...(19): siRNA sense strand
ucacgugaauacuagucaa

SEQ ID NO: 1318065 - RNA, 19 nt, Homo sapiens
  misc_RNA (1)...(19): siRNA sense strand
caaccuucagcaaguguuu

SEQ ID NO: 1318066 - RNA, 19 nt, Homo sapiens
  misc_RNA (1)...(19): siRNA sense strand
aacagaaacugcuuuaucc

SEQ ID NO: 1318067 - RNA, 19 nt, Homo sapiens
  misc_RNA (1)...(19): siRNA sense strand
gacaagccuucugcucugu

SEQ ID NO: 1318068 - RNA, 19 nt, Homo sapiens
  misc_RNA (1)...(19): siRNA sense strand
gaaccagccgagaaauugg

SEQ ID NO: 1318069 - RNA, 19 nt, Homo sapiens
  misc_RNA (1)...(19): siRNA sense strand
aaucggaucugcgaacagu

SEQ ID NO: 1318070 - RNA, 19 nt, Homo sapiens
  misc_RNA (1)...(19): siRNA sense strand
guggaacccaggcucagua

SEQ ID NO: 1318071 - RNA, 19 nt, Homo sapiens
  misc_RNA (1)...(19): siRNA sense strand
acacaaccuucagcaagug

SEQ ID NO: 1318072 - RNA, 19 nt, Homo sapiens
  misc_RNA (1)...(19): siRNA sense strand
ugggaugucaccuggauaa

SEQ ID NO: 1318073 - RNA, 19 nt, Homo sapiens
  misc_RNA (1)...(19): siRNA sense strand
uaacugacaagaagaacag

SEQ ID NO: 1318074 - RNA, 19 nt, Homo sapiens
  misc_RNA (1)...(19): siRNA sense strand
aacacaaccuucagcaagu

SEQ ID NO: 1318075 - RNA, 19 nt, Homo sapiens
  misc_RNA (1)...(19): siRNA sense strand
acuccaggacgaugaauuu

SEQ ID NO: 1318076 - RNA, 19 nt, Homo sapiens
  misc_RNA (1)...(19): siRNA sense strand
aagcugggacugccaagaa

SEQ ID NO: 1318077 - RNA, 19 nt, Homo sapiens
  misc_RNA (1)...(19): siRNA sense strand
uucagcaaguguuucuuaa

SEQ ID NO: 1318078 - RNA, 19 nt, Homo sapiens
  misc_RNA (1)...(19): siRNA sense strand
cggaaccagccgagaaauu

SEQ ID NO: 1318079 - RNA, 19 nt, Homo sapiens
  misc_RNA (1)...(19): siRNA sense strand
gcucaguaacaacgaaugu

SEQ ID NO: 1318080 - RNA, 19 nt, Homo sapiens
  misc_RNA (1)...(19): siRNA sense strand
gaggguaccgcugcucaga

SEQ ID NO: 1318081 - RNA, 19 nt, Homo sapiens
  misc_RNA (1)...(19): siRNA sense strand
cauccaauucuuugauuca

SEQ ID NO: 1318082 - RNA, 19 nt, Homo sapiens
  misc_RNA (1)...(19): siRNA sense strand
caagaaaacacaaccuuca

SEQ ID NO: 1318083 - RNA, 19 nt, Homo sapiens
  misc_RNA (1)...(19): siRNA sense strand
uacaaugcggauuuaauga

SEQ ID NO: 1318084 - RNA, 19 nt, Homo sapiens
  misc_RNA (1)...(19): siRNA sense strand
gggagauccgguguccuua

SEQ ID NO: 1318085 - RNA, 19 nt, Homo sapiens
  misc_RNA (1)...(19): siRNA sense strand
gcggauuuaaugaacugua

SEQ ID NO: 1318086 - RNA, 19 nt, Homo sapiens
  misc_RNA (1)...(19): siRNA sense strand
ucaucuacaaugcggauuu

SEQ ID NO: 1318087 - RNA, 19 nt, Homo sapiens
  misc_RNA (1)...(19): siRNA sense strand
uccaggacgaugaauuuaa

SEQ ID NO: 1318088 - RNA, 19 nt, Homo sapiens
  misc_RNA (1)...(19): siRNA sense strand
cggauuuaaugaacuguac

SEQ ID NO: 1318089 - RNA, 19 nt, Homo sapiens
  misc_RNA (1)...(19): siRNA sense strand
ugugggaugucaccuggau

SEQ ID NO: 1318090 - RNA, 19 nt, Homo sapiens
  misc_RNA (1)...(19): siRNA sense strand
gcaauuacuuucugguuaa

SEQ ID NO: 1318091 - RNA, 19 nt, Homo sapiens
  misc_RNA (1)...(19): siRNA sense strand
caaagaggauuucaacaga

SEQ ID NO: 1318092 - RNA, 19 nt, Homo sapiens
  misc_RNA (1)...(19): siRNA sense strand
gcaaguguuucuuaacuga

SEQ ID NO: 1318093 - RNA, 19 nt, Homo sapiens
  misc_RNA (1)...(19): siRNA sense strand
ggauuaacgucucgcaauu

SEQ ID NO: 1318094 - RNA, 19 nt, Homo sapiens
  misc_RNA (1)...(19): siRNA sense strand
gcaccagccucuagucuca

SEQ ID NO: 1318095 - RNA, 19 nt, Homo sapiens
  misc_RNA (1)...(19): siRNA sense strand
gagauccgguguccuuauu

SEQ ID NO: 1318096 - RNA, 19 nt, Homo sapiens
  misc_RNA (1)...(19): siRNA sense strand
gaaacugcuuuauccaaau

SEQ ID NO: 1318097 - RNA, 19 nt, Homo sapiens
  misc_RNA (1)...(19): siRNA sense strand
auacgaaacucaaagagaa

SEQ ID NO: 1318098 - RNA, 19 nt, Homo sapiens
  misc_RNA (1)...(19): siRNA sense strand
caacagaaacugcuuuauc

SEQ ID NO: 1318099 - RNA, 19 nt, Homo sapiens
  misc_RNA (1)...(19): siRNA sense strand
caucuacaaugcggauuua

SEQ ID NO: 1318100 - RNA, 19 nt, Homo sapiens
  misc_RNA (1)...(19): siRNA sense strand
gcaugaaggagucacauuu

SEQ ID NO: 1318101 - RNA, 19 nt, Homo sapiens
  misc_RNA (1)...(19): siRNA sense strand
agaaacugcuuuauccaaa

SEQ ID NO: 1318102 - RNA, 19 nt, Homo sapiens
  misc_RNA (1)...(19): siRNA sense strand
cgcaauuacuuucugguua

SEQ ID NO: 1318103 - RNA, 19 nt, Homo sapiens
  misc_RNA (1)...(19): siRNA sense strand
ggaaccagccgagaaauug

SEQ ID NO: 1318104 - RNA, 19 nt, Homo sapiens
  misc_RNA (1)...(19): siRNA sense strand
gaaaucggaucugcgaaca

SEQ ID NO: 1318105 - RNA, 19 nt, Homo sapiens
  misc_RNA (1)...(19): siRNA sense strand
gaacccaggcucaguaaca

SEQ ID NO: 1318106 - RNA, 19 nt, Homo sapiens
  misc_RNA (1)...(19): siRNA sense strand
gauuaacgucucgcaauua

SEQ ID NO: 1318107 - RNA, 19 nt, Homo sapiens
  misc_RNA (1)...(19): siRNA sense strand
gaagaacagagucguggaa

SEQ ID NO: 1318108 - RNA, 19 nt, Homo sapiens
  misc_RNA (1)...(19): siRNA sense strand
gaauuucuccuguuucauc

SEQ ID NO: 1318109 - RNA, 19 nt, Homo sapiens
  misc_RNA (1)...(19): siRNA sense strand
aaagaggauuucaacagaa

SEQ ID NO: 1318110 - RNA, 19 nt, Homo sapiens
  misc_RNA (1)...(19): siRNA sense strand
guaccgcugcucagaauuu

SEQ ID NO: 1318111 - RNA, 19 nt, Homo sapiens
  misc_RNA (1)...(19): siRNA sense strand
ccaggacgaugaauuuaag

SEQ ID NO: 1318112 - RNA, 19 nt, Homo sapiens
  misc_RNA (1)...(19): siRNA sense strand
ccaauucuuugauucacuu

SEQ ID NO: 1318113 - RNA, 19 nt, Homo sapiens
  misc_RNA (1)...(19): siRNA sense strand
ccgguguccuuauuacaua

SEQ ID NO: 1318114 - RNA, 19 nt, Homo sapiens
  misc_RNA (1)...(19): siRNA sense strand
cagcaaguguuucuuaacu

SEQ ID NO: 1318115 - RNA, 19 nt, Homo sapiens
  misc_RNA (1)...(19): siRNA sense strand
uaacggaaccagccgagaa

SEQ ID NO: 1318116 - RNA, 19 nt, Homo sapiens
  misc_RNA (1)...(19): siRNA sense strand
cuacaaugcggauuuaaug

SEQ ID NO: 1318117 - RNA, 19 nt, Homo sapiens
  misc_RNA (1)...(19): siRNA sense strand
uaacgucucgcaauuacuu

SEQ ID NO: 1318118 - RNA, 19 nt, Homo sapiens
  misc_RNA (1)...(19): siRNA sense strand
cccgugacguccaguauuu

SEQ ID NO: 1318119 - RNA, 19 nt, Homo sapiens
  misc_RNA (1)...(19): siRNA sense strand
ggcauccaauucuuugauu

SEQ ID NO: 1318120 - RNA, 19 nt, Homo sapiens
  misc_RNA (1)...(19): siRNA sense strand
gaaauuugucugcaugaag

SEQ ID NO: 1318121 - RNA, 19 nt, Homo sapiens
  misc_RNA (1)...(19): siRNA sense strand
gaaaggcuaccgcgaagag

SEQ ID NO: 1318122 - RNA, 19 nt, Homo sapiens
  misc_RNA (1)...(19): siRNA sense strand
ggguaccgcugcucagaau

SEQ ID NO: 1318123 - RNA, 19 nt, Homo sapiens
  misc_RNA (1)...(19): siRNA sense strand
ugaaauuugucugcaugaa

SEQ ID NO: 1318124 - RNA, 19 nt, Homo sapiens
  misc_RNA (1)...(19): siRNA sense strand
gcauccaauucuuugauuc

SEQ ID NO: 1318125 - RNA, 19 nt, Homo sapiens
  misc_RNA (1)...(19): siRNA sense strand
caagccuucugcucuguga

SEQ ID NO: 1318126 - RNA, 19 nt, Homo sapiens
  misc_RNA (1)...(19): siRNA sense strand
gauccgguguccuuauuac

SEQ ID NO: 1318127 - RNA, 19 nt, Homo sapiens
  misc_RNA (1)...(19): siRNA sense strand
cgugaauacuagucaaaga

SEQ ID NO: 1318128 - RNA, 19 nt, Homo sapiens
  misc_RNA (1)...(19): siRNA sense strand
cuucagcaaguguuucuua

SEQ ID NO: 1318129 - RNA, 19 nt, Homo sapiens
  misc_RNA (1)...(19): siRNA sense strand
gaugucaccuggauaaccu

SEQ ID NO: 1318130 - RNA, 19 nt, Homo sapiens
  misc_RNA (1)...(19): siRNA sense strand
caugaaggagucacauuug

SEQ ID NO: 1318131 - RNA, 19 nt, Homo sapiens
  misc_RNA (1)...(19): siRNA sense strand
ucaccuggauaaccuguca

SEQ ID NO: 1318132 - RNA, 19 nt, Homo sapiens
  misc_RNA (1)...(19): siRNA sense strand
ggagauccgguguccuuau

SEQ ID NO: 1318133 - RNA, 19 nt, Homo sapiens
  misc_RNA (1)...(19): siRNA sense strand
ucaaagaggauuucaacag

SEQ ID NO: 1318134 - RNA, 19 nt, Homo sapiens
  misc_RNA (1)...(19): siRNA sense strand
guacauacgaaacucaaag

SEQ ID NO: 1318135 - RNA, 19 nt, Homo sapiens
  misc_RNA (1)...(19): siRNA sense strand
augaaggagucacauuuga

SEQ ID NO: 1318136 - RNA, 19 nt, Homo sapiens
  misc_RNA (1)...(19): siRNA sense strand
cagaaacugcuuuauccaa

SEQ ID NO: 1318137 - RNA, 19 nt, Homo sapiens
  misc_RNA (1)...(19): siRNA sense strand
caaugcggauuuaaugaac

SEQ ID NO: 1318138 - RNA, 19 nt, Homo sapiens
  misc_RNA (1)...(19): siRNA sense strand
gaucaucugggaggaauuc

SEQ ID NO: 1318139 - RNA, 19 nt, Homo sapiens
  misc_RNA (1)...(19): siRNA sense strand
cauacgaaacucaaagaga

SEQ ID NO: 1318140 - RNA, 19 nt, Homo sapiens
  misc_RNA (1)...(19): siRNA sense strand
acaaugcggauuuaaugaa

SEQ ID NO: 1318141 - RNA, 19 nt, Homo sapiens
  misc_RNA (1)...(19): siRNA sense strand
ucacgugaauacuagucaa

SEQ ID NO: 1318142 - RNA, 19 nt, Homo sapiens
  misc_RNA (1)...(19): siRNA sense strand
caaccuucagcaaguguuu

SEQ ID NO: 1318143 - RNA, 19 nt, Homo sapiens
  misc_RNA (1)...(19): siRNA sense strand
ggaauucaccccagaggaa

SEQ ID NO: 1318144 - RNA, 19 nt, Homo sapiens
  misc_RNA (1)...(19): siRNA sense strand
aacagaaacugcuuuaucc

SEQ ID NO: 1318145 - RNA, 19 nt, Homo sapiens
  misc_RNA (1)...(19): siRNA sense strand
gacaagccuucugcucugu

SEQ ID NO: 1318146 - RNA, 19 nt, Homo sapiens
  misc_RNA (1)...(19): siRNA sense strand
gaaccagccgagaaauugg

SEQ ID NO: 1318147 - RNA, 19 nt, Homo sapiens
  misc_RNA (1)...(19): siRNA sense strand
aaucggaucugcgaacagu

SEQ ID NO: 1318148 - RNA, 19 nt, Homo sapiens
  misc_RNA (1)...(19): siRNA sense strand
guggaacccaggcucagua

SEQ ID NO: 1318149 - RNA, 19 nt, Homo sapiens
  misc_RNA (1)...(19): siRNA sense strand
acacaaccuucagcaagug

SEQ ID NO: 1318150 - RNA, 19 nt, Homo sapiens
  misc_RNA (1)...(19): siRNA sense strand
ugggaugucaccuggauaa

SEQ ID NO: 1318151 - RNA, 19 nt, Homo sapiens
  misc_RNA (1)...(19): siRNA sense strand
uaacugacaagaagaacag

SEQ ID NO: 1318152 - RNA, 19 nt, Homo sapiens
  misc_RNA (1)...(19): siRNA sense strand
aacacaaccuucagcaagu

SEQ ID NO: 1318153 - RNA, 19 nt, Homo sapiens
  misc_RNA (1)...(19): siRNA sense strand
acuccaggacgaugaauuu

SEQ ID NO: 1318154 - RNA, 19 nt, Homo sapiens
  misc_RNA (1)...(19): siRNA sense strand
aagcugggacugccaagaa

SEQ ID NO: 1318155 - RNA, 19 nt, Homo sapiens
  misc_RNA (1)...(19): siRNA sense strand
uucagcaaguguuucuuaa

SEQ ID NO: 1318156 - RNA, 19 nt, Homo sapiens
  misc_RNA (1)...(19): siRNA sense strand
cggaaccagccgagaaauu

SEQ ID NO: 1318157 - RNA, 19 nt, Homo sapiens
  misc_RNA (1)...(19): siRNA sense strand
gcucaguaacaacgaaugu

SEQ ID NO: 1318158 - RNA, 19 nt, Homo sapiens
  misc_RNA (1)...(19): siRNA sense strand
gaggguaccgcugcucaga

SEQ ID NO: 1318159 - RNA, 19 nt, Homo sapiens
  misc_RNA (1)...(19): siRNA sense strand
cauccaauucuuugauuca

SEQ ID NO: 1318160 - RNA, 19 nt, Homo sapiens
  misc_RNA (1)...(19): siRNA sense strand
caagaaaacacaaccuuca

SEQ ID NO: 1318161 - RNA, 19 nt, Homo sapiens
  misc_RNA (1)...(19): siRNA sense strand
uacaaugcggauuuaauga

SEQ ID NO: 1318162 - RNA, 19 nt, Homo sapiens
  misc_RNA (1)...(19): siRNA sense strand
ggaaaggcuaccgcgaaga

SEQ ID NO: 1318163 - RNA, 19 nt, Homo sapiens
  misc_RNA (1)...(19): siRNA sense strand
gggagauccgguguccuua

SEQ ID NO: 1318164 - RNA, 19 nt, Homo sapiens
  misc_RNA (1)...(19): siRNA sense strand
gcggauuuaaugaacugua

SEQ ID NO: 1318165 - RNA, 19 nt, Homo sapiens
  misc_RNA (1)...(19): siRNA sense strand
uccaggacgaugaauuuaa

SEQ ID NO: 1318166 - RNA, 19 nt, Homo sapiens
  misc_RNA (1)...(19): siRNA sense strand
cggauuuaaugaacuguac

SEQ ID NO: 1318167 - RNA, 19 nt, Homo sapiens
  misc_RNA (1)...(19): siRNA sense strand
ucaucuacaaugcggauuu

SEQ ID NO: 1318168 - RNA, 19 nt, Homo sapiens
  misc_RNA (1)...(19): siRNA sense strand
ugugggaugucaccuggau

SEQ ID NO: 1318169 - RNA, 19 nt, Homo sapiens
  misc_RNA (1)...(19): siRNA sense strand
gcaauuacuuucugguuaa

SEQ ID NO: 1318170 - RNA, 19 nt, Homo sapiens
  misc_RNA (1)...(19): siRNA sense strand
caaagaggauuucaacaga

SEQ ID NO: 1318171 - RNA, 19 nt, Homo sapiens
  misc_RNA (1)...(19): siRNA sense strand
gcaaguguuucuuaacuga

SEQ ID NO: 1318172 - RNA, 19 nt, Homo sapiens
  misc_RNA (1)...(19): siRNA sense strand
ggauuaacgucucgcaauu

SEQ ID NO: 1318173 - RNA, 19 nt, Homo sapiens
  misc_RNA (1)...(19): siRNA sense strand
gcaccagccucuagucuca

SEQ ID NO: 1318174 - RNA, 19 nt, Homo sapiens
  misc_RNA (1)...(19): siRNA sense strand
gagauccgguguccuuauu

SEQ ID NO: 1318175 - RNA, 19 nt, Homo sapiens
  misc_RNA (1)...(19): siRNA sense strand
gaaacugcuuuauccaaau

SEQ ID NO: 1318176 - RNA, 19 nt, Homo sapiens
  misc_RNA (1)...(19): siRNA sense strand
auacgaaacucaaagagaa

SEQ ID NO: 1318177 - RNA, 19 nt, Homo sapiens
  misc_RNA (1)...(19): siRNA sense strand
caacagaaacugcuuuauc

SEQ ID NO: 1318178 - RNA, 19 nt, Homo sapiens
  misc_RNA (1)...(19): siRNA sense strand
caucuacaaugcggauuua

SEQ ID NO: 1318179 - RNA, 19 nt, Homo sapiens
  misc_RNA (1)...(19): siRNA sense strand
gcaugaaggagucacauuu

SEQ ID NO: 1318180 - RNA, 19 nt, Homo sapiens
  misc_RNA (1)...(19): siRNA sense strand
agaaacugcuuuauccaaa

SEQ ID NO: 1318181 - RNA, 19 nt, Homo sapiens
  misc_RNA (1)...(19): siRNA sense strand
cgcaauuacuuucugguua

SEQ ID NO: 1318182 - RNA, 19 nt, Homo sapiens
  misc_RNA (1)...(19): siRNA sense strand
ggaaccagccgagaaauug

SEQ ID NO: 1318183 - RNA, 19 nt, Homo sapiens
  misc_RNA (1)...(19): siRNA sense strand
gaaaucggaucugcgaaca

SEQ ID NO: 1318184 - RNA, 19 nt, Homo sapiens
  misc_RNA (1)...(19): siRNA sense strand
gaacccaggcucaguaaca

SEQ ID NO: 1318185 - RNA, 19 nt, Homo sapiens
  misc_RNA (1)...(19): siRNA sense strand
gauuaacgucucgcaauua

SEQ ID NO: 1318186 - RNA, 19 nt, Homo sapiens
  misc_RNA (1)...(19): siRNA sense strand
gaagaacagagucguggaa

SEQ ID NO: 1318187 - RNA, 19 nt, Homo sapiens
  misc_RNA (1)...(19): siRNA sense strand
gaauuucuccuguuucauc

SEQ ID NO: 1318188 - RNA, 19 nt, Homo sapiens
  misc_RNA (1)...(19): siRNA sense strand
aaagaggauuucaacagaa

SEQ ID NO: 1318189 - RNA, 19 nt, Homo sapiens
  misc_RNA (1)...(19): siRNA sense strand
guaccgcugcucagaauuu

SEQ ID NO: 1318190 - RNA, 19 nt, Homo sapiens
  misc_RNA (1)...(19): siRNA sense strand
ccaggacgaugaauuuaag

SEQ ID NO: 1318191 - RNA, 19 nt, Homo sapiens
  misc_RNA (1)...(19): siRNA sense strand
ccaauucuuugauucacuu

SEQ ID NO: 1318192 - RNA, 19 nt, Homo sapiens
  misc_RNA (1)...(19): siRNA sense strand
ccgguguccuuauuacaua

SEQ ID NO: 1318193 - RNA, 19 nt, Homo sapiens
  misc_RNA (1)...(19): siRNA sense strand
cagcaaguguuucuuaacu

SEQ ID NO: 1318194 - RNA, 19 nt, Homo sapiens
  misc_RNA (1)...(19): siRNA sense strand
uaacggaaccagccgagaa

SEQ ID NO: 1318195 - RNA, 19 nt, Homo sapiens
  misc_RNA (1)...(19): siRNA sense strand
cuacaaugcggauuuaaug

SEQ ID NO: 1318196 - RNA, 19 nt, Homo sapiens
  misc_RNA (1)...(19): siRNA sense strand
uaacgucucgcaauuacuu

SEQ ID NO: 1318197 - RNA, 19 nt, Homo sapiens
  misc_RNA (1)...(19): siRNA sense strand
cccgugacguccaguauuu

SEQ ID NO: 1318198 - RNA, 19 nt, Homo sapiens
  misc_RNA (1)...(19): siRNA sense strand
ggcauccaauucuuugauu

SEQ ID NO: 1318199 - RNA, 19 nt, Homo sapiens
  misc_RNA (1)...(19): siRNA sense strand
gaaauuugucugcaugaag

SEQ ID NO: 1318200 - RNA, 19 nt, Homo sapiens
  misc_RNA (1)...(19): siRNA sense strand
gaaaggcuaccgcgaagag

SEQ ID NO: 1318201 - RNA, 19 nt, Homo sapiens
  misc_RNA (1)...(19): siRNA sense strand
ggguaccgcugcucagaau

SEQ ID NO: 1318202 - RNA, 19 nt, Homo sapiens
  misc_RNA (1)...(19): siRNA sense strand
ugaaauuugucugcaugaa

SEQ ID NO: 1318203 - RNA, 19 nt, Homo sapiens
  misc_RNA (1)...(19): siRNA sense strand
gcauccaauucuuugauuc

SEQ ID NO: 1318204 - RNA, 19 nt, Homo sapiens
  misc_RNA (1)...(19): siRNA sense strand
caagccuucugcucuguga

SEQ ID NO: 1318205 - RNA, 19 nt, Homo sapiens
  misc_RNA (1)...(19): siRNA sense strand
gauccgguguccuuauuac

SEQ ID NO: 1318206 - RNA, 19 nt, Homo sapiens
  misc_RNA (1)...(19): siRNA sense strand
cgugaauacuagucaaaga

SEQ ID NO: 1318207 - RNA, 19 nt, Homo sapiens
  misc_RNA (1)...(19): siRNA sense strand
cuucagcaaguguuucuua

SEQ ID NO: 1318208 - RNA, 19 nt, Homo sapiens
  misc_RNA (1)...(19): siRNA sense strand
gaugucaccuggauaaccu

SEQ ID NO: 1318209 - RNA, 19 nt, Homo sapiens
  misc_RNA (1)...(19): siRNA sense strand
caugaaggagucacauuug

SEQ ID NO: 1318210 - RNA, 19 nt, Homo sapiens
  misc_RNA (1)...(19): siRNA sense strand
ucaccuggauaaccuguca

SEQ ID NO: 1318211 - RNA, 19 nt, Homo sapiens
  misc_RNA (1)...(19): siRNA sense strand
ggagauccgguguccuuau

SEQ ID NO: 1318212 - RNA, 19 nt, Homo sapiens
  misc_RNA (1)...(19): siRNA sense strand
ucaaagaggauuucaacag

SEQ ID NO: 1318213 - RNA, 19 nt, Homo sapiens
  misc_RNA (1)...(19): siRNA sense strand
guacauacgaaacucaaag

SEQ ID NO: 1318214 - RNA, 19 nt, Homo sapiens
  misc_RNA (1)...(19): siRNA sense strand
augaaggagucacauuuga

SEQ ID NO: 1318215 - RNA, 19 nt, Homo sapiens
  misc_RNA (1)...(19): siRNA sense strand
cagaaacugcuuuauccaa

SEQ ID NO: 1318216 - RNA, 19 nt, Homo sapiens
  misc_RNA (1)...(19): siRNA sense strand
caaugcggauuuaaugaac

SEQ ID NO: 1318217 - RNA, 19 nt, Homo sapiens
  misc_RNA (1)...(19): siRNA sense strand
gaucaucugggaggaauuc

SEQ ID NO: 1318218 - RNA, 19 nt, Homo sapiens
  misc_RNA (1)...(19): siRNA sense strand
cauacgaaacucaaagaga

SEQ ID NO: 1318219 - RNA, 19 nt, Homo sapiens
  misc_RNA (1)...(19): siRNA sense strand
acaaugcggauuuaaugaa

SEQ ID NO: 1318220 - RNA, 19 nt, Homo sapiens
  misc_RNA (1)...(19): siRNA sense strand
ucacgugaauacuagucaa

SEQ ID NO: 1318221 - RNA, 19 nt, Homo sapiens
  misc_RNA (1)...(19): siRNA sense strand
caaccuucagcaaguguuu

SEQ ID NO: 1318222 - RNA, 19 nt, Homo sapiens
  misc_RNA (1)...(19): siRNA sense strand
ggaauucaccccagaggaa

SEQ ID NO: 1318223 - RNA, 19 nt, Homo sapiens
  misc_RNA (1)...(19): siRNA sense strand
aacagaaacugcuuuaucc

SEQ ID NO: 1318224 - RNA, 19 nt, Homo sapiens
  misc_RNA (1)...(19): siRNA sense strand
gacaagccuucugcucugu

SEQ ID NO: 1318225 - RNA, 19 nt, Homo sapiens
  misc_RNA (1)...(19): siRNA sense strand
gaaccagccgagaaauugg

SEQ ID NO: 1318226 - RNA, 19 nt, Homo sapiens
  misc_RNA (1)...(19): siRNA sense strand
aaucggaucugcgaacagu

SEQ ID NO: 1318227 - RNA, 19 nt, Homo sapiens
  misc_RNA (1)...(19): siRNA sense strand
guggaacccaggcucagua

SEQ ID NO: 1318228 - RNA, 19 nt, Homo sapiens
  misc_RNA (1)...(19): siRNA sense strand
acacaaccuucagcaagug

SEQ ID NO: 1318229 - RNA, 19 nt, Homo sapiens
  misc_RNA (1)...(19): siRNA sense strand
ugggaugucaccuggauaa

SEQ ID NO: 1318230 - RNA, 19 nt, Homo sapiens
  misc_RNA (1)...(19): siRNA sense strand
uaacugacaagaagaacag

SEQ ID NO: 1318231 - RNA, 19 nt, Homo sapiens
  misc_RNA (1)...(19): siRNA sense strand
aacacaaccuucagcaagu

SEQ ID NO: 1318232 - RNA, 19 nt, Homo sapiens
  misc_RNA (1)...(19): siRNA sense strand
acuccaggacgaugaauuu

SEQ ID NO: 1318233 - RNA, 19 nt, Homo sapiens
  misc_RNA (1)...(19): siRNA sense strand
aagcugggacugccaagaa

SEQ ID NO: 1318234 - RNA, 19 nt, Homo sapiens
  misc_RNA (1)...(19): siRNA sense strand
uucagcaaguguuucuuaa

SEQ ID NO: 1318235 - RNA, 19 nt, Homo sapiens
  misc_RNA (1)...(19): siRNA sense strand
cggaaccagccgagaaauu

SEQ ID NO: 1318236 - RNA, 19 nt, Homo sapiens
  misc_RNA (1)...(19): siRNA sense strand
gcucaguaacaacgaaugu

SEQ ID NO: 1318237 - RNA, 19 nt, Homo sapiens
  misc_RNA (1)...(19): siRNA sense strand
gaggguaccgcugcucaga

SEQ ID NO: 1318238 - RNA, 19 nt, Homo sapiens
  misc_RNA (1)...(19): siRNA sense strand
cauccaauucuuugauuca

SEQ ID NO: 1318239 - RNA, 19 nt, Homo sapiens
  misc_RNA (1)...(19): siRNA sense strand
caagaaaacacaaccuuca

SEQ ID NO: 1318240 - RNA, 19 nt, Homo sapiens
  misc_RNA (1)...(19): siRNA sense strand
uacaaugcggauuuaauga

SEQ ID NO: 1318241 - RNA, 19 nt, Homo sapiens
  misc_RNA (1)...(19): siRNA sense strand
ggaaaggcuaccgcgaaga

SEQ ID NO: 1318242 - RNA, 19 nt, Homo sapiens
  misc_RNA (1)...(19): siRNA sense strand
gggagauccgguguccuua

SEQ ID NO: 1318243 - RNA, 19 nt, Homo sapiens
  misc_RNA (1)...(19): siRNA sense strand
gcggauuuaaugaacugua

SEQ ID NO: 1318244 - RNA, 19 nt, Homo sapiens
  misc_RNA (1)...(19): siRNA sense strand
uccaggacgaugaauuuaa

SEQ ID NO: 1318245 - RNA, 19 nt, Homo sapiens
  misc_RNA (1)...(19): siRNA sense strand
cggauuuaaugaacuguac

SEQ ID NO: 1318246 - RNA, 19 nt, Homo sapiens
  misc_RNA (1)...(19): siRNA sense strand
ucaucuacaaugcggauuu

SEQ ID NO: 1318247 - RNA, 19 nt, Homo sapiens
  misc_RNA (1)...(19): siRNA sense strand
ugugggaugucaccuggau

SEQ ID NO: 1318248 - RNA, 19 nt, Homo sapiens
  misc_RNA (1)...(19): siRNA sense strand
gcaauuacuuucugguuaa

SEQ ID NO: 1318249 - RNA, 19 nt, Homo sapiens
  misc_RNA (1)...(19): siRNA sense strand
caaagaggauuucaacaga

SEQ ID NO: 1318250 - RNA, 19 nt, Homo sapiens
  misc_RNA (1)...(19): siRNA sense strand
gcaaguguuucuuaacuga

SEQ ID NO: 1318251 - RNA, 19 nt, Homo sapiens
  misc_RNA (1)...(19): siRNA sense strand
ggauuaacgucucgcaauu

SEQ ID NO: 1318252 - RNA, 19 nt, Homo sapiens
  misc_RNA (1)...(19): siRNA sense strand
ugaaggaaauuaccugaga

SEQ ID NO: 1318253 - RNA, 19 nt, Homo sapiens
  misc_RNA (1)...(19): siRNA sense strand
gcaccagccucuagucuca

SEQ ID NO: 1318254 - RNA, 19 nt, Homo sapiens
  misc_RNA (1)...(19): siRNA sense strand
gagauccgguguccuuauu

SEQ ID NO: 1318255 - RNA, 19 nt, Homo sapiens
  misc_RNA (1)...(19): siRNA sense strand
gaaacugcuuuauccaaau

SEQ ID NO: 1318256 - RNA, 19 nt, Homo sapiens
  misc_RNA (1)...(19): siRNA sense strand
auacgaaacucaaagagaa

SEQ ID NO: 1318257 - RNA, 19 nt, Homo sapiens
  misc_RNA (1)...(19): siRNA sense strand
caacagaaacugcuuuauc

SEQ ID NO: 1318258 - RNA, 19 nt, Homo sapiens
  misc_RNA (1)...(19): siRNA sense strand
caucuacaaugcggauuua

SEQ ID NO: 1318259 - RNA, 19 nt, Homo sapiens
  misc_RNA (1)...(19): siRNA sense strand
gcaugaaggagucacauuu

SEQ ID NO: 1318260 - RNA, 19 nt, Homo sapiens
  misc_RNA (1)...(19): siRNA sense strand
agaaacugcuuuauccaaa

SEQ ID NO: 1318261 - RNA, 19 nt, Homo sapiens
  misc_RNA (1)...(19): siRNA sense strand
cgcaauuacuuucugguua

SEQ ID NO: 1318262 - RNA, 19 nt, Homo sapiens
  misc_RNA (1)...(19): siRNA sense strand
ggaaccagccgagaaauug

SEQ ID NO: 1318263 - RNA, 19 nt, Homo sapiens
  misc_RNA (1)...(19): siRNA sense strand
gcugugaaccuuuauauca

SEQ ID NO: 1318264 - RNA, 19 nt, Homo sapiens
  misc_RNA (1)...(19): siRNA sense strand
gaaaucggaucugcgaaca

SEQ ID NO: 1318265 - RNA, 19 nt, Homo sapiens
  misc_RNA (1)...(19): siRNA sense strand
gaacccaggcucaguaaca

SEQ ID NO: 1318266 - RNA, 19 nt, Homo sapiens
  misc_RNA (1)...(19): siRNA sense strand
gauuaacgucucgcaauua

SEQ ID NO: 1318267 - RNA, 19 nt, Homo sapiens
  misc_RNA (1)...(19): siRNA sense strand
gaagaacagagucguggaa

SEQ ID NO: 1318268 - RNA, 19 nt, Homo sapiens
  misc_RNA (1)...(19): siRNA sense strand
gaauuucuccuguuucauc

SEQ ID NO: 1318269 - RNA, 19 nt, Homo sapiens
  misc_RNA (1)...(19): siRNA sense strand
aaagaggauuucaacagaa

SEQ ID NO: 1318270 - RNA, 19 nt, Homo sapiens
  misc_RNA (1)...(19): siRNA sense strand
guaccgcugcucagaauuu

SEQ ID NO: 1318271 - RNA, 19 nt, Homo sapiens
  misc_RNA (1)...(19): siRNA sense strand
ccaggacgaugaauuuaag

SEQ ID NO: 1318272 - RNA, 19 nt, Homo sapiens
  misc_RNA (1)...(19): siRNA sense strand
ccaauucuuugauucacuu

SEQ ID NO: 1318273 - RNA, 19 nt, Homo sapiens
  misc_RNA (1)...(19): siRNA sense strand
ccgguguccuuauuacaua

SEQ ID NO: 1318274 - RNA, 19 nt, Homo sapiens
  misc_RNA (1)...(19): siRNA sense strand
cagcaaguguuucuuaacu

SEQ ID NO: 1318275 - RNA, 19 nt, Homo sapiens
  misc_RNA (1)...(19): siRNA sense strand
ggaauggcauggacaucuc

SEQ ID NO: 1318276 - RNA, 19 nt, Homo sapiens
  misc_RNA (1)...(19): siRNA sense strand
uaacggaaccagccgagaa

SEQ ID NO: 1318277 - RNA, 19 nt, Homo sapiens
  misc_RNA (1)...(19): siRNA sense strand
cuacaaugcggauuuaaug

SEQ ID NO: 1318278 - RNA, 19 nt, Homo sapiens
  misc_RNA (1)...(19): siRNA sense strand
uaacgucucgcaauuacuu

SEQ ID NO: 1318279 - RNA, 19 nt, Homo sapiens
  misc_RNA (1)...(19): siRNA sense strand
cccgugacguccaguauuu

SEQ ID NO: 1318280 - RNA, 19 nt, Homo sapiens
  misc_RNA (1)...(19): siRNA sense strand
ggcauccaauucuuugauu

SEQ ID NO: 1318281 - RNA, 19 nt, Homo sapiens
  misc_RNA (1)...(19): siRNA sense strand
gaaauuugucugcaugaag

SEQ ID NO: 1318282 - RNA, 19 nt, Homo sapiens
  misc_RNA (1)...(19): siRNA sense strand
gaaaggcuaccgcgaagag

SEQ ID NO: 1318283 - RNA, 19 nt, Homo sapiens
  misc_RNA (1)...(19): siRNA sense strand
ggguaccgcugcucagaau

SEQ ID NO: 1318284 - RNA, 19 nt, Homo sapiens
  misc_RNA (1)...(19): siRNA sense strand
ugaaauuugucugcaugaa

SEQ ID NO: 1318285 - RNA, 19 nt, Homo sapiens
  misc_RNA (1)...(19): siRNA sense strand
gcauccaauucuuugauuc

SEQ ID NO: 1318286 - RNA, 19 nt, Homo sapiens
  misc_RNA (1)...(19): siRNA sense strand
caagccuucugcucuguga

SEQ ID NO: 1318287 - RNA, 19 nt, Homo sapiens
  misc_RNA (1)...(19): siRNA sense strand
gauccgguguccuuauuac

SEQ ID NO: 1318288 - RNA, 19 nt, Homo sapiens
  misc_RNA (1)...(19): siRNA sense strand
cgugaauacuagucaaaga

SEQ ID NO: 1318289 - RNA, 19 nt, Homo sapiens
  misc_RNA (1)...(19): siRNA sense strand
cuucagcaaguguuucuua

SEQ ID NO: 1318290 - RNA, 19 nt, Homo sapiens
  misc_RNA (1)...(19): siRNA sense strand
gaugucaccuggauaaccu

SEQ ID NO: 1318291 - RNA, 19 nt, Homo sapiens
  misc_RNA (1)...(19): siRNA sense strand
caugaaggagucacauuug

SEQ ID NO: 1318292 - RNA, 19 nt, Homo sapiens
  misc_RNA (1)...(19): siRNA sense strand
augaugcugugaaccuuua

SEQ ID NO: 1318293 - RNA, 19 nt, Homo sapiens
  misc_RNA (1)...(19): siRNA sense strand
ucaccuggauaaccuguca

SEQ ID NO: 1318294 - RNA, 19 nt, Homo sapiens
  misc_RNA (1)...(19): siRNA sense strand
ggagauccgguguccuuau

SEQ ID NO: 1318295 - RNA, 19 nt, Homo sapiens
  misc_RNA (1)...(19): siRNA sense strand
ucaaagaggauuucaacag

SEQ ID NO: 1318296 - RNA, 19 nt, Homo sapiens
  misc_RNA (1)...(19): siRNA sense strand
guacauacgaaacucaaag

SEQ ID NO: 1318297 - RNA, 19 nt, Homo sapiens
  misc_RNA (1)...(19): siRNA sense strand
ggaacuguuuucuugauga

SEQ ID NO: 1318298 - RNA, 19 nt, Homo sapiens
  misc_RNA (1)...(19): siRNA sense strand
augaaggagucacauuuga

SEQ ID NO: 1318299 - RNA, 19 nt, Homo sapiens
  misc_RNA (1)...(19): siRNA sense strand
gaugaugcugugaaccuuu

SEQ ID NO: 1318300 - RNA, 19 nt, Homo sapiens
  misc_RNA (1)...(19): siRNA sense strand
cagaaacugcuuuauccaa

SEQ ID NO: 1318301 - RNA, 19 nt, Homo sapiens
  misc_RNA (1)...(19): siRNA sense strand
caaugcggauuuaaugaac

SEQ ID NO: 1318302 - RNA, 19 nt, Homo sapiens
  misc_RNA (1)...(19): siRNA sense strand
gaucaucugggaggaauuc

SEQ ID NO: 1318303 - RNA, 19 nt, Homo sapiens
  misc_RNA (1)...(19): siRNA sense strand
cauacgaaacucaaagaga

SEQ ID NO: 1318304 - RNA, 19 nt, Homo sapiens
  misc_RNA (1)...(19): siRNA sense strand
acaaugcggauuuaaugaa

SEQ ID NO: 1318305 - RNA, 19 nt, Homo sapiens
  misc_RNA (1)...(19): siRNA sense strand
ucacgugaauacuagucaa

SEQ ID NO: 1318306 - RNA, 19 nt, Homo sapiens
  misc_RNA (1)...(19): siRNA sense strand
caaccuucagcaaguguuu

SEQ ID NO: 1318307 - RNA, 19 nt, Homo sapiens
  misc_RNA (1)...(19): siRNA sense strand
ggaauucaccccagaggaa

SEQ ID NO: 1318308 - RNA, 19 nt, Homo sapiens
  misc_RNA (1)...(19): siRNA sense strand
aacagaaacugcuuuaucc

SEQ ID NO: 1318309 - RNA, 19 nt, Homo sapiens
  misc_RNA (1)...(19): siRNA sense strand
gacaagccuucugcucugu

SEQ ID NO: 1318310 - RNA, 19 nt, Homo sapiens
  misc_RNA (1)...(19): siRNA sense strand
aaucggaucugcgaacagu

SEQ ID NO: 1318311 - RNA, 19 nt, Homo sapiens
  misc_RNA (1)...(19): siRNA sense strand
gaaccagccgagaaauugg

SEQ ID NO: 1318312 - RNA, 19 nt, Homo sapiens
  misc_RNA (1)...(19): siRNA sense strand
guggaacccaggcucagua

SEQ ID NO: 1318313 - RNA, 19 nt, Homo sapiens
  misc_RNA (1)...(19): siRNA sense strand
acacaaccuucagcaagug

SEQ ID NO: 1318314 - RNA, 19 nt, Homo sapiens
  misc_RNA (1)...(19): siRNA sense strand
ugggaugucaccuggauaa

SEQ ID NO: 1318315 - RNA, 19 nt, Homo sapiens
  misc_RNA (1)...(19): siRNA sense strand
uaacugacaagaagaacag

SEQ ID NO: 1318316 - RNA, 19 nt, Homo sapiens
  misc_RNA (1)...(19): siRNA sense strand
aagcugggacugccaagaa

SEQ ID NO: 1318317 - RNA, 19 nt, Homo sapiens
  misc_RNA (1)...(19): siRNA sense strand
gaugcugugaaccuuuaua

SEQ ID NO: 1318318 - RNA, 19 nt, Homo sapiens
  misc_RNA (1)...(19): siRNA sense strand
acuccaggacgaugaauuu

SEQ ID NO: 1318319 - RNA, 19 nt, Homo sapiens
  misc_RNA (1)...(19): siRNA sense strand
aacacaaccuucagcaagu

SEQ ID NO: 1318320 - RNA, 19 nt, Homo sapiens
  misc_RNA (1)...(19): siRNA sense strand
uucagcaaguguuucuuaa

SEQ ID NO: 1318321 - RNA, 19 nt, Homo sapiens
  misc_RNA (1)...(19): siRNA sense strand
gaacuguuuucuugaugau

SEQ ID NO: 1318322 - RNA, 19 nt, Homo sapiens
  misc_RNA (1)...(19): siRNA sense strand
cggaaccagccgagaaauu

SEQ ID NO: 1318323 - RNA, 19 nt, Homo sapiens
  misc_RNA (1)...(19): siRNA sense strand
gcucaguaacaacgaaugu

SEQ ID NO: 1318324 - RNA, 19 nt, Homo sapiens
  misc_RNA (1)...(19): siRNA sense strand
gaggguaccgcugcucaga

SEQ ID NO: 1318325 - RNA, 19 nt, Homo sapiens
  misc_RNA (1)...(19): siRNA sense strand
cauccaauucuuugauuca

SEQ ID NO: 1318326 - RNA, 19 nt, Homo sapiens
  misc_RNA (1)...(19): siRNA sense strand
caagaaaacacaaccuuca

SEQ ID NO: 1318327 - RNA, 19 nt, Homo sapiens
  misc_RNA (1)...(19): siRNA sense strand
uacaaugcggauuuaauga

SEQ ID NO: 1318328 - RNA, 19 nt, Homo sapiens
  misc_RNA (1)...(19): siRNA sense strand
ggaaaggcuaccgcgaaga

SEQ ID NO: 1318329 - RNA, 19 nt, Homo sapiens
  misc_RNA (1)...(19): siRNA sense strand
gggagauccgguguccuua

SEQ ID NO: 1318330 - RNA, 19 nt, Homo sapiens
  misc_RNA (1)...(19): siRNA sense strand
gcggauuuaaugaacugua

SEQ ID NO: 1318331 - RNA, 19 nt, Homo sapiens
  misc_RNA (1)...(19): siRNA sense strand
uccaggacgaugaauuuaa

SEQ ID NO: 1318332 - RNA, 19 nt, Homo sapiens
  misc_RNA (1)...(19): siRNA sense strand
cggauuuaaugaacuguac

SEQ ID NO: 1318333 - RNA, 19 nt, Homo sapiens
  misc_RNA (1)...(19): siRNA sense strand
ucaucuacaaugcggauuu

SEQ ID NO: 1318334 - RNA, 19 nt, Homo sapiens
  misc_RNA (1)...(19): siRNA sense strand
ugaugaugcugugaaccuu

SEQ ID NO: 1318335 - RNA, 19 nt, Homo sapiens
  misc_RNA (1)...(19): siRNA sense strand
cugugaaccuuuauaucau

SEQ ID NO: 1318336 - RNA, 19 nt, Homo sapiens
  misc_RNA (1)...(19): siRNA sense strand
ugugggaugucaccuggau

SEQ ID NO: 1318337 - RNA, 19 nt, Homo sapiens
  misc_RNA (1)...(19): siRNA sense strand
gcaauuacuuucugguuaa

SEQ ID NO: 1318338 - RNA, 19 nt, Homo sapiens
  misc_RNA (1)...(19): siRNA sense strand
caaagaggauuucaacaga

SEQ ID NO: 1318339 - RNA, 19 nt, Homo sapiens
  misc_RNA (1)...(19): siRNA sense strand
gcaaguguuucuuaacuga

SEQ ID NO: 1318340 - RNA, 19 nt, Homo sapiens
  misc_RNA (1)...(19): siRNA sense strand
ggauuaacgucucgcaauu

SEQ ID NO: 1318341 - RNA, 19 nt, Homo sapiens
  misc_RNA (1)...(19): siRNA sense strand
gcaccagccucuagucuca

SEQ ID NO: 1318342 - RNA, 19 nt, Homo sapiens
  misc_RNA (1)...(19): siRNA sense strand
gagauccgguguccuuauu

SEQ ID NO: 1318343 - RNA, 19 nt, Homo sapiens
  misc_RNA (1)...(19): siRNA sense strand
gaaacugcuuuauccaaau

SEQ ID NO: 1318344 - RNA, 19 nt, Homo sapiens
  misc_RNA (1)...(19): siRNA sense strand
auacgaaacucaaagagaa

SEQ ID NO: 1318345 - RNA, 19 nt, Homo sapiens
  misc_RNA (1)...(19): siRNA sense strand
caacagaaacugcuuuauc

SEQ ID NO: 1318346 - RNA, 19 nt, Homo sapiens
  misc_RNA (1)...(19): siRNA sense strand
caucuacaaugcggauuua

SEQ ID NO: 1318347 - RNA, 19 nt, Homo sapiens
  misc_RNA (1)...(19): siRNA sense strand
gcaugaaggagucacauuu

SEQ ID NO: 1318348 - RNA, 19 nt, Homo sapiens
  misc_RNA (1)...(19): siRNA sense strand
agaaacugcuuuauccaaa

SEQ ID NO: 1318349 - RNA, 19 nt, Homo sapiens
  misc_RNA (1)...(19): siRNA sense strand
cgcaauuacuuucugguua

SEQ ID NO: 1318350 - RNA, 19 nt, Homo sapiens
  misc_RNA (1)...(19): siRNA sense strand
ggaaccagccgagaaauug

SEQ ID NO: 1318351 - RNA, 19 nt, Homo sapiens
  misc_RNA (1)...(19): siRNA sense strand
gaaaucggaucugcgaaca

SEQ ID NO: 1318352 - RNA, 19 nt, Homo sapiens
  misc_RNA (1)...(19): siRNA sense strand
gaacccaggcucaguaaca

SEQ ID NO: 1318353 - RNA, 19 nt, Homo sapiens
  misc_RNA (1)...(19): siRNA sense strand
gauuaacgucucgcaauua

SEQ ID NO: 1318354 - RNA, 19 nt, Homo sapiens
  misc_RNA (1)...(19): siRNA sense strand
gaagaacagagucguggaa

SEQ ID NO: 1318355 - RNA, 19 nt, Homo sapiens
  misc_RNA (1)...(19): siRNA sense strand
gaauuucuccuguuucauc

SEQ ID NO: 1318356 - RNA, 19 nt, Homo sapiens
  misc_RNA (1)...(19): siRNA sense strand
aaagaggauuucaacagaa

SEQ ID NO: 1318357 - RNA, 19 nt, Homo sapiens
  misc_RNA (1)...(19): siRNA sense strand
guaccgcugcucagaauuu

SEQ ID NO: 1318358 - RNA, 19 nt, Homo sapiens
  misc_RNA (1)...(19): siRNA sense strand
ccaggacgaugaauuuaag

SEQ ID NO: 1318359 - RNA, 19 nt, Homo sapiens
  misc_RNA (1)...(19): siRNA sense strand
ccaauucuuugauucacuu

SEQ ID NO: 1318360 - RNA, 19 nt, Homo sapiens
  misc_RNA (1)...(19): siRNA sense strand
ccgguguccuuauuacaua

SEQ ID NO: 1318361 - RNA, 19 nt, Homo sapiens
  misc_RNA (1)...(19): siRNA sense strand
cagcaaguguuucuuaacu

SEQ ID NO: 1318362 - RNA, 19 nt, Homo sapiens
  misc_RNA (1)...(19): siRNA sense strand
uaacggaaccagccgagaa

SEQ ID NO: 1318363 - RNA, 19 nt, Homo sapiens
  misc_RNA (1)...(19): siRNA sense strand
cuacaaugcggauuuaaug

SEQ ID NO: 1318364 - RNA, 19 nt, Homo sapiens
  misc_RNA (1)...(19): siRNA sense strand
uaacgucucgcaauuacuu

SEQ ID NO: 1318365 - RNA, 19 nt, Homo sapiens
  misc_RNA (1)...(19): siRNA sense strand
cccgugacguccaguauuu

SEQ ID NO: 1318366 - RNA, 19 nt, Homo sapiens
  misc_RNA (1)...(19): siRNA sense strand
ggcauccaauucuuugauu

SEQ ID NO: 1318367 - RNA, 19 nt, Homo sapiens
  misc_RNA (1)...(19): siRNA sense strand
gaaauuugucugcaugaag

SEQ ID NO: 1318368 - RNA, 19 nt, Homo sapiens
  misc_RNA (1)...(19): siRNA sense strand
ggguaccgcugcucagaau

SEQ ID NO: 1318369 - RNA, 19 nt, Homo sapiens
  misc_RNA (1)...(19): siRNA sense strand
ugaaauuugucugcaugaa

SEQ ID NO: 1318370 - RNA, 19 nt, Homo sapiens
  misc_RNA (1)...(19): siRNA sense strand
gcauccaauucuuugauuc

SEQ ID NO: 1318371 - RNA, 19 nt, Homo sapiens
  misc_RNA (1)...(19): siRNA sense strand
caagccuucugcucuguga

SEQ ID NO: 1318372 - RNA, 19 nt, Homo sapiens
  misc_RNA (1)...(19): siRNA sense strand
gauccgguguccuuauuac

SEQ ID NO: 1318373 - RNA, 19 nt, Homo sapiens
  misc_RNA (1)...(19): siRNA sense strand
cgugaauacuagucaaaga

SEQ ID NO: 1318374 - RNA, 19 nt, Homo sapiens
  misc_RNA (1)...(19): siRNA sense strand
cuucagcaaguguuucuua

SEQ ID NO: 1318375 - RNA, 19 nt, Homo sapiens
  misc_RNA (1)...(19): siRNA sense strand
gaugucaccuggauaaccu

SEQ ID NO: 1318376 - RNA, 19 nt, Homo sapiens
  misc_RNA (1)...(19): siRNA sense strand
caugaaggagucacauuug

SEQ ID NO: 1318377 - RNA, 19 nt, Homo sapiens
  misc_RNA (1)...(19): siRNA sense strand
ucaccuggauaaccuguca

SEQ ID NO: 1318378 - RNA, 19 nt, Homo sapiens
  misc_RNA (1)...(19): siRNA sense strand
ggagauccgguguccuuau

SEQ ID NO: 1318379 - RNA, 19 nt, Homo sapiens
  misc_RNA (1)...(19): siRNA sense strand
ucaaagaggauuucaacag

SEQ ID NO: 1318380 - RNA, 19 nt, Homo sapiens
  misc_RNA (1)...(19): siRNA sense strand
guacauacgaaacucaaag

SEQ ID NO: 1318381 - RNA, 19 nt, Homo sapiens
  misc_RNA (1)...(19): siRNA sense strand
augaaggagucacauuuga

SEQ ID NO: 1318382 - RNA, 19 nt, Homo sapiens
  misc_RNA (1)...(19): siRNA sense strand
cagaaacugcuuuauccaa

SEQ ID NO: 1318383 - RNA, 19 nt, Homo sapiens
  misc_RNA (1)...(19): siRNA sense strand
caaugcggauuuaaugaac

SEQ ID NO: 1318384 - RNA, 19 nt, Homo sapiens
  misc_RNA (1)...(19): siRNA sense strand
cauacgaaacucaaagaga

SEQ ID NO: 1318385 - RNA, 19 nt, Homo sapiens
  misc_RNA (1)...(19): siRNA sense strand
acaaugcggauuuaaugaa

SEQ ID NO: 1318386 - RNA, 19 nt, Homo sapiens
  misc_RNA (1)...(19): siRNA sense strand
ucacgugaauacuagucaa

SEQ ID NO: 1318387 - RNA, 19 nt, Homo sapiens
  misc_RNA (1)...(19): siRNA sense strand
caaccuucagcaaguguuu

SEQ ID NO: 1318388 - RNA, 19 nt, Homo sapiens
  misc_RNA (1)...(19): siRNA sense strand
aacagaaacugcuuuaucc

SEQ ID NO: 1318389 - RNA, 19 nt, Homo sapiens
  misc_RNA (1)...(19): siRNA sense strand
gacaagccuucugcucugu

SEQ ID NO: 1318390 - RNA, 19 nt, Homo sapiens
  misc_RNA (1)...(19): siRNA sense strand
gaaccagccgagaaauugg

SEQ ID NO: 1318391 - RNA, 19 nt, Homo sapiens
  misc_RNA (1)...(19): siRNA sense strand
aaucggaucugcgaacagu

SEQ ID NO: 1318392 - RNA, 19 nt, Homo sapiens
  misc_RNA (1)...(19): siRNA sense strand
guggaacccaggcucagua

SEQ ID NO: 1318393 - RNA, 19 nt, Homo sapiens
  misc_RNA (1)...(19): siRNA sense strand
acacaaccuucagcaagug

SEQ ID NO: 1318394 - RNA, 19 nt, Homo sapiens
  misc_RNA (1)...(19): siRNA sense strand
ugggaugucaccuggauaa

SEQ ID NO: 1318395 - RNA, 19 nt, Homo sapiens
  misc_RNA (1)...(19): siRNA sense strand
uaacugacaagaagaacag

SEQ ID NO: 1318396 - RNA, 19 nt, Homo sapiens
  misc_RNA (1)...(19): siRNA sense strand
aacacaaccuucagcaagu

SEQ ID NO: 1318397 - RNA, 19 nt, Homo sapiens
  misc_RNA (1)...(19): siRNA sense strand
acuccaggacgaugaauuu

SEQ ID NO: 1318398 - RNA, 19 nt, Homo sapiens
  misc_RNA (1)...(19): siRNA sense strand
aagcugggacugccaagaa

SEQ ID NO: 1318399 - RNA, 19 nt, Homo sapiens
  misc_RNA (1)...(19): siRNA sense strand
uucagcaaguguuucuuaa

SEQ ID NO: 1318400 - RNA, 19 nt, Homo sapiens
  misc_RNA (1)...(19): siRNA sense strand
cggaaccagccgagaaauu

SEQ ID NO: 1318401 - RNA, 19 nt, Homo sapiens
  misc_RNA (1)...(19): siRNA sense strand
gcucaguaacaacgaaugu

SEQ ID NO: 1318402 - RNA, 19 nt, Homo sapiens
  misc_RNA (1)...(19): siRNA sense strand
gaggguaccgcugcucaga

SEQ ID NO: 1318403 - RNA, 19 nt, Homo sapiens
  misc_RNA (1)...(19): siRNA sense strand
cauccaauucuuugauuca

SEQ ID NO: 1318404 - RNA, 19 nt, Homo sapiens
  misc_RNA (1)...(19): siRNA sense strand
caagaaaacacaaccuuca

SEQ ID NO: 1318405 - RNA, 19 nt, Homo sapiens
  misc_RNA (1)...(19): siRNA sense strand
uacaaugcggauuuaauga

SEQ ID NO: 1318406 - RNA, 19 nt, Homo sapiens
  misc_RNA (1)...(19): siRNA sense strand
gggagauccgguguccuua

SEQ ID NO: 1318407 - RNA, 19 nt, Homo sapiens
  misc_RNA (1)...(19): siRNA sense strand
gcggauuuaaugaacugua

SEQ ID NO: 1318408 - RNA, 19 nt, Homo sapiens
  misc_RNA (1)...(19): siRNA sense strand
ucaucuacaaugcggauuu

SEQ ID NO: 1318409 - RNA, 19 nt, Homo sapiens
  misc_RNA (1)...(19): siRNA sense strand
uccaggacgaugaauuuaa

SEQ ID NO: 1318410 - RNA, 19 nt, Homo sapiens
  misc_RNA (1)...(19): siRNA sense strand
cggauuuaaugaacuguac

SEQ ID NO: 1318411 - RNA, 19 nt, Homo sapiens
  misc_RNA (1)...(19): siRNA sense strand
ugugggaugucaccuggau

SEQ ID NO: 1318412 - RNA, 19 nt, Homo sapiens
  misc_RNA (1)...(19): siRNA sense strand
gcaauuacuuucugguuaa

SEQ ID NO: 1318413 - RNA, 19 nt, Homo sapiens
  misc_RNA (1)...(19): siRNA sense strand
caaagaggauuucaacaga

SEQ ID NO: 1318414 - RNA, 19 nt, Homo sapiens
  misc_RNA (1)...(19): siRNA sense strand
gcaaguguuucuuaacuga

SEQ ID NO: 1318415 - RNA, 19 nt, Homo sapiens
  misc_RNA (1)...(19): siRNA sense strand
ggauuaacgucucgcaauu

SEQ ID NO: 1318416 - RNA, 19 nt, Homo sapiens
  misc_RNA (1)...(19): siRNA sense strand
gcaccagccucuagucuca

SEQ ID NO: 1318417 - RNA, 19 nt, Homo sapiens
  misc_RNA (1)...(19): siRNA sense strand
gagauccgguguccuuauu

SEQ ID NO: 1318418 - RNA, 19 nt, Homo sapiens
  misc_RNA (1)...(19): siRNA sense strand
gaaacugcuuuauccaaau

SEQ ID NO: 1318419 - RNA, 19 nt, Homo sapiens
  misc_RNA (1)...(19): siRNA sense strand
auacgaaacucaaagagaa

SEQ ID NO: 1318420 - RNA, 19 nt, Homo sapiens
  misc_RNA (1)...(19): siRNA sense strand
caacagaaacugcuuuauc

SEQ ID NO: 1318421 - RNA, 19 nt, Homo sapiens
  misc_RNA (1)...(19): siRNA sense strand
caucuacaaugcggauuua

SEQ ID NO: 1318422 - RNA, 19 nt, Homo sapiens
  misc_RNA (1)...(19): siRNA sense strand
gcaugaaggagucacauuu

SEQ ID NO: 1318423 - RNA, 19 nt, Homo sapiens
  misc_RNA (1)...(19): siRNA sense strand
agaaacugcuuuauccaaa

SEQ ID NO: 1318424 - RNA, 19 nt, Homo sapiens
  misc_RNA (1)...(19): siRNA sense strand
cgcaauuacuuucugguua

SEQ ID NO: 1318425 - RNA, 19 nt, Homo sapiens
  misc_RNA (1)...(19): siRNA sense strand
ggaaccagccgagaaauug

SEQ ID NO: 1318426 - RNA, 19 nt, Homo sapiens
  misc_RNA (1)...(19): siRNA sense strand
gaaaucggaucugcgaaca

SEQ ID NO: 1318427 - RNA, 19 nt, Homo sapiens
  misc_RNA (1)...(19): siRNA sense strand
gaacccaggcucaguaaca

SEQ ID NO: 1318428 - RNA, 19 nt, Homo sapiens
  misc_RNA (1)...(19): siRNA sense strand
gauuaacgucucgcaauua

SEQ ID NO: 1318429 - RNA, 19 nt, Homo sapiens
  misc_RNA (1)...(19): siRNA sense strand
gaagaacagagucguggaa

SEQ ID NO: 1318430 - RNA, 19 nt, Homo sapiens
  misc_RNA (1)...(19): siRNA sense strand
gaauuucuccuguuucauc

SEQ ID NO: 1318431 - RNA, 19 nt, Homo sapiens
  misc_RNA (1)...(19): siRNA sense strand
aaagaggauuucaacagaa

SEQ ID NO: 1318432 - RNA, 19 nt, Homo sapiens
  misc_RNA (1)...(19): siRNA sense strand
guaccgcugcucagaauuu

SEQ ID NO: 1318433 - RNA, 19 nt, Homo sapiens
  misc_RNA (1)...(19): siRNA sense strand
ccaggacgaugaauuuaag

SEQ ID NO: 1318434 - RNA, 19 nt, Homo sapiens
  misc_RNA (1)...(19): siRNA sense strand
ccaauucuuugauucacuu

SEQ ID NO: 1318435 - RNA, 19 nt, Homo sapiens
  misc_RNA (1)...(19): siRNA sense strand
ccgguguccuuauuacaua

SEQ ID NO: 1318436 - RNA, 19 nt, Homo sapiens
  misc_RNA (1)...(19): siRNA sense strand
cagcaaguguuucuuaacu

SEQ ID NO: 1318437 - RNA, 19 nt, Homo sapiens
  misc_RNA (1)...(19): siRNA sense strand
uaacggaaccagccgagaa

SEQ ID NO: 1318438 - RNA, 19 nt, Homo sapiens
  misc_RNA (1)...(19): siRNA sense strand
cuacaaugcggauuuaaug

SEQ ID NO: 1318439 - RNA, 19 nt, Homo sapiens
  misc_RNA (1)...(19): siRNA sense strand
uaacgucucgcaauuacuu

SEQ ID NO: 1318440 - RNA, 19 nt, Homo sapiens
  misc_RNA (1)...(19): siRNA sense strand
cccgugacguccaguauuu

SEQ ID NO: 1318441 - RNA, 19 nt, Homo sapiens
  misc_RNA (1)...(19): siRNA sense strand
ggcauccaauucuuugauu

SEQ ID NO: 1318442 - RNA, 19 nt, Homo sapiens
  misc_RNA (1)...(19): siRNA sense strand
gaaauuugucugcaugaag

SEQ ID NO: 1318443 - RNA, 19 nt, Homo sapiens
  misc_RNA (1)...(19): siRNA sense strand
ggguaccgcugcucagaau

SEQ ID NO: 1318444 - RNA, 19 nt, Homo sapiens
  misc_RNA (1)...(19): siRNA sense strand
ugaaauuugucugcaugaa

SEQ ID NO: 1318445 - RNA, 19 nt, Homo sapiens
  misc_RNA (1)...(19): siRNA sense strand
gcauccaauucuuugauuc

SEQ ID NO: 1318446 - RNA, 19 nt, Homo sapiens
  misc_RNA (1)...(19): siRNA sense strand
caagccuucugcucuguga

SEQ ID NO: 1318447 - RNA, 19 nt, Homo sapiens
  misc_RNA (1)...(19): siRNA sense strand
gauccgguguccuuauuac

SEQ ID NO: 1318448 - RNA, 19 nt, Homo sapiens
  misc_RNA (1)...(19): siRNA sense strand
cgugaauacuagucaaaga

SEQ ID NO: 1318449 - RNA, 19 nt, Homo sapiens
  misc_RNA (1)...(19): siRNA sense strand
cuucagcaaguguuucuua

SEQ ID NO: 1318450 - RNA, 19 nt, Homo sapiens
  misc_RNA (1)...(19): siRNA sense strand
gaugucaccuggauaaccu

SEQ ID NO: 1318451 - RNA, 19 nt, Homo sapiens
  misc_RNA (1)...(19): siRNA sense strand
caugaaggagucacauuug

SEQ ID NO: 1318452 - RNA, 19 nt, Homo sapiens
  misc_RNA (1)...(19): siRNA sense strand
ucaccuggauaaccuguca

SEQ ID NO: 1318453 - RNA, 19 nt, Homo sapiens
  misc_RNA (1)...(19): siRNA sense strand
ggagauccgguguccuuau

SEQ ID NO: 1318454 - RNA, 19 nt, Homo sapiens
  misc_RNA (1)...(19): siRNA sense strand
ucaaagaggauuucaacag

SEQ ID NO: 1318455 - RNA, 19 nt, Homo sapiens
  misc_RNA (1)...(19): siRNA sense strand
guacauacgaaacucaaag

SEQ ID NO: 1318456 - RNA, 19 nt, Homo sapiens
  misc_RNA (1)...(19): siRNA sense strand
augaaggagucacauuuga

SEQ ID NO: 1318457 - RNA, 19 nt, Homo sapiens
  misc_RNA (1)...(19): siRNA sense strand
cagaaacugcuuuauccaa

SEQ ID NO: 1318458 - RNA, 19 nt, Homo sapiens
  misc_RNA (1)...(19): siRNA sense strand
caaugcggauuuaaugaac

SEQ ID NO: 1318459 - RNA, 19 nt, Homo sapiens
  misc_RNA (1)...(19): siRNA sense strand
cauacgaaacucaaagaga

SEQ ID NO: 1318460 - RNA, 19 nt, Homo sapiens
  misc_RNA (1)...(19): siRNA sense strand
acaaugcggauuuaaugaa

SEQ ID NO: 1318461 - RNA, 19 nt, Homo sapiens
  misc_RNA (1)...(19): siRNA sense strand
ucacgugaauacuagucaa

SEQ ID NO: 1318462 - RNA, 19 nt, Homo sapiens
  misc_RNA (1)...(19): siRNA sense strand
caaccuucagcaaguguuu

SEQ ID NO: 1318463 - RNA, 19 nt, Homo sapiens
  misc_RNA (1)...(19): siRNA sense strand
aacagaaacugcuuuaucc

SEQ ID NO: 1318464 - RNA, 19 nt, Homo sapiens
  misc_RNA (1)...(19): siRNA sense strand
gacaagccuucugcucugu

SEQ ID NO: 1318465 - RNA, 19 nt, Homo sapiens
  misc_RNA (1)...(19): siRNA sense strand
gaaccagccgagaaauugg

SEQ ID NO: 1318466 - RNA, 19 nt, Homo sapiens
  misc_RNA (1)...(19): siRNA sense strand
aaucggaucugcgaacagu

SEQ ID NO: 1318467 - RNA, 19 nt, Homo sapiens
  misc_RNA (1)...(19): siRNA sense strand
guggaacccaggcucagua

SEQ ID NO: 1318468 - RNA, 19 nt, Homo sapiens
  misc_RNA (1)...(19): siRNA sense strand
acacaaccuucagcaagug

SEQ ID NO: 1318469 - RNA, 19 nt, Homo sapiens
  misc_RNA (1)...(19): siRNA sense strand
ugggaugucaccuggauaa

SEQ ID NO: 1318470 - RNA, 19 nt, Homo sapiens
  misc_RNA (1)...(19): siRNA sense strand
uaacugacaagaagaacag

SEQ ID NO: 1318471 - RNA, 19 nt, Homo sapiens
  misc_RNA (1)...(19): siRNA sense strand
aacacaaccuucagcaagu

SEQ ID NO: 1318472 - RNA, 19 nt, Homo sapiens
  misc_RNA (1)...(19): siRNA sense strand
acuccaggacgaugaauuu

SEQ ID NO: 1318473 - RNA, 19 nt, Homo sapiens
  misc_RNA (1)...(19): siRNA sense strand
aagcugggacugccaagaa

SEQ ID NO: 1318474 - RNA, 19 nt, Homo sapiens
  misc_RNA (1)...(19): siRNA sense strand
uucagcaaguguuucuuaa

SEQ ID NO: 1318475 - RNA, 19 nt, Homo sapiens
  misc_RNA (1)...(19): siRNA sense strand
cggaaccagccgagaaauu

SEQ ID NO: 1318476 - RNA, 19 nt, Homo sapiens
  misc_RNA (1)...(19): siRNA sense strand
gcucaguaacaacgaaugu

SEQ ID NO: 1318477 - RNA, 19 nt, Homo sapiens
  misc_RNA (1)...(19): siRNA sense strand
gaggguaccgcugcucaga

SEQ ID NO: 1318478 - RNA, 19 nt, Homo sapiens
  misc_RNA (1)...(19): siRNA sense strand
cauccaauucuuugauuca

SEQ ID NO: 1318479 - RNA, 19 nt, Homo sapiens
  misc_RNA (1)...(19): siRNA sense strand
caagaaaacacaaccuuca

SEQ ID NO: 1318480 - RNA, 19 nt, Homo sapiens
  misc_RNA (1)...(19): siRNA sense strand
uacaaugcggauuuaauga

SEQ ID NO: 1318481 - RNA, 19 nt, Homo sapiens
  misc_RNA (1)...(19): siRNA sense strand
gggagauccgguguccuua

SEQ ID NO: 1318482 - RNA, 19 nt, Homo sapiens
  misc_RNA (1)...(19): siRNA sense strand
gcggauuuaaugaacugua

SEQ ID NO: 1318483 - RNA, 19 nt, Homo sapiens
  misc_RNA (1)...(19): siRNA sense strand
ucaucuacaaugcggauuu

SEQ ID NO: 1318484 - RNA, 19 nt, Homo sapiens
  misc_RNA (1)...(19): siRNA sense strand
uccaggacgaugaauuuaa

SEQ ID NO: 1318485 - RNA, 19 nt, Homo sapiens
  misc_RNA (1)...(19): siRNA sense strand
cggauuuaaugaacuguac

SEQ ID NO: 1318486 - RNA, 19 nt, Homo sapiens
  misc_RNA (1)...(19): siRNA sense strand
ugugggaugucaccuggau

SEQ ID NO: 1318487 - RNA, 19 nt, Homo sapiens
  misc_RNA (1)...(19): siRNA sense strand
gcaauuacuuucugguuaa

SEQ ID NO: 1318488 - RNA, 19 nt, Homo sapiens
  misc_RNA (1)...(19): siRNA sense strand
caaagaggauuucaacaga

SEQ ID NO: 1318489 - RNA, 19 nt, Homo sapiens
  misc_RNA (1)...(19): siRNA sense strand
gcaaguguuucuuaacuga

SEQ ID NO: 1318490 - RNA, 19 nt, Homo sapiens
  misc_RNA (1)...(19): siRNA sense strand
ggauuaacgucucgcaauu

SEQ ID NO: 1318491 - RNA, 19 nt, Homo sapiens
  misc_RNA (1)...(19): siRNA sense strand
gcaccagccucuagucuca

SEQ ID NO: 1318492 - RNA, 19 nt, Homo sapiens
  misc_RNA (1)...(19): siRNA sense strand
gagauccgguguccuuauu

SEQ ID NO: 1318493 - RNA, 19 nt, Homo sapiens
  misc_RNA (1)...(19): siRNA sense strand
gaaacugcuuuauccaaau

SEQ ID NO: 1318494 - RNA, 19 nt, Homo sapiens
  misc_RNA (1)...(19): siRNA sense strand
auacgaaacucaaagagaa

SEQ ID NO: 1318495 - RNA, 19 nt, Homo sapiens
  misc_RNA (1)...(19): siRNA sense strand
caacagaaacugcuuuauc

SEQ ID NO: 1318496 - RNA, 19 nt, Homo sapiens
  misc_RNA (1)...(19): siRNA sense strand
caucuacaaugcggauuua

SEQ ID NO: 1318497 - RNA, 19 nt, Homo sapiens
  misc_RNA (1)...(19): siRNA sense strand
gcaugaaggagucacauuu

SEQ ID NO: 1318498 - RNA, 19 nt, Homo sapiens
  misc_RNA (1)...(19): siRNA sense strand
agaaacugcuuuauccaaa

SEQ ID NO: 1318499 - RNA, 19 nt, Homo sapiens
  misc_RNA (1)...(19): siRNA sense strand
cgcaauuacuuucugguua

SEQ ID NO: 1318500 - RNA, 19 nt, Homo sapiens
  misc_RNA (1)...(19): siRNA sense strand
ggaaccagccgagaaauug

SEQ ID NO: 1318501 - RNA, 19 nt, Homo sapiens
  misc_RNA (1)...(19): siRNA sense strand
gaaaucggaucugcgaaca

SEQ ID NO: 1318502 - RNA, 19 nt, Homo sapiens
  misc_RNA (1)...(19): siRNA sense strand
gaacccaggcucaguaaca

SEQ ID NO: 1318503 - RNA, 19 nt, Homo sapiens
  misc_RNA (1)...(19): siRNA sense strand
gauuaacgucucgcaauua

SEQ ID NO: 1318504 - RNA, 19 nt, Homo sapiens
  misc_RNA (1)...(19): siRNA sense strand
gaagaacagagucguggaa

SEQ ID NO: 1318505 - RNA, 19 nt, Homo sapiens
  misc_RNA (1)...(19): siRNA sense strand
gaauuucuccuguuucauc

SEQ ID NO: 1318506 - RNA, 19 nt, Homo sapiens
  misc_RNA (1)...(19): siRNA sense strand
aaagaggauuucaacagaa

SEQ ID NO: 1318507 - RNA, 19 nt, Homo sapiens
  misc_RNA (1)...(19): siRNA sense strand
guaccgcugcucagaauuu

SEQ ID NO: 1318508 - RNA, 19 nt, Homo sapiens
  misc_RNA (1)...(19): siRNA sense strand
ccaggacgaugaauuuaag

SEQ ID NO: 1318509 - RNA, 19 nt, Homo sapiens
  misc_RNA (1)...(19): siRNA sense strand
ccaauucuuugauucacuu

SEQ ID NO: 1318510 - RNA, 19 nt, Homo sapiens
  misc_RNA (1)...(19): siRNA sense strand
ccgguguccuuauuacaua

SEQ ID NO: 1318511 - RNA, 19 nt, Homo sapiens
  misc_RNA (1)...(19): siRNA sense strand
cagcaaguguuucuuaacu

SEQ ID NO: 1318512 - RNA, 19 nt, Homo sapiens
  misc_RNA (1)...(19): siRNA sense strand
uaacggaaccagccgagaa

SEQ ID NO: 1318513 - RNA, 19 nt, Homo sapiens
  misc_RNA (1)...(19): siRNA sense strand
cuacaaugcggauuuaaug

SEQ ID NO: 1318514 - RNA, 19 nt, Homo sapiens
  misc_RNA (1)...(19): siRNA sense strand
uaacgucucgcaauuacuu

SEQ ID NO: 1318515 - RNA, 19 nt, Homo sapiens
  misc_RNA (1)...(19): siRNA sense strand
cccgugacguccaguauuu

SEQ ID NO: 1318516 - RNA, 19 nt, Homo sapiens
  misc_RNA (1)...(19): siRNA sense strand
ggcauccaauucuuugauu

SEQ ID NO: 1318517 - RNA, 19 nt, Homo sapiens
  misc_RNA (1)...(19): siRNA sense strand
gaaauuugucugcaugaag

SEQ ID NO: 1318518 - RNA, 19 nt, Homo sapiens
  misc_RNA (1)...(19): siRNA sense strand
ggguaccgcugcucagaau

SEQ ID NO: 1318519 - RNA, 19 nt, Homo sapiens
  misc_RNA (1)...(19): siRNA sense strand
ugaaauuugucugcaugaa

SEQ ID NO: 1318520 - RNA, 19 nt, Homo sapiens
  misc_RNA (1)...(19): siRNA sense strand
gcauccaauucuuugauuc

SEQ ID NO: 1318521 - RNA, 19 nt, Homo sapiens
  misc_RNA (1)...(19): siRNA sense strand
caagccuucugcucuguga

SEQ ID NO: 1318522 - RNA, 19 nt, Homo sapiens
  misc_RNA (1)...(19): siRNA sense strand
gauccgguguccuuauuac

SEQ ID NO: 1318523 - RNA, 19 nt, Homo sapiens
  misc_RNA (1)...(19): siRNA sense strand
cgugaauacuagucaaaga

SEQ ID NO: 1318524 - RNA, 19 nt, Homo sapiens
  misc_RNA (1)...(19): siRNA sense strand
cuucagcaaguguuucuua

SEQ ID NO: 1318525 - RNA, 19 nt, Homo sapiens
  misc_RNA (1)...(19): siRNA sense strand
gaugucaccuggauaaccu

SEQ ID NO: 1318526 - RNA, 19 nt, Homo sapiens
  misc_RNA (1)...(19): siRNA sense strand
caugaaggagucacauuug

SEQ ID NO: 1318527 - RNA, 19 nt, Homo sapiens
  misc_RNA (1)...(19): siRNA sense strand
ucaccuggauaaccuguca

SEQ ID NO: 1318528 - RNA, 19 nt, Homo sapiens
  misc_RNA (1)...(19): siRNA sense strand
ggagauccgguguccuuau

SEQ ID NO: 1318529 - RNA, 19 nt, Homo sapiens
  misc_RNA (1)...(19): siRNA sense strand
ucaaagaggauuucaacag

SEQ ID NO: 1318530 - RNA, 19 nt, Homo sapiens
  misc_RNA (1)...(19): siRNA sense strand
guacauacgaaacucaaag

SEQ ID NO: 1318531 - RNA, 19 nt, Homo sapiens
  misc_RNA (1)...(19): siRNA sense strand
augaaggagucacauuuga

SEQ ID NO: 1318532 - RNA, 19 nt, Homo sapiens
  misc_RNA (1)...(19): siRNA sense strand
cagaaacugcuuuauccaa

SEQ ID NO: 1318533 - RNA, 19 nt, Homo sapiens
  misc_RNA (1)...(19): siRNA sense strand
caaugcggauuuaaugaac

SEQ ID NO: 1318534 - RNA, 19 nt, Homo sapiens
  misc_RNA (1)...(19): siRNA sense strand
cauacgaaacucaaagaga

SEQ ID NO: 1318535 - RNA, 19 nt, Homo sapiens
  misc_RNA (1)...(19): siRNA sense strand
acaaugcggauuuaaugaa

SEQ ID NO: 1318536 - RNA, 19 nt, Homo sapiens
  misc_RNA (1)...(19): siRNA sense strand
ucacgugaauacuagucaa

SEQ ID NO: 1318537 - RNA, 19 nt, Homo sapiens
  misc_RNA (1)...(19): siRNA sense strand
caaccuucagcaaguguuu

SEQ ID NO: 1318538 - RNA, 19 nt, Homo sapiens
  misc_RNA (1)...(19): siRNA sense strand
aacagaaacugcuuuaucc

SEQ ID NO: 1318539 - RNA, 19 nt, Homo sapiens
  misc_RNA (1)...(19): siRNA sense strand
gacaagccuucugcucugu

SEQ ID NO: 1318540 - RNA, 19 nt, Homo sapiens
  misc_RNA (1)...(19): siRNA sense strand
gaaccagccgagaaauugg

SEQ ID NO: 1318541 - RNA, 19 nt, Homo sapiens
  misc_RNA (1)...(19): siRNA sense strand
aaucggaucugcgaacagu

SEQ ID NO: 1318542 - RNA, 19 nt, Homo sapiens
  misc_RNA (1)...(19): siRNA sense strand
guggaacccaggcucagua

SEQ ID NO: 1318543 - RNA, 19 nt, Homo sapiens
  misc_RNA (1)...(19): siRNA sense strand
acacaaccuucagcaagug

SEQ ID NO: 1318544 - RNA, 19 nt, Homo sapiens
  misc_RNA (1)...(19): siRNA sense strand
ugggaugucaccuggauaa

SEQ ID NO: 1318545 - RNA, 19 nt, Homo sapiens
  misc_RNA (1)...(19): siRNA sense strand
uaacugacaagaagaacag

SEQ ID NO: 1318546 - RNA, 19 nt, Homo sapiens
  misc_RNA (1)...(19): siRNA sense strand
aacacaaccuucagcaagu

SEQ ID NO: 1318547 - RNA, 19 nt, Homo sapiens
  misc_RNA (1)...(19): siRNA sense strand
acuccaggacgaugaauuu

SEQ ID NO: 1318548 - RNA, 19 nt, Homo sapiens
  misc_RNA (1)...(19): siRNA sense strand
aagcugggacugccaagaa

SEQ ID NO: 1318549 - RNA, 19 nt, Homo sapiens
  misc_RNA (1)...(19): siRNA sense strand
uucagcaaguguuucuuaa

SEQ ID NO: 1318550 - RNA, 19 nt, Homo sapiens
  misc_RNA (1)...(19): siRNA sense strand
cggaaccagccgagaaauu

SEQ ID NO: 1318551 - RNA, 19 nt, Homo sapiens
  misc_RNA (1)...(19): siRNA sense strand
gcucaguaacaacgaaugu

SEQ ID NO: 1318552 - RNA, 19 nt, Homo sapiens
  misc_RNA (1)...(19): siRNA sense strand
gaggguaccgcugcucaga

SEQ ID NO: 1318553 - RNA, 19 nt, Homo sapiens
  misc_RNA (1)...(19): siRNA sense strand
cauccaauucuuugauuca

SEQ ID NO: 1318554 - RNA, 19 nt, Homo sapiens
  misc_RNA (1)...(19): siRNA sense strand
caagaaaacacaaccuuca

SEQ ID NO: 1318555 - RNA, 19 nt, Homo sapiens
  misc_RNA (1)...(19): siRNA sense strand
uacaaugcggauuuaauga

SEQ ID NO: 1318556 - RNA, 19 nt, Homo sapiens
  misc_RNA (1)...(19): siRNA sense strand
gggagauccgguguccuua

SEQ ID NO: 1318557 - RNA, 19 nt, Homo sapiens
  misc_RNA (1)...(19): siRNA sense strand
gcggauuuaaugaacugua

SEQ ID NO: 1318558 - RNA, 19 nt, Homo sapiens
  misc_RNA (1)...(19): siRNA sense strand
ucaucuacaaugcggauuu

SEQ ID NO: 1318559 - RNA, 19 nt, Homo sapiens
  misc_RNA (1)...(19): siRNA sense strand
uccaggacgaugaauuuaa

SEQ ID NO: 1318560 - RNA, 19 nt, Homo sapiens
  misc_RNA (1)...(19): siRNA sense strand
cggauuuaaugaacuguac

SEQ ID NO: 1318561 - RNA, 19 nt, Homo sapiens
  misc_RNA (1)...(19): siRNA sense strand
ugugggaugucaccuggau

SEQ ID NO: 1318562 - RNA, 19 nt, Homo sapiens
  misc_RNA (1)...(19): siRNA sense strand
gaagguaccugaagaagaa

SEQ ID NO: 1318563 - RNA, 19 nt, Homo sapiens
  misc_RNA (1)...(19): siRNA sense strand
ccaaguaacucuccucuuu

SEQ ID NO: 1318564 - RNA, 19 nt, Homo sapiens
  misc_RNA (1)...(19): siRNA sense strand
gaagaggacccuuuaaauu

SEQ ID NO: 1318565 - RNA, 19 nt, Homo sapiens
  misc_RNA (1)...(19): siRNA sense strand
guaaagcaaccaagaaaua

SEQ ID NO: 1318566 - RNA, 19 nt, Homo sapiens
  misc_RNA (1)...(19): siRNA sense strand
gaagcgagaugaauccuau

SEQ ID NO: 1318567 - RNA, 19 nt, Homo sapiens
  misc_RNA (1)...(19): siRNA sense strand
gaaagaugguguuaugugu

SEQ ID NO: 1318568 - RNA, 19 nt, Homo sapiens
  misc_RNA (1)...(19): siRNA sense strand
agaagaagcugacaguauu

SEQ ID NO: 1318569 - RNA, 19 nt, Homo sapiens
  misc_RNA (1)...(19): siRNA sense strand
caaaguaggucuuccagau

SEQ ID NO: 1318570 - RNA, 19 nt, Homo sapiens
  misc_RNA (1)...(19): siRNA sense strand
ggaaaguucucacuauauc

SEQ ID NO: 1318571 - RNA, 19 nt, Homo sapiens
  misc_RNA (1)...(19): siRNA sense strand
ggauugauauucuugacua

SEQ ID NO: 1318572 - RNA, 19 nt, Homo sapiens
  misc_RNA (1)...(19): siRNA sense strand
ccacaggucucucaaacaa

SEQ ID NO: 1318573 - RNA, 19 nt, Homo sapiens
  misc_RNA (1)...(19): siRNA sense strand
caaauggacugaagcugaa

SEQ ID NO: 1318574 - RNA, 19 nt, Homo sapiens
  misc_RNA (1)...(19): siRNA sense strand
caggaaaguucucacuaua

SEQ ID NO: 1318575 - RNA, 19 nt, Homo sapiens
  misc_RNA (1)...(19): siRNA sense strand
ucaacagcaucauuaguua

SEQ ID NO: 1318576 - RNA, 19 nt, Homo sapiens
  misc_RNA (1)...(19): siRNA sense strand
gguuugagcugaugcguuu

SEQ ID NO: 1318577 - RNA, 19 nt, Homo sapiens
  misc_RNA (1)...(19): siRNA sense strand
gaaccaagacucacuuaga

SEQ ID NO: 1318578 - RNA, 19 nt, Homo sapiens
  misc_RNA (1)...(19): siRNA sense strand
acaaggagaugccuauuga

SEQ ID NO: 1318579 - RNA, 19 nt, Homo sapiens
  misc_RNA (1)...(19): siRNA sense strand
ccaaagacuucccagguuu

SEQ ID NO: 1318580 - RNA, 19 nt, Homo sapiens
  misc_RNA (1)...(19): siRNA sense strand
gaaaaugccucuuccuuug

SEQ ID NO: 1318581 - RNA, 19 nt, Homo sapiens
  misc_RNA (1)...(19): siRNA sense strand
gaagaaauaggaaguacaa

SEQ ID NO: 1318582 - RNA, 19 nt, Homo sapiens
  misc_RNA (1)...(19): siRNA sense strand
gcaaguauuucaacagcuu

SEQ ID NO: 1318583 - RNA, 19 nt, Homo sapiens
  misc_RNA (1)...(19): siRNA sense strand
gagcauacguggaacuuca

SEQ ID NO: 1318584 - RNA, 19 nt, Homo sapiens
  misc_RNA (1)...(19): siRNA sense strand
agauacagcuugauccaua

SEQ ID NO: 1318585 - RNA, 19 nt, Homo sapiens
  misc_RNA (1)...(19): siRNA sense strand
gauuuaagcauucggguua

SEQ ID NO: 1318586 - RNA, 19 nt, Homo sapiens
  misc_RNA (1)...(19): siRNA sense strand
agaagucucugaaagcuaa

SEQ ID NO: 1318587 - RNA, 19 nt, Homo sapiens
  misc_RNA (1)...(19): siRNA sense strand
gaaucuauuugcugaagaa

SEQ ID NO: 1318588 - RNA, 19 nt, Homo sapiens
  misc_RNA (1)...(19): siRNA sense strand
gaaucaaggugucuguaga

SEQ ID NO: 1318589 - RNA, 19 nt, Homo sapiens
  misc_RNA (1)...(19): siRNA sense strand
gcgcagaggucauccuaug

SEQ ID NO: 1318590 - RNA, 19 nt, Homo sapiens
  misc_RNA (1)...(19): siRNA sense strand
ggagaugccuauugaccaa

SEQ ID NO: 1318591 - RNA, 19 nt, Homo sapiens
  misc_RNA (1)...(19): siRNA sense strand
ggugauacaucuuccaaug

SEQ ID NO: 1318592 - RNA, 19 nt, Homo sapiens
  misc_RNA (1)...(19): siRNA sense strand
aaacuaguguuccacaauu

SEQ ID NO: 1318593 - RNA, 19 nt, Homo sapiens
  misc_RNA (1)...(19): siRNA sense strand
gagaugaauccuauuauga

SEQ ID NO: 1318594 - RNA, 19 nt, Homo sapiens
  misc_RNA (1)...(19): siRNA sense strand
uuaaagagauacagcuuga

SEQ ID NO: 1318595 - RNA, 19 nt, Homo sapiens
  misc_RNA (1)...(19): siRNA sense strand
ugaagaagguauagaggaa

SEQ ID NO: 1318596 - RNA, 19 nt, Homo sapiens
  misc_RNA (1)...(19): siRNA sense strand
agacagaaguaguucauga

SEQ ID NO: 1318597 - RNA, 19 nt, Homo sapiens
  misc_RNA (1)...(19): siRNA sense strand
gugagaagcuugaacaucu

SEQ ID NO: 1318598 - RNA, 19 nt, Homo sapiens
  misc_RNA (1)...(19): siRNA sense strand
guugagaacuucaguguag

SEQ ID NO: 1318599 - RNA, 19 nt, Homo sapiens
  misc_RNA (1)...(19): siRNA sense strand
gagcaaucaagaaucauua

SEQ ID NO: 1318600 - RNA, 19 nt, Homo sapiens
  misc_RNA (1)...(19): siRNA sense strand
uaaugaagacccucaagua

SEQ ID NO: 1318601 - RNA, 19 nt, Homo sapiens
  misc_RNA (1)...(19): siRNA sense strand
guauggaugugauucugua

SEQ ID NO: 1318602 - RNA, 19 nt, Homo sapiens
  misc_RNA (1)...(19): siRNA sense strand
gaaauucccucugauuggu

SEQ ID NO: 1318603 - RNA, 19 nt, Homo sapiens
  misc_RNA (1)...(19): siRNA sense strand
aggaggagcugaugaaguu

SEQ ID NO: 1318604 - RNA, 19 nt, Homo sapiens
  misc_RNA (1)...(19): siRNA sense strand
gagacuauguauuugcaaa

SEQ ID NO: 1318605 - RNA, 19 nt, Homo sapiens
  misc_RNA (1)...(19): siRNA sense strand
gaaugaauuucuagggaau

SEQ ID NO: 1318606 - RNA, 19 nt, Homo sapiens
  misc_RNA (1)...(19): siRNA sense strand
ccgcacagcuugcaccaaa

SEQ ID NO: 1318607 - RNA, 19 nt, Homo sapiens
  misc_RNA (1)...(19): siRNA sense strand
gcuacaacauccagccuaa

SEQ ID NO: 1318608 - RNA, 19 nt, Homo sapiens
  misc_RNA (1)...(19): siRNA sense strand
caaauuagagcuuggauca

SEQ ID NO: 1318609 - RNA, 19 nt, Homo sapiens
  misc_RNA (1)...(19): siRNA sense strand
cgagaugaauccuauuaug

SEQ ID NO: 1318610 - RNA, 19 nt, Homo sapiens
  misc_RNA (1)...(19): siRNA sense strand
gaaacaaggagaugccuau

SEQ ID NO: 1318611 - RNA, 19 nt, Homo sapiens
  misc_RNA (1)...(19): siRNA sense strand
gcauucggguuacugauga

SEQ ID NO: 1318612 - RNA, 19 nt, Homo sapiens
  misc_RNA (1)...(19): siRNA sense strand
ucaggaaaguucucacuau

SEQ ID NO: 1318613 - RNA, 19 nt, Homo sapiens
  misc_RNA (1)...(19): siRNA sense strand
gaaaaugccaccagugaua

SEQ ID NO: 1318614 - RNA, 19 nt, Homo sapiens
  misc_RNA (1)...(19): siRNA sense strand
aaacuccagugcaaacuuu

SEQ ID NO: 1318615 - RNA, 19 nt, Homo sapiens
  misc_RNA (1)...(19): siRNA sense strand
gcagcgagcuugcuacaac

SEQ ID NO: 1318616 - RNA, 19 nt, Homo sapiens
  misc_RNA (1)...(19): siRNA sense strand
gcagugguauggaagauag

SEQ ID NO: 1318617 - RNA, 19 nt, Homo sapiens
  misc_RNA (1)...(19): siRNA sense strand
gaugaauccuauuaugaga

SEQ ID NO: 1318618 - RNA, 19 nt, Homo sapiens
  misc_RNA (1)...(19): siRNA sense strand
gcagauguauuaugaacag

SEQ ID NO: 1318619 - RNA, 19 nt, Homo sapiens
  misc_RNA (1)...(19): siRNA sense strand
ugauacaucuuccaaugaa

SEQ ID NO: 1318620 - RNA, 19 nt, Homo sapiens
  misc_RNA (1)...(19): siRNA sense strand
gaagcaagaacaaauggaa

SEQ ID NO: 1318621 - RNA, 19 nt, Homo sapiens
  misc_RNA (1)...(19): siRNA sense strand
gcuguucaaucuucucaaa

SEQ ID NO: 1318622 - RNA, 19 nt, Homo sapiens
  misc_RNA (1)...(19): siRNA sense strand
gaagaagcugacaguauuu

SEQ ID NO: 1318623 - RNA, 19 nt, Homo sapiens
  misc_RNA (1)...(19): siRNA sense strand
gauaggaaacacuuagaaa

SEQ ID NO: 1318624 - RNA, 19 nt, Homo sapiens
  misc_RNA (1)...(19): siRNA sense strand
gaacugggcacuucaaacu

SEQ ID NO: 1318625 - RNA, 19 nt, Homo sapiens
  misc_RNA (1)...(19): siRNA sense strand
caagaaauucccucugauu

SEQ ID NO: 1318626 - RNA, 19 nt, Homo sapiens
  misc_RNA (1)...(19): siRNA sense strand
ucagguggauuuaagcauu

SEQ ID NO: 1318627 - RNA, 19 nt, Homo sapiens
  misc_RNA (1)...(19): siRNA sense strand
gaauuucuagggaauauug

SEQ ID NO: 1318628 - RNA, 19 nt, Homo sapiens
  misc_RNA (1)...(19): siRNA sense strand
gaaauaggaaguacaagag

SEQ ID NO: 1318629 - RNA, 19 nt, Homo sapiens
  misc_RNA (1)...(19): siRNA sense strand
aaccaagacucacuuagaa

SEQ ID NO: 1318630 - RNA, 19 nt, Homo sapiens
  misc_RNA (1)...(19): siRNA sense strand
aagaugguguuauguguuu

SEQ ID NO: 1318631 - RNA, 19 nt, Homo sapiens
  misc_RNA (1)...(19): siRNA sense strand
uggccagccuucaguaaua

SEQ ID NO: 1318632 - RNA, 19 nt, Homo sapiens
  misc_RNA (1)...(19): siRNA sense strand
cagcagaacugggcacuuc

SEQ ID NO: 1318633 - RNA, 19 nt, Homo sapiens
  misc_RNA (1)...(19): siRNA sense strand
gcugugauaacucaaauuu

SEQ ID NO: 1318634 - RNA, 19 nt, Homo sapiens
  misc_RNA (1)...(19): siRNA sense strand
gaacuacgaggagcaagaa

SEQ ID NO: 1318635 - RNA, 19 nt, Homo sapiens
  misc_RNA (1)...(19): siRNA sense strand
gaaccugucauucaaguca

SEQ ID NO: 1318636 - RNA, 19 nt, Homo sapiens
  misc_RNA (1)...(19): siRNA sense strand
guacaagaauuugagcaau

SEQ ID NO: 1318637 - RNA, 19 nt, Homo sapiens
  misc_RNA (1)...(19): siRNA sense strand
ccacaaacaguagugauaa

SEQ ID NO: 1318638 - RNA, 19 nt, Homo sapiens
  misc_RNA (1)...(19): siRNA sense strand
gagcugaugcguuucaaga

SEQ ID NO: 1318639 - RNA, 19 nt, Homo sapiens
  misc_RNA (1)...(19): siRNA sense strand
ggacucaugugcuuuaucc

SEQ ID NO: 1318640 - RNA, 19 nt, Homo sapiens
  misc_RNA (1)...(19): siRNA sense strand
gagagacuauguauuugca

SEQ ID NO: 1318641 - RNA, 19 nt, Homo sapiens
  misc_RNA (1)...(19): siRNA sense strand
guuauugucugucaguaug

SEQ ID NO: 1318642 - RNA, 19 nt, Homo sapiens
  misc_RNA (1)...(19): siRNA sense strand
ugaagacccucaaguaaac

SEQ ID NO: 1318643 - RNA, 19 nt, Homo sapiens
  misc_RNA (1)...(19): siRNA sense strand
gaagaagaagcugacagua

SEQ ID NO: 1318644 - RNA, 19 nt, Homo sapiens
  misc_RNA (1)...(19): siRNA sense strand
gaaguugccagcuguuuca

SEQ ID NO: 1318645 - RNA, 19 nt, Homo sapiens
  misc_RNA (1)...(19): siRNA sense strand
gaagaagaauaugaugucu

SEQ ID NO: 1318646 - RNA, 19 nt, Homo sapiens
  misc_RNA (1)...(19): siRNA sense strand
gauacagcuugauccauau

SEQ ID NO: 1318647 - RNA, 19 nt, Homo sapiens
  misc_RNA (1)...(19): siRNA sense strand
guacaagagaugcagauga

SEQ ID NO: 1318648 - RNA, 19 nt, Homo sapiens
  misc_RNA (1)...(19): siRNA sense strand
uaucuggucaccuuuauaa

SEQ ID NO: 1318649 - RNA, 19 nt, Homo sapiens
  misc_RNA (1)...(19): siRNA sense strand
ugaaggaguucggaaucua

SEQ ID NO: 1318650 - RNA, 19 nt, Homo sapiens
  misc_RNA (1)...(19): siRNA sense strand
agauugaacaugugucuua

SEQ ID NO: 1318651 - RNA, 19 nt, Homo sapiens
  misc_RNA (1)...(19): siRNA sense strand
gagaugcagaugagaauga

SEQ ID NO: 1318652 - RNA, 19 nt, Homo sapiens
  misc_RNA (1)...(19): siRNA sense strand
agggagagacuauguauuu

SEQ ID NO: 1318653 - RNA, 19 nt, Homo sapiens
  misc_RNA (1)...(19): siRNA sense strand
gcaagaacaaauggaaauu

SEQ ID NO: 1318654 - RNA, 19 nt, Homo sapiens
  misc_RNA (1)...(19): siRNA sense strand
uagaagaggacccuuuaaa

SEQ ID NO: 1318655 - RNA, 19 nt, Homo sapiens
  misc_RNA (1)...(19): siRNA sense strand
caaacaguagugauaauga

SEQ ID NO: 1318656 - RNA, 19 nt, Homo sapiens
  misc_RNA (1)...(19): siRNA sense strand
gagaaccaagacucacuua

SEQ ID NO: 1318657 - RNA, 19 nt, Homo sapiens
  misc_RNA (1)...(19): siRNA sense strand
gggagagacuauguauuug

SEQ ID NO: 1318658 - RNA, 19 nt, Homo sapiens
  misc_RNA (1)...(19): siRNA sense strand
caagagaugcagaugagaa

SEQ ID NO: 1318659 - RNA, 19 nt, Homo sapiens
  misc_RNA (1)...(19): siRNA sense strand
gaaggaguucggaaucuau

SEQ ID NO: 1318660 - RNA, 19 nt, Homo sapiens
  misc_RNA (1)...(19): siRNA sense strand
ccacaaauccaggcaaaug

SEQ ID NO: 1318661 - RNA, 19 nt, Homo sapiens
  misc_RNA (1)...(19): siRNA sense strand
ggagggagagacuauguau

SEQ ID NO: 1318662 - RNA, 19 nt, Homo sapiens
  misc_RNA (1)...(19): siRNA sense strand
caacaaagccucacgacua

SEQ ID NO: 1318663 - RNA, 19 nt, Homo sapiens
  misc_RNA (1)...(19): siRNA sense strand
caaagcagcugcauuaucu

SEQ ID NO: 1318664 - RNA, 19 nt, Homo sapiens
  misc_RNA (1)...(19): siRNA sense strand
gaacaggaacccacaagga

SEQ ID NO: 1318665 - RNA, 19 nt, Homo sapiens
  misc_RNA (1)...(19): siRNA sense strand
gaucgggucccuaacuaua

SEQ ID NO: 1318666 - RNA, 19 nt, Homo sapiens
  misc_RNA (1)...(19): siRNA sense strand
gacauuaaagggaagcuua

SEQ ID NO: 1318667 - RNA, 19 nt, Homo sapiens
  misc_RNA (1)...(19): siRNA sense strand
aagggaagcuuaugguuug

SEQ ID NO: 1318668 - RNA, 19 nt, Homo sapiens
  misc_RNA (1)...(19): siRNA sense strand
gcagcugcauuaucuacaa

SEQ ID NO: 1318669 - RNA, 19 nt, Homo sapiens
  misc_RNA (1)...(19): siRNA sense strand
ggaagcuuaugguuugcua

SEQ ID NO: 1318670 - RNA, 19 nt, Homo sapiens
  misc_RNA (1)...(19): siRNA sense strand
ugccaaagcagcugcauua

SEQ ID NO: 1318671 - RNA, 19 nt, Homo sapiens
  misc_RNA (1)...(19): siRNA sense strand
gucgcgaucuuuagacaua

SEQ ID NO: 1318672 - RNA, 19 nt, Homo sapiens
  misc_RNA (1)...(19): siRNA sense strand
cagaucgggucccuaacua

SEQ ID NO: 1318673 - RNA, 19 nt, Homo sapiens
  misc_RNA (1)...(19): siRNA sense strand
acaaccaccuugggaauuu

SEQ ID NO: 1318674 - RNA, 19 nt, Homo sapiens
  misc_RNA (1)...(19): siRNA sense strand
gcacuacaacugaccauag

SEQ ID NO: 1318675 - RNA, 19 nt, Homo sapiens
  misc_RNA (1)...(19): siRNA sense strand
gcuuaugguuugcuaugaa

SEQ ID NO: 1318676 - RNA, 19 nt, Homo sapiens
  misc_RNA (1)...(19): siRNA sense strand
gccagugccuccucuacaa

SEQ ID NO: 1318677 - RNA, 19 nt, Homo sapiens
  misc_RNA (1)...(19): siRNA sense strand
aaagggaagcuuaugguuu

SEQ ID NO: 1318678 - RNA, 19 nt, Homo sapiens
  misc_RNA (1)...(19): siRNA sense strand
gcuuugagcccgucuaugu

SEQ ID NO: 1318679 - RNA, 19 nt, Homo sapiens
  misc_RNA (1)...(19): siRNA sense strand
ccugagaccuucuggauac

SEQ ID NO: 1318680 - RNA, 19 nt, Homo sapiens
  misc_RNA (1)...(19): siRNA sense strand
gcucaggacacuugcacua

SEQ ID NO: 1318681 - RNA, 19 nt, Homo sapiens
  misc_RNA (1)...(19): siRNA sense strand
ucauggagccguccucuga

SEQ ID NO: 1318682 - RNA, 19 nt, Homo sapiens
  misc_RNA (1)...(19): siRNA sense strand
ccaaccaccuggaucaagu

SEQ ID NO: 1318683 - RNA, 19 nt, Homo sapiens
  misc_RNA (1)...(19): siRNA sense strand
caacugggaggaagagaga

SEQ ID NO: 1318684 - RNA, 19 nt, Homo sapiens
  misc_RNA (1)...(19): siRNA sense strand
ccaugggagucuuggcuuu

SEQ ID NO: 1318685 - RNA, 19 nt, Homo sapiens
  misc_RNA (1)...(19): siRNA sense strand
cagcugcauuaucuacaaa

SEQ ID NO: 1318686 - RNA, 19 nt, Homo sapiens
  misc_RNA (1)...(19): siRNA sense strand
cggcuuuacccacaauaua

SEQ ID NO: 1318687 - RNA, 19 nt, Homo sapiens
  misc_RNA (1)...(19): siRNA sense strand
gugaagccaugcuggagau

SEQ ID NO: 1318688 - RNA, 19 nt, Homo sapiens
  misc_RNA (1)...(19): siRNA sense strand
acacuggcccugacucuga

SEQ ID NO: 1318689 - RNA, 19 nt, Homo sapiens
  misc_RNA (1)...(19): siRNA sense strand
ccaaagcagcugcauuauc

SEQ ID NO: 1318690 - RNA, 19 nt, Homo sapiens
  misc_RNA (1)...(19): siRNA sense strand
caggacacuugcacuacaa

SEQ ID NO: 1318691 - RNA, 19 nt, Homo sapiens
  misc_RNA (1)...(19): siRNA sense strand
ucaggacacuugcacuaca

SEQ ID NO: 1318692 - RNA, 19 nt, Homo sapiens
  misc_RNA (1)...(19): siRNA sense strand
gcugcauuaucuacaaaga

SEQ ID NO: 1318693 - RNA, 19 nt, Homo sapiens
  misc_RNA (1)...(19): siRNA sense strand
uaaagggaagcuuaugguu

SEQ ID NO: 1318694 - RNA, 19 nt, Homo sapiens
  misc_RNA (1)...(19): siRNA sense strand
acacuugcacuacaacuga

SEQ ID NO: 1318695 - RNA, 19 nt, Homo sapiens
  misc_RNA (1)...(19): siRNA sense strand
uggcagaucgggucccuaa

SEQ ID NO: 1318696 - RNA, 19 nt, Homo sapiens
  misc_RNA (1)...(19): siRNA sense strand
gcagaucgggucccuaacu

SEQ ID NO: 1318697 - RNA, 19 nt, Homo sapiens
  misc_RNA (1)...(19): siRNA sense strand
cuuaugguuugcuaugaaa

SEQ ID NO: 1318698 - RNA, 19 nt, Homo sapiens
  misc_RNA (1)...(19): siRNA sense strand
aaacaaccaccuugggaau

SEQ ID NO: 1318699 - RNA, 19 nt, Homo sapiens
  misc_RNA (1)...(19): siRNA sense strand
aaacgucuauuggccacuu

SEQ ID NO: 1318700 - RNA, 19 nt, Homo sapiens
  misc_RNA (1)...(19): siRNA sense strand
gucuauguuuccuguauug

SEQ ID NO: 1318701 - RNA, 19 nt, Homo sapiens
  misc_RNA (1)...(19): siRNA sense strand
aacaaagccucacgacuac

SEQ ID NO: 1318702 - RNA, 19 nt, Homo sapiens
  misc_RNA (1)...(19): siRNA sense strand
ccaccaaccaccuggauca

SEQ ID NO: 1318703 - RNA, 19 nt, Homo sapiens
  misc_RNA (1)...(19): siRNA sense strand
gagcucagccccuguauuc

SEQ ID NO: 1318704 - RNA, 19 nt, Homo sapiens
  misc_RNA (1)...(19): siRNA sense strand
guauugcucaggacacuug

SEQ ID NO: 1318705 - RNA, 19 nt, Homo sapiens
  misc_RNA (1)...(19): siRNA sense strand
cgucuauguuuccuguauu

SEQ ID NO: 1318706 - RNA, 19 nt, Homo sapiens
  misc_RNA (1)...(19): siRNA sense strand
ccagcgcccuguucugagu

SEQ ID NO: 1318707 - RNA, 19 nt, Homo sapiens
  misc_RNA (1)...(19): siRNA sense strand
caccaggaaacgucuauug

SEQ ID NO: 1318708 - RNA, 19 nt, Homo sapiens
  misc_RNA (1)...(19): siRNA sense strand
ccgucuauguuuccuguau

SEQ ID NO: 1318709 - RNA, 19 nt, Homo sapiens
  misc_RNA (1)...(19): siRNA sense strand
aacaggaacccacaaggaa

SEQ ID NO: 1318710 - RNA, 19 nt, Homo sapiens
  misc_RNA (1)...(19): siRNA sense strand
cuucaccacugccaaagca

SEQ ID NO: 1318711 - RNA, 19 nt, Homo sapiens
  misc_RNA (1)...(19): siRNA sense strand
gcagaacaggaacccacaa

SEQ ID NO: 1318712 - RNA, 19 nt, Homo sapiens
  misc_RNA (1)...(19): siRNA sense strand
cagcaucagaucuguaaag

SEQ ID NO: 1318713 - RNA, 19 nt, Homo sapiens
  misc_RNA (1)...(19): siRNA sense strand
ccacccagaaagacucgua

SEQ ID NO: 1318714 - RNA, 19 nt, Homo sapiens
  misc_RNA (1)...(19): siRNA sense strand
gcccuguucugaguucaug

SEQ ID NO: 1318715 - RNA, 19 nt, Homo sapiens
  misc_RNA (1)...(19): siRNA sense strand
ggcuuuacccacaauauag

SEQ ID NO: 1318716 - RNA, 19 nt, Homo sapiens
  misc_RNA (1)...(19): siRNA sense strand
agcaucagaucuguaaaga

SEQ ID NO: 1318717 - RNA, 19 nt, Homo sapiens
  misc_RNA (1)...(19): siRNA sense strand
gcaugcaggauggcucuga

SEQ ID NO: 1318718 - RNA, 19 nt, Homo sapiens
  misc_RNA (1)...(19): siRNA sense strand
ggugcaggcagaacaggaa

SEQ ID NO: 1318719 - RNA, 19 nt, Homo sapiens
  misc_RNA (1)...(19): siRNA sense strand
ugcagcaucagaucuguaa

SEQ ID NO: 1318720 - RNA, 19 nt, Homo sapiens
  misc_RNA (1)...(19): siRNA sense strand
uuugagcccgucuauguuu

SEQ ID NO: 1318721 - RNA, 19 nt, Homo sapiens
  misc_RNA (1)...(19): siRNA sense strand
gcucuucgagguugagucu

SEQ ID NO: 1318722 - RNA, 19 nt, Homo sapiens
  misc_RNA (1)...(19): siRNA sense strand
ccagcaccacccagaaaga

SEQ ID NO: 1318723 - RNA, 19 nt, Homo sapiens
  misc_RNA (1)...(19): siRNA sense strand
gacccggcuuuacccacaa

SEQ ID NO: 1318724 - RNA, 19 nt, Homo sapiens
  misc_RNA (1)...(19): siRNA sense strand
caacaaagccucacgacua

SEQ ID NO: 1318725 - RNA, 19 nt, Homo sapiens
  misc_RNA (1)...(19): siRNA sense strand
caaagcagcugcauuaucu

SEQ ID NO: 1318726 - RNA, 19 nt, Homo sapiens
  misc_RNA (1)...(19): siRNA sense strand
caaauaggcucugccauca

SEQ ID NO: 1318727 - RNA, 19 nt, Homo sapiens
  misc_RNA (1)...(19): siRNA sense strand
gaacaggaacccacaagga

SEQ ID NO: 1318728 - RNA, 19 nt, Homo sapiens
  misc_RNA (1)...(19): siRNA sense strand
gaucgggucccuaacuaua

SEQ ID NO: 1318729 - RNA, 19 nt, Homo sapiens
  misc_RNA (1)...(19): siRNA sense strand
ggaaaugggaagcaagaaa

SEQ ID NO: 1318730 - RNA, 19 nt, Homo sapiens
  misc_RNA (1)...(19): siRNA sense strand
gacauuaaagggaagcuua

SEQ ID NO: 1318731 - RNA, 19 nt, Homo sapiens
  misc_RNA (1)...(19): siRNA sense strand
aagggaagcuuaugguuug

SEQ ID NO: 1318732 - RNA, 19 nt, Homo sapiens
  misc_RNA (1)...(19): siRNA sense strand
gcagcugcauuaucuacaa

SEQ ID NO: 1318733 - RNA, 19 nt, Homo sapiens
  misc_RNA (1)...(19): siRNA sense strand
ggaagcuuaugguuugcua

SEQ ID NO: 1318734 - RNA, 19 nt, Homo sapiens
  misc_RNA (1)...(19): siRNA sense strand
ugccaaagcagcugcauua

SEQ ID NO: 1318735 - RNA, 19 nt, Homo sapiens
  misc_RNA (1)...(19): siRNA sense strand
gucgcgaucuuuagacaua

SEQ ID NO: 1318736 - RNA, 19 nt, Homo sapiens
  misc_RNA (1)...(19): siRNA sense strand
cagaucgggucccuaacua

SEQ ID NO: 1318737 - RNA, 19 nt, Homo sapiens
  misc_RNA (1)...(19): siRNA sense strand
acaaccaccuugggaauuu

SEQ ID NO: 1318738 - RNA, 19 nt, Homo sapiens
  misc_RNA (1)...(19): siRNA sense strand
aagacuaucugacuuggaa

SEQ ID NO: 1318739 - RNA, 19 nt, Homo sapiens
  misc_RNA (1)...(19): siRNA sense strand
agcaggacauggacaaaua

SEQ ID NO: 1318740 - RNA, 19 nt, Homo sapiens
  misc_RNA (1)...(19): siRNA sense strand
gcacuacaacugaccauag

SEQ ID NO: 1318741 - RNA, 19 nt, Homo sapiens
  misc_RNA (1)...(19): siRNA sense strand
gcuuaugguuugcuaugaa

SEQ ID NO: 1318742 - RNA, 19 nt, Homo sapiens
  misc_RNA (1)...(19): siRNA sense strand
gccagugccuccucuacaa

SEQ ID NO: 1318743 - RNA, 19 nt, Homo sapiens
  misc_RNA (1)...(19): siRNA sense strand
aaagggaagcuuaugguuu

SEQ ID NO: 1318744 - RNA, 19 nt, Homo sapiens
  misc_RNA (1)...(19): siRNA sense strand
gcuuugagcccgucuaugu

SEQ ID NO: 1318745 - RNA, 19 nt, Homo sapiens
  misc_RNA (1)...(19): siRNA sense strand
ccugagaccuucuggauac

SEQ ID NO: 1318746 - RNA, 19 nt, Homo sapiens
  misc_RNA (1)...(19): siRNA sense strand
gcucaggacacuugcacua

SEQ ID NO: 1318747 - RNA, 19 nt, Homo sapiens
  misc_RNA (1)...(19): siRNA sense strand
uaucugacuuggaaagaau

SEQ ID NO: 1318748 - RNA, 19 nt, Homo sapiens
  misc_RNA (1)...(19): siRNA sense strand
ucauggagccguccucuga

SEQ ID NO: 1318749 - RNA, 19 nt, Homo sapiens
  misc_RNA (1)...(19): siRNA sense strand
ccaaccaccuggaucaagu

SEQ ID NO: 1318750 - RNA, 19 nt, Homo sapiens
  misc_RNA (1)...(19): siRNA sense strand
caacugggaggaagagaga

SEQ ID NO: 1318751 - RNA, 19 nt, Homo sapiens
  misc_RNA (1)...(19): siRNA sense strand
gaaaugggaagcaagaaaa

SEQ ID NO: 1318752 - RNA, 19 nt, Homo sapiens
  misc_RNA (1)...(19): siRNA sense strand
ccaugggagucuuggcuuu

SEQ ID NO: 1318753 - RNA, 19 nt, Homo sapiens
  misc_RNA (1)...(19): siRNA sense strand
gcucugccaucaggaaaug

SEQ ID NO: 1318754 - RNA, 19 nt, Homo sapiens
  misc_RNA (1)...(19): siRNA sense strand
cagcugcauuaucuacaaa

SEQ ID NO: 1318755 - RNA, 19 nt, Homo sapiens
  misc_RNA (1)...(19): siRNA sense strand
cggcuuuacccacaauaua

SEQ ID NO: 1318756 - RNA, 19 nt, Homo sapiens
  misc_RNA (1)...(19): siRNA sense strand
gugaagccaugcuggagau

SEQ ID NO: 1318757 - RNA, 19 nt, Homo sapiens
  misc_RNA (1)...(19): siRNA sense strand
ccaaagcagcugcauuauc

SEQ ID NO: 1318758 - RNA, 19 nt, Homo sapiens
  misc_RNA (1)...(19): siRNA sense strand
acacuggcccugacucuga

SEQ ID NO: 1318759 - RNA, 19 nt, Homo sapiens
  misc_RNA (1)...(19): siRNA sense strand
caggacacuugcacuacaa

SEQ ID NO: 1318760 - RNA, 19 nt, Homo sapiens
  misc_RNA (1)...(19): siRNA sense strand
ucaggacacuugcacuaca

SEQ ID NO: 1318761 - RNA, 19 nt, Homo sapiens
  misc_RNA (1)...(19): siRNA sense strand
gcugcauuaucuacaaaga

SEQ ID NO: 1318762 - RNA, 19 nt, Homo sapiens
  misc_RNA (1)...(19): siRNA sense strand
ccagguaccagcagcagaa

SEQ ID NO: 1318763 - RNA, 19 nt, Homo sapiens
  misc_RNA (1)...(19): siRNA sense strand
uaaagggaagcuuaugguu

SEQ ID NO: 1318764 - RNA, 19 nt, Homo sapiens
  misc_RNA (1)...(19): siRNA sense strand
acacuugcacuacaacuga

SEQ ID NO: 1318765 - RNA, 19 nt, Homo sapiens
  misc_RNA (1)...(19): siRNA sense strand
uggcagaucgggucccuaa

SEQ ID NO: 1318766 - RNA, 19 nt, Homo sapiens
  misc_RNA (1)...(19): siRNA sense strand
gcagaucgggucccuaacu

SEQ ID NO: 1318767 - RNA, 19 nt, Homo sapiens
  misc_RNA (1)...(19): siRNA sense strand
gcaagaaaacgguaacuca

SEQ ID NO: 1318768 - RNA, 19 nt, Homo sapiens
  misc_RNA (1)...(19): siRNA sense strand
ccuuuccgcucuccuaaga

SEQ ID NO: 1318769 - RNA, 19 nt, Homo sapiens
  misc_RNA (1)...(19): siRNA sense strand
cuuaugguuugcuaugaaa

SEQ ID NO: 1318770 - RNA, 19 nt, Homo sapiens
  misc_RNA (1)...(19): siRNA sense strand
aaacaaccaccuugggaau

SEQ ID NO: 1318771 - RNA, 19 nt, Homo sapiens
  misc_RNA (1)...(19): siRNA sense strand
aaacgucuauuggccacuu

SEQ ID NO: 1318772 - RNA, 19 nt, Homo sapiens
  misc_RNA (1)...(19): siRNA sense strand
gucuauguuuccuguauug

SEQ ID NO: 1318773 - RNA, 19 nt, Homo sapiens
  misc_RNA (1)...(19): siRNA sense strand
aacaaagccucacgacuac

SEQ ID NO: 1318774 - RNA, 19 nt, Homo sapiens
  misc_RNA (1)...(19): siRNA sense strand
ccaccaaccaccuggauca

SEQ ID NO: 1318775 - RNA, 19 nt, Homo sapiens
  misc_RNA (1)...(19): siRNA sense strand
gagcucagccccuguauuc

SEQ ID NO: 1318776 - RNA, 19 nt, Homo sapiens
  misc_RNA (1)...(19): siRNA sense strand
guauugcucaggacacuug

SEQ ID NO: 1318777 - RNA, 19 nt, Homo sapiens
  misc_RNA (1)...(19): siRNA sense strand
cgucuauguuuccuguauu

SEQ ID NO: 1318778 - RNA, 19 nt, Homo sapiens
  misc_RNA (1)...(19): siRNA sense strand
ccagcgcccuguucugagu

SEQ ID NO: 1318779 - RNA, 19 nt, Homo sapiens
  misc_RNA (1)...(19): siRNA sense strand
caggaaaugggaagcaaga

SEQ ID NO: 1318780 - RNA, 19 nt, Homo sapiens
  misc_RNA (1)...(19): siRNA sense strand
gcaggacauggacaaauag

SEQ ID NO: 1318781 - RNA, 19 nt, Homo sapiens
  misc_RNA (1)...(19): siRNA sense strand
caccaggaaacgucuauug

SEQ ID NO: 1318782 - RNA, 19 nt, Homo sapiens
  misc_RNA (1)...(19): siRNA sense strand
caguaaacauuugcggaau

SEQ ID NO: 1318783 - RNA, 19 nt, Homo sapiens
  misc_RNA (1)...(19): siRNA sense strand
gccauugcccacccaggua

SEQ ID NO: 1318784 - RNA, 19 nt, Homo sapiens
  misc_RNA (1)...(19): siRNA sense strand
agaaaacgguaacucaaga

SEQ ID NO: 1318785 - RNA, 19 nt, Homo sapiens
  misc_RNA (1)...(19): siRNA sense strand
cuaucugacuuggaaagaa

SEQ ID NO: 1318786 - RNA, 19 nt, Homo sapiens
  misc_RNA (1)...(19): siRNA sense strand
ccgucuauguuuccuguau

SEQ ID NO: 1318787 - RNA, 19 nt, Homo sapiens
  misc_RNA (1)...(19): siRNA sense strand
gaagacuaucugacuugga

SEQ ID NO: 1318788 - RNA, 19 nt, Homo sapiens
  misc_RNA (1)...(19): siRNA sense strand
aacaggaacccacaaggaa

SEQ ID NO: 1318789 - RNA, 19 nt, Homo sapiens
  misc_RNA (1)...(19): siRNA sense strand
gcccuguucugaguucaug

SEQ ID NO: 1318790 - RNA, 19 nt, Homo sapiens
  misc_RNA (1)...(19): siRNA sense strand
cuucaccacugccaaagca

SEQ ID NO: 1318791 - RNA, 19 nt, Homo sapiens
  misc_RNA (1)...(19): siRNA sense strand
gcagaacaggaacccacaa

SEQ ID NO: 1318792 - RNA, 19 nt, Homo sapiens
  misc_RNA (1)...(19): siRNA sense strand
cagcaucagaucuguaaag

SEQ ID NO: 1318793 - RNA, 19 nt, Homo sapiens
  misc_RNA (1)...(19): siRNA sense strand
ccacccagaaagacucgua

SEQ ID NO: 1318794 - RNA, 19 nt, Homo sapiens
  misc_RNA (1)...(19): siRNA sense strand
agcaucagaucuguaaaga

SEQ ID NO: 1318795 - RNA, 19 nt, Homo sapiens
  misc_RNA (1)...(19): siRNA sense strand
gcagcaggacauggacaaa

SEQ ID NO: 1318796 - RNA, 19 nt, Homo sapiens
  misc_RNA (1)...(19): siRNA sense strand
ggcuuuacccacaauauag

SEQ ID NO: 1318797 - RNA, 19 nt, Homo sapiens
  misc_RNA (1)...(19): siRNA sense strand
gcaugcaggauggcucuga

SEQ ID NO: 1318798 - RNA, 19 nt, Homo sapiens
  misc_RNA (1)...(19): siRNA sense strand
ggugcaggcagaacaggaa

SEQ ID NO: 1318799 - RNA, 19 nt, Homo sapiens
  misc_RNA (1)...(19): siRNA sense strand
ugcagcaucagaucuguaa

SEQ ID NO: 1318800 - RNA, 19 nt, Homo sapiens
  misc_RNA (1)...(19): siRNA sense strand
caagaaaacgguaacucaa

SEQ ID NO: 1318801 - RNA, 19 nt, Homo sapiens
  misc_RNA (1)...(19): siRNA sense strand
gguccuuuccgcucuccua

SEQ ID NO: 1318802 - RNA, 19 nt, Homo sapiens
  misc_RNA (1)...(19): siRNA sense strand
gacccggcuuuacccacaa

SEQ ID NO: 1318803 - RNA, 19 nt, Homo sapiens
  misc_RNA (1)...(19): siRNA sense strand
gcucuucgagguugagucu

SEQ ID NO: 1318804 - RNA, 19 nt, Homo sapiens
  misc_RNA (1)...(19): siRNA sense strand
uuugagcccgucuauguuu

SEQ ID NO: 1318805 - RNA, 19 nt, Homo sapiens
  misc_RNA (1)...(19): siRNA sense strand
ccagcaccacccagaaaga

SEQ ID NO: 1318806 - RNA, 19 nt, Homo sapiens
  misc_RNA (1)...(19): siRNA sense strand
gcaaaccgcucaucuauaa

SEQ ID NO: 1318807 - RNA, 19 nt, Homo sapiens
  misc_RNA (1)...(19): siRNA sense strand
caucaagucuggagaaaga

SEQ ID NO: 1318808 - RNA, 19 nt, Homo sapiens
  misc_RNA (1)...(19): siRNA sense strand
caacauuacaguucucaua

SEQ ID NO: 1318809 - RNA, 19 nt, Homo sapiens
  misc_RNA (1)...(19): siRNA sense strand
gagaaucacuuugucauag

SEQ ID NO: 1318810 - RNA, 19 nt, Homo sapiens
  misc_RNA (1)...(19): siRNA sense strand
gaaagcaacauuacaguuc

SEQ ID NO: 1318811 - RNA, 19 nt, Homo sapiens
  misc_RNA (1)...(19): siRNA sense strand
gcaaggcugugaccaagau

SEQ ID NO: 1318812 - RNA, 19 nt, Homo sapiens
  misc_RNA (1)...(19): siRNA sense strand
ccacgagaaagcaacauua

SEQ ID NO: 1318813 - RNA, 19 nt, Homo sapiens
  misc_RNA (1)...(19): siRNA sense strand
ugaccaagaugcccaaagu

SEQ ID NO: 1318814 - RNA, 19 nt, Homo sapiens
  misc_RNA (1)...(19): siRNA sense strand
gaauagucuuuaccuuuag

SEQ ID NO: 1318815 - RNA, 19 nt, Homo sapiens
  misc_RNA (1)...(19): siRNA sense strand
ggcagaagcuuuugagauu

SEQ ID NO: 1318816 - RNA, 19 nt, Homo sapiens
  misc_RNA (1)...(19): siRNA sense strand
caucaucgagucuguguuu

SEQ ID NO: 1318817 - RNA, 19 nt, Homo sapiens
  misc_RNA (1)...(19): siRNA sense strand
cggcugcaguuccaaguuu

SEQ ID NO: 1318818 - RNA, 19 nt, Homo sapiens
  misc_RNA (1)...(19): siRNA sense strand
ggaaccuucugcagcaaug

SEQ ID NO: 1318819 - RNA, 19 nt, Homo sapiens
  misc_RNA (1)...(19): siRNA sense strand
ugagaaucacuuugucaua

SEQ ID NO: 1318820 - RNA, 19 nt, Homo sapiens
  misc_RNA (1)...(19): siRNA sense strand
gaugcaagaaggagugaaa

SEQ ID NO: 1318821 - RNA, 19 nt, Homo sapiens
  misc_RNA (1)...(19): siRNA sense strand
guuacaucgucauuucuaa

SEQ ID NO: 1318822 - RNA, 19 nt, Homo sapiens
  misc_RNA (1)...(19): siRNA sense strand
agaaucacuuugucauaga

SEQ ID NO: 1318823 - RNA, 19 nt, Homo sapiens
  misc_RNA (1)...(19): siRNA sense strand
ccuguuacaucgucauuuc

SEQ ID NO: 1318824 - RNA, 19 nt, Homo sapiens
  misc_RNA (1)...(19): siRNA sense strand
aggaggagcggguugaaua

SEQ ID NO: 1318825 - RNA, 19 nt, Homo sapiens
  misc_RNA (1)...(19): siRNA sense strand
cauuacaguucucauaaag

SEQ ID NO: 1318826 - RNA, 19 nt, Homo sapiens
  misc_RNA (1)...(19): siRNA sense strand
gcucaugacguggcaguuu

SEQ ID NO: 1318827 - RNA, 19 nt, Homo sapiens
  misc_RNA (1)...(19): siRNA sense strand
cauaagagcaucgguuuag

SEQ ID NO: 1318828 - RNA, 19 nt, Homo sapiens
  misc_RNA (1)...(19): siRNA sense strand
agaaaugucuccggcuuca

SEQ ID NO: 1318829 - RNA, 19 nt, Homo sapiens
  misc_RNA (1)...(19): siRNA sense strand
ggagcggguugaauacuac

SEQ ID NO: 1318830 - RNA, 19 nt, Homo sapiens
  misc_RNA (1)...(19): siRNA sense strand
ggaaggaggagcggguuga

SEQ ID NO: 1318831 - RNA, 19 nt, Homo sapiens
  misc_RNA (1)...(19): siRNA sense strand
gaugucaaagcucauaaga

SEQ ID NO: 1318832 - RNA, 19 nt, Homo sapiens
  misc_RNA (1)...(19): siRNA sense strand
caagucuggagaaagaaua

SEQ ID NO: 1318833 - RNA, 19 nt, Homo sapiens
  misc_RNA (1)...(19): siRNA sense strand
gaaucacuuugucauagag

SEQ ID NO: 1318834 - RNA, 19 nt, Homo sapiens
  misc_RNA (1)...(19): siRNA sense strand
gccagaguccugagaauca

SEQ ID NO: 1318835 - RNA, 19 nt, Homo sapiens
  misc_RNA (1)...(19): siRNA sense strand
caagcagccugggaacaug

SEQ ID NO: 1318836 - RNA, 19 nt, Homo sapiens
  misc_RNA (1)...(19): siRNA sense strand
gagaaagcaacauuacagu

SEQ ID NO: 1318837 - RNA, 19 nt, Homo sapiens
  misc_RNA (1)...(19): siRNA sense strand
gaucaagaugcaagaagga

SEQ ID NO: 1318838 - RNA, 19 nt, Homo sapiens
  misc_RNA (1)...(19): siRNA sense strand
ccuuacaccucccaugguu

SEQ ID NO: 1318839 - RNA, 19 nt, Homo sapiens
  misc_RNA (1)...(19): siRNA sense strand
ccugaugucugccaacuac

SEQ ID NO: 1318840 - RNA, 19 nt, Homo sapiens
  misc_RNA (1)...(19): siRNA sense strand
uuacaguucucauaaagcu

SEQ ID NO: 1318841 - RNA, 19 nt, Homo sapiens
  misc_RNA (1)...(19): siRNA sense strand
uaaccauguuguccaucaa

SEQ ID NO: 1318842 - RNA, 19 nt, Homo sapiens
  misc_RNA (1)...(19): siRNA sense strand
aggagcggguugaauacua

SEQ ID NO: 1318843 - RNA, 19 nt, Homo sapiens
  misc_RNA (1)...(19): siRNA sense strand
guuuagagcugcaguuuuc

SEQ ID NO: 1318844 - RNA, 19 nt, Homo sapiens
  misc_RNA (1)...(19): siRNA sense strand
ugucauagagauccagaaa

SEQ ID NO: 1318845 - RNA, 19 nt, Homo sapiens
  misc_RNA (1)...(19): siRNA sense strand
cgagaaagcaacauuacag

SEQ ID NO: 1318846 - RNA, 19 nt, Homo sapiens
  misc_RNA (1)...(19): siRNA sense strand
aaagcaacauuacaguucu

SEQ ID NO: 1318847 - RNA, 19 nt, Homo sapiens
  misc_RNA (1)...(19): siRNA sense strand
gaaggaggagcggguugaa

SEQ ID NO: 1318848 - RNA, 19 nt, Homo sapiens
  misc_RNA (1)...(19): siRNA sense strand
ucauaagagcaucgguuua

SEQ ID NO: 1318849 - RNA, 19 nt, Homo sapiens
  misc_RNA (1)...(19): siRNA sense strand
agaaagcaacauuacaguu

SEQ ID NO: 1318850 - RNA, 19 nt, Homo sapiens
  misc_RNA (1)...(19): siRNA sense strand
caacauccacaaaaugaaa

SEQ ID NO: 1318851 - RNA, 19 nt, Homo sapiens
  misc_RNA (1)...(19): siRNA sense strand
gcagaagcuuuugagauug

SEQ ID NO: 1318852 - RNA, 19 nt, Homo sapiens
  misc_RNA (1)...(19): siRNA sense strand
gguccaacauccacaaaau

SEQ ID NO: 1318853 - RNA, 19 nt, Homo sapiens
  misc_RNA (1)...(19): siRNA sense strand
uugcaaaccgcucaucuau

SEQ ID NO: 1318854 - RNA, 19 nt, Homo sapiens
  misc_RNA (1)...(19): siRNA sense strand
auaaccauguuguccauca

SEQ ID NO: 1318855 - RNA, 19 nt, Homo sapiens
  misc_RNA (1)...(19): siRNA sense strand
uguucaagcuggaggacaa

SEQ ID NO: 1318856 - RNA, 19 nt, Homo sapiens
  misc_RNA (1)...(19): siRNA sense strand
gcaagaaggagugaaaaug

SEQ ID NO: 1318857 - RNA, 19 nt, Homo sapiens
  misc_RNA (1)...(19): siRNA sense strand
caucgagucuguguuugag

SEQ ID NO: 1318858 - RNA, 19 nt, Homo sapiens
  misc_RNA (1)...(19): siRNA sense strand
ggaggagcggguugaauac

SEQ ID NO: 1318859 - RNA, 19 nt, Homo sapiens
  misc_RNA (1)...(19): siRNA sense strand
auaagagcaucgguuuaga

SEQ ID NO: 1318860 - RNA, 19 nt, Homo sapiens
  misc_RNA (1)...(19): siRNA sense strand
cucaugacguggcaguuug

SEQ ID NO: 1318861 - RNA, 19 nt, Homo sapiens
  misc_RNA (1)...(19): siRNA sense strand
caucgucauuucuaaaaga

SEQ ID NO: 1318862 - RNA, 19 nt, Homo sapiens
  misc_RNA (1)...(19): siRNA sense strand
ugcaaaccgcucaucuaua

SEQ ID NO: 1318863 - RNA, 19 nt, Homo sapiens
  misc_RNA (1)...(19): siRNA sense strand
ggcacugugucccggauca

SEQ ID NO: 1318864 - RNA, 19 nt, Homo sapiens
  misc_RNA (1)...(19): siRNA sense strand
guccugagaaucacuuugu

SEQ ID NO: 1318865 - RNA, 19 nt, Homo sapiens
  misc_RNA (1)...(19): siRNA sense strand
ucaucgagucuguguuuga

SEQ ID NO: 1318866 - RNA, 19 nt, Homo sapiens
  misc_RNA (1)...(19): siRNA sense strand
uaagagcaucgguuuagag

SEQ ID NO: 1318867 - RNA, 19 nt, Homo sapiens
  misc_RNA (1)...(19): siRNA sense strand
gggaugucaaagcucauaa

SEQ ID NO: 1318868 - RNA, 19 nt, Homo sapiens
  misc_RNA (1)...(19): siRNA sense strand
gccacgagaaagcaacauu

SEQ ID NO: 1318869 - RNA, 19 nt, Homo sapiens
  misc_RNA (1)...(19): siRNA sense strand
gcaaaccgcucaucuauaa

SEQ ID NO: 1318870 - RNA, 19 nt, Homo sapiens
  misc_RNA (1)...(19): siRNA sense strand
caucaagucuggagaaaga

SEQ ID NO: 1318871 - RNA, 19 nt, Homo sapiens
  misc_RNA (1)...(19): siRNA sense strand
caacauuacaguucucaua

SEQ ID NO: 1318872 - RNA, 19 nt, Homo sapiens
  misc_RNA (1)...(19): siRNA sense strand
gagaaucacuuugucauag

SEQ ID NO: 1318873 - RNA, 19 nt, Homo sapiens
  misc_RNA (1)...(19): siRNA sense strand
gaaagcaacauuacaguuc

SEQ ID NO: 1318874 - RNA, 19 nt, Homo sapiens
  misc_RNA (1)...(19): siRNA sense strand
gcaaggcugugaccaagau

SEQ ID NO: 1318875 - RNA, 19 nt, Homo sapiens
  misc_RNA (1)...(19): siRNA sense strand
ccacgagaaagcaacauua

SEQ ID NO: 1318876 - RNA, 19 nt, Homo sapiens
  misc_RNA (1)...(19): siRNA sense strand
ugaccaagaugcccaaagu

SEQ ID NO: 1318877 - RNA, 19 nt, Homo sapiens
  misc_RNA (1)...(19): siRNA sense strand
gaauagucuuuaccuuuag

SEQ ID NO: 1318878 - RNA, 19 nt, Homo sapiens
  misc_RNA (1)...(19): siRNA sense strand
ggcagaagcuuuugagauu

SEQ ID NO: 1318879 - RNA, 19 nt, Homo sapiens
  misc_RNA (1)...(19): siRNA sense strand
caucaucgagucuguguuu

SEQ ID NO: 1318880 - RNA, 19 nt, Homo sapiens
  misc_RNA (1)...(19): siRNA sense strand
cggcugcaguuccaaguuu

SEQ ID NO: 1318881 - RNA, 19 nt, Homo sapiens
  misc_RNA (1)...(19): siRNA sense strand
ggaaccuucugcagcaaug

SEQ ID NO: 1318882 - RNA, 19 nt, Homo sapiens
  misc_RNA (1)...(19): siRNA sense strand
ugagaaucacuuugucaua

SEQ ID NO: 1318883 - RNA, 19 nt, Homo sapiens
  misc_RNA (1)...(19): siRNA sense strand
gaugcaagaaggagugaaa

SEQ ID NO: 1318884 - RNA, 19 nt, Homo sapiens
  misc_RNA (1)...(19): siRNA sense strand
guuacaucgucauuucuaa

SEQ ID NO: 1318885 - RNA, 19 nt, Homo sapiens
  misc_RNA (1)...(19): siRNA sense strand
agaaucacuuugucauaga

SEQ ID NO: 1318886 - RNA, 19 nt, Homo sapiens
  misc_RNA (1)...(19): siRNA sense strand
ccuguuacaucgucauuuc

SEQ ID NO: 1318887 - RNA, 19 nt, Homo sapiens
  misc_RNA (1)...(19): siRNA sense strand
aggaggagcggguugaaua

SEQ ID NO: 1318888 - RNA, 19 nt, Homo sapiens
  misc_RNA (1)...(19): siRNA sense strand
cauuacaguucucauaaag

SEQ ID NO: 1318889 - RNA, 19 nt, Homo sapiens
  misc_RNA (1)...(19): siRNA sense strand
gcucaugacguggcaguuu

SEQ ID NO: 1318890 - RNA, 19 nt, Homo sapiens
  misc_RNA (1)...(19): siRNA sense strand
cauaagagcaucgguuuag

SEQ ID NO: 1318891 - RNA, 19 nt, Homo sapiens
  misc_RNA (1)...(19): siRNA sense strand
agaaaugucuccggcuuca

SEQ ID NO: 1318892 - RNA, 19 nt, Homo sapiens
  misc_RNA (1)...(19): siRNA sense strand
ggagcggguugaauacuac

SEQ ID NO: 1318893 - RNA, 19 nt, Homo sapiens
  misc_RNA (1)...(19): siRNA sense strand
ggaaggaggagcggguuga

SEQ ID NO: 1318894 - RNA, 19 nt, Homo sapiens
  misc_RNA (1)...(19): siRNA sense strand
gaugucaaagcucauaaga

SEQ ID NO: 1318895 - RNA, 19 nt, Homo sapiens
  misc_RNA (1)...(19): siRNA sense strand
caagucuggagaaagaaua

SEQ ID NO: 1318896 - RNA, 19 nt, Homo sapiens
  misc_RNA (1)...(19): siRNA sense strand
gaaucacuuugucauagag

SEQ ID NO: 1318897 - RNA, 19 nt, Homo sapiens
  misc_RNA (1)...(19): siRNA sense strand
gccagaguccugagaauca

SEQ ID NO: 1318898 - RNA, 19 nt, Homo sapiens
  misc_RNA (1)...(19): siRNA sense strand
caagcagccugggaacaug

SEQ ID NO: 1318899 - RNA, 19 nt, Homo sapiens
  misc_RNA (1)...(19): siRNA sense strand
gagaaagcaacauuacagu

SEQ ID NO: 1318900 - RNA, 19 nt, Homo sapiens
  misc_RNA (1)...(19): siRNA sense strand
gaucaagaugcaagaagga

SEQ ID NO: 1318901 - RNA, 19 nt, Homo sapiens
  misc_RNA (1)...(19): siRNA sense strand
ccuuacaccucccaugguu

SEQ ID NO: 1318902 - RNA, 19 nt, Homo sapiens
  misc_RNA (1)...(19): siRNA sense strand
ccugaugucugccaacuac

SEQ ID NO: 1318903 - RNA, 19 nt, Homo sapiens
  misc_RNA (1)...(19): siRNA sense strand
uuacaguucucauaaagcu

SEQ ID NO: 1318904 - RNA, 19 nt, Homo sapiens
  misc_RNA (1)...(19): siRNA sense strand
uaaccauguuguccaucaa

SEQ ID NO: 1318905 - RNA, 19 nt, Homo sapiens
  misc_RNA (1)...(19): siRNA sense strand
aggagcggguugaauacua

SEQ ID NO: 1318906 - RNA, 19 nt, Homo sapiens
  misc_RNA (1)...(19): siRNA sense strand
guuuagagcugcaguuuuc

SEQ ID NO: 1318907 - RNA, 19 nt, Homo sapiens
  misc_RNA (1)...(19): siRNA sense strand
ugucauagagauccagaaa

SEQ ID NO: 1318908 - RNA, 19 nt, Homo sapiens
  misc_RNA (1)...(19): siRNA sense strand
cgagaaagcaacauuacag

SEQ ID NO: 1318909 - RNA, 19 nt, Homo sapiens
  misc_RNA (1)...(19): siRNA sense strand
aaagcaacauuacaguucu

SEQ ID NO: 1318910 - RNA, 19 nt, Homo sapiens
  misc_RNA (1)...(19): siRNA sense strand
gaaggaggagcggguugaa

SEQ ID NO: 1318911 - RNA, 19 nt, Homo sapiens
  misc_RNA (1)...(19): siRNA sense strand
ucauaagagcaucgguuua

SEQ ID NO: 1318912 - RNA, 19 nt, Homo sapiens
  misc_RNA (1)...(19): siRNA sense strand
agaaagcaacauuacaguu

SEQ ID NO: 1318913 - RNA, 19 nt, Homo sapiens
  misc_RNA (1)...(19): siRNA sense strand
caacauccacaaaaugaaa

SEQ ID NO: 1318914 - RNA, 19 nt, Homo sapiens
  misc_RNA (1)...(19): siRNA sense strand
gcagaagcuuuugagauug

SEQ ID NO: 1318915 - RNA, 19 nt, Homo sapiens
  misc_RNA (1)...(19): siRNA sense strand
gguccaacauccacaaaau

SEQ ID NO: 1318916 - RNA, 19 nt, Homo sapiens
  misc_RNA (1)...(19): siRNA sense strand
uugcaaaccgcucaucuau

SEQ ID NO: 1318917 - RNA, 19 nt, Homo sapiens
  misc_RNA (1)...(19): siRNA sense strand
auaaccauguuguccauca

SEQ ID NO: 1318918 - RNA, 19 nt, Homo sapiens
  misc_RNA (1)...(19): siRNA sense strand
uguucaagcuggaggacaa

SEQ ID NO: 1318919 - RNA, 19 nt, Homo sapiens
  misc_RNA (1)...(19): siRNA sense strand
gcaagaaggagugaaaaug

SEQ ID NO: 1318920 - RNA, 19 nt, Homo sapiens
  misc_RNA (1)...(19): siRNA sense strand
caucgagucuguguuugag

SEQ ID NO: 1318921 - RNA, 19 nt, Homo sapiens
  misc_RNA (1)...(19): siRNA sense strand
ggaggagcggguugaauac

SEQ ID NO: 1318922 - RNA, 19 nt, Homo sapiens
  misc_RNA (1)...(19): siRNA sense strand
auaagagcaucgguuuaga

SEQ ID NO: 1318923 - RNA, 19 nt, Homo sapiens
  misc_RNA (1)...(19): siRNA sense strand
cucaugacguggcaguuug

SEQ ID NO: 1318924 - RNA, 19 nt, Homo sapiens
  misc_RNA (1)...(19): siRNA sense strand
caucgucauuucuaaaaga

SEQ ID NO: 1318925 - RNA, 19 nt, Homo sapiens
  misc_RNA (1)...(19): siRNA sense strand
ugcaaaccgcucaucuaua

SEQ ID NO: 1318926 - RNA, 19 nt, Homo sapiens
  misc_RNA (1)...(19): siRNA sense strand
ggcacugugucccggauca

SEQ ID NO: 1318927 - RNA, 19 nt, Homo sapiens
  misc_RNA (1)...(19): siRNA sense strand
guccugagaaucacuuugu

SEQ ID NO: 1318928 - RNA, 19 nt, Homo sapiens
  misc_RNA (1)...(19): siRNA sense strand
ucaucgagucuguguuuga

SEQ ID NO: 1318929 - RNA, 19 nt, Homo sapiens
  misc_RNA (1)...(19): siRNA sense strand
uaagagcaucgguuuagag

SEQ ID NO: 1318930 - RNA, 19 nt, Homo sapiens
  misc_RNA (1)...(19): siRNA sense strand
gggaugucaaagcucauaa

SEQ ID NO: 1318931 - RNA, 19 nt, Homo sapiens
  misc_RNA (1)...(19): siRNA sense strand
gccacgagaaagcaacauu

SEQ ID NO: 1318932 - RNA, 19 nt, Homo sapiens
  misc_RNA (1)...(19): siRNA sense strand
caguggaccugaagaagga

SEQ ID NO: 1318933 - RNA, 19 nt, Homo sapiens
  misc_RNA (1)...(19): siRNA sense strand
gcacagggaggacguacug

SEQ ID NO: 1318934 - RNA, 19 nt, Homo sapiens
  misc_RNA (1)...(19): siRNA sense strand
aggaggagcuggccuacug

SEQ ID NO: 1318935 - RNA, 19 nt, Homo sapiens
  misc_RNA (1)...(19): siRNA sense strand
ugcggaagcugcugaggaa

SEQ ID NO: 1318936 - RNA, 19 nt, Homo sapiens
  misc_RNA (1)...(19): siRNA sense strand
gccaggaguucuucuucga

SEQ ID NO: 1318937 - RNA, 19 nt, Homo sapiens
  misc_RNA (1)...(19): siRNA sense strand
ggacagccaggaguucuuc

SEQ ID NO: 1318938 - RNA, 19 nt, Homo sapiens
  misc_RNA (1)...(19): siRNA sense strand
ccagacaccaccacuaugg

SEQ ID NO: 1318939 - RNA, 19 nt, Homo sapiens
  misc_RNA (1)...(19): siRNA sense strand
gccgucagccuguguguca

SEQ ID NO: 1318940 - RNA, 19 nt, Homo sapiens
  misc_RNA (1)...(19): siRNA sense strand
ucccagacaccaccacuau

SEQ ID NO: 1318941 - RNA, 19 nt, Homo sapiens
  misc_RNA (1)...(19): siRNA sense strand
caguggaccugaagaagga

SEQ ID NO: 1318942 - RNA, 19 nt, Homo sapiens
  misc_RNA (1)...(19): siRNA sense strand
gcacagggaggacguacug

SEQ ID NO: 1318943 - RNA, 19 nt, Homo sapiens
  misc_RNA (1)...(19): siRNA sense strand
aggaggagcuggccuacug

SEQ ID NO: 1318944 - RNA, 19 nt, Homo sapiens
  misc_RNA (1)...(19): siRNA sense strand
ugcggaagcugcugaggaa

SEQ ID NO: 1318945 - RNA, 19 nt, Homo sapiens
  misc_RNA (1)...(19): siRNA sense strand
gccaggaguucuucuucga

SEQ ID NO: 1318946 - RNA, 19 nt, Homo sapiens
  misc_RNA (1)...(19): siRNA sense strand
ggacagccaggaguucuuc

SEQ ID NO: 1318947 - RNA, 19 nt, Homo sapiens
  misc_RNA (1)...(19): siRNA sense strand
ccagacaccaccacuaugg

SEQ ID NO: 1318948 - RNA, 19 nt, Homo sapiens
  misc_RNA (1)...(19): siRNA sense strand
gccgucagccuguguguca

SEQ ID NO: 1318949 - RNA, 19 nt, Homo sapiens
  misc_RNA (1)...(19): siRNA sense strand
ucccagacaccaccacuau

SEQ ID NO: 1318950 - RNA, 19 nt, Homo sapiens
  misc_RNA (1)...(19): siRNA sense strand
gaagauagcugaguguuug

SEQ ID NO: 1318951 - RNA, 19 nt, Homo sapiens
  misc_RNA (1)...(19): siRNA sense strand
ggacagagggcaacuauaa

SEQ ID NO: 1318952 - RNA, 19 nt, Homo sapiens
  misc_RNA (1)...(19): siRNA sense strand
gcugaaggcuuaugaguau

SEQ ID NO: 1318953 - RNA, 19 nt, Homo sapiens
  misc_RNA (1)...(19): siRNA sense strand
caacaccgcaggagcauuu

SEQ ID NO: 1318954 - RNA, 19 nt, Homo sapiens
  misc_RNA (1)...(19): siRNA sense strand
ggaacacgacggagaauga

SEQ ID NO: 1318955 - RNA, 19 nt, Homo sapiens
  misc_RNA (1)...(19): siRNA sense strand
gcagacagacgaauacuuc

SEQ ID NO: 1318956 - RNA, 19 nt, Homo sapiens
  misc_RNA (1)...(19): siRNA sense strand
ggagacauguacccagaga

SEQ ID NO: 1318957 - RNA, 19 nt, Homo sapiens
  misc_RNA (1)...(19): siRNA sense strand
gcagagagccagaaagaag

SEQ ID NO: 1318958 - RNA, 19 nt, Homo sapiens
  misc_RNA (1)...(19): siRNA sense strand
ccaugggcaucuucacuuu

SEQ ID NO: 1318959 - RNA, 19 nt, Homo sapiens
  misc_RNA (1)...(19): siRNA sense strand
gcuaccagcuggacuacug

SEQ ID NO: 1318960 - RNA, 19 nt, Homo sapiens
  misc_RNA (1)...(19): siRNA sense strand
uaaggugggucagguguug

SEQ ID NO: 1318961 - RNA, 19 nt, Homo sapiens
  misc_RNA (1)...(19): siRNA sense strand
ucuggaaccucauggagaa

SEQ ID NO: 1318962 - RNA, 19 nt, Homo sapiens
  misc_RNA (1)...(19): siRNA sense strand
gcaccaacuucacuaccau

SEQ ID NO: 1318963 - RNA, 19 nt, Homo sapiens
  misc_RNA (1)...(19): siRNA sense strand
gggcaacuauaacuacuac

SEQ ID NO: 1318964 - RNA, 19 nt, Homo sapiens
  misc_RNA (1)...(19): siRNA sense strand
ucaacgggaugcccauuuc

SEQ ID NO: 1318965 - RNA, 19 nt, Homo sapiens
  misc_RNA (1)...(19): siRNA sense strand
gcgaacggcucaagaucca

SEQ ID NO: 1318966 - RNA, 19 nt, Homo sapiens
  misc_RNA (1)...(19): siRNA sense strand
gaaggacgaccuggcagaa

SEQ ID NO: 1318967 - RNA, 19 nt, Homo sapiens
  misc_RNA (1)...(19): siRNA sense strand
gcugaguguuugcuuggaa

SEQ ID NO: 1318968 - RNA, 19 nt, Homo sapiens
  misc_RNA (1)...(19): siRNA sense strand
gcaacuauaacuacuacau

SEQ ID NO: 1318969 - RNA, 19 nt, Homo sapiens
  misc_RNA (1)...(19): siRNA sense strand
ccauuuccauccucuacaa

SEQ ID NO: 1318970 - RNA, 19 nt, Homo sapiens
  misc_RNA (1)...(19): siRNA sense strand
cagcuggucuacaauuucu

SEQ ID NO: 1318971 - RNA, 19 nt, Homo sapiens
  misc_RNA (1)...(19): siRNA sense strand
cuacaucgaggaagacgaa

SEQ ID NO: 1318972 - RNA, 19 nt, Homo sapiens
  misc_RNA (1)...(19): siRNA sense strand
caacuauaacuacuacauc

SEQ ID NO: 1318973 - RNA, 19 nt, Homo sapiens
  misc_RNA (1)...(19): siRNA sense strand
gacagacgaauacuucuuc

SEQ ID NO: 1318974 - RNA, 19 nt, Homo sapiens
  misc_RNA (1)...(19): siRNA sense strand
uguccacgcugaaugugaa

SEQ ID NO: 1318975 - RNA, 19 nt, Homo sapiens
  misc_RNA (1)...(19): siRNA sense strand
uaacuacuacaucgaggaa

SEQ ID NO: 1318976 - RNA, 19 nt, Homo sapiens
  misc_RNA (1)...(19): siRNA sense strand
gagggcaacuauaacuacu

SEQ ID NO: 1318977 - RNA, 19 nt, Homo sapiens
  misc_RNA (1)...(19): siRNA sense strand
agaagauagcugaguguuu

SEQ ID NO: 1318978 - RNA, 19 nt, Homo sapiens
  misc_RNA (1)...(19): siRNA sense strand
caacaaguuuucugauuac

SEQ ID NO: 1318979 - RNA, 19 nt, Homo sapiens
  misc_RNA (1)...(19): siRNA sense strand
uggaggagcugggcuacug

SEQ ID NO: 1318980 - RNA, 19 nt, Homo sapiens
  misc_RNA (1)...(19): siRNA sense strand
cagagggcaacuauaacua

SEQ ID NO: 1318981 - RNA, 19 nt, Homo sapiens
  misc_RNA (1)...(19): siRNA sense strand
aggacgaccuggcagaaga

SEQ ID NO: 1318982 - RNA, 19 nt, Homo sapiens
  misc_RNA (1)...(19): siRNA sense strand
uccagcuggucuacaauuu

SEQ ID NO: 1318983 - RNA, 19 nt, Homo sapiens
  misc_RNA (1)...(19): siRNA sense strand
cagagagccagaaagaaga

SEQ ID NO: 1318984 - RNA, 19 nt, Homo sapiens
  misc_RNA (1)...(19): siRNA sense strand
ggagcagacagacgaauac

SEQ ID NO: 1318985 - RNA, 19 nt, Homo sapiens
  misc_RNA (1)...(19): siRNA sense strand
acuacuacaucgaggaaga

SEQ ID NO: 1318986 - RNA, 19 nt, Homo sapiens
  misc_RNA (1)...(19): siRNA sense strand
gaacacgacggagaaugag

SEQ ID NO: 1318987 - RNA, 19 nt, Homo sapiens
  misc_RNA (1)...(19): siRNA sense strand
ggaggcggaggaacucuuc

SEQ ID NO: 1318988 - RNA, 19 nt, Homo sapiens
  misc_RNA (1)...(19): siRNA sense strand
cauccucuacaacaaguuu

SEQ ID NO: 1318989 - RNA, 19 nt, Homo sapiens
  misc_RNA (1)...(19): siRNA sense strand
ucaacaccguggaggagau

SEQ ID NO: 1318990 - RNA, 19 nt, Homo sapiens
  misc_RNA (1)...(19): siRNA sense strand
gccaugggcaucuucacuu

SEQ ID NO: 1318991 - RNA, 19 nt, Homo sapiens
  misc_RNA (1)...(19): siRNA sense strand
caaguuuucugauuacuac

SEQ ID NO: 1318992 - RNA, 19 nt, Homo sapiens
  misc_RNA (1)...(19): siRNA sense strand
ucuuccagcuggucuacaa

SEQ ID NO: 1318993 - RNA, 19 nt, Homo sapiens
  misc_RNA (1)...(19): siRNA sense strand
ggagacgguccuggagcua

SEQ ID NO: 1318994 - RNA, 19 nt, Homo sapiens
  misc_RNA (1)...(19): siRNA sense strand
aggagcagacagacgaaua

SEQ ID NO: 1318995 - RNA, 19 nt, Homo sapiens
  misc_RNA (1)...(19): siRNA sense strand
agacagacgaauacuucuu

SEQ ID NO: 1318996 - RNA, 19 nt, Homo sapiens
  misc_RNA (1)...(19): siRNA sense strand
augcagagagccagaaaga

SEQ ID NO: 1318997 - RNA, 19 nt, Homo sapiens
  misc_RNA (1)...(19): siRNA sense strand
agacgguccuggagcuaca

SEQ ID NO: 1318998 - RNA, 19 nt, Homo sapiens
  misc_RNA (1)...(19): siRNA sense strand
guaaggugggucagguguu

SEQ ID NO: 1318999 - RNA, 19 nt, Homo sapiens
  misc_RNA (1)...(19): siRNA sense strand
gcacugggaugcugauugu

SEQ ID NO: 1319000 - RNA, 19 nt, Homo sapiens
  misc_RNA (1)...(19): siRNA sense strand
acacaaagccucagaguug

SEQ ID NO: 1319001 - RNA, 19 nt, Homo sapiens
  misc_RNA (1)...(19): siRNA sense strand
gauccuggcccucggguua

SEQ ID NO: 1319002 - RNA, 19 nt, Homo sapiens
  misc_RNA (1)...(19): siRNA sense strand
gaacaauggcuuccuggau

SEQ ID NO: 1319003 - RNA, 19 nt, Homo sapiens
  misc_RNA (1)...(19): siRNA sense strand
gcccacgucucuucaccua

SEQ ID NO: 1319004 - RNA, 19 nt, Homo sapiens
  misc_RNA (1)...(19): siRNA sense strand
ggugggaaccugacaguga

SEQ ID NO: 1319005 - RNA, 19 nt, Homo sapiens
  misc_RNA (1)...(19): siRNA sense strand
ccuauguucucuaccauga

SEQ ID NO: 1319006 - RNA, 19 nt, Homo sapiens
  misc_RNA (1)...(19): siRNA sense strand
caacuucuucaccauguuu

SEQ ID NO: 1319007 - RNA, 19 nt, Homo sapiens
  misc_RNA (1)...(19): siRNA sense strand
gggucaagcuccccauuua

SEQ ID NO: 1319008 - RNA, 19 nt, Homo sapiens
  misc_RNA (1)...(19): siRNA sense strand
gcaacuucuucaccauguu

SEQ ID NO: 1319009 - RNA, 19 nt, Homo sapiens
  misc_RNA (1)...(19): siRNA sense strand
ccaccuauguucucuacca

SEQ ID NO: 1319010 - RNA, 19 nt, Homo sapiens
  misc_RNA (1)...(19): siRNA sense strand
gcucagaugcuggagugua

SEQ ID NO: 1319011 - RNA, 19 nt, Homo sapiens
  misc_RNA (1)...(19): siRNA sense strand
cucagaugcuggaguguaa

SEQ ID NO: 1319012 - RNA, 19 nt, Homo sapiens
  misc_RNA (1)...(19): siRNA sense strand
uauguucucuaccaugaug

SEQ ID NO: 1319013 - RNA, 19 nt, Homo sapiens
  misc_RNA (1)...(19): siRNA sense strand
ggcaacuucuucaccaugu

SEQ ID NO: 1319014 - RNA, 19 nt, Homo sapiens
  misc_RNA (1)...(19): siRNA sense strand
caacacaaagccucagagu

SEQ ID NO: 1319015 - RNA, 19 nt, Homo sapiens
  misc_RNA (1)...(19): siRNA sense strand
gcuggaguguaagcuauga

SEQ ID NO: 1319016 - RNA, 19 nt, Homo sapiens
  misc_RNA (1)...(19): siRNA sense strand
acaauggcuuccuggauca

SEQ ID NO: 1319017 - RNA, 19 nt, Homo sapiens
  misc_RNA (1)...(19): siRNA sense strand
guugcugucugcuuucugu

SEQ ID NO: 1319018 - RNA, 19 nt, Homo sapiens
  misc_RNA (1)...(19): siRNA sense strand
ccaucuacgugggugguaa

SEQ ID NO: 1319019 - RNA, 19 nt, Homo sapiens
  misc_RNA (1)...(19): siRNA sense strand
gaugcuggaguguaagcua

SEQ ID NO: 1319020 - RNA, 19 nt, Homo sapiens
  misc_RNA (1)...(19): siRNA sense strand
augaugcccuacagaacua

SEQ ID NO: 1319021 - RNA, 19 nt, Homo sapiens
  misc_RNA (1)...(19): siRNA sense strand
gaucuggugucugcucaac

SEQ ID NO: 1319022 - RNA, 19 nt, Homo sapiens
  misc_RNA (1)...(19): siRNA sense strand
gaaaccaaaggcaacuucu

SEQ ID NO: 1319023 - RNA, 19 nt, Homo sapiens
  misc_RNA (1)...(19): siRNA sense strand
ggguguguuuguacucaug

SEQ ID NO: 1319024 - RNA, 19 nt, Homo sapiens
  misc_RNA (1)...(19): siRNA sense strand
ggagccaccuauguucucu

SEQ ID NO: 1319025 - RNA, 19 nt, Homo sapiens
  misc_RNA (1)...(19): siRNA sense strand
aaccaaaggcaacuucuuc

SEQ ID NO: 1319026 - RNA, 19 nt, Homo sapiens
  misc_RNA (1)...(19): siRNA sense strand
caaagccucagaguuggaa

SEQ ID NO: 1319027 - RNA, 19 nt, Homo sapiens
  misc_RNA (1)...(19): siRNA sense strand
ggugccaacugcgggauuc

SEQ ID NO: 1319028 - RNA, 19 nt, Homo sapiens
  misc_RNA (1)...(19): siRNA sense strand
ccguuacgauagccaucua

SEQ ID NO: 1319029 - RNA, 19 nt, Homo sapiens
  misc_RNA (1)...(19): siRNA sense strand
aaaccaaaggcaacuucuu

SEQ ID NO: 1319030 - RNA, 19 nt, Homo sapiens
  misc_RNA (1)...(19): siRNA sense strand
uaucugucccugaacaaug

SEQ ID NO: 1319031 - RNA, 19 nt, Homo sapiens
  misc_RNA (1)...(19): siRNA sense strand
guuucuggguguguuugua

SEQ ID NO: 1319032 - RNA, 19 nt, Homo sapiens
  misc_RNA (1)...(19): siRNA sense strand
caugggccaccuccggaua

SEQ ID NO: 1319033 - RNA, 19 nt, Homo sapiens
  misc_RNA (1)...(19): siRNA sense strand
ggagaaaccaaaggcaacu

SEQ ID NO: 1319034 - RNA, 19 nt, Homo sapiens
  misc_RNA (1)...(19): siRNA sense strand
ggaagaagaucauagagaa

SEQ ID NO: 1319035 - RNA, 19 nt, Homo sapiens
  misc_RNA (1)...(19): siRNA sense strand
gaaaugcccuggagugaau

SEQ ID NO: 1319036 - RNA, 19 nt, Homo sapiens
  misc_RNA (1)...(19): siRNA sense strand
gcacaccgccguacccuua

SEQ ID NO: 1319037 - RNA, 19 nt, Homo sapiens
  misc_RNA (1)...(19): siRNA sense strand
ucaaagacuuguucaugaa

SEQ ID NO: 1319038 - RNA, 19 nt, Homo sapiens
  misc_RNA (1)...(19): siRNA sense strand
gaccaaaucugcgcaugaa

SEQ ID NO: 1319039 - RNA, 19 nt, Homo sapiens
  misc_RNA (1)...(19): siRNA sense strand
caaccggccuauccucuuu

SEQ ID NO: 1319040 - RNA, 19 nt, Homo sapiens
  misc_RNA (1)...(19): siRNA sense strand
ucaacuaccugacggagaa

SEQ ID NO: 1319041 - RNA, 19 nt, Homo sapiens
  misc_RNA (1)...(19): siRNA sense strand
gaaugagaccuaccaguau

SEQ ID NO: 1319042 - RNA, 19 nt, Homo sapiens
  misc_RNA (1)...(19): siRNA sense strand
gcaaguggaggacugauga

SEQ ID NO: 1319043 - RNA, 19 nt, Homo sapiens
  misc_RNA (1)...(19): siRNA sense strand
ggaggaagaagaucauaga

SEQ ID NO: 1319044 - RNA, 19 nt, Homo sapiens
  misc_RNA (1)...(19): siRNA sense strand
agaaugagaccuaccagua

SEQ ID NO: 1319045 - RNA, 19 nt, Homo sapiens
  misc_RNA (1)...(19): siRNA sense strand
agaaacgccuaacugauga

SEQ ID NO: 1319046 - RNA, 19 nt, Homo sapiens
  misc_RNA (1)...(19): siRNA sense strand
gcaaugaggaccagaccaa

SEQ ID NO: 1319047 - RNA, 19 nt, Homo sapiens
  misc_RNA (1)...(19): siRNA sense strand
gaacccgugugccaacaug

SEQ ID NO: 1319048 - RNA, 19 nt, Homo sapiens
  misc_RNA (1)...(19): siRNA sense strand
gaugaaugcccuuuacuuc

SEQ ID NO: 1319049 - RNA, 19 nt, Homo sapiens
  misc_RNA (1)...(19): siRNA sense strand
aacaagagguggaggaaga

SEQ ID NO: 1319050 - RNA, 19 nt, Homo sapiens
  misc_RNA (1)...(19): siRNA sense strand
ccaccauccuggacauuga

SEQ ID NO: 1319051 - RNA, 19 nt, Homo sapiens
  misc_RNA (1)...(19): siRNA sense strand
aaugagaccuaccaguauu

SEQ ID NO: 1319052 - RNA, 19 nt, Homo sapiens
  misc_RNA (1)...(19): siRNA sense strand
acaagaaacgccuaacuga

SEQ ID NO: 1319053 - RNA, 19 nt, Homo sapiens
  misc_RNA (1)...(19): siRNA sense strand
ucaccaacaucaaagacuu

SEQ ID NO: 1319054 - RNA, 19 nt, Homo sapiens
  misc_RNA (1)...(19): siRNA sense strand
acaugaaggugugcaauga

SEQ ID NO: 1319055 - RNA, 19 nt, Homo sapiens
  misc_RNA (1)...(19): siRNA sense strand
ccaaguuuguuaccaagau

SEQ ID NO: 1319056 - RNA, 19 nt, Homo sapiens
  misc_RNA (1)...(19): siRNA sense strand
ggaugaaugcccuuuacuu

SEQ ID NO: 1319057 - RNA, 19 nt, Homo sapiens
  misc_RNA (1)...(19): siRNA sense strand
guccugggcuggaugaaug

SEQ ID NO: 1319058 - RNA, 19 nt, Homo sapiens
  misc_RNA (1)...(19): siRNA sense strand
caucaaagacuuguucaug

SEQ ID NO: 1319059 - RNA, 19 nt, Homo sapiens
  misc_RNA (1)...(19): siRNA sense strand
ggacaaguggcgcaaguuc

SEQ ID NO: 1319060 - RNA, 19 nt, Homo sapiens
  misc_RNA (1)...(19): siRNA sense strand
aagaaacgccuaacugaug

SEQ ID NO: 1319061 - RNA, 19 nt, Homo sapiens
  misc_RNA (1)...(19): siRNA sense strand
caaaucugcgcaugaaguu

SEQ ID NO: 1319062 - RNA, 19 nt, Homo sapiens
  misc_RNA (1)...(19): siRNA sense strand
ugguggaacugaacaagaa

SEQ ID NO: 1319063 - RNA, 19 nt, Homo sapiens
  misc_RNA (1)...(19): siRNA sense strand
gaaagcacccauggacuca

SEQ ID NO: 1319064 - RNA, 19 nt, Homo sapiens
  misc_RNA (1)...(19): siRNA sense strand
gaccgcagguggugcuuca

SEQ ID NO: 1319065 - RNA, 19 nt, Homo sapiens
  misc_RNA (1)...(19): siRNA sense strand
acaccaaguuuguuaccaa

SEQ ID NO: 1319066 - RNA, 19 nt, Homo sapiens
  misc_RNA (1)...(19): siRNA sense strand
gaacuugggcaucaucaac

SEQ ID NO: 1319067 - RNA, 19 nt, Homo sapiens
  misc_RNA (1)...(19): siRNA sense strand
caagaaacgccuaacugau

SEQ ID NO: 1319068 - RNA, 19 nt, Homo sapiens
  misc_RNA (1)...(19): siRNA sense strand
caaguuuguuaccaagaug

SEQ ID NO: 1319069 - RNA, 19 nt, Homo sapiens
  misc_RNA (1)...(19): siRNA sense strand
aucaaagacuuguucauga

SEQ ID NO: 1319070 - RNA, 19 nt, Homo sapiens
  misc_RNA (1)...(19): siRNA sense strand
uggacucacuguuugacua

SEQ ID NO: 1319071 - RNA, 19 nt, Homo sapiens
  misc_RNA (1)...(19): siRNA sense strand
gcaucaugauccagaagau

SEQ ID NO: 1319072 - RNA, 19 nt, Homo sapiens
  misc_RNA (1)...(19): siRNA sense strand
aaagacuuguucaugaaga

SEQ ID NO: 1319073 - RNA, 19 nt, Homo sapiens
  misc_RNA (1)...(19): siRNA sense strand
gcaagaaugagaccuacca

SEQ ID NO: 1319074 - RNA, 19 nt, Homo sapiens
  misc_RNA (1)...(19): siRNA sense strand
gaagaagaucauagagaag

SEQ ID NO: 1319075 - RNA, 19 nt, Homo sapiens
  misc_RNA (1)...(19): siRNA sense strand
aaccagaacuugggcauca

SEQ ID NO: 1319076 - RNA, 19 nt, Homo sapiens
  misc_RNA (1)...(19): siRNA sense strand
caacaugcgggaguucauu

SEQ ID NO: 1319077 - RNA, 19 nt, Homo sapiens
  misc_RNA (1)...(19): siRNA sense strand
cccauggacucacuguuug

SEQ ID NO: 1319078 - RNA, 19 nt, Homo sapiens
  misc_RNA (1)...(19): siRNA sense strand
ggaccuauagcaucaugau

SEQ ID NO: 1319079 - RNA, 19 nt, Homo sapiens
  misc_RNA (1)...(19): siRNA sense strand
gccaagacgggcaagauug

SEQ ID NO: 1319080 - RNA, 19 nt, Homo sapiens
  misc_RNA (1)...(19): siRNA sense strand
gcaagcacaucuggaagcu

SEQ ID NO: 1319081 - RNA, 19 nt, Homo sapiens
  misc_RNA (1)...(19): siRNA sense strand
cuacaucauccucaccuuu

SEQ ID NO: 1319082 - RNA, 19 nt, Homo sapiens
  misc_RNA (1)...(19): siRNA sense strand
ccaaaucugcgcaugaagu

SEQ ID NO: 1319083 - RNA, 19 nt, Homo sapiens
  misc_RNA (1)...(19): siRNA sense strand
cagcugcucuacuucaucu

SEQ ID NO: 1319084 - RNA, 19 nt, Homo sapiens
  misc_RNA (1)...(19): siRNA sense strand
uggagugaauucucucuuc

SEQ ID NO: 1319085 - RNA, 19 nt, Homo sapiens
  misc_RNA (1)...(19): siRNA sense strand
cgaccaaaucugcgcauga

SEQ ID NO: 1319086 - RNA, 19 nt, Homo sapiens
  misc_RNA (1)...(19): siRNA sense strand
uggacgggcugcucccauu

SEQ ID NO: 1319087 - RNA, 19 nt, Homo sapiens
  misc_RNA (1)...(19): siRNA sense strand
gugagaacaccaaguuugu

SEQ ID NO: 1319088 - RNA, 19 nt, Homo sapiens
  misc_RNA (1)...(19): siRNA sense strand
gcugacaacacccgugaga

SEQ ID NO: 1319089 - RNA, 19 nt, Homo sapiens
  misc_RNA (1)...(19): siRNA sense strand
gcuggaugaaugcccuuua

SEQ ID NO: 1319090 - RNA, 19 nt, Homo sapiens
  misc_RNA (1)...(19): siRNA sense strand
cuguggagcccaucaauga

SEQ ID NO: 1319091 - RNA, 19 nt, Homo sapiens
  misc_RNA (1)...(19): siRNA sense strand
cgugagaacaccaaguuug

SEQ ID NO: 1319092 - RNA, 19 nt, Homo sapiens
  misc_RNA (1)...(19): siRNA sense strand
gaacugcugcgggacaagu

SEQ ID NO: 1319093 - RNA, 19 nt, Homo sapiens
  misc_RNA (1)...(19): siRNA sense strand
gauuccugcucgucuacuu

SEQ ID NO: 1319094 - RNA, 19 nt, Homo sapiens
  misc_RNA (1)...(19): siRNA sense strand
ugacaacacccgugagaac

SEQ ID NO: 1319095 - RNA, 19 nt, Homo sapiens
  misc_RNA (1)...(19): siRNA sense strand
acaucaacguggucuccua

SEQ ID NO: 1319096 - RNA, 19 nt, Homo sapiens
  misc_RNA (1)...(19): siRNA sense strand
cacaagaaacgccuaacug

SEQ ID NO: 1319097 - RNA, 19 nt, Homo sapiens
  misc_RNA (1)...(19): siRNA sense strand
agagcaagcacaucuggaa

SEQ ID NO: 1319098 - RNA, 19 nt, Homo sapiens
  misc_RNA (1)...(19): siRNA sense strand
ccaaggagagcaagcacau

SEQ ID NO: 1319099 - RNA, 19 nt, Homo sapiens
  misc_RNA (1)...(19): siRNA sense strand
ccaagaaagcacccaugga

SEQ ID NO: 1319100 - RNA, 19 nt, Homo sapiens
  misc_RNA (1)...(19): siRNA sense strand
gcccuggagugaauucucu

SEQ ID NO: 1319101 - RNA, 19 nt, Homo sapiens
  misc_RNA (1)...(19): siRNA sense strand
gcccuuccgugacaucuac

SEQ ID NO: 1319102 - RNA, 19 nt, Homo sapiens
  misc_RNA (1)...(19): siRNA sense strand
gcuggugaccuacaucauc

SEQ ID NO: 1319103 - RNA, 19 nt, Homo sapiens
  misc_RNA (1)...(19): siRNA sense strand
aagacuuguucaugaagaa

SEQ ID NO: 1319104 - RNA, 19 nt, Homo sapiens
  misc_RNA (1)...(19): siRNA sense strand
cugcaaacacuacguggaa

SEQ ID NO: 1319105 - RNA, 19 nt, Homo sapiens
  misc_RNA (1)...(19): siRNA sense strand
acccauggacucacuguuu

SEQ ID NO: 1319106 - RNA, 19 nt, Homo sapiens
  misc_RNA (1)...(19): siRNA sense strand
agaccuaccaguauuaugg

SEQ ID NO: 1319107 - RNA, 19 nt, Homo sapiens
  misc_RNA (1)...(19): siRNA sense strand
ccuuccagcugcucuacuu

SEQ ID NO: 1319108 - RNA, 19 nt, Homo sapiens
  misc_RNA (1)...(19): siRNA sense strand
gacaacacccgugagaaca

SEQ ID NO: 1319109 - RNA, 19 nt, Homo sapiens
  misc_RNA (1)...(19): siRNA sense strand
ggccuauccucuuugacau

SEQ ID NO: 1319110 - RNA, 19 nt, Homo sapiens
  misc_RNA (1)...(19): siRNA sense strand
ggaguccacccuauaugag

SEQ ID NO: 1319111 - RNA, 19 nt, Homo sapiens
  misc_RNA (1)...(19): siRNA sense strand
caugaucggcuacgcuuca

SEQ ID NO: 1319112 - RNA, 19 nt, Homo sapiens
  misc_RNA (1)...(19): siRNA sense strand
ggacucacuguuugacuac

SEQ ID NO: 1319113 - RNA, 19 nt, Homo sapiens
  misc_RNA (1)...(19): siRNA sense strand
aauucucucuucauugaug

SEQ ID NO: 1319114 - RNA, 19 nt, Homo sapiens
  misc_RNA (1)...(19): siRNA sense strand
uggaggccgugcucaacaa

SEQ ID NO: 1319115 - RNA, 19 nt, Homo sapiens
  misc_RNA (1)...(19): siRNA sense strand
gcgaggucauuacgcucuu

SEQ ID NO: 1319116 - RNA, 19 nt, Homo sapiens
  misc_RNA (1)...(19): siRNA sense strand
gcgaugggcgaccaaaucu

SEQ ID NO: 1319117 - RNA, 19 nt, Homo sapiens
  misc_RNA (1)...(19): siRNA sense strand
uacaucauccucaccuuug

SEQ ID NO: 1319118 - RNA, 19 nt, Homo sapiens
  misc_RNA (1)...(19): siRNA sense strand
caacaugaaggugugcaau

SEQ ID NO: 1319119 - RNA, 19 nt, Homo sapiens
  misc_RNA (1)...(19): siRNA sense strand
ucuacuugcucuucaugau

SEQ ID NO: 1319120 - RNA, 19 nt, Homo sapiens
  misc_RNA (1)...(19): siRNA sense strand
caucaugauccagaagauu

SEQ ID NO: 1319121 - RNA, 19 nt, Homo sapiens
  misc_RNA (1)...(19): siRNA sense strand
aagaaaugcccuggaguga

SEQ ID NO: 1319122 - RNA, 19 nt, Homo sapiens
  misc_RNA (1)...(19): siRNA sense strand
caaagacuuguucaugaag

SEQ ID NO: 1319123 - RNA, 19 nt, Homo sapiens
  misc_RNA (1)...(19): siRNA sense strand
ccacaagaaacgccuaacu

SEQ ID NO: 1319124 - RNA, 19 nt, Homo sapiens
  misc_RNA (1)...(19): siRNA sense strand
ggcgaugggcgaccaaauc

SEQ ID NO: 1319125 - RNA, 19 nt, Homo sapiens
  misc_RNA (1)...(19): siRNA sense strand
ccaccaccauccuggacau

SEQ ID NO: 1319126 - RNA, 19 nt, Homo sapiens
  misc_RNA (1)...(19): siRNA sense strand
agaaaugcccuggagugaa

SEQ ID NO: 1319127 - RNA, 19 nt, Homo sapiens
  misc_RNA (1)...(19): siRNA sense strand
caaacacuacguggaacuu

SEQ ID NO: 1319128 - RNA, 19 nt, Homo sapiens
  misc_RNA (1)...(19): siRNA sense strand
gcaaacacuacguggaacu

SEQ ID NO: 1319129 - RNA, 19 nt, Homo sapiens
  misc_RNA (1)...(19): siRNA sense strand
ucagacagcccugcacauc

SEQ ID NO: 1319130 - RNA, 19 nt, Homo sapiens
  misc_RNA (1)...(19): siRNA sense strand
aacaugcgggaguucauua

SEQ ID NO: 1319131 - RNA, 19 nt, Homo sapiens
  misc_RNA (1)...(19): siRNA sense strand
aggaagaagaucauagaga

SEQ ID NO: 1319132 - RNA, 19 nt, Homo sapiens
  misc_RNA (1)...(19): siRNA sense strand
cuucuucaccaacaucaaa

SEQ ID NO: 1319133 - RNA, 19 nt, Homo sapiens
  misc_RNA (1)...(19): siRNA sense strand
ggccgucuccuucuacauc

SEQ ID NO: 1319134 - RNA, 19 nt, Homo sapiens
  misc_RNA (1)...(19): siRNA sense strand
ggaagaagaucauagagaa

SEQ ID NO: 1319135 - RNA, 19 nt, Homo sapiens
  misc_RNA (1)...(19): siRNA sense strand
gaaaugcccuggagugaau

SEQ ID NO: 1319136 - RNA, 19 nt, Homo sapiens
  misc_RNA (1)...(19): siRNA sense strand
gcacaccgccguacccuua

SEQ ID NO: 1319137 - RNA, 19 nt, Homo sapiens
  misc_RNA (1)...(19): siRNA sense strand
ucaaagacuuguucaugaa

SEQ ID NO: 1319138 - RNA, 19 nt, Homo sapiens
  misc_RNA (1)...(19): siRNA sense strand
gaccaaaucugcgcaugaa

SEQ ID NO: 1319139 - RNA, 19 nt, Homo sapiens
  misc_RNA (1)...(19): siRNA sense strand
caaccggccuauccucuuu

SEQ ID NO: 1319140 - RNA, 19 nt, Homo sapiens
  misc_RNA (1)...(19): siRNA sense strand
ucaacuaccugacggagaa

SEQ ID NO: 1319141 - RNA, 19 nt, Homo sapiens
  misc_RNA (1)...(19): siRNA sense strand
gaaugagaccuaccaguau

SEQ ID NO: 1319142 - RNA, 19 nt, Homo sapiens
  misc_RNA (1)...(19): siRNA sense strand
gcaaguggaggacugauga

SEQ ID NO: 1319143 - RNA, 19 nt, Homo sapiens
  misc_RNA (1)...(19): siRNA sense strand
ggaggaagaagaucauaga

SEQ ID NO: 1319144 - RNA, 19 nt, Homo sapiens
  misc_RNA (1)...(19): siRNA sense strand
agaaugagaccuaccagua

SEQ ID NO: 1319145 - RNA, 19 nt, Homo sapiens
  misc_RNA (1)...(19): siRNA sense strand
agaaacgccuaacugauga

SEQ ID NO: 1319146 - RNA, 19 nt, Homo sapiens
  misc_RNA (1)...(19): siRNA sense strand
gcaaugaggaccagaccaa

SEQ ID NO: 1319147 - RNA, 19 nt, Homo sapiens
  misc_RNA (1)...(19): siRNA sense strand
gaacccgugugccaacaug

SEQ ID NO: 1319148 - RNA, 19 nt, Homo sapiens
  misc_RNA (1)...(19): siRNA sense strand
gaugaaugcccuuuacuuc

SEQ ID NO: 1319149 - RNA, 19 nt, Homo sapiens
  misc_RNA (1)...(19): siRNA sense strand
aacaagagguggaggaaga

SEQ ID NO: 1319150 - RNA, 19 nt, Homo sapiens
  misc_RNA (1)...(19): siRNA sense strand
ccaccauccuggacauuga

SEQ ID NO: 1319151 - RNA, 19 nt, Homo sapiens
  misc_RNA (1)...(19): siRNA sense strand
aaugagaccuaccaguauu

SEQ ID NO: 1319152 - RNA, 19 nt, Homo sapiens
  misc_RNA (1)...(19): siRNA sense strand
acaagaaacgccuaacuga

SEQ ID NO: 1319153 - RNA, 19 nt, Homo sapiens
  misc_RNA (1)...(19): siRNA sense strand
ucaccaacaucaaagacuu

SEQ ID NO: 1319154 - RNA, 19 nt, Homo sapiens
  misc_RNA (1)...(19): siRNA sense strand
acaugaaggugugcaauga

SEQ ID NO: 1319155 - RNA, 19 nt, Homo sapiens
  misc_RNA (1)...(19): siRNA sense strand
ccaaguuuguuaccaagau

SEQ ID NO: 1319156 - RNA, 19 nt, Homo sapiens
  misc_RNA (1)...(19): siRNA sense strand
ggaugaaugcccuuuacuu

SEQ ID NO: 1319157 - RNA, 19 nt, Homo sapiens
  misc_RNA (1)...(19): siRNA sense strand
guccugggcuggaugaaug

SEQ ID NO: 1319158 - RNA, 19 nt, Homo sapiens
  misc_RNA (1)...(19): siRNA sense strand
caucaaagacuuguucaug

SEQ ID NO: 1319159 - RNA, 19 nt, Homo sapiens
  misc_RNA (1)...(19): siRNA sense strand
ggacaaguggcgcaaguuc

SEQ ID NO: 1319160 - RNA, 19 nt, Homo sapiens
  misc_RNA (1)...(19): siRNA sense strand
aagaaacgccuaacugaug

SEQ ID NO: 1319161 - RNA, 19 nt, Homo sapiens
  misc_RNA (1)...(19): siRNA sense strand
caaaucugcgcaugaaguu

SEQ ID NO: 1319162 - RNA, 19 nt, Homo sapiens
  misc_RNA (1)...(19): siRNA sense strand
ugguggaacugaacaagaa

SEQ ID NO: 1319163 - RNA, 19 nt, Homo sapiens
  misc_RNA (1)...(19): siRNA sense strand
gaaagcacccauggacuca

SEQ ID NO: 1319164 - RNA, 19 nt, Homo sapiens
  misc_RNA (1)...(19): siRNA sense strand
gaccgcagguggugcuuca

SEQ ID NO: 1319165 - RNA, 19 nt, Homo sapiens
  misc_RNA (1)...(19): siRNA sense strand
acaccaaguuuguuaccaa

SEQ ID NO: 1319166 - RNA, 19 nt, Homo sapiens
  misc_RNA (1)...(19): siRNA sense strand
gaacuugggcaucaucaac

SEQ ID NO: 1319167 - RNA, 19 nt, Homo sapiens
  misc_RNA (1)...(19): siRNA sense strand
caagaaacgccuaacugau

SEQ ID NO: 1319168 - RNA, 19 nt, Homo sapiens
  misc_RNA (1)...(19): siRNA sense strand
caaguuuguuaccaagaug

SEQ ID NO: 1319169 - RNA, 19 nt, Homo sapiens
  misc_RNA (1)...(19): siRNA sense strand
aucaaagacuuguucauga

SEQ ID NO: 1319170 - RNA, 19 nt, Homo sapiens
  misc_RNA (1)...(19): siRNA sense strand
uggacucacuguuugacua

SEQ ID NO: 1319171 - RNA, 19 nt, Homo sapiens
  misc_RNA (1)...(19): siRNA sense strand
gcaucaugauccagaagau

SEQ ID NO: 1319172 - RNA, 19 nt, Homo sapiens
  misc_RNA (1)...(19): siRNA sense strand
aaagacuuguucaugaaga

SEQ ID NO: 1319173 - RNA, 19 nt, Homo sapiens
  misc_RNA (1)...(19): siRNA sense strand
gcaagaaugagaccuacca

SEQ ID NO: 1319174 - RNA, 19 nt, Homo sapiens
  misc_RNA (1)...(19): siRNA sense strand
gaagaagaucauagagaag

SEQ ID NO: 1319175 - RNA, 19 nt, Homo sapiens
  misc_RNA (1)...(19): siRNA sense strand
aaccagaacuugggcauca

SEQ ID NO: 1319176 - RNA, 19 nt, Homo sapiens
  misc_RNA (1)...(19): siRNA sense strand
caacaugcgggaguucauu

SEQ ID NO: 1319177 - RNA, 19 nt, Homo sapiens
  misc_RNA (1)...(19): siRNA sense strand
cccauggacucacuguuug

SEQ ID NO: 1319178 - RNA, 19 nt, Homo sapiens
  misc_RNA (1)...(19): siRNA sense strand
ggaccuauagcaucaugau

SEQ ID NO: 1319179 - RNA, 19 nt, Homo sapiens
  misc_RNA (1)...(19): siRNA sense strand
gccaagacgggcaagauug

SEQ ID NO: 1319180 - RNA, 19 nt, Homo sapiens
  misc_RNA (1)...(19): siRNA sense strand
gcaagcacaucuggaagcu

SEQ ID NO: 1319181 - RNA, 19 nt, Homo sapiens
  misc_RNA (1)...(19): siRNA sense strand
cuacaucauccucaccuuu

SEQ ID NO: 1319182 - RNA, 19 nt, Homo sapiens
  misc_RNA (1)...(19): siRNA sense strand
ccaaaucugcgcaugaagu

SEQ ID NO: 1319183 - RNA, 19 nt, Homo sapiens
  misc_RNA (1)...(19): siRNA sense strand
cagcugcucuacuucaucu

SEQ ID NO: 1319184 - RNA, 19 nt, Homo sapiens
  misc_RNA (1)...(19): siRNA sense strand
uggagugaauucucucuuc

SEQ ID NO: 1319185 - RNA, 19 nt, Homo sapiens
  misc_RNA (1)...(19): siRNA sense strand
cgaccaaaucugcgcauga

SEQ ID NO: 1319186 - RNA, 19 nt, Homo sapiens
  misc_RNA (1)...(19): siRNA sense strand
uggacgggcugcucccauu

SEQ ID NO: 1319187 - RNA, 19 nt, Homo sapiens
  misc_RNA (1)...(19): siRNA sense strand
gugagaacaccaaguuugu

SEQ ID NO: 1319188 - RNA, 19 nt, Homo sapiens
  misc_RNA (1)...(19): siRNA sense strand
gcugacaacacccgugaga

SEQ ID NO: 1319189 - RNA, 19 nt, Homo sapiens
  misc_RNA (1)...(19): siRNA sense strand
gcuggaugaaugcccuuua

SEQ ID NO: 1319190 - RNA, 19 nt, Homo sapiens
  misc_RNA (1)...(19): siRNA sense strand
cuguggagcccaucaauga

SEQ ID NO: 1319191 - RNA, 19 nt, Homo sapiens
  misc_RNA (1)...(19): siRNA sense strand
cgugagaacaccaaguuug

SEQ ID NO: 1319192 - RNA, 19 nt, Homo sapiens
  misc_RNA (1)...(19): siRNA sense strand
gaacugcugcgggacaagu

SEQ ID NO: 1319193 - RNA, 19 nt, Homo sapiens
  misc_RNA (1)...(19): siRNA sense strand
gauuccugcucgucuacuu

SEQ ID NO: 1319194 - RNA, 19 nt, Homo sapiens
  misc_RNA (1)...(19): siRNA sense strand
ugacaacacccgugagaac

SEQ ID NO: 1319195 - RNA, 19 nt, Homo sapiens
  misc_RNA (1)...(19): siRNA sense strand
acaucaacguggucuccua

SEQ ID NO: 1319196 - RNA, 19 nt, Homo sapiens
  misc_RNA (1)...(19): siRNA sense strand
cacaagaaacgccuaacug

SEQ ID NO: 1319197 - RNA, 19 nt, Homo sapiens
  misc_RNA (1)...(19): siRNA sense strand
agagcaagcacaucuggaa

SEQ ID NO: 1319198 - RNA, 19 nt, Homo sapiens
  misc_RNA (1)...(19): siRNA sense strand
ccaaggagagcaagcacau

SEQ ID NO: 1319199 - RNA, 19 nt, Homo sapiens
  misc_RNA (1)...(19): siRNA sense strand
ccaagaaagcacccaugga

SEQ ID NO: 1319200 - RNA, 19 nt, Homo sapiens
  misc_RNA (1)...(19): siRNA sense strand
gcccuggagugaauucucu

SEQ ID NO: 1319201 - RNA, 19 nt, Homo sapiens
  misc_RNA (1)...(19): siRNA sense strand
gcccuuccgugacaucuac

SEQ ID NO: 1319202 - RNA, 19 nt, Homo sapiens
  misc_RNA (1)...(19): siRNA sense strand
gcuggugaccuacaucauc

SEQ ID NO: 1319203 - RNA, 19 nt, Homo sapiens
  misc_RNA (1)...(19): siRNA sense strand
aagacuuguucaugaagaa

SEQ ID NO: 1319204 - RNA, 19 nt, Homo sapiens
  misc_RNA (1)...(19): siRNA sense strand
cugcaaacacuacguggaa

SEQ ID NO: 1319205 - RNA, 19 nt, Homo sapiens
  misc_RNA (1)...(19): siRNA sense strand
acccauggacucacuguuu

SEQ ID NO: 1319206 - RNA, 19 nt, Homo sapiens
  misc_RNA (1)...(19): siRNA sense strand
agaccuaccaguauuaugg

SEQ ID NO: 1319207 - RNA, 19 nt, Homo sapiens
  misc_RNA (1)...(19): siRNA sense strand
ccuuccagcugcucuacuu

SEQ ID NO: 1319208 - RNA, 19 nt, Homo sapiens
  misc_RNA (1)...(19): siRNA sense strand
gacaacacccgugagaaca

SEQ ID NO: 1319209 - RNA, 19 nt, Homo sapiens
  misc_RNA (1)...(19): siRNA sense strand
ggccuauccucuuugacau

SEQ ID NO: 1319210 - RNA, 19 nt, Homo sapiens
  misc_RNA (1)...(19): siRNA sense strand
ggaguccacccuauaugag

SEQ ID NO: 1319211 - RNA, 19 nt, Homo sapiens
  misc_RNA (1)...(19): siRNA sense strand
caugaucggcuacgcuuca

SEQ ID NO: 1319212 - RNA, 19 nt, Homo sapiens
  misc_RNA (1)...(19): siRNA sense strand
ggacucacuguuugacuac

SEQ ID NO: 1319213 - RNA, 19 nt, Homo sapiens
  misc_RNA (1)...(19): siRNA sense strand
aauucucucuucauugaug

SEQ ID NO: 1319214 - RNA, 19 nt, Homo sapiens
  misc_RNA (1)...(19): siRNA sense strand
uggaggccgugcucaacaa

SEQ ID NO: 1319215 - RNA, 19 nt, Homo sapiens
  misc_RNA (1)...(19): siRNA sense strand
gcgaggucauuacgcucuu

SEQ ID NO: 1319216 - RNA, 19 nt, Homo sapiens
  misc_RNA (1)...(19): siRNA sense strand
gcgaugggcgaccaaaucu

SEQ ID NO: 1319217 - RNA, 19 nt, Homo sapiens
  misc_RNA (1)...(19): siRNA sense strand
uacaucauccucaccuuug

SEQ ID NO: 1319218 - RNA, 19 nt, Homo sapiens
  misc_RNA (1)...(19): siRNA sense strand
caacaugaaggugugcaau

SEQ ID NO: 1319219 - RNA, 19 nt, Homo sapiens
  misc_RNA (1)...(19): siRNA sense strand
ucuacuugcucuucaugau

SEQ ID NO: 1319220 - RNA, 19 nt, Homo sapiens
  misc_RNA (1)...(19): siRNA sense strand
caucaugauccagaagauu

SEQ ID NO: 1319221 - RNA, 19 nt, Homo sapiens
  misc_RNA (1)...(19): siRNA sense strand
aagaaaugcccuggaguga

SEQ ID NO: 1319222 - RNA, 19 nt, Homo sapiens
  misc_RNA (1)...(19): siRNA sense strand
caaagacuuguucaugaag

SEQ ID NO: 1319223 - RNA, 19 nt, Homo sapiens
  misc_RNA (1)...(19): siRNA sense strand
ccacaagaaacgccuaacu

SEQ ID NO: 1319224 - RNA, 19 nt, Homo sapiens
  misc_RNA (1)...(19): siRNA sense strand
ggcgaugggcgaccaaauc

SEQ ID NO: 1319225 - RNA, 19 nt, Homo sapiens
  misc_RNA (1)...(19): siRNA sense strand
ccaccaccauccuggacau

SEQ ID NO: 1319226 - RNA, 19 nt, Homo sapiens
  misc_RNA (1)...(19): siRNA sense strand
agaaaugcccuggagugaa

SEQ ID NO: 1319227 - RNA, 19 nt, Homo sapiens
  misc_RNA (1)...(19): siRNA sense strand
caaacacuacguggaacuu

SEQ ID NO: 1319228 - RNA, 19 nt, Homo sapiens
  misc_RNA (1)...(19): siRNA sense strand
gcaaacacuacguggaacu

SEQ ID NO: 1319229 - RNA, 19 nt, Homo sapiens
  misc_RNA (1)...(19): siRNA sense strand
ucagacagcccugcacauc

SEQ ID NO: 1319230 - RNA, 19 nt, Homo sapiens
  misc_RNA (1)...(19): siRNA sense strand
aacaugcgggaguucauua

SEQ ID NO: 1319231 - RNA, 19 nt, Homo sapiens
  misc_RNA (1)...(19): siRNA sense strand
aggaagaagaucauagaga

SEQ ID NO: 1319232 - RNA, 19 nt, Homo sapiens
  misc_RNA (1)...(19): siRNA sense strand
cuucuucaccaacaucaaa

SEQ ID NO: 1319233 - RNA, 19 nt, Homo sapiens
  misc_RNA (1)...(19): siRNA sense strand
ggccgucuccuucuacauc

SEQ ID NO: 1319234 - RNA, 19 nt, Homo sapiens
  misc_RNA (1)...(19): siRNA sense strand
ggaagaagaucauagagaa

SEQ ID NO: 1319235 - RNA, 19 nt, Homo sapiens
  misc_RNA (1)...(19): siRNA sense strand
gaaaugcccuggagugaau

SEQ ID NO: 1319236 - RNA, 19 nt, Homo sapiens
  misc_RNA (1)...(19): siRNA sense strand
gcacaccgccguacccuua

SEQ ID NO: 1319237 - RNA, 19 nt, Homo sapiens
  misc_RNA (1)...(19): siRNA sense strand
ucaaagacuuguucaugaa

SEQ ID NO: 1319238 - RNA, 19 nt, Homo sapiens
  misc_RNA (1)...(19): siRNA sense strand
gaccaaaucugcgcaugaa

SEQ ID NO: 1319239 - RNA, 19 nt, Homo sapiens
  misc_RNA (1)...(19): siRNA sense strand
caaccggccuauccucuuu

SEQ ID NO: 1319240 - RNA, 19 nt, Homo sapiens
  misc_RNA (1)...(19): siRNA sense strand
ucaacuaccugacggagaa

SEQ ID NO: 1319241 - RNA, 19 nt, Homo sapiens
  misc_RNA (1)...(19): siRNA sense strand
gaaugagaccuaccaguau

SEQ ID NO: 1319242 - RNA, 19 nt, Homo sapiens
  misc_RNA (1)...(19): siRNA sense strand
gcaaguggaggacugauga

SEQ ID NO: 1319243 - RNA, 19 nt, Homo sapiens
  misc_RNA (1)...(19): siRNA sense strand
ggaggaagaagaucauaga

SEQ ID NO: 1319244 - RNA, 19 nt, Homo sapiens
  misc_RNA (1)...(19): siRNA sense strand
agaaugagaccuaccagua

SEQ ID NO: 1319245 - RNA, 19 nt, Homo sapiens
  misc_RNA (1)...(19): siRNA sense strand
agaaacgccuaacugauga

SEQ ID NO: 1319246 - RNA, 19 nt, Homo sapiens
  misc_RNA (1)...(19): siRNA sense strand
gcaaugaggaccagaccaa

SEQ ID NO: 1319247 - RNA, 19 nt, Homo sapiens
  misc_RNA (1)...(19): siRNA sense strand
gaacccgugugccaacaug

SEQ ID NO: 1319248 - RNA, 19 nt, Homo sapiens
  misc_RNA (1)...(19): siRNA sense strand
gaugaaugcccuuuacuuc

SEQ ID NO: 1319249 - RNA, 19 nt, Homo sapiens
  misc_RNA (1)...(19): siRNA sense strand
aacaagagguggaggaaga

SEQ ID NO: 1319250 - RNA, 19 nt, Homo sapiens
  misc_RNA (1)...(19): siRNA sense strand
ccaccauccuggacauuga

SEQ ID NO: 1319251 - RNA, 19 nt, Homo sapiens
  misc_RNA (1)...(19): siRNA sense strand
aaugagaccuaccaguauu

SEQ ID NO: 1319252 - RNA, 19 nt, Homo sapiens
  misc_RNA (1)...(19): siRNA sense strand
acaagaaacgccuaacuga

SEQ ID NO: 1319253 - RNA, 19 nt, Homo sapiens
  misc_RNA (1)...(19): siRNA sense strand
ucaccaacaucaaagacuu

SEQ ID NO: 1319254 - RNA, 19 nt, Homo sapiens
  misc_RNA (1)...(19): siRNA sense strand
acaugaaggugugcaauga

SEQ ID NO: 1319255 - RNA, 19 nt, Homo sapiens
  misc_RNA (1)...(19): siRNA sense strand
ccaaguuuguuaccaagau

SEQ ID NO: 1319256 - RNA, 19 nt, Homo sapiens
  misc_RNA (1)...(19): siRNA sense strand
ggaugaaugcccuuuacuu

SEQ ID NO: 1319257 - RNA, 19 nt, Homo sapiens
  misc_RNA (1)...(19): siRNA sense strand
guccugggcuggaugaaug

SEQ ID NO: 1319258 - RNA, 19 nt, Homo sapiens
  misc_RNA (1)...(19): siRNA sense strand
caucaaagacuuguucaug

SEQ ID NO: 1319259 - RNA, 19 nt, Homo sapiens
  misc_RNA (1)...(19): siRNA sense strand
ggacaaguggcgcaaguuc

SEQ ID NO: 1319260 - RNA, 19 nt, Homo sapiens
  misc_RNA (1)...(19): siRNA sense strand
aagaaacgccuaacugaug

SEQ ID NO: 1319261 - RNA, 19 nt, Homo sapiens
  misc_RNA (1)...(19): siRNA sense strand
caaaucugcgcaugaaguu

SEQ ID NO: 1319262 - RNA, 19 nt, Homo sapiens
  misc_RNA (1)...(19): siRNA sense strand
ugguggaacugaacaagaa

SEQ ID NO: 1319263 - RNA, 19 nt, Homo sapiens
  misc_RNA (1)...(19): siRNA sense strand
gaaagcacccauggacuca

SEQ ID NO: 1319264 - RNA, 19 nt, Homo sapiens
  misc_RNA (1)...(19): siRNA sense strand
gaccgcagguggugcuuca

SEQ ID NO: 1319265 - RNA, 19 nt, Homo sapiens
  misc_RNA (1)...(19): siRNA sense strand
acaccaaguuuguuaccaa

SEQ ID NO: 1319266 - RNA, 19 nt, Homo sapiens
  misc_RNA (1)...(19): siRNA sense strand
gaacuugggcaucaucaac

SEQ ID NO: 1319267 - RNA, 19 nt, Homo sapiens
  misc_RNA (1)...(19): siRNA sense strand
caagaaacgccuaacugau

SEQ ID NO: 1319268 - RNA, 19 nt, Homo sapiens
  misc_RNA (1)...(19): siRNA sense strand
caaguuuguuaccaagaug

SEQ ID NO: 1319269 - RNA, 19 nt, Homo sapiens
  misc_RNA (1)...(19): siRNA sense strand
aucaaagacuuguucauga

SEQ ID NO: 1319270 - RNA, 19 nt, Homo sapiens
  misc_RNA (1)...(19): siRNA sense strand
uggacucacuguuugacua

SEQ ID NO: 1319271 - RNA, 19 nt, Homo sapiens
  misc_RNA (1)...(19): siRNA sense strand
gcaucaugauccagaagau

SEQ ID NO: 1319272 - RNA, 19 nt, Homo sapiens
  misc_RNA (1)...(19): siRNA sense strand
aaagacuuguucaugaaga

SEQ ID NO: 1319273 - RNA, 19 nt, Homo sapiens
  misc_RNA (1)...(19): siRNA sense strand
gcaagaaugagaccuacca

SEQ ID NO: 1319274 - RNA, 19 nt, Homo sapiens
  misc_RNA (1)...(19): siRNA sense strand
gaagaagaucauagagaag

SEQ ID NO: 1319275 - RNA, 19 nt, Homo sapiens
  misc_RNA (1)...(19): siRNA sense strand
aaccagaacuugggcauca

SEQ ID NO: 1319276 - RNA, 19 nt, Homo sapiens
  misc_RNA (1)...(19): siRNA sense strand
caacaugcgggaguucauu

SEQ ID NO: 1319277 - RNA, 19 nt, Homo sapiens
  misc_RNA (1)...(19): siRNA sense strand
cccauggacucacuguuug

SEQ ID NO: 1319278 - RNA, 19 nt, Homo sapiens
  misc_RNA (1)...(19): siRNA sense strand
ggaccuauagcaucaugau

SEQ ID NO: 1319279 - RNA, 19 nt, Homo sapiens
  misc_RNA (1)...(19): siRNA sense strand
gccaagacgggcaagauug

SEQ ID NO: 1319280 - RNA, 19 nt, Homo sapiens
  misc_RNA (1)...(19): siRNA sense strand
gcaagcacaucuggaagcu

SEQ ID NO: 1319281 - RNA, 19 nt, Homo sapiens
  misc_RNA (1)...(19): siRNA sense strand
cuacaucauccucaccuuu

SEQ ID NO: 1319282 - RNA, 19 nt, Homo sapiens
  misc_RNA (1)...(19): siRNA sense strand
ccaaaucugcgcaugaagu

SEQ ID NO: 1319283 - RNA, 19 nt, Homo sapiens
  misc_RNA (1)...(19): siRNA sense strand
cagcugcucuacuucaucu

SEQ ID NO: 1319284 - RNA, 19 nt, Homo sapiens
  misc_RNA (1)...(19): siRNA sense strand
uggagugaauucucucuuc

SEQ ID NO: 1319285 - RNA, 19 nt, Homo sapiens
  misc_RNA (1)...(19): siRNA sense strand
cgaccaaaucugcgcauga

SEQ ID NO: 1319286 - RNA, 19 nt, Homo sapiens
  misc_RNA (1)...(19): siRNA sense strand
uggacgggcugcucccauu

SEQ ID NO: 1319287 - RNA, 19 nt, Homo sapiens
  misc_RNA (1)...(19): siRNA sense strand
gugagaacaccaaguuugu

SEQ ID NO: 1319288 - RNA, 19 nt, Homo sapiens
  misc_RNA (1)...(19): siRNA sense strand
gcugacaacacccgugaga

SEQ ID NO: 1319289 - RNA, 19 nt, Homo sapiens
  misc_RNA (1)...(19): siRNA sense strand
gcuggaugaaugcccuuua

SEQ ID NO: 1319290 - RNA, 19 nt, Homo sapiens
  misc_RNA (1)...(19): siRNA sense strand
cuguggagcccaucaauga

SEQ ID NO: 1319291 - RNA, 19 nt, Homo sapiens
  misc_RNA (1)...(19): siRNA sense strand
cgugagaacaccaaguuug

SEQ ID NO: 1319292 - RNA, 19 nt, Homo sapiens
  misc_RNA (1)...(19): siRNA sense strand
gaacugcugcgggacaagu

SEQ ID NO: 1319293 - RNA, 19 nt, Homo sapiens
  misc_RNA (1)...(19): siRNA sense strand
gauuccugcucgucuacuu

SEQ ID NO: 1319294 - RNA, 19 nt, Homo sapiens
  misc_RNA (1)...(19): siRNA sense strand
ugacaacacccgugagaac

SEQ ID NO: 1319295 - RNA, 19 nt, Homo sapiens
  misc_RNA (1)...(19): siRNA sense strand
acaucaacguggucuccua

SEQ ID NO: 1319296 - RNA, 19 nt, Homo sapiens
  misc_RNA (1)...(19): siRNA sense strand
cacaagaaacgccuaacug

SEQ ID NO: 1319297 - RNA, 19 nt, Homo sapiens
  misc_RNA (1)...(19): siRNA sense strand
agagcaagcacaucuggaa

SEQ ID NO: 1319298 - RNA, 19 nt, Homo sapiens
  misc_RNA (1)...(19): siRNA sense strand
ccaaggagagcaagcacau

SEQ ID NO: 1319299 - RNA, 19 nt, Homo sapiens
  misc_RNA (1)...(19): siRNA sense strand
ccaagaaagcacccaugga

SEQ ID NO: 1319300 - RNA, 19 nt, Homo sapiens
  misc_RNA (1)...(19): siRNA sense strand
gcccuggagugaauucucu

SEQ ID NO: 1319301 - RNA, 19 nt, Homo sapiens
  misc_RNA (1)...(19): siRNA sense strand
gcccuuccgugacaucuac

SEQ ID NO: 1319302 - RNA, 19 nt, Homo sapiens
  misc_RNA (1)...(19): siRNA sense strand
gcuggugaccuacaucauc

SEQ ID NO: 1319303 - RNA, 19 nt, Homo sapiens
  misc_RNA (1)...(19): siRNA sense strand
aagacuuguucaugaagaa

SEQ ID NO: 1319304 - RNA, 19 nt, Homo sapiens
  misc_RNA (1)...(19): siRNA sense strand
cugcaaacacuacguggaa

SEQ ID NO: 1319305 - RNA, 19 nt, Homo sapiens
  misc_RNA (1)...(19): siRNA sense strand
acccauggacucacuguuu

SEQ ID NO: 1319306 - RNA, 19 nt, Homo sapiens
  misc_RNA (1)...(19): siRNA sense strand
agaccuaccaguauuaugg

SEQ ID NO: 1319307 - RNA, 19 nt, Homo sapiens
  misc_RNA (1)...(19): siRNA sense strand
ccuuccagcugcucuacuu

SEQ ID NO: 1319308 - RNA, 19 nt, Homo sapiens
  misc_RNA (1)...(19): siRNA sense strand
gacaacacccgugagaaca

SEQ ID NO: 1319309 - RNA, 19 nt, Homo sapiens
  misc_RNA (1)...(19): siRNA sense strand
ggccuauccucuuugacau

SEQ ID NO: 1319310 - RNA, 19 nt, Homo sapiens
  misc_RNA (1)...(19): siRNA sense strand
ggaguccacccuauaugag

SEQ ID NO: 1319311 - RNA, 19 nt, Homo sapiens
  misc_RNA (1)...(19): siRNA sense strand
caugaucggcuacgcuuca

SEQ ID NO: 1319312 - RNA, 19 nt, Homo sapiens
  misc_RNA (1)...(19): siRNA sense strand
ggacucacuguuugacuac

SEQ ID NO: 1319313 - RNA, 19 nt, Homo sapiens
  misc_RNA (1)...(19): siRNA sense strand
aauucucucuucauugaug

SEQ ID NO: 1319314 - RNA, 19 nt, Homo sapiens
  misc_RNA (1)...(19): siRNA sense strand
uggaggccgugcucaacaa

SEQ ID NO: 1319315 - RNA, 19 nt, Homo sapiens
  misc_RNA (1)...(19): siRNA sense strand
gcgaggucauuacgcucuu

SEQ ID NO: 1319316 - RNA, 19 nt, Homo sapiens
  misc_RNA (1)...(19): siRNA sense strand
gcgaugggcgaccaaaucu

SEQ ID NO: 1319317 - RNA, 19 nt, Homo sapiens
  misc_RNA (1)...(19): siRNA sense strand
uacaucauccucaccuuug

SEQ ID NO: 1319318 - RNA, 19 nt, Homo sapiens
  misc_RNA (1)...(19): siRNA sense strand
caacaugaaggugugcaau

SEQ ID NO: 1319319 - RNA, 19 nt, Homo sapiens
  misc_RNA (1)...(19): siRNA sense strand
ucuacuugcucuucaugau

SEQ ID NO: 1319320 - RNA, 19 nt, Homo sapiens
  misc_RNA (1)...(19): siRNA sense strand
caucaugauccagaagauu

SEQ ID NO: 1319321 - RNA, 19 nt, Homo sapiens
  misc_RNA (1)...(19): siRNA sense strand
aagaaaugcccuggaguga

SEQ ID NO: 1319322 - RNA, 19 nt, Homo sapiens
  misc_RNA (1)...(19): siRNA sense strand
caaagacuuguucaugaag

SEQ ID NO: 1319323 - RNA, 19 nt, Homo sapiens
  misc_RNA (1)...(19): siRNA sense strand
ccacaagaaacgccuaacu

SEQ ID NO: 1319324 - RNA, 19 nt, Homo sapiens
  misc_RNA (1)...(19): siRNA sense strand
ggcgaugggcgaccaaauc

SEQ ID NO: 1319325 - RNA, 19 nt, Homo sapiens
  misc_RNA (1)...(19): siRNA sense strand
ccaccaccauccuggacau

SEQ ID NO: 1319326 - RNA, 19 nt, Homo sapiens
  misc_RNA (1)...(19): siRNA sense strand
agaaaugcccuggagugaa

SEQ ID NO: 1319327 - RNA, 19 nt, Homo sapiens
  misc_RNA (1)...(19): siRNA sense strand
caaacacuacguggaacuu

SEQ ID NO: 1319328 - RNA, 19 nt, Homo sapiens
  misc_RNA (1)...(19): siRNA sense strand
gcaaacacuacguggaacu

SEQ ID NO: 1319329 - RNA, 19 nt, Homo sapiens
  misc_RNA (1)...(19): siRNA sense strand
ucagacagcccugcacauc

SEQ ID NO: 1319330 - RNA, 19 nt, Homo sapiens
  misc_RNA (1)...(19): siRNA sense strand
aacaugcgggaguucauua

SEQ ID NO: 1319331 - RNA, 19 nt, Homo sapiens
  misc_RNA (1)...(19): siRNA sense strand
aggaagaagaucauagaga

SEQ ID NO: 1319332 - RNA, 19 nt, Homo sapiens
  misc_RNA (1)...(19): siRNA sense strand
cuucuucaccaacaucaaa

SEQ ID NO: 1319333 - RNA, 19 nt, Homo sapiens
  misc_RNA (1)...(19): siRNA sense strand
ggccgucuccuucuacauc

SEQ ID NO: 1319334 - RNA, 19 nt, Homo sapiens
  misc_RNA (1)...(19): siRNA sense strand
ggaagaagaucauagagaa

SEQ ID NO: 1319335 - RNA, 19 nt, Homo sapiens
  misc_RNA (1)...(19): siRNA sense strand
gaaaugcccuggagugaau

SEQ ID NO: 1319336 - RNA, 19 nt, Homo sapiens
  misc_RNA (1)...(19): siRNA sense strand
gcacaccgccguacccuua

SEQ ID NO: 1319337 - RNA, 19 nt, Homo sapiens
  misc_RNA (1)...(19): siRNA sense strand
ucaaagacuuguucaugaa

SEQ ID NO: 1319338 - RNA, 19 nt, Homo sapiens
  misc_RNA (1)...(19): siRNA sense strand
gaccaaaucugcgcaugaa

SEQ ID NO: 1319339 - RNA, 19 nt, Homo sapiens
  misc_RNA (1)...(19): siRNA sense strand
caaccggccuauccucuuu

SEQ ID NO: 1319340 - RNA, 19 nt, Homo sapiens
  misc_RNA (1)...(19): siRNA sense strand
ucaacuaccugacggagaa

SEQ ID NO: 1319341 - RNA, 19 nt, Homo sapiens
  misc_RNA (1)...(19): siRNA sense strand
gaaugagaccuaccaguau

SEQ ID NO: 1319342 - RNA, 19 nt, Homo sapiens
  misc_RNA (1)...(19): siRNA sense strand
gcaaguggaggacugauga

SEQ ID NO: 1319343 - RNA, 19 nt, Homo sapiens
  misc_RNA (1)...(19): siRNA sense strand
ggaggaagaagaucauaga

SEQ ID NO: 1319344 - RNA, 19 nt, Homo sapiens
  misc_RNA (1)...(19): siRNA sense strand
agaaugagaccuaccagua

SEQ ID NO: 1319345 - RNA, 19 nt, Homo sapiens
  misc_RNA (1)...(19): siRNA sense strand
agaaacgccuaacugauga

SEQ ID NO: 1319346 - RNA, 19 nt, Homo sapiens
  misc_RNA (1)...(19): siRNA sense strand
gcaaugaggaccagaccaa

SEQ ID NO: 1319347 - RNA, 19 nt, Homo sapiens
  misc_RNA (1)...(19): siRNA sense strand
gaacccgugugccaacaug

SEQ ID NO: 1319348 - RNA, 19 nt, Homo sapiens
  misc_RNA (1)...(19): siRNA sense strand
gaugaaugcccuuuacuuc

SEQ ID NO: 1319349 - RNA, 19 nt, Homo sapiens
  misc_RNA (1)...(19): siRNA sense strand
aacaagagguggaggaaga

SEQ ID NO: 1319350 - RNA, 19 nt, Homo sapiens
  misc_RNA (1)...(19): siRNA sense strand
ccaccauccuggacauuga

SEQ ID NO: 1319351 - RNA, 19 nt, Homo sapiens
  misc_RNA (1)...(19): siRNA sense strand
aaugagaccuaccaguauu

SEQ ID NO: 1319352 - RNA, 19 nt, Homo sapiens
  misc_RNA (1)...(19): siRNA sense strand
acaagaaacgccuaacuga

SEQ ID NO: 1319353 - RNA, 19 nt, Homo sapiens
  misc_RNA (1)...(19): siRNA sense strand
ucaccaacaucaaagacuu

SEQ ID NO: 1319354 - RNA, 19 nt, Homo sapiens
  misc_RNA (1)...(19): siRNA sense strand
acaugaaggugugcaauga

SEQ ID NO: 1319355 - RNA, 19 nt, Homo sapiens
  misc_RNA (1)...(19): siRNA sense strand
ccaaguuuguuaccaagau

SEQ ID NO: 1319356 - RNA, 19 nt, Homo sapiens
  misc_RNA (1)...(19): siRNA sense strand
ggaugaaugcccuuuacuu

SEQ ID NO: 1319357 - RNA, 19 nt, Homo sapiens
  misc_RNA (1)...(19): siRNA sense strand
guccugggcuggaugaaug

SEQ ID NO: 1319358 - RNA, 19 nt, Homo sapiens
  misc_RNA (1)...(19): siRNA sense strand
caucaaagacuuguucaug

SEQ ID NO: 1319359 - RNA, 19 nt, Homo sapiens
  misc_RNA (1)...(19): siRNA sense strand
ggacaaguggcgcaaguuc

SEQ ID NO: 1319360 - RNA, 19 nt, Homo sapiens
  misc_RNA (1)...(19): siRNA sense strand
aagaaacgccuaacugaug

SEQ ID NO: 1319361 - RNA, 19 nt, Homo sapiens
  misc_RNA (1)...(19): siRNA sense strand
caaaucugcgcaugaaguu

SEQ ID NO: 1319362 - RNA, 19 nt, Homo sapiens
  misc_RNA (1)...(19): siRNA sense strand
ugguggaacugaacaagaa

SEQ ID NO: 1319363 - RNA, 19 nt, Homo sapiens
  misc_RNA (1)...(19): siRNA sense strand
gaaagcacccauggacuca

SEQ ID NO: 1319364 - RNA, 19 nt, Homo sapiens
  misc_RNA (1)...(19): siRNA sense strand
gaccgcagguggugcuuca

SEQ ID NO: 1319365 - RNA, 19 nt, Homo sapiens
  misc_RNA (1)...(19): siRNA sense strand
acaccaaguuuguuaccaa

SEQ ID NO: 1319366 - RNA, 19 nt, Homo sapiens
  misc_RNA (1)...(19): siRNA sense strand
gaacuugggcaucaucaac

SEQ ID NO: 1319367 - RNA, 19 nt, Homo sapiens
  misc_RNA (1)...(19): siRNA sense strand
caagaaacgccuaacugau

SEQ ID NO: 1319368 - RNA, 19 nt, Homo sapiens
  misc_RNA (1)...(19): siRNA sense strand
caaguuuguuaccaagaug

SEQ ID NO: 1319369 - RNA, 19 nt, Homo sapiens
  misc_RNA (1)...(19): siRNA sense strand
aucaaagacuuguucauga

SEQ ID NO: 1319370 - RNA, 19 nt, Homo sapiens
  misc_RNA (1)...(19): siRNA sense strand
uggacucacuguuugacua

SEQ ID NO: 1319371 - RNA, 19 nt, Homo sapiens
  misc_RNA (1)...(19): siRNA sense strand
gcaucaugauccagaagau

SEQ ID NO: 1319372 - RNA, 19 nt, Homo sapiens
  misc_RNA (1)...(19): siRNA sense strand
aaagacuuguucaugaaga

SEQ ID NO: 1319373 - RNA, 19 nt, Homo sapiens
  misc_RNA (1)...(19): siRNA sense strand
gcaagaaugagaccuacca

SEQ ID NO: 1319374 - RNA, 19 nt, Homo sapiens
  misc_RNA (1)...(19): siRNA sense strand
gaagaagaucauagagaag

SEQ ID NO: 1319375 - RNA, 19 nt, Homo sapiens
  misc_RNA (1)...(19): siRNA sense strand
aaccagaacuugggcauca

SEQ ID NO: 1319376 - RNA, 19 nt, Homo sapiens
  misc_RNA (1)...(19): siRNA sense strand
caacaugcgggaguucauu

SEQ ID NO: 1319377 - RNA, 19 nt, Homo sapiens
  misc_RNA (1)...(19): siRNA sense strand
cccauggacucacuguuug

SEQ ID NO: 1319378 - RNA, 19 nt, Homo sapiens
  misc_RNA (1)...(19): siRNA sense strand
ggaccuauagcaucaugau

SEQ ID NO: 1319379 - RNA, 19 nt, Homo sapiens
  misc_RNA (1)...(19): siRNA sense strand
gccaagacgggcaagauug

SEQ ID NO: 1319380 - RNA, 19 nt, Homo sapiens
  misc_RNA (1)...(19): siRNA sense strand
gcaagcacaucuggaagcu

SEQ ID NO: 1319381 - RNA, 19 nt, Homo sapiens
  misc_RNA (1)...(19): siRNA sense strand
cuacaucauccucaccuuu

SEQ ID NO: 1319382 - RNA, 19 nt, Homo sapiens
  misc_RNA (1)...(19): siRNA sense strand
ccaaaucugcgcaugaagu

SEQ ID NO: 1319383 - RNA, 19 nt, Homo sapiens
  misc_RNA (1)...(19): siRNA sense strand
cagcugcucuacuucaucu

SEQ ID NO: 1319384 - RNA, 19 nt, Homo sapiens
  misc_RNA (1)...(19): siRNA sense strand
uggagugaauucucucuuc

SEQ ID NO: 1319385 - RNA, 19 nt, Homo sapiens
  misc_RNA (1)...(19): siRNA sense strand
cgaccaaaucugcgcauga

SEQ ID NO: 1319386 - RNA, 19 nt, Homo sapiens
  misc_RNA (1)...(19): siRNA sense strand
uggacgggcugcucccauu

SEQ ID NO: 1319387 - RNA, 19 nt, Homo sapiens
  misc_RNA (1)...(19): siRNA sense strand
gugagaacaccaaguuugu

SEQ ID NO: 1319388 - RNA, 19 nt, Homo sapiens
  misc_RNA (1)...(19): siRNA sense strand
gcugacaacacccgugaga

SEQ ID NO: 1319389 - RNA, 19 nt, Homo sapiens
  misc_RNA (1)...(19): siRNA sense strand
gcuggaugaaugcccuuua

SEQ ID NO: 1319390 - RNA, 19 nt, Homo sapiens
  misc_RNA (1)...(19): siRNA sense strand
cuguggagcccaucaauga

SEQ ID NO: 1319391 - RNA, 19 nt, Homo sapiens
  misc_RNA (1)...(19): siRNA sense strand
cgugagaacaccaaguuug

SEQ ID NO: 1319392 - RNA, 19 nt, Homo sapiens
  misc_RNA (1)...(19): siRNA sense strand
gaacugcugcgggacaagu

SEQ ID NO: 1319393 - RNA, 19 nt, Homo sapiens
  misc_RNA (1)...(19): siRNA sense strand
gauuccugcucgucuacuu

SEQ ID NO: 1319394 - RNA, 19 nt, Homo sapiens
  misc_RNA (1)...(19): siRNA sense strand
ugacaacacccgugagaac

SEQ ID NO: 1319395 - RNA, 19 nt, Homo sapiens
  misc_RNA (1)...(19): siRNA sense strand
acaucaacguggucuccua

SEQ ID NO: 1319396 - RNA, 19 nt, Homo sapiens
  misc_RNA (1)...(19): siRNA sense strand
cacaagaaacgccuaacug

SEQ ID NO: 1319397 - RNA, 19 nt, Homo sapiens
  misc_RNA (1)...(19): siRNA sense strand
agagcaagcacaucuggaa

SEQ ID NO: 1319398 - RNA, 19 nt, Homo sapiens
  misc_RNA (1)...(19): siRNA sense strand
ccaaggagagcaagcacau

SEQ ID NO: 1319399 - RNA, 19 nt, Homo sapiens
  misc_RNA (1)...(19): siRNA sense strand
ccaagaaagcacccaugga

SEQ ID NO: 1319400 - RNA, 19 nt, Homo sapiens
  misc_RNA (1)...(19): siRNA sense strand
gcccuggagugaauucucu

SEQ ID NO: 1319401 - RNA, 19 nt, Homo sapiens
  misc_RNA (1)...(19): siRNA sense strand
gcccuuccgugacaucuac

SEQ ID NO: 1319402 - RNA, 19 nt, Homo sapiens
  misc_RNA (1)...(19): siRNA sense strand
gcuggugaccuacaucauc

SEQ ID NO: 1319403 - RNA, 19 nt, Homo sapiens
  misc_RNA (1)...(19): siRNA sense strand
aagacuuguucaugaagaa

SEQ ID NO: 1319404 - RNA, 19 nt, Homo sapiens
  misc_RNA (1)...(19): siRNA sense strand
cugcaaacacuacguggaa

SEQ ID NO: 1319405 - RNA, 19 nt, Homo sapiens
  misc_RNA (1)...(19): siRNA sense strand
acccauggacucacuguuu

SEQ ID NO: 1319406 - RNA, 19 nt, Homo sapiens
  misc_RNA (1)...(19): siRNA sense strand
agaccuaccaguauuaugg

SEQ ID NO: 1319407 - RNA, 19 nt, Homo sapiens
  misc_RNA (1)...(19): siRNA sense strand
ccuuccagcugcucuacuu

SEQ ID NO: 1319408 - RNA, 19 nt, Homo sapiens
  misc_RNA (1)...(19): siRNA sense strand
gacaacacccgugagaaca

SEQ ID NO: 1319409 - RNA, 19 nt, Homo sapiens
  misc_RNA (1)...(19): siRNA sense strand
ggccuauccucuuugacau

SEQ ID NO: 1319410 - RNA, 19 nt, Homo sapiens
  misc_RNA (1)...(19): siRNA sense strand
ggaguccacccuauaugag

SEQ ID NO: 1319411 - RNA, 19 nt, Homo sapiens
  misc_RNA (1)...(19): siRNA sense strand
caugaucggcuacgcuuca

SEQ ID NO: 1319412 - RNA, 19 nt, Homo sapiens
  misc_RNA (1)...(19): siRNA sense strand
ggacucacuguuugacuac

SEQ ID NO: 1319413 - RNA, 19 nt, Homo sapiens
  misc_RNA (1)...(19): siRNA sense strand
aauucucucuucauugaug

SEQ ID NO: 1319414 - RNA, 19 nt, Homo sapiens
  misc_RNA (1)...(19): siRNA sense strand
uggaggccgugcucaacaa

SEQ ID NO: 1319415 - RNA, 19 nt, Homo sapiens
  misc_RNA (1)...(19): siRNA sense strand
gcgaggucauuacgcucuu

SEQ ID NO: 1319416 - RNA, 19 nt, Homo sapiens
  misc_RNA (1)...(19): siRNA sense strand
gcgaugggcgaccaaaucu

SEQ ID NO: 1319417 - RNA, 19 nt, Homo sapiens
  misc_RNA (1)...(19): siRNA sense strand
uacaucauccucaccuuug

SEQ ID NO: 1319418 - RNA, 19 nt, Homo sapiens
  misc_RNA (1)...(19): siRNA sense strand
caacaugaaggugugcaau

SEQ ID NO: 1319419 - RNA, 19 nt, Homo sapiens
  misc_RNA (1)...(19): siRNA sense strand
ucuacuugcucuucaugau

SEQ ID NO: 1319420 - RNA, 19 nt, Homo sapiens
  misc_RNA (1)...(19): siRNA sense strand
caucaugauccagaagauu

SEQ ID NO: 1319421 - RNA, 19 nt, Homo sapiens
  misc_RNA (1)...(19): siRNA sense strand
aagaaaugcccuggaguga

SEQ ID NO: 1319422 - RNA, 19 nt, Homo sapiens
  misc_RNA (1)...(19): siRNA sense strand
caaagacuuguucaugaag

SEQ ID NO: 1319423 - RNA, 19 nt, Homo sapiens
  misc_RNA (1)...(19): siRNA sense strand
ccacaagaaacgccuaacu

SEQ ID NO: 1319424 - RNA, 19 nt, Homo sapiens
  misc_RNA (1)...(19): siRNA sense strand
ggcgaugggcgaccaaauc

SEQ ID NO: 1319425 - RNA, 19 nt, Homo sapiens
  misc_RNA (1)...(19): siRNA sense strand
ccaccaccauccuggacau

SEQ ID NO: 1319426 - RNA, 19 nt, Homo sapiens
  misc_RNA (1)...(19): siRNA sense strand
agaaaugcccuggagugaa

SEQ ID NO: 1319427 - RNA, 19 nt, Homo sapiens
  misc_RNA (1)...(19): siRNA sense strand
caaacacuacguggaacuu

SEQ ID NO: 1319428 - RNA, 19 nt, Homo sapiens
  misc_RNA (1)...(19): siRNA sense strand
gcaaacacuacguggaacu

SEQ ID NO: 1319429 - RNA, 19 nt, Homo sapiens
  misc_RNA (1)...(19): siRNA sense strand
ucagacagcccugcacauc

SEQ ID NO: 1319430 - RNA, 19 nt, Homo sapiens
  misc_RNA (1)...(19): siRNA sense strand
aacaugcgggaguucauua

SEQ ID NO: 1319431 - RNA, 19 nt, Homo sapiens
  misc_RNA (1)...(19): siRNA sense strand
aggaagaagaucauagaga

SEQ ID NO: 1319432 - RNA, 19 nt, Homo sapiens
  misc_RNA (1)...(19): siRNA sense strand
cuucuucaccaacaucaaa

SEQ ID NO: 1319433 - RNA, 19 nt, Homo sapiens
  misc_RNA (1)...(19): siRNA sense strand
ggccgucuccuucuacauc

SEQ ID NO: 1319434 - RNA, 19 nt, Homo sapiens
  misc_RNA (1)...(19): siRNA sense strand
caaggaaacuccaguauaa

SEQ ID NO: 1319435 - RNA, 19 nt, Homo sapiens
  misc_RNA (1)...(19): siRNA sense strand
gaauucaccuagcagauua

SEQ ID NO: 1319436 - RNA, 19 nt, Homo sapiens
  misc_RNA (1)...(19): siRNA sense strand
cgaaauagccauaccuuua

SEQ ID NO: 1319437 - RNA, 19 nt, Homo sapiens
  misc_RNA (1)...(19): siRNA sense strand
cagaugagcucacagaauu

SEQ ID NO: 1319438 - RNA, 19 nt, Homo sapiens
  misc_RNA (1)...(19): siRNA sense strand
gaaauagccauaccuuuaa

SEQ ID NO: 1319439 - RNA, 19 nt, Homo sapiens
  misc_RNA (1)...(19): siRNA sense strand
ucagacaucucaucaagua

SEQ ID NO: 1319440 - RNA, 19 nt, Homo sapiens
  misc_RNA (1)...(19): siRNA sense strand
gaauguaaccagcuacuua

SEQ ID NO: 1319441 - RNA, 19 nt, Homo sapiens
  misc_RNA (1)...(19): siRNA sense strand
gacaacagcucuagugaug

SEQ ID NO: 1319442 - RNA, 19 nt, Homo sapiens
  misc_RNA (1)...(19): siRNA sense strand
gacgaugccuguucaagua

SEQ ID NO: 1319443 - RNA, 19 nt, Homo sapiens
  misc_RNA (1)...(19): siRNA sense strand
ugaagaaucugcuaccaaa

SEQ ID NO: 1319444 - RNA, 19 nt, Homo sapiens
  misc_RNA (1)...(19): siRNA sense strand
cagauuccauggacaaaua

SEQ ID NO: 1319445 - RNA, 19 nt, Homo sapiens
  misc_RNA (1)...(19): siRNA sense strand
ccagacagcuguuccaaga

SEQ ID NO: 1319446 - RNA, 19 nt, Homo sapiens
  misc_RNA (1)...(19): siRNA sense strand
caagagaaaucaacaacug

SEQ ID NO: 1319447 - RNA, 19 nt, Homo sapiens
  misc_RNA (1)...(19): siRNA sense strand
ucaccuagcagauuaaaua

SEQ ID NO: 1319448 - RNA, 19 nt, Homo sapiens
  misc_RNA (1)...(19): siRNA sense strand
gaauaucccuagcacaguu

SEQ ID NO: 1319449 - RNA, 19 nt, Homo sapiens
  misc_RNA (1)...(19): siRNA sense strand
gagaagauuuccagucaug

SEQ ID NO: 1319450 - RNA, 19 nt, Homo sapiens
  misc_RNA (1)...(19): siRNA sense strand
caggaggaauuaaugaaua

SEQ ID NO: 1319451 - RNA, 19 nt, Homo sapiens
  misc_RNA (1)...(19): siRNA sense strand
caacuuugcuccaucucua

SEQ ID NO: 1319452 - RNA, 19 nt, Homo sapiens
  misc_RNA (1)...(19): siRNA sense strand
ccucagauaucaccacuuu

SEQ ID NO: 1319453 - RNA, 19 nt, Homo sapiens
  misc_RNA (1)...(19): siRNA sense strand
gacacaagcugcaaagaug

SEQ ID NO: 1319454 - RNA, 19 nt, Homo sapiens
  misc_RNA (1)...(19): siRNA sense strand
gaacaugaacccaaugaug

SEQ ID NO: 1319455 - RNA, 19 nt, Homo sapiens
  misc_RNA (1)...(19): siRNA sense strand
gaucagauacagcuaauga

SEQ ID NO: 1319456 - RNA, 19 nt, Homo sapiens
  misc_RNA (1)...(19): siRNA sense strand
gaaauacgaauguucagaa

SEQ ID NO: 1319457 - RNA, 19 nt, Homo sapiens
  misc_RNA (1)...(19): siRNA sense strand
gcagaggcaugacaggaaa

SEQ ID NO: 1319458 - RNA, 19 nt, Homo sapiens
  misc_RNA (1)...(19): siRNA sense strand
aguagugccuguaauaaua

SEQ ID NO: 1319459 - RNA, 19 nt, Homo sapiens
  misc_RNA (1)...(19): siRNA sense strand
ucagaagaccaguguauua

SEQ ID NO: 1319460 - RNA, 19 nt, Homo sapiens
  misc_RNA (1)...(19): siRNA sense strand
gcaagauacuacagguaaa

SEQ ID NO: 1319461 - RNA, 19 nt, Homo sapiens
  misc_RNA (1)...(19): siRNA sense strand
uguauuagcucacaauuag

SEQ ID NO: 1319462 - RNA, 19 nt, Homo sapiens
  misc_RNA (1)...(19): siRNA sense strand
gguguagaauccuuuauga

SEQ ID NO: 1319463 - RNA, 19 nt, Homo sapiens
  misc_RNA (1)...(19): siRNA sense strand
gcaaagagccaugcuuaug

SEQ ID NO: 1319464 - RNA, 19 nt, Homo sapiens
  misc_RNA (1)...(19): siRNA sense strand
gauuuaagaucaacuccaa

SEQ ID NO: 1319465 - RNA, 19 nt, Homo sapiens
  misc_RNA (1)...(19): siRNA sense strand
gaaaucagacaucucauca

SEQ ID NO: 1319466 - RNA, 19 nt, Homo sapiens
  misc_RNA (1)...(19): siRNA sense strand
caaagagccaugcuuauga

SEQ ID NO: 1319467 - RNA, 19 nt, Homo sapiens
  misc_RNA (1)...(19): siRNA sense strand
cagcugguauccuuccuua

SEQ ID NO: 1319468 - RNA, 19 nt, Homo sapiens
  misc_RNA (1)...(19): siRNA sense strand
ggagaaggcagcacaguug

SEQ ID NO: 1319469 - RNA, 19 nt, Homo sapiens
  misc_RNA (1)...(19): siRNA sense strand
cagcugaccuugaccaguu

SEQ ID NO: 1319470 - RNA, 19 nt, Homo sapiens
  misc_RNA (1)...(19): siRNA sense strand
gagaauggaacaagagaaa

SEQ ID NO: 1319471 - RNA, 19 nt, Homo sapiens
  misc_RNA (1)...(19): siRNA sense strand
ucaaaccagucacaaacua

SEQ ID NO: 1319472 - RNA, 19 nt, Homo sapiens
  misc_RNA (1)...(19): siRNA sense strand
uauggaagguacaggaaua

SEQ ID NO: 1319473 - RNA, 19 nt, Homo sapiens
  misc_RNA (1)...(19): siRNA sense strand
ggaagcaauugauaaccaa

SEQ ID NO: 1319474 - RNA, 19 nt, Homo sapiens
  misc_RNA (1)...(19): siRNA sense strand
gaaaacagucgaucagaua

SEQ ID NO: 1319475 - RNA, 19 nt, Homo sapiens
  misc_RNA (1)...(19): siRNA sense strand
gaagggagaauuguauuug

SEQ ID NO: 1319476 - RNA, 19 nt, Homo sapiens
  misc_RNA (1)...(19): siRNA sense strand
ugaccaguuugaucaguua

SEQ ID NO: 1319477 - RNA, 19 nt, Homo sapiens
  misc_RNA (1)...(19): siRNA sense strand
gcauaacaaugacagacuu

SEQ ID NO: 1319478 - RNA, 19 nt, Homo sapiens
  misc_RNA (1)...(19): siRNA sense strand
uaaccgaucuuauucaaac

SEQ ID NO: 1319479 - RNA, 19 nt, Homo sapiens
  misc_RNA (1)...(19): siRNA sense strand
gaacugguugggaagauuu

SEQ ID NO: 1319480 - RNA, 19 nt, Homo sapiens
  misc_RNA (1)...(19): siRNA sense strand
gcccugagcagauaaauga

SEQ ID NO: 1319481 - RNA, 19 nt, Homo sapiens
  misc_RNA (1)...(19): siRNA sense strand
auucagggcuucugcauaa

SEQ ID NO: 1319482 - RNA, 19 nt, Homo sapiens
  misc_RNA (1)...(19): siRNA sense strand
gaacaagagaaaucaacaa

SEQ ID NO: 1319483 - RNA, 19 nt, Homo sapiens
  misc_RNA (1)...(19): siRNA sense strand
gaugagcucuuugcagaug

SEQ ID NO: 1319484 - RNA, 19 nt, Homo sapiens
  misc_RNA (1)...(19): siRNA sense strand
cauagcagcagucauagua

SEQ ID NO: 1319485 - RNA, 19 nt, Homo sapiens
  misc_RNA (1)...(19): siRNA sense strand
guaaaucccucggucaauc

SEQ ID NO: 1319486 - RNA, 19 nt, Homo sapiens
  misc_RNA (1)...(19): siRNA sense strand
guacagaaaucagacaucu

SEQ ID NO: 1319487 - RNA, 19 nt, Homo sapiens
  misc_RNA (1)...(19): siRNA sense strand
gaggcaacacgacgaaaua

SEQ ID NO: 1319488 - RNA, 19 nt, Homo sapiens
  misc_RNA (1)...(19): siRNA sense strand
ggacaggccaguucacaga

SEQ ID NO: 1319489 - RNA, 19 nt, Homo sapiens
  misc_RNA (1)...(19): siRNA sense strand
cuucauagcagcagucaua

SEQ ID NO: 1319490 - RNA, 19 nt, Homo sapiens
  misc_RNA (1)...(19): siRNA sense strand
guccagacaugcaaccuuu

SEQ ID NO: 1319491 - RNA, 19 nt, Homo sapiens
  misc_RNA (1)...(19): siRNA sense strand
ucaagaggauggagaagau

SEQ ID NO: 1319492 - RNA, 19 nt, Homo sapiens
  misc_RNA (1)...(19): siRNA sense strand
ugaagagaauggaacaaga

SEQ ID NO: 1319493 - RNA, 19 nt, Homo sapiens
  misc_RNA (1)...(19): siRNA sense strand
ccugaaugcucaaauguug

SEQ ID NO: 1319494 - RNA, 19 nt, Homo sapiens
  misc_RNA (1)...(19): siRNA sense strand
ggaaaggaucgccauguga

SEQ ID NO: 1319495 - RNA, 19 nt, Homo sapiens
  misc_RNA (1)...(19): siRNA sense strand
gagccuggaugauguaaag

SEQ ID NO: 1319496 - RNA, 19 nt, Homo sapiens
  misc_RNA (1)...(19): siRNA sense strand
aaagcugaguccaaagaua

SEQ ID NO: 1319497 - RNA, 19 nt, Homo sapiens
  misc_RNA (1)...(19): siRNA sense strand
gggaagauuuagugaggaa

SEQ ID NO: 1319498 - RNA, 19 nt, Homo sapiens
  misc_RNA (1)...(19): siRNA sense strand
agucaugucugauuuguau

SEQ ID NO: 1319499 - RNA, 19 nt, Homo sapiens
  misc_RNA (1)...(19): siRNA sense strand
gaaguaaugcaguguuuca

SEQ ID NO: 1319500 - RNA, 19 nt, Homo sapiens
  misc_RNA (1)...(19): siRNA sense strand
acaaguagugccuguaaua

SEQ ID NO: 1319501 - RNA, 19 nt, Homo sapiens
  misc_RNA (1)...(19): siRNA sense strand
aaacugagcuagcugaacu

SEQ ID NO: 1319502 - RNA, 19 nt, Homo sapiens
  misc_RNA (1)...(19): siRNA sense strand
ugacagacuuucagaugga

SEQ ID NO: 1319503 - RNA, 19 nt, Homo sapiens
  misc_RNA (1)...(19): siRNA sense strand
gugaggaagugcauuuaug

SEQ ID NO: 1319504 - RNA, 19 nt, Homo sapiens
  misc_RNA (1)...(19): siRNA sense strand
cagaaugucuuccaguauc

SEQ ID NO: 1319505 - RNA, 19 nt, Homo sapiens
  misc_RNA (1)...(19): siRNA sense strand
auugacagcuugaguguaa

SEQ ID NO: 1319506 - RNA, 19 nt, Homo sapiens
  misc_RNA (1)...(19): siRNA sense strand
ugaugacgauguacagaaa

SEQ ID NO: 1319507 - RNA, 19 nt, Homo sapiens
  misc_RNA (1)...(19): siRNA sense strand
acacaggccucuacugcaa

SEQ ID NO: 1319508 - RNA, 19 nt, Homo sapiens
  misc_RNA (1)...(19): siRNA sense strand
caggcaaacucuaaacaga

SEQ ID NO: 1319509 - RNA, 19 nt, Homo sapiens
  misc_RNA (1)...(19): siRNA sense strand
gaagaccaguguauuagcu

SEQ ID NO: 1319510 - RNA, 19 nt, Homo sapiens
  misc_RNA (1)...(19): siRNA sense strand
uaccugagcuggaauugga

SEQ ID NO: 1319511 - RNA, 19 nt, Homo sapiens
  misc_RNA (1)...(19): siRNA sense strand
gaacuggaugcuucaaaga

SEQ ID NO: 1319512 - RNA, 19 nt, Homo sapiens
  misc_RNA (1)...(19): siRNA sense strand
guacaaggaaacuccagua

SEQ ID NO: 1319513 - RNA, 19 nt, Homo sapiens
  misc_RNA (1)...(19): siRNA sense strand
ucacagaauucaccuagca

SEQ ID NO: 1319514 - RNA, 19 nt, Homo sapiens
  misc_RNA (1)...(19): siRNA sense strand
gcagagaaccaucuuaugc

SEQ ID NO: 1319515 - RNA, 19 nt, Homo sapiens
  misc_RNA (1)...(19): siRNA sense strand
cagagaauguaaccagcua

SEQ ID NO: 1319516 - RNA, 19 nt, Homo sapiens
  misc_RNA (1)...(19): siRNA sense strand
guuacugucugccaacauu

SEQ ID NO: 1319517 - RNA, 19 nt, Homo sapiens
  misc_RNA (1)...(19): siRNA sense strand
ccuagcagauuaaauauac

SEQ ID NO: 1319518 - RNA, 19 nt, Homo sapiens
  misc_RNA (1)...(19): siRNA sense strand
uaacaucuuuacaggguau

SEQ ID NO: 1319519 - RNA, 19 nt, Homo sapiens
  misc_RNA (1)...(19): siRNA sense strand
uagccaauguugccuuaaa

SEQ ID NO: 1319520 - RNA, 19 nt, Homo sapiens
  misc_RNA (1)...(19): siRNA sense strand
guuacggcaugcugauaua

SEQ ID NO: 1319521 - RNA, 19 nt, Homo sapiens
  misc_RNA (1)...(19): siRNA sense strand
gaauuguauuugugucaga

SEQ ID NO: 1319522 - RNA, 19 nt, Homo sapiens
  misc_RNA (1)...(19): siRNA sense strand
uagauuaccugagcuggaa

SEQ ID NO: 1319523 - RNA, 19 nt, Homo sapiens
  misc_RNA (1)...(19): siRNA sense strand
acaaggaaacuccaguaua

SEQ ID NO: 1319524 - RNA, 19 nt, Homo sapiens
  misc_RNA (1)...(19): siRNA sense strand
gacaacaacugccgaacag

SEQ ID NO: 1319525 - RNA, 19 nt, Homo sapiens
  misc_RNA (1)...(19): siRNA sense strand
gaauggaacaagagaaauc

SEQ ID NO: 1319526 - RNA, 19 nt, Homo sapiens
  misc_RNA (1)...(19): siRNA sense strand
caaguagugccuguaauaa

SEQ ID NO: 1319527 - RNA, 19 nt, Homo sapiens
  misc_RNA (1)...(19): siRNA sense strand
caaaaucacuaguaaaugg

SEQ ID NO: 1319528 - RNA, 19 nt, Homo sapiens
  misc_RNA (1)...(19): siRNA sense strand
cauaguaauucuagcaaca

SEQ ID NO: 1319529 - RNA, 19 nt, Homo sapiens
  misc_RNA (1)...(19): siRNA sense strand
gaucagauuccauggacaa

SEQ ID NO: 1319530 - RNA, 19 nt, Homo sapiens
  misc_RNA (1)...(19): siRNA sense strand
gcagggagcaagaaaauaa

SEQ ID NO: 1319531 - RNA, 19 nt, Homo sapiens
  misc_RNA (1)...(19): siRNA sense strand
gcagaugagcucacagaau

SEQ ID NO: 1319532 - RNA, 19 nt, Homo sapiens
  misc_RNA (1)...(19): siRNA sense strand
ugaaugaaggacccaauaa

SEQ ID NO: 1319533 - RNA, 19 nt, Homo sapiens
  misc_RNA (1)...(19): siRNA sense strand
acaauuccuuuccuccuaa

SEQ ID NO: 1319534 - RNA, 19 nt, Homo sapiens
  misc_RNA (1)...(19): siRNA sense strand
caaggaaacuccaguauaa

SEQ ID NO: 1319535 - RNA, 19 nt, Homo sapiens
  misc_RNA (1)...(19): siRNA sense strand
gaauucaccuagcagauua

SEQ ID NO: 1319536 - RNA, 19 nt, Homo sapiens
  misc_RNA (1)...(19): siRNA sense strand
cgaaauagccauaccuuua

SEQ ID NO: 1319537 - RNA, 19 nt, Homo sapiens
  misc_RNA (1)...(19): siRNA sense strand
cagaugagcucacagaauu

SEQ ID NO: 1319538 - RNA, 19 nt, Homo sapiens
  misc_RNA (1)...(19): siRNA sense strand
gaaauagccauaccuuuaa

SEQ ID NO: 1319539 - RNA, 19 nt, Homo sapiens
  misc_RNA (1)...(19): siRNA sense strand
ucagacaucucaucaagua

SEQ ID NO: 1319540 - RNA, 19 nt, Homo sapiens
  misc_RNA (1)...(19): siRNA sense strand
gaauguaaccagcuacuua

SEQ ID NO: 1319541 - RNA, 19 nt, Homo sapiens
  misc_RNA (1)...(19): siRNA sense strand
gacaacagcucuagugaug

SEQ ID NO: 1319542 - RNA, 19 nt, Homo sapiens
  misc_RNA (1)...(19): siRNA sense strand
gacgaugccuguucaagua

SEQ ID NO: 1319543 - RNA, 19 nt, Homo sapiens
  misc_RNA (1)...(19): siRNA sense strand
ugaagaaucugcuaccaaa

SEQ ID NO: 1319544 - RNA, 19 nt, Homo sapiens
  misc_RNA (1)...(19): siRNA sense strand
cagauuccauggacaaaua

SEQ ID NO: 1319545 - RNA, 19 nt, Homo sapiens
  misc_RNA (1)...(19): siRNA sense strand
ccagacagcuguuccaaga

SEQ ID NO: 1319546 - RNA, 19 nt, Homo sapiens
  misc_RNA (1)...(19): siRNA sense strand
caagagaaaucaacaacug

SEQ ID NO: 1319547 - RNA, 19 nt, Homo sapiens
  misc_RNA (1)...(19): siRNA sense strand
ucaccuagcagauuaaaua

SEQ ID NO: 1319548 - RNA, 19 nt, Homo sapiens
  misc_RNA (1)...(19): siRNA sense strand
gaauaucccuagcacaguu

SEQ ID NO: 1319549 - RNA, 19 nt, Homo sapiens
  misc_RNA (1)...(19): siRNA sense strand
gagaagauuuccagucaug

SEQ ID NO: 1319550 - RNA, 19 nt, Homo sapiens
  misc_RNA (1)...(19): siRNA sense strand
caggaggaauuaaugaaua

SEQ ID NO: 1319551 - RNA, 19 nt, Homo sapiens
  misc_RNA (1)...(19): siRNA sense strand
caacuuugcuccaucucua

SEQ ID NO: 1319552 - RNA, 19 nt, Homo sapiens
  misc_RNA (1)...(19): siRNA sense strand
ccucagauaucaccacuuu

SEQ ID NO: 1319553 - RNA, 19 nt, Homo sapiens
  misc_RNA (1)...(19): siRNA sense strand
gacacaagcugcaaagaug

SEQ ID NO: 1319554 - RNA, 19 nt, Homo sapiens
  misc_RNA (1)...(19): siRNA sense strand
gaacaugaacccaaugaug

SEQ ID NO: 1319555 - RNA, 19 nt, Homo sapiens
  misc_RNA (1)...(19): siRNA sense strand
gaucagauacagcuaauga

SEQ ID NO: 1319556 - RNA, 19 nt, Homo sapiens
  misc_RNA (1)...(19): siRNA sense strand
gaaauacgaauguucagaa

SEQ ID NO: 1319557 - RNA, 19 nt, Homo sapiens
  misc_RNA (1)...(19): siRNA sense strand
gcagaggcaugacaggaaa

SEQ ID NO: 1319558 - RNA, 19 nt, Homo sapiens
  misc_RNA (1)...(19): siRNA sense strand
aguagugccuguaauaaua

SEQ ID NO: 1319559 - RNA, 19 nt, Homo sapiens
  misc_RNA (1)...(19): siRNA sense strand
ucagaagaccaguguauua

SEQ ID NO: 1319560 - RNA, 19 nt, Homo sapiens
  misc_RNA (1)...(19): siRNA sense strand
gcaagauacuacagguaaa

SEQ ID NO: 1319561 - RNA, 19 nt, Homo sapiens
  misc_RNA (1)...(19): siRNA sense strand
uguauuagcucacaauuag

SEQ ID NO: 1319562 - RNA, 19 nt, Homo sapiens
  misc_RNA (1)...(19): siRNA sense strand
gguguagaauccuuuauga

SEQ ID NO: 1319563 - RNA, 19 nt, Homo sapiens
  misc_RNA (1)...(19): siRNA sense strand
gcaaagagccaugcuuaug

SEQ ID NO: 1319564 - RNA, 19 nt, Homo sapiens
  misc_RNA (1)...(19): siRNA sense strand
gauuuaagaucaacuccaa

SEQ ID NO: 1319565 - RNA, 19 nt, Homo sapiens
  misc_RNA (1)...(19): siRNA sense strand
gaaaucagacaucucauca

SEQ ID NO: 1319566 - RNA, 19 nt, Homo sapiens
  misc_RNA (1)...(19): siRNA sense strand
caaagagccaugcuuauga

SEQ ID NO: 1319567 - RNA, 19 nt, Homo sapiens
  misc_RNA (1)...(19): siRNA sense strand
cagcugguauccuuccuua

SEQ ID NO: 1319568 - RNA, 19 nt, Homo sapiens
  misc_RNA (1)...(19): siRNA sense strand
ggagaaggcagcacaguug

SEQ ID NO: 1319569 - RNA, 19 nt, Homo sapiens
  misc_RNA (1)...(19): siRNA sense strand
cagcugaccuugaccaguu

SEQ ID NO: 1319570 - RNA, 19 nt, Homo sapiens
  misc_RNA (1)...(19): siRNA sense strand
gagaauggaacaagagaaa

SEQ ID NO: 1319571 - RNA, 19 nt, Homo sapiens
  misc_RNA (1)...(19): siRNA sense strand
ucaaaccagucacaaacua

SEQ ID NO: 1319572 - RNA, 19 nt, Homo sapiens
  misc_RNA (1)...(19): siRNA sense strand
uauggaagguacaggaaua

SEQ ID NO: 1319573 - RNA, 19 nt, Homo sapiens
  misc_RNA (1)...(19): siRNA sense strand
ggaagcaauugauaaccaa

SEQ ID NO: 1319574 - RNA, 19 nt, Homo sapiens
  misc_RNA (1)...(19): siRNA sense strand
gaaaacagucgaucagaua

SEQ ID NO: 1319575 - RNA, 19 nt, Homo sapiens
  misc_RNA (1)...(19): siRNA sense strand
gaagggagaauuguauuug

SEQ ID NO: 1319576 - RNA, 19 nt, Homo sapiens
  misc_RNA (1)...(19): siRNA sense strand
ugaccaguuugaucaguua

SEQ ID NO: 1319577 - RNA, 19 nt, Homo sapiens
  misc_RNA (1)...(19): siRNA sense strand
gcauaacaaugacagacuu

SEQ ID NO: 1319578 - RNA, 19 nt, Homo sapiens
  misc_RNA (1)...(19): siRNA sense strand
uaaccgaucuuauucaaac

SEQ ID NO: 1319579 - RNA, 19 nt, Homo sapiens
  misc_RNA (1)...(19): siRNA sense strand
gaacugguugggaagauuu

SEQ ID NO: 1319580 - RNA, 19 nt, Homo sapiens
  misc_RNA (1)...(19): siRNA sense strand
gcccugagcagauaaauga

SEQ ID NO: 1319581 - RNA, 19 nt, Homo sapiens
  misc_RNA (1)...(19): siRNA sense strand
auucagggcuucugcauaa

SEQ ID NO: 1319582 - RNA, 19 nt, Homo sapiens
  misc_RNA (1)...(19): siRNA sense strand
gaacaagagaaaucaacaa

SEQ ID NO: 1319583 - RNA, 19 nt, Homo sapiens
  misc_RNA (1)...(19): siRNA sense strand
gaugagcucuuugcagaug

SEQ ID NO: 1319584 - RNA, 19 nt, Homo sapiens
  misc_RNA (1)...(19): siRNA sense strand
cauagcagcagucauagua

SEQ ID NO: 1319585 - RNA, 19 nt, Homo sapiens
  misc_RNA (1)...(19): siRNA sense strand
guaaaucccucggucaauc

SEQ ID NO: 1319586 - RNA, 19 nt, Homo sapiens
  misc_RNA (1)...(19): siRNA sense strand
guacagaaaucagacaucu

SEQ ID NO: 1319587 - RNA, 19 nt, Homo sapiens
  misc_RNA (1)...(19): siRNA sense strand
gaggcaacacgacgaaaua

SEQ ID NO: 1319588 - RNA, 19 nt, Homo sapiens
  misc_RNA (1)...(19): siRNA sense strand
ggacaggccaguucacaga

SEQ ID NO: 1319589 - RNA, 19 nt, Homo sapiens
  misc_RNA (1)...(19): siRNA sense strand
cuucauagcagcagucaua

SEQ ID NO: 1319590 - RNA, 19 nt, Homo sapiens
  misc_RNA (1)...(19): siRNA sense strand
guccagacaugcaaccuuu

SEQ ID NO: 1319591 - RNA, 19 nt, Homo sapiens
  misc_RNA (1)...(19): siRNA sense strand
ucaagaggauggagaagau

SEQ ID NO: 1319592 - RNA, 19 nt, Homo sapiens
  misc_RNA (1)...(19): siRNA sense strand
ugaagagaauggaacaaga

SEQ ID NO: 1319593 - RNA, 19 nt, Homo sapiens
  misc_RNA (1)...(19): siRNA sense strand
ccugaaugcucaaauguug

SEQ ID NO: 1319594 - RNA, 19 nt, Homo sapiens
  misc_RNA (1)...(19): siRNA sense strand
ggaaaggaucgccauguga

SEQ ID NO: 1319595 - RNA, 19 nt, Homo sapiens
  misc_RNA (1)...(19): siRNA sense strand
gagccuggaugauguaaag

SEQ ID NO: 1319596 - RNA, 19 nt, Homo sapiens
  misc_RNA (1)...(19): siRNA sense strand
aaagcugaguccaaagaua

SEQ ID NO: 1319597 - RNA, 19 nt, Homo sapiens
  misc_RNA (1)...(19): siRNA sense strand
gggaagauuuagugaggaa

SEQ ID NO: 1319598 - RNA, 19 nt, Homo sapiens
  misc_RNA (1)...(19): siRNA sense strand
agucaugucugauuuguau

SEQ ID NO: 1319599 - RNA, 19 nt, Homo sapiens
  misc_RNA (1)...(19): siRNA sense strand
gaaguaaugcaguguuuca

SEQ ID NO: 1319600 - RNA, 19 nt, Homo sapiens
  misc_RNA (1)...(19): siRNA sense strand
acaaguagugccuguaaua

SEQ ID NO: 1319601 - RNA, 19 nt, Homo sapiens
  misc_RNA (1)...(19): siRNA sense strand
aaacugagcuagcugaacu

SEQ ID NO: 1319602 - RNA, 19 nt, Homo sapiens
  misc_RNA (1)...(19): siRNA sense strand
ugacagacuuucagaugga

SEQ ID NO: 1319603 - RNA, 19 nt, Homo sapiens
  misc_RNA (1)...(19): siRNA sense strand
gugaggaagugcauuuaug

SEQ ID NO: 1319604 - RNA, 19 nt, Homo sapiens
  misc_RNA (1)...(19): siRNA sense strand
cagaaugucuuccaguauc

SEQ ID NO: 1319605 - RNA, 19 nt, Homo sapiens
  misc_RNA (1)...(19): siRNA sense strand
auugacagcuugaguguaa

SEQ ID NO: 1319606 - RNA, 19 nt, Homo sapiens
  misc_RNA (1)...(19): siRNA sense strand
ugaugacgauguacagaaa

SEQ ID NO: 1319607 - RNA, 19 nt, Homo sapiens
  misc_RNA (1)...(19): siRNA sense strand
acacaggccucuacugcaa

SEQ ID NO: 1319608 - RNA, 19 nt, Homo sapiens
  misc_RNA (1)...(19): siRNA sense strand
caggcaaacucuaaacaga

SEQ ID NO: 1319609 - RNA, 19 nt, Homo sapiens
  misc_RNA (1)...(19): siRNA sense strand
gaagaccaguguauuagcu

SEQ ID NO: 1319610 - RNA, 19 nt, Homo sapiens
  misc_RNA (1)...(19): siRNA sense strand
uaccugagcuggaauugga

SEQ ID NO: 1319611 - RNA, 19 nt, Homo sapiens
  misc_RNA (1)...(19): siRNA sense strand
gaacuggaugcuucaaaga

SEQ ID NO: 1319612 - RNA, 19 nt, Homo sapiens
  misc_RNA (1)...(19): siRNA sense strand
guacaaggaaacuccagua

SEQ ID NO: 1319613 - RNA, 19 nt, Homo sapiens
  misc_RNA (1)...(19): siRNA sense strand
ucacagaauucaccuagca

SEQ ID NO: 1319614 - RNA, 19 nt, Homo sapiens
  misc_RNA (1)...(19): siRNA sense strand
gcagagaaccaucuuaugc

SEQ ID NO: 1319615 - RNA, 19 nt, Homo sapiens
  misc_RNA (1)...(19): siRNA sense strand
cagagaauguaaccagcua

SEQ ID NO: 1319616 - RNA, 19 nt, Homo sapiens
  misc_RNA (1)...(19): siRNA sense strand
guuacugucugccaacauu

SEQ ID NO: 1319617 - RNA, 19 nt, Homo sapiens
  misc_RNA (1)...(19): siRNA sense strand
ccuagcagauuaaauauac

SEQ ID NO: 1319618 - RNA, 19 nt, Homo sapiens
  misc_RNA (1)...(19): siRNA sense strand
uaacaucuuuacaggguau

SEQ ID NO: 1319619 - RNA, 19 nt, Homo sapiens
  misc_RNA (1)...(19): siRNA sense strand
uagccaauguugccuuaaa

SEQ ID NO: 1319620 - RNA, 19 nt, Homo sapiens
  misc_RNA (1)...(19): siRNA sense strand
guuacggcaugcugauaua

SEQ ID NO: 1319621 - RNA, 19 nt, Homo sapiens
  misc_RNA (1)...(19): siRNA sense strand
gaauuguauuugugucaga

SEQ ID NO: 1319622 - RNA, 19 nt, Homo sapiens
  misc_RNA (1)...(19): siRNA sense strand
uagauuaccugagcuggaa

SEQ ID NO: 1319623 - RNA, 19 nt, Homo sapiens
  misc_RNA (1)...(19): siRNA sense strand
acaaggaaacuccaguaua

SEQ ID NO: 1319624 - RNA, 19 nt, Homo sapiens
  misc_RNA (1)...(19): siRNA sense strand
gacaacaacugccgaacag

SEQ ID NO: 1319625 - RNA, 19 nt, Homo sapiens
  misc_RNA (1)...(19): siRNA sense strand
gaauggaacaagagaaauc

SEQ ID NO: 1319626 - RNA, 19 nt, Homo sapiens
  misc_RNA (1)...(19): siRNA sense strand
caaguagugccuguaauaa

SEQ ID NO: 1319627 - RNA, 19 nt, Homo sapiens
  misc_RNA (1)...(19): siRNA sense strand
caaaaucacuaguaaaugg

SEQ ID NO: 1319628 - RNA, 19 nt, Homo sapiens
  misc_RNA (1)...(19): siRNA sense strand
cauaguaauucuagcaaca

SEQ ID NO: 1319629 - RNA, 19 nt, Homo sapiens
  misc_RNA (1)...(19): siRNA sense strand
gaucagauuccauggacaa

SEQ ID NO: 1319630 - RNA, 19 nt, Homo sapiens
  misc_RNA (1)...(19): siRNA sense strand
gcagggagcaagaaaauaa

SEQ ID NO: 1319631 - RNA, 19 nt, Homo sapiens
  misc_RNA (1)...(19): siRNA sense strand
gcagaugagcucacagaau

SEQ ID NO: 1319632 - RNA, 19 nt, Homo sapiens
  misc_RNA (1)...(19): siRNA sense strand
ugaaugaaggacccaauaa

SEQ ID NO: 1319633 - RNA, 19 nt, Homo sapiens
  misc_RNA (1)...(19): siRNA sense strand
acaauuccuuuccuccuaa

SEQ ID NO: 1319634 - RNA, 19 nt, Homo sapiens
  misc_RNA (1)...(19): siRNA sense strand
caaggaaacuccaguauaa

SEQ ID NO: 1319635 - RNA, 19 nt, Homo sapiens
  misc_RNA (1)...(19): siRNA sense strand
gaauucaccuagcagauua

SEQ ID NO: 1319636 - RNA, 19 nt, Homo sapiens
  misc_RNA (1)...(19): siRNA sense strand
cgaaauagccauaccuuua

SEQ ID NO: 1319637 - RNA, 19 nt, Homo sapiens
  misc_RNA (1)...(19): siRNA sense strand
cagaugagcucacagaauu

SEQ ID NO: 1319638 - RNA, 19 nt, Homo sapiens
  misc_RNA (1)...(19): siRNA sense strand
gaaauagccauaccuuuaa

SEQ ID NO: 1319639 - RNA, 19 nt, Homo sapiens
  misc_RNA (1)...(19): siRNA sense strand
ucagacaucucaucaagua

SEQ ID NO: 1319640 - RNA, 19 nt, Homo sapiens
  misc_RNA (1)...(19): siRNA sense strand
gaauguaaccagcuacuua

SEQ ID NO: 1319641 - RNA, 19 nt, Homo sapiens
  misc_RNA (1)...(19): siRNA sense strand
gacaacagcucuagugaug

SEQ ID NO: 1319642 - RNA, 19 nt, Homo sapiens
  misc_RNA (1)...(19): siRNA sense strand
gacgaugccuguucaagua

SEQ ID NO: 1319643 - RNA, 19 nt, Homo sapiens
  misc_RNA (1)...(19): siRNA sense strand
ugaagaaucugcuaccaaa

SEQ ID NO: 1319644 - RNA, 19 nt, Homo sapiens
  misc_RNA (1)...(19): siRNA sense strand
cagauuccauggacaaaua

SEQ ID NO: 1319645 - RNA, 19 nt, Homo sapiens
  misc_RNA (1)...(19): siRNA sense strand
ccagacagcuguuccaaga

SEQ ID NO: 1319646 - RNA, 19 nt, Homo sapiens
  misc_RNA (1)...(19): siRNA sense strand
caagagaaaucaacaacug

SEQ ID NO: 1319647 - RNA, 19 nt, Homo sapiens
  misc_RNA (1)...(19): siRNA sense strand
ucaccuagcagauuaaaua

SEQ ID NO: 1319648 - RNA, 19 nt, Homo sapiens
  misc_RNA (1)...(19): siRNA sense strand
gaauaucccuagcacaguu

SEQ ID NO: 1319649 - RNA, 19 nt, Homo sapiens
  misc_RNA (1)...(19): siRNA sense strand
gagaagauuuccagucaug

SEQ ID NO: 1319650 - RNA, 19 nt, Homo sapiens
  misc_RNA (1)...(19): siRNA sense strand
caggaggaauuaaugaaua

SEQ ID NO: 1319651 - RNA, 19 nt, Homo sapiens
  misc_RNA (1)...(19): siRNA sense strand
caacuuugcuccaucucua

SEQ ID NO: 1319652 - RNA, 19 nt, Homo sapiens
  misc_RNA (1)...(19): siRNA sense strand
ccucagauaucaccacuuu

SEQ ID NO: 1319653 - RNA, 19 nt, Homo sapiens
  misc_RNA (1)...(19): siRNA sense strand
gacacaagcugcaaagaug

SEQ ID NO: 1319654 - RNA, 19 nt, Homo sapiens
  misc_RNA (1)...(19): siRNA sense strand
gaacaugaacccaaugaug

SEQ ID NO: 1319655 - RNA, 19 nt, Homo sapiens
  misc_RNA (1)...(19): siRNA sense strand
gaucagauacagcuaauga

SEQ ID NO: 1319656 - RNA, 19 nt, Homo sapiens
  misc_RNA (1)...(19): siRNA sense strand
gaaauacgaauguucagaa

SEQ ID NO: 1319657 - RNA, 19 nt, Homo sapiens
  misc_RNA (1)...(19): siRNA sense strand
gcagaggcaugacaggaaa

SEQ ID NO: 1319658 - RNA, 19 nt, Homo sapiens
  misc_RNA (1)...(19): siRNA sense strand
aguagugccuguaauaaua

SEQ ID NO: 1319659 - RNA, 19 nt, Homo sapiens
  misc_RNA (1)...(19): siRNA sense strand
ucagaagaccaguguauua

SEQ ID NO: 1319660 - RNA, 19 nt, Homo sapiens
  misc_RNA (1)...(19): siRNA sense strand
gcaagauacuacagguaaa

SEQ ID NO: 1319661 - RNA, 19 nt, Homo sapiens
  misc_RNA (1)...(19): siRNA sense strand
uguauuagcucacaauuag

SEQ ID NO: 1319662 - RNA, 19 nt, Homo sapiens
  misc_RNA (1)...(19): siRNA sense strand
gguguagaauccuuuauga

SEQ ID NO: 1319663 - RNA, 19 nt, Homo sapiens
  misc_RNA (1)...(19): siRNA sense strand
gcaaagagccaugcuuaug

SEQ ID NO: 1319664 - RNA, 19 nt, Homo sapiens
  misc_RNA (1)...(19): siRNA sense strand
gauuuaagaucaacuccaa

SEQ ID NO: 1319665 - RNA, 19 nt, Homo sapiens
  misc_RNA (1)...(19): siRNA sense strand
gaaaucagacaucucauca

SEQ ID NO: 1319666 - RNA, 19 nt, Homo sapiens
  misc_RNA (1)...(19): siRNA sense strand
caaagagccaugcuuauga

SEQ ID NO: 1319667 - RNA, 19 nt, Homo sapiens
  misc_RNA (1)...(19): siRNA sense strand
cagcugguauccuuccuua

SEQ ID NO: 1319668 - RNA, 19 nt, Homo sapiens
  misc_RNA (1)...(19): siRNA sense strand
ggagaaggcagcacaguug

SEQ ID NO: 1319669 - RNA, 19 nt, Homo sapiens
  misc_RNA (1)...(19): siRNA sense strand
cagcugaccuugaccaguu

SEQ ID NO: 1319670 - RNA, 19 nt, Homo sapiens
  misc_RNA (1)...(19): siRNA sense strand
gagaauggaacaagagaaa

SEQ ID NO: 1319671 - RNA, 19 nt, Homo sapiens
  misc_RNA (1)...(19): siRNA sense strand
ucaaaccagucacaaacua

SEQ ID NO: 1319672 - RNA, 19 nt, Homo sapiens
  misc_RNA (1)...(19): siRNA sense strand
uauggaagguacaggaaua

SEQ ID NO: 1319673 - RNA, 19 nt, Homo sapiens
  misc_RNA (1)...(19): siRNA sense strand
ggaagcaauugauaaccaa

SEQ ID NO: 1319674 - RNA, 19 nt, Homo sapiens
  misc_RNA (1)...(19): siRNA sense strand
gaaaacagucgaucagaua

SEQ ID NO: 1319675 - RNA, 19 nt, Homo sapiens
  misc_RNA (1)...(19): siRNA sense strand
gaagggagaauuguauuug

SEQ ID NO: 1319676 - RNA, 19 nt, Homo sapiens
  misc_RNA (1)...(19): siRNA sense strand
ugaccaguuugaucaguua

SEQ ID NO: 1319677 - RNA, 19 nt, Homo sapiens
  misc_RNA (1)...(19): siRNA sense strand
gcauaacaaugacagacuu

SEQ ID NO: 1319678 - RNA, 19 nt, Homo sapiens
  misc_RNA (1)...(19): siRNA sense strand
uaaccgaucuuauucaaac

SEQ ID NO: 1319679 - RNA, 19 nt, Homo sapiens
  misc_RNA (1)...(19): siRNA sense strand
gaacugguugggaagauuu

SEQ ID NO: 1319680 - RNA, 19 nt, Homo sapiens
  misc_RNA (1)...(19): siRNA sense strand
gcccugagcagauaaauga

SEQ ID NO: 1319681 - RNA, 19 nt, Homo sapiens
  misc_RNA (1)...(19): siRNA sense strand
auucagggcuucugcauaa

SEQ ID NO: 1319682 - RNA, 19 nt, Homo sapiens
  misc_RNA (1)...(19): siRNA sense strand
gaacaagagaaaucaacaa

SEQ ID NO: 1319683 - RNA, 19 nt, Homo sapiens
  misc_RNA (1)...(19): siRNA sense strand
gaugagcucuuugcagaug

SEQ ID NO: 1319684 - RNA, 19 nt, Homo sapiens
  misc_RNA (1)...(19): siRNA sense strand
cauagcagcagucauagua

SEQ ID NO: 1319685 - RNA, 19 nt, Homo sapiens
  misc_RNA (1)...(19): siRNA sense strand
guaaaucccucggucaauc

SEQ ID NO: 1319686 - RNA, 19 nt, Homo sapiens
  misc_RNA (1)...(19): siRNA sense strand
guacagaaaucagacaucu

SEQ ID NO: 1319687 - RNA, 19 nt, Homo sapiens
  misc_RNA (1)...(19): siRNA sense strand
gaggcaacacgacgaaaua

SEQ ID NO: 1319688 - RNA, 19 nt, Homo sapiens
  misc_RNA (1)...(19): siRNA sense strand
ggacaggccaguucacaga

SEQ ID NO: 1319689 - RNA, 19 nt, Homo sapiens
  misc_RNA (1)...(19): siRNA sense strand
cuucauagcagcagucaua

SEQ ID NO: 1319690 - RNA, 19 nt, Homo sapiens
  misc_RNA (1)...(19): siRNA sense strand
guccagacaugcaaccuuu

SEQ ID NO: 1319691 - RNA, 19 nt, Homo sapiens
  misc_RNA (1)...(19): siRNA sense strand
ucaagaggauggagaagau

SEQ ID NO: 1319692 - RNA, 19 nt, Homo sapiens
  misc_RNA (1)...(19): siRNA sense strand
ugaagagaauggaacaaga

SEQ ID NO: 1319693 - RNA, 19 nt, Homo sapiens
  misc_RNA (1)...(19): siRNA sense strand
ccugaaugcucaaauguug

SEQ ID NO: 1319694 - RNA, 19 nt, Homo sapiens
  misc_RNA (1)...(19): siRNA sense strand
ggaaaggaucgccauguga

SEQ ID NO: 1319695 - RNA, 19 nt, Homo sapiens
  misc_RNA (1)...(19): siRNA sense strand
gagccuggaugauguaaag

SEQ ID NO: 1319696 - RNA, 19 nt, Homo sapiens
  misc_RNA (1)...(19): siRNA sense strand
aaagcugaguccaaagaua

SEQ ID NO: 1319697 - RNA, 19 nt, Homo sapiens
  misc_RNA (1)...(19): siRNA sense strand
gggaagauuuagugaggaa

SEQ ID NO: 1319698 - RNA, 19 nt, Homo sapiens
  misc_RNA (1)...(19): siRNA sense strand
agucaugucugauuuguau

SEQ ID NO: 1319699 - RNA, 19 nt, Homo sapiens
  misc_RNA (1)...(19): siRNA sense strand
gaaguaaugcaguguuuca

SEQ ID NO: 1319700 - RNA, 19 nt, Homo sapiens
  misc_RNA (1)...(19): siRNA sense strand
acaaguagugccuguaaua

SEQ ID NO: 1319701 - RNA, 19 nt, Homo sapiens
  misc_RNA (1)...(19): siRNA sense strand
aaacugagcuagcugaacu

SEQ ID NO: 1319702 - RNA, 19 nt, Homo sapiens
  misc_RNA (1)...(19): siRNA sense strand
ugacagacuuucagaugga

SEQ ID NO: 1319703 - RNA, 19 nt, Homo sapiens
  misc_RNA (1)...(19): siRNA sense strand
gugaggaagugcauuuaug

SEQ ID NO: 1319704 - RNA, 19 nt, Homo sapiens
  misc_RNA (1)...(19): siRNA sense strand
cagaaugucuuccaguauc

SEQ ID NO: 1319705 - RNA, 19 nt, Homo sapiens
  misc_RNA (1)...(19): siRNA sense strand
auugacagcuugaguguaa

SEQ ID NO: 1319706 - RNA, 19 nt, Homo sapiens
  misc_RNA (1)...(19): siRNA sense strand
ugaugacgauguacagaaa

SEQ ID NO: 1319707 - RNA, 19 nt, Homo sapiens
  misc_RNA (1)...(19): siRNA sense strand
acacaggccucuacugcaa

SEQ ID NO: 1319708 - RNA, 19 nt, Homo sapiens
  misc_RNA (1)...(19): siRNA sense strand
caggcaaacucuaaacaga

SEQ ID NO: 1319709 - RNA, 19 nt, Homo sapiens
  misc_RNA (1)...(19): siRNA sense strand
gaagaccaguguauuagcu

SEQ ID NO: 1319710 - RNA, 19 nt, Homo sapiens
  misc_RNA (1)...(19): siRNA sense strand
uaccugagcuggaauugga

SEQ ID NO: 1319711 - RNA, 19 nt, Homo sapiens
  misc_RNA (1)...(19): siRNA sense strand
gaacuggaugcuucaaaga

SEQ ID NO: 1319712 - RNA, 19 nt, Homo sapiens
  misc_RNA (1)...(19): siRNA sense strand
guacaaggaaacuccagua

SEQ ID NO: 1319713 - RNA, 19 nt, Homo sapiens
  misc_RNA (1)...(19): siRNA sense strand
ucacagaauucaccuagca

SEQ ID NO: 1319714 - RNA, 19 nt, Homo sapiens
  misc_RNA (1)...(19): siRNA sense strand
gcagagaaccaucuuaugc

SEQ ID NO: 1319715 - RNA, 19 nt, Homo sapiens
  misc_RNA (1)...(19): siRNA sense strand
cagagaauguaaccagcua

SEQ ID NO: 1319716 - RNA, 19 nt, Homo sapiens
  misc_RNA (1)...(19): siRNA sense strand
guuacugucugccaacauu

SEQ ID NO: 1319717 - RNA, 19 nt, Homo sapiens
  misc_RNA (1)...(19): siRNA sense strand
ccuagcagauuaaauauac

SEQ ID NO: 1319718 - RNA, 19 nt, Homo sapiens
  misc_RNA (1)...(19): siRNA sense strand
uaacaucuuuacaggguau

SEQ ID NO: 1319719 - RNA, 19 nt, Homo sapiens
  misc_RNA (1)...(19): siRNA sense strand
uagccaauguugccuuaaa

SEQ ID NO: 1319720 - RNA, 19 nt, Homo sapiens
  misc_RNA (1)...(19): siRNA sense strand
guuacggcaugcugauaua

SEQ ID NO: 1319721 - RNA, 19 nt, Homo sapiens
  misc_RNA (1)...(19): siRNA sense strand
gaauuguauuugugucaga

SEQ ID NO: 1319722 - RNA, 19 nt, Homo sapiens
  misc_RNA (1)...(19): siRNA sense strand
uagauuaccugagcuggaa

SEQ ID NO: 1319723 - RNA, 19 nt, Homo sapiens
  misc_RNA (1)...(19): siRNA sense strand
acaaggaaacuccaguaua

SEQ ID NO: 1319724 - RNA, 19 nt, Homo sapiens
  misc_RNA (1)...(19): siRNA sense strand
gacaacaacugccgaacag

SEQ ID NO: 1319725 - RNA, 19 nt, Homo sapiens
  misc_RNA (1)...(19): siRNA sense strand
gaauggaacaagagaaauc

SEQ ID NO: 1319726 - RNA, 19 nt, Homo sapiens
  misc_RNA (1)...(19): siRNA sense strand
caaguagugccuguaauaa

SEQ ID NO: 1319727 - RNA, 19 nt, Homo sapiens
  misc_RNA (1)...(19): siRNA sense strand
caaaaucacuaguaaaugg

SEQ ID NO: 1319728 - RNA, 19 nt, Homo sapiens
  misc_RNA (1)...(19): siRNA sense strand
cauaguaauucuagcaaca

SEQ ID NO: 1319729 - RNA, 19 nt, Homo sapiens
  misc_RNA (1)...(19): siRNA sense strand
gaucagauuccauggacaa

SEQ ID NO: 1319730 - RNA, 19 nt, Homo sapiens
  misc_RNA (1)...(19): siRNA sense strand
gcagggagcaagaaaauaa

SEQ ID NO: 1319731 - RNA, 19 nt, Homo sapiens
  misc_RNA (1)...(19): siRNA sense strand
gcagaugagcucacagaau

SEQ ID NO: 1319732 - RNA, 19 nt, Homo sapiens
  misc_RNA (1)...(19): siRNA sense strand
ugaaugaaggacccaauaa

SEQ ID NO: 1319733 - RNA, 19 nt, Homo sapiens
  misc_RNA (1)...(19): siRNA sense strand
acaauuccuuuccuccuaa

SEQ ID NO: 1319734 - RNA, 19 nt, Homo sapiens
  misc_RNA (1)...(19): siRNA sense strand
caaggaaacuccaguauaa

SEQ ID NO: 1319735 - RNA, 19 nt, Homo sapiens
  misc_RNA (1)...(19): siRNA sense strand
gaauucaccuagcagauua

SEQ ID NO: 1319736 - RNA, 19 nt, Homo sapiens
  misc_RNA (1)...(19): siRNA sense strand
cgaaauagccauaccuuua

SEQ ID NO: 1319737 - RNA, 19 nt, Homo sapiens
  misc_RNA (1)...(19): siRNA sense strand
cagaugagcucacagaauu

SEQ ID NO: 1319738 - RNA, 19 nt, Homo sapiens
  misc_RNA (1)...(19): siRNA sense strand
gaaauagccauaccuuuaa

SEQ ID NO: 1319739 - RNA, 19 nt, Homo sapiens
  misc_RNA (1)...(19): siRNA sense strand
ucagacaucucaucaagua

SEQ ID NO: 1319740 - RNA, 19 nt, Homo sapiens
  misc_RNA (1)...(19): siRNA sense strand
gaauguaaccagcuacuua

SEQ ID NO: 1319741 - RNA, 19 nt, Homo sapiens
  misc_RNA (1)...(19): siRNA sense strand
gacaacagcucuagugaug

SEQ ID NO: 1319742 - RNA, 19 nt, Homo sapiens
  misc_RNA (1)...(19): siRNA sense strand
gacgaugccuguucaagua

SEQ ID NO: 1319743 - RNA, 19 nt, Homo sapiens
  misc_RNA (1)...(19): siRNA sense strand
ugaagaaucugcuaccaaa

SEQ ID NO: 1319744 - RNA, 19 nt, Homo sapiens
  misc_RNA (1)...(19): siRNA sense strand
cagauuccauggacaaaua

SEQ ID NO: 1319745 - RNA, 19 nt, Homo sapiens
  misc_RNA (1)...(19): siRNA sense strand
ccagacagcuguuccaaga

SEQ ID NO: 1319746 - RNA, 19 nt, Homo sapiens
  misc_RNA (1)...(19): siRNA sense strand
caagagaaaucaacaacug

SEQ ID NO: 1319747 - RNA, 19 nt, Homo sapiens
  misc_RNA (1)...(19): siRNA sense strand
ucaccuagcagauuaaaua

SEQ ID NO: 1319748 - RNA, 19 nt, Homo sapiens
  misc_RNA (1)...(19): siRNA sense strand
gaauaucccuagcacaguu

SEQ ID NO: 1319749 - RNA, 19 nt, Homo sapiens
  misc_RNA (1)...(19): siRNA sense strand
gagaagauuuccagucaug

SEQ ID NO: 1319750 - RNA, 19 nt, Homo sapiens
  misc_RNA (1)...(19): siRNA sense strand
caggaggaauuaaugaaua

SEQ ID NO: 1319751 - RNA, 19 nt, Homo sapiens
  misc_RNA (1)...(19): siRNA sense strand
caacuuugcuccaucucua

SEQ ID NO: 1319752 - RNA, 19 nt, Homo sapiens
  misc_RNA (1)...(19): siRNA sense strand
ccucagauaucaccacuuu

SEQ ID NO: 1319753 - RNA, 19 nt, Homo sapiens
  misc_RNA (1)...(19): siRNA sense strand
gacacaagcugcaaagaug

SEQ ID NO: 1319754 - RNA, 19 nt, Homo sapiens
  misc_RNA (1)...(19): siRNA sense strand
gaacaugaacccaaugaug

SEQ ID NO: 1319755 - RNA, 19 nt, Homo sapiens
  misc_RNA (1)...(19): siRNA sense strand
gaucagauacagcuaauga

SEQ ID NO: 1319756 - RNA, 19 nt, Homo sapiens
  misc_RNA (1)...(19): siRNA sense strand
gaaauacgaauguucagaa

SEQ ID NO: 1319757 - RNA, 19 nt, Homo sapiens
  misc_RNA (1)...(19): siRNA sense strand
gcagaggcaugacaggaaa

SEQ ID NO: 1319758 - RNA, 19 nt, Homo sapiens
  misc_RNA (1)...(19): siRNA sense strand
aguagugccuguaauaaua

SEQ ID NO: 1319759 - RNA, 19 nt, Homo sapiens
  misc_RNA (1)...(19): siRNA sense strand
ucagaagaccaguguauua

SEQ ID NO: 1319760 - RNA, 19 nt, Homo sapiens
  misc_RNA (1)...(19): siRNA sense strand
gcaagauacuacagguaaa

SEQ ID NO: 1319761 - RNA, 19 nt, Homo sapiens
  misc_RNA (1)...(19): siRNA sense strand
uguauuagcucacaauuag

SEQ ID NO: 1319762 - RNA, 19 nt, Homo sapiens
  misc_RNA (1)...(19): siRNA sense strand
gguguagaauccuuuauga

SEQ ID NO: 1319763 - RNA, 19 nt, Homo sapiens
  misc_RNA (1)...(19): siRNA sense strand
gcaaagagccaugcuuaug

SEQ ID NO: 1319764 - RNA, 19 nt, Homo sapiens
  misc_RNA (1)...(19): siRNA sense strand
gauuuaagaucaacuccaa

SEQ ID NO: 1319765 - RNA, 19 nt, Homo sapiens
  misc_RNA (1)...(19): siRNA sense strand
gaaaucagacaucucauca

SEQ ID NO: 1319766 - RNA, 19 nt, Homo sapiens
  misc_RNA (1)...(19): siRNA sense strand
caaagagccaugcuuauga

SEQ ID NO: 1319767 - RNA, 19 nt, Homo sapiens
  misc_RNA (1)...(19): siRNA sense strand
cagcugguauccuuccuua

SEQ ID NO: 1319768 - RNA, 19 nt, Homo sapiens
  misc_RNA (1)...(19): siRNA sense strand
ggagaaggcagcacaguug

SEQ ID NO: 1319769 - RNA, 19 nt, Homo sapiens
  misc_RNA (1)...(19): siRNA sense strand
cagcugaccuugaccaguu

SEQ ID NO: 1319770 - RNA, 19 nt, Homo sapiens
  misc_RNA (1)...(19): siRNA sense strand
gagaauggaacaagagaaa

SEQ ID NO: 1319771 - RNA, 19 nt, Homo sapiens
  misc_RNA (1)...(19): siRNA sense strand
ucaaaccagucacaaacua

SEQ ID NO: 1319772 - RNA, 19 nt, Homo sapiens
  misc_RNA (1)...(19): siRNA sense strand
uauggaagguacaggaaua

SEQ ID NO: 1319773 - RNA, 19 nt, Homo sapiens
  misc_RNA (1)...(19): siRNA sense strand
ggaagcaauugauaaccaa

SEQ ID NO: 1319774 - RNA, 19 nt, Homo sapiens
  misc_RNA (1)...(19): siRNA sense strand
gaaaacagucgaucagaua

SEQ ID NO: 1319775 - RNA, 19 nt, Homo sapiens
  misc_RNA (1)...(19): siRNA sense strand
gaagggagaauuguauuug

SEQ ID NO: 1319776 - RNA, 19 nt, Homo sapiens
  misc_RNA (1)...(19): siRNA sense strand
ugaccaguuugaucaguua

SEQ ID NO: 1319777 - RNA, 19 nt, Homo sapiens
  misc_RNA (1)...(19): siRNA sense strand
gcauaacaaugacagacuu

SEQ ID NO: 1319778 - RNA, 19 nt, Homo sapiens
  misc_RNA (1)...(19): siRNA sense strand
uaaccgaucuuauucaaac

SEQ ID NO: 1319779 - RNA, 19 nt, Homo sapiens
  misc_RNA (1)...(19): siRNA sense strand
gaacugguugggaagauuu

SEQ ID NO: 1319780 - RNA, 19 nt, Homo sapiens
  misc_RNA (1)...(19): siRNA sense strand
gcccugagcagauaaauga

SEQ ID NO: 1319781 - RNA, 19 nt, Homo sapiens
  misc_RNA (1)...(19): siRNA sense strand
auucagggcuucugcauaa

SEQ ID NO: 1319782 - RNA, 19 nt, Homo sapiens
  misc_RNA (1)...(19): siRNA sense strand
gaacaagagaaaucaacaa

SEQ ID NO: 1319783 - RNA, 19 nt, Homo sapiens
  misc_RNA (1)...(19): siRNA sense strand
gaugagcucuuugcagaug

SEQ ID NO: 1319784 - RNA, 19 nt, Homo sapiens
  misc_RNA (1)...(19): siRNA sense strand
cauagcagcagucauagua

SEQ ID NO: 1319785 - RNA, 19 nt, Homo sapiens
  misc_RNA (1)...(19): siRNA sense strand
guaaaucccucggucaauc

SEQ ID NO: 1319786 - RNA, 19 nt, Homo sapiens
  misc_RNA (1)...(19): siRNA sense strand
guacagaaaucagacaucu

SEQ ID NO: 1319787 - RNA, 19 nt, Homo sapiens
  misc_RNA (1)...(19): siRNA sense strand
gaggcaacacgacgaaaua

SEQ ID NO: 1319788 - RNA, 19 nt, Homo sapiens
  misc_RNA (1)...(19): siRNA sense strand
ggacaggccaguucacaga

SEQ ID NO: 1319789 - RNA, 19 nt, Homo sapiens
  misc_RNA (1)...(19): siRNA sense strand
cuucauagcagcagucaua

SEQ ID NO: 1319790 - RNA, 19 nt, Homo sapiens
  misc_RNA (1)...(19): siRNA sense strand
guccagacaugcaaccuuu

SEQ ID NO: 1319791 - RNA, 19 nt, Homo sapiens
  misc_RNA (1)...(19): siRNA sense strand
ucaagaggauggagaagau

SEQ ID NO: 1319792 - RNA, 19 nt, Homo sapiens
  misc_RNA (1)...(19): siRNA sense strand
ugaagagaauggaacaaga

SEQ ID NO: 1319793 - RNA, 19 nt, Homo sapiens
  misc_RNA (1)...(19): siRNA sense strand
ccugaaugcucaaauguug

SEQ ID NO: 1319794 - RNA, 19 nt, Homo sapiens
  misc_RNA (1)...(19): siRNA sense strand
ggaaaggaucgccauguga

SEQ ID NO: 1319795 - RNA, 19 nt, Homo sapiens
  misc_RNA (1)...(19): siRNA sense strand
gagccuggaugauguaaag

SEQ ID NO: 1319796 - RNA, 19 nt, Homo sapiens
  misc_RNA (1)...(19): siRNA sense strand
aaagcugaguccaaagaua

SEQ ID NO: 1319797 - RNA, 19 nt, Homo sapiens
  misc_RNA (1)...(19): siRNA sense strand
gggaagauuuagugaggaa

SEQ ID NO: 1319798 - RNA, 19 nt, Homo sapiens
  misc_RNA (1)...(19): siRNA sense strand
agucaugucugauuuguau

SEQ ID NO: 1319799 - RNA, 19 nt, Homo sapiens
  misc_RNA (1)...(19): siRNA sense strand
gaaguaaugcaguguuuca

SEQ ID NO: 1319800 - RNA, 19 nt, Homo sapiens
  misc_RNA (1)...(19): siRNA sense strand
acaaguagugccuguaaua

SEQ ID NO: 1319801 - RNA, 19 nt, Homo sapiens
  misc_RNA (1)...(19): siRNA sense strand
aaacugagcuagcugaacu

SEQ ID NO: 1319802 - RNA, 19 nt, Homo sapiens
  misc_RNA (1)...(19): siRNA sense strand
ugacagacuuucagaugga

SEQ ID NO: 1319803 - RNA, 19 nt, Homo sapiens
  misc_RNA (1)...(19): siRNA sense strand
gugaggaagugcauuuaug

SEQ ID NO: 1319804 - RNA, 19 nt, Homo sapiens
  misc_RNA (1)...(19): siRNA sense strand
cagaaugucuuccaguauc

SEQ ID NO: 1319805 - RNA, 19 nt, Homo sapiens
  misc_RNA (1)...(19): siRNA sense strand
auugacagcuugaguguaa

SEQ ID NO: 1319806 - RNA, 19 nt, Homo sapiens
  misc_RNA (1)...(19): siRNA sense strand
ugaugacgauguacagaaa

SEQ ID NO: 1319807 - RNA, 19 nt, Homo sapiens
  misc_RNA (1)...(19): siRNA sense strand
acacaggccucuacugcaa

SEQ ID NO: 1319808 - RNA, 19 nt, Homo sapiens
  misc_RNA (1)...(19): siRNA sense strand
caggcaaacucuaaacaga

SEQ ID NO: 1319809 - RNA, 19 nt, Homo sapiens
  misc_RNA (1)...(19): siRNA sense strand
gaagaccaguguauuagcu

SEQ ID NO: 1319810 - RNA, 19 nt, Homo sapiens
  misc_RNA (1)...(19): siRNA sense strand
uaccugagcuggaauugga

SEQ ID NO: 1319811 - RNA, 19 nt, Homo sapiens
  misc_RNA (1)...(19): siRNA sense strand
gaacuggaugcuucaaaga

SEQ ID NO: 1319812 - RNA, 19 nt, Homo sapiens
  misc_RNA (1)...(19): siRNA sense strand
guacaaggaaacuccagua

SEQ ID NO: 1319813 - RNA, 19 nt, Homo sapiens
  misc_RNA (1)...(19): siRNA sense strand
ucacagaauucaccuagca

SEQ ID NO: 1319814 - RNA, 19 nt, Homo sapiens
  misc_RNA (1)...(19): siRNA sense strand
gcagagaaccaucuuaugc

SEQ ID NO: 1319815 - RNA, 19 nt, Homo sapiens
  misc_RNA (1)...(19): siRNA sense strand
cagagaauguaaccagcua

SEQ ID NO: 1319816 - RNA, 19 nt, Homo sapiens
  misc_RNA (1)...(19): siRNA sense strand
guuacugucugccaacauu

SEQ ID NO: 1319817 - RNA, 19 nt, Homo sapiens
  misc_RNA (1)...(19): siRNA sense strand
ccuagcagauuaaauauac

SEQ ID NO: 1319818 - RNA, 19 nt, Homo sapiens
  misc_RNA (1)...(19): siRNA sense strand
uaacaucuuuacaggguau

SEQ ID NO: 1319819 - RNA, 19 nt, Homo sapiens
  misc_RNA (1)...(19): siRNA sense strand
uagccaauguugccuuaaa

SEQ ID NO: 1319820 - RNA, 19 nt, Homo sapiens
  misc_RNA (1)...(19): siRNA sense strand
guuacggcaugcugauaua

SEQ ID NO: 1319821 - RNA, 19 nt, Homo sapiens
  misc_RNA (1)...(19): siRNA sense strand
gaauuguauuugugucaga

SEQ ID NO: 1319822 - RNA, 19 nt, Homo sapiens
  misc_RNA (1)...(19): siRNA sense strand
uagauuaccugagcuggaa

SEQ ID NO: 1319823 - RNA, 19 nt, Homo sapiens
  misc_RNA (1)...(19): siRNA sense strand
acaaggaaacuccaguaua

SEQ ID NO: 1319824 - RNA, 19 nt, Homo sapiens
  misc_RNA (1)...(19): siRNA sense strand
gacaacaacugccgaacag

SEQ ID NO: 1319825 - RNA, 19 nt, Homo sapiens
  misc_RNA (1)...(19): siRNA sense strand
gaauggaacaagagaaauc

SEQ ID NO: 1319826 - RNA, 19 nt, Homo sapiens
  misc_RNA (1)...(19): siRNA sense strand
caaguagugccuguaauaa

SEQ ID NO: 1319827 - RNA, 19 nt, Homo sapiens
  misc_RNA (1)...(19): siRNA sense strand
caaaaucacuaguaaaugg

SEQ ID NO: 1319828 - RNA, 19 nt, Homo sapiens
  misc_RNA (1)...(19): siRNA sense strand
cauaguaauucuagcaaca

SEQ ID NO: 1319829 - RNA, 19 nt, Homo sapiens
  misc_RNA (1)...(19): siRNA sense strand
gaucagauuccauggacaa

SEQ ID NO: 1319830 - RNA, 19 nt, Homo sapiens
  misc_RNA (1)...(19): siRNA sense strand
gcagggagcaagaaaauaa

SEQ ID NO: 1319831 - RNA, 19 nt, Homo sapiens
  misc_RNA (1)...(19): siRNA sense strand
gcagaugagcucacagaau

SEQ ID NO: 1319832 - RNA, 19 nt, Homo sapiens
  misc_RNA (1)...(19): siRNA sense strand
ugaaugaaggacccaauaa

SEQ ID NO: 1319833 - RNA, 19 nt, Homo sapiens
  misc_RNA (1)...(19): siRNA sense strand
acaauuccuuuccuccuaa

SEQ ID NO: 1319834 - RNA, 19 nt, Homo sapiens
  misc_RNA (1)...(19): siRNA sense strand
caaggaaacuccaguauaa

SEQ ID NO: 1319835 - RNA, 19 nt, Homo sapiens
  misc_RNA (1)...(19): siRNA sense strand
gaauucaccuagcagauua

SEQ ID NO: 1319836 - RNA, 19 nt, Homo sapiens
  misc_RNA (1)...(19): siRNA sense strand
cgaaauagccauaccuuua

SEQ ID NO: 1319837 - RNA, 19 nt, Homo sapiens
  misc_RNA (1)...(19): siRNA sense strand
cagaugagcucacagaauu

SEQ ID NO: 1319838 - RNA, 19 nt, Homo sapiens
  misc_RNA (1)...(19): siRNA sense strand
gaaauagccauaccuuuaa

SEQ ID NO: 1319839 - RNA, 19 nt, Homo sapiens
  misc_RNA (1)...(19): siRNA sense strand
ucagacaucucaucaagua

SEQ ID NO: 1319840 - RNA, 19 nt, Homo sapiens
  misc_RNA (1)...(19): siRNA sense strand
gaauguaaccagcuacuua

SEQ ID NO: 1319841 - RNA, 19 nt, Homo sapiens
  misc_RNA (1)...(19): siRNA sense strand
gacaacagcucuagugaug

SEQ ID NO: 1319842 - RNA, 19 nt, Homo sapiens
  misc_RNA (1)...(19): siRNA sense strand
gacgaugccuguucaagua

SEQ ID NO: 1319843 - RNA, 19 nt, Homo sapiens
  misc_RNA (1)...(19): siRNA sense strand
ugaagaaucugcuaccaaa

SEQ ID NO: 1319844 - RNA, 19 nt, Homo sapiens
  misc_RNA (1)...(19): siRNA sense strand
cagauuccauggacaaaua

SEQ ID NO: 1319845 - RNA, 19 nt, Homo sapiens
  misc_RNA (1)...(19): siRNA sense strand
ccagacagcuguuccaaga

SEQ ID NO: 1319846 - RNA, 19 nt, Homo sapiens
  misc_RNA (1)...(19): siRNA sense strand
caagagaaaucaacaacug

SEQ ID NO: 1319847 - RNA, 19 nt, Homo sapiens
  misc_RNA (1)...(19): siRNA sense strand
ucaccuagcagauuaaaua

SEQ ID NO: 1319848 - RNA, 19 nt, Homo sapiens
  misc_RNA (1)...(19): siRNA sense strand
gaauaucccuagcacaguu

SEQ ID NO: 1319849 - RNA, 19 nt, Homo sapiens
  misc_RNA (1)...(19): siRNA sense strand
gagaagauuuccagucaug

SEQ ID NO: 1319850 - RNA, 19 nt, Homo sapiens
  misc_RNA (1)...(19): siRNA sense strand
caggaggaauuaaugaaua

SEQ ID NO: 1319851 - RNA, 19 nt, Homo sapiens
  misc_RNA (1)...(19): siRNA sense strand
caacuuugcuccaucucua

SEQ ID NO: 1319852 - RNA, 19 nt, Homo sapiens
  misc_RNA (1)...(19): siRNA sense strand
ccucagauaucaccacuuu

SEQ ID NO: 1319853 - RNA, 19 nt, Homo sapiens
  misc_RNA (1)...(19): siRNA sense strand
gacacaagcugcaaagaug

SEQ ID NO: 1319854 - RNA, 19 nt, Homo sapiens
  misc_RNA (1)...(19): siRNA sense strand
gaacaugaacccaaugaug

SEQ ID NO: 1319855 - RNA, 19 nt, Homo sapiens
  misc_RNA (1)...(19): siRNA sense strand
gaucagauacagcuaauga

SEQ ID NO: 1319856 - RNA, 19 nt, Homo sapiens
  misc_RNA (1)...(19): siRNA sense strand
gaaauacgaauguucagaa

SEQ ID NO: 1319857 - RNA, 19 nt, Homo sapiens
  misc_RNA (1)...(19): siRNA sense strand
gcagaggcaugacaggaaa

SEQ ID NO: 1319858 - RNA, 19 nt, Homo sapiens
  misc_RNA (1)...(19): siRNA sense strand
aguagugccuguaauaaua

SEQ ID NO: 1319859 - RNA, 19 nt, Homo sapiens
  misc_RNA (1)...(19): siRNA sense strand
ucagaagaccaguguauua

SEQ ID NO: 1319860 - RNA, 19 nt, Homo sapiens
  misc_RNA (1)...(19): siRNA sense strand
gcaagauacuacagguaaa

SEQ ID NO: 1319861 - RNA, 19 nt, Homo sapiens
  misc_RNA (1)...(19): siRNA sense strand
uguauuagcucacaauuag

SEQ ID NO: 1319862 - RNA, 19 nt, Homo sapiens
  misc_RNA (1)...(19): siRNA sense strand
gguguagaauccuuuauga

SEQ ID NO: 1319863 - RNA, 19 nt, Homo sapiens
  misc_RNA (1)...(19): siRNA sense strand
gcaaagagccaugcuuaug

SEQ ID NO: 1319864 - RNA, 19 nt, Homo sapiens
  misc_RNA (1)...(19): siRNA sense strand
gauuuaagaucaacuccaa

SEQ ID NO: 1319865 - RNA, 19 nt, Homo sapiens
  misc_RNA (1)...(19): siRNA sense strand
gaaaucagacaucucauca

SEQ ID NO: 1319866 - RNA, 19 nt, Homo sapiens
  misc_RNA (1)...(19): siRNA sense strand
caaagagccaugcuuauga

SEQ ID NO: 1319867 - RNA, 19 nt, Homo sapiens
  misc_RNA (1)...(19): siRNA sense strand
cagcugguauccuuccuua

SEQ ID NO: 1319868 - RNA, 19 nt, Homo sapiens
  misc_RNA (1)...(19): siRNA sense strand
ggagaaggcagcacaguug

SEQ ID NO: 1319869 - RNA, 19 nt, Homo sapiens
  misc_RNA (1)...(19): siRNA sense strand
cagcugaccuugaccaguu

SEQ ID NO: 1319870 - RNA, 19 nt, Homo sapiens
  misc_RNA (1)...(19): siRNA sense strand
gagaauggaacaagagaaa

SEQ ID NO: 1319871 - RNA, 19 nt, Homo sapiens
  misc_RNA (1)...(19): siRNA sense strand
ucaaaccagucacaaacua

SEQ ID NO: 1319872 - RNA, 19 nt, Homo sapiens
  misc_RNA (1)...(19): siRNA sense strand
uauggaagguacaggaaua

SEQ ID NO: 1319873 - RNA, 19 nt, Homo sapiens
  misc_RNA (1)...(19): siRNA sense strand
ggaagcaauugauaaccaa

SEQ ID NO: 1319874 - RNA, 19 nt, Homo sapiens
  misc_RNA (1)...(19): siRNA sense strand
gaaaacagucgaucagaua

SEQ ID NO: 1319875 - RNA, 19 nt, Homo sapiens
  misc_RNA (1)...(19): siRNA sense strand
gaagggagaauuguauuug

SEQ ID NO: 1319876 - RNA, 19 nt, Homo sapiens
  misc_RNA (1)...(19): siRNA sense strand
ugaccaguuugaucaguua

SEQ ID NO: 1319877 - RNA, 19 nt, Homo sapiens
  misc_RNA (1)...(19): siRNA sense strand
gcauaacaaugacagacuu

SEQ ID NO: 1319878 - RNA, 19 nt, Homo sapiens
  misc_RNA (1)...(19): siRNA sense strand
uaaccgaucuuauucaaac

SEQ ID NO: 1319879 - RNA, 19 nt, Homo sapiens
  misc_RNA (1)...(19): siRNA sense strand
gaacugguugggaagauuu

SEQ ID NO: 1319880 - RNA, 19 nt, Homo sapiens
  misc_RNA (1)...(19): siRNA sense strand
gcccugagcagauaaauga

SEQ ID NO: 1319881 - RNA, 19 nt, Homo sapiens
  misc_RNA (1)...(19): siRNA sense strand
auucagggcuucugcauaa

SEQ ID NO: 1319882 - RNA, 19 nt, Homo sapiens
  misc_RNA (1)...(19): siRNA sense strand
gaacaagagaaaucaacaa

SEQ ID NO: 1319883 - RNA, 19 nt, Homo sapiens
  misc_RNA (1)...(19): siRNA sense strand
gaugagcucuuugcagaug

SEQ ID NO: 1319884 - RNA, 19 nt, Homo sapiens
  misc_RNA (1)...(19): siRNA sense strand
cauagcagcagucauagua

SEQ ID NO: 1319885 - RNA, 19 nt, Homo sapiens
  misc_RNA (1)...(19): siRNA sense strand
guaaaucccucggucaauc

SEQ ID NO: 1319886 - RNA, 19 nt, Homo sapiens
  misc_RNA (1)...(19): siRNA sense strand
guacagaaaucagacaucu

SEQ ID NO: 1319887 - RNA, 19 nt, Homo sapiens
  misc_RNA (1)...(19): siRNA sense strand
gaggcaacacgacgaaaua

SEQ ID NO: 1319888 - RNA, 19 nt, Homo sapiens
  misc_RNA (1)...(19): siRNA sense strand
ggacaggccaguucacaga

SEQ ID NO: 1319889 - RNA, 19 nt, Homo sapiens
  misc_RNA (1)...(19): siRNA sense strand
cuucauagcagcagucaua

SEQ ID NO: 1319890 - RNA, 19 nt, Homo sapiens
  misc_RNA (1)...(19): siRNA sense strand
guccagacaugcaaccuuu

SEQ ID NO: 1319891 - RNA, 19 nt, Homo sapiens
  misc_RNA (1)...(19): siRNA sense strand
ucaagaggauggagaagau

SEQ ID NO: 1319892 - RNA, 19 nt, Homo sapiens
  misc_RNA (1)...(19): siRNA sense strand
ugaagagaauggaacaaga

SEQ ID NO: 1319893 - RNA, 19 nt, Homo sapiens
  misc_RNA (1)...(19): siRNA sense strand
ccugaaugcucaaauguug

SEQ ID NO: 1319894 - RNA, 19 nt, Homo sapiens
  misc_RNA (1)...(19): siRNA sense strand
ggaaaggaucgccauguga

SEQ ID NO: 1319895 - RNA, 19 nt, Homo sapiens
  misc_RNA (1)...(19): siRNA sense strand
gagccuggaugauguaaag

SEQ ID NO: 1319896 - RNA, 19 nt, Homo sapiens
  misc_RNA (1)...(19): siRNA sense strand
aaagcugaguccaaagaua

SEQ ID NO: 1319897 - RNA, 19 nt, Homo sapiens
  misc_RNA (1)...(19): siRNA sense strand
gggaagauuuagugaggaa

SEQ ID NO: 1319898 - RNA, 19 nt, Homo sapiens
  misc_RNA (1)...(19): siRNA sense strand
agucaugucugauuuguau

SEQ ID NO: 1319899 - RNA, 19 nt, Homo sapiens
  misc_RNA (1)...(19): siRNA sense strand
gaaguaaugcaguguuuca

SEQ ID NO: 1319900 - RNA, 19 nt, Homo sapiens
  misc_RNA (1)...(19): siRNA sense strand
acaaguagugccuguaaua

SEQ ID NO: 1319901 - RNA, 19 nt, Homo sapiens
  misc_RNA (1)...(19): siRNA sense strand
aaacugagcuagcugaacu

SEQ ID NO: 1319902 - RNA, 19 nt, Homo sapiens
  misc_RNA (1)...(19): siRNA sense strand
ugacagacuuucagaugga

SEQ ID NO: 1319903 - RNA, 19 nt, Homo sapiens
  misc_RNA (1)...(19): siRNA sense strand
gugaggaagugcauuuaug

SEQ ID NO: 1319904 - RNA, 19 nt, Homo sapiens
  misc_RNA (1)...(19): siRNA sense strand
cagaaugucuuccaguauc

SEQ ID NO: 1319905 - RNA, 19 nt, Homo sapiens
  misc_RNA (1)...(19): siRNA sense strand
auugacagcuugaguguaa

SEQ ID NO: 1319906 - RNA, 19 nt, Homo sapiens
  misc_RNA (1)...(19): siRNA sense strand
ugaugacgauguacagaaa

SEQ ID NO: 1319907 - RNA, 19 nt, Homo sapiens
  misc_RNA (1)...(19): siRNA sense strand
acacaggccucuacugcaa

SEQ ID NO: 1319908 - RNA, 19 nt, Homo sapiens
  misc_RNA (1)...(19): siRNA sense strand
caggcaaacucuaaacaga

SEQ ID NO: 1319909 - RNA, 19 nt, Homo sapiens
  misc_RNA (1)...(19): siRNA sense strand
gaagaccaguguauuagcu

SEQ ID NO: 1319910 - RNA, 19 nt, Homo sapiens
  misc_RNA (1)...(19): siRNA sense strand
uaccugagcuggaauugga

SEQ ID NO: 1319911 - RNA, 19 nt, Homo sapiens
  misc_RNA (1)...(19): siRNA sense strand
gaacuggaugcuucaaaga

SEQ ID NO: 1319912 - RNA, 19 nt, Homo sapiens
  misc_RNA (1)...(19): siRNA sense strand
guacaaggaaacuccagua

SEQ ID NO: 1319913 - RNA, 19 nt, Homo sapiens
  misc_RNA (1)...(19): siRNA sense strand
ucacagaauucaccuagca

SEQ ID NO: 1319914 - RNA, 19 nt, Homo sapiens
  misc_RNA (1)...(19): siRNA sense strand
gcagagaaccaucuuaugc

SEQ ID NO: 1319915 - RNA, 19 nt, Homo sapiens
  misc_RNA (1)...(19): siRNA sense strand
cagagaauguaaccagcua

SEQ ID NO: 1319916 - RNA, 19 nt, Homo sapiens
  misc_RNA (1)...(19): siRNA sense strand
guuacugucugccaacauu

SEQ ID NO: 1319917 - RNA, 19 nt, Homo sapiens
  misc_RNA (1)...(19): siRNA sense strand
ccuagcagauuaaauauac

SEQ ID NO: 1319918 - RNA, 19 nt, Homo sapiens
  misc_RNA (1)...(19): siRNA sense strand
uaacaucuuuacaggguau

SEQ ID NO: 1319919 - RNA, 19 nt, Homo sapiens
  misc_RNA (1)...(19): siRNA sense strand
uagccaauguugccuuaaa

SEQ ID NO: 1319920 - RNA, 19 nt, Homo sapiens
  misc_RNA (1)...(19): siRNA sense strand
guuacggcaugcugauaua

SEQ ID NO: 1319921 - RNA, 19 nt, Homo sapiens
  misc_RNA (1)...(19): siRNA sense strand
gaauuguauuugugucaga

SEQ ID NO: 1319922 - RNA, 19 nt, Homo sapiens
  misc_RNA (1)...(19): siRNA sense strand
uagauuaccugagcuggaa

SEQ ID NO: 1319923 - RNA, 19 nt, Homo sapiens
  misc_RNA (1)...(19): siRNA sense strand
acaaggaaacuccaguaua

SEQ ID NO: 1319924 - RNA, 19 nt, Homo sapiens
  misc_RNA (1)...(19): siRNA sense strand
gacaacaacugccgaacag

SEQ ID NO: 1319925 - RNA, 19 nt, Homo sapiens
  misc_RNA (1)...(19): siRNA sense strand
gaauggaacaagagaaauc

SEQ ID NO: 1319926 - RNA, 19 nt, Homo sapiens
  misc_RNA (1)...(19): siRNA sense strand
caaguagugccuguaauaa

SEQ ID NO: 1319927 - RNA, 19 nt, Homo sapiens
  misc_RNA (1)...(19): siRNA sense strand
caaaaucacuaguaaaugg

SEQ ID NO: 1319928 - RNA, 19 nt, Homo sapiens
  misc_RNA (1)...(19): siRNA sense strand
cauaguaauucuagcaaca

SEQ ID NO: 1319929 - RNA, 19 nt, Homo sapiens
  misc_RNA (1)...(19): siRNA sense strand
gaucagauuccauggacaa

SEQ ID NO: 1319930 - RNA, 19 nt, Homo sapiens
  misc_RNA (1)...(19): siRNA sense strand
gcagggagcaagaaaauaa

SEQ ID NO: 1319931 - RNA, 19 nt, Homo sapiens
  misc_RNA (1)...(19): siRNA sense strand
gcagaugagcucacagaau

SEQ ID NO: 1319932 - RNA, 19 nt, Homo sapiens
  misc_RNA (1)...(19): siRNA sense strand
ugaaugaaggacccaauaa

SEQ ID NO: 1319933 - RNA, 19 nt, Homo sapiens
  misc_RNA (1)...(19): siRNA sense strand
acaauuccuuuccuccuaa

SEQ ID NO: 1319934 - RNA, 19 nt, Homo sapiens
  misc_RNA (1)...(19): siRNA sense strand
caaggaaacuccaguauaa

SEQ ID NO: 1319935 - RNA, 19 nt, Homo sapiens
  misc_RNA (1)...(19): siRNA sense strand
gaauucaccuagcagauua

SEQ ID NO: 1319936 - RNA, 19 nt, Homo sapiens
  misc_RNA (1)...(19): siRNA sense strand
cgaaauagccauaccuuua

SEQ ID NO: 1319937 - RNA, 19 nt, Homo sapiens
  misc_RNA (1)...(19): siRNA sense strand
cagaugagcucacagaauu

SEQ ID NO: 1319938 - RNA, 19 nt, Homo sapiens
  misc_RNA (1)...(19): siRNA sense strand
gaaauagccauaccuuuaa

SEQ ID NO: 1319939 - RNA, 19 nt, Homo sapiens
  misc_RNA (1)...(19): siRNA sense strand
ucagacaucucaucaagua

SEQ ID NO: 1319940 - RNA, 19 nt, Homo sapiens
  misc_RNA (1)...(19): siRNA sense strand
gaauguaaccagcuacuua

SEQ ID NO: 1319941 - RNA, 19 nt, Homo sapiens
  misc_RNA (1)...(19): siRNA sense strand
gacaacagcucuagugaug

SEQ ID NO: 1319942 - RNA, 19 nt, Homo sapiens
  misc_RNA (1)...(19): siRNA sense strand
gacgaugccuguucaagua

SEQ ID NO: 1319943 - RNA, 19 nt, Homo sapiens
  misc_RNA (1)...(19): siRNA sense strand
ugaagaaucugcuaccaaa

SEQ ID NO: 1319944 - RNA, 19 nt, Homo sapiens
  misc_RNA (1)...(19): siRNA sense strand
cagauuccauggacaaaua

SEQ ID NO: 1319945 - RNA, 19 nt, Homo sapiens
  misc_RNA (1)...(19): siRNA sense strand
ccagacagcuguuccaaga

SEQ ID NO: 1319946 - RNA, 19 nt, Homo sapiens
  misc_RNA (1)...(19): siRNA sense strand
caagagaaaucaacaacug

SEQ ID NO: 1319947 - RNA, 19 nt, Homo sapiens
  misc_RNA (1)...(19): siRNA sense strand
ucaccuagcagauuaaaua

SEQ ID NO: 1319948 - RNA, 19 nt, Homo sapiens
  misc_RNA (1)...(19): siRNA sense strand
gaauaucccuagcacaguu

SEQ ID NO: 1319949 - RNA, 19 nt, Homo sapiens
  misc_RNA (1)...(19): siRNA sense strand
gagaagauuuccagucaug

SEQ ID NO: 1319950 - RNA, 19 nt, Homo sapiens
  misc_RNA (1)...(19): siRNA sense strand
caggaggaauuaaugaaua

SEQ ID NO: 1319951 - RNA, 19 nt, Homo sapiens
  misc_RNA (1)...(19): siRNA sense strand
caacuuugcuccaucucua

SEQ ID NO: 1319952 - RNA, 19 nt, Homo sapiens
  misc_RNA (1)...(19): siRNA sense strand
ccucagauaucaccacuuu

SEQ ID NO: 1319953 - RNA, 19 nt, Homo sapiens
  misc_RNA (1)...(19): siRNA sense strand
gacacaagcugcaaagaug

SEQ ID NO: 1319954 - RNA, 19 nt, Homo sapiens
  misc_RNA (1)...(19): siRNA sense strand
gaacaugaacccaaugaug

SEQ ID NO: 1319955 - RNA, 19 nt, Homo sapiens
  misc_RNA (1)...(19): siRNA sense strand
gaucagauacagcuaauga

SEQ ID NO: 1319956 - RNA, 19 nt, Homo sapiens
  misc_RNA (1)...(19): siRNA sense strand
gaaauacgaauguucagaa

SEQ ID NO: 1319957 - RNA, 19 nt, Homo sapiens
  misc_RNA (1)...(19): siRNA sense strand
gcagaggcaugacaggaaa

SEQ ID NO: 1319958 - RNA, 19 nt, Homo sapiens
  misc_RNA (1)...(19): siRNA sense strand
aguagugccuguaauaaua

SEQ ID NO: 1319959 - RNA, 19 nt, Homo sapiens
  misc_RNA (1)...(19): siRNA sense strand
ucagaagaccaguguauua

SEQ ID NO: 1319960 - RNA, 19 nt, Homo sapiens
  misc_RNA (1)...(19): siRNA sense strand
gcaagauacuacagguaaa

SEQ ID NO: 1319961 - RNA, 19 nt, Homo sapiens
  misc_RNA (1)...(19): siRNA sense strand
uguauuagcucacaauuag

SEQ ID NO: 1319962 - RNA, 19 nt, Homo sapiens
  misc_RNA (1)...(19): siRNA sense strand
gguguagaauccuuuauga

SEQ ID NO: 1319963 - RNA, 19 nt, Homo sapiens
  misc_RNA (1)...(19): siRNA sense strand
gcaaagagccaugcuuaug

SEQ ID NO: 1319964 - RNA, 19 nt, Homo sapiens
  misc_RNA (1)...(19): siRNA sense strand
gauuuaagaucaacuccaa

SEQ ID NO: 1319965 - RNA, 19 nt, Homo sapiens
  misc_RNA (1)...(19): siRNA sense strand
gaaaucagacaucucauca

SEQ ID NO: 1319966 - RNA, 19 nt, Homo sapiens
  misc_RNA (1)...(19): siRNA sense strand
caaagagccaugcuuauga

SEQ ID NO: 1319967 - RNA, 19 nt, Homo sapiens
  misc_RNA (1)...(19): siRNA sense strand
cagcugguauccuuccuua

SEQ ID NO: 1319968 - RNA, 19 nt, Homo sapiens
  misc_RNA (1)...(19): siRNA sense strand
ggagaaggcagcacaguug

SEQ ID NO: 1319969 - RNA, 19 nt, Homo sapiens
  misc_RNA (1)...(19): siRNA sense strand
cagcugaccuugaccaguu

SEQ ID NO: 1319970 - RNA, 19 nt, Homo sapiens
  misc_RNA (1)...(19): siRNA sense strand
gagaauggaacaagagaaa

SEQ ID NO: 1319971 - RNA, 19 nt, Homo sapiens
  misc_RNA (1)...(19): siRNA sense strand
ucaaaccagucacaaacua

SEQ ID NO: 1319972 - RNA, 19 nt, Homo sapiens
  misc_RNA (1)...(19): siRNA sense strand
uauggaagguacaggaaua

SEQ ID NO: 1319973 - RNA, 19 nt, Homo sapiens
  misc_RNA (1)...(19): siRNA sense strand
ggaagcaauugauaaccaa

SEQ ID NO: 1319974 - RNA, 19 nt, Homo sapiens
  misc_RNA (1)...(19): siRNA sense strand
gaaaacagucgaucagaua

SEQ ID NO: 1319975 - RNA, 19 nt, Homo sapiens
  misc_RNA (1)...(19): siRNA sense strand
gaagggagaauuguauuug

SEQ ID NO: 1319976 - RNA, 19 nt, Homo sapiens
  misc_RNA (1)...(19): siRNA sense strand
ugaccaguuugaucaguua

SEQ ID NO: 1319977 - RNA, 19 nt, Homo sapiens
  misc_RNA (1)...(19): siRNA sense strand
gcauaacaaugacagacuu

SEQ ID NO: 1319978 - RNA, 19 nt, Homo sapiens
  misc_RNA (1)...(19): siRNA sense strand
uaaccgaucuuauucaaac

SEQ ID NO: 1319979 - RNA, 19 nt, Homo sapiens
  misc_RNA (1)...(19): siRNA sense strand
gaacugguugggaagauuu

SEQ ID NO: 1319980 - RNA, 19 nt, Homo sapiens
  misc_RNA (1)...(19): siRNA sense strand
gcccugagcagauaaauga

SEQ ID NO: 1319981 - RNA, 19 nt, Homo sapiens
  misc_RNA (1)...(19): siRNA sense strand
auucagggcuucugcauaa

SEQ ID NO: 1319982 - RNA, 19 nt, Homo sapiens
  misc_RNA (1)...(19): siRNA sense strand
gaacaagagaaaucaacaa

SEQ ID NO: 1319983 - RNA, 19 nt, Homo sapiens
  misc_RNA (1)...(19): siRNA sense strand
gaugagcucuuugcagaug

SEQ ID NO: 1319984 - RNA, 19 nt, Homo sapiens
  misc_RNA (1)...(19): siRNA sense strand
cauagcagcagucauagua

SEQ ID NO: 1319985 - RNA, 19 nt, Homo sapiens
  misc_RNA (1)...(19): siRNA sense strand
guaaaucccucggucaauc

SEQ ID NO: 1319986 - RNA, 19 nt, Homo sapiens
  misc_RNA (1)...(19): siRNA sense strand
guacagaaaucagacaucu

SEQ ID NO: 1319987 - RNA, 19 nt, Homo sapiens
  misc_RNA (1)...(19): siRNA sense strand
gaggcaacacgacgaaaua

SEQ ID NO: 1319988 - RNA, 19 nt, Homo sapiens
  misc_RNA (1)...(19): siRNA sense strand
ggacaggccaguucacaga

SEQ ID NO: 1319989 - RNA, 19 nt, Homo sapiens
  misc_RNA (1)...(19): siRNA sense strand
cuucauagcagcagucaua

SEQ ID NO: 1319990 - RNA, 19 nt, Homo sapiens
  misc_RNA (1)...(19): siRNA sense strand
guccagacaugcaaccuuu

SEQ ID NO: 1319991 - RNA, 19 nt, Homo sapiens
  misc_RNA (1)...(19): siRNA sense strand
ucaagaggauggagaagau

SEQ ID NO: 1319992 - RNA, 19 nt, Homo sapiens
  misc_RNA (1)...(19): siRNA sense strand
ugaagagaauggaacaaga

SEQ ID NO: 1319993 - RNA, 19 nt, Homo sapiens
  misc_RNA (1)...(19): siRNA sense strand
ccugaaugcucaaauguug

SEQ ID NO: 1319994 - RNA, 19 nt, Homo sapiens
  misc_RNA (1)...(19): siRNA sense strand
ggaaaggaucgccauguga

SEQ ID NO: 1319995 - RNA, 19 nt, Homo sapiens
  misc_RNA (1)...(19): siRNA sense strand
gagccuggaugauguaaag

SEQ ID NO: 1319996 - RNA, 19 nt, Homo sapiens
  misc_RNA (1)...(19): siRNA sense strand
aaagcugaguccaaagaua

SEQ ID NO: 1319997 - RNA, 19 nt, Homo sapiens
  misc_RNA (1)...(19): siRNA sense strand
gggaagauuuagugaggaa

SEQ ID NO: 1319998 - RNA, 19 nt, Homo sapiens
  misc_RNA (1)...(19): siRNA sense strand
agucaugucugauuuguau

SEQ ID NO: 1319999 - RNA, 19 nt, Homo sapiens
  misc_RNA (1)...(19): siRNA sense strand
gaaguaaugcaguguuuca

SEQ ID NO: 1320000 - RNA, 19 nt, Homo sapiens
  misc_RNA (1)...(19): siRNA sense strand
acaaguagugccuguaaua

SEQ ID NO: 1320001 - RNA, 19 nt, Homo sapiens
  misc_RNA (1)...(19): siRNA sense strand
aaacugagcuagcugaacu

SEQ ID NO: 1320002 - RNA, 19 nt, Homo sapiens
  misc_RNA (1)...(19): siRNA sense strand
ugacagacuuucagaugga

SEQ ID NO: 1320003 - RNA, 19 nt, Homo sapiens
  misc_RNA (1)...(19): siRNA sense strand
gugaggaagugcauuuaug

SEQ ID NO: 1320004 - RNA, 19 nt, Homo sapiens
  misc_RNA (1)...(19): siRNA sense strand
cagaaugucuuccaguauc

SEQ ID NO: 1320005 - RNA, 19 nt, Homo sapiens
  misc_RNA (1)...(19): siRNA sense strand
auugacagcuugaguguaa

SEQ ID NO: 1320006 - RNA, 19 nt, Homo sapiens
  misc_RNA (1)...(19): siRNA sense strand
ugaugacgauguacagaaa

SEQ ID NO: 1320007 - RNA, 19 nt, Homo sapiens
  misc_RNA (1)...(19): siRNA sense strand
acacaggccucuacugcaa

SEQ ID NO: 1320008 - RNA, 19 nt, Homo sapiens
  misc_RNA (1)...(19): siRNA sense strand
caggcaaacucuaaacaga

SEQ ID NO: 1320009 - RNA, 19 nt, Homo sapiens
  misc_RNA (1)...(19): siRNA sense strand
gaagaccaguguauuagcu

SEQ ID NO: 1320010 - RNA, 19 nt, Homo sapiens
  misc_RNA (1)...(19): siRNA sense strand
uaccugagcuggaauugga

SEQ ID NO: 1320011 - RNA, 19 nt, Homo sapiens
  misc_RNA (1)...(19): siRNA sense strand
gaacuggaugcuucaaaga

SEQ ID NO: 1320012 - RNA, 19 nt, Homo sapiens
  misc_RNA (1)...(19): siRNA sense strand
guacaaggaaacuccagua

SEQ ID NO: 1320013 - RNA, 19 nt, Homo sapiens
  misc_RNA (1)...(19): siRNA sense strand
ucacagaauucaccuagca

SEQ ID NO: 1320014 - RNA, 19 nt, Homo sapiens
  misc_RNA (1)...(19): siRNA sense strand
gcagagaaccaucuuaugc

SEQ ID NO: 1320015 - RNA, 19 nt, Homo sapiens
  misc_RNA (1)...(19): siRNA sense strand
cagagaauguaaccagcua

SEQ ID NO: 1320016 - RNA, 19 nt, Homo sapiens
  misc_RNA (1)...(19): siRNA sense strand
guuacugucugccaacauu

SEQ ID NO: 1320017 - RNA, 19 nt, Homo sapiens
  misc_RNA (1)...(19): siRNA sense strand
ccuagcagauuaaauauac

SEQ ID NO: 1320018 - RNA, 19 nt, Homo sapiens
  misc_RNA (1)...(19): siRNA sense strand
uaacaucuuuacaggguau

SEQ ID NO: 1320019 - RNA, 19 nt, Homo sapiens
  misc_RNA (1)...(19): siRNA sense strand
uagccaauguugccuuaaa

SEQ ID NO: 1320020 - RNA, 19 nt, Homo sapiens
  misc_RNA (1)...(19): siRNA sense strand
guuacggcaugcugauaua

SEQ ID NO: 1320021 - RNA, 19 nt, Homo sapiens
  misc_RNA (1)...(19): siRNA sense strand
gaauuguauuugugucaga

SEQ ID NO: 1320022 - RNA, 19 nt, Homo sapiens
  misc_RNA (1)...(19): siRNA sense strand
uagauuaccugagcuggaa

SEQ ID NO: 1320023 - RNA, 19 nt, Homo sapiens
  misc_RNA (1)...(19): siRNA sense strand
acaaggaaacuccaguaua

SEQ ID NO: 1320024 - RNA, 19 nt, Homo sapiens
  misc_RNA (1)...(19): siRNA sense strand
gacaacaacugccgaacag

SEQ ID NO: 1320025 - RNA, 19 nt, Homo sapiens
  misc_RNA (1)...(19): siRNA sense strand
gaauggaacaagagaaauc

SEQ ID NO: 1320026 - RNA, 19 nt, Homo sapiens
  misc_RNA (1)...(19): siRNA sense strand
caaguagugccuguaauaa

SEQ ID NO: 1320027 - RNA, 19 nt, Homo sapiens
  misc_RNA (1)...(19): siRNA sense strand
caaaaucacuaguaaaugg

SEQ ID NO: 1320028 - RNA, 19 nt, Homo sapiens
  misc_RNA (1)...(19): siRNA sense strand
cauaguaauucuagcaaca

SEQ ID NO: 1320029 - RNA, 19 nt, Homo sapiens
  misc_RNA (1)...(19): siRNA sense strand
gaucagauuccauggacaa

SEQ ID NO: 1320030 - RNA, 19 nt, Homo sapiens
  misc_RNA (1)...(19): siRNA sense strand
gcagggagcaagaaaauaa

SEQ ID NO: 1320031 - RNA, 19 nt, Homo sapiens
  misc_RNA (1)...(19): siRNA sense strand
gcagaugagcucacagaau

SEQ ID NO: 1320032 - RNA, 19 nt, Homo sapiens
  misc_RNA (1)...(19): siRNA sense strand
ugaaugaaggacccaauaa

SEQ ID NO: 1320033 - RNA, 19 nt, Homo sapiens
  misc_RNA (1)...(19): siRNA sense strand
acaauuccuuuccuccuaa

SEQ ID NO: 1320034 - RNA, 19 nt, Homo sapiens
  misc_RNA (1)...(19): siRNA sense strand
ucacuaagcucuugacuaa

SEQ ID NO: 1320035 - RNA, 19 nt, Homo sapiens
  misc_RNA (1)...(19): siRNA sense strand
gcaaagaaauggauaucaa

SEQ ID NO: 1320036 - RNA, 19 nt, Homo sapiens
  misc_RNA (1)...(19): siRNA sense strand
gcacugagguccaagaguu

SEQ ID NO: 1320037 - RNA, 19 nt, Homo sapiens
  misc_RNA (1)...(19): siRNA sense strand
cagaguaccucacagcuua

SEQ ID NO: 1320038 - RNA, 19 nt, Homo sapiens
  misc_RNA (1)...(19): siRNA sense strand
ggaagcugcugauguauug

SEQ ID NO: 1320039 - RNA, 19 nt, Homo sapiens
  misc_RNA (1)...(19): siRNA sense strand
gccaagagcuggagcguuu

SEQ ID NO: 1320040 - RNA, 19 nt, Homo sapiens
  misc_RNA (1)...(19): siRNA sense strand
ggaagaggcuaaaugucua

SEQ ID NO: 1320041 - RNA, 19 nt, Homo sapiens
  misc_RNA (1)...(19): siRNA sense strand
gaagauauggugacuguuu

SEQ ID NO: 1320042 - RNA, 19 nt, Homo sapiens
  misc_RNA (1)...(19): siRNA sense strand
aagaugagcuccacacuuu

SEQ ID NO: 1320043 - RNA, 19 nt, Homo sapiens
  misc_RNA (1)...(19): siRNA sense strand
ugacaucgaugaucugaaa

SEQ ID NO: 1320044 - RNA, 19 nt, Homo sapiens
  misc_RNA (1)...(19): siRNA sense strand
ucaaggaagugaucuauga

SEQ ID NO: 1320045 - RNA, 19 nt, Homo sapiens
  misc_RNA (1)...(19): siRNA sense strand
gaagauacacgguccaauu

SEQ ID NO: 1320046 - RNA, 19 nt, Homo sapiens
  misc_RNA (1)...(19): siRNA sense strand
ggagugcucugaaggcuuu

SEQ ID NO: 1320047 - RNA, 19 nt, Homo sapiens
  misc_RNA (1)...(19): siRNA sense strand
gagcccagaugacuaagua

SEQ ID NO: 1320048 - RNA, 19 nt, Homo sapiens
  misc_RNA (1)...(19): siRNA sense strand
gcaguuggcggcuuucuua

SEQ ID NO: 1320049 - RNA, 19 nt, Homo sapiens
  misc_RNA (1)...(19): siRNA sense strand
ccacaaauaugccaugaug

SEQ ID NO: 1320050 - RNA, 19 nt, Homo sapiens
  misc_RNA (1)...(19): siRNA sense strand
gcccaacccuccucuuaua

SEQ ID NO: 1320051 - RNA, 19 nt, Homo sapiens
  misc_RNA (1)...(19): siRNA sense strand
gaacaagucugagcaggau

SEQ ID NO: 1320052 - RNA, 19 nt, Homo sapiens
  misc_RNA (1)...(19): siRNA sense strand
ggaauuggaugaggauuau

SEQ ID NO: 1320053 - RNA, 19 nt, Homo sapiens
  misc_RNA (1)...(19): siRNA sense strand
caaggagccucucaagauu

SEQ ID NO: 1320054 - RNA, 19 nt, Homo sapiens
  misc_RNA (1)...(19): siRNA sense strand
ggagcucucucuuaacuga

SEQ ID NO: 1320055 - RNA, 19 nt, Homo sapiens
  misc_RNA (1)...(19): siRNA sense strand
uaacagaggagaauaagaa

SEQ ID NO: 1320056 - RNA, 19 nt, Homo sapiens
  misc_RNA (1)...(19): siRNA sense strand
ugacagcaaucaaacguaa

SEQ ID NO: 1320057 - RNA, 19 nt, Homo sapiens
  misc_RNA (1)...(19): siRNA sense strand
agaaagaccaccugaguua

SEQ ID NO: 1320058 - RNA, 19 nt, Homo sapiens
  misc_RNA (1)...(19): siRNA sense strand
agaagggacugguuaauga

SEQ ID NO: 1320059 - RNA, 19 nt, Homo sapiens
  misc_RNA (1)...(19): siRNA sense strand
gugggaagcugcugaugua

SEQ ID NO: 1320060 - RNA, 19 nt, Homo sapiens
  misc_RNA (1)...(19): siRNA sense strand
gcaaauauuuccgccaaga

SEQ ID NO: 1320061 - RNA, 19 nt, Homo sapiens
  misc_RNA (1)...(19): siRNA sense strand
gaagaggaccagaugauga

SEQ ID NO: 1320062 - RNA, 19 nt, Homo sapiens
  misc_RNA (1)...(19): siRNA sense strand
gaagaaagaccaccugagu

SEQ ID NO: 1320063 - RNA, 19 nt, Homo sapiens
  misc_RNA (1)...(19): siRNA sense strand
cuaaaugucuagagaaguu

SEQ ID NO: 1320064 - RNA, 19 nt, Homo sapiens
  misc_RNA (1)...(19): siRNA sense strand
gcaaagaagauaaggagaa

SEQ ID NO: 1320065 - RNA, 19 nt, Homo sapiens
  misc_RNA (1)...(19): siRNA sense strand
gaaacccucucuccugaug

SEQ ID NO: 1320066 - RNA, 19 nt, Homo sapiens
  misc_RNA (1)...(19): siRNA sense strand
uaaaggaacuagaggaauc

SEQ ID NO: 1320067 - RNA, 19 nt, Homo sapiens
  misc_RNA (1)...(19): siRNA sense strand
gagcagaaguggagaggau

SEQ ID NO: 1320068 - RNA, 19 nt, Homo sapiens
  misc_RNA (1)...(19): siRNA sense strand
ucagucagauauacagaua

SEQ ID NO: 1320069 - RNA, 19 nt, Homo sapiens
  misc_RNA (1)...(19): siRNA sense strand
gcucugagauggaauugga

SEQ ID NO: 1320070 - RNA, 19 nt, Homo sapiens
  misc_RNA (1)...(19): siRNA sense strand
gaucaugacagcaaucaaa

SEQ ID NO: 1320071 - RNA, 19 nt, Homo sapiens
  misc_RNA (1)...(19): siRNA sense strand
uaaaggcccuaaugcugua

SEQ ID NO: 1320072 - RNA, 19 nt, Homo sapiens
  misc_RNA (1)...(19): siRNA sense strand
ggagagcccagaugacuaa

SEQ ID NO: 1320073 - RNA, 19 nt, Homo sapiens
  misc_RNA (1)...(19): siRNA sense strand
ggaagaaagcaaagaaaug

SEQ ID NO: 1320074 - RNA, 19 nt, Homo sapiens
  misc_RNA (1)...(19): siRNA sense strand
auacagauauggagaguga

SEQ ID NO: 1320075 - RNA, 19 nt, Homo sapiens
  misc_RNA (1)...(19): siRNA sense strand
cugcaggacuaauauauuu

SEQ ID NO: 1320076 - RNA, 19 nt, Homo sapiens
  misc_RNA (1)...(19): siRNA sense strand
ggaggaagaugaggaagau

SEQ ID NO: 1320077 - RNA, 19 nt, Homo sapiens
  misc_RNA (1)...(19): siRNA sense strand
cacaagagaugcagguuga

SEQ ID NO: 1320078 - RNA, 19 nt, Homo sapiens
  misc_RNA (1)...(19): siRNA sense strand
gaagugaucuaugauaugc

SEQ ID NO: 1320079 - RNA, 19 nt, Homo sapiens
  misc_RNA (1)...(19): siRNA sense strand
cagaagauauggugacugu

SEQ ID NO: 1320080 - RNA, 19 nt, Homo sapiens
  misc_RNA (1)...(19): siRNA sense strand
cuaaguaccugcaauccaa

SEQ ID NO: 1320081 - RNA, 19 nt, Homo sapiens
  misc_RNA (1)...(19): siRNA sense strand
gacgagaacuagcacagaa

SEQ ID NO: 1320082 - RNA, 19 nt, Homo sapiens
  misc_RNA (1)...(19): siRNA sense strand
gauaaaggcaaagaagaua

SEQ ID NO: 1320083 - RNA, 19 nt, Homo sapiens
  misc_RNA (1)...(19): siRNA sense strand
aaacagcaauggacaggaa

SEQ ID NO: 1320084 - RNA, 19 nt, Homo sapiens
  misc_RNA (1)...(19): siRNA sense strand
ggagguaaaguuccuguuu

SEQ ID NO: 1320085 - RNA, 19 nt, Homo sapiens
  misc_RNA (1)...(19): siRNA sense strand
gagcaugcaugacuguguu

SEQ ID NO: 1320086 - RNA, 19 nt, Homo sapiens
  misc_RNA (1)...(19): siRNA sense strand
gagaugggaagaaagauaa

SEQ ID NO: 1320087 - RNA, 19 nt, Homo sapiens
  misc_RNA (1)...(19): siRNA sense strand
cgcaugaucuugaauuuga

SEQ ID NO: 1320088 - RNA, 19 nt, Homo sapiens
  misc_RNA (1)...(19): siRNA sense strand
gaaauggauaucaaacgua

SEQ ID NO: 1320089 - RNA, 19 nt, Homo sapiens
  misc_RNA (1)...(19): siRNA sense strand
gaaagcaaagaaauggaua

SEQ ID NO: 1320090 - RNA, 19 nt, Homo sapiens
  misc_RNA (1)...(19): siRNA sense strand
caaguggcauccuuaaugu

SEQ ID NO: 1320091 - RNA, 19 nt, Homo sapiens
  misc_RNA (1)...(19): siRNA sense strand
guaaaguuccuguuucuga

SEQ ID NO: 1320092 - RNA, 19 nt, Homo sapiens
  misc_RNA (1)...(19): siRNA sense strand
ccacuacuguuucaauuuc

SEQ ID NO: 1320093 - RNA, 19 nt, Homo sapiens
  misc_RNA (1)...(19): siRNA sense strand
ggagagcauugcguucuuu

SEQ ID NO: 1320094 - RNA, 19 nt, Homo sapiens
  misc_RNA (1)...(19): siRNA sense strand
ggaaaccccugaagguaua

SEQ ID NO: 1320095 - RNA, 19 nt, Homo sapiens
  misc_RNA (1)...(19): siRNA sense strand
gaugacagguccacagauc

SEQ ID NO: 1320096 - RNA, 19 nt, Homo sapiens
  misc_RNA (1)...(19): siRNA sense strand
ggaguuagagcugcuuaua

SEQ ID NO: 1320097 - RNA, 19 nt, Homo sapiens
  misc_RNA (1)...(19): siRNA sense strand
ggcaguggcucuucaacaa

SEQ ID NO: 1320098 - RNA, 19 nt, Homo sapiens
  misc_RNA (1)...(19): siRNA sense strand
uggaggaccugauagauga

SEQ ID NO: 1320099 - RNA, 19 nt, Homo sapiens
  misc_RNA (1)...(19): siRNA sense strand
ccaaggagccucucaagau

SEQ ID NO: 1320100 - RNA, 19 nt, Homo sapiens
  misc_RNA (1)...(19): siRNA sense strand
gaagaaagcaaagaaaugg

SEQ ID NO: 1320101 - RNA, 19 nt, Homo sapiens
  misc_RNA (1)...(19): siRNA sense strand
cuacaauggugcagguuaa

SEQ ID NO: 1320102 - RNA, 19 nt, Homo sapiens
  misc_RNA (1)...(19): siRNA sense strand
gaacggaaagcucgggaaa

SEQ ID NO: 1320103 - RNA, 19 nt, Homo sapiens
  misc_RNA (1)...(19): siRNA sense strand
gagguaaaguuccuguuuc

SEQ ID NO: 1320104 - RNA, 19 nt, Homo sapiens
  misc_RNA (1)...(19): siRNA sense strand
cgccggagcucucucuuaa

SEQ ID NO: 1320105 - RNA, 19 nt, Homo sapiens
  misc_RNA (1)...(19): siRNA sense strand
ccaaagaaacaaacuguga

SEQ ID NO: 1320106 - RNA, 19 nt, Homo sapiens
  misc_RNA (1)...(19): siRNA sense strand
cuagaaggcucuccuaugg

SEQ ID NO: 1320107 - RNA, 19 nt, Homo sapiens
  misc_RNA (1)...(19): siRNA sense strand
agucugaacugaucaaaga

SEQ ID NO: 1320108 - RNA, 19 nt, Homo sapiens
  misc_RNA (1)...(19): siRNA sense strand
gauggugccuccacugaga

SEQ ID NO: 1320109 - RNA, 19 nt, Homo sapiens
  misc_RNA (1)...(19): siRNA sense strand
ggaggaagaggcuaaaugu

SEQ ID NO: 1320110 - RNA, 19 nt, Homo sapiens
  misc_RNA (1)...(19): siRNA sense strand
guacagacuuuaagauggu

SEQ ID NO: 1320111 - RNA, 19 nt, Homo sapiens
  misc_RNA (1)...(19): siRNA sense strand
caauuucucccacuacuaa

SEQ ID NO: 1320112 - RNA, 19 nt, Homo sapiens
  misc_RNA (1)...(19): siRNA sense strand
gcccuaggcugcaggacua

SEQ ID NO: 1320113 - RNA, 19 nt, Homo sapiens
  misc_RNA (1)...(19): siRNA sense strand
gaagugagcccugaguuuc

SEQ ID NO: 1320114 - RNA, 19 nt, Homo sapiens
  misc_RNA (1)...(19): siRNA sense strand
agacagccaucuccucaaa

SEQ ID NO: 1320115 - RNA, 19 nt, Homo sapiens
  misc_RNA (1)...(19): siRNA sense strand
gaggcuaaaugucuagaga

SEQ ID NO: 1320116 - RNA, 19 nt, Homo sapiens
  misc_RNA (1)...(19): siRNA sense strand
cuacuuuacucgauccuuu

SEQ ID NO: 1320117 - RNA, 19 nt, Homo sapiens
  misc_RNA (1)...(19): siRNA sense strand
ggccaaagcuguauaugac

SEQ ID NO: 1320118 - RNA, 19 nt, Homo sapiens
  misc_RNA (1)...(19): siRNA sense strand
ucaagauacucaauccauu

SEQ ID NO: 1320119 - RNA, 19 nt, Homo sapiens
  misc_RNA (1)...(19): siRNA sense strand
cagcagcaguacagacuuu

SEQ ID NO: 1320120 - RNA, 19 nt, Homo sapiens
  misc_RNA (1)...(19): siRNA sense strand
uggauacacucauucaauu

SEQ ID NO: 1320121 - RNA, 19 nt, Homo sapiens
  misc_RNA (1)...(19): siRNA sense strand
gaacaguacaauuauagug

SEQ ID NO: 1320122 - RNA, 19 nt, Homo sapiens
  misc_RNA (1)...(19): siRNA sense strand
ggacuucuuguuaaacuuu

SEQ ID NO: 1320123 - RNA, 19 nt, Homo sapiens
  misc_RNA (1)...(19): siRNA sense strand
ucacagaaguggccaacug

SEQ ID NO: 1320124 - RNA, 19 nt, Homo sapiens
  misc_RNA (1)...(19): siRNA sense strand
gaggaagaaacaaagauaa

SEQ ID NO: 1320125 - RNA, 19 nt, Homo sapiens
  misc_RNA (1)...(19): siRNA sense strand
gcaagucagucagauauac

SEQ ID NO: 1320126 - RNA, 19 nt, Homo sapiens
  misc_RNA (1)...(19): siRNA sense strand
gaucagagugcacagugua

SEQ ID NO: 1320127 - RNA, 19 nt, Homo sapiens
  misc_RNA (1)...(19): siRNA sense strand
gauaacugauaaaggcaaa

SEQ ID NO: 1320128 - RNA, 19 nt, Homo sapiens
  misc_RNA (1)...(19): siRNA sense strand
gaaucaaguggcauccuua

SEQ ID NO: 1320129 - RNA, 19 nt, Homo sapiens
  misc_RNA (1)...(19): siRNA sense strand
ugaaauccaacacugaaua

SEQ ID NO: 1320130 - RNA, 19 nt, Homo sapiens
  misc_RNA (1)...(19): siRNA sense strand
caagacaucuacccagaag

SEQ ID NO: 1320131 - RNA, 19 nt, Homo sapiens
  misc_RNA (1)...(19): siRNA sense strand
guuaaaguguccauuguca

SEQ ID NO: 1320132 - RNA, 19 nt, Homo sapiens
  misc_RNA (1)...(19): siRNA sense strand
ggaggaggaucaugauguc

SEQ ID NO: 1320133 - RNA, 19 nt, Homo sapiens
  misc_RNA (1)...(19): siRNA sense strand
cagcaguaccggucacuua

SEQ ID NO: 1320134 - RNA, 19 nt, Homo sapiens
  misc_RNA (1)...(19): siRNA sense strand
ggaagaagauugugagaaa

SEQ ID NO: 1320135 - RNA, 19 nt, Homo sapiens
  misc_RNA (1)...(19): siRNA sense strand
ccaaagaaguccaaagaua

SEQ ID NO: 1320136 - RNA, 19 nt, Homo sapiens
  misc_RNA (1)...(19): siRNA sense strand
ccaaacagaucuuuaugaa

SEQ ID NO: 1320137 - RNA, 19 nt, Homo sapiens
  misc_RNA (1)...(19): siRNA sense strand
ggaaauacaccaagaguga

SEQ ID NO: 1320138 - RNA, 19 nt, Homo sapiens
  misc_RNA (1)...(19): siRNA sense strand
gaauuaagcacaagaagaa

SEQ ID NO: 1320139 - RNA, 19 nt, Homo sapiens
  misc_RNA (1)...(19): siRNA sense strand
caaagaaguccaaagauaa

SEQ ID NO: 1320140 - RNA, 19 nt, Homo sapiens
  misc_RNA (1)...(19): siRNA sense strand
caacauggaucucaguuuc

SEQ ID NO: 1320141 - RNA, 19 nt, Homo sapiens
  misc_RNA (1)...(19): siRNA sense strand
gaaagaagaugaggacuac

SEQ ID NO: 1320142 - RNA, 19 nt, Homo sapiens
  misc_RNA (1)...(19): siRNA sense strand
caggauaucuauagagaaa

SEQ ID NO: 1320143 - RNA, 19 nt, Homo sapiens
  misc_RNA (1)...(19): siRNA sense strand
gaagaauacauguggauuu

SEQ ID NO: 1320144 - RNA, 19 nt, Homo sapiens
  misc_RNA (1)...(19): siRNA sense strand
gaaggcauggacauaauua

SEQ ID NO: 1320145 - RNA, 19 nt, Homo sapiens
  misc_RNA (1)...(19): siRNA sense strand
gcauggacauaauuaagaa

SEQ ID NO: 1320146 - RNA, 19 nt, Homo sapiens
  misc_RNA (1)...(19): siRNA sense strand
gcuuauagaugacagaaga

SEQ ID NO: 1320147 - RNA, 19 nt, Homo sapiens
  misc_RNA (1)...(19): siRNA sense strand
ugaugacccuccugauuua

SEQ ID NO: 1320148 - RNA, 19 nt, Homo sapiens
  misc_RNA (1)...(19): siRNA sense strand
acaaugugcuuauagauga

SEQ ID NO: 1320149 - RNA, 19 nt, Homo sapiens
  misc_RNA (1)...(19): siRNA sense strand
gauauuaaaccuccagaaa

SEQ ID NO: 1320150 - RNA, 19 nt, Homo sapiens
  misc_RNA (1)...(19): siRNA sense strand
ggaaguagaagaaauaaag

SEQ ID NO: 1320151 - RNA, 19 nt, Homo sapiens
  misc_RNA (1)...(19): siRNA sense strand
ggauaaaccaccuaauuug

SEQ ID NO: 1320152 - RNA, 19 nt, Homo sapiens
  misc_RNA (1)...(19): siRNA sense strand
ggauaucuauagagaaaug

SEQ ID NO: 1320153 - RNA, 19 nt, Homo sapiens
  misc_RNA (1)...(19): siRNA sense strand
ugacccuccugauuuauua

SEQ ID NO: 1320154 - RNA, 19 nt, Homo sapiens
  misc_RNA (1)...(19): siRNA sense strand
ggaggagagucuaucuuug

SEQ ID NO: 1320155 - RNA, 19 nt, Homo sapiens
  misc_RNA (1)...(19): siRNA sense strand
aagaucagcugaggaagua

SEQ ID NO: 1320156 - RNA, 19 nt, Homo sapiens
  misc_RNA (1)...(19): siRNA sense strand
cuaauuugguucugaaaga

SEQ ID NO: 1320157 - RNA, 19 nt, Homo sapiens
  misc_RNA (1)...(19): siRNA sense strand
uugcaaagguuaaauggaa

SEQ ID NO: 1320158 - RNA, 19 nt, Homo sapiens
  misc_RNA (1)...(19): siRNA sense strand
ucaagucacucacacacaa

SEQ ID NO: 1320159 - RNA, 19 nt, Homo sapiens
  misc_RNA (1)...(19): siRNA sense strand
caaggacuuuguaccauau

SEQ ID NO: 1320160 - RNA, 19 nt, Homo sapiens
  misc_RNA (1)...(19): siRNA sense strand
ugaggaaguagaagaaaua

SEQ ID NO: 1320161 - RNA, 19 nt, Homo sapiens
  misc_RNA (1)...(19): siRNA sense strand
guaaagcccaaacaggaua

SEQ ID NO: 1320162 - RNA, 19 nt, Homo sapiens
  misc_RNA (1)...(19): siRNA sense strand
caggauaaaccaccuaauu

SEQ ID NO: 1320163 - RNA, 19 nt, Homo sapiens
  misc_RNA (1)...(19): siRNA sense strand
ggaucucaguuucuuauca

SEQ ID NO: 1320164 - RNA, 19 nt, Homo sapiens
  misc_RNA (1)...(19): siRNA sense strand
agagagggauggccauuau

SEQ ID NO: 1320165 - RNA, 19 nt, Homo sapiens
  misc_RNA (1)...(19): siRNA sense strand
gagcagaugaagaaauuga

SEQ ID NO: 1320166 - RNA, 19 nt, Homo sapiens
  misc_RNA (1)...(19): siRNA sense strand
gaagaaauaaaggcagaaa

SEQ ID NO: 1320167 - RNA, 19 nt, Homo sapiens
  misc_RNA (1)...(19): siRNA sense strand
gggauggccauuauaguaa

SEQ ID NO: 1320168 - RNA, 19 nt, Homo sapiens
  misc_RNA (1)...(19): siRNA sense strand
agagugauuucaaggagua

SEQ ID NO: 1320169 - RNA, 19 nt, Homo sapiens
  misc_RNA (1)...(19): siRNA sense strand
cagaaggcauggacauaau

SEQ ID NO: 1320170 - RNA, 19 nt, Homo sapiens
  misc_RNA (1)...(19): siRNA sense strand
gaagaagauugugagaaag

SEQ ID NO: 1320171 - RNA, 19 nt, Homo sapiens
  misc_RNA (1)...(19): siRNA sense strand
aggagcagaugaagaaauu

SEQ ID NO: 1320172 - RNA, 19 nt, Homo sapiens
  misc_RNA (1)...(19): siRNA sense strand
caguguccauggugaauaa

SEQ ID NO: 1320173 - RNA, 19 nt, Homo sapiens
  misc_RNA (1)...(19): siRNA sense strand
gaagaaaacccaucacugu

SEQ ID NO: 1320174 - RNA, 19 nt, Homo sapiens
  misc_RNA (1)...(19): siRNA sense strand
gaagaucagcugaggaagu

SEQ ID NO: 1320175 - RNA, 19 nt, Homo sapiens
  misc_RNA (1)...(19): siRNA sense strand
ccgcgugccugcuugaauu

SEQ ID NO: 1320176 - RNA, 19 nt, Homo sapiens
  misc_RNA (1)...(19): siRNA sense strand
gaaguccaaagauaaagaa

SEQ ID NO: 1320177 - RNA, 19 nt, Homo sapiens
  misc_RNA (1)...(19): siRNA sense strand
gagagagggauggccauua

SEQ ID NO: 1320178 - RNA, 19 nt, Homo sapiens
  misc_RNA (1)...(19): siRNA sense strand
uuaaugagaccuuuguuga

SEQ ID NO: 1320179 - RNA, 19 nt, Homo sapiens
  misc_RNA (1)...(19): siRNA sense strand
gaugacagaagaauacaug

SEQ ID NO: 1320180 - RNA, 19 nt, Homo sapiens
  misc_RNA (1)...(19): siRNA sense strand
acagagggauuuuaucaua

SEQ ID NO: 1320181 - RNA, 19 nt, Homo sapiens
  misc_RNA (1)...(19): siRNA sense strand
aauaggagcagaugaagaa

SEQ ID NO: 1320182 - RNA, 19 nt, Homo sapiens
  misc_RNA (1)...(19): siRNA sense strand
uagaugauccauuugauga

SEQ ID NO: 1320183 - RNA, 19 nt, Homo sapiens
  misc_RNA (1)...(19): siRNA sense strand
gaacaggauaaaccaccua

SEQ ID NO: 1320184 - RNA, 19 nt, Homo sapiens
  misc_RNA (1)...(19): siRNA sense strand
agaaagcuguugggagaaa

SEQ ID NO: 1320185 - RNA, 19 nt, Homo sapiens
  misc_RNA (1)...(19): siRNA sense strand
ccaaacaggauacaaaaua

SEQ ID NO: 1320186 - RNA, 19 nt, Homo sapiens
  misc_RNA (1)...(19): siRNA sense strand
gacaaugugcuuauagaug

SEQ ID NO: 1320187 - RNA, 19 nt, Homo sapiens
  misc_RNA (1)...(19): siRNA sense strand
gcagaaguccaaagaaguc

SEQ ID NO: 1320188 - RNA, 19 nt, Homo sapiens
  misc_RNA (1)...(19): siRNA sense strand
acucagaaccgaagucgua

SEQ ID NO: 1320189 - RNA, 19 nt, Homo sapiens
  misc_RNA (1)...(19): siRNA sense strand
gauaaaccaccuaauuugg

SEQ ID NO: 1320190 - RNA, 19 nt, Homo sapiens
  misc_RNA (1)...(19): siRNA sense strand
gaugaggaucuggaaauaa

SEQ ID NO: 1320191 - RNA, 19 nt, Homo sapiens
  misc_RNA (1)...(19): siRNA sense strand
ggacuacaugccaaucaaa

SEQ ID NO: 1320192 - RNA, 19 nt, Homo sapiens
  misc_RNA (1)...(19): siRNA sense strand
aggauaaaccaccuaauuu

SEQ ID NO: 1320193 - RNA, 19 nt, Homo sapiens
  misc_RNA (1)...(19): siRNA sense strand
aagguuaaauggaaaggaa

SEQ ID NO: 1320194 - RNA, 19 nt, Homo sapiens
  misc_RNA (1)...(19): siRNA sense strand
gacagaaggcauggacaua

SEQ ID NO: 1320195 - RNA, 19 nt, Homo sapiens
  misc_RNA (1)...(19): siRNA sense strand
aagcagaaguccaaagaag

SEQ ID NO: 1320196 - RNA, 19 nt, Homo sapiens
  misc_RNA (1)...(19): siRNA sense strand
gaagcagaaguccaaagaa

SEQ ID NO: 1320197 - RNA, 19 nt, Homo sapiens
  misc_RNA (1)...(19): siRNA sense strand
cgaagcagaaguccaaaga

SEQ ID NO: 1320198 - RNA, 19 nt, Homo sapiens
  misc_RNA (1)...(19): siRNA sense strand
gaccgaagcagaaguccaa

SEQ ID NO: 1320199 - RNA, 19 nt, Homo sapiens
  misc_RNA (1)...(19): siRNA sense strand
ccaccuaauuugguucuga

SEQ ID NO: 1320200 - RNA, 19 nt, Homo sapiens
  misc_RNA (1)...(19): siRNA sense strand
gaauacauguggauuuuag

SEQ ID NO: 1320201 - RNA, 19 nt, Homo sapiens
  misc_RNA (1)...(19): siRNA sense strand
gaaaauguacuguuugugu

SEQ ID NO: 1320202 - RNA, 19 nt, Homo sapiens
  misc_RNA (1)...(19): siRNA sense strand
agaccuaccugaugcagau

SEQ ID NO: 1320203 - RNA, 19 nt, Homo sapiens
  misc_RNA (1)...(19): siRNA sense strand
gaauaggagcagaugaaga

SEQ ID NO: 1320204 - RNA, 19 nt, Homo sapiens
  misc_RNA (1)...(19): siRNA sense strand
ccaauaagaaguugugaag

SEQ ID NO: 1320205 - RNA, 19 nt, Homo sapiens
  misc_RNA (1)...(19): siRNA sense strand
gaaagagaaaggaguaaaa

SEQ ID NO: 1320206 - RNA, 19 nt, Homo sapiens
  misc_RNA (1)...(19): siRNA sense strand
agaaagaagaugaggacua

SEQ ID NO: 1320207 - RNA, 19 nt, Homo sapiens
  misc_RNA (1)...(19): siRNA sense strand
caagggaacaauuagauag

SEQ ID NO: 1320208 - RNA, 19 nt, Homo sapiens
  misc_RNA (1)...(19): siRNA sense strand
gaggagagucuaucuuugg

SEQ ID NO: 1320209 - RNA, 19 nt, Homo sapiens
  misc_RNA (1)...(19): siRNA sense strand
ccaacuguauggugaucaa

SEQ ID NO: 1320210 - RNA, 19 nt, Homo sapiens
  misc_RNA (1)...(19): siRNA sense strand
ggacaaugugcuuauagau

SEQ ID NO: 1320211 - RNA, 19 nt, Homo sapiens
  misc_RNA (1)...(19): siRNA sense strand
gaggaucuggaaauaauau

SEQ ID NO: 1320212 - RNA, 19 nt, Homo sapiens
  misc_RNA (1)...(19): siRNA sense strand
ggagauggugggagaccua

SEQ ID NO: 1320213 - RNA, 19 nt, Homo sapiens
  misc_RNA (1)...(19): siRNA sense strand
gaagaagaagaaagcuguu

SEQ ID NO: 1320214 - RNA, 19 nt, Homo sapiens
  misc_RNA (1)...(19): siRNA sense strand
guccaaagaaguccaaaga

SEQ ID NO: 1320215 - RNA, 19 nt, Homo sapiens
  misc_RNA (1)...(19): siRNA sense strand
uaugaaagagaaaggagua

SEQ ID NO: 1320216 - RNA, 19 nt, Homo sapiens
  misc_RNA (1)...(19): siRNA sense strand
gagagggauggccauuaua

SEQ ID NO: 1320217 - RNA, 19 nt, Homo sapiens
  misc_RNA (1)...(19): siRNA sense strand
acaagggaacaauuagaua

SEQ ID NO: 1320218 - RNA, 19 nt, Homo sapiens
  misc_RNA (1)...(19): siRNA sense strand
caagaauuaagcacaagaa

SEQ ID NO: 1320219 - RNA, 19 nt, Homo sapiens
  misc_RNA (1)...(19): siRNA sense strand
gcagaugaagaaauugaug

SEQ ID NO: 1320220 - RNA, 19 nt, Homo sapiens
  misc_RNA (1)...(19): siRNA sense strand
ggcauggacauaauuaaga

SEQ ID NO: 1320221 - RNA, 19 nt, Homo sapiens
  misc_RNA (1)...(19): siRNA sense strand
uagaugagcaggccgaaga

SEQ ID NO: 1320222 - RNA, 19 nt, Homo sapiens
  misc_RNA (1)...(19): siRNA sense strand
uggaggagagucuaucuuu

SEQ ID NO: 1320223 - RNA, 19 nt, Homo sapiens
  misc_RNA (1)...(19): siRNA sense strand
augaggaucuggaaauaau

SEQ ID NO: 1320224 - RNA, 19 nt, Homo sapiens
  misc_RNA (1)...(19): siRNA sense strand
gaggaaguagaagaaauaa

SEQ ID NO: 1320225 - RNA, 19 nt, Homo sapiens
  misc_RNA (1)...(19): siRNA sense strand
gcacaguguccauggugaa

SEQ ID NO: 1320226 - RNA, 19 nt, Homo sapiens
  misc_RNA (1)...(19): siRNA sense strand
acagaaggcauggacauaa

SEQ ID NO: 1320227 - RNA, 19 nt, Homo sapiens
  misc_RNA (1)...(19): siRNA sense strand
cuaaucaggauaucuauag

SEQ ID NO: 1320228 - RNA, 19 nt, Homo sapiens
  misc_RNA (1)...(19): siRNA sense strand
uugaugacccuccugauuu

SEQ ID NO: 1320229 - RNA, 19 nt, Homo sapiens
  misc_RNA (1)...(19): siRNA sense strand
aaugagaccuuuguugaca

SEQ ID NO: 1320230 - RNA, 19 nt, Homo sapiens
  misc_RNA (1)...(19): siRNA sense strand
uggacaaugugcuuauaga

SEQ ID NO: 1320231 - RNA, 19 nt, Homo sapiens
  misc_RNA (1)...(19): siRNA sense strand
caccuaauuugguucugaa

SEQ ID NO: 1320232 - RNA, 19 nt, Homo sapiens
  misc_RNA (1)...(19): siRNA sense strand
caccaagagugauuucaag

SEQ ID NO: 1320233 - RNA, 19 nt, Homo sapiens
  misc_RNA (1)...(19): siRNA sense strand
agggauggccauuauagua

SEQ ID NO: 1320234 - RNA, 19 nt, Homo sapiens
  misc_RNA (1)...(19): siRNA sense strand
gagcauggcuuacauacua

SEQ ID NO: 1320235 - RNA, 19 nt, Homo sapiens
  misc_RNA (1)...(19): siRNA sense strand
guaaauggcuuccaaacug

SEQ ID NO: 1320236 - RNA, 19 nt, Homo sapiens
  misc_RNA (1)...(19): siRNA sense strand
gauaagaccgugaugauaa

SEQ ID NO: 1320237 - RNA, 19 nt, Homo sapiens
  misc_RNA (1)...(19): siRNA sense strand
ccacaaugcuucacaauuc

SEQ ID NO: 1320238 - RNA, 19 nt, Homo sapiens
  misc_RNA (1)...(19): siRNA sense strand
gaccaaaguuuaccuaaug

SEQ ID NO: 1320239 - RNA, 19 nt, Homo sapiens
  misc_RNA (1)...(19): siRNA sense strand
caaaucagaccaaaguuua

SEQ ID NO: 1320240 - RNA, 19 nt, Homo sapiens
  misc_RNA (1)...(19): siRNA sense strand
gaacuaucauuaccauugu

SEQ ID NO: 1320241 - RNA, 19 nt, Homo sapiens
  misc_RNA (1)...(19): siRNA sense strand
gagcaucaguuuucauuua

SEQ ID NO: 1320242 - RNA, 19 nt, Homo sapiens
  misc_RNA (1)...(19): siRNA sense strand
ugaaaccaaucccagaaua

SEQ ID NO: 1320243 - RNA, 19 nt, Homo sapiens
  misc_RNA (1)...(19): siRNA sense strand
agaagguuauccugaauua

SEQ ID NO: 1320244 - RNA, 19 nt, Homo sapiens
  misc_RNA (1)...(19): siRNA sense strand
gggcaaagcuuucccuucu

SEQ ID NO: 1320245 - RNA, 19 nt, Homo sapiens
  misc_RNA (1)...(19): siRNA sense strand
ggaacuaucauuaccauug

SEQ ID NO: 1320246 - RNA, 19 nt, Homo sapiens
  misc_RNA (1)...(19): siRNA sense strand
cuauggagguggugaaauu

SEQ ID NO: 1320247 - RNA, 19 nt, Homo sapiens
  misc_RNA (1)...(19): siRNA sense strand
ggaguucccucaguuugaa

SEQ ID NO: 1320248 - RNA, 19 nt, Homo sapiens
  misc_RNA (1)...(19): siRNA sense strand
gcagaagguuauccugaau

SEQ ID NO: 1320249 - RNA, 19 nt, Homo sapiens
  misc_RNA (1)...(19): siRNA sense strand
ggauaagaccgugaugaua

SEQ ID NO: 1320250 - RNA, 19 nt, Homo sapiens
  misc_RNA (1)...(19): siRNA sense strand
gaaaccaaucccagaauau

SEQ ID NO: 1320251 - RNA, 19 nt, Homo sapiens
  misc_RNA (1)...(19): siRNA sense strand
gauagaauccgaggcauug

SEQ ID NO: 1320252 - RNA, 19 nt, Homo sapiens
  misc_RNA (1)...(19): siRNA sense strand
gaaccaccugcuccaaaua

SEQ ID NO: 1320253 - RNA, 19 nt, Homo sapiens
  misc_RNA (1)...(19): siRNA sense strand
aaacaaggaagcaugaauu

SEQ ID NO: 1320254 - RNA, 19 nt, Homo sapiens
  misc_RNA (1)...(19): siRNA sense strand
ugacauauuugaggauaga

SEQ ID NO: 1320255 - RNA, 19 nt, Homo sapiens
  misc_RNA (1)...(19): siRNA sense strand
ucagaacacucaugucuac

SEQ ID NO: 1320256 - RNA, 19 nt, Homo sapiens
  misc_RNA (1)...(19): siRNA sense strand
gaaccgagcaggccuggau

SEQ ID NO: 1320257 - RNA, 19 nt, Homo sapiens
  misc_RNA (1)...(19): siRNA sense strand
ggaggacagugaagacagu

SEQ ID NO: 1320258 - RNA, 19 nt, Homo sapiens
  misc_RNA (1)...(19): siRNA sense strand
acagagagacugcuccuuu

SEQ ID NO: 1320259 - RNA, 19 nt, Homo sapiens
  misc_RNA (1)...(19): siRNA sense strand
caucaccagccaccuaaua

SEQ ID NO: 1320260 - RNA, 19 nt, Homo sapiens
  misc_RNA (1)...(19): siRNA sense strand
gcugagagaggaagaguau

SEQ ID NO: 1320261 - RNA, 19 nt, Homo sapiens
  misc_RNA (1)...(19): siRNA sense strand
cagagagacugcuccuuuc

SEQ ID NO: 1320262 - RNA, 19 nt, Homo sapiens
  misc_RNA (1)...(19): siRNA sense strand
gaaugaugcagauugaguu

SEQ ID NO: 1320263 - RNA, 19 nt, Homo sapiens
  misc_RNA (1)...(19): siRNA sense strand
ccaaacugcaauugacaua

SEQ ID NO: 1320264 - RNA, 19 nt, Homo sapiens
  misc_RNA (1)...(19): siRNA sense strand
cguaaucaauggcugguau

SEQ ID NO: 1320265 - RNA, 19 nt, Homo sapiens
  misc_RNA (1)...(19): siRNA sense strand
ucaggugguucccuuguga

SEQ ID NO: 1320266 - RNA, 19 nt, Homo sapiens
  misc_RNA (1)...(19): siRNA sense strand
acagcuggcccaagaauaa

SEQ ID NO: 1320267 - RNA, 19 nt, Homo sapiens
  misc_RNA (1)...(19): siRNA sense strand
ccagaagaauugcggaaag

SEQ ID NO: 1320268 - RNA, 19 nt, Homo sapiens
  misc_RNA (1)...(19): siRNA sense strand
ucagagguauccagcaugu

SEQ ID NO: 1320269 - RNA, 19 nt, Homo sapiens
  misc_RNA (1)...(19): siRNA sense strand
agacaaaucagaccaaagu

SEQ ID NO: 1320270 - RNA, 19 nt, Homo sapiens
  misc_RNA (1)...(19): siRNA sense strand
acaaaucagaccaaaguuu

SEQ ID NO: 1320271 - RNA, 19 nt, Homo sapiens
  misc_RNA (1)...(19): siRNA sense strand
gaugagcauggcuuacaua

SEQ ID NO: 1320272 - RNA, 19 nt, Homo sapiens
  misc_RNA (1)...(19): siRNA sense strand
ggccaugacucagacaaau

SEQ ID NO: 1320273 - RNA, 19 nt, Homo sapiens
  misc_RNA (1)...(19): siRNA sense strand
ccugugcucuucccaaaug

SEQ ID NO: 1320274 - RNA, 19 nt, Homo sapiens
  misc_RNA (1)...(19): siRNA sense strand
ccacaucaccagccaccua

SEQ ID NO: 1320275 - RNA, 19 nt, Homo sapiens
  misc_RNA (1)...(19): siRNA sense strand
gaugcugccucccaaucuu

SEQ ID NO: 1320276 - RNA, 19 nt, Homo sapiens
  misc_RNA (1)...(19): siRNA sense strand
gaugcagauugaguucaua

SEQ ID NO: 1320277 - RNA, 19 nt, Homo sapiens
  misc_RNA (1)...(19): siRNA sense strand
aaaccaaucccagaauauu

SEQ ID NO: 1320278 - RNA, 19 nt, Homo sapiens
  misc_RNA (1)...(19): siRNA sense strand
ucagacaaaucagaccaaa

SEQ ID NO: 1320279 - RNA, 19 nt, Homo sapiens
  misc_RNA (1)...(19): siRNA sense strand
ggaugagcauggcuuacau

SEQ ID NO: 1320280 - RNA, 19 nt, Homo sapiens
  misc_RNA (1)...(19): siRNA sense strand
gaugauaaucguagcaauc

SEQ ID NO: 1320281 - RNA, 19 nt, Homo sapiens
  misc_RNA (1)...(19): siRNA sense strand
gggauaagaccgugaugau

SEQ ID NO: 1320282 - RNA, 19 nt, Homo sapiens
  misc_RNA (1)...(19): siRNA sense strand
caauuccuccggagacuuu

SEQ ID NO: 1320283 - RNA, 19 nt, Homo sapiens
  misc_RNA (1)...(19): siRNA sense strand
gcauuccuguggagguuga

SEQ ID NO: 1320284 - RNA, 19 nt, Homo sapiens
  misc_RNA (1)...(19): siRNA sense strand
agaccaaaguuuaccuaau

SEQ ID NO: 1320285 - RNA, 19 nt, Homo sapiens
  misc_RNA (1)...(19): siRNA sense strand
ccaccugcuccaaauauaa

SEQ ID NO: 1320286 - RNA, 19 nt, Homo sapiens
  misc_RNA (1)...(19): siRNA sense strand
ggacagugaagacaguuuc

SEQ ID NO: 1320287 - RNA, 19 nt, Homo sapiens
  misc_RNA (1)...(19): siRNA sense strand
cagaagaauugcggaaagu

SEQ ID NO: 1320288 - RNA, 19 nt, Homo sapiens
  misc_RNA (1)...(19): siRNA sense strand
agaaccaccugcuccaaau

SEQ ID NO: 1320289 - RNA, 19 nt, Homo sapiens
  misc_RNA (1)...(19): siRNA sense strand
ggauggagcgcuaccuuag

SEQ ID NO: 1320290 - RNA, 19 nt, Homo sapiens
  misc_RNA (1)...(19): siRNA sense strand
ggugaaauucgugaacuuu

SEQ ID NO: 1320291 - RNA, 19 nt, Homo sapiens
  misc_RNA (1)...(19): siRNA sense strand
cccugaaacuugcaaauca

SEQ ID NO: 1320292 - RNA, 19 nt, Homo sapiens
  misc_RNA (1)...(19): siRNA sense strand
gagcgcuaccuuagggaua

SEQ ID NO: 1320293 - RNA, 19 nt, Homo sapiens
  misc_RNA (1)...(19): siRNA sense strand
gaaccauacccaagucagu

SEQ ID NO: 1320294 - RNA, 19 nt, Homo sapiens
  misc_RNA (1)...(19): siRNA sense strand
gaagaauugcggaaagucu

SEQ ID NO: 1320295 - RNA, 19 nt, Homo sapiens
  misc_RNA (1)...(19): siRNA sense strand
ccgaggcauugauaucauu

SEQ ID NO: 1320296 - RNA, 19 nt, Homo sapiens
  misc_RNA (1)...(19): siRNA sense strand
ugcagaagguuauccugaa

SEQ ID NO: 1320297 - RNA, 19 nt, Homo sapiens
  misc_RNA (1)...(19): siRNA sense strand
gucuacagcuggcccaaga

SEQ ID NO: 1320298 - RNA, 19 nt, Homo sapiens
  misc_RNA (1)...(19): siRNA sense strand
ggaagaggaaucagaacca

SEQ ID NO: 1320299 - RNA, 19 nt, Homo sapiens
  misc_RNA (1)...(19): siRNA sense strand
gcugaaaccaaucccagaa

SEQ ID NO: 1320300 - RNA, 19 nt, Homo sapiens
  misc_RNA (1)...(19): siRNA sense strand
cuccauggaacuaucauua

SEQ ID NO: 1320301 - RNA, 19 nt, Homo sapiens
  misc_RNA (1)...(19): siRNA sense strand
ugagagaggaagaguaugu

SEQ ID NO: 1320302 - RNA, 19 nt, Homo sapiens
  misc_RNA (1)...(19): siRNA sense strand
ccaccuggcuucagaacac

SEQ ID NO: 1320303 - RNA, 19 nt, Homo sapiens
  misc_RNA (1)...(19): siRNA sense strand
auaagaccgugaugauaau

SEQ ID NO: 1320304 - RNA, 19 nt, Homo sapiens
  misc_RNA (1)...(19): siRNA sense strand
agaauccgaggcauugaua

SEQ ID NO: 1320305 - RNA, 19 nt, Homo sapiens
  misc_RNA (1)...(19): siRNA sense strand
gugcccaccuggcuucaga

SEQ ID NO: 1320306 - RNA, 19 nt, Homo sapiens
  misc_RNA (1)...(19): siRNA sense strand
aucaauggcugguaucuca

SEQ ID NO: 1320307 - RNA, 19 nt, Homo sapiens
  misc_RNA (1)...(19): siRNA sense strand
cagaaccaccugcuccaaa

SEQ ID NO: 1320308 - RNA, 19 nt, Homo sapiens
  misc_RNA (1)...(19): siRNA sense strand
gcaaucagccccaaauaca

SEQ ID NO: 1320309 - RNA, 19 nt, Homo sapiens
  misc_RNA (1)...(19): siRNA sense strand
gcagauugaguucauaaaa

SEQ ID NO: 1320310 - RNA, 19 nt, Homo sapiens
  misc_RNA (1)...(19): siRNA sense strand
cgaggaugagcauggcuua

SEQ ID NO: 1320311 - RNA, 19 nt, Homo sapiens
  misc_RNA (1)...(19): siRNA sense strand
ucagaaccauacccaaguc

SEQ ID NO: 1320312 - RNA, 19 nt, Homo sapiens
  misc_RNA (1)...(19): siRNA sense strand
aacaaggaagcaugaauuu

SEQ ID NO: 1320313 - RNA, 19 nt, Homo sapiens
  misc_RNA (1)...(19): siRNA sense strand
cgaggcauugauaucauua

SEQ ID NO: 1320314 - RNA, 19 nt, Homo sapiens
  misc_RNA (1)...(19): siRNA sense strand
cgaaugaugcagauugagu

SEQ ID NO: 1320315 - RNA, 19 nt, Homo sapiens
  misc_RNA (1)...(19): siRNA sense strand
ccaugacucagacaaauca

SEQ ID NO: 1320316 - RNA, 19 nt, Homo sapiens
  misc_RNA (1)...(19): siRNA sense strand
ucacucaacccugaaacuu

SEQ ID NO: 1320317 - RNA, 19 nt, Homo sapiens
  misc_RNA (1)...(19): siRNA sense strand
gguaaauggcuuccaaacu

SEQ ID NO: 1320318 - RNA, 19 nt, Homo sapiens
  misc_RNA (1)...(19): siRNA sense strand
cagaagguuauccugaauu

SEQ ID NO: 1320319 - RNA, 19 nt, Homo sapiens
  misc_RNA (1)...(19): siRNA sense strand
gaagguuauccugaauuau

SEQ ID NO: 1320320 - RNA, 19 nt, Homo sapiens
  misc_RNA (1)...(19): siRNA sense strand
ugaugcagauugaguucau

SEQ ID NO: 1320321 - RNA, 19 nt, Homo sapiens
  misc_RNA (1)...(19): siRNA sense strand
aagguuauccugaauuauc

SEQ ID NO: 1320322 - RNA, 19 nt, Homo sapiens
  misc_RNA (1)...(19): siRNA sense strand
uggauggagcgcuaccuua

SEQ ID NO: 1320323 - RNA, 19 nt, Homo sapiens
  misc_RNA (1)...(19): siRNA sense strand
ucccugugcucuucccaaa

SEQ ID NO: 1320324 - RNA, 19 nt, Homo sapiens
  misc_RNA (1)...(19): siRNA sense strand
auacaaacaggacguggaa

SEQ ID NO: 1320325 - RNA, 19 nt, Homo sapiens
  misc_RNA (1)...(19): siRNA sense strand
ucaccugccugcgcacuca

SEQ ID NO: 1320326 - RNA, 19 nt, Homo sapiens
  misc_RNA (1)...(19): siRNA sense strand
aagcauuccuguggagguu

SEQ ID NO: 1320327 - RNA, 19 nt, Homo sapiens
  misc_RNA (1)...(19): siRNA sense strand
ggcaaagcuuucccuucug

SEQ ID NO: 1320328 - RNA, 19 nt, Homo sapiens
  misc_RNA (1)...(19): siRNA sense strand
gaggcauugauaucauuaa

SEQ ID NO: 1320329 - RNA, 19 nt, Homo sapiens
  misc_RNA (1)...(19): siRNA sense strand
caaccauagacacgggaua

SEQ ID NO: 1320330 - RNA, 19 nt, Homo sapiens
  misc_RNA (1)...(19): siRNA sense strand
gaucugccaaccauagaca

SEQ ID NO: 1320331 - RNA, 19 nt, Homo sapiens
  misc_RNA (1)...(19): siRNA sense strand
cacaucaccagccaccuaa

SEQ ID NO: 1320332 - RNA, 19 nt, Homo sapiens
  misc_RNA (1)...(19): siRNA sense strand
ucccaaaugcuaagaagga

SEQ ID NO: 1320333 - RNA, 19 nt, Homo sapiens
  misc_RNA (1)...(19): siRNA sense strand
caaacugcaauugacauau

SEQ ID NO: 1320334 - RNA, 19 nt, Homo sapiens
  misc_RNA (1)...(19): siRNA sense strand
gagcauggcuuacauacua

SEQ ID NO: 1320335 - RNA, 19 nt, Homo sapiens
  misc_RNA (1)...(19): siRNA sense strand
guaaauggcuuccaaacug

SEQ ID NO: 1320336 - RNA, 19 nt, Homo sapiens
  misc_RNA (1)...(19): siRNA sense strand
gauaagaccgugaugauaa

SEQ ID NO: 1320337 - RNA, 19 nt, Homo sapiens
  misc_RNA (1)...(19): siRNA sense strand
ccacaaugcuucacaauuc

SEQ ID NO: 1320338 - RNA, 19 nt, Homo sapiens
  misc_RNA (1)...(19): siRNA sense strand
gaccaaaguuuaccuaaug

SEQ ID NO: 1320339 - RNA, 19 nt, Homo sapiens
  misc_RNA (1)...(19): siRNA sense strand
caaaucagaccaaaguuua

SEQ ID NO: 1320340 - RNA, 19 nt, Homo sapiens
  misc_RNA (1)...(19): siRNA sense strand
gaacuaucauuaccauugu

SEQ ID NO: 1320341 - RNA, 19 nt, Homo sapiens
  misc_RNA (1)...(19): siRNA sense strand
gagcaucaguuuucauuua

SEQ ID NO: 1320342 - RNA, 19 nt, Homo sapiens
  misc_RNA (1)...(19): siRNA sense strand
ugaaaccaaucccagaaua

SEQ ID NO: 1320343 - RNA, 19 nt, Homo sapiens
  misc_RNA (1)...(19): siRNA sense strand
agaagguuauccugaauua

SEQ ID NO: 1320344 - RNA, 19 nt, Homo sapiens
  misc_RNA (1)...(19): siRNA sense strand
gggcaaagcuuucccuucu

SEQ ID NO: 1320345 - RNA, 19 nt, Homo sapiens
  misc_RNA (1)...(19): siRNA sense strand
ggaacuaucauuaccauug

SEQ ID NO: 1320346 - RNA, 19 nt, Homo sapiens
  misc_RNA (1)...(19): siRNA sense strand
cuauggagguggugaaauu

SEQ ID NO: 1320347 - RNA, 19 nt, Homo sapiens
  misc_RNA (1)...(19): siRNA sense strand
ggaguucccucaguuugaa

SEQ ID NO: 1320348 - RNA, 19 nt, Homo sapiens
  misc_RNA (1)...(19): siRNA sense strand
gcagaagguuauccugaau

SEQ ID NO: 1320349 - RNA, 19 nt, Homo sapiens
  misc_RNA (1)...(19): siRNA sense strand
ggauaagaccgugaugaua

SEQ ID NO: 1320350 - RNA, 19 nt, Homo sapiens
  misc_RNA (1)...(19): siRNA sense strand
gaaaccaaucccagaauau

SEQ ID NO: 1320351 - RNA, 19 nt, Homo sapiens
  misc_RNA (1)...(19): siRNA sense strand
gauagaauccgaggcauug

SEQ ID NO: 1320352 - RNA, 19 nt, Homo sapiens
  misc_RNA (1)...(19): siRNA sense strand
gaaccaccugcuccaaaua

SEQ ID NO: 1320353 - RNA, 19 nt, Homo sapiens
  misc_RNA (1)...(19): siRNA sense strand
aaacaaggaagcaugaauu

SEQ ID NO: 1320354 - RNA, 19 nt, Homo sapiens
  misc_RNA (1)...(19): siRNA sense strand
ugacauauuugaggauaga

SEQ ID NO: 1320355 - RNA, 19 nt, Homo sapiens
  misc_RNA (1)...(19): siRNA sense strand
ucagaacacucaugucuac

SEQ ID NO: 1320356 - RNA, 19 nt, Homo sapiens
  misc_RNA (1)...(19): siRNA sense strand
gaaccgagcaggccuggau

SEQ ID NO: 1320357 - RNA, 19 nt, Homo sapiens
  misc_RNA (1)...(19): siRNA sense strand
ggaggacagugaagacagu

SEQ ID NO: 1320358 - RNA, 19 nt, Homo sapiens
  misc_RNA (1)...(19): siRNA sense strand
acagagagacugcuccuuu

SEQ ID NO: 1320359 - RNA, 19 nt, Homo sapiens
  misc_RNA (1)...(19): siRNA sense strand
caucaccagccaccuaaua

SEQ ID NO: 1320360 - RNA, 19 nt, Homo sapiens
  misc_RNA (1)...(19): siRNA sense strand
gcugagagaggaagaguau

SEQ ID NO: 1320361 - RNA, 19 nt, Homo sapiens
  misc_RNA (1)...(19): siRNA sense strand
cagagagacugcuccuuuc

SEQ ID NO: 1320362 - RNA, 19 nt, Homo sapiens
  misc_RNA (1)...(19): siRNA sense strand
gaaugaugcagauugaguu

SEQ ID NO: 1320363 - RNA, 19 nt, Homo sapiens
  misc_RNA (1)...(19): siRNA sense strand
ccaaacugcaauugacaua

SEQ ID NO: 1320364 - RNA, 19 nt, Homo sapiens
  misc_RNA (1)...(19): siRNA sense strand
cguaaucaauggcugguau

SEQ ID NO: 1320365 - RNA, 19 nt, Homo sapiens
  misc_RNA (1)...(19): siRNA sense strand
ucaggugguucccuuguga

SEQ ID NO: 1320366 - RNA, 19 nt, Homo sapiens
  misc_RNA (1)...(19): siRNA sense strand
acagcuggcccaagaauaa

SEQ ID NO: 1320367 - RNA, 19 nt, Homo sapiens
  misc_RNA (1)...(19): siRNA sense strand
ccagaagaauugcggaaag

SEQ ID NO: 1320368 - RNA, 19 nt, Homo sapiens
  misc_RNA (1)...(19): siRNA sense strand
ucagagguauccagcaugu

SEQ ID NO: 1320369 - RNA, 19 nt, Homo sapiens
  misc_RNA (1)...(19): siRNA sense strand
agacaaaucagaccaaagu

SEQ ID NO: 1320370 - RNA, 19 nt, Homo sapiens
  misc_RNA (1)...(19): siRNA sense strand
acaaaucagaccaaaguuu

SEQ ID NO: 1320371 - RNA, 19 nt, Homo sapiens
  misc_RNA (1)...(19): siRNA sense strand
gaugagcauggcuuacaua

SEQ ID NO: 1320372 - RNA, 19 nt, Homo sapiens
  misc_RNA (1)...(19): siRNA sense strand
ggccaugacucagacaaau

SEQ ID NO: 1320373 - RNA, 19 nt, Homo sapiens
  misc_RNA (1)...(19): siRNA sense strand
ccugugcucuucccaaaug

SEQ ID NO: 1320374 - RNA, 19 nt, Homo sapiens
  misc_RNA (1)...(19): siRNA sense strand
ccacaucaccagccaccua

SEQ ID NO: 1320375 - RNA, 19 nt, Homo sapiens
  misc_RNA (1)...(19): siRNA sense strand
gaugcugccucccaaucuu

SEQ ID NO: 1320376 - RNA, 19 nt, Homo sapiens
  misc_RNA (1)...(19): siRNA sense strand
gaugcagauugaguucaua

SEQ ID NO: 1320377 - RNA, 19 nt, Homo sapiens
  misc_RNA (1)...(19): siRNA sense strand
aaaccaaucccagaauauu

SEQ ID NO: 1320378 - RNA, 19 nt, Homo sapiens
  misc_RNA (1)...(19): siRNA sense strand
ucagacaaaucagaccaaa

SEQ ID NO: 1320379 - RNA, 19 nt, Homo sapiens
  misc_RNA (1)...(19): siRNA sense strand
ggaugagcauggcuuacau

SEQ ID NO: 1320380 - RNA, 19 nt, Homo sapiens
  misc_RNA (1)...(19): siRNA sense strand
gaugauaaucguagcaauc

SEQ ID NO: 1320381 - RNA, 19 nt, Homo sapiens
  misc_RNA (1)...(19): siRNA sense strand
gggauaagaccgugaugau

SEQ ID NO: 1320382 - RNA, 19 nt, Homo sapiens
  misc_RNA (1)...(19): siRNA sense strand
caauuccuccggagacuuu

SEQ ID NO: 1320383 - RNA, 19 nt, Homo sapiens
  misc_RNA (1)...(19): siRNA sense strand
gcauuccuguggagguuga

SEQ ID NO: 1320384 - RNA, 19 nt, Homo sapiens
  misc_RNA (1)...(19): siRNA sense strand
agaccaaaguuuaccuaau

SEQ ID NO: 1320385 - RNA, 19 nt, Homo sapiens
  misc_RNA (1)...(19): siRNA sense strand
ccaccugcuccaaauauaa

SEQ ID NO: 1320386 - RNA, 19 nt, Homo sapiens
  misc_RNA (1)...(19): siRNA sense strand
ggacagugaagacaguuuc

SEQ ID NO: 1320387 - RNA, 19 nt, Homo sapiens
  misc_RNA (1)...(19): siRNA sense strand
cagaagaauugcggaaagu

SEQ ID NO: 1320388 - RNA, 19 nt, Homo sapiens
  misc_RNA (1)...(19): siRNA sense strand
agaaccaccugcuccaaau

SEQ ID NO: 1320389 - RNA, 19 nt, Homo sapiens
  misc_RNA (1)...(19): siRNA sense strand
ggauggagcgcuaccuuag

SEQ ID NO: 1320390 - RNA, 19 nt, Homo sapiens
  misc_RNA (1)...(19): siRNA sense strand
ggugaaauucgugaacuuu

SEQ ID NO: 1320391 - RNA, 19 nt, Homo sapiens
  misc_RNA (1)...(19): siRNA sense strand
cccugaaacuugcaaauca

SEQ ID NO: 1320392 - RNA, 19 nt, Homo sapiens
  misc_RNA (1)...(19): siRNA sense strand
gagcgcuaccuuagggaua

SEQ ID NO: 1320393 - RNA, 19 nt, Homo sapiens
  misc_RNA (1)...(19): siRNA sense strand
gaaccauacccaagucagu

SEQ ID NO: 1320394 - RNA, 19 nt, Homo sapiens
  misc_RNA (1)...(19): siRNA sense strand
gaagaauugcggaaagucu

SEQ ID NO: 1320395 - RNA, 19 nt, Homo sapiens
  misc_RNA (1)...(19): siRNA sense strand
ccgaggcauugauaucauu

SEQ ID NO: 1320396 - RNA, 19 nt, Homo sapiens
  misc_RNA (1)...(19): siRNA sense strand
ugcagaagguuauccugaa

SEQ ID NO: 1320397 - RNA, 19 nt, Homo sapiens
  misc_RNA (1)...(19): siRNA sense strand
gucuacagcuggcccaaga

SEQ ID NO: 1320398 - RNA, 19 nt, Homo sapiens
  misc_RNA (1)...(19): siRNA sense strand
ggaagaggaaucagaacca

SEQ ID NO: 1320399 - RNA, 19 nt, Homo sapiens
  misc_RNA (1)...(19): siRNA sense strand
gcugaaaccaaucccagaa

SEQ ID NO: 1320400 - RNA, 19 nt, Homo sapiens
  misc_RNA (1)...(19): siRNA sense strand
cuccauggaacuaucauua

SEQ ID NO: 1320401 - RNA, 19 nt, Homo sapiens
  misc_RNA (1)...(19): siRNA sense strand
ugagagaggaagaguaugu

SEQ ID NO: 1320402 - RNA, 19 nt, Homo sapiens
  misc_RNA (1)...(19): siRNA sense strand
ccaccuggcuucagaacac

SEQ ID NO: 1320403 - RNA, 19 nt, Homo sapiens
  misc_RNA (1)...(19): siRNA sense strand
auaagaccgugaugauaau

SEQ ID NO: 1320404 - RNA, 19 nt, Homo sapiens
  misc_RNA (1)...(19): siRNA sense strand
agaauccgaggcauugaua

SEQ ID NO: 1320405 - RNA, 19 nt, Homo sapiens
  misc_RNA (1)...(19): siRNA sense strand
gugcccaccuggcuucaga

SEQ ID NO: 1320406 - RNA, 19 nt, Homo sapiens
  misc_RNA (1)...(19): siRNA sense strand
aucaauggcugguaucuca

SEQ ID NO: 1320407 - RNA, 19 nt, Homo sapiens
  misc_RNA (1)...(19): siRNA sense strand
cagaaccaccugcuccaaa

SEQ ID NO: 1320408 - RNA, 19 nt, Homo sapiens
  misc_RNA (1)...(19): siRNA sense strand
gcaaucagccccaaauaca

SEQ ID NO: 1320409 - RNA, 19 nt, Homo sapiens
  misc_RNA (1)...(19): siRNA sense strand
gcagauugaguucauaaaa

SEQ ID NO: 1320410 - RNA, 19 nt, Homo sapiens
  misc_RNA (1)...(19): siRNA sense strand
cgaggaugagcauggcuua

SEQ ID NO: 1320411 - RNA, 19 nt, Homo sapiens
  misc_RNA (1)...(19): siRNA sense strand
ucagaaccauacccaaguc

SEQ ID NO: 1320412 - RNA, 19 nt, Homo sapiens
  misc_RNA (1)...(19): siRNA sense strand
aacaaggaagcaugaauuu

SEQ ID NO: 1320413 - RNA, 19 nt, Homo sapiens
  misc_RNA (1)...(19): siRNA sense strand
cgaggcauugauaucauua

SEQ ID NO: 1320414 - RNA, 19 nt, Homo sapiens
  misc_RNA (1)...(19): siRNA sense strand
cgaaugaugcagauugagu

SEQ ID NO: 1320415 - RNA, 19 nt, Homo sapiens
  misc_RNA (1)...(19): siRNA sense strand
ccaugacucagacaaauca

SEQ ID NO: 1320416 - RNA, 19 nt, Homo sapiens
  misc_RNA (1)...(19): siRNA sense strand
ucacucaacccugaaacuu

SEQ ID NO: 1320417 - RNA, 19 nt, Homo sapiens
  misc_RNA (1)...(19): siRNA sense strand
gguaaauggcuuccaaacu

SEQ ID NO: 1320418 - RNA, 19 nt, Homo sapiens
  misc_RNA (1)...(19): siRNA sense strand
cagaagguuauccugaauu

SEQ ID NO: 1320419 - RNA, 19 nt, Homo sapiens
  misc_RNA (1)...(19): siRNA sense strand
gaagguuauccugaauuau

SEQ ID NO: 1320420 - RNA, 19 nt, Homo sapiens
  misc_RNA (1)...(19): siRNA sense strand
ugaugcagauugaguucau

SEQ ID NO: 1320421 - RNA, 19 nt, Homo sapiens
  misc_RNA (1)...(19): siRNA sense strand
aagguuauccugaauuauc

SEQ ID NO: 1320422 - RNA, 19 nt, Homo sapiens
  misc_RNA (1)...(19): siRNA sense strand
uggauggagcgcuaccuua

SEQ ID NO: 1320423 - RNA, 19 nt, Homo sapiens
  misc_RNA (1)...(19): siRNA sense strand
ucccugugcucuucccaaa

SEQ ID NO: 1320424 - RNA, 19 nt, Homo sapiens
  misc_RNA (1)...(19): siRNA sense strand
auacaaacaggacguggaa

SEQ ID NO: 1320425 - RNA, 19 nt, Homo sapiens
  misc_RNA (1)...(19): siRNA sense strand
ucaccugccugcgcacuca

SEQ ID NO: 1320426 - RNA, 19 nt, Homo sapiens
  misc_RNA (1)...(19): siRNA sense strand
aagcauuccuguggagguu

SEQ ID NO: 1320427 - RNA, 19 nt, Homo sapiens
  misc_RNA (1)...(19): siRNA sense strand
ggcaaagcuuucccuucug

SEQ ID NO: 1320428 - RNA, 19 nt, Homo sapiens
  misc_RNA (1)...(19): siRNA sense strand
gaggcauugauaucauuaa

SEQ ID NO: 1320429 - RNA, 19 nt, Homo sapiens
  misc_RNA (1)...(19): siRNA sense strand
caaccauagacacgggaua

SEQ ID NO: 1320430 - RNA, 19 nt, Homo sapiens
  misc_RNA (1)...(19): siRNA sense strand
gaucugccaaccauagaca

SEQ ID NO: 1320431 - RNA, 19 nt, Homo sapiens
  misc_RNA (1)...(19): siRNA sense strand
cacaucaccagccaccuaa

SEQ ID NO: 1320432 - RNA, 19 nt, Homo sapiens
  misc_RNA (1)...(19): siRNA sense strand
ucccaaaugcuaagaagga

SEQ ID NO: 1320433 - RNA, 19 nt, Homo sapiens
  misc_RNA (1)...(19): siRNA sense strand
caaacugcaauugacauau

SEQ ID NO: 1320434 - RNA, 19 nt, Homo sapiens
  misc_RNA (1)...(19): siRNA sense strand
gagcugcccuccuggauuu

SEQ ID NO: 1320435 - RNA, 19 nt, Homo sapiens
  misc_RNA (1)...(19): siRNA sense strand
gcaaggagcugcaguacgu

SEQ ID NO: 1320436 - RNA, 19 nt, Homo sapiens
  misc_RNA (1)...(19): siRNA sense strand
cuacaaaguuuacgccuaa

SEQ ID NO: 1320437 - RNA, 19 nt, Homo sapiens
  misc_RNA (1)...(19): siRNA sense strand
caacacagcucacaagaac

SEQ ID NO: 1320438 - RNA, 19 nt, Homo sapiens
  misc_RNA (1)...(19): siRNA sense strand
ucaagaagaucauccaaga

SEQ ID NO: 1320439 - RNA, 19 nt, Homo sapiens
  misc_RNA (1)...(19): siRNA sense strand
aaacaacacuguacagcaa

SEQ ID NO: 1320440 - RNA, 19 nt, Homo sapiens
  misc_RNA (1)...(19): siRNA sense strand
gauauugaccucugugaaa

SEQ ID NO: 1320441 - RNA, 19 nt, Homo sapiens
  misc_RNA (1)...(19): siRNA sense strand
gagauagaguucugcuuga

SEQ ID NO: 1320442 - RNA, 19 nt, Homo sapiens
  misc_RNA (1)...(19): siRNA sense strand
gaagaucauccaagauauu

SEQ ID NO: 1320443 - RNA, 19 nt, Homo sapiens
  misc_RNA (1)...(19): siRNA sense strand
gaguucugcuugaaacaua

SEQ ID NO: 1320444 - RNA, 19 nt, Homo sapiens
  misc_RNA (1)...(19): siRNA sense strand
uaaagaagaccaucagguu

SEQ ID NO: 1320445 - RNA, 19 nt, Homo sapiens
  misc_RNA (1)...(19): siRNA sense strand
gcacuaaagcacucaaaga

SEQ ID NO: 1320446 - RNA, 19 nt, Homo sapiens
  misc_RNA (1)...(19): siRNA sense strand
gauggguucuucucaaaug

SEQ ID NO: 1320447 - RNA, 19 nt, Homo sapiens
  misc_RNA (1)...(19): siRNA sense strand
cuucacagcuucacaaugu

SEQ ID NO: 1320448 - RNA, 19 nt, Homo sapiens
  misc_RNA (1)...(19): siRNA sense strand
cuucguagcuugauggaaa

SEQ ID NO: 1320449 - RNA, 19 nt, Homo sapiens
  misc_RNA (1)...(19): siRNA sense strand
aagaagaucauccaagaua

SEQ ID NO: 1320450 - RNA, 19 nt, Homo sapiens
  misc_RNA (1)...(19): siRNA sense strand
caagauauagucaagaaga

SEQ ID NO: 1320451 - RNA, 19 nt, Homo sapiens
  misc_RNA (1)...(19): siRNA sense strand
cagauggguucuucucaaa

SEQ ID NO: 1320452 - RNA, 19 nt, Homo sapiens
  misc_RNA (1)...(19): siRNA sense strand
aaacguuuccuccaaagua

SEQ ID NO: 1320453 - RNA, 19 nt, Homo sapiens
  misc_RNA (1)...(19): siRNA sense strand
ccagauggguucuucucaa

SEQ ID NO: 1320454 - RNA, 19 nt, Homo sapiens
  misc_RNA (1)...(19): siRNA sense strand
ccaaaguaccuucauuaug

SEQ ID NO: 1320455 - RNA, 19 nt, Homo sapiens
  misc_RNA (1)...(19): siRNA sense strand
guaaccagguccaaucagu

SEQ ID NO: 1320456 - RNA, 19 nt, Homo sapiens
  misc_RNA (1)...(19): siRNA sense strand
gcaacacagcucacaagaa

SEQ ID NO: 1320457 - RNA, 19 nt, Homo sapiens
  misc_RNA (1)...(19): siRNA sense strand
uaacuggcuuagugucuug

SEQ ID NO: 1320458 - RNA, 19 nt, Homo sapiens
  misc_RNA (1)...(19): siRNA sense strand
caaaguaaacgcagagagu

SEQ ID NO: 1320459 - RNA, 19 nt, Homo sapiens
  misc_RNA (1)...(19): siRNA sense strand
gaaaugcaacacacgacaa

SEQ ID NO: 1320460 - RNA, 19 nt, Homo sapiens
  misc_RNA (1)...(19): siRNA sense strand
caucagcuguugugugaca

SEQ ID NO: 1320461 - RNA, 19 nt, Homo sapiens
  misc_RNA (1)...(19): siRNA sense strand
gcuucacaauguacaaauu

SEQ ID NO: 1320462 - RNA, 19 nt, Homo sapiens
  misc_RNA (1)...(19): siRNA sense strand
caacacacgacaacauaug

SEQ ID NO: 1320463 - RNA, 19 nt, Homo sapiens
  misc_RNA (1)...(19): siRNA sense strand
gauagaguucugcuugaaa

SEQ ID NO: 1320464 - RNA, 19 nt, Homo sapiens
  misc_RNA (1)...(19): siRNA sense strand
cucaucagcuguuguguga

SEQ ID NO: 1320465 - RNA, 19 nt, Homo sapiens
  misc_RNA (1)...(19): siRNA sense strand
guagaaaacacacaaauug

SEQ ID NO: 1320466 - RNA, 19 nt, Homo sapiens
  misc_RNA (1)...(19): siRNA sense strand
ggcgcuaccuugagauaga

SEQ ID NO: 1320467 - RNA, 19 nt, Homo sapiens
  misc_RNA (1)...(19): siRNA sense strand
agaagaucauccaagauau

SEQ ID NO: 1320468 - RNA, 19 nt, Homo sapiens
  misc_RNA (1)...(19): siRNA sense strand
ccagagcgaaauacaguuu

SEQ ID NO: 1320469 - RNA, 19 nt, Homo sapiens
  misc_RNA (1)...(19): siRNA sense strand
ggaggcauucuucagguuu

SEQ ID NO: 1320470 - RNA, 19 nt, Homo sapiens
  misc_RNA (1)...(19): siRNA sense strand
uaaccagguccaaucagua

SEQ ID NO: 1320471 - RNA, 19 nt, Homo sapiens
  misc_RNA (1)...(19): siRNA sense strand
gauauagucaagaagauca

SEQ ID NO: 1320472 - RNA, 19 nt, Homo sapiens
  misc_RNA (1)...(19): siRNA sense strand
gaggcauucuucagguuug

SEQ ID NO: 1320473 - RNA, 19 nt, Homo sapiens
  misc_RNA (1)...(19): siRNA sense strand
cuaaagcacccuguagaaa

SEQ ID NO: 1320474 - RNA, 19 nt, Homo sapiens
  misc_RNA (1)...(19): siRNA sense strand
gagaguguagagaggauaa

SEQ ID NO: 1320475 - RNA, 19 nt, Homo sapiens
  misc_RNA (1)...(19): siRNA sense strand
gcaacacacgacaacauau

SEQ ID NO: 1320476 - RNA, 19 nt, Homo sapiens
  misc_RNA (1)...(19): siRNA sense strand
gaaauacaguuugcaaaag

SEQ ID NO: 1320477 - RNA, 19 nt, Homo sapiens
  misc_RNA (1)...(19): siRNA sense strand
gaaagugggagcagaagac

SEQ ID NO: 1320478 - RNA, 19 nt, Homo sapiens
  misc_RNA (1)...(19): siRNA sense strand
gugcugcgcgcucguguuu

SEQ ID NO: 1320479 - RNA, 19 nt, Homo sapiens
  misc_RNA (1)...(19): siRNA sense strand
gcucacaagaacagacuuu

SEQ ID NO: 1320480 - RNA, 19 nt, Homo sapiens
  misc_RNA (1)...(19): siRNA sense strand
aacagugaaucaacucaaa

SEQ ID NO: 1320481 - RNA, 19 nt, Homo sapiens
  misc_RNA (1)...(19): siRNA sense strand
gcgaaauacaguuugcaaa

SEQ ID NO: 1320482 - RNA, 19 nt, Homo sapiens
  misc_RNA (1)...(19): siRNA sense strand
aaagaaagugggagcagaa

SEQ ID NO: 1320483 - RNA, 19 nt, Homo sapiens
  misc_RNA (1)...(19): siRNA sense strand
ggaccacccaggaaacguu

SEQ ID NO: 1320484 - RNA, 19 nt, Homo sapiens
  misc_RNA (1)...(19): siRNA sense strand
cuccaaaguaccuucauua

SEQ ID NO: 1320485 - RNA, 19 nt, Homo sapiens
  misc_RNA (1)...(19): siRNA sense strand
ccuccaaaguaccuucauu

SEQ ID NO: 1320486 - RNA, 19 nt, Homo sapiens
  misc_RNA (1)...(19): siRNA sense strand
aagcuuaccgggaaagaaa

SEQ ID NO: 1320487 - RNA, 19 nt, Homo sapiens
  misc_RNA (1)...(19): siRNA sense strand
gaaacagugaaucaacuca

SEQ ID NO: 1320488 - RNA, 19 nt, Homo sapiens
  misc_RNA (1)...(19): siRNA sense strand
uaaagcacucaaagacgua

SEQ ID NO: 1320489 - RNA, 19 nt, Homo sapiens
  misc_RNA (1)...(19): siRNA sense strand
agauagaguucugcuugaa

SEQ ID NO: 1320490 - RNA, 19 nt, Homo sapiens
  misc_RNA (1)...(19): siRNA sense strand
ccaagauauugaccucugu

SEQ ID NO: 1320491 - RNA, 19 nt, Homo sapiens
  misc_RNA (1)...(19): siRNA sense strand
cgaagaaaccucucaucag

SEQ ID NO: 1320492 - RNA, 19 nt, Homo sapiens
  misc_RNA (1)...(19): siRNA sense strand
caaacccagugaccagauc

SEQ ID NO: 1320493 - RNA, 19 nt, Homo sapiens
  misc_RNA (1)...(19): siRNA sense strand
gagcagaagacauugaaaa

SEQ ID NO: 1320494 - RNA, 19 nt, Homo sapiens
  misc_RNA (1)...(19): siRNA sense strand
gggagcagaagacauugaa

SEQ ID NO: 1320495 - RNA, 19 nt, Homo sapiens
  misc_RNA (1)...(19): siRNA sense strand
cgaaauacaguuugcaaaa

SEQ ID NO: 1320496 - RNA, 19 nt, Homo sapiens
  misc_RNA (1)...(19): siRNA sense strand
ucagguuccuucacagcuu

SEQ ID NO: 1320497 - RNA, 19 nt, Homo sapiens
  misc_RNA (1)...(19): siRNA sense strand
gcugcgcgcucguguuucu

SEQ ID NO: 1320498 - RNA, 19 nt, Homo sapiens
  misc_RNA (1)...(19): siRNA sense strand
uaaagcacccuguagaaaa

SEQ ID NO: 1320499 - RNA, 19 nt, Homo sapiens
  misc_RNA (1)...(19): siRNA sense strand
ccagugaccagauccugaa

SEQ ID NO: 1320500 - RNA, 19 nt, Homo sapiens
  misc_RNA (1)...(19): siRNA sense strand
ugucuuuggucuccugcua

SEQ ID NO: 1320501 - RNA, 19 nt, Homo sapiens
  misc_RNA (1)...(19): siRNA sense strand
ggaaacagugaaucaacuc

SEQ ID NO: 1320502 - RNA, 19 nt, Homo sapiens
  misc_RNA (1)...(19): siRNA sense strand
gaaagcuuaccgggaaaga

SEQ ID NO: 1320503 - RNA, 19 nt, Homo sapiens
  misc_RNA (1)...(19): siRNA sense strand
gcuguuccuacaaaguuua

SEQ ID NO: 1320504 - RNA, 19 nt, Homo sapiens
  misc_RNA (1)...(19): siRNA sense strand
cagguuugcuguuccuaca

SEQ ID NO: 1320505 - RNA, 19 nt, Homo sapiens
  misc_RNA (1)...(19): siRNA sense strand
ugcaacacacgacaacaua

SEQ ID NO: 1320506 - RNA, 19 nt, Homo sapiens
  misc_RNA (1)...(19): siRNA sense strand
aaccagguccaaucaguaa

SEQ ID NO: 1320507 - RNA, 19 nt, Homo sapiens
  misc_RNA (1)...(19): siRNA sense strand
gaccacuacuacacagaca

SEQ ID NO: 1320508 - RNA, 19 nt, Homo sapiens
  misc_RNA (1)...(19): siRNA sense strand
cggaaacagugaaucaacu

SEQ ID NO: 1320509 - RNA, 19 nt, Homo sapiens
  misc_RNA (1)...(19): siRNA sense strand
guaccuaccuaaaacaaca

SEQ ID NO: 1320510 - RNA, 19 nt, Homo sapiens
  misc_RNA (1)...(19): siRNA sense strand
acucaaagacguaccacuu

SEQ ID NO: 1320511 - RNA, 19 nt, Homo sapiens
  misc_RNA (1)...(19): siRNA sense strand
gcaaacccagugaccagau

SEQ ID NO: 1320512 - RNA, 19 nt, Homo sapiens
  misc_RNA (1)...(19): siRNA sense strand
ccugcuaacucagaaagga

SEQ ID NO: 1320513 - RNA, 19 nt, Homo sapiens
  misc_RNA (1)...(19): siRNA sense strand
caagaagaucauccaagau

SEQ ID NO: 1320514 - RNA, 19 nt, Homo sapiens
  misc_RNA (1)...(19): siRNA sense strand
ucagaaaggaaaugcaaca

SEQ ID NO: 1320515 - RNA, 19 nt, Homo sapiens
  misc_RNA (1)...(19): siRNA sense strand
cagagaguguagagaggau

SEQ ID NO: 1320516 - RNA, 19 nt, Homo sapiens
  misc_RNA (1)...(19): siRNA sense strand
acgaagaaaccucucauca

SEQ ID NO: 1320517 - RNA, 19 nt, Homo sapiens
  misc_RNA (1)...(19): siRNA sense strand
gaccacccaggaaacguuu

SEQ ID NO: 1320518 - RNA, 19 nt, Homo sapiens
  misc_RNA (1)...(19): siRNA sense strand
ccagugacgagugucuaua

SEQ ID NO: 1320519 - RNA, 19 nt, Homo sapiens
  misc_RNA (1)...(19): siRNA sense strand
ggagcagaagacauugaaa

SEQ ID NO: 1320520 - RNA, 19 nt, Homo sapiens
  misc_RNA (1)...(19): siRNA sense strand
agugggagcagaagacauu

SEQ ID NO: 1320521 - RNA, 19 nt, Homo sapiens
  misc_RNA (1)...(19): siRNA sense strand
gacguaccacuuucccaaa

SEQ ID NO: 1320522 - RNA, 19 nt, Homo sapiens
  misc_RNA (1)...(19): siRNA sense strand
caucuaaagcacccuguag

SEQ ID NO: 1320523 - RNA, 19 nt, Homo sapiens
  misc_RNA (1)...(19): siRNA sense strand
aacaauaaaggcaugcaaa

SEQ ID NO: 1320524 - RNA, 19 nt, Homo sapiens
  misc_RNA (1)...(19): siRNA sense strand
gcacauuggacaugcuaac

SEQ ID NO: 1320525 - RNA, 19 nt, Homo sapiens
  misc_RNA (1)...(19): siRNA sense strand
aaacagugaaucaacucaa

SEQ ID NO: 1320526 - RNA, 19 nt, Homo sapiens
  misc_RNA (1)...(19): siRNA sense strand
aagaucauccaagauauug

SEQ ID NO: 1320527 - RNA, 19 nt, Homo sapiens
  misc_RNA (1)...(19): siRNA sense strand
ccuaaugcacgcacuaaag

SEQ ID NO: 1320528 - RNA, 19 nt, Homo sapiens
  misc_RNA (1)...(19): siRNA sense strand
gaucauccaagauauugac

SEQ ID NO: 1320529 - RNA, 19 nt, Homo sapiens
  misc_RNA (1)...(19): siRNA sense strand
aaauugcagugucuuuggu

SEQ ID NO: 1320530 - RNA, 19 nt, Homo sapiens
  misc_RNA (1)...(19): siRNA sense strand
aaacaauaaaggcaugcaa

SEQ ID NO: 1320531 - RNA, 19 nt, Homo sapiens
  misc_RNA (1)...(19): siRNA sense strand
augcuaaccucaccuucga

SEQ ID NO: 1320532 - RNA, 19 nt, Homo sapiens
  misc_RNA (1)...(19): siRNA sense strand
ggcaacacagcucacaaga

SEQ ID NO: 1320533 - RNA, 19 nt, Homo sapiens
  misc_RNA (1)...(19): siRNA sense strand
ggucuccugcuaacucaga

SEQ ID NO: 1320534 - RNA, 19 nt, Homo sapiens
  misc_RNA (1)...(19): siRNA sense strand
gcacauaccugcgcucaac

SEQ ID NO: 1320535 - RNA, 19 nt, Homo sapiens
  misc_RNA (1)...(19): siRNA sense strand
gaagaaggcagcugaguac

SEQ ID NO: 1320536 - RNA, 19 nt, Homo sapiens
  misc_RNA (1)...(19): siRNA sense strand
caaaguaaccgcgcaguuc

SEQ ID NO: 1320537 - RNA, 19 nt, Homo sapiens
  misc_RNA (1)...(19): siRNA sense strand
ggcccuggaucuccucuuu

SEQ ID NO: 1320538 - RNA, 19 nt, Homo sapiens
  misc_RNA (1)...(19): siRNA sense strand
ggacccagaggaugucaaa

SEQ ID NO: 1320539 - RNA, 19 nt, Homo sapiens
  misc_RNA (1)...(19): siRNA sense strand
cuacaccgaguacaaagua

SEQ ID NO: 1320540 - RNA, 19 nt, Homo sapiens
  misc_RNA (1)...(19): siRNA sense strand
ucgcuucacugugcacaua

SEQ ID NO: 1320541 - RNA, 19 nt, Homo sapiens
  misc_RNA (1)...(19): siRNA sense strand
cccuggaucuccucuuuaa

SEQ ID NO: 1320542 - RNA, 19 nt, Homo sapiens
  misc_RNA (1)...(19): siRNA sense strand
agaagaaggcagcugagua

SEQ ID NO: 1320543 - RNA, 19 nt, Homo sapiens
  misc_RNA (1)...(19): siRNA sense strand
aggaaggugugaagaagaa

SEQ ID NO: 1320544 - RNA, 19 nt, Homo sapiens
  misc_RNA (1)...(19): siRNA sense strand
ccgcgcaguucaucucaaa

SEQ ID NO: 1320545 - RNA, 19 nt, Homo sapiens
  misc_RNA (1)...(19): siRNA sense strand
ccagguguuuggccgguuu

SEQ ID NO: 1320546 - RNA, 19 nt, Homo sapiens
  misc_RNA (1)...(19): siRNA sense strand
ccaggaaggugugaagaag

SEQ ID NO: 1320547 - RNA, 19 nt, Homo sapiens
  misc_RNA (1)...(19): siRNA sense strand
gcgcaguucaucucaaaga

SEQ ID NO: 1320548 - RNA, 19 nt, Homo sapiens
  misc_RNA (1)...(19): siRNA sense strand
gggcuacaccgaguacaaa

SEQ ID NO: 1320549 - RNA, 19 nt, Homo sapiens
  misc_RNA (1)...(19): siRNA sense strand
aggcugagcuugcccucuu

SEQ ID NO: 1320550 - RNA, 19 nt, Homo sapiens
  misc_RNA (1)...(19): siRNA sense strand
aaagaaggacccagaggau

SEQ ID NO: 1320551 - RNA, 19 nt, Homo sapiens
  misc_RNA (1)...(19): siRNA sense strand
gccaggaaggugugaagaa

SEQ ID NO: 1320552 - RNA, 19 nt, Homo sapiens
  misc_RNA (1)...(19): siRNA sense strand
aaaguaaccgcgcaguuca

SEQ ID NO: 1320553 - RNA, 19 nt, Homo sapiens
  misc_RNA (1)...(19): siRNA sense strand
gcccuggaucuccucuuua

SEQ ID NO: 1320554 - RNA, 19 nt, Homo sapiens
  misc_RNA (1)...(19): siRNA sense strand
uaccugcgcucaacaacag

SEQ ID NO: 1320555 - RNA, 19 nt, Homo sapiens
  misc_RNA (1)...(19): siRNA sense strand
agaaggacccagaggaugu

SEQ ID NO: 1320556 - RNA, 19 nt, Homo sapiens
  misc_RNA (1)...(19): siRNA sense strand
gcaguucaucucaaagaag

SEQ ID NO: 1320557 - RNA, 19 nt, Homo sapiens
  misc_RNA (1)...(19): siRNA sense strand
guuugaagccucagugauc

SEQ ID NO: 1320558 - RNA, 19 nt, Homo sapiens
  misc_RNA (1)...(19): siRNA sense strand
aagaggugguggucuggaa

SEQ ID NO: 1320559 - RNA, 19 nt, Homo sapiens
  misc_RNA (1)...(19): siRNA sense strand
ggaccugcuucgcuucacu

SEQ ID NO: 1320560 - RNA, 19 nt, Homo sapiens
  misc_RNA (1)...(19): siRNA sense strand
cgcaguucaucucaaagaa

SEQ ID NO: 1320561 - RNA, 19 nt, Homo sapiens
  misc_RNA (1)...(19): siRNA sense strand
ccaagggcuacaccgagua

SEQ ID NO: 1320562 - RNA, 19 nt, Homo sapiens
  misc_RNA (1)...(19): siRNA sense strand
cccagaggaugucaaagag

SEQ ID NO: 1320563 - RNA, 19 nt, Homo sapiens
  misc_RNA (1)...(19): siRNA sense strand
gaagcgggcagaggagauc

SEQ ID NO: 1320564 - RNA, 19 nt, Homo sapiens
  misc_RNA (1)...(19): siRNA sense strand
acccagaggaugucaaaga

SEQ ID NO: 1320565 - RNA, 19 nt, Homo sapiens
  misc_RNA (1)...(19): siRNA sense strand
gaaggacccagaggauguc

SEQ ID NO: 1320566 - RNA, 19 nt, Homo sapiens
  misc_RNA (1)...(19): siRNA sense strand
caggaaggugugaagaaga

SEQ ID NO: 1320567 - RNA, 19 nt, Homo sapiens
  misc_RNA (1)...(19): siRNA sense strand
ccagggaccuacacauccu

SEQ ID NO: 1320568 - RNA, 19 nt, Homo sapiens
  misc_RNA (1)...(19): siRNA sense strand
acaaaguaaccgcgcaguu

SEQ ID NO: 1320569 - RNA, 19 nt, Homo sapiens
  misc_RNA (1)...(19): siRNA sense strand
gcacauaccugcgcucaac

SEQ ID NO: 1320570 - RNA, 19 nt, Homo sapiens
  misc_RNA (1)...(19): siRNA sense strand
gaagaaggcagcugaguac

SEQ ID NO: 1320571 - RNA, 19 nt, Homo sapiens
  misc_RNA (1)...(19): siRNA sense strand
caaaguaaccgcgcaguuc

SEQ ID NO: 1320572 - RNA, 19 nt, Homo sapiens
  misc_RNA (1)...(19): siRNA sense strand
ggcccuggaucuccucuuu

SEQ ID NO: 1320573 - RNA, 19 nt, Homo sapiens
  misc_RNA (1)...(19): siRNA sense strand
ggacccagaggaugucaaa

SEQ ID NO: 1320574 - RNA, 19 nt, Homo sapiens
  misc_RNA (1)...(19): siRNA sense strand
cuacaccgaguacaaagua

SEQ ID NO: 1320575 - RNA, 19 nt, Homo sapiens
  misc_RNA (1)...(19): siRNA sense strand
ucgcuucacugugcacaua

SEQ ID NO: 1320576 - RNA, 19 nt, Homo sapiens
  misc_RNA (1)...(19): siRNA sense strand
cccuggaucuccucuuuaa

SEQ ID NO: 1320577 - RNA, 19 nt, Homo sapiens
  misc_RNA (1)...(19): siRNA sense strand
agaagaaggcagcugagua

SEQ ID NO: 1320578 - RNA, 19 nt, Homo sapiens
  misc_RNA (1)...(19): siRNA sense strand
aggaaggugugaagaagaa

SEQ ID NO: 1320579 - RNA, 19 nt, Homo sapiens
  misc_RNA (1)...(19): siRNA sense strand
ccgcgcaguucaucucaaa

SEQ ID NO: 1320580 - RNA, 19 nt, Homo sapiens
  misc_RNA (1)...(19): siRNA sense strand
ccagguguuuggccgguuu

SEQ ID NO: 1320581 - RNA, 19 nt, Homo sapiens
  misc_RNA (1)...(19): siRNA sense strand
ccaggaaggugugaagaag

SEQ ID NO: 1320582 - RNA, 19 nt, Homo sapiens
  misc_RNA (1)...(19): siRNA sense strand
gcgcaguucaucucaaaga

SEQ ID NO: 1320583 - RNA, 19 nt, Homo sapiens
  misc_RNA (1)...(19): siRNA sense strand
gggcuacaccgaguacaaa

SEQ ID NO: 1320584 - RNA, 19 nt, Homo sapiens
  misc_RNA (1)...(19): siRNA sense strand
aggcugagcuugcccucuu

SEQ ID NO: 1320585 - RNA, 19 nt, Homo sapiens
  misc_RNA (1)...(19): siRNA sense strand
aaagaaggacccagaggau

SEQ ID NO: 1320586 - RNA, 19 nt, Homo sapiens
  misc_RNA (1)...(19): siRNA sense strand
gccaggaaggugugaagaa

SEQ ID NO: 1320587 - RNA, 19 nt, Homo sapiens
  misc_RNA (1)...(19): siRNA sense strand
aaaguaaccgcgcaguuca

SEQ ID NO: 1320588 - RNA, 19 nt, Homo sapiens
  misc_RNA (1)...(19): siRNA sense strand
gcccuggaucuccucuuua

SEQ ID NO: 1320589 - RNA, 19 nt, Homo sapiens
  misc_RNA (1)...(19): siRNA sense strand
uaccugcgcucaacaacag

SEQ ID NO: 1320590 - RNA, 19 nt, Homo sapiens
  misc_RNA (1)...(19): siRNA sense strand
agaaggacccagaggaugu

SEQ ID NO: 1320591 - RNA, 19 nt, Homo sapiens
  misc_RNA (1)...(19): siRNA sense strand
gcaguucaucucaaagaag

SEQ ID NO: 1320592 - RNA, 19 nt, Homo sapiens
  misc_RNA (1)...(19): siRNA sense strand
guuugaagccucagugauc

SEQ ID NO: 1320593 - RNA, 19 nt, Homo sapiens
  misc_RNA (1)...(19): siRNA sense strand
aagaggugguggucuggaa

SEQ ID NO: 1320594 - RNA, 19 nt, Homo sapiens
  misc_RNA (1)...(19): siRNA sense strand
ggaccugcuucgcuucacu

SEQ ID NO: 1320595 - RNA, 19 nt, Homo sapiens
  misc_RNA (1)...(19): siRNA sense strand
cgcaguucaucucaaagaa

SEQ ID NO: 1320596 - RNA, 19 nt, Homo sapiens
  misc_RNA (1)...(19): siRNA sense strand
ccaagggcuacaccgagua

SEQ ID NO: 1320597 - RNA, 19 nt, Homo sapiens
  misc_RNA (1)...(19): siRNA sense strand
cccagaggaugucaaagag

SEQ ID NO: 1320598 - RNA, 19 nt, Homo sapiens
  misc_RNA (1)...(19): siRNA sense strand
gaagcgggcagaggagauc

SEQ ID NO: 1320599 - RNA, 19 nt, Homo sapiens
  misc_RNA (1)...(19): siRNA sense strand
acccagaggaugucaaaga

SEQ ID NO: 1320600 - RNA, 19 nt, Homo sapiens
  misc_RNA (1)...(19): siRNA sense strand
gaaggacccagaggauguc

SEQ ID NO: 1320601 - RNA, 19 nt, Homo sapiens
  misc_RNA (1)...(19): siRNA sense strand
caggaaggugugaagaaga

SEQ ID NO: 1320602 - RNA, 19 nt, Homo sapiens
  misc_RNA (1)...(19): siRNA sense strand
ccagggaccuacacauccu

SEQ ID NO: 1320603 - RNA, 19 nt, Homo sapiens
  misc_RNA (1)...(19): siRNA sense strand
acaaaguaaccgcgcaguu

SEQ ID NO: 1320604 - RNA, 19 nt, Homo sapiens
  misc_RNA (1)...(19): siRNA sense strand
gcaauuacuuucugguuaa

SEQ ID NO: 1320605 - RNA, 19 nt, Homo sapiens
  misc_RNA (1)...(19): siRNA sense strand
caaagaggauuucaacaga

SEQ ID NO: 1320606 - RNA, 19 nt, Homo sapiens
  misc_RNA (1)...(19): siRNA sense strand
gcaaguguuucuuaacuga

SEQ ID NO: 1320607 - RNA, 19 nt, Homo sapiens
  misc_RNA (1)...(19): siRNA sense strand
ggauuaacgucucgcaauu

SEQ ID NO: 1320608 - RNA, 19 nt, Homo sapiens
  misc_RNA (1)...(19): siRNA sense strand
gcaccagccucuagucuca

SEQ ID NO: 1320609 - RNA, 19 nt, Homo sapiens
  misc_RNA (1)...(19): siRNA sense strand
gagauccgguguccuuauu

SEQ ID NO: 1320610 - RNA, 19 nt, Homo sapiens
  misc_RNA (1)...(19): siRNA sense strand
gaaacugcuuuauccaaau

SEQ ID NO: 1320611 - RNA, 19 nt, Homo sapiens
  misc_RNA (1)...(19): siRNA sense strand
auacgaaacucaaagagaa

SEQ ID NO: 1320612 - RNA, 19 nt, Homo sapiens
  misc_RNA (1)...(19): siRNA sense strand
caacagaaacugcuuuauc

SEQ ID NO: 1320613 - RNA, 19 nt, Homo sapiens
  misc_RNA (1)...(19): siRNA sense strand
caucuacaaugcggauuua

SEQ ID NO: 1320614 - RNA, 19 nt, Homo sapiens
  misc_RNA (1)...(19): siRNA sense strand
gcaugaaggagucacauuu

SEQ ID NO: 1320615 - RNA, 19 nt, Homo sapiens
  misc_RNA (1)...(19): siRNA sense strand
agaaacugcuuuauccaaa

SEQ ID NO: 1320616 - RNA, 19 nt, Homo sapiens
  misc_RNA (1)...(19): siRNA sense strand
cgcaauuacuuucugguua

SEQ ID NO: 1320617 - RNA, 19 nt, Homo sapiens
  misc_RNA (1)...(19): siRNA sense strand
ggaaccagccgagaaauug

SEQ ID NO: 1320618 - RNA, 19 nt, Homo sapiens
  misc_RNA (1)...(19): siRNA sense strand
gaaaucggaucugcgaaca

SEQ ID NO: 1320619 - RNA, 19 nt, Homo sapiens
  misc_RNA (1)...(19): siRNA sense strand
gaacccaggcucaguaaca

SEQ ID NO: 1320620 - RNA, 19 nt, Homo sapiens
  misc_RNA (1)...(19): siRNA sense strand
gauuaacgucucgcaauua

SEQ ID NO: 1320621 - RNA, 19 nt, Homo sapiens
  misc_RNA (1)...(19): siRNA sense strand
gaagaacagagucguggaa

SEQ ID NO: 1320622 - RNA, 19 nt, Homo sapiens
  misc_RNA (1)...(19): siRNA sense strand
gaauuucuccuguuucauc

SEQ ID NO: 1320623 - RNA, 19 nt, Homo sapiens
  misc_RNA (1)...(19): siRNA sense strand
aaagaggauuucaacagaa

SEQ ID NO: 1320624 - RNA, 19 nt, Homo sapiens
  misc_RNA (1)...(19): siRNA sense strand
guaccgcugcucagaauuu

SEQ ID NO: 1320625 - RNA, 19 nt, Homo sapiens
  misc_RNA (1)...(19): siRNA sense strand
ccaggacgaugaauuuaag

SEQ ID NO: 1320626 - RNA, 19 nt, Homo sapiens
  misc_RNA (1)...(19): siRNA sense strand
ccaauucuuugauucacuu

SEQ ID NO: 1320627 - RNA, 19 nt, Homo sapiens
  misc_RNA (1)...(19): siRNA sense strand
ccgguguccuuauuacaua

SEQ ID NO: 1320628 - RNA, 19 nt, Homo sapiens
  misc_RNA (1)...(19): siRNA sense strand
cagcaaguguuucuuaacu

SEQ ID NO: 1320629 - RNA, 19 nt, Homo sapiens
  misc_RNA (1)...(19): siRNA sense strand
uaacggaaccagccgagaa

SEQ ID NO: 1320630 - RNA, 19 nt, Homo sapiens
  misc_RNA (1)...(19): siRNA sense strand
cuacaaugcggauuuaaug

SEQ ID NO: 1320631 - RNA, 19 nt, Homo sapiens
  misc_RNA (1)...(19): siRNA sense strand
uaacgucucgcaauuacuu

SEQ ID NO: 1320632 - RNA, 19 nt, Homo sapiens
  misc_RNA (1)...(19): siRNA sense strand
cccgugacguccaguauuu

SEQ ID NO: 1320633 - RNA, 19 nt, Homo sapiens
  misc_RNA (1)...(19): siRNA sense strand
ggcauccaauucuuugauu

SEQ ID NO: 1320634 - RNA, 19 nt, Homo sapiens
  misc_RNA (1)...(19): siRNA sense strand
gaaauuugucugcaugaag

SEQ ID NO: 1320635 - RNA, 19 nt, Homo sapiens
  misc_RNA (1)...(19): siRNA sense strand
gaaaggcuaccgcgaagag

SEQ ID NO: 1320636 - RNA, 19 nt, Homo sapiens
  misc_RNA (1)...(19): siRNA sense strand
ggguaccgcugcucagaau

SEQ ID NO: 1320637 - RNA, 19 nt, Homo sapiens
  misc_RNA (1)...(19): siRNA sense strand
ugaaauuugucugcaugaa

SEQ ID NO: 1320638 - RNA, 19 nt, Homo sapiens
  misc_RNA (1)...(19): siRNA sense strand
gcauccaauucuuugauuc

SEQ ID NO: 1320639 - RNA, 19 nt, Homo sapiens
  misc_RNA (1)...(19): siRNA sense strand
caagccuucugcucuguga

SEQ ID NO: 1320640 - RNA, 19 nt, Homo sapiens
  misc_RNA (1)...(19): siRNA sense strand
gauccgguguccuuauuac

SEQ ID NO: 1320641 - RNA, 19 nt, Homo sapiens
  misc_RNA (1)...(19): siRNA sense strand
cgugaauacuagucaaaga

SEQ ID NO: 1320642 - RNA, 19 nt, Homo sapiens
  misc_RNA (1)...(19): siRNA sense strand
cuucagcaaguguuucuua

SEQ ID NO: 1320643 - RNA, 19 nt, Homo sapiens
  misc_RNA (1)...(19): siRNA sense strand
gaugucaccuggauaaccu

SEQ ID NO: 1320644 - RNA, 19 nt, Homo sapiens
  misc_RNA (1)...(19): siRNA sense strand
caugaaggagucacauuug

SEQ ID NO: 1320645 - RNA, 19 nt, Homo sapiens
  misc_RNA (1)...(19): siRNA sense strand
ucaccuggauaaccuguca

SEQ ID NO: 1320646 - RNA, 19 nt, Homo sapiens
  misc_RNA (1)...(19): siRNA sense strand
ggagauccgguguccuuau

SEQ ID NO: 1320647 - RNA, 19 nt, Homo sapiens
  misc_RNA (1)...(19): siRNA sense strand
ucaaagaggauuucaacag

SEQ ID NO: 1320648 - RNA, 19 nt, Homo sapiens
  misc_RNA (1)...(19): siRNA sense strand
guacauacgaaacucaaag

SEQ ID NO: 1320649 - RNA, 19 nt, Homo sapiens
  misc_RNA (1)...(19): siRNA sense strand
augaaggagucacauuuga

SEQ ID NO: 1320650 - RNA, 19 nt, Homo sapiens
  misc_RNA (1)...(19): siRNA sense strand
cagaaacugcuuuauccaa

SEQ ID NO: 1320651 - RNA, 19 nt, Homo sapiens
  misc_RNA (1)...(19): siRNA sense strand
caaugcggauuuaaugaac

SEQ ID NO: 1320652 - RNA, 19 nt, Homo sapiens
  misc_RNA (1)...(19): siRNA sense strand
gaucaucugggaggaauuc

SEQ ID NO: 1320653 - RNA, 19 nt, Homo sapiens
  misc_RNA (1)...(19): siRNA sense strand
cauacgaaacucaaagaga

SEQ ID NO: 1320654 - RNA, 19 nt, Homo sapiens
  misc_RNA (1)...(19): siRNA sense strand
acaaugcggauuuaaugaa

SEQ ID NO: 1320655 - RNA, 19 nt, Homo sapiens
  misc_RNA (1)...(19): siRNA sense strand
ucacgugaauacuagucaa

SEQ ID NO: 1320656 - RNA, 19 nt, Homo sapiens
  misc_RNA (1)...(19): siRNA sense strand
caaccuucagcaaguguuu

SEQ ID NO: 1320657 - RNA, 19 nt, Homo sapiens
  misc_RNA (1)...(19): siRNA sense strand
ggaauucaccccagaggaa

SEQ ID NO: 1320658 - RNA, 19 nt, Homo sapiens
  misc_RNA (1)...(19): siRNA sense strand
aacagaaacugcuuuaucc

SEQ ID NO: 1320659 - RNA, 19 nt, Homo sapiens
  misc_RNA (1)...(19): siRNA sense strand
gacaagccuucugcucugu

SEQ ID NO: 1320660 - RNA, 19 nt, Homo sapiens
  misc_RNA (1)...(19): siRNA sense strand
gaaccagccgagaaauugg

SEQ ID NO: 1320661 - RNA, 19 nt, Homo sapiens
  misc_RNA (1)...(19): siRNA sense strand
aaucggaucugcgaacagu

SEQ ID NO: 1320662 - RNA, 19 nt, Homo sapiens
  misc_RNA (1)...(19): siRNA sense strand
guggaacccaggcucagua

SEQ ID NO: 1320663 - RNA, 19 nt, Homo sapiens
  misc_RNA (1)...(19): siRNA sense strand
acacaaccuucagcaagug

SEQ ID NO: 1320664 - RNA, 19 nt, Homo sapiens
  misc_RNA (1)...(19): siRNA sense strand
ugggaugucaccuggauaa

SEQ ID NO: 1320665 - RNA, 19 nt, Homo sapiens
  misc_RNA (1)...(19): siRNA sense strand
uaacugacaagaagaacag

SEQ ID NO: 1320666 - RNA, 19 nt, Homo sapiens
  misc_RNA (1)...(19): siRNA sense strand
aacacaaccuucagcaagu

SEQ ID NO: 1320667 - RNA, 19 nt, Homo sapiens
  misc_RNA (1)...(19): siRNA sense strand
acuccaggacgaugaauuu

SEQ ID NO: 1320668 - RNA, 19 nt, Homo sapiens
  misc_RNA (1)...(19): siRNA sense strand
aagcugggacugccaagaa

SEQ ID NO: 1320669 - RNA, 19 nt, Homo sapiens
  misc_RNA (1)...(19): siRNA sense strand
uucagcaaguguuucuuaa

SEQ ID NO: 1320670 - RNA, 19 nt, Homo sapiens
  misc_RNA (1)...(19): siRNA sense strand
cggaaccagccgagaaauu

SEQ ID NO: 1320671 - RNA, 19 nt, Homo sapiens
  misc_RNA (1)...(19): siRNA sense strand
gcucaguaacaacgaaugu

SEQ ID NO: 1320672 - RNA, 19 nt, Homo sapiens
  misc_RNA (1)...(19): siRNA sense strand
gaggguaccgcugcucaga

SEQ ID NO: 1320673 - RNA, 19 nt, Homo sapiens
  misc_RNA (1)...(19): siRNA sense strand
cauccaauucuuugauuca

SEQ ID NO: 1320674 - RNA, 19 nt, Homo sapiens
  misc_RNA (1)...(19): siRNA sense strand
caagaaaacacaaccuuca

SEQ ID NO: 1320675 - RNA, 19 nt, Homo sapiens
  misc_RNA (1)...(19): siRNA sense strand
uacaaugcggauuuaauga

SEQ ID NO: 1320676 - RNA, 19 nt, Homo sapiens
  misc_RNA (1)...(19): siRNA sense strand
ggaaaggcuaccgcgaaga

SEQ ID NO: 1320677 - RNA, 19 nt, Homo sapiens
  misc_RNA (1)...(19): siRNA sense strand
gggagauccgguguccuua

SEQ ID NO: 1320678 - RNA, 19 nt, Homo sapiens
  misc_RNA (1)...(19): siRNA sense strand
gcggauuuaaugaacugua

SEQ ID NO: 1320679 - RNA, 19 nt, Homo sapiens
  misc_RNA (1)...(19): siRNA sense strand
uccaggacgaugaauuuaa

SEQ ID NO: 1320680 - RNA, 19 nt, Homo sapiens
  misc_RNA (1)...(19): siRNA sense strand
cggauuuaaugaacuguac

SEQ ID NO: 1320681 - RNA, 19 nt, Homo sapiens
  misc_RNA (1)...(19): siRNA sense strand
ucaucuacaaugcggauuu

SEQ ID NO: 1320682 - RNA, 19 nt, Homo sapiens
  misc_RNA (1)...(19): siRNA sense strand
ugugggaugucaccuggau

SEQ ID NO: 1320683 - RNA, 19 nt, Homo sapiens
  misc_RNA (1)...(19): siRNA sense strand
gcaauuacuuucugguuaa

SEQ ID NO: 1320684 - RNA, 19 nt, Homo sapiens
  misc_RNA (1)...(19): siRNA sense strand
caaagaggauuucaacaga

SEQ ID NO: 1320685 - RNA, 19 nt, Homo sapiens
  misc_RNA (1)...(19): siRNA sense strand
gcaaguguuucuuaacuga

SEQ ID NO: 1320686 - RNA, 19 nt, Homo sapiens
  misc_RNA (1)...(19): siRNA sense strand
ggauuaacgucucgcaauu

SEQ ID NO: 1320687 - RNA, 19 nt, Homo sapiens
  misc_RNA (1)...(19): siRNA sense strand
gcaccagccucuagucuca

SEQ ID NO: 1320688 - RNA, 19 nt, Homo sapiens
  misc_RNA (1)...(19): siRNA sense strand
gagauccgguguccuuauu

SEQ ID NO: 1320689 - RNA, 19 nt, Homo sapiens
  misc_RNA (1)...(19): siRNA sense strand
gaaacugcuuuauccaaau

SEQ ID NO: 1320690 - RNA, 19 nt, Homo sapiens
  misc_RNA (1)...(19): siRNA sense strand
auacgaaacucaaagagaa

SEQ ID NO: 1320691 - RNA, 19 nt, Homo sapiens
  misc_RNA (1)...(19): siRNA sense strand
caacagaaacugcuuuauc

SEQ ID NO: 1320692 - RNA, 19 nt, Homo sapiens
  misc_RNA (1)...(19): siRNA sense strand
caucuacaaugcggauuua

SEQ ID NO: 1320693 - RNA, 19 nt, Homo sapiens
  misc_RNA (1)...(19): siRNA sense strand
gcaugaaggagucacauuu

SEQ ID NO: 1320694 - RNA, 19 nt, Homo sapiens
  misc_RNA (1)...(19): siRNA sense strand
agaaacugcuuuauccaaa

SEQ ID NO: 1320695 - RNA, 19 nt, Homo sapiens
  misc_RNA (1)...(19): siRNA sense strand
cgcaauuacuuucugguua

SEQ ID NO: 1320696 - RNA, 19 nt, Homo sapiens
  misc_RNA (1)...(19): siRNA sense strand
ggaaccagccgagaaauug

SEQ ID NO: 1320697 - RNA, 19 nt, Homo sapiens
  misc_RNA (1)...(19): siRNA sense strand
gaaaucggaucugcgaaca

SEQ ID NO: 1320698 - RNA, 19 nt, Homo sapiens
  misc_RNA (1)...(19): siRNA sense strand
gaacccaggcucaguaaca

SEQ ID NO: 1320699 - RNA, 19 nt, Homo sapiens
  misc_RNA (1)...(19): siRNA sense strand
gauuaacgucucgcaauua

SEQ ID NO: 1320700 - RNA, 19 nt, Homo sapiens
  misc_RNA (1)...(19): siRNA sense strand
gaagaacagagucguggaa

SEQ ID NO: 1320701 - RNA, 19 nt, Homo sapiens
  misc_RNA (1)...(19): siRNA sense strand
gaauuucuccuguuucauc

SEQ ID NO: 1320702 - RNA, 19 nt, Homo sapiens
  misc_RNA (1)...(19): siRNA sense strand
aaagaggauuucaacagaa

SEQ ID NO: 1320703 - RNA, 19 nt, Homo sapiens
  misc_RNA (1)...(19): siRNA sense strand
guaccgcugcucagaauuu

SEQ ID NO: 1320704 - RNA, 19 nt, Homo sapiens
  misc_RNA (1)...(19): siRNA sense strand
ccaggacgaugaauuuaag

SEQ ID NO: 1320705 - RNA, 19 nt, Homo sapiens
  misc_RNA (1)...(19): siRNA sense strand
ccaauucuuugauucacuu

SEQ ID NO: 1320706 - RNA, 19 nt, Homo sapiens
  misc_RNA (1)...(19): siRNA sense strand
ccgguguccuuauuacaua

SEQ ID NO: 1320707 - RNA, 19 nt, Homo sapiens
  misc_RNA (1)...(19): siRNA sense strand
cagcaaguguuucuuaacu

SEQ ID NO: 1320708 - RNA, 19 nt, Homo sapiens
  misc_RNA (1)...(19): siRNA sense strand
uaacggaaccagccgagaa

SEQ ID NO: 1320709 - RNA, 19 nt, Homo sapiens
  misc_RNA (1)...(19): siRNA sense strand
cuacaaugcggauuuaaug

SEQ ID NO: 1320710 - RNA, 19 nt, Homo sapiens
  misc_RNA (1)...(19): siRNA sense strand
uaacgucucgcaauuacuu

SEQ ID NO: 1320711 - RNA, 19 nt, Homo sapiens
  misc_RNA (1)...(19): siRNA sense strand
cccgugacguccaguauuu

SEQ ID NO: 1320712 - RNA, 19 nt, Homo sapiens
  misc_RNA (1)...(19): siRNA sense strand
ggcauccaauucuuugauu

SEQ ID NO: 1320713 - RNA, 19 nt, Homo sapiens
  misc_RNA (1)...(19): siRNA sense strand
gaaauuugucugcaugaag

SEQ ID NO: 1320714 - RNA, 19 nt, Homo sapiens
  misc_RNA (1)...(19): siRNA sense strand
gaaaggcuaccgcgaagag

SEQ ID NO: 1320715 - RNA, 19 nt, Homo sapiens
  misc_RNA (1)...(19): siRNA sense strand
ggguaccgcugcucagaau

SEQ ID NO: 1320716 - RNA, 19 nt, Homo sapiens
  misc_RNA (1)...(19): siRNA sense strand
ugaaauuugucugcaugaa

SEQ ID NO: 1320717 - RNA, 19 nt, Homo sapiens
  misc_RNA (1)...(19): siRNA sense strand
gcauccaauucuuugauuc

SEQ ID NO: 1320718 - RNA, 19 nt, Homo sapiens
  misc_RNA (1)...(19): siRNA sense strand
caagccuucugcucuguga

SEQ ID NO: 1320719 - RNA, 19 nt, Homo sapiens
  misc_RNA (1)...(19): siRNA sense strand
gauccgguguccuuauuac

SEQ ID NO: 1320720 - RNA, 19 nt, Homo sapiens
  misc_RNA (1)...(19): siRNA sense strand
cgugaauacuagucaaaga

SEQ ID NO: 1320721 - RNA, 19 nt, Homo sapiens
  misc_RNA (1)...(19): siRNA sense strand
cuucagcaaguguuucuua

SEQ ID NO: 1320722 - RNA, 19 nt, Homo sapiens
  misc_RNA (1)...(19): siRNA sense strand
gaugucaccuggauaaccu

SEQ ID NO: 1320723 - RNA, 19 nt, Homo sapiens
  misc_RNA (1)...(19): siRNA sense strand
caugaaggagucacauuug

SEQ ID NO: 1320724 - RNA, 19 nt, Homo sapiens
  misc_RNA (1)...(19): siRNA sense strand
ucaccuggauaaccuguca

SEQ ID NO: 1320725 - RNA, 19 nt, Homo sapiens
  misc_RNA (1)...(19): siRNA sense strand
ggagauccgguguccuuau

SEQ ID NO: 1320726 - RNA, 19 nt, Homo sapiens
  misc_RNA (1)...(19): siRNA sense strand
ucaaagaggauuucaacag

SEQ ID NO: 1320727 - RNA, 19 nt, Homo sapiens
  misc_RNA (1)...(19): siRNA sense strand
guacauacgaaacucaaag

SEQ ID NO: 1320728 - RNA, 19 nt, Homo sapiens
  misc_RNA (1)...(19): siRNA sense strand
augaaggagucacauuuga

SEQ ID NO: 1320729 - RNA, 19 nt, Homo sapiens
  misc_RNA (1)...(19): siRNA sense strand
cagaaacugcuuuauccaa

SEQ ID NO: 1320730 - RNA, 19 nt, Homo sapiens
  misc_RNA (1)...(19): siRNA sense strand
caaugcggauuuaaugaac

SEQ ID NO: 1320731 - RNA, 19 nt, Homo sapiens
  misc_RNA (1)...(19): siRNA sense strand
gaucaucugggaggaauuc

SEQ ID NO: 1320732 - RNA, 19 nt, Homo sapiens
  misc_RNA (1)...(19): siRNA sense strand
cauacgaaacucaaagaga

SEQ ID NO: 1320733 - RNA, 19 nt, Homo sapiens
  misc_RNA (1)...(19): siRNA sense strand
acaaugcggauuuaaugaa

SEQ ID NO: 1320734 - RNA, 19 nt, Homo sapiens
  misc_RNA (1)...(19): siRNA sense strand
ucacgugaauacuagucaa

SEQ ID NO: 1320735 - RNA, 19 nt, Homo sapiens
  misc_RNA (1)...(19): siRNA sense strand
caaccuucagcaaguguuu

SEQ ID NO: 1320736 - RNA, 19 nt, Homo sapiens
  misc_RNA (1)...(19): siRNA sense strand
ggaauucaccccagaggaa

SEQ ID NO: 1320737 - RNA, 19 nt, Homo sapiens
  misc_RNA (1)...(19): siRNA sense strand
aacagaaacugcuuuaucc

SEQ ID NO: 1320738 - RNA, 19 nt, Homo sapiens
  misc_RNA (1)...(19): siRNA sense strand
gacaagccuucugcucugu

SEQ ID NO: 1320739 - RNA, 19 nt, Homo sapiens
  misc_RNA (1)...(19): siRNA sense strand
gaaccagccgagaaauugg

SEQ ID NO: 1320740 - RNA, 19 nt, Homo sapiens
  misc_RNA (1)...(19): siRNA sense strand
aaucggaucugcgaacagu

SEQ ID NO: 1320741 - RNA, 19 nt, Homo sapiens
  misc_RNA (1)...(19): siRNA sense strand
guggaacccaggcucagua

SEQ ID NO: 1320742 - RNA, 19 nt, Homo sapiens
  misc_RNA (1)...(19): siRNA sense strand
acacaaccuucagcaagug

SEQ ID NO: 1320743 - RNA, 19 nt, Homo sapiens
  misc_RNA (1)...(19): siRNA sense strand
ugggaugucaccuggauaa

SEQ ID NO: 1320744 - RNA, 19 nt, Homo sapiens
  misc_RNA (1)...(19): siRNA sense strand
uaacugacaagaagaacag

SEQ ID NO: 1320745 - RNA, 19 nt, Homo sapiens
  misc_RNA (1)...(19): siRNA sense strand
aacacaaccuucagcaagu

SEQ ID NO: 1320746 - RNA, 19 nt, Homo sapiens
  misc_RNA (1)...(19): siRNA sense strand
acuccaggacgaugaauuu

SEQ ID NO: 1320747 - RNA, 19 nt, Homo sapiens
  misc_RNA (1)...(19): siRNA sense strand
aagcugggacugccaagaa

SEQ ID NO: 1320748 - RNA, 19 nt, Homo sapiens
  misc_RNA (1)...(19): siRNA sense strand
uucagcaaguguuucuuaa

SEQ ID NO: 1320749 - RNA, 19 nt, Homo sapiens
  misc_RNA (1)...(19): siRNA sense strand
cggaaccagccgagaaauu

SEQ ID NO: 1320750 - RNA, 19 nt, Homo sapiens
  misc_RNA (1)...(19): siRNA sense strand
gcucaguaacaacgaaugu

SEQ ID NO: 1320751 - RNA, 19 nt, Homo sapiens
  misc_RNA (1)...(19): siRNA sense strand
gaggguaccgcugcucaga

SEQ ID NO: 1320752 - RNA, 19 nt, Homo sapiens
  misc_RNA (1)...(19): siRNA sense strand
cauccaauucuuugauuca

SEQ ID NO: 1320753 - RNA, 19 nt, Homo sapiens
  misc_RNA (1)...(19): siRNA sense strand
caagaaaacacaaccuuca

SEQ ID NO: 1320754 - RNA, 19 nt, Homo sapiens
  misc_RNA (1)...(19): siRNA sense strand
uacaaugcggauuuaauga

SEQ ID NO: 1320755 - RNA, 19 nt, Homo sapiens
  misc_RNA (1)...(19): siRNA sense strand
ggaaaggcuaccgcgaaga

SEQ ID NO: 1320756 - RNA, 19 nt, Homo sapiens
  misc_RNA (1)...(19): siRNA sense strand
gggagauccgguguccuua

SEQ ID NO: 1320757 - RNA, 19 nt, Homo sapiens
  misc_RNA (1)...(19): siRNA sense strand
gcggauuuaaugaacugua

SEQ ID NO: 1320758 - RNA, 19 nt, Homo sapiens
  misc_RNA (1)...(19): siRNA sense strand
uccaggacgaugaauuuaa

SEQ ID NO: 1320759 - RNA, 19 nt, Homo sapiens
  misc_RNA (1)...(19): siRNA sense strand
cggauuuaaugaacuguac

SEQ ID NO: 1320760 - RNA, 19 nt, Homo sapiens
  misc_RNA (1)...(19): siRNA sense strand
ucaucuacaaugcggauuu

SEQ ID NO: 1320761 - RNA, 19 nt, Homo sapiens
  misc_RNA (1)...(19): siRNA sense strand
ugugggaugucaccuggau

SEQ ID NO: 1320762 - RNA, 19 nt, Homo sapiens
  misc_RNA (1)...(19): siRNA sense strand
gcaauuacuuucugguuaa

SEQ ID NO: 1320763 - RNA, 19 nt, Homo sapiens
  misc_RNA (1)...(19): siRNA sense strand
caaagaggauuucaacaga

SEQ ID NO: 1320764 - RNA, 19 nt, Homo sapiens
  misc_RNA (1)...(19): siRNA sense strand
gcaaguguuucuuaacuga

SEQ ID NO: 1320765 - RNA, 19 nt, Homo sapiens
  misc_RNA (1)...(19): siRNA sense strand
ggauuaacgucucgcaauu

SEQ ID NO: 1320766 - RNA, 19 nt, Homo sapiens
  misc_RNA (1)...(19): siRNA sense strand
ugaaggaaauuaccugaga

SEQ ID NO: 1320767 - RNA, 19 nt, Homo sapiens
  misc_RNA (1)...(19): siRNA sense strand
gcaccagccucuagucuca

SEQ ID NO: 1320768 - RNA, 19 nt, Homo sapiens
  misc_RNA (1)...(19): siRNA sense strand
gagauccgguguccuuauu

SEQ ID NO: 1320769 - RNA, 19 nt, Homo sapiens
  misc_RNA (1)...(19): siRNA sense strand
gaaacugcuuuauccaaau

SEQ ID NO: 1320770 - RNA, 19 nt, Homo sapiens
  misc_RNA (1)...(19): siRNA sense strand
auacgaaacucaaagagaa

SEQ ID NO: 1320771 - RNA, 19 nt, Homo sapiens
  misc_RNA (1)...(19): siRNA sense strand
caacagaaacugcuuuauc

SEQ ID NO: 1320772 - RNA, 19 nt, Homo sapiens
  misc_RNA (1)...(19): siRNA sense strand
caucuacaaugcggauuua

SEQ ID NO: 1320773 - RNA, 19 nt, Homo sapiens
  misc_RNA (1)...(19): siRNA sense strand
gcaugaaggagucacauuu

SEQ ID NO: 1320774 - RNA, 19 nt, Homo sapiens
  misc_RNA (1)...(19): siRNA sense strand
agaaacugcuuuauccaaa

SEQ ID NO: 1320775 - RNA, 19 nt, Homo sapiens
  misc_RNA (1)...(19): siRNA sense strand
cgcaauuacuuucugguua

SEQ ID NO: 1320776 - RNA, 19 nt, Homo sapiens
  misc_RNA (1)...(19): siRNA sense strand
ggaaccagccgagaaauug

SEQ ID NO: 1320777 - RNA, 19 nt, Homo sapiens
  misc_RNA (1)...(19): siRNA sense strand
gcugugaaccuuuauauca

SEQ ID NO: 1320778 - RNA, 19 nt, Homo sapiens
  misc_RNA (1)...(19): siRNA sense strand
gaaaucggaucugcgaaca

SEQ ID NO: 1320779 - RNA, 19 nt, Homo sapiens
  misc_RNA (1)...(19): siRNA sense strand
gaacccaggcucaguaaca

SEQ ID NO: 1320780 - RNA, 19 nt, Homo sapiens
  misc_RNA (1)...(19): siRNA sense strand
gauuaacgucucgcaauua

SEQ ID NO: 1320781 - RNA, 19 nt, Homo sapiens
  misc_RNA (1)...(19): siRNA sense strand
gaagaacagagucguggaa

SEQ ID NO: 1320782 - RNA, 19 nt, Homo sapiens
  misc_RNA (1)...(19): siRNA sense strand
gaauuucuccuguuucauc

SEQ ID NO: 1320783 - RNA, 19 nt, Homo sapiens
  misc_RNA (1)...(19): siRNA sense strand
aaagaggauuucaacagaa

SEQ ID NO: 1320784 - RNA, 19 nt, Homo sapiens
  misc_RNA (1)...(19): siRNA sense strand
guaccgcugcucagaauuu

SEQ ID NO: 1320785 - RNA, 19 nt, Homo sapiens
  misc_RNA (1)...(19): siRNA sense strand
ccaggacgaugaauuuaag

SEQ ID NO: 1320786 - RNA, 19 nt, Homo sapiens
  misc_RNA (1)...(19): siRNA sense strand
ccaauucuuugauucacuu

SEQ ID NO: 1320787 - RNA, 19 nt, Homo sapiens
  misc_RNA (1)...(19): siRNA sense strand
ccgguguccuuauuacaua

SEQ ID NO: 1320788 - RNA, 19 nt, Homo sapiens
  misc_RNA (1)...(19): siRNA sense strand
cagcaaguguuucuuaacu

SEQ ID NO: 1320789 - RNA, 19 nt, Homo sapiens
  misc_RNA (1)...(19): siRNA sense strand
ggaauggcauggacaucuc

SEQ ID NO: 1320790 - RNA, 19 nt, Homo sapiens
  misc_RNA (1)...(19): siRNA sense strand
uaacggaaccagccgagaa

SEQ ID NO: 1320791 - RNA, 19 nt, Homo sapiens
  misc_RNA (1)...(19): siRNA sense strand
cuacaaugcggauuuaaug

SEQ ID NO: 1320792 - RNA, 19 nt, Homo sapiens
  misc_RNA (1)...(19): siRNA sense strand
uaacgucucgcaauuacuu

SEQ ID NO: 1320793 - RNA, 19 nt, Homo sapiens
  misc_RNA (1)...(19): siRNA sense strand
cccgugacguccaguauuu

SEQ ID NO: 1320794 - RNA, 19 nt, Homo sapiens
  misc_RNA (1)...(19): siRNA sense strand
ggcauccaauucuuugauu

SEQ ID NO: 1320795 - RNA, 19 nt, Homo sapiens
  misc_RNA (1)...(19): siRNA sense strand
gaaauuugucugcaugaag

SEQ ID NO: 1320796 - RNA, 19 nt, Homo sapiens
  misc_RNA (1)...(19): siRNA sense strand
gaaaggcuaccgcgaagag

SEQ ID NO: 1320797 - RNA, 19 nt, Homo sapiens
  misc_RNA (1)...(19): siRNA sense strand
ggguaccgcugcucagaau

SEQ ID NO: 1320798 - RNA, 19 nt, Homo sapiens
  misc_RNA (1)...(19): siRNA sense strand
ugaaauuugucugcaugaa

SEQ ID NO: 1320799 - RNA, 19 nt, Homo sapiens
  misc_RNA (1)...(19): siRNA sense strand
gcauccaauucuuugauuc

SEQ ID NO: 1320800 - RNA, 19 nt, Homo sapiens
  misc_RNA (1)...(19): siRNA sense strand
caagccuucugcucuguga

SEQ ID NO: 1320801 - RNA, 19 nt, Homo sapiens
  misc_RNA (1)...(19): siRNA sense strand
gauccgguguccuuauuac

SEQ ID NO: 1320802 - RNA, 19 nt, Homo sapiens
  misc_RNA (1)...(19): siRNA sense strand
cgugaauacuagucaaaga

SEQ ID NO: 1320803 - RNA, 19 nt, Homo sapiens
  misc_RNA (1)...(19): siRNA sense strand
cuucagcaaguguuucuua

SEQ ID NO: 1320804 - RNA, 19 nt, Homo sapiens
  misc_RNA (1)...(19): siRNA sense strand
gaugucaccuggauaaccu

SEQ ID NO: 1320805 - RNA, 19 nt, Homo sapiens
  misc_RNA (1)...(19): siRNA sense strand
caugaaggagucacauuug

SEQ ID NO: 1320806 - RNA, 19 nt, Homo sapiens
  misc_RNA (1)...(19): siRNA sense strand
augaugcugugaaccuuua

SEQ ID NO: 1320807 - RNA, 19 nt, Homo sapiens
  misc_RNA (1)...(19): siRNA sense strand
ucaccuggauaaccuguca

SEQ ID NO: 1320808 - RNA, 19 nt, Homo sapiens
  misc_RNA (1)...(19): siRNA sense strand
ggagauccgguguccuuau

SEQ ID NO: 1320809 - RNA, 19 nt, Homo sapiens
  misc_RNA (1)...(19): siRNA sense strand
ucaaagaggauuucaacag

SEQ ID NO: 1320810 - RNA, 19 nt, Homo sapiens
  misc_RNA (1)...(19): siRNA sense strand
guacauacgaaacucaaag

SEQ ID NO: 1320811 - RNA, 19 nt, Homo sapiens
  misc_RNA (1)...(19): siRNA sense strand
ggaacuguuuucuugauga

SEQ ID NO: 1320812 - RNA, 19 nt, Homo sapiens
  misc_RNA (1)...(19): siRNA sense strand
augaaggagucacauuuga

SEQ ID NO: 1320813 - RNA, 19 nt, Homo sapiens
  misc_RNA (1)...(19): siRNA sense strand
gaugaugcugugaaccuuu

SEQ ID NO: 1320814 - RNA, 19 nt, Homo sapiens
  misc_RNA (1)...(19): siRNA sense strand
cagaaacugcuuuauccaa

SEQ ID NO: 1320815 - RNA, 19 nt, Homo sapiens
  misc_RNA (1)...(19): siRNA sense strand
caaugcggauuuaaugaac

SEQ ID NO: 1320816 - RNA, 19 nt, Homo sapiens
  misc_RNA (1)...(19): siRNA sense strand
gaucaucugggaggaauuc

SEQ ID NO: 1320817 - RNA, 19 nt, Homo sapiens
  misc_RNA (1)...(19): siRNA sense strand
cauacgaaacucaaagaga

SEQ ID NO: 1320818 - RNA, 19 nt, Homo sapiens
  misc_RNA (1)...(19): siRNA sense strand
acaaugcggauuuaaugaa

SEQ ID NO: 1320819 - RNA, 19 nt, Homo sapiens
  misc_RNA (1)...(19): siRNA sense strand
ucacgugaauacuagucaa

SEQ ID NO: 1320820 - RNA, 19 nt, Homo sapiens
  misc_RNA (1)...(19): siRNA sense strand
caaccuucagcaaguguuu

SEQ ID NO: 1320821 - RNA, 19 nt, Homo sapiens
  misc_RNA (1)...(19): siRNA sense strand
ggaauucaccccagaggaa

SEQ ID NO: 1320822 - RNA, 19 nt, Homo sapiens
  misc_RNA (1)...(19): siRNA sense strand
aacagaaacugcuuuaucc

SEQ ID NO: 1320823 - RNA, 19 nt, Homo sapiens
  misc_RNA (1)...(19): siRNA sense strand
gacaagccuucugcucugu

SEQ ID NO: 1320824 - RNA, 19 nt, Homo sapiens
  misc_RNA (1)...(19): siRNA sense strand
aaucggaucugcgaacagu

SEQ ID NO: 1320825 - RNA, 19 nt, Homo sapiens
  misc_RNA (1)...(19): siRNA sense strand
gaaccagccgagaaauugg

SEQ ID NO: 1320826 - RNA, 19 nt, Homo sapiens
  misc_RNA (1)...(19): siRNA sense strand
guggaacccaggcucagua

SEQ ID NO: 1320827 - RNA, 19 nt, Homo sapiens
  misc_RNA (1)...(19): siRNA sense strand
acacaaccuucagcaagug

SEQ ID NO: 1320828 - RNA, 19 nt, Homo sapiens
  misc_RNA (1)...(19): siRNA sense strand
ugggaugucaccuggauaa

SEQ ID NO: 1320829 - RNA, 19 nt, Homo sapiens
  misc_RNA (1)...(19): siRNA sense strand
uaacugacaagaagaacag

SEQ ID NO: 1320830 - RNA, 19 nt, Homo sapiens
  misc_RNA (1)...(19): siRNA sense strand
aagcugggacugccaagaa

SEQ ID NO: 1320831 - RNA, 19 nt, Homo sapiens
  misc_RNA (1)...(19): siRNA sense strand
gaugcugugaaccuuuaua

SEQ ID NO: 1320832 - RNA, 19 nt, Homo sapiens
  misc_RNA (1)...(19): siRNA sense strand
acuccaggacgaugaauuu

SEQ ID NO: 1320833 - RNA, 19 nt, Homo sapiens
  misc_RNA (1)...(19): siRNA sense strand
aacacaaccuucagcaagu

SEQ ID NO: 1320834 - RNA, 19 nt, Homo sapiens
  misc_RNA (1)...(19): siRNA sense strand
uucagcaaguguuucuuaa

SEQ ID NO: 1320835 - RNA, 19 nt, Homo sapiens
  misc_RNA (1)...(19): siRNA sense strand
gaacuguuuucuugaugau

SEQ ID NO: 1320836 - RNA, 19 nt, Homo sapiens
  misc_RNA (1)...(19): siRNA sense strand
cggaaccagccgagaaauu

SEQ ID NO: 1320837 - RNA, 19 nt, Homo sapiens
  misc_RNA (1)...(19): siRNA sense strand
gcucaguaacaacgaaugu

SEQ ID NO: 1320838 - RNA, 19 nt, Homo sapiens
  misc_RNA (1)...(19): siRNA sense strand
gaggguaccgcugcucaga

SEQ ID NO: 1320839 - RNA, 19 nt, Homo sapiens
  misc_RNA (1)...(19): siRNA sense strand
cauccaauucuuugauuca

SEQ ID NO: 1320840 - RNA, 19 nt, Homo sapiens
  misc_RNA (1)...(19): siRNA sense strand
caagaaaacacaaccuuca

SEQ ID NO: 1320841 - RNA, 19 nt, Homo sapiens
  misc_RNA (1)...(19): siRNA sense strand
uacaaugcggauuuaauga

SEQ ID NO: 1320842 - RNA, 19 nt, Homo sapiens
  misc_RNA (1)...(19): siRNA sense strand
ggaaaggcuaccgcgaaga

SEQ ID NO: 1320843 - RNA, 19 nt, Homo sapiens
  misc_RNA (1)...(19): siRNA sense strand
gggagauccgguguccuua

SEQ ID NO: 1320844 - RNA, 19 nt, Homo sapiens
  misc_RNA (1)...(19): siRNA sense strand
gcggauuuaaugaacugua

SEQ ID NO: 1320845 - RNA, 19 nt, Homo sapiens
  misc_RNA (1)...(19): siRNA sense strand
uccaggacgaugaauuuaa

SEQ ID NO: 1320846 - RNA, 19 nt, Homo sapiens
  misc_RNA (1)...(19): siRNA sense strand
cggauuuaaugaacuguac

SEQ ID NO: 1320847 - RNA, 19 nt, Homo sapiens
  misc_RNA (1)...(19): siRNA sense strand
ucaucuacaaugcggauuu

SEQ ID NO: 1320848 - RNA, 19 nt, Homo sapiens
  misc_RNA (1)...(19): siRNA sense strand
ugaugaugcugugaaccuu

SEQ ID NO: 1320849 - RNA, 19 nt, Homo sapiens
  misc_RNA (1)...(19): siRNA sense strand
cugugaaccuuuauaucau

SEQ ID NO: 1320850 - RNA, 19 nt, Homo sapiens
  misc_RNA (1)...(19): siRNA sense strand
ugugggaugucaccuggau

SEQ ID NO: 1320851 - RNA, 19 nt, Homo sapiens
  misc_RNA (1)...(19): siRNA sense strand
gcaauuacuuucugguuaa

SEQ ID NO: 1320852 - RNA, 19 nt, Homo sapiens
  misc_RNA (1)...(19): siRNA sense strand
caaagaggauuucaacaga

SEQ ID NO: 1320853 - RNA, 19 nt, Homo sapiens
  misc_RNA (1)...(19): siRNA sense strand
gcaaguguuucuuaacuga

SEQ ID NO: 1320854 - RNA, 19 nt, Homo sapiens
  misc_RNA (1)...(19): siRNA sense strand
ggauuaacgucucgcaauu

SEQ ID NO: 1320855 - RNA, 19 nt, Homo sapiens
  misc_RNA (1)...(19): siRNA sense strand
gcaccagccucuagucuca

SEQ ID NO: 1320856 - RNA, 19 nt, Homo sapiens
  misc_RNA (1)...(19): siRNA sense strand
gagauccgguguccuuauu

SEQ ID NO: 1320857 - RNA, 19 nt, Homo sapiens
  misc_RNA (1)...(19): siRNA sense strand
gaaacugcuuuauccaaau

SEQ ID NO: 1320858 - RNA, 19 nt, Homo sapiens
  misc_RNA (1)...(19): siRNA sense strand
auacgaaacucaaagagaa

SEQ ID NO: 1320859 - RNA, 19 nt, Homo sapiens
  misc_RNA (1)...(19): siRNA sense strand
caacagaaacugcuuuauc

SEQ ID NO: 1320860 - RNA, 19 nt, Homo sapiens
  misc_RNA (1)...(19): siRNA sense strand
caucuacaaugcggauuua

SEQ ID NO: 1320861 - RNA, 19 nt, Homo sapiens
  misc_RNA (1)...(19): siRNA sense strand
gcaugaaggagucacauuu

SEQ ID NO: 1320862 - RNA, 19 nt, Homo sapiens
  misc_RNA (1)...(19): siRNA sense strand
agaaacugcuuuauccaaa

SEQ ID NO: 1320863 - RNA, 19 nt, Homo sapiens
  misc_RNA (1)...(19): siRNA sense strand
cgcaauuacuuucugguua

SEQ ID NO: 1320864 - RNA, 19 nt, Homo sapiens
  misc_RNA (1)...(19): siRNA sense strand
ggaaccagccgagaaauug

SEQ ID NO: 1320865 - RNA, 19 nt, Homo sapiens
  misc_RNA (1)...(19): siRNA sense strand
gaaaucggaucugcgaaca

SEQ ID NO: 1320866 - RNA, 19 nt, Homo sapiens
  misc_RNA (1)...(19): siRNA sense strand
gaacccaggcucaguaaca

SEQ ID NO: 1320867 - RNA, 19 nt, Homo sapiens
  misc_RNA (1)...(19): siRNA sense strand
gauuaacgucucgcaauua

SEQ ID NO: 1320868 - RNA, 19 nt, Homo sapiens
  misc_RNA (1)...(19): siRNA sense strand
gaagaacagagucguggaa

SEQ ID NO: 1320869 - RNA, 19 nt, Homo sapiens
  misc_RNA (1)...(19): siRNA sense strand
gaauuucuccuguuucauc

SEQ ID NO: 1320870 - RNA, 19 nt, Homo sapiens
  misc_RNA (1)...(19): siRNA sense strand
aaagaggauuucaacagaa

SEQ ID NO: 1320871 - RNA, 19 nt, Homo sapiens
  misc_RNA (1)...(19): siRNA sense strand
guaccgcugcucagaauuu

SEQ ID NO: 1320872 - RNA, 19 nt, Homo sapiens
  misc_RNA (1)...(19): siRNA sense strand
ccaggacgaugaauuuaag

SEQ ID NO: 1320873 - RNA, 19 nt, Homo sapiens
  misc_RNA (1)...(19): siRNA sense strand
ccaauucuuugauucacuu

SEQ ID NO: 1320874 - RNA, 19 nt, Homo sapiens
  misc_RNA (1)...(19): siRNA sense strand
ccgguguccuuauuacaua

SEQ ID NO: 1320875 - RNA, 19 nt, Homo sapiens
  misc_RNA (1)...(19): siRNA sense strand
cagcaaguguuucuuaacu

SEQ ID NO: 1320876 - RNA, 19 nt, Homo sapiens
  misc_RNA (1)...(19): siRNA sense strand
uaacggaaccagccgagaa

SEQ ID NO: 1320877 - RNA, 19 nt, Homo sapiens
  misc_RNA (1)...(19): siRNA sense strand
cuacaaugcggauuuaaug

SEQ ID NO: 1320878 - RNA, 19 nt, Homo sapiens
  misc_RNA (1)...(19): siRNA sense strand
uaacgucucgcaauuacuu

SEQ ID NO: 1320879 - RNA, 19 nt, Homo sapiens
  misc_RNA (1)...(19): siRNA sense strand
cccgugacguccaguauuu

SEQ ID NO: 1320880 - RNA, 19 nt, Homo sapiens
  misc_RNA (1)...(19): siRNA sense strand
ggcauccaauucuuugauu

SEQ ID NO: 1320881 - RNA, 19 nt, Homo sapiens
  misc_RNA (1)...(19): siRNA sense strand
gaaauuugucugcaugaag

SEQ ID NO: 1320882 - RNA, 19 nt, Homo sapiens
  misc_RNA (1)...(19): siRNA sense strand
ggguaccgcugcucagaau

SEQ ID NO: 1320883 - RNA, 19 nt, Homo sapiens
  misc_RNA (1)...(19): siRNA sense strand
ugaaauuugucugcaugaa

SEQ ID NO: 1320884 - RNA, 19 nt, Homo sapiens
  misc_RNA (1)...(19): siRNA sense strand
gcauccaauucuuugauuc

SEQ ID NO: 1320885 - RNA, 19 nt, Homo sapiens
  misc_RNA (1)...(19): siRNA sense strand
caagccuucugcucuguga

SEQ ID NO: 1320886 - RNA, 19 nt, Homo sapiens
  misc_RNA (1)...(19): siRNA sense strand
gauccgguguccuuauuac

SEQ ID NO: 1320887 - RNA, 19 nt, Homo sapiens
  misc_RNA (1)...(19): siRNA sense strand
cgugaauacuagucaaaga

SEQ ID NO: 1320888 - RNA, 19 nt, Homo sapiens
  misc_RNA (1)...(19): siRNA sense strand
cuucagcaaguguuucuua

SEQ ID NO: 1320889 - RNA, 19 nt, Homo sapiens
  misc_RNA (1)...(19): siRNA sense strand
gaugucaccuggauaaccu

SEQ ID NO: 1320890 - RNA, 19 nt, Homo sapiens
  misc_RNA (1)...(19): siRNA sense strand
caugaaggagucacauuug

SEQ ID NO: 1320891 - RNA, 19 nt, Homo sapiens
  misc_RNA (1)...(19): siRNA sense strand
ucaccuggauaaccuguca

SEQ ID NO: 1320892 - RNA, 19 nt, Homo sapiens
  misc_RNA (1)...(19): siRNA sense strand
ggagauccgguguccuuau

SEQ ID NO: 1320893 - RNA, 19 nt, Homo sapiens
  misc_RNA (1)...(19): siRNA sense strand
ucaaagaggauuucaacag

SEQ ID NO: 1320894 - RNA, 19 nt, Homo sapiens
  misc_RNA (1)...(19): siRNA sense strand
guacauacgaaacucaaag

SEQ ID NO: 1320895 - RNA, 19 nt, Homo sapiens
  misc_RNA (1)...(19): siRNA sense strand
augaaggagucacauuuga

SEQ ID NO: 1320896 - RNA, 19 nt, Homo sapiens
  misc_RNA (1)...(19): siRNA sense strand
cagaaacugcuuuauccaa

SEQ ID NO: 1320897 - RNA, 19 nt, Homo sapiens
  misc_RNA (1)...(19): siRNA sense strand
caaugcggauuuaaugaac

SEQ ID NO: 1320898 - RNA, 19 nt, Homo sapiens
  misc_RNA (1)...(19): siRNA sense strand
cauacgaaacucaaagaga

SEQ ID NO: 1320899 - RNA, 19 nt, Homo sapiens
  misc_RNA (1)...(19): siRNA sense strand
acaaugcggauuuaaugaa

SEQ ID NO: 1320900 - RNA, 19 nt, Homo sapiens
  misc_RNA (1)...(19): siRNA sense strand
ucacgugaauacuagucaa

SEQ ID NO: 1320901 - RNA, 19 nt, Homo sapiens
  misc_RNA (1)...(19): siRNA sense strand
caaccuucagcaaguguuu

SEQ ID NO: 1320902 - RNA, 19 nt, Homo sapiens
  misc_RNA (1)...(19): siRNA sense strand
aacagaaacugcuuuaucc

SEQ ID NO: 1320903 - RNA, 19 nt, Homo sapiens
  misc_RNA (1)...(19): siRNA sense strand
gacaagccuucugcucugu

SEQ ID NO: 1320904 - RNA, 19 nt, Homo sapiens
  misc_RNA (1)...(19): siRNA sense strand
gaaccagccgagaaauugg

SEQ ID NO: 1320905 - RNA, 19 nt, Homo sapiens
  misc_RNA (1)...(19): siRNA sense strand
aaucggaucugcgaacagu

SEQ ID NO: 1320906 - RNA, 19 nt, Homo sapiens
  misc_RNA (1)...(19): siRNA sense strand
guggaacccaggcucagua

SEQ ID NO: 1320907 - RNA, 19 nt, Homo sapiens
  misc_RNA (1)...(19): siRNA sense strand
acacaaccuucagcaagug

SEQ ID NO: 1320908 - RNA, 19 nt, Homo sapiens
  misc_RNA (1)...(19): siRNA sense strand
ugggaugucaccuggauaa

SEQ ID NO: 1320909 - RNA, 19 nt, Homo sapiens
  misc_RNA (1)...(19): siRNA sense strand
uaacugacaagaagaacag

SEQ ID NO: 1320910 - RNA, 19 nt, Homo sapiens
  misc_RNA (1)...(19): siRNA sense strand
aacacaaccuucagcaagu

SEQ ID NO: 1320911 - RNA, 19 nt, Homo sapiens
  misc_RNA (1)...(19): siRNA sense strand
acuccaggacgaugaauuu

SEQ ID NO: 1320912 - RNA, 19 nt, Homo sapiens
  misc_RNA (1)...(19): siRNA sense strand
aagcugggacugccaagaa

SEQ ID NO: 1320913 - RNA, 19 nt, Homo sapiens
  misc_RNA (1)...(19): siRNA sense strand
uucagcaaguguuucuuaa

SEQ ID NO: 1320914 - RNA, 19 nt, Homo sapiens
  misc_RNA (1)...(19): siRNA sense strand
cggaaccagccgagaaauu

SEQ ID NO: 1320915 - RNA, 19 nt, Homo sapiens
  misc_RNA (1)...(19): siRNA sense strand
gcucaguaacaacgaaugu

SEQ ID NO: 1320916 - RNA, 19 nt, Homo sapiens
  misc_RNA (1)...(19): siRNA sense strand
gaggguaccgcugcucaga

SEQ ID NO: 1320917 - RNA, 19 nt, Homo sapiens
  misc_RNA (1)...(19): siRNA sense strand
cauccaauucuuugauuca

SEQ ID NO: 1320918 - RNA, 19 nt, Homo sapiens
  misc_RNA (1)...(19): siRNA sense strand
caagaaaacacaaccuuca

SEQ ID NO: 1320919 - RNA, 19 nt, Homo sapiens
  misc_RNA (1)...(19): siRNA sense strand
uacaaugcggauuuaauga

SEQ ID NO: 1320920 - RNA, 19 nt, Homo sapiens
  misc_RNA (1)...(19): siRNA sense strand
gggagauccgguguccuua

SEQ ID NO: 1320921 - RNA, 19 nt, Homo sapiens
  misc_RNA (1)...(19): siRNA sense strand
gcggauuuaaugaacugua

SEQ ID NO: 1320922 - RNA, 19 nt, Homo sapiens
  misc_RNA (1)...(19): siRNA sense strand
ucaucuacaaugcggauuu

SEQ ID NO: 1320923 - RNA, 19 nt, Homo sapiens
  misc_RNA (1)...(19): siRNA sense strand
uccaggacgaugaauuuaa

SEQ ID NO: 1320924 - RNA, 19 nt, Homo sapiens
  misc_RNA (1)...(19): siRNA sense strand
cggauuuaaugaacuguac

SEQ ID NO: 1320925 - RNA, 19 nt, Homo sapiens
  misc_RNA (1)...(19): siRNA sense strand
ugugggaugucaccuggau

SEQ ID NO: 1320926 - RNA, 19 nt, Homo sapiens
  misc_RNA (1)...(19): siRNA sense strand
gcaauuacuuucugguuaa

SEQ ID NO: 1320927 - RNA, 19 nt, Homo sapiens
  misc_RNA (1)...(19): siRNA sense strand
caaagaggauuucaacaga

SEQ ID NO: 1320928 - RNA, 19 nt, Homo sapiens
  misc_RNA (1)...(19): siRNA sense strand
gcaaguguuucuuaacuga

SEQ ID NO: 1320929 - RNA, 19 nt, Homo sapiens
  misc_RNA (1)...(19): siRNA sense strand
ggauuaacgucucgcaauu

SEQ ID NO: 1320930 - RNA, 19 nt, Homo sapiens
  misc_RNA (1)...(19): siRNA sense strand
gcaccagccucuagucuca

SEQ ID NO: 1320931 - RNA, 19 nt, Homo sapiens
  misc_RNA (1)...(19): siRNA sense strand
gagauccgguguccuuauu

SEQ ID NO: 1320932 - RNA, 19 nt, Homo sapiens
  misc_RNA (1)...(19): siRNA sense strand
gaaacugcuuuauccaaau

SEQ ID NO: 1320933 - RNA, 19 nt, Homo sapiens
  misc_RNA (1)...(19): siRNA sense strand
auacgaaacucaaagagaa

SEQ ID NO: 1320934 - RNA, 19 nt, Homo sapiens
  misc_RNA (1)...(19): siRNA sense strand
caacagaaacugcuuuauc

SEQ ID NO: 1320935 - RNA, 19 nt, Homo sapiens
  misc_RNA (1)...(19): siRNA sense strand
caucuacaaugcggauuua

SEQ ID NO: 1320936 - RNA, 19 nt, Homo sapiens
  misc_RNA (1)...(19): siRNA sense strand
gcaugaaggagucacauuu

SEQ ID NO: 1320937 - RNA, 19 nt, Homo sapiens
  misc_RNA (1)...(19): siRNA sense strand
agaaacugcuuuauccaaa

SEQ ID NO: 1320938 - RNA, 19 nt, Homo sapiens
  misc_RNA (1)...(19): siRNA sense strand
cgcaauuacuuucugguua

SEQ ID NO: 1320939 - RNA, 19 nt, Homo sapiens
  misc_RNA (1)...(19): siRNA sense strand
ggaaccagccgagaaauug

SEQ ID NO: 1320940 - RNA, 19 nt, Homo sapiens
  misc_RNA (1)...(19): siRNA sense strand
gaaaucggaucugcgaaca

SEQ ID NO: 1320941 - RNA, 19 nt, Homo sapiens
  misc_RNA (1)...(19): siRNA sense strand
gaacccaggcucaguaaca

SEQ ID NO: 1320942 - RNA, 19 nt, Homo sapiens
  misc_RNA (1)...(19): siRNA sense strand
gauuaacgucucgcaauua

SEQ ID NO: 1320943 - RNA, 19 nt, Homo sapiens
  misc_RNA (1)...(19): siRNA sense strand
gaagaacagagucguggaa

SEQ ID NO: 1320944 - RNA, 19 nt, Homo sapiens
  misc_RNA (1)...(19): siRNA sense strand
gaauuucuccuguuucauc

SEQ ID NO: 1320945 - RNA, 19 nt, Homo sapiens
  misc_RNA (1)...(19): siRNA sense strand
aaagaggauuucaacagaa

SEQ ID NO: 1320946 - RNA, 19 nt, Homo sapiens
  misc_RNA (1)...(19): siRNA sense strand
guaccgcugcucagaauuu

SEQ ID NO: 1320947 - RNA, 19 nt, Homo sapiens
  misc_RNA (1)...(19): siRNA sense strand
ccaggacgaugaauuuaag

SEQ ID NO: 1320948 - RNA, 19 nt, Homo sapiens
  misc_RNA (1)...(19): siRNA sense strand
ccaauucuuugauucacuu

SEQ ID NO: 1320949 - RNA, 19 nt, Homo sapiens
  misc_RNA (1)...(19): siRNA sense strand
ccgguguccuuauuacaua

SEQ ID NO: 1320950 - RNA, 19 nt, Homo sapiens
  misc_RNA (1)...(19): siRNA sense strand
cagcaaguguuucuuaacu

SEQ ID NO: 1320951 - RNA, 19 nt, Homo sapiens
  misc_RNA (1)...(19): siRNA sense strand
uaacggaaccagccgagaa

SEQ ID NO: 1320952 - RNA, 19 nt, Homo sapiens
  misc_RNA (1)...(19): siRNA sense strand
cuacaaugcggauuuaaug

SEQ ID NO: 1320953 - RNA, 19 nt, Homo sapiens
  misc_RNA (1)...(19): siRNA sense strand
uaacgucucgcaauuacuu

SEQ ID NO: 1320954 - RNA, 19 nt, Homo sapiens
  misc_RNA (1)...(19): siRNA sense strand
cccgugacguccaguauuu

SEQ ID NO: 1320955 - RNA, 19 nt, Homo sapiens
  misc_RNA (1)...(19): siRNA sense strand
ggcauccaauucuuugauu

SEQ ID NO: 1320956 - RNA, 19 nt, Homo sapiens
  misc_RNA (1)...(19): siRNA sense strand
gaaauuugucugcaugaag

SEQ ID NO: 1320957 - RNA, 19 nt, Homo sapiens
  misc_RNA (1)...(19): siRNA sense strand
ggguaccgcugcucagaau

SEQ ID NO: 1320958 - RNA, 19 nt, Homo sapiens
  misc_RNA (1)...(19): siRNA sense strand
ugaaauuugucugcaugaa

SEQ ID NO: 1320959 - RNA, 19 nt, Homo sapiens
  misc_RNA (1)...(19): siRNA sense strand
gcauccaauucuuugauuc

SEQ ID NO: 1320960 - RNA, 19 nt, Homo sapiens
  misc_RNA (1)...(19): siRNA sense strand
caagccuucugcucuguga

SEQ ID NO: 1320961 - RNA, 19 nt, Homo sapiens
  misc_RNA (1)...(19): siRNA sense strand
gauccgguguccuuauuac

SEQ ID NO: 1320962 - RNA, 19 nt, Homo sapiens
  misc_RNA (1)...(19): siRNA sense strand
cgugaauacuagucaaaga

SEQ ID NO: 1320963 - RNA, 19 nt, Homo sapiens
  misc_RNA (1)...(19): siRNA sense strand
cuucagcaaguguuucuua

SEQ ID NO: 1320964 - RNA, 19 nt, Homo sapiens
  misc_RNA (1)...(19): siRNA sense strand
gaugucaccuggauaaccu

SEQ ID NO: 1320965 - RNA, 19 nt, Homo sapiens
  misc_RNA (1)...(19): siRNA sense strand
caugaaggagucacauuug

SEQ ID NO: 1320966 - RNA, 19 nt, Homo sapiens
  misc_RNA (1)...(19): siRNA sense strand
ucaccuggauaaccuguca

SEQ ID NO: 1320967 - RNA, 19 nt, Homo sapiens
  misc_RNA (1)...(19): siRNA sense strand
ggagauccgguguccuuau

SEQ ID NO: 1320968 - RNA, 19 nt, Homo sapiens
  misc_RNA (1)...(19): siRNA sense strand
ucaaagaggauuucaacag

SEQ ID NO: 1320969 - RNA, 19 nt, Homo sapiens
  misc_RNA (1)...(19): siRNA sense strand
guacauacgaaacucaaag

SEQ ID NO: 1320970 - RNA, 19 nt, Homo sapiens
  misc_RNA (1)...(19): siRNA sense strand
augaaggagucacauuuga

SEQ ID NO: 1320971 - RNA, 19 nt, Homo sapiens
  misc_RNA (1)...(19): siRNA sense strand
cagaaacugcuuuauccaa

SEQ ID NO: 1320972 - RNA, 19 nt, Homo sapiens
  misc_RNA (1)...(19): siRNA sense strand
caaugcggauuuaaugaac

SEQ ID NO: 1320973 - RNA, 19 nt, Homo sapiens
  misc_RNA (1)...(19): siRNA sense strand
cauacgaaacucaaagaga

SEQ ID NO: 1320974 - RNA, 19 nt, Homo sapiens
  misc_RNA (1)...(19): siRNA sense strand
acaaugcggauuuaaugaa

SEQ ID NO: 1320975 - RNA, 19 nt, Homo sapiens
  misc_RNA (1)...(19): siRNA sense strand
ucacgugaauacuagucaa

SEQ ID NO: 1320976 - RNA, 19 nt, Homo sapiens
  misc_RNA (1)...(19): siRNA sense strand
caaccuucagcaaguguuu

SEQ ID NO: 1320977 - RNA, 19 nt, Homo sapiens
  misc_RNA (1)...(19): siRNA sense strand
aacagaaacugcuuuaucc

SEQ ID NO: 1320978 - RNA, 19 nt, Homo sapiens
  misc_RNA (1)...(19): siRNA sense strand
gacaagccuucugcucugu

SEQ ID NO: 1320979 - RNA, 19 nt, Homo sapiens
  misc_RNA (1)...(19): siRNA sense strand
gaaccagccgagaaauugg

SEQ ID NO: 1320980 - RNA, 19 nt, Homo sapiens
  misc_RNA (1)...(19): siRNA sense strand
aaucggaucugcgaacagu

SEQ ID NO: 1320981 - RNA, 19 nt, Homo sapiens
  misc_RNA (1)...(19): siRNA sense strand
guggaacccaggcucagua

SEQ ID NO: 1320982 - RNA, 19 nt, Homo sapiens
  misc_RNA (1)...(19): siRNA sense strand
acacaaccuucagcaagug

SEQ ID NO: 1320983 - RNA, 19 nt, Homo sapiens
  misc_RNA (1)...(19): siRNA sense strand
ugggaugucaccuggauaa

SEQ ID NO: 1320984 - RNA, 19 nt, Homo sapiens
  misc_RNA (1)...(19): siRNA sense strand
uaacugacaagaagaacag

SEQ ID NO: 1320985 - RNA, 19 nt, Homo sapiens
  misc_RNA (1)...(19): siRNA sense strand
aacacaaccuucagcaagu

SEQ ID NO: 1320986 - RNA, 19 nt, Homo sapiens
  misc_RNA (1)...(19): siRNA sense strand
acuccaggacgaugaauuu

SEQ ID NO: 1320987 - RNA, 19 nt, Homo sapiens
  misc_RNA (1)...(19): siRNA sense strand
aagcugggacugccaagaa

SEQ ID NO: 1320988 - RNA, 19 nt, Homo sapiens
  misc_RNA (1)...(19): siRNA sense strand
uucagcaaguguuucuuaa

SEQ ID NO: 1320989 - RNA, 19 nt, Homo sapiens
  misc_RNA (1)...(19): siRNA sense strand
cggaaccagccgagaaauu

SEQ ID NO: 1320990 - RNA, 19 nt, Homo sapiens
  misc_RNA (1)...(19): siRNA sense strand
gcucaguaacaacgaaugu

SEQ ID NO: 1320991 - RNA, 19 nt, Homo sapiens
  misc_RNA (1)...(19): siRNA sense strand
gaggguaccgcugcucaga

SEQ ID NO: 1320992 - RNA, 19 nt, Homo sapiens
  misc_RNA (1)...(19): siRNA sense strand
cauccaauucuuugauuca

SEQ ID NO: 1320993 - RNA, 19 nt, Homo sapiens
  misc_RNA (1)...(19): siRNA sense strand
caagaaaacacaaccuuca

SEQ ID NO: 1320994 - RNA, 19 nt, Homo sapiens
  misc_RNA (1)...(19): siRNA sense strand
uacaaugcggauuuaauga

SEQ ID NO: 1320995 - RNA, 19 nt, Homo sapiens
  misc_RNA (1)...(19): siRNA sense strand
gggagauccgguguccuua

SEQ ID NO: 1320996 - RNA, 19 nt, Homo sapiens
  misc_RNA (1)...(19): siRNA sense strand
gcggauuuaaugaacugua

SEQ ID NO: 1320997 - RNA, 19 nt, Homo sapiens
  misc_RNA (1)...(19): siRNA sense strand
ucaucuacaaugcggauuu

SEQ ID NO: 1320998 - RNA, 19 nt, Homo sapiens
  misc_RNA (1)...(19): siRNA sense strand
uccaggacgaugaauuuaa

SEQ ID NO: 1320999 - RNA, 19 nt, Homo sapiens
  misc_RNA (1)...(19): siRNA sense strand
cggauuuaaugaacuguac

SEQ ID NO: 1321000 - RNA, 19 nt, Homo sapiens
  misc_RNA (1)...(19): siRNA sense strand
ugugggaugucaccuggau

SEQ ID NO: 1321001 - RNA, 19 nt, Homo sapiens
  misc_RNA (1)...(19): siRNA sense strand
gcaauuacuuucugguuaa

SEQ ID NO: 1321002 - RNA, 19 nt, Homo sapiens
  misc_RNA (1)...(19): siRNA sense strand
caaagaggauuucaacaga

SEQ ID NO: 1321003 - RNA, 19 nt, Homo sapiens
  misc_RNA (1)...(19): siRNA sense strand
gcaaguguuucuuaacuga

SEQ ID NO: 1321004 - RNA, 19 nt, Homo sapiens
  misc_RNA (1)...(19): siRNA sense strand
ggauuaacgucucgcaauu

SEQ ID NO: 1321005 - RNA, 19 nt, Homo sapiens
  misc_RNA (1)...(19): siRNA sense strand
gcaccagccucuagucuca

SEQ ID NO: 1321006 - RNA, 19 nt, Homo sapiens
  misc_RNA (1)...(19): siRNA sense strand
gagauccgguguccuuauu

SEQ ID NO: 1321007 - RNA, 19 nt, Homo sapiens
  misc_RNA (1)...(19): siRNA sense strand
gaaacugcuuuauccaaau

SEQ ID NO: 1321008 - RNA, 19 nt, Homo sapiens
  misc_RNA (1)...(19): siRNA sense strand
auacgaaacucaaagagaa

SEQ ID NO: 1321009 - RNA, 19 nt, Homo sapiens
  misc_RNA (1)...(19): siRNA sense strand
caacagaaacugcuuuauc

SEQ ID NO: 1321010 - RNA, 19 nt, Homo sapiens
  misc_RNA (1)...(19): siRNA sense strand
caucuacaaugcggauuua

SEQ ID NO: 1321011 - RNA, 19 nt, Homo sapiens
  misc_RNA (1)...(19): siRNA sense strand
gcaugaaggagucacauuu

SEQ ID NO: 1321012 - RNA, 19 nt, Homo sapiens
  misc_RNA (1)...(19): siRNA sense strand
agaaacugcuuuauccaaa

SEQ ID NO: 1321013 - RNA, 19 nt, Homo sapiens
  misc_RNA (1)...(19): siRNA sense strand
cgcaauuacuuucugguua

SEQ ID NO: 1321014 - RNA, 19 nt, Homo sapiens
  misc_RNA (1)...(19): siRNA sense strand
ggaaccagccgagaaauug

SEQ ID NO: 1321015 - RNA, 19 nt, Homo sapiens
  misc_RNA (1)...(19): siRNA sense strand
gaaaucggaucugcgaaca

SEQ ID NO: 1321016 - RNA, 19 nt, Homo sapiens
  misc_RNA (1)...(19): siRNA sense strand
gaacccaggcucaguaaca

SEQ ID NO: 1321017 - RNA, 19 nt, Homo sapiens
  misc_RNA (1)...(19): siRNA sense strand
gauuaacgucucgcaauua

SEQ ID NO: 1321018 - RNA, 19 nt, Homo sapiens
  misc_RNA (1)...(19): siRNA sense strand
gaagaacagagucguggaa

SEQ ID NO: 1321019 - RNA, 19 nt, Homo sapiens
  misc_RNA (1)...(19): siRNA sense strand
gaauuucuccuguuucauc

SEQ ID NO: 1321020 - RNA, 19 nt, Homo sapiens
  misc_RNA (1)...(19): siRNA sense strand
aaagaggauuucaacagaa

SEQ ID NO: 1321021 - RNA, 19 nt, Homo sapiens
  misc_RNA (1)...(19): siRNA sense strand
guaccgcugcucagaauuu

SEQ ID NO: 1321022 - RNA, 19 nt, Homo sapiens
  misc_RNA (1)...(19): siRNA sense strand
ccaggacgaugaauuuaag

SEQ ID NO: 1321023 - RNA, 19 nt, Homo sapiens
  misc_RNA (1)...(19): siRNA sense strand
ccaauucuuugauucacuu

SEQ ID NO: 1321024 - RNA, 19 nt, Homo sapiens
  misc_RNA (1)...(19): siRNA sense strand
ccgguguccuuauuacaua

SEQ ID NO: 1321025 - RNA, 19 nt, Homo sapiens
  misc_RNA (1)...(19): siRNA sense strand
cagcaaguguuucuuaacu

SEQ ID NO: 1321026 - RNA, 19 nt, Homo sapiens
  misc_RNA (1)...(19): siRNA sense strand
uaacggaaccagccgagaa

SEQ ID NO: 1321027 - RNA, 19 nt, Homo sapiens
  misc_RNA (1)...(19): siRNA sense strand
cuacaaugcggauuuaaug

SEQ ID NO: 1321028 - RNA, 19 nt, Homo sapiens
  misc_RNA (1)...(19): siRNA sense strand
uaacgucucgcaauuacuu

SEQ ID NO: 1321029 - RNA, 19 nt, Homo sapiens
  misc_RNA (1)...(19): siRNA sense strand
cccgugacguccaguauuu

SEQ ID NO: 1321030 - RNA, 19 nt, Homo sapiens
  misc_RNA (1)...(19): siRNA sense strand
ggcauccaauucuuugauu

SEQ ID NO: 1321031 - RNA, 19 nt, Homo sapiens
  misc_RNA (1)...(19): siRNA sense strand
gaaauuugucugcaugaag

SEQ ID NO: 1321032 - RNA, 19 nt, Homo sapiens
  misc_RNA (1)...(19): siRNA sense strand
ggguaccgcugcucagaau

SEQ ID NO: 1321033 - RNA, 19 nt, Homo sapiens
  misc_RNA (1)...(19): siRNA sense strand
ugaaauuugucugcaugaa

SEQ ID NO: 1321034 - RNA, 19 nt, Homo sapiens
  misc_RNA (1)...(19): siRNA sense strand
gcauccaauucuuugauuc

SEQ ID NO: 1321035 - RNA, 19 nt, Homo sapiens
  misc_RNA (1)...(19): siRNA sense strand
caagccuucugcucuguga

SEQ ID NO: 1321036 - RNA, 19 nt, Homo sapiens
  misc_RNA (1)...(19): siRNA sense strand
gauccgguguccuuauuac

SEQ ID NO: 1321037 - RNA, 19 nt, Homo sapiens
  misc_RNA (1)...(19): siRNA sense strand
cgugaauacuagucaaaga

SEQ ID NO: 1321038 - RNA, 19 nt, Homo sapiens
  misc_RNA (1)...(19): siRNA sense strand
cuucagcaaguguuucuua

SEQ ID NO: 1321039 - RNA, 19 nt, Homo sapiens
  misc_RNA (1)...(19): siRNA sense strand
gaugucaccuggauaaccu

SEQ ID NO: 1321040 - RNA, 19 nt, Homo sapiens
  misc_RNA (1)...(19): siRNA sense strand
caugaaggagucacauuug

SEQ ID NO: 1321041 - RNA, 19 nt, Homo sapiens
  misc_RNA (1)...(19): siRNA sense strand
ucaccuggauaaccuguca

SEQ ID NO: 1321042 - RNA, 19 nt, Homo sapiens
  misc_RNA (1)...(19): siRNA sense strand
ggagauccgguguccuuau

SEQ ID NO: 1321043 - RNA, 19 nt, Homo sapiens
  misc_RNA (1)...(19): siRNA sense strand
ucaaagaggauuucaacag

SEQ ID NO: 1321044 - RNA, 19 nt, Homo sapiens
  misc_RNA (1)...(19): siRNA sense strand
guacauacgaaacucaaag

SEQ ID NO: 1321045 - RNA, 19 nt, Homo sapiens
  misc_RNA (1)...(19): siRNA sense strand
augaaggagucacauuuga

SEQ ID NO: 1321046 - RNA, 19 nt, Homo sapiens
  misc_RNA (1)...(19): siRNA sense strand
cagaaacugcuuuauccaa

SEQ ID NO: 1321047 - RNA, 19 nt, Homo sapiens
  misc_RNA (1)...(19): siRNA sense strand
caaugcggauuuaaugaac

SEQ ID NO: 1321048 - RNA, 19 nt, Homo sapiens
  misc_RNA (1)...(19): siRNA sense strand
cauacgaaacucaaagaga

SEQ ID NO: 1321049 - RNA, 19 nt, Homo sapiens
  misc_RNA (1)...(19): siRNA sense strand
acaaugcggauuuaaugaa

SEQ ID NO: 1321050 - RNA, 19 nt, Homo sapiens
  misc_RNA (1)...(19): siRNA sense strand
ucacgugaauacuagucaa

SEQ ID NO: 1321051 - RNA, 19 nt, Homo sapiens
  misc_RNA (1)...(19): siRNA sense strand
caaccuucagcaaguguuu

SEQ ID NO: 1321052 - RNA, 19 nt, Homo sapiens
  misc_RNA (1)...(19): siRNA sense strand
aacagaaacugcuuuaucc

SEQ ID NO: 1321053 - RNA, 19 nt, Homo sapiens
  misc_RNA (1)...(19): siRNA sense strand
gacaagccuucugcucugu

SEQ ID NO: 1321054 - RNA, 19 nt, Homo sapiens
  misc_RNA (1)...(19): siRNA sense strand
gaaccagccgagaaauugg

SEQ ID NO: 1321055 - RNA, 19 nt, Homo sapiens
  misc_RNA (1)...(19): siRNA sense strand
aaucggaucugcgaacagu

SEQ ID NO: 1321056 - RNA, 19 nt, Homo sapiens
  misc_RNA (1)...(19): siRNA sense strand
guggaacccaggcucagua

SEQ ID NO: 1321057 - RNA, 19 nt, Homo sapiens
  misc_RNA (1)...(19): siRNA sense strand
acacaaccuucagcaagug

SEQ ID NO: 1321058 - RNA, 19 nt, Homo sapiens
  misc_RNA (1)...(19): siRNA sense strand
ugggaugucaccuggauaa

SEQ ID NO: 1321059 - RNA, 19 nt, Homo sapiens
  misc_RNA (1)...(19): siRNA sense strand
uaacugacaagaagaacag

SEQ ID NO: 1321060 - RNA, 19 nt, Homo sapiens
  misc_RNA (1)...(19): siRNA sense strand
aacacaaccuucagcaagu

SEQ ID NO: 1321061 - RNA, 19 nt, Homo sapiens
  misc_RNA (1)...(19): siRNA sense strand
acuccaggacgaugaauuu

SEQ ID NO: 1321062 - RNA, 19 nt, Homo sapiens
  misc_RNA (1)...(19): siRNA sense strand
aagcugggacugccaagaa

SEQ ID NO: 1321063 - RNA, 19 nt, Homo sapiens
  misc_RNA (1)...(19): siRNA sense strand
uucagcaaguguuucuuaa

SEQ ID NO: 1321064 - RNA, 19 nt, Homo sapiens
  misc_RNA (1)...(19): siRNA sense strand
cggaaccagccgagaaauu

SEQ ID NO: 1321065 - RNA, 19 nt, Homo sapiens
  misc_RNA (1)...(19): siRNA sense strand
gcucaguaacaacgaaugu

SEQ ID NO: 1321066 - RNA, 19 nt, Homo sapiens
  misc_RNA (1)...(19): siRNA sense strand
gaggguaccgcugcucaga

SEQ ID NO: 1321067 - RNA, 19 nt, Homo sapiens
  misc_RNA (1)...(19): siRNA sense strand
cauccaauucuuugauuca

SEQ ID NO: 1321068 - RNA, 19 nt, Homo sapiens
  misc_RNA (1)...(19): siRNA sense strand
caagaaaacacaaccuuca

SEQ ID NO: 1321069 - RNA, 19 nt, Homo sapiens
  misc_RNA (1)...(19): siRNA sense strand
uacaaugcggauuuaauga

SEQ ID NO: 1321070 - RNA, 19 nt, Homo sapiens
  misc_RNA (1)...(19): siRNA sense strand
gggagauccgguguccuua

SEQ ID NO: 1321071 - RNA, 19 nt, Homo sapiens
  misc_RNA (1)...(19): siRNA sense strand
gcggauuuaaugaacugua

SEQ ID NO: 1321072 - RNA, 19 nt, Homo sapiens
  misc_RNA (1)...(19): siRNA sense strand
ucaucuacaaugcggauuu

SEQ ID NO: 1321073 - RNA, 19 nt, Homo sapiens
  misc_RNA (1)...(19): siRNA sense strand
uccaggacgaugaauuuaa

SEQ ID NO: 1321074 - RNA, 19 nt, Homo sapiens
  misc_RNA (1)...(19): siRNA sense strand
cggauuuaaugaacuguac

SEQ ID NO: 1321075 - RNA, 19 nt, Homo sapiens
  misc_RNA (1)...(19): siRNA sense strand
ugugggaugucaccuggau

SEQ ID NO: 1321076 - RNA, 19 nt, Homo sapiens
  misc_RNA (1)...(19): siRNA sense strand
gcaauuacuuucugguuaa

SEQ ID NO: 1321077 - RNA, 19 nt, Homo sapiens
  misc_RNA (1)...(19): siRNA sense strand
caaagaggauuucaacaga

SEQ ID NO: 1321078 - RNA, 19 nt, Homo sapiens
  misc_RNA (1)...(19): siRNA sense strand
gcaaguguuucuuaacuga

SEQ ID NO: 1321079 - RNA, 19 nt, Homo sapiens
  misc_RNA (1)...(19): siRNA sense strand
ggauuaacgucucgcaauu

SEQ ID NO: 1321080 - RNA, 19 nt, Homo sapiens
  misc_RNA (1)...(19): siRNA sense strand
gcaccagccucuagucuca

SEQ ID NO: 1321081 - RNA, 19 nt, Homo sapiens
  misc_RNA (1)...(19): siRNA sense strand
gagauccgguguccuuauu

SEQ ID NO: 1321082 - RNA, 19 nt, Homo sapiens
  misc_RNA (1)...(19): siRNA sense strand
gaaacugcuuuauccaaau

SEQ ID NO: 1321083 - RNA, 19 nt, Homo sapiens
  misc_RNA (1)...(19): siRNA sense strand
auacgaaacucaaagagaa

SEQ ID NO: 1321084 - RNA, 19 nt, Homo sapiens
  misc_RNA (1)...(19): siRNA sense strand
caacagaaacugcuuuauc

SEQ ID NO: 1321085 - RNA, 19 nt, Homo sapiens
  misc_RNA (1)...(19): siRNA sense strand
caucuacaaugcggauuua

SEQ ID NO: 1321086 - RNA, 19 nt, Homo sapiens
  misc_RNA (1)...(19): siRNA sense strand
gcaugaaggagucacauuu

SEQ ID NO: 1321087 - RNA, 19 nt, Homo sapiens
  misc_RNA (1)...(19): siRNA sense strand
agaaacugcuuuauccaaa

SEQ ID NO: 1321088 - RNA, 19 nt, Homo sapiens
  misc_RNA (1)...(19): siRNA sense strand
cgcaauuacuuucugguua

SEQ ID NO: 1321089 - RNA, 19 nt, Homo sapiens
  misc_RNA (1)...(19): siRNA sense strand
ggaaccagccgagaaauug

SEQ ID NO: 1321090 - RNA, 19 nt, Homo sapiens
  misc_RNA (1)...(19): siRNA sense strand
gaaaucggaucugcgaaca

SEQ ID NO: 1321091 - RNA, 19 nt, Homo sapiens
  misc_RNA (1)...(19): siRNA sense strand
gaacccaggcucaguaaca

SEQ ID NO: 1321092 - RNA, 19 nt, Homo sapiens
  misc_RNA (1)...(19): siRNA sense strand
gauuaacgucucgcaauua

SEQ ID NO: 1321093 - RNA, 19 nt, Homo sapiens
  misc_RNA (1)...(19): siRNA sense strand
gaagaacagagucguggaa

SEQ ID NO: 1321094 - RNA, 19 nt, Homo sapiens
  misc_RNA (1)...(19): siRNA sense strand
gaauuucuccuguuucauc

SEQ ID NO: 1321095 - RNA, 19 nt, Homo sapiens
  misc_RNA (1)...(19): siRNA sense strand
aaagaggauuucaacagaa

SEQ ID NO: 1321096 - RNA, 19 nt, Homo sapiens
  misc_RNA (1)...(19): siRNA sense strand
guaccgcugcucagaauuu

SEQ ID NO: 1321097 - RNA, 19 nt, Homo sapiens
  misc_RNA (1)...(19): siRNA sense strand
ccaggacgaugaauuuaag

SEQ ID NO: 1321098 - RNA, 19 nt, Homo sapiens
  misc_RNA (1)...(19): siRNA sense strand
ccaauucuuugauucacuu

SEQ ID NO: 1321099 - RNA, 19 nt, Homo sapiens
  misc_RNA (1)...(19): siRNA sense strand
ccgguguccuuauuacaua

SEQ ID NO: 1321100 - RNA, 19 nt, Homo sapiens
  misc_RNA (1)...(19): siRNA sense strand
cagcaaguguuucuuaacu

SEQ ID NO: 1321101 - RNA, 19 nt, Homo sapiens
  misc_RNA (1)...(19): siRNA sense strand
uaacggaaccagccgagaa

SEQ ID NO: 1321102 - RNA, 19 nt, Homo sapiens
  misc_RNA (1)...(19): siRNA sense strand
cuacaaugcggauuuaaug

SEQ ID NO: 1321103 - RNA, 19 nt, Homo sapiens
  misc_RNA (1)...(19): siRNA sense strand
uaacgucucgcaauuacuu

SEQ ID NO: 1321104 - RNA, 19 nt, Homo sapiens
  misc_RNA (1)...(19): siRNA sense strand
cccgugacguccaguauuu

SEQ ID NO: 1321105 - RNA, 19 nt, Homo sapiens
  misc_RNA (1)...(19): siRNA sense strand
ggcauccaauucuuugauu

SEQ ID NO: 1321106 - RNA, 19 nt, Homo sapiens
  misc_RNA (1)...(19): siRNA sense strand
gaaauuugucugcaugaag

SEQ ID NO: 1321107 - RNA, 19 nt, Homo sapiens
  misc_RNA (1)...(19): siRNA sense strand
gaaaggcuaccgcgaagag

SEQ ID NO: 1321108 - RNA, 19 nt, Homo sapiens
  misc_RNA (1)...(19): siRNA sense strand
ggguaccgcugcucagaau

SEQ ID NO: 1321109 - RNA, 19 nt, Homo sapiens
  misc_RNA (1)...(19): siRNA sense strand
ugaaauuugucugcaugaa

SEQ ID NO: 1321110 - RNA, 19 nt, Homo sapiens
  misc_RNA (1)...(19): siRNA sense strand
gcauccaauucuuugauuc

SEQ ID NO: 1321111 - RNA, 19 nt, Homo sapiens
  misc_RNA (1)...(19): siRNA sense strand
caagccuucugcucuguga

SEQ ID NO: 1321112 - RNA, 19 nt, Homo sapiens
  misc_RNA (1)...(19): siRNA sense strand
gauccgguguccuuauuac

SEQ ID NO: 1321113 - RNA, 19 nt, Homo sapiens
  misc_RNA (1)...(19): siRNA sense strand
cgugaauacuagucaaaga

SEQ ID NO: 1321114 - RNA, 19 nt, Homo sapiens
  misc_RNA (1)...(19): siRNA sense strand
cuucagcaaguguuucuua

SEQ ID NO: 1321115 - RNA, 19 nt, Homo sapiens
  misc_RNA (1)...(19): siRNA sense strand
gaugucaccuggauaaccu

SEQ ID NO: 1321116 - RNA, 19 nt, Homo sapiens
  misc_RNA (1)...(19): siRNA sense strand
caugaaggagucacauuug

SEQ ID NO: 1321117 - RNA, 19 nt, Homo sapiens
  misc_RNA (1)...(19): siRNA sense strand
ucaccuggauaaccuguca

SEQ ID NO: 1321118 - RNA, 19 nt, Homo sapiens
  misc_RNA (1)...(19): siRNA sense strand
ggagauccgguguccuuau

SEQ ID NO: 1321119 - RNA, 19 nt, Homo sapiens
  misc_RNA (1)...(19): siRNA sense strand
ucaaagaggauuucaacag

SEQ ID NO: 1321120 - RNA, 19 nt, Homo sapiens
  misc_RNA (1)...(19): siRNA sense strand
guacauacgaaacucaaag

SEQ ID NO: 1321121 - RNA, 19 nt, Homo sapiens
  misc_RNA (1)...(19): siRNA sense strand
augaaggagucacauuuga

SEQ ID NO: 1321122 - RNA, 19 nt, Homo sapiens
  misc_RNA (1)...(19): siRNA sense strand
cagaaacugcuuuauccaa

SEQ ID NO: 1321123 - RNA, 19 nt, Homo sapiens
  misc_RNA (1)...(19): siRNA sense strand
caaugcggauuuaaugaac

SEQ ID NO: 1321124 - RNA, 19 nt, Homo sapiens
  misc_RNA (1)...(19): siRNA sense strand
gaucaucugggaggaauuc

SEQ ID NO: 1321125 - RNA, 19 nt, Homo sapiens
  misc_RNA (1)...(19): siRNA sense strand
cauacgaaacucaaagaga

SEQ ID NO: 1321126 - RNA, 19 nt, Homo sapiens
  misc_RNA (1)...(19): siRNA sense strand
acaaugcggauuuaaugaa

SEQ ID NO: 1321127 - RNA, 19 nt, Homo sapiens
  misc_RNA (1)...(19): siRNA sense strand
ucacgugaauacuagucaa

SEQ ID NO: 1321128 - RNA, 19 nt, Homo sapiens
  misc_RNA (1)...(19): siRNA sense strand
caaccuucagcaaguguuu

SEQ ID NO: 1321129 - RNA, 19 nt, Homo sapiens
  misc_RNA (1)...(19): siRNA sense strand
ggaauucaccccagaggaa

SEQ ID NO: 1321130 - RNA, 19 nt, Homo sapiens
  misc_RNA (1)...(19): siRNA sense strand
aacagaaacugcuuuaucc

SEQ ID NO: 1321131 - RNA, 19 nt, Homo sapiens
  misc_RNA (1)...(19): siRNA sense strand
gacaagccuucugcucugu

SEQ ID NO: 1321132 - RNA, 19 nt, Homo sapiens
  misc_RNA (1)...(19): siRNA sense strand
gaaccagccgagaaauugg

SEQ ID NO: 1321133 - RNA, 19 nt, Homo sapiens
  misc_RNA (1)...(19): siRNA sense strand
aaucggaucugcgaacagu

SEQ ID NO: 1321134 - RNA, 19 nt, Homo sapiens
  misc_RNA (1)...(19): siRNA sense strand
guggaacccaggcucagua

SEQ ID NO: 1321135 - RNA, 19 nt, Homo sapiens
  misc_RNA (1)...(19): siRNA sense strand
acacaaccuucagcaagug

SEQ ID NO: 1321136 - RNA, 19 nt, Homo sapiens
  misc_RNA (1)...(19): siRNA sense strand
ugggaugucaccuggauaa

SEQ ID NO: 1321137 - RNA, 19 nt, Homo sapiens
  misc_RNA (1)...(19): siRNA sense strand
uaacugacaagaagaacag

SEQ ID NO: 1321138 - RNA, 19 nt, Homo sapiens
  misc_RNA (1)...(19): siRNA sense strand
aacacaaccuucagcaagu

SEQ ID NO: 1321139 - RNA, 19 nt, Homo sapiens
  misc_RNA (1)...(19): siRNA sense strand
acuccaggacgaugaauuu

SEQ ID NO: 1321140 - RNA, 19 nt, Homo sapiens
  misc_RNA (1)...(19): siRNA sense strand
aagcugggacugccaagaa

SEQ ID NO: 1321141 - RNA, 19 nt, Homo sapiens
  misc_RNA (1)...(19): siRNA sense strand
uucagcaaguguuucuuaa

SEQ ID NO: 1321142 - RNA, 19 nt, Homo sapiens
  misc_RNA (1)...(19): siRNA sense strand
cggaaccagccgagaaauu

SEQ ID NO: 1321143 - RNA, 19 nt, Homo sapiens
  misc_RNA (1)...(19): siRNA sense strand
gcucaguaacaacgaaugu

SEQ ID NO: 1321144 - RNA, 19 nt, Homo sapiens
  misc_RNA (1)...(19): siRNA sense strand
gaggguaccgcugcucaga

SEQ ID NO: 1321145 - RNA, 19 nt, Homo sapiens
  misc_RNA (1)...(19): siRNA sense strand
cauccaauucuuugauuca

SEQ ID NO: 1321146 - RNA, 19 nt, Homo sapiens
  misc_RNA (1)...(19): siRNA sense strand
caagaaaacacaaccuuca

SEQ ID NO: 1321147 - RNA, 19 nt, Homo sapiens
  misc_RNA (1)...(19): siRNA sense strand
uacaaugcggauuuaauga

SEQ ID NO: 1321148 - RNA, 19 nt, Homo sapiens
  misc_RNA (1)...(19): siRNA sense strand
ggaaaggcuaccgcgaaga

SEQ ID NO: 1321149 - RNA, 19 nt, Homo sapiens
  misc_RNA (1)...(19): siRNA sense strand
gggagauccgguguccuua

SEQ ID NO: 1321150 - RNA, 19 nt, Homo sapiens
  misc_RNA (1)...(19): siRNA sense strand
gcggauuuaaugaacugua

SEQ ID NO: 1321151 - RNA, 19 nt, Homo sapiens
  misc_RNA (1)...(19): siRNA sense strand
uccaggacgaugaauuuaa

SEQ ID NO: 1321152 - RNA, 19 nt, Homo sapiens
  misc_RNA (1)...(19): siRNA sense strand
cggauuuaaugaacuguac

SEQ ID NO: 1321153 - RNA, 19 nt, Homo sapiens
  misc_RNA (1)...(19): siRNA sense strand
ucaucuacaaugcggauuu

SEQ ID NO: 1321154 - RNA, 19 nt, Homo sapiens
  misc_RNA (1)...(19): siRNA sense strand
ugugggaugucaccuggau

SEQ ID NO: 1321155 - RNA, 19 nt, Homo sapiens
  misc_RNA (1)...(19): siRNA sense strand
gcaauuacuuucugguuaa

SEQ ID NO: 1321156 - RNA, 19 nt, Homo sapiens
  misc_RNA (1)...(19): siRNA sense strand
caaagaggauuucaacaga

SEQ ID NO: 1321157 - RNA, 19 nt, Homo sapiens
  misc_RNA (1)...(19): siRNA sense strand
gcaaguguuucuuaacuga

SEQ ID NO: 1321158 - RNA, 19 nt, Homo sapiens
  misc_RNA (1)...(19): siRNA sense strand
ggauuaacgucucgcaauu

SEQ ID NO: 1321159 - RNA, 19 nt, Homo sapiens
  misc_RNA (1)...(19): siRNA sense strand
gcaccagccucuagucuca

SEQ ID NO: 1321160 - RNA, 19 nt, Homo sapiens
  misc_RNA (1)...(19): siRNA sense strand
gagauccgguguccuuauu

SEQ ID NO: 1321161 - RNA, 19 nt, Homo sapiens
  misc_RNA (1)...(19): siRNA sense strand
gaaacugcuuuauccaaau

SEQ ID NO: 1321162 - RNA, 19 nt, Homo sapiens
  misc_RNA (1)...(19): siRNA sense strand
auacgaaacucaaagagaa

SEQ ID NO: 1321163 - RNA, 19 nt, Homo sapiens
  misc_RNA (1)...(19): siRNA sense strand
caacagaaacugcuuuauc

SEQ ID NO: 1321164 - RNA, 19 nt, Homo sapiens
  misc_RNA (1)...(19): siRNA sense strand
caucuacaaugcggauuua

SEQ ID NO: 1321165 - RNA, 19 nt, Homo sapiens
  misc_RNA (1)...(19): siRNA sense strand
gcaugaaggagucacauuu

SEQ ID NO: 1321166 - RNA, 19 nt, Homo sapiens
  misc_RNA (1)...(19): siRNA sense strand
agaaacugcuuuauccaaa

SEQ ID NO: 1321167 - RNA, 19 nt, Homo sapiens
  misc_RNA (1)...(19): siRNA sense strand
cgcaauuacuuucugguua

SEQ ID NO: 1321168 - RNA, 19 nt, Homo sapiens
  misc_RNA (1)...(19): siRNA sense strand
ggaaccagccgagaaauug

SEQ ID NO: 1321169 - RNA, 19 nt, Homo sapiens
  misc_RNA (1)...(19): siRNA sense strand
gaaaucggaucugcgaaca

SEQ ID NO: 1321170 - RNA, 19 nt, Homo sapiens
  misc_RNA (1)...(19): siRNA sense strand
gaacccaggcucaguaaca

SEQ ID NO: 1321171 - RNA, 19 nt, Homo sapiens
  misc_RNA (1)...(19): siRNA sense strand
gauuaacgucucgcaauua

SEQ ID NO: 1321172 - RNA, 19 nt, Homo sapiens
  misc_RNA (1)...(19): siRNA sense strand
gaagaacagagucguggaa

SEQ ID NO: 1321173 - RNA, 19 nt, Homo sapiens
  misc_RNA (1)...(19): siRNA sense strand
gaauuucuccuguuucauc

SEQ ID NO: 1321174 - RNA, 19 nt, Homo sapiens
  misc_RNA (1)...(19): siRNA sense strand
aaagaggauuucaacagaa

SEQ ID NO: 1321175 - RNA, 19 nt, Homo sapiens
  misc_RNA (1)...(19): siRNA sense strand
guaccgcugcucagaauuu

SEQ ID NO: 1321176 - RNA, 19 nt, Homo sapiens
  misc_RNA (1)...(19): siRNA sense strand
ccaggacgaugaauuuaag

SEQ ID NO: 1321177 - RNA, 19 nt, Homo sapiens
  misc_RNA (1)...(19): siRNA sense strand
ccaauucuuugauucacuu

SEQ ID NO: 1321178 - RNA, 19 nt, Homo sapiens
  misc_RNA (1)...(19): siRNA sense strand
ccgguguccuuauuacaua

SEQ ID NO: 1321179 - RNA, 19 nt, Homo sapiens
  misc_RNA (1)...(19): siRNA sense strand
cagcaaguguuucuuaacu

SEQ ID NO: 1321180 - RNA, 19 nt, Homo sapiens
  misc_RNA (1)...(19): siRNA sense strand
uaacggaaccagccgagaa

SEQ ID NO: 1321181 - RNA, 19 nt, Homo sapiens
  misc_RNA (1)...(19): siRNA sense strand
cuacaaugcggauuuaaug

SEQ ID NO: 1321182 - RNA, 19 nt, Homo sapiens
  misc_RNA (1)...(19): siRNA sense strand
uaacgucucgcaauuacuu

SEQ ID NO: 1321183 - RNA, 19 nt, Homo sapiens
  misc_RNA (1)...(19): siRNA sense strand
cccgugacguccaguauuu

SEQ ID NO: 1321184 - RNA, 19 nt, Homo sapiens
  misc_RNA (1)...(19): siRNA sense strand
ggcauccaauucuuugauu

SEQ ID NO: 1321185 - RNA, 19 nt, Homo sapiens
  misc_RNA (1)...(19): siRNA sense strand
gaaauuugucugcaugaag

SEQ ID NO: 1321186 - RNA, 19 nt, Homo sapiens
  misc_RNA (1)...(19): siRNA sense strand
gaaaggcuaccgcgaagag

SEQ ID NO: 1321187 - RNA, 19 nt, Homo sapiens
  misc_RNA (1)...(19): siRNA sense strand
ggguaccgcugcucagaau

SEQ ID NO: 1321188 - RNA, 19 nt, Homo sapiens
  misc_RNA (1)...(19): siRNA sense strand
ugaaauuugucugcaugaa

SEQ ID NO: 1321189 - RNA, 19 nt, Homo sapiens
  misc_RNA (1)...(19): siRNA sense strand
gcauccaauucuuugauuc

SEQ ID NO: 1321190 - RNA, 19 nt, Homo sapiens
  misc_RNA (1)...(19): siRNA sense strand
caagccuucugcucuguga

SEQ ID NO: 1321191 - RNA, 19 nt, Homo sapiens
  misc_RNA (1)...(19): siRNA sense strand
gauccgguguccuuauuac

SEQ ID NO: 1321192 - RNA, 19 nt, Homo sapiens
  misc_RNA (1)...(19): siRNA sense strand
cgugaauacuagucaaaga

SEQ ID NO: 1321193 - RNA, 19 nt, Homo sapiens
  misc_RNA (1)...(19): siRNA sense strand
cuucagcaaguguuucuua

SEQ ID NO: 1321194 - RNA, 19 nt, Homo sapiens
  misc_RNA (1)...(19): siRNA sense strand
gaugucaccuggauaaccu

SEQ ID NO: 1321195 - RNA, 19 nt, Homo sapiens
  misc_RNA (1)...(19): siRNA sense strand
caugaaggagucacauuug

SEQ ID NO: 1321196 - RNA, 19 nt, Homo sapiens
  misc_RNA (1)...(19): siRNA sense strand
ucaccuggauaaccuguca

SEQ ID NO: 1321197 - RNA, 19 nt, Homo sapiens
  misc_RNA (1)...(19): siRNA sense strand
ggagauccgguguccuuau

SEQ ID NO: 1321198 - RNA, 19 nt, Homo sapiens
  misc_RNA (1)...(19): siRNA sense strand
ucaaagaggauuucaacag

SEQ ID NO: 1321199 - RNA, 19 nt, Homo sapiens
  misc_RNA (1)...(19): siRNA sense strand
guacauacgaaacucaaag

SEQ ID NO: 1321200 - RNA, 19 nt, Homo sapiens
  misc_RNA (1)...(19): siRNA sense strand
augaaggagucacauuuga

SEQ ID NO: 1321201 - RNA, 19 nt, Homo sapiens
  misc_RNA (1)...(19): siRNA sense strand
cagaaacugcuuuauccaa

SEQ ID NO: 1321202 - RNA, 19 nt, Homo sapiens
  misc_RNA (1)...(19): siRNA sense strand
caaugcggauuuaaugaac

SEQ ID NO: 1321203 - RNA, 19 nt, Homo sapiens
  misc_RNA (1)...(19): siRNA sense strand
gaucaucugggaggaauuc

SEQ ID NO: 1321204 - RNA, 19 nt, Homo sapiens
  misc_RNA (1)...(19): siRNA sense strand
cauacgaaacucaaagaga

SEQ ID NO: 1321205 - RNA, 19 nt, Homo sapiens
  misc_RNA (1)...(19): siRNA sense strand
acaaugcggauuuaaugaa

SEQ ID NO: 1321206 - RNA, 19 nt, Homo sapiens
  misc_RNA (1)...(19): siRNA sense strand
ucacgugaauacuagucaa

SEQ ID NO: 1321207 - RNA, 19 nt, Homo sapiens
  misc_RNA (1)...(19): siRNA sense strand
caaccuucagcaaguguuu

SEQ ID NO: 1321208 - RNA, 19 nt, Homo sapiens
  misc_RNA (1)...(19): siRNA sense strand
ggaauucaccccagaggaa

SEQ ID NO: 1321209 - RNA, 19 nt, Homo sapiens
  misc_RNA (1)...(19): siRNA sense strand
aacagaaacugcuuuaucc

SEQ ID NO: 1321210 - RNA, 19 nt, Homo sapiens
  misc_RNA (1)...(19): siRNA sense strand
gacaagccuucugcucugu

SEQ ID NO: 1321211 - RNA, 19 nt, Homo sapiens
  misc_RNA (1)...(19): siRNA sense strand
gaaccagccgagaaauugg

SEQ ID NO: 1321212 - RNA, 19 nt, Homo sapiens
  misc_RNA (1)...(19): siRNA sense strand
aaucggaucugcgaacagu

SEQ ID NO: 1321213 - RNA, 19 nt, Homo sapiens
  misc_RNA (1)...(19): siRNA sense strand
guggaacccaggcucagua

SEQ ID NO: 1321214 - RNA, 19 nt, Homo sapiens
  misc_RNA (1)...(19): siRNA sense strand
acacaaccuucagcaagug

SEQ ID NO: 1321215 - RNA, 19 nt, Homo sapiens
  misc_RNA (1)...(19): siRNA sense strand
ugggaugucaccuggauaa

SEQ ID NO: 1321216 - RNA, 19 nt, Homo sapiens
  misc_RNA (1)...(19): siRNA sense strand
uaacugacaagaagaacag

SEQ ID NO: 1321217 - RNA, 19 nt, Homo sapiens
  misc_RNA (1)...(19): siRNA sense strand
aacacaaccuucagcaagu

SEQ ID NO: 1321218 - RNA, 19 nt, Homo sapiens
  misc_RNA (1)...(19): siRNA sense strand
acuccaggacgaugaauuu

SEQ ID NO: 1321219 - RNA, 19 nt, Homo sapiens
  misc_RNA (1)...(19): siRNA sense strand
aagcugggacugccaagaa

SEQ ID NO: 1321220 - RNA, 19 nt, Homo sapiens
  misc_RNA (1)...(19): siRNA sense strand
uucagcaaguguuucuuaa

SEQ ID NO: 1321221 - RNA, 19 nt, Homo sapiens
  misc_RNA (1)...(19): siRNA sense strand
cggaaccagccgagaaauu

SEQ ID NO: 1321222 - RNA, 19 nt, Homo sapiens
  misc_RNA (1)...(19): siRNA sense strand
gcucaguaacaacgaaugu

SEQ ID NO: 1321223 - RNA, 19 nt, Homo sapiens
  misc_RNA (1)...(19): siRNA sense strand
gaggguaccgcugcucaga

SEQ ID NO: 1321224 - RNA, 19 nt, Homo sapiens
  misc_RNA (1)...(19): siRNA sense strand
cauccaauucuuugauuca

SEQ ID NO: 1321225 - RNA, 19 nt, Homo sapiens
  misc_RNA (1)...(19): siRNA sense strand
caagaaaacacaaccuuca

SEQ ID NO: 1321226 - RNA, 19 nt, Homo sapiens
  misc_RNA (1)...(19): siRNA sense strand
uacaaugcggauuuaauga

SEQ ID NO: 1321227 - RNA, 19 nt, Homo sapiens
  misc_RNA (1)...(19): siRNA sense strand
ggaaaggcuaccgcgaaga

SEQ ID NO: 1321228 - RNA, 19 nt, Homo sapiens
  misc_RNA (1)...(19): siRNA sense strand
gggagauccgguguccuua

SEQ ID NO: 1321229 - RNA, 19 nt, Homo sapiens
  misc_RNA (1)...(19): siRNA sense strand
gcggauuuaaugaacugua

SEQ ID NO: 1321230 - RNA, 19 nt, Homo sapiens
  misc_RNA (1)...(19): siRNA sense strand
uccaggacgaugaauuuaa

SEQ ID NO: 1321231 - RNA, 19 nt, Homo sapiens
  misc_RNA (1)...(19): siRNA sense strand
cggauuuaaugaacuguac

SEQ ID NO: 1321232 - RNA, 19 nt, Homo sapiens
  misc_RNA (1)...(19): siRNA sense strand
ucaucuacaaugcggauuu

SEQ ID NO: 1321233 - RNA, 19 nt, Homo sapiens
  misc_RNA (1)...(19): siRNA sense strand
ugugggaugucaccuggau

SEQ ID NO: 1321234 - RNA, 19 nt, Homo sapiens
  misc_RNA (1)...(19): siRNA sense strand
gcaauuacuuucugguuaa

SEQ ID NO: 1321235 - RNA, 19 nt, Homo sapiens
  misc_RNA (1)...(19): siRNA sense strand
caaagaggauuucaacaga

SEQ ID NO: 1321236 - RNA, 19 nt, Homo sapiens
  misc_RNA (1)...(19): siRNA sense strand
gcaaguguuucuuaacuga

SEQ ID NO: 1321237 - RNA, 19 nt, Homo sapiens
  misc_RNA (1)...(19): siRNA sense strand
ggauuaacgucucgcaauu

SEQ ID NO: 1321238 - RNA, 19 nt, Homo sapiens
  misc_RNA (1)...(19): siRNA sense strand
ugaaggaaauuaccugaga

SEQ ID NO: 1321239 - RNA, 19 nt, Homo sapiens
  misc_RNA (1)...(19): siRNA sense strand
gcaccagccucuagucuca

SEQ ID NO: 1321240 - RNA, 19 nt, Homo sapiens
  misc_RNA (1)...(19): siRNA sense strand
gagauccgguguccuuauu

SEQ ID NO: 1321241 - RNA, 19 nt, Homo sapiens
  misc_RNA (1)...(19): siRNA sense strand
gaaacugcuuuauccaaau

SEQ ID NO: 1321242 - RNA, 19 nt, Homo sapiens
  misc_RNA (1)...(19): siRNA sense strand
auacgaaacucaaagagaa

SEQ ID NO: 1321243 - RNA, 19 nt, Homo sapiens
  misc_RNA (1)...(19): siRNA sense strand
caacagaaacugcuuuauc

SEQ ID NO: 1321244 - RNA, 19 nt, Homo sapiens
  misc_RNA (1)...(19): siRNA sense strand
caucuacaaugcggauuua

SEQ ID NO: 1321245 - RNA, 19 nt, Homo sapiens
  misc_RNA (1)...(19): siRNA sense strand
gcaugaaggagucacauuu

SEQ ID NO: 1321246 - RNA, 19 nt, Homo sapiens
  misc_RNA (1)...(19): siRNA sense strand
agaaacugcuuuauccaaa

SEQ ID NO: 1321247 - RNA, 19 nt, Homo sapiens
  misc_RNA (1)...(19): siRNA sense strand
cgcaauuacuuucugguua

SEQ ID NO: 1321248 - RNA, 19 nt, Homo sapiens
  misc_RNA (1)...(19): siRNA sense strand
ggaaccagccgagaaauug

SEQ ID NO: 1321249 - RNA, 19 nt, Homo sapiens
  misc_RNA (1)...(19): siRNA sense strand
gcugugaaccuuuauauca

SEQ ID NO: 1321250 - RNA, 19 nt, Homo sapiens
  misc_RNA (1)...(19): siRNA sense strand
gaaaucggaucugcgaaca

SEQ ID NO: 1321251 - RNA, 19 nt, Homo sapiens
  misc_RNA (1)...(19): siRNA sense strand
gaacccaggcucaguaaca

SEQ ID NO: 1321252 - RNA, 19 nt, Homo sapiens
  misc_RNA (1)...(19): siRNA sense strand
gauuaacgucucgcaauua

SEQ ID NO: 1321253 - RNA, 19 nt, Homo sapiens
  misc_RNA (1)...(19): siRNA sense strand
gaagaacagagucguggaa

SEQ ID NO: 1321254 - RNA, 19 nt, Homo sapiens
  misc_RNA (1)...(19): siRNA sense strand
gaauuucuccuguuucauc

SEQ ID NO: 1321255 - RNA, 19 nt, Homo sapiens
  misc_RNA (1)...(19): siRNA sense strand
aaagaggauuucaacagaa

SEQ ID NO: 1321256 - RNA, 19 nt, Homo sapiens
  misc_RNA (1)...(19): siRNA sense strand
guaccgcugcucagaauuu

SEQ ID NO: 1321257 - RNA, 19 nt, Homo sapiens
  misc_RNA (1)...(19): siRNA sense strand
ccaggacgaugaauuuaag

SEQ ID NO: 1321258 - RNA, 19 nt, Homo sapiens
  misc_RNA (1)...(19): siRNA sense strand
ccaauucuuugauucacuu

SEQ ID NO: 1321259 - RNA, 19 nt, Homo sapiens
  misc_RNA (1)...(19): siRNA sense strand
ccgguguccuuauuacaua

SEQ ID NO: 1321260 - RNA, 19 nt, Homo sapiens
  misc_RNA (1)...(19): siRNA sense strand
cagcaaguguuucuuaacu

SEQ ID NO: 1321261 - RNA, 19 nt, Homo sapiens
  misc_RNA (1)...(19): siRNA sense strand
ggaauggcauggacaucuc

SEQ ID NO: 1321262 - RNA, 19 nt, Homo sapiens
  misc_RNA (1)...(19): siRNA sense strand
uaacggaaccagccgagaa

SEQ ID NO: 1321263 - RNA, 19 nt, Homo sapiens
  misc_RNA (1)...(19): siRNA sense strand
cuacaaugcggauuuaaug

SEQ ID NO: 1321264 - RNA, 19 nt, Homo sapiens
  misc_RNA (1)...(19): siRNA sense strand
uaacgucucgcaauuacuu

SEQ ID NO: 1321265 - RNA, 19 nt, Homo sapiens
  misc_RNA (1)...(19): siRNA sense strand
cccgugacguccaguauuu

SEQ ID NO: 1321266 - RNA, 19 nt, Homo sapiens
  misc_RNA (1)...(19): siRNA sense strand
ggcauccaauucuuugauu

SEQ ID NO: 1321267 - RNA, 19 nt, Homo sapiens
  misc_RNA (1)...(19): siRNA sense strand
gaaauuugucugcaugaag

SEQ ID NO: 1321268 - RNA, 19 nt, Homo sapiens
  misc_RNA (1)...(19): siRNA sense strand
gaaaggcuaccgcgaagag

SEQ ID NO: 1321269 - RNA, 19 nt, Homo sapiens
  misc_RNA (1)...(19): siRNA sense strand
ggguaccgcugcucagaau

SEQ ID NO: 1321270 - RNA, 19 nt, Homo sapiens
  misc_RNA (1)...(19): siRNA sense strand
ugaaauuugucugcaugaa

SEQ ID NO: 1321271 - RNA, 19 nt, Homo sapiens
  misc_RNA (1)...(19): siRNA sense strand
gcauccaauucuuugauuc

SEQ ID NO: 1321272 - RNA, 19 nt, Homo sapiens
  misc_RNA (1)...(19): siRNA sense strand
caagccuucugcucuguga

SEQ ID NO: 1321273 - RNA, 19 nt, Homo sapiens
  misc_RNA (1)...(19): siRNA sense strand
gauccgguguccuuauuac

SEQ ID NO: 1321274 - RNA, 19 nt, Homo sapiens
  misc_RNA (1)...(19): siRNA sense strand
cgugaauacuagucaaaga

SEQ ID NO: 1321275 - RNA, 19 nt, Homo sapiens
  misc_RNA (1)...(19): siRNA sense strand
cuucagcaaguguuucuua

SEQ ID NO: 1321276 - RNA, 19 nt, Homo sapiens
  misc_RNA (1)...(19): siRNA sense strand
gaugucaccuggauaaccu

SEQ ID NO: 1321277 - RNA, 19 nt, Homo sapiens
  misc_RNA (1)...(19): siRNA sense strand
caugaaggagucacauuug

SEQ ID NO: 1321278 - RNA, 19 nt, Homo sapiens
  misc_RNA (1)...(19): siRNA sense strand
augaugcugugaaccuuua

SEQ ID NO: 1321279 - RNA, 19 nt, Homo sapiens
  misc_RNA (1)...(19): siRNA sense strand
ucaccuggauaaccuguca

SEQ ID NO: 1321280 - RNA, 19 nt, Homo sapiens
  misc_RNA (1)...(19): siRNA sense strand
ggagauccgguguccuuau

SEQ ID NO: 1321281 - RNA, 19 nt, Homo sapiens
  misc_RNA (1)...(19): siRNA sense strand
ucaaagaggauuucaacag

SEQ ID NO: 1321282 - RNA, 19 nt, Homo sapiens
  misc_RNA (1)...(19): siRNA sense strand
guacauacgaaacucaaag

SEQ ID NO: 1321283 - RNA, 19 nt, Homo sapiens
  misc_RNA (1)...(19): siRNA sense strand
ggaacuguuuucuugauga

SEQ ID NO: 1321284 - RNA, 19 nt, Homo sapiens
  misc_RNA (1)...(19): siRNA sense strand
augaaggagucacauuuga

SEQ ID NO: 1321285 - RNA, 19 nt, Homo sapiens
  misc_RNA (1)...(19): siRNA sense strand
gaugaugcugugaaccuuu

SEQ ID NO: 1321286 - RNA, 19 nt, Homo sapiens
  misc_RNA (1)...(19): siRNA sense strand
cagaaacugcuuuauccaa

SEQ ID NO: 1321287 - RNA, 19 nt, Homo sapiens
  misc_RNA (1)...(19): siRNA sense strand
caaugcggauuuaaugaac

SEQ ID NO: 1321288 - RNA, 19 nt, Homo sapiens
  misc_RNA (1)...(19): siRNA sense strand
gaucaucugggaggaauuc

SEQ ID NO: 1321289 - RNA, 19 nt, Homo sapiens
  misc_RNA (1)...(19): siRNA sense strand
cauacgaaacucaaagaga

SEQ ID NO: 1321290 - RNA, 19 nt, Homo sapiens
  misc_RNA (1)...(19): siRNA sense strand
acaaugcggauuuaaugaa

SEQ ID NO: 1321291 - RNA, 19 nt, Homo sapiens
  misc_RNA (1)...(19): siRNA sense strand
ucacgugaauacuagucaa

SEQ ID NO: 1321292 - RNA, 19 nt, Homo sapiens
  misc_RNA (1)...(19): siRNA sense strand
caaccuucagcaaguguuu

SEQ ID NO: 1321293 - RNA, 19 nt, Homo sapiens
  misc_RNA (1)...(19): siRNA sense strand
ggaauucaccccagaggaa

SEQ ID NO: 1321294 - RNA, 19 nt, Homo sapiens
  misc_RNA (1)...(19): siRNA sense strand
aacagaaacugcuuuaucc

SEQ ID NO: 1321295 - RNA, 19 nt, Homo sapiens
  misc_RNA (1)...(19): siRNA sense strand
gacaagccuucugcucugu

SEQ ID NO: 1321296 - RNA, 19 nt, Homo sapiens
  misc_RNA (1)...(19): siRNA sense strand
aaucggaucugcgaacagu

SEQ ID NO: 1321297 - RNA, 19 nt, Homo sapiens
  misc_RNA (1)...(19): siRNA sense strand
gaaccagccgagaaauugg

SEQ ID NO: 1321298 - RNA, 19 nt, Homo sapiens
  misc_RNA (1)...(19): siRNA sense strand
guggaacccaggcucagua

SEQ ID NO: 1321299 - RNA, 19 nt, Homo sapiens
  misc_RNA (1)...(19): siRNA sense strand
acacaaccuucagcaagug

SEQ ID NO: 1321300 - RNA, 19 nt, Homo sapiens
  misc_RNA (1)...(19): siRNA sense strand
ugggaugucaccuggauaa

SEQ ID NO: 1321301 - RNA, 19 nt, Homo sapiens
  misc_RNA (1)...(19): siRNA sense strand
uaacugacaagaagaacag

SEQ ID NO: 1321302 - RNA, 19 nt, Homo sapiens
  misc_RNA (1)...(19): siRNA sense strand
aagcugggacugccaagaa

SEQ ID NO: 1321303 - RNA, 19 nt, Homo sapiens
  misc_RNA (1)...(19): siRNA sense strand
gaugcugugaaccuuuaua

SEQ ID NO: 1321304 - RNA, 19 nt, Homo sapiens
  misc_RNA (1)...(19): siRNA sense strand
acuccaggacgaugaauuu

SEQ ID NO: 1321305 - RNA, 19 nt, Homo sapiens
  misc_RNA (1)...(19): siRNA sense strand
aacacaaccuucagcaagu

SEQ ID NO: 1321306 - RNA, 19 nt, Homo sapiens
  misc_RNA (1)...(19): siRNA sense strand
uucagcaaguguuucuuaa

SEQ ID NO: 1321307 - RNA, 19 nt, Homo sapiens
  misc_RNA (1)...(19): siRNA sense strand
gaacuguuuucuugaugau

SEQ ID NO: 1321308 - RNA, 19 nt, Homo sapiens
  misc_RNA (1)...(19): siRNA sense strand
cggaaccagccgagaaauu

SEQ ID NO: 1321309 - RNA, 19 nt, Homo sapiens
  misc_RNA (1)...(19): siRNA sense strand
gcucaguaacaacgaaugu

SEQ ID NO: 1321310 - RNA, 19 nt, Homo sapiens
  misc_RNA (1)...(19): siRNA sense strand
gaggguaccgcugcucaga

SEQ ID NO: 1321311 - RNA, 19 nt, Homo sapiens
  misc_RNA (1)...(19): siRNA sense strand
cauccaauucuuugauuca

SEQ ID NO: 1321312 - RNA, 19 nt, Homo sapiens
  misc_RNA (1)...(19): siRNA sense strand
caagaaaacacaaccuuca

SEQ ID NO: 1321313 - RNA, 19 nt, Homo sapiens
  misc_RNA (1)...(19): siRNA sense strand
uacaaugcggauuuaauga

SEQ ID NO: 1321314 - RNA, 19 nt, Homo sapiens
  misc_RNA (1)...(19): siRNA sense strand
ggaaaggcuaccgcgaaga

SEQ ID NO: 1321315 - RNA, 19 nt, Homo sapiens
  misc_RNA (1)...(19): siRNA sense strand
gggagauccgguguccuua

SEQ ID NO: 1321316 - RNA, 19 nt, Homo sapiens
  misc_RNA (1)...(19): siRNA sense strand
gcggauuuaaugaacugua

SEQ ID NO: 1321317 - RNA, 19 nt, Homo sapiens
  misc_RNA (1)...(19): siRNA sense strand
uccaggacgaugaauuuaa

SEQ ID NO: 1321318 - RNA, 19 nt, Homo sapiens
  misc_RNA (1)...(19): siRNA sense strand
cggauuuaaugaacuguac

SEQ ID NO: 1321319 - RNA, 19 nt, Homo sapiens
  misc_RNA (1)...(19): siRNA sense strand
ucaucuacaaugcggauuu

SEQ ID NO: 1321320 - RNA, 19 nt, Homo sapiens
  misc_RNA (1)...(19): siRNA sense strand
ugaugaugcugugaaccuu

SEQ ID NO: 1321321 - RNA, 19 nt, Homo sapiens
  misc_RNA (1)...(19): siRNA sense strand
cugugaaccuuuauaucau

SEQ ID NO: 1321322 - RNA, 19 nt, Homo sapiens
  misc_RNA (1)...(19): siRNA sense strand
ugugggaugucaccuggau

SEQ ID NO: 1321323 - RNA, 19 nt, Homo sapiens
  misc_RNA (1)...(19): siRNA sense strand
gcaauuacuuucugguuaa

SEQ ID NO: 1321324 - RNA, 19 nt, Homo sapiens
  misc_RNA (1)...(19): siRNA sense strand
caaagaggauuucaacaga

SEQ ID NO: 1321325 - RNA, 19 nt, Homo sapiens
  misc_RNA (1)...(19): siRNA sense strand
gcaaguguuucuuaacuga

SEQ ID NO: 1321326 - RNA, 19 nt, Homo sapiens
  misc_RNA (1)...(19): siRNA sense strand
ggauuaacgucucgcaauu

SEQ ID NO: 1321327 - RNA, 19 nt, Homo sapiens
  misc_RNA (1)...(19): siRNA sense strand
gcaccagccucuagucuca

SEQ ID NO: 1321328 - RNA, 19 nt, Homo sapiens
  misc_RNA (1)...(19): siRNA sense strand
gagauccgguguccuuauu

SEQ ID NO: 1321329 - RNA, 19 nt, Homo sapiens
  misc_RNA (1)...(19): siRNA sense strand
gaaacugcuuuauccaaau

SEQ ID NO: 1321330 - RNA, 19 nt, Homo sapiens
  misc_RNA (1)...(19): siRNA sense strand
auacgaaacucaaagagaa

SEQ ID NO: 1321331 - RNA, 19 nt, Homo sapiens
  misc_RNA (1)...(19): siRNA sense strand
caacagaaacugcuuuauc

SEQ ID NO: 1321332 - RNA, 19 nt, Homo sapiens
  misc_RNA (1)...(19): siRNA sense strand
caucuacaaugcggauuua

SEQ ID NO: 1321333 - RNA, 19 nt, Homo sapiens
  misc_RNA (1)...(19): siRNA sense strand
gcaugaaggagucacauuu

SEQ ID NO: 1321334 - RNA, 19 nt, Homo sapiens
  misc_RNA (1)...(19): siRNA sense strand
agaaacugcuuuauccaaa

SEQ ID NO: 1321335 - RNA, 19 nt, Homo sapiens
  misc_RNA (1)...(19): siRNA sense strand
cgcaauuacuuucugguua

SEQ ID NO: 1321336 - RNA, 19 nt, Homo sapiens
  misc_RNA (1)...(19): siRNA sense strand
ggaaccagccgagaaauug

SEQ ID NO: 1321337 - RNA, 19 nt, Homo sapiens
  misc_RNA (1)...(19): siRNA sense strand
gaaaucggaucugcgaaca

SEQ ID NO: 1321338 - RNA, 19 nt, Homo sapiens
  misc_RNA (1)...(19): siRNA sense strand
gaacccaggcucaguaaca

SEQ ID NO: 1321339 - RNA, 19 nt, Homo sapiens
  misc_RNA (1)...(19): siRNA sense strand
gauuaacgucucgcaauua

SEQ ID NO: 1321340 - RNA, 19 nt, Homo sapiens
  misc_RNA (1)...(19): siRNA sense strand
gaagaacagagucguggaa

SEQ ID NO: 1321341 - RNA, 19 nt, Homo sapiens
  misc_RNA (1)...(19): siRNA sense strand
gaauuucuccuguuucauc

SEQ ID NO: 1321342 - RNA, 19 nt, Homo sapiens
  misc_RNA (1)...(19): siRNA sense strand
aaagaggauuucaacagaa

SEQ ID NO: 1321343 - RNA, 19 nt, Homo sapiens
  misc_RNA (1)...(19): siRNA sense strand
guaccgcugcucagaauuu

SEQ ID NO: 1321344 - RNA, 19 nt, Homo sapiens
  misc_RNA (1)...(19): siRNA sense strand
ccaggacgaugaauuuaag

SEQ ID NO: 1321345 - RNA, 19 nt, Homo sapiens
  misc_RNA (1)...(19): siRNA sense strand
ccaauucuuugauucacuu

SEQ ID NO: 1321346 - RNA, 19 nt, Homo sapiens
  misc_RNA (1)...(19): siRNA sense strand
ccgguguccuuauuacaua

SEQ ID NO: 1321347 - RNA, 19 nt, Homo sapiens
  misc_RNA (1)...(19): siRNA sense strand
cagcaaguguuucuuaacu

SEQ ID NO: 1321348 - RNA, 19 nt, Homo sapiens
  misc_RNA (1)...(19): siRNA sense strand
uaacggaaccagccgagaa

SEQ ID NO: 1321349 - RNA, 19 nt, Homo sapiens
  misc_RNA (1)...(19): siRNA sense strand
cuacaaugcggauuuaaug

SEQ ID NO: 1321350 - RNA, 19 nt, Homo sapiens
  misc_RNA (1)...(19): siRNA sense strand
uaacgucucgcaauuacuu

SEQ ID NO: 1321351 - RNA, 19 nt, Homo sapiens
  misc_RNA (1)...(19): siRNA sense strand
cccgugacguccaguauuu

SEQ ID NO: 1321352 - RNA, 19 nt, Homo sapiens
  misc_RNA (1)...(19): siRNA sense strand
ggcauccaauucuuugauu

SEQ ID NO: 1321353 - RNA, 19 nt, Homo sapiens
  misc_RNA (1)...(19): siRNA sense strand
gaaauuugucugcaugaag

SEQ ID NO: 1321354 - RNA, 19 nt, Homo sapiens
  misc_RNA (1)...(19): siRNA sense strand
ggguaccgcugcucagaau

SEQ ID NO: 1321355 - RNA, 19 nt, Homo sapiens
  misc_RNA (1)...(19): siRNA sense strand
ugaaauuugucugcaugaa

SEQ ID NO: 1321356 - RNA, 19 nt, Homo sapiens
  misc_RNA (1)...(19): siRNA sense strand
gcauccaauucuuugauuc

SEQ ID NO: 1321357 - RNA, 19 nt, Homo sapiens
  misc_RNA (1)...(19): siRNA sense strand
caagccuucugcucuguga

SEQ ID NO: 1321358 - RNA, 19 nt, Homo sapiens
  misc_RNA (1)...(19): siRNA sense strand
gauccgguguccuuauuac

SEQ ID NO: 1321359 - RNA, 19 nt, Homo sapiens
  misc_RNA (1)...(19): siRNA sense strand
cgugaauacuagucaaaga

SEQ ID NO: 1321360 - RNA, 19 nt, Homo sapiens
  misc_RNA (1)...(19): siRNA sense strand
cuucagcaaguguuucuua

SEQ ID NO: 1321361 - RNA, 19 nt, Homo sapiens
  misc_RNA (1)...(19): siRNA sense strand
gaugucaccuggauaaccu

SEQ ID NO: 1321362 - RNA, 19 nt, Homo sapiens
  misc_RNA (1)...(19): siRNA sense strand
caugaaggagucacauuug

SEQ ID NO: 1321363 - RNA, 19 nt, Homo sapiens
  misc_RNA (1)...(19): siRNA sense strand
ucaccuggauaaccuguca

SEQ ID NO: 1321364 - RNA, 19 nt, Homo sapiens
  misc_RNA (1)...(19): siRNA sense strand
ggagauccgguguccuuau

SEQ ID NO: 1321365 - RNA, 19 nt, Homo sapiens
  misc_RNA (1)...(19): siRNA sense strand
ucaaagaggauuucaacag

SEQ ID NO: 1321366 - RNA, 19 nt, Homo sapiens
  misc_RNA (1)...(19): siRNA sense strand
guacauacgaaacucaaag

SEQ ID NO: 1321367 - RNA, 19 nt, Homo sapiens
  misc_RNA (1)...(19): siRNA sense strand
augaaggagucacauuuga

SEQ ID NO: 1321368 - RNA, 19 nt, Homo sapiens
  misc_RNA (1)...(19): siRNA sense strand
cagaaacugcuuuauccaa

SEQ ID NO: 1321369 - RNA, 19 nt, Homo sapiens
  misc_RNA (1)...(19): siRNA sense strand
caaugcggauuuaaugaac

SEQ ID NO: 1321370 - RNA, 19 nt, Homo sapiens
  misc_RNA (1)...(19): siRNA sense strand
cauacgaaacucaaagaga

SEQ ID NO: 1321371 - RNA, 19 nt, Homo sapiens
  misc_RNA (1)...(19): siRNA sense strand
acaaugcggauuuaaugaa

SEQ ID NO: 1321372 - RNA, 19 nt, Homo sapiens
  misc_RNA (1)...(19): siRNA sense strand
ucacgugaauacuagucaa

SEQ ID NO: 1321373 - RNA, 19 nt, Homo sapiens
  misc_RNA (1)...(19): siRNA sense strand
caaccuucagcaaguguuu

SEQ ID NO: 1321374 - RNA, 19 nt, Homo sapiens
  misc_RNA (1)...(19): siRNA sense strand
aacagaaacugcuuuaucc

SEQ ID NO: 1321375 - RNA, 19 nt, Homo sapiens
  misc_RNA (1)...(19): siRNA sense strand
gacaagccuucugcucugu

SEQ ID NO: 1321376 - RNA, 19 nt, Homo sapiens
  misc_RNA (1)...(19): siRNA sense strand
gaaccagccgagaaauugg

SEQ ID NO: 1321377 - RNA, 19 nt, Homo sapiens
  misc_RNA (1)...(19): siRNA sense strand
aaucggaucugcgaacagu

SEQ ID NO: 1321378 - RNA, 19 nt, Homo sapiens
  misc_RNA (1)...(19): siRNA sense strand
guggaacccaggcucagua

SEQ ID NO: 1321379 - RNA, 19 nt, Homo sapiens
  misc_RNA (1)...(19): siRNA sense strand
acacaaccuucagcaagug

SEQ ID NO: 1321380 - RNA, 19 nt, Homo sapiens
  misc_RNA (1)...(19): siRNA sense strand
ugggaugucaccuggauaa

SEQ ID NO: 1321381 - RNA, 19 nt, Homo sapiens
  misc_RNA (1)...(19): siRNA sense strand
uaacugacaagaagaacag

SEQ ID NO: 1321382 - RNA, 19 nt, Homo sapiens
  misc_RNA (1)...(19): siRNA sense strand
aacacaaccuucagcaagu

SEQ ID NO: 1321383 - RNA, 19 nt, Homo sapiens
  misc_RNA (1)...(19): siRNA sense strand
acuccaggacgaugaauuu

SEQ ID NO: 1321384 - RNA, 19 nt, Homo sapiens
  misc_RNA (1)...(19): siRNA sense strand
aagcugggacugccaagaa

SEQ ID NO: 1321385 - RNA, 19 nt, Homo sapiens
  misc_RNA (1)...(19): siRNA sense strand
uucagcaaguguuucuuaa

SEQ ID NO: 1321386 - RNA, 19 nt, Homo sapiens
  misc_RNA (1)...(19): siRNA sense strand
cggaaccagccgagaaauu

SEQ ID NO: 1321387 - RNA, 19 nt, Homo sapiens
  misc_RNA (1)...(19): siRNA sense strand
gcucaguaacaacgaaugu

SEQ ID NO: 1321388 - RNA, 19 nt, Homo sapiens
  misc_RNA (1)...(19): siRNA sense strand
gaggguaccgcugcucaga

SEQ ID NO: 1321389 - RNA, 19 nt, Homo sapiens
  misc_RNA (1)...(19): siRNA sense strand
cauccaauucuuugauuca

SEQ ID NO: 1321390 - RNA, 19 nt, Homo sapiens
  misc_RNA (1)...(19): siRNA sense strand
caagaaaacacaaccuuca

SEQ ID NO: 1321391 - RNA, 19 nt, Homo sapiens
  misc_RNA (1)...(19): siRNA sense strand
uacaaugcggauuuaauga

SEQ ID NO: 1321392 - RNA, 19 nt, Homo sapiens
  misc_RNA (1)...(19): siRNA sense strand
gggagauccgguguccuua

SEQ ID NO: 1321393 - RNA, 19 nt, Homo sapiens
  misc_RNA (1)...(19): siRNA sense strand
gcggauuuaaugaacugua

SEQ ID NO: 1321394 - RNA, 19 nt, Homo sapiens
  misc_RNA (1)...(19): siRNA sense strand
ucaucuacaaugcggauuu

SEQ ID NO: 1321395 - RNA, 19 nt, Homo sapiens
  misc_RNA (1)...(19): siRNA sense strand
uccaggacgaugaauuuaa

SEQ ID NO: 1321396 - RNA, 19 nt, Homo sapiens
  misc_RNA (1)...(19): siRNA sense strand
cggauuuaaugaacuguac

SEQ ID NO: 1321397 - RNA, 19 nt, Homo sapiens
  misc_RNA (1)...(19): siRNA sense strand
ugugggaugucaccuggau

SEQ ID NO: 1321398 - RNA, 19 nt, Homo sapiens
  misc_RNA (1)...(19): siRNA sense strand
gcaauuacuuucugguuaa

SEQ ID NO: 1321399 - RNA, 19 nt, Homo sapiens
  misc_RNA (1)...(19): siRNA sense strand
caaagaggauuucaacaga

SEQ ID NO: 1321400 - RNA, 19 nt, Homo sapiens
  misc_RNA (1)...(19): siRNA sense strand
gcaaguguuucuuaacuga

SEQ ID NO: 1321401 - RNA, 19 nt, Homo sapiens
  misc_RNA (1)...(19): siRNA sense strand
ggauuaacgucucgcaauu

SEQ ID NO: 1321402 - RNA, 19 nt, Homo sapiens
  misc_RNA (1)...(19): siRNA sense strand
gcaccagccucuagucuca

SEQ ID NO: 1321403 - RNA, 19 nt, Homo sapiens
  misc_RNA (1)...(19): siRNA sense strand
gagauccgguguccuuauu

SEQ ID NO: 1321404 - RNA, 19 nt, Homo sapiens
  misc_RNA (1)...(19): siRNA sense strand
gaaacugcuuuauccaaau

SEQ ID NO: 1321405 - RNA, 19 nt, Homo sapiens
  misc_RNA (1)...(19): siRNA sense strand
auacgaaacucaaagagaa

SEQ ID NO: 1321406 - RNA, 19 nt, Homo sapiens
  misc_RNA (1)...(19): siRNA sense strand
caacagaaacugcuuuauc

SEQ ID NO: 1321407 - RNA, 19 nt, Homo sapiens
  misc_RNA (1)...(19): siRNA sense strand
caucuacaaugcggauuua

SEQ ID NO: 1321408 - RNA, 19 nt, Homo sapiens
  misc_RNA (1)...(19): siRNA sense strand
gcaugaaggagucacauuu

SEQ ID NO: 1321409 - RNA, 19 nt, Homo sapiens
  misc_RNA (1)...(19): siRNA sense strand
agaaacugcuuuauccaaa

SEQ ID NO: 1321410 - RNA, 19 nt, Homo sapiens
  misc_RNA (1)...(19): siRNA sense strand
cgcaauuacuuucugguua

SEQ ID NO: 1321411 - RNA, 19 nt, Homo sapiens
  misc_RNA (1)...(19): siRNA sense strand
ggaaccagccgagaaauug

SEQ ID NO: 1321412 - RNA, 19 nt, Homo sapiens
  misc_RNA (1)...(19): siRNA sense strand
gaaaucggaucugcgaaca

SEQ ID NO: 1321413 - RNA, 19 nt, Homo sapiens
  misc_RNA (1)...(19): siRNA sense strand
gaacccaggcucaguaaca

SEQ ID NO: 1321414 - RNA, 19 nt, Homo sapiens
  misc_RNA (1)...(19): siRNA sense strand
gauuaacgucucgcaauua

SEQ ID NO: 1321415 - RNA, 19 nt, Homo sapiens
  misc_RNA (1)...(19): siRNA sense strand
gaagaacagagucguggaa

SEQ ID NO: 1321416 - RNA, 19 nt, Homo sapiens
  misc_RNA (1)...(19): siRNA sense strand
gaauuucuccuguuucauc

SEQ ID NO: 1321417 - RNA, 19 nt, Homo sapiens
  misc_RNA (1)...(19): siRNA sense strand
aaagaggauuucaacagaa

SEQ ID NO: 1321418 - RNA, 19 nt, Homo sapiens
  misc_RNA (1)...(19): siRNA sense strand
guaccgcugcucagaauuu

SEQ ID NO: 1321419 - RNA, 19 nt, Homo sapiens
  misc_RNA (1)...(19): siRNA sense strand
ccaggacgaugaauuuaag

SEQ ID NO: 1321420 - RNA, 19 nt, Homo sapiens
  misc_RNA (1)...(19): siRNA sense strand
ccaauucuuugauucacuu

SEQ ID NO: 1321421 - RNA, 19 nt, Homo sapiens
  misc_RNA (1)...(19): siRNA sense strand
ccgguguccuuauuacaua

SEQ ID NO: 1321422 - RNA, 19 nt, Homo sapiens
  misc_RNA (1)...(19): siRNA sense strand
cagcaaguguuucuuaacu

SEQ ID NO: 1321423 - RNA, 19 nt, Homo sapiens
  misc_RNA (1)...(19): siRNA sense strand
uaacggaaccagccgagaa

SEQ ID NO: 1321424 - RNA, 19 nt, Homo sapiens
  misc_RNA (1)...(19): siRNA sense strand
cuacaaugcggauuuaaug

SEQ ID NO: 1321425 - RNA, 19 nt, Homo sapiens
  misc_RNA (1)...(19): siRNA sense strand
uaacgucucgcaauuacuu

SEQ ID NO: 1321426 - RNA, 19 nt, Homo sapiens
  misc_RNA (1)...(19): siRNA sense strand
cccgugacguccaguauuu

SEQ ID NO: 1321427 - RNA, 19 nt, Homo sapiens
  misc_RNA (1)...(19): siRNA sense strand
ggcauccaauucuuugauu

SEQ ID NO: 1321428 - RNA, 19 nt, Homo sapiens
  misc_RNA (1)...(19): siRNA sense strand
gaaauuugucugcaugaag

SEQ ID NO: 1321429 - RNA, 19 nt, Homo sapiens
  misc_RNA (1)...(19): siRNA sense strand
ggguaccgcugcucagaau

SEQ ID NO: 1321430 - RNA, 19 nt, Homo sapiens
  misc_RNA (1)...(19): siRNA sense strand
ugaaauuugucugcaugaa

SEQ ID NO: 1321431 - RNA, 19 nt, Homo sapiens
  misc_RNA (1)...(19): siRNA sense strand
gcauccaauucuuugauuc

SEQ ID NO: 1321432 - RNA, 19 nt, Homo sapiens
  misc_RNA (1)...(19): siRNA sense strand
caagccuucugcucuguga

SEQ ID NO: 1321433 - RNA, 19 nt, Homo sapiens
  misc_RNA (1)...(19): siRNA sense strand
gauccgguguccuuauuac

SEQ ID NO: 1321434 - RNA, 19 nt, Homo sapiens
  misc_RNA (1)...(19): siRNA sense strand
cgugaauacuagucaaaga

SEQ ID NO: 1321435 - RNA, 19 nt, Homo sapiens
  misc_RNA (1)...(19): siRNA sense strand
cuucagcaaguguuucuua

SEQ ID NO: 1321436 - RNA, 19 nt, Homo sapiens
  misc_RNA (1)...(19): siRNA sense strand
gaugucaccuggauaaccu

SEQ ID NO: 1321437 - RNA, 19 nt, Homo sapiens
  misc_RNA (1)...(19): siRNA sense strand
caugaaggagucacauuug

SEQ ID NO: 1321438 - RNA, 19 nt, Homo sapiens
  misc_RNA (1)...(19): siRNA sense strand
ucaccuggauaaccuguca

SEQ ID NO: 1321439 - RNA, 19 nt, Homo sapiens
  misc_RNA (1)...(19): siRNA sense strand
ggagauccgguguccuuau

SEQ ID NO: 1321440 - RNA, 19 nt, Homo sapiens
  misc_RNA (1)...(19): siRNA sense strand
ucaaagaggauuucaacag

SEQ ID NO: 1321441 - RNA, 19 nt, Homo sapiens
  misc_RNA (1)...(19): siRNA sense strand
guacauacgaaacucaaag

SEQ ID NO: 1321442 - RNA, 19 nt, Homo sapiens
  misc_RNA (1)...(19): siRNA sense strand
augaaggagucacauuuga

SEQ ID NO: 1321443 - RNA, 19 nt, Homo sapiens
  misc_RNA (1)...(19): siRNA sense strand
cagaaacugcuuuauccaa

SEQ ID NO: 1321444 - RNA, 19 nt, Homo sapiens
  misc_RNA (1)...(19): siRNA sense strand
caaugcggauuuaaugaac

SEQ ID NO: 1321445 - RNA, 19 nt, Homo sapiens
  misc_RNA (1)...(19): siRNA sense strand
cauacgaaacucaaagaga

SEQ ID NO: 1321446 - RNA, 19 nt, Homo sapiens
  misc_RNA (1)...(19): siRNA sense strand
acaaugcggauuuaaugaa

SEQ ID NO: 1321447 - RNA, 19 nt, Homo sapiens
  misc_RNA (1)...(19): siRNA sense strand
ucacgugaauacuagucaa

SEQ ID NO: 1321448 - RNA, 19 nt, Homo sapiens
  misc_RNA (1)...(19): siRNA sense strand
caaccuucagcaaguguuu

SEQ ID NO: 1321449 - RNA, 19 nt, Homo sapiens
  misc_RNA (1)...(19): siRNA sense strand
aacagaaacugcuuuaucc

SEQ ID NO: 1321450 - RNA, 19 nt, Homo sapiens
  misc_RNA (1)...(19): siRNA sense strand
gacaagccuucugcucugu

SEQ ID NO: 1321451 - RNA, 19 nt, Homo sapiens
  misc_RNA (1)...(19): siRNA sense strand
gaaccagccgagaaauugg

SEQ ID NO: 1321452 - RNA, 19 nt, Homo sapiens
  misc_RNA (1)...(19): siRNA sense strand
aaucggaucugcgaacagu

SEQ ID NO: 1321453 - RNA, 19 nt, Homo sapiens
  misc_RNA (1)...(19): siRNA sense strand
guggaacccaggcucagua

SEQ ID NO: 1321454 - RNA, 19 nt, Homo sapiens
  misc_RNA (1)...(19): siRNA sense strand
acacaaccuucagcaagug

SEQ ID NO: 1321455 - RNA, 19 nt, Homo sapiens
  misc_RNA (1)...(19): siRNA sense strand
ugggaugucaccuggauaa

SEQ ID NO: 1321456 - RNA, 19 nt, Homo sapiens
  misc_RNA (1)...(19): siRNA sense strand
uaacugacaagaagaacag

SEQ ID NO: 1321457 - RNA, 19 nt, Homo sapiens
  misc_RNA (1)...(19): siRNA sense strand
aacacaaccuucagcaagu

SEQ ID NO: 1321458 - RNA, 19 nt, Homo sapiens
  misc_RNA (1)...(19): siRNA sense strand
acuccaggacgaugaauuu

SEQ ID NO: 1321459 - RNA, 19 nt, Homo sapiens
  misc_RNA (1)...(19): siRNA sense strand
aagcugggacugccaagaa

SEQ ID NO: 1321460 - RNA, 19 nt, Homo sapiens
  misc_RNA (1)...(19): siRNA sense strand
uucagcaaguguuucuuaa

SEQ ID NO: 1321461 - RNA, 19 nt, Homo sapiens
  misc_RNA (1)...(19): siRNA sense strand
cggaaccagccgagaaauu

SEQ ID NO: 1321462 - RNA, 19 nt, Homo sapiens
  misc_RNA (1)...(19): siRNA sense strand
gcucaguaacaacgaaugu

SEQ ID NO: 1321463 - RNA, 19 nt, Homo sapiens
  misc_RNA (1)...(19): siRNA sense strand
gaggguaccgcugcucaga

SEQ ID NO: 1321464 - RNA, 19 nt, Homo sapiens
  misc_RNA (1)...(19): siRNA sense strand
cauccaauucuuugauuca

SEQ ID NO: 1321465 - RNA, 19 nt, Homo sapiens
  misc_RNA (1)...(19): siRNA sense strand
caagaaaacacaaccuuca

SEQ ID NO: 1321466 - RNA, 19 nt, Homo sapiens
  misc_RNA (1)...(19): siRNA sense strand
uacaaugcggauuuaauga

SEQ ID NO: 1321467 - RNA, 19 nt, Homo sapiens
  misc_RNA (1)...(19): siRNA sense strand
gggagauccgguguccuua

SEQ ID NO: 1321468 - RNA, 19 nt, Homo sapiens
  misc_RNA (1)...(19): siRNA sense strand
gcggauuuaaugaacugua

SEQ ID NO: 1321469 - RNA, 19 nt, Homo sapiens
  misc_RNA (1)...(19): siRNA sense strand
ucaucuacaaugcggauuu

SEQ ID NO: 1321470 - RNA, 19 nt, Homo sapiens
  misc_RNA (1)...(19): siRNA sense strand
uccaggacgaugaauuuaa

SEQ ID NO: 1321471 - RNA, 19 nt, Homo sapiens
  misc_RNA (1)...(19): siRNA sense strand
cggauuuaaugaacuguac

SEQ ID NO: 1321472 - RNA, 19 nt, Homo sapiens
  misc_RNA (1)...(19): siRNA sense strand
ugugggaugucaccuggau

SEQ ID NO: 1321473 - RNA, 19 nt, Homo sapiens
  misc_RNA (1)...(19): siRNA sense strand
gcaauuacuuucugguuaa

SEQ ID NO: 1321474 - RNA, 19 nt, Homo sapiens
  misc_RNA (1)...(19): siRNA sense strand
caaagaggauuucaacaga

SEQ ID NO: 1321475 - RNA, 19 nt, Homo sapiens
  misc_RNA (1)...(19): siRNA sense strand
gcaaguguuucuuaacuga

SEQ ID NO: 1321476 - RNA, 19 nt, Homo sapiens
  misc_RNA (1)...(19): siRNA sense strand
ggauuaacgucucgcaauu

SEQ ID NO: 1321477 - RNA, 19 nt, Homo sapiens
  misc_RNA (1)...(19): siRNA sense strand
gcaccagccucuagucuca

SEQ ID NO: 1321478 - RNA, 19 nt, Homo sapiens
  misc_RNA (1)...(19): siRNA sense strand
gagauccgguguccuuauu

SEQ ID NO: 1321479 - RNA, 19 nt, Homo sapiens
  misc_RNA (1)...(19): siRNA sense strand
gaaacugcuuuauccaaau

SEQ ID NO: 1321480 - RNA, 19 nt, Homo sapiens
  misc_RNA (1)...(19): siRNA sense strand
auacgaaacucaaagagaa

SEQ ID NO: 1321481 - RNA, 19 nt, Homo sapiens
  misc_RNA (1)...(19): siRNA sense strand
caacagaaacugcuuuauc

SEQ ID NO: 1321482 - RNA, 19 nt, Homo sapiens
  misc_RNA (1)...(19): siRNA sense strand
caucuacaaugcggauuua

SEQ ID NO: 1321483 - RNA, 19 nt, Homo sapiens
  misc_RNA (1)...(19): siRNA sense strand
gcaugaaggagucacauuu

SEQ ID NO: 1321484 - RNA, 19 nt, Homo sapiens
  misc_RNA (1)...(19): siRNA sense strand
agaaacugcuuuauccaaa

SEQ ID NO: 1321485 - RNA, 19 nt, Homo sapiens
  misc_RNA (1)...(19): siRNA sense strand
cgcaauuacuuucugguua

SEQ ID NO: 1321486 - RNA, 19 nt, Homo sapiens
  misc_RNA (1)...(19): siRNA sense strand
ggaaccagccgagaaauug

SEQ ID NO: 1321487 - RNA, 19 nt, Homo sapiens
  misc_RNA (1)...(19): siRNA sense strand
gaaaucggaucugcgaaca

SEQ ID NO: 1321488 - RNA, 19 nt, Homo sapiens
  misc_RNA (1)...(19): siRNA sense strand
gaacccaggcucaguaaca

SEQ ID NO: 1321489 - RNA, 19 nt, Homo sapiens
  misc_RNA (1)...(19): siRNA sense strand
gauuaacgucucgcaauua

SEQ ID NO: 1321490 - RNA, 19 nt, Homo sapiens
  misc_RNA (1)...(19): siRNA sense strand
gaagaacagagucguggaa

SEQ ID NO: 1321491 - RNA, 19 nt, Homo sapiens
  misc_RNA (1)...(19): siRNA sense strand
gaauuucuccuguuucauc

SEQ ID NO: 1321492 - RNA, 19 nt, Homo sapiens
  misc_RNA (1)...(19): siRNA sense strand
aaagaggauuucaacagaa

SEQ ID NO: 1321493 - RNA, 19 nt, Homo sapiens
  misc_RNA (1)...(19): siRNA sense strand
guaccgcugcucagaauuu

SEQ ID NO: 1321494 - RNA, 19 nt, Homo sapiens
  misc_RNA (1)...(19): siRNA sense strand
ccaggacgaugaauuuaag

SEQ ID NO: 1321495 - RNA, 19 nt, Homo sapiens
  misc_RNA (1)...(19): siRNA sense strand
ccaauucuuugauucacuu

SEQ ID NO: 1321496 - RNA, 19 nt, Homo sapiens
  misc_RNA (1)...(19): siRNA sense strand
ccgguguccuuauuacaua

SEQ ID NO: 1321497 - RNA, 19 nt, Homo sapiens
  misc_RNA (1)...(19): siRNA sense strand
cagcaaguguuucuuaacu

SEQ ID NO: 1321498 - RNA, 19 nt, Homo sapiens
  misc_RNA (1)...(19): siRNA sense strand
uaacggaaccagccgagaa

SEQ ID NO: 1321499 - RNA, 19 nt, Homo sapiens
  misc_RNA (1)...(19): siRNA sense strand
cuacaaugcggauuuaaug

SEQ ID NO: 1321500 - RNA, 19 nt, Homo sapiens
  misc_RNA (1)...(19): siRNA sense strand
uaacgucucgcaauuacuu

SEQ ID NO: 1321501 - RNA, 19 nt, Homo sapiens
  misc_RNA (1)...(19): siRNA sense strand
cccgugacguccaguauuu

SEQ ID NO: 1321502 - RNA, 19 nt, Homo sapiens
  misc_RNA (1)...(19): siRNA sense strand
ggcauccaauucuuugauu

SEQ ID NO: 1321503 - RNA, 19 nt, Homo sapiens
  misc_RNA (1)...(19): siRNA sense strand
gaaauuugucugcaugaag

SEQ ID NO: 1321504 - RNA, 19 nt, Homo sapiens
  misc_RNA (1)...(19): siRNA sense strand
ggguaccgcugcucagaau

SEQ ID NO: 1321505 - RNA, 19 nt, Homo sapiens
  misc_RNA (1)...(19): siRNA sense strand
ugaaauuugucugcaugaa

SEQ ID NO: 1321506 - RNA, 19 nt, Homo sapiens
  misc_RNA (1)...(19): siRNA sense strand
gcauccaauucuuugauuc

SEQ ID NO: 1321507 - RNA, 19 nt, Homo sapiens
  misc_RNA (1)...(19): siRNA sense strand
caagccuucugcucuguga

SEQ ID NO: 1321508 - RNA, 19 nt, Homo sapiens
  misc_RNA (1)...(19): siRNA sense strand
gauccgguguccuuauuac

SEQ ID NO: 1321509 - RNA, 19 nt, Homo sapiens
  misc_RNA (1)...(19): siRNA sense strand
cgugaauacuagucaaaga

SEQ ID NO: 1321510 - RNA, 19 nt, Homo sapiens
  misc_RNA (1)...(19): siRNA sense strand
cuucagcaaguguuucuua

SEQ ID NO: 1321511 - RNA, 19 nt, Homo sapiens
  misc_RNA (1)...(19): siRNA sense strand
gaugucaccuggauaaccu

SEQ ID NO: 1321512 - RNA, 19 nt, Homo sapiens
  misc_RNA (1)...(19): siRNA sense strand
caugaaggagucacauuug

SEQ ID NO: 1321513 - RNA, 19 nt, Homo sapiens
  misc_RNA (1)...(19): siRNA sense strand
ucaccuggauaaccuguca

SEQ ID NO: 1321514 - RNA, 19 nt, Homo sapiens
  misc_RNA (1)...(19): siRNA sense strand
ggagauccgguguccuuau

SEQ ID NO: 1321515 - RNA, 19 nt, Homo sapiens
  misc_RNA (1)...(19): siRNA sense strand
ucaaagaggauuucaacag

SEQ ID NO: 1321516 - RNA, 19 nt, Homo sapiens
  misc_RNA (1)...(19): siRNA sense strand
guacauacgaaacucaaag

SEQ ID NO: 1321517 - RNA, 19 nt, Homo sapiens
  misc_RNA (1)...(19): siRNA sense strand
augaaggagucacauuuga

SEQ ID NO: 1321518 - RNA, 19 nt, Homo sapiens
  misc_RNA (1)...(19): siRNA sense strand
cagaaacugcuuuauccaa

SEQ ID NO: 1321519 - RNA, 19 nt, Homo sapiens
  misc_RNA (1)...(19): siRNA sense strand
caaugcggauuuaaugaac

SEQ ID NO: 1321520 - RNA, 19 nt, Homo sapiens
  misc_RNA (1)...(19): siRNA sense strand
cauacgaaacucaaagaga

SEQ ID NO: 1321521 - RNA, 19 nt, Homo sapiens
  misc_RNA (1)...(19): siRNA sense strand
acaaugcggauuuaaugaa

SEQ ID NO: 1321522 - RNA, 19 nt, Homo sapiens
  misc_RNA (1)...(19): siRNA sense strand
ucacgugaauacuagucaa

SEQ ID NO: 1321523 - RNA, 19 nt, Homo sapiens
  misc_RNA (1)...(19): siRNA sense strand
caaccuucagcaaguguuu

SEQ ID NO: 1321524 - RNA, 19 nt, Homo sapiens
  misc_RNA (1)...(19): siRNA sense strand
aacagaaacugcuuuaucc

SEQ ID NO: 1321525 - RNA, 19 nt, Homo sapiens
  misc_RNA (1)...(19): siRNA sense strand
gacaagccuucugcucugu

SEQ ID NO: 1321526 - RNA, 19 nt, Homo sapiens
  misc_RNA (1)...(19): siRNA sense strand
gaaccagccgagaaauugg

SEQ ID NO: 1321527 - RNA, 19 nt, Homo sapiens
  misc_RNA (1)...(19): siRNA sense strand
aaucggaucugcgaacagu

SEQ ID NO: 1321528 - RNA, 19 nt, Homo sapiens
  misc_RNA (1)...(19): siRNA sense strand
guggaacccaggcucagua

SEQ ID NO: 1321529 - RNA, 19 nt, Homo sapiens
  misc_RNA (1)...(19): siRNA sense strand
acacaaccuucagcaagug

SEQ ID NO: 1321530 - RNA, 19 nt, Homo sapiens
  misc_RNA (1)...(19): siRNA sense strand
ugggaugucaccuggauaa

SEQ ID NO: 1321531 - RNA, 19 nt, Homo sapiens
  misc_RNA (1)...(19): siRNA sense strand
uaacugacaagaagaacag

SEQ ID NO: 1321532 - RNA, 19 nt, Homo sapiens
  misc_RNA (1)...(19): siRNA sense strand
aacacaaccuucagcaagu

SEQ ID NO: 1321533 - RNA, 19 nt, Homo sapiens
  misc_RNA (1)...(19): siRNA sense strand
acuccaggacgaugaauuu

SEQ ID NO: 1321534 - RNA, 19 nt, Homo sapiens
  misc_RNA (1)...(19): siRNA sense strand
aagcugggacugccaagaa

SEQ ID NO: 1321535 - RNA, 19 nt, Homo sapiens
  misc_RNA (1)...(19): siRNA sense strand
uucagcaaguguuucuuaa

SEQ ID NO: 1321536 - RNA, 19 nt, Homo sapiens
  misc_RNA (1)...(19): siRNA sense strand
cggaaccagccgagaaauu

SEQ ID NO: 1321537 - RNA, 19 nt, Homo sapiens
  misc_RNA (1)...(19): siRNA sense strand
gcucaguaacaacgaaugu

SEQ ID NO: 1321538 - RNA, 19 nt, Homo sapiens
  misc_RNA (1)...(19): siRNA sense strand
gaggguaccgcugcucaga

SEQ ID NO: 1321539 - RNA, 19 nt, Homo sapiens
  misc_RNA (1)...(19): siRNA sense strand
cauccaauucuuugauuca

SEQ ID NO: 1321540 - RNA, 19 nt, Homo sapiens
  misc_RNA (1)...(19): siRNA sense strand
caagaaaacacaaccuuca

SEQ ID NO: 1321541 - RNA, 19 nt, Homo sapiens
  misc_RNA (1)...(19): siRNA sense strand
uacaaugcggauuuaauga

SEQ ID NO: 1321542 - RNA, 19 nt, Homo sapiens
  misc_RNA (1)...(19): siRNA sense strand
gggagauccgguguccuua

SEQ ID NO: 1321543 - RNA, 19 nt, Homo sapiens
  misc_RNA (1)...(19): siRNA sense strand
gcggauuuaaugaacugua

SEQ ID NO: 1321544 - RNA, 19 nt, Homo sapiens
  misc_RNA (1)...(19): siRNA sense strand
ucaucuacaaugcggauuu

SEQ ID NO: 1321545 - RNA, 19 nt, Homo sapiens
  misc_RNA (1)...(19): siRNA sense strand
uccaggacgaugaauuuaa

SEQ ID NO: 1321546 - RNA, 19 nt, Homo sapiens
  misc_RNA (1)...(19): siRNA sense strand
cggauuuaaugaacuguac

SEQ ID NO: 1321547 - RNA, 19 nt, Homo sapiens
  misc_RNA (1)...(19): siRNA sense strand
ugugggaugucaccuggau

SEQ ID NO: 1321548 - RNA, 19 nt, Homo sapiens
  misc_RNA (1)...(19): siRNA sense strand
gcaauuacuuucugguuaa

SEQ ID NO: 1321549 - RNA, 19 nt, Homo sapiens
  misc_RNA (1)...(19): siRNA sense strand
caaagaggauuucaacaga

SEQ ID NO: 1321550 - RNA, 19 nt, Homo sapiens
  misc_RNA (1)...(19): siRNA sense strand
gcaaguguuucuuaacuga

SEQ ID NO: 1321551 - RNA, 19 nt, Homo sapiens
  misc_RNA (1)...(19): siRNA sense strand
ggauuaacgucucgcaauu

SEQ ID NO: 1321552 - RNA, 19 nt, Homo sapiens
  misc_RNA (1)...(19): siRNA sense strand
gcaccagccucuagucuca

SEQ ID NO: 1321553 - RNA, 19 nt, Homo sapiens
  misc_RNA (1)...(19): siRNA sense strand
gagauccgguguccuuauu

SEQ ID NO: 1321554 - RNA, 19 nt, Homo sapiens
  misc_RNA (1)...(19): siRNA sense strand
gaaacugcuuuauccaaau

SEQ ID NO: 1321555 - RNA, 19 nt, Homo sapiens
  misc_RNA (1)...(19): siRNA sense strand
auacgaaacucaaagagaa

SEQ ID NO: 1321556 - RNA, 19 nt, Homo sapiens
  misc_RNA (1)...(19): siRNA sense strand
caacagaaacugcuuuauc

SEQ ID NO: 1321557 - RNA, 19 nt, Homo sapiens
  misc_RNA (1)...(19): siRNA sense strand
caucuacaaugcggauuua

SEQ ID NO: 1321558 - RNA, 19 nt, Homo sapiens
  misc_RNA (1)...(19): siRNA sense strand
gcaugaaggagucacauuu

SEQ ID NO: 1321559 - RNA, 19 nt, Homo sapiens
  misc_RNA (1)...(19): siRNA sense strand
agaaacugcuuuauccaaa

SEQ ID NO: 1321560 - RNA, 19 nt, Homo sapiens
  misc_RNA (1)...(19): siRNA sense strand
cgcaauuacuuucugguua

SEQ ID NO: 1321561 - RNA, 19 nt, Homo sapiens
  misc_RNA (1)...(19): siRNA sense strand
ggaaccagccgagaaauug

SEQ ID NO: 1321562 - RNA, 19 nt, Homo sapiens
  misc_RNA (1)...(19): siRNA sense strand
gaaaucggaucugcgaaca

SEQ ID NO: 1321563 - RNA, 19 nt, Homo sapiens
  misc_RNA (1)...(19): siRNA sense strand
gaacccaggcucaguaaca

SEQ ID NO: 1321564 - RNA, 19 nt, Homo sapiens
  misc_RNA (1)...(19): siRNA sense strand
gauuaacgucucgcaauua

SEQ ID NO: 1321565 - RNA, 19 nt, Homo sapiens
  misc_RNA (1)...(19): siRNA sense strand
gaagaacagagucguggaa

SEQ ID NO: 1321566 - RNA, 19 nt, Homo sapiens
  misc_RNA (1)...(19): siRNA sense strand
gaauuucuccuguuucauc

SEQ ID NO: 1321567 - RNA, 19 nt, Homo sapiens
  misc_RNA (1)...(19): siRNA sense strand
aaagaggauuucaacagaa

SEQ ID NO: 1321568 - RNA, 19 nt, Homo sapiens
  misc_RNA (1)...(19): siRNA sense strand
guaccgcugcucagaauuu

SEQ ID NO: 1321569 - RNA, 19 nt, Homo sapiens
  misc_RNA (1)...(19): siRNA sense strand
ccaggacgaugaauuuaag

SEQ ID NO: 1321570 - RNA, 19 nt, Homo sapiens
  misc_RNA (1)...(19): siRNA sense strand
ccaauucuuugauucacuu

SEQ ID NO: 1321571 - RNA, 19 nt, Homo sapiens
  misc_RNA (1)...(19): siRNA sense strand
ccgguguccuuauuacaua

SEQ ID NO: 1321572 - RNA, 19 nt, Homo sapiens
  misc_RNA (1)...(19): siRNA sense strand
cagcaaguguuucuuaacu

SEQ ID NO: 1321573 - RNA, 19 nt, Homo sapiens
  misc_RNA (1)...(19): siRNA sense strand
uaacggaaccagccgagaa

SEQ ID NO: 1321574 - RNA, 19 nt, Homo sapiens
  misc_RNA (1)...(19): siRNA sense strand
cuacaaugcggauuuaaug

SEQ ID NO: 1321575 - RNA, 19 nt, Homo sapiens
  misc_RNA (1)...(19): siRNA sense strand
uaacgucucgcaauuacuu

SEQ ID NO: 1321576 - RNA, 19 nt, Homo sapiens
  misc_RNA (1)...(19): siRNA sense strand
cccgugacguccaguauuu

SEQ ID NO: 1321577 - RNA, 19 nt, Homo sapiens
  misc_RNA (1)...(19): siRNA sense strand
ggcauccaauucuuugauu

SEQ ID NO: 1321578 - RNA, 19 nt, Homo sapiens
  misc_RNA (1)...(19): siRNA sense strand
gaaauuugucugcaugaag

SEQ ID NO: 1321579 - RNA, 19 nt, Homo sapiens
  misc_RNA (1)...(19): siRNA sense strand
gaaaggcuaccgcgaagag

SEQ ID NO: 1321580 - RNA, 19 nt, Homo sapiens
  misc_RNA (1)...(19): siRNA sense strand
ggguaccgcugcucagaau

SEQ ID NO: 1321581 - RNA, 19 nt, Homo sapiens
  misc_RNA (1)...(19): siRNA sense strand
ugaaauuugucugcaugaa

SEQ ID NO: 1321582 - RNA, 19 nt, Homo sapiens
  misc_RNA (1)...(19): siRNA sense strand
gcauccaauucuuugauuc

SEQ ID NO: 1321583 - RNA, 19 nt, Homo sapiens
  misc_RNA (1)...(19): siRNA sense strand
caagccuucugcucuguga

SEQ ID NO: 1321584 - RNA, 19 nt, Homo sapiens
  misc_RNA (1)...(19): siRNA sense strand
gauccgguguccuuauuac

SEQ ID NO: 1321585 - RNA, 19 nt, Homo sapiens
  misc_RNA (1)...(19): siRNA sense strand
cgugaauacuagucaaaga

SEQ ID NO: 1321586 - RNA, 19 nt, Homo sapiens
  misc_RNA (1)...(19): siRNA sense strand
cuucagcaaguguuucuua

SEQ ID NO: 1321587 - RNA, 19 nt, Homo sapiens
  misc_RNA (1)...(19): siRNA sense strand
gaugucaccuggauaaccu

SEQ ID NO: 1321588 - RNA, 19 nt, Homo sapiens
  misc_RNA (1)...(19): siRNA sense strand
caugaaggagucacauuug

SEQ ID NO: 1321589 - RNA, 19 nt, Homo sapiens
  misc_RNA (1)...(19): siRNA sense strand
ucaccuggauaaccuguca

SEQ ID NO: 1321590 - RNA, 19 nt, Homo sapiens
  misc_RNA (1)...(19): siRNA sense strand
ggagauccgguguccuuau

SEQ ID NO: 1321591 - RNA, 19 nt, Homo sapiens
  misc_RNA (1)...(19): siRNA sense strand
ucaaagaggauuucaacag

SEQ ID NO: 1321592 - RNA, 19 nt, Homo sapiens
  misc_RNA (1)...(19): siRNA sense strand
guacauacgaaacucaaag

SEQ ID NO: 1321593 - RNA, 19 nt, Homo sapiens
  misc_RNA (1)...(19): siRNA sense strand
augaaggagucacauuuga

SEQ ID NO: 1321594 - RNA, 19 nt, Homo sapiens
  misc_RNA (1)...(19): siRNA sense strand
cagaaacugcuuuauccaa

SEQ ID NO: 1321595 - RNA, 19 nt, Homo sapiens
  misc_RNA (1)...(19): siRNA sense strand
caaugcggauuuaaugaac

SEQ ID NO: 1321596 - RNA, 19 nt, Homo sapiens
  misc_RNA (1)...(19): siRNA sense strand
gaucaucugggaggaauuc

SEQ ID NO: 1321597 - RNA, 19 nt, Homo sapiens
  misc_RNA (1)...(19): siRNA sense strand
cauacgaaacucaaagaga

SEQ ID NO: 1321598 - RNA, 19 nt, Homo sapiens
  misc_RNA (1)...(19): siRNA sense strand
acaaugcggauuuaaugaa

SEQ ID NO: 1321599 - RNA, 19 nt, Homo sapiens
  misc_RNA (1)...(19): siRNA sense strand
ucacgugaauacuagucaa

SEQ ID NO: 1321600 - RNA, 19 nt, Homo sapiens
  misc_RNA (1)...(19): siRNA sense strand
caaccuucagcaaguguuu

SEQ ID NO: 1321601 - RNA, 19 nt, Homo sapiens
  misc_RNA (1)...(19): siRNA sense strand
ggaauucaccccagaggaa

SEQ ID NO: 1321602 - RNA, 19 nt, Homo sapiens
  misc_RNA (1)...(19): siRNA sense strand
aacagaaacugcuuuaucc

SEQ ID NO: 1321603 - RNA, 19 nt, Homo sapiens
  misc_RNA (1)...(19): siRNA sense strand
gacaagccuucugcucugu

SEQ ID NO: 1321604 - RNA, 19 nt, Homo sapiens
  misc_RNA (1)...(19): siRNA sense strand
gaaccagccgagaaauugg

SEQ ID NO: 1321605 - RNA, 19 nt, Homo sapiens
  misc_RNA (1)...(19): siRNA sense strand
aaucggaucugcgaacagu

SEQ ID NO: 1321606 - RNA, 19 nt, Homo sapiens
  misc_RNA (1)...(19): siRNA sense strand
guggaacccaggcucagua

SEQ ID NO: 1321607 - RNA, 19 nt, Homo sapiens
  misc_RNA (1)...(19): siRNA sense strand
acacaaccuucagcaagug

SEQ ID NO: 1321608 - RNA, 19 nt, Homo sapiens
  misc_RNA (1)...(19): siRNA sense strand
ugggaugucaccuggauaa

SEQ ID NO: 1321609 - RNA, 19 nt, Homo sapiens
  misc_RNA (1)...(19): siRNA sense strand
uaacugacaagaagaacag

SEQ ID NO: 1321610 - RNA, 19 nt, Homo sapiens
  misc_RNA (1)...(19): siRNA sense strand
aacacaaccuucagcaagu

SEQ ID NO: 1321611 - RNA, 19 nt, Homo sapiens
  misc_RNA (1)...(19): siRNA sense strand
acuccaggacgaugaauuu

SEQ ID NO: 1321612 - RNA, 19 nt, Homo sapiens
  misc_RNA (1)...(19): siRNA sense strand
aagcugggacugccaagaa

SEQ ID NO: 1321613 - RNA, 19 nt, Homo sapiens
  misc_RNA (1)...(19): siRNA sense strand
uucagcaaguguuucuuaa

SEQ ID NO: 1321614 - RNA, 19 nt, Homo sapiens
  misc_RNA (1)...(19): siRNA sense strand
cggaaccagccgagaaauu

SEQ ID NO: 1321615 - RNA, 19 nt, Homo sapiens
  misc_RNA (1)...(19): siRNA sense strand
gcucaguaacaacgaaugu

SEQ ID NO: 1321616 - RNA, 19 nt, Homo sapiens
  misc_RNA (1)...(19): siRNA sense strand
gaggguaccgcugcucaga

SEQ ID NO: 1321617 - RNA, 19 nt, Homo sapiens
  misc_RNA (1)...(19): siRNA sense strand
cauccaauucuuugauuca

SEQ ID NO: 1321618 - RNA, 19 nt, Homo sapiens
  misc_RNA (1)...(19): siRNA sense strand
caagaaaacacaaccuuca

SEQ ID NO: 1321619 - RNA, 19 nt, Homo sapiens
  misc_RNA (1)...(19): siRNA sense strand
uacaaugcggauuuaauga

SEQ ID NO: 1321620 - RNA, 19 nt, Homo sapiens
  misc_RNA (1)...(19): siRNA sense strand
ggaaaggcuaccgcgaaga

SEQ ID NO: 1321621 - RNA, 19 nt, Homo sapiens
  misc_RNA (1)...(19): siRNA sense strand
gggagauccgguguccuua

SEQ ID NO: 1321622 - RNA, 19 nt, Homo sapiens
  misc_RNA (1)...(19): siRNA sense strand
gcggauuuaaugaacugua

SEQ ID NO: 1321623 - RNA, 19 nt, Homo sapiens
  misc_RNA (1)...(19): siRNA sense strand
uccaggacgaugaauuuaa

SEQ ID NO: 1321624 - RNA, 19 nt, Homo sapiens
  misc_RNA (1)...(19): siRNA sense strand
cggauuuaaugaacuguac

SEQ ID NO: 1321625 - RNA, 19 nt, Homo sapiens
  misc_RNA (1)...(19): siRNA sense strand
ucaucuacaaugcggauuu

SEQ ID NO: 1321626 - RNA, 19 nt, Homo sapiens
  misc_RNA (1)...(19): siRNA sense strand
ugugggaugucaccuggau

SEQ ID NO: 1321627 - RNA, 19 nt, Homo sapiens
  misc_RNA (1)...(19): siRNA sense strand
gcaauuacuuucugguuaa

SEQ ID NO: 1321628 - RNA, 19 nt, Homo sapiens
  misc_RNA (1)...(19): siRNA sense strand
caaagaggauuucaacaga

SEQ ID NO: 1321629 - RNA, 19 nt, Homo sapiens
  misc_RNA (1)...(19): siRNA sense strand
gcaaguguuucuuaacuga

SEQ ID NO: 1321630 - RNA, 19 nt, Homo sapiens
  misc_RNA (1)...(19): siRNA sense strand
ggauuaacgucucgcaauu

SEQ ID NO: 1321631 - RNA, 19 nt, Homo sapiens
  misc_RNA (1)...(19): siRNA sense strand
gcaccagccucuagucuca

SEQ ID NO: 1321632 - RNA, 19 nt, Homo sapiens
  misc_RNA (1)...(19): siRNA sense strand
gagauccgguguccuuauu

SEQ ID NO: 1321633 - RNA, 19 nt, Homo sapiens
  misc_RNA (1)...(19): siRNA sense strand
gaaacugcuuuauccaaau

SEQ ID NO: 1321634 - RNA, 19 nt, Homo sapiens
  misc_RNA (1)...(19): siRNA sense strand
auacgaaacucaaagagaa

SEQ ID NO: 1321635 - RNA, 19 nt, Homo sapiens
  misc_RNA (1)...(19): siRNA sense strand
caacagaaacugcuuuauc

SEQ ID NO: 1321636 - RNA, 19 nt, Homo sapiens
  misc_RNA (1)...(19): siRNA sense strand
caucuacaaugcggauuua

SEQ ID NO: 1321637 - RNA, 19 nt, Homo sapiens
  misc_RNA (1)...(19): siRNA sense strand
gcaugaaggagucacauuu

SEQ ID NO: 1321638 - RNA, 19 nt, Homo sapiens
  misc_RNA (1)...(19): siRNA sense strand
agaaacugcuuuauccaaa

SEQ ID NO: 1321639 - RNA, 19 nt, Homo sapiens
  misc_RNA (1)...(19): siRNA sense strand
cgcaauuacuuucugguua

SEQ ID NO: 1321640 - RNA, 19 nt, Homo sapiens
  misc_RNA (1)...(19): siRNA sense strand
ggaaccagccgagaaauug

SEQ ID NO: 1321641 - RNA, 19 nt, Homo sapiens
  misc_RNA (1)...(19): siRNA sense strand
gaaaucggaucugcgaaca

SEQ ID NO: 1321642 - RNA, 19 nt, Homo sapiens
  misc_RNA (1)...(19): siRNA sense strand
gaacccaggcucaguaaca

SEQ ID NO: 1321643 - RNA, 19 nt, Homo sapiens
  misc_RNA (1)...(19): siRNA sense strand
gauuaacgucucgcaauua

SEQ ID NO: 1321644 - RNA, 19 nt, Homo sapiens
  misc_RNA (1)...(19): siRNA sense strand
gaagaacagagucguggaa

SEQ ID NO: 1321645 - RNA, 19 nt, Homo sapiens
  misc_RNA (1)...(19): siRNA sense strand
gaauuucuccuguuucauc

SEQ ID NO: 1321646 - RNA, 19 nt, Homo sapiens
  misc_RNA (1)...(19): siRNA sense strand
aaagaggauuucaacagaa

SEQ ID NO: 1321647 - RNA, 19 nt, Homo sapiens
  misc_RNA (1)...(19): siRNA sense strand
guaccgcugcucagaauuu

SEQ ID NO: 1321648 - RNA, 19 nt, Homo sapiens
  misc_RNA (1)...(19): siRNA sense strand
ccaggacgaugaauuuaag

SEQ ID NO: 1321649 - RNA, 19 nt, Homo sapiens
  misc_RNA (1)...(19): siRNA sense strand
ccaauucuuugauucacuu

SEQ ID NO: 1321650 - RNA, 19 nt, Homo sapiens
  misc_RNA (1)...(19): siRNA sense strand
ccgguguccuuauuacaua

SEQ ID NO: 1321651 - RNA, 19 nt, Homo sapiens
  misc_RNA (1)...(19): siRNA sense strand
cagcaaguguuucuuaacu

SEQ ID NO: 1321652 - RNA, 19 nt, Homo sapiens
  misc_RNA (1)...(19): siRNA sense strand
uaacggaaccagccgagaa

SEQ ID NO: 1321653 - RNA, 19 nt, Homo sapiens
  misc_RNA (1)...(19): siRNA sense strand
cuacaaugcggauuuaaug

SEQ ID NO: 1321654 - RNA, 19 nt, Homo sapiens
  misc_RNA (1)...(19): siRNA sense strand
uaacgucucgcaauuacuu

SEQ ID NO: 1321655 - RNA, 19 nt, Homo sapiens
  misc_RNA (1)...(19): siRNA sense strand
cccgugacguccaguauuu

SEQ ID NO: 1321656 - RNA, 19 nt, Homo sapiens
  misc_RNA (1)...(19): siRNA sense strand
ggcauccaauucuuugauu

SEQ ID NO: 1321657 - RNA, 19 nt, Homo sapiens
  misc_RNA (1)...(19): siRNA sense strand
gaaauuugucugcaugaag

SEQ ID NO: 1321658 - RNA, 19 nt, Homo sapiens
  misc_RNA (1)...(19): siRNA sense strand
gaaaggcuaccgcgaagag

SEQ ID NO: 1321659 - RNA, 19 nt, Homo sapiens
  misc_RNA (1)...(19): siRNA sense strand
ggguaccgcugcucagaau

SEQ ID NO: 1321660 - RNA, 19 nt, Homo sapiens
  misc_RNA (1)...(19): siRNA sense strand
ugaaauuugucugcaugaa

SEQ ID NO: 1321661 - RNA, 19 nt, Homo sapiens
  misc_RNA (1)...(19): siRNA sense strand
gcauccaauucuuugauuc

SEQ ID NO: 1321662 - RNA, 19 nt, Homo sapiens
  misc_RNA (1)...(19): siRNA sense strand
caagccuucugcucuguga

SEQ ID NO: 1321663 - RNA, 19 nt, Homo sapiens
  misc_RNA (1)...(19): siRNA sense strand
gauccgguguccuuauuac

SEQ ID NO: 1321664 - RNA, 19 nt, Homo sapiens
  misc_RNA (1)...(19): siRNA sense strand
cgugaauacuagucaaaga

SEQ ID NO: 1321665 - RNA, 19 nt, Homo sapiens
  misc_RNA (1)...(19): siRNA sense strand
cuucagcaaguguuucuua

SEQ ID NO: 1321666 - RNA, 19 nt, Homo sapiens
  misc_RNA (1)...(19): siRNA sense strand
gaugucaccuggauaaccu

SEQ ID NO: 1321667 - RNA, 19 nt, Homo sapiens
  misc_RNA (1)...(19): siRNA sense strand
caugaaggagucacauuug

SEQ ID NO: 1321668 - RNA, 19 nt, Homo sapiens
  misc_RNA (1)...(19): siRNA sense strand
ucaccuggauaaccuguca

SEQ ID NO: 1321669 - RNA, 19 nt, Homo sapiens
  misc_RNA (1)...(19): siRNA sense strand
ggagauccgguguccuuau

SEQ ID NO: 1321670 - RNA, 19 nt, Homo sapiens
  misc_RNA (1)...(19): siRNA sense strand
ucaaagaggauuucaacag

SEQ ID NO: 1321671 - RNA, 19 nt, Homo sapiens
  misc_RNA (1)...(19): siRNA sense strand
guacauacgaaacucaaag

SEQ ID NO: 1321672 - RNA, 19 nt, Homo sapiens
  misc_RNA (1)...(19): siRNA sense strand
augaaggagucacauuuga

SEQ ID NO: 1321673 - RNA, 19 nt, Homo sapiens
  misc_RNA (1)...(19): siRNA sense strand
cagaaacugcuuuauccaa

SEQ ID NO: 1321674 - RNA, 19 nt, Homo sapiens
  misc_RNA (1)...(19): siRNA sense strand
caaugcggauuuaaugaac

SEQ ID NO: 1321675 - RNA, 19 nt, Homo sapiens
  misc_RNA (1)...(19): siRNA sense strand
gaucaucugggaggaauuc

SEQ ID NO: 1321676 - RNA, 19 nt, Homo sapiens
  misc_RNA (1)...(19): siRNA sense strand
cauacgaaacucaaagaga

SEQ ID NO: 1321677 - RNA, 19 nt, Homo sapiens
  misc_RNA (1)...(19): siRNA sense strand
acaaugcggauuuaaugaa

SEQ ID NO: 1321678 - RNA, 19 nt, Homo sapiens
  misc_RNA (1)...(19): siRNA sense strand
ucacgugaauacuagucaa

SEQ ID NO: 1321679 - RNA, 19 nt, Homo sapiens
  misc_RNA (1)...(19): siRNA sense strand
caaccuucagcaaguguuu

SEQ ID NO: 1321680 - RNA, 19 nt, Homo sapiens
  misc_RNA (1)...(19): siRNA sense strand
ggaauucaccccagaggaa

SEQ ID NO: 1321681 - RNA, 19 nt, Homo sapiens
  misc_RNA (1)...(19): siRNA sense strand
aacagaaacugcuuuaucc

SEQ ID NO: 1321682 - RNA, 19 nt, Homo sapiens
  misc_RNA (1)...(19): siRNA sense strand
gacaagccuucugcucugu

SEQ ID NO: 1321683 - RNA, 19 nt, Homo sapiens
  misc_RNA (1)...(19): siRNA sense strand
gaaccagccgagaaauugg

SEQ ID NO: 1321684 - RNA, 19 nt, Homo sapiens
  misc_RNA (1)...(19): siRNA sense strand
aaucggaucugcgaacagu

SEQ ID NO: 1321685 - RNA, 19 nt, Homo sapiens
  misc_RNA (1)...(19): siRNA sense strand
guggaacccaggcucagua

SEQ ID NO: 1321686 - RNA, 19 nt, Homo sapiens
  misc_RNA (1)...(19): siRNA sense strand
acacaaccuucagcaagug

SEQ ID NO: 1321687 - RNA, 19 nt, Homo sapiens
  misc_RNA (1)...(19): siRNA sense strand
ugggaugucaccuggauaa

SEQ ID NO: 1321688 - RNA, 19 nt, Homo sapiens
  misc_RNA (1)...(19): siRNA sense strand
uaacugacaagaagaacag

SEQ ID NO: 1321689 - RNA, 19 nt, Homo sapiens
  misc_RNA (1)...(19): siRNA sense strand
aacacaaccuucagcaagu

SEQ ID NO: 1321690 - RNA, 19 nt, Homo sapiens
  misc_RNA (1)...(19): siRNA sense strand
acuccaggacgaugaauuu

SEQ ID NO: 1321691 - RNA, 19 nt, Homo sapiens
  misc_RNA (1)...(19): siRNA sense strand
aagcugggacugccaagaa

SEQ ID NO: 1321692 - RNA, 19 nt, Homo sapiens
  misc_RNA (1)...(19): siRNA sense strand
uucagcaaguguuucuuaa

SEQ ID NO: 1321693 - RNA, 19 nt, Homo sapiens
  misc_RNA (1)...(19): siRNA sense strand
cggaaccagccgagaaauu

SEQ ID NO: 1321694 - RNA, 19 nt, Homo sapiens
  misc_RNA (1)...(19): siRNA sense strand
gcucaguaacaacgaaugu

SEQ ID NO: 1321695 - RNA, 19 nt, Homo sapiens
  misc_RNA (1)...(19): siRNA sense strand
gaggguaccgcugcucaga

SEQ ID NO: 1321696 - RNA, 19 nt, Homo sapiens
  misc_RNA (1)...(19): siRNA sense strand
cauccaauucuuugauuca

SEQ ID NO: 1321697 - RNA, 19 nt, Homo sapiens
  misc_RNA (1)...(19): siRNA sense strand
caagaaaacacaaccuuca

SEQ ID NO: 1321698 - RNA, 19 nt, Homo sapiens
  misc_RNA (1)...(19): siRNA sense strand
uacaaugcggauuuaauga

SEQ ID NO: 1321699 - RNA, 19 nt, Homo sapiens
  misc_RNA (1)...(19): siRNA sense strand
ggaaaggcuaccgcgaaga

SEQ ID NO: 1321700 - RNA, 19 nt, Homo sapiens
  misc_RNA (1)...(19): siRNA sense strand
gggagauccgguguccuua

SEQ ID NO: 1321701 - RNA, 19 nt, Homo sapiens
  misc_RNA (1)...(19): siRNA sense strand
gcggauuuaaugaacugua

SEQ ID NO: 1321702 - RNA, 19 nt, Homo sapiens
  misc_RNA (1)...(19): siRNA sense strand
uccaggacgaugaauuuaa

SEQ ID NO: 1321703 - RNA, 19 nt, Homo sapiens
  misc_RNA (1)...(19): siRNA sense strand
cggauuuaaugaacuguac

SEQ ID NO: 1321704 - RNA, 19 nt, Homo sapiens
  misc_RNA (1)...(19): siRNA sense strand
ucaucuacaaugcggauuu

SEQ ID NO: 1321705 - RNA, 19 nt, Homo sapiens
  misc_RNA (1)...(19): siRNA sense strand
ugugggaugucaccuggau

SEQ ID NO: 1321706 - RNA, 19 nt, Homo sapiens
  misc_RNA (1)...(19): siRNA sense strand
gcaauuacuuucugguuaa

SEQ ID NO: 1321707 - RNA, 19 nt, Homo sapiens
  misc_RNA (1)...(19): siRNA sense strand
caaagaggauuucaacaga

SEQ ID NO: 1321708 - RNA, 19 nt, Homo sapiens
  misc_RNA (1)...(19): siRNA sense strand
gcaaguguuucuuaacuga

SEQ ID NO: 1321709 - RNA, 19 nt, Homo sapiens
  misc_RNA (1)...(19): siRNA sense strand
ggauuaacgucucgcaauu

SEQ ID NO: 1321710 - RNA, 19 nt, Homo sapiens
  misc_RNA (1)...(19): siRNA sense strand
ugaaggaaauuaccugaga

SEQ ID NO: 1321711 - RNA, 19 nt, Homo sapiens
  misc_RNA (1)...(19): siRNA sense strand
gcaccagccucuagucuca

SEQ ID NO: 1321712 - RNA, 19 nt, Homo sapiens
  misc_RNA (1)...(19): siRNA sense strand
gagauccgguguccuuauu

SEQ ID NO: 1321713 - RNA, 19 nt, Homo sapiens
  misc_RNA (1)...(19): siRNA sense strand
gaaacugcuuuauccaaau

SEQ ID NO: 1321714 - RNA, 19 nt, Homo sapiens
  misc_RNA (1)...(19): siRNA sense strand
auacgaaacucaaagagaa

SEQ ID NO: 1321715 - RNA, 19 nt, Homo sapiens
  misc_RNA (1)...(19): siRNA sense strand
caacagaaacugcuuuauc

SEQ ID NO: 1321716 - RNA, 19 nt, Homo sapiens
  misc_RNA (1)...(19): siRNA sense strand
caucuacaaugcggauuua

SEQ ID NO: 1321717 - RNA, 19 nt, Homo sapiens
  misc_RNA (1)...(19): siRNA sense strand
gcaugaaggagucacauuu

SEQ ID NO: 1321718 - RNA, 19 nt, Homo sapiens
  misc_RNA (1)...(19): siRNA sense strand
agaaacugcuuuauccaaa

SEQ ID NO: 1321719 - RNA, 19 nt, Homo sapiens
  misc_RNA (1)...(19): siRNA sense strand
cgcaauuacuuucugguua

SEQ ID NO: 1321720 - RNA, 19 nt, Homo sapiens
  misc_RNA (1)...(19): siRNA sense strand
ggaaccagccgagaaauug

SEQ ID NO: 1321721 - RNA, 19 nt, Homo sapiens
  misc_RNA (1)...(19): siRNA sense strand
gcugugaaccuuuauauca

SEQ ID NO: 1321722 - RNA, 19 nt, Homo sapiens
  misc_RNA (1)...(19): siRNA sense strand
gaaaucggaucugcgaaca

SEQ ID NO: 1321723 - RNA, 19 nt, Homo sapiens
  misc_RNA (1)...(19): siRNA sense strand
gaacccaggcucaguaaca

SEQ ID NO: 1321724 - RNA, 19 nt, Homo sapiens
  misc_RNA (1)...(19): siRNA sense strand
gauuaacgucucgcaauua

SEQ ID NO: 1321725 - RNA, 19 nt, Homo sapiens
  misc_RNA (1)...(19): siRNA sense strand
gaagaacagagucguggaa

SEQ ID NO: 1321726 - RNA, 19 nt, Homo sapiens
  misc_RNA (1)...(19): siRNA sense strand
gaauuucuccuguuucauc

SEQ ID NO: 1321727 - RNA, 19 nt, Homo sapiens
  misc_RNA (1)...(19): siRNA sense strand
aaagaggauuucaacagaa

SEQ ID NO: 1321728 - RNA, 19 nt, Homo sapiens
  misc_RNA (1)...(19): siRNA sense strand
guaccgcugcucagaauuu

SEQ ID NO: 1321729 - RNA, 19 nt, Homo sapiens
  misc_RNA (1)...(19): siRNA sense strand
ccaggacgaugaauuuaag

SEQ ID NO: 1321730 - RNA, 19 nt, Homo sapiens
  misc_RNA (1)...(19): siRNA sense strand
ccaauucuuugauucacuu

SEQ ID NO: 1321731 - RNA, 19 nt, Homo sapiens
  misc_RNA (1)...(19): siRNA sense strand
ccgguguccuuauuacaua

SEQ ID NO: 1321732 - RNA, 19 nt, Homo sapiens
  misc_RNA (1)...(19): siRNA sense strand
cagcaaguguuucuuaacu

SEQ ID NO: 1321733 - RNA, 19 nt, Homo sapiens
  misc_RNA (1)...(19): siRNA sense strand
ggaauggcauggacaucuc

SEQ ID NO: 1321734 - RNA, 19 nt, Homo sapiens
  misc_RNA (1)...(19): siRNA sense strand
uaacggaaccagccgagaa

SEQ ID NO: 1321735 - RNA, 19 nt, Homo sapiens
  misc_RNA (1)...(19): siRNA sense strand
cuacaaugcggauuuaaug

SEQ ID NO: 1321736 - RNA, 19 nt, Homo sapiens
  misc_RNA (1)...(19): siRNA sense strand
uaacgucucgcaauuacuu

SEQ ID NO: 1321737 - RNA, 19 nt, Homo sapiens
  misc_RNA (1)...(19): siRNA sense strand
cccgugacguccaguauuu

SEQ ID NO: 1321738 - RNA, 19 nt, Homo sapiens
  misc_RNA (1)...(19): siRNA sense strand
ggcauccaauucuuugauu

SEQ ID NO: 1321739 - RNA, 19 nt, Homo sapiens
  misc_RNA (1)...(19): siRNA sense strand
gaaauuugucugcaugaag

SEQ ID NO: 1321740 - RNA, 19 nt, Homo sapiens
  misc_RNA (1)...(19): siRNA sense strand
gaaaggcuaccgcgaagag

SEQ ID NO: 1321741 - RNA, 19 nt, Homo sapiens
  misc_RNA (1)...(19): siRNA sense strand
ggguaccgcugcucagaau

SEQ ID NO: 1321742 - RNA, 19 nt, Homo sapiens
  misc_RNA (1)...(19): siRNA sense strand
ugaaauuugucugcaugaa

SEQ ID NO: 1321743 - RNA, 19 nt, Homo sapiens
  misc_RNA (1)...(19): siRNA sense strand
gcauccaauucuuugauuc

SEQ ID NO: 1321744 - RNA, 19 nt, Homo sapiens
  misc_RNA (1)...(19): siRNA sense strand
caagccuucugcucuguga

SEQ ID NO: 1321745 - RNA, 19 nt, Homo sapiens
  misc_RNA (1)...(19): siRNA sense strand
gauccgguguccuuauuac

SEQ ID NO: 1321746 - RNA, 19 nt, Homo sapiens
  misc_RNA (1)...(19): siRNA sense strand
cgugaauacuagucaaaga

SEQ ID NO: 1321747 - RNA, 19 nt, Homo sapiens
  misc_RNA (1)...(19): siRNA sense strand
cuucagcaaguguuucuua

SEQ ID NO: 1321748 - RNA, 19 nt, Homo sapiens
  misc_RNA (1)...(19): siRNA sense strand
gaugucaccuggauaaccu

SEQ ID NO: 1321749 - RNA, 19 nt, Homo sapiens
  misc_RNA (1)...(19): siRNA sense strand
caugaaggagucacauuug

SEQ ID NO: 1321750 - RNA, 19 nt, Homo sapiens
  misc_RNA (1)...(19): siRNA sense strand
augaugcugugaaccuuua

SEQ ID NO: 1321751 - RNA, 19 nt, Homo sapiens
  misc_RNA (1)...(19): siRNA sense strand
ucaccuggauaaccuguca

SEQ ID NO: 1321752 - RNA, 19 nt, Homo sapiens
  misc_RNA (1)...(19): siRNA sense strand
ggagauccgguguccuuau

SEQ ID NO: 1321753 - RNA, 19 nt, Homo sapiens
  misc_RNA (1)...(19): siRNA sense strand
ucaaagaggauuucaacag

SEQ ID NO: 1321754 - RNA, 19 nt, Homo sapiens
  misc_RNA (1)...(19): siRNA sense strand
guacauacgaaacucaaag

SEQ ID NO: 1321755 - RNA, 19 nt, Homo sapiens
  misc_RNA (1)...(19): siRNA sense strand
ggaacuguuuucuugauga

SEQ ID NO: 1321756 - RNA, 19 nt, Homo sapiens
  misc_RNA (1)...(19): siRNA sense strand
augaaggagucacauuuga

SEQ ID NO: 1321757 - RNA, 19 nt, Homo sapiens
  misc_RNA (1)...(19): siRNA sense strand
gaugaugcugugaaccuuu

SEQ ID NO: 1321758 - RNA, 19 nt, Homo sapiens
  misc_RNA (1)...(19): siRNA sense strand
cagaaacugcuuuauccaa

SEQ ID NO: 1321759 - RNA, 19 nt, Homo sapiens
  misc_RNA (1)...(19): siRNA sense strand
caaugcggauuuaaugaac

SEQ ID NO: 1321760 - RNA, 19 nt, Homo sapiens
  misc_RNA (1)...(19): siRNA sense strand
gaucaucugggaggaauuc

SEQ ID NO: 1321761 - RNA, 19 nt, Homo sapiens
  misc_RNA (1)...(19): siRNA sense strand
cauacgaaacucaaagaga

SEQ ID NO: 1321762 - RNA, 19 nt, Homo sapiens
  misc_RNA (1)...(19): siRNA sense strand
acaaugcggauuuaaugaa

SEQ ID NO: 1321763 - RNA, 19 nt, Homo sapiens
  misc_RNA (1)...(19): siRNA sense strand
ucacgugaauacuagucaa

SEQ ID NO: 1321764 - RNA, 19 nt, Homo sapiens
  misc_RNA (1)...(19): siRNA sense strand
caaccuucagcaaguguuu

SEQ ID NO: 1321765 - RNA, 19 nt, Homo sapiens
  misc_RNA (1)...(19): siRNA sense strand
ggaauucaccccagaggaa

SEQ ID NO: 1321766 - RNA, 19 nt, Homo sapiens
  misc_RNA (1)...(19): siRNA sense strand
aacagaaacugcuuuaucc

SEQ ID NO: 1321767 - RNA, 19 nt, Homo sapiens
  misc_RNA (1)...(19): siRNA sense strand
gacaagccuucugcucugu

SEQ ID NO: 1321768 - RNA, 19 nt, Homo sapiens
  misc_RNA (1)...(19): siRNA sense strand
aaucggaucugcgaacagu

SEQ ID NO: 1321769 - RNA, 19 nt, Homo sapiens
  misc_RNA (1)...(19): siRNA sense strand
gaaccagccgagaaauugg

SEQ ID NO: 1321770 - RNA, 19 nt, Homo sapiens
  misc_RNA (1)...(19): siRNA sense strand
guggaacccaggcucagua

SEQ ID NO: 1321771 - RNA, 19 nt, Homo sapiens
  misc_RNA (1)...(19): siRNA sense strand
acacaaccuucagcaagug

SEQ ID NO: 1321772 - RNA, 19 nt, Homo sapiens
  misc_RNA (1)...(19): siRNA sense strand
ugggaugucaccuggauaa

SEQ ID NO: 1321773 - RNA, 19 nt, Homo sapiens
  misc_RNA (1)...(19): siRNA sense strand
uaacugacaagaagaacag

SEQ ID NO: 1321774 - RNA, 19 nt, Homo sapiens
  misc_RNA (1)...(19): siRNA sense strand
aagcugggacugccaagaa

SEQ ID NO: 1321775 - RNA, 19 nt, Homo sapiens
  misc_RNA (1)...(19): siRNA sense strand
gaugcugugaaccuuuaua

SEQ ID NO: 1321776 - RNA, 19 nt, Homo sapiens
  misc_RNA (1)...(19): siRNA sense strand
acuccaggacgaugaauuu

SEQ ID NO: 1321777 - RNA, 19 nt, Homo sapiens
  misc_RNA (1)...(19): siRNA sense strand
aacacaaccuucagcaagu

SEQ ID NO: 1321778 - RNA, 19 nt, Homo sapiens
  misc_RNA (1)...(19): siRNA sense strand
uucagcaaguguuucuuaa

SEQ ID NO: 1321779 - RNA, 19 nt, Homo sapiens
  misc_RNA (1)...(19): siRNA sense strand
gaacuguuuucuugaugau

SEQ ID NO: 1321780 - RNA, 19 nt, Homo sapiens
  misc_RNA (1)...(19): siRNA sense strand
cggaaccagccgagaaauu

SEQ ID NO: 1321781 - RNA, 19 nt, Homo sapiens
  misc_RNA (1)...(19): siRNA sense strand
gcucaguaacaacgaaugu

SEQ ID NO: 1321782 - RNA, 19 nt, Homo sapiens
  misc_RNA (1)...(19): siRNA sense strand
gaggguaccgcugcucaga

SEQ ID NO: 1321783 - RNA, 19 nt, Homo sapiens
  misc_RNA (1)...(19): siRNA sense strand
cauccaauucuuugauuca

SEQ ID NO: 1321784 - RNA, 19 nt, Homo sapiens
  misc_RNA (1)...(19): siRNA sense strand
caagaaaacacaaccuuca

SEQ ID NO: 1321785 - RNA, 19 nt, Homo sapiens
  misc_RNA (1)...(19): siRNA sense strand
uacaaugcggauuuaauga

SEQ ID NO: 1321786 - RNA, 19 nt, Homo sapiens
  misc_RNA (1)...(19): siRNA sense strand
ggaaaggcuaccgcgaaga

SEQ ID NO: 1321787 - RNA, 19 nt, Homo sapiens
  misc_RNA (1)...(19): siRNA sense strand
gggagauccgguguccuua

SEQ ID NO: 1321788 - RNA, 19 nt, Homo sapiens
  misc_RNA (1)...(19): siRNA sense strand
gcggauuuaaugaacugua

SEQ ID NO: 1321789 - RNA, 19 nt, Homo sapiens
  misc_RNA (1)...(19): siRNA sense strand
uccaggacgaugaauuuaa

SEQ ID NO: 1321790 - RNA, 19 nt, Homo sapiens
  misc_RNA (1)...(19): siRNA sense strand
cggauuuaaugaacuguac

SEQ ID NO: 1321791 - RNA, 19 nt, Homo sapiens
  misc_RNA (1)...(19): siRNA sense strand
ucaucuacaaugcggauuu

SEQ ID NO: 1321792 - RNA, 19 nt, Homo sapiens
  misc_RNA (1)...(19): siRNA sense strand
ugaugaugcugugaaccuu

SEQ ID NO: 1321793 - RNA, 19 nt, Homo sapiens
  misc_RNA (1)...(19): siRNA sense strand
cugugaaccuuuauaucau

SEQ ID NO: 1321794 - RNA, 19 nt, Homo sapiens
  misc_RNA (1)...(19): siRNA sense strand
ugugggaugucaccuggau

SEQ ID NO: 1321795 - RNA, 19 nt, Homo sapiens
  misc_RNA (1)...(19): siRNA sense strand
gcaauuacuuucugguuaa

SEQ ID NO: 1321796 - RNA, 19 nt, Homo sapiens
  misc_RNA (1)...(19): siRNA sense strand
caaagaggauuucaacaga

SEQ ID NO: 1321797 - RNA, 19 nt, Homo sapiens
  misc_RNA (1)...(19): siRNA sense strand
gcaaguguuucuuaacuga

SEQ ID NO: 1321798 - RNA, 19 nt, Homo sapiens
  misc_RNA (1)...(19): siRNA sense strand
ggauuaacgucucgcaauu

SEQ ID NO: 1321799 - RNA, 19 nt, Homo sapiens
  misc_RNA (1)...(19): siRNA sense strand
gcaccagccucuagucuca

SEQ ID NO: 1321800 - RNA, 19 nt, Homo sapiens
  misc_RNA (1)...(19): siRNA sense strand
gagauccgguguccuuauu

SEQ ID NO: 1321801 - RNA, 19 nt, Homo sapiens
  misc_RNA (1)...(19): siRNA sense strand
gaaacugcuuuauccaaau

SEQ ID NO: 1321802 - RNA, 19 nt, Homo sapiens
  misc_RNA (1)...(19): siRNA sense strand
auacgaaacucaaagagaa

SEQ ID NO: 1321803 - RNA, 19 nt, Homo sapiens
  misc_RNA (1)...(19): siRNA sense strand
caacagaaacugcuuuauc

SEQ ID NO: 1321804 - RNA, 19 nt, Homo sapiens
  misc_RNA (1)...(19): siRNA sense strand
caucuacaaugcggauuua

SEQ ID NO: 1321805 - RNA, 19 nt, Homo sapiens
  misc_RNA (1)...(19): siRNA sense strand
gcaugaaggagucacauuu

SEQ ID NO: 1321806 - RNA, 19 nt, Homo sapiens
  misc_RNA (1)...(19): siRNA sense strand
agaaacugcuuuauccaaa

SEQ ID NO: 1321807 - RNA, 19 nt, Homo sapiens
  misc_RNA (1)...(19): siRNA sense strand
cgcaauuacuuucugguua

SEQ ID NO: 1321808 - RNA, 19 nt, Homo sapiens
  misc_RNA (1)...(19): siRNA sense strand
ggaaccagccgagaaauug

SEQ ID NO: 1321809 - RNA, 19 nt, Homo sapiens
  misc_RNA (1)...(19): siRNA sense strand
gaaaucggaucugcgaaca

SEQ ID NO: 1321810 - RNA, 19 nt, Homo sapiens
  misc_RNA (1)...(19): siRNA sense strand
gaacccaggcucaguaaca

SEQ ID NO: 1321811 - RNA, 19 nt, Homo sapiens
  misc_RNA (1)...(19): siRNA sense strand
gauuaacgucucgcaauua

SEQ ID NO: 1321812 - RNA, 19 nt, Homo sapiens
  misc_RNA (1)...(19): siRNA sense strand
gaagaacagagucguggaa

SEQ ID NO: 1321813 - RNA, 19 nt, Homo sapiens
  misc_RNA (1)...(19): siRNA sense strand
gaauuucuccuguuucauc

SEQ ID NO: 1321814 - RNA, 19 nt, Homo sapiens
  misc_RNA (1)...(19): siRNA sense strand
aaagaggauuucaacagaa

SEQ ID NO: 1321815 - RNA, 19 nt, Homo sapiens
  misc_RNA (1)...(19): siRNA sense strand
guaccgcugcucagaauuu

SEQ ID NO: 1321816 - RNA, 19 nt, Homo sapiens
  misc_RNA (1)...(19): siRNA sense strand
ccaggacgaugaauuuaag

SEQ ID NO: 1321817 - RNA, 19 nt, Homo sapiens
  misc_RNA (1)...(19): siRNA sense strand
ccaauucuuugauucacuu

SEQ ID NO: 1321818 - RNA, 19 nt, Homo sapiens
  misc_RNA (1)...(19): siRNA sense strand
ccgguguccuuauuacaua

SEQ ID NO: 1321819 - RNA, 19 nt, Homo sapiens
  misc_RNA (1)...(19): siRNA sense strand
cagcaaguguuucuuaacu

SEQ ID NO: 1321820 - RNA, 19 nt, Homo sapiens
  misc_RNA (1)...(19): siRNA sense strand
uaacggaaccagccgagaa

SEQ ID NO: 1321821 - RNA, 19 nt, Homo sapiens
  misc_RNA (1)...(19): siRNA sense strand
cuacaaugcggauuuaaug

SEQ ID NO: 1321822 - RNA, 19 nt, Homo sapiens
  misc_RNA (1)...(19): siRNA sense strand
uaacgucucgcaauuacuu

SEQ ID NO: 1321823 - RNA, 19 nt, Homo sapiens
  misc_RNA (1)...(19): siRNA sense strand
cccgugacguccaguauuu

SEQ ID NO: 1321824 - RNA, 19 nt, Homo sapiens
  misc_RNA (1)...(19): siRNA sense strand
ggcauccaauucuuugauu

SEQ ID NO: 1321825 - RNA, 19 nt, Homo sapiens
  misc_RNA (1)...(19): siRNA sense strand
gaaauuugucugcaugaag

SEQ ID NO: 1321826 - RNA, 19 nt, Homo sapiens
  misc_RNA (1)...(19): siRNA sense strand
ggguaccgcugcucagaau

SEQ ID NO: 1321827 - RNA, 19 nt, Homo sapiens
  misc_RNA (1)...(19): siRNA sense strand
ugaaauuugucugcaugaa

SEQ ID NO: 1321828 - RNA, 19 nt, Homo sapiens
  misc_RNA (1)...(19): siRNA sense strand
gcauccaauucuuugauuc

SEQ ID NO: 1321829 - RNA, 19 nt, Homo sapiens
  misc_RNA (1)...(19): siRNA sense strand
caagccuucugcucuguga

SEQ ID NO: 1321830 - RNA, 19 nt, Homo sapiens
  misc_RNA (1)...(19): siRNA sense strand
gauccgguguccuuauuac

SEQ ID NO: 1321831 - RNA, 19 nt, Homo sapiens
  misc_RNA (1)...(19): siRNA sense strand
cgugaauacuagucaaaga

SEQ ID NO: 1321832 - RNA, 19 nt, Homo sapiens
  misc_RNA (1)...(19): siRNA sense strand
cuucagcaaguguuucuua

SEQ ID NO: 1321833 - RNA, 19 nt, Homo sapiens
  misc_RNA (1)...(19): siRNA sense strand
gaugucaccuggauaaccu

SEQ ID NO: 1321834 - RNA, 19 nt, Homo sapiens
  misc_RNA (1)...(19): siRNA sense strand
caugaaggagucacauuug

SEQ ID NO: 1321835 - RNA, 19 nt, Homo sapiens
  misc_RNA (1)...(19): siRNA sense strand
ucaccuggauaaccuguca

SEQ ID NO: 1321836 - RNA, 19 nt, Homo sapiens
  misc_RNA (1)...(19): siRNA sense strand
ggagauccgguguccuuau

SEQ ID NO: 1321837 - RNA, 19 nt, Homo sapiens
  misc_RNA (1)...(19): siRNA sense strand
ucaaagaggauuucaacag

SEQ ID NO: 1321838 - RNA, 19 nt, Homo sapiens
  misc_RNA (1)...(19): siRNA sense strand
guacauacgaaacucaaag

SEQ ID NO: 1321839 - RNA, 19 nt, Homo sapiens
  misc_RNA (1)...(19): siRNA sense strand
augaaggagucacauuuga

SEQ ID NO: 1321840 - RNA, 19 nt, Homo sapiens
  misc_RNA (1)...(19): siRNA sense strand
cagaaacugcuuuauccaa

SEQ ID NO: 1321841 - RNA, 19 nt, Homo sapiens
  misc_RNA (1)...(19): siRNA sense strand
caaugcggauuuaaugaac

SEQ ID NO: 1321842 - RNA, 19 nt, Homo sapiens
  misc_RNA (1)...(19): siRNA sense strand
cauacgaaacucaaagaga

SEQ ID NO: 1321843 - RNA, 19 nt, Homo sapiens
  misc_RNA (1)...(19): siRNA sense strand
acaaugcggauuuaaugaa

SEQ ID NO: 1321844 - RNA, 19 nt, Homo sapiens
  misc_RNA (1)...(19): siRNA sense strand
ucacgugaauacuagucaa

SEQ ID NO: 1321845 - RNA, 19 nt, Homo sapiens
  misc_RNA (1)...(19): siRNA sense strand
caaccuucagcaaguguuu

SEQ ID NO: 1321846 - RNA, 19 nt, Homo sapiens
  misc_RNA (1)...(19): siRNA sense strand
aacagaaacugcuuuaucc

SEQ ID NO: 1321847 - RNA, 19 nt, Homo sapiens
  misc_RNA (1)...(19): siRNA sense strand
gacaagccuucugcucugu

SEQ ID NO: 1321848 - RNA, 19 nt, Homo sapiens
  misc_RNA (1)...(19): siRNA sense strand
gaaccagccgagaaauugg

SEQ ID NO: 1321849 - RNA, 19 nt, Homo sapiens
  misc_RNA (1)...(19): siRNA sense strand
aaucggaucugcgaacagu

SEQ ID NO: 1321850 - RNA, 19 nt, Homo sapiens
  misc_RNA (1)...(19): siRNA sense strand
guggaacccaggcucagua

SEQ ID NO: 1321851 - RNA, 19 nt, Homo sapiens
  misc_RNA (1)...(19): siRNA sense strand
acacaaccuucagcaagug

SEQ ID NO: 1321852 - RNA, 19 nt, Homo sapiens
  misc_RNA (1)...(19): siRNA sense strand
ugggaugucaccuggauaa

SEQ ID NO: 1321853 - RNA, 19 nt, Homo sapiens
  misc_RNA (1)...(19): siRNA sense strand
uaacugacaagaagaacag

SEQ ID NO: 1321854 - RNA, 19 nt, Homo sapiens
  misc_RNA (1)...(19): siRNA sense strand
aacacaaccuucagcaagu

SEQ ID NO: 1321855 - RNA, 19 nt, Homo sapiens
  misc_RNA (1)...(19): siRNA sense strand
acuccaggacgaugaauuu

SEQ ID NO: 1321856 - RNA, 19 nt, Homo sapiens
  misc_RNA (1)...(19): siRNA sense strand
aagcugggacugccaagaa

SEQ ID NO: 1321857 - RNA, 19 nt, Homo sapiens
  misc_RNA (1)...(19): siRNA sense strand
uucagcaaguguuucuuaa

SEQ ID NO: 1321858 - RNA, 19 nt, Homo sapiens
  misc_RNA (1)...(19): siRNA sense strand
cggaaccagccgagaaauu

SEQ ID NO: 1321859 - RNA, 19 nt, Homo sapiens
  misc_RNA (1)...(19): siRNA sense strand
gcucaguaacaacgaaugu

SEQ ID NO: 1321860 - RNA, 19 nt, Homo sapiens
  misc_RNA (1)...(19): siRNA sense strand
gaggguaccgcugcucaga

SEQ ID NO: 1321861 - RNA, 19 nt, Homo sapiens
  misc_RNA (1)...(19): siRNA sense strand
cauccaauucuuugauuca

SEQ ID NO: 1321862 - RNA, 19 nt, Homo sapiens
  misc_RNA (1)...(19): siRNA sense strand
caagaaaacacaaccuuca

SEQ ID NO: 1321863 - RNA, 19 nt, Homo sapiens
  misc_RNA (1)...(19): siRNA sense strand
uacaaugcggauuuaauga

SEQ ID NO: 1321864 - RNA, 19 nt, Homo sapiens
  misc_RNA (1)...(19): siRNA sense strand
gggagauccgguguccuua

SEQ ID NO: 1321865 - RNA, 19 nt, Homo sapiens
  misc_RNA (1)...(19): siRNA sense strand
gcggauuuaaugaacugua

SEQ ID NO: 1321866 - RNA, 19 nt, Homo sapiens
  misc_RNA (1)...(19): siRNA sense strand
ucaucuacaaugcggauuu

SEQ ID NO: 1321867 - RNA, 19 nt, Homo sapiens
  misc_RNA (1)...(19): siRNA sense strand
uccaggacgaugaauuuaa

SEQ ID NO: 1321868 - RNA, 19 nt, Homo sapiens
  misc_RNA (1)...(19): siRNA sense strand
cggauuuaaugaacuguac

SEQ ID NO: 1321869 - RNA, 19 nt, Homo sapiens
  misc_RNA (1)...(19): siRNA sense strand
ugugggaugucaccuggau

SEQ ID NO: 1321870 - RNA, 19 nt, Homo sapiens
  misc_RNA (1)...(19): siRNA sense strand
gcaauuacuuucugguuaa

SEQ ID NO: 1321871 - RNA, 19 nt, Homo sapiens
  misc_RNA (1)...(19): siRNA sense strand
caaagaggauuucaacaga

SEQ ID NO: 1321872 - RNA, 19 nt, Homo sapiens
  misc_RNA (1)...(19): siRNA sense strand
gcaaguguuucuuaacuga

SEQ ID NO: 1321873 - RNA, 19 nt, Homo sapiens
  misc_RNA (1)...(19): siRNA sense strand
ggauuaacgucucgcaauu

SEQ ID NO: 1321874 - RNA, 19 nt, Homo sapiens
  misc_RNA (1)...(19): siRNA sense strand
gcaccagccucuagucuca

SEQ ID NO: 1321875 - RNA, 19 nt, Homo sapiens
  misc_RNA (1)...(19): siRNA sense strand
gagauccgguguccuuauu

SEQ ID NO: 1321876 - RNA, 19 nt, Homo sapiens
  misc_RNA (1)...(19): siRNA sense strand
gaaacugcuuuauccaaau

SEQ ID NO: 1321877 - RNA, 19 nt, Homo sapiens
  misc_RNA (1)...(19): siRNA sense strand
auacgaaacucaaagagaa

SEQ ID NO: 1321878 - RNA, 19 nt, Homo sapiens
  misc_RNA (1)...(19): siRNA sense strand
caacagaaacugcuuuauc

SEQ ID NO: 1321879 - RNA, 19 nt, Homo sapiens
  misc_RNA (1)...(19): siRNA sense strand
caucuacaaugcggauuua

SEQ ID NO: 1321880 - RNA, 19 nt, Homo sapiens
  misc_RNA (1)...(19): siRNA sense strand
gcaugaaggagucacauuu

SEQ ID NO: 1321881 - RNA, 19 nt, Homo sapiens
  misc_RNA (1)...(19): siRNA sense strand
agaaacugcuuuauccaaa

SEQ ID NO: 1321882 - RNA, 19 nt, Homo sapiens
  misc_RNA (1)...(19): siRNA sense strand
cgcaauuacuuucugguua

SEQ ID NO: 1321883 - RNA, 19 nt, Homo sapiens
  misc_RNA (1)...(19): siRNA sense strand
ggaaccagccgagaaauug

SEQ ID NO: 1321884 - RNA, 19 nt, Homo sapiens
  misc_RNA (1)...(19): siRNA sense strand
gaaaucggaucugcgaaca

SEQ ID NO: 1321885 - RNA, 19 nt, Homo sapiens
  misc_RNA (1)...(19): siRNA sense strand
gaacccaggcucaguaaca

SEQ ID NO: 1321886 - RNA, 19 nt, Homo sapiens
  misc_RNA (1)...(19): siRNA sense strand
gauuaacgucucgcaauua

SEQ ID NO: 1321887 - RNA, 19 nt, Homo sapiens
  misc_RNA (1)...(19): siRNA sense strand
gaagaacagagucguggaa

SEQ ID NO: 1321888 - RNA, 19 nt, Homo sapiens
  misc_RNA (1)...(19): siRNA sense strand
gaauuucuccuguuucauc

SEQ ID NO: 1321889 - RNA, 19 nt, Homo sapiens
  misc_RNA (1)...(19): siRNA sense strand
aaagaggauuucaacagaa

SEQ ID NO: 1321890 - RNA, 19 nt, Homo sapiens
  misc_RNA (1)...(19): siRNA sense strand
guaccgcugcucagaauuu

SEQ ID NO: 1321891 - RNA, 19 nt, Homo sapiens
  misc_RNA (1)...(19): siRNA sense strand
ccaggacgaugaauuuaag

SEQ ID NO: 1321892 - RNA, 19 nt, Homo sapiens
  misc_RNA (1)...(19): siRNA sense strand
ccaauucuuugauucacuu

SEQ ID NO: 1321893 - RNA, 19 nt, Homo sapiens
  misc_RNA (1)...(19): siRNA sense strand
ccgguguccuuauuacaua

SEQ ID NO: 1321894 - RNA, 19 nt, Homo sapiens
  misc_RNA (1)...(19): siRNA sense strand
cagcaaguguuucuuaacu

SEQ ID NO: 1321895 - RNA, 19 nt, Homo sapiens
  misc_RNA (1)...(19): siRNA sense strand
uaacggaaccagccgagaa

SEQ ID NO: 1321896 - RNA, 19 nt, Homo sapiens
  misc_RNA (1)...(19): siRNA sense strand
cuacaaugcggauuuaaug

SEQ ID NO: 1321897 - RNA, 19 nt, Homo sapiens
  misc_RNA (1)...(19): siRNA sense strand
uaacgucucgcaauuacuu

SEQ ID NO: 1321898 - RNA, 19 nt, Homo sapiens
  misc_RNA (1)...(19): siRNA sense strand
cccgugacguccaguauuu

SEQ ID NO: 1321899 - RNA, 19 nt, Homo sapiens
  misc_RNA (1)...(19): siRNA sense strand
ggcauccaauucuuugauu

SEQ ID NO: 1321900 - RNA, 19 nt, Homo sapiens
  misc_RNA (1)...(19): siRNA sense strand
gaaauuugucugcaugaag

SEQ ID NO: 1321901 - RNA, 19 nt, Homo sapiens
  misc_RNA (1)...(19): siRNA sense strand
ggguaccgcugcucagaau

SEQ ID NO: 1321902 - RNA, 19 nt, Homo sapiens
  misc_RNA (1)...(19): siRNA sense strand
ugaaauuugucugcaugaa

SEQ ID NO: 1321903 - RNA, 19 nt, Homo sapiens
  misc_RNA (1)...(19): siRNA sense strand
gcauccaauucuuugauuc

SEQ ID NO: 1321904 - RNA, 19 nt, Homo sapiens
  misc_RNA (1)...(19): siRNA sense strand
caagccuucugcucuguga

SEQ ID NO: 1321905 - RNA, 19 nt, Homo sapiens
  misc_RNA (1)...(19): siRNA sense strand
gauccgguguccuuauuac

SEQ ID NO: 1321906 - RNA, 19 nt, Homo sapiens
  misc_RNA (1)...(19): siRNA sense strand
cgugaauacuagucaaaga

SEQ ID NO: 1321907 - RNA, 19 nt, Homo sapiens
  misc_RNA (1)...(19): siRNA sense strand
cuucagcaaguguuucuua

SEQ ID NO: 1321908 - RNA, 19 nt, Homo sapiens
  misc_RNA (1)...(19): siRNA sense strand
gaugucaccuggauaaccu

SEQ ID NO: 1321909 - RNA, 19 nt, Homo sapiens
  misc_RNA (1)...(19): siRNA sense strand
caugaaggagucacauuug

SEQ ID NO: 1321910 - RNA, 19 nt, Homo sapiens
  misc_RNA (1)...(19): siRNA sense strand
ucaccuggauaaccuguca

SEQ ID NO: 1321911 - RNA, 19 nt, Homo sapiens
  misc_RNA (1)...(19): siRNA sense strand
ggagauccgguguccuuau

SEQ ID NO: 1321912 - RNA, 19 nt, Homo sapiens
  misc_RNA (1)...(19): siRNA sense strand
ucaaagaggauuucaacag

SEQ ID NO: 1321913 - RNA, 19 nt, Homo sapiens
  misc_RNA (1)...(19): siRNA sense strand
guacauacgaaacucaaag

SEQ ID NO: 1321914 - RNA, 19 nt, Homo sapiens
  misc_RNA (1)...(19): siRNA sense strand
augaaggagucacauuuga

SEQ ID NO: 1321915 - RNA, 19 nt, Homo sapiens
  misc_RNA (1)...(19): siRNA sense strand
cagaaacugcuuuauccaa

SEQ ID NO: 1321916 - RNA, 19 nt, Homo sapiens
  misc_RNA (1)...(19): siRNA sense strand
caaugcggauuuaaugaac

SEQ ID NO: 1321917 - RNA, 19 nt, Homo sapiens
  misc_RNA (1)...(19): siRNA sense strand
cauacgaaacucaaagaga

SEQ ID NO: 1321918 - RNA, 19 nt, Homo sapiens
  misc_RNA (1)...(19): siRNA sense strand
acaaugcggauuuaaugaa

SEQ ID NO: 1321919 - RNA, 19 nt, Homo sapiens
  misc_RNA (1)...(19): siRNA sense strand
ucacgugaauacuagucaa

SEQ ID NO: 1321920 - RNA, 19 nt, Homo sapiens
  misc_RNA (1)...(19): siRNA sense strand
caaccuucagcaaguguuu

SEQ ID NO: 1321921 - RNA, 19 nt, Homo sapiens
  misc_RNA (1)...(19): siRNA sense strand
aacagaaacugcuuuaucc

SEQ ID NO: 1321922 - RNA, 19 nt, Homo sapiens
  misc_RNA (1)...(19): siRNA sense strand
gacaagccuucugcucugu

SEQ ID NO: 1321923 - RNA, 19 nt, Homo sapiens
  misc_RNA (1)...(19): siRNA sense strand
gaaccagccgagaaauugg

SEQ ID NO: 1321924 - RNA, 19 nt, Homo sapiens
  misc_RNA (1)...(19): siRNA sense strand
aaucggaucugcgaacagu

SEQ ID NO: 1321925 - RNA, 19 nt, Homo sapiens
  misc_RNA (1)...(19): siRNA sense strand
guggaacccaggcucagua

SEQ ID NO: 1321926 - RNA, 19 nt, Homo sapiens
  misc_RNA (1)...(19): siRNA sense strand
acacaaccuucagcaagug

SEQ ID NO: 1321927 - RNA, 19 nt, Homo sapiens
  misc_RNA (1)...(19): siRNA sense strand
ugggaugucaccuggauaa

SEQ ID NO: 1321928 - RNA, 19 nt, Homo sapiens
  misc_RNA (1)...(19): siRNA sense strand
uaacugacaagaagaacag

SEQ ID NO: 1321929 - RNA, 19 nt, Homo sapiens
  misc_RNA (1)...(19): siRNA sense strand
aacacaaccuucagcaagu

SEQ ID NO: 1321930 - RNA, 19 nt, Homo sapiens
  misc_RNA (1)...(19): siRNA sense strand
acuccaggacgaugaauuu

SEQ ID NO: 1321931 - RNA, 19 nt, Homo sapiens
  misc_RNA (1)...(19): siRNA sense strand
aagcugggacugccaagaa

SEQ ID NO: 1321932 - RNA, 19 nt, Homo sapiens
  misc_RNA (1)...(19): siRNA sense strand
uucagcaaguguuucuuaa

SEQ ID NO: 1321933 - RNA, 19 nt, Homo sapiens
  misc_RNA (1)...(19): siRNA sense strand
cggaaccagccgagaaauu

SEQ ID NO: 1321934 - RNA, 19 nt, Homo sapiens
  misc_RNA (1)...(19): siRNA sense strand
gcucaguaacaacgaaugu

SEQ ID NO: 1321935 - RNA, 19 nt, Homo sapiens
  misc_RNA (1)...(19): siRNA sense strand
gaggguaccgcugcucaga

SEQ ID NO: 1321936 - RNA, 19 nt, Homo sapiens
  misc_RNA (1)...(19): siRNA sense strand
cauccaauucuuugauuca

SEQ ID NO: 1321937 - RNA, 19 nt, Homo sapiens
  misc_RNA (1)...(19): siRNA sense strand
caagaaaacacaaccuuca

SEQ ID NO: 1321938 - RNA, 19 nt, Homo sapiens
  misc_RNA (1)...(19): siRNA sense strand
uacaaugcggauuuaauga

SEQ ID NO: 1321939 - RNA, 19 nt, Homo sapiens
  misc_RNA (1)...(19): siRNA sense strand
gggagauccgguguccuua

SEQ ID NO: 1321940 - RNA, 19 nt, Homo sapiens
  misc_RNA (1)...(19): siRNA sense strand
gcggauuuaaugaacugua

SEQ ID NO: 1321941 - RNA, 19 nt, Homo sapiens
  misc_RNA (1)...(19): siRNA sense strand
ucaucuacaaugcggauuu

SEQ ID NO: 1321942 - RNA, 19 nt, Homo sapiens
  misc_RNA (1)...(19): siRNA sense strand
uccaggacgaugaauuuaa

SEQ ID NO: 1321943 - RNA, 19 nt, Homo sapiens
  misc_RNA (1)...(19): siRNA sense strand
cggauuuaaugaacuguac

SEQ ID NO: 1321944 - RNA, 19 nt, Homo sapiens
  misc_RNA (1)...(19): siRNA sense strand
ugugggaugucaccuggau

SEQ ID NO: 1321945 - RNA, 19 nt, Homo sapiens
  misc_RNA (1)...(19): siRNA sense strand
gcaauuacuuucugguuaa

SEQ ID NO: 1321946 - RNA, 19 nt, Homo sapiens
  misc_RNA (1)...(19): siRNA sense strand
caaagaggauuucaacaga

SEQ ID NO: 1321947 - RNA, 19 nt, Homo sapiens
  misc_RNA (1)...(19): siRNA sense strand
gcaaguguuucuuaacuga

SEQ ID NO: 1321948 - RNA, 19 nt, Homo sapiens
  misc_RNA (1)...(19): siRNA sense strand
ggauuaacgucucgcaauu

SEQ ID NO: 1321949 - RNA, 19 nt, Homo sapiens
  misc_RNA (1)...(19): siRNA sense strand
gcaccagccucuagucuca

SEQ ID NO: 1321950 - RNA, 19 nt, Homo sapiens
  misc_RNA (1)...(19): siRNA sense strand
gagauccgguguccuuauu

SEQ ID NO: 1321951 - RNA, 19 nt, Homo sapiens
  misc_RNA (1)...(19): siRNA sense strand
gaaacugcuuuauccaaau

SEQ ID NO: 1321952 - RNA, 19 nt, Homo sapiens
  misc_RNA (1)...(19): siRNA sense strand
auacgaaacucaaagagaa

SEQ ID NO: 1321953 - RNA, 19 nt, Homo sapiens
  misc_RNA (1)...(19): siRNA sense strand
caacagaaacugcuuuauc

SEQ ID NO: 1321954 - RNA, 19 nt, Homo sapiens
  misc_RNA (1)...(19): siRNA sense strand
caucuacaaugcggauuua

SEQ ID NO: 1321955 - RNA, 19 nt, Homo sapiens
  misc_RNA (1)...(19): siRNA sense strand
gcaugaaggagucacauuu

SEQ ID NO: 1321956 - RNA, 19 nt, Homo sapiens
  misc_RNA (1)...(19): siRNA sense strand
agaaacugcuuuauccaaa

SEQ ID NO: 1321957 - RNA, 19 nt, Homo sapiens
  misc_RNA (1)...(19): siRNA sense strand
cgcaauuacuuucugguua

SEQ ID NO: 1321958 - RNA, 19 nt, Homo sapiens
  misc_RNA (1)...(19): siRNA sense strand
ggaaccagccgagaaauug

SEQ ID NO: 1321959 - RNA, 19 nt, Homo sapiens
  misc_RNA (1)...(19): siRNA sense strand
gaaaucggaucugcgaaca

SEQ ID NO: 1321960 - RNA, 19 nt, Homo sapiens
  misc_RNA (1)...(19): siRNA sense strand
gaacccaggcucaguaaca

SEQ ID NO: 1321961 - RNA, 19 nt, Homo sapiens
  misc_RNA (1)...(19): siRNA sense strand
gauuaacgucucgcaauua

SEQ ID NO: 1321962 - RNA, 19 nt, Homo sapiens
  misc_RNA (1)...(19): siRNA sense strand
gaagaacagagucguggaa

SEQ ID NO: 1321963 - RNA, 19 nt, Homo sapiens
  misc_RNA (1)...(19): siRNA sense strand
gaauuucuccuguuucauc

SEQ ID NO: 1321964 - RNA, 19 nt, Homo sapiens
  misc_RNA (1)...(19): siRNA sense strand
aaagaggauuucaacagaa

SEQ ID NO: 1321965 - RNA, 19 nt, Homo sapiens
  misc_RNA (1)...(19): siRNA sense strand
guaccgcugcucagaauuu

SEQ ID NO: 1321966 - RNA, 19 nt, Homo sapiens
  misc_RNA (1)...(19): siRNA sense strand
ccaggacgaugaauuuaag

SEQ ID NO: 1321967 - RNA, 19 nt, Homo sapiens
  misc_RNA (1)...(19): siRNA sense strand
ccaauucuuugauucacuu

SEQ ID NO: 1321968 - RNA, 19 nt, Homo sapiens
  misc_RNA (1)...(19): siRNA sense strand
ccgguguccuuauuacaua

SEQ ID NO: 1321969 - RNA, 19 nt, Homo sapiens
  misc_RNA (1)...(19): siRNA sense strand
cagcaaguguuucuuaacu

SEQ ID NO: 1321970 - RNA, 19 nt, Homo sapiens
  misc_RNA (1)...(19): siRNA sense strand
uaacggaaccagccgagaa

SEQ ID NO: 1321971 - RNA, 19 nt, Homo sapiens
  misc_RNA (1)...(19): siRNA sense strand
cuacaaugcggauuuaaug

SEQ ID NO: 1321972 - RNA, 19 nt, Homo sapiens
  misc_RNA (1)...(19): siRNA sense strand
uaacgucucgcaauuacuu

SEQ ID NO: 1321973 - RNA, 19 nt, Homo sapiens
  misc_RNA (1)...(19): siRNA sense strand
cccgugacguccaguauuu

SEQ ID NO: 1321974 - RNA, 19 nt, Homo sapiens
  misc_RNA (1)...(19): siRNA sense strand
ggcauccaauucuuugauu

SEQ ID NO: 1321975 - RNA, 19 nt, Homo sapiens
  misc_RNA (1)...(19): siRNA sense strand
gaaauuugucugcaugaag

SEQ ID NO: 1321976 - RNA, 19 nt, Homo sapiens
  misc_RNA (1)...(19): siRNA sense strand
ggguaccgcugcucagaau

SEQ ID NO: 1321977 - RNA, 19 nt, Homo sapiens
  misc_RNA (1)...(19): siRNA sense strand
ugaaauuugucugcaugaa

SEQ ID NO: 1321978 - RNA, 19 nt, Homo sapiens
  misc_RNA (1)...(19): siRNA sense strand
gcauccaauucuuugauuc

SEQ ID NO: 1321979 - RNA, 19 nt, Homo sapiens
  misc_RNA (1)...(19): siRNA sense strand
caagccuucugcucuguga

SEQ ID NO: 1321980 - RNA, 19 nt, Homo sapiens
  misc_RNA (1)...(19): siRNA sense strand
gauccgguguccuuauuac

SEQ ID NO: 1321981 - RNA, 19 nt, Homo sapiens
  misc_RNA (1)...(19): siRNA sense strand
cgugaauacuagucaaaga

SEQ ID NO: 1321982 - RNA, 19 nt, Homo sapiens
  misc_RNA (1)...(19): siRNA sense strand
cuucagcaaguguuucuua

SEQ ID NO: 1321983 - RNA, 19 nt, Homo sapiens
  misc_RNA (1)...(19): siRNA sense strand
gaugucaccuggauaaccu

SEQ ID NO: 1321984 - RNA, 19 nt, Homo sapiens
  misc_RNA (1)...(19): siRNA sense strand
caugaaggagucacauuug

SEQ ID NO: 1321985 - RNA, 19 nt, Homo sapiens
  misc_RNA (1)...(19): siRNA sense strand
ucaccuggauaaccuguca

SEQ ID NO: 1321986 - RNA, 19 nt, Homo sapiens
  misc_RNA (1)...(19): siRNA sense strand
ggagauccgguguccuuau

SEQ ID NO: 1321987 - RNA, 19 nt, Homo sapiens
  misc_RNA (1)...(19): siRNA sense strand
ucaaagaggauuucaacag

SEQ ID NO: 1321988 - RNA, 19 nt, Homo sapiens
  misc_RNA (1)...(19): siRNA sense strand
guacauacgaaacucaaag

SEQ ID NO: 1321989 - RNA, 19 nt, Homo sapiens
  misc_RNA (1)...(19): siRNA sense strand
augaaggagucacauuuga

SEQ ID NO: 1321990 - RNA, 19 nt, Homo sapiens
  misc_RNA (1)...(19): siRNA sense strand
cagaaacugcuuuauccaa

SEQ ID NO: 1321991 - RNA, 19 nt, Homo sapiens
  misc_RNA (1)...(19): siRNA sense strand
caaugcggauuuaaugaac

SEQ ID NO: 1321992 - RNA, 19 nt, Homo sapiens
  misc_RNA (1)...(19): siRNA sense strand
cauacgaaacucaaagaga

SEQ ID NO: 1321993 - RNA, 19 nt, Homo sapiens
  misc_RNA (1)...(19): siRNA sense strand
acaaugcggauuuaaugaa

SEQ ID NO: 1321994 - RNA, 19 nt, Homo sapiens
  misc_RNA (1)...(19): siRNA sense strand
ucacgugaauacuagucaa

SEQ ID NO: 1321995 - RNA, 19 nt, Homo sapiens
  misc_RNA (1)...(19): siRNA sense strand
caaccuucagcaaguguuu

SEQ ID NO: 1321996 - RNA, 19 nt, Homo sapiens
  misc_RNA (1)...(19): siRNA sense strand
aacagaaacugcuuuaucc

SEQ ID NO: 1321997 - RNA, 19 nt, Homo sapiens
  misc_RNA (1)...(19): siRNA sense strand
gacaagccuucugcucugu

SEQ ID NO: 1321998 - RNA, 19 nt, Homo sapiens
  misc_RNA (1)...(19): siRNA sense strand
gaaccagccgagaaauugg

SEQ ID NO: 1321999 - RNA, 19 nt, Homo sapiens
  misc_RNA (1)...(19): siRNA sense strand
aaucggaucugcgaacagu

SEQ ID NO: 1322000 - RNA, 19 nt, Homo sapiens
  misc_RNA (1)...(19): siRNA sense strand
guggaacccaggcucagua

SEQ ID NO: 1322001 - RNA, 19 nt, Homo sapiens
  misc_RNA (1)...(19): siRNA sense strand
acacaaccuucagcaagug

SEQ ID NO: 1322002 - RNA, 19 nt, Homo sapiens
  misc_RNA (1)...(19): siRNA sense strand
ugggaugucaccuggauaa

SEQ ID NO: 1322003 - RNA, 19 nt, Homo sapiens
  misc_RNA (1)...(19): siRNA sense strand
uaacugacaagaagaacag

SEQ ID NO: 1322004 - RNA, 19 nt, Homo sapiens
  misc_RNA (1)...(19): siRNA sense strand
aacacaaccuucagcaagu

SEQ ID NO: 1322005 - RNA, 19 nt, Homo sapiens
  misc_RNA (1)...(19): siRNA sense strand
acuccaggacgaugaauuu

SEQ ID NO: 1322006 - RNA, 19 nt, Homo sapiens
  misc_RNA (1)...(19): siRNA sense strand
aagcugggacugccaagaa

SEQ ID NO: 1322007 - RNA, 19 nt, Homo sapiens
  misc_RNA (1)...(19): siRNA sense strand
uucagcaaguguuucuuaa

SEQ ID NO: 1322008 - RNA, 19 nt, Homo sapiens
  misc_RNA (1)...(19): siRNA sense strand
cggaaccagccgagaaauu

SEQ ID NO: 1322009 - RNA, 19 nt, Homo sapiens
  misc_RNA (1)...(19): siRNA sense strand
gcucaguaacaacgaaugu

SEQ ID NO: 1322010 - RNA, 19 nt, Homo sapiens
  misc_RNA (1)...(19): siRNA sense strand
gaggguaccgcugcucaga

SEQ ID NO: 1322011 - RNA, 19 nt, Homo sapiens
  misc_RNA (1)...(19): siRNA sense strand
cauccaauucuuugauuca

SEQ ID NO: 1322012 - RNA, 19 nt, Homo sapiens
  misc_RNA (1)...(19): siRNA sense strand
caagaaaacacaaccuuca

SEQ ID NO: 1322013 - RNA, 19 nt, Homo sapiens
  misc_RNA (1)...(19): siRNA sense strand
uacaaugcggauuuaauga

SEQ ID NO: 1322014 - RNA, 19 nt, Homo sapiens
  misc_RNA (1)...(19): siRNA sense strand
gggagauccgguguccuua

SEQ ID NO: 1322015 - RNA, 19 nt, Homo sapiens
  misc_RNA (1)...(19): siRNA sense strand
gcggauuuaaugaacugua

SEQ ID NO: 1322016 - RNA, 19 nt, Homo sapiens
  misc_RNA (1)...(19): siRNA sense strand
ucaucuacaaugcggauuu

SEQ ID NO: 1322017 - RNA, 19 nt, Homo sapiens
  misc_RNA (1)...(19): siRNA sense strand
uccaggacgaugaauuuaa

SEQ ID NO: 1322018 - RNA, 19 nt, Homo sapiens
  misc_RNA (1)...(19): siRNA sense strand
cggauuuaaugaacuguac

SEQ ID NO: 1322019 - RNA, 19 nt, Homo sapiens
  misc_RNA (1)...(19): siRNA sense strand
ugugggaugucaccuggau

SEQ ID NO: 1322020 - RNA, 19 nt, Homo sapiens
  misc_RNA (1)...(19): siRNA sense strand
gcagugauguccuggauaa

SEQ ID NO: 1322021 - RNA, 19 nt, Homo sapiens
  misc_RNA (1)...(19): siRNA sense strand
gaagcuauguucgccauua

SEQ ID NO: 1322022 - RNA, 19 nt, Homo sapiens
  misc_RNA (1)...(19): siRNA sense strand
ccaacgaugugaagaaauu

SEQ ID NO: 1322023 - RNA, 19 nt, Homo sapiens
  misc_RNA (1)...(19): siRNA sense strand
caaagaaggagcuaauaaa

SEQ ID NO: 1322024 - RNA, 19 nt, Homo sapiens
  misc_RNA (1)...(19): siRNA sense strand
ccaaagaaggagcuaauaa

SEQ ID NO: 1322025 - RNA, 19 nt, Homo sapiens
  misc_RNA (1)...(19): siRNA sense strand
gguaugcacugcuuauugu

SEQ ID NO: 1322026 - RNA, 19 nt, Homo sapiens
  misc_RNA (1)...(19): siRNA sense strand
ggugguagcucaaguggau

SEQ ID NO: 1322027 - RNA, 19 nt, Homo sapiens
  misc_RNA (1)...(19): siRNA sense strand
agacccagcuccuuuauca

SEQ ID NO: 1322028 - RNA, 19 nt, Homo sapiens
  misc_RNA (1)...(19): siRNA sense strand
gggaauuagugaagccaaa

SEQ ID NO: 1322029 - RNA, 19 nt, Homo sapiens
  misc_RNA (1)...(19): siRNA sense strand
ggauggagcagcgauguuu

SEQ ID NO: 1322030 - RNA, 19 nt, Homo sapiens
  misc_RNA (1)...(19): siRNA sense strand
gugauguccuggauaaugu

SEQ ID NO: 1322031 - RNA, 19 nt, Homo sapiens
  misc_RNA (1)...(19): siRNA sense strand
uaucaucgcccaugcauca

SEQ ID NO: 1322032 - RNA, 19 nt, Homo sapiens
  misc_RNA (1)...(19): siRNA sense strand
agccaaagcugauaaaauu

SEQ ID NO: 1322033 - RNA, 19 nt, Homo sapiens
  misc_RNA (1)...(19): siRNA sense strand
uaucaagcaucagccauga

SEQ ID NO: 1322034 - RNA, 19 nt, Homo sapiens
  misc_RNA (1)...(19): siRNA sense strand
gauuguaucugaggaaagg

SEQ ID NO: 1322035 - RNA, 19 nt, Homo sapiens
  misc_RNA (1)...(19): siRNA sense strand
gugaagaaauuggaagaag

SEQ ID NO: 1322036 - RNA, 19 nt, Homo sapiens
  misc_RNA (1)...(19): siRNA sense strand
uuagagcaguguggcauaa

SEQ ID NO: 1322037 - RNA, 19 nt, Homo sapiens
  misc_RNA (1)...(19): siRNA sense strand
gaagaaauuggaagaagcu

SEQ ID NO: 1322038 - RNA, 19 nt, Homo sapiens
  misc_RNA (1)...(19): siRNA sense strand
aagcuauguucgccauuaa

SEQ ID NO: 1322039 - RNA, 19 nt, Homo sapiens
  misc_RNA (1)...(19): siRNA sense strand
ggcaguggcugagagguau

SEQ ID NO: 1322040 - RNA, 19 nt, Homo sapiens
  misc_RNA (1)...(19): siRNA sense strand
cuacgacucucccugucuu

SEQ ID NO: 1322041 - RNA, 19 nt, Homo sapiens
  misc_RNA (1)...(19): siRNA sense strand
caccagacccagcuccuuu

SEQ ID NO: 1322042 - RNA, 19 nt, Homo sapiens
  misc_RNA (1)...(19): siRNA sense strand
gggagaugccaaagacuga

SEQ ID NO: 1322043 - RNA, 19 nt, Homo sapiens
  misc_RNA (1)...(19): siRNA sense strand
gagcaguguggcauaaaug

SEQ ID NO: 1322044 - RNA, 19 nt, Homo sapiens
  misc_RNA (1)...(19): siRNA sense strand
gccaaagaaggagcuaaua

SEQ ID NO: 1322045 - RNA, 19 nt, Homo sapiens
  misc_RNA (1)...(19): siRNA sense strand
agaaagcuuuggcccacaa

SEQ ID NO: 1322046 - RNA, 19 nt, Homo sapiens
  misc_RNA (1)...(19): siRNA sense strand
ugaagcaaaugcagauacu

SEQ ID NO: 1322047 - RNA, 19 nt, Homo sapiens
  misc_RNA (1)...(19): siRNA sense strand
ugccaacgaugugaagaaa

SEQ ID NO: 1322048 - RNA, 19 nt, Homo sapiens
  misc_RNA (1)...(19): siRNA sense strand
gcuauguucgccauuaaug

SEQ ID NO: 1322049 - RNA, 19 nt, Homo sapiens
  misc_RNA (1)...(19): siRNA sense strand
gcuccuuuaucaagcauca

SEQ ID NO: 1322050 - RNA, 19 nt, Homo sapiens
  misc_RNA (1)...(19): siRNA sense strand
gcagauggagugggagaug

SEQ ID NO: 1322051 - RNA, 19 nt, Homo sapiens
  misc_RNA (1)...(19): siRNA sense strand
gcccaugcaucaacaacca

SEQ ID NO: 1322052 - RNA, 19 nt, Homo sapiens
  misc_RNA (1)...(19): siRNA sense strand
caaaugcagauacuucagu

SEQ ID NO: 1322053 - RNA, 19 nt, Homo sapiens
  misc_RNA (1)...(19): siRNA sense strand
agagcaguguggcauaaau

SEQ ID NO: 1322054 - RNA, 19 nt, Homo sapiens
  misc_RNA (1)...(19): siRNA sense strand
gugaagccaaagcugauaa

SEQ ID NO: 1322055 - RNA, 19 nt, Homo sapiens
  misc_RNA (1)...(19): siRNA sense strand
cauaaaugccaacgaugug

SEQ ID NO: 1322056 - RNA, 19 nt, Homo sapiens
  misc_RNA (1)...(19): siRNA sense strand
uaaaugccaacgaugugaa

SEQ ID NO: 1322057 - RNA, 19 nt, Homo sapiens
  misc_RNA (1)...(19): siRNA sense strand
aagcaaaugcagauacuuc

SEQ ID NO: 1322058 - RNA, 19 nt, Homo sapiens
  misc_RNA (1)...(19): siRNA sense strand
gcacuuggccagguuucug

SEQ ID NO: 1322059 - RNA, 19 nt, Homo sapiens
  misc_RNA (1)...(19): siRNA sense strand
ccuaugcgccaaagaagga

SEQ ID NO: 1322060 - RNA, 19 nt, Homo sapiens
  misc_RNA (1)...(19): siRNA sense strand
uggauaauguagcauaugc

SEQ ID NO: 1322061 - RNA, 19 nt, Homo sapiens
  misc_RNA (1)...(19): siRNA sense strand
ccuggauaauguagcauau

SEQ ID NO: 1322062 - RNA, 19 nt, Homo sapiens
  misc_RNA (1)...(19): siRNA sense strand
guuagagcaguguggcaua

SEQ ID NO: 1322063 - RNA, 19 nt, Homo sapiens
  misc_RNA (1)...(19): siRNA sense strand
gaagcaaaugcagauacuu

SEQ ID NO: 1322064 - RNA, 19 nt, Homo sapiens
  misc_RNA (1)...(19): siRNA sense strand
caucgcccaugcaucaaca

SEQ ID NO: 1322065 - RNA, 19 nt, Homo sapiens
  misc_RNA (1)...(19): siRNA sense strand
ugcagauacuucaguggaa

SEQ ID NO: 1322066 - RNA, 19 nt, Homo sapiens
  misc_RNA (1)...(19): siRNA sense strand
ggaauuagugaagccaaag

SEQ ID NO: 1322067 - RNA, 19 nt, Homo sapiens
  misc_RNA (1)...(19): siRNA sense strand
gauggagcagcgauguuug

SEQ ID NO: 1322068 - RNA, 19 nt, Homo sapiens
  misc_RNA (1)...(19): siRNA sense strand
uggcagugauguccuggau

SEQ ID NO: 1322069 - RNA, 19 nt, Homo sapiens
  misc_RNA (1)...(19): siRNA sense strand
ugaagccaaagcugauaaa

SEQ ID NO: 1322070 - RNA, 19 nt, Homo sapiens
  misc_RNA (1)...(19): siRNA sense strand
uggcaguggcugagaggua

SEQ ID NO: 1322071 - RNA, 19 nt, Homo sapiens
  misc_RNA (1)...(19): siRNA sense strand
aaucacuaaucagguggua

SEQ ID NO: 1322072 - RNA, 19 nt, Homo sapiens
  misc_RNA (1)...(19): siRNA sense strand
gggucgaggugagcuuuca

SEQ ID NO: 1322073 - RNA, 19 nt, Homo sapiens
  misc_RNA (1)...(19): siRNA sense strand
guaugcacugcuuauugua

SEQ ID NO: 1322074 - RNA, 19 nt, Homo sapiens
  misc_RNA (1)...(19): siRNA sense strand
ccagcuccuuuaucaagca

SEQ ID NO: 1322075 - RNA, 19 nt, Homo sapiens
  misc_RNA (1)...(19): siRNA sense strand
gcaaaugcagauacuucag

SEQ ID NO: 1322076 - RNA, 19 nt, Homo sapiens
  misc_RNA (1)...(19): siRNA sense strand
aguggaagaagaaagcuuu

SEQ ID NO: 1322077 - RNA, 19 nt, Homo sapiens
  misc_RNA (1)...(19): siRNA sense strand
caacgaugugaagaaauug

SEQ ID NO: 1322078 - RNA, 19 nt, Homo sapiens
  misc_RNA (1)...(19): siRNA sense strand
augcacugcuuauuguaga

SEQ ID NO: 1322079 - RNA, 19 nt, Homo sapiens
  misc_RNA (1)...(19): siRNA sense strand
gcagugauguccuggauaa

SEQ ID NO: 1322080 - RNA, 19 nt, Homo sapiens
  misc_RNA (1)...(19): siRNA sense strand
gaagcuauguucgccauua

SEQ ID NO: 1322081 - RNA, 19 nt, Homo sapiens
  misc_RNA (1)...(19): siRNA sense strand
ccaacgaugugaagaaauu

SEQ ID NO: 1322082 - RNA, 19 nt, Homo sapiens
  misc_RNA (1)...(19): siRNA sense strand
caaagaaggagcuaauaaa

SEQ ID NO: 1322083 - RNA, 19 nt, Homo sapiens
  misc_RNA (1)...(19): siRNA sense strand
ccaaagaaggagcuaauaa

SEQ ID NO: 1322084 - RNA, 19 nt, Homo sapiens
  misc_RNA (1)...(19): siRNA sense strand
gguaugcacugcuuauugu

SEQ ID NO: 1322085 - RNA, 19 nt, Homo sapiens
  misc_RNA (1)...(19): siRNA sense strand
ggugguagcucaaguggau

SEQ ID NO: 1322086 - RNA, 19 nt, Homo sapiens
  misc_RNA (1)...(19): siRNA sense strand
agacccagcuccuuuauca

SEQ ID NO: 1322087 - RNA, 19 nt, Homo sapiens
  misc_RNA (1)...(19): siRNA sense strand
gggaauuagugaagccaaa

SEQ ID NO: 1322088 - RNA, 19 nt, Homo sapiens
  misc_RNA (1)...(19): siRNA sense strand
ggauggagcagcgauguuu

SEQ ID NO: 1322089 - RNA, 19 nt, Homo sapiens
  misc_RNA (1)...(19): siRNA sense strand
gugauguccuggauaaugu

SEQ ID NO: 1322090 - RNA, 19 nt, Homo sapiens
  misc_RNA (1)...(19): siRNA sense strand
uaucaucgcccaugcauca

SEQ ID NO: 1322091 - RNA, 19 nt, Homo sapiens
  misc_RNA (1)...(19): siRNA sense strand
agccaaagcugauaaaauu

SEQ ID NO: 1322092 - RNA, 19 nt, Homo sapiens
  misc_RNA (1)...(19): siRNA sense strand
uaucaagcaucagccauga

SEQ ID NO: 1322093 - RNA, 19 nt, Homo sapiens
  misc_RNA (1)...(19): siRNA sense strand
gauuguaucugaggaaagg

SEQ ID NO: 1322094 - RNA, 19 nt, Homo sapiens
  misc_RNA (1)...(19): siRNA sense strand
gugaagaaauuggaagaag

SEQ ID NO: 1322095 - RNA, 19 nt, Homo sapiens
  misc_RNA (1)...(19): siRNA sense strand
uuagagcaguguggcauaa

SEQ ID NO: 1322096 - RNA, 19 nt, Homo sapiens
  misc_RNA (1)...(19): siRNA sense strand
gaagaaauuggaagaagcu

SEQ ID NO: 1322097 - RNA, 19 nt, Homo sapiens
  misc_RNA (1)...(19): siRNA sense strand
aagcuauguucgccauuaa

SEQ ID NO: 1322098 - RNA, 19 nt, Homo sapiens
  misc_RNA (1)...(19): siRNA sense strand
ggcaguggcugagagguau

SEQ ID NO: 1322099 - RNA, 19 nt, Homo sapiens
  misc_RNA (1)...(19): siRNA sense strand
cuacgacucucccugucuu

SEQ ID NO: 1322100 - RNA, 19 nt, Homo sapiens
  misc_RNA (1)...(19): siRNA sense strand
caccagacccagcuccuuu

SEQ ID NO: 1322101 - RNA, 19 nt, Homo sapiens
  misc_RNA (1)...(19): siRNA sense strand
gggagaugccaaagacuga

SEQ ID NO: 1322102 - RNA, 19 nt, Homo sapiens
  misc_RNA (1)...(19): siRNA sense strand
gagcaguguggcauaaaug

SEQ ID NO: 1322103 - RNA, 19 nt, Homo sapiens
  misc_RNA (1)...(19): siRNA sense strand
gccaaagaaggagcuaaua

SEQ ID NO: 1322104 - RNA, 19 nt, Homo sapiens
  misc_RNA (1)...(19): siRNA sense strand
agaaagcuuuggcccacaa

SEQ ID NO: 1322105 - RNA, 19 nt, Homo sapiens
  misc_RNA (1)...(19): siRNA sense strand
ugaagcaaaugcagauacu

SEQ ID NO: 1322106 - RNA, 19 nt, Homo sapiens
  misc_RNA (1)...(19): siRNA sense strand
ugccaacgaugugaagaaa

SEQ ID NO: 1322107 - RNA, 19 nt, Homo sapiens
  misc_RNA (1)...(19): siRNA sense strand
gcuauguucgccauuaaug

SEQ ID NO: 1322108 - RNA, 19 nt, Homo sapiens
  misc_RNA (1)...(19): siRNA sense strand
gcuccuuuaucaagcauca

SEQ ID NO: 1322109 - RNA, 19 nt, Homo sapiens
  misc_RNA (1)...(19): siRNA sense strand
gcagauggagugggagaug

SEQ ID NO: 1322110 - RNA, 19 nt, Homo sapiens
  misc_RNA (1)...(19): siRNA sense strand
gcccaugcaucaacaacca

SEQ ID NO: 1322111 - RNA, 19 nt, Homo sapiens
  misc_RNA (1)...(19): siRNA sense strand
caaaugcagauacuucagu

SEQ ID NO: 1322112 - RNA, 19 nt, Homo sapiens
  misc_RNA (1)...(19): siRNA sense strand
agagcaguguggcauaaau

SEQ ID NO: 1322113 - RNA, 19 nt, Homo sapiens
  misc_RNA (1)...(19): siRNA sense strand
gugaagccaaagcugauaa

SEQ ID NO: 1322114 - RNA, 19 nt, Homo sapiens
  misc_RNA (1)...(19): siRNA sense strand
cauaaaugccaacgaugug

SEQ ID NO: 1322115 - RNA, 19 nt, Homo sapiens
  misc_RNA (1)...(19): siRNA sense strand
uaaaugccaacgaugugaa

SEQ ID NO: 1322116 - RNA, 19 nt, Homo sapiens
  misc_RNA (1)...(19): siRNA sense strand
aagcaaaugcagauacuuc

SEQ ID NO: 1322117 - RNA, 19 nt, Homo sapiens
  misc_RNA (1)...(19): siRNA sense strand
gcacuuggccagguuucug

SEQ ID NO: 1322118 - RNA, 19 nt, Homo sapiens
  misc_RNA (1)...(19): siRNA sense strand
ccuaugcgccaaagaagga

SEQ ID NO: 1322119 - RNA, 19 nt, Homo sapiens
  misc_RNA (1)...(19): siRNA sense strand
uggauaauguagcauaugc

SEQ ID NO: 1322120 - RNA, 19 nt, Homo sapiens
  misc_RNA (1)...(19): siRNA sense strand
ccuggauaauguagcauau

SEQ ID NO: 1322121 - RNA, 19 nt, Homo sapiens
  misc_RNA (1)...(19): siRNA sense strand
guuagagcaguguggcaua

SEQ ID NO: 1322122 - RNA, 19 nt, Homo sapiens
  misc_RNA (1)...(19): siRNA sense strand
gaagcaaaugcagauacuu

SEQ ID NO: 1322123 - RNA, 19 nt, Homo sapiens
  misc_RNA (1)...(19): siRNA sense strand
caucgcccaugcaucaaca

SEQ ID NO: 1322124 - RNA, 19 nt, Homo sapiens
  misc_RNA (1)...(19): siRNA sense strand
ugcagauacuucaguggaa

SEQ ID NO: 1322125 - RNA, 19 nt, Homo sapiens
  misc_RNA (1)...(19): siRNA sense strand
ggaauuagugaagccaaag

SEQ ID NO: 1322126 - RNA, 19 nt, Homo sapiens
  misc_RNA (1)...(19): siRNA sense strand
gauggagcagcgauguuug

SEQ ID NO: 1322127 - RNA, 19 nt, Homo sapiens
  misc_RNA (1)...(19): siRNA sense strand
uggcagugauguccuggau

SEQ ID NO: 1322128 - RNA, 19 nt, Homo sapiens
  misc_RNA (1)...(19): siRNA sense strand
ugaagccaaagcugauaaa

SEQ ID NO: 1322129 - RNA, 19 nt, Homo sapiens
  misc_RNA (1)...(19): siRNA sense strand
uggcaguggcugagaggua

SEQ ID NO: 1322130 - RNA, 19 nt, Homo sapiens
  misc_RNA (1)...(19): siRNA sense strand
aaucacuaaucagguggua

SEQ ID NO: 1322131 - RNA, 19 nt, Homo sapiens
  misc_RNA (1)...(19): siRNA sense strand
gggucgaggugagcuuuca

SEQ ID NO: 1322132 - RNA, 19 nt, Homo sapiens
  misc_RNA (1)...(19): siRNA sense strand
guaugcacugcuuauugua

SEQ ID NO: 1322133 - RNA, 19 nt, Homo sapiens
  misc_RNA (1)...(19): siRNA sense strand
ccagcuccuuuaucaagca

SEQ ID NO: 1322134 - RNA, 19 nt, Homo sapiens
  misc_RNA (1)...(19): siRNA sense strand
gcaaaugcagauacuucag

SEQ ID NO: 1322135 - RNA, 19 nt, Homo sapiens
  misc_RNA (1)...(19): siRNA sense strand
aguggaagaagaaagcuuu

SEQ ID NO: 1322136 - RNA, 19 nt, Homo sapiens
  misc_RNA (1)...(19): siRNA sense strand
caacgaugugaagaaauug

SEQ ID NO: 1322137 - RNA, 19 nt, Homo sapiens
  misc_RNA (1)...(19): siRNA sense strand
augcacugcuuauuguaga

SEQ ID NO: 1322138 - RNA, 19 nt, Homo sapiens
  misc_RNA (1)...(19): siRNA sense strand
gcagugauguccuggauaa

SEQ ID NO: 1322139 - RNA, 19 nt, Homo sapiens
  misc_RNA (1)...(19): siRNA sense strand
gaagcuauguucgccauua

SEQ ID NO: 1322140 - RNA, 19 nt, Homo sapiens
  misc_RNA (1)...(19): siRNA sense strand
ccaacgaugugaagaaauu

SEQ ID NO: 1322141 - RNA, 19 nt, Homo sapiens
  misc_RNA (1)...(19): siRNA sense strand
caaagaaggagcuaauaaa

SEQ ID NO: 1322142 - RNA, 19 nt, Homo sapiens
  misc_RNA (1)...(19): siRNA sense strand
ccaaagaaggagcuaauaa

SEQ ID NO: 1322143 - RNA, 19 nt, Homo sapiens
  misc_RNA (1)...(19): siRNA sense strand
gguaugcacugcuuauugu

SEQ ID NO: 1322144 - RNA, 19 nt, Homo sapiens
  misc_RNA (1)...(19): siRNA sense strand
ggugguagcucaaguggau

SEQ ID NO: 1322145 - RNA, 19 nt, Homo sapiens
  misc_RNA (1)...(19): siRNA sense strand
agacccagcuccuuuauca

SEQ ID NO: 1322146 - RNA, 19 nt, Homo sapiens
  misc_RNA (1)...(19): siRNA sense strand
gggaauuagugaagccaaa

SEQ ID NO: 1322147 - RNA, 19 nt, Homo sapiens
  misc_RNA (1)...(19): siRNA sense strand
ggauggagcagcgauguuu

SEQ ID NO: 1322148 - RNA, 19 nt, Homo sapiens
  misc_RNA (1)...(19): siRNA sense strand
gugauguccuggauaaugu

SEQ ID NO: 1322149 - RNA, 19 nt, Homo sapiens
  misc_RNA (1)...(19): siRNA sense strand
uaucaucgcccaugcauca

SEQ ID NO: 1322150 - RNA, 19 nt, Homo sapiens
  misc_RNA (1)...(19): siRNA sense strand
agccaaagcugauaaaauu

SEQ ID NO: 1322151 - RNA, 19 nt, Homo sapiens
  misc_RNA (1)...(19): siRNA sense strand
uaucaagcaucagccauga

SEQ ID NO: 1322152 - RNA, 19 nt, Homo sapiens
  misc_RNA (1)...(19): siRNA sense strand
gauuguaucugaggaaagg

SEQ ID NO: 1322153 - RNA, 19 nt, Homo sapiens
  misc_RNA (1)...(19): siRNA sense strand
gugaagaaauuggaagaag

SEQ ID NO: 1322154 - RNA, 19 nt, Homo sapiens
  misc_RNA (1)...(19): siRNA sense strand
uuagagcaguguggcauaa

SEQ ID NO: 1322155 - RNA, 19 nt, Homo sapiens
  misc_RNA (1)...(19): siRNA sense strand
gaagaaauuggaagaagcu

SEQ ID NO: 1322156 - RNA, 19 nt, Homo sapiens
  misc_RNA (1)...(19): siRNA sense strand
aagcuauguucgccauuaa

SEQ ID NO: 1322157 - RNA, 19 nt, Homo sapiens
  misc_RNA (1)...(19): siRNA sense strand
ggcaguggcugagagguau

SEQ ID NO: 1322158 - RNA, 19 nt, Homo sapiens
  misc_RNA (1)...(19): siRNA sense strand
cuacgacucucccugucuu

SEQ ID NO: 1322159 - RNA, 19 nt, Homo sapiens
  misc_RNA (1)...(19): siRNA sense strand
caccagacccagcuccuuu

SEQ ID NO: 1322160 - RNA, 19 nt, Homo sapiens
  misc_RNA (1)...(19): siRNA sense strand
gggagaugccaaagacuga

SEQ ID NO: 1322161 - RNA, 19 nt, Homo sapiens
  misc_RNA (1)...(19): siRNA sense strand
gagcaguguggcauaaaug

SEQ ID NO: 1322162 - RNA, 19 nt, Homo sapiens
  misc_RNA (1)...(19): siRNA sense strand
gccaaagaaggagcuaaua

SEQ ID NO: 1322163 - RNA, 19 nt, Homo sapiens
  misc_RNA (1)...(19): siRNA sense strand
agaaagcuuuggcccacaa

SEQ ID NO: 1322164 - RNA, 19 nt, Homo sapiens
  misc_RNA (1)...(19): siRNA sense strand
ugaagcaaaugcagauacu

SEQ ID NO: 1322165 - RNA, 19 nt, Homo sapiens
  misc_RNA (1)...(19): siRNA sense strand
ugccaacgaugugaagaaa

SEQ ID NO: 1322166 - RNA, 19 nt, Homo sapiens
  misc_RNA (1)...(19): siRNA sense strand
gcuauguucgccauuaaug

SEQ ID NO: 1322167 - RNA, 19 nt, Homo sapiens
  misc_RNA (1)...(19): siRNA sense strand
gcuccuuuaucaagcauca

SEQ ID NO: 1322168 - RNA, 19 nt, Homo sapiens
  misc_RNA (1)...(19): siRNA sense strand
gcagauggagugggagaug

SEQ ID NO: 1322169 - RNA, 19 nt, Homo sapiens
  misc_RNA (1)...(19): siRNA sense strand
gcccaugcaucaacaacca

SEQ ID NO: 1322170 - RNA, 19 nt, Homo sapiens
  misc_RNA (1)...(19): siRNA sense strand
caaaugcagauacuucagu

SEQ ID NO: 1322171 - RNA, 19 nt, Homo sapiens
  misc_RNA (1)...(19): siRNA sense strand
agagcaguguggcauaaau

SEQ ID NO: 1322172 - RNA, 19 nt, Homo sapiens
  misc_RNA (1)...(19): siRNA sense strand
gugaagccaaagcugauaa

SEQ ID NO: 1322173 - RNA, 19 nt, Homo sapiens
  misc_RNA (1)...(19): siRNA sense strand
cauaaaugccaacgaugug

SEQ ID NO: 1322174 - RNA, 19 nt, Homo sapiens
  misc_RNA (1)...(19): siRNA sense strand
uaaaugccaacgaugugaa

SEQ ID NO: 1322175 - RNA, 19 nt, Homo sapiens
  misc_RNA (1)...(19): siRNA sense strand
aagcaaaugcagauacuuc

SEQ ID NO: 1322176 - RNA, 19 nt, Homo sapiens
  misc_RNA (1)...(19): siRNA sense strand
gcacuuggccagguuucug

SEQ ID NO: 1322177 - RNA, 19 nt, Homo sapiens
  misc_RNA (1)...(19): siRNA sense strand
ccuaugcgccaaagaagga

SEQ ID NO: 1322178 - RNA, 19 nt, Homo sapiens
  misc_RNA (1)...(19): siRNA sense strand
uggauaauguagcauaugc

SEQ ID NO: 1322179 - RNA, 19 nt, Homo sapiens
  misc_RNA (1)...(19): siRNA sense strand
ccuggauaauguagcauau

SEQ ID NO: 1322180 - RNA, 19 nt, Homo sapiens
  misc_RNA (1)...(19): siRNA sense strand
guuagagcaguguggcaua

SEQ ID NO: 1322181 - RNA, 19 nt, Homo sapiens
  misc_RNA (1)...(19): siRNA sense strand
gaagcaaaugcagauacuu

SEQ ID NO: 1322182 - RNA, 19 nt, Homo sapiens
  misc_RNA (1)...(19): siRNA sense strand
caucgcccaugcaucaaca

SEQ ID NO: 1322183 - RNA, 19 nt, Homo sapiens
  misc_RNA (1)...(19): siRNA sense strand
ugcagauacuucaguggaa

SEQ ID NO: 1322184 - RNA, 19 nt, Homo sapiens
  misc_RNA (1)...(19): siRNA sense strand
ggaauuagugaagccaaag

SEQ ID NO: 1322185 - RNA, 19 nt, Homo sapiens
  misc_RNA (1)...(19): siRNA sense strand
gauggagcagcgauguuug

SEQ ID NO: 1322186 - RNA, 19 nt, Homo sapiens
  misc_RNA (1)...(19): siRNA sense strand
uggcagugauguccuggau

SEQ ID NO: 1322187 - RNA, 19 nt, Homo sapiens
  misc_RNA (1)...(19): siRNA sense strand
ugaagccaaagcugauaaa

SEQ ID NO: 1322188 - RNA, 19 nt, Homo sapiens
  misc_RNA (1)...(19): siRNA sense strand
uggcaguggcugagaggua

SEQ ID NO: 1322189 - RNA, 19 nt, Homo sapiens
  misc_RNA (1)...(19): siRNA sense strand
aaucacuaaucagguggua

SEQ ID NO: 1322190 - RNA, 19 nt, Homo sapiens
  misc_RNA (1)...(19): siRNA sense strand
gggucgaggugagcuuuca

SEQ ID NO: 1322191 - RNA, 19 nt, Homo sapiens
  misc_RNA (1)...(19): siRNA sense strand
guaugcacugcuuauugua

SEQ ID NO: 1322192 - RNA, 19 nt, Homo sapiens
  misc_RNA (1)...(19): siRNA sense strand
ccagcuccuuuaucaagca

SEQ ID NO: 1322193 - RNA, 19 nt, Homo sapiens
  misc_RNA (1)...(19): siRNA sense strand
gcaaaugcagauacuucag

SEQ ID NO: 1322194 - RNA, 19 nt, Homo sapiens
  misc_RNA (1)...(19): siRNA sense strand
aguggaagaagaaagcuuu

SEQ ID NO: 1322195 - RNA, 19 nt, Homo sapiens
  misc_RNA (1)...(19): siRNA sense strand
caacgaugugaagaaauug

SEQ ID NO: 1322196 - RNA, 19 nt, Homo sapiens
  misc_RNA (1)...(19): siRNA sense strand
augcacugcuuauuguaga

SEQ ID NO: 1322197 - RNA, 19 nt, Homo sapiens
  misc_RNA (1)...(19): siRNA sense strand
gcagugauguccuggauaa

SEQ ID NO: 1322198 - RNA, 19 nt, Homo sapiens
  misc_RNA (1)...(19): siRNA sense strand
gaagcuauguucgccauua

SEQ ID NO: 1322199 - RNA, 19 nt, Homo sapiens
  misc_RNA (1)...(19): siRNA sense strand
ccaacgaugugaagaaauu

SEQ ID NO: 1322200 - RNA, 19 nt, Homo sapiens
  misc_RNA (1)...(19): siRNA sense strand
caaagaaggagcuaauaaa

SEQ ID NO: 1322201 - RNA, 19 nt, Homo sapiens
  misc_RNA (1)...(19): siRNA sense strand
ccaaagaaggagcuaauaa

SEQ ID NO: 1322202 - RNA, 19 nt, Homo sapiens
  misc_RNA (1)...(19): siRNA sense strand
gguaugcacugcuuauugu

SEQ ID NO: 1322203 - RNA, 19 nt, Homo sapiens
  misc_RNA (1)...(19): siRNA sense strand
ggugguagcucaaguggau

SEQ ID NO: 1322204 - RNA, 19 nt, Homo sapiens
  misc_RNA (1)...(19): siRNA sense strand
agacccagcuccuuuauca

SEQ ID NO: 1322205 - RNA, 19 nt, Homo sapiens
  misc_RNA (1)...(19): siRNA sense strand
gggaauuagugaagccaaa

SEQ ID NO: 1322206 - RNA, 19 nt, Homo sapiens
  misc_RNA (1)...(19): siRNA sense strand
ggauggagcagcgauguuu

SEQ ID NO: 1322207 - RNA, 19 nt, Homo sapiens
  misc_RNA (1)...(19): siRNA sense strand
gugauguccuggauaaugu

SEQ ID NO: 1322208 - RNA, 19 nt, Homo sapiens
  misc_RNA (1)...(19): siRNA sense strand
uaucaucgcccaugcauca

SEQ ID NO: 1322209 - RNA, 19 nt, Homo sapiens
  misc_RNA (1)...(19): siRNA sense strand
agccaaagcugauaaaauu

SEQ ID NO: 1322210 - RNA, 19 nt, Homo sapiens
  misc_RNA (1)...(19): siRNA sense strand
uaucaagcaucagccauga

SEQ ID NO: 1322211 - RNA, 19 nt, Homo sapiens
  misc_RNA (1)...(19): siRNA sense strand
gauuguaucugaggaaagg

SEQ ID NO: 1322212 - RNA, 19 nt, Homo sapiens
  misc_RNA (1)...(19): siRNA sense strand
gugaagaaauuggaagaag

SEQ ID NO: 1322213 - RNA, 19 nt, Homo sapiens
  misc_RNA (1)...(19): siRNA sense strand
uuagagcaguguggcauaa

SEQ ID NO: 1322214 - RNA, 19 nt, Homo sapiens
  misc_RNA (1)...(19): siRNA sense strand
gaagaaauuggaagaagcu

SEQ ID NO: 1322215 - RNA, 19 nt, Homo sapiens
  misc_RNA (1)...(19): siRNA sense strand
aagcuauguucgccauuaa

SEQ ID NO: 1322216 - RNA, 19 nt, Homo sapiens
  misc_RNA (1)...(19): siRNA sense strand
ggcaguggcugagagguau

SEQ ID NO: 1322217 - RNA, 19 nt, Homo sapiens
  misc_RNA (1)...(19): siRNA sense strand
cuacgacucucccugucuu

SEQ ID NO: 1322218 - RNA, 19 nt, Homo sapiens
  misc_RNA (1)...(19): siRNA sense strand
caccagacccagcuccuuu

SEQ ID NO: 1322219 - RNA, 19 nt, Homo sapiens
  misc_RNA (1)...(19): siRNA sense strand
gggagaugccaaagacuga

SEQ ID NO: 1322220 - RNA, 19 nt, Homo sapiens
  misc_RNA (1)...(19): siRNA sense strand
gagcaguguggcauaaaug

SEQ ID NO: 1322221 - RNA, 19 nt, Homo sapiens
  misc_RNA (1)...(19): siRNA sense strand
gccaaagaaggagcuaaua

SEQ ID NO: 1322222 - RNA, 19 nt, Homo sapiens
  misc_RNA (1)...(19): siRNA sense strand
agaaagcuuuggcccacaa

SEQ ID NO: 1322223 - RNA, 19 nt, Homo sapiens
  misc_RNA (1)...(19): siRNA sense strand
ugaagcaaaugcagauacu

SEQ ID NO: 1322224 - RNA, 19 nt, Homo sapiens
  misc_RNA (1)...(19): siRNA sense strand
ugccaacgaugugaagaaa

SEQ ID NO: 1322225 - RNA, 19 nt, Homo sapiens
  misc_RNA (1)...(19): siRNA sense strand
gcuauguucgccauuaaug

SEQ ID NO: 1322226 - RNA, 19 nt, Homo sapiens
  misc_RNA (1)...(19): siRNA sense strand
gcuccuuuaucaagcauca

SEQ ID NO: 1322227 - RNA, 19 nt, Homo sapiens
  misc_RNA (1)...(19): siRNA sense strand
gcagauggagugggagaug

SEQ ID NO: 1322228 - RNA, 19 nt, Homo sapiens
  misc_RNA (1)...(19): siRNA sense strand
gcccaugcaucaacaacca

SEQ ID NO: 1322229 - RNA, 19 nt, Homo sapiens
  misc_RNA (1)...(19): siRNA sense strand
caaaugcagauacuucagu

SEQ ID NO: 1322230 - RNA, 19 nt, Homo sapiens
  misc_RNA (1)...(19): siRNA sense strand
agagcaguguggcauaaau

SEQ ID NO: 1322231 - RNA, 19 nt, Homo sapiens
  misc_RNA (1)...(19): siRNA sense strand
gugaagccaaagcugauaa

SEQ ID NO: 1322232 - RNA, 19 nt, Homo sapiens
  misc_RNA (1)...(19): siRNA sense strand
cauaaaugccaacgaugug

SEQ ID NO: 1322233 - RNA, 19 nt, Homo sapiens
  misc_RNA (1)...(19): siRNA sense strand
uaaaugccaacgaugugaa

SEQ ID NO: 1322234 - RNA, 19 nt, Homo sapiens
  misc_RNA (1)...(19): siRNA sense strand
aagcaaaugcagauacuuc

SEQ ID NO: 1322235 - RNA, 19 nt, Homo sapiens
  misc_RNA (1)...(19): siRNA sense strand
gcacuuggccagguuucug

SEQ ID NO: 1322236 - RNA, 19 nt, Homo sapiens
  misc_RNA (1)...(19): siRNA sense strand
ccuaugcgccaaagaagga

SEQ ID NO: 1322237 - RNA, 19 nt, Homo sapiens
  misc_RNA (1)...(19): siRNA sense strand
uggauaauguagcauaugc

SEQ ID NO: 1322238 - RNA, 19 nt, Homo sapiens
  misc_RNA (1)...(19): siRNA sense strand
ccuggauaauguagcauau

SEQ ID NO: 1322239 - RNA, 19 nt, Homo sapiens
  misc_RNA (1)...(19): siRNA sense strand
guuagagcaguguggcaua

SEQ ID NO: 1322240 - RNA, 19 nt, Homo sapiens
  misc_RNA (1)...(19): siRNA sense strand
gaagcaaaugcagauacuu

SEQ ID NO: 1322241 - RNA, 19 nt, Homo sapiens
  misc_RNA (1)...(19): siRNA sense strand
caucgcccaugcaucaaca

SEQ ID NO: 1322242 - RNA, 19 nt, Homo sapiens
  misc_RNA (1)...(19): siRNA sense strand
ugcagauacuucaguggaa

SEQ ID NO: 1322243 - RNA, 19 nt, Homo sapiens
  misc_RNA (1)...(19): siRNA sense strand
ggaauuagugaagccaaag

SEQ ID NO: 1322244 - RNA, 19 nt, Homo sapiens
  misc_RNA (1)...(19): siRNA sense strand
gauggagcagcgauguuug

SEQ ID NO: 1322245 - RNA, 19 nt, Homo sapiens
  misc_RNA (1)...(19): siRNA sense strand
uggcagugauguccuggau

SEQ ID NO: 1322246 - RNA, 19 nt, Homo sapiens
  misc_RNA (1)...(19): siRNA sense strand
ugaagccaaagcugauaaa

SEQ ID NO: 1322247 - RNA, 19 nt, Homo sapiens
  misc_RNA (1)...(19): siRNA sense strand
uggcaguggcugagaggua

SEQ ID NO: 1322248 - RNA, 19 nt, Homo sapiens
  misc_RNA (1)...(19): siRNA sense strand
aaucacuaaucagguggua

SEQ ID NO: 1322249 - RNA, 19 nt, Homo sapiens
  misc_RNA (1)...(19): siRNA sense strand
gggucgaggugagcuuuca

SEQ ID NO: 1322250 - RNA, 19 nt, Homo sapiens
  misc_RNA (1)...(19): siRNA sense strand
guaugcacugcuuauugua

SEQ ID NO: 1322251 - RNA, 19 nt, Homo sapiens
  misc_RNA (1)...(19): siRNA sense strand
ccagcuccuuuaucaagca

SEQ ID NO: 1322252 - RNA, 19 nt, Homo sapiens
  misc_RNA (1)...(19): siRNA sense strand
gcaaaugcagauacuucag

SEQ ID NO: 1322253 - RNA, 19 nt, Homo sapiens
  misc_RNA (1)...(19): siRNA sense strand
aguggaagaagaaagcuuu

SEQ ID NO: 1322254 - RNA, 19 nt, Homo sapiens
  misc_RNA (1)...(19): siRNA sense strand
caacgaugugaagaaauug

SEQ ID NO: 1322255 - RNA, 19 nt, Homo sapiens
  misc_RNA (1)...(19): siRNA sense strand
augcacugcuuauuguaga

SEQ ID NO: 1322256 - RNA, 19 nt, Homo sapiens
  misc_RNA (1)...(19): siRNA sense strand
gcacauaccugcgcucaac

SEQ ID NO: 1322257 - RNA, 19 nt, Homo sapiens
  misc_RNA (1)...(19): siRNA sense strand
gaagaaggcagcugaguac

SEQ ID NO: 1322258 - RNA, 19 nt, Homo sapiens
  misc_RNA (1)...(19): siRNA sense strand
caaaguaaccgcgcaguuc

SEQ ID NO: 1322259 - RNA, 19 nt, Homo sapiens
  misc_RNA (1)...(19): siRNA sense strand
ggcccuggaucuccucuuu

SEQ ID NO: 1322260 - RNA, 19 nt, Homo sapiens
  misc_RNA (1)...(19): siRNA sense strand
ggacccagaggaugucaaa

SEQ ID NO: 1322261 - RNA, 19 nt, Homo sapiens
  misc_RNA (1)...(19): siRNA sense strand
cuacaccgaguacaaagua

SEQ ID NO: 1322262 - RNA, 19 nt, Homo sapiens
  misc_RNA (1)...(19): siRNA sense strand
ucgcuucacugugcacaua

SEQ ID NO: 1322263 - RNA, 19 nt, Homo sapiens
  misc_RNA (1)...(19): siRNA sense strand
cccuggaucuccucuuuaa

SEQ ID NO: 1322264 - RNA, 19 nt, Homo sapiens
  misc_RNA (1)...(19): siRNA sense strand
agaagaaggcagcugagua

SEQ ID NO: 1322265 - RNA, 19 nt, Homo sapiens
  misc_RNA (1)...(19): siRNA sense strand
aggaaggugugaagaagaa

SEQ ID NO: 1322266 - RNA, 19 nt, Homo sapiens
  misc_RNA (1)...(19): siRNA sense strand
ccgcgcaguucaucucaaa

SEQ ID NO: 1322267 - RNA, 19 nt, Homo sapiens
  misc_RNA (1)...(19): siRNA sense strand
ccagguguuuggccgguuu

SEQ ID NO: 1322268 - RNA, 19 nt, Homo sapiens
  misc_RNA (1)...(19): siRNA sense strand
ccaggaaggugugaagaag

SEQ ID NO: 1322269 - RNA, 19 nt, Homo sapiens
  misc_RNA (1)...(19): siRNA sense strand
gcgcaguucaucucaaaga

SEQ ID NO: 1322270 - RNA, 19 nt, Homo sapiens
  misc_RNA (1)...(19): siRNA sense strand
gggcuacaccgaguacaaa

SEQ ID NO: 1322271 - RNA, 19 nt, Homo sapiens
  misc_RNA (1)...(19): siRNA sense strand
aggcugagcuugcccucuu

SEQ ID NO: 1322272 - RNA, 19 nt, Homo sapiens
  misc_RNA (1)...(19): siRNA sense strand
aaagaaggacccagaggau

SEQ ID NO: 1322273 - RNA, 19 nt, Homo sapiens
  misc_RNA (1)...(19): siRNA sense strand
gccaggaaggugugaagaa

SEQ ID NO: 1322274 - RNA, 19 nt, Homo sapiens
  misc_RNA (1)...(19): siRNA sense strand
aaaguaaccgcgcaguuca

SEQ ID NO: 1322275 - RNA, 19 nt, Homo sapiens
  misc_RNA (1)...(19): siRNA sense strand
gcccuggaucuccucuuua

SEQ ID NO: 1322276 - RNA, 19 nt, Homo sapiens
  misc_RNA (1)...(19): siRNA sense strand
uaccugcgcucaacaacag

SEQ ID NO: 1322277 - RNA, 19 nt, Homo sapiens
  misc_RNA (1)...(19): siRNA sense strand
agaaggacccagaggaugu

SEQ ID NO: 1322278 - RNA, 19 nt, Homo sapiens
  misc_RNA (1)...(19): siRNA sense strand
gcaguucaucucaaagaag

SEQ ID NO: 1322279 - RNA, 19 nt, Homo sapiens
  misc_RNA (1)...(19): siRNA sense strand
guuugaagccucagugauc

SEQ ID NO: 1322280 - RNA, 19 nt, Homo sapiens
  misc_RNA (1)...(19): siRNA sense strand
aagaggugguggucuggaa

SEQ ID NO: 1322281 - RNA, 19 nt, Homo sapiens
  misc_RNA (1)...(19): siRNA sense strand
ggaccugcuucgcuucacu

SEQ ID NO: 1322282 - RNA, 19 nt, Homo sapiens
  misc_RNA (1)...(19): siRNA sense strand
cgcaguucaucucaaagaa

SEQ ID NO: 1322283 - RNA, 19 nt, Homo sapiens
  misc_RNA (1)...(19): siRNA sense strand
ccaagggcuacaccgagua

SEQ ID NO: 1322284 - RNA, 19 nt, Homo sapiens
  misc_RNA (1)...(19): siRNA sense strand
cccagaggaugucaaagag

SEQ ID NO: 1322285 - RNA, 19 nt, Homo sapiens
  misc_RNA (1)...(19): siRNA sense strand
gaagcgggcagaggagauc

SEQ ID NO: 1322286 - RNA, 19 nt, Homo sapiens
  misc_RNA (1)...(19): siRNA sense strand
acccagaggaugucaaaga

SEQ ID NO: 1322287 - RNA, 19 nt, Homo sapiens
  misc_RNA (1)...(19): siRNA sense strand
gaaggacccagaggauguc

SEQ ID NO: 1322288 - RNA, 19 nt, Homo sapiens
  misc_RNA (1)...(19): siRNA sense strand
caggaaggugugaagaaga

SEQ ID NO: 1322289 - RNA, 19 nt, Homo sapiens
  misc_RNA (1)...(19): siRNA sense strand
ccagggaccuacacauccu

SEQ ID NO: 1322290 - RNA, 19 nt, Homo sapiens
  misc_RNA (1)...(19): siRNA sense strand
acaaaguaaccgcgcaguu

SEQ ID NO: 1322291 - RNA, 19 nt, Homo sapiens
  misc_RNA (1)...(19): siRNA sense strand
gcacauaccugcgcucaac

SEQ ID NO: 1322292 - RNA, 19 nt, Homo sapiens
  misc_RNA (1)...(19): siRNA sense strand
gaagaaggcagcugaguac

SEQ ID NO: 1322293 - RNA, 19 nt, Homo sapiens
  misc_RNA (1)...(19): siRNA sense strand
caaaguaaccgcgcaguuc

SEQ ID NO: 1322294 - RNA, 19 nt, Homo sapiens
  misc_RNA (1)...(19): siRNA sense strand
ggcccuggaucuccucuuu

SEQ ID NO: 1322295 - RNA, 19 nt, Homo sapiens
  misc_RNA (1)...(19): siRNA sense strand
ggacccagaggaugucaaa

SEQ ID NO: 1322296 - RNA, 19 nt, Homo sapiens
  misc_RNA (1)...(19): siRNA sense strand
cuacaccgaguacaaagua

SEQ ID NO: 1322297 - RNA, 19 nt, Homo sapiens
  misc_RNA (1)...(19): siRNA sense strand
ucgcuucacugugcacaua

SEQ ID NO: 1322298 - RNA, 19 nt, Homo sapiens
  misc_RNA (1)...(19): siRNA sense strand
cccuggaucuccucuuuaa

SEQ ID NO: 1322299 - RNA, 19 nt, Homo sapiens
  misc_RNA (1)...(19): siRNA sense strand
agaagaaggcagcugagua

SEQ ID NO: 1322300 - RNA, 19 nt, Homo sapiens
  misc_RNA (1)...(19): siRNA sense strand
aggaaggugugaagaagaa

SEQ ID NO: 1322301 - RNA, 19 nt, Homo sapiens
  misc_RNA (1)...(19): siRNA sense strand
ccgcgcaguucaucucaaa

SEQ ID NO: 1322302 - RNA, 19 nt, Homo sapiens
  misc_RNA (1)...(19): siRNA sense strand
ccagguguuuggccgguuu

SEQ ID NO: 1322303 - RNA, 19 nt, Homo sapiens
  misc_RNA (1)...(19): siRNA sense strand
ccaggaaggugugaagaag

SEQ ID NO: 1322304 - RNA, 19 nt, Homo sapiens
  misc_RNA (1)...(19): siRNA sense strand
gcgcaguucaucucaaaga

SEQ ID NO: 1322305 - RNA, 19 nt, Homo sapiens
  misc_RNA (1)...(19): siRNA sense strand
gggcuacaccgaguacaaa

SEQ ID NO: 1322306 - RNA, 19 nt, Homo sapiens
  misc_RNA (1)...(19): siRNA sense strand
aggcugagcuugcccucuu

SEQ ID NO: 1322307 - RNA, 19 nt, Homo sapiens
  misc_RNA (1)...(19): siRNA sense strand
aaagaaggacccagaggau

SEQ ID NO: 1322308 - RNA, 19 nt, Homo sapiens
  misc_RNA (1)...(19): siRNA sense strand
gccaggaaggugugaagaa

SEQ ID NO: 1322309 - RNA, 19 nt, Homo sapiens
  misc_RNA (1)...(19): siRNA sense strand
aaaguaaccgcgcaguuca

SEQ ID NO: 1322310 - RNA, 19 nt, Homo sapiens
  misc_RNA (1)...(19): siRNA sense strand
gcccuggaucuccucuuua

SEQ ID NO: 1322311 - RNA, 19 nt, Homo sapiens
  misc_RNA (1)...(19): siRNA sense strand
uaccugcgcucaacaacag

SEQ ID NO: 1322312 - RNA, 19 nt, Homo sapiens
  misc_RNA (1)...(19): siRNA sense strand
agaaggacccagaggaugu

SEQ ID NO: 1322313 - RNA, 19 nt, Homo sapiens
  misc_RNA (1)...(19): siRNA sense strand
gcaguucaucucaaagaag

SEQ ID NO: 1322314 - RNA, 19 nt, Homo sapiens
  misc_RNA (1)...(19): siRNA sense strand
guuugaagccucagugauc

SEQ ID NO: 1322315 - RNA, 19 nt, Homo sapiens
  misc_RNA (1)...(19): siRNA sense strand
aagaggugguggucuggaa

SEQ ID NO: 1322316 - RNA, 19 nt, Homo sapiens
  misc_RNA (1)...(19): siRNA sense strand
ggaccugcuucgcuucacu

SEQ ID NO: 1322317 - RNA, 19 nt, Homo sapiens
  misc_RNA (1)...(19): siRNA sense strand
cgcaguucaucucaaagaa

SEQ ID NO: 1322318 - RNA, 19 nt, Homo sapiens
  misc_RNA (1)...(19): siRNA sense strand
ccaagggcuacaccgagua

SEQ ID NO: 1322319 - RNA, 19 nt, Homo sapiens
  misc_RNA (1)...(19): siRNA sense strand
cccagaggaugucaaagag

SEQ ID NO: 1322320 - RNA, 19 nt, Homo sapiens
  misc_RNA (1)...(19): siRNA sense strand
gaagcgggcagaggagauc

SEQ ID NO: 1322321 - RNA, 19 nt, Homo sapiens
  misc_RNA (1)...(19): siRNA sense strand
acccagaggaugucaaaga

SEQ ID NO: 1322322 - RNA, 19 nt, Homo sapiens
  misc_RNA (1)...(19): siRNA sense strand
gaaggacccagaggauguc

SEQ ID NO: 1322323 - RNA, 19 nt, Homo sapiens
  misc_RNA (1)...(19): siRNA sense strand
caggaaggugugaagaaga

SEQ ID NO: 1322324 - RNA, 19 nt, Homo sapiens
  misc_RNA (1)...(19): siRNA sense strand
ccagggaccuacacauccu

SEQ ID NO: 1322325 - RNA, 19 nt, Homo sapiens
  misc_RNA (1)...(19): siRNA sense strand
acaaaguaaccgcgcaguu

SEQ ID NO: 1322326 - RNA, 19 nt, Homo sapiens
  misc_RNA (1)...(19): siRNA sense strand
cggaugagcuggucaacua

SEQ ID NO: 1322327 - RNA, 19 nt, Homo sapiens
  misc_RNA (1)...(19): siRNA sense strand
ggucaacuaugucaacaaa

SEQ ID NO: 1322328 - RNA, 19 nt, Homo sapiens
  misc_RNA (1)...(19): siRNA sense strand
gacaauggcuucuuuaaaa

SEQ ID NO: 1322329 - RNA, 19 nt, Homo sapiens
  misc_RNA (1)...(19): siRNA sense strand
gcuuggaacuucuggacaa

SEQ ID NO: 1322330 - RNA, 19 nt, Homo sapiens
  misc_RNA (1)...(19): siRNA sense strand
ugacaauggcuucuuuaaa

SEQ ID NO: 1322331 - RNA, 19 nt, Homo sapiens
  misc_RNA (1)...(19): siRNA sense strand
gggugacaauggcuucuuu

SEQ ID NO: 1322332 - RNA, 19 nt, Homo sapiens
  misc_RNA (1)...(19): siRNA sense strand
ggacaagcacuacggauac

SEQ ID NO: 1322333 - RNA, 19 nt, Homo sapiens
  misc_RNA (1)...(19): siRNA sense strand
ggaucacuguggaaucgaa

SEQ ID NO: 1322334 - RNA, 19 nt, Homo sapiens
  misc_RNA (1)...(19): siRNA sense strand
uugaagaggcuauguggua

SEQ ID NO: 1322335 - RNA, 19 nt, Homo sapiens
  misc_RNA (1)...(19): siRNA sense strand
ggagcuuucucuguguauu

SEQ ID NO: 1322336 - RNA, 19 nt, Homo sapiens
  misc_RNA (1)...(19): siRNA sense strand
acaaacaggacaagcacua

SEQ ID NO: 1322337 - RNA, 19 nt, Homo sapiens
  misc_RNA (1)...(19): siRNA sense strand
ggaacaauggccacagugu

SEQ ID NO: 1322338 - RNA, 19 nt, Homo sapiens
  misc_RNA (1)...(19): siRNA sense strand
cagaagugguggcuggaau

SEQ ID NO: 1322339 - RNA, 19 nt, Homo sapiens
  misc_RNA (1)...(19): siRNA sense strand
gagggagcuuucucugugu

SEQ ID NO: 1322340 - RNA, 19 nt, Homo sapiens
  misc_RNA (1)...(19): siRNA sense strand
gagcaggcccucuuuccau

SEQ ID NO: 1322341 - RNA, 19 nt, Homo sapiens
  misc_RNA (1)...(19): siRNA sense strand
gacaagcacuacggauaca

SEQ ID NO: 1322342 - RNA, 19 nt, Homo sapiens
  misc_RNA (1)...(19): siRNA sense strand
ggugacaauggcuucuuua

SEQ ID NO: 1322343 - RNA, 19 nt, Homo sapiens
  misc_RNA (1)...(19): siRNA sense strand
ucaacuaugucaacaaacg

SEQ ID NO: 1322344 - RNA, 19 nt, Homo sapiens
  misc_RNA (1)...(19): siRNA sense strand
gugacaauggcuucuuuaa

SEQ ID NO: 1322345 - RNA, 19 nt, Homo sapiens
  misc_RNA (1)...(19): siRNA sense strand
gaucaguacugggaaaaga

SEQ ID NO: 1322346 - RNA, 19 nt, Homo sapiens
  misc_RNA (1)...(19): siRNA sense strand
gagcuggucaacuauguca

SEQ ID NO: 1322347 - RNA, 19 nt, Homo sapiens
  misc_RNA (1)...(19): siRNA sense strand
gaagugguggcuggaauuc

SEQ ID NO: 1322348 - RNA, 19 nt, Homo sapiens
  misc_RNA (1)...(19): siRNA sense strand
gagaauggcacacccuacu

SEQ ID NO: 1322349 - RNA, 19 nt, Homo sapiens
  misc_RNA (1)...(19): siRNA sense strand
cuacagcccgaccuacaaa

SEQ ID NO: 1322350 - RNA, 19 nt, Homo sapiens
  misc_RNA (1)...(19): siRNA sense strand
gaauuccacgcaccgauca

SEQ ID NO: 1322351 - RNA, 19 nt, Homo sapiens
  misc_RNA (1)...(19): siRNA sense strand
gaccugaagcugccugcaa

SEQ ID NO: 1322352 - RNA, 19 nt, Homo sapiens
  misc_RNA (1)...(19): siRNA sense strand
gagcuuucucuguguauuc

SEQ ID NO: 1322353 - RNA, 19 nt, Homo sapiens
  misc_RNA (1)...(19): siRNA sense strand
ggacaucauggccgagauc

SEQ ID NO: 1322354 - RNA, 19 nt, Homo sapiens
  misc_RNA (1)...(19): siRNA sense strand
uaugucaacaaacggaaua

SEQ ID NO: 1322355 - RNA, 19 nt, Homo sapiens
  misc_RNA (1)...(19): siRNA sense strand
gcuacagcccgaccuacaa

SEQ ID NO: 1322356 - RNA, 19 nt, Homo sapiens
  misc_RNA (1)...(19): siRNA sense strand
acacgucaccggagagaug

SEQ ID NO: 1322357 - RNA, 19 nt, Homo sapiens
  misc_RNA (1)...(19): siRNA sense strand
aggacaagcacuacggaua

SEQ ID NO: 1322358 - RNA, 19 nt, Homo sapiens
  misc_RNA (1)...(19): siRNA sense strand
caggaucacuguggaaucg

SEQ ID NO: 1322359 - RNA, 19 nt, Homo sapiens
  misc_RNA (1)...(19): siRNA sense strand
caucauggccgagaucuac

SEQ ID NO: 1322360 - RNA, 19 nt, Homo sapiens
  misc_RNA (1)...(19): siRNA sense strand
gaugagcuggucaacuaug

SEQ ID NO: 1322361 - RNA, 19 nt, Homo sapiens
  misc_RNA (1)...(19): siRNA sense strand
ccacagugucccaccauca

SEQ ID NO: 1322362 - RNA, 19 nt, Homo sapiens
  misc_RNA (1)...(19): siRNA sense strand
caacacgucaccggagaga

SEQ ID NO: 1322363 - RNA, 19 nt, Homo sapiens
  misc_RNA (1)...(19): siRNA sense strand
caagcacuacggauacaau

SEQ ID NO: 1322364 - RNA, 19 nt, Homo sapiens
  misc_RNA (1)...(19): siRNA sense strand
agucaggaguguaccaaca

SEQ ID NO: 1322365 - RNA, 19 nt, Homo sapiens
  misc_RNA (1)...(19): siRNA sense strand
cggacuuccugcucuacaa

SEQ ID NO: 1322366 - RNA, 19 nt, Homo sapiens
  misc_RNA (1)...(19): siRNA sense strand
gaucugcauccacaccaau

SEQ ID NO: 1322367 - RNA, 19 nt, Homo sapiens
  misc_RNA (1)...(19): siRNA sense strand
uggaaucgaaucagaagug

SEQ ID NO: 1322368 - RNA, 19 nt, Homo sapiens
  misc_RNA (1)...(19): siRNA sense strand
ggagcaggcccucuuucca

SEQ ID NO: 1322369 - RNA, 19 nt, Homo sapiens
  misc_RNA (1)...(19): siRNA sense strand
cgggaacaauggccacagu

SEQ ID NO: 1322370 - RNA, 19 nt, Homo sapiens
  misc_RNA (1)...(19): siRNA sense strand
agaagugguggcuggaauu

SEQ ID NO: 1322371 - RNA, 19 nt, Homo sapiens
  misc_RNA (1)...(19): siRNA sense strand
ggacuuccugcucuacaag

SEQ ID NO: 1322372 - RNA, 19 nt, Homo sapiens
  misc_RNA (1)...(19): siRNA sense strand
gguuucugguggccucuau

SEQ ID NO: 1322373 - RNA, 19 nt, Homo sapiens
  misc_RNA (1)...(19): siRNA sense strand
acuguggaaucgaaucaga

SEQ ID NO: 1322374 - RNA, 19 nt, Homo sapiens
  misc_RNA (1)...(19): siRNA sense strand
cggcuguaaugguggcuau

SEQ ID NO: 1322375 - RNA, 19 nt, Homo sapiens
  misc_RNA (1)...(19): siRNA sense strand
ggaugagcuggucaacuau

SEQ ID NO: 1322376 - RNA, 19 nt, Homo sapiens
  misc_RNA (1)...(19): siRNA sense strand
agggagcuuucucugugua

SEQ ID NO: 1322377 - RNA, 19 nt, Homo sapiens
  misc_RNA (1)...(19): siRNA sense strand
cccagagaguuauguuuac

SEQ ID NO: 1322378 - RNA, 19 nt, Homo sapiens
  misc_RNA (1)...(19): siRNA sense strand
ccucuaugaaucccaugua

SEQ ID NO: 1322379 - RNA, 19 nt, Homo sapiens
  misc_RNA (1)...(19): siRNA sense strand
cugguggccucuaugaauc

SEQ ID NO: 1322380 - RNA, 19 nt, Homo sapiens
  misc_RNA (1)...(19): siRNA sense strand
ucugguggccucuaugaau

SEQ ID NO: 1322381 - RNA, 19 nt, Homo sapiens
  misc_RNA (1)...(19): siRNA sense strand
cggaugagcuggucaacua

SEQ ID NO: 1322382 - RNA, 19 nt, Homo sapiens
  misc_RNA (1)...(19): siRNA sense strand
ggucaacuaugucaacaaa

SEQ ID NO: 1322383 - RNA, 19 nt, Homo sapiens
  misc_RNA (1)...(19): siRNA sense strand
gacaauggcuucuuuaaaa

SEQ ID NO: 1322384 - RNA, 19 nt, Homo sapiens
  misc_RNA (1)...(19): siRNA sense strand
gcuuggaacuucuggacaa

SEQ ID NO: 1322385 - RNA, 19 nt, Homo sapiens
  misc_RNA (1)...(19): siRNA sense strand
ugacaauggcuucuuuaaa

SEQ ID NO: 1322386 - RNA, 19 nt, Homo sapiens
  misc_RNA (1)...(19): siRNA sense strand
gggugacaauggcuucuuu

SEQ ID NO: 1322387 - RNA, 19 nt, Homo sapiens
  misc_RNA (1)...(19): siRNA sense strand
ggacaagcacuacggauac

SEQ ID NO: 1322388 - RNA, 19 nt, Homo sapiens
  misc_RNA (1)...(19): siRNA sense strand
ggaucacuguggaaucgaa

SEQ ID NO: 1322389 - RNA, 19 nt, Homo sapiens
  misc_RNA (1)...(19): siRNA sense strand
uugaagaggcuauguggua

SEQ ID NO: 1322390 - RNA, 19 nt, Homo sapiens
  misc_RNA (1)...(19): siRNA sense strand
ggagcuuucucuguguauu

SEQ ID NO: 1322391 - RNA, 19 nt, Homo sapiens
  misc_RNA (1)...(19): siRNA sense strand
acaaacaggacaagcacua

SEQ ID NO: 1322392 - RNA, 19 nt, Homo sapiens
  misc_RNA (1)...(19): siRNA sense strand
ggaacaauggccacagugu

SEQ ID NO: 1322393 - RNA, 19 nt, Homo sapiens
  misc_RNA (1)...(19): siRNA sense strand
cagaagugguggcuggaau

SEQ ID NO: 1322394 - RNA, 19 nt, Homo sapiens
  misc_RNA (1)...(19): siRNA sense strand
gagggagcuuucucugugu

SEQ ID NO: 1322395 - RNA, 19 nt, Homo sapiens
  misc_RNA (1)...(19): siRNA sense strand
gagcaggcccucuuuccau

SEQ ID NO: 1322396 - RNA, 19 nt, Homo sapiens
  misc_RNA (1)...(19): siRNA sense strand
gacaagcacuacggauaca

SEQ ID NO: 1322397 - RNA, 19 nt, Homo sapiens
  misc_RNA (1)...(19): siRNA sense strand
ggugacaauggcuucuuua

SEQ ID NO: 1322398 - RNA, 19 nt, Homo sapiens
  misc_RNA (1)...(19): siRNA sense strand
ucaacuaugucaacaaacg

SEQ ID NO: 1322399 - RNA, 19 nt, Homo sapiens
  misc_RNA (1)...(19): siRNA sense strand
gugacaauggcuucuuuaa

SEQ ID NO: 1322400 - RNA, 19 nt, Homo sapiens
  misc_RNA (1)...(19): siRNA sense strand
gaucaguacugggaaaaga

SEQ ID NO: 1322401 - RNA, 19 nt, Homo sapiens
  misc_RNA (1)...(19): siRNA sense strand
gagcuggucaacuauguca

SEQ ID NO: 1322402 - RNA, 19 nt, Homo sapiens
  misc_RNA (1)...(19): siRNA sense strand
gaagugguggcuggaauuc

SEQ ID NO: 1322403 - RNA, 19 nt, Homo sapiens
  misc_RNA (1)...(19): siRNA sense strand
gagaauggcacacccuacu

SEQ ID NO: 1322404 - RNA, 19 nt, Homo sapiens
  misc_RNA (1)...(19): siRNA sense strand
cuacagcccgaccuacaaa

SEQ ID NO: 1322405 - RNA, 19 nt, Homo sapiens
  misc_RNA (1)...(19): siRNA sense strand
gaauuccacgcaccgauca

SEQ ID NO: 1322406 - RNA, 19 nt, Homo sapiens
  misc_RNA (1)...(19): siRNA sense strand
gaccugaagcugccugcaa

SEQ ID NO: 1322407 - RNA, 19 nt, Homo sapiens
  misc_RNA (1)...(19): siRNA sense strand
gagcuuucucuguguauuc

SEQ ID NO: 1322408 - RNA, 19 nt, Homo sapiens
  misc_RNA (1)...(19): siRNA sense strand
ggacaucauggccgagauc

SEQ ID NO: 1322409 - RNA, 19 nt, Homo sapiens
  misc_RNA (1)...(19): siRNA sense strand
uaugucaacaaacggaaua

SEQ ID NO: 1322410 - RNA, 19 nt, Homo sapiens
  misc_RNA (1)...(19): siRNA sense strand
gcuacagcccgaccuacaa

SEQ ID NO: 1322411 - RNA, 19 nt, Homo sapiens
  misc_RNA (1)...(19): siRNA sense strand
acacgucaccggagagaug

SEQ ID NO: 1322412 - RNA, 19 nt, Homo sapiens
  misc_RNA (1)...(19): siRNA sense strand
aggacaagcacuacggaua

SEQ ID NO: 1322413 - RNA, 19 nt, Homo sapiens
  misc_RNA (1)...(19): siRNA sense strand
caggaucacuguggaaucg

SEQ ID NO: 1322414 - RNA, 19 nt, Homo sapiens
  misc_RNA (1)...(19): siRNA sense strand
caucauggccgagaucuac

SEQ ID NO: 1322415 - RNA, 19 nt, Homo sapiens
  misc_RNA (1)...(19): siRNA sense strand
gaugagcuggucaacuaug

SEQ ID NO: 1322416 - RNA, 19 nt, Homo sapiens
  misc_RNA (1)...(19): siRNA sense strand
ccacagugucccaccauca

SEQ ID NO: 1322417 - RNA, 19 nt, Homo sapiens
  misc_RNA (1)...(19): siRNA sense strand
caacacgucaccggagaga

SEQ ID NO: 1322418 - RNA, 19 nt, Homo sapiens
  misc_RNA (1)...(19): siRNA sense strand
caagcacuacggauacaau

SEQ ID NO: 1322419 - RNA, 19 nt, Homo sapiens
  misc_RNA (1)...(19): siRNA sense strand
agucaggaguguaccaaca

SEQ ID NO: 1322420 - RNA, 19 nt, Homo sapiens
  misc_RNA (1)...(19): siRNA sense strand
cggacuuccugcucuacaa

SEQ ID NO: 1322421 - RNA, 19 nt, Homo sapiens
  misc_RNA (1)...(19): siRNA sense strand
gaucugcauccacaccaau

SEQ ID NO: 1322422 - RNA, 19 nt, Homo sapiens
  misc_RNA (1)...(19): siRNA sense strand
uggaaucgaaucagaagug

SEQ ID NO: 1322423 - RNA, 19 nt, Homo sapiens
  misc_RNA (1)...(19): siRNA sense strand
ggagcaggcccucuuucca

SEQ ID NO: 1322424 - RNA, 19 nt, Homo sapiens
  misc_RNA (1)...(19): siRNA sense strand
cgggaacaauggccacagu

SEQ ID NO: 1322425 - RNA, 19 nt, Homo sapiens
  misc_RNA (1)...(19): siRNA sense strand
agaagugguggcuggaauu

SEQ ID NO: 1322426 - RNA, 19 nt, Homo sapiens
  misc_RNA (1)...(19): siRNA sense strand
ggacuuccugcucuacaag

SEQ ID NO: 1322427 - RNA, 19 nt, Homo sapiens
  misc_RNA (1)...(19): siRNA sense strand
gguuucugguggccucuau

SEQ ID NO: 1322428 - RNA, 19 nt, Homo sapiens
  misc_RNA (1)...(19): siRNA sense strand
acuguggaaucgaaucaga

SEQ ID NO: 1322429 - RNA, 19 nt, Homo sapiens
  misc_RNA (1)...(19): siRNA sense strand
cggcuguaaugguggcuau

SEQ ID NO: 1322430 - RNA, 19 nt, Homo sapiens
  misc_RNA (1)...(19): siRNA sense strand
ggaugagcuggucaacuau

SEQ ID NO: 1322431 - RNA, 19 nt, Homo sapiens
  misc_RNA (1)...(19): siRNA sense strand
agggagcuuucucugugua

SEQ ID NO: 1322432 - RNA, 19 nt, Homo sapiens
  misc_RNA (1)...(19): siRNA sense strand
cccagagaguuauguuuac

SEQ ID NO: 1322433 - RNA, 19 nt, Homo sapiens
  misc_RNA (1)...(19): siRNA sense strand
ccucuaugaaucccaugua

SEQ ID NO: 1322434 - RNA, 19 nt, Homo sapiens
  misc_RNA (1)...(19): siRNA sense strand
cugguggccucuaugaauc

SEQ ID NO: 1322435 - RNA, 19 nt, Homo sapiens
  misc_RNA (1)...(19): siRNA sense strand
ucugguggccucuaugaau

SEQ ID NO: 1322436 - RNA, 19 nt, Homo sapiens
  misc_RNA (1)...(19): siRNA sense strand
cggaugagcuggucaacua

SEQ ID NO: 1322437 - RNA, 19 nt, Homo sapiens
  misc_RNA (1)...(19): siRNA sense strand
ggucaacuaugucaacaaa

SEQ ID NO: 1322438 - RNA, 19 nt, Homo sapiens
  misc_RNA (1)...(19): siRNA sense strand
gacaauggcuucuuuaaaa

SEQ ID NO: 1322439 - RNA, 19 nt, Homo sapiens
  misc_RNA (1)...(19): siRNA sense strand
gcuuggaacuucuggacaa

SEQ ID NO: 1322440 - RNA, 19 nt, Homo sapiens
  misc_RNA (1)...(19): siRNA sense strand
ugacaauggcuucuuuaaa

SEQ ID NO: 1322441 - RNA, 19 nt, Homo sapiens
  misc_RNA (1)...(19): siRNA sense strand
gggugacaauggcuucuuu

SEQ ID NO: 1322442 - RNA, 19 nt, Homo sapiens
  misc_RNA (1)...(19): siRNA sense strand
ggacaagcacuacggauac

SEQ ID NO: 1322443 - RNA, 19 nt, Homo sapiens
  misc_RNA (1)...(19): siRNA sense strand
ggaucacuguggaaucgaa

SEQ ID NO: 1322444 - RNA, 19 nt, Homo sapiens
  misc_RNA (1)...(19): siRNA sense strand
uugaagaggcuauguggua

SEQ ID NO: 1322445 - RNA, 19 nt, Homo sapiens
  misc_RNA (1)...(19): siRNA sense strand
ggagcuuucucuguguauu

SEQ ID NO: 1322446 - RNA, 19 nt, Homo sapiens
  misc_RNA (1)...(19): siRNA sense strand
acaaacaggacaagcacua

SEQ ID NO: 1322447 - RNA, 19 nt, Homo sapiens
  misc_RNA (1)...(19): siRNA sense strand
ggaacaauggccacagugu

SEQ ID NO: 1322448 - RNA, 19 nt, Homo sapiens
  misc_RNA (1)...(19): siRNA sense strand
cagaagugguggcuggaau

SEQ ID NO: 1322449 - RNA, 19 nt, Homo sapiens
  misc_RNA (1)...(19): siRNA sense strand
gagggagcuuucucugugu

SEQ ID NO: 1322450 - RNA, 19 nt, Homo sapiens
  misc_RNA (1)...(19): siRNA sense strand
gagcaggcccucuuuccau

SEQ ID NO: 1322451 - RNA, 19 nt, Homo sapiens
  misc_RNA (1)...(19): siRNA sense strand
gacaagcacuacggauaca

SEQ ID NO: 1322452 - RNA, 19 nt, Homo sapiens
  misc_RNA (1)...(19): siRNA sense strand
ggugacaauggcuucuuua

SEQ ID NO: 1322453 - RNA, 19 nt, Homo sapiens
  misc_RNA (1)...(19): siRNA sense strand
ucaacuaugucaacaaacg

SEQ ID NO: 1322454 - RNA, 19 nt, Homo sapiens
  misc_RNA (1)...(19): siRNA sense strand
gugacaauggcuucuuuaa

SEQ ID NO: 1322455 - RNA, 19 nt, Homo sapiens
  misc_RNA (1)...(19): siRNA sense strand
gaucaguacugggaaaaga

SEQ ID NO: 1322456 - RNA, 19 nt, Homo sapiens
  misc_RNA (1)...(19): siRNA sense strand
gagcuggucaacuauguca

SEQ ID NO: 1322457 - RNA, 19 nt, Homo sapiens
  misc_RNA (1)...(19): siRNA sense strand
gaagugguggcuggaauuc

SEQ ID NO: 1322458 - RNA, 19 nt, Homo sapiens
  misc_RNA (1)...(19): siRNA sense strand
gagaauggcacacccuacu

SEQ ID NO: 1322459 - RNA, 19 nt, Homo sapiens
  misc_RNA (1)...(19): siRNA sense strand
cuacagcccgaccuacaaa

SEQ ID NO: 1322460 - RNA, 19 nt, Homo sapiens
  misc_RNA (1)...(19): siRNA sense strand
gaauuccacgcaccgauca

SEQ ID NO: 1322461 - RNA, 19 nt, Homo sapiens
  misc_RNA (1)...(19): siRNA sense strand
gaccugaagcugccugcaa

SEQ ID NO: 1322462 - RNA, 19 nt, Homo sapiens
  misc_RNA (1)...(19): siRNA sense strand
gagcuuucucuguguauuc

SEQ ID NO: 1322463 - RNA, 19 nt, Homo sapiens
  misc_RNA (1)...(19): siRNA sense strand
ggacaucauggccgagauc

SEQ ID NO: 1322464 - RNA, 19 nt, Homo sapiens
  misc_RNA (1)...(19): siRNA sense strand
uaugucaacaaacggaaua

SEQ ID NO: 1322465 - RNA, 19 nt, Homo sapiens
  misc_RNA (1)...(19): siRNA sense strand
gcuacagcccgaccuacaa

SEQ ID NO: 1322466 - RNA, 19 nt, Homo sapiens
  misc_RNA (1)...(19): siRNA sense strand
acacgucaccggagagaug

SEQ ID NO: 1322467 - RNA, 19 nt, Homo sapiens
  misc_RNA (1)...(19): siRNA sense strand
aggacaagcacuacggaua

SEQ ID NO: 1322468 - RNA, 19 nt, Homo sapiens
  misc_RNA (1)...(19): siRNA sense strand
caggaucacuguggaaucg

SEQ ID NO: 1322469 - RNA, 19 nt, Homo sapiens
  misc_RNA (1)...(19): siRNA sense strand
caucauggccgagaucuac

SEQ ID NO: 1322470 - RNA, 19 nt, Homo sapiens
  misc_RNA (1)...(19): siRNA sense strand
gaugagcuggucaacuaug

SEQ ID NO: 1322471 - RNA, 19 nt, Homo sapiens
  misc_RNA (1)...(19): siRNA sense strand
ccacagugucccaccauca

SEQ ID NO: 1322472 - RNA, 19 nt, Homo sapiens
  misc_RNA (1)...(19): siRNA sense strand
caacacgucaccggagaga

SEQ ID NO: 1322473 - RNA, 19 nt, Homo sapiens
  misc_RNA (1)...(19): siRNA sense strand
caagcacuacggauacaau

SEQ ID NO: 1322474 - RNA, 19 nt, Homo sapiens
  misc_RNA (1)...(19): siRNA sense strand
agucaggaguguaccaaca

SEQ ID NO: 1322475 - RNA, 19 nt, Homo sapiens
  misc_RNA (1)...(19): siRNA sense strand
cggacuuccugcucuacaa

SEQ ID NO: 1322476 - RNA, 19 nt, Homo sapiens
  misc_RNA (1)...(19): siRNA sense strand
gaucugcauccacaccaau

SEQ ID NO: 1322477 - RNA, 19 nt, Homo sapiens
  misc_RNA (1)...(19): siRNA sense strand
uggaaucgaaucagaagug

SEQ ID NO: 1322478 - RNA, 19 nt, Homo sapiens
  misc_RNA (1)...(19): siRNA sense strand
ggagcaggcccucuuucca

SEQ ID NO: 1322479 - RNA, 19 nt, Homo sapiens
  misc_RNA (1)...(19): siRNA sense strand
cgggaacaauggccacagu

SEQ ID NO: 1322480 - RNA, 19 nt, Homo sapiens
  misc_RNA (1)...(19): siRNA sense strand
agaagugguggcuggaauu

SEQ ID NO: 1322481 - RNA, 19 nt, Homo sapiens
  misc_RNA (1)...(19): siRNA sense strand
ggacuuccugcucuacaag

SEQ ID NO: 1322482 - RNA, 19 nt, Homo sapiens
  misc_RNA (1)...(19): siRNA sense strand
gguuucugguggccucuau

SEQ ID NO: 1322483 - RNA, 19 nt, Homo sapiens
  misc_RNA (1)...(19): siRNA sense strand
acuguggaaucgaaucaga

SEQ ID NO: 1322484 - RNA, 19 nt, Homo sapiens
  misc_RNA (1)...(19): siRNA sense strand
cggcuguaaugguggcuau

SEQ ID NO: 1322485 - RNA, 19 nt, Homo sapiens
  misc_RNA (1)...(19): siRNA sense strand
ggaugagcuggucaacuau

SEQ ID NO: 1322486 - RNA, 19 nt, Homo sapiens
  misc_RNA (1)...(19): siRNA sense strand
agggagcuuucucugugua

SEQ ID NO: 1322487 - RNA, 19 nt, Homo sapiens
  misc_RNA (1)...(19): siRNA sense strand
cccagagaguuauguuuac

SEQ ID NO: 1322488 - RNA, 19 nt, Homo sapiens
  misc_RNA (1)...(19): siRNA sense strand
ccucuaugaaucccaugua

SEQ ID NO: 1322489 - RNA, 19 nt, Homo sapiens
  misc_RNA (1)...(19): siRNA sense strand
cugguggccucuaugaauc

SEQ ID NO: 1322490 - RNA, 19 nt, Homo sapiens
  misc_RNA (1)...(19): siRNA sense strand
ucugguggccucuaugaau

SEQ ID NO: 1322491 - RNA, 19 nt, Homo sapiens
  misc_RNA (1)...(19): siRNA sense strand
cggaugagcuggucaacua

SEQ ID NO: 1322492 - RNA, 19 nt, Homo sapiens
  misc_RNA (1)...(19): siRNA sense strand
ggucaacuaugucaacaaa

SEQ ID NO: 1322493 - RNA, 19 nt, Homo sapiens
  misc_RNA (1)...(19): siRNA sense strand
gacaauggcuucuuuaaaa

SEQ ID NO: 1322494 - RNA, 19 nt, Homo sapiens
  misc_RNA (1)...(19): siRNA sense strand
gcuuggaacuucuggacaa

SEQ ID NO: 1322495 - RNA, 19 nt, Homo sapiens
  misc_RNA (1)...(19): siRNA sense strand
ugacaauggcuucuuuaaa

SEQ ID NO: 1322496 - RNA, 19 nt, Homo sapiens
  misc_RNA (1)...(19): siRNA sense strand
gggugacaauggcuucuuu

SEQ ID NO: 1322497 - RNA, 19 nt, Homo sapiens
  misc_RNA (1)...(19): siRNA sense strand
ggacaagcacuacggauac

SEQ ID NO: 1322498 - RNA, 19 nt, Homo sapiens
  misc_RNA (1)...(19): siRNA sense strand
ggaucacuguggaaucgaa

SEQ ID NO: 1322499 - RNA, 19 nt, Homo sapiens
  misc_RNA (1)...(19): siRNA sense strand
uugaagaggcuauguggua

SEQ ID NO: 1322500 - RNA, 19 nt, Homo sapiens
  misc_RNA (1)...(19): siRNA sense strand
ggagcuuucucuguguauu

SEQ ID NO: 1322501 - RNA, 19 nt, Homo sapiens
  misc_RNA (1)...(19): siRNA sense strand
acaaacaggacaagcacua

SEQ ID NO: 1322502 - RNA, 19 nt, Homo sapiens
  misc_RNA (1)...(19): siRNA sense strand
ggaacaauggccacagugu

SEQ ID NO: 1322503 - RNA, 19 nt, Homo sapiens
  misc_RNA (1)...(19): siRNA sense strand
cagaagugguggcuggaau

SEQ ID NO: 1322504 - RNA, 19 nt, Homo sapiens
  misc_RNA (1)...(19): siRNA sense strand
gagggagcuuucucugugu

SEQ ID NO: 1322505 - RNA, 19 nt, Homo sapiens
  misc_RNA (1)...(19): siRNA sense strand
gagcaggcccucuuuccau

SEQ ID NO: 1322506 - RNA, 19 nt, Homo sapiens
  misc_RNA (1)...(19): siRNA sense strand
gacaagcacuacggauaca

SEQ ID NO: 1322507 - RNA, 19 nt, Homo sapiens
  misc_RNA (1)...(19): siRNA sense strand
ggugacaauggcuucuuua

SEQ ID NO: 1322508 - RNA, 19 nt, Homo sapiens
  misc_RNA (1)...(19): siRNA sense strand
ucaacuaugucaacaaacg

SEQ ID NO: 1322509 - RNA, 19 nt, Homo sapiens
  misc_RNA (1)...(19): siRNA sense strand
gugacaauggcuucuuuaa

SEQ ID NO: 1322510 - RNA, 19 nt, Homo sapiens
  misc_RNA (1)...(19): siRNA sense strand
gaucaguacugggaaaaga

SEQ ID NO: 1322511 - RNA, 19 nt, Homo sapiens
  misc_RNA (1)...(19): siRNA sense strand
gagcuggucaacuauguca

SEQ ID NO: 1322512 - RNA, 19 nt, Homo sapiens
  misc_RNA (1)...(19): siRNA sense strand
gaagugguggcuggaauuc

SEQ ID NO: 1322513 - RNA, 19 nt, Homo sapiens
  misc_RNA (1)...(19): siRNA sense strand
gagaauggcacacccuacu

SEQ ID NO: 1322514 - RNA, 19 nt, Homo sapiens
  misc_RNA (1)...(19): siRNA sense strand
cuacagcccgaccuacaaa

SEQ ID NO: 1322515 - RNA, 19 nt, Homo sapiens
  misc_RNA (1)...(19): siRNA sense strand
gaauuccacgcaccgauca

SEQ ID NO: 1322516 - RNA, 19 nt, Homo sapiens
  misc_RNA (1)...(19): siRNA sense strand
gaccugaagcugccugcaa

SEQ ID NO: 1322517 - RNA, 19 nt, Homo sapiens
  misc_RNA (1)...(19): siRNA sense strand
gagcuuucucuguguauuc

SEQ ID NO: 1322518 - RNA, 19 nt, Homo sapiens
  misc_RNA (1)...(19): siRNA sense strand
ggacaucauggccgagauc

SEQ ID NO: 1322519 - RNA, 19 nt, Homo sapiens
  misc_RNA (1)...(19): siRNA sense strand
uaugucaacaaacggaaua

SEQ ID NO: 1322520 - RNA, 19 nt, Homo sapiens
  misc_RNA (1)...(19): siRNA sense strand
gcuacagcccgaccuacaa

SEQ ID NO: 1322521 - RNA, 19 nt, Homo sapiens
  misc_RNA (1)...(19): siRNA sense strand
acacgucaccggagagaug

SEQ ID NO: 1322522 - RNA, 19 nt, Homo sapiens
  misc_RNA (1)...(19): siRNA sense strand
aggacaagcacuacggaua

SEQ ID NO: 1322523 - RNA, 19 nt, Homo sapiens
  misc_RNA (1)...(19): siRNA sense strand
caggaucacuguggaaucg

SEQ ID NO: 1322524 - RNA, 19 nt, Homo sapiens
  misc_RNA (1)...(19): siRNA sense strand
caucauggccgagaucuac

SEQ ID NO: 1322525 - RNA, 19 nt, Homo sapiens
  misc_RNA (1)...(19): siRNA sense strand
gaugagcuggucaacuaug

SEQ ID NO: 1322526 - RNA, 19 nt, Homo sapiens
  misc_RNA (1)...(19): siRNA sense strand
ccacagugucccaccauca

SEQ ID NO: 1322527 - RNA, 19 nt, Homo sapiens
  misc_RNA (1)...(19): siRNA sense strand
caacacgucaccggagaga

SEQ ID NO: 1322528 - RNA, 19 nt, Homo sapiens
  misc_RNA (1)...(19): siRNA sense strand
caagcacuacggauacaau

SEQ ID NO: 1322529 - RNA, 19 nt, Homo sapiens
  misc_RNA (1)...(19): siRNA sense strand
agucaggaguguaccaaca

SEQ ID NO: 1322530 - RNA, 19 nt, Homo sapiens
  misc_RNA (1)...(19): siRNA sense strand
cggacuuccugcucuacaa

SEQ ID NO: 1322531 - RNA, 19 nt, Homo sapiens
  misc_RNA (1)...(19): siRNA sense strand
gaucugcauccacaccaau

SEQ ID NO: 1322532 - RNA, 19 nt, Homo sapiens
  misc_RNA (1)...(19): siRNA sense strand
uggaaucgaaucagaagug

SEQ ID NO: 1322533 - RNA, 19 nt, Homo sapiens
  misc_RNA (1)...(19): siRNA sense strand
ggagcaggcccucuuucca

SEQ ID NO: 1322534 - RNA, 19 nt, Homo sapiens
  misc_RNA (1)...(19): siRNA sense strand
cgggaacaauggccacagu

SEQ ID NO: 1322535 - RNA, 19 nt, Homo sapiens
  misc_RNA (1)...(19): siRNA sense strand
agaagugguggcuggaauu

SEQ ID NO: 1322536 - RNA, 19 nt, Homo sapiens
  misc_RNA (1)...(19): siRNA sense strand
ggacuuccugcucuacaag

SEQ ID NO: 1322537 - RNA, 19 nt, Homo sapiens
  misc_RNA (1)...(19): siRNA sense strand
gguuucugguggccucuau

SEQ ID NO: 1322538 - RNA, 19 nt, Homo sapiens
  misc_RNA (1)...(19): siRNA sense strand
acuguggaaucgaaucaga

SEQ ID NO: 1322539 - RNA, 19 nt, Homo sapiens
  misc_RNA (1)...(19): siRNA sense strand
cggcuguaaugguggcuau

SEQ ID NO: 1322540 - RNA, 19 nt, Homo sapiens
  misc_RNA (1)...(19): siRNA sense strand
ggaugagcuggucaacuau

SEQ ID NO: 1322541 - RNA, 19 nt, Homo sapiens
  misc_RNA (1)...(19): siRNA sense strand
agggagcuuucucugugua

SEQ ID NO: 1322542 - RNA, 19 nt, Homo sapiens
  misc_RNA (1)...(19): siRNA sense strand
cccagagaguuauguuuac

SEQ ID NO: 1322543 - RNA, 19 nt, Homo sapiens
  misc_RNA (1)...(19): siRNA sense strand
ccucuaugaaucccaugua

SEQ ID NO: 1322544 - RNA, 19 nt, Homo sapiens
  misc_RNA (1)...(19): siRNA sense strand
cugguggccucuaugaauc

SEQ ID NO: 1322545 - RNA, 19 nt, Homo sapiens
  misc_RNA (1)...(19): siRNA sense strand
ucugguggccucuaugaau

SEQ ID NO: 1322546 - RNA, 19 nt, Homo sapiens
  misc_RNA (1)...(19): siRNA sense strand
cggaugagcuggucaacua

SEQ ID NO: 1322547 - RNA, 19 nt, Homo sapiens
  misc_RNA (1)...(19): siRNA sense strand
ggucaacuaugucaacaaa

SEQ ID NO: 1322548 - RNA, 19 nt, Homo sapiens
  misc_RNA (1)...(19): siRNA sense strand
gacaauggcuucuuuaaaa

SEQ ID NO: 1322549 - RNA, 19 nt, Homo sapiens
  misc_RNA (1)...(19): siRNA sense strand
gcuuggaacuucuggacaa

SEQ ID NO: 1322550 - RNA, 19 nt, Homo sapiens
  misc_RNA (1)...(19): siRNA sense strand
ugacaauggcuucuuuaaa

SEQ ID NO: 1322551 - RNA, 19 nt, Homo sapiens
  misc_RNA (1)...(19): siRNA sense strand
gggugacaauggcuucuuu

SEQ ID NO: 1322552 - RNA, 19 nt, Homo sapiens
  misc_RNA (1)...(19): siRNA sense strand
ggacaagcacuacggauac

SEQ ID NO: 1322553 - RNA, 19 nt, Homo sapiens
  misc_RNA (1)...(19): siRNA sense strand
ggaucacuguggaaucgaa

SEQ ID NO: 1322554 - RNA, 19 nt, Homo sapiens
  misc_RNA (1)...(19): siRNA sense strand
uugaagaggcuauguggua

SEQ ID NO: 1322555 - RNA, 19 nt, Homo sapiens
  misc_RNA (1)...(19): siRNA sense strand
ggagcuuucucuguguauu

SEQ ID NO: 1322556 - RNA, 19 nt, Homo sapiens
  misc_RNA (1)...(19): siRNA sense strand
acaaacaggacaagcacua

SEQ ID NO: 1322557 - RNA, 19 nt, Homo sapiens
  misc_RNA (1)...(19): siRNA sense strand
ggaacaauggccacagugu

SEQ ID NO: 1322558 - RNA, 19 nt, Homo sapiens
  misc_RNA (1)...(19): siRNA sense strand
cagaagugguggcuggaau

SEQ ID NO: 1322559 - RNA, 19 nt, Homo sapiens
  misc_RNA (1)...(19): siRNA sense strand
gagggagcuuucucugugu

SEQ ID NO: 1322560 - RNA, 19 nt, Homo sapiens
  misc_RNA (1)...(19): siRNA sense strand
gagcaggcccucuuuccau

SEQ ID NO: 1322561 - RNA, 19 nt, Homo sapiens
  misc_RNA (1)...(19): siRNA sense strand
gacaagcacuacggauaca

SEQ ID NO: 1322562 - RNA, 19 nt, Homo sapiens
  misc_RNA (1)...(19): siRNA sense strand
ggugacaauggcuucuuua

SEQ ID NO: 1322563 - RNA, 19 nt, Homo sapiens
  misc_RNA (1)...(19): siRNA sense strand
ucaacuaugucaacaaacg

SEQ ID NO: 1322564 - RNA, 19 nt, Homo sapiens
  misc_RNA (1)...(19): siRNA sense strand
gugacaauggcuucuuuaa

SEQ ID NO: 1322565 - RNA, 19 nt, Homo sapiens
  misc_RNA (1)...(19): siRNA sense strand
gaucaguacugggaaaaga

SEQ ID NO: 1322566 - RNA, 19 nt, Homo sapiens
  misc_RNA (1)...(19): siRNA sense strand
gagcuggucaacuauguca

SEQ ID NO: 1322567 - RNA, 19 nt, Homo sapiens
  misc_RNA (1)...(19): siRNA sense strand
gaagugguggcuggaauuc

SEQ ID NO: 1322568 - RNA, 19 nt, Homo sapiens
  misc_RNA (1)...(19): siRNA sense strand
gagaauggcacacccuacu

SEQ ID NO: 1322569 - RNA, 19 nt, Homo sapiens
  misc_RNA (1)...(19): siRNA sense strand
cuacagcccgaccuacaaa

SEQ ID NO: 1322570 - RNA, 19 nt, Homo sapiens
  misc_RNA (1)...(19): siRNA sense strand
gaauuccacgcaccgauca

SEQ ID NO: 1322571 - RNA, 19 nt, Homo sapiens
  misc_RNA (1)...(19): siRNA sense strand
gaccugaagcugccugcaa

SEQ ID NO: 1322572 - RNA, 19 nt, Homo sapiens
  misc_RNA (1)...(19): siRNA sense strand
gagcuuucucuguguauuc

SEQ ID NO: 1322573 - RNA, 19 nt, Homo sapiens
  misc_RNA (1)...(19): siRNA sense strand
ggacaucauggccgagauc

SEQ ID NO: 1322574 - RNA, 19 nt, Homo sapiens
  misc_RNA (1)...(19): siRNA sense strand
uaugucaacaaacggaaua

SEQ ID NO: 1322575 - RNA, 19 nt, Homo sapiens
  misc_RNA (1)...(19): siRNA sense strand
gcuacagcccgaccuacaa

SEQ ID NO: 1322576 - RNA, 19 nt, Homo sapiens
  misc_RNA (1)...(19): siRNA sense strand
acacgucaccggagagaug

SEQ ID NO: 1322577 - RNA, 19 nt, Homo sapiens
  misc_RNA (1)...(19): siRNA sense strand
aggacaagcacuacggaua

SEQ ID NO: 1322578 - RNA, 19 nt, Homo sapiens
  misc_RNA (1)...(19): siRNA sense strand
caggaucacuguggaaucg

SEQ ID NO: 1322579 - RNA, 19 nt, Homo sapiens
  misc_RNA (1)...(19): siRNA sense strand
caucauggccgagaucuac

SEQ ID NO: 1322580 - RNA, 19 nt, Homo sapiens
  misc_RNA (1)...(19): siRNA sense strand
gaugagcuggucaacuaug

SEQ ID NO: 1322581 - RNA, 19 nt, Homo sapiens
  misc_RNA (1)...(19): siRNA sense strand
ccacagugucccaccauca

SEQ ID NO: 1322582 - RNA, 19 nt, Homo sapiens
  misc_RNA (1)...(19): siRNA sense strand
caacacgucaccggagaga

SEQ ID NO: 1322583 - RNA, 19 nt, Homo sapiens
  misc_RNA (1)...(19): siRNA sense strand
caagcacuacggauacaau

SEQ ID NO: 1322584 - RNA, 19 nt, Homo sapiens
  misc_RNA (1)...(19): siRNA sense strand
agucaggaguguaccaaca

SEQ ID NO: 1322585 - RNA, 19 nt, Homo sapiens
  misc_RNA (1)...(19): siRNA sense strand
cggacuuccugcucuacaa

SEQ ID NO: 1322586 - RNA, 19 nt, Homo sapiens
  misc_RNA (1)...(19): siRNA sense strand
gaucugcauccacaccaau

SEQ ID NO: 1322587 - RNA, 19 nt, Homo sapiens
  misc_RNA (1)...(19): siRNA sense strand
uggaaucgaaucagaagug

SEQ ID NO: 1322588 - RNA, 19 nt, Homo sapiens
  misc_RNA (1)...(19): siRNA sense strand
ggagcaggcccucuuucca

SEQ ID NO: 1322589 - RNA, 19 nt, Homo sapiens
  misc_RNA (1)...(19): siRNA sense strand
cgggaacaauggccacagu

SEQ ID NO: 1322590 - RNA, 19 nt, Homo sapiens
  misc_RNA (1)...(19): siRNA sense strand
agaagugguggcuggaauu

SEQ ID NO: 1322591 - RNA, 19 nt, Homo sapiens
  misc_RNA (1)...(19): siRNA sense strand
ggacuuccugcucuacaag

SEQ ID NO: 1322592 - RNA, 19 nt, Homo sapiens
  misc_RNA (1)...(19): siRNA sense strand
gguuucugguggccucuau

SEQ ID NO: 1322593 - RNA, 19 nt, Homo sapiens
  misc_RNA (1)...(19): siRNA sense strand
acuguggaaucgaaucaga

SEQ ID NO: 1322594 - RNA, 19 nt, Homo sapiens
  misc_RNA (1)...(19): siRNA sense strand
cggcuguaaugguggcuau

SEQ ID NO: 1322595 - RNA, 19 nt, Homo sapiens
  misc_RNA (1)...(19): siRNA sense strand
ggaugagcuggucaacuau

SEQ ID NO: 1322596 - RNA, 19 nt, Homo sapiens
  misc_RNA (1)...(19): siRNA sense strand
agggagcuuucucugugua

SEQ ID NO: 1322597 - RNA, 19 nt, Homo sapiens
  misc_RNA (1)...(19): siRNA sense strand
cccagagaguuauguuuac

SEQ ID NO: 1322598 - RNA, 19 nt, Homo sapiens
  misc_RNA (1)...(19): siRNA sense strand
ccucuaugaaucccaugua

SEQ ID NO: 1322599 - RNA, 19 nt, Homo sapiens
  misc_RNA (1)...(19): siRNA sense strand
cugguggccucuaugaauc

SEQ ID NO: 1322600 - RNA, 19 nt, Homo sapiens
  misc_RNA (1)...(19): siRNA sense strand
ucugguggccucuaugaau

SEQ ID NO: 1322601 - RNA, 19 nt, Homo sapiens
  misc_RNA (1)...(19): siRNA sense strand
cggaugagcuggucaacua

SEQ ID NO: 1322602 - RNA, 19 nt, Homo sapiens
  misc_RNA (1)...(19): siRNA sense strand
ggucaacuaugucaacaaa

SEQ ID NO: 1322603 - RNA, 19 nt, Homo sapiens
  misc_RNA (1)...(19): siRNA sense strand
gacaauggcuucuuuaaaa

SEQ ID NO: 1322604 - RNA, 19 nt, Homo sapiens
  misc_RNA (1)...(19): siRNA sense strand
gcuuggaacuucuggacaa

SEQ ID NO: 1322605 - RNA, 19 nt, Homo sapiens
  misc_RNA (1)...(19): siRNA sense strand
ugacaauggcuucuuuaaa

SEQ ID NO: 1322606 - RNA, 19 nt, Homo sapiens
  misc_RNA (1)...(19): siRNA sense strand
gggugacaauggcuucuuu

SEQ ID NO: 1322607 - RNA, 19 nt, Homo sapiens
  misc_RNA (1)...(19): siRNA sense strand
ggacaagcacuacggauac

SEQ ID NO: 1322608 - RNA, 19 nt, Homo sapiens
  misc_RNA (1)...(19): siRNA sense strand
ggaucacuguggaaucgaa

SEQ ID NO: 1322609 - RNA, 19 nt, Homo sapiens
  misc_RNA (1)...(19): siRNA sense strand
uugaagaggcuauguggua

SEQ ID NO: 1322610 - RNA, 19 nt, Homo sapiens
  misc_RNA (1)...(19): siRNA sense strand
ggagcuuucucuguguauu

SEQ ID NO: 1322611 - RNA, 19 nt, Homo sapiens
  misc_RNA (1)...(19): siRNA sense strand
acaaacaggacaagcacua

SEQ ID NO: 1322612 - RNA, 19 nt, Homo sapiens
  misc_RNA (1)...(19): siRNA sense strand
ggaacaauggccacagugu

SEQ ID NO: 1322613 - RNA, 19 nt, Homo sapiens
  misc_RNA (1)...(19): siRNA sense strand
cagaagugguggcuggaau

SEQ ID NO: 1322614 - RNA, 19 nt, Homo sapiens
  misc_RNA (1)...(19): siRNA sense strand
gagggagcuuucucugugu

SEQ ID NO: 1322615 - RNA, 19 nt, Homo sapiens
  misc_RNA (1)...(19): siRNA sense strand
gagcaggcccucuuuccau

SEQ ID NO: 1322616 - RNA, 19 nt, Homo sapiens
  misc_RNA (1)...(19): siRNA sense strand
gacaagcacuacggauaca

SEQ ID NO: 1322617 - RNA, 19 nt, Homo sapiens
  misc_RNA (1)...(19): siRNA sense strand
ggugacaauggcuucuuua

SEQ ID NO: 1322618 - RNA, 19 nt, Homo sapiens
  misc_RNA (1)...(19): siRNA sense strand
ucaacuaugucaacaaacg

SEQ ID NO: 1322619 - RNA, 19 nt, Homo sapiens
  misc_RNA (1)...(19): siRNA sense strand
gugacaauggcuucuuuaa

SEQ ID NO: 1322620 - RNA, 19 nt, Homo sapiens
  misc_RNA (1)...(19): siRNA sense strand
gaucaguacugggaaaaga

SEQ ID NO: 1322621 - RNA, 19 nt, Homo sapiens
  misc_RNA (1)...(19): siRNA sense strand
gagcuggucaacuauguca

SEQ ID NO: 1322622 - RNA, 19 nt, Homo sapiens
  misc_RNA (1)...(19): siRNA sense strand
gaagugguggcuggaauuc

SEQ ID NO: 1322623 - RNA, 19 nt, Homo sapiens
  misc_RNA (1)...(19): siRNA sense strand
gagaauggcacacccuacu

SEQ ID NO: 1322624 - RNA, 19 nt, Homo sapiens
  misc_RNA (1)...(19): siRNA sense strand
cuacagcccgaccuacaaa

SEQ ID NO: 1322625 - RNA, 19 nt, Homo sapiens
  misc_RNA (1)...(19): siRNA sense strand
gaauuccacgcaccgauca

SEQ ID NO: 1322626 - RNA, 19 nt, Homo sapiens
  misc_RNA (1)...(19): siRNA sense strand
gaccugaagcugccugcaa

SEQ ID NO: 1322627 - RNA, 19 nt, Homo sapiens
  misc_RNA (1)...(19): siRNA sense strand
gagcuuucucuguguauuc

SEQ ID NO: 1322628 - RNA, 19 nt, Homo sapiens
  misc_RNA (1)...(19): siRNA sense strand
ggacaucauggccgagauc

SEQ ID NO: 1322629 - RNA, 19 nt, Homo sapiens
  misc_RNA (1)...(19): siRNA sense strand
uaugucaacaaacggaaua

SEQ ID NO: 1322630 - RNA, 19 nt, Homo sapiens
  misc_RNA (1)...(19): siRNA sense strand
gcuacagcccgaccuacaa

SEQ ID NO: 1322631 - RNA, 19 nt, Homo sapiens
  misc_RNA (1)...(19): siRNA sense strand
acacgucaccggagagaug

SEQ ID NO: 1322632 - RNA, 19 nt, Homo sapiens
  misc_RNA (1)...(19): siRNA sense strand
aggacaagcacuacggaua

SEQ ID NO: 1322633 - RNA, 19 nt, Homo sapiens
  misc_RNA (1)...(19): siRNA sense strand
caggaucacuguggaaucg

SEQ ID NO: 1322634 - RNA, 19 nt, Homo sapiens
  misc_RNA (1)...(19): siRNA sense strand
caucauggccgagaucuac

SEQ ID NO: 1322635 - RNA, 19 nt, Homo sapiens
  misc_RNA (1)...(19): siRNA sense strand
gaugagcuggucaacuaug

SEQ ID NO: 1322636 - RNA, 19 nt, Homo sapiens
  misc_RNA (1)...(19): siRNA sense strand
ccacagugucccaccauca

SEQ ID NO: 1322637 - RNA, 19 nt, Homo sapiens
  misc_RNA (1)...(19): siRNA sense strand
caacacgucaccggagaga

SEQ ID NO: 1322638 - RNA, 19 nt, Homo sapiens
  misc_RNA (1)...(19): siRNA sense strand
caagcacuacggauacaau

SEQ ID NO: 1322639 - RNA, 19 nt, Homo sapiens
  misc_RNA (1)...(19): siRNA sense strand
agucaggaguguaccaaca

SEQ ID NO: 1322640 - RNA, 19 nt, Homo sapiens
  misc_RNA (1)...(19): siRNA sense strand
cggacuuccugcucuacaa

SEQ ID NO: 1322641 - RNA, 19 nt, Homo sapiens
  misc_RNA (1)...(19): siRNA sense strand
gaucugcauccacaccaau

SEQ ID NO: 1322642 - RNA, 19 nt, Homo sapiens
  misc_RNA (1)...(19): siRNA sense strand
uggaaucgaaucagaagug

SEQ ID NO: 1322643 - RNA, 19 nt, Homo sapiens
  misc_RNA (1)...(19): siRNA sense strand
ggagcaggcccucuuucca

SEQ ID NO: 1322644 - RNA, 19 nt, Homo sapiens
  misc_RNA (1)...(19): siRNA sense strand
cgggaacaauggccacagu

SEQ ID NO: 1322645 - RNA, 19 nt, Homo sapiens
  misc_RNA (1)...(19): siRNA sense strand
agaagugguggcuggaauu

SEQ ID NO: 1322646 - RNA, 19 nt, Homo sapiens
  misc_RNA (1)...(19): siRNA sense strand
ggacuuccugcucuacaag

SEQ ID NO: 1322647 - RNA, 19 nt, Homo sapiens
  misc_RNA (1)...(19): siRNA sense strand
gguuucugguggccucuau

SEQ ID NO: 1322648 - RNA, 19 nt, Homo sapiens
  misc_RNA (1)...(19): siRNA sense strand
acuguggaaucgaaucaga

SEQ ID NO: 1322649 - RNA, 19 nt, Homo sapiens
  misc_RNA (1)...(19): siRNA sense strand
cggcuguaaugguggcuau

SEQ ID NO: 1322650 - RNA, 19 nt, Homo sapiens
  misc_RNA (1)...(19): siRNA sense strand
ggaugagcuggucaacuau

SEQ ID NO: 1322651 - RNA, 19 nt, Homo sapiens
  misc_RNA (1)...(19): siRNA sense strand
agggagcuuucucugugua

SEQ ID NO: 1322652 - RNA, 19 nt, Homo sapiens
  misc_RNA (1)...(19): siRNA sense strand
cccagagaguuauguuuac

SEQ ID NO: 1322653 - RNA, 19 nt, Homo sapiens
  misc_RNA (1)...(19): siRNA sense strand
ccucuaugaaucccaugua

SEQ ID NO: 1322654 - RNA, 19 nt, Homo sapiens
  misc_RNA (1)...(19): siRNA sense strand
cugguggccucuaugaauc

SEQ ID NO: 1322655 - RNA, 19 nt, Homo sapiens
  misc_RNA (1)...(19): siRNA sense strand
ucugguggccucuaugaau

SEQ ID NO: 1322656 - RNA, 19 nt, Homo sapiens
  misc_RNA (1)...(19): siRNA sense strand
cggaugagcuggucaacua

SEQ ID NO: 1322657 - RNA, 19 nt, Homo sapiens
  misc_RNA (1)...(19): siRNA sense strand
ggucaacuaugucaacaaa

SEQ ID NO: 1322658 - RNA, 19 nt, Homo sapiens
  misc_RNA (1)...(19): siRNA sense strand
gacaauggcuucuuuaaaa

SEQ ID NO: 1322659 - RNA, 19 nt, Homo sapiens
  misc_RNA (1)...(19): siRNA sense strand
gcuuggaacuucuggacaa

SEQ ID NO: 1322660 - RNA, 19 nt, Homo sapiens
  misc_RNA (1)...(19): siRNA sense strand
ugacaauggcuucuuuaaa

SEQ ID NO: 1322661 - RNA, 19 nt, Homo sapiens
  misc_RNA (1)...(19): siRNA sense strand
gggugacaauggcuucuuu

SEQ ID NO: 1322662 - RNA, 19 nt, Homo sapiens
  misc_RNA (1)...(19): siRNA sense strand
ggacaagcacuacggauac

SEQ ID NO: 1322663 - RNA, 19 nt, Homo sapiens
  misc_RNA (1)...(19): siRNA sense strand
ggaucacuguggaaucgaa

SEQ ID NO: 1322664 - RNA, 19 nt, Homo sapiens
  misc_RNA (1)...(19): siRNA sense strand
uugaagaggcuauguggua

SEQ ID NO: 1322665 - RNA, 19 nt, Homo sapiens
  misc_RNA (1)...(19): siRNA sense strand
ggagcuuucucuguguauu

SEQ ID NO: 1322666 - RNA, 19 nt, Homo sapiens
  misc_RNA (1)...(19): siRNA sense strand
acaaacaggacaagcacua

SEQ ID NO: 1322667 - RNA, 19 nt, Homo sapiens
  misc_RNA (1)...(19): siRNA sense strand
ggaacaauggccacagugu

SEQ ID NO: 1322668 - RNA, 19 nt, Homo sapiens
  misc_RNA (1)...(19): siRNA sense strand
cagaagugguggcuggaau

SEQ ID NO: 1322669 - RNA, 19 nt, Homo sapiens
  misc_RNA (1)...(19): siRNA sense strand
gagggagcuuucucugugu

SEQ ID NO: 1322670 - RNA, 19 nt, Homo sapiens
  misc_RNA (1)...(19): siRNA sense strand
gagcaggcccucuuuccau

SEQ ID NO: 1322671 - RNA, 19 nt, Homo sapiens
  misc_RNA (1)...(19): siRNA sense strand
gacaagcacuacggauaca

SEQ ID NO: 1322672 - RNA, 19 nt, Homo sapiens
  misc_RNA (1)...(19): siRNA sense strand
ggugacaauggcuucuuua

SEQ ID NO: 1322673 - RNA, 19 nt, Homo sapiens
  misc_RNA (1)...(19): siRNA sense strand
ucaacuaugucaacaaacg

SEQ ID NO: 1322674 - RNA, 19 nt, Homo sapiens
  misc_RNA (1)...(19): siRNA sense strand
gugacaauggcuucuuuaa

SEQ ID NO: 1322675 - RNA, 19 nt, Homo sapiens
  misc_RNA (1)...(19): siRNA sense strand
gaucaguacugggaaaaga

SEQ ID NO: 1322676 - RNA, 19 nt, Homo sapiens
  misc_RNA (1)...(19): siRNA sense strand
gagcuggucaacuauguca

SEQ ID NO: 1322677 - RNA, 19 nt, Homo sapiens
  misc_RNA (1)...(19): siRNA sense strand
gaagugguggcuggaauuc

SEQ ID NO: 1322678 - RNA, 19 nt, Homo sapiens
  misc_RNA (1)...(19): siRNA sense strand
gagaauggcacacccuacu

SEQ ID NO: 1322679 - RNA, 19 nt, Homo sapiens
  misc_RNA (1)...(19): siRNA sense strand
cuacagcccgaccuacaaa

SEQ ID NO: 1322680 - RNA, 19 nt, Homo sapiens
  misc_RNA (1)...(19): siRNA sense strand
gaauuccacgcaccgauca

SEQ ID NO: 1322681 - RNA, 19 nt, Homo sapiens
  misc_RNA (1)...(19): siRNA sense strand
gaccugaagcugccugcaa

SEQ ID NO: 1322682 - RNA, 19 nt, Homo sapiens
  misc_RNA (1)...(19): siRNA sense strand
gagcuuucucuguguauuc

SEQ ID NO: 1322683 - RNA, 19 nt, Homo sapiens
  misc_RNA (1)...(19): siRNA sense strand
ggacaucauggccgagauc

SEQ ID NO: 1322684 - RNA, 19 nt, Homo sapiens
  misc_RNA (1)...(19): siRNA sense strand
uaugucaacaaacggaaua

SEQ ID NO: 1322685 - RNA, 19 nt, Homo sapiens
  misc_RNA (1)...(19): siRNA sense strand
gcuacagcccgaccuacaa

SEQ ID NO: 1322686 - RNA, 19 nt, Homo sapiens
  misc_RNA (1)...(19): siRNA sense strand
acacgucaccggagagaug

SEQ ID NO: 1322687 - RNA, 19 nt, Homo sapiens
  misc_RNA (1)...(19): siRNA sense strand
aggacaagcacuacggaua

SEQ ID NO: 1322688 - RNA, 19 nt, Homo sapiens
  misc_RNA (1)...(19): siRNA sense strand
caggaucacuguggaaucg

SEQ ID NO: 1322689 - RNA, 19 nt, Homo sapiens
  misc_RNA (1)...(19): siRNA sense strand
caucauggccgagaucuac

SEQ ID NO: 1322690 - RNA, 19 nt, Homo sapiens
  misc_RNA (1)...(19): siRNA sense strand
gaugagcuggucaacuaug

SEQ ID NO: 1322691 - RNA, 19 nt, Homo sapiens
  misc_RNA (1)...(19): siRNA sense strand
ccacagugucccaccauca

SEQ ID NO: 1322692 - RNA, 19 nt, Homo sapiens
  misc_RNA (1)...(19): siRNA sense strand
caacacgucaccggagaga

SEQ ID NO: 1322693 - RNA, 19 nt, Homo sapiens
  misc_RNA (1)...(19): siRNA sense strand
caagcacuacggauacaau

SEQ ID NO: 1322694 - RNA, 19 nt, Homo sapiens
  misc_RNA (1)...(19): siRNA sense strand
agucaggaguguaccaaca

SEQ ID NO: 1322695 - RNA, 19 nt, Homo sapiens
  misc_RNA (1)...(19): siRNA sense strand
cggacuuccugcucuacaa

SEQ ID NO: 1322696 - RNA, 19 nt, Homo sapiens
  misc_RNA (1)...(19): siRNA sense strand
gaucugcauccacaccaau

SEQ ID NO: 1322697 - RNA, 19 nt, Homo sapiens
  misc_RNA (1)...(19): siRNA sense strand
uggaaucgaaucagaagug

SEQ ID NO: 1322698 - RNA, 19 nt, Homo sapiens
  misc_RNA (1)...(19): siRNA sense strand
ggagcaggcccucuuucca

SEQ ID NO: 1322699 - RNA, 19 nt, Homo sapiens
  misc_RNA (1)...(19): siRNA sense strand
cgggaacaauggccacagu

SEQ ID NO: 1322700 - RNA, 19 nt, Homo sapiens
  misc_RNA (1)...(19): siRNA sense strand
agaagugguggcuggaauu

SEQ ID NO: 1322701 - RNA, 19 nt, Homo sapiens
  misc_RNA (1)...(19): siRNA sense strand
ggacuuccugcucuacaag

SEQ ID NO: 1322702 - RNA, 19 nt, Homo sapiens
  misc_RNA (1)...(19): siRNA sense strand
gguuucugguggccucuau

SEQ ID NO: 1322703 - RNA, 19 nt, Homo sapiens
  misc_RNA (1)...(19): siRNA sense strand
acuguggaaucgaaucaga

SEQ ID NO: 1322704 - RNA, 19 nt, Homo sapiens
  misc_RNA (1)...(19): siRNA sense strand
cggcuguaaugguggcuau

SEQ ID NO: 1322705 - RNA, 19 nt, Homo sapiens
  misc_RNA (1)...(19): siRNA sense strand
ggaugagcuggucaacuau

SEQ ID NO: 1322706 - RNA, 19 nt, Homo sapiens
  misc_RNA (1)...(19): siRNA sense strand
agggagcuuucucugugua

SEQ ID NO: 1322707 - RNA, 19 nt, Homo sapiens
  misc_RNA (1)...(19): siRNA sense strand
cccagagaguuauguuuac

SEQ ID NO: 1322708 - RNA, 19 nt, Homo sapiens
  misc_RNA (1)...(19): siRNA sense strand
ccucuaugaaucccaugua

SEQ ID NO: 1322709 - RNA, 19 nt, Homo sapiens
  misc_RNA (1)...(19): siRNA sense strand
cugguggccucuaugaauc

SEQ ID NO: 1322710 - RNA, 19 nt, Homo sapiens
  misc_RNA (1)...(19): siRNA sense strand
ucugguggccucuaugaau

SEQ ID NO: 1322711 - RNA, 19 nt, Homo sapiens
  misc_RNA (1)...(19): siRNA sense strand
cggaugagcuggucaacua

SEQ ID NO: 1322712 - RNA, 19 nt, Homo sapiens
  misc_RNA (1)...(19): siRNA sense strand
ggucaacuaugucaacaaa

SEQ ID NO: 1322713 - RNA, 19 nt, Homo sapiens
  misc_RNA (1)...(19): siRNA sense strand
gacaauggcuucuuuaaaa

SEQ ID NO: 1322714 - RNA, 19 nt, Homo sapiens
  misc_RNA (1)...(19): siRNA sense strand
gcuuggaacuucuggacaa

SEQ ID NO: 1322715 - RNA, 19 nt, Homo sapiens
  misc_RNA (1)...(19): siRNA sense strand
ugacaauggcuucuuuaaa

SEQ ID NO: 1322716 - RNA, 19 nt, Homo sapiens
  misc_RNA (1)...(19): siRNA sense strand
gggugacaauggcuucuuu

SEQ ID NO: 1322717 - RNA, 19 nt, Homo sapiens
  misc_RNA (1)...(19): siRNA sense strand
ggacaagcacuacggauac

SEQ ID NO: 1322718 - RNA, 19 nt, Homo sapiens
  misc_RNA (1)...(19): siRNA sense strand
ggaucacuguggaaucgaa

SEQ ID NO: 1322719 - RNA, 19 nt, Homo sapiens
  misc_RNA (1)...(19): siRNA sense strand
uugaagaggcuauguggua

SEQ ID NO: 1322720 - RNA, 19 nt, Homo sapiens
  misc_RNA (1)...(19): siRNA sense strand
ggagcuuucucuguguauu

SEQ ID NO: 1322721 - RNA, 19 nt, Homo sapiens
  misc_RNA (1)...(19): siRNA sense strand
acaaacaggacaagcacua

SEQ ID NO: 1322722 - RNA, 19 nt, Homo sapiens
  misc_RNA (1)...(19): siRNA sense strand
ggaacaauggccacagugu

SEQ ID NO: 1322723 - RNA, 19 nt, Homo sapiens
  misc_RNA (1)...(19): siRNA sense strand
cagaagugguggcuggaau

SEQ ID NO: 1322724 - RNA, 19 nt, Homo sapiens
  misc_RNA (1)...(19): siRNA sense strand
gagggagcuuucucugugu

SEQ ID NO: 1322725 - RNA, 19 nt, Homo sapiens
  misc_RNA (1)...(19): siRNA sense strand
gagcaggcccucuuuccau

SEQ ID NO: 1322726 - RNA, 19 nt, Homo sapiens
  misc_RNA (1)...(19): siRNA sense strand
gacaagcacuacggauaca

SEQ ID NO: 1322727 - RNA, 19 nt, Homo sapiens
  misc_RNA (1)...(19): siRNA sense strand
ggugacaauggcuucuuua

SEQ ID NO: 1322728 - RNA, 19 nt, Homo sapiens
  misc_RNA (1)...(19): siRNA sense strand
ucaacuaugucaacaaacg

SEQ ID NO: 1322729 - RNA, 19 nt, Homo sapiens
  misc_RNA (1)...(19): siRNA sense strand
gugacaauggcuucuuuaa

SEQ ID NO: 1322730 - RNA, 19 nt, Homo sapiens
  misc_RNA (1)...(19): siRNA sense strand
gaucaguacugggaaaaga

SEQ ID NO: 1322731 - RNA, 19 nt, Homo sapiens
  misc_RNA (1)...(19): siRNA sense strand
gagcuggucaacuauguca

SEQ ID NO: 1322732 - RNA, 19 nt, Homo sapiens
  misc_RNA (1)...(19): siRNA sense strand
gaagugguggcuggaauuc

SEQ ID NO: 1322733 - RNA, 19 nt, Homo sapiens
  misc_RNA (1)...(19): siRNA sense strand
gagaauggcacacccuacu

SEQ ID NO: 1322734 - RNA, 19 nt, Homo sapiens
  misc_RNA (1)...(19): siRNA sense strand
cuacagcccgaccuacaaa

SEQ ID NO: 1322735 - RNA, 19 nt, Homo sapiens
  misc_RNA (1)...(19): siRNA sense strand
gaauuccacgcaccgauca

SEQ ID NO: 1322736 - RNA, 19 nt, Homo sapiens
  misc_RNA (1)...(19): siRNA sense strand
gaccugaagcugccugcaa

SEQ ID NO: 1322737 - RNA, 19 nt, Homo sapiens
  misc_RNA (1)...(19): siRNA sense strand
gagcuuucucuguguauuc

SEQ ID NO: 1322738 - RNA, 19 nt, Homo sapiens
  misc_RNA (1)...(19): siRNA sense strand
ggacaucauggccgagauc

SEQ ID NO: 1322739 - RNA, 19 nt, Homo sapiens
  misc_RNA (1)...(19): siRNA sense strand
uaugucaacaaacggaaua

SEQ ID NO: 1322740 - RNA, 19 nt, Homo sapiens
  misc_RNA (1)...(19): siRNA sense strand
gcuacagcccgaccuacaa

SEQ ID NO: 1322741 - RNA, 19 nt, Homo sapiens
  misc_RNA (1)...(19): siRNA sense strand
acacgucaccggagagaug

SEQ ID NO: 1322742 - RNA, 19 nt, Homo sapiens
  misc_RNA (1)...(19): siRNA sense strand
aggacaagcacuacggaua

SEQ ID NO: 1322743 - RNA, 19 nt, Homo sapiens
  misc_RNA (1)...(19): siRNA sense strand
caggaucacuguggaaucg

SEQ ID NO: 1322744 - RNA, 19 nt, Homo sapiens
  misc_RNA (1)...(19): siRNA sense strand
caucauggccgagaucuac

SEQ ID NO: 1322745 - RNA, 19 nt, Homo sapiens
  misc_RNA (1)...(19): siRNA sense strand
gaugagcuggucaacuaug

SEQ ID NO: 1322746 - RNA, 19 nt, Homo sapiens
  misc_RNA (1)...(19): siRNA sense strand
ccacagugucccaccauca

SEQ ID NO: 1322747 - RNA, 19 nt, Homo sapiens
  misc_RNA (1)...(19): siRNA sense strand
caacacgucaccggagaga

SEQ ID NO: 1322748 - RNA, 19 nt, Homo sapiens
  misc_RNA (1)...(19): siRNA sense strand
caagcacuacggauacaau

SEQ ID NO: 1322749 - RNA, 19 nt, Homo sapiens
  misc_RNA (1)...(19): siRNA sense strand
agucaggaguguaccaaca

SEQ ID NO: 1322750 - RNA, 19 nt, Homo sapiens
  misc_RNA (1)...(19): siRNA sense strand
cggacuuccugcucuacaa

SEQ ID NO: 1322751 - RNA, 19 nt, Homo sapiens
  misc_RNA (1)...(19): siRNA sense strand
gaucugcauccacaccaau

SEQ ID NO: 1322752 - RNA, 19 nt, Homo sapiens
  misc_RNA (1)...(19): siRNA sense strand
uggaaucgaaucagaagug

SEQ ID NO: 1322753 - RNA, 19 nt, Homo sapiens
  misc_RNA (1)...(19): siRNA sense strand
ggagcaggcccucuuucca

SEQ ID NO: 1322754 - RNA, 19 nt, Homo sapiens
  misc_RNA (1)...(19): siRNA sense strand
cgggaacaauggccacagu

SEQ ID NO: 1322755 - RNA, 19 nt, Homo sapiens
  misc_RNA (1)...(19): siRNA sense strand
agaagugguggcuggaauu

SEQ ID NO: 1322756 - RNA, 19 nt, Homo sapiens
  misc_RNA (1)...(19): siRNA sense strand
ggacuuccugcucuacaag

SEQ ID NO: 1322757 - RNA, 19 nt, Homo sapiens
  misc_RNA (1)...(19): siRNA sense strand
gguuucugguggccucuau

SEQ ID NO: 1322758 - RNA, 19 nt, Homo sapiens
  misc_RNA (1)...(19): siRNA sense strand
acuguggaaucgaaucaga

SEQ ID NO: 1322759 - RNA, 19 nt, Homo sapiens
  misc_RNA (1)...(19): siRNA sense strand
cggcuguaaugguggcuau

SEQ ID NO: 1322760 - RNA, 19 nt, Homo sapiens
  misc_RNA (1)...(19): siRNA sense strand
ggaugagcuggucaacuau

SEQ ID NO: 1322761 - RNA, 19 nt, Homo sapiens
  misc_RNA (1)...(19): siRNA sense strand
agggagcuuucucugugua

SEQ ID NO: 1322762 - RNA, 19 nt, Homo sapiens
  misc_RNA (1)...(19): siRNA sense strand
cccagagaguuauguuuac

SEQ ID NO: 1322763 - RNA, 19 nt, Homo sapiens
  misc_RNA (1)...(19): siRNA sense strand
ccucuaugaaucccaugua

SEQ ID NO: 1322764 - RNA, 19 nt, Homo sapiens
  misc_RNA (1)...(19): siRNA sense strand
cugguggccucuaugaauc

SEQ ID NO: 1322765 - RNA, 19 nt, Homo sapiens
  misc_RNA (1)...(19): siRNA sense strand
ucugguggccucuaugaau

SEQ ID NO: 1322766 - RNA, 19 nt, Homo sapiens
  misc_RNA (1)...(19): siRNA sense strand
cggaugagcuggucaacua

SEQ ID NO: 1322767 - RNA, 19 nt, Homo sapiens
  misc_RNA (1)...(19): siRNA sense strand
ggucaacuaugucaacaaa

SEQ ID NO: 1322768 - RNA, 19 nt, Homo sapiens
  misc_RNA (1)...(19): siRNA sense strand
gacaauggcuucuuuaaaa

SEQ ID NO: 1322769 - RNA, 19 nt, Homo sapiens
  misc_RNA (1)...(19): siRNA sense strand
gcuuggaacuucuggacaa

SEQ ID NO: 1322770 - RNA, 19 nt, Homo sapiens
  misc_RNA (1)...(19): siRNA sense strand
ugacaauggcuucuuuaaa

SEQ ID NO: 1322771 - RNA, 19 nt, Homo sapiens
  misc_RNA (1)...(19): siRNA sense strand
gggugacaauggcuucuuu

SEQ ID NO: 1322772 - RNA, 19 nt, Homo sapiens
  misc_RNA (1)...(19): siRNA sense strand
ggacaagcacuacggauac

SEQ ID NO: 1322773 - RNA, 19 nt, Homo sapiens
  misc_RNA (1)...(19): siRNA sense strand
ggaucacuguggaaucgaa

SEQ ID NO: 1322774 - RNA, 19 nt, Homo sapiens
  misc_RNA (1)...(19): siRNA sense strand
uugaagaggcuauguggua

SEQ ID NO: 1322775 - RNA, 19 nt, Homo sapiens
  misc_RNA (1)...(19): siRNA sense strand
ggagcuuucucuguguauu

SEQ ID NO: 1322776 - RNA, 19 nt, Homo sapiens
  misc_RNA (1)...(19): siRNA sense strand
acaaacaggacaagcacua

SEQ ID NO: 1322777 - RNA, 19 nt, Homo sapiens
  misc_RNA (1)...(19): siRNA sense strand
ggaacaauggccacagugu

SEQ ID NO: 1322778 - RNA, 19 nt, Homo sapiens
  misc_RNA (1)...(19): siRNA sense strand
cagaagugguggcuggaau

SEQ ID NO: 1322779 - RNA, 19 nt, Homo sapiens
  misc_RNA (1)...(19): siRNA sense strand
gagggagcuuucucugugu

SEQ ID NO: 1322780 - RNA, 19 nt, Homo sapiens
  misc_RNA (1)...(19): siRNA sense strand
gagcaggcccucuuuccau

SEQ ID NO: 1322781 - RNA, 19 nt, Homo sapiens
  misc_RNA (1)...(19): siRNA sense strand
gacaagcacuacggauaca

SEQ ID NO: 1322782 - RNA, 19 nt, Homo sapiens
  misc_RNA (1)...(19): siRNA sense strand
ggugacaauggcuucuuua

SEQ ID NO: 1322783 - RNA, 19 nt, Homo sapiens
  misc_RNA (1)...(19): siRNA sense strand
ucaacuaugucaacaaacg

SEQ ID NO: 1322784 - RNA, 19 nt, Homo sapiens
  misc_RNA (1)...(19): siRNA sense strand
gugacaauggcuucuuuaa

SEQ ID NO: 1322785 - RNA, 19 nt, Homo sapiens
  misc_RNA (1)...(19): siRNA sense strand
gaucaguacugggaaaaga

SEQ ID NO: 1322786 - RNA, 19 nt, Homo sapiens
  misc_RNA (1)...(19): siRNA sense strand
gagcuggucaacuauguca

SEQ ID NO: 1322787 - RNA, 19 nt, Homo sapiens
  misc_RNA (1)...(19): siRNA sense strand
gaagugguggcuggaauuc

SEQ ID NO: 1322788 - RNA, 19 nt, Homo sapiens
  misc_RNA (1)...(19): siRNA sense strand
gagaauggcacacccuacu

SEQ ID NO: 1322789 - RNA, 19 nt, Homo sapiens
  misc_RNA (1)...(19): siRNA sense strand
cuacagcccgaccuacaaa

SEQ ID NO: 1322790 - RNA, 19 nt, Homo sapiens
  misc_RNA (1)...(19): siRNA sense strand
gaauuccacgcaccgauca

SEQ ID NO: 1322791 - RNA, 19 nt, Homo sapiens
  misc_RNA (1)...(19): siRNA sense strand
gaccugaagcugccugcaa

SEQ ID NO: 1322792 - RNA, 19 nt, Homo sapiens
  misc_RNA (1)...(19): siRNA sense strand
gagcuuucucuguguauuc

SEQ ID NO: 1322793 - RNA, 19 nt, Homo sapiens
  misc_RNA (1)...(19): siRNA sense strand
ggacaucauggccgagauc

SEQ ID NO: 1322794 - RNA, 19 nt, Homo sapiens
  misc_RNA (1)...(19): siRNA sense strand
uaugucaacaaacggaaua

SEQ ID NO: 1322795 - RNA, 19 nt, Homo sapiens
  misc_RNA (1)...(19): siRNA sense strand
gcuacagcccgaccuacaa

SEQ ID NO: 1322796 - RNA, 19 nt, Homo sapiens
  misc_RNA (1)...(19): siRNA sense strand
acacgucaccggagagaug

SEQ ID NO: 1322797 - RNA, 19 nt, Homo sapiens
  misc_RNA (1)...(19): siRNA sense strand
aggacaagcacuacggaua

SEQ ID NO: 1322798 - RNA, 19 nt, Homo sapiens
  misc_RNA (1)...(19): siRNA sense strand
caggaucacuguggaaucg

SEQ ID NO: 1322799 - RNA, 19 nt, Homo sapiens
  misc_RNA (1)...(19): siRNA sense strand
caucauggccgagaucuac

SEQ ID NO: 1322800 - RNA, 19 nt, Homo sapiens
  misc_RNA (1)...(19): siRNA sense strand
gaugagcuggucaacuaug

SEQ ID NO: 1322801 - RNA, 19 nt, Homo sapiens
  misc_RNA (1)...(19): siRNA sense strand
ccacagugucccaccauca

SEQ ID NO: 1322802 - RNA, 19 nt, Homo sapiens
  misc_RNA (1)...(19): siRNA sense strand
caacacgucaccggagaga

SEQ ID NO: 1322803 - RNA, 19 nt, Homo sapiens
  misc_RNA (1)...(19): siRNA sense strand
caagcacuacggauacaau

SEQ ID NO: 1322804 - RNA, 19 nt, Homo sapiens
  misc_RNA (1)...(19): siRNA sense strand
agucaggaguguaccaaca

SEQ ID NO: 1322805 - RNA, 19 nt, Homo sapiens
  misc_RNA (1)...(19): siRNA sense strand
cggacuuccugcucuacaa

SEQ ID NO: 1322806 - RNA, 19 nt, Homo sapiens
  misc_RNA (1)...(19): siRNA sense strand
gaucugcauccacaccaau

SEQ ID NO: 1322807 - RNA, 19 nt, Homo sapiens
  misc_RNA (1)...(19): siRNA sense strand
uggaaucgaaucagaagug

SEQ ID NO: 1322808 - RNA, 19 nt, Homo sapiens
  misc_RNA (1)...(19): siRNA sense strand
ggagcaggcccucuuucca

SEQ ID NO: 1322809 - RNA, 19 nt, Homo sapiens
  misc_RNA (1)...(19): siRNA sense strand
cgggaacaauggccacagu

SEQ ID NO: 1322810 - RNA, 19 nt, Homo sapiens
  misc_RNA (1)...(19): siRNA sense strand
agaagugguggcuggaauu

SEQ ID NO: 1322811 - RNA, 19 nt, Homo sapiens
  misc_RNA (1)...(19): siRNA sense strand
ggacuuccugcucuacaag

SEQ ID NO: 1322812 - RNA, 19 nt, Homo sapiens
  misc_RNA (1)...(19): siRNA sense strand
gguuucugguggccucuau

SEQ ID NO: 1322813 - RNA, 19 nt, Homo sapiens
  misc_RNA (1)...(19): siRNA sense strand
acuguggaaucgaaucaga

SEQ ID NO: 1322814 - RNA, 19 nt, Homo sapiens
  misc_RNA (1)...(19): siRNA sense strand
cggcuguaaugguggcuau

SEQ ID NO: 1322815 - RNA, 19 nt, Homo sapiens
  misc_RNA (1)...(19): siRNA sense strand
ggaugagcuggucaacuau

SEQ ID NO: 1322816 - RNA, 19 nt, Homo sapiens
  misc_RNA (1)...(19): siRNA sense strand
agggagcuuucucugugua

SEQ ID NO: 1322817 - RNA, 19 nt, Homo sapiens
  misc_RNA (1)...(19): siRNA sense strand
cccagagaguuauguuuac

SEQ ID NO: 1322818 - RNA, 19 nt, Homo sapiens
  misc_RNA (1)...(19): siRNA sense strand
ccucuaugaaucccaugua

SEQ ID NO: 1322819 - RNA, 19 nt, Homo sapiens
  misc_RNA (1)...(19): siRNA sense strand
cugguggccucuaugaauc

SEQ ID NO: 1322820 - RNA, 19 nt, Homo sapiens
  misc_RNA (1)...(19): siRNA sense strand
ucugguggccucuaugaau

SEQ ID NO: 1322821 - RNA, 19 nt, Homo sapiens
  misc_RNA (1)...(19): siRNA sense strand
cggaugagcuggucaacua

SEQ ID NO: 1322822 - RNA, 19 nt, Homo sapiens
  misc_RNA (1)...(19): siRNA sense strand
ggucaacuaugucaacaaa

SEQ ID NO: 1322823 - RNA, 19 nt, Homo sapiens
  misc_RNA (1)...(19): siRNA sense strand
gacaauggcuucuuuaaaa

SEQ ID NO: 1322824 - RNA, 19 nt, Homo sapiens
  misc_RNA (1)...(19): siRNA sense strand
gcuuggaacuucuggacaa

SEQ ID NO: 1322825 - RNA, 19 nt, Homo sapiens
  misc_RNA (1)...(19): siRNA sense strand
ugacaauggcuucuuuaaa

SEQ ID NO: 1322826 - RNA, 19 nt, Homo sapiens
  misc_RNA (1)...(19): siRNA sense strand
gggugacaauggcuucuuu

SEQ ID NO: 1322827 - RNA, 19 nt, Homo sapiens
  misc_RNA (1)...(19): siRNA sense strand
ggacaagcacuacggauac

SEQ ID NO: 1322828 - RNA, 19 nt, Homo sapiens
  misc_RNA (1)...(19): siRNA sense strand
ggaucacuguggaaucgaa

SEQ ID NO: 1322829 - RNA, 19 nt, Homo sapiens
  misc_RNA (1)...(19): siRNA sense strand
uugaagaggcuauguggua

SEQ ID NO: 1322830 - RNA, 19 nt, Homo sapiens
  misc_RNA (1)...(19): siRNA sense strand
ggagcuuucucuguguauu

SEQ ID NO: 1322831 - RNA, 19 nt, Homo sapiens
  misc_RNA (1)...(19): siRNA sense strand
acaaacaggacaagcacua

SEQ ID NO: 1322832 - RNA, 19 nt, Homo sapiens
  misc_RNA (1)...(19): siRNA sense strand
ggaacaauggccacagugu

SEQ ID NO: 1322833 - RNA, 19 nt, Homo sapiens
  misc_RNA (1)...(19): siRNA sense strand
cagaagugguggcuggaau

SEQ ID NO: 1322834 - RNA, 19 nt, Homo sapiens
  misc_RNA (1)...(19): siRNA sense strand
gagggagcuuucucugugu

SEQ ID NO: 1322835 - RNA, 19 nt, Homo sapiens
  misc_RNA (1)...(19): siRNA sense strand
gagcaggcccucuuuccau

SEQ ID NO: 1322836 - RNA, 19 nt, Homo sapiens
  misc_RNA (1)...(19): siRNA sense strand
gacaagcacuacggauaca

SEQ ID NO: 1322837 - RNA, 19 nt, Homo sapiens
  misc_RNA (1)...(19): siRNA sense strand
ggugacaauggcuucuuua

SEQ ID NO: 1322838 - RNA, 19 nt, Homo sapiens
  misc_RNA (1)...(19): siRNA sense strand
ucaacuaugucaacaaacg

SEQ ID NO: 1322839 - RNA, 19 nt, Homo sapiens
  misc_RNA (1)...(19): siRNA sense strand
gugacaauggcuucuuuaa

SEQ ID NO: 1322840 - RNA, 19 nt, Homo sapiens
  misc_RNA (1)...(19): siRNA sense strand
gaucaguacugggaaaaga

SEQ ID NO: 1322841 - RNA, 19 nt, Homo sapiens
  misc_RNA (1)...(19): siRNA sense strand
gagcuggucaacuauguca

SEQ ID NO: 1322842 - RNA, 19 nt, Homo sapiens
  misc_RNA (1)...(19): siRNA sense strand
gaagugguggcuggaauuc

SEQ ID NO: 1322843 - RNA, 19 nt, Homo sapiens
  misc_RNA (1)...(19): siRNA sense strand
gagaauggcacacccuacu

SEQ ID NO: 1322844 - RNA, 19 nt, Homo sapiens
  misc_RNA (1)...(19): siRNA sense strand
cuacagcccgaccuacaaa

SEQ ID NO: 1322845 - RNA, 19 nt, Homo sapiens
  misc_RNA (1)...(19): siRNA sense strand
gaauuccacgcaccgauca

SEQ ID NO: 1322846 - RNA, 19 nt, Homo sapiens
  misc_RNA (1)...(19): siRNA sense strand
gaccugaagcugccugcaa

SEQ ID NO: 1322847 - RNA, 19 nt, Homo sapiens
  misc_RNA (1)...(19): siRNA sense strand
gagcuuucucuguguauuc

SEQ ID NO: 1322848 - RNA, 19 nt, Homo sapiens
  misc_RNA (1)...(19): siRNA sense strand
ggacaucauggccgagauc

SEQ ID NO: 1322849 - RNA, 19 nt, Homo sapiens
  misc_RNA (1)...(19): siRNA sense strand
uaugucaacaaacggaaua

SEQ ID NO: 1322850 - RNA, 19 nt, Homo sapiens
  misc_RNA (1)...(19): siRNA sense strand
gcuacagcccgaccuacaa

SEQ ID NO: 1322851 - RNA, 19 nt, Homo sapiens
  misc_RNA (1)...(19): siRNA sense strand
acacgucaccggagagaug

SEQ ID NO: 1322852 - RNA, 19 nt, Homo sapiens
  misc_RNA (1)...(19): siRNA sense strand
aggacaagcacuacggaua

SEQ ID NO: 1322853 - RNA, 19 nt, Homo sapiens
  misc_RNA (1)...(19): siRNA sense strand
caggaucacuguggaaucg

SEQ ID NO: 1322854 - RNA, 19 nt, Homo sapiens
  misc_RNA (1)...(19): siRNA sense strand
caucauggccgagaucuac

SEQ ID NO: 1322855 - RNA, 19 nt, Homo sapiens
  misc_RNA (1)...(19): siRNA sense strand
gaugagcuggucaacuaug

SEQ ID NO: 1322856 - RNA, 19 nt, Homo sapiens
  misc_RNA (1)...(19): siRNA sense strand
ccacagugucccaccauca

SEQ ID NO: 1322857 - RNA, 19 nt, Homo sapiens
  misc_RNA (1)...(19): siRNA sense strand
caacacgucaccggagaga

SEQ ID NO: 1322858 - RNA, 19 nt, Homo sapiens
  misc_RNA (1)...(19): siRNA sense strand
caagcacuacggauacaau

SEQ ID NO: 1322859 - RNA, 19 nt, Homo sapiens
  misc_RNA (1)...(19): siRNA sense strand
agucaggaguguaccaaca

SEQ ID NO: 1322860 - RNA, 19 nt, Homo sapiens
  misc_RNA (1)...(19): siRNA sense strand
cggacuuccugcucuacaa

SEQ ID NO: 1322861 - RNA, 19 nt, Homo sapiens
  misc_RNA (1)...(19): siRNA sense strand
gaucugcauccacaccaau

SEQ ID NO: 1322862 - RNA, 19 nt, Homo sapiens
  misc_RNA (1)...(19): siRNA sense strand
uggaaucgaaucagaagug

SEQ ID NO: 1322863 - RNA, 19 nt, Homo sapiens
  misc_RNA (1)...(19): siRNA sense strand
ggagcaggcccucuuucca

SEQ ID NO: 1322864 - RNA, 19 nt, Homo sapiens
  misc_RNA (1)...(19): siRNA sense strand
cgggaacaauggccacagu

SEQ ID NO: 1322865 - RNA, 19 nt, Homo sapiens
  misc_RNA (1)...(19): siRNA sense strand
agaagugguggcuggaauu

SEQ ID NO: 1322866 - RNA, 19 nt, Homo sapiens
  misc_RNA (1)...(19): siRNA sense strand
ggacuuccugcucuacaag

SEQ ID NO: 1322867 - RNA, 19 nt, Homo sapiens
  misc_RNA (1)...(19): siRNA sense strand
gguuucugguggccucuau

SEQ ID NO: 1322868 - RNA, 19 nt, Homo sapiens
  misc_RNA (1)...(19): siRNA sense strand
acuguggaaucgaaucaga

SEQ ID NO: 1322869 - RNA, 19 nt, Homo sapiens
  misc_RNA (1)...(19): siRNA sense strand
cggcuguaaugguggcuau

SEQ ID NO: 1322870 - RNA, 19 nt, Homo sapiens
  misc_RNA (1)...(19): siRNA sense strand
ggaugagcuggucaacuau

SEQ ID NO: 1322871 - RNA, 19 nt, Homo sapiens
  misc_RNA (1)...(19): siRNA sense strand
agggagcuuucucugugua

SEQ ID NO: 1322872 - RNA, 19 nt, Homo sapiens
  misc_RNA (1)...(19): siRNA sense strand
cccagagaguuauguuuac

SEQ ID NO: 1322873 - RNA, 19 nt, Homo sapiens
  misc_RNA (1)...(19): siRNA sense strand
ccucuaugaaucccaugua

SEQ ID NO: 1322874 - RNA, 19 nt, Homo sapiens
  misc_RNA (1)...(19): siRNA sense strand
cugguggccucuaugaauc

SEQ ID NO: 1322875 - RNA, 19 nt, Homo sapiens
  misc_RNA (1)...(19): siRNA sense strand
ucugguggccucuaugaau

SEQ ID NO: 1322876 - RNA, 19 nt, Homo sapiens
  misc_RNA (1)...(19): siRNA sense strand
cggaugagcuggucaacua

SEQ ID NO: 1322877 - RNA, 19 nt, Homo sapiens
  misc_RNA (1)...(19): siRNA sense strand
ggucaacuaugucaacaaa

SEQ ID NO: 1322878 - RNA, 19 nt, Homo sapiens
  misc_RNA (1)...(19): siRNA sense strand
gacaauggcuucuuuaaaa

SEQ ID NO: 1322879 - RNA, 19 nt, Homo sapiens
  misc_RNA (1)...(19): siRNA sense strand
gcuuggaacuucuggacaa

SEQ ID NO: 1322880 - RNA, 19 nt, Homo sapiens
  misc_RNA (1)...(19): siRNA sense strand
ugacaauggcuucuuuaaa

SEQ ID NO: 1322881 - RNA, 19 nt, Homo sapiens
  misc_RNA (1)...(19): siRNA sense strand
gggugacaauggcuucuuu

SEQ ID NO: 1322882 - RNA, 19 nt, Homo sapiens
  misc_RNA (1)...(19): siRNA sense strand
ggacaagcacuacggauac

SEQ ID NO: 1322883 - RNA, 19 nt, Homo sapiens
  misc_RNA (1)...(19): siRNA sense strand
ggaucacuguggaaucgaa

SEQ ID NO: 1322884 - RNA, 19 nt, Homo sapiens
  misc_RNA (1)...(19): siRNA sense strand
uugaagaggcuauguggua

SEQ ID NO: 1322885 - RNA, 19 nt, Homo sapiens
  misc_RNA (1)...(19): siRNA sense strand
ggagcuuucucuguguauu

SEQ ID NO: 1322886 - RNA, 19 nt, Homo sapiens
  misc_RNA (1)...(19): siRNA sense strand
acaaacaggacaagcacua

SEQ ID NO: 1322887 - RNA, 19 nt, Homo sapiens
  misc_RNA (1)...(19): siRNA sense strand
ggaacaauggccacagugu

SEQ ID NO: 1322888 - RNA, 19 nt, Homo sapiens
  misc_RNA (1)...(19): siRNA sense strand
cagaagugguggcuggaau

SEQ ID NO: 1322889 - RNA, 19 nt, Homo sapiens
  misc_RNA (1)...(19): siRNA sense strand
gagggagcuuucucugugu

SEQ ID NO: 1322890 - RNA, 19 nt, Homo sapiens
  misc_RNA (1)...(19): siRNA sense strand
gagcaggcccucuuuccau

SEQ ID NO: 1322891 - RNA, 19 nt, Homo sapiens
  misc_RNA (1)...(19): siRNA sense strand
gacaagcacuacggauaca

SEQ ID NO: 1322892 - RNA, 19 nt, Homo sapiens
  misc_RNA (1)...(19): siRNA sense strand
ggugacaauggcuucuuua

SEQ ID NO: 1322893 - RNA, 19 nt, Homo sapiens
  misc_RNA (1)...(19): siRNA sense strand
ucaacuaugucaacaaacg

SEQ ID NO: 1322894 - RNA, 19 nt, Homo sapiens
  misc_RNA (1)...(19): siRNA sense strand
gugacaauggcuucuuuaa

SEQ ID NO: 1322895 - RNA, 19 nt, Homo sapiens
  misc_RNA (1)...(19): siRNA sense strand
gaucaguacugggaaaaga

SEQ ID NO: 1322896 - RNA, 19 nt, Homo sapiens
  misc_RNA (1)...(19): siRNA sense strand
gagcuggucaacuauguca

SEQ ID NO: 1322897 - RNA, 19 nt, Homo sapiens
  misc_RNA (1)...(19): siRNA sense strand
gaagugguggcuggaauuc

SEQ ID NO: 1322898 - RNA, 19 nt, Homo sapiens
  misc_RNA (1)...(19): siRNA sense strand
gagaauggcacacccuacu

SEQ ID NO: 1322899 - RNA, 19 nt, Homo sapiens
  misc_RNA (1)...(19): siRNA sense strand
cuacagcccgaccuacaaa

SEQ ID NO: 1322900 - RNA, 19 nt, Homo sapiens
  misc_RNA (1)...(19): siRNA sense strand
gaauuccacgcaccgauca

SEQ ID NO: 1322901 - RNA, 19 nt, Homo sapiens
  misc_RNA (1)...(19): siRNA sense strand
gaccugaagcugccugcaa

SEQ ID NO: 1322902 - RNA, 19 nt, Homo sapiens
  misc_RNA (1)...(19): siRNA sense strand
gagcuuucucuguguauuc

SEQ ID NO: 1322903 - RNA, 19 nt, Homo sapiens
  misc_RNA (1)...(19): siRNA sense strand
ggacaucauggccgagauc

SEQ ID NO: 1322904 - RNA, 19 nt, Homo sapiens
  misc_RNA (1)...(19): siRNA sense strand
uaugucaacaaacggaaua

SEQ ID NO: 1322905 - RNA, 19 nt, Homo sapiens
  misc_RNA (1)...(19): siRNA sense strand
gcuacagcccgaccuacaa

SEQ ID NO: 1322906 - RNA, 19 nt, Homo sapiens
  misc_RNA (1)...(19): siRNA sense strand
acacgucaccggagagaug

SEQ ID NO: 1322907 - RNA, 19 nt, Homo sapiens
  misc_RNA (1)...(19): siRNA sense strand
aggacaagcacuacggaua

SEQ ID NO: 1322908 - RNA, 19 nt, Homo sapiens
  misc_RNA (1)...(19): siRNA sense strand
caggaucacuguggaaucg

SEQ ID NO: 1322909 - RNA, 19 nt, Homo sapiens
  misc_RNA (1)...(19): siRNA sense strand
caucauggccgagaucuac

SEQ ID NO: 1322910 - RNA, 19 nt, Homo sapiens
  misc_RNA (1)...(19): siRNA sense strand
gaugagcuggucaacuaug

SEQ ID NO: 1322911 - RNA, 19 nt, Homo sapiens
  misc_RNA (1)...(19): siRNA sense strand
ccacagugucccaccauca

SEQ ID NO: 1322912 - RNA, 19 nt, Homo sapiens
  misc_RNA (1)...(19): siRNA sense strand
caacacgucaccggagaga

SEQ ID NO: 1322913 - RNA, 19 nt, Homo sapiens
  misc_RNA (1)...(19): siRNA sense strand
caagcacuacggauacaau

SEQ ID NO: 1322914 - RNA, 19 nt, Homo sapiens
  misc_RNA (1)...(19): siRNA sense strand
agucaggaguguaccaaca

SEQ ID NO: 1322915 - RNA, 19 nt, Homo sapiens
  misc_RNA (1)...(19): siRNA sense strand
cggacuuccugcucuacaa

SEQ ID NO: 1322916 - RNA, 19 nt, Homo sapiens
  misc_RNA (1)...(19): siRNA sense strand
gaucugcauccacaccaau

SEQ ID NO: 1322917 - RNA, 19 nt, Homo sapiens
  misc_RNA (1)...(19): siRNA sense strand
uggaaucgaaucagaagug

SEQ ID NO: 1322918 - RNA, 19 nt, Homo sapiens
  misc_RNA (1)...(19): siRNA sense strand
ggagcaggcccucuuucca

SEQ ID NO: 1322919 - RNA, 19 nt, Homo sapiens
  misc_RNA (1)...(19): siRNA sense strand
cgggaacaauggccacagu

SEQ ID NO: 1322920 - RNA, 19 nt, Homo sapiens
  misc_RNA (1)...(19): siRNA sense strand
agaagugguggcuggaauu

SEQ ID NO: 1322921 - RNA, 19 nt, Homo sapiens
  misc_RNA (1)...(19): siRNA sense strand
ggacuuccugcucuacaag

SEQ ID NO: 1322922 - RNA, 19 nt, Homo sapiens
  misc_RNA (1)...(19): siRNA sense strand
gguuucugguggccucuau

SEQ ID NO: 1322923 - RNA, 19 nt, Homo sapiens
  misc_RNA (1)...(19): siRNA sense strand
acuguggaaucgaaucaga

SEQ ID NO: 1322924 - RNA, 19 nt, Homo sapiens
  misc_RNA (1)...(19): siRNA sense strand
cggcuguaaugguggcuau

SEQ ID NO: 1322925 - RNA, 19 nt, Homo sapiens
  misc_RNA (1)...(19): siRNA sense strand
ggaugagcuggucaacuau

SEQ ID NO: 1322926 - RNA, 19 nt, Homo sapiens
  misc_RNA (1)...(19): siRNA sense strand
agggagcuuucucugugua

SEQ ID NO: 1322927 - RNA, 19 nt, Homo sapiens
  misc_RNA (1)...(19): siRNA sense strand
cccagagaguuauguuuac

SEQ ID NO: 1322928 - RNA, 19 nt, Homo sapiens
  misc_RNA (1)...(19): siRNA sense strand
ccucuaugaaucccaugua

SEQ ID NO: 1322929 - RNA, 19 nt, Homo sapiens
  misc_RNA (1)...(19): siRNA sense strand
cugguggccucuaugaauc

SEQ ID NO: 1322930 - RNA, 19 nt, Homo sapiens
  misc_RNA (1)...(19): siRNA sense strand
ucugguggccucuaugaau

SEQ ID NO: 1322931 - RNA, 19 nt, Homo sapiens
  misc_RNA (1)...(19): siRNA sense strand
cggaugagcuggucaacua

SEQ ID NO: 1322932 - RNA, 19 nt, Homo sapiens
  misc_RNA (1)...(19): siRNA sense strand
ggucaacuaugucaacaaa

SEQ ID NO: 1322933 - RNA, 19 nt, Homo sapiens
  misc_RNA (1)...(19): siRNA sense strand
gacaauggcuucuuuaaaa

SEQ ID NO: 1322934 - RNA, 19 nt, Homo sapiens
  misc_RNA (1)...(19): siRNA sense strand
gcuuggaacuucuggacaa

SEQ ID NO: 1322935 - RNA, 19 nt, Homo sapiens
  misc_RNA (1)...(19): siRNA sense strand
ugacaauggcuucuuuaaa

SEQ ID NO: 1322936 - RNA, 19 nt, Homo sapiens
  misc_RNA (1)...(19): siRNA sense strand
gggugacaauggcuucuuu

SEQ ID NO: 1322937 - RNA, 19 nt, Homo sapiens
  misc_RNA (1)...(19): siRNA sense strand
ggacaagcacuacggauac

SEQ ID NO: 1322938 - RNA, 19 nt, Homo sapiens
  misc_RNA (1)...(19): siRNA sense strand
ggaucacuguggaaucgaa

SEQ ID NO: 1322939 - RNA, 19 nt, Homo sapiens
  misc_RNA (1)...(19): siRNA sense strand
uugaagaggcuauguggua

SEQ ID NO: 1322940 - RNA, 19 nt, Homo sapiens
  misc_RNA (1)...(19): siRNA sense strand
ggagcuuucucuguguauu

SEQ ID NO: 1322941 - RNA, 19 nt, Homo sapiens
  misc_RNA (1)...(19): siRNA sense strand
acaaacaggacaagcacua

SEQ ID NO: 1322942 - RNA, 19 nt, Homo sapiens
  misc_RNA (1)...(19): siRNA sense strand
ggaacaauggccacagugu

SEQ ID NO: 1322943 - RNA, 19 nt, Homo sapiens
  misc_RNA (1)...(19): siRNA sense strand
cagaagugguggcuggaau

SEQ ID NO: 1322944 - RNA, 19 nt, Homo sapiens
  misc_RNA (1)...(19): siRNA sense strand
gagggagcuuucucugugu

SEQ ID NO: 1322945 - RNA, 19 nt, Homo sapiens
  misc_RNA (1)...(19): siRNA sense strand
gagcaggcccucuuuccau

SEQ ID NO: 1322946 - RNA, 19 nt, Homo sapiens
  misc_RNA (1)...(19): siRNA sense strand
gacaagcacuacggauaca

SEQ ID NO: 1322947 - RNA, 19 nt, Homo sapiens
  misc_RNA (1)...(19): siRNA sense strand
ggugacaauggcuucuuua

SEQ ID NO: 1322948 - RNA, 19 nt, Homo sapiens
  misc_RNA (1)...(19): siRNA sense strand
ucaacuaugucaacaaacg

SEQ ID NO: 1322949 - RNA, 19 nt, Homo sapiens
  misc_RNA (1)...(19): siRNA sense strand
gugacaauggcuucuuuaa

SEQ ID NO: 1322950 - RNA, 19 nt, Homo sapiens
  misc_RNA (1)...(19): siRNA sense strand
gaucaguacugggaaaaga

SEQ ID NO: 1322951 - RNA, 19 nt, Homo sapiens
  misc_RNA (1)...(19): siRNA sense strand
gagcuggucaacuauguca

SEQ ID NO: 1322952 - RNA, 19 nt, Homo sapiens
  misc_RNA (1)...(19): siRNA sense strand
gaagugguggcuggaauuc

SEQ ID NO: 1322953 - RNA, 19 nt, Homo sapiens
  misc_RNA (1)...(19): siRNA sense strand
gagaauggcacacccuacu

SEQ ID NO: 1322954 - RNA, 19 nt, Homo sapiens
  misc_RNA (1)...(19): siRNA sense strand
cuacagcccgaccuacaaa

SEQ ID NO: 1322955 - RNA, 19 nt, Homo sapiens
  misc_RNA (1)...(19): siRNA sense strand
gaauuccacgcaccgauca

SEQ ID NO: 1322956 - RNA, 19 nt, Homo sapiens
  misc_RNA (1)...(19): siRNA sense strand
gaccugaagcugccugcaa

SEQ ID NO: 1322957 - RNA, 19 nt, Homo sapiens
  misc_RNA (1)...(19): siRNA sense strand
gagcuuucucuguguauuc

SEQ ID NO: 1322958 - RNA, 19 nt, Homo sapiens
  misc_RNA (1)...(19): siRNA sense strand
ggacaucauggccgagauc

SEQ ID NO: 1322959 - RNA, 19 nt, Homo sapiens
  misc_RNA (1)...(19): siRNA sense strand
uaugucaacaaacggaaua

SEQ ID NO: 1322960 - RNA, 19 nt, Homo sapiens
  misc_RNA (1)...(19): siRNA sense strand
gcuacagcccgaccuacaa

SEQ ID NO: 1322961 - RNA, 19 nt, Homo sapiens
  misc_RNA (1)...(19): siRNA sense strand
acacgucaccggagagaug

SEQ ID NO: 1322962 - RNA, 19 nt, Homo sapiens
  misc_RNA (1)...(19): siRNA sense strand
aggacaagcacuacggaua

SEQ ID NO: 1322963 - RNA, 19 nt, Homo sapiens
  misc_RNA (1)...(19): siRNA sense strand
caggaucacuguggaaucg

SEQ ID NO: 1322964 - RNA, 19 nt, Homo sapiens
  misc_RNA (1)...(19): siRNA sense strand
caucauggccgagaucuac

SEQ ID NO: 1322965 - RNA, 19 nt, Homo sapiens
  misc_RNA (1)...(19): siRNA sense strand
gaugagcuggucaacuaug

SEQ ID NO: 1322966 - RNA, 19 nt, Homo sapiens
  misc_RNA (1)...(19): siRNA sense strand
ccacagugucccaccauca

SEQ ID NO: 1322967 - RNA, 19 nt, Homo sapiens
  misc_RNA (1)...(19): siRNA sense strand
caacacgucaccggagaga

SEQ ID NO: 1322968 - RNA, 19 nt, Homo sapiens
  misc_RNA (1)...(19): siRNA sense strand
caagcacuacggauacaau

SEQ ID NO: 1322969 - RNA, 19 nt, Homo sapiens
  misc_RNA (1)...(19): siRNA sense strand
agucaggaguguaccaaca

SEQ ID NO: 1322970 - RNA, 19 nt, Homo sapiens
  misc_RNA (1)...(19): siRNA sense strand
cggacuuccugcucuacaa

SEQ ID NO: 1322971 - RNA, 19 nt, Homo sapiens
  misc_RNA (1)...(19): siRNA sense strand
gaucugcauccacaccaau

SEQ ID NO: 1322972 - RNA, 19 nt, Homo sapiens
  misc_RNA (1)...(19): siRNA sense strand
uggaaucgaaucagaagug

SEQ ID NO: 1322973 - RNA, 19 nt, Homo sapiens
  misc_RNA (1)...(19): siRNA sense strand
ggagcaggcccucuuucca

SEQ ID NO: 1322974 - RNA, 19 nt, Homo sapiens
  misc_RNA (1)...(19): siRNA sense strand
cgggaacaauggccacagu

SEQ ID NO: 1322975 - RNA, 19 nt, Homo sapiens
  misc_RNA (1)...(19): siRNA sense strand
agaagugguggcuggaauu

SEQ ID NO: 1322976 - RNA, 19 nt, Homo sapiens
  misc_RNA (1)...(19): siRNA sense strand
ggacuuccugcucuacaag

SEQ ID NO: 1322977 - RNA, 19 nt, Homo sapiens
  misc_RNA (1)...(19): siRNA sense strand
gguuucugguggccucuau

SEQ ID NO: 1322978 - RNA, 19 nt, Homo sapiens
  misc_RNA (1)...(19): siRNA sense strand
acuguggaaucgaaucaga

SEQ ID NO: 1322979 - RNA, 19 nt, Homo sapiens
  misc_RNA (1)...(19): siRNA sense strand
cggcuguaaugguggcuau

SEQ ID NO: 1322980 - RNA, 19 nt, Homo sapiens
  misc_RNA (1)...(19): siRNA sense strand
ggaugagcuggucaacuau

SEQ ID NO: 1322981 - RNA, 19 nt, Homo sapiens
  misc_RNA (1)...(19): siRNA sense strand
agggagcuuucucugugua

SEQ ID NO: 1322982 - RNA, 19 nt, Homo sapiens
  misc_RNA (1)...(19): siRNA sense strand
cccagagaguuauguuuac

SEQ ID NO: 1322983 - RNA, 19 nt, Homo sapiens
  misc_RNA (1)...(19): siRNA sense strand
ccucuaugaaucccaugua

SEQ ID NO: 1322984 - RNA, 19 nt, Homo sapiens
  misc_RNA (1)...(19): siRNA sense strand
cugguggccucuaugaauc

SEQ ID NO: 1322985 - RNA, 19 nt, Homo sapiens
  misc_RNA (1)...(19): siRNA sense strand
ucugguggccucuaugaau

SEQ ID NO: 1322986 - RNA, 19 nt, Homo sapiens
  misc_RNA (1)...(19): siRNA sense strand
cggaugagcuggucaacua

SEQ ID NO: 1322987 - RNA, 19 nt, Homo sapiens
  misc_RNA (1)...(19): siRNA sense strand
ggucaacuaugucaacaaa

SEQ ID NO: 1322988 - RNA, 19 nt, Homo sapiens
  misc_RNA (1)...(19): siRNA sense strand
gacaauggcuucuuuaaaa

SEQ ID NO: 1322989 - RNA, 19 nt, Homo sapiens
  misc_RNA (1)...(19): siRNA sense strand
gcuuggaacuucuggacaa

SEQ ID NO: 1322990 - RNA, 19 nt, Homo sapiens
  misc_RNA (1)...(19): siRNA sense strand
ugacaauggcuucuuuaaa

SEQ ID NO: 1322991 - RNA, 19 nt, Homo sapiens
  misc_RNA (1)...(19): siRNA sense strand
gggugacaauggcuucuuu

SEQ ID NO: 1322992 - RNA, 19 nt, Homo sapiens
  misc_RNA (1)...(19): siRNA sense strand
ggacaagcacuacggauac

SEQ ID NO: 1322993 - RNA, 19 nt, Homo sapiens
  misc_RNA (1)...(19): siRNA sense strand
ggaucacuguggaaucgaa

SEQ ID NO: 1322994 - RNA, 19 nt, Homo sapiens
  misc_RNA (1)...(19): siRNA sense strand
uugaagaggcuauguggua

SEQ ID NO: 1322995 - RNA, 19 nt, Homo sapiens
  misc_RNA (1)...(19): siRNA sense strand
ggagcuuucucuguguauu

SEQ ID NO: 1322996 - RNA, 19 nt, Homo sapiens
  misc_RNA (1)...(19): siRNA sense strand
acaaacaggacaagcacua

SEQ ID NO: 1322997 - RNA, 19 nt, Homo sapiens
  misc_RNA (1)...(19): siRNA sense strand
ggaacaauggccacagugu

SEQ ID NO: 1322998 - RNA, 19 nt, Homo sapiens
  misc_RNA (1)...(19): siRNA sense strand
cagaagugguggcuggaau

SEQ ID NO: 1322999 - RNA, 19 nt, Homo sapiens
  misc_RNA (1)...(19): siRNA sense strand
gagggagcuuucucugugu

SEQ ID NO: 1323000 - RNA, 19 nt, Homo sapiens
  misc_RNA (1)...(19): siRNA sense strand
gagcaggcccucuuuccau

SEQ ID NO: 1323001 - RNA, 19 nt, Homo sapiens
  misc_RNA (1)...(19): siRNA sense strand
gacaagcacuacggauaca

SEQ ID NO: 1323002 - RNA, 19 nt, Homo sapiens
  misc_RNA (1)...(19): siRNA sense strand
ggugacaauggcuucuuua

SEQ ID NO: 1323003 - RNA, 19 nt, Homo sapiens
  misc_RNA (1)...(19): siRNA sense strand
ucaacuaugucaacaaacg

SEQ ID NO: 1323004 - RNA, 19 nt, Homo sapiens
  misc_RNA (1)...(19): siRNA sense strand
gugacaauggcuucuuuaa

SEQ ID NO: 1323005 - RNA, 19 nt, Homo sapiens
  misc_RNA (1)...(19): siRNA sense strand
gaucaguacugggaaaaga

SEQ ID NO: 1323006 - RNA, 19 nt, Homo sapiens
  misc_RNA (1)...(19): siRNA sense strand
gagcuggucaacuauguca

SEQ ID NO: 1323007 - RNA, 19 nt, Homo sapiens
  misc_RNA (1)...(19): siRNA sense strand
gaagugguggcuggaauuc

SEQ ID NO: 1323008 - RNA, 19 nt, Homo sapiens
  misc_RNA (1)...(19): siRNA sense strand
gagaauggcacacccuacu

SEQ ID NO: 1323009 - RNA, 19 nt, Homo sapiens
  misc_RNA (1)...(19): siRNA sense strand
cuacagcccgaccuacaaa

SEQ ID NO: 1323010 - RNA, 19 nt, Homo sapiens
  misc_RNA (1)...(19): siRNA sense strand
gaauuccacgcaccgauca

SEQ ID NO: 1323011 - RNA, 19 nt, Homo sapiens
  misc_RNA (1)...(19): siRNA sense strand
gaccugaagcugccugcaa

SEQ ID NO: 1323012 - RNA, 19 nt, Homo sapiens
  misc_RNA (1)...(19): siRNA sense strand
gagcuuucucuguguauuc

SEQ ID NO: 1323013 - RNA, 19 nt, Homo sapiens
  misc_RNA (1)...(19): siRNA sense strand
ggacaucauggccgagauc

SEQ ID NO: 1323014 - RNA, 19 nt, Homo sapiens
  misc_RNA (1)...(19): siRNA sense strand
uaugucaacaaacggaaua

SEQ ID NO: 1323015 - RNA, 19 nt, Homo sapiens
  misc_RNA (1)...(19): siRNA sense strand
gcuacagcccgaccuacaa

SEQ ID NO: 1323016 - RNA, 19 nt, Homo sapiens
  misc_RNA (1)...(19): siRNA sense strand
acacgucaccggagagaug

SEQ ID NO: 1323017 - RNA, 19 nt, Homo sapiens
  misc_RNA (1)...(19): siRNA sense strand
aggacaagcacuacggaua

SEQ ID NO: 1323018 - RNA, 19 nt, Homo sapiens
  misc_RNA (1)...(19): siRNA sense strand
caggaucacuguggaaucg

SEQ ID NO: 1323019 - RNA, 19 nt, Homo sapiens
  misc_RNA (1)...(19): siRNA sense strand
caucauggccgagaucuac

SEQ ID NO: 1323020 - RNA, 19 nt, Homo sapiens
  misc_RNA (1)...(19): siRNA sense strand
gaugagcuggucaacuaug

SEQ ID NO: 1323021 - RNA, 19 nt, Homo sapiens
  misc_RNA (1)...(19): siRNA sense strand
ccacagugucccaccauca

SEQ ID NO: 1323022 - RNA, 19 nt, Homo sapiens
  misc_RNA (1)...(19): siRNA sense strand
caacacgucaccggagaga

SEQ ID NO: 1323023 - RNA, 19 nt, Homo sapiens
  misc_RNA (1)...(19): siRNA sense strand
caagcacuacggauacaau

SEQ ID NO: 1323024 - RNA, 19 nt, Homo sapiens
  misc_RNA (1)...(19): siRNA sense strand
agucaggaguguaccaaca

SEQ ID NO: 1323025 - RNA, 19 nt, Homo sapiens
  misc_RNA (1)...(19): siRNA sense strand
cggacuuccugcucuacaa

SEQ ID NO: 1323026 - RNA, 19 nt, Homo sapiens
  misc_RNA (1)...(19): siRNA sense strand
gaucugcauccacaccaau

SEQ ID NO: 1323027 - RNA, 19 nt, Homo sapiens
  misc_RNA (1)...(19): siRNA sense strand
uggaaucgaaucagaagug

SEQ ID NO: 1323028 - RNA, 19 nt, Homo sapiens
  misc_RNA (1)...(19): siRNA sense strand
ggagcaggcccucuuucca

SEQ ID NO: 1323029 - RNA, 19 nt, Homo sapiens
  misc_RNA (1)...(19): siRNA sense strand
cgggaacaauggccacagu

SEQ ID NO: 1323030 - RNA, 19 nt, Homo sapiens
  misc_RNA (1)...(19): siRNA sense strand
agaagugguggcuggaauu

SEQ ID NO: 1323031 - RNA, 19 nt, Homo sapiens
  misc_RNA (1)...(19): siRNA sense strand
ggacuuccugcucuacaag

SEQ ID NO: 1323032 - RNA, 19 nt, Homo sapiens
  misc_RNA (1)...(19): siRNA sense strand
gguuucugguggccucuau

SEQ ID NO: 1323033 - RNA, 19 nt, Homo sapiens
  misc_RNA (1)...(19): siRNA sense strand
acuguggaaucgaaucaga

SEQ ID NO: 1323034 - RNA, 19 nt, Homo sapiens
  misc_RNA (1)...(19): siRNA sense strand
cggcuguaaugguggcuau

SEQ ID NO: 1323035 - RNA, 19 nt, Homo sapiens
  misc_RNA (1)...(19): siRNA sense strand
ggaugagcuggucaacuau

SEQ ID NO: 1323036 - RNA, 19 nt, Homo sapiens
  misc_RNA (1)...(19): siRNA sense strand
agggagcuuucucugugua

SEQ ID NO: 1323037 - RNA, 19 nt, Homo sapiens
  misc_RNA (1)...(19): siRNA sense strand
cccagagaguuauguuuac

SEQ ID NO: 1323038 - RNA, 19 nt, Homo sapiens
  misc_RNA (1)...(19): siRNA sense strand
ccucuaugaaucccaugua

SEQ ID NO: 1323039 - RNA, 19 nt, Homo sapiens
  misc_RNA (1)...(19): siRNA sense strand
cugguggccucuaugaauc

SEQ ID NO: 1323040 - RNA, 19 nt, Homo sapiens
  misc_RNA (1)...(19): siRNA sense strand
ucugguggccucuaugaau

SEQ ID NO: 1323041 - RNA, 19 nt, Homo sapiens
  misc_RNA (1)...(19): siRNA sense strand
cggaugagcuggucaacua

SEQ ID NO: 1323042 - RNA, 19 nt, Homo sapiens
  misc_RNA (1)...(19): siRNA sense strand
ggucaacuaugucaacaaa

SEQ ID NO: 1323043 - RNA, 19 nt, Homo sapiens
  misc_RNA (1)...(19): siRNA sense strand
gacaauggcuucuuuaaaa

SEQ ID NO: 1323044 - RNA, 19 nt, Homo sapiens
  misc_RNA (1)...(19): siRNA sense strand
gcuuggaacuucuggacaa

SEQ ID NO: 1323045 - RNA, 19 nt, Homo sapiens
  misc_RNA (1)...(19): siRNA sense strand
ugacaauggcuucuuuaaa

SEQ ID NO: 1323046 - RNA, 19 nt, Homo sapiens
  misc_RNA (1)...(19): siRNA sense strand
gggugacaauggcuucuuu

SEQ ID NO: 1323047 - RNA, 19 nt, Homo sapiens
  misc_RNA (1)...(19): siRNA sense strand
ggacaagcacuacggauac

SEQ ID NO: 1323048 - RNA, 19 nt, Homo sapiens
  misc_RNA (1)...(19): siRNA sense strand
ggaucacuguggaaucgaa

SEQ ID NO: 1323049 - RNA, 19 nt, Homo sapiens
  misc_RNA (1)...(19): siRNA sense strand
uugaagaggcuauguggua

SEQ ID NO: 1323050 - RNA, 19 nt, Homo sapiens
  misc_RNA (1)...(19): siRNA sense strand
ggagcuuucucuguguauu

SEQ ID NO: 1323051 - RNA, 19 nt, Homo sapiens
  misc_RNA (1)...(19): siRNA sense strand
acaaacaggacaagcacua

SEQ ID NO: 1323052 - RNA, 19 nt, Homo sapiens
  misc_RNA (1)...(19): siRNA sense strand
ggaacaauggccacagugu

SEQ ID NO: 1323053 - RNA, 19 nt, Homo sapiens
  misc_RNA (1)...(19): siRNA sense strand
cagaagugguggcuggaau

SEQ ID NO: 1323054 - RNA, 19 nt, Homo sapiens
  misc_RNA (1)...(19): siRNA sense strand
gagggagcuuucucugugu

SEQ ID NO: 1323055 - RNA, 19 nt, Homo sapiens
  misc_RNA (1)...(19): siRNA sense strand
gagcaggcccucuuuccau

SEQ ID NO: 1323056 - RNA, 19 nt, Homo sapiens
  misc_RNA (1)...(19): siRNA sense strand
gacaagcacuacggauaca

SEQ ID NO: 1323057 - RNA, 19 nt, Homo sapiens
  misc_RNA (1)...(19): siRNA sense strand
ggugacaauggcuucuuua

SEQ ID NO: 1323058 - RNA, 19 nt, Homo sapiens
  misc_RNA (1)...(19): siRNA sense strand
ucaacuaugucaacaaacg

SEQ ID NO: 1323059 - RNA, 19 nt, Homo sapiens
  misc_RNA (1)...(19): siRNA sense strand
gugacaauggcuucuuuaa

SEQ ID NO: 1323060 - RNA, 19 nt, Homo sapiens
  misc_RNA (1)...(19): siRNA sense strand
gaucaguacugggaaaaga

SEQ ID NO: 1323061 - RNA, 19 nt, Homo sapiens
  misc_RNA (1)...(19): siRNA sense strand
gagcuggucaacuauguca

SEQ ID NO: 1323062 - RNA, 19 nt, Homo sapiens
  misc_RNA (1)...(19): siRNA sense strand
gaagugguggcuggaauuc

SEQ ID NO: 1323063 - RNA, 19 nt, Homo sapiens
  misc_RNA (1)...(19): siRNA sense strand
gagaauggcacacccuacu

SEQ ID NO: 1323064 - RNA, 19 nt, Homo sapiens
  misc_RNA (1)...(19): siRNA sense strand
cuacagcccgaccuacaaa

SEQ ID NO: 1323065 - RNA, 19 nt, Homo sapiens
  misc_RNA (1)...(19): siRNA sense strand
gaauuccacgcaccgauca

SEQ ID NO: 1323066 - RNA, 19 nt, Homo sapiens
  misc_RNA (1)...(19): siRNA sense strand
gaccugaagcugccugcaa

SEQ ID NO: 1323067 - RNA, 19 nt, Homo sapiens
  misc_RNA (1)...(19): siRNA sense strand
gagcuuucucuguguauuc

SEQ ID NO: 1323068 - RNA, 19 nt, Homo sapiens
  misc_RNA (1)...(19): siRNA sense strand
ggacaucauggccgagauc

SEQ ID NO: 1323069 - RNA, 19 nt, Homo sapiens
  misc_RNA (1)...(19): siRNA sense strand
uaugucaacaaacggaaua

SEQ ID NO: 1323070 - RNA, 19 nt, Homo sapiens
  misc_RNA (1)...(19): siRNA sense strand
gcuacagcccgaccuacaa

SEQ ID NO: 1323071 - RNA, 19 nt, Homo sapiens
  misc_RNA (1)...(19): siRNA sense strand
acacgucaccggagagaug

SEQ ID NO: 1323072 - RNA, 19 nt, Homo sapiens
  misc_RNA (1)...(19): siRNA sense strand
aggacaagcacuacggaua

SEQ ID NO: 1323073 - RNA, 19 nt, Homo sapiens
  misc_RNA (1)...(19): siRNA sense strand
caggaucacuguggaaucg

SEQ ID NO: 1323074 - RNA, 19 nt, Homo sapiens
  misc_RNA (1)...(19): siRNA sense strand
caucauggccgagaucuac

SEQ ID NO: 1323075 - RNA, 19 nt, Homo sapiens
  misc_RNA (1)...(19): siRNA sense strand
gaugagcuggucaacuaug

SEQ ID NO: 1323076 - RNA, 19 nt, Homo sapiens
  misc_RNA (1)...(19): siRNA sense strand
ccacagugucccaccauca

SEQ ID NO: 1323077 - RNA, 19 nt, Homo sapiens
  misc_RNA (1)...(19): siRNA sense strand
caacacgucaccggagaga

SEQ ID NO: 1323078 - RNA, 19 nt, Homo sapiens
  misc_RNA (1)...(19): siRNA sense strand
caagcacuacggauacaau

SEQ ID NO: 1323079 - RNA, 19 nt, Homo sapiens
  misc_RNA (1)...(19): siRNA sense strand
agucaggaguguaccaaca

SEQ ID NO: 1323080 - RNA, 19 nt, Homo sapiens
  misc_RNA (1)...(19): siRNA sense strand
cggacuuccugcucuacaa

SEQ ID NO: 1323081 - RNA, 19 nt, Homo sapiens
  misc_RNA (1)...(19): siRNA sense strand
gaucugcauccacaccaau

SEQ ID NO: 1323082 - RNA, 19 nt, Homo sapiens
  misc_RNA (1)...(19): siRNA sense strand
uggaaucgaaucagaagug

SEQ ID NO: 1323083 - RNA, 19 nt, Homo sapiens
  misc_RNA (1)...(19): siRNA sense strand
ggagcaggcccucuuucca

SEQ ID NO: 1323084 - RNA, 19 nt, Homo sapiens
  misc_RNA (1)...(19): siRNA sense strand
cgggaacaauggccacagu

SEQ ID NO: 1323085 - RNA, 19 nt, Homo sapiens
  misc_RNA (1)...(19): siRNA sense strand
agaagugguggcuggaauu

SEQ ID NO: 1323086 - RNA, 19 nt, Homo sapiens
  misc_RNA (1)...(19): siRNA sense strand
ggacuuccugcucuacaag

SEQ ID NO: 1323087 - RNA, 19 nt, Homo sapiens
  misc_RNA (1)...(19): siRNA sense strand
gguuucugguggccucuau

SEQ ID NO: 1323088 - RNA, 19 nt, Homo sapiens
  misc_RNA (1)...(19): siRNA sense strand
acuguggaaucgaaucaga

SEQ ID NO: 1323089 - RNA, 19 nt, Homo sapiens
  misc_RNA (1)...(19): siRNA sense strand
cggcuguaaugguggcuau

SEQ ID NO: 1323090 - RNA, 19 nt, Homo sapiens
  misc_RNA (1)...(19): siRNA sense strand
ggaugagcuggucaacuau

SEQ ID NO: 1323091 - RNA, 19 nt, Homo sapiens
  misc_RNA (1)...(19): siRNA sense strand
agggagcuuucucugugua

SEQ ID NO: 1323092 - RNA, 19 nt, Homo sapiens
  misc_RNA (1)...(19): siRNA sense strand
cccagagaguuauguuuac

SEQ ID NO: 1323093 - RNA, 19 nt, Homo sapiens
  misc_RNA (1)...(19): siRNA sense strand
ccucuaugaaucccaugua

SEQ ID NO: 1323094 - RNA, 19 nt, Homo sapiens
  misc_RNA (1)...(19): siRNA sense strand
cugguggccucuaugaauc

SEQ ID NO: 1323095 - RNA, 19 nt, Homo sapiens
  misc_RNA (1)...(19): siRNA sense strand
ucugguggccucuaugaau

SEQ ID NO: 1323096 - RNA, 19 nt, Homo sapiens
  misc_RNA (1)...(19): siRNA sense strand
cggaugagcuggucaacua

SEQ ID NO: 1323097 - RNA, 19 nt, Homo sapiens
  misc_RNA (1)...(19): siRNA sense strand
ggucaacuaugucaacaaa

SEQ ID NO: 1323098 - RNA, 19 nt, Homo sapiens
  misc_RNA (1)...(19): siRNA sense strand
gacaauggcuucuuuaaaa

SEQ ID NO: 1323099 - RNA, 19 nt, Homo sapiens
  misc_RNA (1)...(19): siRNA sense strand
gcuuggaacuucuggacaa

SEQ ID NO: 1323100 - RNA, 19 nt, Homo sapiens
  misc_RNA (1)...(19): siRNA sense strand
ugacaauggcuucuuuaaa

SEQ ID NO: 1323101 - RNA, 19 nt, Homo sapiens
  misc_RNA (1)...(19): siRNA sense strand
gggugacaauggcuucuuu

SEQ ID NO: 1323102 - RNA, 19 nt, Homo sapiens
  misc_RNA (1)...(19): siRNA sense strand
ggacaagcacuacggauac

SEQ ID NO: 1323103 - RNA, 19 nt, Homo sapiens
  misc_RNA (1)...(19): siRNA sense strand
ggaucacuguggaaucgaa

SEQ ID NO: 1323104 - RNA, 19 nt, Homo sapiens
  misc_RNA (1)...(19): siRNA sense strand
uugaagaggcuauguggua

SEQ ID NO: 1323105 - RNA, 19 nt, Homo sapiens
  misc_RNA (1)...(19): siRNA sense strand
ggagcuuucucuguguauu

SEQ ID NO: 1323106 - RNA, 19 nt, Homo sapiens
  misc_RNA (1)...(19): siRNA sense strand
acaaacaggacaagcacua

SEQ ID NO: 1323107 - RNA, 19 nt, Homo sapiens
  misc_RNA (1)...(19): siRNA sense strand
ggaacaauggccacagugu

SEQ ID NO: 1323108 - RNA, 19 nt, Homo sapiens
  misc_RNA (1)...(19): siRNA sense strand
cagaagugguggcuggaau

SEQ ID NO: 1323109 - RNA, 19 nt, Homo sapiens
  misc_RNA (1)...(19): siRNA sense strand
gagggagcuuucucugugu

SEQ ID NO: 1323110 - RNA, 19 nt, Homo sapiens
  misc_RNA (1)...(19): siRNA sense strand
gagcaggcccucuuuccau

SEQ ID NO: 1323111 - RNA, 19 nt, Homo sapiens
  misc_RNA (1)...(19): siRNA sense strand
gacaagcacuacggauaca

SEQ ID NO: 1323112 - RNA, 19 nt, Homo sapiens
  misc_RNA (1)...(19): siRNA sense strand
ggugacaauggcuucuuua

SEQ ID NO: 1323113 - RNA, 19 nt, Homo sapiens
  misc_RNA (1)...(19): siRNA sense strand
ucaacuaugucaacaaacg

SEQ ID NO: 1323114 - RNA, 19 nt, Homo sapiens
  misc_RNA (1)...(19): siRNA sense strand
gugacaauggcuucuuuaa

SEQ ID NO: 1323115 - RNA, 19 nt, Homo sapiens
  misc_RNA (1)...(19): siRNA sense strand
gaucaguacugggaaaaga

SEQ ID NO: 1323116 - RNA, 19 nt, Homo sapiens
  misc_RNA (1)...(19): siRNA sense strand
gagcuggucaacuauguca

SEQ ID NO: 1323117 - RNA, 19 nt, Homo sapiens
  misc_RNA (1)...(19): siRNA sense strand
gaagugguggcuggaauuc

SEQ ID NO: 1323118 - RNA, 19 nt, Homo sapiens
  misc_RNA (1)...(19): siRNA sense strand
gagaauggcacacccuacu

SEQ ID NO: 1323119 - RNA, 19 nt, Homo sapiens
  misc_RNA (1)...(19): siRNA sense strand
cuacagcccgaccuacaaa

SEQ ID NO: 1323120 - RNA, 19 nt, Homo sapiens
  misc_RNA (1)...(19): siRNA sense strand
gaauuccacgcaccgauca

SEQ ID NO: 1323121 - RNA, 19 nt, Homo sapiens
  misc_RNA (1)...(19): siRNA sense strand
gaccugaagcugccugcaa

SEQ ID NO: 1323122 - RNA, 19 nt, Homo sapiens
  misc_RNA (1)...(19): siRNA sense strand
gagcuuucucuguguauuc

SEQ ID NO: 1323123 - RNA, 19 nt, Homo sapiens
  misc_RNA (1)...(19): siRNA sense strand
ggacaucauggccgagauc

SEQ ID NO: 1323124 - RNA, 19 nt, Homo sapiens
  misc_RNA (1)...(19): siRNA sense strand
uaugucaacaaacggaaua

SEQ ID NO: 1323125 - RNA, 19 nt, Homo sapiens
  misc_RNA (1)...(19): siRNA sense strand
gcuacagcccgaccuacaa

SEQ ID NO: 1323126 - RNA, 19 nt, Homo sapiens
  misc_RNA (1)...(19): siRNA sense strand
acacgucaccggagagaug

SEQ ID NO: 1323127 - RNA, 19 nt, Homo sapiens
  misc_RNA (1)...(19): siRNA sense strand
aggacaagcacuacggaua

SEQ ID NO: 1323128 - RNA, 19 nt, Homo sapiens
  misc_RNA (1)...(19): siRNA sense strand
caggaucacuguggaaucg

SEQ ID NO: 1323129 - RNA, 19 nt, Homo sapiens
  misc_RNA (1)...(19): siRNA sense strand
caucauggccgagaucuac

SEQ ID NO: 1323130 - RNA, 19 nt, Homo sapiens
  misc_RNA (1)...(19): siRNA sense strand
gaugagcuggucaacuaug

SEQ ID NO: 1323131 - RNA, 19 nt, Homo sapiens
  misc_RNA (1)...(19): siRNA sense strand
ccacagugucccaccauca

SEQ ID NO: 1323132 - RNA, 19 nt, Homo sapiens
  misc_RNA (1)...(19): siRNA sense strand
caacacgucaccggagaga

SEQ ID NO: 1323133 - RNA, 19 nt, Homo sapiens
  misc_RNA (1)...(19): siRNA sense strand
caagcacuacggauacaau

SEQ ID NO: 1323134 - RNA, 19 nt, Homo sapiens
  misc_RNA (1)...(19): siRNA sense strand
agucaggaguguaccaaca

SEQ ID NO: 1323135 - RNA, 19 nt, Homo sapiens
  misc_RNA (1)...(19): siRNA sense strand
cggacuuccugcucuacaa

SEQ ID NO: 1323136 - RNA, 19 nt, Homo sapiens
  misc_RNA (1)...(19): siRNA sense strand
gaucugcauccacaccaau

SEQ ID NO: 1323137 - RNA, 19 nt, Homo sapiens
  misc_RNA (1)...(19): siRNA sense strand
uggaaucgaaucagaagug

SEQ ID NO: 1323138 - RNA, 19 nt, Homo sapiens
  misc_RNA (1)...(19): siRNA sense strand
ggagcaggcccucuuucca

SEQ ID NO: 1323139 - RNA, 19 nt, Homo sapiens
  misc_RNA (1)...(19): siRNA sense strand
cgggaacaauggccacagu

SEQ ID NO: 1323140 - RNA, 19 nt, Homo sapiens
  misc_RNA (1)...(19): siRNA sense strand
agaagugguggcuggaauu

SEQ ID NO: 1323141 - RNA, 19 nt, Homo sapiens
  misc_RNA (1)...(19): siRNA sense strand
ggacuuccugcucuacaag

SEQ ID NO: 1323142 - RNA, 19 nt, Homo sapiens
  misc_RNA (1)...(19): siRNA sense strand
gguuucugguggccucuau

SEQ ID NO: 1323143 - RNA, 19 nt, Homo sapiens
  misc_RNA (1)...(19): siRNA sense strand
acuguggaaucgaaucaga

SEQ ID NO: 1323144 - RNA, 19 nt, Homo sapiens
  misc_RNA (1)...(19): siRNA sense strand
cggcuguaaugguggcuau

SEQ ID NO: 1323145 - RNA, 19 nt, Homo sapiens
  misc_RNA (1)...(19): siRNA sense strand
ggaugagcuggucaacuau

SEQ ID NO: 1323146 - RNA, 19 nt, Homo sapiens
  misc_RNA (1)...(19): siRNA sense strand
agggagcuuucucugugua

SEQ ID NO: 1323147 - RNA, 19 nt, Homo sapiens
  misc_RNA (1)...(19): siRNA sense strand
cccagagaguuauguuuac

SEQ ID NO: 1323148 - RNA, 19 nt, Homo sapiens
  misc_RNA (1)...(19): siRNA sense strand
ccucuaugaaucccaugua

SEQ ID NO: 1323149 - RNA, 19 nt, Homo sapiens
  misc_RNA (1)...(19): siRNA sense strand
cugguggccucuaugaauc

SEQ ID NO: 1323150 - RNA, 19 nt, Homo sapiens
  misc_RNA (1)...(19): siRNA sense strand
ucugguggccucuaugaau

SEQ ID NO: 1323151 - RNA, 19 nt, Homo sapiens
  misc_RNA (1)...(19): siRNA sense strand
cggaugagcuggucaacua

SEQ ID NO: 1323152 - RNA, 19 nt, Homo sapiens
  misc_RNA (1)...(19): siRNA sense strand
ggucaacuaugucaacaaa

SEQ ID NO: 1323153 - RNA, 19 nt, Homo sapiens
  misc_RNA (1)...(19): siRNA sense strand
gacaauggcuucuuuaaaa

SEQ ID NO: 1323154 - RNA, 19 nt, Homo sapiens
  misc_RNA (1)...(19): siRNA sense strand
gcuuggaacuucuggacaa

SEQ ID NO: 1323155 - RNA, 19 nt, Homo sapiens
  misc_RNA (1)...(19): siRNA sense strand
ugacaauggcuucuuuaaa

SEQ ID NO: 1323156 - RNA, 19 nt, Homo sapiens
  misc_RNA (1)...(19): siRNA sense strand
gggugacaauggcuucuuu

SEQ ID NO: 1323157 - RNA, 19 nt, Homo sapiens
  misc_RNA (1)...(19): siRNA sense strand
ggacaagcacuacggauac

SEQ ID NO: 1323158 - RNA, 19 nt, Homo sapiens
  misc_RNA (1)...(19): siRNA sense strand
ggaucacuguggaaucgaa

SEQ ID NO: 1323159 - RNA, 19 nt, Homo sapiens
  misc_RNA (1)...(19): siRNA sense strand
uugaagaggcuauguggua

SEQ ID NO: 1323160 - RNA, 19 nt, Homo sapiens
  misc_RNA (1)...(19): siRNA sense strand
ggagcuuucucuguguauu

SEQ ID NO: 1323161 - RNA, 19 nt, Homo sapiens
  misc_RNA (1)...(19): siRNA sense strand
acaaacaggacaagcacua

SEQ ID NO: 1323162 - RNA, 19 nt, Homo sapiens
  misc_RNA (1)...(19): siRNA sense strand
ggaacaauggccacagugu

SEQ ID NO: 1323163 - RNA, 19 nt, Homo sapiens
  misc_RNA (1)...(19): siRNA sense strand
cagaagugguggcuggaau

SEQ ID NO: 1323164 - RNA, 19 nt, Homo sapiens
  misc_RNA (1)...(19): siRNA sense strand
gagggagcuuucucugugu

SEQ ID NO: 1323165 - RNA, 19 nt, Homo sapiens
  misc_RNA (1)...(19): siRNA sense strand
gagcaggcccucuuuccau

SEQ ID NO: 1323166 - RNA, 19 nt, Homo sapiens
  misc_RNA (1)...(19): siRNA sense strand
gacaagcacuacggauaca

SEQ ID NO: 1323167 - RNA, 19 nt, Homo sapiens
  misc_RNA (1)...(19): siRNA sense strand
ggugacaauggcuucuuua

SEQ ID NO: 1323168 - RNA, 19 nt, Homo sapiens
  misc_RNA (1)...(19): siRNA sense strand
ucaacuaugucaacaaacg

SEQ ID NO: 1323169 - RNA, 19 nt, Homo sapiens
  misc_RNA (1)...(19): siRNA sense strand
gugacaauggcuucuuuaa

SEQ ID NO: 1323170 - RNA, 19 nt, Homo sapiens
  misc_RNA (1)...(19): siRNA sense strand
gaucaguacugggaaaaga

SEQ ID NO: 1323171 - RNA, 19 nt, Homo sapiens
  misc_RNA (1)...(19): siRNA sense strand
gagcuggucaacuauguca

SEQ ID NO: 1323172 - RNA, 19 nt, Homo sapiens
  misc_RNA (1)...(19): siRNA sense strand
gaagugguggcuggaauuc

SEQ ID NO: 1323173 - RNA, 19 nt, Homo sapiens
  misc_RNA (1)...(19): siRNA sense strand
gagaauggcacacccuacu

SEQ ID NO: 1323174 - RNA, 19 nt, Homo sapiens
  misc_RNA (1)...(19): siRNA sense strand
cuacagcccgaccuacaaa

SEQ ID NO: 1323175 - RNA, 19 nt, Homo sapiens
  misc_RNA (1)...(19): siRNA sense strand
gaauuccacgcaccgauca

SEQ ID NO: 1323176 - RNA, 19 nt, Homo sapiens
  misc_RNA (1)...(19): siRNA sense strand
gaccugaagcugccugcaa

SEQ ID NO: 1323177 - RNA, 19 nt, Homo sapiens
  misc_RNA (1)...(19): siRNA sense strand
gagcuuucucuguguauuc

SEQ ID NO: 1323178 - RNA, 19 nt, Homo sapiens
  misc_RNA (1)...(19): siRNA sense strand
ggacaucauggccgagauc

SEQ ID NO: 1323179 - RNA, 19 nt, Homo sapiens
  misc_RNA (1)...(19): siRNA sense strand
uaugucaacaaacggaaua

SEQ ID NO: 1323180 - RNA, 19 nt, Homo sapiens
  misc_RNA (1)...(19): siRNA sense strand
gcuacagcccgaccuacaa

SEQ ID NO: 1323181 - RNA, 19 nt, Homo sapiens
  misc_RNA (1)...(19): siRNA sense strand
acacgucaccggagagaug

SEQ ID NO: 1323182 - RNA, 19 nt, Homo sapiens
  misc_RNA (1)...(19): siRNA sense strand
aggacaagcacuacggaua

SEQ ID NO: 1323183 - RNA, 19 nt, Homo sapiens
  misc_RNA (1)...(19): siRNA sense strand
caggaucacuguggaaucg

SEQ ID NO: 1323184 - RNA, 19 nt, Homo sapiens
  misc_RNA (1)...(19): siRNA sense strand
caucauggccgagaucuac

SEQ ID NO: 1323185 - RNA, 19 nt, Homo sapiens
  misc_RNA (1)...(19): siRNA sense strand
gaugagcuggucaacuaug

SEQ ID NO: 1323186 - RNA, 19 nt, Homo sapiens
  misc_RNA (1)...(19): siRNA sense strand
ccacagugucccaccauca

SEQ ID NO: 1323187 - RNA, 19 nt, Homo sapiens
  misc_RNA (1)...(19): siRNA sense strand
caacacgucaccggagaga

SEQ ID NO: 1323188 - RNA, 19 nt, Homo sapiens
  misc_RNA (1)...(19): siRNA sense strand
caagcacuacggauacaau

SEQ ID NO: 1323189 - RNA, 19 nt, Homo sapiens
  misc_RNA (1)...(19): siRNA sense strand
agucaggaguguaccaaca

SEQ ID NO: 1323190 - RNA, 19 nt, Homo sapiens
  misc_RNA (1)...(19): siRNA sense strand
cggacuuccugcucuacaa

SEQ ID NO: 1323191 - RNA, 19 nt, Homo sapiens
  misc_RNA (1)...(19): siRNA sense strand
gaucugcauccacaccaau

SEQ ID NO: 1323192 - RNA, 19 nt, Homo sapiens
  misc_RNA (1)...(19): siRNA sense strand
uggaaucgaaucagaagug

SEQ ID NO: 1323193 - RNA, 19 nt, Homo sapiens
  misc_RNA (1)...(19): siRNA sense strand
ggagcaggcccucuuucca

SEQ ID NO: 1323194 - RNA, 19 nt, Homo sapiens
  misc_RNA (1)...(19): siRNA sense strand
cgggaacaauggccacagu

SEQ ID NO: 1323195 - RNA, 19 nt, Homo sapiens
  misc_RNA (1)...(19): siRNA sense strand
agaagugguggcuggaauu

SEQ ID NO: 1323196 - RNA, 19 nt, Homo sapiens
  misc_RNA (1)...(19): siRNA sense strand
ggacuuccugcucuacaag

SEQ ID NO: 1323197 - RNA, 19 nt, Homo sapiens
  misc_RNA (1)...(19): siRNA sense strand
gguuucugguggccucuau

SEQ ID NO: 1323198 - RNA, 19 nt, Homo sapiens
  misc_RNA (1)...(19): siRNA sense strand
acuguggaaucgaaucaga

SEQ ID NO: 1323199 - RNA, 19 nt, Homo sapiens
  misc_RNA (1)...(19): siRNA sense strand
cggcuguaaugguggcuau

SEQ ID NO: 1323200 - RNA, 19 nt, Homo sapiens
  misc_RNA (1)...(19): siRNA sense strand
ggaugagcuggucaacuau

SEQ ID NO: 1323201 - RNA, 19 nt, Homo sapiens
  misc_RNA (1)...(19): siRNA sense strand
agggagcuuucucugugua

SEQ ID NO: 1323202 - RNA, 19 nt, Homo sapiens
  misc_RNA (1)...(19): siRNA sense strand
cccagagaguuauguuuac

SEQ ID NO: 1323203 - RNA, 19 nt, Homo sapiens
  misc_RNA (1)...(19): siRNA sense strand
ccucuaugaaucccaugua

SEQ ID NO: 1323204 - RNA, 19 nt, Homo sapiens
  misc_RNA (1)...(19): siRNA sense strand
cugguggccucuaugaauc

SEQ ID NO: 1323205 - RNA, 19 nt, Homo sapiens
  misc_RNA (1)...(19): siRNA sense strand
ucugguggccucuaugaau

SEQ ID NO: 1323206 - RNA, 19 nt, Homo sapiens
  misc_RNA (1)...(19): siRNA sense strand
cggaugagcuggucaacua

SEQ ID NO: 1323207 - RNA, 19 nt, Homo sapiens
  misc_RNA (1)...(19): siRNA sense strand
ggucaacuaugucaacaaa

SEQ ID NO: 1323208 - RNA, 19 nt, Homo sapiens
  misc_RNA (1)...(19): siRNA sense strand
gacaauggcuucuuuaaaa

SEQ ID NO: 1323209 - RNA, 19 nt, Homo sapiens
  misc_RNA (1)...(19): siRNA sense strand
gcuuggaacuucuggacaa

SEQ ID NO: 1323210 - RNA, 19 nt, Homo sapiens
  misc_RNA (1)...(19): siRNA sense strand
ugacaauggcuucuuuaaa

SEQ ID NO: 1323211 - RNA, 19 nt, Homo sapiens
  misc_RNA (1)...(19): siRNA sense strand
gggugacaauggcuucuuu

SEQ ID NO: 1323212 - RNA, 19 nt, Homo sapiens
  misc_RNA (1)...(19): siRNA sense strand
ggacaagcacuacggauac

SEQ ID NO: 1323213 - RNA, 19 nt, Homo sapiens
  misc_RNA (1)...(19): siRNA sense strand
ggaucacuguggaaucgaa

SEQ ID NO: 1323214 - RNA, 19 nt, Homo sapiens
  misc_RNA (1)...(19): siRNA sense strand
uugaagaggcuauguggua

SEQ ID NO: 1323215 - RNA, 19 nt, Homo sapiens
  misc_RNA (1)...(19): siRNA sense strand
ggagcuuucucuguguauu

SEQ ID NO: 1323216 - RNA, 19 nt, Homo sapiens
  misc_RNA (1)...(19): siRNA sense strand
acaaacaggacaagcacua

SEQ ID NO: 1323217 - RNA, 19 nt, Homo sapiens
  misc_RNA (1)...(19): siRNA sense strand
ggaacaauggccacagugu

SEQ ID NO: 1323218 - RNA, 19 nt, Homo sapiens
  misc_RNA (1)...(19): siRNA sense strand
cagaagugguggcuggaau

SEQ ID NO: 1323219 - RNA, 19 nt, Homo sapiens
  misc_RNA (1)...(19): siRNA sense strand
gagggagcuuucucugugu

SEQ ID NO: 1323220 - RNA, 19 nt, Homo sapiens
  misc_RNA (1)...(19): siRNA sense strand
gagcaggcccucuuuccau

SEQ ID NO: 1323221 - RNA, 19 nt, Homo sapiens
  misc_RNA (1)...(19): siRNA sense strand
gacaagcacuacggauaca

SEQ ID NO: 1323222 - RNA, 19 nt, Homo sapiens
  misc_RNA (1)...(19): siRNA sense strand
ggugacaauggcuucuuua

SEQ ID NO: 1323223 - RNA, 19 nt, Homo sapiens
  misc_RNA (1)...(19): siRNA sense strand
ucaacuaugucaacaaacg

SEQ ID NO: 1323224 - RNA, 19 nt, Homo sapiens
  misc_RNA (1)...(19): siRNA sense strand
gugacaauggcuucuuuaa

SEQ ID NO: 1323225 - RNA, 19 nt, Homo sapiens
  misc_RNA (1)...(19): siRNA sense strand
gaucaguacugggaaaaga

SEQ ID NO: 1323226 - RNA, 19 nt, Homo sapiens
  misc_RNA (1)...(19): siRNA sense strand
gagcuggucaacuauguca

SEQ ID NO: 1323227 - RNA, 19 nt, Homo sapiens
  misc_RNA (1)...(19): siRNA sense strand
gaagugguggcuggaauuc

SEQ ID NO: 1323228 - RNA, 19 nt, Homo sapiens
  misc_RNA (1)...(19): siRNA sense strand
gagaauggcacacccuacu

SEQ ID NO: 1323229 - RNA, 19 nt, Homo sapiens
  misc_RNA (1)...(19): siRNA sense strand
cuacagcccgaccuacaaa

SEQ ID NO: 1323230 - RNA, 19 nt, Homo sapiens
  misc_RNA (1)...(19): siRNA sense strand
gaauuccacgcaccgauca

SEQ ID NO: 1323231 - RNA, 19 nt, Homo sapiens
  misc_RNA (1)...(19): siRNA sense strand
gaccugaagcugccugcaa

SEQ ID NO: 1323232 - RNA, 19 nt, Homo sapiens
  misc_RNA (1)...(19): siRNA sense strand
gagcuuucucuguguauuc

SEQ ID NO: 1323233 - RNA, 19 nt, Homo sapiens
  misc_RNA (1)...(19): siRNA sense strand
ggacaucauggccgagauc

SEQ ID NO: 1323234 - RNA, 19 nt, Homo sapiens
  misc_RNA (1)...(19): siRNA sense strand
uaugucaacaaacggaaua

SEQ ID NO: 1323235 - RNA, 19 nt, Homo sapiens
  misc_RNA (1)...(19): siRNA sense strand
gcuacagcccgaccuacaa

SEQ ID NO: 1323236 - RNA, 19 nt, Homo sapiens
  misc_RNA (1)...(19): siRNA sense strand
acacgucaccggagagaug

SEQ ID NO: 1323237 - RNA, 19 nt, Homo sapiens
  misc_RNA (1)...(19): siRNA sense strand
aggacaagcacuacggaua

SEQ ID NO: 1323238 - RNA, 19 nt, Homo sapiens
  misc_RNA (1)...(19): siRNA sense strand
caggaucacuguggaaucg

SEQ ID NO: 1323239 - RNA, 19 nt, Homo sapiens
  misc_RNA (1)...(19): siRNA sense strand
caucauggccgagaucuac

SEQ ID NO: 1323240 - RNA, 19 nt, Homo sapiens
  misc_RNA (1)...(19): siRNA sense strand
gaugagcuggucaacuaug

SEQ ID NO: 1323241 - RNA, 19 nt, Homo sapiens
  misc_RNA (1)...(19): siRNA sense strand
ccacagugucccaccauca

SEQ ID NO: 1323242 - RNA, 19 nt, Homo sapiens
  misc_RNA (1)...(19): siRNA sense strand
caacacgucaccggagaga

SEQ ID NO: 1323243 - RNA, 19 nt, Homo sapiens
  misc_RNA (1)...(19): siRNA sense strand
caagcacuacggauacaau

SEQ ID NO: 1323244 - RNA, 19 nt, Homo sapiens
  misc_RNA (1)...(19): siRNA sense strand
agucaggaguguaccaaca

SEQ ID NO: 1323245 - RNA, 19 nt, Homo sapiens
  misc_RNA (1)...(19): siRNA sense strand
cggacuuccugcucuacaa

SEQ ID NO: 1323246 - RNA, 19 nt, Homo sapiens
  misc_RNA (1)...(19): siRNA sense strand
gaucugcauccacaccaau

SEQ ID NO: 1323247 - RNA, 19 nt, Homo sapiens
  misc_RNA (1)...(19): siRNA sense strand
uggaaucgaaucagaagug

SEQ ID NO: 1323248 - RNA, 19 nt, Homo sapiens
  misc_RNA (1)...(19): siRNA sense strand
ggagcaggcccucuuucca

SEQ ID NO: 1323249 - RNA, 19 nt, Homo sapiens
  misc_RNA (1)...(19): siRNA sense strand
cgggaacaauggccacagu

SEQ ID NO: 1323250 - RNA, 19 nt, Homo sapiens
  misc_RNA (1)...(19): siRNA sense strand
agaagugguggcuggaauu

SEQ ID NO: 1323251 - RNA, 19 nt, Homo sapiens
  misc_RNA (1)...(19): siRNA sense strand
ggacuuccugcucuacaag

SEQ ID NO: 1323252 - RNA, 19 nt, Homo sapiens
  misc_RNA (1)...(19): siRNA sense strand
gguuucugguggccucuau

SEQ ID NO: 1323253 - RNA, 19 nt, Homo sapiens
  misc_RNA (1)...(19): siRNA sense strand
acuguggaaucgaaucaga

SEQ ID NO: 1323254 - RNA, 19 nt, Homo sapiens
  misc_RNA (1)...(19): siRNA sense strand
cggcuguaaugguggcuau

SEQ ID NO: 1323255 - RNA, 19 nt, Homo sapiens
  misc_RNA (1)...(19): siRNA sense strand
ggaugagcuggucaacuau

SEQ ID NO: 1323256 - RNA, 19 nt, Homo sapiens
  misc_RNA (1)...(19): siRNA sense strand
agggagcuuucucugugua

SEQ ID NO: 1323257 - RNA, 19 nt, Homo sapiens
  misc_RNA (1)...(19): siRNA sense strand
cccagagaguuauguuuac

SEQ ID NO: 1323258 - RNA, 19 nt, Homo sapiens
  misc_RNA (1)...(19): siRNA sense strand
ccucuaugaaucccaugua

SEQ ID NO: 1323259 - RNA, 19 nt, Homo sapiens
  misc_RNA (1)...(19): siRNA sense strand
cugguggccucuaugaauc

SEQ ID NO: 1323260 - RNA, 19 nt, Homo sapiens
  misc_RNA (1)...(19): siRNA sense strand
ucugguggccucuaugaau

SEQ ID NO: 1323261 - RNA, 19 nt, Homo sapiens
  misc_RNA (1)...(19): siRNA sense strand
cggaugagcuggucaacua

SEQ ID NO: 1323262 - RNA, 19 nt, Homo sapiens
  misc_RNA (1)...(19): siRNA sense strand
ggucaacuaugucaacaaa

SEQ ID NO: 1323263 - RNA, 19 nt, Homo sapiens
  misc_RNA (1)...(19): siRNA sense strand
gacaauggcuucuuuaaaa

SEQ ID NO: 1323264 - RNA, 19 nt, Homo sapiens
  misc_RNA (1)...(19): siRNA sense strand
gcuuggaacuucuggacaa

SEQ ID NO: 1323265 - RNA, 19 nt, Homo sapiens
  misc_RNA (1)...(19): siRNA sense strand
ugacaauggcuucuuuaaa

SEQ ID NO: 1323266 - RNA, 19 nt, Homo sapiens
  misc_RNA (1)...(19): siRNA sense strand
gggugacaauggcuucuuu

SEQ ID NO: 1323267 - RNA, 19 nt, Homo sapiens
  misc_RNA (1)...(19): siRNA sense strand
ggacaagcacuacggauac

SEQ ID NO: 1323268 - RNA, 19 nt, Homo sapiens
  misc_RNA (1)...(19): siRNA sense strand
ggaucacuguggaaucgaa

SEQ ID NO: 1323269 - RNA, 19 nt, Homo sapiens
  misc_RNA (1)...(19): siRNA sense strand
uugaagaggcuauguggua

SEQ ID NO: 1323270 - RNA, 19 nt, Homo sapiens
  misc_RNA (1)...(19): siRNA sense strand
ggagcuuucucuguguauu

SEQ ID NO: 1323271 - RNA, 19 nt, Homo sapiens
  misc_RNA (1)...(19): siRNA sense strand
acaaacaggacaagcacua

SEQ ID NO: 1323272 - RNA, 19 nt, Homo sapiens
  misc_RNA (1)...(19): siRNA sense strand
ggaacaauggccacagugu

SEQ ID NO: 1323273 - RNA, 19 nt, Homo sapiens
  misc_RNA (1)...(19): siRNA sense strand
cagaagugguggcuggaau

SEQ ID NO: 1323274 - RNA, 19 nt, Homo sapiens
  misc_RNA (1)...(19): siRNA sense strand
gagggagcuuucucugugu

SEQ ID NO: 1323275 - RNA, 19 nt, Homo sapiens
  misc_RNA (1)...(19): siRNA sense strand
gagcaggcccucuuuccau

SEQ ID NO: 1323276 - RNA, 19 nt, Homo sapiens
  misc_RNA (1)...(19): siRNA sense strand
gacaagcacuacggauaca

SEQ ID NO: 1323277 - RNA, 19 nt, Homo sapiens
  misc_RNA (1)...(19): siRNA sense strand
ggugacaauggcuucuuua

SEQ ID NO: 1323278 - RNA, 19 nt, Homo sapiens
  misc_RNA (1)...(19): siRNA sense strand
ucaacuaugucaacaaacg

SEQ ID NO: 1323279 - RNA, 19 nt, Homo sapiens
  misc_RNA (1)...(19): siRNA sense strand
gugacaauggcuucuuuaa

SEQ ID NO: 1323280 - RNA, 19 nt, Homo sapiens
  misc_RNA (1)...(19): siRNA sense strand
gaucaguacugggaaaaga

SEQ ID NO: 1323281 - RNA, 19 nt, Homo sapiens
  misc_RNA (1)...(19): siRNA sense strand
gagcuggucaacuauguca

SEQ ID NO: 1323282 - RNA, 19 nt, Homo sapiens
  misc_RNA (1)...(19): siRNA sense strand
gaagugguggcuggaauuc

SEQ ID NO: 1323283 - RNA, 19 nt, Homo sapiens
  misc_RNA (1)...(19): siRNA sense strand
gagaauggcacacccuacu

SEQ ID NO: 1323284 - RNA, 19 nt, Homo sapiens
  misc_RNA (1)...(19): siRNA sense strand
cuacagcccgaccuacaaa

SEQ ID NO: 1323285 - RNA, 19 nt, Homo sapiens
  misc_RNA (1)...(19): siRNA sense strand
gaauuccacgcaccgauca

SEQ ID NO: 1323286 - RNA, 19 nt, Homo sapiens
  misc_RNA (1)...(19): siRNA sense strand
gaccugaagcugccugcaa

SEQ ID NO: 1323287 - RNA, 19 nt, Homo sapiens
  misc_RNA (1)...(19): siRNA sense strand
gagcuuucucuguguauuc

SEQ ID NO: 1323288 - RNA, 19 nt, Homo sapiens
  misc_RNA (1)...(19): siRNA sense strand
ggacaucauggccgagauc

SEQ ID NO: 1323289 - RNA, 19 nt, Homo sapiens
  misc_RNA (1)...(19): siRNA sense strand
uaugucaacaaacggaaua

SEQ ID NO: 1323290 - RNA, 19 nt, Homo sapiens
  misc_RNA (1)...(19): siRNA sense strand
gcuacagcccgaccuacaa

SEQ ID NO: 1323291 - RNA, 19 nt, Homo sapiens
  misc_RNA (1)...(19): siRNA sense strand
acacgucaccggagagaug

SEQ ID NO: 1323292 - RNA, 19 nt, Homo sapiens
  misc_RNA (1)...(19): siRNA sense strand
aggacaagcacuacggaua

SEQ ID NO: 1323293 - RNA, 19 nt, Homo sapiens
  misc_RNA (1)...(19): siRNA sense strand
caggaucacuguggaaucg

SEQ ID NO: 1323294 - RNA, 19 nt, Homo sapiens
  misc_RNA (1)...(19): siRNA sense strand
caucauggccgagaucuac

SEQ ID NO: 1323295 - RNA, 19 nt, Homo sapiens
  misc_RNA (1)...(19): siRNA sense strand
gaugagcuggucaacuaug

SEQ ID NO: 1323296 - RNA, 19 nt, Homo sapiens
  misc_RNA (1)...(19): siRNA sense strand
ccacagugucccaccauca

SEQ ID NO: 1323297 - RNA, 19 nt, Homo sapiens
  misc_RNA (1)...(19): siRNA sense strand
caacacgucaccggagaga

SEQ ID NO: 1323298 - RNA, 19 nt, Homo sapiens
  misc_RNA (1)...(19): siRNA sense strand
caagcacuacggauacaau

SEQ ID NO: 1323299 - RNA, 19 nt, Homo sapiens
  misc_RNA (1)...(19): siRNA sense strand
agucaggaguguaccaaca

SEQ ID NO: 1323300 - RNA, 19 nt, Homo sapiens
  misc_RNA (1)...(19): siRNA sense strand
cggacuuccugcucuacaa

SEQ ID NO: 1323301 - RNA, 19 nt, Homo sapiens
  misc_RNA (1)...(19): siRNA sense strand
gaucugcauccacaccaau

SEQ ID NO: 1323302 - RNA, 19 nt, Homo sapiens
  misc_RNA (1)...(19): siRNA sense strand
uggaaucgaaucagaagug

SEQ ID NO: 1323303 - RNA, 19 nt, Homo sapiens
  misc_RNA (1)...(19): siRNA sense strand
ggagcaggcccucuuucca

SEQ ID NO: 1323304 - RNA, 19 nt, Homo sapiens
  misc_RNA (1)...(19): siRNA sense strand
cgggaacaauggccacagu

SEQ ID NO: 1323305 - RNA, 19 nt, Homo sapiens
  misc_RNA (1)...(19): siRNA sense strand
agaagugguggcuggaauu

SEQ ID NO: 1323306 - RNA, 19 nt, Homo sapiens
  misc_RNA (1)...(19): siRNA sense strand
ggacuuccugcucuacaag

SEQ ID NO: 1323307 - RNA, 19 nt, Homo sapiens
  misc_RNA (1)...(19): siRNA sense strand
gguuucugguggccucuau

SEQ ID NO: 1323308 - RNA, 19 nt, Homo sapiens
  misc_RNA (1)...(19): siRNA sense strand
acuguggaaucgaaucaga

SEQ ID NO: 1323309 - RNA, 19 nt, Homo sapiens
  misc_RNA (1)...(19): siRNA sense strand
cggcuguaaugguggcuau

SEQ ID NO: 1323310 - RNA, 19 nt, Homo sapiens
  misc_RNA (1)...(19): siRNA sense strand
ggaugagcuggucaacuau

SEQ ID NO: 1323311 - RNA, 19 nt, Homo sapiens
  misc_RNA (1)...(19): siRNA sense strand
agggagcuuucucugugua

SEQ ID NO: 1323312 - RNA, 19 nt, Homo sapiens
  misc_RNA (1)...(19): siRNA sense strand
cccagagaguuauguuuac

SEQ ID NO: 1323313 - RNA, 19 nt, Homo sapiens
  misc_RNA (1)...(19): siRNA sense strand
ccucuaugaaucccaugua

SEQ ID NO: 1323314 - RNA, 19 nt, Homo sapiens
  misc_RNA (1)...(19): siRNA sense strand
cugguggccucuaugaauc

SEQ ID NO: 1323315 - RNA, 19 nt, Homo sapiens
  misc_RNA (1)...(19): siRNA sense strand
ucugguggccucuaugaau

SEQ ID NO: 1323316 - RNA, 19 nt, Homo sapiens
  misc_RNA (1)...(19): siRNA sense strand
cggaugagcuggucaacua

SEQ ID NO: 1323317 - RNA, 19 nt, Homo sapiens
  misc_RNA (1)...(19): siRNA sense strand
ggucaacuaugucaacaaa

SEQ ID NO: 1323318 - RNA, 19 nt, Homo sapiens
  misc_RNA (1)...(19): siRNA sense strand
gacaauggcuucuuuaaaa

SEQ ID NO: 1323319 - RNA, 19 nt, Homo sapiens
  misc_RNA (1)...(19): siRNA sense strand
gcuuggaacuucuggacaa

SEQ ID NO: 1323320 - RNA, 19 nt, Homo sapiens
  misc_RNA (1)...(19): siRNA sense strand
ugacaauggcuucuuuaaa

SEQ ID NO: 1323321 - RNA, 19 nt, Homo sapiens
  misc_RNA (1)...(19): siRNA sense strand
gggugacaauggcuucuuu

SEQ ID NO: 1323322 - RNA, 19 nt, Homo sapiens
  misc_RNA (1)...(19): siRNA sense strand
ggacaagcacuacggauac

SEQ ID NO: 1323323 - RNA, 19 nt, Homo sapiens
  misc_RNA (1)...(19): siRNA sense strand
ggaucacuguggaaucgaa

SEQ ID NO: 1323324 - RNA, 19 nt, Homo sapiens
  misc_RNA (1)...(19): siRNA sense strand
uugaagaggcuauguggua

SEQ ID NO: 1323325 - RNA, 19 nt, Homo sapiens
  misc_RNA (1)...(19): siRNA sense strand
ggagcuuucucuguguauu

SEQ ID NO: 1323326 - RNA, 19 nt, Homo sapiens
  misc_RNA (1)...(19): siRNA sense strand
acaaacaggacaagcacua

SEQ ID NO: 1323327 - RNA, 19 nt, Homo sapiens
  misc_RNA (1)...(19): siRNA sense strand
ggaacaauggccacagugu

SEQ ID NO: 1323328 - RNA, 19 nt, Homo sapiens
  misc_RNA (1)...(19): siRNA sense strand
cagaagugguggcuggaau

SEQ ID NO: 1323329 - RNA, 19 nt, Homo sapiens
  misc_RNA (1)...(19): siRNA sense strand
gagggagcuuucucugugu

SEQ ID NO: 1323330 - RNA, 19 nt, Homo sapiens
  misc_RNA (1)...(19): siRNA sense strand
gagcaggcccucuuuccau

SEQ ID NO: 1323331 - RNA, 19 nt, Homo sapiens
  misc_RNA (1)...(19): siRNA sense strand
gacaagcacuacggauaca

SEQ ID NO: 1323332 - RNA, 19 nt, Homo sapiens
  misc_RNA (1)...(19): siRNA sense strand
ggugacaauggcuucuuua

SEQ ID NO: 1323333 - RNA, 19 nt, Homo sapiens
  misc_RNA (1)...(19): siRNA sense strand
ucaacuaugucaacaaacg

SEQ ID NO: 1323334 - RNA, 19 nt, Homo sapiens
  misc_RNA (1)...(19): siRNA sense strand
gugacaauggcuucuuuaa

SEQ ID NO: 1323335 - RNA, 19 nt, Homo sapiens
  misc_RNA (1)...(19): siRNA sense strand
gaucaguacugggaaaaga

SEQ ID NO: 1323336 - RNA, 19 nt, Homo sapiens
  misc_RNA (1)...(19): siRNA sense strand
gagcuggucaacuauguca

SEQ ID NO: 1323337 - RNA, 19 nt, Homo sapiens
  misc_RNA (1)...(19): siRNA sense strand
gaagugguggcuggaauuc

SEQ ID NO: 1323338 - RNA, 19 nt, Homo sapiens
  misc_RNA (1)...(19): siRNA sense strand
gagaauggcacacccuacu

SEQ ID NO: 1323339 - RNA, 19 nt, Homo sapiens
  misc_RNA (1)...(19): siRNA sense strand
cuacagcccgaccuacaaa

SEQ ID NO: 1323340 - RNA, 19 nt, Homo sapiens
  misc_RNA (1)...(19): siRNA sense strand
gaauuccacgcaccgauca

SEQ ID NO: 1323341 - RNA, 19 nt, Homo sapiens
  misc_RNA (1)...(19): siRNA sense strand
gaccugaagcugccugcaa

SEQ ID NO: 1323342 - RNA, 19 nt, Homo sapiens
  misc_RNA (1)...(19): siRNA sense strand
gagcuuucucuguguauuc

SEQ ID NO: 1323343 - RNA, 19 nt, Homo sapiens
  misc_RNA (1)...(19): siRNA sense strand
ggacaucauggccgagauc

SEQ ID NO: 1323344 - RNA, 19 nt, Homo sapiens
  misc_RNA (1)...(19): siRNA sense strand
uaugucaacaaacggaaua

SEQ ID NO: 1323345 - RNA, 19 nt, Homo sapiens
  misc_RNA (1)...(19): siRNA sense strand
gcuacagcccgaccuacaa

SEQ ID NO: 1323346 - RNA, 19 nt, Homo sapiens
  misc_RNA (1)...(19): siRNA sense strand
acacgucaccggagagaug

SEQ ID NO: 1323347 - RNA, 19 nt, Homo sapiens
  misc_RNA (1)...(19): siRNA sense strand
aggacaagcacuacggaua

SEQ ID NO: 1323348 - RNA, 19 nt, Homo sapiens
  misc_RNA (1)...(19): siRNA sense strand
caggaucacuguggaaucg

SEQ ID NO: 1323349 - RNA, 19 nt, Homo sapiens
  misc_RNA (1)...(19): siRNA sense strand
caucauggccgagaucuac

SEQ ID NO: 1323350 - RNA, 19 nt, Homo sapiens
  misc_RNA (1)...(19): siRNA sense strand
gaugagcuggucaacuaug

SEQ ID NO: 1323351 - RNA, 19 nt, Homo sapiens
  misc_RNA (1)...(19): siRNA sense strand
ccacagugucccaccauca

SEQ ID NO: 1323352 - RNA, 19 nt, Homo sapiens
  misc_RNA (1)...(19): siRNA sense strand
caacacgucaccggagaga

SEQ ID NO: 1323353 - RNA, 19 nt, Homo sapiens
  misc_RNA (1)...(19): siRNA sense strand
caagcacuacggauacaau

SEQ ID NO: 1323354 - RNA, 19 nt, Homo sapiens
  misc_RNA (1)...(19): siRNA sense strand
agucaggaguguaccaaca

SEQ ID NO: 1323355 - RNA, 19 nt, Homo sapiens
  misc_RNA (1)...(19): siRNA sense strand
cggacuuccugcucuacaa

SEQ ID NO: 1323356 - RNA, 19 nt, Homo sapiens
  misc_RNA (1)...(19): siRNA sense strand
gaucugcauccacaccaau

SEQ ID NO: 1323357 - RNA, 19 nt, Homo sapiens
  misc_RNA (1)...(19): siRNA sense strand
uggaaucgaaucagaagug

SEQ ID NO: 1323358 - RNA, 19 nt, Homo sapiens
  misc_RNA (1)...(19): siRNA sense strand
ggagcaggcccucuuucca

SEQ ID NO: 1323359 - RNA, 19 nt, Homo sapiens
  misc_RNA (1)...(19): siRNA sense strand
cgggaacaauggccacagu

SEQ ID NO: 1323360 - RNA, 19 nt, Homo sapiens
  misc_RNA (1)...(19): siRNA sense strand
agaagugguggcuggaauu

SEQ ID NO: 1323361 - RNA, 19 nt, Homo sapiens
  misc_RNA (1)...(19): siRNA sense strand
ggacuuccugcucuacaag

SEQ ID NO: 1323362 - RNA, 19 nt, Homo sapiens
  misc_RNA (1)...(19): siRNA sense strand
gguuucugguggccucuau

SEQ ID NO: 1323363 - RNA, 19 nt, Homo sapiens
  misc_RNA (1)...(19): siRNA sense strand
acuguggaaucgaaucaga

SEQ ID NO: 1323364 - RNA, 19 nt, Homo sapiens
  misc_RNA (1)...(19): siRNA sense strand
cggcuguaaugguggcuau

SEQ ID NO: 1323365 - RNA, 19 nt, Homo sapiens
  misc_RNA (1)...(19): siRNA sense strand
ggaugagcuggucaacuau

SEQ ID NO: 1323366 - RNA, 19 nt, Homo sapiens
  misc_RNA (1)...(19): siRNA sense strand
agggagcuuucucugugua

SEQ ID NO: 1323367 - RNA, 19 nt, Homo sapiens
  misc_RNA (1)...(19): siRNA sense strand
cccagagaguuauguuuac

SEQ ID NO: 1323368 - RNA, 19 nt, Homo sapiens
  misc_RNA (1)...(19): siRNA sense strand
ccucuaugaaucccaugua

SEQ ID NO: 1323369 - RNA, 19 nt, Homo sapiens
  misc_RNA (1)...(19): siRNA sense strand
cugguggccucuaugaauc

SEQ ID NO: 1323370 - RNA, 19 nt, Homo sapiens
  misc_RNA (1)...(19): siRNA sense strand
ucugguggccucuaugaau

SEQ ID NO: 1323371 - RNA, 19 nt, Homo sapiens
  misc_RNA (1)...(19): siRNA sense strand
cggaugagcuggucaacua

SEQ ID NO: 1323372 - RNA, 19 nt, Homo sapiens
  misc_RNA (1)...(19): siRNA sense strand
ggucaacuaugucaacaaa

SEQ ID NO: 1323373 - RNA, 19 nt, Homo sapiens
  misc_RNA (1)...(19): siRNA sense strand
gacaauggcuucuuuaaaa

SEQ ID NO: 1323374 - RNA, 19 nt, Homo sapiens
  misc_RNA (1)...(19): siRNA sense strand
gcuuggaacuucuggacaa

SEQ ID NO: 1323375 - RNA, 19 nt, Homo sapiens
  misc_RNA (1)...(19): siRNA sense strand
ugacaauggcuucuuuaaa

SEQ ID NO: 1323376 - RNA, 19 nt, Homo sapiens
  misc_RNA (1)...(19): siRNA sense strand
gggugacaauggcuucuuu

SEQ ID NO: 1323377 - RNA, 19 nt, Homo sapiens
  misc_RNA (1)...(19): siRNA sense strand
ggacaagcacuacggauac

SEQ ID NO: 1323378 - RNA, 19 nt, Homo sapiens
  misc_RNA (1)...(19): siRNA sense strand
ggaucacuguggaaucgaa

SEQ ID NO: 1323379 - RNA, 19 nt, Homo sapiens
  misc_RNA (1)...(19): siRNA sense strand
uugaagaggcuauguggua

SEQ ID NO: 1323380 - RNA, 19 nt, Homo sapiens
  misc_RNA (1)...(19): siRNA sense strand
ggagcuuucucuguguauu

SEQ ID NO: 1323381 - RNA, 19 nt, Homo sapiens
  misc_RNA (1)...(19): siRNA sense strand
acaaacaggacaagcacua

SEQ ID NO: 1323382 - RNA, 19 nt, Homo sapiens
  misc_RNA (1)...(19): siRNA sense strand
ggaacaauggccacagugu

SEQ ID NO: 1323383 - RNA, 19 nt, Homo sapiens
  misc_RNA (1)...(19): siRNA sense strand
cagaagugguggcuggaau

SEQ ID NO: 1323384 - RNA, 19 nt, Homo sapiens
  misc_RNA (1)...(19): siRNA sense strand
gagggagcuuucucugugu

SEQ ID NO: 1323385 - RNA, 19 nt, Homo sapiens
  misc_RNA (1)...(19): siRNA sense strand
gagcaggcccucuuuccau

SEQ ID NO: 1323386 - RNA, 19 nt, Homo sapiens
  misc_RNA (1)...(19): siRNA sense strand
gacaagcacuacggauaca

SEQ ID NO: 1323387 - RNA, 19 nt, Homo sapiens
  misc_RNA (1)...(19): siRNA sense strand
ggugacaauggcuucuuua

SEQ ID NO: 1323388 - RNA, 19 nt, Homo sapiens
  misc_RNA (1)...(19): siRNA sense strand
ucaacuaugucaacaaacg

SEQ ID NO: 1323389 - RNA, 19 nt, Homo sapiens
  misc_RNA (1)...(19): siRNA sense strand
gugacaauggcuucuuuaa

SEQ ID NO: 1323390 - RNA, 19 nt, Homo sapiens
  misc_RNA (1)...(19): siRNA sense strand
gaucaguacugggaaaaga

SEQ ID NO: 1323391 - RNA, 19 nt, Homo sapiens
  misc_RNA (1)...(19): siRNA sense strand
gagcuggucaacuauguca

SEQ ID NO: 1323392 - RNA, 19 nt, Homo sapiens
  misc_RNA (1)...(19): siRNA sense strand
gaagugguggcuggaauuc

SEQ ID NO: 1323393 - RNA, 19 nt, Homo sapiens
  misc_RNA (1)...(19): siRNA sense strand
gagaauggcacacccuacu

SEQ ID NO: 1323394 - RNA, 19 nt, Homo sapiens
  misc_RNA (1)...(19): siRNA sense strand
cuacagcccgaccuacaaa

SEQ ID NO: 1323395 - RNA, 19 nt, Homo sapiens
  misc_RNA (1)...(19): siRNA sense strand
gaauuccacgcaccgauca

SEQ ID NO: 1323396 - RNA, 19 nt, Homo sapiens
  misc_RNA (1)...(19): siRNA sense strand
gaccugaagcugccugcaa

SEQ ID NO: 1323397 - RNA, 19 nt, Homo sapiens
  misc_RNA (1)...(19): siRNA sense strand
gagcuuucucuguguauuc

SEQ ID NO: 1323398 - RNA, 19 nt, Homo sapiens
  misc_RNA (1)...(19): siRNA sense strand
ggacaucauggccgagauc

SEQ ID NO: 1323399 - RNA, 19 nt, Homo sapiens
  misc_RNA (1)...(19): siRNA sense strand
uaugucaacaaacggaaua

SEQ ID NO: 1323400 - RNA, 19 nt, Homo sapiens
  misc_RNA (1)...(19): siRNA sense strand
gcuacagcccgaccuacaa

SEQ ID NO: 1323401 - RNA, 19 nt, Homo sapiens
  misc_RNA (1)...(19): siRNA sense strand
acacgucaccggagagaug

SEQ ID NO: 1323402 - RNA, 19 nt, Homo sapiens
  misc_RNA (1)...(19): siRNA sense strand
aggacaagcacuacggaua

SEQ ID NO: 1323403 - RNA, 19 nt, Homo sapiens
  misc_RNA (1)...(19): siRNA sense strand
caggaucacuguggaaucg

SEQ ID NO: 1323404 - RNA, 19 nt, Homo sapiens
  misc_RNA (1)...(19): siRNA sense strand
caucauggccgagaucuac

SEQ ID NO: 1323405 - RNA, 19 nt, Homo sapiens
  misc_RNA (1)...(19): siRNA sense strand
gaugagcuggucaacuaug

SEQ ID NO: 1323406 - RNA, 19 nt, Homo sapiens
  misc_RNA (1)...(19): siRNA sense strand
ccacagugucccaccauca

SEQ ID NO: 1323407 - RNA, 19 nt, Homo sapiens
  misc_RNA (1)...(19): siRNA sense strand
caacacgucaccggagaga

SEQ ID NO: 1323408 - RNA, 19 nt, Homo sapiens
  misc_RNA (1)...(19): siRNA sense strand
caagcacuacggauacaau

SEQ ID NO: 1323409 - RNA, 19 nt, Homo sapiens
  misc_RNA (1)...(19): siRNA sense strand
agucaggaguguaccaaca

SEQ ID NO: 1323410 - RNA, 19 nt, Homo sapiens
  misc_RNA (1)...(19): siRNA sense strand
cggacuuccugcucuacaa

SEQ ID NO: 1323411 - RNA, 19 nt, Homo sapiens
  misc_RNA (1)...(19): siRNA sense strand
gaucugcauccacaccaau

SEQ ID NO: 1323412 - RNA, 19 nt, Homo sapiens
  misc_RNA (1)...(19): siRNA sense strand
uggaaucgaaucagaagug

SEQ ID NO: 1323413 - RNA, 19 nt, Homo sapiens
  misc_RNA (1)...(19): siRNA sense strand
ggagcaggcccucuuucca

SEQ ID NO: 1323414 - RNA, 19 nt, Homo sapiens
  misc_RNA (1)...(19): siRNA sense strand
cgggaacaauggccacagu

SEQ ID NO: 1323415 - RNA, 19 nt, Homo sapiens
  misc_RNA (1)...(19): siRNA sense strand
agaagugguggcuggaauu

SEQ ID NO: 1323416 - RNA, 19 nt, Homo sapiens
  misc_RNA (1)...(19): siRNA sense strand
ggacuuccugcucuacaag

SEQ ID NO: 1323417 - RNA, 19 nt, Homo sapiens
  misc_RNA (1)...(19): siRNA sense strand
gguuucugguggccucuau

SEQ ID NO: 1323418 - RNA, 19 nt, Homo sapiens
  misc_RNA (1)...(19): siRNA sense strand
acuguggaaucgaaucaga

SEQ ID NO: 1323419 - RNA, 19 nt, Homo sapiens
  misc_RNA (1)...(19): siRNA sense strand
cggcuguaaugguggcuau

SEQ ID NO: 1323420 - RNA, 19 nt, Homo sapiens
  misc_RNA (1)...(19): siRNA sense strand
ggaugagcuggucaacuau

SEQ ID NO: 1323421 - RNA, 19 nt, Homo sapiens
  misc_RNA (1)...(19): siRNA sense strand
agggagcuuucucugugua

SEQ ID NO: 1323422 - RNA, 19 nt, Homo sapiens
  misc_RNA (1)...(19): siRNA sense strand
cccagagaguuauguuuac

SEQ ID NO: 1323423 - RNA, 19 nt, Homo sapiens
  misc_RNA (1)...(19): siRNA sense strand
ccucuaugaaucccaugua

SEQ ID NO: 1323424 - RNA, 19 nt, Homo sapiens
  misc_RNA (1)...(19): siRNA sense strand
cugguggccucuaugaauc

SEQ ID NO: 1323425 - RNA, 19 nt, Homo sapiens
  misc_RNA (1)...(19): siRNA sense strand
ucugguggccucuaugaau

SEQ ID NO: 1323426 - RNA, 19 nt, Homo sapiens
  misc_RNA (1)...(19): siRNA sense strand
gacaagauguuuaagauga

SEQ ID NO: 1323427 - RNA, 19 nt, Homo sapiens
  misc_RNA (1)...(19): siRNA sense strand
gaaggacgaucaugacaag

SEQ ID NO: 1323428 - RNA, 19 nt, Homo sapiens
  misc_RNA (1)...(19): siRNA sense strand
gaucaugacaagauguuua

SEQ ID NO: 1323429 - RNA, 19 nt, Homo sapiens
  misc_RNA (1)...(19): siRNA sense strand
gcaauauuguccagaugaa

SEQ ID NO: 1323430 - RNA, 19 nt, Homo sapiens
  misc_RNA (1)...(19): siRNA sense strand
ggacgaucaugacaagaug

SEQ ID NO: 1323431 - RNA, 19 nt, Homo sapiens
  misc_RNA (1)...(19): siRNA sense strand
gaugcgaaauggauaugaa

SEQ ID NO: 1323432 - RNA, 19 nt, Homo sapiens
  misc_RNA (1)...(19): siRNA sense strand
cgaaauggauaugaauugu

SEQ ID NO: 1323433 - RNA, 19 nt, Homo sapiens
  misc_RNA (1)...(19): siRNA sense strand
gcgaaauggauaugaauug

SEQ ID NO: 1323434 - RNA, 19 nt, Homo sapiens
  misc_RNA (1)...(19): siRNA sense strand
aaaccuggcugacugucuu

SEQ ID NO: 1323435 - RNA, 19 nt, Homo sapiens
  misc_RNA (1)...(19): siRNA sense strand
ggcagcagcuaacuucaca

SEQ ID NO: 1323436 - RNA, 19 nt, Homo sapiens
  misc_RNA (1)...(19): siRNA sense strand
ccagcaauauuguccagau

SEQ ID NO: 1323437 - RNA, 19 nt, Homo sapiens
  misc_RNA (1)...(19): siRNA sense strand
cuguacaguuugcagaaua

SEQ ID NO: 1323438 - RNA, 19 nt, Homo sapiens
  misc_RNA (1)...(19): siRNA sense strand
gauacuacacaccgacuau

SEQ ID NO: 1323439 - RNA, 19 nt, Homo sapiens
  misc_RNA (1)...(19): siRNA sense strand
uauaagaugcgaaauggau

SEQ ID NO: 1323440 - RNA, 19 nt, Homo sapiens
  misc_RNA (1)...(19): siRNA sense strand
gaagggccagcgcuguauu

SEQ ID NO: 1323441 - RNA, 19 nt, Homo sapiens
  misc_RNA (1)...(19): siRNA sense strand
gaaauggauaugaauuguc

SEQ ID NO: 1323442 - RNA, 19 nt, Homo sapiens
  misc_RNA (1)...(19): siRNA sense strand
cagcaauauuguccagaug

SEQ ID NO: 1323443 - RNA, 19 nt, Homo sapiens
  misc_RNA (1)...(19): siRNA sense strand
agauauuacuccugugugu

SEQ ID NO: 1323444 - RNA, 19 nt, Homo sapiens
  misc_RNA (1)...(19): siRNA sense strand
cuucaguguucgaaucauu

SEQ ID NO: 1323445 - RNA, 19 nt, Homo sapiens
  misc_RNA (1)...(19): siRNA sense strand
cugccaaccuucaguguuc

SEQ ID NO: 1323446 - RNA, 19 nt, Homo sapiens
  misc_RNA (1)...(19): siRNA sense strand
caugacaagauguuuaaga

SEQ ID NO: 1323447 - RNA, 19 nt, Homo sapiens
  misc_RNA (1)...(19): siRNA sense strand
guacaguuugcagaauaua

SEQ ID NO: 1323448 - RNA, 19 nt, Homo sapiens
  misc_RNA (1)...(19): siRNA sense strand
ccuccuggcuggcuaugau

SEQ ID NO: 1323449 - RNA, 19 nt, Homo sapiens
  misc_RNA (1)...(19): siRNA sense strand
uaagaugcgaaauggauau

SEQ ID NO: 1323450 - RNA, 19 nt, Homo sapiens
  misc_RNA (1)...(19): siRNA sense strand
uuuauaagaugcgaaaugg

SEQ ID NO: 1323451 - RNA, 19 nt, Homo sapiens
  misc_RNA (1)...(19): siRNA sense strand
aaagauauuacuccugugu

SEQ ID NO: 1323452 - RNA, 19 nt, Homo sapiens
  misc_RNA (1)...(19): siRNA sense strand
caagauguuuaagaugagu

SEQ ID NO: 1323453 - RNA, 19 nt, Homo sapiens
  misc_RNA (1)...(19): siRNA sense strand
uguacaguuugcagaauau

SEQ ID NO: 1323454 - RNA, 19 nt, Homo sapiens
  misc_RNA (1)...(19): siRNA sense strand
ugacaagauguuuaagaug

SEQ ID NO: 1323455 - RNA, 19 nt, Homo sapiens
  misc_RNA (1)...(19): siRNA sense strand
gauauuacuccuguguguu

SEQ ID NO: 1323456 - RNA, 19 nt, Homo sapiens
  misc_RNA (1)...(19): siRNA sense strand
ugaaggacgaucaugacaa

SEQ ID NO: 1323457 - RNA, 19 nt, Homo sapiens
  misc_RNA (1)...(19): siRNA sense strand
cgugcaacuuuauaagaug

SEQ ID NO: 1323458 - RNA, 19 nt, Homo sapiens
  misc_RNA (1)...(19): siRNA sense strand
cuacacaccgacuaucuca

SEQ ID NO: 1323459 - RNA, 19 nt, Homo sapiens
  misc_RNA (1)...(19): siRNA sense strand
acgugcaacuuuauaagau

SEQ ID NO: 1323460 - RNA, 19 nt, Homo sapiens
  misc_RNA (1)...(19): siRNA sense strand
aagggccagcgcuguauua

SEQ ID NO: 1323461 - RNA, 19 nt, Homo sapiens
  misc_RNA (1)...(19): siRNA sense strand
uaacuucacacgccgaaac

SEQ ID NO: 1323462 - RNA, 19 nt, Homo sapiens
  misc_RNA (1)...(19): siRNA sense strand
acaagauguuuaagaugag

SEQ ID NO: 1323463 - RNA, 19 nt, Homo sapiens
  misc_RNA (1)...(19): siRNA sense strand
auaagaugcgaaauggaua

SEQ ID NO: 1323464 - RNA, 19 nt, Homo sapiens
  misc_RNA (1)...(19): siRNA sense strand
gaaaccuggcugacugucu

SEQ ID NO: 1323465 - RNA, 19 nt, Homo sapiens
  misc_RNA (1)...(19): siRNA sense strand
uaacauuuccuuccccaaa

SEQ ID NO: 1323466 - RNA, 19 nt, Homo sapiens
  misc_RNA (1)...(19): siRNA sense strand
aaacgugcaacuuuauaag

SEQ ID NO: 1323467 - RNA, 19 nt, Homo sapiens
  misc_RNA (1)...(19): siRNA sense strand
ccacggcagcagcuaacuu

SEQ ID NO: 1323468 - RNA, 19 nt, Homo sapiens
  misc_RNA (1)...(19): siRNA sense strand
gaacggcugggccauagaa

SEQ ID NO: 1323469 - RNA, 19 nt, Homo sapiens
  misc_RNA (1)...(19): siRNA sense strand
gaacugcggcugcgucuac

SEQ ID NO: 1323470 - RNA, 19 nt, Homo sapiens
  misc_RNA (1)...(19): siRNA sense strand
aaaaggaaguggucaaguu

SEQ ID NO: 1323471 - RNA, 19 nt, Homo sapiens
  misc_RNA (1)...(19): siRNA sense strand
ggacagcgcccagauugag

SEQ ID NO: 1323472 - RNA, 19 nt, Homo sapiens
  misc_RNA (1)...(19): siRNA sense strand
gccgcaaucucaucuucaa

SEQ ID NO: 1323473 - RNA, 19 nt, Homo sapiens
  misc_RNA (1)...(19): siRNA sense strand
gcaaucucaucuucaacuc

SEQ ID NO: 1323474 - RNA, 19 nt, Homo sapiens
  misc_RNA (1)...(19): siRNA sense strand
cgugaccucuuucgaaugg

SEQ ID NO: 1323475 - RNA, 19 nt, Homo sapiens
  misc_RNA (1)...(19): siRNA sense strand
caagggcauccgcuacgua

SEQ ID NO: 1323476 - RNA, 19 nt, Homo sapiens
  misc_RNA (1)...(19): siRNA sense strand
ccacgucuucaccaacuuu

SEQ ID NO: 1323477 - RNA, 19 nt, Homo sapiens
  misc_RNA (1)...(19): siRNA sense strand
gcaagggcauccgcuacgu

SEQ ID NO: 1323478 - RNA, 19 nt, Homo sapiens
  misc_RNA (1)...(19): siRNA sense strand
ggauguguaugaaaaggaa

SEQ ID NO: 1323479 - RNA, 19 nt, Homo sapiens
  misc_RNA (1)...(19): siRNA sense strand
gggcauccgcuacguaucu

SEQ ID NO: 1323480 - RNA, 19 nt, Homo sapiens
  misc_RNA (1)...(19): siRNA sense strand
aaaggaaguggucaaguuc

SEQ ID NO: 1323481 - RNA, 19 nt, Homo sapiens
  misc_RNA (1)...(19): siRNA sense strand
ggaaguggucaaguucuca

SEQ ID NO: 1323482 - RNA, 19 nt, Homo sapiens
  misc_RNA (1)...(19): siRNA sense strand
acaggucucccacgucuuc

SEQ ID NO: 1323483 - RNA, 19 nt, Homo sapiens
  misc_RNA (1)...(19): siRNA sense strand
gaacggcugggccauagaa

SEQ ID NO: 1323484 - RNA, 19 nt, Homo sapiens
  misc_RNA (1)...(19): siRNA sense strand
gaacugcggcugcgucuac

SEQ ID NO: 1323485 - RNA, 19 nt, Homo sapiens
  misc_RNA (1)...(19): siRNA sense strand
aaaaggaaguggucaaguu

SEQ ID NO: 1323486 - RNA, 19 nt, Homo sapiens
  misc_RNA (1)...(19): siRNA sense strand
ggacagcgcccagauugag

SEQ ID NO: 1323487 - RNA, 19 nt, Homo sapiens
  misc_RNA (1)...(19): siRNA sense strand
gccgcaaucucaucuucaa

SEQ ID NO: 1323488 - RNA, 19 nt, Homo sapiens
  misc_RNA (1)...(19): siRNA sense strand
gcaaucucaucuucaacuc

SEQ ID NO: 1323489 - RNA, 19 nt, Homo sapiens
  misc_RNA (1)...(19): siRNA sense strand
cgugaccucuuucgaaugg

SEQ ID NO: 1323490 - RNA, 19 nt, Homo sapiens
  misc_RNA (1)...(19): siRNA sense strand
caagggcauccgcuacgua

SEQ ID NO: 1323491 - RNA, 19 nt, Homo sapiens
  misc_RNA (1)...(19): siRNA sense strand
ccacgucuucaccaacuuu

SEQ ID NO: 1323492 - RNA, 19 nt, Homo sapiens
  misc_RNA (1)...(19): siRNA sense strand
gcaagggcauccgcuacgu

SEQ ID NO: 1323493 - RNA, 19 nt, Homo sapiens
  misc_RNA (1)...(19): siRNA sense strand
ggauguguaugaaaaggaa

SEQ ID NO: 1323494 - RNA, 19 nt, Homo sapiens
  misc_RNA (1)...(19): siRNA sense strand
gggcauccgcuacguaucu

SEQ ID NO: 1323495 - RNA, 19 nt, Homo sapiens
  misc_RNA (1)...(19): siRNA sense strand
aaaggaaguggucaaguuc

SEQ ID NO: 1323496 - RNA, 19 nt, Homo sapiens
  misc_RNA (1)...(19): siRNA sense strand
ggaaguggucaaguucuca

SEQ ID NO: 1323497 - RNA, 19 nt, Homo sapiens
  misc_RNA (1)...(19): siRNA sense strand
acaggucucccacgucuuc

SEQ ID NO: 1323498 - RNA, 19 nt, Homo sapiens
  misc_RNA (1)...(19): siRNA sense strand
gacucuggcuacuggagau

SEQ ID NO: 1323499 - RNA, 19 nt, Homo sapiens
  misc_RNA (1)...(19): siRNA sense strand
gaacaaauguacggaaugu

SEQ ID NO: 1323500 - RNA, 19 nt, Homo sapiens
  misc_RNA (1)...(19): siRNA sense strand
cauggugacugaugacuuu

SEQ ID NO: 1323501 - RNA, 19 nt, Homo sapiens
  misc_RNA (1)...(19): siRNA sense strand
gaaggaaggucggcagauc

SEQ ID NO: 1323502 - RNA, 19 nt, Homo sapiens
  misc_RNA (1)...(19): siRNA sense strand
ggaccgggaugcaguguca

SEQ ID NO: 1323503 - RNA, 19 nt, Homo sapiens
  misc_RNA (1)...(19): siRNA sense strand
uggccaaccucuuguauga

SEQ ID NO: 1323504 - RNA, 19 nt, Homo sapiens
  misc_RNA (1)...(19): siRNA sense strand
gccaaccucuuguaugaga

SEQ ID NO: 1323505 - RNA, 19 nt, Homo sapiens
  misc_RNA (1)...(19): siRNA sense strand
gucggcagaucaaaccuua

SEQ ID NO: 1323506 - RNA, 19 nt, Homo sapiens
  misc_RNA (1)...(19): siRNA sense strand
gaaccuguaugaguugaag

SEQ ID NO: 1323507 - RNA, 19 nt, Homo sapiens
  misc_RNA (1)...(19): siRNA sense strand
cggcagaucaaaccuuaua

SEQ ID NO: 1323508 - RNA, 19 nt, Homo sapiens
  misc_RNA (1)...(19): siRNA sense strand
ggcugaaccuguaugaguu

SEQ ID NO: 1323509 - RNA, 19 nt, Homo sapiens
  misc_RNA (1)...(19): siRNA sense strand
ccuuuaagcccuucauuug

SEQ ID NO: 1323510 - RNA, 19 nt, Homo sapiens
  misc_RNA (1)...(19): siRNA sense strand
ccgaacaaauguacggaau

SEQ ID NO: 1323511 - RNA, 19 nt, Homo sapiens
  misc_RNA (1)...(19): siRNA sense strand
caccugcgccgaacaaaug

SEQ ID NO: 1323512 - RNA, 19 nt, Homo sapiens
  misc_RNA (1)...(19): siRNA sense strand
ccggaucaccuguuugaaa

SEQ ID NO: 1323513 - RNA, 19 nt, Homo sapiens
  misc_RNA (1)...(19): siRNA sense strand
acaaauguacggaaugugu

SEQ ID NO: 1323514 - RNA, 19 nt, Homo sapiens
  misc_RNA (1)...(19): siRNA sense strand
gggagucauuguccacauc

SEQ ID NO: 1323515 - RNA, 19 nt, Homo sapiens
  misc_RNA (1)...(19): siRNA sense strand
ggugacugaugacuuugug

SEQ ID NO: 1323516 - RNA, 19 nt, Homo sapiens
  misc_RNA (1)...(19): siRNA sense strand
gcaccugcgccgaacaaau

SEQ ID NO: 1323517 - RNA, 19 nt, Homo sapiens
  misc_RNA (1)...(19): siRNA sense strand
gaaggucggcagaucaaac

SEQ ID NO: 1323518 - RNA, 19 nt, Homo sapiens
  misc_RNA (1)...(19): siRNA sense strand
gcccuucauuugcucucua

SEQ ID NO: 1323519 - RNA, 19 nt, Homo sapiens
  misc_RNA (1)...(19): siRNA sense strand
caaccucuuguaugagaaa

SEQ ID NO: 1323520 - RNA, 19 nt, Homo sapiens
  misc_RNA (1)...(19): siRNA sense strand
caugguggccaaccucuug

SEQ ID NO: 1323521 - RNA, 19 nt, Homo sapiens
  misc_RNA (1)...(19): siRNA sense strand
cggcugaaccuguaugagu

SEQ ID NO: 1323522 - RNA, 19 nt, Homo sapiens
  misc_RNA (1)...(19): siRNA sense strand
ggagucauuguccacauca

SEQ ID NO: 1323523 - RNA, 19 nt, Homo sapiens
  misc_RNA (1)...(19): siRNA sense strand
caaaccuuauacccucaug

SEQ ID NO: 1323524 - RNA, 19 nt, Homo sapiens
  misc_RNA (1)...(19): siRNA sense strand
gcugaaccuguaugaguug

SEQ ID NO: 1323525 - RNA, 19 nt, Homo sapiens
  misc_RNA (1)...(19): siRNA sense strand
ugaaggcccgaauggacua

SEQ ID NO: 1323526 - RNA, 19 nt, Homo sapiens
  misc_RNA (1)...(19): siRNA sense strand
gguuggacccgaagaccuu

SEQ ID NO: 1323527 - RNA, 19 nt, Homo sapiens
  misc_RNA (1)...(19): siRNA sense strand
cuuauacccucaugagcau

SEQ ID NO: 1323528 - RNA, 19 nt, Homo sapiens
  misc_RNA (1)...(19): siRNA sense strand
cgaacaaauguacggaaug

SEQ ID NO: 1323529 - RNA, 19 nt, Homo sapiens
  misc_RNA (1)...(19): siRNA sense strand
ggaaggucggcagaucaaa

SEQ ID NO: 1323530 - RNA, 19 nt, Homo sapiens
  misc_RNA (1)...(19): siRNA sense strand
ggacacugaaggcccgaau

SEQ ID NO: 1323531 - RNA, 19 nt, Homo sapiens
  misc_RNA (1)...(19): siRNA sense strand
caucaucgagaaggacaaa

SEQ ID NO: 1323532 - RNA, 19 nt, Homo sapiens
  misc_RNA (1)...(19): siRNA sense strand
gaccuuuaagcccuucauu

SEQ ID NO: 1323533 - RNA, 19 nt, Homo sapiens
  misc_RNA (1)...(19): siRNA sense strand
aaauguacggaauguguga

SEQ ID NO: 1323534 - RNA, 19 nt, Homo sapiens
  misc_RNA (1)...(19): siRNA sense strand
gaugucaacugcucgguua

SEQ ID NO: 1323535 - RNA, 19 nt, Homo sapiens
  misc_RNA (1)...(19): siRNA sense strand
caaccaaggcuuugagauu

SEQ ID NO: 1323536 - RNA, 19 nt, Homo sapiens
  misc_RNA (1)...(19): siRNA sense strand
gcuuugagauuguguugaa

SEQ ID NO: 1323537 - RNA, 19 nt, Homo sapiens
  misc_RNA (1)...(19): siRNA sense strand
gagauuguguugaaugacu

SEQ ID NO: 1323538 - RNA, 19 nt, Homo sapiens
  misc_RNA (1)...(19): siRNA sense strand
aaccaaggcuuugagauug

SEQ ID NO: 1323539 - RNA, 19 nt, Homo sapiens
  misc_RNA (1)...(19): siRNA sense strand
guagugguguaccuucaga

SEQ ID NO: 1323540 - RNA, 19 nt, Homo sapiens
  misc_RNA (1)...(19): siRNA sense strand
gccauuucaccaucauuua

SEQ ID NO: 1323541 - RNA, 19 nt, Homo sapiens
  misc_RNA (1)...(19): siRNA sense strand
ggccauuucaccaucauuu

SEQ ID NO: 1323542 - RNA, 19 nt, Homo sapiens
  misc_RNA (1)...(19): siRNA sense strand
cuacaagugguuugccuuu

SEQ ID NO: 1323543 - RNA, 19 nt, Homo sapiens
  misc_RNA (1)...(19): siRNA sense strand
caccaucauuuacaaccaa

SEQ ID NO: 1323544 - RNA, 19 nt, Homo sapiens
  misc_RNA (1)...(19): siRNA sense strand
caacugcaccuaucuugac

SEQ ID NO: 1323545 - RNA, 19 nt, Homo sapiens
  misc_RNA (1)...(19): siRNA sense strand
ggauacagcauaugaugac

SEQ ID NO: 1323546 - RNA, 19 nt, Homo sapiens
  misc_RNA (1)...(19): siRNA sense strand
uugagauuguguugaauga

SEQ ID NO: 1323547 - RNA, 19 nt, Homo sapiens
  misc_RNA (1)...(19): siRNA sense strand
gaaugacuacaagugguuu

SEQ ID NO: 1323548 - RNA, 19 nt, Homo sapiens
  misc_RNA (1)...(19): siRNA sense strand
augaugaccuuggcaauuc

SEQ ID NO: 1323549 - RNA, 19 nt, Homo sapiens
  misc_RNA (1)...(19): siRNA sense strand
uaugaugaccuuggcaauu

SEQ ID NO: 1323550 - RNA, 19 nt, Homo sapiens
  misc_RNA (1)...(19): siRNA sense strand
uacagcauaugaugaccuu

SEQ ID NO: 1323551 - RNA, 19 nt, Homo sapiens
  misc_RNA (1)...(19): siRNA sense strand
ugaaugacuacaagugguu

SEQ ID NO: 1323552 - RNA, 19 nt, Homo sapiens
  misc_RNA (1)...(19): siRNA sense strand
ccaacugcaccuaucuuga

SEQ ID NO: 1323553 - RNA, 19 nt, Homo sapiens
  misc_RNA (1)...(19): siRNA sense strand
ccaaggcuuugagauugug

SEQ ID NO: 1323554 - RNA, 19 nt, Homo sapiens
  misc_RNA (1)...(19): siRNA sense strand
agauuguguugaaugacua

SEQ ID NO: 1323555 - RNA, 19 nt, Homo sapiens
  misc_RNA (1)...(19): siRNA sense strand
gccaacugcaccuaucuug

SEQ ID NO: 1323556 - RNA, 19 nt, Homo sapiens
  misc_RNA (1)...(19): siRNA sense strand
cauuuacaaccaaggcuuu

SEQ ID NO: 1323557 - RNA, 19 nt, Homo sapiens
  misc_RNA (1)...(19): siRNA sense strand
gaugucaacugcucgguua

SEQ ID NO: 1323558 - RNA, 19 nt, Homo sapiens
  misc_RNA (1)...(19): siRNA sense strand
caaccaaggcuuugagauu

SEQ ID NO: 1323559 - RNA, 19 nt, Homo sapiens
  misc_RNA (1)...(19): siRNA sense strand
gcuuugagauuguguugaa

SEQ ID NO: 1323560 - RNA, 19 nt, Homo sapiens
  misc_RNA (1)...(19): siRNA sense strand
gagauuguguugaaugacu

SEQ ID NO: 1323561 - RNA, 19 nt, Homo sapiens
  misc_RNA (1)...(19): siRNA sense strand
aaccaaggcuuugagauug

SEQ ID NO: 1323562 - RNA, 19 nt, Homo sapiens
  misc_RNA (1)...(19): siRNA sense strand
guagugguguaccuucaga

SEQ ID NO: 1323563 - RNA, 19 nt, Homo sapiens
  misc_RNA (1)...(19): siRNA sense strand
gccauuucaccaucauuua

SEQ ID NO: 1323564 - RNA, 19 nt, Homo sapiens
  misc_RNA (1)...(19): siRNA sense strand
ggccauuucaccaucauuu

SEQ ID NO: 1323565 - RNA, 19 nt, Homo sapiens
  misc_RNA (1)...(19): siRNA sense strand
cuacaagugguuugccuuu

SEQ ID NO: 1323566 - RNA, 19 nt, Homo sapiens
  misc_RNA (1)...(19): siRNA sense strand
caccaucauuuacaaccaa

SEQ ID NO: 1323567 - RNA, 19 nt, Homo sapiens
  misc_RNA (1)...(19): siRNA sense strand
caacugcaccuaucuugac

SEQ ID NO: 1323568 - RNA, 19 nt, Homo sapiens
  misc_RNA (1)...(19): siRNA sense strand
ggauacagcauaugaugac

SEQ ID NO: 1323569 - RNA, 19 nt, Homo sapiens
  misc_RNA (1)...(19): siRNA sense strand
uugagauuguguugaauga

SEQ ID NO: 1323570 - RNA, 19 nt, Homo sapiens
  misc_RNA (1)...(19): siRNA sense strand
gaaugacuacaagugguuu

SEQ ID NO: 1323571 - RNA, 19 nt, Homo sapiens
  misc_RNA (1)...(19): siRNA sense strand
augaugaccuuggcaauuc

SEQ ID NO: 1323572 - RNA, 19 nt, Homo sapiens
  misc_RNA (1)...(19): siRNA sense strand
uaugaugaccuuggcaauu

SEQ ID NO: 1323573 - RNA, 19 nt, Homo sapiens
  misc_RNA (1)...(19): siRNA sense strand
uacagcauaugaugaccuu

SEQ ID NO: 1323574 - RNA, 19 nt, Homo sapiens
  misc_RNA (1)...(19): siRNA sense strand
ugaaugacuacaagugguu

SEQ ID NO: 1323575 - RNA, 19 nt, Homo sapiens
  misc_RNA (1)...(19): siRNA sense strand
ccaacugcaccuaucuuga

SEQ ID NO: 1323576 - RNA, 19 nt, Homo sapiens
  misc_RNA (1)...(19): siRNA sense strand
ccaaggcuuugagauugug

SEQ ID NO: 1323577 - RNA, 19 nt, Homo sapiens
  misc_RNA (1)...(19): siRNA sense strand
agauuguguugaaugacua

SEQ ID NO: 1323578 - RNA, 19 nt, Homo sapiens
  misc_RNA (1)...(19): siRNA sense strand
gccaacugcaccuaucuug

SEQ ID NO: 1323579 - RNA, 19 nt, Homo sapiens
  misc_RNA (1)...(19): siRNA sense strand
cauuuacaaccaaggcuuu

SEQ ID NO: 1323580 - RNA, 19 nt, Homo sapiens
  misc_RNA (1)...(19): siRNA sense strand
guacagaacuccacauaua

SEQ ID NO: 1323581 - RNA, 19 nt, Homo sapiens
  misc_RNA (1)...(19): siRNA sense strand
gaagccaacuccuuugaaa

SEQ ID NO: 1323582 - RNA, 19 nt, Homo sapiens
  misc_RNA (1)...(19): siRNA sense strand
ggacaaaccuucagaucgu

SEQ ID NO: 1323583 - RNA, 19 nt, Homo sapiens
  misc_RNA (1)...(19): siRNA sense strand
caacauagcucaggaucug

SEQ ID NO: 1323584 - RNA, 19 nt, Homo sapiens
  misc_RNA (1)...(19): siRNA sense strand
gaugggagccuagcuaaua

SEQ ID NO: 1323585 - RNA, 19 nt, Homo sapiens
  misc_RNA (1)...(19): siRNA sense strand
ggcaacagcugaacagaug

SEQ ID NO: 1323586 - RNA, 19 nt, Homo sapiens
  misc_RNA (1)...(19): siRNA sense strand
gaacuggcaucaaauacuc

SEQ ID NO: 1323587 - RNA, 19 nt, Homo sapiens
  misc_RNA (1)...(19): siRNA sense strand
cagcagaugucacaggauu

SEQ ID NO: 1323588 - RNA, 19 nt, Homo sapiens
  misc_RNA (1)...(19): siRNA sense strand
acacuggucuucccuacua

SEQ ID NO: 1323589 - RNA, 19 nt, Homo sapiens
  misc_RNA (1)...(19): siRNA sense strand
ggaagggaauucagacaca

SEQ ID NO: 1323590 - RNA, 19 nt, Homo sapiens
  misc_RNA (1)...(19): siRNA sense strand
uaagugagccuuugaauac

SEQ ID NO: 1323591 - RNA, 19 nt, Homo sapiens
  misc_RNA (1)...(19): siRNA sense strand
uaauggagaugugaacaaa

SEQ ID NO: 1323592 - RNA, 19 nt, Homo sapiens
  misc_RNA (1)...(19): siRNA sense strand
ccacuggucuaccugauau

SEQ ID NO: 1323593 - RNA, 19 nt, Homo sapiens
  misc_RNA (1)...(19): siRNA sense strand
gcacaaccaguaccucgua

SEQ ID NO: 1323594 - RNA, 19 nt, Homo sapiens
  misc_RNA (1)...(19): siRNA sense strand
gaucaucgcaggcaccaaa

SEQ ID NO: 1323595 - RNA, 19 nt, Homo sapiens
  misc_RNA (1)...(19): siRNA sense strand
guugaaagcuccgaguuug

SEQ ID NO: 1323596 - RNA, 19 nt, Homo sapiens
  misc_RNA (1)...(19): siRNA sense strand
ggaagaauucuguggaaga

SEQ ID NO: 1323597 - RNA, 19 nt, Homo sapiens
  misc_RNA (1)...(19): siRNA sense strand
gaagucagcagacacuaga

SEQ ID NO: 1323598 - RNA, 19 nt, Homo sapiens
  misc_RNA (1)...(19): siRNA sense strand
gauuaaaugugcaguuugg

SEQ ID NO: 1323599 - RNA, 19 nt, Homo sapiens
  misc_RNA (1)...(19): siRNA sense strand
ccaaguacacagcagaaua

SEQ ID NO: 1323600 - RNA, 19 nt, Homo sapiens
  misc_RNA (1)...(19): siRNA sense strand
gaagaauucuguggaagag

SEQ ID NO: 1323601 - RNA, 19 nt, Homo sapiens
  misc_RNA (1)...(19): siRNA sense strand
gcacgaccauugaaaauau

SEQ ID NO: 1323602 - RNA, 19 nt, Homo sapiens
  misc_RNA (1)...(19): siRNA sense strand
gcagaugucacaggauuaa

SEQ ID NO: 1323603 - RNA, 19 nt, Homo sapiens
  misc_RNA (1)...(19): siRNA sense strand
gaagggaauucagacacaa

SEQ ID NO: 1323604 - RNA, 19 nt, Homo sapiens
  misc_RNA (1)...(19): siRNA sense strand
acaauaagacacagacuuu

SEQ ID NO: 1323605 - RNA, 19 nt, Homo sapiens
  misc_RNA (1)...(19): siRNA sense strand
cugacaagcucaucacuga

SEQ ID NO: 1323606 - RNA, 19 nt, Homo sapiens
  misc_RNA (1)...(19): siRNA sense strand
gaauuuagaggugaagaaa

SEQ ID NO: 1323607 - RNA, 19 nt, Homo sapiens
  misc_RNA (1)...(19): siRNA sense strand
aaacaagucugcagguucu

SEQ ID NO: 1323608 - RNA, 19 nt, Homo sapiens
  misc_RNA (1)...(19): siRNA sense strand
cagcagagccaaucacaga

SEQ ID NO: 1323609 - RNA, 19 nt, Homo sapiens
  misc_RNA (1)...(19): siRNA sense strand
aaaucaggaugaaugcaua

SEQ ID NO: 1323610 - RNA, 19 nt, Homo sapiens
  misc_RNA (1)...(19): siRNA sense strand
gagccuagcuaauaaucca

SEQ ID NO: 1323611 - RNA, 19 nt, Homo sapiens
  misc_RNA (1)...(19): siRNA sense strand
gcaaugucuuccucuuaug

SEQ ID NO: 1323612 - RNA, 19 nt, Homo sapiens
  misc_RNA (1)...(19): siRNA sense strand
gaauuugggucagaaccuu

SEQ ID NO: 1323613 - RNA, 19 nt, Homo sapiens
  misc_RNA (1)...(19): siRNA sense strand
caaauucgcaacacaacaa

SEQ ID NO: 1323614 - RNA, 19 nt, Homo sapiens
  misc_RNA (1)...(19): siRNA sense strand
caaagagaauagagagaag

SEQ ID NO: 1323615 - RNA, 19 nt, Homo sapiens
  misc_RNA (1)...(19): siRNA sense strand
ccaaacaagucugcagguu

SEQ ID NO: 1323616 - RNA, 19 nt, Homo sapiens
  misc_RNA (1)...(19): siRNA sense strand
ccaguggacuacuauggaa

SEQ ID NO: 1323617 - RNA, 19 nt, Homo sapiens
  misc_RNA (1)...(19): siRNA sense strand
ccaaagcccugugaguuca

SEQ ID NO: 1323618 - RNA, 19 nt, Homo sapiens
  misc_RNA (1)...(19): siRNA sense strand
gugaacaaagcuaucaaua

SEQ ID NO: 1323619 - RNA, 19 nt, Homo sapiens
  misc_RNA (1)...(19): siRNA sense strand
uauacaacuuccgucauua

SEQ ID NO: 1323620 - RNA, 19 nt, Homo sapiens
  misc_RNA (1)...(19): siRNA sense strand
gaaaggaagaggcggcaau

SEQ ID NO: 1323621 - RNA, 19 nt, Homo sapiens
  misc_RNA (1)...(19): siRNA sense strand
gagaugggagccuagcuaa

SEQ ID NO: 1323622 - RNA, 19 nt, Homo sapiens
  misc_RNA (1)...(19): siRNA sense strand
auauacaacuuccgucauu

SEQ ID NO: 1323623 - RNA, 19 nt, Homo sapiens
  misc_RNA (1)...(19): siRNA sense strand
acaagucacccuacaacua

SEQ ID NO: 1323624 - RNA, 19 nt, Homo sapiens
  misc_RNA (1)...(19): siRNA sense strand
caacagaagacuggacuga

SEQ ID NO: 1323625 - RNA, 19 nt, Homo sapiens
  misc_RNA (1)...(19): siRNA sense strand
cuacaacuacuacuucuug

SEQ ID NO: 1323626 - RNA, 19 nt, Homo sapiens
  misc_RNA (1)...(19): siRNA sense strand
ggaauucagacacaacuuc

SEQ ID NO: 1323627 - RNA, 19 nt, Homo sapiens
  misc_RNA (1)...(19): siRNA sense strand
uagcaaugucuuccucuua

SEQ ID NO: 1323628 - RNA, 19 nt, Homo sapiens
  misc_RNA (1)...(19): siRNA sense strand
aaccuucucucucugaauu

SEQ ID NO: 1323629 - RNA, 19 nt, Homo sapiens
  misc_RNA (1)...(19): siRNA sense strand
gcaaucaaguggacaaacc

SEQ ID NO: 1323630 - RNA, 19 nt, Homo sapiens
  misc_RNA (1)...(19): siRNA sense strand
cugguucugucuacaauaa

SEQ ID NO: 1323631 - RNA, 19 nt, Homo sapiens
  misc_RNA (1)...(19): siRNA sense strand
uuaagugagccuuugaaua

SEQ ID NO: 1323632 - RNA, 19 nt, Homo sapiens
  misc_RNA (1)...(19): siRNA sense strand
aaacacaucaaacuugcua

SEQ ID NO: 1323633 - RNA, 19 nt, Homo sapiens
  misc_RNA (1)...(19): siRNA sense strand
caaguacacagcagaauag

SEQ ID NO: 1323634 - RNA, 19 nt, Homo sapiens
  misc_RNA (1)...(19): siRNA sense strand
gcauaguggcccuacauga

SEQ ID NO: 1323635 - RNA, 19 nt, Homo sapiens
  misc_RNA (1)...(19): siRNA sense strand
gaguaucagugucuucaag

SEQ ID NO: 1323636 - RNA, 19 nt, Homo sapiens
  misc_RNA (1)...(19): siRNA sense strand
caacgcaaccacagaaaca

SEQ ID NO: 1323637 - RNA, 19 nt, Homo sapiens
  misc_RNA (1)...(19): siRNA sense strand
acagaagacuggacugaag

SEQ ID NO: 1323638 - RNA, 19 nt, Homo sapiens
  misc_RNA (1)...(19): siRNA sense strand
caucaaauacucacaacau

SEQ ID NO: 1323639 - RNA, 19 nt, Homo sapiens
  misc_RNA (1)...(19): siRNA sense strand
ugacuucagugagcaguga

SEQ ID NO: 1323640 - RNA, 19 nt, Homo sapiens
  misc_RNA (1)...(19): siRNA sense strand
aggauuaaaugugcaguuu

SEQ ID NO: 1323641 - RNA, 19 nt, Homo sapiens
  misc_RNA (1)...(19): siRNA sense strand
ggaaacaacaaccggaaag

SEQ ID NO: 1323642 - RNA, 19 nt, Homo sapiens
  misc_RNA (1)...(19): siRNA sense strand
gaucagcuccaagcaguga

SEQ ID NO: 1323643 - RNA, 19 nt, Homo sapiens
  misc_RNA (1)...(19): siRNA sense strand
caacaucccaguccucagu

SEQ ID NO: 1323644 - RNA, 19 nt, Homo sapiens
  misc_RNA (1)...(19): siRNA sense strand
cucaggaucugucaaacaa

SEQ ID NO: 1323645 - RNA, 19 nt, Homo sapiens
  misc_RNA (1)...(19): siRNA sense strand
ccaggaaccaucaugaaug

SEQ ID NO: 1323646 - RNA, 19 nt, Homo sapiens
  misc_RNA (1)...(19): siRNA sense strand
guagcaaugucuuccucuu

SEQ ID NO: 1323647 - RNA, 19 nt, Homo sapiens
  misc_RNA (1)...(19): siRNA sense strand
gccuuugaauacaucuuua

SEQ ID NO: 1323648 - RNA, 19 nt, Homo sapiens
  misc_RNA (1)...(19): siRNA sense strand
ggagaugugaacaaagcua

SEQ ID NO: 1323649 - RNA, 19 nt, Homo sapiens
  misc_RNA (1)...(19): siRNA sense strand
cgaccuccgucucaaguuc

SEQ ID NO: 1323650 - RNA, 19 nt, Homo sapiens
  misc_RNA (1)...(19): siRNA sense strand
ccaacuccuuugaaacuuc

SEQ ID NO: 1323651 - RNA, 19 nt, Homo sapiens
  misc_RNA (1)...(19): siRNA sense strand
aaucguggcagagaauuua

SEQ ID NO: 1323652 - RNA, 19 nt, Homo sapiens
  misc_RNA (1)...(19): siRNA sense strand
gggagacuguaggguguaa

SEQ ID NO: 1323653 - RNA, 19 nt, Homo sapiens
  misc_RNA (1)...(19): siRNA sense strand
gaauucagacacaacuuca

SEQ ID NO: 1323654 - RNA, 19 nt, Homo sapiens
  misc_RNA (1)...(19): siRNA sense strand
gguucugucuacaauaaga

SEQ ID NO: 1323655 - RNA, 19 nt, Homo sapiens
  misc_RNA (1)...(19): siRNA sense strand
gaacuccacauauacaacu

SEQ ID NO: 1323656 - RNA, 19 nt, Homo sapiens
  misc_RNA (1)...(19): siRNA sense strand
ucacaaauucgcaacacaa

SEQ ID NO: 1323657 - RNA, 19 nt, Homo sapiens
  misc_RNA (1)...(19): siRNA sense strand
gaagaaaagcgagaaagaa

SEQ ID NO: 1323658 - RNA, 19 nt, Homo sapiens
  misc_RNA (1)...(19): siRNA sense strand
acaaagagaauagagagaa

SEQ ID NO: 1323659 - RNA, 19 nt, Homo sapiens
  misc_RNA (1)...(19): siRNA sense strand
ccaccuggcuauagcuaca

SEQ ID NO: 1323660 - RNA, 19 nt, Homo sapiens
  misc_RNA (1)...(19): siRNA sense strand
cagcagcccuucgugaauc

SEQ ID NO: 1323661 - RNA, 19 nt, Homo sapiens
  misc_RNA (1)...(19): siRNA sense strand
gcagcgaccuccgucucaa

SEQ ID NO: 1323662 - RNA, 19 nt, Homo sapiens
  misc_RNA (1)...(19): siRNA sense strand
caaugucuuccucuuauga

SEQ ID NO: 1323663 - RNA, 19 nt, Homo sapiens
  misc_RNA (1)...(19): siRNA sense strand
gaugucacaggauuaaaug

SEQ ID NO: 1323664 - RNA, 19 nt, Homo sapiens
  misc_RNA (1)...(19): siRNA sense strand
caagucacccuacaacuac

SEQ ID NO: 1323665 - RNA, 19 nt, Homo sapiens
  misc_RNA (1)...(19): siRNA sense strand
gaagaguggacaacagaag

SEQ ID NO: 1323666 - RNA, 19 nt, Homo sapiens
  misc_RNA (1)...(19): siRNA sense strand
guaauggagaugugaacaa

SEQ ID NO: 1323667 - RNA, 19 nt, Homo sapiens
  misc_RNA (1)...(19): siRNA sense strand
gagaauagagagaagaaaa

SEQ ID NO: 1323668 - RNA, 19 nt, Homo sapiens
  misc_RNA (1)...(19): siRNA sense strand
cagggacgccuccaccuuu

SEQ ID NO: 1323669 - RNA, 19 nt, Homo sapiens
  misc_RNA (1)...(19): siRNA sense strand
caaaggaguaucagugucu

SEQ ID NO: 1323670 - RNA, 19 nt, Homo sapiens
  misc_RNA (1)...(19): siRNA sense strand
ggccagcacggcuacagua

SEQ ID NO: 1323671 - RNA, 19 nt, Homo sapiens
  misc_RNA (1)...(19): siRNA sense strand
gcccagugccuuccaguau

SEQ ID NO: 1323672 - RNA, 19 nt, Homo sapiens
  misc_RNA (1)...(19): siRNA sense strand
ucucucagcuuagcaguuc

SEQ ID NO: 1323673 - RNA, 19 nt, Homo sapiens
  misc_RNA (1)...(19): siRNA sense strand
caguacagaacuccacaua

SEQ ID NO: 1323674 - RNA, 19 nt, Homo sapiens
  misc_RNA (1)...(19): siRNA sense strand
cagagaauuuagaggugaa

SEQ ID NO: 1323675 - RNA, 19 nt, Homo sapiens
  misc_RNA (1)...(19): siRNA sense strand
caaaggggcuuggaagaau

SEQ ID NO: 1323676 - RNA, 19 nt, Homo sapiens
  misc_RNA (1)...(19): siRNA sense strand
acacuagacacuccaaaga

SEQ ID NO: 1323677 - RNA, 19 nt, Homo sapiens
  misc_RNA (1)...(19): siRNA sense strand
agcaaugucuuccucuuau

SEQ ID NO: 1323678 - RNA, 19 nt, Homo sapiens
  misc_RNA (1)...(19): siRNA sense strand
cauaguggcccuacaugau

SEQ ID NO: 1323679 - RNA, 19 nt, Homo sapiens
  misc_RNA (1)...(19): siRNA sense strand
gcuuguauucgaagucuuu

SEQ ID NO: 1323680 - RNA, 19 nt, Homo sapiens
  misc_RNA (1)...(19): siRNA sense strand
guacagaacuccacauaua

SEQ ID NO: 1323681 - RNA, 19 nt, Homo sapiens
  misc_RNA (1)...(19): siRNA sense strand
gaagccaacuccuuugaaa

SEQ ID NO: 1323682 - RNA, 19 nt, Homo sapiens
  misc_RNA (1)...(19): siRNA sense strand
ggacaaaccuucagaucgu

SEQ ID NO: 1323683 - RNA, 19 nt, Homo sapiens
  misc_RNA (1)...(19): siRNA sense strand
caacauagcucaggaucug

SEQ ID NO: 1323684 - RNA, 19 nt, Homo sapiens
  misc_RNA (1)...(19): siRNA sense strand
gaugggagccuagcuaaua

SEQ ID NO: 1323685 - RNA, 19 nt, Homo sapiens
  misc_RNA (1)...(19): siRNA sense strand
ggcaacagcugaacagaug

SEQ ID NO: 1323686 - RNA, 19 nt, Homo sapiens
  misc_RNA (1)...(19): siRNA sense strand
gaacuggcaucaaauacuc

SEQ ID NO: 1323687 - RNA, 19 nt, Homo sapiens
  misc_RNA (1)...(19): siRNA sense strand
cagcagaugucacaggauu

SEQ ID NO: 1323688 - RNA, 19 nt, Homo sapiens
  misc_RNA (1)...(19): siRNA sense strand
acacuggucuucccuacua

SEQ ID NO: 1323689 - RNA, 19 nt, Homo sapiens
  misc_RNA (1)...(19): siRNA sense strand
ggaagggaauucagacaca

SEQ ID NO: 1323690 - RNA, 19 nt, Homo sapiens
  misc_RNA (1)...(19): siRNA sense strand
uaagugagccuuugaauac

SEQ ID NO: 1323691 - RNA, 19 nt, Homo sapiens
  misc_RNA (1)...(19): siRNA sense strand
uaauggagaugugaacaaa

SEQ ID NO: 1323692 - RNA, 19 nt, Homo sapiens
  misc_RNA (1)...(19): siRNA sense strand
ccacuggucuaccugauau

SEQ ID NO: 1323693 - RNA, 19 nt, Homo sapiens
  misc_RNA (1)...(19): siRNA sense strand
gcacaaccaguaccucgua

SEQ ID NO: 1323694 - RNA, 19 nt, Homo sapiens
  misc_RNA (1)...(19): siRNA sense strand
gaucaucgcaggcaccaaa

SEQ ID NO: 1323695 - RNA, 19 nt, Homo sapiens
  misc_RNA (1)...(19): siRNA sense strand
guugaaagcuccgaguuug

SEQ ID NO: 1323696 - RNA, 19 nt, Homo sapiens
  misc_RNA (1)...(19): siRNA sense strand
ggaagaauucuguggaaga

SEQ ID NO: 1323697 - RNA, 19 nt, Homo sapiens
  misc_RNA (1)...(19): siRNA sense strand
gaagucagcagacacuaga

SEQ ID NO: 1323698 - RNA, 19 nt, Homo sapiens
  misc_RNA (1)...(19): siRNA sense strand
gauuaaaugugcaguuugg

SEQ ID NO: 1323699 - RNA, 19 nt, Homo sapiens
  misc_RNA (1)...(19): siRNA sense strand
ccaaguacacagcagaaua

SEQ ID NO: 1323700 - RNA, 19 nt, Homo sapiens
  misc_RNA (1)...(19): siRNA sense strand
gaagaauucuguggaagag

SEQ ID NO: 1323701 - RNA, 19 nt, Homo sapiens
  misc_RNA (1)...(19): siRNA sense strand
gcacgaccauugaaaauau

SEQ ID NO: 1323702 - RNA, 19 nt, Homo sapiens
  misc_RNA (1)...(19): siRNA sense strand
gcagaugucacaggauuaa

SEQ ID NO: 1323703 - RNA, 19 nt, Homo sapiens
  misc_RNA (1)...(19): siRNA sense strand
gaagggaauucagacacaa

SEQ ID NO: 1323704 - RNA, 19 nt, Homo sapiens
  misc_RNA (1)...(19): siRNA sense strand
acaauaagacacagacuuu

SEQ ID NO: 1323705 - RNA, 19 nt, Homo sapiens
  misc_RNA (1)...(19): siRNA sense strand
cugacaagcucaucacuga

SEQ ID NO: 1323706 - RNA, 19 nt, Homo sapiens
  misc_RNA (1)...(19): siRNA sense strand
gaauuuagaggugaagaaa

SEQ ID NO: 1323707 - RNA, 19 nt, Homo sapiens
  misc_RNA (1)...(19): siRNA sense strand
aaacaagucugcagguucu

SEQ ID NO: 1323708 - RNA, 19 nt, Homo sapiens
  misc_RNA (1)...(19): siRNA sense strand
cagcagagccaaucacaga

SEQ ID NO: 1323709 - RNA, 19 nt, Homo sapiens
  misc_RNA (1)...(19): siRNA sense strand
aaaucaggaugaaugcaua

SEQ ID NO: 1323710 - RNA, 19 nt, Homo sapiens
  misc_RNA (1)...(19): siRNA sense strand
gagccuagcuaauaaucca

SEQ ID NO: 1323711 - RNA, 19 nt, Homo sapiens
  misc_RNA (1)...(19): siRNA sense strand
gcaaugucuuccucuuaug

SEQ ID NO: 1323712 - RNA, 19 nt, Homo sapiens
  misc_RNA (1)...(19): siRNA sense strand
gaauuugggucagaaccuu

SEQ ID NO: 1323713 - RNA, 19 nt, Homo sapiens
  misc_RNA (1)...(19): siRNA sense strand
caaauucgcaacacaacaa

SEQ ID NO: 1323714 - RNA, 19 nt, Homo sapiens
  misc_RNA (1)...(19): siRNA sense strand
caaagagaauagagagaag

SEQ ID NO: 1323715 - RNA, 19 nt, Homo sapiens
  misc_RNA (1)...(19): siRNA sense strand
ccaaacaagucugcagguu

SEQ ID NO: 1323716 - RNA, 19 nt, Homo sapiens
  misc_RNA (1)...(19): siRNA sense strand
ccaguggacuacuauggaa

SEQ ID NO: 1323717 - RNA, 19 nt, Homo sapiens
  misc_RNA (1)...(19): siRNA sense strand
ccaaagcccugugaguuca

SEQ ID NO: 1323718 - RNA, 19 nt, Homo sapiens
  misc_RNA (1)...(19): siRNA sense strand
gugaacaaagcuaucaaua

SEQ ID NO: 1323719 - RNA, 19 nt, Homo sapiens
  misc_RNA (1)...(19): siRNA sense strand
uauacaacuuccgucauua

SEQ ID NO: 1323720 - RNA, 19 nt, Homo sapiens
  misc_RNA (1)...(19): siRNA sense strand
gaaaggaagaggcggcaau

SEQ ID NO: 1323721 - RNA, 19 nt, Homo sapiens
  misc_RNA (1)...(19): siRNA sense strand
gagaugggagccuagcuaa

SEQ ID NO: 1323722 - RNA, 19 nt, Homo sapiens
  misc_RNA (1)...(19): siRNA sense strand
auauacaacuuccgucauu

SEQ ID NO: 1323723 - RNA, 19 nt, Homo sapiens
  misc_RNA (1)...(19): siRNA sense strand
acaagucacccuacaacua

SEQ ID NO: 1323724 - RNA, 19 nt, Homo sapiens
  misc_RNA (1)...(19): siRNA sense strand
caacagaagacuggacuga

SEQ ID NO: 1323725 - RNA, 19 nt, Homo sapiens
  misc_RNA (1)...(19): siRNA sense strand
cuacaacuacuacuucuug

SEQ ID NO: 1323726 - RNA, 19 nt, Homo sapiens
  misc_RNA (1)...(19): siRNA sense strand
ggaauucagacacaacuuc

SEQ ID NO: 1323727 - RNA, 19 nt, Homo sapiens
  misc_RNA (1)...(19): siRNA sense strand
uagcaaugucuuccucuua

SEQ ID NO: 1323728 - RNA, 19 nt, Homo sapiens
  misc_RNA (1)...(19): siRNA sense strand
aaccuucucucucugaauu

SEQ ID NO: 1323729 - RNA, 19 nt, Homo sapiens
  misc_RNA (1)...(19): siRNA sense strand
gcaaucaaguggacaaacc

SEQ ID NO: 1323730 - RNA, 19 nt, Homo sapiens
  misc_RNA (1)...(19): siRNA sense strand
cugguucugucuacaauaa

SEQ ID NO: 1323731 - RNA, 19 nt, Homo sapiens
  misc_RNA (1)...(19): siRNA sense strand
uuaagugagccuuugaaua

SEQ ID NO: 1323732 - RNA, 19 nt, Homo sapiens
  misc_RNA (1)...(19): siRNA sense strand
aaacacaucaaacuugcua

SEQ ID NO: 1323733 - RNA, 19 nt, Homo sapiens
  misc_RNA (1)...(19): siRNA sense strand
caaguacacagcagaauag

SEQ ID NO: 1323734 - RNA, 19 nt, Homo sapiens
  misc_RNA (1)...(19): siRNA sense strand
gcauaguggcccuacauga

SEQ ID NO: 1323735 - RNA, 19 nt, Homo sapiens
  misc_RNA (1)...(19): siRNA sense strand
gaguaucagugucuucaag

SEQ ID NO: 1323736 - RNA, 19 nt, Homo sapiens
  misc_RNA (1)...(19): siRNA sense strand
caacgcaaccacagaaaca

SEQ ID NO: 1323737 - RNA, 19 nt, Homo sapiens
  misc_RNA (1)...(19): siRNA sense strand
acagaagacuggacugaag

SEQ ID NO: 1323738 - RNA, 19 nt, Homo sapiens
  misc_RNA (1)...(19): siRNA sense strand
caucaaauacucacaacau

SEQ ID NO: 1323739 - RNA, 19 nt, Homo sapiens
  misc_RNA (1)...(19): siRNA sense strand
ugacuucagugagcaguga

SEQ ID NO: 1323740 - RNA, 19 nt, Homo sapiens
  misc_RNA (1)...(19): siRNA sense strand
aggauuaaaugugcaguuu

SEQ ID NO: 1323741 - RNA, 19 nt, Homo sapiens
  misc_RNA (1)...(19): siRNA sense strand
ggaaacaacaaccggaaag

SEQ ID NO: 1323742 - RNA, 19 nt, Homo sapiens
  misc_RNA (1)...(19): siRNA sense strand
gaucagcuccaagcaguga

SEQ ID NO: 1323743 - RNA, 19 nt, Homo sapiens
  misc_RNA (1)...(19): siRNA sense strand
caacaucccaguccucagu

SEQ ID NO: 1323744 - RNA, 19 nt, Homo sapiens
  misc_RNA (1)...(19): siRNA sense strand
cucaggaucugucaaacaa

SEQ ID NO: 1323745 - RNA, 19 nt, Homo sapiens
  misc_RNA (1)...(19): siRNA sense strand
ccaggaaccaucaugaaug

SEQ ID NO: 1323746 - RNA, 19 nt, Homo sapiens
  misc_RNA (1)...(19): siRNA sense strand
guagcaaugucuuccucuu

SEQ ID NO: 1323747 - RNA, 19 nt, Homo sapiens
  misc_RNA (1)...(19): siRNA sense strand
gccuuugaauacaucuuua

SEQ ID NO: 1323748 - RNA, 19 nt, Homo sapiens
  misc_RNA (1)...(19): siRNA sense strand
ggagaugugaacaaagcua

SEQ ID NO: 1323749 - RNA, 19 nt, Homo sapiens
  misc_RNA (1)...(19): siRNA sense strand
cgaccuccgucucaaguuc

SEQ ID NO: 1323750 - RNA, 19 nt, Homo sapiens
  misc_RNA (1)...(19): siRNA sense strand
ccaacuccuuugaaacuuc

SEQ ID NO: 1323751 - RNA, 19 nt, Homo sapiens
  misc_RNA (1)...(19): siRNA sense strand
aaucguggcagagaauuua

SEQ ID NO: 1323752 - RNA, 19 nt, Homo sapiens
  misc_RNA (1)...(19): siRNA sense strand
gggagacuguaggguguaa

SEQ ID NO: 1323753 - RNA, 19 nt, Homo sapiens
  misc_RNA (1)...(19): siRNA sense strand
gaauucagacacaacuuca

SEQ ID NO: 1323754 - RNA, 19 nt, Homo sapiens
  misc_RNA (1)...(19): siRNA sense strand
gguucugucuacaauaaga

SEQ ID NO: 1323755 - RNA, 19 nt, Homo sapiens
  misc_RNA (1)...(19): siRNA sense strand
gaacuccacauauacaacu

SEQ ID NO: 1323756 - RNA, 19 nt, Homo sapiens
  misc_RNA (1)...(19): siRNA sense strand
ucacaaauucgcaacacaa

SEQ ID NO: 1323757 - RNA, 19 nt, Homo sapiens
  misc_RNA (1)...(19): siRNA sense strand
gaagaaaagcgagaaagaa

SEQ ID NO: 1323758 - RNA, 19 nt, Homo sapiens
  misc_RNA (1)...(19): siRNA sense strand
acaaagagaauagagagaa

SEQ ID NO: 1323759 - RNA, 19 nt, Homo sapiens
  misc_RNA (1)...(19): siRNA sense strand
ccaccuggcuauagcuaca

SEQ ID NO: 1323760 - RNA, 19 nt, Homo sapiens
  misc_RNA (1)...(19): siRNA sense strand
cagcagcccuucgugaauc

SEQ ID NO: 1323761 - RNA, 19 nt, Homo sapiens
  misc_RNA (1)...(19): siRNA sense strand
gcagcgaccuccgucucaa

SEQ ID NO: 1323762 - RNA, 19 nt, Homo sapiens
  misc_RNA (1)...(19): siRNA sense strand
caaugucuuccucuuauga

SEQ ID NO: 1323763 - RNA, 19 nt, Homo sapiens
  misc_RNA (1)...(19): siRNA sense strand
gaugucacaggauuaaaug

SEQ ID NO: 1323764 - RNA, 19 nt, Homo sapiens
  misc_RNA (1)...(19): siRNA sense strand
caagucacccuacaacuac

SEQ ID NO: 1323765 - RNA, 19 nt, Homo sapiens
  misc_RNA (1)...(19): siRNA sense strand
gaagaguggacaacagaag

SEQ ID NO: 1323766 - RNA, 19 nt, Homo sapiens
  misc_RNA (1)...(19): siRNA sense strand
guaauggagaugugaacaa

SEQ ID NO: 1323767 - RNA, 19 nt, Homo sapiens
  misc_RNA (1)...(19): siRNA sense strand
gagaauagagagaagaaaa

SEQ ID NO: 1323768 - RNA, 19 nt, Homo sapiens
  misc_RNA (1)...(19): siRNA sense strand
cagggacgccuccaccuuu

SEQ ID NO: 1323769 - RNA, 19 nt, Homo sapiens
  misc_RNA (1)...(19): siRNA sense strand
caaaggaguaucagugucu

SEQ ID NO: 1323770 - RNA, 19 nt, Homo sapiens
  misc_RNA (1)...(19): siRNA sense strand
ggccagcacggcuacagua

SEQ ID NO: 1323771 - RNA, 19 nt, Homo sapiens
  misc_RNA (1)...(19): siRNA sense strand
gcccagugccuuccaguau

SEQ ID NO: 1323772 - RNA, 19 nt, Homo sapiens
  misc_RNA (1)...(19): siRNA sense strand
ucucucagcuuagcaguuc

SEQ ID NO: 1323773 - RNA, 19 nt, Homo sapiens
  misc_RNA (1)...(19): siRNA sense strand
caguacagaacuccacaua

SEQ ID NO: 1323774 - RNA, 19 nt, Homo sapiens
  misc_RNA (1)...(19): siRNA sense strand
cagagaauuuagaggugaa

SEQ ID NO: 1323775 - RNA, 19 nt, Homo sapiens
  misc_RNA (1)...(19): siRNA sense strand
caaaggggcuuggaagaau

SEQ ID NO: 1323776 - RNA, 19 nt, Homo sapiens
  misc_RNA (1)...(19): siRNA sense strand
acacuagacacuccaaaga

SEQ ID NO: 1323777 - RNA, 19 nt, Homo sapiens
  misc_RNA (1)...(19): siRNA sense strand
agcaaugucuuccucuuau

SEQ ID NO: 1323778 - RNA, 19 nt, Homo sapiens
  misc_RNA (1)...(19): siRNA sense strand
cauaguggcccuacaugau

SEQ ID NO: 1323779 - RNA, 19 nt, Homo sapiens
  misc_RNA (1)...(19): siRNA sense strand
gcuuguauucgaagucuuu

SEQ ID NO: 1323780 - RNA, 19 nt, Homo sapiens
  misc_RNA (1)...(19): siRNA sense strand
ggacaaaccuucagaucgu

SEQ ID NO: 1323781 - RNA, 19 nt, Homo sapiens
  misc_RNA (1)...(19): siRNA sense strand
caacauagcucaggaucug

SEQ ID NO: 1323782 - RNA, 19 nt, Homo sapiens
  misc_RNA (1)...(19): siRNA sense strand
ggcaacagcugaacagaug

SEQ ID NO: 1323783 - RNA, 19 nt, Homo sapiens
  misc_RNA (1)...(19): siRNA sense strand
gaacuggcaucaaauacuc

SEQ ID NO: 1323784 - RNA, 19 nt, Homo sapiens
  misc_RNA (1)...(19): siRNA sense strand
ggaagggaauucagacaca

SEQ ID NO: 1323785 - RNA, 19 nt, Homo sapiens
  misc_RNA (1)...(19): siRNA sense strand
uaauggagaugugaacaaa

SEQ ID NO: 1323786 - RNA, 19 nt, Homo sapiens
  misc_RNA (1)...(19): siRNA sense strand
ggaagaauucuguggaaga

SEQ ID NO: 1323787 - RNA, 19 nt, Homo sapiens
  misc_RNA (1)...(19): siRNA sense strand
gaagaauucuguggaagag

SEQ ID NO: 1323788 - RNA, 19 nt, Homo sapiens
  misc_RNA (1)...(19): siRNA sense strand
gaagggaauucagacacaa

SEQ ID NO: 1323789 - RNA, 19 nt, Homo sapiens
  misc_RNA (1)...(19): siRNA sense strand
gaauuuagaggugaagaaa

SEQ ID NO: 1323790 - RNA, 19 nt, Homo sapiens
  misc_RNA (1)...(19): siRNA sense strand
aaaucaggaugaaugcaua

SEQ ID NO: 1323791 - RNA, 19 nt, Homo sapiens
  misc_RNA (1)...(19): siRNA sense strand
caaagagaauagagagaag

SEQ ID NO: 1323792 - RNA, 19 nt, Homo sapiens
  misc_RNA (1)...(19): siRNA sense strand
gugaacaaagcuaucaaua

SEQ ID NO: 1323793 - RNA, 19 nt, Homo sapiens
  misc_RNA (1)...(19): siRNA sense strand
gaaaggaagaggcggcaau

SEQ ID NO: 1323794 - RNA, 19 nt, Homo sapiens
  misc_RNA (1)...(19): siRNA sense strand
caacagaagacuggacuga

SEQ ID NO: 1323795 - RNA, 19 nt, Homo sapiens
  misc_RNA (1)...(19): siRNA sense strand
ggaauucagacacaacuuc

SEQ ID NO: 1323796 - RNA, 19 nt, Homo sapiens
  misc_RNA (1)...(19): siRNA sense strand
gcaaucaaguggacaaacc

SEQ ID NO: 1323797 - RNA, 19 nt, Homo sapiens
  misc_RNA (1)...(19): siRNA sense strand
gcauaguggcccuacauga

SEQ ID NO: 1323798 - RNA, 19 nt, Homo sapiens
  misc_RNA (1)...(19): siRNA sense strand
acagaagacuggacugaag

SEQ ID NO: 1323799 - RNA, 19 nt, Homo sapiens
  misc_RNA (1)...(19): siRNA sense strand
caacgcaaccacagaaaca

SEQ ID NO: 1323800 - RNA, 19 nt, Homo sapiens
  misc_RNA (1)...(19): siRNA sense strand
ugacuucagugagcaguga

SEQ ID NO: 1323801 - RNA, 19 nt, Homo sapiens
  misc_RNA (1)...(19): siRNA sense strand
caucaaauacucacaacau

SEQ ID NO: 1323802 - RNA, 19 nt, Homo sapiens
  misc_RNA (1)...(19): siRNA sense strand
ggaaacaacaaccggaaag

SEQ ID NO: 1323803 - RNA, 19 nt, Homo sapiens
  misc_RNA (1)...(19): siRNA sense strand
cucaggaucugucaaacaa

SEQ ID NO: 1323804 - RNA, 19 nt, Homo sapiens
  misc_RNA (1)...(19): siRNA sense strand
ggagaugugaacaaagcua

SEQ ID NO: 1323805 - RNA, 19 nt, Homo sapiens
  misc_RNA (1)...(19): siRNA sense strand
aaucguggcagagaauuua

SEQ ID NO: 1323806 - RNA, 19 nt, Homo sapiens
  misc_RNA (1)...(19): siRNA sense strand
gggagacuguaggguguaa

SEQ ID NO: 1323807 - RNA, 19 nt, Homo sapiens
  misc_RNA (1)...(19): siRNA sense strand
gaauucagacacaacuuca

SEQ ID NO: 1323808 - RNA, 19 nt, Homo sapiens
  misc_RNA (1)...(19): siRNA sense strand
gaagaaaagcgagaaagaa

SEQ ID NO: 1323809 - RNA, 19 nt, Homo sapiens
  misc_RNA (1)...(19): siRNA sense strand
guaauggagaugugaacaa

SEQ ID NO: 1323810 - RNA, 19 nt, Homo sapiens
  misc_RNA (1)...(19): siRNA sense strand
gaagaguggacaacagaag

SEQ ID NO: 1323811 - RNA, 19 nt, Homo sapiens
  misc_RNA (1)...(19): siRNA sense strand
acaaagagaauagagagaa

SEQ ID NO: 1323812 - RNA, 19 nt, Homo sapiens
  misc_RNA (1)...(19): siRNA sense strand
gagaauagagagaagaaaa

SEQ ID NO: 1323813 - RNA, 19 nt, Homo sapiens
  misc_RNA (1)...(19): siRNA sense strand
cagagaauuuagaggugaa

SEQ ID NO: 1323814 - RNA, 19 nt, Homo sapiens
  misc_RNA (1)...(19): siRNA sense strand
cauaguggcccuacaugau

SEQ ID NO: 1323815 - RNA, 19 nt, Homo sapiens
  misc_RNA (1)...(19): siRNA sense strand
caaaggggcuuggaagaau

SEQ ID NO: 1323816 - RNA, 19 nt, Homo sapiens
  misc_RNA (1)...(19): siRNA sense strand
caacaaccggaaaggaaga

SEQ ID NO: 1323817 - RNA, 19 nt, Homo sapiens
  misc_RNA (1)...(19): siRNA sense strand
gacuguaggguguaagaaa

SEQ ID NO: 1323818 - RNA, 19 nt, Homo sapiens
  misc_RNA (1)...(19): siRNA sense strand
ggaagaguggacaacagaa

SEQ ID NO: 1323819 - RNA, 19 nt, Homo sapiens
  misc_RNA (1)...(19): siRNA sense strand
ucaaauacucacaacauag

SEQ ID NO: 1323820 - RNA, 19 nt, Homo sapiens
  misc_RNA (1)...(19): siRNA sense strand
gagaugugaacaaagcuau

SEQ ID NO: 1323821 - RNA, 19 nt, Homo sapiens
  misc_RNA (1)...(19): siRNA sense strand
gaugugaacaaagcuauca

SEQ ID NO: 1323822 - RNA, 19 nt, Homo sapiens
  misc_RNA (1)...(19): siRNA sense strand
gcgucucgcucaagugauc

SEQ ID NO: 1323823 - RNA, 19 nt, Homo sapiens
  misc_RNA (1)...(19): siRNA sense strand
gagacuguaggguguaaga

SEQ ID NO: 1323824 - RNA, 19 nt, Homo sapiens
  misc_RNA (1)...(19): siRNA sense strand
gggcuuggaagaauucugu

SEQ ID NO: 1323825 - RNA, 19 nt, Homo sapiens
  misc_RNA (1)...(19): siRNA sense strand
gcucaggaucugucaaaca

SEQ ID NO: 1323826 - RNA, 19 nt, Homo sapiens
  misc_RNA (1)...(19): siRNA sense strand
aaacaacaaccggaaagga

SEQ ID NO: 1323827 - RNA, 19 nt, Homo sapiens
  misc_RNA (1)...(19): siRNA sense strand
uagcucaggaucugucaaa

SEQ ID NO: 1323828 - RNA, 19 nt, Homo sapiens
  misc_RNA (1)...(19): siRNA sense strand
uaguggcccuacaugauug

SEQ ID NO: 1323829 - RNA, 19 nt, Homo sapiens
  misc_RNA (1)...(19): siRNA sense strand
cagaagacuggacugaaga

SEQ ID NO: 1323830 - RNA, 19 nt, Homo sapiens
  misc_RNA (1)...(19): siRNA sense strand
caggaucugucaaacaaaa

SEQ ID NO: 1323831 - RNA, 19 nt, Homo sapiens
  misc_RNA (1)...(19): siRNA sense strand
caaauacucacaacauagc

SEQ ID NO: 1323832 - RNA, 19 nt, Homo sapiens
  misc_RNA (1)...(19): siRNA sense strand
ucagugagcagugaccauu

SEQ ID NO: 1323833 - RNA, 19 nt, Homo sapiens
  misc_RNA (1)...(19): siRNA sense strand
cggcaaucguggcagagaa

SEQ ID NO: 1323834 - RNA, 19 nt, Homo sapiens
  misc_RNA (1)...(19): siRNA sense strand
acagaugcgucucgcucaa

SEQ ID NO: 1323835 - RNA, 19 nt, Homo sapiens
  misc_RNA (1)...(19): siRNA sense strand
uuggaagaauucuguggaa

SEQ ID NO: 1323836 - RNA, 19 nt, Homo sapiens
  misc_RNA (1)...(19): siRNA sense strand
aacaacaaccggaaaggaa

SEQ ID NO: 1323837 - RNA, 19 nt, Homo sapiens
  misc_RNA (1)...(19): siRNA sense strand
gaaacaacaaccggaaagg

SEQ ID NO: 1323838 - RNA, 19 nt, Homo sapiens
  misc_RNA (1)...(19): siRNA sense strand
aaucaacgcaaccacagaa

SEQ ID NO: 1323839 - RNA, 19 nt, Homo sapiens
  misc_RNA (1)...(19): siRNA sense strand
gcaaucguggcagagaauu

SEQ ID NO: 1323840 - RNA, 19 nt, Homo sapiens
  misc_RNA (1)...(19): siRNA sense strand
caaucguggcagagaauuu

SEQ ID NO: 1323841 - RNA, 19 nt, Homo sapiens
  misc_RNA (1)...(19): siRNA sense strand
caacuucaugggagacugu

SEQ ID NO: 1323842 - RNA, 19 nt, Homo sapiens
  misc_RNA (1)...(19): siRNA sense strand
auaguggcccuacaugauu

SEQ ID NO: 1323843 - RNA, 19 nt, Homo sapiens
  misc_RNA (1)...(19): siRNA sense strand
gcaaccacagaaacaagug

SEQ ID NO: 1323844 - RNA, 19 nt, Homo sapiens
  misc_RNA (1)...(19): siRNA sense strand
ucaaguggacaaaccuuca

SEQ ID NO: 1323845 - RNA, 19 nt, Homo sapiens
  misc_RNA (1)...(19): siRNA sense strand
uggaagaguggacaacaga

SEQ ID NO: 1323846 - RNA, 19 nt, Homo sapiens
  misc_RNA (1)...(19): siRNA sense strand
aagagaauagagagaagaa

SEQ ID NO: 1323847 - RNA, 19 nt, Homo sapiens
  misc_RNA (1)...(19): siRNA sense strand
guggaagaguggacaacag

SEQ ID NO: 1323848 - RNA, 19 nt, Homo sapiens
  misc_RNA (1)...(19): siRNA sense strand
agugagcagugaccauugu

SEQ ID NO: 1323849 - RNA, 19 nt, Homo sapiens
  misc_RNA (1)...(19): siRNA sense strand
aaagagaauagagagaaga

SEQ ID NO: 1323850 - RNA, 19 nt, Homo sapiens
  misc_RNA (1)...(19): siRNA sense strand
gaaaagcgagaaagaaucg

SEQ ID NO: 1323851 - RNA, 19 nt, Homo sapiens
  misc_RNA (1)...(19): siRNA sense strand
gaacuuuccuaggugauua

SEQ ID NO: 1323852 - RNA, 19 nt, Homo sapiens
  misc_RNA (1)...(19): siRNA sense strand
ucaauccgcucuacuggaa

SEQ ID NO: 1323853 - RNA, 19 nt, Homo sapiens
  misc_RNA (1)...(19): siRNA sense strand
uuuccuaggugauuacuuc

SEQ ID NO: 1323854 - RNA, 19 nt, Homo sapiens
  misc_RNA (1)...(19): siRNA sense strand
gcacgaugggaacacaaga

SEQ ID NO: 1323855 - RNA, 19 nt, Homo sapiens
  misc_RNA (1)...(19): siRNA sense strand
ucaccauccugcuccugaa

SEQ ID NO: 1323856 - RNA, 19 nt, Homo sapiens
  misc_RNA (1)...(19): siRNA sense strand
gcacugggguucgcuggaa

SEQ ID NO: 1323857 - RNA, 19 nt, Homo sapiens
  misc_RNA (1)...(19): siRNA sense strand
gggaagcacagccaacuac

SEQ ID NO: 1323858 - RNA, 19 nt, Homo sapiens
  misc_RNA (1)...(19): siRNA sense strand
uaccugggcugggccauca

SEQ ID NO: 1323859 - RNA, 19 nt, Homo sapiens
  misc_RNA (1)...(19): siRNA sense strand
aauccgcucuacuggaaug

SEQ ID NO: 1323860 - RNA, 19 nt, Homo sapiens
  misc_RNA (1)...(19): siRNA sense strand
ugagaucuaccggcagaaa

SEQ ID NO: 1323861 - RNA, 19 nt, Homo sapiens
  misc_RNA (1)...(19): siRNA sense strand
ccauccugcuccugaacuu

SEQ ID NO: 1323862 - RNA, 19 nt, Homo sapiens
  misc_RNA (1)...(19): siRNA sense strand
gaacuuuccuaggugauua

SEQ ID NO: 1323863 - RNA, 19 nt, Homo sapiens
  misc_RNA (1)...(19): siRNA sense strand
ucaauccgcucuacuggaa

SEQ ID NO: 1323864 - RNA, 19 nt, Homo sapiens
  misc_RNA (1)...(19): siRNA sense strand
uuuccuaggugauuacuuc

SEQ ID NO: 1323865 - RNA, 19 nt, Homo sapiens
  misc_RNA (1)...(19): siRNA sense strand
gcacgaugggaacacaaga

SEQ ID NO: 1323866 - RNA, 19 nt, Homo sapiens
  misc_RNA (1)...(19): siRNA sense strand
ucaccauccugcuccugaa

SEQ ID NO: 1323867 - RNA, 19 nt, Homo sapiens
  misc_RNA (1)...(19): siRNA sense strand
gcacugggguucgcuggaa

SEQ ID NO: 1323868 - RNA, 19 nt, Homo sapiens
  misc_RNA (1)...(19): siRNA sense strand
gggaagcacagccaacuac

SEQ ID NO: 1323869 - RNA, 19 nt, Homo sapiens
  misc_RNA (1)...(19): siRNA sense strand
uaccugggcugggccauca

SEQ ID NO: 1323870 - RNA, 19 nt, Homo sapiens
  misc_RNA (1)...(19): siRNA sense strand
aauccgcucuacuggaaug

SEQ ID NO: 1323871 - RNA, 19 nt, Homo sapiens
  misc_RNA (1)...(19): siRNA sense strand
ugagaucuaccggcagaaa

SEQ ID NO: 1323872 - RNA, 19 nt, Homo sapiens
  misc_RNA (1)...(19): siRNA sense strand
ccauccugcuccugaacuu

SEQ ID NO: 1323873 - RNA, 19 nt, Homo sapiens
  misc_RNA (1)...(19): siRNA sense strand
gaacuuuccuaggugauua

SEQ ID NO: 1323874 - RNA, 19 nt, Homo sapiens
  misc_RNA (1)...(19): siRNA sense strand
ucaauccgcucuacuggaa

SEQ ID NO: 1323875 - RNA, 19 nt, Homo sapiens
  misc_RNA (1)...(19): siRNA sense strand
uuuccuaggugauuacuuc

SEQ ID NO: 1323876 - RNA, 19 nt, Homo sapiens
  misc_RNA (1)...(19): siRNA sense strand
gcacgaugggaacacaaga

SEQ ID NO: 1323877 - RNA, 19 nt, Homo sapiens
  misc_RNA (1)...(19): siRNA sense strand
ucaccauccugcuccugaa

SEQ ID NO: 1323878 - RNA, 19 nt, Homo sapiens
  misc_RNA (1)...(19): siRNA sense strand
gcacugggguucgcuggaa

SEQ ID NO: 1323879 - RNA, 19 nt, Homo sapiens
  misc_RNA (1)...(19): siRNA sense strand
gggaagcacagccaacuac

SEQ ID NO: 1323880 - RNA, 19 nt, Homo sapiens
  misc_RNA (1)...(19): siRNA sense strand
uaccugggcugggccauca

SEQ ID NO: 1323881 - RNA, 19 nt, Homo sapiens
  misc_RNA (1)...(19): siRNA sense strand
aauccgcucuacuggaaug

SEQ ID NO: 1323882 - RNA, 19 nt, Homo sapiens
  misc_RNA (1)...(19): siRNA sense strand
ugagaucuaccggcagaaa

SEQ ID NO: 1323883 - RNA, 19 nt, Homo sapiens
  misc_RNA (1)...(19): siRNA sense strand
ccauccugcuccugaacuu

SEQ ID NO: 1323884 - RNA, 19 nt, Homo sapiens
  misc_RNA (1)...(19): siRNA sense strand
gaacuuuccuaggugauua

SEQ ID NO: 1323885 - RNA, 19 nt, Homo sapiens
  misc_RNA (1)...(19): siRNA sense strand
ucaauccgcucuacuggaa

SEQ ID NO: 1323886 - RNA, 19 nt, Homo sapiens
  misc_RNA (1)...(19): siRNA sense strand
uuuccuaggugauuacuuc

SEQ ID NO: 1323887 - RNA, 19 nt, Homo sapiens
  misc_RNA (1)...(19): siRNA sense strand
gcacgaugggaacacaaga

SEQ ID NO: 1323888 - RNA, 19 nt, Homo sapiens
  misc_RNA (1)...(19): siRNA sense strand
ucaccauccugcuccugaa

SEQ ID NO: 1323889 - RNA, 19 nt, Homo sapiens
  misc_RNA (1)...(19): siRNA sense strand
gcacugggguucgcuggaa

SEQ ID NO: 1323890 - RNA, 19 nt, Homo sapiens
  misc_RNA (1)...(19): siRNA sense strand
gggaagcacagccaacuac

SEQ ID NO: 1323891 - RNA, 19 nt, Homo sapiens
  misc_RNA (1)...(19): siRNA sense strand
uaccugggcugggccauca

SEQ ID NO: 1323892 - RNA, 19 nt, Homo sapiens
  misc_RNA (1)...(19): siRNA sense strand
aauccgcucuacuggaaug

SEQ ID NO: 1323893 - RNA, 19 nt, Homo sapiens
  misc_RNA (1)...(19): siRNA sense strand
ugagaucuaccggcagaaa

SEQ ID NO: 1323894 - RNA, 19 nt, Homo sapiens
  misc_RNA (1)...(19): siRNA sense strand
ccauccugcuccugaacuu

SEQ ID NO: 1323895 - RNA, 19 nt, Homo sapiens
  misc_RNA (1)...(19): siRNA sense strand
gaacuuuccuaggugauua

SEQ ID NO: 1323896 - RNA, 19 nt, Homo sapiens
  misc_RNA (1)...(19): siRNA sense strand
ucaauccgcucuacuggaa

SEQ ID NO: 1323897 - RNA, 19 nt, Homo sapiens
  misc_RNA (1)...(19): siRNA sense strand
uuuccuaggugauuacuuc

SEQ ID NO: 1323898 - RNA, 19 nt, Homo sapiens
  misc_RNA (1)...(19): siRNA sense strand
gcacgaugggaacacaaga

SEQ ID NO: 1323899 - RNA, 19 nt, Homo sapiens
  misc_RNA (1)...(19): siRNA sense strand
ucaccauccugcuccugaa

SEQ ID NO: 1323900 - RNA, 19 nt, Homo sapiens
  misc_RNA (1)...(19): siRNA sense strand
gcacugggguucgcuggaa

SEQ ID NO: 1323901 - RNA, 19 nt, Homo sapiens
  misc_RNA (1)...(19): siRNA sense strand
gggaagcacagccaacuac

SEQ ID NO: 1323902 - RNA, 19 nt, Homo sapiens
  misc_RNA (1)...(19): siRNA sense strand
uaccugggcugggccauca

SEQ ID NO: 1323903 - RNA, 19 nt, Homo sapiens
  misc_RNA (1)...(19): siRNA sense strand
aauccgcucuacuggaaug

SEQ ID NO: 1323904 - RNA, 19 nt, Homo sapiens
  misc_RNA (1)...(19): siRNA sense strand
ugagaucuaccggcagaaa

SEQ ID NO: 1323905 - RNA, 19 nt, Homo sapiens
  misc_RNA (1)...(19): siRNA sense strand
ccauccugcuccugaacuu

SEQ ID NO: 1323906 - RNA, 19 nt, Homo sapiens
  misc_RNA (1)...(19): siRNA sense strand
gaacuuuccuaggugauua

SEQ ID NO: 1323907 - RNA, 19 nt, Homo sapiens
  misc_RNA (1)...(19): siRNA sense strand
ucaauccgcucuacuggaa

SEQ ID NO: 1323908 - RNA, 19 nt, Homo sapiens
  misc_RNA (1)...(19): siRNA sense strand
uuuccuaggugauuacuuc

SEQ ID NO: 1323909 - RNA, 19 nt, Homo sapiens
  misc_RNA (1)...(19): siRNA sense strand
gcacgaugggaacacaaga

SEQ ID NO: 1323910 - RNA, 19 nt, Homo sapiens
  misc_RNA (1)...(19): siRNA sense strand
ucaccauccugcuccugaa

SEQ ID NO: 1323911 - RNA, 19 nt, Homo sapiens
  misc_RNA (1)...(19): siRNA sense strand
gcacugggguucgcuggaa

SEQ ID NO: 1323912 - RNA, 19 nt, Homo sapiens
  misc_RNA (1)...(19): siRNA sense strand
gggaagcacagccaacuac

SEQ ID NO: 1323913 - RNA, 19 nt, Homo sapiens
  misc_RNA (1)...(19): siRNA sense strand
uaccugggcugggccauca

SEQ ID NO: 1323914 - RNA, 19 nt, Homo sapiens
  misc_RNA (1)...(19): siRNA sense strand
aauccgcucuacuggaaug

SEQ ID NO: 1323915 - RNA, 19 nt, Homo sapiens
  misc_RNA (1)...(19): siRNA sense strand
ugagaucuaccggcagaaa

SEQ ID NO: 1323916 - RNA, 19 nt, Homo sapiens
  misc_RNA (1)...(19): siRNA sense strand
ccauccugcuccugaacuu

SEQ ID NO: 1323917 - RNA, 19 nt, Homo sapiens
  misc_RNA (1)...(19): siRNA sense strand
gaaauuggcuuuacgauga

SEQ ID NO: 1323918 - RNA, 19 nt, Homo sapiens
  misc_RNA (1)...(19): siRNA sense strand
gaacaaaccuuggaaaugu

SEQ ID NO: 1323919 - RNA, 19 nt, Homo sapiens
  misc_RNA (1)...(19): siRNA sense strand
ugacauggcuggagaaauu

SEQ ID NO: 1323920 - RNA, 19 nt, Homo sapiens
  misc_RNA (1)...(19): siRNA sense strand
ggaacuugauguccaaaua

SEQ ID NO: 1323921 - RNA, 19 nt, Homo sapiens
  misc_RNA (1)...(19): siRNA sense strand
gccaaggucuuacuacaua

SEQ ID NO: 1323922 - RNA, 19 nt, Homo sapiens
  misc_RNA (1)...(19): siRNA sense strand
gaaccagccuucauguauu

SEQ ID NO: 1323923 - RNA, 19 nt, Homo sapiens
  misc_RNA (1)...(19): siRNA sense strand
gcaaagaaucucaaguaua

SEQ ID NO: 1323924 - RNA, 19 nt, Homo sapiens
  misc_RNA (1)...(19): siRNA sense strand
gaagaugagccucuguuua

SEQ ID NO: 1323925 - RNA, 19 nt, Homo sapiens
  misc_RNA (1)...(19): siRNA sense strand
ugaaauggcuuuagugcaa

SEQ ID NO: 1323926 - RNA, 19 nt, Homo sapiens
  misc_RNA (1)...(19): siRNA sense strand
gaaagauugugaagaaaca

SEQ ID NO: 1323927 - RNA, 19 nt, Homo sapiens
  misc_RNA (1)...(19): siRNA sense strand
uaaacugucugaggacuua

SEQ ID NO: 1323928 - RNA, 19 nt, Homo sapiens
  misc_RNA (1)...(19): siRNA sense strand
gcacuacccugaagaacug

SEQ ID NO: 1323929 - RNA, 19 nt, Homo sapiens
  misc_RNA (1)...(19): siRNA sense strand
guggaaagcugucuucuuc

SEQ ID NO: 1323930 - RNA, 19 nt, Homo sapiens
  misc_RNA (1)...(19): siRNA sense strand
gaacuugauguccaaauaa

SEQ ID NO: 1323931 - RNA, 19 nt, Homo sapiens
  misc_RNA (1)...(19): siRNA sense strand
gaugcaagaugcuggaauu

SEQ ID NO: 1323932 - RNA, 19 nt, Homo sapiens
  misc_RNA (1)...(19): siRNA sense strand
gcaagugucucagauaaag

SEQ ID NO: 1323933 - RNA, 19 nt, Homo sapiens
  misc_RNA (1)...(19): siRNA sense strand
ggaagagguuaaucauguu

SEQ ID NO: 1323934 - RNA, 19 nt, Homo sapiens
  misc_RNA (1)...(19): siRNA sense strand
gaagagguuaaucauguua

SEQ ID NO: 1323935 - RNA, 19 nt, Homo sapiens
  misc_RNA (1)...(19): siRNA sense strand
gaauguaguggcucagaua

SEQ ID NO: 1323936 - RNA, 19 nt, Homo sapiens
  misc_RNA (1)...(19): siRNA sense strand
gcaaagaaaguuguugaaa

SEQ ID NO: 1323937 - RNA, 19 nt, Homo sapiens
  misc_RNA (1)...(19): siRNA sense strand
caacucugcuccagcugua

SEQ ID NO: 1323938 - RNA, 19 nt, Homo sapiens
  misc_RNA (1)...(19): siRNA sense strand
guaggcaucucuuggaaug

SEQ ID NO: 1323939 - RNA, 19 nt, Homo sapiens
  misc_RNA (1)...(19): siRNA sense strand
ugaauauccugacauguga

SEQ ID NO: 1323940 - RNA, 19 nt, Homo sapiens
  misc_RNA (1)...(19): siRNA sense strand
gcaagaugcuggaauuacu

SEQ ID NO: 1323941 - RNA, 19 nt, Homo sapiens
  misc_RNA (1)...(19): siRNA sense strand
gagcagauucuuuccauga

SEQ ID NO: 1323942 - RNA, 19 nt, Homo sapiens
  misc_RNA (1)...(19): siRNA sense strand
ugaaggaucugguguuaag

SEQ ID NO: 1323943 - RNA, 19 nt, Homo sapiens
  misc_RNA (1)...(19): siRNA sense strand
gcaagcaagugucucagau

SEQ ID NO: 1323944 - RNA, 19 nt, Homo sapiens
  misc_RNA (1)...(19): siRNA sense strand
uggaagagguuaaucaugu

SEQ ID NO: 1323945 - RNA, 19 nt, Homo sapiens
  misc_RNA (1)...(19): siRNA sense strand
aagcaagugucucagauaa

SEQ ID NO: 1323946 - RNA, 19 nt, Homo sapiens
  misc_RNA (1)...(19): siRNA sense strand
gaagaaacacagucaaugg

SEQ ID NO: 1323947 - RNA, 19 nt, Homo sapiens
  misc_RNA (1)...(19): siRNA sense strand
ggauuugcuuguuccagua

SEQ ID NO: 1323948 - RNA, 19 nt, Homo sapiens
  misc_RNA (1)...(19): siRNA sense strand
aaccagccuucauguauua

SEQ ID NO: 1323949 - RNA, 19 nt, Homo sapiens
  misc_RNA (1)...(19): siRNA sense strand
ggaacaaaccuuggaaaug

SEQ ID NO: 1323950 - RNA, 19 nt, Homo sapiens
  misc_RNA (1)...(19): siRNA sense strand
ggaaugugcuaaggaacuu

SEQ ID NO: 1323951 - RNA, 19 nt, Homo sapiens
  misc_RNA (1)...(19): siRNA sense strand
gcauucagcugagccaaga

SEQ ID NO: 1323952 - RNA, 19 nt, Homo sapiens
  misc_RNA (1)...(19): siRNA sense strand
gcauuuacacucgcaguua

SEQ ID NO: 1323953 - RNA, 19 nt, Homo sapiens
  misc_RNA (1)...(19): siRNA sense strand
cuaugugucuucugcauuu

SEQ ID NO: 1323954 - RNA, 19 nt, Homo sapiens
  misc_RNA (1)...(19): siRNA sense strand
ccugaaggaucugguguua

SEQ ID NO: 1323955 - RNA, 19 nt, Homo sapiens
  misc_RNA (1)...(19): siRNA sense strand
gagugaauauccugacaug

SEQ ID NO: 1323956 - RNA, 19 nt, Homo sapiens
  misc_RNA (1)...(19): siRNA sense strand
gauaaaguaugcagcaaaa

SEQ ID NO: 1323957 - RNA, 19 nt, Homo sapiens
  misc_RNA (1)...(19): siRNA sense strand
ggacuuaaauaccauucca

SEQ ID NO: 1323958 - RNA, 19 nt, Homo sapiens
  misc_RNA (1)...(19): siRNA sense strand
uuggaaagauugugaagaa

SEQ ID NO: 1323959 - RNA, 19 nt, Homo sapiens
  misc_RNA (1)...(19): siRNA sense strand
uaaauuucccucuggagua

SEQ ID NO: 1323960 - RNA, 19 nt, Homo sapiens
  misc_RNA (1)...(19): siRNA sense strand
ggaagaugagccucuguuu

SEQ ID NO: 1323961 - RNA, 19 nt, Homo sapiens
  misc_RNA (1)...(19): siRNA sense strand
caacagaagauaauauugg

SEQ ID NO: 1323962 - RNA, 19 nt, Homo sapiens
  misc_RNA (1)...(19): siRNA sense strand
cauuuacacucgcaguuaa

SEQ ID NO: 1323963 - RNA, 19 nt, Homo sapiens
  misc_RNA (1)...(19): siRNA sense strand
ggaauuacuucagacucaa

SEQ ID NO: 1323964 - RNA, 19 nt, Homo sapiens
  misc_RNA (1)...(19): siRNA sense strand
gauaaagccauucuacaca

SEQ ID NO: 1323965 - RNA, 19 nt, Homo sapiens
  misc_RNA (1)...(19): siRNA sense strand
agaaauacaaggaagauga

SEQ ID NO: 1323966 - RNA, 19 nt, Homo sapiens
  misc_RNA (1)...(19): siRNA sense strand
uaaggaacuugauguccaa

SEQ ID NO: 1323967 - RNA, 19 nt, Homo sapiens
  misc_RNA (1)...(19): siRNA sense strand
caagcaagugucucagaua

SEQ ID NO: 1323968 - RNA, 19 nt, Homo sapiens
  misc_RNA (1)...(19): siRNA sense strand
gagccaagaagacagcuuu

SEQ ID NO: 1323969 - RNA, 19 nt, Homo sapiens
  misc_RNA (1)...(19): siRNA sense strand
cagacucaaugaugaagaa

SEQ ID NO: 1323970 - RNA, 19 nt, Homo sapiens
  misc_RNA (1)...(19): siRNA sense strand
gcuuuacgaugaacauguu

SEQ ID NO: 1323971 - RNA, 19 nt, Homo sapiens
  misc_RNA (1)...(19): siRNA sense strand
gaggguaacaugaaguuug

SEQ ID NO: 1323972 - RNA, 19 nt, Homo sapiens
  misc_RNA (1)...(19): siRNA sense strand
gcacguaaucacccaaaug

SEQ ID NO: 1323973 - RNA, 19 nt, Homo sapiens
  misc_RNA (1)...(19): siRNA sense strand
gugaauauccugacaugug

SEQ ID NO: 1323974 - RNA, 19 nt, Homo sapiens
  misc_RNA (1)...(19): siRNA sense strand
agacauugguggaggauuc

SEQ ID NO: 1323975 - RNA, 19 nt, Homo sapiens
  misc_RNA (1)...(19): siRNA sense strand
gaagaaaauugcacguaau

SEQ ID NO: 1323976 - RNA, 19 nt, Homo sapiens
  misc_RNA (1)...(19): siRNA sense strand
gaacuguaggcaucucuug

SEQ ID NO: 1323977 - RNA, 19 nt, Homo sapiens
  misc_RNA (1)...(19): siRNA sense strand
uuccagagguucacaagaa

SEQ ID NO: 1323978 - RNA, 19 nt, Homo sapiens
  misc_RNA (1)...(19): siRNA sense strand
gaaugaugguguuuauggu

SEQ ID NO: 1323979 - RNA, 19 nt, Homo sapiens
  misc_RNA (1)...(19): siRNA sense strand
gggguuaaauuucauguuu

SEQ ID NO: 1323980 - RNA, 19 nt, Homo sapiens
  misc_RNA (1)...(19): siRNA sense strand
ugaagaaaauugcacguaa

SEQ ID NO: 1323981 - RNA, 19 nt, Homo sapiens
  misc_RNA (1)...(19): siRNA sense strand
cagagguucacaagaaaua

SEQ ID NO: 1323982 - RNA, 19 nt, Homo sapiens
  misc_RNA (1)...(19): siRNA sense strand
gauaucuacuuuccugaag

SEQ ID NO: 1323983 - RNA, 19 nt, Homo sapiens
  misc_RNA (1)...(19): siRNA sense strand
gcaacagaagauaauauug

SEQ ID NO: 1323984 - RNA, 19 nt, Homo sapiens
  misc_RNA (1)...(19): siRNA sense strand
ggaaccggauuugcuuguu

SEQ ID NO: 1323985 - RNA, 19 nt, Homo sapiens
  misc_RNA (1)...(19): siRNA sense strand
gggagcagauucuuuccau

SEQ ID NO: 1323986 - RNA, 19 nt, Homo sapiens
  misc_RNA (1)...(19): siRNA sense strand
uugcaaagaaucucaagua

SEQ ID NO: 1323987 - RNA, 19 nt, Homo sapiens
  misc_RNA (1)...(19): siRNA sense strand
gugaagaggguaacaugaa

SEQ ID NO: 1323988 - RNA, 19 nt, Homo sapiens
  misc_RNA (1)...(19): siRNA sense strand
ucuguuggauaucuacuuu

SEQ ID NO: 1323989 - RNA, 19 nt, Homo sapiens
  misc_RNA (1)...(19): siRNA sense strand
guacaugcucuaucugaug

SEQ ID NO: 1323990 - RNA, 19 nt, Homo sapiens
  misc_RNA (1)...(19): siRNA sense strand
uggaauuacuucagacuca

SEQ ID NO: 1323991 - RNA, 19 nt, Homo sapiens
  misc_RNA (1)...(19): siRNA sense strand
ggccagccauuuauuacau

SEQ ID NO: 1323992 - RNA, 19 nt, Homo sapiens
  misc_RNA (1)...(19): siRNA sense strand
gagccucuguuuacaagca

SEQ ID NO: 1323993 - RNA, 19 nt, Homo sapiens
  misc_RNA (1)...(19): siRNA sense strand
ggaaagauugugaagaaac

SEQ ID NO: 1323994 - RNA, 19 nt, Homo sapiens
  misc_RNA (1)...(19): siRNA sense strand
cagccuucauguauuauau

SEQ ID NO: 1323995 - RNA, 19 nt, Homo sapiens
  misc_RNA (1)...(19): siRNA sense strand
ggauaucuacuuuccugaa

SEQ ID NO: 1323996 - RNA, 19 nt, Homo sapiens
  misc_RNA (1)...(19): siRNA sense strand
ggagaaauuggcuuuacga

SEQ ID NO: 1323997 - RNA, 19 nt, Homo sapiens
  misc_RNA (1)...(19): siRNA sense strand
ucaaguauauguacaugcu

SEQ ID NO: 1323998 - RNA, 19 nt, Homo sapiens
  misc_RNA (1)...(19): siRNA sense strand
ccugacaugugacaaugaa

SEQ ID NO: 1323999 - RNA, 19 nt, Homo sapiens
  misc_RNA (1)...(19): siRNA sense strand
gaaauacaaggaagaugag

SEQ ID NO: 1324000 - RNA, 19 nt, Homo sapiens
  misc_RNA (1)...(19): siRNA sense strand
acucgcaguuaauaucaua

SEQ ID NO: 1324001 - RNA, 19 nt, Homo sapiens
  misc_RNA (1)...(19): siRNA sense strand
ugcaaagaaucucaaguau

SEQ ID NO: 1324002 - RNA, 19 nt, Homo sapiens
  misc_RNA (1)...(19): siRNA sense strand
ugaagaggguaacaugaag

SEQ ID NO: 1324003 - RNA, 19 nt, Homo sapiens
  misc_RNA (1)...(19): siRNA sense strand
gacaugugacaaugaaauu

SEQ ID NO: 1324004 - RNA, 19 nt, Homo sapiens
  misc_RNA (1)...(19): siRNA sense strand
gcaguuaauaucauagcaa

SEQ ID NO: 1324005 - RNA, 19 nt, Homo sapiens
  misc_RNA (1)...(19): siRNA sense strand
agaggccagccauuuauua

SEQ ID NO: 1324006 - RNA, 19 nt, Homo sapiens
  misc_RNA (1)...(19): siRNA sense strand
ucacaagaaauacaaggaa

SEQ ID NO: 1324007 - RNA, 19 nt, Homo sapiens
  misc_RNA (1)...(19): siRNA sense strand
acaaaccuuggaaauguua

SEQ ID NO: 1324008 - RNA, 19 nt, Homo sapiens
  misc_RNA (1)...(19): siRNA sense strand
acucaaugaugaagaacuu

SEQ ID NO: 1324009 - RNA, 19 nt, Homo sapiens
  misc_RNA (1)...(19): siRNA sense strand
uagcaaagaaaguuguuga

SEQ ID NO: 1324010 - RNA, 19 nt, Homo sapiens
  misc_RNA (1)...(19): siRNA sense strand
gaugcucgauguguguuug

SEQ ID NO: 1324011 - RNA, 19 nt, Homo sapiens
  misc_RNA (1)...(19): siRNA sense strand
ggguuaaauuucauguuuc

SEQ ID NO: 1324012 - RNA, 19 nt, Homo sapiens
  misc_RNA (1)...(19): siRNA sense strand
gauaacaugggagcagauu

SEQ ID NO: 1324013 - RNA, 19 nt, Homo sapiens
  misc_RNA (1)...(19): siRNA sense strand
gaugagccucuguuuacaa

SEQ ID NO: 1324014 - RNA, 19 nt, Homo sapiens
  misc_RNA (1)...(19): siRNA sense strand
uguaguggcucagauaaag

SEQ ID NO: 1324015 - RNA, 19 nt, Homo sapiens
  misc_RNA (1)...(19): siRNA sense strand
gcagauucuuuccaugaac

SEQ ID NO: 1324016 - RNA, 19 nt, Homo sapiens
  misc_RNA (1)...(19): siRNA sense strand
uaacaugggagcagauucu

SEQ ID NO: 1324017 - RNA, 19 nt, Homo sapiens
  misc_RNA (1)...(19): siRNA sense strand
gaaauuggcuuuacgauga

SEQ ID NO: 1324018 - RNA, 19 nt, Homo sapiens
  misc_RNA (1)...(19): siRNA sense strand
gaacaaaccuuggaaaugu

SEQ ID NO: 1324019 - RNA, 19 nt, Homo sapiens
  misc_RNA (1)...(19): siRNA sense strand
ugacauggcuggagaaauu

SEQ ID NO: 1324020 - RNA, 19 nt, Homo sapiens
  misc_RNA (1)...(19): siRNA sense strand
ggaacuugauguccaaaua

SEQ ID NO: 1324021 - RNA, 19 nt, Homo sapiens
  misc_RNA (1)...(19): siRNA sense strand
gccaaggucuuacuacaua

SEQ ID NO: 1324022 - RNA, 19 nt, Homo sapiens
  misc_RNA (1)...(19): siRNA sense strand
gaaccagccuucauguauu

SEQ ID NO: 1324023 - RNA, 19 nt, Homo sapiens
  misc_RNA (1)...(19): siRNA sense strand
gcaaagaaucucaaguaua

SEQ ID NO: 1324024 - RNA, 19 nt, Homo sapiens
  misc_RNA (1)...(19): siRNA sense strand
gaagaugagccucuguuua

SEQ ID NO: 1324025 - RNA, 19 nt, Homo sapiens
  misc_RNA (1)...(19): siRNA sense strand
ugaaauggcuuuagugcaa

SEQ ID NO: 1324026 - RNA, 19 nt, Homo sapiens
  misc_RNA (1)...(19): siRNA sense strand
gaaagauugugaagaaaca

SEQ ID NO: 1324027 - RNA, 19 nt, Homo sapiens
  misc_RNA (1)...(19): siRNA sense strand
uaaacugucugaggacuua

SEQ ID NO: 1324028 - RNA, 19 nt, Homo sapiens
  misc_RNA (1)...(19): siRNA sense strand
gcacuacccugaagaacug

SEQ ID NO: 1324029 - RNA, 19 nt, Homo sapiens
  misc_RNA (1)...(19): siRNA sense strand
guggaaagcugucuucuuc

SEQ ID NO: 1324030 - RNA, 19 nt, Homo sapiens
  misc_RNA (1)...(19): siRNA sense strand
gaacuugauguccaaauaa

SEQ ID NO: 1324031 - RNA, 19 nt, Homo sapiens
  misc_RNA (1)...(19): siRNA sense strand
gaugcaagaugcuggaauu

SEQ ID NO: 1324032 - RNA, 19 nt, Homo sapiens
  misc_RNA (1)...(19): siRNA sense strand
gcaagugucucagauaaag

SEQ ID NO: 1324033 - RNA, 19 nt, Homo sapiens
  misc_RNA (1)...(19): siRNA sense strand
ggaagagguuaaucauguu

SEQ ID NO: 1324034 - RNA, 19 nt, Homo sapiens
  misc_RNA (1)...(19): siRNA sense strand
gaagagguuaaucauguua

SEQ ID NO: 1324035 - RNA, 19 nt, Homo sapiens
  misc_RNA (1)...(19): siRNA sense strand
gaauguaguggcucagaua

SEQ ID NO: 1324036 - RNA, 19 nt, Homo sapiens
  misc_RNA (1)...(19): siRNA sense strand
gcaaagaaaguuguugaaa

SEQ ID NO: 1324037 - RNA, 19 nt, Homo sapiens
  misc_RNA (1)...(19): siRNA sense strand
caacucugcuccagcugua

SEQ ID NO: 1324038 - RNA, 19 nt, Homo sapiens
  misc_RNA (1)...(19): siRNA sense strand
guaggcaucucuuggaaug

SEQ ID NO: 1324039 - RNA, 19 nt, Homo sapiens
  misc_RNA (1)...(19): siRNA sense strand
ugaauauccugacauguga

SEQ ID NO: 1324040 - RNA, 19 nt, Homo sapiens
  misc_RNA (1)...(19): siRNA sense strand
gcaagaugcuggaauuacu

SEQ ID NO: 1324041 - RNA, 19 nt, Homo sapiens
  misc_RNA (1)...(19): siRNA sense strand
gagcagauucuuuccauga

SEQ ID NO: 1324042 - RNA, 19 nt, Homo sapiens
  misc_RNA (1)...(19): siRNA sense strand
ugaaggaucugguguuaag

SEQ ID NO: 1324043 - RNA, 19 nt, Homo sapiens
  misc_RNA (1)...(19): siRNA sense strand
gcaagcaagugucucagau

SEQ ID NO: 1324044 - RNA, 19 nt, Homo sapiens
  misc_RNA (1)...(19): siRNA sense strand
uggaagagguuaaucaugu

SEQ ID NO: 1324045 - RNA, 19 nt, Homo sapiens
  misc_RNA (1)...(19): siRNA sense strand
aagcaagugucucagauaa

SEQ ID NO: 1324046 - RNA, 19 nt, Homo sapiens
  misc_RNA (1)...(19): siRNA sense strand
gaagaaacacagucaaugg

SEQ ID NO: 1324047 - RNA, 19 nt, Homo sapiens
  misc_RNA (1)...(19): siRNA sense strand
ggauuugcuuguuccagua

SEQ ID NO: 1324048 - RNA, 19 nt, Homo sapiens
  misc_RNA (1)...(19): siRNA sense strand
aaccagccuucauguauua

SEQ ID NO: 1324049 - RNA, 19 nt, Homo sapiens
  misc_RNA (1)...(19): siRNA sense strand
ggaacaaaccuuggaaaug

SEQ ID NO: 1324050 - RNA, 19 nt, Homo sapiens
  misc_RNA (1)...(19): siRNA sense strand
ggaaugugcuaaggaacuu

SEQ ID NO: 1324051 - RNA, 19 nt, Homo sapiens
  misc_RNA (1)...(19): siRNA sense strand
gcauucagcugagccaaga

SEQ ID NO: 1324052 - RNA, 19 nt, Homo sapiens
  misc_RNA (1)...(19): siRNA sense strand
gcauuuacacucgcaguua

SEQ ID NO: 1324053 - RNA, 19 nt, Homo sapiens
  misc_RNA (1)...(19): siRNA sense strand
cuaugugucuucugcauuu

SEQ ID NO: 1324054 - RNA, 19 nt, Homo sapiens
  misc_RNA (1)...(19): siRNA sense strand
ccugaaggaucugguguua

SEQ ID NO: 1324055 - RNA, 19 nt, Homo sapiens
  misc_RNA (1)...(19): siRNA sense strand
gagugaauauccugacaug

SEQ ID NO: 1324056 - RNA, 19 nt, Homo sapiens
  misc_RNA (1)...(19): siRNA sense strand
gauaaaguaugcagcaaaa

SEQ ID NO: 1324057 - RNA, 19 nt, Homo sapiens
  misc_RNA (1)...(19): siRNA sense strand
ggacuuaaauaccauucca

SEQ ID NO: 1324058 - RNA, 19 nt, Homo sapiens
  misc_RNA (1)...(19): siRNA sense strand
uuggaaagauugugaagaa

SEQ ID NO: 1324059 - RNA, 19 nt, Homo sapiens
  misc_RNA (1)...(19): siRNA sense strand
uaaauuucccucuggagua

SEQ ID NO: 1324060 - RNA, 19 nt, Homo sapiens
  misc_RNA (1)...(19): siRNA sense strand
ggaagaugagccucuguuu

SEQ ID NO: 1324061 - RNA, 19 nt, Homo sapiens
  misc_RNA (1)...(19): siRNA sense strand
caacagaagauaauauugg

SEQ ID NO: 1324062 - RNA, 19 nt, Homo sapiens
  misc_RNA (1)...(19): siRNA sense strand
cauuuacacucgcaguuaa

SEQ ID NO: 1324063 - RNA, 19 nt, Homo sapiens
  misc_RNA (1)...(19): siRNA sense strand
ggaauuacuucagacucaa

SEQ ID NO: 1324064 - RNA, 19 nt, Homo sapiens
  misc_RNA (1)...(19): siRNA sense strand
gauaaagccauucuacaca

SEQ ID NO: 1324065 - RNA, 19 nt, Homo sapiens
  misc_RNA (1)...(19): siRNA sense strand
agaaauacaaggaagauga

SEQ ID NO: 1324066 - RNA, 19 nt, Homo sapiens
  misc_RNA (1)...(19): siRNA sense strand
uaaggaacuugauguccaa

SEQ ID NO: 1324067 - RNA, 19 nt, Homo sapiens
  misc_RNA (1)...(19): siRNA sense strand
caagcaagugucucagaua

SEQ ID NO: 1324068 - RNA, 19 nt, Homo sapiens
  misc_RNA (1)...(19): siRNA sense strand
gagccaagaagacagcuuu

SEQ ID NO: 1324069 - RNA, 19 nt, Homo sapiens
  misc_RNA (1)...(19): siRNA sense strand
cagacucaaugaugaagaa

SEQ ID NO: 1324070 - RNA, 19 nt, Homo sapiens
  misc_RNA (1)...(19): siRNA sense strand
gcuuuacgaugaacauguu

SEQ ID NO: 1324071 - RNA, 19 nt, Homo sapiens
  misc_RNA (1)...(19): siRNA sense strand
gaggguaacaugaaguuug

SEQ ID NO: 1324072 - RNA, 19 nt, Homo sapiens
  misc_RNA (1)...(19): siRNA sense strand
gcacguaaucacccaaaug

SEQ ID NO: 1324073 - RNA, 19 nt, Homo sapiens
  misc_RNA (1)...(19): siRNA sense strand
gugaauauccugacaugug

SEQ ID NO: 1324074 - RNA, 19 nt, Homo sapiens
  misc_RNA (1)...(19): siRNA sense strand
agacauugguggaggauuc

SEQ ID NO: 1324075 - RNA, 19 nt, Homo sapiens
  misc_RNA (1)...(19): siRNA sense strand
gaagaaaauugcacguaau

SEQ ID NO: 1324076 - RNA, 19 nt, Homo sapiens
  misc_RNA (1)...(19): siRNA sense strand
gaacuguaggcaucucuug

SEQ ID NO: 1324077 - RNA, 19 nt, Homo sapiens
  misc_RNA (1)...(19): siRNA sense strand
uuccagagguucacaagaa

SEQ ID NO: 1324078 - RNA, 19 nt, Homo sapiens
  misc_RNA (1)...(19): siRNA sense strand
gaaugaugguguuuauggu

SEQ ID NO: 1324079 - RNA, 19 nt, Homo sapiens
  misc_RNA (1)...(19): siRNA sense strand
gggguuaaauuucauguuu

SEQ ID NO: 1324080 - RNA, 19 nt, Homo sapiens
  misc_RNA (1)...(19): siRNA sense strand
ugaagaaaauugcacguaa

SEQ ID NO: 1324081 - RNA, 19 nt, Homo sapiens
  misc_RNA (1)...(19): siRNA sense strand
cagagguucacaagaaaua

SEQ ID NO: 1324082 - RNA, 19 nt, Homo sapiens
  misc_RNA (1)...(19): siRNA sense strand
gauaucuacuuuccugaag

SEQ ID NO: 1324083 - RNA, 19 nt, Homo sapiens
  misc_RNA (1)...(19): siRNA sense strand
gcaacagaagauaauauug

SEQ ID NO: 1324084 - RNA, 19 nt, Homo sapiens
  misc_RNA (1)...(19): siRNA sense strand
ggaaccggauuugcuuguu

SEQ ID NO: 1324085 - RNA, 19 nt, Homo sapiens
  misc_RNA (1)...(19): siRNA sense strand
gggagcagauucuuuccau

SEQ ID NO: 1324086 - RNA, 19 nt, Homo sapiens
  misc_RNA (1)...(19): siRNA sense strand
uugcaaagaaucucaagua

SEQ ID NO: 1324087 - RNA, 19 nt, Homo sapiens
  misc_RNA (1)...(19): siRNA sense strand
gugaagaggguaacaugaa

SEQ ID NO: 1324088 - RNA, 19 nt, Homo sapiens
  misc_RNA (1)...(19): siRNA sense strand
ucuguuggauaucuacuuu

SEQ ID NO: 1324089 - RNA, 19 nt, Homo sapiens
  misc_RNA (1)...(19): siRNA sense strand
guacaugcucuaucugaug

SEQ ID NO: 1324090 - RNA, 19 nt, Homo sapiens
  misc_RNA (1)...(19): siRNA sense strand
uggaauuacuucagacuca

SEQ ID NO: 1324091 - RNA, 19 nt, Homo sapiens
  misc_RNA (1)...(19): siRNA sense strand
ggccagccauuuauuacau

SEQ ID NO: 1324092 - RNA, 19 nt, Homo sapiens
  misc_RNA (1)...(19): siRNA sense strand
gagccucuguuuacaagca

SEQ ID NO: 1324093 - RNA, 19 nt, Homo sapiens
  misc_RNA (1)...(19): siRNA sense strand
ggaaagauugugaagaaac

SEQ ID NO: 1324094 - RNA, 19 nt, Homo sapiens
  misc_RNA (1)...(19): siRNA sense strand
cagccuucauguauuauau

SEQ ID NO: 1324095 - RNA, 19 nt, Homo sapiens
  misc_RNA (1)...(19): siRNA sense strand
ggauaucuacuuuccugaa

SEQ ID NO: 1324096 - RNA, 19 nt, Homo sapiens
  misc_RNA (1)...(19): siRNA sense strand
ggagaaauuggcuuuacga

SEQ ID NO: 1324097 - RNA, 19 nt, Homo sapiens
  misc_RNA (1)...(19): siRNA sense strand
ucaaguauauguacaugcu

SEQ ID NO: 1324098 - RNA, 19 nt, Homo sapiens
  misc_RNA (1)...(19): siRNA sense strand
ccugacaugugacaaugaa

SEQ ID NO: 1324099 - RNA, 19 nt, Homo sapiens
  misc_RNA (1)...(19): siRNA sense strand
gaaauacaaggaagaugag

SEQ ID NO: 1324100 - RNA, 19 nt, Homo sapiens
  misc_RNA (1)...(19): siRNA sense strand
acucgcaguuaauaucaua

SEQ ID NO: 1324101 - RNA, 19 nt, Homo sapiens
  misc_RNA (1)...(19): siRNA sense strand
ugcaaagaaucucaaguau

SEQ ID NO: 1324102 - RNA, 19 nt, Homo sapiens
  misc_RNA (1)...(19): siRNA sense strand
ugaagaggguaacaugaag

SEQ ID NO: 1324103 - RNA, 19 nt, Homo sapiens
  misc_RNA (1)...(19): siRNA sense strand
gacaugugacaaugaaauu

SEQ ID NO: 1324104 - RNA, 19 nt, Homo sapiens
  misc_RNA (1)...(19): siRNA sense strand
gcaguuaauaucauagcaa

SEQ ID NO: 1324105 - RNA, 19 nt, Homo sapiens
  misc_RNA (1)...(19): siRNA sense strand
agaggccagccauuuauua

SEQ ID NO: 1324106 - RNA, 19 nt, Homo sapiens
  misc_RNA (1)...(19): siRNA sense strand
ucacaagaaauacaaggaa

SEQ ID NO: 1324107 - RNA, 19 nt, Homo sapiens
  misc_RNA (1)...(19): siRNA sense strand
acaaaccuuggaaauguua

SEQ ID NO: 1324108 - RNA, 19 nt, Homo sapiens
  misc_RNA (1)...(19): siRNA sense strand
acucaaugaugaagaacuu

SEQ ID NO: 1324109 - RNA, 19 nt, Homo sapiens
  misc_RNA (1)...(19): siRNA sense strand
uagcaaagaaaguuguuga

SEQ ID NO: 1324110 - RNA, 19 nt, Homo sapiens
  misc_RNA (1)...(19): siRNA sense strand
gaugcucgauguguguuug

SEQ ID NO: 1324111 - RNA, 19 nt, Homo sapiens
  misc_RNA (1)...(19): siRNA sense strand
ggguuaaauuucauguuuc

SEQ ID NO: 1324112 - RNA, 19 nt, Homo sapiens
  misc_RNA (1)...(19): siRNA sense strand
gauaacaugggagcagauu

SEQ ID NO: 1324113 - RNA, 19 nt, Homo sapiens
  misc_RNA (1)...(19): siRNA sense strand
gaugagccucuguuuacaa

SEQ ID NO: 1324114 - RNA, 19 nt, Homo sapiens
  misc_RNA (1)...(19): siRNA sense strand
uguaguggcucagauaaag

SEQ ID NO: 1324115 - RNA, 19 nt, Homo sapiens
  misc_RNA (1)...(19): siRNA sense strand
gcagauucuuuccaugaac

SEQ ID NO: 1324116 - RNA, 19 nt, Homo sapiens
  misc_RNA (1)...(19): siRNA sense strand
uaacaugggagcagauucu

SEQ ID NO: 1324117 - RNA, 19 nt, Homo sapiens
  misc_RNA (1)...(19): siRNA sense strand
caacaggucucaauucuuc

SEQ ID NO: 1324118 - RNA, 19 nt, Homo sapiens
  misc_RNA (1)...(19): siRNA sense strand
gcaagaagcauuauuacga

SEQ ID NO: 1324119 - RNA, 19 nt, Homo sapiens
  misc_RNA (1)...(19): siRNA sense strand
gcugaacgcugcccacuau

SEQ ID NO: 1324120 - RNA, 19 nt, Homo sapiens
  misc_RNA (1)...(19): siRNA sense strand
ccaaacaggacccgucuua

SEQ ID NO: 1324121 - RNA, 19 nt, Homo sapiens
  misc_RNA (1)...(19): siRNA sense strand
caagaagcauuauuacgau

SEQ ID NO: 1324122 - RNA, 19 nt, Homo sapiens
  misc_RNA (1)...(19): siRNA sense strand
gaagacacagcucaaggua

SEQ ID NO: 1324123 - RNA, 19 nt, Homo sapiens
  misc_RNA (1)...(19): siRNA sense strand
gaagccagaucucccacaa

SEQ ID NO: 1324124 - RNA, 19 nt, Homo sapiens
  misc_RNA (1)...(19): siRNA sense strand
uuccauggcuuaagaagua

SEQ ID NO: 1324125 - RNA, 19 nt, Homo sapiens
  misc_RNA (1)...(19): siRNA sense strand
gcaguggaacagcuaaaua

SEQ ID NO: 1324126 - RNA, 19 nt, Homo sapiens
  misc_RNA (1)...(19): siRNA sense strand
gaggagauccgcauugaug

SEQ ID NO: 1324127 - RNA, 19 nt, Homo sapiens
  misc_RNA (1)...(19): siRNA sense strand
ugacagccauggagaaugu

SEQ ID NO: 1324128 - RNA, 19 nt, Homo sapiens
  misc_RNA (1)...(19): siRNA sense strand
caaugucucuaacuucuau

SEQ ID NO: 1324129 - RNA, 19 nt, Homo sapiens
  misc_RNA (1)...(19): siRNA sense strand
ggaggccgaugcccagauu

SEQ ID NO: 1324130 - RNA, 19 nt, Homo sapiens
  misc_RNA (1)...(19): siRNA sense strand
aaacaggacccgucuuauu

SEQ ID NO: 1324131 - RNA, 19 nt, Homo sapiens
  misc_RNA (1)...(19): siRNA sense strand
aacaggacccgucuuauua

SEQ ID NO: 1324132 - RNA, 19 nt, Homo sapiens
  misc_RNA (1)...(19): siRNA sense strand
gugccuaccuggacaagaa

SEQ ID NO: 1324133 - RNA, 19 nt, Homo sapiens
  misc_RNA (1)...(19): siRNA sense strand
gcuaccaguuugugaagaa

SEQ ID NO: 1324134 - RNA, 19 nt, Homo sapiens
  misc_RNA (1)...(19): siRNA sense strand
uggaacagcuaaauaucaa

SEQ ID NO: 1324135 - RNA, 19 nt, Homo sapiens
  misc_RNA (1)...(19): siRNA sense strand
aauaauagacccagaugaa

SEQ ID NO: 1324136 - RNA, 19 nt, Homo sapiens
  misc_RNA (1)...(19): siRNA sense strand
ggaggucccugaucaagcu

SEQ ID NO: 1324137 - RNA, 19 nt, Homo sapiens
  misc_RNA (1)...(19): siRNA sense strand
uggagaauguggagaguga

SEQ ID NO: 1324138 - RNA, 19 nt, Homo sapiens
  misc_RNA (1)...(19): siRNA sense strand
ugcaggagcucuacaagga

SEQ ID NO: 1324139 - RNA, 19 nt, Homo sapiens
  misc_RNA (1)...(19): siRNA sense strand
ccagaucucccacaaacaa

SEQ ID NO: 1324140 - RNA, 19 nt, Homo sapiens
  misc_RNA (1)...(19): siRNA sense strand
ggacccgucuuauuaucug

SEQ ID NO: 1324141 - RNA, 19 nt, Homo sapiens
  misc_RNA (1)...(19): siRNA sense strand
uggcaucgucuuugacuua

SEQ ID NO: 1324142 - RNA, 19 nt, Homo sapiens
  misc_RNA (1)...(19): siRNA sense strand
uaauagacccagaugaaga

SEQ ID NO: 1324143 - RNA, 19 nt, Homo sapiens
  misc_RNA (1)...(19): siRNA sense strand
gugcugcgcuaccaguuug

SEQ ID NO: 1324144 - RNA, 19 nt, Homo sapiens
  misc_RNA (1)...(19): siRNA sense strand
guacauuaccugugcugaa

SEQ ID NO: 1324145 - RNA, 19 nt, Homo sapiens
  misc_RNA (1)...(19): siRNA sense strand
aaacugaccgcccuaagga

SEQ ID NO: 1324146 - RNA, 19 nt, Homo sapiens
  misc_RNA (1)...(19): siRNA sense strand
ggaagacacagcucaaggu

SEQ ID NO: 1324147 - RNA, 19 nt, Homo sapiens
  misc_RNA (1)...(19): siRNA sense strand
gaucucccacaaacaaauu

SEQ ID NO: 1324148 - RNA, 19 nt, Homo sapiens
  misc_RNA (1)...(19): siRNA sense strand
caacaagggcgaccucaac

SEQ ID NO: 1324149 - RNA, 19 nt, Homo sapiens
  misc_RNA (1)...(19): siRNA sense strand
caaguucaaugucucuaac

SEQ ID NO: 1324150 - RNA, 19 nt, Homo sapiens
  misc_RNA (1)...(19): siRNA sense strand
uacauuaccugugcugaau

SEQ ID NO: 1324151 - RNA, 19 nt, Homo sapiens
  misc_RNA (1)...(19): siRNA sense strand
ucucuaacuucuaucaugu

SEQ ID NO: 1324152 - RNA, 19 nt, Homo sapiens
  misc_RNA (1)...(19): siRNA sense strand
agaagaaaguggacaagcu

SEQ ID NO: 1324153 - RNA, 19 nt, Homo sapiens
  misc_RNA (1)...(19): siRNA sense strand
gcaacaggucucaauucuu

SEQ ID NO: 1324154 - RNA, 19 nt, Homo sapiens
  misc_RNA (1)...(19): siRNA sense strand
ucaucaggcuuugcaagaa

SEQ ID NO: 1324155 - RNA, 19 nt, Homo sapiens
  misc_RNA (1)...(19): siRNA sense strand
caguggaacagcuaaauau

SEQ ID NO: 1324156 - RNA, 19 nt, Homo sapiens
  misc_RNA (1)...(19): siRNA sense strand
gggaagcgacagcaccaaa

SEQ ID NO: 1324157 - RNA, 19 nt, Homo sapiens
  misc_RNA (1)...(19): siRNA sense strand
ucuaacuucuaucauguga

SEQ ID NO: 1324158 - RNA, 19 nt, Homo sapiens
  misc_RNA (1)...(19): siRNA sense strand
caucaggcuuugcaagaag

SEQ ID NO: 1324159 - RNA, 19 nt, Homo sapiens
  misc_RNA (1)...(19): siRNA sense strand
caaacaaauuuucgucguu

SEQ ID NO: 1324160 - RNA, 19 nt, Homo sapiens
  misc_RNA (1)...(19): siRNA sense strand
aggaggagauccgcauuga

SEQ ID NO: 1324161 - RNA, 19 nt, Homo sapiens
  misc_RNA (1)...(19): siRNA sense strand
guggaacagcuaaauauca

SEQ ID NO: 1324162 - RNA, 19 nt, Homo sapiens
  misc_RNA (1)...(19): siRNA sense strand
caucgucuuugacuuacug

SEQ ID NO: 1324163 - RNA, 19 nt, Homo sapiens
  misc_RNA (1)...(19): siRNA sense strand
cagcaacaggucucaauuc

SEQ ID NO: 1324164 - RNA, 19 nt, Homo sapiens
  misc_RNA (1)...(19): siRNA sense strand
ggagaccacacaugaagca

SEQ ID NO: 1324165 - RNA, 19 nt, Homo sapiens
  misc_RNA (1)...(19): siRNA sense strand
uaaauaucaaggccaagaa

SEQ ID NO: 1324166 - RNA, 19 nt, Homo sapiens
  misc_RNA (1)...(19): siRNA sense strand
agacccagaugaagagaag

SEQ ID NO: 1324167 - RNA, 19 nt, Homo sapiens
  misc_RNA (1)...(19): siRNA sense strand
aagcugaacuuuuccaaga

SEQ ID NO: 1324168 - RNA, 19 nt, Homo sapiens
  misc_RNA (1)...(19): siRNA sense strand
gacaagaagcauaccaucu

SEQ ID NO: 1324169 - RNA, 19 nt, Homo sapiens
  misc_RNA (1)...(19): siRNA sense strand
gaaaacuucaucaggcuuu

SEQ ID NO: 1324170 - RNA, 19 nt, Homo sapiens
  misc_RNA (1)...(19): siRNA sense strand
gucucuaacuucuaucaug

SEQ ID NO: 1324171 - RNA, 19 nt, Homo sapiens
  misc_RNA (1)...(19): siRNA sense strand
gaagaagaaaguggacaag

SEQ ID NO: 1324172 - RNA, 19 nt, Homo sapiens
  misc_RNA (1)...(19): siRNA sense strand
cuaaauaucaaggccaaga

SEQ ID NO: 1324173 - RNA, 19 nt, Homo sapiens
  misc_RNA (1)...(19): siRNA sense strand
gaaaauaauagacccagau

SEQ ID NO: 1324174 - RNA, 19 nt, Homo sapiens
  misc_RNA (1)...(19): siRNA sense strand
caggacccgucuuauuauc

SEQ ID NO: 1324175 - RNA, 19 nt, Homo sapiens
  misc_RNA (1)...(19): siRNA sense strand
gaagcauaccaucuuugga

SEQ ID NO: 1324176 - RNA, 19 nt, Homo sapiens
  misc_RNA (1)...(19): siRNA sense strand
cugaauacacucacuuuua

SEQ ID NO: 1324177 - RNA, 19 nt, Homo sapiens
  misc_RNA (1)...(19): siRNA sense strand
acagauccauccggaacuu

SEQ ID NO: 1324178 - RNA, 19 nt, Homo sapiens
  misc_RNA (1)...(19): siRNA sense strand
gaaaguggacaagcugaac

SEQ ID NO: 1324179 - RNA, 19 nt, Homo sapiens
  misc_RNA (1)...(19): siRNA sense strand
uaucaaggccaagaacuuc

SEQ ID NO: 1324180 - RNA, 19 nt, Homo sapiens
  misc_RNA (1)...(19): siRNA sense strand
ucaauucuucaucacguuu

SEQ ID NO: 1324181 - RNA, 19 nt, Homo sapiens
  misc_RNA (1)...(19): siRNA sense strand
ugaucaagcugaacuuuuc

SEQ ID NO: 1324182 - RNA, 19 nt, Homo sapiens
  misc_RNA (1)...(19): siRNA sense strand
acugcgaccugacaccaaa

SEQ ID NO: 1324183 - RNA, 19 nt, Homo sapiens
  misc_RNA (1)...(19): siRNA sense strand
gaacgcugcccacuauucc

SEQ ID NO: 1324184 - RNA, 19 nt, Homo sapiens
  misc_RNA (1)...(19): siRNA sense strand
caaacaggacccgucuuau

SEQ ID NO: 1324185 - RNA, 19 nt, Homo sapiens
  misc_RNA (1)...(19): siRNA sense strand
acaaguucaaugucucuaa

SEQ ID NO: 1324186 - RNA, 19 nt, Homo sapiens
  misc_RNA (1)...(19): siRNA sense strand
caacgucuacgccuaugag

SEQ ID NO: 1324187 - RNA, 19 nt, Homo sapiens
  misc_RNA (1)...(19): siRNA sense strand
cauuaccugugcugaauac

SEQ ID NO: 1324188 - RNA, 19 nt, Homo sapiens
  misc_RNA (1)...(19): siRNA sense strand
guucaaugucucuaacuuc

SEQ ID NO: 1324189 - RNA, 19 nt, Homo sapiens
  misc_RNA (1)...(19): siRNA sense strand
acaggacccgucuuauuau

SEQ ID NO: 1324190 - RNA, 19 nt, Homo sapiens
  misc_RNA (1)...(19): siRNA sense strand
agccagaucucccacaaac

SEQ ID NO: 1324191 - RNA, 19 nt, Homo sapiens
  misc_RNA (1)...(19): siRNA sense strand
agaagaagaaaguggacaa

SEQ ID NO: 1324192 - RNA, 19 nt, Homo sapiens
  misc_RNA (1)...(19): siRNA sense strand
gcaacgucuacgccuauga

SEQ ID NO: 1324193 - RNA, 19 nt, Homo sapiens
  misc_RNA (1)...(19): siRNA sense strand
ucccggagaccacacauga

SEQ ID NO: 1324194 - RNA, 19 nt, Homo sapiens
  misc_RNA (1)...(19): siRNA sense strand
ugaacgcugcccacuauuc

SEQ ID NO: 1324195 - RNA, 19 nt, Homo sapiens
  misc_RNA (1)...(19): siRNA sense strand
gcaccaaaaggacaaaaug

SEQ ID NO: 1324196 - RNA, 19 nt, Homo sapiens
  misc_RNA (1)...(19): siRNA sense strand
gucuuugacuuacugaaca

SEQ ID NO: 1324197 - RNA, 19 nt, Homo sapiens
  misc_RNA (1)...(19): siRNA sense strand
gcucuacaaggaguucaaa

SEQ ID NO: 1324198 - RNA, 19 nt, Homo sapiens
  misc_RNA (1)...(19): siRNA sense strand
agcaacaggucucaauucu

SEQ ID NO: 1324199 - RNA, 19 nt, Homo sapiens
  misc_RNA (1)...(19): siRNA sense strand
gcacggguggggagucaua

SEQ ID NO: 1324200 - RNA, 19 nt, Homo sapiens
  misc_RNA (1)...(19): siRNA sense strand
uaccugugcugaauacacu

SEQ ID NO: 1324201 - RNA, 19 nt, Homo sapiens
  misc_RNA (1)...(19): siRNA sense strand
ggaggagauccgcauugau

SEQ ID NO: 1324202 - RNA, 19 nt, Homo sapiens
  misc_RNA (1)...(19): siRNA sense strand
uaaggaggagauccgcauu

SEQ ID NO: 1324203 - RNA, 19 nt, Homo sapiens
  misc_RNA (1)...(19): siRNA sense strand
gacccgucuuauuaucuga

SEQ ID NO: 1324204 - RNA, 19 nt, Homo sapiens
  misc_RNA (1)...(19): siRNA sense strand
ucaaugucucuaacuucua

SEQ ID NO: 1324205 - RNA, 19 nt, Homo sapiens
  misc_RNA (1)...(19): siRNA sense strand
ggucccugaucaagcugaa

SEQ ID NO: 1324206 - RNA, 19 nt, Homo sapiens
  misc_RNA (1)...(19): siRNA sense strand
gggcuuugacguacugaca

SEQ ID NO: 1324207 - RNA, 19 nt, Homo sapiens
  misc_RNA (1)...(19): siRNA sense strand
caacaggucucaauucuuc

SEQ ID NO: 1324208 - RNA, 19 nt, Homo sapiens
  misc_RNA (1)...(19): siRNA sense strand
gcaagaagcauuauuacga

SEQ ID NO: 1324209 - RNA, 19 nt, Homo sapiens
  misc_RNA (1)...(19): siRNA sense strand
gcugaacgcugcccacuau

SEQ ID NO: 1324210 - RNA, 19 nt, Homo sapiens
  misc_RNA (1)...(19): siRNA sense strand
ccaaacaggacccgucuua

SEQ ID NO: 1324211 - RNA, 19 nt, Homo sapiens
  misc_RNA (1)...(19): siRNA sense strand
caagaagcauuauuacgau

SEQ ID NO: 1324212 - RNA, 19 nt, Homo sapiens
  misc_RNA (1)...(19): siRNA sense strand
gaagacacagcucaaggua

SEQ ID NO: 1324213 - RNA, 19 nt, Homo sapiens
  misc_RNA (1)...(19): siRNA sense strand
gaagccagaucucccacaa

SEQ ID NO: 1324214 - RNA, 19 nt, Homo sapiens
  misc_RNA (1)...(19): siRNA sense strand
uuccauggcuuaagaagua

SEQ ID NO: 1324215 - RNA, 19 nt, Homo sapiens
  misc_RNA (1)...(19): siRNA sense strand
gcaguggaacagcuaaaua

SEQ ID NO: 1324216 - RNA, 19 nt, Homo sapiens
  misc_RNA (1)...(19): siRNA sense strand
gaggagauccgcauugaug

SEQ ID NO: 1324217 - RNA, 19 nt, Homo sapiens
  misc_RNA (1)...(19): siRNA sense strand
ugacagccauggagaaugu

SEQ ID NO: 1324218 - RNA, 19 nt, Homo sapiens
  misc_RNA (1)...(19): siRNA sense strand
caaugucucuaacuucuau

SEQ ID NO: 1324219 - RNA, 19 nt, Homo sapiens
  misc_RNA (1)...(19): siRNA sense strand
ggaggccgaugcccagauu

SEQ ID NO: 1324220 - RNA, 19 nt, Homo sapiens
  misc_RNA (1)...(19): siRNA sense strand
aaacaggacccgucuuauu

SEQ ID NO: 1324221 - RNA, 19 nt, Homo sapiens
  misc_RNA (1)...(19): siRNA sense strand
aacaggacccgucuuauua

SEQ ID NO: 1324222 - RNA, 19 nt, Homo sapiens
  misc_RNA (1)...(19): siRNA sense strand
gugccuaccuggacaagaa

SEQ ID NO: 1324223 - RNA, 19 nt, Homo sapiens
  misc_RNA (1)...(19): siRNA sense strand
gcuaccaguuugugaagaa

SEQ ID NO: 1324224 - RNA, 19 nt, Homo sapiens
  misc_RNA (1)...(19): siRNA sense strand
uggaacagcuaaauaucaa

SEQ ID NO: 1324225 - RNA, 19 nt, Homo sapiens
  misc_RNA (1)...(19): siRNA sense strand
aauaauagacccagaugaa

SEQ ID NO: 1324226 - RNA, 19 nt, Homo sapiens
  misc_RNA (1)...(19): siRNA sense strand
ggaggucccugaucaagcu

SEQ ID NO: 1324227 - RNA, 19 nt, Homo sapiens
  misc_RNA (1)...(19): siRNA sense strand
uggagaauguggagaguga

SEQ ID NO: 1324228 - RNA, 19 nt, Homo sapiens
  misc_RNA (1)...(19): siRNA sense strand
ugcaggagcucuacaagga

SEQ ID NO: 1324229 - RNA, 19 nt, Homo sapiens
  misc_RNA (1)...(19): siRNA sense strand
ccagaucucccacaaacaa

SEQ ID NO: 1324230 - RNA, 19 nt, Homo sapiens
  misc_RNA (1)...(19): siRNA sense strand
ggacccgucuuauuaucug

SEQ ID NO: 1324231 - RNA, 19 nt, Homo sapiens
  misc_RNA (1)...(19): siRNA sense strand
uggcaucgucuuugacuua

SEQ ID NO: 1324232 - RNA, 19 nt, Homo sapiens
  misc_RNA (1)...(19): siRNA sense strand
uaauagacccagaugaaga

SEQ ID NO: 1324233 - RNA, 19 nt, Homo sapiens
  misc_RNA (1)...(19): siRNA sense strand
gugcugcgcuaccaguuug

SEQ ID NO: 1324234 - RNA, 19 nt, Homo sapiens
  misc_RNA (1)...(19): siRNA sense strand
guacauuaccugugcugaa

SEQ ID NO: 1324235 - RNA, 19 nt, Homo sapiens
  misc_RNA (1)...(19): siRNA sense strand
aaacugaccgcccuaagga

SEQ ID NO: 1324236 - RNA, 19 nt, Homo sapiens
  misc_RNA (1)...(19): siRNA sense strand
ggaagacacagcucaaggu

SEQ ID NO: 1324237 - RNA, 19 nt, Homo sapiens
  misc_RNA (1)...(19): siRNA sense strand
gaucucccacaaacaaauu

SEQ ID NO: 1324238 - RNA, 19 nt, Homo sapiens
  misc_RNA (1)...(19): siRNA sense strand
caacaagggcgaccucaac

SEQ ID NO: 1324239 - RNA, 19 nt, Homo sapiens
  misc_RNA (1)...(19): siRNA sense strand
caaguucaaugucucuaac

SEQ ID NO: 1324240 - RNA, 19 nt, Homo sapiens
  misc_RNA (1)...(19): siRNA sense strand
uacauuaccugugcugaau

SEQ ID NO: 1324241 - RNA, 19 nt, Homo sapiens
  misc_RNA (1)...(19): siRNA sense strand
ucucuaacuucuaucaugu

SEQ ID NO: 1324242 - RNA, 19 nt, Homo sapiens
  misc_RNA (1)...(19): siRNA sense strand
agaagaaaguggacaagcu

SEQ ID NO: 1324243 - RNA, 19 nt, Homo sapiens
  misc_RNA (1)...(19): siRNA sense strand
gcaacaggucucaauucuu

SEQ ID NO: 1324244 - RNA, 19 nt, Homo sapiens
  misc_RNA (1)...(19): siRNA sense strand
ucaucaggcuuugcaagaa

SEQ ID NO: 1324245 - RNA, 19 nt, Homo sapiens
  misc_RNA (1)...(19): siRNA sense strand
caguggaacagcuaaauau

SEQ ID NO: 1324246 - RNA, 19 nt, Homo sapiens
  misc_RNA (1)...(19): siRNA sense strand
gggaagcgacagcaccaaa

SEQ ID NO: 1324247 - RNA, 19 nt, Homo sapiens
  misc_RNA (1)...(19): siRNA sense strand
ucuaacuucuaucauguga

SEQ ID NO: 1324248 - RNA, 19 nt, Homo sapiens
  misc_RNA (1)...(19): siRNA sense strand
caucaggcuuugcaagaag

SEQ ID NO: 1324249 - RNA, 19 nt, Homo sapiens
  misc_RNA (1)...(19): siRNA sense strand
caaacaaauuuucgucguu

SEQ ID NO: 1324250 - RNA, 19 nt, Homo sapiens
  misc_RNA (1)...(19): siRNA sense strand
aggaggagauccgcauuga

SEQ ID NO: 1324251 - RNA, 19 nt, Homo sapiens
  misc_RNA (1)...(19): siRNA sense strand
guggaacagcuaaauauca

SEQ ID NO: 1324252 - RNA, 19 nt, Homo sapiens
  misc_RNA (1)...(19): siRNA sense strand
caucgucuuugacuuacug

SEQ ID NO: 1324253 - RNA, 19 nt, Homo sapiens
  misc_RNA (1)...(19): siRNA sense strand
cagcaacaggucucaauuc

SEQ ID NO: 1324254 - RNA, 19 nt, Homo sapiens
  misc_RNA (1)...(19): siRNA sense strand
ggagaccacacaugaagca

SEQ ID NO: 1324255 - RNA, 19 nt, Homo sapiens
  misc_RNA (1)...(19): siRNA sense strand
uaaauaucaaggccaagaa

SEQ ID NO: 1324256 - RNA, 19 nt, Homo sapiens
  misc_RNA (1)...(19): siRNA sense strand
agacccagaugaagagaag

SEQ ID NO: 1324257 - RNA, 19 nt, Homo sapiens
  misc_RNA (1)...(19): siRNA sense strand
aagcugaacuuuuccaaga

SEQ ID NO: 1324258 - RNA, 19 nt, Homo sapiens
  misc_RNA (1)...(19): siRNA sense strand
gacaagaagcauaccaucu

SEQ ID NO: 1324259 - RNA, 19 nt, Homo sapiens
  misc_RNA (1)...(19): siRNA sense strand
gaaaacuucaucaggcuuu

SEQ ID NO: 1324260 - RNA, 19 nt, Homo sapiens
  misc_RNA (1)...(19): siRNA sense strand
gucucuaacuucuaucaug

SEQ ID NO: 1324261 - RNA, 19 nt, Homo sapiens
  misc_RNA (1)...(19): siRNA sense strand
gaagaagaaaguggacaag

SEQ ID NO: 1324262 - RNA, 19 nt, Homo sapiens
  misc_RNA (1)...(19): siRNA sense strand
cuaaauaucaaggccaaga

SEQ ID NO: 1324263 - RNA, 19 nt, Homo sapiens
  misc_RNA (1)...(19): siRNA sense strand
gaaaauaauagacccagau

SEQ ID NO: 1324264 - RNA, 19 nt, Homo sapiens
  misc_RNA (1)...(19): siRNA sense strand
caggacccgucuuauuauc

SEQ ID NO: 1324265 - RNA, 19 nt, Homo sapiens
  misc_RNA (1)...(19): siRNA sense strand
gaagcauaccaucuuugga

SEQ ID NO: 1324266 - RNA, 19 nt, Homo sapiens
  misc_RNA (1)...(19): siRNA sense strand
cugaauacacucacuuuua

SEQ ID NO: 1324267 - RNA, 19 nt, Homo sapiens
  misc_RNA (1)...(19): siRNA sense strand
acagauccauccggaacuu

SEQ ID NO: 1324268 - RNA, 19 nt, Homo sapiens
  misc_RNA (1)...(19): siRNA sense strand
gaaaguggacaagcugaac

SEQ ID NO: 1324269 - RNA, 19 nt, Homo sapiens
  misc_RNA (1)...(19): siRNA sense strand
uaucaaggccaagaacuuc

SEQ ID NO: 1324270 - RNA, 19 nt, Homo sapiens
  misc_RNA (1)...(19): siRNA sense strand
ucaauucuucaucacguuu

SEQ ID NO: 1324271 - RNA, 19 nt, Homo sapiens
  misc_RNA (1)...(19): siRNA sense strand
ugaucaagcugaacuuuuc

SEQ ID NO: 1324272 - RNA, 19 nt, Homo sapiens
  misc_RNA (1)...(19): siRNA sense strand
acugcgaccugacaccaaa

SEQ ID NO: 1324273 - RNA, 19 nt, Homo sapiens
  misc_RNA (1)...(19): siRNA sense strand
gaacgcugcccacuauucc

SEQ ID NO: 1324274 - RNA, 19 nt, Homo sapiens
  misc_RNA (1)...(19): siRNA sense strand
caaacaggacccgucuuau

SEQ ID NO: 1324275 - RNA, 19 nt, Homo sapiens
  misc_RNA (1)...(19): siRNA sense strand
acaaguucaaugucucuaa

SEQ ID NO: 1324276 - RNA, 19 nt, Homo sapiens
  misc_RNA (1)...(19): siRNA sense strand
caacgucuacgccuaugag

SEQ ID NO: 1324277 - RNA, 19 nt, Homo sapiens
  misc_RNA (1)...(19): siRNA sense strand
cauuaccugugcugaauac

SEQ ID NO: 1324278 - RNA, 19 nt, Homo sapiens
  misc_RNA (1)...(19): siRNA sense strand
guucaaugucucuaacuuc

SEQ ID NO: 1324279 - RNA, 19 nt, Homo sapiens
  misc_RNA (1)...(19): siRNA sense strand
acaggacccgucuuauuau

SEQ ID NO: 1324280 - RNA, 19 nt, Homo sapiens
  misc_RNA (1)...(19): siRNA sense strand
agccagaucucccacaaac

SEQ ID NO: 1324281 - RNA, 19 nt, Homo sapiens
  misc_RNA (1)...(19): siRNA sense strand
agaagaagaaaguggacaa

SEQ ID NO: 1324282 - RNA, 19 nt, Homo sapiens
  misc_RNA (1)...(19): siRNA sense strand
gcaacgucuacgccuauga

SEQ ID NO: 1324283 - RNA, 19 nt, Homo sapiens
  misc_RNA (1)...(19): siRNA sense strand
ucccggagaccacacauga

SEQ ID NO: 1324284 - RNA, 19 nt, Homo sapiens
  misc_RNA (1)...(19): siRNA sense strand
ugaacgcugcccacuauuc

SEQ ID NO: 1324285 - RNA, 19 nt, Homo sapiens
  misc_RNA (1)...(19): siRNA sense strand
gcaccaaaaggacaaaaug

SEQ ID NO: 1324286 - RNA, 19 nt, Homo sapiens
  misc_RNA (1)...(19): siRNA sense strand
gucuuugacuuacugaaca

SEQ ID NO: 1324287 - RNA, 19 nt, Homo sapiens
  misc_RNA (1)...(19): siRNA sense strand
gcucuacaaggaguucaaa

SEQ ID NO: 1324288 - RNA, 19 nt, Homo sapiens
  misc_RNA (1)...(19): siRNA sense strand
agcaacaggucucaauucu

SEQ ID NO: 1324289 - RNA, 19 nt, Homo sapiens
  misc_RNA (1)...(19): siRNA sense strand
gcacggguggggagucaua

SEQ ID NO: 1324290 - RNA, 19 nt, Homo sapiens
  misc_RNA (1)...(19): siRNA sense strand
uaccugugcugaauacacu

SEQ ID NO: 1324291 - RNA, 19 nt, Homo sapiens
  misc_RNA (1)...(19): siRNA sense strand
ggaggagauccgcauugau

SEQ ID NO: 1324292 - RNA, 19 nt, Homo sapiens
  misc_RNA (1)...(19): siRNA sense strand
uaaggaggagauccgcauu

SEQ ID NO: 1324293 - RNA, 19 nt, Homo sapiens
  misc_RNA (1)...(19): siRNA sense strand
gacccgucuuauuaucuga

SEQ ID NO: 1324294 - RNA, 19 nt, Homo sapiens
  misc_RNA (1)...(19): siRNA sense strand
ucaaugucucuaacuucua

SEQ ID NO: 1324295 - RNA, 19 nt, Homo sapiens
  misc_RNA (1)...(19): siRNA sense strand
ggucccugaucaagcugaa

SEQ ID NO: 1324296 - RNA, 19 nt, Homo sapiens
  misc_RNA (1)...(19): siRNA sense strand
gggcuuugacguacugaca

SEQ ID NO: 1324297 - RNA, 19 nt, Homo sapiens
  misc_RNA (1)...(19): siRNA sense strand
caacaggucucaauucuuc

SEQ ID NO: 1324298 - RNA, 19 nt, Homo sapiens
  misc_RNA (1)...(19): siRNA sense strand
gcaagaagcauuauuacga

SEQ ID NO: 1324299 - RNA, 19 nt, Homo sapiens
  misc_RNA (1)...(19): siRNA sense strand
gcugaacgcugcccacuau

SEQ ID NO: 1324300 - RNA, 19 nt, Homo sapiens
  misc_RNA (1)...(19): siRNA sense strand
ccaaacaggacccgucuua

SEQ ID NO: 1324301 - RNA, 19 nt, Homo sapiens
  misc_RNA (1)...(19): siRNA sense strand
caagaagcauuauuacgau

SEQ ID NO: 1324302 - RNA, 19 nt, Homo sapiens
  misc_RNA (1)...(19): siRNA sense strand
gaagacacagcucaaggua

SEQ ID NO: 1324303 - RNA, 19 nt, Homo sapiens
  misc_RNA (1)...(19): siRNA sense strand
gaagccagaucucccacaa

SEQ ID NO: 1324304 - RNA, 19 nt, Homo sapiens
  misc_RNA (1)...(19): siRNA sense strand
uuccauggcuuaagaagua

SEQ ID NO: 1324305 - RNA, 19 nt, Homo sapiens
  misc_RNA (1)...(19): siRNA sense strand
gcaguggaacagcuaaaua

SEQ ID NO: 1324306 - RNA, 19 nt, Homo sapiens
  misc_RNA (1)...(19): siRNA sense strand
gaggagauccgcauugaug

SEQ ID NO: 1324307 - RNA, 19 nt, Homo sapiens
  misc_RNA (1)...(19): siRNA sense strand
ugacagccauggagaaugu

SEQ ID NO: 1324308 - RNA, 19 nt, Homo sapiens
  misc_RNA (1)...(19): siRNA sense strand
caaugucucuaacuucuau

SEQ ID NO: 1324309 - RNA, 19 nt, Homo sapiens
  misc_RNA (1)...(19): siRNA sense strand
ggaggccgaugcccagauu

SEQ ID NO: 1324310 - RNA, 19 nt, Homo sapiens
  misc_RNA (1)...(19): siRNA sense strand
aaacaggacccgucuuauu

SEQ ID NO: 1324311 - RNA, 19 nt, Homo sapiens
  misc_RNA (1)...(19): siRNA sense strand
aacaggacccgucuuauua

SEQ ID NO: 1324312 - RNA, 19 nt, Homo sapiens
  misc_RNA (1)...(19): siRNA sense strand
gugccuaccuggacaagaa

SEQ ID NO: 1324313 - RNA, 19 nt, Homo sapiens
  misc_RNA (1)...(19): siRNA sense strand
gcuaccaguuugugaagaa

SEQ ID NO: 1324314 - RNA, 19 nt, Homo sapiens
  misc_RNA (1)...(19): siRNA sense strand
uggaacagcuaaauaucaa

SEQ ID NO: 1324315 - RNA, 19 nt, Homo sapiens
  misc_RNA (1)...(19): siRNA sense strand
aauaauagacccagaugaa

SEQ ID NO: 1324316 - RNA, 19 nt, Homo sapiens
  misc_RNA (1)...(19): siRNA sense strand
ggaggucccugaucaagcu

SEQ ID NO: 1324317 - RNA, 19 nt, Homo sapiens
  misc_RNA (1)...(19): siRNA sense strand
uggagaauguggagaguga

SEQ ID NO: 1324318 - RNA, 19 nt, Homo sapiens
  misc_RNA (1)...(19): siRNA sense strand
ugcaggagcucuacaagga

SEQ ID NO: 1324319 - RNA, 19 nt, Homo sapiens
  misc_RNA (1)...(19): siRNA sense strand
ccagaucucccacaaacaa

SEQ ID NO: 1324320 - RNA, 19 nt, Homo sapiens
  misc_RNA (1)...(19): siRNA sense strand
ggacccgucuuauuaucug

SEQ ID NO: 1324321 - RNA, 19 nt, Homo sapiens
  misc_RNA (1)...(19): siRNA sense strand
uggcaucgucuuugacuua

SEQ ID NO: 1324322 - RNA, 19 nt, Homo sapiens
  misc_RNA (1)...(19): siRNA sense strand
uaauagacccagaugaaga

SEQ ID NO: 1324323 - RNA, 19 nt, Homo sapiens
  misc_RNA (1)...(19): siRNA sense strand
gugcugcgcuaccaguuug

SEQ ID NO: 1324324 - RNA, 19 nt, Homo sapiens
  misc_RNA (1)...(19): siRNA sense strand
guacauuaccugugcugaa

SEQ ID NO: 1324325 - RNA, 19 nt, Homo sapiens
  misc_RNA (1)...(19): siRNA sense strand
aaacugaccgcccuaagga

SEQ ID NO: 1324326 - RNA, 19 nt, Homo sapiens
  misc_RNA (1)...(19): siRNA sense strand
ggaagacacagcucaaggu

SEQ ID NO: 1324327 - RNA, 19 nt, Homo sapiens
  misc_RNA (1)...(19): siRNA sense strand
gaucucccacaaacaaauu

SEQ ID NO: 1324328 - RNA, 19 nt, Homo sapiens
  misc_RNA (1)...(19): siRNA sense strand
caacaagggcgaccucaac

SEQ ID NO: 1324329 - RNA, 19 nt, Homo sapiens
  misc_RNA (1)...(19): siRNA sense strand
caaguucaaugucucuaac

SEQ ID NO: 1324330 - RNA, 19 nt, Homo sapiens
  misc_RNA (1)...(19): siRNA sense strand
uacauuaccugugcugaau

SEQ ID NO: 1324331 - RNA, 19 nt, Homo sapiens
  misc_RNA (1)...(19): siRNA sense strand
ucucuaacuucuaucaugu

SEQ ID NO: 1324332 - RNA, 19 nt, Homo sapiens
  misc_RNA (1)...(19): siRNA sense strand
agaagaaaguggacaagcu

SEQ ID NO: 1324333 - RNA, 19 nt, Homo sapiens
  misc_RNA (1)...(19): siRNA sense strand
gcaacaggucucaauucuu

SEQ ID NO: 1324334 - RNA, 19 nt, Homo sapiens
  misc_RNA (1)...(19): siRNA sense strand
ucaucaggcuuugcaagaa

SEQ ID NO: 1324335 - RNA, 19 nt, Homo sapiens
  misc_RNA (1)...(19): siRNA sense strand
caguggaacagcuaaauau

SEQ ID NO: 1324336 - RNA, 19 nt, Homo sapiens
  misc_RNA (1)...(19): siRNA sense strand
gggaagcgacagcaccaaa

SEQ ID NO: 1324337 - RNA, 19 nt, Homo sapiens
  misc_RNA (1)...(19): siRNA sense strand
ucuaacuucuaucauguga

SEQ ID NO: 1324338 - RNA, 19 nt, Homo sapiens
  misc_RNA (1)...(19): siRNA sense strand
caucaggcuuugcaagaag

SEQ ID NO: 1324339 - RNA, 19 nt, Homo sapiens
  misc_RNA (1)...(19): siRNA sense strand
caaacaaauuuucgucguu

SEQ ID NO: 1324340 - RNA, 19 nt, Homo sapiens
  misc_RNA (1)...(19): siRNA sense strand
aggaggagauccgcauuga

SEQ ID NO: 1324341 - RNA, 19 nt, Homo sapiens
  misc_RNA (1)...(19): siRNA sense strand
guggaacagcuaaauauca

SEQ ID NO: 1324342 - RNA, 19 nt, Homo sapiens
  misc_RNA (1)...(19): siRNA sense strand
caucgucuuugacuuacug

SEQ ID NO: 1324343 - RNA, 19 nt, Homo sapiens
  misc_RNA (1)...(19): siRNA sense strand
cagcaacaggucucaauuc

SEQ ID NO: 1324344 - RNA, 19 nt, Homo sapiens
  misc_RNA (1)...(19): siRNA sense strand
ggagaccacacaugaagca

SEQ ID NO: 1324345 - RNA, 19 nt, Homo sapiens
  misc_RNA (1)...(19): siRNA sense strand
uaaauaucaaggccaagaa

SEQ ID NO: 1324346 - RNA, 19 nt, Homo sapiens
  misc_RNA (1)...(19): siRNA sense strand
agacccagaugaagagaag

SEQ ID NO: 1324347 - RNA, 19 nt, Homo sapiens
  misc_RNA (1)...(19): siRNA sense strand
aagcugaacuuuuccaaga

SEQ ID NO: 1324348 - RNA, 19 nt, Homo sapiens
  misc_RNA (1)...(19): siRNA sense strand
gacaagaagcauaccaucu

SEQ ID NO: 1324349 - RNA, 19 nt, Homo sapiens
  misc_RNA (1)...(19): siRNA sense strand
gaaaacuucaucaggcuuu

SEQ ID NO: 1324350 - RNA, 19 nt, Homo sapiens
  misc_RNA (1)...(19): siRNA sense strand
gucucuaacuucuaucaug

SEQ ID NO: 1324351 - RNA, 19 nt, Homo sapiens
  misc_RNA (1)...(19): siRNA sense strand
gaagaagaaaguggacaag

SEQ ID NO: 1324352 - RNA, 19 nt, Homo sapiens
  misc_RNA (1)...(19): siRNA sense strand
cuaaauaucaaggccaaga

SEQ ID NO: 1324353 - RNA, 19 nt, Homo sapiens
  misc_RNA (1)...(19): siRNA sense strand
gaaaauaauagacccagau

SEQ ID NO: 1324354 - RNA, 19 nt, Homo sapiens
  misc_RNA (1)...(19): siRNA sense strand
caggacccgucuuauuauc

SEQ ID NO: 1324355 - RNA, 19 nt, Homo sapiens
  misc_RNA (1)...(19): siRNA sense strand
gaagcauaccaucuuugga

SEQ ID NO: 1324356 - RNA, 19 nt, Homo sapiens
  misc_RNA (1)...(19): siRNA sense strand
cugaauacacucacuuuua

SEQ ID NO: 1324357 - RNA, 19 nt, Homo sapiens
  misc_RNA (1)...(19): siRNA sense strand
acagauccauccggaacuu

SEQ ID NO: 1324358 - RNA, 19 nt, Homo sapiens
  misc_RNA (1)...(19): siRNA sense strand
gaaaguggacaagcugaac

SEQ ID NO: 1324359 - RNA, 19 nt, Homo sapiens
  misc_RNA (1)...(19): siRNA sense strand
uaucaaggccaagaacuuc

SEQ ID NO: 1324360 - RNA, 19 nt, Homo sapiens
  misc_RNA (1)...(19): siRNA sense strand
ucaauucuucaucacguuu

SEQ ID NO: 1324361 - RNA, 19 nt, Homo sapiens
  misc_RNA (1)...(19): siRNA sense strand
ugaucaagcugaacuuuuc

SEQ ID NO: 1324362 - RNA, 19 nt, Homo sapiens
  misc_RNA (1)...(19): siRNA sense strand
acugcgaccugacaccaaa

SEQ ID NO: 1324363 - RNA, 19 nt, Homo sapiens
  misc_RNA (1)...(19): siRNA sense strand
gaacgcugcccacuauucc

SEQ ID NO: 1324364 - RNA, 19 nt, Homo sapiens
  misc_RNA (1)...(19): siRNA sense strand
caaacaggacccgucuuau

SEQ ID NO: 1324365 - RNA, 19 nt, Homo sapiens
  misc_RNA (1)...(19): siRNA sense strand
acaaguucaaugucucuaa

SEQ ID NO: 1324366 - RNA, 19 nt, Homo sapiens
  misc_RNA (1)...(19): siRNA sense strand
caacgucuacgccuaugag

SEQ ID NO: 1324367 - RNA, 19 nt, Homo sapiens
  misc_RNA (1)...(19): siRNA sense strand
cauuaccugugcugaauac

SEQ ID NO: 1324368 - RNA, 19 nt, Homo sapiens
  misc_RNA (1)...(19): siRNA sense strand
guucaaugucucuaacuuc

SEQ ID NO: 1324369 - RNA, 19 nt, Homo sapiens
  misc_RNA (1)...(19): siRNA sense strand
acaggacccgucuuauuau

SEQ ID NO: 1324370 - RNA, 19 nt, Homo sapiens
  misc_RNA (1)...(19): siRNA sense strand
agccagaucucccacaaac

SEQ ID NO: 1324371 - RNA, 19 nt, Homo sapiens
  misc_RNA (1)...(19): siRNA sense strand
agaagaagaaaguggacaa

SEQ ID NO: 1324372 - RNA, 19 nt, Homo sapiens
  misc_RNA (1)...(19): siRNA sense strand
gcaacgucuacgccuauga

SEQ ID NO: 1324373 - RNA, 19 nt, Homo sapiens
  misc_RNA (1)...(19): siRNA sense strand
ucccggagaccacacauga

SEQ ID NO: 1324374 - RNA, 19 nt, Homo sapiens
  misc_RNA (1)...(19): siRNA sense strand
ugaacgcugcccacuauuc

SEQ ID NO: 1324375 - RNA, 19 nt, Homo sapiens
  misc_RNA (1)...(19): siRNA sense strand
gcaccaaaaggacaaaaug

SEQ ID NO: 1324376 - RNA, 19 nt, Homo sapiens
  misc_RNA (1)...(19): siRNA sense strand
gucuuugacuuacugaaca

SEQ ID NO: 1324377 - RNA, 19 nt, Homo sapiens
  misc_RNA (1)...(19): siRNA sense strand
gcucuacaaggaguucaaa

SEQ ID NO: 1324378 - RNA, 19 nt, Homo sapiens
  misc_RNA (1)...(19): siRNA sense strand
agcaacaggucucaauucu

SEQ ID NO: 1324379 - RNA, 19 nt, Homo sapiens
  misc_RNA (1)...(19): siRNA sense strand
gcacggguggggagucaua

SEQ ID NO: 1324380 - RNA, 19 nt, Homo sapiens
  misc_RNA (1)...(19): siRNA sense strand
uaccugugcugaauacacu

SEQ ID NO: 1324381 - RNA, 19 nt, Homo sapiens
  misc_RNA (1)...(19): siRNA sense strand
ggaggagauccgcauugau

SEQ ID NO: 1324382 - RNA, 19 nt, Homo sapiens
  misc_RNA (1)...(19): siRNA sense strand
uaaggaggagauccgcauu

SEQ ID NO: 1324383 - RNA, 19 nt, Homo sapiens
  misc_RNA (1)...(19): siRNA sense strand
gacccgucuuauuaucuga

SEQ ID NO: 1324384 - RNA, 19 nt, Homo sapiens
  misc_RNA (1)...(19): siRNA sense strand
ucaaugucucuaacuucua

SEQ ID NO: 1324385 - RNA, 19 nt, Homo sapiens
  misc_RNA (1)...(19): siRNA sense strand
ggucccugaucaagcugaa

SEQ ID NO: 1324386 - RNA, 19 nt, Homo sapiens
  misc_RNA (1)...(19): siRNA sense strand
gggcuuugacguacugaca

SEQ ID NO: 1324387 - RNA, 19 nt, Homo sapiens
  misc_RNA (1)...(19): siRNA sense strand
gcacagacugacagaauga

SEQ ID NO: 1324388 - RNA, 19 nt, Homo sapiens
  misc_RNA (1)...(19): siRNA sense strand
caauguggcugaacaaagg

SEQ ID NO: 1324389 - RNA, 19 nt, Homo sapiens
  misc_RNA (1)...(19): siRNA sense strand
uaucguugcuggccugguu

SEQ ID NO: 1324390 - RNA, 19 nt, Homo sapiens
  misc_RNA (1)...(19): siRNA sense strand
gaagaggagacacggaaca

SEQ ID NO: 1324391 - RNA, 19 nt, Homo sapiens
  misc_RNA (1)...(19): siRNA sense strand
aggauuaccucgcccugaa

SEQ ID NO: 1324392 - RNA, 19 nt, Homo sapiens
  misc_RNA (1)...(19): siRNA sense strand
ccuacgauggcaaggauua

SEQ ID NO: 1324393 - RNA, 19 nt, Homo sapiens
  misc_RNA (1)...(19): siRNA sense strand
gagauacacgugccaugug

SEQ ID NO: 1324394 - RNA, 19 nt, Homo sapiens
  misc_RNA (1)...(19): siRNA sense strand
ggacacugcggcucagauc

SEQ ID NO: 1324395 - RNA, 19 nt, Homo sapiens
  misc_RNA (1)...(19): siRNA sense strand
ugaacaguaugccuacgau

SEQ ID NO: 1324396 - RNA, 19 nt, Homo sapiens
  misc_RNA (1)...(19): siRNA sense strand
ucuccaagcgcaaguguga

SEQ ID NO: 1324397 - RNA, 19 nt, Homo sapiens
  misc_RNA (1)...(19): siRNA sense strand
caucauggguaucguugcu

SEQ ID NO: 1324398 - RNA, 19 nt, Homo sapiens
  misc_RNA (1)...(19): siRNA sense strand
gguuguccuugcagcugua

SEQ ID NO: 1324399 - RNA, 19 nt, Homo sapiens
  misc_RNA (1)...(19): siRNA sense strand
cgcacagacugacagaaug

SEQ ID NO: 1324400 - RNA, 19 nt, Homo sapiens
  misc_RNA (1)...(19): siRNA sense strand
ccaauguggcugaacaaag

SEQ ID NO: 1324401 - RNA, 19 nt, Homo sapiens
  misc_RNA (1)...(19): siRNA sense strand
cccacuccaugagguauuu

SEQ ID NO: 1324402 - RNA, 19 nt, Homo sapiens
  misc_RNA (1)...(19): siRNA sense strand
gcucccacuccaugaggua

SEQ ID NO: 1324403 - RNA, 19 nt, Homo sapiens
  misc_RNA (1)...(19): siRNA sense strand
gccagucccuccaggugaa

SEQ ID NO: 1324404 - RNA, 19 nt, Homo sapiens
  misc_RNA (1)...(19): siRNA sense strand
ccgugcagcuccuugugua

SEQ ID NO: 1324405 - RNA, 19 nt, Homo sapiens
  misc_RNA (1)...(19): siRNA sense strand
ggacgaggacgugcuguuc

SEQ ID NO: 1324406 - RNA, 19 nt, Homo sapiens
  misc_RNA (1)...(19): siRNA sense strand
ccaacgcgcucuccuucuc

SEQ ID NO: 1324407 - RNA, 19 nt, Homo sapiens
  misc_RNA (1)...(19): siRNA sense strand
gacgaggacgugcuguuca

SEQ ID NO: 1324408 - RNA, 19 nt, Homo sapiens
  misc_RNA (1)...(19): siRNA sense strand
cagcuucucugaggcuucu

SEQ ID NO: 1324409 - RNA, 19 nt, Homo sapiens
  misc_RNA (1)...(19): siRNA sense strand
gccagucccuccaggugaa

SEQ ID NO: 1324410 - RNA, 19 nt, Homo sapiens
  misc_RNA (1)...(19): siRNA sense strand
ccgugcagcuccuugugua

SEQ ID NO: 1324411 - RNA, 19 nt, Homo sapiens
  misc_RNA (1)...(19): siRNA sense strand
ggacgaggacgugcuguuc

SEQ ID NO: 1324412 - RNA, 19 nt, Homo sapiens
  misc_RNA (1)...(19): siRNA sense strand
ccaacgcgcucuccuucuc

SEQ ID NO: 1324413 - RNA, 19 nt, Homo sapiens
  misc_RNA (1)...(19): siRNA sense strand
gacgaggacgugcuguuca

SEQ ID NO: 1324414 - RNA, 19 nt, Homo sapiens
  misc_RNA (1)...(19): siRNA sense strand
cagcuucucugaggcuucu

SEQ ID NO: 1324415 - RNA, 19 nt, Homo sapiens
  misc_RNA (1)...(19): siRNA sense strand
gccagucccuccaggugaa

SEQ ID NO: 1324416 - RNA, 19 nt, Homo sapiens
  misc_RNA (1)...(19): siRNA sense strand
ccgugcagcuccuugugua

SEQ ID NO: 1324417 - RNA, 19 nt, Homo sapiens
  misc_RNA (1)...(19): siRNA sense strand
ggacgaggacgugcuguuc

SEQ ID NO: 1324418 - RNA, 19 nt, Homo sapiens
  misc_RNA (1)...(19): siRNA sense strand
ccaacgcgcucuccuucuc

SEQ ID NO: 1324419 - RNA, 19 nt, Homo sapiens
  misc_RNA (1)...(19): siRNA sense strand
gacgaggacgugcuguuca

SEQ ID NO: 1324420 - RNA, 19 nt, Homo sapiens
  misc_RNA (1)...(19): siRNA sense strand
cagcuucucugaggcuucu

SEQ ID NO: 1324421 - RNA, 19 nt, Homo sapiens
  misc_RNA (1)...(19): siRNA sense strand
aagaugagcugcuggagaa

SEQ ID NO: 1324422 - RNA, 19 nt, Homo sapiens
  misc_RNA (1)...(19): siRNA sense strand
gaagaagucauaggucguu

SEQ ID NO: 1324423 - RNA, 19 nt, Homo sapiens
  misc_RNA (1)...(19): siRNA sense strand
ccagcuagaagaagucaua

SEQ ID NO: 1324424 - RNA, 19 nt, Homo sapiens
  misc_RNA (1)...(19): siRNA sense strand
caacucagcccagagaaga

SEQ ID NO: 1324425 - RNA, 19 nt, Homo sapiens
  misc_RNA (1)...(19): siRNA sense strand
gaggaagucccaccaggaa

SEQ ID NO: 1324426 - RNA, 19 nt, Homo sapiens
  misc_RNA (1)...(19): siRNA sense strand
ggaagucccaccaggaaug

SEQ ID NO: 1324427 - RNA, 19 nt, Homo sapiens
  misc_RNA (1)...(19): siRNA sense strand
agaaaugcauccaguccuu

SEQ ID NO: 1324428 - RNA, 19 nt, Homo sapiens
  misc_RNA (1)...(19): siRNA sense strand
gaaaagacaguaagaggaa

SEQ ID NO: 1324429 - RNA, 19 nt, Homo sapiens
  misc_RNA (1)...(19): siRNA sense strand
ugagacggcugcagaucug

SEQ ID NO: 1324430 - RNA, 19 nt, Homo sapiens
  misc_RNA (1)...(19): siRNA sense strand
gcuagaagaagucauaggu

SEQ ID NO: 1324431 - RNA, 19 nt, Homo sapiens
  misc_RNA (1)...(19): siRNA sense strand
ggaaaucagcaaggucaug

SEQ ID NO: 1324432 - RNA, 19 nt, Homo sapiens
  misc_RNA (1)...(19): siRNA sense strand
gcaccaggauccccagcua

SEQ ID NO: 1324433 - RNA, 19 nt, Homo sapiens
  misc_RNA (1)...(19): siRNA sense strand
gaagucauaggucguuucu

SEQ ID NO: 1324434 - RNA, 19 nt, Homo sapiens
  misc_RNA (1)...(19): siRNA sense strand
gaacagaaaagacaguaag

SEQ ID NO: 1324435 - RNA, 19 nt, Homo sapiens
  misc_RNA (1)...(19): siRNA sense strand
gagaagacugggagacucu

SEQ ID NO: 1324436 - RNA, 19 nt, Homo sapiens
  misc_RNA (1)...(19): siRNA sense strand
gaaccugggccugcugagu

SEQ ID NO: 1324437 - RNA, 19 nt, Homo sapiens
  misc_RNA (1)...(19): siRNA sense strand
gcaacucagcccagagaag

SEQ ID NO: 1324438 - RNA, 19 nt, Homo sapiens
  misc_RNA (1)...(19): siRNA sense strand
cauccaguccuucgauuca

SEQ ID NO: 1324439 - RNA, 19 nt, Homo sapiens
  misc_RNA (1)...(19): siRNA sense strand
gaugagcugcuggagaaau

SEQ ID NO: 1324440 - RNA, 19 nt, Homo sapiens
  misc_RNA (1)...(19): siRNA sense strand
gaggaccacaugcucaaca

SEQ ID NO: 1324441 - RNA, 19 nt, Homo sapiens
  misc_RNA (1)...(19): siRNA sense strand
gcauccaguccuucgauuc

SEQ ID NO: 1324442 - RNA, 19 nt, Homo sapiens
  misc_RNA (1)...(19): siRNA sense strand
ggacacccaggagcugaga

SEQ ID NO: 1324443 - RNA, 19 nt, Homo sapiens
  misc_RNA (1)...(19): siRNA sense strand
aagaugagcugcuggagaa

SEQ ID NO: 1324444 - RNA, 19 nt, Homo sapiens
  misc_RNA (1)...(19): siRNA sense strand
gacgagaucuaugagcuuu

SEQ ID NO: 1324445 - RNA, 19 nt, Homo sapiens
  misc_RNA (1)...(19): siRNA sense strand
gaagguagaauguaagaag

SEQ ID NO: 1324446 - RNA, 19 nt, Homo sapiens
  misc_RNA (1)...(19): siRNA sense strand
gagcgacucucgggcaauu

SEQ ID NO: 1324447 - RNA, 19 nt, Homo sapiens
  misc_RNA (1)...(19): siRNA sense strand
ucuaugagcuuucuuaugc

SEQ ID NO: 1324448 - RNA, 19 nt, Homo sapiens
  misc_RNA (1)...(19): siRNA sense strand
agucuguguucaagaauua

SEQ ID NO: 1324449 - RNA, 19 nt, Homo sapiens
  misc_RNA (1)...(19): siRNA sense strand
caagaauuaugacccugaa

SEQ ID NO: 1324450 - RNA, 19 nt, Homo sapiens
  misc_RNA (1)...(19): siRNA sense strand
gaagaagucauaggucguu

SEQ ID NO: 1324451 - RNA, 19 nt, Homo sapiens
  misc_RNA (1)...(19): siRNA sense strand
gagaccaggugaagguaga

SEQ ID NO: 1324452 - RNA, 19 nt, Homo sapiens
  misc_RNA (1)...(19): siRNA sense strand
uccaccagcugcagaauuu

SEQ ID NO: 1324453 - RNA, 19 nt, Homo sapiens
  misc_RNA (1)...(19): siRNA sense strand
ccagcuagaagaagucaua

SEQ ID NO: 1324454 - RNA, 19 nt, Homo sapiens
  misc_RNA (1)...(19): siRNA sense strand
caacucagcccagagaaga

SEQ ID NO: 1324455 - RNA, 19 nt, Homo sapiens
  misc_RNA (1)...(19): siRNA sense strand
ggaagucccaccaggaaug

SEQ ID NO: 1324456 - RNA, 19 nt, Homo sapiens
  misc_RNA (1)...(19): siRNA sense strand
gcagagaccaggugaaggu

SEQ ID NO: 1324457 - RNA, 19 nt, Homo sapiens
  misc_RNA (1)...(19): siRNA sense strand
gaggaagucccaccaggaa

SEQ ID NO: 1324458 - RNA, 19 nt, Homo sapiens
  misc_RNA (1)...(19): siRNA sense strand
agaaaugcauccaguccuu

SEQ ID NO: 1324459 - RNA, 19 nt, Homo sapiens
  misc_RNA (1)...(19): siRNA sense strand
gaaaagacaguaagaggaa

SEQ ID NO: 1324460 - RNA, 19 nt, Homo sapiens
  misc_RNA (1)...(19): siRNA sense strand
cacaggugcuggacaaguu

SEQ ID NO: 1324461 - RNA, 19 nt, Homo sapiens
  misc_RNA (1)...(19): siRNA sense strand
gagucuguguucaagaauu

SEQ ID NO: 1324462 - RNA, 19 nt, Homo sapiens
  misc_RNA (1)...(19): siRNA sense strand
gagccgcguugucccaaga

SEQ ID NO: 1324463 - RNA, 19 nt, Homo sapiens
  misc_RNA (1)...(19): siRNA sense strand
cggaagacgagaucuauga

SEQ ID NO: 1324464 - RNA, 19 nt, Homo sapiens
  misc_RNA (1)...(19): siRNA sense strand
uggagucuguguucaagaa

SEQ ID NO: 1324465 - RNA, 19 nt, Homo sapiens
  misc_RNA (1)...(19): siRNA sense strand
ugagacggcugcagaucug

SEQ ID NO: 1324466 - RNA, 19 nt, Homo sapiens
  misc_RNA (1)...(19): siRNA sense strand
gcuagaagaagucauaggu

SEQ ID NO: 1324467 - RNA, 19 nt, Homo sapiens
  misc_RNA (1)...(19): siRNA sense strand
gaucuaugagcuuucuuau

SEQ ID NO: 1324468 - RNA, 19 nt, Homo sapiens
  misc_RNA (1)...(19): siRNA sense strand
aggugaagguagaauguaa

SEQ ID NO: 1324469 - RNA, 19 nt, Homo sapiens
  misc_RNA (1)...(19): siRNA sense strand
gaggauccuucagcagaga

SEQ ID NO: 1324470 - RNA, 19 nt, Homo sapiens
  misc_RNA (1)...(19): siRNA sense strand
ggaaaucagcaaggucaug

SEQ ID NO: 1324471 - RNA, 19 nt, Homo sapiens
  misc_RNA (1)...(19): siRNA sense strand
gcaccaggauccccagcua

SEQ ID NO: 1324472 - RNA, 19 nt, Homo sapiens
  misc_RNA (1)...(19): siRNA sense strand
aagguagaauguaagaaga

SEQ ID NO: 1324473 - RNA, 19 nt, Homo sapiens
  misc_RNA (1)...(19): siRNA sense strand
gaagucauaggucguuucu

SEQ ID NO: 1324474 - RNA, 19 nt, Homo sapiens
  misc_RNA (1)...(19): siRNA sense strand
gaaggccgaggaacaaucu

SEQ ID NO: 1324475 - RNA, 19 nt, Homo sapiens
  misc_RNA (1)...(19): siRNA sense strand
gaccugcggagcuacguuu

SEQ ID NO: 1324476 - RNA, 19 nt, Homo sapiens
  misc_RNA (1)...(19): siRNA sense strand
cgagaucuaugagcuuucu

SEQ ID NO: 1324477 - RNA, 19 nt, Homo sapiens
  misc_RNA (1)...(19): siRNA sense strand
agaucuaugagcuuucuua

SEQ ID NO: 1324478 - RNA, 19 nt, Homo sapiens
  misc_RNA (1)...(19): siRNA sense strand
gguggagucuguguucaag

SEQ ID NO: 1324479 - RNA, 19 nt, Homo sapiens
  misc_RNA (1)...(19): siRNA sense strand
gagaagacugggagacucu

SEQ ID NO: 1324480 - RNA, 19 nt, Homo sapiens
  misc_RNA (1)...(19): siRNA sense strand
gaacagaaaagacaguaag

SEQ ID NO: 1324481 - RNA, 19 nt, Homo sapiens
  misc_RNA (1)...(19): siRNA sense strand
acacggaagacgagaucua

SEQ ID NO: 1324482 - RNA, 19 nt, Homo sapiens
  misc_RNA (1)...(19): siRNA sense strand
gcaacucagcccagagaag

SEQ ID NO: 1324483 - RNA, 19 nt, Homo sapiens
  misc_RNA (1)...(19): siRNA sense strand
gugaagguagaauguaaga

SEQ ID NO: 1324484 - RNA, 19 nt, Homo sapiens
  misc_RNA (1)...(19): siRNA sense strand
cauccaguccuucgauuca

SEQ ID NO: 1324485 - RNA, 19 nt, Homo sapiens
  misc_RNA (1)...(19): siRNA sense strand
ggaagacgagaucuaugag

SEQ ID NO: 1324486 - RNA, 19 nt, Homo sapiens
  misc_RNA (1)...(19): siRNA sense strand
gaaccugggccugcugagu

SEQ ID NO: 1324487 - RNA, 19 nt, Homo sapiens
  misc_RNA (1)...(19): siRNA sense strand
aggcacagcccgacagguu

SEQ ID NO: 1324488 - RNA, 19 nt, Homo sapiens
  misc_RNA (1)...(19): siRNA sense strand
gaugagcugcuggagaaau

SEQ ID NO: 1324489 - RNA, 19 nt, Homo sapiens
  misc_RNA (1)...(19): siRNA sense strand
ccaggugaagguagaaugu

SEQ ID NO: 1324490 - RNA, 19 nt, Homo sapiens
  misc_RNA (1)...(19): siRNA sense strand
uacccaagcugaacaaccu

SEQ ID NO: 1324491 - RNA, 19 nt, Homo sapiens
  misc_RNA (1)...(19): siRNA sense strand
gaggaccacaugcucaaca

SEQ ID NO: 1324492 - RNA, 19 nt, Homo sapiens
  misc_RNA (1)...(19): siRNA sense strand
uggcucagcaccucaccua

SEQ ID NO: 1324493 - RNA, 19 nt, Homo sapiens
  misc_RNA (1)...(19): siRNA sense strand
gacccaccaucaacugcau

SEQ ID NO: 1324494 - RNA, 19 nt, Homo sapiens
  misc_RNA (1)...(19): siRNA sense strand
gcauccaguccuucgauuc

SEQ ID NO: 1324495 - RNA, 19 nt, Homo sapiens
  misc_RNA (1)...(19): siRNA sense strand
gcugguggagucuguguuc

SEQ ID NO: 1324496 - RNA, 19 nt, Homo sapiens
  misc_RNA (1)...(19): siRNA sense strand
gaauuucaacacgcugaug

SEQ ID NO: 1324497 - RNA, 19 nt, Homo sapiens
  misc_RNA (1)...(19): siRNA sense strand
ggacacccaggagcugaga

SEQ ID NO: 1324498 - RNA, 19 nt, Homo sapiens
  misc_RNA (1)...(19): siRNA sense strand
aaucacuccuacacgcuau

SEQ ID NO: 1324499 - RNA, 19 nt, Homo sapiens
  misc_RNA (1)...(19): siRNA sense strand
caggugaagguagaaugua

SEQ ID NO: 1324500 - RNA, 19 nt, Homo sapiens
  misc_RNA (1)...(19): siRNA sense strand
aagaugagcugcuggagaa

SEQ ID NO: 1324501 - RNA, 19 nt, Homo sapiens
  misc_RNA (1)...(19): siRNA sense strand
gacgagaucuaugagcuuu

SEQ ID NO: 1324502 - RNA, 19 nt, Homo sapiens
  misc_RNA (1)...(19): siRNA sense strand
gaagguagaauguaagaag

SEQ ID NO: 1324503 - RNA, 19 nt, Homo sapiens
  misc_RNA (1)...(19): siRNA sense strand
gagcgacucucgggcaauu

SEQ ID NO: 1324504 - RNA, 19 nt, Homo sapiens
  misc_RNA (1)...(19): siRNA sense strand
ucuaugagcuuucuuaugc

SEQ ID NO: 1324505 - RNA, 19 nt, Homo sapiens
  misc_RNA (1)...(19): siRNA sense strand
agucuguguucaagaauua

SEQ ID NO: 1324506 - RNA, 19 nt, Homo sapiens
  misc_RNA (1)...(19): siRNA sense strand
caagaauuaugacccugaa

SEQ ID NO: 1324507 - RNA, 19 nt, Homo sapiens
  misc_RNA (1)...(19): siRNA sense strand
gaagaagucauaggucguu

SEQ ID NO: 1324508 - RNA, 19 nt, Homo sapiens
  misc_RNA (1)...(19): siRNA sense strand
gagaccaggugaagguaga

SEQ ID NO: 1324509 - RNA, 19 nt, Homo sapiens
  misc_RNA (1)...(19): siRNA sense strand
uccaccagcugcagaauuu

SEQ ID NO: 1324510 - RNA, 19 nt, Homo sapiens
  misc_RNA (1)...(19): siRNA sense strand
ccagcuagaagaagucaua

SEQ ID NO: 1324511 - RNA, 19 nt, Homo sapiens
  misc_RNA (1)...(19): siRNA sense strand
caacucagcccagagaaga

SEQ ID NO: 1324512 - RNA, 19 nt, Homo sapiens
  misc_RNA (1)...(19): siRNA sense strand
ggaagucccaccaggaaug

SEQ ID NO: 1324513 - RNA, 19 nt, Homo sapiens
  misc_RNA (1)...(19): siRNA sense strand
gcagagaccaggugaaggu

SEQ ID NO: 1324514 - RNA, 19 nt, Homo sapiens
  misc_RNA (1)...(19): siRNA sense strand
gaggaagucccaccaggaa

SEQ ID NO: 1324515 - RNA, 19 nt, Homo sapiens
  misc_RNA (1)...(19): siRNA sense strand
agaaaugcauccaguccuu

SEQ ID NO: 1324516 - RNA, 19 nt, Homo sapiens
  misc_RNA (1)...(19): siRNA sense strand
gaaaagacaguaagaggaa

SEQ ID NO: 1324517 - RNA, 19 nt, Homo sapiens
  misc_RNA (1)...(19): siRNA sense strand
cacaggugcuggacaaguu

SEQ ID NO: 1324518 - RNA, 19 nt, Homo sapiens
  misc_RNA (1)...(19): siRNA sense strand
gagucuguguucaagaauu

SEQ ID NO: 1324519 - RNA, 19 nt, Homo sapiens
  misc_RNA (1)...(19): siRNA sense strand
gagccgcguugucccaaga

SEQ ID NO: 1324520 - RNA, 19 nt, Homo sapiens
  misc_RNA (1)...(19): siRNA sense strand
cggaagacgagaucuauga

SEQ ID NO: 1324521 - RNA, 19 nt, Homo sapiens
  misc_RNA (1)...(19): siRNA sense strand
uggagucuguguucaagaa

SEQ ID NO: 1324522 - RNA, 19 nt, Homo sapiens
  misc_RNA (1)...(19): siRNA sense strand
ugagacggcugcagaucug

SEQ ID NO: 1324523 - RNA, 19 nt, Homo sapiens
  misc_RNA (1)...(19): siRNA sense strand
gcuagaagaagucauaggu

SEQ ID NO: 1324524 - RNA, 19 nt, Homo sapiens
  misc_RNA (1)...(19): siRNA sense strand
gaucuaugagcuuucuuau

SEQ ID NO: 1324525 - RNA, 19 nt, Homo sapiens
  misc_RNA (1)...(19): siRNA sense strand
aggugaagguagaauguaa

SEQ ID NO: 1324526 - RNA, 19 nt, Homo sapiens
  misc_RNA (1)...(19): siRNA sense strand
gaggauccuucagcagaga

SEQ ID NO: 1324527 - RNA, 19 nt, Homo sapiens
  misc_RNA (1)...(19): siRNA sense strand
ggaaaucagcaaggucaug

SEQ ID NO: 1324528 - RNA, 19 nt, Homo sapiens
  misc_RNA (1)...(19): siRNA sense strand
gcaccaggauccccagcua

SEQ ID NO: 1324529 - RNA, 19 nt, Homo sapiens
  misc_RNA (1)...(19): siRNA sense strand
aagguagaauguaagaaga

SEQ ID NO: 1324530 - RNA, 19 nt, Homo sapiens
  misc_RNA (1)...(19): siRNA sense strand
gaagucauaggucguuucu

SEQ ID NO: 1324531 - RNA, 19 nt, Homo sapiens
  misc_RNA (1)...(19): siRNA sense strand
gaaggccgaggaacaaucu

SEQ ID NO: 1324532 - RNA, 19 nt, Homo sapiens
  misc_RNA (1)...(19): siRNA sense strand
gaccugcggagcuacguuu

SEQ ID NO: 1324533 - RNA, 19 nt, Homo sapiens
  misc_RNA (1)...(19): siRNA sense strand
cgagaucuaugagcuuucu

SEQ ID NO: 1324534 - RNA, 19 nt, Homo sapiens
  misc_RNA (1)...(19): siRNA sense strand
agaucuaugagcuuucuua

SEQ ID NO: 1324535 - RNA, 19 nt, Homo sapiens
  misc_RNA (1)...(19): siRNA sense strand
gguggagucuguguucaag

SEQ ID NO: 1324536 - RNA, 19 nt, Homo sapiens
  misc_RNA (1)...(19): siRNA sense strand
gagaagacugggagacucu

SEQ ID NO: 1324537 - RNA, 19 nt, Homo sapiens
  misc_RNA (1)...(19): siRNA sense strand
gaacagaaaagacaguaag

SEQ ID NO: 1324538 - RNA, 19 nt, Homo sapiens
  misc_RNA (1)...(19): siRNA sense strand
acacggaagacgagaucua

SEQ ID NO: 1324539 - RNA, 19 nt, Homo sapiens
  misc_RNA (1)...(19): siRNA sense strand
gcaacucagcccagagaag

SEQ ID NO: 1324540 - RNA, 19 nt, Homo sapiens
  misc_RNA (1)...(19): siRNA sense strand
gugaagguagaauguaaga

SEQ ID NO: 1324541 - RNA, 19 nt, Homo sapiens
  misc_RNA (1)...(19): siRNA sense strand
cauccaguccuucgauuca

SEQ ID NO: 1324542 - RNA, 19 nt, Homo sapiens
  misc_RNA (1)...(19): siRNA sense strand
ggaagacgagaucuaugag

SEQ ID NO: 1324543 - RNA, 19 nt, Homo sapiens
  misc_RNA (1)...(19): siRNA sense strand
gaaccugggccugcugagu

SEQ ID NO: 1324544 - RNA, 19 nt, Homo sapiens
  misc_RNA (1)...(19): siRNA sense strand
aggcacagcccgacagguu

SEQ ID NO: 1324545 - RNA, 19 nt, Homo sapiens
  misc_RNA (1)...(19): siRNA sense strand
gaugagcugcuggagaaau

SEQ ID NO: 1324546 - RNA, 19 nt, Homo sapiens
  misc_RNA (1)...(19): siRNA sense strand
ccaggugaagguagaaugu

SEQ ID NO: 1324547 - RNA, 19 nt, Homo sapiens
  misc_RNA (1)...(19): siRNA sense strand
uacccaagcugaacaaccu

SEQ ID NO: 1324548 - RNA, 19 nt, Homo sapiens
  misc_RNA (1)...(19): siRNA sense strand
gaggaccacaugcucaaca

SEQ ID NO: 1324549 - RNA, 19 nt, Homo sapiens
  misc_RNA (1)...(19): siRNA sense strand
uggcucagcaccucaccua

SEQ ID NO: 1324550 - RNA, 19 nt, Homo sapiens
  misc_RNA (1)...(19): siRNA sense strand
gacccaccaucaacugcau

SEQ ID NO: 1324551 - RNA, 19 nt, Homo sapiens
  misc_RNA (1)...(19): siRNA sense strand
gcauccaguccuucgauuc

SEQ ID NO: 1324552 - RNA, 19 nt, Homo sapiens
  misc_RNA (1)...(19): siRNA sense strand
gcugguggagucuguguuc

SEQ ID NO: 1324553 - RNA, 19 nt, Homo sapiens
  misc_RNA (1)...(19): siRNA sense strand
gaauuucaacacgcugaug

SEQ ID NO: 1324554 - RNA, 19 nt, Homo sapiens
  misc_RNA (1)...(19): siRNA sense strand
ggacacccaggagcugaga

SEQ ID NO: 1324555 - RNA, 19 nt, Homo sapiens
  misc_RNA (1)...(19): siRNA sense strand
aaucacuccuacacgcuau

SEQ ID NO: 1324556 - RNA, 19 nt, Homo sapiens
  misc_RNA (1)...(19): siRNA sense strand
caggugaagguagaaugua

SEQ ID NO: 1324557 - RNA, 19 nt, Homo sapiens
  misc_RNA (1)...(19): siRNA sense strand
aagaugagcugcuggagaa

SEQ ID NO: 1324558 - RNA, 19 nt, Homo sapiens
  misc_RNA (1)...(19): siRNA sense strand
gacgagaucuaugagcuuu

SEQ ID NO: 1324559 - RNA, 19 nt, Homo sapiens
  misc_RNA (1)...(19): siRNA sense strand
gaagguagaauguaagaag

SEQ ID NO: 1324560 - RNA, 19 nt, Homo sapiens
  misc_RNA (1)...(19): siRNA sense strand
gagcgacucucgggcaauu

SEQ ID NO: 1324561 - RNA, 19 nt, Homo sapiens
  misc_RNA (1)...(19): siRNA sense strand
ucuaugagcuuucuuaugc

SEQ ID NO: 1324562 - RNA, 19 nt, Homo sapiens
  misc_RNA (1)...(19): siRNA sense strand
agucuguguucaagaauua

SEQ ID NO: 1324563 - RNA, 19 nt, Homo sapiens
  misc_RNA (1)...(19): siRNA sense strand
caagaauuaugacccugaa

SEQ ID NO: 1324564 - RNA, 19 nt, Homo sapiens
  misc_RNA (1)...(19): siRNA sense strand
gaagaagucauaggucguu

SEQ ID NO: 1324565 - RNA, 19 nt, Homo sapiens
  misc_RNA (1)...(19): siRNA sense strand
gagaccaggugaagguaga

SEQ ID NO: 1324566 - RNA, 19 nt, Homo sapiens
  misc_RNA (1)...(19): siRNA sense strand
uccaccagcugcagaauuu

SEQ ID NO: 1324567 - RNA, 19 nt, Homo sapiens
  misc_RNA (1)...(19): siRNA sense strand
ccagcuagaagaagucaua

SEQ ID NO: 1324568 - RNA, 19 nt, Homo sapiens
  misc_RNA (1)...(19): siRNA sense strand
caacucagcccagagaaga

SEQ ID NO: 1324569 - RNA, 19 nt, Homo sapiens
  misc_RNA (1)...(19): siRNA sense strand
ggaagucccaccaggaaug

SEQ ID NO: 1324570 - RNA, 19 nt, Homo sapiens
  misc_RNA (1)...(19): siRNA sense strand
gcagagaccaggugaaggu

SEQ ID NO: 1324571 - RNA, 19 nt, Homo sapiens
  misc_RNA (1)...(19): siRNA sense strand
gaggaagucccaccaggaa

SEQ ID NO: 1324572 - RNA, 19 nt, Homo sapiens
  misc_RNA (1)...(19): siRNA sense strand
agaaaugcauccaguccuu

SEQ ID NO: 1324573 - RNA, 19 nt, Homo sapiens
  misc_RNA (1)...(19): siRNA sense strand
gaaaagacaguaagaggaa

SEQ ID NO: 1324574 - RNA, 19 nt, Homo sapiens
  misc_RNA (1)...(19): siRNA sense strand
cacaggugcuggacaaguu

SEQ ID NO: 1324575 - RNA, 19 nt, Homo sapiens
  misc_RNA (1)...(19): siRNA sense strand
gagucuguguucaagaauu

SEQ ID NO: 1324576 - RNA, 19 nt, Homo sapiens
  misc_RNA (1)...(19): siRNA sense strand
gagccgcguugucccaaga

SEQ ID NO: 1324577 - RNA, 19 nt, Homo sapiens
  misc_RNA (1)...(19): siRNA sense strand
cggaagacgagaucuauga

SEQ ID NO: 1324578 - RNA, 19 nt, Homo sapiens
  misc_RNA (1)...(19): siRNA sense strand
uggagucuguguucaagaa

SEQ ID NO: 1324579 - RNA, 19 nt, Homo sapiens
  misc_RNA (1)...(19): siRNA sense strand
ugagacggcugcagaucug

SEQ ID NO: 1324580 - RNA, 19 nt, Homo sapiens
  misc_RNA (1)...(19): siRNA sense strand
gcuagaagaagucauaggu

SEQ ID NO: 1324581 - RNA, 19 nt, Homo sapiens
  misc_RNA (1)...(19): siRNA sense strand
gaucuaugagcuuucuuau

SEQ ID NO: 1324582 - RNA, 19 nt, Homo sapiens
  misc_RNA (1)...(19): siRNA sense strand
aggugaagguagaauguaa

SEQ ID NO: 1324583 - RNA, 19 nt, Homo sapiens
  misc_RNA (1)...(19): siRNA sense strand
gaggauccuucagcagaga

SEQ ID NO: 1324584 - RNA, 19 nt, Homo sapiens
  misc_RNA (1)...(19): siRNA sense strand
ggaaaucagcaaggucaug

SEQ ID NO: 1324585 - RNA, 19 nt, Homo sapiens
  misc_RNA (1)...(19): siRNA sense strand
gcaccaggauccccagcua

SEQ ID NO: 1324586 - RNA, 19 nt, Homo sapiens
  misc_RNA (1)...(19): siRNA sense strand
aagguagaauguaagaaga

SEQ ID NO: 1324587 - RNA, 19 nt, Homo sapiens
  misc_RNA (1)...(19): siRNA sense strand
gaagucauaggucguuucu

SEQ ID NO: 1324588 - RNA, 19 nt, Homo sapiens
  misc_RNA (1)...(19): siRNA sense strand
gaaggccgaggaacaaucu

SEQ ID NO: 1324589 - RNA, 19 nt, Homo sapiens
  misc_RNA (1)...(19): siRNA sense strand
gaccugcggagcuacguuu

SEQ ID NO: 1324590 - RNA, 19 nt, Homo sapiens
  misc_RNA (1)...(19): siRNA sense strand
cgagaucuaugagcuuucu

SEQ ID NO: 1324591 - RNA, 19 nt, Homo sapiens
  misc_RNA (1)...(19): siRNA sense strand
agaucuaugagcuuucuua

SEQ ID NO: 1324592 - RNA, 19 nt, Homo sapiens
  misc_RNA (1)...(19): siRNA sense strand
gguggagucuguguucaag

SEQ ID NO: 1324593 - RNA, 19 nt, Homo sapiens
  misc_RNA (1)...(19): siRNA sense strand
gagaagacugggagacucu

SEQ ID NO: 1324594 - RNA, 19 nt, Homo sapiens
  misc_RNA (1)...(19): siRNA sense strand
gaacagaaaagacaguaag

SEQ ID NO: 1324595 - RNA, 19 nt, Homo sapiens
  misc_RNA (1)...(19): siRNA sense strand
acacggaagacgagaucua

SEQ ID NO: 1324596 - RNA, 19 nt, Homo sapiens
  misc_RNA (1)...(19): siRNA sense strand
gcaacucagcccagagaag

SEQ ID NO: 1324597 - RNA, 19 nt, Homo sapiens
  misc_RNA (1)...(19): siRNA sense strand
gugaagguagaauguaaga

SEQ ID NO: 1324598 - RNA, 19 nt, Homo sapiens
  misc_RNA (1)...(19): siRNA sense strand
cauccaguccuucgauuca

SEQ ID NO: 1324599 - RNA, 19 nt, Homo sapiens
  misc_RNA (1)...(19): siRNA sense strand
ggaagacgagaucuaugag

SEQ ID NO: 1324600 - RNA, 19 nt, Homo sapiens
  misc_RNA (1)...(19): siRNA sense strand
gaaccugggccugcugagu

SEQ ID NO: 1324601 - RNA, 19 nt, Homo sapiens
  misc_RNA (1)...(19): siRNA sense strand
aggcacagcccgacagguu

SEQ ID NO: 1324602 - RNA, 19 nt, Homo sapiens
  misc_RNA (1)...(19): siRNA sense strand
gaugagcugcuggagaaau

SEQ ID NO: 1324603 - RNA, 19 nt, Homo sapiens
  misc_RNA (1)...(19): siRNA sense strand
ccaggugaagguagaaugu

SEQ ID NO: 1324604 - RNA, 19 nt, Homo sapiens
  misc_RNA (1)...(19): siRNA sense strand
uacccaagcugaacaaccu

SEQ ID NO: 1324605 - RNA, 19 nt, Homo sapiens
  misc_RNA (1)...(19): siRNA sense strand
gaggaccacaugcucaaca

SEQ ID NO: 1324606 - RNA, 19 nt, Homo sapiens
  misc_RNA (1)...(19): siRNA sense strand
uggcucagcaccucaccua

SEQ ID NO: 1324607 - RNA, 19 nt, Homo sapiens
  misc_RNA (1)...(19): siRNA sense strand
gacccaccaucaacugcau

SEQ ID NO: 1324608 - RNA, 19 nt, Homo sapiens
  misc_RNA (1)...(19): siRNA sense strand
gcauccaguccuucgauuc

SEQ ID NO: 1324609 - RNA, 19 nt, Homo sapiens
  misc_RNA (1)...(19): siRNA sense strand
gcugguggagucuguguuc

SEQ ID NO: 1324610 - RNA, 19 nt, Homo sapiens
  misc_RNA (1)...(19): siRNA sense strand
gaauuucaacacgcugaug

SEQ ID NO: 1324611 - RNA, 19 nt, Homo sapiens
  misc_RNA (1)...(19): siRNA sense strand
ggacacccaggagcugaga

SEQ ID NO: 1324612 - RNA, 19 nt, Homo sapiens
  misc_RNA (1)...(19): siRNA sense strand
aaucacuccuacacgcuau

SEQ ID NO: 1324613 - RNA, 19 nt, Homo sapiens
  misc_RNA (1)...(19): siRNA sense strand
caggugaagguagaaugua

SEQ ID NO: 1324614 - RNA, 19 nt, Homo sapiens
  misc_RNA (1)...(19): siRNA sense strand
ggaaauggaugaagaaaga

SEQ ID NO: 1324615 - RNA, 19 nt, Homo sapiens
  misc_RNA (1)...(19): siRNA sense strand
gaagcagucuccuuucuua

SEQ ID NO: 1324616 - RNA, 19 nt, Homo sapiens
  misc_RNA (1)...(19): siRNA sense strand
gaucaaauauuggccauua

SEQ ID NO: 1324617 - RNA, 19 nt, Homo sapiens
  misc_RNA (1)...(19): siRNA sense strand
gagaggagcuuaaagguau

SEQ ID NO: 1324618 - RNA, 19 nt, Homo sapiens
  misc_RNA (1)...(19): siRNA sense strand
agacagggaucaaagauua

SEQ ID NO: 1324619 - RNA, 19 nt, Homo sapiens
  misc_RNA (1)...(19): siRNA sense strand
gagaagaaacuccaaauuu

SEQ ID NO: 1324620 - RNA, 19 nt, Homo sapiens
  misc_RNA (1)...(19): siRNA sense strand
gaggagaacuuggagauuu

SEQ ID NO: 1324621 - RNA, 19 nt, Homo sapiens
  misc_RNA (1)...(19): siRNA sense strand
caagauuguugaacuagua

SEQ ID NO: 1324622 - RNA, 19 nt, Homo sapiens
  misc_RNA (1)...(19): siRNA sense strand
cagaggaacuguuguagaa

SEQ ID NO: 1324623 - RNA, 19 nt, Homo sapiens
  misc_RNA (1)...(19): siRNA sense strand
gguccuagcuugcucauug

SEQ ID NO: 1324624 - RNA, 19 nt, Homo sapiens
  misc_RNA (1)...(19): siRNA sense strand
gcaugcagcuuuauggaaa

SEQ ID NO: 1324625 - RNA, 19 nt, Homo sapiens
  misc_RNA (1)...(19): siRNA sense strand
aagaagaacuuguggauga

SEQ ID NO: 1324626 - RNA, 19 nt, Homo sapiens
  misc_RNA (1)...(19): siRNA sense strand
ggaagauaaugaagaagaa

SEQ ID NO: 1324627 - RNA, 19 nt, Homo sapiens
  misc_RNA (1)...(19): siRNA sense strand
gaaccaaggcgcacugaaa

SEQ ID NO: 1324628 - RNA, 19 nt, Homo sapiens
  misc_RNA (1)...(19): siRNA sense strand
uauuggagaugaacucuua

SEQ ID NO: 1324629 - RNA, 19 nt, Homo sapiens
  misc_RNA (1)...(19): siRNA sense strand
ucuaauaacucgacuguau

SEQ ID NO: 1324630 - RNA, 19 nt, Homo sapiens
  misc_RNA (1)...(19): siRNA sense strand
acacacagauugcagauga

SEQ ID NO: 1324631 - RNA, 19 nt, Homo sapiens
  misc_RNA (1)...(19): siRNA sense strand
gacaggaaaugauuauaga

SEQ ID NO: 1324632 - RNA, 19 nt, Homo sapiens
  misc_RNA (1)...(19): siRNA sense strand
ggaaagguuuguuaguguu

SEQ ID NO: 1324633 - RNA, 19 nt, Homo sapiens
  misc_RNA (1)...(19): siRNA sense strand
ucaauggcaugcagcuuua

SEQ ID NO: 1324634 - RNA, 19 nt, Homo sapiens
  misc_RNA (1)...(19): siRNA sense strand
gggcagagucuuggaauua

SEQ ID NO: 1324635 - RNA, 19 nt, Homo sapiens
  misc_RNA (1)...(19): siRNA sense strand
ggagggagcaagaagauuu

SEQ ID NO: 1324636 - RNA, 19 nt, Homo sapiens
  misc_RNA (1)...(19): siRNA sense strand
acacagugguugcaugaua

SEQ ID NO: 1324637 - RNA, 19 nt, Homo sapiens
  misc_RNA (1)...(19): siRNA sense strand
caacauacaagccuuagaa

SEQ ID NO: 1324638 - RNA, 19 nt, Homo sapiens
  misc_RNA (1)...(19): siRNA sense strand
gcacauuauugaacuugaa

SEQ ID NO: 1324639 - RNA, 19 nt, Homo sapiens
  misc_RNA (1)...(19): siRNA sense strand
gaaacuuccuccuccuuau

SEQ ID NO: 1324640 - RNA, 19 nt, Homo sapiens
  misc_RNA (1)...(19): siRNA sense strand
gguggaagauaaugaagaa

SEQ ID NO: 1324641 - RNA, 19 nt, Homo sapiens
  misc_RNA (1)...(19): siRNA sense strand
caagaagauuugccuuuau

SEQ ID NO: 1324642 - RNA, 19 nt, Homo sapiens
  misc_RNA (1)...(19): siRNA sense strand
gacuguaucuggguuauuu

SEQ ID NO: 1324643 - RNA, 19 nt, Homo sapiens
  misc_RNA (1)...(19): siRNA sense strand
auaaagcucugacugauga

SEQ ID NO: 1324644 - RNA, 19 nt, Homo sapiens
  misc_RNA (1)...(19): siRNA sense strand
gaaguggauuccuuugaug

SEQ ID NO: 1324645 - RNA, 19 nt, Homo sapiens
  misc_RNA (1)...(19): siRNA sense strand
gaaaccaccagcucucuuu

SEQ ID NO: 1324646 - RNA, 19 nt, Homo sapiens
  misc_RNA (1)...(19): siRNA sense strand
gaacauuucccaucagcaa

SEQ ID NO: 1324647 - RNA, 19 nt, Homo sapiens
  misc_RNA (1)...(19): siRNA sense strand
agacagagguugaccacaa

SEQ ID NO: 1324648 - RNA, 19 nt, Homo sapiens
  misc_RNA (1)...(19): siRNA sense strand
guugggaaaugaagacuuu

SEQ ID NO: 1324649 - RNA, 19 nt, Homo sapiens
  misc_RNA (1)...(19): siRNA sense strand
ggagaggagcuuaaaggua

SEQ ID NO: 1324650 - RNA, 19 nt, Homo sapiens
  misc_RNA (1)...(19): siRNA sense strand
ugaugaagcuucuguagau

SEQ ID NO: 1324651 - RNA, 19 nt, Homo sapiens
  misc_RNA (1)...(19): siRNA sense strand
gcaauugcauuauuacaac

SEQ ID NO: 1324652 - RNA, 19 nt, Homo sapiens
  misc_RNA (1)...(19): siRNA sense strand
ggagguuguuugaugauga

SEQ ID NO: 1324653 - RNA, 19 nt, Homo sapiens
  misc_RNA (1)...(19): siRNA sense strand
cuaaggaacugugggaauu

SEQ ID NO: 1324654 - RNA, 19 nt, Homo sapiens
  misc_RNA (1)...(19): siRNA sense strand
ggaauguugucuucuagau

SEQ ID NO: 1324655 - RNA, 19 nt, Homo sapiens
  misc_RNA (1)...(19): siRNA sense strand
gaagagguugagcucauua

SEQ ID NO: 1324656 - RNA, 19 nt, Homo sapiens
  misc_RNA (1)...(19): siRNA sense strand
ggacaggaaaugauuauag

SEQ ID NO: 1324657 - RNA, 19 nt, Homo sapiens
  misc_RNA (1)...(19): siRNA sense strand
cgucgaaguugguauuaaa

SEQ ID NO: 1324658 - RNA, 19 nt, Homo sapiens
  misc_RNA (1)...(19): siRNA sense strand
gcaccgaaccuauuaguag

SEQ ID NO: 1324659 - RNA, 19 nt, Homo sapiens
  misc_RNA (1)...(19): siRNA sense strand
ggagaugcaugaauuucug

SEQ ID NO: 1324660 - RNA, 19 nt, Homo sapiens
  misc_RNA (1)...(19): siRNA sense strand
gaugaaccauuucuagauc

SEQ ID NO: 1324661 - RNA, 19 nt, Homo sapiens
  misc_RNA (1)...(19): siRNA sense strand
gguuugggauucagcauuu

SEQ ID NO: 1324662 - RNA, 19 nt, Homo sapiens
  misc_RNA (1)...(19): siRNA sense strand
caaagcugcugccuauuca

SEQ ID NO: 1324663 - RNA, 19 nt, Homo sapiens
  misc_RNA (1)...(19): siRNA sense strand
gaagauugguggcacaaac

SEQ ID NO: 1324664 - RNA, 19 nt, Homo sapiens
  misc_RNA (1)...(19): siRNA sense strand
aaacgaggaugcagucaau

SEQ ID NO: 1324665 - RNA, 19 nt, Homo sapiens
  misc_RNA (1)...(19): siRNA sense strand
gaagacgaacgcacuuaaa

SEQ ID NO: 1324666 - RNA, 19 nt, Homo sapiens
  misc_RNA (1)...(19): siRNA sense strand
ggaagacgaacgcacuuaa

SEQ ID NO: 1324667 - RNA, 19 nt, Homo sapiens
  misc_RNA (1)...(19): siRNA sense strand
caggaacaauucaugauau

SEQ ID NO: 1324668 - RNA, 19 nt, Homo sapiens
  misc_RNA (1)...(19): siRNA sense strand
aaagaccgaucacgcauga

SEQ ID NO: 1324669 - RNA, 19 nt, Homo sapiens
  misc_RNA (1)...(19): siRNA sense strand
ggagaacugcacauuauug

SEQ ID NO: 1324670 - RNA, 19 nt, Homo sapiens
  misc_RNA (1)...(19): siRNA sense strand
guugaaguauuacgaaaug

SEQ ID NO: 1324671 - RNA, 19 nt, Homo sapiens
  misc_RNA (1)...(19): siRNA sense strand
ggaguagauuugcagaaug

SEQ ID NO: 1324672 - RNA, 19 nt, Homo sapiens
  misc_RNA (1)...(19): siRNA sense strand
gaaggaaacagucaacaag

SEQ ID NO: 1324673 - RNA, 19 nt, Homo sapiens
  misc_RNA (1)...(19): siRNA sense strand
gaaaugaagacuuuaacuc

SEQ ID NO: 1324674 - RNA, 19 nt, Homo sapiens
  misc_RNA (1)...(19): siRNA sense strand
gaauguugucuucuagaua

SEQ ID NO: 1324675 - RNA, 19 nt, Homo sapiens
  misc_RNA (1)...(19): siRNA sense strand
guaaugaagacaagacuga

SEQ ID NO: 1324676 - RNA, 19 nt, Homo sapiens
  misc_RNA (1)...(19): siRNA sense strand
ggaugucaauacugaagaa

SEQ ID NO: 1324677 - RNA, 19 nt, Homo sapiens
  misc_RNA (1)...(19): siRNA sense strand
gggaaccaguccacacaaa

SEQ ID NO: 1324678 - RNA, 19 nt, Homo sapiens
  misc_RNA (1)...(19): siRNA sense strand
gaacuucacuuugguacac

SEQ ID NO: 1324679 - RNA, 19 nt, Homo sapiens
  misc_RNA (1)...(19): siRNA sense strand
ccugggagaugcaugaauu

SEQ ID NO: 1324680 - RNA, 19 nt, Homo sapiens
  misc_RNA (1)...(19): siRNA sense strand
ucuagcagccuaaaugaua

SEQ ID NO: 1324681 - RNA, 19 nt, Homo sapiens
  misc_RNA (1)...(19): siRNA sense strand
gugaagaugaggaaauuaa

SEQ ID NO: 1324682 - RNA, 19 nt, Homo sapiens
  misc_RNA (1)...(19): siRNA sense strand
gaacuccagccacgaagaa

SEQ ID NO: 1324683 - RNA, 19 nt, Homo sapiens
  misc_RNA (1)...(19): siRNA sense strand
caucauaccauucaacaga

SEQ ID NO: 1324684 - RNA, 19 nt, Homo sapiens
  misc_RNA (1)...(19): siRNA sense strand
acaauugccugaaagugaa

SEQ ID NO: 1324685 - RNA, 19 nt, Homo sapiens
  misc_RNA (1)...(19): siRNA sense strand
gcuuaaagguauauucauc

SEQ ID NO: 1324686 - RNA, 19 nt, Homo sapiens
  misc_RNA (1)...(19): siRNA sense strand
acaggaauguugucuucua

SEQ ID NO: 1324687 - RNA, 19 nt, Homo sapiens
  misc_RNA (1)...(19): siRNA sense strand
acacaggaauguugucuuc

SEQ ID NO: 1324688 - RNA, 19 nt, Homo sapiens
  misc_RNA (1)...(19): siRNA sense strand
gcagagucuuggaauuaga

SEQ ID NO: 1324689 - RNA, 19 nt, Homo sapiens
  misc_RNA (1)...(19): siRNA sense strand
gaucacgcaugagcauauu

SEQ ID NO: 1324690 - RNA, 19 nt, Homo sapiens
  misc_RNA (1)...(19): siRNA sense strand
cuggagaacugcacauuau

SEQ ID NO: 1324691 - RNA, 19 nt, Homo sapiens
  misc_RNA (1)...(19): siRNA sense strand
ugaagaagaagaugccuuu

SEQ ID NO: 1324692 - RNA, 19 nt, Homo sapiens
  misc_RNA (1)...(19): siRNA sense strand
gaaccaggacacccaagaa

SEQ ID NO: 1324693 - RNA, 19 nt, Homo sapiens
  misc_RNA (1)...(19): siRNA sense strand
cacagugguugcaugauaa

SEQ ID NO: 1324694 - RNA, 19 nt, Homo sapiens
  misc_RNA (1)...(19): siRNA sense strand
caagggauuuagagaugaa

SEQ ID NO: 1324695 - RNA, 19 nt, Homo sapiens
  misc_RNA (1)...(19): siRNA sense strand
auucaaagcugcugccuau

SEQ ID NO: 1324696 - RNA, 19 nt, Homo sapiens
  misc_RNA (1)...(19): siRNA sense strand
cgaaguugguauuaaacaa

SEQ ID NO: 1324697 - RNA, 19 nt, Homo sapiens
  misc_RNA (1)...(19): siRNA sense strand
gagaacugcacauuauuga

SEQ ID NO: 1324698 - RNA, 19 nt, Homo sapiens
  misc_RNA (1)...(19): siRNA sense strand
ugaguuaccugagagagaa

SEQ ID NO: 1324699 - RNA, 19 nt, Homo sapiens
  misc_RNA (1)...(19): siRNA sense strand
caauauggaugucaauacu

SEQ ID NO: 1324700 - RNA, 19 nt, Homo sapiens
  misc_RNA (1)...(19): siRNA sense strand
gguagcagaugguguagca

SEQ ID NO: 1324701 - RNA, 19 nt, Homo sapiens
  misc_RNA (1)...(19): siRNA sense strand
caucuucuauugaggauca

SEQ ID NO: 1324702 - RNA, 19 nt, Homo sapiens
  misc_RNA (1)...(19): siRNA sense strand
gaacugcacauuauugaac

SEQ ID NO: 1324703 - RNA, 19 nt, Homo sapiens
  misc_RNA (1)...(19): siRNA sense strand
gaagaagaagaugccuuua

SEQ ID NO: 1324704 - RNA, 19 nt, Homo sapiens
  misc_RNA (1)...(19): siRNA sense strand
gagcuuaaagguauauuca

SEQ ID NO: 1324705 - RNA, 19 nt, Homo sapiens
  misc_RNA (1)...(19): siRNA sense strand
cgacacgaguuauuuccaa

SEQ ID NO: 1324706 - RNA, 19 nt, Homo sapiens
  misc_RNA (1)...(19): siRNA sense strand
aaacuagucuggauuuagg

SEQ ID NO: 1324707 - RNA, 19 nt, Homo sapiens
  misc_RNA (1)...(19): siRNA sense strand
guccacaggcccucuaaua

SEQ ID NO: 1324708 - RNA, 19 nt, Homo sapiens
  misc_RNA (1)...(19): siRNA sense strand
gagagaagaaggcgaagga

SEQ ID NO: 1324709 - RNA, 19 nt, Homo sapiens
  misc_RNA (1)...(19): siRNA sense strand
caagaucccucaccaucca

SEQ ID NO: 1324710 - RNA, 19 nt, Homo sapiens
  misc_RNA (1)...(19): siRNA sense strand
gagguuguuugaugaugaa

SEQ ID NO: 1324711 - RNA, 19 nt, Homo sapiens
  misc_RNA (1)...(19): siRNA sense strand
ugucggagguuguuugaug

SEQ ID NO: 1324712 - RNA, 19 nt, Homo sapiens
  misc_RNA (1)...(19): siRNA sense strand
uaauguggauggugaagau

SEQ ID NO: 1324713 - RNA, 19 nt, Homo sapiens
  misc_RNA (1)...(19): siRNA sense strand
gccggcaaauugaauauau

SEQ ID NO: 1324714 - RNA, 19 nt, Homo sapiens
  misc_RNA (1)...(19): siRNA sense strand
ggaaauggaugaagaaaga

SEQ ID NO: 1324715 - RNA, 19 nt, Homo sapiens
  misc_RNA (1)...(19): siRNA sense strand
gaagcagucuccuuucuua

SEQ ID NO: 1324716 - RNA, 19 nt, Homo sapiens
  misc_RNA (1)...(19): siRNA sense strand
gaucaaauauuggccauua

SEQ ID NO: 1324717 - RNA, 19 nt, Homo sapiens
  misc_RNA (1)...(19): siRNA sense strand
gagaggagcuuaaagguau

SEQ ID NO: 1324718 - RNA, 19 nt, Homo sapiens
  misc_RNA (1)...(19): siRNA sense strand
agacagggaucaaagauua

SEQ ID NO: 1324719 - RNA, 19 nt, Homo sapiens
  misc_RNA (1)...(19): siRNA sense strand
gagaagaaacuccaaauuu

SEQ ID NO: 1324720 - RNA, 19 nt, Homo sapiens
  misc_RNA (1)...(19): siRNA sense strand
gaggagaacuuggagauuu

SEQ ID NO: 1324721 - RNA, 19 nt, Homo sapiens
  misc_RNA (1)...(19): siRNA sense strand
caagauuguugaacuagua

SEQ ID NO: 1324722 - RNA, 19 nt, Homo sapiens
  misc_RNA (1)...(19): siRNA sense strand
cagaggaacuguuguagaa

SEQ ID NO: 1324723 - RNA, 19 nt, Homo sapiens
  misc_RNA (1)...(19): siRNA sense strand
gguccuagcuugcucauug

SEQ ID NO: 1324724 - RNA, 19 nt, Homo sapiens
  misc_RNA (1)...(19): siRNA sense strand
gcaugcagcuuuauggaaa

SEQ ID NO: 1324725 - RNA, 19 nt, Homo sapiens
  misc_RNA (1)...(19): siRNA sense strand
aagaagaacuuguggauga

SEQ ID NO: 1324726 - RNA, 19 nt, Homo sapiens
  misc_RNA (1)...(19): siRNA sense strand
ggaagauaaugaagaagaa

SEQ ID NO: 1324727 - RNA, 19 nt, Homo sapiens
  misc_RNA (1)...(19): siRNA sense strand
gaaccaaggcgcacugaaa

SEQ ID NO: 1324728 - RNA, 19 nt, Homo sapiens
  misc_RNA (1)...(19): siRNA sense strand
uauuggagaugaacucuua

SEQ ID NO: 1324729 - RNA, 19 nt, Homo sapiens
  misc_RNA (1)...(19): siRNA sense strand
ucuaauaacucgacuguau

SEQ ID NO: 1324730 - RNA, 19 nt, Homo sapiens
  misc_RNA (1)...(19): siRNA sense strand
acacacagauugcagauga

SEQ ID NO: 1324731 - RNA, 19 nt, Homo sapiens
  misc_RNA (1)...(19): siRNA sense strand
gacaggaaaugauuauaga

SEQ ID NO: 1324732 - RNA, 19 nt, Homo sapiens
  misc_RNA (1)...(19): siRNA sense strand
ggaaagguuuguuaguguu

SEQ ID NO: 1324733 - RNA, 19 nt, Homo sapiens
  misc_RNA (1)...(19): siRNA sense strand
ucaauggcaugcagcuuua

SEQ ID NO: 1324734 - RNA, 19 nt, Homo sapiens
  misc_RNA (1)...(19): siRNA sense strand
gggcagagucuuggaauua

SEQ ID NO: 1324735 - RNA, 19 nt, Homo sapiens
  misc_RNA (1)...(19): siRNA sense strand
ggagggagcaagaagauuu

SEQ ID NO: 1324736 - RNA, 19 nt, Homo sapiens
  misc_RNA (1)...(19): siRNA sense strand
acacagugguugcaugaua

SEQ ID NO: 1324737 - RNA, 19 nt, Homo sapiens
  misc_RNA (1)...(19): siRNA sense strand
caacauacaagccuuagaa

SEQ ID NO: 1324738 - RNA, 19 nt, Homo sapiens
  misc_RNA (1)...(19): siRNA sense strand
gcacauuauugaacuugaa

SEQ ID NO: 1324739 - RNA, 19 nt, Homo sapiens
  misc_RNA (1)...(19): siRNA sense strand
gaaacuuccuccuccuuau

SEQ ID NO: 1324740 - RNA, 19 nt, Homo sapiens
  misc_RNA (1)...(19): siRNA sense strand
gguggaagauaaugaagaa

SEQ ID NO: 1324741 - RNA, 19 nt, Homo sapiens
  misc_RNA (1)...(19): siRNA sense strand
caagaagauuugccuuuau

SEQ ID NO: 1324742 - RNA, 19 nt, Homo sapiens
  misc_RNA (1)...(19): siRNA sense strand
gacuguaucuggguuauuu

SEQ ID NO: 1324743 - RNA, 19 nt, Homo sapiens
  misc_RNA (1)...(19): siRNA sense strand
auaaagcucugacugauga

SEQ ID NO: 1324744 - RNA, 19 nt, Homo sapiens
  misc_RNA (1)...(19): siRNA sense strand
gaaguggauuccuuugaug

SEQ ID NO: 1324745 - RNA, 19 nt, Homo sapiens
  misc_RNA (1)...(19): siRNA sense strand
gaaaccaccagcucucuuu

SEQ ID NO: 1324746 - RNA, 19 nt, Homo sapiens
  misc_RNA (1)...(19): siRNA sense strand
gaacauuucccaucagcaa

SEQ ID NO: 1324747 - RNA, 19 nt, Homo sapiens
  misc_RNA (1)...(19): siRNA sense strand
agacagagguugaccacaa

SEQ ID NO: 1324748 - RNA, 19 nt, Homo sapiens
  misc_RNA (1)...(19): siRNA sense strand
guugggaaaugaagacuuu

SEQ ID NO: 1324749 - RNA, 19 nt, Homo sapiens
  misc_RNA (1)...(19): siRNA sense strand
ggagaggagcuuaaaggua

SEQ ID NO: 1324750 - RNA, 19 nt, Homo sapiens
  misc_RNA (1)...(19): siRNA sense strand
ugaugaagcuucuguagau

SEQ ID NO: 1324751 - RNA, 19 nt, Homo sapiens
  misc_RNA (1)...(19): siRNA sense strand
gcaauugcauuauuacaac

SEQ ID NO: 1324752 - RNA, 19 nt, Homo sapiens
  misc_RNA (1)...(19): siRNA sense strand
ggagguuguuugaugauga

SEQ ID NO: 1324753 - RNA, 19 nt, Homo sapiens
  misc_RNA (1)...(19): siRNA sense strand
cuaaggaacugugggaauu

SEQ ID NO: 1324754 - RNA, 19 nt, Homo sapiens
  misc_RNA (1)...(19): siRNA sense strand
ggaauguugucuucuagau

SEQ ID NO: 1324755 - RNA, 19 nt, Homo sapiens
  misc_RNA (1)...(19): siRNA sense strand
gaagagguugagcucauua

SEQ ID NO: 1324756 - RNA, 19 nt, Homo sapiens
  misc_RNA (1)...(19): siRNA sense strand
ggacaggaaaugauuauag

SEQ ID NO: 1324757 - RNA, 19 nt, Homo sapiens
  misc_RNA (1)...(19): siRNA sense strand
cgucgaaguugguauuaaa

SEQ ID NO: 1324758 - RNA, 19 nt, Homo sapiens
  misc_RNA (1)...(19): siRNA sense strand
gcaccgaaccuauuaguag

SEQ ID NO: 1324759 - RNA, 19 nt, Homo sapiens
  misc_RNA (1)...(19): siRNA sense strand
ggagaugcaugaauuucug

SEQ ID NO: 1324760 - RNA, 19 nt, Homo sapiens
  misc_RNA (1)...(19): siRNA sense strand
gaugaaccauuucuagauc

SEQ ID NO: 1324761 - RNA, 19 nt, Homo sapiens
  misc_RNA (1)...(19): siRNA sense strand
gguuugggauucagcauuu

SEQ ID NO: 1324762 - RNA, 19 nt, Homo sapiens
  misc_RNA (1)...(19): siRNA sense strand
caaagcugcugccuauuca

SEQ ID NO: 1324763 - RNA, 19 nt, Homo sapiens
  misc_RNA (1)...(19): siRNA sense strand
gaagauugguggcacaaac

SEQ ID NO: 1324764 - RNA, 19 nt, Homo sapiens
  misc_RNA (1)...(19): siRNA sense strand
aaacgaggaugcagucaau

SEQ ID NO: 1324765 - RNA, 19 nt, Homo sapiens
  misc_RNA (1)...(19): siRNA sense strand
gaagacgaacgcacuuaaa

SEQ ID NO: 1324766 - RNA, 19 nt, Homo sapiens
  misc_RNA (1)...(19): siRNA sense strand
ggaagacgaacgcacuuaa

SEQ ID NO: 1324767 - RNA, 19 nt, Homo sapiens
  misc_RNA (1)...(19): siRNA sense strand
caggaacaauucaugauau

SEQ ID NO: 1324768 - RNA, 19 nt, Homo sapiens
  misc_RNA (1)...(19): siRNA sense strand
aaagaccgaucacgcauga

SEQ ID NO: 1324769 - RNA, 19 nt, Homo sapiens
  misc_RNA (1)...(19): siRNA sense strand
ggagaacugcacauuauug

SEQ ID NO: 1324770 - RNA, 19 nt, Homo sapiens
  misc_RNA (1)...(19): siRNA sense strand
guugaaguauuacgaaaug

SEQ ID NO: 1324771 - RNA, 19 nt, Homo sapiens
  misc_RNA (1)...(19): siRNA sense strand
ggaguagauuugcagaaug

SEQ ID NO: 1324772 - RNA, 19 nt, Homo sapiens
  misc_RNA (1)...(19): siRNA sense strand
gaaggaaacagucaacaag

SEQ ID NO: 1324773 - RNA, 19 nt, Homo sapiens
  misc_RNA (1)...(19): siRNA sense strand
gaaaugaagacuuuaacuc

SEQ ID NO: 1324774 - RNA, 19 nt, Homo sapiens
  misc_RNA (1)...(19): siRNA sense strand
gaauguugucuucuagaua

SEQ ID NO: 1324775 - RNA, 19 nt, Homo sapiens
  misc_RNA (1)...(19): siRNA sense strand
guaaugaagacaagacuga

SEQ ID NO: 1324776 - RNA, 19 nt, Homo sapiens
  misc_RNA (1)...(19): siRNA sense strand
ggaugucaauacugaagaa

SEQ ID NO: 1324777 - RNA, 19 nt, Homo sapiens
  misc_RNA (1)...(19): siRNA sense strand
gggaaccaguccacacaaa

SEQ ID NO: 1324778 - RNA, 19 nt, Homo sapiens
  misc_RNA (1)...(19): siRNA sense strand
gaacuucacuuugguacac

SEQ ID NO: 1324779 - RNA, 19 nt, Homo sapiens
  misc_RNA (1)...(19): siRNA sense strand
ccugggagaugcaugaauu

SEQ ID NO: 1324780 - RNA, 19 nt, Homo sapiens
  misc_RNA (1)...(19): siRNA sense strand
ucuagcagccuaaaugaua

SEQ ID NO: 1324781 - RNA, 19 nt, Homo sapiens
  misc_RNA (1)...(19): siRNA sense strand
gugaagaugaggaaauuaa

SEQ ID NO: 1324782 - RNA, 19 nt, Homo sapiens
  misc_RNA (1)...(19): siRNA sense strand
gaacuccagccacgaagaa

SEQ ID NO: 1324783 - RNA, 19 nt, Homo sapiens
  misc_RNA (1)...(19): siRNA sense strand
caucauaccauucaacaga

SEQ ID NO: 1324784 - RNA, 19 nt, Homo sapiens
  misc_RNA (1)...(19): siRNA sense strand
acaauugccugaaagugaa

SEQ ID NO: 1324785 - RNA, 19 nt, Homo sapiens
  misc_RNA (1)...(19): siRNA sense strand
gcuuaaagguauauucauc

SEQ ID NO: 1324786 - RNA, 19 nt, Homo sapiens
  misc_RNA (1)...(19): siRNA sense strand
acaggaauguugucuucua

SEQ ID NO: 1324787 - RNA, 19 nt, Homo sapiens
  misc_RNA (1)...(19): siRNA sense strand
acacaggaauguugucuuc

SEQ ID NO: 1324788 - RNA, 19 nt, Homo sapiens
  misc_RNA (1)...(19): siRNA sense strand
gcagagucuuggaauuaga

SEQ ID NO: 1324789 - RNA, 19 nt, Homo sapiens
  misc_RNA (1)...(19): siRNA sense strand
gaucacgcaugagcauauu

SEQ ID NO: 1324790 - RNA, 19 nt, Homo sapiens
  misc_RNA (1)...(19): siRNA sense strand
cuggagaacugcacauuau

SEQ ID NO: 1324791 - RNA, 19 nt, Homo sapiens
  misc_RNA (1)...(19): siRNA sense strand
ugaagaagaagaugccuuu

SEQ ID NO: 1324792 - RNA, 19 nt, Homo sapiens
  misc_RNA (1)...(19): siRNA sense strand
gaaccaggacacccaagaa

SEQ ID NO: 1324793 - RNA, 19 nt, Homo sapiens
  misc_RNA (1)...(19): siRNA sense strand
cacagugguugcaugauaa

SEQ ID NO: 1324794 - RNA, 19 nt, Homo sapiens
  misc_RNA (1)...(19): siRNA sense strand
caagggauuuagagaugaa

SEQ ID NO: 1324795 - RNA, 19 nt, Homo sapiens
  misc_RNA (1)...(19): siRNA sense strand
auucaaagcugcugccuau

SEQ ID NO: 1324796 - RNA, 19 nt, Homo sapiens
  misc_RNA (1)...(19): siRNA sense strand
cgaaguugguauuaaacaa

SEQ ID NO: 1324797 - RNA, 19 nt, Homo sapiens
  misc_RNA (1)...(19): siRNA sense strand
gagaacugcacauuauuga

SEQ ID NO: 1324798 - RNA, 19 nt, Homo sapiens
  misc_RNA (1)...(19): siRNA sense strand
ugaguuaccugagagagaa

SEQ ID NO: 1324799 - RNA, 19 nt, Homo sapiens
  misc_RNA (1)...(19): siRNA sense strand
caauauggaugucaauacu

SEQ ID NO: 1324800 - RNA, 19 nt, Homo sapiens
  misc_RNA (1)...(19): siRNA sense strand
gguagcagaugguguagca

SEQ ID NO: 1324801 - RNA, 19 nt, Homo sapiens
  misc_RNA (1)...(19): siRNA sense strand
caucuucuauugaggauca

SEQ ID NO: 1324802 - RNA, 19 nt, Homo sapiens
  misc_RNA (1)...(19): siRNA sense strand
gaacugcacauuauugaac

SEQ ID NO: 1324803 - RNA, 19 nt, Homo sapiens
  misc_RNA (1)...(19): siRNA sense strand
gaagaagaagaugccuuua

SEQ ID NO: 1324804 - RNA, 19 nt, Homo sapiens
  misc_RNA (1)...(19): siRNA sense strand
gagcuuaaagguauauuca

SEQ ID NO: 1324805 - RNA, 19 nt, Homo sapiens
  misc_RNA (1)...(19): siRNA sense strand
cgacacgaguuauuuccaa

SEQ ID NO: 1324806 - RNA, 19 nt, Homo sapiens
  misc_RNA (1)...(19): siRNA sense strand
aaacuagucuggauuuagg

SEQ ID NO: 1324807 - RNA, 19 nt, Homo sapiens
  misc_RNA (1)...(19): siRNA sense strand
guccacaggcccucuaaua

SEQ ID NO: 1324808 - RNA, 19 nt, Homo sapiens
  misc_RNA (1)...(19): siRNA sense strand
gagagaagaaggcgaagga

SEQ ID NO: 1324809 - RNA, 19 nt, Homo sapiens
  misc_RNA (1)...(19): siRNA sense strand
caagaucccucaccaucca

SEQ ID NO: 1324810 - RNA, 19 nt, Homo sapiens
  misc_RNA (1)...(19): siRNA sense strand
gagguuguuugaugaugaa

SEQ ID NO: 1324811 - RNA, 19 nt, Homo sapiens
  misc_RNA (1)...(19): siRNA sense strand
ugucggagguuguuugaug

SEQ ID NO: 1324812 - RNA, 19 nt, Homo sapiens
  misc_RNA (1)...(19): siRNA sense strand
uaauguggauggugaagau

SEQ ID NO: 1324813 - RNA, 19 nt, Homo sapiens
  misc_RNA (1)...(19): siRNA sense strand
gccggcaaauugaauauau

SEQ ID NO: 1324814 - RNA, 19 nt, Homo sapiens
  misc_RNA (1)...(19): siRNA sense strand
ggaaauggaugaagaaaga

SEQ ID NO: 1324815 - RNA, 19 nt, Homo sapiens
  misc_RNA (1)...(19): siRNA sense strand
gaagcagucuccuuucuua

SEQ ID NO: 1324816 - RNA, 19 nt, Homo sapiens
  misc_RNA (1)...(19): siRNA sense strand
gaucaaauauuggccauua

SEQ ID NO: 1324817 - RNA, 19 nt, Homo sapiens
  misc_RNA (1)...(19): siRNA sense strand
gagaggagcuuaaagguau

SEQ ID NO: 1324818 - RNA, 19 nt, Homo sapiens
  misc_RNA (1)...(19): siRNA sense strand
agacagggaucaaagauua

SEQ ID NO: 1324819 - RNA, 19 nt, Homo sapiens
  misc_RNA (1)...(19): siRNA sense strand
gagaagaaacuccaaauuu

SEQ ID NO: 1324820 - RNA, 19 nt, Homo sapiens
  misc_RNA (1)...(19): siRNA sense strand
gaggagaacuuggagauuu

SEQ ID NO: 1324821 - RNA, 19 nt, Homo sapiens
  misc_RNA (1)...(19): siRNA sense strand
caagauuguugaacuagua

SEQ ID NO: 1324822 - RNA, 19 nt, Homo sapiens
  misc_RNA (1)...(19): siRNA sense strand
cagaggaacuguuguagaa

SEQ ID NO: 1324823 - RNA, 19 nt, Homo sapiens
  misc_RNA (1)...(19): siRNA sense strand
gguccuagcuugcucauug

SEQ ID NO: 1324824 - RNA, 19 nt, Homo sapiens
  misc_RNA (1)...(19): siRNA sense strand
gcaugcagcuuuauggaaa

SEQ ID NO: 1324825 - RNA, 19 nt, Homo sapiens
  misc_RNA (1)...(19): siRNA sense strand
aagaagaacuuguggauga

SEQ ID NO: 1324826 - RNA, 19 nt, Homo sapiens
  misc_RNA (1)...(19): siRNA sense strand
ggaagauaaugaagaagaa

SEQ ID NO: 1324827 - RNA, 19 nt, Homo sapiens
  misc_RNA (1)...(19): siRNA sense strand
gaaccaaggcgcacugaaa

SEQ ID NO: 1324828 - RNA, 19 nt, Homo sapiens
  misc_RNA (1)...(19): siRNA sense strand
uauuggagaugaacucuua

SEQ ID NO: 1324829 - RNA, 19 nt, Homo sapiens
  misc_RNA (1)...(19): siRNA sense strand
ucuaauaacucgacuguau

SEQ ID NO: 1324830 - RNA, 19 nt, Homo sapiens
  misc_RNA (1)...(19): siRNA sense strand
acacacagauugcagauga

SEQ ID NO: 1324831 - RNA, 19 nt, Homo sapiens
  misc_RNA (1)...(19): siRNA sense strand
gacaggaaaugauuauaga

SEQ ID NO: 1324832 - RNA, 19 nt, Homo sapiens
  misc_RNA (1)...(19): siRNA sense strand
ggaaagguuuguuaguguu

SEQ ID NO: 1324833 - RNA, 19 nt, Homo sapiens
  misc_RNA (1)...(19): siRNA sense strand
ucaauggcaugcagcuuua

SEQ ID NO: 1324834 - RNA, 19 nt, Homo sapiens
  misc_RNA (1)...(19): siRNA sense strand
gggcagagucuuggaauua

SEQ ID NO: 1324835 - RNA, 19 nt, Homo sapiens
  misc_RNA (1)...(19): siRNA sense strand
ggagggagcaagaagauuu

SEQ ID NO: 1324836 - RNA, 19 nt, Homo sapiens
  misc_RNA (1)...(19): siRNA sense strand
acacagugguugcaugaua

SEQ ID NO: 1324837 - RNA, 19 nt, Homo sapiens
  misc_RNA (1)...(19): siRNA sense strand
caacauacaagccuuagaa

SEQ ID NO: 1324838 - RNA, 19 nt, Homo sapiens
  misc_RNA (1)...(19): siRNA sense strand
gcacauuauugaacuugaa

SEQ ID NO: 1324839 - RNA, 19 nt, Homo sapiens
  misc_RNA (1)...(19): siRNA sense strand
gaaacuuccuccuccuuau

SEQ ID NO: 1324840 - RNA, 19 nt, Homo sapiens
  misc_RNA (1)...(19): siRNA sense strand
gguggaagauaaugaagaa

SEQ ID NO: 1324841 - RNA, 19 nt, Homo sapiens
  misc_RNA (1)...(19): siRNA sense strand
caagaagauuugccuuuau

SEQ ID NO: 1324842 - RNA, 19 nt, Homo sapiens
  misc_RNA (1)...(19): siRNA sense strand
gacuguaucuggguuauuu

SEQ ID NO: 1324843 - RNA, 19 nt, Homo sapiens
  misc_RNA (1)...(19): siRNA sense strand
auaaagcucugacugauga

SEQ ID NO: 1324844 - RNA, 19 nt, Homo sapiens
  misc_RNA (1)...(19): siRNA sense strand
gaaguggauuccuuugaug

SEQ ID NO: 1324845 - RNA, 19 nt, Homo sapiens
  misc_RNA (1)...(19): siRNA sense strand
gaaaccaccagcucucuuu

SEQ ID NO: 1324846 - RNA, 19 nt, Homo sapiens
  misc_RNA (1)...(19): siRNA sense strand
gaacauuucccaucagcaa

SEQ ID NO: 1324847 - RNA, 19 nt, Homo sapiens
  misc_RNA (1)...(19): siRNA sense strand
agacagagguugaccacaa

SEQ ID NO: 1324848 - RNA, 19 nt, Homo sapiens
  misc_RNA (1)...(19): siRNA sense strand
guugggaaaugaagacuuu

SEQ ID NO: 1324849 - RNA, 19 nt, Homo sapiens
  misc_RNA (1)...(19): siRNA sense strand
ggagaggagcuuaaaggua

SEQ ID NO: 1324850 - RNA, 19 nt, Homo sapiens
  misc_RNA (1)...(19): siRNA sense strand
ugaugaagcuucuguagau

SEQ ID NO: 1324851 - RNA, 19 nt, Homo sapiens
  misc_RNA (1)...(19): siRNA sense strand
gcaauugcauuauuacaac

SEQ ID NO: 1324852 - RNA, 19 nt, Homo sapiens
  misc_RNA (1)...(19): siRNA sense strand
ggagguuguuugaugauga

SEQ ID NO: 1324853 - RNA, 19 nt, Homo sapiens
  misc_RNA (1)...(19): siRNA sense strand
cuaaggaacugugggaauu

SEQ ID NO: 1324854 - RNA, 19 nt, Homo sapiens
  misc_RNA (1)...(19): siRNA sense strand
ggaauguugucuucuagau

SEQ ID NO: 1324855 - RNA, 19 nt, Homo sapiens
  misc_RNA (1)...(19): siRNA sense strand
gaagagguugagcucauua

SEQ ID NO: 1324856 - RNA, 19 nt, Homo sapiens
  misc_RNA (1)...(19): siRNA sense strand
ggacaggaaaugauuauag

SEQ ID NO: 1324857 - RNA, 19 nt, Homo sapiens
  misc_RNA (1)...(19): siRNA sense strand
cgucgaaguugguauuaaa

SEQ ID NO: 1324858 - RNA, 19 nt, Homo sapiens
  misc_RNA (1)...(19): siRNA sense strand
gcaccgaaccuauuaguag

SEQ ID NO: 1324859 - RNA, 19 nt, Homo sapiens
  misc_RNA (1)...(19): siRNA sense strand
ggagaugcaugaauuucug

SEQ ID NO: 1324860 - RNA, 19 nt, Homo sapiens
  misc_RNA (1)...(19): siRNA sense strand
gaugaaccauuucuagauc

SEQ ID NO: 1324861 - RNA, 19 nt, Homo sapiens
  misc_RNA (1)...(19): siRNA sense strand
gguuugggauucagcauuu

SEQ ID NO: 1324862 - RNA, 19 nt, Homo sapiens
  misc_RNA (1)...(19): siRNA sense strand
caaagcugcugccuauuca

SEQ ID NO: 1324863 - RNA, 19 nt, Homo sapiens
  misc_RNA (1)...(19): siRNA sense strand
gaagauugguggcacaaac

SEQ ID NO: 1324864 - RNA, 19 nt, Homo sapiens
  misc_RNA (1)...(19): siRNA sense strand
aaacgaggaugcagucaau

SEQ ID NO: 1324865 - RNA, 19 nt, Homo sapiens
  misc_RNA (1)...(19): siRNA sense strand
gaagacgaacgcacuuaaa

SEQ ID NO: 1324866 - RNA, 19 nt, Homo sapiens
  misc_RNA (1)...(19): siRNA sense strand
ggaagacgaacgcacuuaa

SEQ ID NO: 1324867 - RNA, 19 nt, Homo sapiens
  misc_RNA (1)...(19): siRNA sense strand
caggaacaauucaugauau

SEQ ID NO: 1324868 - RNA, 19 nt, Homo sapiens
  misc_RNA (1)...(19): siRNA sense strand
aaagaccgaucacgcauga

SEQ ID NO: 1324869 - RNA, 19 nt, Homo sapiens
  misc_RNA (1)...(19): siRNA sense strand
ggagaacugcacauuauug

SEQ ID NO: 1324870 - RNA, 19 nt, Homo sapiens
  misc_RNA (1)...(19): siRNA sense strand
guugaaguauuacgaaaug

SEQ ID NO: 1324871 - RNA, 19 nt, Homo sapiens
  misc_RNA (1)...(19): siRNA sense strand
ggaguagauuugcagaaug

SEQ ID NO: 1324872 - RNA, 19 nt, Homo sapiens
  misc_RNA (1)...(19): siRNA sense strand
gaaggaaacagucaacaag

SEQ ID NO: 1324873 - RNA, 19 nt, Homo sapiens
  misc_RNA (1)...(19): siRNA sense strand
gaaaugaagacuuuaacuc

SEQ ID NO: 1324874 - RNA, 19 nt, Homo sapiens
  misc_RNA (1)...(19): siRNA sense strand
gaauguugucuucuagaua

SEQ ID NO: 1324875 - RNA, 19 nt, Homo sapiens
  misc_RNA (1)...(19): siRNA sense strand
guaaugaagacaagacuga

SEQ ID NO: 1324876 - RNA, 19 nt, Homo sapiens
  misc_RNA (1)...(19): siRNA sense strand
ggaugucaauacugaagaa

SEQ ID NO: 1324877 - RNA, 19 nt, Homo sapiens
  misc_RNA (1)...(19): siRNA sense strand
gggaaccaguccacacaaa

SEQ ID NO: 1324878 - RNA, 19 nt, Homo sapiens
  misc_RNA (1)...(19): siRNA sense strand
gaacuucacuuugguacac

SEQ ID NO: 1324879 - RNA, 19 nt, Homo sapiens
  misc_RNA (1)...(19): siRNA sense strand
ccugggagaugcaugaauu

SEQ ID NO: 1324880 - RNA, 19 nt, Homo sapiens
  misc_RNA (1)...(19): siRNA sense strand
ucuagcagccuaaaugaua

SEQ ID NO: 1324881 - RNA, 19 nt, Homo sapiens
  misc_RNA (1)...(19): siRNA sense strand
gugaagaugaggaaauuaa

SEQ ID NO: 1324882 - RNA, 19 nt, Homo sapiens
  misc_RNA (1)...(19): siRNA sense strand
gaacuccagccacgaagaa

SEQ ID NO: 1324883 - RNA, 19 nt, Homo sapiens
  misc_RNA (1)...(19): siRNA sense strand
caucauaccauucaacaga

SEQ ID NO: 1324884 - RNA, 19 nt, Homo sapiens
  misc_RNA (1)...(19): siRNA sense strand
acaauugccugaaagugaa

SEQ ID NO: 1324885 - RNA, 19 nt, Homo sapiens
  misc_RNA (1)...(19): siRNA sense strand
gcuuaaagguauauucauc

SEQ ID NO: 1324886 - RNA, 19 nt, Homo sapiens
  misc_RNA (1)...(19): siRNA sense strand
acaggaauguugucuucua

SEQ ID NO: 1324887 - RNA, 19 nt, Homo sapiens
  misc_RNA (1)...(19): siRNA sense strand
acacaggaauguugucuuc

SEQ ID NO: 1324888 - RNA, 19 nt, Homo sapiens
  misc_RNA (1)...(19): siRNA sense strand
gcagagucuuggaauuaga

SEQ ID NO: 1324889 - RNA, 19 nt, Homo sapiens
  misc_RNA (1)...(19): siRNA sense strand
gaucacgcaugagcauauu

SEQ ID NO: 1324890 - RNA, 19 nt, Homo sapiens
  misc_RNA (1)...(19): siRNA sense strand
cuggagaacugcacauuau

SEQ ID NO: 1324891 - RNA, 19 nt, Homo sapiens
  misc_RNA (1)...(19): siRNA sense strand
ugaagaagaagaugccuuu

SEQ ID NO: 1324892 - RNA, 19 nt, Homo sapiens
  misc_RNA (1)...(19): siRNA sense strand
gaaccaggacacccaagaa

SEQ ID NO: 1324893 - RNA, 19 nt, Homo sapiens
  misc_RNA (1)...(19): siRNA sense strand
cacagugguugcaugauaa

SEQ ID NO: 1324894 - RNA, 19 nt, Homo sapiens
  misc_RNA (1)...(19): siRNA sense strand
caagggauuuagagaugaa

SEQ ID NO: 1324895 - RNA, 19 nt, Homo sapiens
  misc_RNA (1)...(19): siRNA sense strand
auucaaagcugcugccuau

SEQ ID NO: 1324896 - RNA, 19 nt, Homo sapiens
  misc_RNA (1)...(19): siRNA sense strand
cgaaguugguauuaaacaa

SEQ ID NO: 1324897 - RNA, 19 nt, Homo sapiens
  misc_RNA (1)...(19): siRNA sense strand
gagaacugcacauuauuga

SEQ ID NO: 1324898 - RNA, 19 nt, Homo sapiens
  misc_RNA (1)...(19): siRNA sense strand
ugaguuaccugagagagaa

SEQ ID NO: 1324899 - RNA, 19 nt, Homo sapiens
  misc_RNA (1)...(19): siRNA sense strand
caauauggaugucaauacu

SEQ ID NO: 1324900 - RNA, 19 nt, Homo sapiens
  misc_RNA (1)...(19): siRNA sense strand
gguagcagaugguguagca

SEQ ID NO: 1324901 - RNA, 19 nt, Homo sapiens
  misc_RNA (1)...(19): siRNA sense strand
caucuucuauugaggauca

SEQ ID NO: 1324902 - RNA, 19 nt, Homo sapiens
  misc_RNA (1)...(19): siRNA sense strand
gaacugcacauuauugaac

SEQ ID NO: 1324903 - RNA, 19 nt, Homo sapiens
  misc_RNA (1)...(19): siRNA sense strand
gaagaagaagaugccuuua

SEQ ID NO: 1324904 - RNA, 19 nt, Homo sapiens
  misc_RNA (1)...(19): siRNA sense strand
gagcuuaaagguauauuca

SEQ ID NO: 1324905 - RNA, 19 nt, Homo sapiens
  misc_RNA (1)...(19): siRNA sense strand
cgacacgaguuauuuccaa

SEQ ID NO: 1324906 - RNA, 19 nt, Homo sapiens
  misc_RNA (1)...(19): siRNA sense strand
aaacuagucuggauuuagg

SEQ ID NO: 1324907 - RNA, 19 nt, Homo sapiens
  misc_RNA (1)...(19): siRNA sense strand
guccacaggcccucuaaua

SEQ ID NO: 1324908 - RNA, 19 nt, Homo sapiens
  misc_RNA (1)...(19): siRNA sense strand
gagagaagaaggcgaagga

SEQ ID NO: 1324909 - RNA, 19 nt, Homo sapiens
  misc_RNA (1)...(19): siRNA sense strand
caagaucccucaccaucca

SEQ ID NO: 1324910 - RNA, 19 nt, Homo sapiens
  misc_RNA (1)...(19): siRNA sense strand
gagguuguuugaugaugaa

SEQ ID NO: 1324911 - RNA, 19 nt, Homo sapiens
  misc_RNA (1)...(19): siRNA sense strand
ugucggagguuguuugaug

SEQ ID NO: 1324912 - RNA, 19 nt, Homo sapiens
  misc_RNA (1)...(19): siRNA sense strand
uaauguggauggugaagau

SEQ ID NO: 1324913 - RNA, 19 nt, Homo sapiens
  misc_RNA (1)...(19): siRNA sense strand
gccggcaaauugaauauau

SEQ ID NO: 1324914 - RNA, 19 nt, Homo sapiens
  misc_RNA (1)...(19): siRNA sense strand
ggaaauggaugaagaaaga

SEQ ID NO: 1324915 - RNA, 19 nt, Homo sapiens
  misc_RNA (1)...(19): siRNA sense strand
gaagcagucuccuuucuua

SEQ ID NO: 1324916 - RNA, 19 nt, Homo sapiens
  misc_RNA (1)...(19): siRNA sense strand
gaucaaauauuggccauua

SEQ ID NO: 1324917 - RNA, 19 nt, Homo sapiens
  misc_RNA (1)...(19): siRNA sense strand
gagaggagcuuaaagguau

SEQ ID NO: 1324918 - RNA, 19 nt, Homo sapiens
  misc_RNA (1)...(19): siRNA sense strand
agacagggaucaaagauua

SEQ ID NO: 1324919 - RNA, 19 nt, Homo sapiens
  misc_RNA (1)...(19): siRNA sense strand
gagaagaaacuccaaauuu

SEQ ID NO: 1324920 - RNA, 19 nt, Homo sapiens
  misc_RNA (1)...(19): siRNA sense strand
gaggagaacuuggagauuu

SEQ ID NO: 1324921 - RNA, 19 nt, Homo sapiens
  misc_RNA (1)...(19): siRNA sense strand
caagauuguugaacuagua

SEQ ID NO: 1324922 - RNA, 19 nt, Homo sapiens
  misc_RNA (1)...(19): siRNA sense strand
cagaggaacuguuguagaa

SEQ ID NO: 1324923 - RNA, 19 nt, Homo sapiens
  misc_RNA (1)...(19): siRNA sense strand
gguccuagcuugcucauug

SEQ ID NO: 1324924 - RNA, 19 nt, Homo sapiens
  misc_RNA (1)...(19): siRNA sense strand
gcaugcagcuuuauggaaa

SEQ ID NO: 1324925 - RNA, 19 nt, Homo sapiens
  misc_RNA (1)...(19): siRNA sense strand
aagaagaacuuguggauga

SEQ ID NO: 1324926 - RNA, 19 nt, Homo sapiens
  misc_RNA (1)...(19): siRNA sense strand
ggaagauaaugaagaagaa

SEQ ID NO: 1324927 - RNA, 19 nt, Homo sapiens
  misc_RNA (1)...(19): siRNA sense strand
gaaccaaggcgcacugaaa

SEQ ID NO: 1324928 - RNA, 19 nt, Homo sapiens
  misc_RNA (1)...(19): siRNA sense strand
uauuggagaugaacucuua

SEQ ID NO: 1324929 - RNA, 19 nt, Homo sapiens
  misc_RNA (1)...(19): siRNA sense strand
ucuaauaacucgacuguau

SEQ ID NO: 1324930 - RNA, 19 nt, Homo sapiens
  misc_RNA (1)...(19): siRNA sense strand
acacacagauugcagauga

SEQ ID NO: 1324931 - RNA, 19 nt, Homo sapiens
  misc_RNA (1)...(19): siRNA sense strand
gacaggaaaugauuauaga

SEQ ID NO: 1324932 - RNA, 19 nt, Homo sapiens
  misc_RNA (1)...(19): siRNA sense strand
ggaaagguuuguuaguguu

SEQ ID NO: 1324933 - RNA, 19 nt, Homo sapiens
  misc_RNA (1)...(19): siRNA sense strand
ucaauggcaugcagcuuua

SEQ ID NO: 1324934 - RNA, 19 nt, Homo sapiens
  misc_RNA (1)...(19): siRNA sense strand
gggcagagucuuggaauua

SEQ ID NO: 1324935 - RNA, 19 nt, Homo sapiens
  misc_RNA (1)...(19): siRNA sense strand
ggagggagcaagaagauuu

SEQ ID NO: 1324936 - RNA, 19 nt, Homo sapiens
  misc_RNA (1)...(19): siRNA sense strand
acacagugguugcaugaua

SEQ ID NO: 1324937 - RNA, 19 nt, Homo sapiens
  misc_RNA (1)...(19): siRNA sense strand
caacauacaagccuuagaa

SEQ ID NO: 1324938 - RNA, 19 nt, Homo sapiens
  misc_RNA (1)...(19): siRNA sense strand
gcacauuauugaacuugaa

SEQ ID NO: 1324939 - RNA, 19 nt, Homo sapiens
  misc_RNA (1)...(19): siRNA sense strand
gaaacuuccuccuccuuau

SEQ ID NO: 1324940 - RNA, 19 nt, Homo sapiens
  misc_RNA (1)...(19): siRNA sense strand
gguggaagauaaugaagaa

SEQ ID NO: 1324941 - RNA, 19 nt, Homo sapiens
  misc_RNA (1)...(19): siRNA sense strand
caagaagauuugccuuuau

SEQ ID NO: 1324942 - RNA, 19 nt, Homo sapiens
  misc_RNA (1)...(19): siRNA sense strand
gacuguaucuggguuauuu

SEQ ID NO: 1324943 - RNA, 19 nt, Homo sapiens
  misc_RNA (1)...(19): siRNA sense strand
auaaagcucugacugauga

SEQ ID NO: 1324944 - RNA, 19 nt, Homo sapiens
  misc_RNA (1)...(19): siRNA sense strand
gaaguggauuccuuugaug

SEQ ID NO: 1324945 - RNA, 19 nt, Homo sapiens
  misc_RNA (1)...(19): siRNA sense strand
gaaaccaccagcucucuuu

SEQ ID NO: 1324946 - RNA, 19 nt, Homo sapiens
  misc_RNA (1)...(19): siRNA sense strand
gaacauuucccaucagcaa

SEQ ID NO: 1324947 - RNA, 19 nt, Homo sapiens
  misc_RNA (1)...(19): siRNA sense strand
agacagagguugaccacaa

SEQ ID NO: 1324948 - RNA, 19 nt, Homo sapiens
  misc_RNA (1)...(19): siRNA sense strand
guugggaaaugaagacuuu

SEQ ID NO: 1324949 - RNA, 19 nt, Homo sapiens
  misc_RNA (1)...(19): siRNA sense strand
ggagaggagcuuaaaggua

SEQ ID NO: 1324950 - RNA, 19 nt, Homo sapiens
  misc_RNA (1)...(19): siRNA sense strand
ugaugaagcuucuguagau

SEQ ID NO: 1324951 - RNA, 19 nt, Homo sapiens
  misc_RNA (1)...(19): siRNA sense strand
gcaauugcauuauuacaac

SEQ ID NO: 1324952 - RNA, 19 nt, Homo sapiens
  misc_RNA (1)...(19): siRNA sense strand
ggagguuguuugaugauga

SEQ ID NO: 1324953 - RNA, 19 nt, Homo sapiens
  misc_RNA (1)...(19): siRNA sense strand
cuaaggaacugugggaauu

SEQ ID NO: 1324954 - RNA, 19 nt, Homo sapiens
  misc_RNA (1)...(19): siRNA sense strand
ggaauguugucuucuagau

SEQ ID NO: 1324955 - RNA, 19 nt, Homo sapiens
  misc_RNA (1)...(19): siRNA sense strand
gaagagguugagcucauua

SEQ ID NO: 1324956 - RNA, 19 nt, Homo sapiens
  misc_RNA (1)...(19): siRNA sense strand
ggacaggaaaugauuauag

SEQ ID NO: 1324957 - RNA, 19 nt, Homo sapiens
  misc_RNA (1)...(19): siRNA sense strand
cgucgaaguugguauuaaa

SEQ ID NO: 1324958 - RNA, 19 nt, Homo sapiens
  misc_RNA (1)...(19): siRNA sense strand
gcaccgaaccuauuaguag

SEQ ID NO: 1324959 - RNA, 19 nt, Homo sapiens
  misc_RNA (1)...(19): siRNA sense strand
ggagaugcaugaauuucug

SEQ ID NO: 1324960 - RNA, 19 nt, Homo sapiens
  misc_RNA (1)...(19): siRNA sense strand
gaugaaccauuucuagauc

SEQ ID NO: 1324961 - RNA, 19 nt, Homo sapiens
  misc_RNA (1)...(19): siRNA sense strand
gguuugggauucagcauuu

SEQ ID NO: 1324962 - RNA, 19 nt, Homo sapiens
  misc_RNA (1)...(19): siRNA sense strand
caaagcugcugccuauuca

SEQ ID NO: 1324963 - RNA, 19 nt, Homo sapiens
  misc_RNA (1)...(19): siRNA sense strand
gaagauugguggcacaaac

SEQ ID NO: 1324964 - RNA, 19 nt, Homo sapiens
  misc_RNA (1)...(19): siRNA sense strand
aaacgaggaugcagucaau

SEQ ID NO: 1324965 - RNA, 19 nt, Homo sapiens
  misc_RNA (1)...(19): siRNA sense strand
gaagacgaacgcacuuaaa

SEQ ID NO: 1324966 - RNA, 19 nt, Homo sapiens
  misc_RNA (1)...(19): siRNA sense strand
ggaagacgaacgcacuuaa

SEQ ID NO: 1324967 - RNA, 19 nt, Homo sapiens
  misc_RNA (1)...(19): siRNA sense strand
caggaacaauucaugauau

SEQ ID NO: 1324968 - RNA, 19 nt, Homo sapiens
  misc_RNA (1)...(19): siRNA sense strand
aaagaccgaucacgcauga

SEQ ID NO: 1324969 - RNA, 19 nt, Homo sapiens
  misc_RNA (1)...(19): siRNA sense strand
ggagaacugcacauuauug

SEQ ID NO: 1324970 - RNA, 19 nt, Homo sapiens
  misc_RNA (1)...(19): siRNA sense strand
guugaaguauuacgaaaug

SEQ ID NO: 1324971 - RNA, 19 nt, Homo sapiens
  misc_RNA (1)...(19): siRNA sense strand
ggaguagauuugcagaaug

SEQ ID NO: 1324972 - RNA, 19 nt, Homo sapiens
  misc_RNA (1)...(19): siRNA sense strand
gaaggaaacagucaacaag

SEQ ID NO: 1324973 - RNA, 19 nt, Homo sapiens
  misc_RNA (1)...(19): siRNA sense strand
gaaaugaagacuuuaacuc

SEQ ID NO: 1324974 - RNA, 19 nt, Homo sapiens
  misc_RNA (1)...(19): siRNA sense strand
gaauguugucuucuagaua

SEQ ID NO: 1324975 - RNA, 19 nt, Homo sapiens
  misc_RNA (1)...(19): siRNA sense strand
guaaugaagacaagacuga

SEQ ID NO: 1324976 - RNA, 19 nt, Homo sapiens
  misc_RNA (1)...(19): siRNA sense strand
ggaugucaauacugaagaa

SEQ ID NO: 1324977 - RNA, 19 nt, Homo sapiens
  misc_RNA (1)...(19): siRNA sense strand
gggaaccaguccacacaaa

SEQ ID NO: 1324978 - RNA, 19 nt, Homo sapiens
  misc_RNA (1)...(19): siRNA sense strand
gaacuucacuuugguacac

SEQ ID NO: 1324979 - RNA, 19 nt, Homo sapiens
  misc_RNA (1)...(19): siRNA sense strand
ccugggagaugcaugaauu

SEQ ID NO: 1324980 - RNA, 19 nt, Homo sapiens
  misc_RNA (1)...(19): siRNA sense strand
ucuagcagccuaaaugaua

SEQ ID NO: 1324981 - RNA, 19 nt, Homo sapiens
  misc_RNA (1)...(19): siRNA sense strand
gugaagaugaggaaauuaa

SEQ ID NO: 1324982 - RNA, 19 nt, Homo sapiens
  misc_RNA (1)...(19): siRNA sense strand
gaacuccagccacgaagaa

SEQ ID NO: 1324983 - RNA, 19 nt, Homo sapiens
  misc_RNA (1)...(19): siRNA sense strand
caucauaccauucaacaga

SEQ ID NO: 1324984 - RNA, 19 nt, Homo sapiens
  misc_RNA (1)...(19): siRNA sense strand
acaauugccugaaagugaa

SEQ ID NO: 1324985 - RNA, 19 nt, Homo sapiens
  misc_RNA (1)...(19): siRNA sense strand
gcuuaaagguauauucauc

SEQ ID NO: 1324986 - RNA, 19 nt, Homo sapiens
  misc_RNA (1)...(19): siRNA sense strand
acaggaauguugucuucua

SEQ ID NO: 1324987 - RNA, 19 nt, Homo sapiens
  misc_RNA (1)...(19): siRNA sense strand
acacaggaauguugucuuc

SEQ ID NO: 1324988 - RNA, 19 nt, Homo sapiens
  misc_RNA (1)...(19): siRNA sense strand
gcagagucuuggaauuaga

SEQ ID NO: 1324989 - RNA, 19 nt, Homo sapiens
  misc_RNA (1)...(19): siRNA sense strand
gaucacgcaugagcauauu

SEQ ID NO: 1324990 - RNA, 19 nt, Homo sapiens
  misc_RNA (1)...(19): siRNA sense strand
cuggagaacugcacauuau

SEQ ID NO: 1324991 - RNA, 19 nt, Homo sapiens
  misc_RNA (1)...(19): siRNA sense strand
ugaagaagaagaugccuuu

SEQ ID NO: 1324992 - RNA, 19 nt, Homo sapiens
  misc_RNA (1)...(19): siRNA sense strand
gaaccaggacacccaagaa

SEQ ID NO: 1324993 - RNA, 19 nt, Homo sapiens
  misc_RNA (1)...(19): siRNA sense strand
cacagugguugcaugauaa

SEQ ID NO: 1324994 - RNA, 19 nt, Homo sapiens
  misc_RNA (1)...(19): siRNA sense strand
caagggauuuagagaugaa

SEQ ID NO: 1324995 - RNA, 19 nt, Homo sapiens
  misc_RNA (1)...(19): siRNA sense strand
auucaaagcugcugccuau

SEQ ID NO: 1324996 - RNA, 19 nt, Homo sapiens
  misc_RNA (1)...(19): siRNA sense strand
cgaaguugguauuaaacaa

SEQ ID NO: 1324997 - RNA, 19 nt, Homo sapiens
  misc_RNA (1)...(19): siRNA sense strand
gagaacugcacauuauuga

SEQ ID NO: 1324998 - RNA, 19 nt, Homo sapiens
  misc_RNA (1)...(19): siRNA sense strand
ugaguuaccugagagagaa

SEQ ID NO: 1324999 - RNA, 19 nt, Homo sapiens
  misc_RNA (1)...(19): siRNA sense strand
caauauggaugucaauacu

SEQ ID NO: 1325000 - RNA, 19 nt, Homo sapiens
  misc_RNA (1)...(19): siRNA sense strand
gguagcagaugguguagca

SEQ ID NO: 1325001 - RNA, 19 nt, Homo sapiens
  misc_RNA (1)...(19): siRNA sense strand
caucuucuauugaggauca

SEQ ID NO: 1325002 - RNA, 19 nt, Homo sapiens
  misc_RNA (1)...(19): siRNA sense strand
gaacugcacauuauugaac

SEQ ID NO: 1325003 - RNA, 19 nt, Homo sapiens
  misc_RNA (1)...(19): siRNA sense strand
gaagaagaagaugccuuua

SEQ ID NO: 1325004 - RNA, 19 nt, Homo sapiens
  misc_RNA (1)...(19): siRNA sense strand
gagcuuaaagguauauuca

SEQ ID NO: 1325005 - RNA, 19 nt, Homo sapiens
  misc_RNA (1)...(19): siRNA sense strand
cgacacgaguuauuuccaa

SEQ ID NO: 1325006 - RNA, 19 nt, Homo sapiens
  misc_RNA (1)...(19): siRNA sense strand
aaacuagucuggauuuagg

SEQ ID NO: 1325007 - RNA, 19 nt, Homo sapiens
  misc_RNA (1)...(19): siRNA sense strand
guccacaggcccucuaaua

SEQ ID NO: 1325008 - RNA, 19 nt, Homo sapiens
  misc_RNA (1)...(19): siRNA sense strand
gagagaagaaggcgaagga

SEQ ID NO: 1325009 - RNA, 19 nt, Homo sapiens
  misc_RNA (1)...(19): siRNA sense strand
caagaucccucaccaucca

SEQ ID NO: 1325010 - RNA, 19 nt, Homo sapiens
  misc_RNA (1)...(19): siRNA sense strand
gagguuguuugaugaugaa

SEQ ID NO: 1325011 - RNA, 19 nt, Homo sapiens
  misc_RNA (1)...(19): siRNA sense strand
ugucggagguuguuugaug

SEQ ID NO: 1325012 - RNA, 19 nt, Homo sapiens
  misc_RNA (1)...(19): siRNA sense strand
uaauguggauggugaagau

SEQ ID NO: 1325013 - RNA, 19 nt, Homo sapiens
  misc_RNA (1)...(19): siRNA sense strand
gccggcaaauugaauauau

SEQ ID NO: 1325014 - RNA, 19 nt, Homo sapiens
  misc_RNA (1)...(19): siRNA sense strand
gccagucccuccaggugaa

SEQ ID NO: 1325015 - RNA, 19 nt, Homo sapiens
  misc_RNA (1)...(19): siRNA sense strand
ccgugcagcuccuugugua

SEQ ID NO: 1325016 - RNA, 19 nt, Homo sapiens
  misc_RNA (1)...(19): siRNA sense strand
ggacgaggacgugcuguuc

SEQ ID NO: 1325017 - RNA, 19 nt, Homo sapiens
  misc_RNA (1)...(19): siRNA sense strand
ccaacgcgcucuccuucuc

SEQ ID NO: 1325018 - RNA, 19 nt, Homo sapiens
  misc_RNA (1)...(19): siRNA sense strand
gacgaggacgugcuguuca

SEQ ID NO: 1325019 - RNA, 19 nt, Homo sapiens
  misc_RNA (1)...(19): siRNA sense strand
cagcuucucugaggcuucu

SEQ ID NO: 1325020 - RNA, 19 nt, Homo sapiens
  misc_RNA (1)...(19): siRNA sense strand
gccagucccuccaggugaa

SEQ ID NO: 1325021 - RNA, 19 nt, Homo sapiens
  misc_RNA (1)...(19): siRNA sense strand
ccgugcagcuccuugugua

SEQ ID NO: 1325022 - RNA, 19 nt, Homo sapiens
  misc_RNA (1)...(19): siRNA sense strand
ggacgaggacgugcuguuc

SEQ ID NO: 1325023 - RNA, 19 nt, Homo sapiens
  misc_RNA (1)...(19): siRNA sense strand
ccaacgcgcucuccuucuc

SEQ ID NO: 1325024 - RNA, 19 nt, Homo sapiens
  misc_RNA (1)...(19): siRNA sense strand
gacgaggacgugcuguuca

SEQ ID NO: 1325025 - RNA, 19 nt, Homo sapiens
  misc_RNA (1)...(19): siRNA sense strand
cagcuucucugaggcuucu

SEQ ID NO: 1325026 - RNA, 19 nt, Homo sapiens
  misc_RNA (1)...(19): siRNA sense strand
gccagucccuccaggugaa

SEQ ID NO: 1325027 - RNA, 19 nt, Homo sapiens
  misc_RNA (1)...(19): siRNA sense strand
ccgugcagcuccuugugua

SEQ ID NO: 1325028 - RNA, 19 nt, Homo sapiens
  misc_RNA (1)...(19): siRNA sense strand
ggacgaggacgugcuguuc

SEQ ID NO: 1325029 - RNA, 19 nt, Homo sapiens
  misc_RNA (1)...(19): siRNA sense strand
ccaacgcgcucuccuucuc

SEQ ID NO: 1325030 - RNA, 19 nt, Homo sapiens
  misc_RNA (1)...(19): siRNA sense strand
gacgaggacgugcuguuca

SEQ ID NO: 1325031 - RNA, 19 nt, Homo sapiens
  misc_RNA (1)...(19): siRNA sense strand
cagcuucucugaggcuucu

SEQ ID NO: 1325032 - RNA, 19 nt, Homo sapiens
  misc_RNA (1)...(19): siRNA sense strand
gccagucccuccaggugaa

SEQ ID NO: 1325033 - RNA, 19 nt, Homo sapiens
  misc_RNA (1)...(19): siRNA sense strand
ccgugcagcuccuugugua

SEQ ID NO: 1325034 - RNA, 19 nt, Homo sapiens
  misc_RNA (1)...(19): siRNA sense strand
ggacgaggacgugcuguuc

SEQ ID NO: 1325035 - RNA, 19 nt, Homo sapiens
  misc_RNA (1)...(19): siRNA sense strand
ccaacgcgcucuccuucuc

SEQ ID NO: 1325036 - RNA, 19 nt, Homo sapiens
  misc_RNA (1)...(19): siRNA sense strand
gacgaggacgugcuguuca

SEQ ID NO: 1325037 - RNA, 19 nt, Homo sapiens
  misc_RNA (1)...(19): siRNA sense strand
cagcuucucugaggcuucu

SEQ ID NO: 1325038 - RNA, 19 nt, Homo sapiens
  misc_RNA (1)...(19): siRNA sense strand
gccagucccuccaggugaa

SEQ ID NO: 1325039 - RNA, 19 nt, Homo sapiens
  misc_RNA (1)...(19): siRNA sense strand
ccgugcagcuccuugugua

SEQ ID NO: 1325040 - RNA, 19 nt, Homo sapiens
  misc_RNA (1)...(19): siRNA sense strand
ggacgaggacgugcuguuc

SEQ ID NO: 1325041 - RNA, 19 nt, Homo sapiens
  misc_RNA (1)...(19): siRNA sense strand
ccaacgcgcucuccuucuc

SEQ ID NO: 1325042 - RNA, 19 nt, Homo sapiens
  misc_RNA (1)...(19): siRNA sense strand
gacgaggacgugcuguuca

SEQ ID NO: 1325043 - RNA, 19 nt, Homo sapiens
  misc_RNA (1)...(19): siRNA sense strand
cagcuucucugaggcuucu

SEQ ID NO: 1325044 - RNA, 19 nt, Homo sapiens
  misc_RNA (1)...(19): siRNA sense strand
gccagucccuccaggugaa

SEQ ID NO: 1325045 - RNA, 19 nt, Homo sapiens
  misc_RNA (1)...(19): siRNA sense strand
ccgugcagcuccuugugua

SEQ ID NO: 1325046 - RNA, 19 nt, Homo sapiens
  misc_RNA (1)...(19): siRNA sense strand
ggacgaggacgugcuguuc

SEQ ID NO: 1325047 - RNA, 19 nt, Homo sapiens
  misc_RNA (1)...(19): siRNA sense strand
ccaacgcgcucuccuucuc

SEQ ID NO: 1325048 - RNA, 19 nt, Homo sapiens
  misc_RNA (1)...(19): siRNA sense strand
gacgaggacgugcuguuca

SEQ ID NO: 1325049 - RNA, 19 nt, Homo sapiens
  misc_RNA (1)...(19): siRNA sense strand
cagcuucucugaggcuucu

SEQ ID NO: 1325050 - RNA, 19 nt, Homo sapiens
  misc_RNA (1)...(19): siRNA sense strand
gcuaucguguggccacuuu

SEQ ID NO: 1325051 - RNA, 19 nt, Homo sapiens
  misc_RNA (1)...(19): siRNA sense strand
gcuaucguguggccacuuu

SEQ ID NO: 1325052 - RNA, 19 nt, Homo sapiens
  misc_RNA (1)...(19): siRNA sense strand
caacaggucucaauucuuc

SEQ ID NO: 1325053 - RNA, 19 nt, Homo sapiens
  misc_RNA (1)...(19): siRNA sense strand
gcaagaagcauuauuacga

SEQ ID NO: 1325054 - RNA, 19 nt, Homo sapiens
  misc_RNA (1)...(19): siRNA sense strand
gcugaacgcugcccacuau

SEQ ID NO: 1325055 - RNA, 19 nt, Homo sapiens
  misc_RNA (1)...(19): siRNA sense strand
ccaaacaggacccgucuua

SEQ ID NO: 1325056 - RNA, 19 nt, Homo sapiens
  misc_RNA (1)...(19): siRNA sense strand
caagaagcauuauuacgau

SEQ ID NO: 1325057 - RNA, 19 nt, Homo sapiens
  misc_RNA (1)...(19): siRNA sense strand
gaagacacagcucaaggua

SEQ ID NO: 1325058 - RNA, 19 nt, Homo sapiens
  misc_RNA (1)...(19): siRNA sense strand
gaagccagaucucccacaa

SEQ ID NO: 1325059 - RNA, 19 nt, Homo sapiens
  misc_RNA (1)...(19): siRNA sense strand
uuccauggcuuaagaagua

SEQ ID NO: 1325060 - RNA, 19 nt, Homo sapiens
  misc_RNA (1)...(19): siRNA sense strand
gcaguggaacagcuaaaua

SEQ ID NO: 1325061 - RNA, 19 nt, Homo sapiens
  misc_RNA (1)...(19): siRNA sense strand
gaggagauccgcauugaug

SEQ ID NO: 1325062 - RNA, 19 nt, Homo sapiens
  misc_RNA (1)...(19): siRNA sense strand
ugacagccauggagaaugu

SEQ ID NO: 1325063 - RNA, 19 nt, Homo sapiens
  misc_RNA (1)...(19): siRNA sense strand
caaugucucuaacuucuau

SEQ ID NO: 1325064 - RNA, 19 nt, Homo sapiens
  misc_RNA (1)...(19): siRNA sense strand
ggaggccgaugcccagauu

SEQ ID NO: 1325065 - RNA, 19 nt, Homo sapiens
  misc_RNA (1)...(19): siRNA sense strand
aaacaggacccgucuuauu

SEQ ID NO: 1325066 - RNA, 19 nt, Homo sapiens
  misc_RNA (1)...(19): siRNA sense strand
aacaggacccgucuuauua

SEQ ID NO: 1325067 - RNA, 19 nt, Homo sapiens
  misc_RNA (1)...(19): siRNA sense strand
gugccuaccuggacaagaa

SEQ ID NO: 1325068 - RNA, 19 nt, Homo sapiens
  misc_RNA (1)...(19): siRNA sense strand
gcuaccaguuugugaagaa

SEQ ID NO: 1325069 - RNA, 19 nt, Homo sapiens
  misc_RNA (1)...(19): siRNA sense strand
uggaacagcuaaauaucaa

SEQ ID NO: 1325070 - RNA, 19 nt, Homo sapiens
  misc_RNA (1)...(19): siRNA sense strand
aauaauagacccagaugaa

SEQ ID NO: 1325071 - RNA, 19 nt, Homo sapiens
  misc_RNA (1)...(19): siRNA sense strand
ggaggucccugaucaagcu

SEQ ID NO: 1325072 - RNA, 19 nt, Homo sapiens
  misc_RNA (1)...(19): siRNA sense strand
uggagaauguggagaguga

SEQ ID NO: 1325073 - RNA, 19 nt, Homo sapiens
  misc_RNA (1)...(19): siRNA sense strand
ugcaggagcucuacaagga

SEQ ID NO: 1325074 - RNA, 19 nt, Homo sapiens
  misc_RNA (1)...(19): siRNA sense strand
ccagaucucccacaaacaa

SEQ ID NO: 1325075 - RNA, 19 nt, Homo sapiens
  misc_RNA (1)...(19): siRNA sense strand
ggacccgucuuauuaucug

SEQ ID NO: 1325076 - RNA, 19 nt, Homo sapiens
  misc_RNA (1)...(19): siRNA sense strand
uggcaucgucuuugacuua

SEQ ID NO: 1325077 - RNA, 19 nt, Homo sapiens
  misc_RNA (1)...(19): siRNA sense strand
uaauagacccagaugaaga

SEQ ID NO: 1325078 - RNA, 19 nt, Homo sapiens
  misc_RNA (1)...(19): siRNA sense strand
gugcugcgcuaccaguuug

SEQ ID NO: 1325079 - RNA, 19 nt, Homo sapiens
  misc_RNA (1)...(19): siRNA sense strand
guacauuaccugugcugaa

SEQ ID NO: 1325080 - RNA, 19 nt, Homo sapiens
  misc_RNA (1)...(19): siRNA sense strand
aaacugaccgcccuaagga

SEQ ID NO: 1325081 - RNA, 19 nt, Homo sapiens
  misc_RNA (1)...(19): siRNA sense strand
ggaagacacagcucaaggu

SEQ ID NO: 1325082 - RNA, 19 nt, Homo sapiens
  misc_RNA (1)...(19): siRNA sense strand
gaucucccacaaacaaauu

SEQ ID NO: 1325083 - RNA, 19 nt, Homo sapiens
  misc_RNA (1)...(19): siRNA sense strand
caacaagggcgaccucaac

SEQ ID NO: 1325084 - RNA, 19 nt, Homo sapiens
  misc_RNA (1)...(19): siRNA sense strand
caaguucaaugucucuaac

SEQ ID NO: 1325085 - RNA, 19 nt, Homo sapiens
  misc_RNA (1)...(19): siRNA sense strand
uacauuaccugugcugaau

SEQ ID NO: 1325086 - RNA, 19 nt, Homo sapiens
  misc_RNA (1)...(19): siRNA sense strand
ucucuaacuucuaucaugu

SEQ ID NO: 1325087 - RNA, 19 nt, Homo sapiens
  misc_RNA (1)...(19): siRNA sense strand
agaagaaaguggacaagcu

SEQ ID NO: 1325088 - RNA, 19 nt, Homo sapiens
  misc_RNA (1)...(19): siRNA sense strand
gcaacaggucucaauucuu

SEQ ID NO: 1325089 - RNA, 19 nt, Homo sapiens
  misc_RNA (1)...(19): siRNA sense strand
ucaucaggcuuugcaagaa

SEQ ID NO: 1325090 - RNA, 19 nt, Homo sapiens
  misc_RNA (1)...(19): siRNA sense strand
caguggaacagcuaaauau

SEQ ID NO: 1325091 - RNA, 19 nt, Homo sapiens
  misc_RNA (1)...(19): siRNA sense strand
gggaagcgacagcaccaaa

SEQ ID NO: 1325092 - RNA, 19 nt, Homo sapiens
  misc_RNA (1)...(19): siRNA sense strand
ucuaacuucuaucauguga

SEQ ID NO: 1325093 - RNA, 19 nt, Homo sapiens
  misc_RNA (1)...(19): siRNA sense strand
caucaggcuuugcaagaag

SEQ ID NO: 1325094 - RNA, 19 nt, Homo sapiens
  misc_RNA (1)...(19): siRNA sense strand
caaacaaauuuucgucguu

SEQ ID NO: 1325095 - RNA, 19 nt, Homo sapiens
  misc_RNA (1)...(19): siRNA sense strand
aggaggagauccgcauuga

SEQ ID NO: 1325096 - RNA, 19 nt, Homo sapiens
  misc_RNA (1)...(19): siRNA sense strand
guggaacagcuaaauauca

SEQ ID NO: 1325097 - RNA, 19 nt, Homo sapiens
  misc_RNA (1)...(19): siRNA sense strand
caucgucuuugacuuacug

SEQ ID NO: 1325098 - RNA, 19 nt, Homo sapiens
  misc_RNA (1)...(19): siRNA sense strand
cagcaacaggucucaauuc

SEQ ID NO: 1325099 - RNA, 19 nt, Homo sapiens
  misc_RNA (1)...(19): siRNA sense strand
ggagaccacacaugaagca

SEQ ID NO: 1325100 - RNA, 19 nt, Homo sapiens
  misc_RNA (1)...(19): siRNA sense strand
uaaauaucaaggccaagaa

SEQ ID NO: 1325101 - RNA, 19 nt, Homo sapiens
  misc_RNA (1)...(19): siRNA sense strand
agacccagaugaagagaag

SEQ ID NO: 1325102 - RNA, 19 nt, Homo sapiens
  misc_RNA (1)...(19): siRNA sense strand
aagcugaacuuuuccaaga

SEQ ID NO: 1325103 - RNA, 19 nt, Homo sapiens
  misc_RNA (1)...(19): siRNA sense strand
gacaagaagcauaccaucu

SEQ ID NO: 1325104 - RNA, 19 nt, Homo sapiens
  misc_RNA (1)...(19): siRNA sense strand
gaaaacuucaucaggcuuu

SEQ ID NO: 1325105 - RNA, 19 nt, Homo sapiens
  misc_RNA (1)...(19): siRNA sense strand
gucucuaacuucuaucaug

SEQ ID NO: 1325106 - RNA, 19 nt, Homo sapiens
  misc_RNA (1)...(19): siRNA sense strand
gaagaagaaaguggacaag

SEQ ID NO: 1325107 - RNA, 19 nt, Homo sapiens
  misc_RNA (1)...(19): siRNA sense strand
cuaaauaucaaggccaaga

SEQ ID NO: 1325108 - RNA, 19 nt, Homo sapiens
  misc_RNA (1)...(19): siRNA sense strand
gaaaauaauagacccagau

SEQ ID NO: 1325109 - RNA, 19 nt, Homo sapiens
  misc_RNA (1)...(19): siRNA sense strand
caggacccgucuuauuauc

SEQ ID NO: 1325110 - RNA, 19 nt, Homo sapiens
  misc_RNA (1)...(19): siRNA sense strand
gaagcauaccaucuuugga

SEQ ID NO: 1325111 - RNA, 19 nt, Homo sapiens
  misc_RNA (1)...(19): siRNA sense strand
cugaauacacucacuuuua

SEQ ID NO: 1325112 - RNA, 19 nt, Homo sapiens
  misc_RNA (1)...(19): siRNA sense strand
acagauccauccggaacuu

SEQ ID NO: 1325113 - RNA, 19 nt, Homo sapiens
  misc_RNA (1)...(19): siRNA sense strand
gaaaguggacaagcugaac

SEQ ID NO: 1325114 - RNA, 19 nt, Homo sapiens
  misc_RNA (1)...(19): siRNA sense strand
uaucaaggccaagaacuuc

SEQ ID NO: 1325115 - RNA, 19 nt, Homo sapiens
  misc_RNA (1)...(19): siRNA sense strand
ucaauucuucaucacguuu

SEQ ID NO: 1325116 - RNA, 19 nt, Homo sapiens
  misc_RNA (1)...(19): siRNA sense strand
ugaucaagcugaacuuuuc

SEQ ID NO: 1325117 - RNA, 19 nt, Homo sapiens
  misc_RNA (1)...(19): siRNA sense strand
acugcgaccugacaccaaa

SEQ ID NO: 1325118 - RNA, 19 nt, Homo sapiens
  misc_RNA (1)...(19): siRNA sense strand
gaacgcugcccacuauucc

SEQ ID NO: 1325119 - RNA, 19 nt, Homo sapiens
  misc_RNA (1)...(19): siRNA sense strand
caaacaggacccgucuuau

SEQ ID NO: 1325120 - RNA, 19 nt, Homo sapiens
  misc_RNA (1)...(19): siRNA sense strand
acaaguucaaugucucuaa

SEQ ID NO: 1325121 - RNA, 19 nt, Homo sapiens
  misc_RNA (1)...(19): siRNA sense strand
caacgucuacgccuaugag

SEQ ID NO: 1325122 - RNA, 19 nt, Homo sapiens
  misc_RNA (1)...(19): siRNA sense strand
cauuaccugugcugaauac

SEQ ID NO: 1325123 - RNA, 19 nt, Homo sapiens
  misc_RNA (1)...(19): siRNA sense strand
guucaaugucucuaacuuc

SEQ ID NO: 1325124 - RNA, 19 nt, Homo sapiens
  misc_RNA (1)...(19): siRNA sense strand
acaggacccgucuuauuau

SEQ ID NO: 1325125 - RNA, 19 nt, Homo sapiens
  misc_RNA (1)...(19): siRNA sense strand
agccagaucucccacaaac

SEQ ID NO: 1325126 - RNA, 19 nt, Homo sapiens
  misc_RNA (1)...(19): siRNA sense strand
agaagaagaaaguggacaa

SEQ ID NO: 1325127 - RNA, 19 nt, Homo sapiens
  misc_RNA (1)...(19): siRNA sense strand
gcaacgucuacgccuauga

SEQ ID NO: 1325128 - RNA, 19 nt, Homo sapiens
  misc_RNA (1)...(19): siRNA sense strand
ucccggagaccacacauga

SEQ ID NO: 1325129 - RNA, 19 nt, Homo sapiens
  misc_RNA (1)...(19): siRNA sense strand
ugaacgcugcccacuauuc

SEQ ID NO: 1325130 - RNA, 19 nt, Homo sapiens
  misc_RNA (1)...(19): siRNA sense strand
gcaccaaaaggacaaaaug

SEQ ID NO: 1325131 - RNA, 19 nt, Homo sapiens
  misc_RNA (1)...(19): siRNA sense strand
gucuuugacuuacugaaca

SEQ ID NO: 1325132 - RNA, 19 nt, Homo sapiens
  misc_RNA (1)...(19): siRNA sense strand
gcucuacaaggaguucaaa

SEQ ID NO: 1325133 - RNA, 19 nt, Homo sapiens
  misc_RNA (1)...(19): siRNA sense strand
agcaacaggucucaauucu

SEQ ID NO: 1325134 - RNA, 19 nt, Homo sapiens
  misc_RNA (1)...(19): siRNA sense strand
gcacggguggggagucaua

SEQ ID NO: 1325135 - RNA, 19 nt, Homo sapiens
  misc_RNA (1)...(19): siRNA sense strand
uaccugugcugaauacacu

SEQ ID NO: 1325136 - RNA, 19 nt, Homo sapiens
  misc_RNA (1)...(19): siRNA sense strand
ggaggagauccgcauugau

SEQ ID NO: 1325137 - RNA, 19 nt, Homo sapiens
  misc_RNA (1)...(19): siRNA sense strand
uaaggaggagauccgcauu

SEQ ID NO: 1325138 - RNA, 19 nt, Homo sapiens
  misc_RNA (1)...(19): siRNA sense strand
gacccgucuuauuaucuga

SEQ ID NO: 1325139 - RNA, 19 nt, Homo sapiens
  misc_RNA (1)...(19): siRNA sense strand
ucaaugucucuaacuucua

SEQ ID NO: 1325140 - RNA, 19 nt, Homo sapiens
  misc_RNA (1)...(19): siRNA sense strand
ggucccugaucaagcugaa

SEQ ID NO: 1325141 - RNA, 19 nt, Homo sapiens
  misc_RNA (1)...(19): siRNA sense strand
gggcuuugacguacugaca

SEQ ID NO: 1325142 - RNA, 19 nt, Homo sapiens
  misc_RNA (1)...(19): siRNA sense strand
caacaggucucaauucuuc

SEQ ID NO: 1325143 - RNA, 19 nt, Homo sapiens
  misc_RNA (1)...(19): siRNA sense strand
gcaagaagcauuauuacga

SEQ ID NO: 1325144 - RNA, 19 nt, Homo sapiens
  misc_RNA (1)...(19): siRNA sense strand
gcugaacgcugcccacuau

SEQ ID NO: 1325145 - RNA, 19 nt, Homo sapiens
  misc_RNA (1)...(19): siRNA sense strand
ccaaacaggacccgucuua

SEQ ID NO: 1325146 - RNA, 19 nt, Homo sapiens
  misc_RNA (1)...(19): siRNA sense strand
caagaagcauuauuacgau

SEQ ID NO: 1325147 - RNA, 19 nt, Homo sapiens
  misc_RNA (1)...(19): siRNA sense strand
gaagacacagcucaaggua

SEQ ID NO: 1325148 - RNA, 19 nt, Homo sapiens
  misc_RNA (1)...(19): siRNA sense strand
gaagccagaucucccacaa

SEQ ID NO: 1325149 - RNA, 19 nt, Homo sapiens
  misc_RNA (1)...(19): siRNA sense strand
uuccauggcuuaagaagua

SEQ ID NO: 1325150 - RNA, 19 nt, Homo sapiens
  misc_RNA (1)...(19): siRNA sense strand
gcaguggaacagcuaaaua

SEQ ID NO: 1325151 - RNA, 19 nt, Homo sapiens
  misc_RNA (1)...(19): siRNA sense strand
gaggagauccgcauugaug

SEQ ID NO: 1325152 - RNA, 19 nt, Homo sapiens
  misc_RNA (1)...(19): siRNA sense strand
ugacagccauggagaaugu

SEQ ID NO: 1325153 - RNA, 19 nt, Homo sapiens
  misc_RNA (1)...(19): siRNA sense strand
caaugucucuaacuucuau

SEQ ID NO: 1325154 - RNA, 19 nt, Homo sapiens
  misc_RNA (1)...(19): siRNA sense strand
ggaggccgaugcccagauu

SEQ ID NO: 1325155 - RNA, 19 nt, Homo sapiens
  misc_RNA (1)...(19): siRNA sense strand
aaacaggacccgucuuauu

SEQ ID NO: 1325156 - RNA, 19 nt, Homo sapiens
  misc_RNA (1)...(19): siRNA sense strand
aacaggacccgucuuauua

SEQ ID NO: 1325157 - RNA, 19 nt, Homo sapiens
  misc_RNA (1)...(19): siRNA sense strand
gugccuaccuggacaagaa

SEQ ID NO: 1325158 - RNA, 19 nt, Homo sapiens
  misc_RNA (1)...(19): siRNA sense strand
gcuaccaguuugugaagaa

SEQ ID NO: 1325159 - RNA, 19 nt, Homo sapiens
  misc_RNA (1)...(19): siRNA sense strand
uggaacagcuaaauaucaa

SEQ ID NO: 1325160 - RNA, 19 nt, Homo sapiens
  misc_RNA (1)...(19): siRNA sense strand
aauaauagacccagaugaa

SEQ ID NO: 1325161 - RNA, 19 nt, Homo sapiens
  misc_RNA (1)...(19): siRNA sense strand
ggaggucccugaucaagcu

SEQ ID NO: 1325162 - RNA, 19 nt, Homo sapiens
  misc_RNA (1)...(19): siRNA sense strand
uggagaauguggagaguga

SEQ ID NO: 1325163 - RNA, 19 nt, Homo sapiens
  misc_RNA (1)...(19): siRNA sense strand
ugcaggagcucuacaagga

SEQ ID NO: 1325164 - RNA, 19 nt, Homo sapiens
  misc_RNA (1)...(19): siRNA sense strand
ccagaucucccacaaacaa

SEQ ID NO: 1325165 - RNA, 19 nt, Homo sapiens
  misc_RNA (1)...(19): siRNA sense strand
ggacccgucuuauuaucug

SEQ ID NO: 1325166 - RNA, 19 nt, Homo sapiens
  misc_RNA (1)...(19): siRNA sense strand
uggcaucgucuuugacuua

SEQ ID NO: 1325167 - RNA, 19 nt, Homo sapiens
  misc_RNA (1)...(19): siRNA sense strand
uaauagacccagaugaaga

SEQ ID NO: 1325168 - RNA, 19 nt, Homo sapiens
  misc_RNA (1)...(19): siRNA sense strand
gugcugcgcuaccaguuug

SEQ ID NO: 1325169 - RNA, 19 nt, Homo sapiens
  misc_RNA (1)...(19): siRNA sense strand
guacauuaccugugcugaa

SEQ ID NO: 1325170 - RNA, 19 nt, Homo sapiens
  misc_RNA (1)...(19): siRNA sense strand
aaacugaccgcccuaagga

SEQ ID NO: 1325171 - RNA, 19 nt, Homo sapiens
  misc_RNA (1)...(19): siRNA sense strand
ggaagacacagcucaaggu

SEQ ID NO: 1325172 - RNA, 19 nt, Homo sapiens
  misc_RNA (1)...(19): siRNA sense strand
gaucucccacaaacaaauu

SEQ ID NO: 1325173 - RNA, 19 nt, Homo sapiens
  misc_RNA (1)...(19): siRNA sense strand
caacaagggcgaccucaac

SEQ ID NO: 1325174 - RNA, 19 nt, Homo sapiens
  misc_RNA (1)...(19): siRNA sense strand
caaguucaaugucucuaac

SEQ ID NO: 1325175 - RNA, 19 nt, Homo sapiens
  misc_RNA (1)...(19): siRNA sense strand
uacauuaccugugcugaau

SEQ ID NO: 1325176 - RNA, 19 nt, Homo sapiens
  misc_RNA (1)...(19): siRNA sense strand
ucucuaacuucuaucaugu

SEQ ID NO: 1325177 - RNA, 19 nt, Homo sapiens
  misc_RNA (1)...(19): siRNA sense strand
agaagaaaguggacaagcu

SEQ ID NO: 1325178 - RNA, 19 nt, Homo sapiens
  misc_RNA (1)...(19): siRNA sense strand
gcaacaggucucaauucuu

SEQ ID NO: 1325179 - RNA, 19 nt, Homo sapiens
  misc_RNA (1)...(19): siRNA sense strand
ucaucaggcuuugcaagaa

SEQ ID NO: 1325180 - RNA, 19 nt, Homo sapiens
  misc_RNA (1)...(19): siRNA sense strand
caguggaacagcuaaauau

SEQ ID NO: 1325181 - RNA, 19 nt, Homo sapiens
  misc_RNA (1)...(19): siRNA sense strand
gggaagcgacagcaccaaa

SEQ ID NO: 1325182 - RNA, 19 nt, Homo sapiens
  misc_RNA (1)...(19): siRNA sense strand
ucuaacuucuaucauguga

SEQ ID NO: 1325183 - RNA, 19 nt, Homo sapiens
  misc_RNA (1)...(19): siRNA sense strand
caucaggcuuugcaagaag

SEQ ID NO: 1325184 - RNA, 19 nt, Homo sapiens
  misc_RNA (1)...(19): siRNA sense strand
caaacaaauuuucgucguu

SEQ ID NO: 1325185 - RNA, 19 nt, Homo sapiens
  misc_RNA (1)...(19): siRNA sense strand
aggaggagauccgcauuga

SEQ ID NO: 1325186 - RNA, 19 nt, Homo sapiens
  misc_RNA (1)...(19): siRNA sense strand
guggaacagcuaaauauca

SEQ ID NO: 1325187 - RNA, 19 nt, Homo sapiens
  misc_RNA (1)...(19): siRNA sense strand
caucgucuuugacuuacug

SEQ ID NO: 1325188 - RNA, 19 nt, Homo sapiens
  misc_RNA (1)...(19): siRNA sense strand
cagcaacaggucucaauuc

SEQ ID NO: 1325189 - RNA, 19 nt, Homo sapiens
  misc_RNA (1)...(19): siRNA sense strand
ggagaccacacaugaagca

SEQ ID NO: 1325190 - RNA, 19 nt, Homo sapiens
  misc_RNA (1)...(19): siRNA sense strand
uaaauaucaaggccaagaa

SEQ ID NO: 1325191 - RNA, 19 nt, Homo sapiens
  misc_RNA (1)...(19): siRNA sense strand
agacccagaugaagagaag

SEQ ID NO: 1325192 - RNA, 19 nt, Homo sapiens
  misc_RNA (1)...(19): siRNA sense strand
aagcugaacuuuuccaaga

SEQ ID NO: 1325193 - RNA, 19 nt, Homo sapiens
  misc_RNA (1)...(19): siRNA sense strand
gacaagaagcauaccaucu

SEQ ID NO: 1325194 - RNA, 19 nt, Homo sapiens
  misc_RNA (1)...(19): siRNA sense strand
gaaaacuucaucaggcuuu

SEQ ID NO: 1325195 - RNA, 19 nt, Homo sapiens
  misc_RNA (1)...(19): siRNA sense strand
gucucuaacuucuaucaug

SEQ ID NO: 1325196 - RNA, 19 nt, Homo sapiens
  misc_RNA (1)...(19): siRNA sense strand
gaagaagaaaguggacaag

SEQ ID NO: 1325197 - RNA, 19 nt, Homo sapiens
  misc_RNA (1)...(19): siRNA sense strand
cuaaauaucaaggccaaga

SEQ ID NO: 1325198 - RNA, 19 nt, Homo sapiens
  misc_RNA (1)...(19): siRNA sense strand
gaaaauaauagacccagau

SEQ ID NO: 1325199 - RNA, 19 nt, Homo sapiens
  misc_RNA (1)...(19): siRNA sense strand
caggacccgucuuauuauc

SEQ ID NO: 1325200 - RNA, 19 nt, Homo sapiens
  misc_RNA (1)...(19): siRNA sense strand
gaagcauaccaucuuugga

SEQ ID NO: 1325201 - RNA, 19 nt, Homo sapiens
  misc_RNA (1)...(19): siRNA sense strand
cugaauacacucacuuuua

SEQ ID NO: 1325202 - RNA, 19 nt, Homo sapiens
  misc_RNA (1)...(19): siRNA sense strand
acagauccauccggaacuu

SEQ ID NO: 1325203 - RNA, 19 nt, Homo sapiens
  misc_RNA (1)...(19): siRNA sense strand
gaaaguggacaagcugaac

SEQ ID NO: 1325204 - RNA, 19 nt, Homo sapiens
  misc_RNA (1)...(19): siRNA sense strand
uaucaaggccaagaacuuc

SEQ ID NO: 1325205 - RNA, 19 nt, Homo sapiens
  misc_RNA (1)...(19): siRNA sense strand
ucaauucuucaucacguuu

SEQ ID NO: 1325206 - RNA, 19 nt, Homo sapiens
  misc_RNA (1)...(19): siRNA sense strand
ugaucaagcugaacuuuuc

SEQ ID NO: 1325207 - RNA, 19 nt, Homo sapiens
  misc_RNA (1)...(19): siRNA sense strand
acugcgaccugacaccaaa

SEQ ID NO: 1325208 - RNA, 19 nt, Homo sapiens
  misc_RNA (1)...(19): siRNA sense strand
gaacgcugcccacuauucc

SEQ ID NO: 1325209 - RNA, 19 nt, Homo sapiens
  misc_RNA (1)...(19): siRNA sense strand
caaacaggacccgucuuau

SEQ ID NO: 1325210 - RNA, 19 nt, Homo sapiens
  misc_RNA (1)...(19): siRNA sense strand
acaaguucaaugucucuaa

SEQ ID NO: 1325211 - RNA, 19 nt, Homo sapiens
  misc_RNA (1)...(19): siRNA sense strand
caacgucuacgccuaugag

SEQ ID NO: 1325212 - RNA, 19 nt, Homo sapiens
  misc_RNA (1)...(19): siRNA sense strand
cauuaccugugcugaauac

SEQ ID NO: 1325213 - RNA, 19 nt, Homo sapiens
  misc_RNA (1)...(19): siRNA sense strand
guucaaugucucuaacuuc

SEQ ID NO: 1325214 - RNA, 19 nt, Homo sapiens
  misc_RNA (1)...(19): siRNA sense strand
acaggacccgucuuauuau

SEQ ID NO: 1325215 - RNA, 19 nt, Homo sapiens
  misc_RNA (1)...(19): siRNA sense strand
agccagaucucccacaaac

SEQ ID NO: 1325216 - RNA, 19 nt, Homo sapiens
  misc_RNA (1)...(19): siRNA sense strand
agaagaagaaaguggacaa

SEQ ID NO: 1325217 - RNA, 19 nt, Homo sapiens
  misc_RNA (1)...(19): siRNA sense strand
gcaacgucuacgccuauga

SEQ ID NO: 1325218 - RNA, 19 nt, Homo sapiens
  misc_RNA (1)...(19): siRNA sense strand
ucccggagaccacacauga

SEQ ID NO: 1325219 - RNA, 19 nt, Homo sapiens
  misc_RNA (1)...(19): siRNA sense strand
ugaacgcugcccacuauuc

SEQ ID NO: 1325220 - RNA, 19 nt, Homo sapiens
  misc_RNA (1)...(19): siRNA sense strand
gcaccaaaaggacaaaaug

SEQ ID NO: 1325221 - RNA, 19 nt, Homo sapiens
  misc_RNA (1)...(19): siRNA sense strand
gucuuugacuuacugaaca

SEQ ID NO: 1325222 - RNA, 19 nt, Homo sapiens
  misc_RNA (1)...(19): siRNA sense strand
gcucuacaaggaguucaaa

SEQ ID NO: 1325223 - RNA, 19 nt, Homo sapiens
  misc_RNA (1)...(19): siRNA sense strand
agcaacaggucucaauucu

SEQ ID NO: 1325224 - RNA, 19 nt, Homo sapiens
  misc_RNA (1)...(19): siRNA sense strand
gcacggguggggagucaua

SEQ ID NO: 1325225 - RNA, 19 nt, Homo sapiens
  misc_RNA (1)...(19): siRNA sense strand
uaccugugcugaauacacu

SEQ ID NO: 1325226 - RNA, 19 nt, Homo sapiens
  misc_RNA (1)...(19): siRNA sense strand
ggaggagauccgcauugau

SEQ ID NO: 1325227 - RNA, 19 nt, Homo sapiens
  misc_RNA (1)...(19): siRNA sense strand
uaaggaggagauccgcauu

SEQ ID NO: 1325228 - RNA, 19 nt, Homo sapiens
  misc_RNA (1)...(19): siRNA sense strand
gacccgucuuauuaucuga

SEQ ID NO: 1325229 - RNA, 19 nt, Homo sapiens
  misc_RNA (1)...(19): siRNA sense strand
ucaaugucucuaacuucua

SEQ ID NO: 1325230 - RNA, 19 nt, Homo sapiens
  misc_RNA (1)...(19): siRNA sense strand
ggucccugaucaagcugaa

SEQ ID NO: 1325231 - RNA, 19 nt, Homo sapiens
  misc_RNA (1)...(19): siRNA sense strand
gggcuuugacguacugaca

SEQ ID NO: 1325232 - RNA, 19 nt, Homo sapiens
  misc_RNA (1)...(19): siRNA sense strand
caacaggucucaauucuuc

SEQ ID NO: 1325233 - RNA, 19 nt, Homo sapiens
  misc_RNA (1)...(19): siRNA sense strand
gcaagaagcauuauuacga

SEQ ID NO: 1325234 - RNA, 19 nt, Homo sapiens
  misc_RNA (1)...(19): siRNA sense strand
gcugaacgcugcccacuau

SEQ ID NO: 1325235 - RNA, 19 nt, Homo sapiens
  misc_RNA (1)...(19): siRNA sense strand
ccaaacaggacccgucuua

SEQ ID NO: 1325236 - RNA, 19 nt, Homo sapiens
  misc_RNA (1)...(19): siRNA sense strand
caagaagcauuauuacgau

SEQ ID NO: 1325237 - RNA, 19 nt, Homo sapiens
  misc_RNA (1)...(19): siRNA sense strand
gaagacacagcucaaggua

SEQ ID NO: 1325238 - RNA, 19 nt, Homo sapiens
  misc_RNA (1)...(19): siRNA sense strand
gaagccagaucucccacaa

SEQ ID NO: 1325239 - RNA, 19 nt, Homo sapiens
  misc_RNA (1)...(19): siRNA sense strand
uuccauggcuuaagaagua

SEQ ID NO: 1325240 - RNA, 19 nt, Homo sapiens
  misc_RNA (1)...(19): siRNA sense strand
gcaguggaacagcuaaaua

SEQ ID NO: 1325241 - RNA, 19 nt, Homo sapiens
  misc_RNA (1)...(19): siRNA sense strand
gaggagauccgcauugaug

SEQ ID NO: 1325242 - RNA, 19 nt, Homo sapiens
  misc_RNA (1)...(19): siRNA sense strand
ugacagccauggagaaugu

SEQ ID NO: 1325243 - RNA, 19 nt, Homo sapiens
  misc_RNA (1)...(19): siRNA sense strand
caaugucucuaacuucuau

SEQ ID NO: 1325244 - RNA, 19 nt, Homo sapiens
  misc_RNA (1)...(19): siRNA sense strand
ggaggccgaugcccagauu

SEQ ID NO: 1325245 - RNA, 19 nt, Homo sapiens
  misc_RNA (1)...(19): siRNA sense strand
aaacaggacccgucuuauu

SEQ ID NO: 1325246 - RNA, 19 nt, Homo sapiens
  misc_RNA (1)...(19): siRNA sense strand
aacaggacccgucuuauua

SEQ ID NO: 1325247 - RNA, 19 nt, Homo sapiens
  misc_RNA (1)...(19): siRNA sense strand
gugccuaccuggacaagaa

SEQ ID NO: 1325248 - RNA, 19 nt, Homo sapiens
  misc_RNA (1)...(19): siRNA sense strand
gcuaccaguuugugaagaa

SEQ ID NO: 1325249 - RNA, 19 nt, Homo sapiens
  misc_RNA (1)...(19): siRNA sense strand
uggaacagcuaaauaucaa

SEQ ID NO: 1325250 - RNA, 19 nt, Homo sapiens
  misc_RNA (1)...(19): siRNA sense strand
aauaauagacccagaugaa

SEQ ID NO: 1325251 - RNA, 19 nt, Homo sapiens
  misc_RNA (1)...(19): siRNA sense strand
ggaggucccugaucaagcu

SEQ ID NO: 1325252 - RNA, 19 nt, Homo sapiens
  misc_RNA (1)...(19): siRNA sense strand
uggagaauguggagaguga

SEQ ID NO: 1325253 - RNA, 19 nt, Homo sapiens
  misc_RNA (1)...(19): siRNA sense strand
ugcaggagcucuacaagga

SEQ ID NO: 1325254 - RNA, 19 nt, Homo sapiens
  misc_RNA (1)...(19): siRNA sense strand
ccagaucucccacaaacaa

SEQ ID NO: 1325255 - RNA, 19 nt, Homo sapiens
  misc_RNA (1)...(19): siRNA sense strand
ggacccgucuuauuaucug

SEQ ID NO: 1325256 - RNA, 19 nt, Homo sapiens
  misc_RNA (1)...(19): siRNA sense strand
uggcaucgucuuugacuua

SEQ ID NO: 1325257 - RNA, 19 nt, Homo sapiens
  misc_RNA (1)...(19): siRNA sense strand
uaauagacccagaugaaga

SEQ ID NO: 1325258 - RNA, 19 nt, Homo sapiens
  misc_RNA (1)...(19): siRNA sense strand
gugcugcgcuaccaguuug

SEQ ID NO: 1325259 - RNA, 19 nt, Homo sapiens
  misc_RNA (1)...(19): siRNA sense strand
guacauuaccugugcugaa

SEQ ID NO: 1325260 - RNA, 19 nt, Homo sapiens
  misc_RNA (1)...(19): siRNA sense strand
aaacugaccgcccuaagga

SEQ ID NO: 1325261 - RNA, 19 nt, Homo sapiens
  misc_RNA (1)...(19): siRNA sense strand
ggaagacacagcucaaggu

SEQ ID NO: 1325262 - RNA, 19 nt, Homo sapiens
  misc_RNA (1)...(19): siRNA sense strand
gaucucccacaaacaaauu

SEQ ID NO: 1325263 - RNA, 19 nt, Homo sapiens
  misc_RNA (1)...(19): siRNA sense strand
caacaagggcgaccucaac

SEQ ID NO: 1325264 - RNA, 19 nt, Homo sapiens
  misc_RNA (1)...(19): siRNA sense strand
caaguucaaugucucuaac

SEQ ID NO: 1325265 - RNA, 19 nt, Homo sapiens
  misc_RNA (1)...(19): siRNA sense strand
uacauuaccugugcugaau

SEQ ID NO: 1325266 - RNA, 19 nt, Homo sapiens
  misc_RNA (1)...(19): siRNA sense strand
ucucuaacuucuaucaugu

SEQ ID NO: 1325267 - RNA, 19 nt, Homo sapiens
  misc_RNA (1)...(19): siRNA sense strand
agaagaaaguggacaagcu

SEQ ID NO: 1325268 - RNA, 19 nt, Homo sapiens
  misc_RNA (1)...(19): siRNA sense strand
gcaacaggucucaauucuu

SEQ ID NO: 1325269 - RNA, 19 nt, Homo sapiens
  misc_RNA (1)...(19): siRNA sense strand
ucaucaggcuuugcaagaa

SEQ ID NO: 1325270 - RNA, 19 nt, Homo sapiens
  misc_RNA (1)...(19): siRNA sense strand
caguggaacagcuaaauau

SEQ ID NO: 1325271 - RNA, 19 nt, Homo sapiens
  misc_RNA (1)...(19): siRNA sense strand
gggaagcgacagcaccaaa

SEQ ID NO: 1325272 - RNA, 19 nt, Homo sapiens
  misc_RNA (1)...(19): siRNA sense strand
ucuaacuucuaucauguga

SEQ ID NO: 1325273 - RNA, 19 nt, Homo sapiens
  misc_RNA (1)...(19): siRNA sense strand
caucaggcuuugcaagaag

SEQ ID NO: 1325274 - RNA, 19 nt, Homo sapiens
  misc_RNA (1)...(19): siRNA sense strand
caaacaaauuuucgucguu

SEQ ID NO: 1325275 - RNA, 19 nt, Homo sapiens
  misc_RNA (1)...(19): siRNA sense strand
aggaggagauccgcauuga

SEQ ID NO: 1325276 - RNA, 19 nt, Homo sapiens
  misc_RNA (1)...(19): siRNA sense strand
guggaacagcuaaauauca

SEQ ID NO: 1325277 - RNA, 19 nt, Homo sapiens
  misc_RNA (1)...(19): siRNA sense strand
caucgucuuugacuuacug

SEQ ID NO: 1325278 - RNA, 19 nt, Homo sapiens
  misc_RNA (1)...(19): siRNA sense strand
cagcaacaggucucaauuc

SEQ ID NO: 1325279 - RNA, 19 nt, Homo sapiens
  misc_RNA (1)...(19): siRNA sense strand
ggagaccacacaugaagca

SEQ ID NO: 1325280 - RNA, 19 nt, Homo sapiens
  misc_RNA (1)...(19): siRNA sense strand
uaaauaucaaggccaagaa

SEQ ID NO: 1325281 - RNA, 19 nt, Homo sapiens
  misc_RNA (1)...(19): siRNA sense strand
agacccagaugaagagaag

SEQ ID NO: 1325282 - RNA, 19 nt, Homo sapiens
  misc_RNA (1)...(19): siRNA sense strand
aagcugaacuuuuccaaga

SEQ ID NO: 1325283 - RNA, 19 nt, Homo sapiens
  misc_RNA (1)...(19): siRNA sense strand
gacaagaagcauaccaucu

SEQ ID NO: 1325284 - RNA, 19 nt, Homo sapiens
  misc_RNA (1)...(19): siRNA sense strand
gaaaacuucaucaggcuuu

SEQ ID NO: 1325285 - RNA, 19 nt, Homo sapiens
  misc_RNA (1)...(19): siRNA sense strand
gucucuaacuucuaucaug

SEQ ID NO: 1325286 - RNA, 19 nt, Homo sapiens
  misc_RNA (1)...(19): siRNA sense strand
gaagaagaaaguggacaag

SEQ ID NO: 1325287 - RNA, 19 nt, Homo sapiens
  misc_RNA (1)...(19): siRNA sense strand
cuaaauaucaaggccaaga

SEQ ID NO: 1325288 - RNA, 19 nt, Homo sapiens
  misc_RNA (1)...(19): siRNA sense strand
gaaaauaauagacccagau

SEQ ID NO: 1325289 - RNA, 19 nt, Homo sapiens
  misc_RNA (1)...(19): siRNA sense strand
caggacccgucuuauuauc

SEQ ID NO: 1325290 - RNA, 19 nt, Homo sapiens
  misc_RNA (1)...(19): siRNA sense strand
gaagcauaccaucuuugga

SEQ ID NO: 1325291 - RNA, 19 nt, Homo sapiens
  misc_RNA (1)...(19): siRNA sense strand
cugaauacacucacuuuua

SEQ ID NO: 1325292 - RNA, 19 nt, Homo sapiens
  misc_RNA (1)...(19): siRNA sense strand
acagauccauccggaacuu

SEQ ID NO: 1325293 - RNA, 19 nt, Homo sapiens
  misc_RNA (1)...(19): siRNA sense strand
gaaaguggacaagcugaac

SEQ ID NO: 1325294 - RNA, 19 nt, Homo sapiens
  misc_RNA (1)...(19): siRNA sense strand
uaucaaggccaagaacuuc

SEQ ID NO: 1325295 - RNA, 19 nt, Homo sapiens
  misc_RNA (1)...(19): siRNA sense strand
ucaauucuucaucacguuu

SEQ ID NO: 1325296 - RNA, 19 nt, Homo sapiens
  misc_RNA (1)...(19): siRNA sense strand
ugaucaagcugaacuuuuc

SEQ ID NO: 1325297 - RNA, 19 nt, Homo sapiens
  misc_RNA (1)...(19): siRNA sense strand
acugcgaccugacaccaaa

SEQ ID NO: 1325298 - RNA, 19 nt, Homo sapiens
  misc_RNA (1)...(19): siRNA sense strand
gaacgcugcccacuauucc

SEQ ID NO: 1325299 - RNA, 19 nt, Homo sapiens
  misc_RNA (1)...(19): siRNA sense strand
caaacaggacccgucuuau

SEQ ID NO: 1325300 - RNA, 19 nt, Homo sapiens
  misc_RNA (1)...(19): siRNA sense strand
acaaguucaaugucucuaa

SEQ ID NO: 1325301 - RNA, 19 nt, Homo sapiens
  misc_RNA (1)...(19): siRNA sense strand
caacgucuacgccuaugag

SEQ ID NO: 1325302 - RNA, 19 nt, Homo sapiens
  misc_RNA (1)...(19): siRNA sense strand
cauuaccugugcugaauac

SEQ ID NO: 1325303 - RNA, 19 nt, Homo sapiens
  misc_RNA (1)...(19): siRNA sense strand
guucaaugucucuaacuuc

SEQ ID NO: 1325304 - RNA, 19 nt, Homo sapiens
  misc_RNA (1)...(19): siRNA sense strand
acaggacccgucuuauuau

SEQ ID NO: 1325305 - RNA, 19 nt, Homo sapiens
  misc_RNA (1)...(19): siRNA sense strand
agccagaucucccacaaac

SEQ ID NO: 1325306 - RNA, 19 nt, Homo sapiens
  misc_RNA (1)...(19): siRNA sense strand
agaagaagaaaguggacaa

SEQ ID NO: 1325307 - RNA, 19 nt, Homo sapiens
  misc_RNA (1)...(19): siRNA sense strand
gcaacgucuacgccuauga

SEQ ID NO: 1325308 - RNA, 19 nt, Homo sapiens
  misc_RNA (1)...(19): siRNA sense strand
ucccggagaccacacauga

SEQ ID NO: 1325309 - RNA, 19 nt, Homo sapiens
  misc_RNA (1)...(19): siRNA sense strand
ugaacgcugcccacuauuc

SEQ ID NO: 1325310 - RNA, 19 nt, Homo sapiens
  misc_RNA (1)...(19): siRNA sense strand
gcaccaaaaggacaaaaug

SEQ ID NO: 1325311 - RNA, 19 nt, Homo sapiens
  misc_RNA (1)...(19): siRNA sense strand
gucuuugacuuacugaaca

SEQ ID NO: 1325312 - RNA, 19 nt, Homo sapiens
  misc_RNA (1)...(19): siRNA sense strand
gcucuacaaggaguucaaa

SEQ ID NO: 1325313 - RNA, 19 nt, Homo sapiens
  misc_RNA (1)...(19): siRNA sense strand
agcaacaggucucaauucu

SEQ ID NO: 1325314 - RNA, 19 nt, Homo sapiens
  misc_RNA (1)...(19): siRNA sense strand
gcacggguggggagucaua

SEQ ID NO: 1325315 - RNA, 19 nt, Homo sapiens
  misc_RNA (1)...(19): siRNA sense strand
uaccugugcugaauacacu

SEQ ID NO: 1325316 - RNA, 19 nt, Homo sapiens
  misc_RNA (1)...(19): siRNA sense strand
ggaggagauccgcauugau

SEQ ID NO: 1325317 - RNA, 19 nt, Homo sapiens
  misc_RNA (1)...(19): siRNA sense strand
uaaggaggagauccgcauu

SEQ ID NO: 1325318 - RNA, 19 nt, Homo sapiens
  misc_RNA (1)...(19): siRNA sense strand
gacccgucuuauuaucuga

SEQ ID NO: 1325319 - RNA, 19 nt, Homo sapiens
  misc_RNA (1)...(19): siRNA sense strand
ucaaugucucuaacuucua

SEQ ID NO: 1325320 - RNA, 19 nt, Homo sapiens
  misc_RNA (1)...(19): siRNA sense strand
ggucccugaucaagcugaa

SEQ ID NO: 1325321 - RNA, 19 nt, Homo sapiens
  misc_RNA (1)...(19): siRNA sense strand
gggcuuugacguacugaca

SEQ ID NO: 1325322 - RNA, 19 nt, Homo sapiens
  misc_RNA (1)...(19): siRNA sense strand
ggaagaagauguauuucaa

SEQ ID NO: 1325323 - RNA, 19 nt, Homo sapiens
  misc_RNA (1)...(19): siRNA sense strand
ggaagaaacucugccagua

SEQ ID NO: 1325324 - RNA, 19 nt, Homo sapiens
  misc_RNA (1)...(19): siRNA sense strand
gcagauccgcaaacgauua

SEQ ID NO: 1325325 - RNA, 19 nt, Homo sapiens
  misc_RNA (1)...(19): siRNA sense strand
caacugccauucuggauuc

SEQ ID NO: 1325326 - RNA, 19 nt, Homo sapiens
  misc_RNA (1)...(19): siRNA sense strand
ucacugaccugccuuugug

SEQ ID NO: 1325327 - RNA, 19 nt, Homo sapiens
  misc_RNA (1)...(19): siRNA sense strand
gaagaaacucugccaguac

SEQ ID NO: 1325328 - RNA, 19 nt, Homo sapiens
  misc_RNA (1)...(19): siRNA sense strand
ucaaacuuguccgauguua

SEQ ID NO: 1325329 - RNA, 19 nt, Homo sapiens
  misc_RNA (1)...(19): siRNA sense strand
aaagagcaguauggagaua

SEQ ID NO: 1325330 - RNA, 19 nt, Homo sapiens
  misc_RNA (1)...(19): siRNA sense strand
caaacacugucacauccuu

SEQ ID NO: 1325331 - RNA, 19 nt, Homo sapiens
  misc_RNA (1)...(19): siRNA sense strand
cgcaaacgauuaauucugu

SEQ ID NO: 1325332 - RNA, 19 nt, Homo sapiens
  misc_RNA (1)...(19): siRNA sense strand
uguuggagcugauagcaaa

SEQ ID NO: 1325333 - RNA, 19 nt, Homo sapiens
  misc_RNA (1)...(19): siRNA sense strand
acaaagggcagcuggauug

SEQ ID NO: 1325334 - RNA, 19 nt, Homo sapiens
  misc_RNA (1)...(19): siRNA sense strand
agacuggacuucucaacug

SEQ ID NO: 1325335 - RNA, 19 nt, Homo sapiens
  misc_RNA (1)...(19): siRNA sense strand
gugcuggucgggaacauua

SEQ ID NO: 1325336 - RNA, 19 nt, Homo sapiens
  misc_RNA (1)...(19): siRNA sense strand
guacacugguccaaagagu

SEQ ID NO: 1325337 - RNA, 19 nt, Homo sapiens
  misc_RNA (1)...(19): siRNA sense strand
gaaagagcaguauggagau

SEQ ID NO: 1325338 - RNA, 19 nt, Homo sapiens
  misc_RNA (1)...(19): siRNA sense strand
caacagacuggacuucuca

SEQ ID NO: 1325339 - RNA, 19 nt, Homo sapiens
  misc_RNA (1)...(19): siRNA sense strand
ggacuucucaacugccauu

SEQ ID NO: 1325340 - RNA, 19 nt, Homo sapiens
  misc_RNA (1)...(19): siRNA sense strand
aagggcagcuggauuggaa

SEQ ID NO: 1325341 - RNA, 19 nt, Homo sapiens
  misc_RNA (1)...(19): siRNA sense strand
gauccgcaaacgauuaauu

SEQ ID NO: 1325342 - RNA, 19 nt, Homo sapiens
  misc_RNA (1)...(19): siRNA sense strand
gauguuacccaaggaaaga

SEQ ID NO: 1325343 - RNA, 19 nt, Homo sapiens
  misc_RNA (1)...(19): siRNA sense strand
caaagucacagcucacauc

SEQ ID NO: 1325344 - RNA, 19 nt, Homo sapiens
  misc_RNA (1)...(19): siRNA sense strand
ccaaagagucggcaagucu

SEQ ID NO: 1325345 - RNA, 19 nt, Homo sapiens
  misc_RNA (1)...(19): siRNA sense strand
gaagaccagcaaaacauua

SEQ ID NO: 1325346 - RNA, 19 nt, Homo sapiens
  misc_RNA (1)...(19): siRNA sense strand
ccaggacuuuaucaacuug

SEQ ID NO: 1325347 - RNA, 19 nt, Homo sapiens
  misc_RNA (1)...(19): siRNA sense strand
cagcuggauuggaagaaga

SEQ ID NO: 1325348 - RNA, 19 nt, Homo sapiens
  misc_RNA (1)...(19): siRNA sense strand
guacugaaaguccuugaag

SEQ ID NO: 1325349 - RNA, 19 nt, Homo sapiens
  misc_RNA (1)...(19): siRNA sense strand
gacaaagggcagcuggauu

SEQ ID NO: 1325350 - RNA, 19 nt, Homo sapiens
  misc_RNA (1)...(19): siRNA sense strand
ccagaagauuuaacuacgu

SEQ ID NO: 1325351 - RNA, 19 nt, Homo sapiens
  misc_RNA (1)...(19): siRNA sense strand
uauguacacugguccaaag

SEQ ID NO: 1325352 - RNA, 19 nt, Homo sapiens
  misc_RNA (1)...(19): siRNA sense strand
caaggaaagagcaguaugg

SEQ ID NO: 1325353 - RNA, 19 nt, Homo sapiens
  misc_RNA (1)...(19): siRNA sense strand
gcagcuggauuggaagaag

SEQ ID NO: 1325354 - RNA, 19 nt, Homo sapiens
  misc_RNA (1)...(19): siRNA sense strand
cagauccgcaaacgauuaa

SEQ ID NO: 1325355 - RNA, 19 nt, Homo sapiens
  misc_RNA (1)...(19): siRNA sense strand
gggaagcuuucaacagacu

SEQ ID NO: 1325356 - RNA, 19 nt, Homo sapiens
  misc_RNA (1)...(19): siRNA sense strand
cggcagauccgcaaacgau

SEQ ID NO: 1325357 - RNA, 19 nt, Homo sapiens
  misc_RNA (1)...(19): siRNA sense strand
uuucaaacuuguccgaugu

SEQ ID NO: 1325358 - RNA, 19 nt, Homo sapiens
  misc_RNA (1)...(19): siRNA sense strand
cccaggacuuuaucaacuu

SEQ ID NO: 1325359 - RNA, 19 nt, Homo sapiens
  misc_RNA (1)...(19): siRNA sense strand
gacccucuacacauccuua

SEQ ID NO: 1325360 - RNA, 19 nt, Homo sapiens
  misc_RNA (1)...(19): siRNA sense strand
ucaacagacuggacuucuc

SEQ ID NO: 1325361 - RNA, 19 nt, Homo sapiens
  misc_RNA (1)...(19): siRNA sense strand
gccuacaacugaacaucau

SEQ ID NO: 1325362 - RNA, 19 nt, Homo sapiens
  misc_RNA (1)...(19): siRNA sense strand
uacugaaaguccuugaaga

SEQ ID NO: 1325363 - RNA, 19 nt, Homo sapiens
  misc_RNA (1)...(19): siRNA sense strand
uggaagaagauguauuuca

SEQ ID NO: 1325364 - RNA, 19 nt, Homo sapiens
  misc_RNA (1)...(19): siRNA sense strand
uggauuggaagaagaugua

SEQ ID NO: 1325365 - RNA, 19 nt, Homo sapiens
  misc_RNA (1)...(19): siRNA sense strand
aagaccggcugcuguggaa

SEQ ID NO: 1325366 - RNA, 19 nt, Homo sapiens
  misc_RNA (1)...(19): siRNA sense strand
cuucagcucugcaaacacu

SEQ ID NO: 1325367 - RNA, 19 nt, Homo sapiens
  misc_RNA (1)...(19): siRNA sense strand
ggacuuuaucaacuuguuc

SEQ ID NO: 1325368 - RNA, 19 nt, Homo sapiens
  misc_RNA (1)...(19): siRNA sense strand
caaacgauuaauucuguca

SEQ ID NO: 1325369 - RNA, 19 nt, Homo sapiens
  misc_RNA (1)...(19): siRNA sense strand
gcugcuccguuucacuuuc

SEQ ID NO: 1325370 - RNA, 19 nt, Homo sapiens
  misc_RNA (1)...(19): siRNA sense strand
ucaacugccauucuggauu

SEQ ID NO: 1325371 - RNA, 19 nt, Homo sapiens
  misc_RNA (1)...(19): siRNA sense strand
cuucucaacugccauucug

SEQ ID NO: 1325372 - RNA, 19 nt, Homo sapiens
  misc_RNA (1)...(19): siRNA sense strand
gaccggcugcuguggaaga

SEQ ID NO: 1325373 - RNA, 19 nt, Homo sapiens
  misc_RNA (1)...(19): siRNA sense strand
ggucgggaacauuaacaug

SEQ ID NO: 1325374 - RNA, 19 nt, Homo sapiens
  misc_RNA (1)...(19): siRNA sense strand
gauuggaagaagauguauu

SEQ ID NO: 1325375 - RNA, 19 nt, Homo sapiens
  misc_RNA (1)...(19): siRNA sense strand
uccagacccucuacacauc

SEQ ID NO: 1325376 - RNA, 19 nt, Homo sapiens
  misc_RNA (1)...(19): siRNA sense strand
ccaaggaaagagcaguaug

SEQ ID NO: 1325377 - RNA, 19 nt, Homo sapiens
  misc_RNA (1)...(19): siRNA sense strand
gcaaagucacagcucacau

SEQ ID NO: 1325378 - RNA, 19 nt, Homo sapiens
  misc_RNA (1)...(19): siRNA sense strand
aaacacugucacauccuuu

SEQ ID NO: 1325379 - RNA, 19 nt, Homo sapiens
  misc_RNA (1)...(19): siRNA sense strand
ccaaaagaacuucaugaau

SEQ ID NO: 1325380 - RNA, 19 nt, Homo sapiens
  misc_RNA (1)...(19): siRNA sense strand
ggaagaagauguauuucaa

SEQ ID NO: 1325381 - RNA, 19 nt, Homo sapiens
  misc_RNA (1)...(19): siRNA sense strand
ggaagaaacucugccagua

SEQ ID NO: 1325382 - RNA, 19 nt, Homo sapiens
  misc_RNA (1)...(19): siRNA sense strand
gcagauccgcaaacgauua

SEQ ID NO: 1325383 - RNA, 19 nt, Homo sapiens
  misc_RNA (1)...(19): siRNA sense strand
ucacugaccugccuuugug

SEQ ID NO: 1325384 - RNA, 19 nt, Homo sapiens
  misc_RNA (1)...(19): siRNA sense strand
gaagaaacucugccaguac

SEQ ID NO: 1325385 - RNA, 19 nt, Homo sapiens
  misc_RNA (1)...(19): siRNA sense strand
ucaaacuuguccgauguua

SEQ ID NO: 1325386 - RNA, 19 nt, Homo sapiens
  misc_RNA (1)...(19): siRNA sense strand
aaagagcaguauggagaua

SEQ ID NO: 1325387 - RNA, 19 nt, Homo sapiens
  misc_RNA (1)...(19): siRNA sense strand
caaacacugucacauccuu

SEQ ID NO: 1325388 - RNA, 19 nt, Homo sapiens
  misc_RNA (1)...(19): siRNA sense strand
cgcaaacgauuaauucugu

SEQ ID NO: 1325389 - RNA, 19 nt, Homo sapiens
  misc_RNA (1)...(19): siRNA sense strand
gugcuggucgggaacauua

SEQ ID NO: 1325390 - RNA, 19 nt, Homo sapiens
  misc_RNA (1)...(19): siRNA sense strand
acaaagggcagcuggauug

SEQ ID NO: 1325391 - RNA, 19 nt, Homo sapiens
  misc_RNA (1)...(19): siRNA sense strand
guacacugguccaaagagu

SEQ ID NO: 1325392 - RNA, 19 nt, Homo sapiens
  misc_RNA (1)...(19): siRNA sense strand
gaaagagcaguauggagau

SEQ ID NO: 1325393 - RNA, 19 nt, Homo sapiens
  misc_RNA (1)...(19): siRNA sense strand
aagggcagcuggauuggaa

SEQ ID NO: 1325394 - RNA, 19 nt, Homo sapiens
  misc_RNA (1)...(19): siRNA sense strand
gauccgcaaacgauuaauu

SEQ ID NO: 1325395 - RNA, 19 nt, Homo sapiens
  misc_RNA (1)...(19): siRNA sense strand
gauguuacccaaggaaaga

SEQ ID NO: 1325396 - RNA, 19 nt, Homo sapiens
  misc_RNA (1)...(19): siRNA sense strand
ccaaagagucggcaagucu

SEQ ID NO: 1325397 - RNA, 19 nt, Homo sapiens
  misc_RNA (1)...(19): siRNA sense strand
gaagaccagcaaaacauua

SEQ ID NO: 1325398 - RNA, 19 nt, Homo sapiens
  misc_RNA (1)...(19): siRNA sense strand
ccaggacuuuaucaacuug

SEQ ID NO: 1325399 - RNA, 19 nt, Homo sapiens
  misc_RNA (1)...(19): siRNA sense strand
cagcuggauuggaagaaga

SEQ ID NO: 1325400 - RNA, 19 nt, Homo sapiens
  misc_RNA (1)...(19): siRNA sense strand
gacaaagggcagcuggauu

SEQ ID NO: 1325401 - RNA, 19 nt, Homo sapiens
  misc_RNA (1)...(19): siRNA sense strand
guacugaaaguccuugaag

SEQ ID NO: 1325402 - RNA, 19 nt, Homo sapiens
  misc_RNA (1)...(19): siRNA sense strand
uauguacacugguccaaag

SEQ ID NO: 1325403 - RNA, 19 nt, Homo sapiens
  misc_RNA (1)...(19): siRNA sense strand
caaggaaagagcaguaugg

SEQ ID NO: 1325404 - RNA, 19 nt, Homo sapiens
  misc_RNA (1)...(19): siRNA sense strand
gcagcuggauuggaagaag

SEQ ID NO: 1325405 - RNA, 19 nt, Homo sapiens
  misc_RNA (1)...(19): siRNA sense strand
cagauccgcaaacgauuaa

SEQ ID NO: 1325406 - RNA, 19 nt, Homo sapiens
  misc_RNA (1)...(19): siRNA sense strand
cggcagauccgcaaacgau

SEQ ID NO: 1325407 - RNA, 19 nt, Homo sapiens
  misc_RNA (1)...(19): siRNA sense strand
uuucaaacuuguccgaugu

SEQ ID NO: 1325408 - RNA, 19 nt, Homo sapiens
  misc_RNA (1)...(19): siRNA sense strand
cccaggacuuuaucaacuu

SEQ ID NO: 1325409 - RNA, 19 nt, Homo sapiens
  misc_RNA (1)...(19): siRNA sense strand
gacccucuacacauccuua

SEQ ID NO: 1325410 - RNA, 19 nt, Homo sapiens
  misc_RNA (1)...(19): siRNA sense strand
gccuacaacugaacaucau

SEQ ID NO: 1325411 - RNA, 19 nt, Homo sapiens
  misc_RNA (1)...(19): siRNA sense strand
aagaccggcugcuguggaa

SEQ ID NO: 1325412 - RNA, 19 nt, Homo sapiens
  misc_RNA (1)...(19): siRNA sense strand
uggaagaagauguauuuca

SEQ ID NO: 1325413 - RNA, 19 nt, Homo sapiens
  misc_RNA (1)...(19): siRNA sense strand
uggauuggaagaagaugua

SEQ ID NO: 1325414 - RNA, 19 nt, Homo sapiens
  misc_RNA (1)...(19): siRNA sense strand
uacugaaaguccuugaaga

SEQ ID NO: 1325415 - RNA, 19 nt, Homo sapiens
  misc_RNA (1)...(19): siRNA sense strand
cuucagcucugcaaacacu

SEQ ID NO: 1325416 - RNA, 19 nt, Homo sapiens
  misc_RNA (1)...(19): siRNA sense strand
ggacuuuaucaacuuguuc

SEQ ID NO: 1325417 - RNA, 19 nt, Homo sapiens
  misc_RNA (1)...(19): siRNA sense strand
caaacgauuaauucuguca

SEQ ID NO: 1325418 - RNA, 19 nt, Homo sapiens
  misc_RNA (1)...(19): siRNA sense strand
gcugcuccguuucacuuuc

SEQ ID NO: 1325419 - RNA, 19 nt, Homo sapiens
  misc_RNA (1)...(19): siRNA sense strand
ggucgggaacauuaacaug

SEQ ID NO: 1325420 - RNA, 19 nt, Homo sapiens
  misc_RNA (1)...(19): siRNA sense strand
gaccggcugcuguggaaga

SEQ ID NO: 1325421 - RNA, 19 nt, Homo sapiens
  misc_RNA (1)...(19): siRNA sense strand
gauuggaagaagauguauu

SEQ ID NO: 1325422 - RNA, 19 nt, Homo sapiens
  misc_RNA (1)...(19): siRNA sense strand
uccagacccucuacacauc

SEQ ID NO: 1325423 - RNA, 19 nt, Homo sapiens
  misc_RNA (1)...(19): siRNA sense strand
ccaaggaaagagcaguaug

SEQ ID NO: 1325424 - RNA, 19 nt, Homo sapiens
  misc_RNA (1)...(19): siRNA sense strand
aaacacugucacauccuuu

SEQ ID NO: 1325425 - RNA, 19 nt, Homo sapiens
  misc_RNA (1)...(19): siRNA sense strand
ccggaaagcuggcucugua

SEQ ID NO: 1325426 - RNA, 19 nt, Homo sapiens
  misc_RNA (1)...(19): siRNA sense strand
gguccgagauggcagcaaa

SEQ ID NO: 1325427 - RNA, 19 nt, Homo sapiens
  misc_RNA (1)...(19): siRNA sense strand
ggaaagcuggcucuguaga

SEQ ID NO: 1325428 - RNA, 19 nt, Homo sapiens
  misc_RNA (1)...(19): siRNA sense strand
cggcagugcucggcaugua

SEQ ID NO: 1325429 - RNA, 19 nt, Homo sapiens
  misc_RNA (1)...(19): siRNA sense strand
cauguaguguucucagguu

SEQ ID NO: 1325430 - RNA, 19 nt, Homo sapiens
  misc_RNA (1)...(19): siRNA sense strand
aagcuacguuuccuucaga

SEQ ID NO: 1325431 - RNA, 19 nt, Homo sapiens
  misc_RNA (1)...(19): siRNA sense strand
gagaugcggguccgagaug

SEQ ID NO: 1325432 - RNA, 19 nt, Homo sapiens
  misc_RNA (1)...(19): siRNA sense strand
cgaagaagggcucgagaca

SEQ ID NO: 1325433 - RNA, 19 nt, Homo sapiens
  misc_RNA (1)...(19): siRNA sense strand
caagcuacguuuccuucag

SEQ ID NO: 1325434 - RNA, 19 nt, Homo sapiens
  misc_RNA (1)...(19): siRNA sense strand
ggcccucguucccgaagaa

SEQ ID NO: 1325435 - RNA, 19 nt, Homo sapiens
  misc_RNA (1)...(19): siRNA sense strand
cgagauggcagcaaaauuc

SEQ ID NO: 1325436 - RNA, 19 nt, Homo sapiens
  misc_RNA (1)...(19): siRNA sense strand
gcagugcucggcauguagu

SEQ ID NO: 1325437 - RNA, 19 nt, Homo sapiens
  misc_RNA (1)...(19): siRNA sense strand
guaguguucucagguucug

SEQ ID NO: 1325438 - RNA, 19 nt, Homo sapiens
  misc_RNA (1)...(19): siRNA sense strand
ccagcuaccuccugauacc

SEQ ID NO: 1325439 - RNA, 19 nt, Homo sapiens
  misc_RNA (1)...(19): siRNA sense strand
ccggaaagcuggcucugua

SEQ ID NO: 1325440 - RNA, 19 nt, Homo sapiens
  misc_RNA (1)...(19): siRNA sense strand
gguccgagauggcagcaaa

SEQ ID NO: 1325441 - RNA, 19 nt, Homo sapiens
  misc_RNA (1)...(19): siRNA sense strand
ggaaagcuggcucuguaga

SEQ ID NO: 1325442 - RNA, 19 nt, Homo sapiens
  misc_RNA (1)...(19): siRNA sense strand
cggcagugcucggcaugua

SEQ ID NO: 1325443 - RNA, 19 nt, Homo sapiens
  misc_RNA (1)...(19): siRNA sense strand
cauguaguguucucagguu

SEQ ID NO: 1325444 - RNA, 19 nt, Homo sapiens
  misc_RNA (1)...(19): siRNA sense strand
aagcuacguuuccuucaga

SEQ ID NO: 1325445 - RNA, 19 nt, Homo sapiens
  misc_RNA (1)...(19): siRNA sense strand
gagaugcggguccgagaug

SEQ ID NO: 1325446 - RNA, 19 nt, Homo sapiens
  misc_RNA (1)...(19): siRNA sense strand
cgaagaagggcucgagaca

SEQ ID NO: 1325447 - RNA, 19 nt, Homo sapiens
  misc_RNA (1)...(19): siRNA sense strand
caagcuacguuuccuucag

SEQ ID NO: 1325448 - RNA, 19 nt, Homo sapiens
  misc_RNA (1)...(19): siRNA sense strand
ggcccucguucccgaagaa

SEQ ID NO: 1325449 - RNA, 19 nt, Homo sapiens
  misc_RNA (1)...(19): siRNA sense strand
cgagauggcagcaaaauuc

SEQ ID NO: 1325450 - RNA, 19 nt, Homo sapiens
  misc_RNA (1)...(19): siRNA sense strand
gcagugcucggcauguagu

SEQ ID NO: 1325451 - RNA, 19 nt, Homo sapiens
  misc_RNA (1)...(19): siRNA sense strand
guaguguucucagguucug

SEQ ID NO: 1325452 - RNA, 19 nt, Homo sapiens
  misc_RNA (1)...(19): siRNA sense strand
ccagcuaccuccugauacc

SEQ ID NO: 1325453 - RNA, 19 nt, Homo sapiens
  misc_RNA (1)...(19): siRNA sense strand
gaacaaagguggagucaac

SEQ ID NO: 1325454 - RNA, 19 nt, Homo sapiens
  misc_RNA (1)...(19): siRNA sense strand
gaauugaacucugggauca

SEQ ID NO: 1325455 - RNA, 19 nt, Homo sapiens
  misc_RNA (1)...(19): siRNA sense strand
gcaguuuccucauggaugu

SEQ ID NO: 1325456 - RNA, 19 nt, Homo sapiens
  misc_RNA (1)...(19): siRNA sense strand
gcaauaucccuaccacuga

SEQ ID NO: 1325457 - RNA, 19 nt, Homo sapiens
  misc_RNA (1)...(19): siRNA sense strand
gcucagcauugccaagaaa

SEQ ID NO: 1325458 - RNA, 19 nt, Homo sapiens
  misc_RNA (1)...(19): siRNA sense strand
gaagcuuuauggcuacuau

SEQ ID NO: 1325459 - RNA, 19 nt, Homo sapiens
  misc_RNA (1)...(19): siRNA sense strand
uaucagcauuugcccuaua

SEQ ID NO: 1325460 - RNA, 19 nt, Homo sapiens
  misc_RNA (1)...(19): siRNA sense strand
ggauuggacuguacaaggu

SEQ ID NO: 1325461 - RNA, 19 nt, Homo sapiens
  misc_RNA (1)...(19): siRNA sense strand
gcaggaggcucagcauaca

SEQ ID NO: 1325462 - RNA, 19 nt, Homo sapiens
  misc_RNA (1)...(19): siRNA sense strand
caauaucccuaccacugaa

SEQ ID NO: 1325463 - RNA, 19 nt, Homo sapiens
  misc_RNA (1)...(19): siRNA sense strand
ggacuggauuggacuguac

SEQ ID NO: 1325464 - RNA, 19 nt, Homo sapiens
  misc_RNA (1)...(19): siRNA sense strand
ggaacuccaacgacuauga

SEQ ID NO: 1325465 - RNA, 19 nt, Homo sapiens
  misc_RNA (1)...(19): siRNA sense strand
acaucugccugaagcuuua

SEQ ID NO: 1325466 - RNA, 19 nt, Homo sapiens
  misc_RNA (1)...(19): siRNA sense strand
gaacaaccggaaccucaau

SEQ ID NO: 1325467 - RNA, 19 nt, Homo sapiens
  misc_RNA (1)...(19): siRNA sense strand
augaguuucuccucuguua

SEQ ID NO: 1325468 - RNA, 19 nt, Homo sapiens
  misc_RNA (1)...(19): siRNA sense strand
gacuuuggguugcacuuug

SEQ ID NO: 1325469 - RNA, 19 nt, Homo sapiens
  misc_RNA (1)...(19): siRNA sense strand
gaaggaccagcucagcauu

SEQ ID NO: 1325470 - RNA, 19 nt, Homo sapiens
  misc_RNA (1)...(19): siRNA sense strand
ggaccacgaccucauuauc

SEQ ID NO: 1325471 - RNA, 19 nt, Homo sapiens
  misc_RNA (1)...(19): siRNA sense strand
ggacuuuggguugcacuuu

SEQ ID NO: 1325472 - RNA, 19 nt, Homo sapiens
  misc_RNA (1)...(19): siRNA sense strand
guggagcaguuuccucaug

SEQ ID NO: 1325473 - RNA, 19 nt, Homo sapiens
  misc_RNA (1)...(19): siRNA sense strand
gggacuggauuggacugua

SEQ ID NO: 1325474 - RNA, 19 nt, Homo sapiens
  misc_RNA (1)...(19): siRNA sense strand
ggcgagacaucccaaacau

SEQ ID NO: 1325475 - RNA, 19 nt, Homo sapiens
  misc_RNA (1)...(19): siRNA sense strand
gaugcugccuuuaaugacu

SEQ ID NO: 1325476 - RNA, 19 nt, Homo sapiens
  misc_RNA (1)...(19): siRNA sense strand
guuauugguuugcaggaau

SEQ ID NO: 1325477 - RNA, 19 nt, Homo sapiens
  misc_RNA (1)...(19): siRNA sense strand
ucaucaaggucucccaugu

SEQ ID NO: 1325478 - RNA, 19 nt, Homo sapiens
  misc_RNA (1)...(19): siRNA sense strand
acuuggagcugaagccauu

SEQ ID NO: 1325479 - RNA, 19 nt, Homo sapiens
  misc_RNA (1)...(19): siRNA sense strand
cgaccucauuaucugguuu

SEQ ID NO: 1325480 - RNA, 19 nt, Homo sapiens
  misc_RNA (1)...(19): siRNA sense strand
gcauugccaagaaacauga

SEQ ID NO: 1325481 - RNA, 19 nt, Homo sapiens
  misc_RNA (1)...(19): siRNA sense strand
ggagcaguuuccucaugga

SEQ ID NO: 1325482 - RNA, 19 nt, Homo sapiens
  misc_RNA (1)...(19): siRNA sense strand
gaccacgaccucauuaucu

SEQ ID NO: 1325483 - RNA, 19 nt, Homo sapiens
  misc_RNA (1)...(19): siRNA sense strand
uccuggagaugcagaauug

SEQ ID NO: 1325484 - RNA, 19 nt, Homo sapiens
  misc_RNA (1)...(19): siRNA sense strand
gaucauaagccuccuuucc

SEQ ID NO: 1325485 - RNA, 19 nt, Homo sapiens
  misc_RNA (1)...(19): siRNA sense strand
auugaacucugggaucaua

SEQ ID NO: 1325486 - RNA, 19 nt, Homo sapiens
  misc_RNA (1)...(19): siRNA sense strand
ccgaugcugccuuuaauga

SEQ ID NO: 1325487 - RNA, 19 nt, Homo sapiens
  misc_RNA (1)...(19): siRNA sense strand
uaucugguuuggagacaug

SEQ ID NO: 1325488 - RNA, 19 nt, Homo sapiens
  misc_RNA (1)...(19): siRNA sense strand
gggaucauaagccuccuuu

SEQ ID NO: 1325489 - RNA, 19 nt, Homo sapiens
  misc_RNA (1)...(19): siRNA sense strand
aaccggaaccucaaucuug

SEQ ID NO: 1325490 - RNA, 19 nt, Homo sapiens
  misc_RNA (1)...(19): siRNA sense strand
cuuuauggcuacuauguca

SEQ ID NO: 1325491 - RNA, 19 nt, Homo sapiens
  misc_RNA (1)...(19): siRNA sense strand
caacaucugccugaagcuu

SEQ ID NO: 1325492 - RNA, 19 nt, Homo sapiens
  misc_RNA (1)...(19): siRNA sense strand
guucgggaauccauuaaaa

SEQ ID NO: 1325493 - RNA, 19 nt, Homo sapiens
  misc_RNA (1)...(19): siRNA sense strand
ggucucccauguccguaug

SEQ ID NO: 1325494 - RNA, 19 nt, Homo sapiens
  misc_RNA (1)...(19): siRNA sense strand
ccacauuuccaacaauuac

SEQ ID NO: 1325495 - RNA, 19 nt, Homo sapiens
  misc_RNA (1)...(19): siRNA sense strand
uuacuggucuuugccaagu

SEQ ID NO: 1325496 - RNA, 19 nt, Homo sapiens
  misc_RNA (1)...(19): siRNA sense strand
ccacugaagaugaguuucu

SEQ ID NO: 1325497 - RNA, 19 nt, Homo sapiens
  misc_RNA (1)...(19): siRNA sense strand
ccaccuacaaguuugauag

SEQ ID NO: 1325498 - RNA, 19 nt, Homo sapiens
  misc_RNA (1)...(19): siRNA sense strand
gggcgagacaucccaaaca

SEQ ID NO: 1325499 - RNA, 19 nt, Homo sapiens
  misc_RNA (1)...(19): siRNA sense strand
caaccggaaccucaaucuu

SEQ ID NO: 1325500 - RNA, 19 nt, Homo sapiens
  misc_RNA (1)...(19): siRNA sense strand
gaagcacagccacagaucu

SEQ ID NO: 1325501 - RNA, 19 nt, Homo sapiens
  misc_RNA (1)...(19): siRNA sense strand
ugcgggacguuaaugacua

SEQ ID NO: 1325502 - RNA, 19 nt, Homo sapiens
  misc_RNA (1)...(19): siRNA sense strand
uaggaacuccaacgacuau

SEQ ID NO: 1325503 - RNA, 19 nt, Homo sapiens
  misc_RNA (1)...(19): siRNA sense strand
caaagguggagucaacauc

SEQ ID NO: 1325504 - RNA, 19 nt, Homo sapiens
  misc_RNA (1)...(19): siRNA sense strand
acaucgacaucagcaauau

SEQ ID NO: 1325505 - RNA, 19 nt, Homo sapiens
  misc_RNA (1)...(19): siRNA sense strand
gauggucagcuacucuuca

SEQ ID NO: 1325506 - RNA, 19 nt, Homo sapiens
  misc_RNA (1)...(19): siRNA sense strand
gaacuccaacgacuaugac

SEQ ID NO: 1325507 - RNA, 19 nt, Homo sapiens
  misc_RNA (1)...(19): siRNA sense strand
uuauugguuugcaggaauu

SEQ ID NO: 1325508 - RNA, 19 nt, Homo sapiens
  misc_RNA (1)...(19): siRNA sense strand
gacuaugacaccagugaga

SEQ ID NO: 1325509 - RNA, 19 nt, Homo sapiens
  misc_RNA (1)...(19): siRNA sense strand
uacaucgacaucagcaaua

SEQ ID NO: 1325510 - RNA, 19 nt, Homo sapiens
  misc_RNA (1)...(19): siRNA sense strand
ugccaaguaucagcauuug

SEQ ID NO: 1325511 - RNA, 19 nt, Homo sapiens
  misc_RNA (1)...(19): siRNA sense strand
ggcaggaggcucagcauac

SEQ ID NO: 1325512 - RNA, 19 nt, Homo sapiens
  misc_RNA (1)...(19): siRNA sense strand
ccaccugccuccccacauu

SEQ ID NO: 1325513 - RNA, 19 nt, Homo sapiens
  misc_RNA (1)...(19): siRNA sense strand
gcuacuaugucagcaucau

SEQ ID NO: 1325514 - RNA, 19 nt, Homo sapiens
  misc_RNA (1)...(19): siRNA sense strand
gagucaacaucugccugaa

SEQ ID NO: 1325515 - RNA, 19 nt, Homo sapiens
  misc_RNA (1)...(19): siRNA sense strand
gcgucacacuucuccuugu

SEQ ID NO: 1325516 - RNA, 19 nt, Homo sapiens
  misc_RNA (1)...(19): siRNA sense strand
ccgcccaccuacaaguuug

SEQ ID NO: 1325517 - RNA, 19 nt, Homo sapiens
  misc_RNA (1)...(19): siRNA sense strand
gcacuuuguucgggaaucc

SEQ ID NO: 1325518 - RNA, 19 nt, Homo sapiens
  misc_RNA (1)...(19): siRNA sense strand
ccuuuccgaugcugccuuu

SEQ ID NO: 1325519 - RNA, 19 nt, Homo sapiens
  misc_RNA (1)...(19): siRNA sense strand
uggagaugcagaauuguga

SEQ ID NO: 1325520 - RNA, 19 nt, Homo sapiens
  misc_RNA (1)...(19): siRNA sense strand
uuacaucgacaucagcaau

SEQ ID NO: 1325521 - RNA, 19 nt, Homo sapiens
  misc_RNA (1)...(19): siRNA sense strand
gcgggacguuaaugacuac

SEQ ID NO: 1325522 - RNA, 19 nt, Homo sapiens
  misc_RNA (1)...(19): siRNA sense strand
cagcucagcauugccaaga

SEQ ID NO: 1325523 - RNA, 19 nt, Homo sapiens
  misc_RNA (1)...(19): siRNA sense strand
uuaaugacuacguguccua

SEQ ID NO: 1325524 - RNA, 19 nt, Homo sapiens
  misc_RNA (1)...(19): siRNA sense strand
cgucacacuucuccuuguc

SEQ ID NO: 1325525 - RNA, 19 nt, Homo sapiens
  misc_RNA (1)...(19): siRNA sense strand
gugaagcacagccacagau

SEQ ID NO: 1325526 - RNA, 19 nt, Homo sapiens
  misc_RNA (1)...(19): siRNA sense strand
ugaacaaccggaaccucaa

SEQ ID NO: 1325527 - RNA, 19 nt, Homo sapiens
  misc_RNA (1)...(19): siRNA sense strand
gaacaaagguggagucaac

SEQ ID NO: 1325528 - RNA, 19 nt, Homo sapiens
  misc_RNA (1)...(19): siRNA sense strand
gcucagcauugccaagaaa

SEQ ID NO: 1325529 - RNA, 19 nt, Homo sapiens
  misc_RNA (1)...(19): siRNA sense strand
gcaauaucccuaccacuga

SEQ ID NO: 1325530 - RNA, 19 nt, Homo sapiens
  misc_RNA (1)...(19): siRNA sense strand
gaagcuuuauggcuacuau

SEQ ID NO: 1325531 - RNA, 19 nt, Homo sapiens
  misc_RNA (1)...(19): siRNA sense strand
uaucagcauuugcccuaua

SEQ ID NO: 1325532 - RNA, 19 nt, Homo sapiens
  misc_RNA (1)...(19): siRNA sense strand
ggauuggacuguacaaggu

SEQ ID NO: 1325533 - RNA, 19 nt, Homo sapiens
  misc_RNA (1)...(19): siRNA sense strand
caauaucccuaccacugaa

SEQ ID NO: 1325534 - RNA, 19 nt, Homo sapiens
  misc_RNA (1)...(19): siRNA sense strand
ggacuggauuggacuguac

SEQ ID NO: 1325535 - RNA, 19 nt, Homo sapiens
  misc_RNA (1)...(19): siRNA sense strand
ggaacuccaacgacuauga

SEQ ID NO: 1325536 - RNA, 19 nt, Homo sapiens
  misc_RNA (1)...(19): siRNA sense strand
acaucugccugaagcuuua

SEQ ID NO: 1325537 - RNA, 19 nt, Homo sapiens
  misc_RNA (1)...(19): siRNA sense strand
augaguuucuccucuguua

SEQ ID NO: 1325538 - RNA, 19 nt, Homo sapiens
  misc_RNA (1)...(19): siRNA sense strand
gacuuuggguugcacuuug

SEQ ID NO: 1325539 - RNA, 19 nt, Homo sapiens
  misc_RNA (1)...(19): siRNA sense strand
gaaggaccagcucagcauu

SEQ ID NO: 1325540 - RNA, 19 nt, Homo sapiens
  misc_RNA (1)...(19): siRNA sense strand
ggaccacgaccucauuauc

SEQ ID NO: 1325541 - RNA, 19 nt, Homo sapiens
  misc_RNA (1)...(19): siRNA sense strand
ggacuuuggguugcacuuu

SEQ ID NO: 1325542 - RNA, 19 nt, Homo sapiens
  misc_RNA (1)...(19): siRNA sense strand
ggcgagacaucccaaacau

SEQ ID NO: 1325543 - RNA, 19 nt, Homo sapiens
  misc_RNA (1)...(19): siRNA sense strand
gggacuggauuggacugua

SEQ ID NO: 1325544 - RNA, 19 nt, Homo sapiens
  misc_RNA (1)...(19): siRNA sense strand
ucaucaaggucucccaugu

SEQ ID NO: 1325545 - RNA, 19 nt, Homo sapiens
  misc_RNA (1)...(19): siRNA sense strand
acuuggagcugaagccauu

SEQ ID NO: 1325546 - RNA, 19 nt, Homo sapiens
  misc_RNA (1)...(19): siRNA sense strand
cgaccucauuaucugguuu

SEQ ID NO: 1325547 - RNA, 19 nt, Homo sapiens
  misc_RNA (1)...(19): siRNA sense strand
gcauugccaagaaacauga

SEQ ID NO: 1325548 - RNA, 19 nt, Homo sapiens
  misc_RNA (1)...(19): siRNA sense strand
uccuggagaugcagaauug

SEQ ID NO: 1325549 - RNA, 19 nt, Homo sapiens
  misc_RNA (1)...(19): siRNA sense strand
gaccacgaccucauuaucu

SEQ ID NO: 1325550 - RNA, 19 nt, Homo sapiens
  misc_RNA (1)...(19): siRNA sense strand
uaucugguuuggagacaug

SEQ ID NO: 1325551 - RNA, 19 nt, Homo sapiens
  misc_RNA (1)...(19): siRNA sense strand
caacaucugccugaagcuu

SEQ ID NO: 1325552 - RNA, 19 nt, Homo sapiens
  misc_RNA (1)...(19): siRNA sense strand
cuuuauggcuacuauguca

SEQ ID NO: 1325553 - RNA, 19 nt, Homo sapiens
  misc_RNA (1)...(19): siRNA sense strand
guucgggaauccauuaaaa

SEQ ID NO: 1325554 - RNA, 19 nt, Homo sapiens
  misc_RNA (1)...(19): siRNA sense strand
ggucucccauguccguaug

SEQ ID NO: 1325555 - RNA, 19 nt, Homo sapiens
  misc_RNA (1)...(19): siRNA sense strand
ccacauuuccaacaauuac

SEQ ID NO: 1325556 - RNA, 19 nt, Homo sapiens
  misc_RNA (1)...(19): siRNA sense strand
uuacuggucuuugccaagu

SEQ ID NO: 1325557 - RNA, 19 nt, Homo sapiens
  misc_RNA (1)...(19): siRNA sense strand
ccacugaagaugaguuucu

SEQ ID NO: 1325558 - RNA, 19 nt, Homo sapiens
  misc_RNA (1)...(19): siRNA sense strand
ccaccuacaaguuugauag

SEQ ID NO: 1325559 - RNA, 19 nt, Homo sapiens
  misc_RNA (1)...(19): siRNA sense strand
gggcgagacaucccaaaca

SEQ ID NO: 1325560 - RNA, 19 nt, Homo sapiens
  misc_RNA (1)...(19): siRNA sense strand
uaggaacuccaacgacuau

SEQ ID NO: 1325561 - RNA, 19 nt, Homo sapiens
  misc_RNA (1)...(19): siRNA sense strand
gaagcacagccacagaucu

SEQ ID NO: 1325562 - RNA, 19 nt, Homo sapiens
  misc_RNA (1)...(19): siRNA sense strand
ugcgggacguuaaugacua

SEQ ID NO: 1325563 - RNA, 19 nt, Homo sapiens
  misc_RNA (1)...(19): siRNA sense strand
caaagguggagucaacauc

SEQ ID NO: 1325564 - RNA, 19 nt, Homo sapiens
  misc_RNA (1)...(19): siRNA sense strand
acaucgacaucagcaauau

SEQ ID NO: 1325565 - RNA, 19 nt, Homo sapiens
  misc_RNA (1)...(19): siRNA sense strand
gauggucagcuacucuuca

SEQ ID NO: 1325566 - RNA, 19 nt, Homo sapiens
  misc_RNA (1)...(19): siRNA sense strand
gaacuccaacgacuaugac

SEQ ID NO: 1325567 - RNA, 19 nt, Homo sapiens
  misc_RNA (1)...(19): siRNA sense strand
gacuaugacaccagugaga

SEQ ID NO: 1325568 - RNA, 19 nt, Homo sapiens
  misc_RNA (1)...(19): siRNA sense strand
uacaucgacaucagcaaua

SEQ ID NO: 1325569 - RNA, 19 nt, Homo sapiens
  misc_RNA (1)...(19): siRNA sense strand
gcuacuaugucagcaucau

SEQ ID NO: 1325570 - RNA, 19 nt, Homo sapiens
  misc_RNA (1)...(19): siRNA sense strand
ugccaaguaucagcauuug

SEQ ID NO: 1325571 - RNA, 19 nt, Homo sapiens
  misc_RNA (1)...(19): siRNA sense strand
ccaccugccuccccacauu

SEQ ID NO: 1325572 - RNA, 19 nt, Homo sapiens
  misc_RNA (1)...(19): siRNA sense strand
gagucaacaucugccugaa

SEQ ID NO: 1325573 - RNA, 19 nt, Homo sapiens
  misc_RNA (1)...(19): siRNA sense strand
gcgucacacuucuccuugu

SEQ ID NO: 1325574 - RNA, 19 nt, Homo sapiens
  misc_RNA (1)...(19): siRNA sense strand
ccgcccaccuacaaguuug

SEQ ID NO: 1325575 - RNA, 19 nt, Homo sapiens
  misc_RNA (1)...(19): siRNA sense strand
gcacuuuguucgggaaucc

SEQ ID NO: 1325576 - RNA, 19 nt, Homo sapiens
  misc_RNA (1)...(19): siRNA sense strand
uggagaugcagaauuguga

SEQ ID NO: 1325577 - RNA, 19 nt, Homo sapiens
  misc_RNA (1)...(19): siRNA sense strand
uuacaucgacaucagcaau

SEQ ID NO: 1325578 - RNA, 19 nt, Homo sapiens
  misc_RNA (1)...(19): siRNA sense strand
gcgggacguuaaugacuac

SEQ ID NO: 1325579 - RNA, 19 nt, Homo sapiens
  misc_RNA (1)...(19): siRNA sense strand
cagcucagcauugccaaga

SEQ ID NO: 1325580 - RNA, 19 nt, Homo sapiens
  misc_RNA (1)...(19): siRNA sense strand
uuaaugacuacguguccua

SEQ ID NO: 1325581 - RNA, 19 nt, Homo sapiens
  misc_RNA (1)...(19): siRNA sense strand
cgucacacuucuccuuguc

SEQ ID NO: 1325582 - RNA, 19 nt, Homo sapiens
  misc_RNA (1)...(19): siRNA sense strand
gugaagcacagccacagau

SEQ ID NO: 1325583 - RNA, 19 nt, Homo sapiens
  misc_RNA (1)...(19): siRNA sense strand
gaacaaagguggagucaac

SEQ ID NO: 1325584 - RNA, 19 nt, Homo sapiens
  misc_RNA (1)...(19): siRNA sense strand
gaauugaacucugggauca

SEQ ID NO: 1325585 - RNA, 19 nt, Homo sapiens
  misc_RNA (1)...(19): siRNA sense strand
gcaguuuccucauggaugu

SEQ ID NO: 1325586 - RNA, 19 nt, Homo sapiens
  misc_RNA (1)...(19): siRNA sense strand
gcaauaucccuaccacuga

SEQ ID NO: 1325587 - RNA, 19 nt, Homo sapiens
  misc_RNA (1)...(19): siRNA sense strand
gcucagcauugccaagaaa

SEQ ID NO: 1325588 - RNA, 19 nt, Homo sapiens
  misc_RNA (1)...(19): siRNA sense strand
gaagcuuuauggcuacuau

SEQ ID NO: 1325589 - RNA, 19 nt, Homo sapiens
  misc_RNA (1)...(19): siRNA sense strand
uaucagcauuugcccuaua

SEQ ID NO: 1325590 - RNA, 19 nt, Homo sapiens
  misc_RNA (1)...(19): siRNA sense strand
ggauuggacuguacaaggu

SEQ ID NO: 1325591 - RNA, 19 nt, Homo sapiens
  misc_RNA (1)...(19): siRNA sense strand
gcaggaggcucagcauaca

SEQ ID NO: 1325592 - RNA, 19 nt, Homo sapiens
  misc_RNA (1)...(19): siRNA sense strand
caauaucccuaccacugaa

SEQ ID NO: 1325593 - RNA, 19 nt, Homo sapiens
  misc_RNA (1)...(19): siRNA sense strand
ggacuggauuggacuguac

SEQ ID NO: 1325594 - RNA, 19 nt, Homo sapiens
  misc_RNA (1)...(19): siRNA sense strand
ggaacuccaacgacuauga

SEQ ID NO: 1325595 - RNA, 19 nt, Homo sapiens
  misc_RNA (1)...(19): siRNA sense strand
acaucugccugaagcuuua

SEQ ID NO: 1325596 - RNA, 19 nt, Homo sapiens
  misc_RNA (1)...(19): siRNA sense strand
gaacaaccggaaccucaau

SEQ ID NO: 1325597 - RNA, 19 nt, Homo sapiens
  misc_RNA (1)...(19): siRNA sense strand
augaguuucuccucuguua

SEQ ID NO: 1325598 - RNA, 19 nt, Homo sapiens
  misc_RNA (1)...(19): siRNA sense strand
gacuuuggguugcacuuug

SEQ ID NO: 1325599 - RNA, 19 nt, Homo sapiens
  misc_RNA (1)...(19): siRNA sense strand
gaaggaccagcucagcauu

SEQ ID NO: 1325600 - RNA, 19 nt, Homo sapiens
  misc_RNA (1)...(19): siRNA sense strand
ggaccacgaccucauuauc

SEQ ID NO: 1325601 - RNA, 19 nt, Homo sapiens
  misc_RNA (1)...(19): siRNA sense strand
ggacuuuggguugcacuuu

SEQ ID NO: 1325602 - RNA, 19 nt, Homo sapiens
  misc_RNA (1)...(19): siRNA sense strand
guggagcaguuuccucaug

SEQ ID NO: 1325603 - RNA, 19 nt, Homo sapiens
  misc_RNA (1)...(19): siRNA sense strand
gggacuggauuggacugua

SEQ ID NO: 1325604 - RNA, 19 nt, Homo sapiens
  misc_RNA (1)...(19): siRNA sense strand
ggcgagacaucccaaacau

SEQ ID NO: 1325605 - RNA, 19 nt, Homo sapiens
  misc_RNA (1)...(19): siRNA sense strand
gaugcugccuuuaaugacu

SEQ ID NO: 1325606 - RNA, 19 nt, Homo sapiens
  misc_RNA (1)...(19): siRNA sense strand
guuauugguuugcaggaau

SEQ ID NO: 1325607 - RNA, 19 nt, Homo sapiens
  misc_RNA (1)...(19): siRNA sense strand
ucaucaaggucucccaugu

SEQ ID NO: 1325608 - RNA, 19 nt, Homo sapiens
  misc_RNA (1)...(19): siRNA sense strand
acuuggagcugaagccauu

SEQ ID NO: 1325609 - RNA, 19 nt, Homo sapiens
  misc_RNA (1)...(19): siRNA sense strand
cgaccucauuaucugguuu

SEQ ID NO: 1325610 - RNA, 19 nt, Homo sapiens
  misc_RNA (1)...(19): siRNA sense strand
gcauugccaagaaacauga

SEQ ID NO: 1325611 - RNA, 19 nt, Homo sapiens
  misc_RNA (1)...(19): siRNA sense strand
ggagcaguuuccucaugga

SEQ ID NO: 1325612 - RNA, 19 nt, Homo sapiens
  misc_RNA (1)...(19): siRNA sense strand
gaccacgaccucauuaucu

SEQ ID NO: 1325613 - RNA, 19 nt, Homo sapiens
  misc_RNA (1)...(19): siRNA sense strand
uccuggagaugcagaauug

SEQ ID NO: 1325614 - RNA, 19 nt, Homo sapiens
  misc_RNA (1)...(19): siRNA sense strand
gaucauaagccuccuuucc

SEQ ID NO: 1325615 - RNA, 19 nt, Homo sapiens
  misc_RNA (1)...(19): siRNA sense strand
auugaacucugggaucaua

SEQ ID NO: 1325616 - RNA, 19 nt, Homo sapiens
  misc_RNA (1)...(19): siRNA sense strand
ccgaugcugccuuuaauga

SEQ ID NO: 1325617 - RNA, 19 nt, Homo sapiens
  misc_RNA (1)...(19): siRNA sense strand
uaucugguuuggagacaug

SEQ ID NO: 1325618 - RNA, 19 nt, Homo sapiens
  misc_RNA (1)...(19): siRNA sense strand
gggaucauaagccuccuuu

SEQ ID NO: 1325619 - RNA, 19 nt, Homo sapiens
  misc_RNA (1)...(19): siRNA sense strand
aaccggaaccucaaucuug

SEQ ID NO: 1325620 - RNA, 19 nt, Homo sapiens
  misc_RNA (1)...(19): siRNA sense strand
cuuuauggcuacuauguca

SEQ ID NO: 1325621 - RNA, 19 nt, Homo sapiens
  misc_RNA (1)...(19): siRNA sense strand
caacaucugccugaagcuu

SEQ ID NO: 1325622 - RNA, 19 nt, Homo sapiens
  misc_RNA (1)...(19): siRNA sense strand
guucgggaauccauuaaaa

SEQ ID NO: 1325623 - RNA, 19 nt, Homo sapiens
  misc_RNA (1)...(19): siRNA sense strand
ggucucccauguccguaug

SEQ ID NO: 1325624 - RNA, 19 nt, Homo sapiens
  misc_RNA (1)...(19): siRNA sense strand
ccacauuuccaacaauuac

SEQ ID NO: 1325625 - RNA, 19 nt, Homo sapiens
  misc_RNA (1)...(19): siRNA sense strand
uuacuggucuuugccaagu

SEQ ID NO: 1325626 - RNA, 19 nt, Homo sapiens
  misc_RNA (1)...(19): siRNA sense strand
ccacugaagaugaguuucu

SEQ ID NO: 1325627 - RNA, 19 nt, Homo sapiens
  misc_RNA (1)...(19): siRNA sense strand
ccaccuacaaguuugauag

SEQ ID NO: 1325628 - RNA, 19 nt, Homo sapiens
  misc_RNA (1)...(19): siRNA sense strand
gggcgagacaucccaaaca

SEQ ID NO: 1325629 - RNA, 19 nt, Homo sapiens
  misc_RNA (1)...(19): siRNA sense strand
caaccggaaccucaaucuu

SEQ ID NO: 1325630 - RNA, 19 nt, Homo sapiens
  misc_RNA (1)...(19): siRNA sense strand
gaagcacagccacagaucu

SEQ ID NO: 1325631 - RNA, 19 nt, Homo sapiens
  misc_RNA (1)...(19): siRNA sense strand
ugcgggacguuaaugacua

SEQ ID NO: 1325632 - RNA, 19 nt, Homo sapiens
  misc_RNA (1)...(19): siRNA sense strand
uaggaacuccaacgacuau

SEQ ID NO: 1325633 - RNA, 19 nt, Homo sapiens
  misc_RNA (1)...(19): siRNA sense strand
caaagguggagucaacauc

SEQ ID NO: 1325634 - RNA, 19 nt, Homo sapiens
  misc_RNA (1)...(19): siRNA sense strand
acaucgacaucagcaauau

SEQ ID NO: 1325635 - RNA, 19 nt, Homo sapiens
  misc_RNA (1)...(19): siRNA sense strand
gauggucagcuacucuuca

SEQ ID NO: 1325636 - RNA, 19 nt, Homo sapiens
  misc_RNA (1)...(19): siRNA sense strand
gaacuccaacgacuaugac

SEQ ID NO: 1325637 - RNA, 19 nt, Homo sapiens
  misc_RNA (1)...(19): siRNA sense strand
uuauugguuugcaggaauu

SEQ ID NO: 1325638 - RNA, 19 nt, Homo sapiens
  misc_RNA (1)...(19): siRNA sense strand
gacuaugacaccagugaga

SEQ ID NO: 1325639 - RNA, 19 nt, Homo sapiens
  misc_RNA (1)...(19): siRNA sense strand
uacaucgacaucagcaaua

SEQ ID NO: 1325640 - RNA, 19 nt, Homo sapiens
  misc_RNA (1)...(19): siRNA sense strand
ugccaaguaucagcauuug

SEQ ID NO: 1325641 - RNA, 19 nt, Homo sapiens
  misc_RNA (1)...(19): siRNA sense strand
ggcaggaggcucagcauac

SEQ ID NO: 1325642 - RNA, 19 nt, Homo sapiens
  misc_RNA (1)...(19): siRNA sense strand
ccaccugccuccccacauu

SEQ ID NO: 1325643 - RNA, 19 nt, Homo sapiens
  misc_RNA (1)...(19): siRNA sense strand
gcuacuaugucagcaucau

SEQ ID NO: 1325644 - RNA, 19 nt, Homo sapiens
  misc_RNA (1)...(19): siRNA sense strand
gagucaacaucugccugaa

SEQ ID NO: 1325645 - RNA, 19 nt, Homo sapiens
  misc_RNA (1)...(19): siRNA sense strand
gcgucacacuucuccuugu

SEQ ID NO: 1325646 - RNA, 19 nt, Homo sapiens
  misc_RNA (1)...(19): siRNA sense strand
ccgcccaccuacaaguuug

SEQ ID NO: 1325647 - RNA, 19 nt, Homo sapiens
  misc_RNA (1)...(19): siRNA sense strand
gcacuuuguucgggaaucc

SEQ ID NO: 1325648 - RNA, 19 nt, Homo sapiens
  misc_RNA (1)...(19): siRNA sense strand
ccuuuccgaugcugccuuu

SEQ ID NO: 1325649 - RNA, 19 nt, Homo sapiens
  misc_RNA (1)...(19): siRNA sense strand
uggagaugcagaauuguga

SEQ ID NO: 1325650 - RNA, 19 nt, Homo sapiens
  misc_RNA (1)...(19): siRNA sense strand
uuacaucgacaucagcaau

SEQ ID NO: 1325651 - RNA, 19 nt, Homo sapiens
  misc_RNA (1)...(19): siRNA sense strand
gcgggacguuaaugacuac

SEQ ID NO: 1325652 - RNA, 19 nt, Homo sapiens
  misc_RNA (1)...(19): siRNA sense strand
cagcucagcauugccaaga

SEQ ID NO: 1325653 - RNA, 19 nt, Homo sapiens
  misc_RNA (1)...(19): siRNA sense strand
uuaaugacuacguguccua

SEQ ID NO: 1325654 - RNA, 19 nt, Homo sapiens
  misc_RNA (1)...(19): siRNA sense strand
cgucacacuucuccuuguc

SEQ ID NO: 1325655 - RNA, 19 nt, Homo sapiens
  misc_RNA (1)...(19): siRNA sense strand
gugaagcacagccacagau

SEQ ID NO: 1325656 - RNA, 19 nt, Homo sapiens
  misc_RNA (1)...(19): siRNA sense strand
ugaacaaccggaaccucaa

SEQ ID NO: 1325657 - RNA, 19 nt, Homo sapiens
  misc_RNA (1)...(19): siRNA sense strand
gaacaaagguggagucaac

SEQ ID NO: 1325658 - RNA, 19 nt, Homo sapiens
  misc_RNA (1)...(19): siRNA sense strand
gcucagcauugccaagaaa

SEQ ID NO: 1325659 - RNA, 19 nt, Homo sapiens
  misc_RNA (1)...(19): siRNA sense strand
gcaauaucccuaccacuga

SEQ ID NO: 1325660 - RNA, 19 nt, Homo sapiens
  misc_RNA (1)...(19): siRNA sense strand
gaagcuuuauggcuacuau

SEQ ID NO: 1325661 - RNA, 19 nt, Homo sapiens
  misc_RNA (1)...(19): siRNA sense strand
uaucagcauuugcccuaua

SEQ ID NO: 1325662 - RNA, 19 nt, Homo sapiens
  misc_RNA (1)...(19): siRNA sense strand
ggauuggacuguacaaggu

SEQ ID NO: 1325663 - RNA, 19 nt, Homo sapiens
  misc_RNA (1)...(19): siRNA sense strand
caauaucccuaccacugaa

SEQ ID NO: 1325664 - RNA, 19 nt, Homo sapiens
  misc_RNA (1)...(19): siRNA sense strand
ggacuggauuggacuguac

SEQ ID NO: 1325665 - RNA, 19 nt, Homo sapiens
  misc_RNA (1)...(19): siRNA sense strand
ggaacuccaacgacuauga

SEQ ID NO: 1325666 - RNA, 19 nt, Homo sapiens
  misc_RNA (1)...(19): siRNA sense strand
acaucugccugaagcuuua

SEQ ID NO: 1325667 - RNA, 19 nt, Homo sapiens
  misc_RNA (1)...(19): siRNA sense strand
augaguuucuccucuguua

SEQ ID NO: 1325668 - RNA, 19 nt, Homo sapiens
  misc_RNA (1)...(19): siRNA sense strand
gacuuuggguugcacuuug

SEQ ID NO: 1325669 - RNA, 19 nt, Homo sapiens
  misc_RNA (1)...(19): siRNA sense strand
gaaggaccagcucagcauu

SEQ ID NO: 1325670 - RNA, 19 nt, Homo sapiens
  misc_RNA (1)...(19): siRNA sense strand
ggaccacgaccucauuauc

SEQ ID NO: 1325671 - RNA, 19 nt, Homo sapiens
  misc_RNA (1)...(19): siRNA sense strand
ggacuuuggguugcacuuu

SEQ ID NO: 1325672 - RNA, 19 nt, Homo sapiens
  misc_RNA (1)...(19): siRNA sense strand
ggcgagacaucccaaacau

SEQ ID NO: 1325673 - RNA, 19 nt, Homo sapiens
  misc_RNA (1)...(19): siRNA sense strand
gggacuggauuggacugua

SEQ ID NO: 1325674 - RNA, 19 nt, Homo sapiens
  misc_RNA (1)...(19): siRNA sense strand
ucaucaaggucucccaugu

SEQ ID NO: 1325675 - RNA, 19 nt, Homo sapiens
  misc_RNA (1)...(19): siRNA sense strand
acuuggagcugaagccauu

SEQ ID NO: 1325676 - RNA, 19 nt, Homo sapiens
  misc_RNA (1)...(19): siRNA sense strand
cgaccucauuaucugguuu

SEQ ID NO: 1325677 - RNA, 19 nt, Homo sapiens
  misc_RNA (1)...(19): siRNA sense strand
gcauugccaagaaacauga

SEQ ID NO: 1325678 - RNA, 19 nt, Homo sapiens
  misc_RNA (1)...(19): siRNA sense strand
uccuggagaugcagaauug

SEQ ID NO: 1325679 - RNA, 19 nt, Homo sapiens
  misc_RNA (1)...(19): siRNA sense strand
gaccacgaccucauuaucu

SEQ ID NO: 1325680 - RNA, 19 nt, Homo sapiens
  misc_RNA (1)...(19): siRNA sense strand
uaucugguuuggagacaug

SEQ ID NO: 1325681 - RNA, 19 nt, Homo sapiens
  misc_RNA (1)...(19): siRNA sense strand
caacaucugccugaagcuu

SEQ ID NO: 1325682 - RNA, 19 nt, Homo sapiens
  misc_RNA (1)...(19): siRNA sense strand
cuuuauggcuacuauguca

SEQ ID NO: 1325683 - RNA, 19 nt, Homo sapiens
  misc_RNA (1)...(19): siRNA sense strand
guucgggaauccauuaaaa

SEQ ID NO: 1325684 - RNA, 19 nt, Homo sapiens
  misc_RNA (1)...(19): siRNA sense strand
ggucucccauguccguaug

SEQ ID NO: 1325685 - RNA, 19 nt, Homo sapiens
  misc_RNA (1)...(19): siRNA sense strand
ccacauuuccaacaauuac

SEQ ID NO: 1325686 - RNA, 19 nt, Homo sapiens
  misc_RNA (1)...(19): siRNA sense strand
uuacuggucuuugccaagu

SEQ ID NO: 1325687 - RNA, 19 nt, Homo sapiens
  misc_RNA (1)...(19): siRNA sense strand
ccacugaagaugaguuucu

SEQ ID NO: 1325688 - RNA, 19 nt, Homo sapiens
  misc_RNA (1)...(19): siRNA sense strand
ccaccuacaaguuugauag

SEQ ID NO: 1325689 - RNA, 19 nt, Homo sapiens
  misc_RNA (1)...(19): siRNA sense strand
gggcgagacaucccaaaca

SEQ ID NO: 1325690 - RNA, 19 nt, Homo sapiens
  misc_RNA (1)...(19): siRNA sense strand
uaggaacuccaacgacuau

SEQ ID NO: 1325691 - RNA, 19 nt, Homo sapiens
  misc_RNA (1)...(19): siRNA sense strand
gaagcacagccacagaucu

SEQ ID NO: 1325692 - RNA, 19 nt, Homo sapiens
  misc_RNA (1)...(19): siRNA sense strand
ugcgggacguuaaugacua

SEQ ID NO: 1325693 - RNA, 19 nt, Homo sapiens
  misc_RNA (1)...(19): siRNA sense strand
caaagguggagucaacauc

SEQ ID NO: 1325694 - RNA, 19 nt, Homo sapiens
  misc_RNA (1)...(19): siRNA sense strand
acaucgacaucagcaauau

SEQ ID NO: 1325695 - RNA, 19 nt, Homo sapiens
  misc_RNA (1)...(19): siRNA sense strand
gauggucagcuacucuuca

SEQ ID NO: 1325696 - RNA, 19 nt, Homo sapiens
  misc_RNA (1)...(19): siRNA sense strand
gaacuccaacgacuaugac

SEQ ID NO: 1325697 - RNA, 19 nt, Homo sapiens
  misc_RNA (1)...(19): siRNA sense strand
gacuaugacaccagugaga

SEQ ID NO: 1325698 - RNA, 19 nt, Homo sapiens
  misc_RNA (1)...(19): siRNA sense strand
uacaucgacaucagcaaua

SEQ ID NO: 1325699 - RNA, 19 nt, Homo sapiens
  misc_RNA (1)...(19): siRNA sense strand
gcuacuaugucagcaucau

SEQ ID NO: 1325700 - RNA, 19 nt, Homo sapiens
  misc_RNA (1)...(19): siRNA sense strand
ugccaaguaucagcauuug

SEQ ID NO: 1325701 - RNA, 19 nt, Homo sapiens
  misc_RNA (1)...(19): siRNA sense strand
ccaccugccuccccacauu

SEQ ID NO: 1325702 - RNA, 19 nt, Homo sapiens
  misc_RNA (1)...(19): siRNA sense strand
gagucaacaucugccugaa

SEQ ID NO: 1325703 - RNA, 19 nt, Homo sapiens
  misc_RNA (1)...(19): siRNA sense strand
gcgucacacuucuccuugu

SEQ ID NO: 1325704 - RNA, 19 nt, Homo sapiens
  misc_RNA (1)...(19): siRNA sense strand
ccgcccaccuacaaguuug

SEQ ID NO: 1325705 - RNA, 19 nt, Homo sapiens
  misc_RNA (1)...(19): siRNA sense strand
gcacuuuguucgggaaucc

SEQ ID NO: 1325706 - RNA, 19 nt, Homo sapiens
  misc_RNA (1)...(19): siRNA sense strand
uggagaugcagaauuguga

SEQ ID NO: 1325707 - RNA, 19 nt, Homo sapiens
  misc_RNA (1)...(19): siRNA sense strand
uuacaucgacaucagcaau

SEQ ID NO: 1325708 - RNA, 19 nt, Homo sapiens
  misc_RNA (1)...(19): siRNA sense strand
gcgggacguuaaugacuac

SEQ ID NO: 1325709 - RNA, 19 nt, Homo sapiens
  misc_RNA (1)...(19): siRNA sense strand
cagcucagcauugccaaga

SEQ ID NO: 1325710 - RNA, 19 nt, Homo sapiens
  misc_RNA (1)...(19): siRNA sense strand
uuaaugacuacguguccua

SEQ ID NO: 1325711 - RNA, 19 nt, Homo sapiens
  misc_RNA (1)...(19): siRNA sense strand
cgucacacuucuccuuguc

SEQ ID NO: 1325712 - RNA, 19 nt, Homo sapiens
  misc_RNA (1)...(19): siRNA sense strand
gugaagcacagccacagau

SEQ ID NO: 1325713 - RNA, 19 nt, Homo sapiens
  misc_RNA (1)...(19): siRNA sense strand
aagaugagcugcuggagaa

SEQ ID NO: 1325714 - RNA, 19 nt, Homo sapiens
  misc_RNA (1)...(19): siRNA sense strand
gaagaagucauaggucguu

SEQ ID NO: 1325715 - RNA, 19 nt, Homo sapiens
  misc_RNA (1)...(19): siRNA sense strand
ccagcuagaagaagucaua

SEQ ID NO: 1325716 - RNA, 19 nt, Homo sapiens
  misc_RNA (1)...(19): siRNA sense strand
caacucagcccagagaaga

SEQ ID NO: 1325717 - RNA, 19 nt, Homo sapiens
  misc_RNA (1)...(19): siRNA sense strand
gaggaagucccaccaggaa

SEQ ID NO: 1325718 - RNA, 19 nt, Homo sapiens
  misc_RNA (1)...(19): siRNA sense strand
ggaagucccaccaggaaug

SEQ ID NO: 1325719 - RNA, 19 nt, Homo sapiens
  misc_RNA (1)...(19): siRNA sense strand
agaaaugcauccaguccuu

SEQ ID NO: 1325720 - RNA, 19 nt, Homo sapiens
  misc_RNA (1)...(19): siRNA sense strand
gaaaagacaguaagaggaa

SEQ ID NO: 1325721 - RNA, 19 nt, Homo sapiens
  misc_RNA (1)...(19): siRNA sense strand
ugagacggcugcagaucug

SEQ ID NO: 1325722 - RNA, 19 nt, Homo sapiens
  misc_RNA (1)...(19): siRNA sense strand
gcuagaagaagucauaggu

SEQ ID NO: 1325723 - RNA, 19 nt, Homo sapiens
  misc_RNA (1)...(19): siRNA sense strand
ggaaaucagcaaggucaug

SEQ ID NO: 1325724 - RNA, 19 nt, Homo sapiens
  misc_RNA (1)...(19): siRNA sense strand
gcaccaggauccccagcua

SEQ ID NO: 1325725 - RNA, 19 nt, Homo sapiens
  misc_RNA (1)...(19): siRNA sense strand
gaagucauaggucguuucu

SEQ ID NO: 1325726 - RNA, 19 nt, Homo sapiens
  misc_RNA (1)...(19): siRNA sense strand
gaacagaaaagacaguaag

SEQ ID NO: 1325727 - RNA, 19 nt, Homo sapiens
  misc_RNA (1)...(19): siRNA sense strand
gagaagacugggagacucu

SEQ ID NO: 1325728 - RNA, 19 nt, Homo sapiens
  misc_RNA (1)...(19): siRNA sense strand
gaaccugggccugcugagu

SEQ ID NO: 1325729 - RNA, 19 nt, Homo sapiens
  misc_RNA (1)...(19): siRNA sense strand
gcaacucagcccagagaag

SEQ ID NO: 1325730 - RNA, 19 nt, Homo sapiens
  misc_RNA (1)...(19): siRNA sense strand
cauccaguccuucgauuca

SEQ ID NO: 1325731 - RNA, 19 nt, Homo sapiens
  misc_RNA (1)...(19): siRNA sense strand
gaugagcugcuggagaaau

SEQ ID NO: 1325732 - RNA, 19 nt, Homo sapiens
  misc_RNA (1)...(19): siRNA sense strand
gaggaccacaugcucaaca

SEQ ID NO: 1325733 - RNA, 19 nt, Homo sapiens
  misc_RNA (1)...(19): siRNA sense strand
gcauccaguccuucgauuc

SEQ ID NO: 1325734 - RNA, 19 nt, Homo sapiens
  misc_RNA (1)...(19): siRNA sense strand
ggacacccaggagcugaga

SEQ ID NO: 1325735 - RNA, 19 nt, Homo sapiens
  misc_RNA (1)...(19): siRNA sense strand
aagaugagcugcuggagaa

SEQ ID NO: 1325736 - RNA, 19 nt, Homo sapiens
  misc_RNA (1)...(19): siRNA sense strand
gacgagaucuaugagcuuu

SEQ ID NO: 1325737 - RNA, 19 nt, Homo sapiens
  misc_RNA (1)...(19): siRNA sense strand
gaagguagaauguaagaag

SEQ ID NO: 1325738 - RNA, 19 nt, Homo sapiens
  misc_RNA (1)...(19): siRNA sense strand
gagcgacucucgggcaauu

SEQ ID NO: 1325739 - RNA, 19 nt, Homo sapiens
  misc_RNA (1)...(19): siRNA sense strand
ucuaugagcuuucuuaugc

SEQ ID NO: 1325740 - RNA, 19 nt, Homo sapiens
  misc_RNA (1)...(19): siRNA sense strand
agucuguguucaagaauua

SEQ ID NO: 1325741 - RNA, 19 nt, Homo sapiens
  misc_RNA (1)...(19): siRNA sense strand
caagaauuaugacccugaa

SEQ ID NO: 1325742 - RNA, 19 nt, Homo sapiens
  misc_RNA (1)...(19): siRNA sense strand
gaagaagucauaggucguu

SEQ ID NO: 1325743 - RNA, 19 nt, Homo sapiens
  misc_RNA (1)...(19): siRNA sense strand
gagaccaggugaagguaga

SEQ ID NO: 1325744 - RNA, 19 nt, Homo sapiens
  misc_RNA (1)...(19): siRNA sense strand
uccaccagcugcagaauuu

SEQ ID NO: 1325745 - RNA, 19 nt, Homo sapiens
  misc_RNA (1)...(19): siRNA sense strand
ccagcuagaagaagucaua

SEQ ID NO: 1325746 - RNA, 19 nt, Homo sapiens
  misc_RNA (1)...(19): siRNA sense strand
caacucagcccagagaaga

SEQ ID NO: 1325747 - RNA, 19 nt, Homo sapiens
  misc_RNA (1)...(19): siRNA sense strand
ggaagucccaccaggaaug

SEQ ID NO: 1325748 - RNA, 19 nt, Homo sapiens
  misc_RNA (1)...(19): siRNA sense strand
gcagagaccaggugaaggu

SEQ ID NO: 1325749 - RNA, 19 nt, Homo sapiens
  misc_RNA (1)...(19): siRNA sense strand
gaggaagucccaccaggaa

SEQ ID NO: 1325750 - RNA, 19 nt, Homo sapiens
  misc_RNA (1)...(19): siRNA sense strand
agaaaugcauccaguccuu

SEQ ID NO: 1325751 - RNA, 19 nt, Homo sapiens
  misc_RNA (1)...(19): siRNA sense strand
gaaaagacaguaagaggaa

SEQ ID NO: 1325752 - RNA, 19 nt, Homo sapiens
  misc_RNA (1)...(19): siRNA sense strand
cacaggugcuggacaaguu

SEQ ID NO: 1325753 - RNA, 19 nt, Homo sapiens
  misc_RNA (1)...(19): siRNA sense strand
gagucuguguucaagaauu

SEQ ID NO: 1325754 - RNA, 19 nt, Homo sapiens
  misc_RNA (1)...(19): siRNA sense strand
gagccgcguugucccaaga

SEQ ID NO: 1325755 - RNA, 19 nt, Homo sapiens
  misc_RNA (1)...(19): siRNA sense strand
cggaagacgagaucuauga

SEQ ID NO: 1325756 - RNA, 19 nt, Homo sapiens
  misc_RNA (1)...(19): siRNA sense strand
uggagucuguguucaagaa

SEQ ID NO: 1325757 - RNA, 19 nt, Homo sapiens
  misc_RNA (1)...(19): siRNA sense strand
ugagacggcugcagaucug

SEQ ID NO: 1325758 - RNA, 19 nt, Homo sapiens
  misc_RNA (1)...(19): siRNA sense strand
gcuagaagaagucauaggu

SEQ ID NO: 1325759 - RNA, 19 nt, Homo sapiens
  misc_RNA (1)...(19): siRNA sense strand
gaucuaugagcuuucuuau

SEQ ID NO: 1325760 - RNA, 19 nt, Homo sapiens
  misc_RNA (1)...(19): siRNA sense strand
aggugaagguagaauguaa

SEQ ID NO: 1325761 - RNA, 19 nt, Homo sapiens
  misc_RNA (1)...(19): siRNA sense strand
gaggauccuucagcagaga

SEQ ID NO: 1325762 - RNA, 19 nt, Homo sapiens
  misc_RNA (1)...(19): siRNA sense strand
ggaaaucagcaaggucaug

SEQ ID NO: 1325763 - RNA, 19 nt, Homo sapiens
  misc_RNA (1)...(19): siRNA sense strand
gcaccaggauccccagcua

SEQ ID NO: 1325764 - RNA, 19 nt, Homo sapiens
  misc_RNA (1)...(19): siRNA sense strand
aagguagaauguaagaaga

SEQ ID NO: 1325765 - RNA, 19 nt, Homo sapiens
  misc_RNA (1)...(19): siRNA sense strand
gaagucauaggucguuucu

SEQ ID NO: 1325766 - RNA, 19 nt, Homo sapiens
  misc_RNA (1)...(19): siRNA sense strand
gaaggccgaggaacaaucu

SEQ ID NO: 1325767 - RNA, 19 nt, Homo sapiens
  misc_RNA (1)...(19): siRNA sense strand
gaccugcggagcuacguuu

SEQ ID NO: 1325768 - RNA, 19 nt, Homo sapiens
  misc_RNA (1)...(19): siRNA sense strand
cgagaucuaugagcuuucu

SEQ ID NO: 1325769 - RNA, 19 nt, Homo sapiens
  misc_RNA (1)...(19): siRNA sense strand
agaucuaugagcuuucuua

SEQ ID NO: 1325770 - RNA, 19 nt, Homo sapiens
  misc_RNA (1)...(19): siRNA sense strand
gguggagucuguguucaag

SEQ ID NO: 1325771 - RNA, 19 nt, Homo sapiens
  misc_RNA (1)...(19): siRNA sense strand
gagaagacugggagacucu

SEQ ID NO: 1325772 - RNA, 19 nt, Homo sapiens
  misc_RNA (1)...(19): siRNA sense strand
gaacagaaaagacaguaag

SEQ ID NO: 1325773 - RNA, 19 nt, Homo sapiens
  misc_RNA (1)...(19): siRNA sense strand
acacggaagacgagaucua

SEQ ID NO: 1325774 - RNA, 19 nt, Homo sapiens
  misc_RNA (1)...(19): siRNA sense strand
gcaacucagcccagagaag

SEQ ID NO: 1325775 - RNA, 19 nt, Homo sapiens
  misc_RNA (1)...(19): siRNA sense strand
gugaagguagaauguaaga

SEQ ID NO: 1325776 - RNA, 19 nt, Homo sapiens
  misc_RNA (1)...(19): siRNA sense strand
cauccaguccuucgauuca

SEQ ID NO: 1325777 - RNA, 19 nt, Homo sapiens
  misc_RNA (1)...(19): siRNA sense strand
ggaagacgagaucuaugag

SEQ ID NO: 1325778 - RNA, 19 nt, Homo sapiens
  misc_RNA (1)...(19): siRNA sense strand
gaaccugggccugcugagu

SEQ ID NO: 1325779 - RNA, 19 nt, Homo sapiens
  misc_RNA (1)...(19): siRNA sense strand
aggcacagcccgacagguu

SEQ ID NO: 1325780 - RNA, 19 nt, Homo sapiens
  misc_RNA (1)...(19): siRNA sense strand
gaugagcugcuggagaaau

SEQ ID NO: 1325781 - RNA, 19 nt, Homo sapiens
  misc_RNA (1)...(19): siRNA sense strand
ccaggugaagguagaaugu

SEQ ID NO: 1325782 - RNA, 19 nt, Homo sapiens
  misc_RNA (1)...(19): siRNA sense strand
uacccaagcugaacaaccu

SEQ ID NO: 1325783 - RNA, 19 nt, Homo sapiens
  misc_RNA (1)...(19): siRNA sense strand
gaggaccacaugcucaaca

SEQ ID NO: 1325784 - RNA, 19 nt, Homo sapiens
  misc_RNA (1)...(19): siRNA sense strand
uggcucagcaccucaccua

SEQ ID NO: 1325785 - RNA, 19 nt, Homo sapiens
  misc_RNA (1)...(19): siRNA sense strand
gacccaccaucaacugcau

SEQ ID NO: 1325786 - RNA, 19 nt, Homo sapiens
  misc_RNA (1)...(19): siRNA sense strand
gcauccaguccuucgauuc

SEQ ID NO: 1325787 - RNA, 19 nt, Homo sapiens
  misc_RNA (1)...(19): siRNA sense strand
gcugguggagucuguguuc

SEQ ID NO: 1325788 - RNA, 19 nt, Homo sapiens
  misc_RNA (1)...(19): siRNA sense strand
gaauuucaacacgcugaug

SEQ ID NO: 1325789 - RNA, 19 nt, Homo sapiens
  misc_RNA (1)...(19): siRNA sense strand
ggacacccaggagcugaga

SEQ ID NO: 1325790 - RNA, 19 nt, Homo sapiens
  misc_RNA (1)...(19): siRNA sense strand
aaucacuccuacacgcuau

SEQ ID NO: 1325791 - RNA, 19 nt, Homo sapiens
  misc_RNA (1)...(19): siRNA sense strand
caggugaagguagaaugua

SEQ ID NO: 1325792 - RNA, 19 nt, Homo sapiens
  misc_RNA (1)...(19): siRNA sense strand
aagaugagcugcuggagaa

SEQ ID NO: 1325793 - RNA, 19 nt, Homo sapiens
  misc_RNA (1)...(19): siRNA sense strand
gacgagaucuaugagcuuu

SEQ ID NO: 1325794 - RNA, 19 nt, Homo sapiens
  misc_RNA (1)...(19): siRNA sense strand
gaagguagaauguaagaag

SEQ ID NO: 1325795 - RNA, 19 nt, Homo sapiens
  misc_RNA (1)...(19): siRNA sense strand
gagcgacucucgggcaauu

SEQ ID NO: 1325796 - RNA, 19 nt, Homo sapiens
  misc_RNA (1)...(19): siRNA sense strand
ucuaugagcuuucuuaugc

SEQ ID NO: 1325797 - RNA, 19 nt, Homo sapiens
  misc_RNA (1)...(19): siRNA sense strand
agucuguguucaagaauua

SEQ ID NO: 1325798 - RNA, 19 nt, Homo sapiens
  misc_RNA (1)...(19): siRNA sense strand
caagaauuaugacccugaa

SEQ ID NO: 1325799 - RNA, 19 nt, Homo sapiens
  misc_RNA (1)...(19): siRNA sense strand
gaagaagucauaggucguu

SEQ ID NO: 1325800 - RNA, 19 nt, Homo sapiens
  misc_RNA (1)...(19): siRNA sense strand
gagaccaggugaagguaga

SEQ ID NO: 1325801 - RNA, 19 nt, Homo sapiens
  misc_RNA (1)...(19): siRNA sense strand
uccaccagcugcagaauuu

SEQ ID NO: 1325802 - RNA, 19 nt, Homo sapiens
  misc_RNA (1)...(19): siRNA sense strand
ccagcuagaagaagucaua

SEQ ID NO: 1325803 - RNA, 19 nt, Homo sapiens
  misc_RNA (1)...(19): siRNA sense strand
caacucagcccagagaaga

SEQ ID NO: 1325804 - RNA, 19 nt, Homo sapiens
  misc_RNA (1)...(19): siRNA sense strand
ggaagucccaccaggaaug

SEQ ID NO: 1325805 - RNA, 19 nt, Homo sapiens
  misc_RNA (1)...(19): siRNA sense strand
gcagagaccaggugaaggu

SEQ ID NO: 1325806 - RNA, 19 nt, Homo sapiens
  misc_RNA (1)...(19): siRNA sense strand
gaggaagucccaccaggaa

SEQ ID NO: 1325807 - RNA, 19 nt, Homo sapiens
  misc_RNA (1)...(19): siRNA sense strand
agaaaugcauccaguccuu

SEQ ID NO: 1325808 - RNA, 19 nt, Homo sapiens
  misc_RNA (1)...(19): siRNA sense strand
gaaaagacaguaagaggaa

SEQ ID NO: 1325809 - RNA, 19 nt, Homo sapiens
  misc_RNA (1)...(19): siRNA sense strand
cacaggugcuggacaaguu

SEQ ID NO: 1325810 - RNA, 19 nt, Homo sapiens
  misc_RNA (1)...(19): siRNA sense strand
gagucuguguucaagaauu

SEQ ID NO: 1325811 - RNA, 19 nt, Homo sapiens
  misc_RNA (1)...(19): siRNA sense strand
gagccgcguugucccaaga

SEQ ID NO: 1325812 - RNA, 19 nt, Homo sapiens
  misc_RNA (1)...(19): siRNA sense strand
cggaagacgagaucuauga

SEQ ID NO: 1325813 - RNA, 19 nt, Homo sapiens
  misc_RNA (1)...(19): siRNA sense strand
uggagucuguguucaagaa

SEQ ID NO: 1325814 - RNA, 19 nt, Homo sapiens
  misc_RNA (1)...(19): siRNA sense strand
ugagacggcugcagaucug

SEQ ID NO: 1325815 - RNA, 19 nt, Homo sapiens
  misc_RNA (1)...(19): siRNA sense strand
gcuagaagaagucauaggu

SEQ ID NO: 1325816 - RNA, 19 nt, Homo sapiens
  misc_RNA (1)...(19): siRNA sense strand
gaucuaugagcuuucuuau

SEQ ID NO: 1325817 - RNA, 19 nt, Homo sapiens
  misc_RNA (1)...(19): siRNA sense strand
aggugaagguagaauguaa

SEQ ID NO: 1325818 - RNA, 19 nt, Homo sapiens
  misc_RNA (1)...(19): siRNA sense strand
gaggauccuucagcagaga

SEQ ID NO: 1325819 - RNA, 19 nt, Homo sapiens
  misc_RNA (1)...(19): siRNA sense strand
ggaaaucagcaaggucaug

SEQ ID NO: 1325820 - RNA, 19 nt, Homo sapiens
  misc_RNA (1)...(19): siRNA sense strand
gcaccaggauccccagcua

SEQ ID NO: 1325821 - RNA, 19 nt, Homo sapiens
  misc_RNA (1)...(19): siRNA sense strand
aagguagaauguaagaaga

SEQ ID NO: 1325822 - RNA, 19 nt, Homo sapiens
  misc_RNA (1)...(19): siRNA sense strand
gaagucauaggucguuucu

SEQ ID NO: 1325823 - RNA, 19 nt, Homo sapiens
  misc_RNA (1)...(19): siRNA sense strand
gaaggccgaggaacaaucu

SEQ ID NO: 1325824 - RNA, 19 nt, Homo sapiens
  misc_RNA (1)...(19): siRNA sense strand
gaccugcggagcuacguuu

SEQ ID NO: 1325825 - RNA, 19 nt, Homo sapiens
  misc_RNA (1)...(19): siRNA sense strand
cgagaucuaugagcuuucu

SEQ ID NO: 1325826 - RNA, 19 nt, Homo sapiens
  misc_RNA (1)...(19): siRNA sense strand
agaucuaugagcuuucuua

SEQ ID NO: 1325827 - RNA, 19 nt, Homo sapiens
  misc_RNA (1)...(19): siRNA sense strand
gguggagucuguguucaag

SEQ ID NO: 1325828 - RNA, 19 nt, Homo sapiens
  misc_RNA (1)...(19): siRNA sense strand
gagaagacugggagacucu

SEQ ID NO: 1325829 - RNA, 19 nt, Homo sapiens
  misc_RNA (1)...(19): siRNA sense strand
gaacagaaaagacaguaag

SEQ ID NO: 1325830 - RNA, 19 nt, Homo sapiens
  misc_RNA (1)...(19): siRNA sense strand
acacggaagacgagaucua

SEQ ID NO: 1325831 - RNA, 19 nt, Homo sapiens
  misc_RNA (1)...(19): siRNA sense strand
gcaacucagcccagagaag

SEQ ID NO: 1325832 - RNA, 19 nt, Homo sapiens
  misc_RNA (1)...(19): siRNA sense strand
gugaagguagaauguaaga

SEQ ID NO: 1325833 - RNA, 19 nt, Homo sapiens
  misc_RNA (1)...(19): siRNA sense strand
cauccaguccuucgauuca

SEQ ID NO: 1325834 - RNA, 19 nt, Homo sapiens
  misc_RNA (1)...(19): siRNA sense strand
ggaagacgagaucuaugag

SEQ ID NO: 1325835 - RNA, 19 nt, Homo sapiens
  misc_RNA (1)...(19): siRNA sense strand
gaaccugggccugcugagu

SEQ ID NO: 1325836 - RNA, 19 nt, Homo sapiens
  misc_RNA (1)...(19): siRNA sense strand
aggcacagcccgacagguu

SEQ ID NO: 1325837 - RNA, 19 nt, Homo sapiens
  misc_RNA (1)...(19): siRNA sense strand
gaugagcugcuggagaaau

SEQ ID NO: 1325838 - RNA, 19 nt, Homo sapiens
  misc_RNA (1)...(19): siRNA sense strand
ccaggugaagguagaaugu

SEQ ID NO: 1325839 - RNA, 19 nt, Homo sapiens
  misc_RNA (1)...(19): siRNA sense strand
uacccaagcugaacaaccu

SEQ ID NO: 1325840 - RNA, 19 nt, Homo sapiens
  misc_RNA (1)...(19): siRNA sense strand
gaggaccacaugcucaaca

SEQ ID NO: 1325841 - RNA, 19 nt, Homo sapiens
  misc_RNA (1)...(19): siRNA sense strand
uggcucagcaccucaccua

SEQ ID NO: 1325842 - RNA, 19 nt, Homo sapiens
  misc_RNA (1)...(19): siRNA sense strand
gacccaccaucaacugcau

SEQ ID NO: 1325843 - RNA, 19 nt, Homo sapiens
  misc_RNA (1)...(19): siRNA sense strand
gcauccaguccuucgauuc

SEQ ID NO: 1325844 - RNA, 19 nt, Homo sapiens
  misc_RNA (1)...(19): siRNA sense strand
gcugguggagucuguguuc

SEQ ID NO: 1325845 - RNA, 19 nt, Homo sapiens
  misc_RNA (1)...(19): siRNA sense strand
gaauuucaacacgcugaug

SEQ ID NO: 1325846 - RNA, 19 nt, Homo sapiens
  misc_RNA (1)...(19): siRNA sense strand
ggacacccaggagcugaga

SEQ ID NO: 1325847 - RNA, 19 nt, Homo sapiens
  misc_RNA (1)...(19): siRNA sense strand
aaucacuccuacacgcuau

SEQ ID NO: 1325848 - RNA, 19 nt, Homo sapiens
  misc_RNA (1)...(19): siRNA sense strand
caggugaagguagaaugua

SEQ ID NO: 1325849 - RNA, 19 nt, Homo sapiens
  misc_RNA (1)...(19): siRNA sense strand
aagaugagcugcuggagaa

SEQ ID NO: 1325850 - RNA, 19 nt, Homo sapiens
  misc_RNA (1)...(19): siRNA sense strand
gacgagaucuaugagcuuu

SEQ ID NO: 1325851 - RNA, 19 nt, Homo sapiens
  misc_RNA (1)...(19): siRNA sense strand
gaagguagaauguaagaag

SEQ ID NO: 1325852 - RNA, 19 nt, Homo sapiens
  misc_RNA (1)...(19): siRNA sense strand
gagcgacucucgggcaauu

SEQ ID NO: 1325853 - RNA, 19 nt, Homo sapiens
  misc_RNA (1)...(19): siRNA sense strand
ucuaugagcuuucuuaugc

SEQ ID NO: 1325854 - RNA, 19 nt, Homo sapiens
  misc_RNA (1)...(19): siRNA sense strand
agucuguguucaagaauua

SEQ ID NO: 1325855 - RNA, 19 nt, Homo sapiens
  misc_RNA (1)...(19): siRNA sense strand
caagaauuaugacccugaa

SEQ ID NO: 1325856 - RNA, 19 nt, Homo sapiens
  misc_RNA (1)...(19): siRNA sense strand
gaagaagucauaggucguu

SEQ ID NO: 1325857 - RNA, 19 nt, Homo sapiens
  misc_RNA (1)...(19): siRNA sense strand
gagaccaggugaagguaga

SEQ ID NO: 1325858 - RNA, 19 nt, Homo sapiens
  misc_RNA (1)...(19): siRNA sense strand
uccaccagcugcagaauuu

SEQ ID NO: 1325859 - RNA, 19 nt, Homo sapiens
  misc_RNA (1)...(19): siRNA sense strand
ccagcuagaagaagucaua

SEQ ID NO: 1325860 - RNA, 19 nt, Homo sapiens
  misc_RNA (1)...(19): siRNA sense strand
caacucagcccagagaaga

SEQ ID NO: 1325861 - RNA, 19 nt, Homo sapiens
  misc_RNA (1)...(19): siRNA sense strand
ggaagucccaccaggaaug

SEQ ID NO: 1325862 - RNA, 19 nt, Homo sapiens
  misc_RNA (1)...(19): siRNA sense strand
gcagagaccaggugaaggu

SEQ ID NO: 1325863 - RNA, 19 nt, Homo sapiens
  misc_RNA (1)...(19): siRNA sense strand
gaggaagucccaccaggaa

SEQ ID NO: 1325864 - RNA, 19 nt, Homo sapiens
  misc_RNA (1)...(19): siRNA sense strand
agaaaugcauccaguccuu

SEQ ID NO: 1325865 - RNA, 19 nt, Homo sapiens
  misc_RNA (1)...(19): siRNA sense strand
gaaaagacaguaagaggaa

SEQ ID NO: 1325866 - RNA, 19 nt, Homo sapiens
  misc_RNA (1)...(19): siRNA sense strand
cacaggugcuggacaaguu

SEQ ID NO: 1325867 - RNA, 19 nt, Homo sapiens
  misc_RNA (1)...(19): siRNA sense strand
gagucuguguucaagaauu

SEQ ID NO: 1325868 - RNA, 19 nt, Homo sapiens
  misc_RNA (1)...(19): siRNA sense strand
gagccgcguugucccaaga

SEQ ID NO: 1325869 - RNA, 19 nt, Homo sapiens
  misc_RNA (1)...(19): siRNA sense strand
cggaagacgagaucuauga

SEQ ID NO: 1325870 - RNA, 19 nt, Homo sapiens
  misc_RNA (1)...(19): siRNA sense strand
uggagucuguguucaagaa

SEQ ID NO: 1325871 - RNA, 19 nt, Homo sapiens
  misc_RNA (1)...(19): siRNA sense strand
ugagacggcugcagaucug

SEQ ID NO: 1325872 - RNA, 19 nt, Homo sapiens
  misc_RNA (1)...(19): siRNA sense strand
gcuagaagaagucauaggu

SEQ ID NO: 1325873 - RNA, 19 nt, Homo sapiens
  misc_RNA (1)...(19): siRNA sense strand
gaucuaugagcuuucuuau

SEQ ID NO: 1325874 - RNA, 19 nt, Homo sapiens
  misc_RNA (1)...(19): siRNA sense strand
aggugaagguagaauguaa

SEQ ID NO: 1325875 - RNA, 19 nt, Homo sapiens
  misc_RNA (1)...(19): siRNA sense strand
gaggauccuucagcagaga

SEQ ID NO: 1325876 - RNA, 19 nt, Homo sapiens
  misc_RNA (1)...(19): siRNA sense strand
ggaaaucagcaaggucaug

SEQ ID NO: 1325877 - RNA, 19 nt, Homo sapiens
  misc_RNA (1)...(19): siRNA sense strand
gcaccaggauccccagcua

SEQ ID NO: 1325878 - RNA, 19 nt, Homo sapiens
  misc_RNA (1)...(19): siRNA sense strand
aagguagaauguaagaaga

SEQ ID NO: 1325879 - RNA, 19 nt, Homo sapiens
  misc_RNA (1)...(19): siRNA sense strand
gaagucauaggucguuucu

SEQ ID NO: 1325880 - RNA, 19 nt, Homo sapiens
  misc_RNA (1)...(19): siRNA sense strand
gaaggccgaggaacaaucu

SEQ ID NO: 1325881 - RNA, 19 nt, Homo sapiens
  misc_RNA (1)...(19): siRNA sense strand
gaccugcggagcuacguuu

SEQ ID NO: 1325882 - RNA, 19 nt, Homo sapiens
  misc_RNA (1)...(19): siRNA sense strand
cgagaucuaugagcuuucu

SEQ ID NO: 1325883 - RNA, 19 nt, Homo sapiens
  misc_RNA (1)...(19): siRNA sense strand
agaucuaugagcuuucuua

SEQ ID NO: 1325884 - RNA, 19 nt, Homo sapiens
  misc_RNA (1)...(19): siRNA sense strand
gguggagucuguguucaag

SEQ ID NO: 1325885 - RNA, 19 nt, Homo sapiens
  misc_RNA (1)...(19): siRNA sense strand
gagaagacugggagacucu

SEQ ID NO: 1325886 - RNA, 19 nt, Homo sapiens
  misc_RNA (1)...(19): siRNA sense strand
gaacagaaaagacaguaag

SEQ ID NO: 1325887 - RNA, 19 nt, Homo sapiens
  misc_RNA (1)...(19): siRNA sense strand
acacggaagacgagaucua

SEQ ID NO: 1325888 - RNA, 19 nt, Homo sapiens
  misc_RNA (1)...(19): siRNA sense strand
gcaacucagcccagagaag

SEQ ID NO: 1325889 - RNA, 19 nt, Homo sapiens
  misc_RNA (1)...(19): siRNA sense strand
gugaagguagaauguaaga

SEQ ID NO: 1325890 - RNA, 19 nt, Homo sapiens
  misc_RNA (1)...(19): siRNA sense strand
cauccaguccuucgauuca

SEQ ID NO: 1325891 - RNA, 19 nt, Homo sapiens
  misc_RNA (1)...(19): siRNA sense strand
ggaagacgagaucuaugag

SEQ ID NO: 1325892 - RNA, 19 nt, Homo sapiens
  misc_RNA (1)...(19): siRNA sense strand
gaaccugggccugcugagu

SEQ ID NO: 1325893 - RNA, 19 nt, Homo sapiens
  misc_RNA (1)...(19): siRNA sense strand
aggcacagcccgacagguu

SEQ ID NO: 1325894 - RNA, 19 nt, Homo sapiens
  misc_RNA (1)...(19): siRNA sense strand
gaugagcugcuggagaaau

SEQ ID NO: 1325895 - RNA, 19 nt, Homo sapiens
  misc_RNA (1)...(19): siRNA sense strand
ccaggugaagguagaaugu

SEQ ID NO: 1325896 - RNA, 19 nt, Homo sapiens
  misc_RNA (1)...(19): siRNA sense strand
uacccaagcugaacaaccu

SEQ ID NO: 1325897 - RNA, 19 nt, Homo sapiens
  misc_RNA (1)...(19): siRNA sense strand
gaggaccacaugcucaaca

SEQ ID NO: 1325898 - RNA, 19 nt, Homo sapiens
  misc_RNA (1)...(19): siRNA sense strand
uggcucagcaccucaccua

SEQ ID NO: 1325899 - RNA, 19 nt, Homo sapiens
  misc_RNA (1)...(19): siRNA sense strand
gacccaccaucaacugcau

SEQ ID NO: 1325900 - RNA, 19 nt, Homo sapiens
  misc_RNA (1)...(19): siRNA sense strand
gcauccaguccuucgauuc

SEQ ID NO: 1325901 - RNA, 19 nt, Homo sapiens
  misc_RNA (1)...(19): siRNA sense strand
gcugguggagucuguguuc

SEQ ID NO: 1325902 - RNA, 19 nt, Homo sapiens
  misc_RNA (1)...(19): siRNA sense strand
gaauuucaacacgcugaug

SEQ ID NO: 1325903 - RNA, 19 nt, Homo sapiens
  misc_RNA (1)...(19): siRNA sense strand
ggacacccaggagcugaga

SEQ ID NO: 1325904 - RNA, 19 nt, Homo sapiens
  misc_RNA (1)...(19): siRNA sense strand
aaucacuccuacacgcuau

SEQ ID NO: 1325905 - RNA, 19 nt, Homo sapiens
  misc_RNA (1)...(19): siRNA sense strand
caggugaagguagaaugua

SEQ ID NO: 1325906 - RNA, 19 nt, Homo sapiens
  misc_RNA (1)...(19): siRNA sense strand
aagaugagcugcuggagaa

SEQ ID NO: 1325907 - RNA, 19 nt, Homo sapiens
  misc_RNA (1)...(19): siRNA sense strand
gaagaagucauaggucguu

SEQ ID NO: 1325908 - RNA, 19 nt, Homo sapiens
  misc_RNA (1)...(19): siRNA sense strand
ccagcuagaagaagucaua

SEQ ID NO: 1325909 - RNA, 19 nt, Homo sapiens
  misc_RNA (1)...(19): siRNA sense strand
caacucagcccagagaaga

SEQ ID NO: 1325910 - RNA, 19 nt, Homo sapiens
  misc_RNA (1)...(19): siRNA sense strand
gaggaagucccaccaggaa

SEQ ID NO: 1325911 - RNA, 19 nt, Homo sapiens
  misc_RNA (1)...(19): siRNA sense strand
ggaagucccaccaggaaug

SEQ ID NO: 1325912 - RNA, 19 nt, Homo sapiens
  misc_RNA (1)...(19): siRNA sense strand
agaaaugcauccaguccuu

SEQ ID NO: 1325913 - RNA, 19 nt, Homo sapiens
  misc_RNA (1)...(19): siRNA sense strand
gaaaagacaguaagaggaa

SEQ ID NO: 1325914 - RNA, 19 nt, Homo sapiens
  misc_RNA (1)...(19): siRNA sense strand
ugagacggcugcagaucug

SEQ ID NO: 1325915 - RNA, 19 nt, Homo sapiens
  misc_RNA (1)...(19): siRNA sense strand
gcuagaagaagucauaggu

SEQ ID NO: 1325916 - RNA, 19 nt, Homo sapiens
  misc_RNA (1)...(19): siRNA sense strand
ggaaaucagcaaggucaug

SEQ ID NO: 1325917 - RNA, 19 nt, Homo sapiens
  misc_RNA (1)...(19): siRNA sense strand
gcaccaggauccccagcua

SEQ ID NO: 1325918 - RNA, 19 nt, Homo sapiens
  misc_RNA (1)...(19): siRNA sense strand
gaagucauaggucguuucu

SEQ ID NO: 1325919 - RNA, 19 nt, Homo sapiens
  misc_RNA (1)...(19): siRNA sense strand
gaacagaaaagacaguaag

SEQ ID NO: 1325920 - RNA, 19 nt, Homo sapiens
  misc_RNA (1)...(19): siRNA sense strand
gagaagacugggagacucu

SEQ ID NO: 1325921 - RNA, 19 nt, Homo sapiens
  misc_RNA (1)...(19): siRNA sense strand
gaaccugggccugcugagu

SEQ ID NO: 1325922 - RNA, 19 nt, Homo sapiens
  misc_RNA (1)...(19): siRNA sense strand
gcaacucagcccagagaag

SEQ ID NO: 1325923 - RNA, 19 nt, Homo sapiens
  misc_RNA (1)...(19): siRNA sense strand
cauccaguccuucgauuca

SEQ ID NO: 1325924 - RNA, 19 nt, Homo sapiens
  misc_RNA (1)...(19): siRNA sense strand
gaugagcugcuggagaaau

SEQ ID NO: 1325925 - RNA, 19 nt, Homo sapiens
  misc_RNA (1)...(19): siRNA sense strand
gaggaccacaugcucaaca

SEQ ID NO: 1325926 - RNA, 19 nt, Homo sapiens
  misc_RNA (1)...(19): siRNA sense strand
gcauccaguccuucgauuc

SEQ ID NO: 1325927 - RNA, 19 nt, Homo sapiens
  misc_RNA (1)...(19): siRNA sense strand
ggacacccaggagcugaga

SEQ ID NO: 1325928 - RNA, 19 nt, Homo sapiens
  misc_RNA (1)...(19): siRNA sense strand
aagaugagcugcuggagaa

SEQ ID NO: 1325929 - RNA, 19 nt, Homo sapiens
  misc_RNA (1)...(19): siRNA sense strand
gacgagaucuaugagcuuu

SEQ ID NO: 1325930 - RNA, 19 nt, Homo sapiens
  misc_RNA (1)...(19): siRNA sense strand
gaagguagaauguaagaag

SEQ ID NO: 1325931 - RNA, 19 nt, Homo sapiens
  misc_RNA (1)...(19): siRNA sense strand
gagcgacucucgggcaauu

SEQ ID NO: 1325932 - RNA, 19 nt, Homo sapiens
  misc_RNA (1)...(19): siRNA sense strand
ucuaugagcuuucuuaugc

SEQ ID NO: 1325933 - RNA, 19 nt, Homo sapiens
  misc_RNA (1)...(19): siRNA sense strand
agucuguguucaagaauua

SEQ ID NO: 1325934 - RNA, 19 nt, Homo sapiens
  misc_RNA (1)...(19): siRNA sense strand
caagaauuaugacccugaa

SEQ ID NO: 1325935 - RNA, 19 nt, Homo sapiens
  misc_RNA (1)...(19): siRNA sense strand
gaagaagucauaggucguu

SEQ ID NO: 1325936 - RNA, 19 nt, Homo sapiens
  misc_RNA (1)...(19): siRNA sense strand
gagaccaggugaagguaga

SEQ ID NO: 1325937 - RNA, 19 nt, Homo sapiens
  misc_RNA (1)...(19): siRNA sense strand
uccaccagcugcagaauuu

SEQ ID NO: 1325938 - RNA, 19 nt, Homo sapiens
  misc_RNA (1)...(19): siRNA sense strand
ccagcuagaagaagucaua

SEQ ID NO: 1325939 - RNA, 19 nt, Homo sapiens
  misc_RNA (1)...(19): siRNA sense strand
caacucagcccagagaaga

SEQ ID NO: 1325940 - RNA, 19 nt, Homo sapiens
  misc_RNA (1)...(19): siRNA sense strand
ggaagucccaccaggaaug

SEQ ID NO: 1325941 - RNA, 19 nt, Homo sapiens
  misc_RNA (1)...(19): siRNA sense strand
gcagagaccaggugaaggu

SEQ ID NO: 1325942 - RNA, 19 nt, Homo sapiens
  misc_RNA (1)...(19): siRNA sense strand
gaggaagucccaccaggaa

SEQ ID NO: 1325943 - RNA, 19 nt, Homo sapiens
  misc_RNA (1)...(19): siRNA sense strand
agaaaugcauccaguccuu

SEQ ID NO: 1325944 - RNA, 19 nt, Homo sapiens
  misc_RNA (1)...(19): siRNA sense strand
gaaaagacaguaagaggaa

SEQ ID NO: 1325945 - RNA, 19 nt, Homo sapiens
  misc_RNA (1)...(19): siRNA sense strand
cacaggugcuggacaaguu

SEQ ID NO: 1325946 - RNA, 19 nt, Homo sapiens
  misc_RNA (1)...(19): siRNA sense strand
gagucuguguucaagaauu

SEQ ID NO: 1325947 - RNA, 19 nt, Homo sapiens
  misc_RNA (1)...(19): siRNA sense strand
gagccgcguugucccaaga

SEQ ID NO: 1325948 - RNA, 19 nt, Homo sapiens
  misc_RNA (1)...(19): siRNA sense strand
cggaagacgagaucuauga

SEQ ID NO: 1325949 - RNA, 19 nt, Homo sapiens
  misc_RNA (1)...(19): siRNA sense strand
uggagucuguguucaagaa

SEQ ID NO: 1325950 - RNA, 19 nt, Homo sapiens
  misc_RNA (1)...(19): siRNA sense strand
ugagacggcugcagaucug

SEQ ID NO: 1325951 - RNA, 19 nt, Homo sapiens
  misc_RNA (1)...(19): siRNA sense strand
gcuagaagaagucauaggu

SEQ ID NO: 1325952 - RNA, 19 nt, Homo sapiens
  misc_RNA (1)...(19): siRNA sense strand
gaucuaugagcuuucuuau

SEQ ID NO: 1325953 - RNA, 19 nt, Homo sapiens
  misc_RNA (1)...(19): siRNA sense strand
aggugaagguagaauguaa

SEQ ID NO: 1325954 - RNA, 19 nt, Homo sapiens
  misc_RNA (1)...(19): siRNA sense strand
gaggauccuucagcagaga

SEQ ID NO: 1325955 - RNA, 19 nt, Homo sapiens
  misc_RNA (1)...(19): siRNA sense strand
ggaaaucagcaaggucaug

SEQ ID NO: 1325956 - RNA, 19 nt, Homo sapiens
  misc_RNA (1)...(19): siRNA sense strand
gcaccaggauccccagcua

SEQ ID NO: 1325957 - RNA, 19 nt, Homo sapiens
  misc_RNA (1)...(19): siRNA sense strand
aagguagaauguaagaaga

SEQ ID NO: 1325958 - RNA, 19 nt, Homo sapiens
  misc_RNA (1)...(19): siRNA sense strand
gaagucauaggucguuucu

SEQ ID NO: 1325959 - RNA, 19 nt, Homo sapiens
  misc_RNA (1)...(19): siRNA sense strand
gaaggccgaggaacaaucu

SEQ ID NO: 1325960 - RNA, 19 nt, Homo sapiens
  misc_RNA (1)...(19): siRNA sense strand
gaccugcggagcuacguuu

SEQ ID NO: 1325961 - RNA, 19 nt, Homo sapiens
  misc_RNA (1)...(19): siRNA sense strand
cgagaucuaugagcuuucu

SEQ ID NO: 1325962 - RNA, 19 nt, Homo sapiens
  misc_RNA (1)...(19): siRNA sense strand
agaucuaugagcuuucuua

SEQ ID NO: 1325963 - RNA, 19 nt, Homo sapiens
  misc_RNA (1)...(19): siRNA sense strand
gguggagucuguguucaag

SEQ ID NO: 1325964 - RNA, 19 nt, Homo sapiens
  misc_RNA (1)...(19): siRNA sense strand
gagaagacugggagacucu

SEQ ID NO: 1325965 - RNA, 19 nt, Homo sapiens
  misc_RNA (1)...(19): siRNA sense strand
gaacagaaaagacaguaag

SEQ ID NO: 1325966 - RNA, 19 nt, Homo sapiens
  misc_RNA (1)...(19): siRNA sense strand
acacggaagacgagaucua

SEQ ID NO: 1325967 - RNA, 19 nt, Homo sapiens
  misc_RNA (1)...(19): siRNA sense strand
gcaacucagcccagagaag

SEQ ID NO: 1325968 - RNA, 19 nt, Homo sapiens
  misc_RNA (1)...(19): siRNA sense strand
gugaagguagaauguaaga

SEQ ID NO: 1325969 - RNA, 19 nt, Homo sapiens
  misc_RNA (1)...(19): siRNA sense strand
cauccaguccuucgauuca

SEQ ID NO: 1325970 - RNA, 19 nt, Homo sapiens
  misc_RNA (1)...(19): siRNA sense strand
ggaagacgagaucuaugag

SEQ ID NO: 1325971 - RNA, 19 nt, Homo sapiens
  misc_RNA (1)...(19): siRNA sense strand
gaaccugggccugcugagu

SEQ ID NO: 1325972 - RNA, 19 nt, Homo sapiens
  misc_RNA (1)...(19): siRNA sense strand
aggcacagcccgacagguu

SEQ ID NO: 1325973 - RNA, 19 nt, Homo sapiens
  misc_RNA (1)...(19): siRNA sense strand
gaugagcugcuggagaaau

SEQ ID NO: 1325974 - RNA, 19 nt, Homo sapiens
  misc_RNA (1)...(19): siRNA sense strand
ccaggugaagguagaaugu

SEQ ID NO: 1325975 - RNA, 19 nt, Homo sapiens
  misc_RNA (1)...(19): siRNA sense strand
uacccaagcugaacaaccu

SEQ ID NO: 1325976 - RNA, 19 nt, Homo sapiens
  misc_RNA (1)...(19): siRNA sense strand
gaggaccacaugcucaaca

SEQ ID NO: 1325977 - RNA, 19 nt, Homo sapiens
  misc_RNA (1)...(19): siRNA sense strand
uggcucagcaccucaccua

SEQ ID NO: 1325978 - RNA, 19 nt, Homo sapiens
  misc_RNA (1)...(19): siRNA sense strand
gacccaccaucaacugcau

SEQ ID NO: 1325979 - RNA, 19 nt, Homo sapiens
  misc_RNA (1)...(19): siRNA sense strand
gcauccaguccuucgauuc

SEQ ID NO: 1325980 - RNA, 19 nt, Homo sapiens
  misc_RNA (1)...(19): siRNA sense strand
gcugguggagucuguguuc

SEQ ID NO: 1325981 - RNA, 19 nt, Homo sapiens
  misc_RNA (1)...(19): siRNA sense strand
gaauuucaacacgcugaug

SEQ ID NO: 1325982 - RNA, 19 nt, Homo sapiens
  misc_RNA (1)...(19): siRNA sense strand
ggacacccaggagcugaga

SEQ ID NO: 1325983 - RNA, 19 nt, Homo sapiens
  misc_RNA (1)...(19): siRNA sense strand
aaucacuccuacacgcuau

SEQ ID NO: 1325984 - RNA, 19 nt, Homo sapiens
  misc_RNA (1)...(19): siRNA sense strand
caggugaagguagaaugua

SEQ ID NO: 1325985 - RNA, 19 nt, Homo sapiens
  misc_RNA (1)...(19): siRNA sense strand
aagaugagcugcuggagaa

SEQ ID NO: 1325986 - RNA, 19 nt, Homo sapiens
  misc_RNA (1)...(19): siRNA sense strand
gacgagaucuaugagcuuu

SEQ ID NO: 1325987 - RNA, 19 nt, Homo sapiens
  misc_RNA (1)...(19): siRNA sense strand
gaagguagaauguaagaag

SEQ ID NO: 1325988 - RNA, 19 nt, Homo sapiens
  misc_RNA (1)...(19): siRNA sense strand
gagcgacucucgggcaauu

SEQ ID NO: 1325989 - RNA, 19 nt, Homo sapiens
  misc_RNA (1)...(19): siRNA sense strand
ucuaugagcuuucuuaugc

SEQ ID NO: 1325990 - RNA, 19 nt, Homo sapiens
  misc_RNA (1)...(19): siRNA sense strand
agucuguguucaagaauua

SEQ ID NO: 1325991 - RNA, 19 nt, Homo sapiens
  misc_RNA (1)...(19): siRNA sense strand
caagaauuaugacccugaa

SEQ ID NO: 1325992 - RNA, 19 nt, Homo sapiens
  misc_RNA (1)...(19): siRNA sense strand
gaagaagucauaggucguu

SEQ ID NO: 1325993 - RNA, 19 nt, Homo sapiens
  misc_RNA (1)...(19): siRNA sense strand
gagaccaggugaagguaga

SEQ ID NO: 1325994 - RNA, 19 nt, Homo sapiens
  misc_RNA (1)...(19): siRNA sense strand
uccaccagcugcagaauuu

SEQ ID NO: 1325995 - RNA, 19 nt, Homo sapiens
  misc_RNA (1)...(19): siRNA sense strand
ccagcuagaagaagucaua

SEQ ID NO: 1325996 - RNA, 19 nt, Homo sapiens
  misc_RNA (1)...(19): siRNA sense strand
caacucagcccagagaaga

SEQ ID NO: 1325997 - RNA, 19 nt, Homo sapiens
  misc_RNA (1)...(19): siRNA sense strand
ggaagucccaccaggaaug

SEQ ID NO: 1325998 - RNA, 19 nt, Homo sapiens
  misc_RNA (1)...(19): siRNA sense strand
gcagagaccaggugaaggu

SEQ ID NO: 1325999 - RNA, 19 nt, Homo sapiens
  misc_RNA (1)...(19): siRNA sense strand
gaggaagucccaccaggaa

SEQ ID NO: 1326000 - RNA, 19 nt, Homo sapiens
  misc_RNA (1)...(19): siRNA sense strand
agaaaugcauccaguccuu

SEQ ID NO: 1326001 - RNA, 19 nt, Homo sapiens
  misc_RNA (1)...(19): siRNA sense strand
gaaaagacaguaagaggaa

SEQ ID NO: 1326002 - RNA, 19 nt, Homo sapiens
  misc_RNA (1)...(19): siRNA sense strand
cacaggugcuggacaaguu

SEQ ID NO: 1326003 - RNA, 19 nt, Homo sapiens
  misc_RNA (1)...(19): siRNA sense strand
gagucuguguucaagaauu

SEQ ID NO: 1326004 - RNA, 19 nt, Homo sapiens
  misc_RNA (1)...(19): siRNA sense strand
gagccgcguugucccaaga

SEQ ID NO: 1326005 - RNA, 19 nt, Homo sapiens
  misc_RNA (1)...(19): siRNA sense strand
cggaagacgagaucuauga

SEQ ID NO: 1326006 - RNA, 19 nt, Homo sapiens
  misc_RNA (1)...(19): siRNA sense strand
uggagucuguguucaagaa

SEQ ID NO: 1326007 - RNA, 19 nt, Homo sapiens
  misc_RNA (1)...(19): siRNA sense strand
ugagacggcugcagaucug

SEQ ID NO: 1326008 - RNA, 19 nt, Homo sapiens
  misc_RNA (1)...(19): siRNA sense strand
gcuagaagaagucauaggu

SEQ ID NO: 1326009 - RNA, 19 nt, Homo sapiens
  misc_RNA (1)...(19): siRNA sense strand
gaucuaugagcuuucuuau

SEQ ID NO: 1326010 - RNA, 19 nt, Homo sapiens
  misc_RNA (1)...(19): siRNA sense strand
aggugaagguagaauguaa

SEQ ID NO: 1326011 - RNA, 19 nt, Homo sapiens
  misc_RNA (1)...(19): siRNA sense strand
gaggauccuucagcagaga

SEQ ID NO: 1326012 - RNA, 19 nt, Homo sapiens
  misc_RNA (1)...(19): siRNA sense strand
ggaaaucagcaaggucaug

SEQ ID NO: 1326013 - RNA, 19 nt, Homo sapiens
  misc_RNA (1)...(19): siRNA sense strand
gcaccaggauccccagcua

SEQ ID NO: 1326014 - RNA, 19 nt, Homo sapiens
  misc_RNA (1)...(19): siRNA sense strand
aagguagaauguaagaaga

SEQ ID NO: 1326015 - RNA, 19 nt, Homo sapiens
  misc_RNA (1)...(19): siRNA sense strand
gaagucauaggucguuucu

SEQ ID NO: 1326016 - RNA, 19 nt, Homo sapiens
  misc_RNA (1)...(19): siRNA sense strand
gaaggccgaggaacaaucu

SEQ ID NO: 1326017 - RNA, 19 nt, Homo sapiens
  misc_RNA (1)...(19): siRNA sense strand
gaccugcggagcuacguuu

SEQ ID NO: 1326018 - RNA, 19 nt, Homo sapiens
  misc_RNA (1)...(19): siRNA sense strand
cgagaucuaugagcuuucu

SEQ ID NO: 1326019 - RNA, 19 nt, Homo sapiens
  misc_RNA (1)...(19): siRNA sense strand
agaucuaugagcuuucuua

SEQ ID NO: 1326020 - RNA, 19 nt, Homo sapiens
  misc_RNA (1)...(19): siRNA sense strand
gguggagucuguguucaag

SEQ ID NO: 1326021 - RNA, 19 nt, Homo sapiens
  misc_RNA (1)...(19): siRNA sense strand
gagaagacugggagacucu

SEQ ID NO: 1326022 - RNA, 19 nt, Homo sapiens
  misc_RNA (1)...(19): siRNA sense strand
gaacagaaaagacaguaag

SEQ ID NO: 1326023 - RNA, 19 nt, Homo sapiens
  misc_RNA (1)...(19): siRNA sense strand
acacggaagacgagaucua

SEQ ID NO: 1326024 - RNA, 19 nt, Homo sapiens
  misc_RNA (1)...(19): siRNA sense strand
gcaacucagcccagagaag

SEQ ID NO: 1326025 - RNA, 19 nt, Homo sapiens
  misc_RNA (1)...(19): siRNA sense strand
gugaagguagaauguaaga

SEQ ID NO: 1326026 - RNA, 19 nt, Homo sapiens
  misc_RNA (1)...(19): siRNA sense strand
cauccaguccuucgauuca

SEQ ID NO: 1326027 - RNA, 19 nt, Homo sapiens
  misc_RNA (1)...(19): siRNA sense strand
ggaagacgagaucuaugag

SEQ ID NO: 1326028 - RNA, 19 nt, Homo sapiens
  misc_RNA (1)...(19): siRNA sense strand
gaaccugggccugcugagu

SEQ ID NO: 1326029 - RNA, 19 nt, Homo sapiens
  misc_RNA (1)...(19): siRNA sense strand
aggcacagcccgacagguu

SEQ ID NO: 1326030 - RNA, 19 nt, Homo sapiens
  misc_RNA (1)...(19): siRNA sense strand
gaugagcugcuggagaaau

SEQ ID NO: 1326031 - RNA, 19 nt, Homo sapiens
  misc_RNA (1)...(19): siRNA sense strand
ccaggugaagguagaaugu

SEQ ID NO: 1326032 - RNA, 19 nt, Homo sapiens
  misc_RNA (1)...(19): siRNA sense strand
uacccaagcugaacaaccu

SEQ ID NO: 1326033 - RNA, 19 nt, Homo sapiens
  misc_RNA (1)...(19): siRNA sense strand
gaggaccacaugcucaaca

SEQ ID NO: 1326034 - RNA, 19 nt, Homo sapiens
  misc_RNA (1)...(19): siRNA sense strand
uggcucagcaccucaccua

SEQ ID NO: 1326035 - RNA, 19 nt, Homo sapiens
  misc_RNA (1)...(19): siRNA sense strand
gacccaccaucaacugcau

SEQ ID NO: 1326036 - RNA, 19 nt, Homo sapiens
  misc_RNA (1)...(19): siRNA sense strand
gcauccaguccuucgauuc

SEQ ID NO: 1326037 - RNA, 19 nt, Homo sapiens
  misc_RNA (1)...(19): siRNA sense strand
gcugguggagucuguguuc

SEQ ID NO: 1326038 - RNA, 19 nt, Homo sapiens
  misc_RNA (1)...(19): siRNA sense strand
gaauuucaacacgcugaug

SEQ ID NO: 1326039 - RNA, 19 nt, Homo sapiens
  misc_RNA (1)...(19): siRNA sense strand
ggacacccaggagcugaga

SEQ ID NO: 1326040 - RNA, 19 nt, Homo sapiens
  misc_RNA (1)...(19): siRNA sense strand
aaucacuccuacacgcuau

SEQ ID NO: 1326041 - RNA, 19 nt, Homo sapiens
  misc_RNA (1)...(19): siRNA sense strand
caggugaagguagaaugua

SEQ ID NO: 1326042 - RNA, 19 nt, Homo sapiens
  misc_RNA (1)...(19): siRNA sense strand
aagaugagcugcuggagaa

SEQ ID NO: 1326043 - RNA, 19 nt, Homo sapiens
  misc_RNA (1)...(19): siRNA sense strand
gacgagaucuaugagcuuu

SEQ ID NO: 1326044 - RNA, 19 nt, Homo sapiens
  misc_RNA (1)...(19): siRNA sense strand
gaagguagaauguaagaag

SEQ ID NO: 1326045 - RNA, 19 nt, Homo sapiens
  misc_RNA (1)...(19): siRNA sense strand
gagcgacucucgggcaauu

SEQ ID NO: 1326046 - RNA, 19 nt, Homo sapiens
  misc_RNA (1)...(19): siRNA sense strand
ucuaugagcuuucuuaugc

SEQ ID NO: 1326047 - RNA, 19 nt, Homo sapiens
  misc_RNA (1)...(19): siRNA sense strand
agucuguguucaagaauua

SEQ ID NO: 1326048 - RNA, 19 nt, Homo sapiens
  misc_RNA (1)...(19): siRNA sense strand
caagaauuaugacccugaa

SEQ ID NO: 1326049 - RNA, 19 nt, Homo sapiens
  misc_RNA (1)...(19): siRNA sense strand
gaagaagucauaggucguu

SEQ ID NO: 1326050 - RNA, 19 nt, Homo sapiens
  misc_RNA (1)...(19): siRNA sense strand
gagaccaggugaagguaga

SEQ ID NO: 1326051 - RNA, 19 nt, Homo sapiens
  misc_RNA (1)...(19): siRNA sense strand
uccaccagcugcagaauuu

SEQ ID NO: 1326052 - RNA, 19 nt, Homo sapiens
  misc_RNA (1)...(19): siRNA sense strand
ccagcuagaagaagucaua

SEQ ID NO: 1326053 - RNA, 19 nt, Homo sapiens
  misc_RNA (1)...(19): siRNA sense strand
caacucagcccagagaaga

SEQ ID NO: 1326054 - RNA, 19 nt, Homo sapiens
  misc_RNA (1)...(19): siRNA sense strand
ggaagucccaccaggaaug

SEQ ID NO: 1326055 - RNA, 19 nt, Homo sapiens
  misc_RNA (1)...(19): siRNA sense strand
gcagagaccaggugaaggu

SEQ ID NO: 1326056 - RNA, 19 nt, Homo sapiens
  misc_RNA (1)...(19): siRNA sense strand
gaggaagucccaccaggaa

SEQ ID NO: 1326057 - RNA, 19 nt, Homo sapiens
  misc_RNA (1)...(19): siRNA sense strand
agaaaugcauccaguccuu

SEQ ID NO: 1326058 - RNA, 19 nt, Homo sapiens
  misc_RNA (1)...(19): siRNA sense strand
gaaaagacaguaagaggaa

SEQ ID NO: 1326059 - RNA, 19 nt, Homo sapiens
  misc_RNA (1)...(19): siRNA sense strand
cacaggugcuggacaaguu

SEQ ID NO: 1326060 - RNA, 19 nt, Homo sapiens
  misc_RNA (1)...(19): siRNA sense strand
gagucuguguucaagaauu

SEQ ID NO: 1326061 - RNA, 19 nt, Homo sapiens
  misc_RNA (1)...(19): siRNA sense strand
gagccgcguugucccaaga

SEQ ID NO: 1326062 - RNA, 19 nt, Homo sapiens
  misc_RNA (1)...(19): siRNA sense strand
cggaagacgagaucuauga

SEQ ID NO: 1326063 - RNA, 19 nt, Homo sapiens
  misc_RNA (1)...(19): siRNA sense strand
uggagucuguguucaagaa

SEQ ID NO: 1326064 - RNA, 19 nt, Homo sapiens
  misc_RNA (1)...(19): siRNA sense strand
ugagacggcugcagaucug

SEQ ID NO: 1326065 - RNA, 19 nt, Homo sapiens
  misc_RNA (1)...(19): siRNA sense strand
gcuagaagaagucauaggu

SEQ ID NO: 1326066 - RNA, 19 nt, Homo sapiens
  misc_RNA (1)...(19): siRNA sense strand
gaucuaugagcuuucuuau

SEQ ID NO: 1326067 - RNA, 19 nt, Homo sapiens
  misc_RNA (1)...(19): siRNA sense strand
aggugaagguagaauguaa

SEQ ID NO: 1326068 - RNA, 19 nt, Homo sapiens
  misc_RNA (1)...(19): siRNA sense strand
gaggauccuucagcagaga

SEQ ID NO: 1326069 - RNA, 19 nt, Homo sapiens
  misc_RNA (1)...(19): siRNA sense strand
ggaaaucagcaaggucaug

SEQ ID NO: 1326070 - RNA, 19 nt, Homo sapiens
  misc_RNA (1)...(19): siRNA sense strand
gcaccaggauccccagcua

SEQ ID NO: 1326071 - RNA, 19 nt, Homo sapiens
  misc_RNA (1)...(19): siRNA sense strand
aagguagaauguaagaaga

SEQ ID NO: 1326072 - RNA, 19 nt, Homo sapiens
  misc_RNA (1)...(19): siRNA sense strand
gaagucauaggucguuucu

SEQ ID NO: 1326073 - RNA, 19 nt, Homo sapiens
  misc_RNA (1)...(19): siRNA sense strand
gaaggccgaggaacaaucu

SEQ ID NO: 1326074 - RNA, 19 nt, Homo sapiens
  misc_RNA (1)...(19): siRNA sense strand
gaccugcggagcuacguuu

SEQ ID NO: 1326075 - RNA, 19 nt, Homo sapiens
  misc_RNA (1)...(19): siRNA sense strand
cgagaucuaugagcuuucu

SEQ ID NO: 1326076 - RNA, 19 nt, Homo sapiens
  misc_RNA (1)...(19): siRNA sense strand
agaucuaugagcuuucuua

SEQ ID NO: 1326077 - RNA, 19 nt, Homo sapiens
  misc_RNA (1)...(19): siRNA sense strand
gguggagucuguguucaag

SEQ ID NO: 1326078 - RNA, 19 nt, Homo sapiens
  misc_RNA (1)...(19): siRNA sense strand
gagaagacugggagacucu

SEQ ID NO: 1326079 - RNA, 19 nt, Homo sapiens
  misc_RNA (1)...(19): siRNA sense strand
gaacagaaaagacaguaag

SEQ ID NO: 1326080 - RNA, 19 nt, Homo sapiens
  misc_RNA (1)...(19): siRNA sense strand
acacggaagacgagaucua

SEQ ID NO: 1326081 - RNA, 19 nt, Homo sapiens
  misc_RNA (1)...(19): siRNA sense strand
gcaacucagcccagagaag

SEQ ID NO: 1326082 - RNA, 19 nt, Homo sapiens
  misc_RNA (1)...(19): siRNA sense strand
gugaagguagaauguaaga

SEQ ID NO: 1326083 - RNA, 19 nt, Homo sapiens
  misc_RNA (1)...(19): siRNA sense strand
cauccaguccuucgauuca

SEQ ID NO: 1326084 - RNA, 19 nt, Homo sapiens
  misc_RNA (1)...(19): siRNA sense strand
ggaagacgagaucuaugag

SEQ ID NO: 1326085 - RNA, 19 nt, Homo sapiens
  misc_RNA (1)...(19): siRNA sense strand
gaaccugggccugcugagu

SEQ ID NO: 1326086 - RNA, 19 nt, Homo sapiens
  misc_RNA (1)...(19): siRNA sense strand
aggcacagcccgacagguu

SEQ ID NO: 1326087 - RNA, 19 nt, Homo sapiens
  misc_RNA (1)...(19): siRNA sense strand
gaugagcugcuggagaaau

SEQ ID NO: 1326088 - RNA, 19 nt, Homo sapiens
  misc_RNA (1)...(19): siRNA sense strand
ccaggugaagguagaaugu

SEQ ID NO: 1326089 - RNA, 19 nt, Homo sapiens
  misc_RNA (1)...(19): siRNA sense strand
uacccaagcugaacaaccu

SEQ ID NO: 1326090 - RNA, 19 nt, Homo sapiens
  misc_RNA (1)...(19): siRNA sense strand
gaggaccacaugcucaaca

SEQ ID NO: 1326091 - RNA, 19 nt, Homo sapiens
  misc_RNA (1)...(19): siRNA sense strand
uggcucagcaccucaccua

SEQ ID NO: 1326092 - RNA, 19 nt, Homo sapiens
  misc_RNA (1)...(19): siRNA sense strand
gacccaccaucaacugcau

SEQ ID NO: 1326093 - RNA, 19 nt, Homo sapiens
  misc_RNA (1)...(19): siRNA sense strand
gcauccaguccuucgauuc

SEQ ID NO: 1326094 - RNA, 19 nt, Homo sapiens
  misc_RNA (1)...(19): siRNA sense strand
gcugguggagucuguguuc

SEQ ID NO: 1326095 - RNA, 19 nt, Homo sapiens
  misc_RNA (1)...(19): siRNA sense strand
gaauuucaacacgcugaug

SEQ ID NO: 1326096 - RNA, 19 nt, Homo sapiens
  misc_RNA (1)...(19): siRNA sense strand
ggacacccaggagcugaga

SEQ ID NO: 1326097 - RNA, 19 nt, Homo sapiens
  misc_RNA (1)...(19): siRNA sense strand
aaucacuccuacacgcuau

SEQ ID NO: 1326098 - RNA, 19 nt, Homo sapiens
  misc_RNA (1)...(19): siRNA sense strand
caggugaagguagaaugua

SEQ ID NO: 1326099 - RNA, 19 nt, Homo sapiens
  misc_RNA (1)...(19): siRNA sense strand
gaaaucagcuagagaccaa

SEQ ID NO: 1326100 - RNA, 19 nt, Homo sapiens
  misc_RNA (1)...(19): siRNA sense strand
gaagagaucguuaauauac

SEQ ID NO: 1326101 - RNA, 19 nt, Homo sapiens
  misc_RNA (1)...(19): siRNA sense strand
caacuauccuauucuguaa

SEQ ID NO: 1326102 - RNA, 19 nt, Homo sapiens
  misc_RNA (1)...(19): siRNA sense strand
caacaaggaucaccucgau

SEQ ID NO: 1326103 - RNA, 19 nt, Homo sapiens
  misc_RNA (1)...(19): siRNA sense strand
ggacaacaacggaugauga

SEQ ID NO: 1326104 - RNA, 19 nt, Homo sapiens
  misc_RNA (1)...(19): siRNA sense strand
ggccacaucuuaccugauu

SEQ ID NO: 1326105 - RNA, 19 nt, Homo sapiens
  misc_RNA (1)...(19): siRNA sense strand
gcuagagaccaauuuaaua

SEQ ID NO: 1326106 - RNA, 19 nt, Homo sapiens
  misc_RNA (1)...(19): siRNA sense strand
caacaacuauccuauucug

SEQ ID NO: 1326107 - RNA, 19 nt, Homo sapiens
  misc_RNA (1)...(19): siRNA sense strand
uaugacaucuuauccugua

SEQ ID NO: 1326108 - RNA, 19 nt, Homo sapiens
  misc_RNA (1)...(19): siRNA sense strand
gaagaugaguuggagugaa

SEQ ID NO: 1326109 - RNA, 19 nt, Homo sapiens
  misc_RNA (1)...(19): siRNA sense strand
gaaauuaaacaccucuugu

SEQ ID NO: 1326110 - RNA, 19 nt, Homo sapiens
  misc_RNA (1)...(19): siRNA sense strand
uaaagccacuugucugugu

SEQ ID NO: 1326111 - RNA, 19 nt, Homo sapiens
  misc_RNA (1)...(19): siRNA sense strand
guacaagaagagaucguua

SEQ ID NO: 1326112 - RNA, 19 nt, Homo sapiens
  misc_RNA (1)...(19): siRNA sense strand
ccacuacacucagauuguu

SEQ ID NO: 1326113 - RNA, 19 nt, Homo sapiens
  misc_RNA (1)...(19): siRNA sense strand
caagaagagaucguuaaua

SEQ ID NO: 1326114 - RNA, 19 nt, Homo sapiens
  misc_RNA (1)...(19): siRNA sense strand
caucuuauccuguaucaug

SEQ ID NO: 1326115 - RNA, 19 nt, Homo sapiens
  misc_RNA (1)...(19): siRNA sense strand
aacaacggaugaugacaua

SEQ ID NO: 1326116 - RNA, 19 nt, Homo sapiens
  misc_RNA (1)...(19): siRNA sense strand
ggaaauuaaacaccucuug

SEQ ID NO: 1326117 - RNA, 19 nt, Homo sapiens
  misc_RNA (1)...(19): siRNA sense strand
gcaacaugcugaagaugag

SEQ ID NO: 1326118 - RNA, 19 nt, Homo sapiens
  misc_RNA (1)...(19): siRNA sense strand
cuacuaugaugaauacuuc

SEQ ID NO: 1326119 - RNA, 19 nt, Homo sapiens
  misc_RNA (1)...(19): siRNA sense strand
ugacauacaaguccauuau

SEQ ID NO: 1326120 - RNA, 19 nt, Homo sapiens
  misc_RNA (1)...(19): siRNA sense strand
guaucauggucaaguguaa

SEQ ID NO: 1326121 - RNA, 19 nt, Homo sapiens
  misc_RNA (1)...(19): siRNA sense strand
gcugugccauugcaucuug

SEQ ID NO: 1326122 - RNA, 19 nt, Homo sapiens
  misc_RNA (1)...(19): siRNA sense strand
gguugcugcugcuugcuua

SEQ ID NO: 1326123 - RNA, 19 nt, Homo sapiens
  misc_RNA (1)...(19): siRNA sense strand
acaacuauccuauucugua

SEQ ID NO: 1326124 - RNA, 19 nt, Homo sapiens
  misc_RNA (1)...(19): siRNA sense strand
acagugagucuacaaguuu

SEQ ID NO: 1326125 - RNA, 19 nt, Homo sapiens
  misc_RNA (1)...(19): siRNA sense strand
auacuucgacugugacaua

SEQ ID NO: 1326126 - RNA, 19 nt, Homo sapiens
  misc_RNA (1)...(19): siRNA sense strand
ugaagaggcugcacaaaau

SEQ ID NO: 1326127 - RNA, 19 nt, Homo sapiens
  misc_RNA (1)...(19): siRNA sense strand
ucaccgacuugccaaaugu

SEQ ID NO: 1326128 - RNA, 19 nt, Homo sapiens
  misc_RNA (1)...(19): siRNA sense strand
ugcaaccacucaacaacua

SEQ ID NO: 1326129 - RNA, 19 nt, Homo sapiens
  misc_RNA (1)...(19): siRNA sense strand
gaugaugacauaacuacug

SEQ ID NO: 1326130 - RNA, 19 nt, Homo sapiens
  misc_RNA (1)...(19): siRNA sense strand
ucagcuagagaccaauuua

SEQ ID NO: 1326131 - RNA, 19 nt, Homo sapiens
  misc_RNA (1)...(19): siRNA sense strand
acaaggaucaccucgauau

SEQ ID NO: 1326132 - RNA, 19 nt, Homo sapiens
  misc_RNA (1)...(19): siRNA sense strand
uacagugagucuacaaguu

SEQ ID NO: 1326133 - RNA, 19 nt, Homo sapiens
  misc_RNA (1)...(19): siRNA sense strand
cucgauaucucuacguuug

SEQ ID NO: 1326134 - RNA, 19 nt, Homo sapiens
  misc_RNA (1)...(19): siRNA sense strand
cauggagaauggacaacaa

SEQ ID NO: 1326135 - RNA, 19 nt, Homo sapiens
  misc_RNA (1)...(19): siRNA sense strand
uuucaaacauggagaaugg

SEQ ID NO: 1326136 - RNA, 19 nt, Homo sapiens
  misc_RNA (1)...(19): siRNA sense strand
gacaucuuauccuguauca

SEQ ID NO: 1326137 - RNA, 19 nt, Homo sapiens
  misc_RNA (1)...(19): siRNA sense strand
ucucuacguuugucacuau

SEQ ID NO: 1326138 - RNA, 19 nt, Homo sapiens
  misc_RNA (1)...(19): siRNA sense strand
caacaacggaugaugacau

SEQ ID NO: 1326139 - RNA, 19 nt, Homo sapiens
  misc_RNA (1)...(19): siRNA sense strand
cucaacaacuauccuauuc

SEQ ID NO: 1326140 - RNA, 19 nt, Homo sapiens
  misc_RNA (1)...(19): siRNA sense strand
cagcuagagaccaauuuaa

SEQ ID NO: 1326141 - RNA, 19 nt, Homo sapiens
  misc_RNA (1)...(19): siRNA sense strand
augaauacuucgacuguga

SEQ ID NO: 1326142 - RNA, 19 nt, Homo sapiens
  misc_RNA (1)...(19): siRNA sense strand
cuacugaccacuacacuca

SEQ ID NO: 1326143 - RNA, 19 nt, Homo sapiens
  misc_RNA (1)...(19): siRNA sense strand
aagaugaguuggagugaag

SEQ ID NO: 1326144 - RNA, 19 nt, Homo sapiens
  misc_RNA (1)...(19): siRNA sense strand
ccacucaacaacuauccua

SEQ ID NO: 1326145 - RNA, 19 nt, Homo sapiens
  misc_RNA (1)...(19): siRNA sense strand
acauacaaguccauuaucu

SEQ ID NO: 1326146 - RNA, 19 nt, Homo sapiens
  misc_RNA (1)...(19): siRNA sense strand
cauaacuacugaccacuac

SEQ ID NO: 1326147 - RNA, 19 nt, Homo sapiens
  misc_RNA (1)...(19): siRNA sense strand
ugccaaauguacaagaaga

SEQ ID NO: 1326148 - RNA, 19 nt, Homo sapiens
  misc_RNA (1)...(19): siRNA sense strand
uacaagaagagaucguuaa

SEQ ID NO: 1326149 - RNA, 19 nt, Homo sapiens
  misc_RNA (1)...(19): siRNA sense strand
ggaugcaaccacucaacaa

SEQ ID NO: 1326150 - RNA, 19 nt, Homo sapiens
  misc_RNA (1)...(19): siRNA sense strand
cuacguuugucacuauugu

SEQ ID NO: 1326151 - RNA, 19 nt, Homo sapiens
  misc_RNA (1)...(19): siRNA sense strand
gaucaccucgauaucucua

SEQ ID NO: 1326152 - RNA, 19 nt, Homo sapiens
  misc_RNA (1)...(19): siRNA sense strand
cgacuugccaaauguacaa

SEQ ID NO: 1326153 - RNA, 19 nt, Homo sapiens
  misc_RNA (1)...(19): siRNA sense strand
gagaccaauuuaauaagcu

SEQ ID NO: 1326154 - RNA, 19 nt, Homo sapiens
  misc_RNA (1)...(19): siRNA sense strand
guacagugagucuacaagu

SEQ ID NO: 1326155 - RNA, 19 nt, Homo sapiens
  misc_RNA (1)...(19): siRNA sense strand
guuugucacuauugucaug

SEQ ID NO: 1326156 - RNA, 19 nt, Homo sapiens
  misc_RNA (1)...(19): siRNA sense strand
gaucguuaauauacacaac

SEQ ID NO: 1326157 - RNA, 19 nt, Homo sapiens
  misc_RNA (1)...(19): siRNA sense strand
augaugacauaacuacuga

SEQ ID NO: 1326158 - RNA, 19 nt, Homo sapiens
  misc_RNA (1)...(19): siRNA sense strand
caacggaugaugacauaac

SEQ ID NO: 1326159 - RNA, 19 nt, Homo sapiens
  misc_RNA (1)...(19): siRNA sense strand
aaacauggagaauggacaa

SEQ ID NO: 1326160 - RNA, 19 nt, Homo sapiens
  misc_RNA (1)...(19): siRNA sense strand
guaauuggagucugguaca

SEQ ID NO: 1326161 - RNA, 19 nt, Homo sapiens
  misc_RNA (1)...(19): siRNA sense strand
cuucgacugugacauacaa

SEQ ID NO: 1326162 - RNA, 19 nt, Homo sapiens
  misc_RNA (1)...(19): siRNA sense strand
acaagaagagaucguuaau

SEQ ID NO: 1326163 - RNA, 19 nt, Homo sapiens
  misc_RNA (1)...(19): siRNA sense strand
gcaaccacucaacaacuau

SEQ ID NO: 1326164 - RNA, 19 nt, Homo sapiens
  misc_RNA (1)...(19): siRNA sense strand
ccaaauguacaagaagaga

SEQ ID NO: 1326165 - RNA, 19 nt, Homo sapiens
  misc_RNA (1)...(19): siRNA sense strand
gugaagaggcugcacaaaa

SEQ ID NO: 1326166 - RNA, 19 nt, Homo sapiens
  misc_RNA (1)...(19): siRNA sense strand
gaccacuacacucagauug

SEQ ID NO: 1326167 - RNA, 19 nt, Homo sapiens
  misc_RNA (1)...(19): siRNA sense strand
ggagucugguacagugagu

SEQ ID NO: 1326168 - RNA, 19 nt, Homo sapiens
  misc_RNA (1)...(19): siRNA sense strand
gagugaagaggcugcacaa

SEQ ID NO: 1326169 - RNA, 19 nt, Homo sapiens
  misc_RNA (1)...(19): siRNA sense strand
gucaccgacuugccaaaug

SEQ ID NO: 1326170 - RNA, 19 nt, Homo sapiens
  misc_RNA (1)...(19): siRNA sense strand
cagugagucuacaaguuuc

SEQ ID NO: 1326171 - RNA, 19 nt, Homo sapiens
  misc_RNA (1)...(19): siRNA sense strand
uccauuaucugggaugcaa

SEQ ID NO: 1326172 - RNA, 19 nt, Homo sapiens
  misc_RNA (1)...(19): siRNA sense strand
agagaccaauuuaauaagc

SEQ ID NO: 1326173 - RNA, 19 nt, Homo sapiens
  misc_RNA (1)...(19): siRNA sense strand
ugaugaauacuucgacugu

SEQ ID NO: 1326174 - RNA, 19 nt, Homo sapiens
  misc_RNA (1)...(19): siRNA sense strand
acauaacuacugaccacua

SEQ ID NO: 1326175 - RNA, 19 nt, Homo sapiens
  misc_RNA (1)...(19): siRNA sense strand
caaauguacaagaagagau

SEQ ID NO: 1326176 - RNA, 19 nt, Homo sapiens
  misc_RNA (1)...(19): siRNA sense strand
caaaguauugugauaugac

SEQ ID NO: 1326177 - RNA, 19 nt, Homo sapiens
  misc_RNA (1)...(19): siRNA sense strand
gggaugcaaccacucaaca

SEQ ID NO: 1326178 - RNA, 19 nt, Homo sapiens
  misc_RNA (1)...(19): siRNA sense strand
gugacauacaaguccauua

SEQ ID NO: 1326179 - RNA, 19 nt, Homo sapiens
  misc_RNA (1)...(19): siRNA sense strand
uauccuguaucauggucaa

SEQ ID NO: 1326180 - RNA, 19 nt, Homo sapiens
  misc_RNA (1)...(19): siRNA sense strand
uguaaagccacuugucugu

SEQ ID NO: 1326181 - RNA, 19 nt, Homo sapiens
  misc_RNA (1)...(19): siRNA sense strand
acucaacaacuauccuauu

SEQ ID NO: 1326182 - RNA, 19 nt, Homo sapiens
  misc_RNA (1)...(19): siRNA sense strand
gacauacaaguccauuauc

SEQ ID NO: 1326183 - RNA, 19 nt, Homo sapiens
  misc_RNA (1)...(19): siRNA sense strand
cgauaucucuacguuuguc

SEQ ID NO: 1326184 - RNA, 19 nt, Homo sapiens
  misc_RNA (1)...(19): siRNA sense strand
cacaacgcccucaggagaa

SEQ ID NO: 1326185 - RNA, 19 nt, Homo sapiens
  misc_RNA (1)...(19): siRNA sense strand
ugagaggagacuuccaaau

SEQ ID NO: 1326186 - RNA, 19 nt, Homo sapiens
  misc_RNA (1)...(19): siRNA sense strand
acuauccuauucuguaaag

SEQ ID NO: 1326187 - RNA, 19 nt, Homo sapiens
  misc_RNA (1)...(19): siRNA sense strand
gaaaucagcuagagaccaa

SEQ ID NO: 1326188 - RNA, 19 nt, Homo sapiens
  misc_RNA (1)...(19): siRNA sense strand
gaagagaucguuaauauac

SEQ ID NO: 1326189 - RNA, 19 nt, Homo sapiens
  misc_RNA (1)...(19): siRNA sense strand
caacaaggaucaccucgau

SEQ ID NO: 1326190 - RNA, 19 nt, Homo sapiens
  misc_RNA (1)...(19): siRNA sense strand
ggacaacaacggaugauga

SEQ ID NO: 1326191 - RNA, 19 nt, Homo sapiens
  misc_RNA (1)...(19): siRNA sense strand
ggccacaucuuaccugauu

SEQ ID NO: 1326192 - RNA, 19 nt, Homo sapiens
  misc_RNA (1)...(19): siRNA sense strand
gcuagagaccaauuuaaua

SEQ ID NO: 1326193 - RNA, 19 nt, Homo sapiens
  misc_RNA (1)...(19): siRNA sense strand
uaugacaucuuauccugua

SEQ ID NO: 1326194 - RNA, 19 nt, Homo sapiens
  misc_RNA (1)...(19): siRNA sense strand
gaagaugaguuggagugaa

SEQ ID NO: 1326195 - RNA, 19 nt, Homo sapiens
  misc_RNA (1)...(19): siRNA sense strand
gaaauuaaacaccucuugu

SEQ ID NO: 1326196 - RNA, 19 nt, Homo sapiens
  misc_RNA (1)...(19): siRNA sense strand
guacaagaagagaucguua

SEQ ID NO: 1326197 - RNA, 19 nt, Homo sapiens
  misc_RNA (1)...(19): siRNA sense strand
ccacuacacucagauuguu

SEQ ID NO: 1326198 - RNA, 19 nt, Homo sapiens
  misc_RNA (1)...(19): siRNA sense strand
caagaagagaucguuaaua

SEQ ID NO: 1326199 - RNA, 19 nt, Homo sapiens
  misc_RNA (1)...(19): siRNA sense strand
caucuuauccuguaucaug

SEQ ID NO: 1326200 - RNA, 19 nt, Homo sapiens
  misc_RNA (1)...(19): siRNA sense strand
aacaacggaugaugacaua

SEQ ID NO: 1326201 - RNA, 19 nt, Homo sapiens
  misc_RNA (1)...(19): siRNA sense strand
ggaaauuaaacaccucuug

SEQ ID NO: 1326202 - RNA, 19 nt, Homo sapiens
  misc_RNA (1)...(19): siRNA sense strand
gcaacaugcugaagaugag

SEQ ID NO: 1326203 - RNA, 19 nt, Homo sapiens
  misc_RNA (1)...(19): siRNA sense strand
guaucauggucaaguguaa

SEQ ID NO: 1326204 - RNA, 19 nt, Homo sapiens
  misc_RNA (1)...(19): siRNA sense strand
gcugugccauugcaucuug

SEQ ID NO: 1326205 - RNA, 19 nt, Homo sapiens
  misc_RNA (1)...(19): siRNA sense strand
gguugcugcugcuugcuua

SEQ ID NO: 1326206 - RNA, 19 nt, Homo sapiens
  misc_RNA (1)...(19): siRNA sense strand
acagugagucuacaaguuu

SEQ ID NO: 1326207 - RNA, 19 nt, Homo sapiens
  misc_RNA (1)...(19): siRNA sense strand
ugaagaggcugcacaaaau

SEQ ID NO: 1326208 - RNA, 19 nt, Homo sapiens
  misc_RNA (1)...(19): siRNA sense strand
ucaccgacuugccaaaugu

SEQ ID NO: 1326209 - RNA, 19 nt, Homo sapiens
  misc_RNA (1)...(19): siRNA sense strand
gaugaugacauaacuacug

SEQ ID NO: 1326210 - RNA, 19 nt, Homo sapiens
  misc_RNA (1)...(19): siRNA sense strand
ucagcuagagaccaauuua

SEQ ID NO: 1326211 - RNA, 19 nt, Homo sapiens
  misc_RNA (1)...(19): siRNA sense strand
acaaggaucaccucgauau

SEQ ID NO: 1326212 - RNA, 19 nt, Homo sapiens
  misc_RNA (1)...(19): siRNA sense strand
uacagugagucuacaaguu

SEQ ID NO: 1326213 - RNA, 19 nt, Homo sapiens
  misc_RNA (1)...(19): siRNA sense strand
cucgauaucucuacguuug

SEQ ID NO: 1326214 - RNA, 19 nt, Homo sapiens
  misc_RNA (1)...(19): siRNA sense strand
cauggagaauggacaacaa

SEQ ID NO: 1326215 - RNA, 19 nt, Homo sapiens
  misc_RNA (1)...(19): siRNA sense strand
uuucaaacauggagaaugg

SEQ ID NO: 1326216 - RNA, 19 nt, Homo sapiens
  misc_RNA (1)...(19): siRNA sense strand
gacaucuuauccuguauca

SEQ ID NO: 1326217 - RNA, 19 nt, Homo sapiens
  misc_RNA (1)...(19): siRNA sense strand
ucucuacguuugucacuau

SEQ ID NO: 1326218 - RNA, 19 nt, Homo sapiens
  misc_RNA (1)...(19): siRNA sense strand
caacaacggaugaugacau

SEQ ID NO: 1326219 - RNA, 19 nt, Homo sapiens
  misc_RNA (1)...(19): siRNA sense strand
cagcuagagaccaauuuaa

SEQ ID NO: 1326220 - RNA, 19 nt, Homo sapiens
  misc_RNA (1)...(19): siRNA sense strand
cuacugaccacuacacuca

SEQ ID NO: 1326221 - RNA, 19 nt, Homo sapiens
  misc_RNA (1)...(19): siRNA sense strand
ugccaaauguacaagaaga

SEQ ID NO: 1326222 - RNA, 19 nt, Homo sapiens
  misc_RNA (1)...(19): siRNA sense strand
cauaacuacugaccacuac

SEQ ID NO: 1326223 - RNA, 19 nt, Homo sapiens
  misc_RNA (1)...(19): siRNA sense strand
aagaugaguuggagugaag

SEQ ID NO: 1326224 - RNA, 19 nt, Homo sapiens
  misc_RNA (1)...(19): siRNA sense strand
uacaagaagagaucguuaa

SEQ ID NO: 1326225 - RNA, 19 nt, Homo sapiens
  misc_RNA (1)...(19): siRNA sense strand
cuacguuugucacuauugu

SEQ ID NO: 1326226 - RNA, 19 nt, Homo sapiens
  misc_RNA (1)...(19): siRNA sense strand
gaucaccucgauaucucua

SEQ ID NO: 1326227 - RNA, 19 nt, Homo sapiens
  misc_RNA (1)...(19): siRNA sense strand
cgacuugccaaauguacaa

SEQ ID NO: 1326228 - RNA, 19 nt, Homo sapiens
  misc_RNA (1)...(19): siRNA sense strand
gagaccaauuuaauaagcu

SEQ ID NO: 1326229 - RNA, 19 nt, Homo sapiens
  misc_RNA (1)...(19): siRNA sense strand
gaucguuaauauacacaac

SEQ ID NO: 1326230 - RNA, 19 nt, Homo sapiens
  misc_RNA (1)...(19): siRNA sense strand
guuugucacuauugucaug

SEQ ID NO: 1326231 - RNA, 19 nt, Homo sapiens
  misc_RNA (1)...(19): siRNA sense strand
augaugacauaacuacuga

SEQ ID NO: 1326232 - RNA, 19 nt, Homo sapiens
  misc_RNA (1)...(19): siRNA sense strand
caacggaugaugacauaac

SEQ ID NO: 1326233 - RNA, 19 nt, Homo sapiens
  misc_RNA (1)...(19): siRNA sense strand
aaacauggagaauggacaa

SEQ ID NO: 1326234 - RNA, 19 nt, Homo sapiens
  misc_RNA (1)...(19): siRNA sense strand
guacagugagucuacaagu

SEQ ID NO: 1326235 - RNA, 19 nt, Homo sapiens
  misc_RNA (1)...(19): siRNA sense strand
guaauuggagucugguaca

SEQ ID NO: 1326236 - RNA, 19 nt, Homo sapiens
  misc_RNA (1)...(19): siRNA sense strand
acaagaagagaucguuaau

SEQ ID NO: 1326237 - RNA, 19 nt, Homo sapiens
  misc_RNA (1)...(19): siRNA sense strand
ccaaauguacaagaagaga

SEQ ID NO: 1326238 - RNA, 19 nt, Homo sapiens
  misc_RNA (1)...(19): siRNA sense strand
gugaagaggcugcacaaaa

SEQ ID NO: 1326239 - RNA, 19 nt, Homo sapiens
  misc_RNA (1)...(19): siRNA sense strand
gaccacuacacucagauug

SEQ ID NO: 1326240 - RNA, 19 nt, Homo sapiens
  misc_RNA (1)...(19): siRNA sense strand
ggagucugguacagugagu

SEQ ID NO: 1326241 - RNA, 19 nt, Homo sapiens
  misc_RNA (1)...(19): siRNA sense strand
gagugaagaggcugcacaa

SEQ ID NO: 1326242 - RNA, 19 nt, Homo sapiens
  misc_RNA (1)...(19): siRNA sense strand
gucaccgacuugccaaaug

SEQ ID NO: 1326243 - RNA, 19 nt, Homo sapiens
  misc_RNA (1)...(19): siRNA sense strand
cagugagucuacaaguuuc

SEQ ID NO: 1326244 - RNA, 19 nt, Homo sapiens
  misc_RNA (1)...(19): siRNA sense strand
agagaccaauuuaauaagc

SEQ ID NO: 1326245 - RNA, 19 nt, Homo sapiens
  misc_RNA (1)...(19): siRNA sense strand
caaauguacaagaagagau

SEQ ID NO: 1326246 - RNA, 19 nt, Homo sapiens
  misc_RNA (1)...(19): siRNA sense strand
acauaacuacugaccacua

SEQ ID NO: 1326247 - RNA, 19 nt, Homo sapiens
  misc_RNA (1)...(19): siRNA sense strand
caaaguauugugauaugac

SEQ ID NO: 1326248 - RNA, 19 nt, Homo sapiens
  misc_RNA (1)...(19): siRNA sense strand
uauccuguaucauggucaa

SEQ ID NO: 1326249 - RNA, 19 nt, Homo sapiens
  misc_RNA (1)...(19): siRNA sense strand
cgauaucucuacguuuguc

SEQ ID NO: 1326250 - RNA, 19 nt, Homo sapiens
  misc_RNA (1)...(19): siRNA sense strand
cacaacgcccucaggagaa

SEQ ID NO: 1326251 - RNA, 19 nt, Homo sapiens
  misc_RNA (1)...(19): siRNA sense strand
ugagaggagacuuccaaau

SEQ ID NO: 1326252 - RNA, 19 nt, Homo sapiens
  misc_RNA (1)...(19): siRNA sense strand
gaaaucagcuagagaccaa

SEQ ID NO: 1326253 - RNA, 19 nt, Homo sapiens
  misc_RNA (1)...(19): siRNA sense strand
gaagagaucguuaauauac

SEQ ID NO: 1326254 - RNA, 19 nt, Homo sapiens
  misc_RNA (1)...(19): siRNA sense strand
caacuauccuauucuguaa

SEQ ID NO: 1326255 - RNA, 19 nt, Homo sapiens
  misc_RNA (1)...(19): siRNA sense strand
caacaaggaucaccucgau

SEQ ID NO: 1326256 - RNA, 19 nt, Homo sapiens
  misc_RNA (1)...(19): siRNA sense strand
ggacaacaacggaugauga

SEQ ID NO: 1326257 - RNA, 19 nt, Homo sapiens
  misc_RNA (1)...(19): siRNA sense strand
ggccacaucuuaccugauu

SEQ ID NO: 1326258 - RNA, 19 nt, Homo sapiens
  misc_RNA (1)...(19): siRNA sense strand
gcuagagaccaauuuaaua

SEQ ID NO: 1326259 - RNA, 19 nt, Homo sapiens
  misc_RNA (1)...(19): siRNA sense strand
caacaacuauccuauucug

SEQ ID NO: 1326260 - RNA, 19 nt, Homo sapiens
  misc_RNA (1)...(19): siRNA sense strand
uaugacaucuuauccugua

SEQ ID NO: 1326261 - RNA, 19 nt, Homo sapiens
  misc_RNA (1)...(19): siRNA sense strand
gaagaugaguuggagugaa

SEQ ID NO: 1326262 - RNA, 19 nt, Homo sapiens
  misc_RNA (1)...(19): siRNA sense strand
gaaauuaaacaccucuugu

SEQ ID NO: 1326263 - RNA, 19 nt, Homo sapiens
  misc_RNA (1)...(19): siRNA sense strand
uaaagccacuugucugugu

SEQ ID NO: 1326264 - RNA, 19 nt, Homo sapiens
  misc_RNA (1)...(19): siRNA sense strand
guacaagaagagaucguua

SEQ ID NO: 1326265 - RNA, 19 nt, Homo sapiens
  misc_RNA (1)...(19): siRNA sense strand
ccacuacacucagauuguu

SEQ ID NO: 1326266 - RNA, 19 nt, Homo sapiens
  misc_RNA (1)...(19): siRNA sense strand
caagaagagaucguuaaua

SEQ ID NO: 1326267 - RNA, 19 nt, Homo sapiens
  misc_RNA (1)...(19): siRNA sense strand
caucuuauccuguaucaug

SEQ ID NO: 1326268 - RNA, 19 nt, Homo sapiens
  misc_RNA (1)...(19): siRNA sense strand
aacaacggaugaugacaua

SEQ ID NO: 1326269 - RNA, 19 nt, Homo sapiens
  misc_RNA (1)...(19): siRNA sense strand
ggaaauuaaacaccucuug

SEQ ID NO: 1326270 - RNA, 19 nt, Homo sapiens
  misc_RNA (1)...(19): siRNA sense strand
gcaacaugcugaagaugag

SEQ ID NO: 1326271 - RNA, 19 nt, Homo sapiens
  misc_RNA (1)...(19): siRNA sense strand
cuacuaugaugaauacuuc

SEQ ID NO: 1326272 - RNA, 19 nt, Homo sapiens
  misc_RNA (1)...(19): siRNA sense strand
ugacauacaaguccauuau

SEQ ID NO: 1326273 - RNA, 19 nt, Homo sapiens
  misc_RNA (1)...(19): siRNA sense strand
guaucauggucaaguguaa

SEQ ID NO: 1326274 - RNA, 19 nt, Homo sapiens
  misc_RNA (1)...(19): siRNA sense strand
gcugugccauugcaucuug

SEQ ID NO: 1326275 - RNA, 19 nt, Homo sapiens
  misc_RNA (1)...(19): siRNA sense strand
gguugcugcugcuugcuua

SEQ ID NO: 1326276 - RNA, 19 nt, Homo sapiens
  misc_RNA (1)...(19): siRNA sense strand
acaacuauccuauucugua

SEQ ID NO: 1326277 - RNA, 19 nt, Homo sapiens
  misc_RNA (1)...(19): siRNA sense strand
acagugagucuacaaguuu

SEQ ID NO: 1326278 - RNA, 19 nt, Homo sapiens
  misc_RNA (1)...(19): siRNA sense strand
auacuucgacugugacaua

SEQ ID NO: 1326279 - RNA, 19 nt, Homo sapiens
  misc_RNA (1)...(19): siRNA sense strand
ugaagaggcugcacaaaau

SEQ ID NO: 1326280 - RNA, 19 nt, Homo sapiens
  misc_RNA (1)...(19): siRNA sense strand
ucaccgacuugccaaaugu

SEQ ID NO: 1326281 - RNA, 19 nt, Homo sapiens
  misc_RNA (1)...(19): siRNA sense strand
ugcaaccacucaacaacua

SEQ ID NO: 1326282 - RNA, 19 nt, Homo sapiens
  misc_RNA (1)...(19): siRNA sense strand
gaugaugacauaacuacug

SEQ ID NO: 1326283 - RNA, 19 nt, Homo sapiens
  misc_RNA (1)...(19): siRNA sense strand
ucagcuagagaccaauuua

SEQ ID NO: 1326284 - RNA, 19 nt, Homo sapiens
  misc_RNA (1)...(19): siRNA sense strand
acaaggaucaccucgauau

SEQ ID NO: 1326285 - RNA, 19 nt, Homo sapiens
  misc_RNA (1)...(19): siRNA sense strand
uacagugagucuacaaguu

SEQ ID NO: 1326286 - RNA, 19 nt, Homo sapiens
  misc_RNA (1)...(19): siRNA sense strand
cucgauaucucuacguuug

SEQ ID NO: 1326287 - RNA, 19 nt, Homo sapiens
  misc_RNA (1)...(19): siRNA sense strand
cauggagaauggacaacaa

SEQ ID NO: 1326288 - RNA, 19 nt, Homo sapiens
  misc_RNA (1)...(19): siRNA sense strand
uuucaaacauggagaaugg

SEQ ID NO: 1326289 - RNA, 19 nt, Homo sapiens
  misc_RNA (1)...(19): siRNA sense strand
gacaucuuauccuguauca

SEQ ID NO: 1326290 - RNA, 19 nt, Homo sapiens
  misc_RNA (1)...(19): siRNA sense strand
ucucuacguuugucacuau

SEQ ID NO: 1326291 - RNA, 19 nt, Homo sapiens
  misc_RNA (1)...(19): siRNA sense strand
caacaacggaugaugacau

SEQ ID NO: 1326292 - RNA, 19 nt, Homo sapiens
  misc_RNA (1)...(19): siRNA sense strand
cucaacaacuauccuauuc

SEQ ID NO: 1326293 - RNA, 19 nt, Homo sapiens
  misc_RNA (1)...(19): siRNA sense strand
cagcuagagaccaauuuaa

SEQ ID NO: 1326294 - RNA, 19 nt, Homo sapiens
  misc_RNA (1)...(19): siRNA sense strand
augaauacuucgacuguga

SEQ ID NO: 1326295 - RNA, 19 nt, Homo sapiens
  misc_RNA (1)...(19): siRNA sense strand
cuacugaccacuacacuca

SEQ ID NO: 1326296 - RNA, 19 nt, Homo sapiens
  misc_RNA (1)...(19): siRNA sense strand
aagaugaguuggagugaag

SEQ ID NO: 1326297 - RNA, 19 nt, Homo sapiens
  misc_RNA (1)...(19): siRNA sense strand
ccacucaacaacuauccua

SEQ ID NO: 1326298 - RNA, 19 nt, Homo sapiens
  misc_RNA (1)...(19): siRNA sense strand
acauacaaguccauuaucu

SEQ ID NO: 1326299 - RNA, 19 nt, Homo sapiens
  misc_RNA (1)...(19): siRNA sense strand
cauaacuacugaccacuac

SEQ ID NO: 1326300 - RNA, 19 nt, Homo sapiens
  misc_RNA (1)...(19): siRNA sense strand
ugccaaauguacaagaaga

SEQ ID NO: 1326301 - RNA, 19 nt, Homo sapiens
  misc_RNA (1)...(19): siRNA sense strand
uacaagaagagaucguuaa

SEQ ID NO: 1326302 - RNA, 19 nt, Homo sapiens
  misc_RNA (1)...(19): siRNA sense strand
ggaugcaaccacucaacaa

SEQ ID NO: 1326303 - RNA, 19 nt, Homo sapiens
  misc_RNA (1)...(19): siRNA sense strand
cuacguuugucacuauugu

SEQ ID NO: 1326304 - RNA, 19 nt, Homo sapiens
  misc_RNA (1)...(19): siRNA sense strand
gaucaccucgauaucucua

SEQ ID NO: 1326305 - RNA, 19 nt, Homo sapiens
  misc_RNA (1)...(19): siRNA sense strand
cgacuugccaaauguacaa

SEQ ID NO: 1326306 - RNA, 19 nt, Homo sapiens
  misc_RNA (1)...(19): siRNA sense strand
gagaccaauuuaauaagcu

SEQ ID NO: 1326307 - RNA, 19 nt, Homo sapiens
  misc_RNA (1)...(19): siRNA sense strand
guacagugagucuacaagu

SEQ ID NO: 1326308 - RNA, 19 nt, Homo sapiens
  misc_RNA (1)...(19): siRNA sense strand
guuugucacuauugucaug

SEQ ID NO: 1326309 - RNA, 19 nt, Homo sapiens
  misc_RNA (1)...(19): siRNA sense strand
gaucguuaauauacacaac

SEQ ID NO: 1326310 - RNA, 19 nt, Homo sapiens
  misc_RNA (1)...(19): siRNA sense strand
augaugacauaacuacuga

SEQ ID NO: 1326311 - RNA, 19 nt, Homo sapiens
  misc_RNA (1)...(19): siRNA sense strand
caacggaugaugacauaac

SEQ ID NO: 1326312 - RNA, 19 nt, Homo sapiens
  misc_RNA (1)...(19): siRNA sense strand
aaacauggagaauggacaa

SEQ ID NO: 1326313 - RNA, 19 nt, Homo sapiens
  misc_RNA (1)...(19): siRNA sense strand
guaauuggagucugguaca

SEQ ID NO: 1326314 - RNA, 19 nt, Homo sapiens
  misc_RNA (1)...(19): siRNA sense strand
cuucgacugugacauacaa

SEQ ID NO: 1326315 - RNA, 19 nt, Homo sapiens
  misc_RNA (1)...(19): siRNA sense strand
acaagaagagaucguuaau

SEQ ID NO: 1326316 - RNA, 19 nt, Homo sapiens
  misc_RNA (1)...(19): siRNA sense strand
gcaaccacucaacaacuau

SEQ ID NO: 1326317 - RNA, 19 nt, Homo sapiens
  misc_RNA (1)...(19): siRNA sense strand
ccaaauguacaagaagaga

SEQ ID NO: 1326318 - RNA, 19 nt, Homo sapiens
  misc_RNA (1)...(19): siRNA sense strand
gugaagaggcugcacaaaa

SEQ ID NO: 1326319 - RNA, 19 nt, Homo sapiens
  misc_RNA (1)...(19): siRNA sense strand
gaccacuacacucagauug

SEQ ID NO: 1326320 - RNA, 19 nt, Homo sapiens
  misc_RNA (1)...(19): siRNA sense strand
ggagucugguacagugagu

SEQ ID NO: 1326321 - RNA, 19 nt, Homo sapiens
  misc_RNA (1)...(19): siRNA sense strand
gagugaagaggcugcacaa

SEQ ID NO: 1326322 - RNA, 19 nt, Homo sapiens
  misc_RNA (1)...(19): siRNA sense strand
gucaccgacuugccaaaug

SEQ ID NO: 1326323 - RNA, 19 nt, Homo sapiens
  misc_RNA (1)...(19): siRNA sense strand
cagugagucuacaaguuuc

SEQ ID NO: 1326324 - RNA, 19 nt, Homo sapiens
  misc_RNA (1)...(19): siRNA sense strand
uccauuaucugggaugcaa

SEQ ID NO: 1326325 - RNA, 19 nt, Homo sapiens
  misc_RNA (1)...(19): siRNA sense strand
agagaccaauuuaauaagc

SEQ ID NO: 1326326 - RNA, 19 nt, Homo sapiens
  misc_RNA (1)...(19): siRNA sense strand
ugaugaauacuucgacugu

SEQ ID NO: 1326327 - RNA, 19 nt, Homo sapiens
  misc_RNA (1)...(19): siRNA sense strand
acauaacuacugaccacua

SEQ ID NO: 1326328 - RNA, 19 nt, Homo sapiens
  misc_RNA (1)...(19): siRNA sense strand
caaauguacaagaagagau

SEQ ID NO: 1326329 - RNA, 19 nt, Homo sapiens
  misc_RNA (1)...(19): siRNA sense strand
caaaguauugugauaugac

SEQ ID NO: 1326330 - RNA, 19 nt, Homo sapiens
  misc_RNA (1)...(19): siRNA sense strand
gggaugcaaccacucaaca

SEQ ID NO: 1326331 - RNA, 19 nt, Homo sapiens
  misc_RNA (1)...(19): siRNA sense strand
gugacauacaaguccauua

SEQ ID NO: 1326332 - RNA, 19 nt, Homo sapiens
  misc_RNA (1)...(19): siRNA sense strand
uauccuguaucauggucaa

SEQ ID NO: 1326333 - RNA, 19 nt, Homo sapiens
  misc_RNA (1)...(19): siRNA sense strand
uguaaagccacuugucugu

SEQ ID NO: 1326334 - RNA, 19 nt, Homo sapiens
  misc_RNA (1)...(19): siRNA sense strand
acucaacaacuauccuauu

SEQ ID NO: 1326335 - RNA, 19 nt, Homo sapiens
  misc_RNA (1)...(19): siRNA sense strand
gacauacaaguccauuauc

SEQ ID NO: 1326336 - RNA, 19 nt, Homo sapiens
  misc_RNA (1)...(19): siRNA sense strand
cgauaucucuacguuuguc

SEQ ID NO: 1326337 - RNA, 19 nt, Homo sapiens
  misc_RNA (1)...(19): siRNA sense strand
cacaacgcccucaggagaa

SEQ ID NO: 1326338 - RNA, 19 nt, Homo sapiens
  misc_RNA (1)...(19): siRNA sense strand
ugagaggagacuuccaaau

SEQ ID NO: 1326339 - RNA, 19 nt, Homo sapiens
  misc_RNA (1)...(19): siRNA sense strand
acuauccuauucuguaaag

SEQ ID NO: 1326340 - RNA, 19 nt, Homo sapiens
  misc_RNA (1)...(19): siRNA sense strand
gaaaucagcuagagaccaa

SEQ ID NO: 1326341 - RNA, 19 nt, Homo sapiens
  misc_RNA (1)...(19): siRNA sense strand
gaagagaucguuaauauac

SEQ ID NO: 1326342 - RNA, 19 nt, Homo sapiens
  misc_RNA (1)...(19): siRNA sense strand
caacaaggaucaccucgau

SEQ ID NO: 1326343 - RNA, 19 nt, Homo sapiens
  misc_RNA (1)...(19): siRNA sense strand
ggacaacaacggaugauga

SEQ ID NO: 1326344 - RNA, 19 nt, Homo sapiens
  misc_RNA (1)...(19): siRNA sense strand
ggccacaucuuaccugauu

SEQ ID NO: 1326345 - RNA, 19 nt, Homo sapiens
  misc_RNA (1)...(19): siRNA sense strand
gcuagagaccaauuuaaua

SEQ ID NO: 1326346 - RNA, 19 nt, Homo sapiens
  misc_RNA (1)...(19): siRNA sense strand
uaugacaucuuauccugua

SEQ ID NO: 1326347 - RNA, 19 nt, Homo sapiens
  misc_RNA (1)...(19): siRNA sense strand
gaagaugaguuggagugaa

SEQ ID NO: 1326348 - RNA, 19 nt, Homo sapiens
  misc_RNA (1)...(19): siRNA sense strand
gaaauuaaacaccucuugu

SEQ ID NO: 1326349 - RNA, 19 nt, Homo sapiens
  misc_RNA (1)...(19): siRNA sense strand
guacaagaagagaucguua

SEQ ID NO: 1326350 - RNA, 19 nt, Homo sapiens
  misc_RNA (1)...(19): siRNA sense strand
ccacuacacucagauuguu

SEQ ID NO: 1326351 - RNA, 19 nt, Homo sapiens
  misc_RNA (1)...(19): siRNA sense strand
caagaagagaucguuaaua

SEQ ID NO: 1326352 - RNA, 19 nt, Homo sapiens
  misc_RNA (1)...(19): siRNA sense strand
caucuuauccuguaucaug

SEQ ID NO: 1326353 - RNA, 19 nt, Homo sapiens
  misc_RNA (1)...(19): siRNA sense strand
aacaacggaugaugacaua

SEQ ID NO: 1326354 - RNA, 19 nt, Homo sapiens
  misc_RNA (1)...(19): siRNA sense strand
ggaaauuaaacaccucuug

SEQ ID NO: 1326355 - RNA, 19 nt, Homo sapiens
  misc_RNA (1)...(19): siRNA sense strand
gcaacaugcugaagaugag

SEQ ID NO: 1326356 - RNA, 19 nt, Homo sapiens
  misc_RNA (1)...(19): siRNA sense strand
guaucauggucaaguguaa

SEQ ID NO: 1326357 - RNA, 19 nt, Homo sapiens
  misc_RNA (1)...(19): siRNA sense strand
gcugugccauugcaucuug

SEQ ID NO: 1326358 - RNA, 19 nt, Homo sapiens
  misc_RNA (1)...(19): siRNA sense strand
gguugcugcugcuugcuua

SEQ ID NO: 1326359 - RNA, 19 nt, Homo sapiens
  misc_RNA (1)...(19): siRNA sense strand
acagugagucuacaaguuu

SEQ ID NO: 1326360 - RNA, 19 nt, Homo sapiens
  misc_RNA (1)...(19): siRNA sense strand
ugaagaggcugcacaaaau

SEQ ID NO: 1326361 - RNA, 19 nt, Homo sapiens
  misc_RNA (1)...(19): siRNA sense strand
ucaccgacuugccaaaugu

SEQ ID NO: 1326362 - RNA, 19 nt, Homo sapiens
  misc_RNA (1)...(19): siRNA sense strand
gaugaugacauaacuacug

SEQ ID NO: 1326363 - RNA, 19 nt, Homo sapiens
  misc_RNA (1)...(19): siRNA sense strand
ucagcuagagaccaauuua

SEQ ID NO: 1326364 - RNA, 19 nt, Homo sapiens
  misc_RNA (1)...(19): siRNA sense strand
acaaggaucaccucgauau

SEQ ID NO: 1326365 - RNA, 19 nt, Homo sapiens
  misc_RNA (1)...(19): siRNA sense strand
uacagugagucuacaaguu

SEQ ID NO: 1326366 - RNA, 19 nt, Homo sapiens
  misc_RNA (1)...(19): siRNA sense strand
cucgauaucucuacguuug

SEQ ID NO: 1326367 - RNA, 19 nt, Homo sapiens
  misc_RNA (1)...(19): siRNA sense strand
cauggagaauggacaacaa

SEQ ID NO: 1326368 - RNA, 19 nt, Homo sapiens
  misc_RNA (1)...(19): siRNA sense strand
uuucaaacauggagaaugg

SEQ ID NO: 1326369 - RNA, 19 nt, Homo sapiens
  misc_RNA (1)...(19): siRNA sense strand
gacaucuuauccuguauca

SEQ ID NO: 1326370 - RNA, 19 nt, Homo sapiens
  misc_RNA (1)...(19): siRNA sense strand
ucucuacguuugucacuau

SEQ ID NO: 1326371 - RNA, 19 nt, Homo sapiens
  misc_RNA (1)...(19): siRNA sense strand
caacaacggaugaugacau

SEQ ID NO: 1326372 - RNA, 19 nt, Homo sapiens
  misc_RNA (1)...(19): siRNA sense strand
cagcuagagaccaauuuaa

SEQ ID NO: 1326373 - RNA, 19 nt, Homo sapiens
  misc_RNA (1)...(19): siRNA sense strand
cuacugaccacuacacuca

SEQ ID NO: 1326374 - RNA, 19 nt, Homo sapiens
  misc_RNA (1)...(19): siRNA sense strand
ugccaaauguacaagaaga

SEQ ID NO: 1326375 - RNA, 19 nt, Homo sapiens
  misc_RNA (1)...(19): siRNA sense strand
cauaacuacugaccacuac

SEQ ID NO: 1326376 - RNA, 19 nt, Homo sapiens
  misc_RNA (1)...(19): siRNA sense strand
aagaugaguuggagugaag

SEQ ID NO: 1326377 - RNA, 19 nt, Homo sapiens
  misc_RNA (1)...(19): siRNA sense strand
uacaagaagagaucguuaa

SEQ ID NO: 1326378 - RNA, 19 nt, Homo sapiens
  misc_RNA (1)...(19): siRNA sense strand
cuacguuugucacuauugu

SEQ ID NO: 1326379 - RNA, 19 nt, Homo sapiens
  misc_RNA (1)...(19): siRNA sense strand
gaucaccucgauaucucua

SEQ ID NO: 1326380 - RNA, 19 nt, Homo sapiens
  misc_RNA (1)...(19): siRNA sense strand
cgacuugccaaauguacaa

SEQ ID NO: 1326381 - RNA, 19 nt, Homo sapiens
  misc_RNA (1)...(19): siRNA sense strand
gagaccaauuuaauaagcu

SEQ ID NO: 1326382 - RNA, 19 nt, Homo sapiens
  misc_RNA (1)...(19): siRNA sense strand
gaucguuaauauacacaac

SEQ ID NO: 1326383 - RNA, 19 nt, Homo sapiens
  misc_RNA (1)...(19): siRNA sense strand
guuugucacuauugucaug

SEQ ID NO: 1326384 - RNA, 19 nt, Homo sapiens
  misc_RNA (1)...(19): siRNA sense strand
augaugacauaacuacuga

SEQ ID NO: 1326385 - RNA, 19 nt, Homo sapiens
  misc_RNA (1)...(19): siRNA sense strand
caacggaugaugacauaac

SEQ ID NO: 1326386 - RNA, 19 nt, Homo sapiens
  misc_RNA (1)...(19): siRNA sense strand
aaacauggagaauggacaa

SEQ ID NO: 1326387 - RNA, 19 nt, Homo sapiens
  misc_RNA (1)...(19): siRNA sense strand
guacagugagucuacaagu

SEQ ID NO: 1326388 - RNA, 19 nt, Homo sapiens
  misc_RNA (1)...(19): siRNA sense strand
guaauuggagucugguaca

SEQ ID NO: 1326389 - RNA, 19 nt, Homo sapiens
  misc_RNA (1)...(19): siRNA sense strand
acaagaagagaucguuaau

SEQ ID NO: 1326390 - RNA, 19 nt, Homo sapiens
  misc_RNA (1)...(19): siRNA sense strand
ccaaauguacaagaagaga

SEQ ID NO: 1326391 - RNA, 19 nt, Homo sapiens
  misc_RNA (1)...(19): siRNA sense strand
gugaagaggcugcacaaaa

SEQ ID NO: 1326392 - RNA, 19 nt, Homo sapiens
  misc_RNA (1)...(19): siRNA sense strand
gaccacuacacucagauug

SEQ ID NO: 1326393 - RNA, 19 nt, Homo sapiens
  misc_RNA (1)...(19): siRNA sense strand
ggagucugguacagugagu

SEQ ID NO: 1326394 - RNA, 19 nt, Homo sapiens
  misc_RNA (1)...(19): siRNA sense strand
gagugaagaggcugcacaa

SEQ ID NO: 1326395 - RNA, 19 nt, Homo sapiens
  misc_RNA (1)...(19): siRNA sense strand
gucaccgacuugccaaaug

SEQ ID NO: 1326396 - RNA, 19 nt, Homo sapiens
  misc_RNA (1)...(19): siRNA sense strand
cagugagucuacaaguuuc

SEQ ID NO: 1326397 - RNA, 19 nt, Homo sapiens
  misc_RNA (1)...(19): siRNA sense strand
agagaccaauuuaauaagc

SEQ ID NO: 1326398 - RNA, 19 nt, Homo sapiens
  misc_RNA (1)...(19): siRNA sense strand
caaauguacaagaagagau

SEQ ID NO: 1326399 - RNA, 19 nt, Homo sapiens
  misc_RNA (1)...(19): siRNA sense strand
acauaacuacugaccacua

SEQ ID NO: 1326400 - RNA, 19 nt, Homo sapiens
  misc_RNA (1)...(19): siRNA sense strand
caaaguauugugauaugac

SEQ ID NO: 1326401 - RNA, 19 nt, Homo sapiens
  misc_RNA (1)...(19): siRNA sense strand
uauccuguaucauggucaa

SEQ ID NO: 1326402 - RNA, 19 nt, Homo sapiens
  misc_RNA (1)...(19): siRNA sense strand
cgauaucucuacguuuguc

SEQ ID NO: 1326403 - RNA, 19 nt, Homo sapiens
  misc_RNA (1)...(19): siRNA sense strand
cacaacgcccucaggagaa

SEQ ID NO: 1326404 - RNA, 19 nt, Homo sapiens
  misc_RNA (1)...(19): siRNA sense strand
ugagaggagacuuccaaau

SEQ ID NO: 1326405 - RNA, 19 nt, Homo sapiens
  misc_RNA (1)...(19): siRNA sense strand
gaagggaaaucacagguuu

SEQ ID NO: 1326406 - RNA, 19 nt, Homo sapiens
  misc_RNA (1)...(19): siRNA sense strand
cgaggaagaucaacauaua

SEQ ID NO: 1326407 - RNA, 19 nt, Homo sapiens
  misc_RNA (1)...(19): siRNA sense strand
gaagagaaaccacccacua

SEQ ID NO: 1326408 - RNA, 19 nt, Homo sapiens
  misc_RNA (1)...(19): siRNA sense strand
ucaagugccugaccuggaa

SEQ ID NO: 1326409 - RNA, 19 nt, Homo sapiens
  misc_RNA (1)...(19): siRNA sense strand
agaagcaggugaagggaaa

SEQ ID NO: 1326410 - RNA, 19 nt, Homo sapiens
  misc_RNA (1)...(19): siRNA sense strand
gaagagagaagaugaucag

SEQ ID NO: 1326411 - RNA, 19 nt, Homo sapiens
  misc_RNA (1)...(19): siRNA sense strand
gcagagcacuuuaaaaugc

SEQ ID NO: 1326412 - RNA, 19 nt, Homo sapiens
  misc_RNA (1)...(19): siRNA sense strand
ugaagagccuaaagaagag

SEQ ID NO: 1326413 - RNA, 19 nt, Homo sapiens
  misc_RNA (1)...(19): siRNA sense strand
aagagaaaccacccacuaa

SEQ ID NO: 1326414 - RNA, 19 nt, Homo sapiens
  misc_RNA (1)...(19): siRNA sense strand
gcgaggaagaucaacauau

SEQ ID NO: 1326415 - RNA, 19 nt, Homo sapiens
  misc_RNA (1)...(19): siRNA sense strand
augaagagccuaaagaaga

SEQ ID NO: 1326416 - RNA, 19 nt, Homo sapiens
  misc_RNA (1)...(19): siRNA sense strand
gaucagaagagagaagaug

SEQ ID NO: 1326417 - RNA, 19 nt, Homo sapiens
  misc_RNA (1)...(19): siRNA sense strand
agagaaaccacccacuaaa

SEQ ID NO: 1326418 - RNA, 19 nt, Homo sapiens
  misc_RNA (1)...(19): siRNA sense strand
ccacugaugaagagccuaa

SEQ ID NO: 1326419 - RNA, 19 nt, Homo sapiens
  misc_RNA (1)...(19): siRNA sense strand
gagaaaccacccacuaaaa

SEQ ID NO: 1326420 - RNA, 19 nt, Homo sapiens
  misc_RNA (1)...(19): siRNA sense strand
ugaugaagagccuaaagaa

SEQ ID NO: 1326421 - RNA, 19 nt, Homo sapiens
  misc_RNA (1)...(19): siRNA sense strand
gaugaagagccuaaagaag

SEQ ID NO: 1326422 - RNA, 19 nt, Homo sapiens
  misc_RNA (1)...(19): siRNA sense strand
gaggaagaucaacauauag

SEQ ID NO: 1326423 - RNA, 19 nt, Homo sapiens
  misc_RNA (1)...(19): siRNA sense strand
ggaauccuacaccugauca

SEQ ID NO: 1326424 - RNA, 19 nt, Homo sapiens
  misc_RNA (1)...(19): siRNA sense strand
gggugcagcugagauucaa

SEQ ID NO: 1326425 - RNA, 19 nt, Homo sapiens
  misc_RNA (1)...(19): siRNA sense strand
ugaacccacugaugaagag

SEQ ID NO: 1326426 - RNA, 19 nt, Homo sapiens
  misc_RNA (1)...(19): siRNA sense strand
gaugugaaggugguacuga

SEQ ID NO: 1326427 - RNA, 19 nt, Homo sapiens
  misc_RNA (1)...(19): siRNA sense strand
caccugaucagaagagaga

SEQ ID NO: 1326428 - RNA, 19 nt, Homo sapiens
  misc_RNA (1)...(19): siRNA sense strand
gaaggugguacugauguca

SEQ ID NO: 1326429 - RNA, 19 nt, Homo sapiens
  misc_RNA (1)...(19): siRNA sense strand
gcuugaacccacugaugaa

SEQ ID NO: 1326430 - RNA, 19 nt, Homo sapiens
  misc_RNA (1)...(19): siRNA sense strand
ggggaagauucuaccaaaa

SEQ ID NO: 1326431 - RNA, 19 nt, Homo sapiens
  misc_RNA (1)...(19): siRNA sense strand
ugaagggaaaucacagguu

SEQ ID NO: 1326432 - RNA, 19 nt, Homo sapiens
  misc_RNA (1)...(19): siRNA sense strand
aagcagagcacuuuaaaau

SEQ ID NO: 1326433 - RNA, 19 nt, Homo sapiens
  misc_RNA (1)...(19): siRNA sense strand
ggcgaggaagaucaacaua

SEQ ID NO: 1326434 - RNA, 19 nt, Homo sapiens
  misc_RNA (1)...(19): siRNA sense strand
agggaaaucacagguuuaa

SEQ ID NO: 1326435 - RNA, 19 nt, Homo sapiens
  misc_RNA (1)...(19): siRNA sense strand
gaagagccuaaagaagaga

SEQ ID NO: 1326436 - RNA, 19 nt, Homo sapiens
  misc_RNA (1)...(19): siRNA sense strand
ugaaggugguacugauguc

SEQ ID NO: 1326437 - RNA, 19 nt, Homo sapiens
  misc_RNA (1)...(19): siRNA sense strand
gaaaccacccacuaaaagu

SEQ ID NO: 1326438 - RNA, 19 nt, Homo sapiens
  misc_RNA (1)...(19): siRNA sense strand
aagggaaaucacagguuua

SEQ ID NO: 1326439 - RNA, 19 nt, Homo sapiens
  misc_RNA (1)...(19): siRNA sense strand
gugaaggugguacugaugu

SEQ ID NO: 1326440 - RNA, 19 nt, Homo sapiens
  misc_RNA (1)...(19): siRNA sense strand
ggauagagauucugcagua

SEQ ID NO: 1326441 - RNA, 19 nt, Homo sapiens
  misc_RNA (1)...(19): siRNA sense strand
gaacagcugucacuucaac

SEQ ID NO: 1326442 - RNA, 19 nt, Homo sapiens
  misc_RNA (1)...(19): siRNA sense strand
ccacucaagauaacaauua

SEQ ID NO: 1326443 - RNA, 19 nt, Homo sapiens
  misc_RNA (1)...(19): siRNA sense strand
gagaauacgugaacaacag

SEQ ID NO: 1326444 - RNA, 19 nt, Homo sapiens
  misc_RNA (1)...(19): siRNA sense strand
ucacuucaacagacuauua

SEQ ID NO: 1326445 - RNA, 19 nt, Homo sapiens
  misc_RNA (1)...(19): siRNA sense strand
gauagagauucugcaguaa

SEQ ID NO: 1326446 - RNA, 19 nt, Homo sapiens
  misc_RNA (1)...(19): siRNA sense strand
gaacuaugagcagagaaua

SEQ ID NO: 1326447 - RNA, 19 nt, Homo sapiens
  misc_RNA (1)...(19): siRNA sense strand
ugaagacagugaaacaaga

SEQ ID NO: 1326448 - RNA, 19 nt, Homo sapiens
  misc_RNA (1)...(19): siRNA sense strand
gcaaaagacugagaacuau

SEQ ID NO: 1326449 - RNA, 19 nt, Homo sapiens
  misc_RNA (1)...(19): siRNA sense strand
gaagacagugaaacaagaa

SEQ ID NO: 1326450 - RNA, 19 nt, Homo sapiens
  misc_RNA (1)...(19): siRNA sense strand
gcaacucaauaaagcguau

SEQ ID NO: 1326451 - RNA, 19 nt, Homo sapiens
  misc_RNA (1)...(19): siRNA sense strand
gccacaagauaaagugauu

SEQ ID NO: 1326452 - RNA, 19 nt, Homo sapiens
  misc_RNA (1)...(19): siRNA sense strand
ugaauuccacucaagauaa

SEQ ID NO: 1326453 - RNA, 19 nt, Homo sapiens
  misc_RNA (1)...(19): siRNA sense strand
cggcaggcaugcauggaua

SEQ ID NO: 1326454 - RNA, 19 nt, Homo sapiens
  misc_RNA (1)...(19): siRNA sense strand
gauaaagugauuucaggaa

SEQ ID NO: 1326455 - RNA, 19 nt, Homo sapiens
  misc_RNA (1)...(19): siRNA sense strand
gaauuccacucaagauaac

SEQ ID NO: 1326456 - RNA, 19 nt, Homo sapiens
  misc_RNA (1)...(19): siRNA sense strand
gcagagaauacgugaacaa

SEQ ID NO: 1326457 - RNA, 19 nt, Homo sapiens
  misc_RNA (1)...(19): siRNA sense strand
gcgagcaacucaauaaagc

SEQ ID NO: 1326458 - RNA, 19 nt, Homo sapiens
  misc_RNA (1)...(19): siRNA sense strand
ucaguuacuucuugugaau

SEQ ID NO: 1326459 - RNA, 19 nt, Homo sapiens
  misc_RNA (1)...(19): siRNA sense strand
caacagacuauuauugaca

SEQ ID NO: 1326460 - RNA, 19 nt, Homo sapiens
  misc_RNA (1)...(19): siRNA sense strand
gcuaaaaucucaguuacuu

SEQ ID NO: 1326461 - RNA, 19 nt, Homo sapiens
  misc_RNA (1)...(19): siRNA sense strand
aggaacagcugucacuuca

SEQ ID NO: 1326462 - RNA, 19 nt, Homo sapiens
  misc_RNA (1)...(19): siRNA sense strand
gugaauuccacucaagaua

SEQ ID NO: 1326463 - RNA, 19 nt, Homo sapiens
  misc_RNA (1)...(19): siRNA sense strand
gagcagagaauacgugaac

SEQ ID NO: 1326464 - RNA, 19 nt, Homo sapiens
  misc_RNA (1)...(19): siRNA sense strand
aaagugauuucaggaauag

SEQ ID NO: 1326465 - RNA, 19 nt, Homo sapiens
  misc_RNA (1)...(19): siRNA sense strand
ugagaacuaugagcagaga

SEQ ID NO: 1326466 - RNA, 19 nt, Homo sapiens
  misc_RNA (1)...(19): siRNA sense strand
aaaucucaguuacuucuug

SEQ ID NO: 1326467 - RNA, 19 nt, Homo sapiens
  misc_RNA (1)...(19): siRNA sense strand
ucaggaauagcaagagaaa

SEQ ID NO: 1326468 - RNA, 19 nt, Homo sapiens
  misc_RNA (1)...(19): siRNA sense strand
gacagugaaacaagaaaga

SEQ ID NO: 1326469 - RNA, 19 nt, Homo sapiens
  misc_RNA (1)...(19): siRNA sense strand
uaauuugacucuugaucag

SEQ ID NO: 1326470 - RNA, 19 nt, Homo sapiens
  misc_RNA (1)...(19): siRNA sense strand
aggcaugcauggauagaga

SEQ ID NO: 1326471 - RNA, 19 nt, Homo sapiens
  misc_RNA (1)...(19): siRNA sense strand
gacuauuauugacaagcua

SEQ ID NO: 1326472 - RNA, 19 nt, Homo sapiens
  misc_RNA (1)...(19): siRNA sense strand
caagauaaagugauuucag

SEQ ID NO: 1326473 - RNA, 19 nt, Homo sapiens
  misc_RNA (1)...(19): siRNA sense strand
caagcuaaaaucucaguua

SEQ ID NO: 1326474 - RNA, 19 nt, Homo sapiens
  misc_RNA (1)...(19): siRNA sense strand
uugaucagccacaagauaa

SEQ ID NO: 1326475 - RNA, 19 nt, Homo sapiens
  misc_RNA (1)...(19): siRNA sense strand
uagagauucugcaguaaaa

SEQ ID NO: 1326476 - RNA, 19 nt, Homo sapiens
  misc_RNA (1)...(19): siRNA sense strand
cuucaacagacuauuauug

SEQ ID NO: 1326477 - RNA, 19 nt, Homo sapiens
  misc_RNA (1)...(19): siRNA sense strand
guguuccucugcuugaaga

SEQ ID NO: 1326478 - RNA, 19 nt, Homo sapiens
  misc_RNA (1)...(19): siRNA sense strand
gcuugaagacagugaaaca

SEQ ID NO: 1326479 - RNA, 19 nt, Homo sapiens
  misc_RNA (1)...(19): siRNA sense strand
gcaugcauggauagagauu

SEQ ID NO: 1326480 - RNA, 19 nt, Homo sapiens
  misc_RNA (1)...(19): siRNA sense strand
uuucaggaauagcaagaga

SEQ ID NO: 1326481 - RNA, 19 nt, Homo sapiens
  misc_RNA (1)...(19): siRNA sense strand
ccacaagauaaagugauuu

SEQ ID NO: 1326482 - RNA, 19 nt, Homo sapiens
  misc_RNA (1)...(19): siRNA sense strand
gaucagccacaagauaaag

SEQ ID NO: 1326483 - RNA, 19 nt, Homo sapiens
  misc_RNA (1)...(19): siRNA sense strand
caggaacagcugucacuuc

SEQ ID NO: 1326484 - RNA, 19 nt, Homo sapiens
  misc_RNA (1)...(19): siRNA sense strand
cacaagauaaagugauuuc

SEQ ID NO: 1326485 - RNA, 19 nt, Homo sapiens
  misc_RNA (1)...(19): siRNA sense strand
gcuguguuccucugcuuga

SEQ ID NO: 1326486 - RNA, 19 nt, Homo sapiens
  misc_RNA (1)...(19): siRNA sense strand
auagagauucugcaguaaa

SEQ ID NO: 1326487 - RNA, 19 nt, Homo sapiens
  misc_RNA (1)...(19): siRNA sense strand
aaucucaguuacuucuugu

SEQ ID NO: 1326488 - RNA, 19 nt, Homo sapiens
  misc_RNA (1)...(19): siRNA sense strand
ucucaguuacuucuuguga

SEQ ID NO: 1326489 - RNA, 19 nt, Homo sapiens
  misc_RNA (1)...(19): siRNA sense strand
agacuauuauugacaagcu

SEQ ID NO: 1326490 - RNA, 19 nt, Homo sapiens
  misc_RNA (1)...(19): siRNA sense strand
gauuucaggaauagcaaga

SEQ ID NO: 1326491 - RNA, 19 nt, Homo sapiens
  misc_RNA (1)...(19): siRNA sense strand
ggcgagcaacucaauaaag

SEQ ID NO: 1326492 - RNA, 19 nt, Homo sapiens
  misc_RNA (1)...(19): siRNA sense strand
ggauagagauucugcagua

SEQ ID NO: 1326493 - RNA, 19 nt, Homo sapiens
  misc_RNA (1)...(19): siRNA sense strand
gaacagcugucacuucaac

SEQ ID NO: 1326494 - RNA, 19 nt, Homo sapiens
  misc_RNA (1)...(19): siRNA sense strand
ccacucaagauaacaauua

SEQ ID NO: 1326495 - RNA, 19 nt, Homo sapiens
  misc_RNA (1)...(19): siRNA sense strand
gagaauacgugaacaacag

SEQ ID NO: 1326496 - RNA, 19 nt, Homo sapiens
  misc_RNA (1)...(19): siRNA sense strand
ucacuucaacagacuauua

SEQ ID NO: 1326497 - RNA, 19 nt, Homo sapiens
  misc_RNA (1)...(19): siRNA sense strand
gauagagauucugcaguaa

SEQ ID NO: 1326498 - RNA, 19 nt, Homo sapiens
  misc_RNA (1)...(19): siRNA sense strand
gaacuaugagcagagaaua

SEQ ID NO: 1326499 - RNA, 19 nt, Homo sapiens
  misc_RNA (1)...(19): siRNA sense strand
ugaagacagugaaacaaga

SEQ ID NO: 1326500 - RNA, 19 nt, Homo sapiens
  misc_RNA (1)...(19): siRNA sense strand
gcaaaagacugagaacuau

SEQ ID NO: 1326501 - RNA, 19 nt, Homo sapiens
  misc_RNA (1)...(19): siRNA sense strand
gaagacagugaaacaagaa

SEQ ID NO: 1326502 - RNA, 19 nt, Homo sapiens
  misc_RNA (1)...(19): siRNA sense strand
gcaacucaauaaagcguau

SEQ ID NO: 1326503 - RNA, 19 nt, Homo sapiens
  misc_RNA (1)...(19): siRNA sense strand
gccacaagauaaagugauu

SEQ ID NO: 1326504 - RNA, 19 nt, Homo sapiens
  misc_RNA (1)...(19): siRNA sense strand
ugaauuccacucaagauaa

SEQ ID NO: 1326505 - RNA, 19 nt, Homo sapiens
  misc_RNA (1)...(19): siRNA sense strand
cggcaggcaugcauggaua

SEQ ID NO: 1326506 - RNA, 19 nt, Homo sapiens
  misc_RNA (1)...(19): siRNA sense strand
gauaaagugauuucaggaa

SEQ ID NO: 1326507 - RNA, 19 nt, Homo sapiens
  misc_RNA (1)...(19): siRNA sense strand
gaauuccacucaagauaac

SEQ ID NO: 1326508 - RNA, 19 nt, Homo sapiens
  misc_RNA (1)...(19): siRNA sense strand
gcagagaauacgugaacaa

SEQ ID NO: 1326509 - RNA, 19 nt, Homo sapiens
  misc_RNA (1)...(19): siRNA sense strand
gcgagcaacucaauaaagc

SEQ ID NO: 1326510 - RNA, 19 nt, Homo sapiens
  misc_RNA (1)...(19): siRNA sense strand
ucaguuacuucuugugaau

SEQ ID NO: 1326511 - RNA, 19 nt, Homo sapiens
  misc_RNA (1)...(19): siRNA sense strand
caacagacuauuauugaca

SEQ ID NO: 1326512 - RNA, 19 nt, Homo sapiens
  misc_RNA (1)...(19): siRNA sense strand
gcuaaaaucucaguuacuu

SEQ ID NO: 1326513 - RNA, 19 nt, Homo sapiens
  misc_RNA (1)...(19): siRNA sense strand
aggaacagcugucacuuca

SEQ ID NO: 1326514 - RNA, 19 nt, Homo sapiens
  misc_RNA (1)...(19): siRNA sense strand
gugaauuccacucaagaua

SEQ ID NO: 1326515 - RNA, 19 nt, Homo sapiens
  misc_RNA (1)...(19): siRNA sense strand
gagcagagaauacgugaac

SEQ ID NO: 1326516 - RNA, 19 nt, Homo sapiens
  misc_RNA (1)...(19): siRNA sense strand
aaagugauuucaggaauag

SEQ ID NO: 1326517 - RNA, 19 nt, Homo sapiens
  misc_RNA (1)...(19): siRNA sense strand
ugagaacuaugagcagaga

SEQ ID NO: 1326518 - RNA, 19 nt, Homo sapiens
  misc_RNA (1)...(19): siRNA sense strand
aaaucucaguuacuucuug

SEQ ID NO: 1326519 - RNA, 19 nt, Homo sapiens
  misc_RNA (1)...(19): siRNA sense strand
ucaggaauagcaagagaaa

SEQ ID NO: 1326520 - RNA, 19 nt, Homo sapiens
  misc_RNA (1)...(19): siRNA sense strand
gacagugaaacaagaaaga

SEQ ID NO: 1326521 - RNA, 19 nt, Homo sapiens
  misc_RNA (1)...(19): siRNA sense strand
uaauuugacucuugaucag

SEQ ID NO: 1326522 - RNA, 19 nt, Homo sapiens
  misc_RNA (1)...(19): siRNA sense strand
aggcaugcauggauagaga

SEQ ID NO: 1326523 - RNA, 19 nt, Homo sapiens
  misc_RNA (1)...(19): siRNA sense strand
gacuauuauugacaagcua

SEQ ID NO: 1326524 - RNA, 19 nt, Homo sapiens
  misc_RNA (1)...(19): siRNA sense strand
caagauaaagugauuucag

SEQ ID NO: 1326525 - RNA, 19 nt, Homo sapiens
  misc_RNA (1)...(19): siRNA sense strand
caagcuaaaaucucaguua

SEQ ID NO: 1326526 - RNA, 19 nt, Homo sapiens
  misc_RNA (1)...(19): siRNA sense strand
uugaucagccacaagauaa

SEQ ID NO: 1326527 - RNA, 19 nt, Homo sapiens
  misc_RNA (1)...(19): siRNA sense strand
uagagauucugcaguaaaa

SEQ ID NO: 1326528 - RNA, 19 nt, Homo sapiens
  misc_RNA (1)...(19): siRNA sense strand
cuucaacagacuauuauug

SEQ ID NO: 1326529 - RNA, 19 nt, Homo sapiens
  misc_RNA (1)...(19): siRNA sense strand
guguuccucugcuugaaga

SEQ ID NO: 1326530 - RNA, 19 nt, Homo sapiens
  misc_RNA (1)...(19): siRNA sense strand
gcuugaagacagugaaaca

SEQ ID NO: 1326531 - RNA, 19 nt, Homo sapiens
  misc_RNA (1)...(19): siRNA sense strand
gcaugcauggauagagauu

SEQ ID NO: 1326532 - RNA, 19 nt, Homo sapiens
  misc_RNA (1)...(19): siRNA sense strand
uuucaggaauagcaagaga

SEQ ID NO: 1326533 - RNA, 19 nt, Homo sapiens
  misc_RNA (1)...(19): siRNA sense strand
ccacaagauaaagugauuu

SEQ ID NO: 1326534 - RNA, 19 nt, Homo sapiens
  misc_RNA (1)...(19): siRNA sense strand
gaucagccacaagauaaag

SEQ ID NO: 1326535 - RNA, 19 nt, Homo sapiens
  misc_RNA (1)...(19): siRNA sense strand
caggaacagcugucacuuc

SEQ ID NO: 1326536 - RNA, 19 nt, Homo sapiens
  misc_RNA (1)...(19): siRNA sense strand
cacaagauaaagugauuuc

SEQ ID NO: 1326537 - RNA, 19 nt, Homo sapiens
  misc_RNA (1)...(19): siRNA sense strand
gcuguguuccucugcuuga

SEQ ID NO: 1326538 - RNA, 19 nt, Homo sapiens
  misc_RNA (1)...(19): siRNA sense strand
auagagauucugcaguaaa

SEQ ID NO: 1326539 - RNA, 19 nt, Homo sapiens
  misc_RNA (1)...(19): siRNA sense strand
aaucucaguuacuucuugu

SEQ ID NO: 1326540 - RNA, 19 nt, Homo sapiens
  misc_RNA (1)...(19): siRNA sense strand
ucucaguuacuucuuguga

SEQ ID NO: 1326541 - RNA, 19 nt, Homo sapiens
  misc_RNA (1)...(19): siRNA sense strand
agacuauuauugacaagcu

SEQ ID NO: 1326542 - RNA, 19 nt, Homo sapiens
  misc_RNA (1)...(19): siRNA sense strand
gauuucaggaauagcaaga

SEQ ID NO: 1326543 - RNA, 19 nt, Homo sapiens
  misc_RNA (1)...(19): siRNA sense strand
ggcgagcaacucaauaaag

SEQ ID NO: 1326544 - RNA, 19 nt, Homo sapiens
  misc_RNA (1)...(19): siRNA sense strand
ccggaaagcuggcucugua

SEQ ID NO: 1326545 - RNA, 19 nt, Homo sapiens
  misc_RNA (1)...(19): siRNA sense strand
gguccgagauggcagcaaa

SEQ ID NO: 1326546 - RNA, 19 nt, Homo sapiens
  misc_RNA (1)...(19): siRNA sense strand
ggaaagcuggcucuguaga

SEQ ID NO: 1326547 - RNA, 19 nt, Homo sapiens
  misc_RNA (1)...(19): siRNA sense strand
cggcagugcucggcaugua

SEQ ID NO: 1326548 - RNA, 19 nt, Homo sapiens
  misc_RNA (1)...(19): siRNA sense strand
cauguaguguucucagguu

SEQ ID NO: 1326549 - RNA, 19 nt, Homo sapiens
  misc_RNA (1)...(19): siRNA sense strand
aagcuacguuuccuucaga

SEQ ID NO: 1326550 - RNA, 19 nt, Homo sapiens
  misc_RNA (1)...(19): siRNA sense strand
gagaugcggguccgagaug

SEQ ID NO: 1326551 - RNA, 19 nt, Homo sapiens
  misc_RNA (1)...(19): siRNA sense strand
cgaagaagggcucgagaca

SEQ ID NO: 1326552 - RNA, 19 nt, Homo sapiens
  misc_RNA (1)...(19): siRNA sense strand
caagcuacguuuccuucag

SEQ ID NO: 1326553 - RNA, 19 nt, Homo sapiens
  misc_RNA (1)...(19): siRNA sense strand
ggcccucguucccgaagaa

SEQ ID NO: 1326554 - RNA, 19 nt, Homo sapiens
  misc_RNA (1)...(19): siRNA sense strand
cgagauggcagcaaaauuc

SEQ ID NO: 1326555 - RNA, 19 nt, Homo sapiens
  misc_RNA (1)...(19): siRNA sense strand
gcagugcucggcauguagu

SEQ ID NO: 1326556 - RNA, 19 nt, Homo sapiens
  misc_RNA (1)...(19): siRNA sense strand
guaguguucucagguucug

SEQ ID NO: 1326557 - RNA, 19 nt, Homo sapiens
  misc_RNA (1)...(19): siRNA sense strand
ccagcuaccuccugauacc

SEQ ID NO: 1326558 - RNA, 19 nt, Homo sapiens
  misc_RNA (1)...(19): siRNA sense strand
ccggaaagcuggcucugua

SEQ ID NO: 1326559 - RNA, 19 nt, Homo sapiens
  misc_RNA (1)...(19): siRNA sense strand
gguccgagauggcagcaaa

SEQ ID NO: 1326560 - RNA, 19 nt, Homo sapiens
  misc_RNA (1)...(19): siRNA sense strand
ggaaagcuggcucuguaga

SEQ ID NO: 1326561 - RNA, 19 nt, Homo sapiens
  misc_RNA (1)...(19): siRNA sense strand
cggcagugcucggcaugua

SEQ ID NO: 1326562 - RNA, 19 nt, Homo sapiens
  misc_RNA (1)...(19): siRNA sense strand
cauguaguguucucagguu

SEQ ID NO: 1326563 - RNA, 19 nt, Homo sapiens
  misc_RNA (1)...(19): siRNA sense strand
aagcuacguuuccuucaga

SEQ ID NO: 1326564 - RNA, 19 nt, Homo sapiens
  misc_RNA (1)...(19): siRNA sense strand
gagaugcggguccgagaug

SEQ ID NO: 1326565 - RNA, 19 nt, Homo sapiens
  misc_RNA (1)...(19): siRNA sense strand
cgaagaagggcucgagaca

SEQ ID NO: 1326566 - RNA, 19 nt, Homo sapiens
  misc_RNA (1)...(19): siRNA sense strand
caagcuacguuuccuucag

SEQ ID NO: 1326567 - RNA, 19 nt, Homo sapiens
  misc_RNA (1)...(19): siRNA sense strand
ggcccucguucccgaagaa

SEQ ID NO: 1326568 - RNA, 19 nt, Homo sapiens
  misc_RNA (1)...(19): siRNA sense strand
cgagauggcagcaaaauuc

SEQ ID NO: 1326569 - RNA, 19 nt, Homo sapiens
  misc_RNA (1)...(19): siRNA sense strand
gcagugcucggcauguagu

SEQ ID NO: 1326570 - RNA, 19 nt, Homo sapiens
  misc_RNA (1)...(19): siRNA sense strand
guaguguucucagguucug

SEQ ID NO: 1326571 - RNA, 19 nt, Homo sapiens
  misc_RNA (1)...(19): siRNA sense strand
ccagcuaccuccugauacc

SEQ ID NO: 1326572 - RNA, 19 nt, Homo sapiens
  misc_RNA (1)...(19): siRNA sense strand
gccaugaacucgaaaguga

SEQ ID NO: 1326573 - RNA, 19 nt, Homo sapiens
  misc_RNA (1)...(19): siRNA sense strand
gaaggcgucuacaacaauu

SEQ ID NO: 1326574 - RNA, 19 nt, Homo sapiens
  misc_RNA (1)...(19): siRNA sense strand
ccaguuggcucgagagauu

SEQ ID NO: 1326575 - RNA, 19 nt, Homo sapiens
  misc_RNA (1)...(19): siRNA sense strand
gaggagaacuacgguguga

SEQ ID NO: 1326576 - RNA, 19 nt, Homo sapiens
  misc_RNA (1)...(19): siRNA sense strand
gggcuccacuugugaugua

SEQ ID NO: 1326577 - RNA, 19 nt, Homo sapiens
  misc_RNA (1)...(19): siRNA sense strand
auagcagucuuucuucuua

SEQ ID NO: 1326578 - RNA, 19 nt, Homo sapiens
  misc_RNA (1)...(19): siRNA sense strand
aaagacaaguucaccgauu

SEQ ID NO: 1326579 - RNA, 19 nt, Homo sapiens
  misc_RNA (1)...(19): siRNA sense strand
ucaagacgcuaagcucaaa

SEQ ID NO: 1326580 - RNA, 19 nt, Homo sapiens
  misc_RNA (1)...(19): siRNA sense strand
gaacuacggugugaagacu

SEQ ID NO: 1326581 - RNA, 19 nt, Homo sapiens
  misc_RNA (1)...(19): siRNA sense strand
acuaugaccucgagucuga

SEQ ID NO: 1326582 - RNA, 19 nt, Homo sapiens
  misc_RNA (1)...(19): siRNA sense strand
ggacagagcacaggaaagg

SEQ ID NO: 1326583 - RNA, 19 nt, Homo sapiens
  misc_RNA (1)...(19): siRNA sense strand
caacuaugcuacuaaagac

SEQ ID NO: 1326584 - RNA, 19 nt, Homo sapiens
  misc_RNA (1)...(19): siRNA sense strand
guucaccgauucagccauu

SEQ ID NO: 1326585 - RNA, 19 nt, Homo sapiens
  misc_RNA (1)...(19): siRNA sense strand
gaaauguucaaguucaaug

SEQ ID NO: 1326586 - RNA, 19 nt, Homo sapiens
  misc_RNA (1)...(19): siRNA sense strand
ucaacuaugcuacuaaaga

SEQ ID NO: 1326587 - RNA, 19 nt, Homo sapiens
  misc_RNA (1)...(19): siRNA sense strand
gugaagacuaccuaugaua

SEQ ID NO: 1326588 - RNA, 19 nt, Homo sapiens
  misc_RNA (1)...(19): siRNA sense strand
cuucaacuaugcuacuaaa

SEQ ID NO: 1326589 - RNA, 19 nt, Homo sapiens
  misc_RNA (1)...(19): siRNA sense strand
gcaacagcgacgacuauga

SEQ ID NO: 1326590 - RNA, 19 nt, Homo sapiens
  misc_RNA (1)...(19): siRNA sense strand
uaagccaagugaugucaug

SEQ ID NO: 1326591 - RNA, 19 nt, Homo sapiens
  misc_RNA (1)...(19): siRNA sense strand
gcacugaagaggagaagca

SEQ ID NO: 1326592 - RNA, 19 nt, Homo sapiens
  misc_RNA (1)...(19): siRNA sense strand
uaugauagcagucuuucuu

SEQ ID NO: 1326593 - RNA, 19 nt, Homo sapiens
  misc_RNA (1)...(19): siRNA sense strand
gccaagugaugucaugcuu

SEQ ID NO: 1326594 - RNA, 19 nt, Homo sapiens
  misc_RNA (1)...(19): siRNA sense strand
gugugaagacuaccuauga

SEQ ID NO: 1326595 - RNA, 19 nt, Homo sapiens
  misc_RNA (1)...(19): siRNA sense strand
gacgcuaagcucaaaguuu

SEQ ID NO: 1326596 - RNA, 19 nt, Homo sapiens
  misc_RNA (1)...(19): siRNA sense strand
gauagcagucuuucuucuu

SEQ ID NO: 1326597 - RNA, 19 nt, Homo sapiens
  misc_RNA (1)...(19): siRNA sense strand
cuuguucacuuccgaaaug

SEQ ID NO: 1326598 - RNA, 19 nt, Homo sapiens
  misc_RNA (1)...(19): siRNA sense strand
ggagaacuacggugugaag

SEQ ID NO: 1326599 - RNA, 19 nt, Homo sapiens
  misc_RNA (1)...(19): siRNA sense strand
ccauugccaugaacucgaa

SEQ ID NO: 1326600 - RNA, 19 nt, Homo sapiens
  misc_RNA (1)...(19): siRNA sense strand
gacuucaacuaugcuacua

SEQ ID NO: 1326601 - RNA, 19 nt, Homo sapiens
  misc_RNA (1)...(19): siRNA sense strand
cuuauacggugcccuuaga

SEQ ID NO: 1326602 - RNA, 19 nt, Homo sapiens
  misc_RNA (1)...(19): siRNA sense strand
aagacaaguucaccgauuc

SEQ ID NO: 1326603 - RNA, 19 nt, Homo sapiens
  misc_RNA (1)...(19): siRNA sense strand
cagcaacagcgacgacuau

SEQ ID NO: 1326604 - RNA, 19 nt, Homo sapiens
  misc_RNA (1)...(19): siRNA sense strand
caacagcgacgacuaugac

SEQ ID NO: 1326605 - RNA, 19 nt, Homo sapiens
  misc_RNA (1)...(19): siRNA sense strand
ugucaugcuuguucacuuc

SEQ ID NO: 1326606 - RNA, 19 nt, Homo sapiens
  misc_RNA (1)...(19): siRNA sense strand
agucugacauguccaaugg

SEQ ID NO: 1326607 - RNA, 19 nt, Homo sapiens
  misc_RNA (1)...(19): siRNA sense strand
uagcagucuuucuucuuau

SEQ ID NO: 1326608 - RNA, 19 nt, Homo sapiens
  misc_RNA (1)...(19): siRNA sense strand
uugaaggcgucuacaacaa

SEQ ID NO: 1326609 - RNA, 19 nt, Homo sapiens
  misc_RNA (1)...(19): siRNA sense strand
ggaucgccauggagaacga

SEQ ID NO: 1326610 - RNA, 19 nt, Homo sapiens
  misc_RNA (1)...(19): siRNA sense strand
agcagucuuucuucuuaua

SEQ ID NO: 1326611 - RNA, 19 nt, Homo sapiens
  misc_RNA (1)...(19): siRNA sense strand
guucacuuccgaaauguug

SEQ ID NO: 1326612 - RNA, 19 nt, Homo sapiens
  misc_RNA (1)...(19): siRNA sense strand
gcauuuccuuacagcuguu

SEQ ID NO: 1326613 - RNA, 19 nt, Homo sapiens
  misc_RNA (1)...(19): siRNA sense strand
cuuccgaaauguugacuuc

SEQ ID NO: 1326614 - RNA, 19 nt, Homo sapiens
  misc_RNA (1)...(19): siRNA sense strand
ugaaggcgucuacaacaau

SEQ ID NO: 1326615 - RNA, 19 nt, Homo sapiens
  misc_RNA (1)...(19): siRNA sense strand
ugugaagacuaccuaugau

SEQ ID NO: 1326616 - RNA, 19 nt, Homo sapiens
  misc_RNA (1)...(19): siRNA sense strand
ugauagcagucuuucuucu

SEQ ID NO: 1326617 - RNA, 19 nt, Homo sapiens
  misc_RNA (1)...(19): siRNA sense strand
gugaugucaugcuuguuca

SEQ ID NO: 1326618 - RNA, 19 nt, Homo sapiens
  misc_RNA (1)...(19): siRNA sense strand
aaaaugguaccacuuauga

SEQ ID NO: 1326619 - RNA, 19 nt, Homo sapiens
  misc_RNA (1)...(19): siRNA sense strand
gaaaaggacaacucagaag

SEQ ID NO: 1326620 - RNA, 19 nt, Homo sapiens
  misc_RNA (1)...(19): siRNA sense strand
gggagccgaaggcaucuug

SEQ ID NO: 1326621 - RNA, 19 nt, Homo sapiens
  misc_RNA (1)...(19): siRNA sense strand
gacgaugggcgcacugaag

SEQ ID NO: 1326622 - RNA, 19 nt, Homo sapiens
  misc_RNA (1)...(19): siRNA sense strand
caugaacucgaaagugaau

SEQ ID NO: 1326623 - RNA, 19 nt, Homo sapiens
  misc_RNA (1)...(19): siRNA sense strand
gaccucgagucugacaugu

SEQ ID NO: 1326624 - RNA, 19 nt, Homo sapiens
  misc_RNA (1)...(19): siRNA sense strand
ccacuugugauguaaaggu

SEQ ID NO: 1326625 - RNA, 19 nt, Homo sapiens
  misc_RNA (1)...(19): siRNA sense strand
ggaccccaaugaaauguuc

SEQ ID NO: 1326626 - RNA, 19 nt, Homo sapiens
  misc_RNA (1)...(19): siRNA sense strand
ggugugaagacuaccuaug

SEQ ID NO: 1326627 - RNA, 19 nt, Homo sapiens
  misc_RNA (1)...(19): siRNA sense strand
uauacggugcccuuagaaa

SEQ ID NO: 1326628 - RNA, 19 nt, Homo sapiens
  misc_RNA (1)...(19): siRNA sense strand
gccaugaacucgaaaguga

SEQ ID NO: 1326629 - RNA, 19 nt, Homo sapiens
  misc_RNA (1)...(19): siRNA sense strand
gaaggcgucuacaacaauu

SEQ ID NO: 1326630 - RNA, 19 nt, Homo sapiens
  misc_RNA (1)...(19): siRNA sense strand
ccaguuggcucgagagauu

SEQ ID NO: 1326631 - RNA, 19 nt, Homo sapiens
  misc_RNA (1)...(19): siRNA sense strand
gaggagaacuacgguguga

SEQ ID NO: 1326632 - RNA, 19 nt, Homo sapiens
  misc_RNA (1)...(19): siRNA sense strand
gggcuccacuugugaugua

SEQ ID NO: 1326633 - RNA, 19 nt, Homo sapiens
  misc_RNA (1)...(19): siRNA sense strand
gacggaagaucuuuuauuu

SEQ ID NO: 1326634 - RNA, 19 nt, Homo sapiens
  misc_RNA (1)...(19): siRNA sense strand
auagcagucuuucuucuua

SEQ ID NO: 1326635 - RNA, 19 nt, Homo sapiens
  misc_RNA (1)...(19): siRNA sense strand
aaagacaaguucaccgauu

SEQ ID NO: 1326636 - RNA, 19 nt, Homo sapiens
  misc_RNA (1)...(19): siRNA sense strand
ucaagacgcuaagcucaaa

SEQ ID NO: 1326637 - RNA, 19 nt, Homo sapiens
  misc_RNA (1)...(19): siRNA sense strand
gaacuacggugugaagacu

SEQ ID NO: 1326638 - RNA, 19 nt, Homo sapiens
  misc_RNA (1)...(19): siRNA sense strand
acuaugaccucgagucuga

SEQ ID NO: 1326639 - RNA, 19 nt, Homo sapiens
  misc_RNA (1)...(19): siRNA sense strand
caacuaugcuacuaaagac

SEQ ID NO: 1326640 - RNA, 19 nt, Homo sapiens
  misc_RNA (1)...(19): siRNA sense strand
ggacagagcacaggaaagg

SEQ ID NO: 1326641 - RNA, 19 nt, Homo sapiens
  misc_RNA (1)...(19): siRNA sense strand
guucaccgauucagccauu

SEQ ID NO: 1326642 - RNA, 19 nt, Homo sapiens
  misc_RNA (1)...(19): siRNA sense strand
gaaauguucaaguucaaug

SEQ ID NO: 1326643 - RNA, 19 nt, Homo sapiens
  misc_RNA (1)...(19): siRNA sense strand
ucaacuaugcuacuaaaga

SEQ ID NO: 1326644 - RNA, 19 nt, Homo sapiens
  misc_RNA (1)...(19): siRNA sense strand
gugaagacuaccuaugaua

SEQ ID NO: 1326645 - RNA, 19 nt, Homo sapiens
  misc_RNA (1)...(19): siRNA sense strand
cggaagaucuuuuauuuuc

SEQ ID NO: 1326646 - RNA, 19 nt, Homo sapiens
  misc_RNA (1)...(19): siRNA sense strand
cuucaacuaugcuacuaaa

SEQ ID NO: 1326647 - RNA, 19 nt, Homo sapiens
  misc_RNA (1)...(19): siRNA sense strand
gcaacagcgacgacuauga

SEQ ID NO: 1326648 - RNA, 19 nt, Homo sapiens
  misc_RNA (1)...(19): siRNA sense strand
uaagccaagugaugucaug

SEQ ID NO: 1326649 - RNA, 19 nt, Homo sapiens
  misc_RNA (1)...(19): siRNA sense strand
gcacugaagaggagaagca

SEQ ID NO: 1326650 - RNA, 19 nt, Homo sapiens
  misc_RNA (1)...(19): siRNA sense strand
uaugauagcagucuuucuu

SEQ ID NO: 1326651 - RNA, 19 nt, Homo sapiens
  misc_RNA (1)...(19): siRNA sense strand
gccaagugaugucaugcuu

SEQ ID NO: 1326652 - RNA, 19 nt, Homo sapiens
  misc_RNA (1)...(19): siRNA sense strand
gugugaagacuaccuauga

SEQ ID NO: 1326653 - RNA, 19 nt, Homo sapiens
  misc_RNA (1)...(19): siRNA sense strand
gacgcuaagcucaaaguuu

SEQ ID NO: 1326654 - RNA, 19 nt, Homo sapiens
  misc_RNA (1)...(19): siRNA sense strand
gauagcagucuuucuucuu

SEQ ID NO: 1326655 - RNA, 19 nt, Homo sapiens
  misc_RNA (1)...(19): siRNA sense strand
cuuguucacuuccgaaaug

SEQ ID NO: 1326656 - RNA, 19 nt, Homo sapiens
  misc_RNA (1)...(19): siRNA sense strand
ggagaacuacggugugaag

SEQ ID NO: 1326657 - RNA, 19 nt, Homo sapiens
  misc_RNA (1)...(19): siRNA sense strand
ccauugccaugaacucgaa

SEQ ID NO: 1326658 - RNA, 19 nt, Homo sapiens
  misc_RNA (1)...(19): siRNA sense strand
ggagacggaagaucuuuua

SEQ ID NO: 1326659 - RNA, 19 nt, Homo sapiens
  misc_RNA (1)...(19): siRNA sense strand
gacuucaacuaugcuacua

SEQ ID NO: 1326660 - RNA, 19 nt, Homo sapiens
  misc_RNA (1)...(19): siRNA sense strand
cuuauacggugcccuuaga

SEQ ID NO: 1326661 - RNA, 19 nt, Homo sapiens
  misc_RNA (1)...(19): siRNA sense strand
aagacaaguucaccgauuc

SEQ ID NO: 1326662 - RNA, 19 nt, Homo sapiens
  misc_RNA (1)...(19): siRNA sense strand
cagcaacagcgacgacuau

SEQ ID NO: 1326663 - RNA, 19 nt, Homo sapiens
  misc_RNA (1)...(19): siRNA sense strand
cccauccucucaucuauuc

SEQ ID NO: 1326664 - RNA, 19 nt, Homo sapiens
  misc_RNA (1)...(19): siRNA sense strand
caacagcgacgacuaugac

SEQ ID NO: 1326665 - RNA, 19 nt, Homo sapiens
  misc_RNA (1)...(19): siRNA sense strand
ugucaugcuuguucacuuc

SEQ ID NO: 1326666 - RNA, 19 nt, Homo sapiens
  misc_RNA (1)...(19): siRNA sense strand
agucugacauguccaaugg

SEQ ID NO: 1326667 - RNA, 19 nt, Homo sapiens
  misc_RNA (1)...(19): siRNA sense strand
uugaaggcgucuacaacaa

SEQ ID NO: 1326668 - RNA, 19 nt, Homo sapiens
  misc_RNA (1)...(19): siRNA sense strand
ggaucgccauggagaacga

SEQ ID NO: 1326669 - RNA, 19 nt, Homo sapiens
  misc_RNA (1)...(19): siRNA sense strand
agcagucuuucuucuuaua

SEQ ID NO: 1326670 - RNA, 19 nt, Homo sapiens
  misc_RNA (1)...(19): siRNA sense strand
uagcagucuuucuucuuau

SEQ ID NO: 1326671 - RNA, 19 nt, Homo sapiens
  misc_RNA (1)...(19): siRNA sense strand
guucacuuccgaaauguug

SEQ ID NO: 1326672 - RNA, 19 nt, Homo sapiens
  misc_RNA (1)...(19): siRNA sense strand
gcauuuccuuacagcuguu

SEQ ID NO: 1326673 - RNA, 19 nt, Homo sapiens
  misc_RNA (1)...(19): siRNA sense strand
cuuccgaaauguugacuuc

SEQ ID NO: 1326674 - RNA, 19 nt, Homo sapiens
  misc_RNA (1)...(19): siRNA sense strand
ugaaggcgucuacaacaau

SEQ ID NO: 1326675 - RNA, 19 nt, Homo sapiens
  misc_RNA (1)...(19): siRNA sense strand
ugugaagacuaccuaugau

SEQ ID NO: 1326676 - RNA, 19 nt, Homo sapiens
  misc_RNA (1)...(19): siRNA sense strand
ugauagcagucuuucuucu

SEQ ID NO: 1326677 - RNA, 19 nt, Homo sapiens
  misc_RNA (1)...(19): siRNA sense strand
gugaugucaugcuuguuca

SEQ ID NO: 1326678 - RNA, 19 nt, Homo sapiens
  misc_RNA (1)...(19): siRNA sense strand
aaaaugguaccacuuauga

SEQ ID NO: 1326679 - RNA, 19 nt, Homo sapiens
  misc_RNA (1)...(19): siRNA sense strand
gaaaaggacaacucagaag

SEQ ID NO: 1326680 - RNA, 19 nt, Homo sapiens
  misc_RNA (1)...(19): siRNA sense strand
caugaacucgaaagugaau

SEQ ID NO: 1326681 - RNA, 19 nt, Homo sapiens
  misc_RNA (1)...(19): siRNA sense strand
gacgaugggcgcacugaag

SEQ ID NO: 1326682 - RNA, 19 nt, Homo sapiens
  misc_RNA (1)...(19): siRNA sense strand
gggagccgaaggcaucuug

SEQ ID NO: 1326683 - RNA, 19 nt, Homo sapiens
  misc_RNA (1)...(19): siRNA sense strand
ccacuugugauguaaaggu

SEQ ID NO: 1326684 - RNA, 19 nt, Homo sapiens
  misc_RNA (1)...(19): siRNA sense strand
ggaccccaaugaaauguuc

SEQ ID NO: 1326685 - RNA, 19 nt, Homo sapiens
  misc_RNA (1)...(19): siRNA sense strand
gaccucgagucugacaugu

SEQ ID NO: 1326686 - RNA, 19 nt, Homo sapiens
  misc_RNA (1)...(19): siRNA sense strand
ggugugaagacuaccuaug

SEQ ID NO: 1326687 - RNA, 19 nt, Homo sapiens
  misc_RNA (1)...(19): siRNA sense strand
ccucccauccucucaucua

SEQ ID NO: 1326688 - RNA, 19 nt, Homo sapiens
  misc_RNA (1)...(19): siRNA sense strand
uauacggugcccuuagaaa

SEQ ID NO: 1326689 - RNA, 19 nt, Homo sapiens
  misc_RNA (1)...(19): siRNA sense strand
gccaugaacucgaaaguga

SEQ ID NO: 1326690 - RNA, 19 nt, Homo sapiens
  misc_RNA (1)...(19): siRNA sense strand
gaaggcgucuacaacaauu

SEQ ID NO: 1326691 - RNA, 19 nt, Homo sapiens
  misc_RNA (1)...(19): siRNA sense strand
ccaguuggcucgagagauu

SEQ ID NO: 1326692 - RNA, 19 nt, Homo sapiens
  misc_RNA (1)...(19): siRNA sense strand
gaggagaacuacgguguga

SEQ ID NO: 1326693 - RNA, 19 nt, Homo sapiens
  misc_RNA (1)...(19): siRNA sense strand
gggcuccacuugugaugua

SEQ ID NO: 1326694 - RNA, 19 nt, Homo sapiens
  misc_RNA (1)...(19): siRNA sense strand
auagcagucuuucuucuua

SEQ ID NO: 1326695 - RNA, 19 nt, Homo sapiens
  misc_RNA (1)...(19): siRNA sense strand
aaagacaaguucaccgauu

SEQ ID NO: 1326696 - RNA, 19 nt, Homo sapiens
  misc_RNA (1)...(19): siRNA sense strand
ucaagacgcuaagcucaaa

SEQ ID NO: 1326697 - RNA, 19 nt, Homo sapiens
  misc_RNA (1)...(19): siRNA sense strand
gaacuacggugugaagacu

SEQ ID NO: 1326698 - RNA, 19 nt, Homo sapiens
  misc_RNA (1)...(19): siRNA sense strand
acuaugaccucgagucuga

SEQ ID NO: 1326699 - RNA, 19 nt, Homo sapiens
  misc_RNA (1)...(19): siRNA sense strand
ggacagagcacaggaaagg

SEQ ID NO: 1326700 - RNA, 19 nt, Homo sapiens
  misc_RNA (1)...(19): siRNA sense strand
caacuaugcuacuaaagac

SEQ ID NO: 1326701 - RNA, 19 nt, Homo sapiens
  misc_RNA (1)...(19): siRNA sense strand
guucaccgauucagccauu

SEQ ID NO: 1326702 - RNA, 19 nt, Homo sapiens
  misc_RNA (1)...(19): siRNA sense strand
gaaauguucaaguucaaug

SEQ ID NO: 1326703 - RNA, 19 nt, Homo sapiens
  misc_RNA (1)...(19): siRNA sense strand
ucaacuaugcuacuaaaga

SEQ ID NO: 1326704 - RNA, 19 nt, Homo sapiens
  misc_RNA (1)...(19): siRNA sense strand
gugaagacuaccuaugaua

SEQ ID NO: 1326705 - RNA, 19 nt, Homo sapiens
  misc_RNA (1)...(19): siRNA sense strand
cuucaacuaugcuacuaaa

SEQ ID NO: 1326706 - RNA, 19 nt, Homo sapiens
  misc_RNA (1)...(19): siRNA sense strand
gcaacagcgacgacuauga

SEQ ID NO: 1326707 - RNA, 19 nt, Homo sapiens
  misc_RNA (1)...(19): siRNA sense strand
uaagccaagugaugucaug

SEQ ID NO: 1326708 - RNA, 19 nt, Homo sapiens
  misc_RNA (1)...(19): siRNA sense strand
gcacugaagaggagaagca

SEQ ID NO: 1326709 - RNA, 19 nt, Homo sapiens
  misc_RNA (1)...(19): siRNA sense strand
uaugauagcagucuuucuu

SEQ ID NO: 1326710 - RNA, 19 nt, Homo sapiens
  misc_RNA (1)...(19): siRNA sense strand
gccaagugaugucaugcuu

SEQ ID NO: 1326711 - RNA, 19 nt, Homo sapiens
  misc_RNA (1)...(19): siRNA sense strand
gugugaagacuaccuauga

SEQ ID NO: 1326712 - RNA, 19 nt, Homo sapiens
  misc_RNA (1)...(19): siRNA sense strand
gacgcuaagcucaaaguuu

SEQ ID NO: 1326713 - RNA, 19 nt, Homo sapiens
  misc_RNA (1)...(19): siRNA sense strand
gauagcagucuuucuucuu

SEQ ID NO: 1326714 - RNA, 19 nt, Homo sapiens
  misc_RNA (1)...(19): siRNA sense strand
cuuguucacuuccgaaaug

SEQ ID NO: 1326715 - RNA, 19 nt, Homo sapiens
  misc_RNA (1)...(19): siRNA sense strand
ggagaacuacggugugaag

SEQ ID NO: 1326716 - RNA, 19 nt, Homo sapiens
  misc_RNA (1)...(19): siRNA sense strand
ccauugccaugaacucgaa

SEQ ID NO: 1326717 - RNA, 19 nt, Homo sapiens
  misc_RNA (1)...(19): siRNA sense strand
gacuucaacuaugcuacua

SEQ ID NO: 1326718 - RNA, 19 nt, Homo sapiens
  misc_RNA (1)...(19): siRNA sense strand
cuuauacggugcccuuaga

SEQ ID NO: 1326719 - RNA, 19 nt, Homo sapiens
  misc_RNA (1)...(19): siRNA sense strand
aagacaaguucaccgauuc

SEQ ID NO: 1326720 - RNA, 19 nt, Homo sapiens
  misc_RNA (1)...(19): siRNA sense strand
cagcaacagcgacgacuau

SEQ ID NO: 1326721 - RNA, 19 nt, Homo sapiens
  misc_RNA (1)...(19): siRNA sense strand
caacagcgacgacuaugac

SEQ ID NO: 1326722 - RNA, 19 nt, Homo sapiens
  misc_RNA (1)...(19): siRNA sense strand
ugucaugcuuguucacuuc

SEQ ID NO: 1326723 - RNA, 19 nt, Homo sapiens
  misc_RNA (1)...(19): siRNA sense strand
agucugacauguccaaugg

SEQ ID NO: 1326724 - RNA, 19 nt, Homo sapiens
  misc_RNA (1)...(19): siRNA sense strand
uagcagucuuucuucuuau

SEQ ID NO: 1326725 - RNA, 19 nt, Homo sapiens
  misc_RNA (1)...(19): siRNA sense strand
uugaaggcgucuacaacaa

SEQ ID NO: 1326726 - RNA, 19 nt, Homo sapiens
  misc_RNA (1)...(19): siRNA sense strand
ggaucgccauggagaacga

SEQ ID NO: 1326727 - RNA, 19 nt, Homo sapiens
  misc_RNA (1)...(19): siRNA sense strand
agcagucuuucuucuuaua

SEQ ID NO: 1326728 - RNA, 19 nt, Homo sapiens
  misc_RNA (1)...(19): siRNA sense strand
guucacuuccgaaauguug

SEQ ID NO: 1326729 - RNA, 19 nt, Homo sapiens
  misc_RNA (1)...(19): siRNA sense strand
gcauuuccuuacagcuguu

SEQ ID NO: 1326730 - RNA, 19 nt, Homo sapiens
  misc_RNA (1)...(19): siRNA sense strand
cuuccgaaauguugacuuc

SEQ ID NO: 1326731 - RNA, 19 nt, Homo sapiens
  misc_RNA (1)...(19): siRNA sense strand
ugaaggcgucuacaacaau

SEQ ID NO: 1326732 - RNA, 19 nt, Homo sapiens
  misc_RNA (1)...(19): siRNA sense strand
ugugaagacuaccuaugau

SEQ ID NO: 1326733 - RNA, 19 nt, Homo sapiens
  misc_RNA (1)...(19): siRNA sense strand
ugauagcagucuuucuucu

SEQ ID NO: 1326734 - RNA, 19 nt, Homo sapiens
  misc_RNA (1)...(19): siRNA sense strand
gugaugucaugcuuguuca

SEQ ID NO: 1326735 - RNA, 19 nt, Homo sapiens
  misc_RNA (1)...(19): siRNA sense strand
aaaaugguaccacuuauga

SEQ ID NO: 1326736 - RNA, 19 nt, Homo sapiens
  misc_RNA (1)...(19): siRNA sense strand
gaaaaggacaacucagaag

SEQ ID NO: 1326737 - RNA, 19 nt, Homo sapiens
  misc_RNA (1)...(19): siRNA sense strand
gggagccgaaggcaucuug

SEQ ID NO: 1326738 - RNA, 19 nt, Homo sapiens
  misc_RNA (1)...(19): siRNA sense strand
gacgaugggcgcacugaag

SEQ ID NO: 1326739 - RNA, 19 nt, Homo sapiens
  misc_RNA (1)...(19): siRNA sense strand
caugaacucgaaagugaau

SEQ ID NO: 1326740 - RNA, 19 nt, Homo sapiens
  misc_RNA (1)...(19): siRNA sense strand
gaccucgagucugacaugu

SEQ ID NO: 1326741 - RNA, 19 nt, Homo sapiens
  misc_RNA (1)...(19): siRNA sense strand
ccacuugugauguaaaggu

SEQ ID NO: 1326742 - RNA, 19 nt, Homo sapiens
  misc_RNA (1)...(19): siRNA sense strand
ggaccccaaugaaauguuc

SEQ ID NO: 1326743 - RNA, 19 nt, Homo sapiens
  misc_RNA (1)...(19): siRNA sense strand
ggugugaagacuaccuaug

SEQ ID NO: 1326744 - RNA, 19 nt, Homo sapiens
  misc_RNA (1)...(19): siRNA sense strand
uauacggugcccuuagaaa

SEQ ID NO: 1326745 - RNA, 19 nt, Homo sapiens
  misc_RNA (1)...(19): siRNA sense strand
gccaugaacucgaaaguga

SEQ ID NO: 1326746 - RNA, 19 nt, Homo sapiens
  misc_RNA (1)...(19): siRNA sense strand
gaaggcgucuacaacaauu

SEQ ID NO: 1326747 - RNA, 19 nt, Homo sapiens
  misc_RNA (1)...(19): siRNA sense strand
ccaguuggcucgagagauu

SEQ ID NO: 1326748 - RNA, 19 nt, Homo sapiens
  misc_RNA (1)...(19): siRNA sense strand
gaggagaacuacgguguga

SEQ ID NO: 1326749 - RNA, 19 nt, Homo sapiens
  misc_RNA (1)...(19): siRNA sense strand
gggcuccacuugugaugua

SEQ ID NO: 1326750 - RNA, 19 nt, Homo sapiens
  misc_RNA (1)...(19): siRNA sense strand
auagcagucuuucuucuua

SEQ ID NO: 1326751 - RNA, 19 nt, Homo sapiens
  misc_RNA (1)...(19): siRNA sense strand
aaagacaaguucaccgauu

SEQ ID NO: 1326752 - RNA, 19 nt, Homo sapiens
  misc_RNA (1)...(19): siRNA sense strand
ucaagacgcuaagcucaaa

SEQ ID NO: 1326753 - RNA, 19 nt, Homo sapiens
  misc_RNA (1)...(19): siRNA sense strand
gaacuacggugugaagacu

SEQ ID NO: 1326754 - RNA, 19 nt, Homo sapiens
  misc_RNA (1)...(19): siRNA sense strand
acuaugaccucgagucuga

SEQ ID NO: 1326755 - RNA, 19 nt, Homo sapiens
  misc_RNA (1)...(19): siRNA sense strand
ggacagagcacaggaaagg

SEQ ID NO: 1326756 - RNA, 19 nt, Homo sapiens
  misc_RNA (1)...(19): siRNA sense strand
caacuaugcuacuaaagac

SEQ ID NO: 1326757 - RNA, 19 nt, Homo sapiens
  misc_RNA (1)...(19): siRNA sense strand
guucaccgauucagccauu

SEQ ID NO: 1326758 - RNA, 19 nt, Homo sapiens
  misc_RNA (1)...(19): siRNA sense strand
gaaauguucaaguucaaug

SEQ ID NO: 1326759 - RNA, 19 nt, Homo sapiens
  misc_RNA (1)...(19): siRNA sense strand
ucaacuaugcuacuaaaga

SEQ ID NO: 1326760 - RNA, 19 nt, Homo sapiens
  misc_RNA (1)...(19): siRNA sense strand
gugaagacuaccuaugaua

SEQ ID NO: 1326761 - RNA, 19 nt, Homo sapiens
  misc_RNA (1)...(19): siRNA sense strand
cuucaacuaugcuacuaaa

SEQ ID NO: 1326762 - RNA, 19 nt, Homo sapiens
  misc_RNA (1)...(19): siRNA sense strand
gcaacagcgacgacuauga

SEQ ID NO: 1326763 - RNA, 19 nt, Homo sapiens
  misc_RNA (1)...(19): siRNA sense strand
uaagccaagugaugucaug

SEQ ID NO: 1326764 - RNA, 19 nt, Homo sapiens
  misc_RNA (1)...(19): siRNA sense strand
gcacugaagaggagaagca

SEQ ID NO: 1326765 - RNA, 19 nt, Homo sapiens
  misc_RNA (1)...(19): siRNA sense strand
uaugauagcagucuuucuu

SEQ ID NO: 1326766 - RNA, 19 nt, Homo sapiens
  misc_RNA (1)...(19): siRNA sense strand
gccaagugaugucaugcuu

SEQ ID NO: 1326767 - RNA, 19 nt, Homo sapiens
  misc_RNA (1)...(19): siRNA sense strand
gugugaagacuaccuauga

SEQ ID NO: 1326768 - RNA, 19 nt, Homo sapiens
  misc_RNA (1)...(19): siRNA sense strand
gacgcuaagcucaaaguuu

SEQ ID NO: 1326769 - RNA, 19 nt, Homo sapiens
  misc_RNA (1)...(19): siRNA sense strand
gauagcagucuuucuucuu

SEQ ID NO: 1326770 - RNA, 19 nt, Homo sapiens
  misc_RNA (1)...(19): siRNA sense strand
cuuguucacuuccgaaaug

SEQ ID NO: 1326771 - RNA, 19 nt, Homo sapiens
  misc_RNA (1)...(19): siRNA sense strand
ggagaacuacggugugaag

SEQ ID NO: 1326772 - RNA, 19 nt, Homo sapiens
  misc_RNA (1)...(19): siRNA sense strand
ccauugccaugaacucgaa

SEQ ID NO: 1326773 - RNA, 19 nt, Homo sapiens
  misc_RNA (1)...(19): siRNA sense strand
gacuucaacuaugcuacua

SEQ ID NO: 1326774 - RNA, 19 nt, Homo sapiens
  misc_RNA (1)...(19): siRNA sense strand
cuuauacggugcccuuaga

SEQ ID NO: 1326775 - RNA, 19 nt, Homo sapiens
  misc_RNA (1)...(19): siRNA sense strand
aagacaaguucaccgauuc

SEQ ID NO: 1326776 - RNA, 19 nt, Homo sapiens
  misc_RNA (1)...(19): siRNA sense strand
cagcaacagcgacgacuau

SEQ ID NO: 1326777 - RNA, 19 nt, Homo sapiens
  misc_RNA (1)...(19): siRNA sense strand
caacagcgacgacuaugac

SEQ ID NO: 1326778 - RNA, 19 nt, Homo sapiens
  misc_RNA (1)...(19): siRNA sense strand
ugucaugcuuguucacuuc

SEQ ID NO: 1326779 - RNA, 19 nt, Homo sapiens
  misc_RNA (1)...(19): siRNA sense strand
agucugacauguccaaugg

SEQ ID NO: 1326780 - RNA, 19 nt, Homo sapiens
  misc_RNA (1)...(19): siRNA sense strand
uagcagucuuucuucuuau

SEQ ID NO: 1326781 - RNA, 19 nt, Homo sapiens
  misc_RNA (1)...(19): siRNA sense strand
uugaaggcgucuacaacaa

SEQ ID NO: 1326782 - RNA, 19 nt, Homo sapiens
  misc_RNA (1)...(19): siRNA sense strand
ggaucgccauggagaacga

SEQ ID NO: 1326783 - RNA, 19 nt, Homo sapiens
  misc_RNA (1)...(19): siRNA sense strand
agcagucuuucuucuuaua

SEQ ID NO: 1326784 - RNA, 19 nt, Homo sapiens
  misc_RNA (1)...(19): siRNA sense strand
guucacuuccgaaauguug

SEQ ID NO: 1326785 - RNA, 19 nt, Homo sapiens
  misc_RNA (1)...(19): siRNA sense strand
gcauuuccuuacagcuguu

SEQ ID NO: 1326786 - RNA, 19 nt, Homo sapiens
  misc_RNA (1)...(19): siRNA sense strand
cuuccgaaauguugacuuc

SEQ ID NO: 1326787 - RNA, 19 nt, Homo sapiens
  misc_RNA (1)...(19): siRNA sense strand
ugaaggcgucuacaacaau

SEQ ID NO: 1326788 - RNA, 19 nt, Homo sapiens
  misc_RNA (1)...(19): siRNA sense strand
ugugaagacuaccuaugau

SEQ ID NO: 1326789 - RNA, 19 nt, Homo sapiens
  misc_RNA (1)...(19): siRNA sense strand
ugauagcagucuuucuucu

SEQ ID NO: 1326790 - RNA, 19 nt, Homo sapiens
  misc_RNA (1)...(19): siRNA sense strand
gugaugucaugcuuguuca

SEQ ID NO: 1326791 - RNA, 19 nt, Homo sapiens
  misc_RNA (1)...(19): siRNA sense strand
aaaaugguaccacuuauga

SEQ ID NO: 1326792 - RNA, 19 nt, Homo sapiens
  misc_RNA (1)...(19): siRNA sense strand
gaaaaggacaacucagaag

SEQ ID NO: 1326793 - RNA, 19 nt, Homo sapiens
  misc_RNA (1)...(19): siRNA sense strand
gggagccgaaggcaucuug

SEQ ID NO: 1326794 - RNA, 19 nt, Homo sapiens
  misc_RNA (1)...(19): siRNA sense strand
gacgaugggcgcacugaag

SEQ ID NO: 1326795 - RNA, 19 nt, Homo sapiens
  misc_RNA (1)...(19): siRNA sense strand
caugaacucgaaagugaau

SEQ ID NO: 1326796 - RNA, 19 nt, Homo sapiens
  misc_RNA (1)...(19): siRNA sense strand
gaccucgagucugacaugu

SEQ ID NO: 1326797 - RNA, 19 nt, Homo sapiens
  misc_RNA (1)...(19): siRNA sense strand
ccacuugugauguaaaggu

SEQ ID NO: 1326798 - RNA, 19 nt, Homo sapiens
  misc_RNA (1)...(19): siRNA sense strand
ggaccccaaugaaauguuc

SEQ ID NO: 1326799 - RNA, 19 nt, Homo sapiens
  misc_RNA (1)...(19): siRNA sense strand
ggugugaagacuaccuaug

SEQ ID NO: 1326800 - RNA, 19 nt, Homo sapiens
  misc_RNA (1)...(19): siRNA sense strand
uauacggugcccuuagaaa

SEQ ID NO: 1326801 - RNA, 19 nt, Homo sapiens
  misc_RNA (1)...(19): siRNA sense strand
gccaugaacucgaaaguga

SEQ ID NO: 1326802 - RNA, 19 nt, Homo sapiens
  misc_RNA (1)...(19): siRNA sense strand
gaaggcgucuacaacaauu

SEQ ID NO: 1326803 - RNA, 19 nt, Homo sapiens
  misc_RNA (1)...(19): siRNA sense strand
ccaguuggcucgagagauu

SEQ ID NO: 1326804 - RNA, 19 nt, Homo sapiens
  misc_RNA (1)...(19): siRNA sense strand
gaggagaacuacgguguga

SEQ ID NO: 1326805 - RNA, 19 nt, Homo sapiens
  misc_RNA (1)...(19): siRNA sense strand
gggcuccacuugugaugua

SEQ ID NO: 1326806 - RNA, 19 nt, Homo sapiens
  misc_RNA (1)...(19): siRNA sense strand
auagcagucuuucuucuua

SEQ ID NO: 1326807 - RNA, 19 nt, Homo sapiens
  misc_RNA (1)...(19): siRNA sense strand
aaagacaaguucaccgauu

SEQ ID NO: 1326808 - RNA, 19 nt, Homo sapiens
  misc_RNA (1)...(19): siRNA sense strand
ucaagacgcuaagcucaaa

SEQ ID NO: 1326809 - RNA, 19 nt, Homo sapiens
  misc_RNA (1)...(19): siRNA sense strand
gaacuacggugugaagacu

SEQ ID NO: 1326810 - RNA, 19 nt, Homo sapiens
  misc_RNA (1)...(19): siRNA sense strand
acuaugaccucgagucuga

SEQ ID NO: 1326811 - RNA, 19 nt, Homo sapiens
  misc_RNA (1)...(19): siRNA sense strand
ggacagagcacaggaaagg

SEQ ID NO: 1326812 - RNA, 19 nt, Homo sapiens
  misc_RNA (1)...(19): siRNA sense strand
caacuaugcuacuaaagac

SEQ ID NO: 1326813 - RNA, 19 nt, Homo sapiens
  misc_RNA (1)...(19): siRNA sense strand
guucaccgauucagccauu

SEQ ID NO: 1326814 - RNA, 19 nt, Homo sapiens
  misc_RNA (1)...(19): siRNA sense strand
gaaauguucaaguucaaug

SEQ ID NO: 1326815 - RNA, 19 nt, Homo sapiens
  misc_RNA (1)...(19): siRNA sense strand
ucaacuaugcuacuaaaga

SEQ ID NO: 1326816 - RNA, 19 nt, Homo sapiens
  misc_RNA (1)...(19): siRNA sense strand
gugaagacuaccuaugaua

SEQ ID NO: 1326817 - RNA, 19 nt, Homo sapiens
  misc_RNA (1)...(19): siRNA sense strand
cuucaacuaugcuacuaaa

SEQ ID NO: 1326818 - RNA, 19 nt, Homo sapiens
  misc_RNA (1)...(19): siRNA sense strand
gcaacagcgacgacuauga

SEQ ID NO: 1326819 - RNA, 19 nt, Homo sapiens
  misc_RNA (1)...(19): siRNA sense strand
uaagccaagugaugucaug

SEQ ID NO: 1326820 - RNA, 19 nt, Homo sapiens
  misc_RNA (1)...(19): siRNA sense strand
gcacugaagaggagaagca

SEQ ID NO: 1326821 - RNA, 19 nt, Homo sapiens
  misc_RNA (1)...(19): siRNA sense strand
uaugauagcagucuuucuu

SEQ ID NO: 1326822 - RNA, 19 nt, Homo sapiens
  misc_RNA (1)...(19): siRNA sense strand
gccaagugaugucaugcuu

SEQ ID NO: 1326823 - RNA, 19 nt, Homo sapiens
  misc_RNA (1)...(19): siRNA sense strand
gugugaagacuaccuauga

SEQ ID NO: 1326824 - RNA, 19 nt, Homo sapiens
  misc_RNA (1)...(19): siRNA sense strand
gacgcuaagcucaaaguuu

SEQ ID NO: 1326825 - RNA, 19 nt, Homo sapiens
  misc_RNA (1)...(19): siRNA sense strand
gauagcagucuuucuucuu

SEQ ID NO: 1326826 - RNA, 19 nt, Homo sapiens
  misc_RNA (1)...(19): siRNA sense strand
cuuguucacuuccgaaaug

SEQ ID NO: 1326827 - RNA, 19 nt, Homo sapiens
  misc_RNA (1)...(19): siRNA sense strand
ggagaacuacggugugaag

SEQ ID NO: 1326828 - RNA, 19 nt, Homo sapiens
  misc_RNA (1)...(19): siRNA sense strand
ccauugccaugaacucgaa

SEQ ID NO: 1326829 - RNA, 19 nt, Homo sapiens
  misc_RNA (1)...(19): siRNA sense strand
gacuucaacuaugcuacua

SEQ ID NO: 1326830 - RNA, 19 nt, Homo sapiens
  misc_RNA (1)...(19): siRNA sense strand
cuuauacggugcccuuaga

SEQ ID NO: 1326831 - RNA, 19 nt, Homo sapiens
  misc_RNA (1)...(19): siRNA sense strand
aagacaaguucaccgauuc

SEQ ID NO: 1326832 - RNA, 19 nt, Homo sapiens
  misc_RNA (1)...(19): siRNA sense strand
cagcaacagcgacgacuau

SEQ ID NO: 1326833 - RNA, 19 nt, Homo sapiens
  misc_RNA (1)...(19): siRNA sense strand
caacagcgacgacuaugac

SEQ ID NO: 1326834 - RNA, 19 nt, Homo sapiens
  misc_RNA (1)...(19): siRNA sense strand
ugucaugcuuguucacuuc

SEQ ID NO: 1326835 - RNA, 19 nt, Homo sapiens
  misc_RNA (1)...(19): siRNA sense strand
agucugacauguccaaugg

SEQ ID NO: 1326836 - RNA, 19 nt, Homo sapiens
  misc_RNA (1)...(19): siRNA sense strand
uagcagucuuucuucuuau

SEQ ID NO: 1326837 - RNA, 19 nt, Homo sapiens
  misc_RNA (1)...(19): siRNA sense strand
uugaaggcgucuacaacaa

SEQ ID NO: 1326838 - RNA, 19 nt, Homo sapiens
  misc_RNA (1)...(19): siRNA sense strand
ggaucgccauggagaacga

SEQ ID NO: 1326839 - RNA, 19 nt, Homo sapiens
  misc_RNA (1)...(19): siRNA sense strand
agcagucuuucuucuuaua

SEQ ID NO: 1326840 - RNA, 19 nt, Homo sapiens
  misc_RNA (1)...(19): siRNA sense strand
guucacuuccgaaauguug

SEQ ID NO: 1326841 - RNA, 19 nt, Homo sapiens
  misc_RNA (1)...(19): siRNA sense strand
gcauuuccuuacagcuguu

SEQ ID NO: 1326842 - RNA, 19 nt, Homo sapiens
  misc_RNA (1)...(19): siRNA sense strand
cuuccgaaauguugacuuc

SEQ ID NO: 1326843 - RNA, 19 nt, Homo sapiens
  misc_RNA (1)...(19): siRNA sense strand
ugaaggcgucuacaacaau

SEQ ID NO: 1326844 - RNA, 19 nt, Homo sapiens
  misc_RNA (1)...(19): siRNA sense strand
ugugaagacuaccuaugau

SEQ ID NO: 1326845 - RNA, 19 nt, Homo sapiens
  misc_RNA (1)...(19): siRNA sense strand
ugauagcagucuuucuucu

SEQ ID NO: 1326846 - RNA, 19 nt, Homo sapiens
  misc_RNA (1)...(19): siRNA sense strand
gugaugucaugcuuguuca

SEQ ID NO: 1326847 - RNA, 19 nt, Homo sapiens
  misc_RNA (1)...(19): siRNA sense strand
aaaaugguaccacuuauga

SEQ ID NO: 1326848 - RNA, 19 nt, Homo sapiens
  misc_RNA (1)...(19): siRNA sense strand
gaaaaggacaacucagaag

SEQ ID NO: 1326849 - RNA, 19 nt, Homo sapiens
  misc_RNA (1)...(19): siRNA sense strand
gggagccgaaggcaucuug

SEQ ID NO: 1326850 - RNA, 19 nt, Homo sapiens
  misc_RNA (1)...(19): siRNA sense strand
gacgaugggcgcacugaag

SEQ ID NO: 1326851 - RNA, 19 nt, Homo sapiens
  misc_RNA (1)...(19): siRNA sense strand
caugaacucgaaagugaau

SEQ ID NO: 1326852 - RNA, 19 nt, Homo sapiens
  misc_RNA (1)...(19): siRNA sense strand
gaccucgagucugacaugu

SEQ ID NO: 1326853 - RNA, 19 nt, Homo sapiens
  misc_RNA (1)...(19): siRNA sense strand
ccacuugugauguaaaggu

SEQ ID NO: 1326854 - RNA, 19 nt, Homo sapiens
  misc_RNA (1)...(19): siRNA sense strand
ggaccccaaugaaauguuc

SEQ ID NO: 1326855 - RNA, 19 nt, Homo sapiens
  misc_RNA (1)...(19): siRNA sense strand
ggugugaagacuaccuaug

SEQ ID NO: 1326856 - RNA, 19 nt, Homo sapiens
  misc_RNA (1)...(19): siRNA sense strand
uauacggugcccuuagaaa

SEQ ID NO: 1326857 - RNA, 19 nt, Homo sapiens
  misc_RNA (1)...(19): siRNA sense strand
gccaugaacucgaaaguga

SEQ ID NO: 1326858 - RNA, 19 nt, Homo sapiens
  misc_RNA (1)...(19): siRNA sense strand
gaaggcgucuacaacaauu

SEQ ID NO: 1326859 - RNA, 19 nt, Homo sapiens
  misc_RNA (1)...(19): siRNA sense strand
ccaguuggcucgagagauu

SEQ ID NO: 1326860 - RNA, 19 nt, Homo sapiens
  misc_RNA (1)...(19): siRNA sense strand
gaggagaacuacgguguga

SEQ ID NO: 1326861 - RNA, 19 nt, Homo sapiens
  misc_RNA (1)...(19): siRNA sense strand
gggcuccacuugugaugua

SEQ ID NO: 1326862 - RNA, 19 nt, Homo sapiens
  misc_RNA (1)...(19): siRNA sense strand
auagcagucuuucuucuua

SEQ ID NO: 1326863 - RNA, 19 nt, Homo sapiens
  misc_RNA (1)...(19): siRNA sense strand
aaagacaaguucaccgauu

SEQ ID NO: 1326864 - RNA, 19 nt, Homo sapiens
  misc_RNA (1)...(19): siRNA sense strand
ucaagacgcuaagcucaaa

SEQ ID NO: 1326865 - RNA, 19 nt, Homo sapiens
  misc_RNA (1)...(19): siRNA sense strand
gaacuacggugugaagacu

SEQ ID NO: 1326866 - RNA, 19 nt, Homo sapiens
  misc_RNA (1)...(19): siRNA sense strand
acuaugaccucgagucuga

SEQ ID NO: 1326867 - RNA, 19 nt, Homo sapiens
  misc_RNA (1)...(19): siRNA sense strand
ggacagagcacaggaaagg

SEQ ID NO: 1326868 - RNA, 19 nt, Homo sapiens
  misc_RNA (1)...(19): siRNA sense strand
caacuaugcuacuaaagac

SEQ ID NO: 1326869 - RNA, 19 nt, Homo sapiens
  misc_RNA (1)...(19): siRNA sense strand
guucaccgauucagccauu

SEQ ID NO: 1326870 - RNA, 19 nt, Homo sapiens
  misc_RNA (1)...(19): siRNA sense strand
gaaauguucaaguucaaug

SEQ ID NO: 1326871 - RNA, 19 nt, Homo sapiens
  misc_RNA (1)...(19): siRNA sense strand
ucaacuaugcuacuaaaga

SEQ ID NO: 1326872 - RNA, 19 nt, Homo sapiens
  misc_RNA (1)...(19): siRNA sense strand
gugaagacuaccuaugaua

SEQ ID NO: 1326873 - RNA, 19 nt, Homo sapiens
  misc_RNA (1)...(19): siRNA sense strand
cuucaacuaugcuacuaaa

SEQ ID NO: 1326874 - RNA, 19 nt, Homo sapiens
  misc_RNA (1)...(19): siRNA sense strand
gcaacagcgacgacuauga

SEQ ID NO: 1326875 - RNA, 19 nt, Homo sapiens
  misc_RNA (1)...(19): siRNA sense strand
uaagccaagugaugucaug

SEQ ID NO: 1326876 - RNA, 19 nt, Homo sapiens
  misc_RNA (1)...(19): siRNA sense strand
gcacugaagaggagaagca

SEQ ID NO: 1326877 - RNA, 19 nt, Homo sapiens
  misc_RNA (1)...(19): siRNA sense strand
uaugauagcagucuuucuu

SEQ ID NO: 1326878 - RNA, 19 nt, Homo sapiens
  misc_RNA (1)...(19): siRNA sense strand
gccaagugaugucaugcuu

SEQ ID NO: 1326879 - RNA, 19 nt, Homo sapiens
  misc_RNA (1)...(19): siRNA sense strand
gugugaagacuaccuauga

SEQ ID NO: 1326880 - RNA, 19 nt, Homo sapiens
  misc_RNA (1)...(19): siRNA sense strand
gacgcuaagcucaaaguuu

SEQ ID NO: 1326881 - RNA, 19 nt, Homo sapiens
  misc_RNA (1)...(19): siRNA sense strand
gauagcagucuuucuucuu

SEQ ID NO: 1326882 - RNA, 19 nt, Homo sapiens
  misc_RNA (1)...(19): siRNA sense strand
cuuguucacuuccgaaaug

SEQ ID NO: 1326883 - RNA, 19 nt, Homo sapiens
  misc_RNA (1)...(19): siRNA sense strand
ggagaacuacggugugaag

SEQ ID NO: 1326884 - RNA, 19 nt, Homo sapiens
  misc_RNA (1)...(19): siRNA sense strand
ccauugccaugaacucgaa

SEQ ID NO: 1326885 - RNA, 19 nt, Homo sapiens
  misc_RNA (1)...(19): siRNA sense strand
gacuucaacuaugcuacua

SEQ ID NO: 1326886 - RNA, 19 nt, Homo sapiens
  misc_RNA (1)...(19): siRNA sense strand
cuuauacggugcccuuaga

SEQ ID NO: 1326887 - RNA, 19 nt, Homo sapiens
  misc_RNA (1)...(19): siRNA sense strand
aagacaaguucaccgauuc

SEQ ID NO: 1326888 - RNA, 19 nt, Homo sapiens
  misc_RNA (1)...(19): siRNA sense strand
cagcaacagcgacgacuau

SEQ ID NO: 1326889 - RNA, 19 nt, Homo sapiens
  misc_RNA (1)...(19): siRNA sense strand
caacagcgacgacuaugac

SEQ ID NO: 1326890 - RNA, 19 nt, Homo sapiens
  misc_RNA (1)...(19): siRNA sense strand
ugucaugcuuguucacuuc

SEQ ID NO: 1326891 - RNA, 19 nt, Homo sapiens
  misc_RNA (1)...(19): siRNA sense strand
agucugacauguccaaugg

SEQ ID NO: 1326892 - RNA, 19 nt, Homo sapiens
  misc_RNA (1)...(19): siRNA sense strand
uagcagucuuucuucuuau

SEQ ID NO: 1326893 - RNA, 19 nt, Homo sapiens
  misc_RNA (1)...(19): siRNA sense strand
uugaaggcgucuacaacaa

SEQ ID NO: 1326894 - RNA, 19 nt, Homo sapiens
  misc_RNA (1)...(19): siRNA sense strand
ggaucgccauggagaacga

SEQ ID NO: 1326895 - RNA, 19 nt, Homo sapiens
  misc_RNA (1)...(19): siRNA sense strand
agcagucuuucuucuuaua

SEQ ID NO: 1326896 - RNA, 19 nt, Homo sapiens
  misc_RNA (1)...(19): siRNA sense strand
guucacuuccgaaauguug

SEQ ID NO: 1326897 - RNA, 19 nt, Homo sapiens
  misc_RNA (1)...(19): siRNA sense strand
gcauuuccuuacagcuguu

SEQ ID NO: 1326898 - RNA, 19 nt, Homo sapiens
  misc_RNA (1)...(19): siRNA sense strand
cuuccgaaauguugacuuc

SEQ ID NO: 1326899 - RNA, 19 nt, Homo sapiens
  misc_RNA (1)...(19): siRNA sense strand
ugaaggcgucuacaacaau

SEQ ID NO: 1326900 - RNA, 19 nt, Homo sapiens
  misc_RNA (1)...(19): siRNA sense strand
ugugaagacuaccuaugau

SEQ ID NO: 1326901 - RNA, 19 nt, Homo sapiens
  misc_RNA (1)...(19): siRNA sense strand
ugauagcagucuuucuucu

SEQ ID NO: 1326902 - RNA, 19 nt, Homo sapiens
  misc_RNA (1)...(19): siRNA sense strand
gugaugucaugcuuguuca

SEQ ID NO: 1326903 - RNA, 19 nt, Homo sapiens
  misc_RNA (1)...(19): siRNA sense strand
aaaaugguaccacuuauga

SEQ ID NO: 1326904 - RNA, 19 nt, Homo sapiens
  misc_RNA (1)...(19): siRNA sense strand
gaaaaggacaacucagaag

SEQ ID NO: 1326905 - RNA, 19 nt, Homo sapiens
  misc_RNA (1)...(19): siRNA sense strand
gggagccgaaggcaucuug

SEQ ID NO: 1326906 - RNA, 19 nt, Homo sapiens
  misc_RNA (1)...(19): siRNA sense strand
gacgaugggcgcacugaag

SEQ ID NO: 1326907 - RNA, 19 nt, Homo sapiens
  misc_RNA (1)...(19): siRNA sense strand
caugaacucgaaagugaau

SEQ ID NO: 1326908 - RNA, 19 nt, Homo sapiens
  misc_RNA (1)...(19): siRNA sense strand
gaccucgagucugacaugu

SEQ ID NO: 1326909 - RNA, 19 nt, Homo sapiens
  misc_RNA (1)...(19): siRNA sense strand
ccacuugugauguaaaggu

SEQ ID NO: 1326910 - RNA, 19 nt, Homo sapiens
  misc_RNA (1)...(19): siRNA sense strand
ggaccccaaugaaauguuc

SEQ ID NO: 1326911 - RNA, 19 nt, Homo sapiens
  misc_RNA (1)...(19): siRNA sense strand
ggugugaagacuaccuaug

SEQ ID NO: 1326912 - RNA, 19 nt, Homo sapiens
  misc_RNA (1)...(19): siRNA sense strand
uauacggugcccuuagaaa

SEQ ID NO: 1326913 - RNA, 19 nt, Homo sapiens
  misc_RNA (1)...(19): siRNA sense strand
aaccugcuguuucuucuua

SEQ ID NO: 1326914 - RNA, 19 nt, Homo sapiens
  misc_RNA (1)...(19): siRNA sense strand
gaccuggugucacggauga

SEQ ID NO: 1326915 - RNA, 19 nt, Homo sapiens
  misc_RNA (1)...(19): siRNA sense strand
gagaaagugugaggucaac

SEQ ID NO: 1326916 - RNA, 19 nt, Homo sapiens
  misc_RNA (1)...(19): siRNA sense strand
agaggaacaucgaggagau

SEQ ID NO: 1326917 - RNA, 19 nt, Homo sapiens
  misc_RNA (1)...(19): siRNA sense strand
gcuguuucuucuuaccauu

SEQ ID NO: 1326918 - RNA, 19 nt, Homo sapiens
  misc_RNA (1)...(19): siRNA sense strand
ccucacaaccugcuguuuc

SEQ ID NO: 1326919 - RNA, 19 nt, Homo sapiens
  misc_RNA (1)...(19): siRNA sense strand
agugugaggucaacuugca

SEQ ID NO: 1326920 - RNA, 19 nt, Homo sapiens
  misc_RNA (1)...(19): siRNA sense strand
caacaagaggagccugucu

SEQ ID NO: 1326921 - RNA, 19 nt, Homo sapiens
  misc_RNA (1)...(19): siRNA sense strand
gaacagagcuuacuuauuc

SEQ ID NO: 1326922 - RNA, 19 nt, Homo sapiens
  misc_RNA (1)...(19): siRNA sense strand
gaucaaagcuuauacucaa

SEQ ID NO: 1326923 - RNA, 19 nt, Homo sapiens
  misc_RNA (1)...(19): siRNA sense strand
gcauguacauagacaaaua

SEQ ID NO: 1326924 - RNA, 19 nt, Homo sapiens
  misc_RNA (1)...(19): siRNA sense strand
gggagaaacugcuguugua

SEQ ID NO: 1326925 - RNA, 19 nt, Homo sapiens
  misc_RNA (1)...(19): siRNA sense strand
ggagagaucuuaggacuau

SEQ ID NO: 1326926 - RNA, 19 nt, Homo sapiens
  misc_RNA (1)...(19): siRNA sense strand
caacagauguauacaauag

SEQ ID NO: 1326927 - RNA, 19 nt, Homo sapiens
  misc_RNA (1)...(19): siRNA sense strand
gaaacuaccugcaggaauc

SEQ ID NO: 1326928 - RNA, 19 nt, Homo sapiens
  misc_RNA (1)...(19): siRNA sense strand
ggaggcagaucaauaagaa

SEQ ID NO: 1326929 - RNA, 19 nt, Homo sapiens
  misc_RNA (1)...(19): siRNA sense strand
ugucaaagcugaaagacua

SEQ ID NO: 1326930 - RNA, 19 nt, Homo sapiens
  misc_RNA (1)...(19): siRNA sense strand
gaggagaaaccauccauua

SEQ ID NO: 1326931 - RNA, 19 nt, Homo sapiens
  misc_RNA (1)...(19): siRNA sense strand
ggaaggagcuggagucaac

SEQ ID NO: 1326932 - RNA, 19 nt, Homo sapiens
  misc_RNA (1)...(19): siRNA sense strand
acaagaagauagaguagua

SEQ ID NO: 1326933 - RNA, 19 nt, Homo sapiens
  misc_RNA (1)...(19): siRNA sense strand
ggaugaagcugacauucuu

SEQ ID NO: 1326934 - RNA, 19 nt, Homo sapiens
  misc_RNA (1)...(19): siRNA sense strand
caaaguagcagcauuguga

SEQ ID NO: 1326935 - RNA, 19 nt, Homo sapiens
  misc_RNA (1)...(19): siRNA sense strand
ucaaggacauggacaaauu

SEQ ID NO: 1326936 - RNA, 19 nt, Homo sapiens
  misc_RNA (1)...(19): siRNA sense strand
cauagaugcugccauuaua

SEQ ID NO: 1326937 - RNA, 19 nt, Homo sapiens
  misc_RNA (1)...(19): siRNA sense strand
ucagaagacuguaaagaaa

SEQ ID NO: 1326938 - RNA, 19 nt, Homo sapiens
  misc_RNA (1)...(19): siRNA sense strand
ggaaagaguacauugauga

SEQ ID NO: 1326939 - RNA, 19 nt, Homo sapiens
  misc_RNA (1)...(19): siRNA sense strand
gagacaaaccacauaaaua

SEQ ID NO: 1326940 - RNA, 19 nt, Homo sapiens
  misc_RNA (1)...(19): siRNA sense strand
ccaagcagauuauagugua

SEQ ID NO: 1326941 - RNA, 19 nt, Homo sapiens
  misc_RNA (1)...(19): siRNA sense strand
gaauuuggcuuacggagau

SEQ ID NO: 1326942 - RNA, 19 nt, Homo sapiens
  misc_RNA (1)...(19): siRNA sense strand
gaaaguaaaucagugagau

SEQ ID NO: 1326943 - RNA, 19 nt, Homo sapiens
  misc_RNA (1)...(19): siRNA sense strand
caaacuuguuccagacuua

SEQ ID NO: 1326944 - RNA, 19 nt, Homo sapiens
  misc_RNA (1)...(19): siRNA sense strand
gaagucauaagucgaauaa

SEQ ID NO: 1326945 - RNA, 19 nt, Homo sapiens
  misc_RNA (1)...(19): siRNA sense strand
acacagagucucagaaaua

SEQ ID NO: 1326946 - RNA, 19 nt, Homo sapiens
  misc_RNA (1)...(19): siRNA sense strand
aaagaaagcugucauuagg

SEQ ID NO: 1326947 - RNA, 19 nt, Homo sapiens
  misc_RNA (1)...(19): siRNA sense strand
gaagaagugccuaauauag

SEQ ID NO: 1326948 - RNA, 19 nt, Homo sapiens
  misc_RNA (1)...(19): siRNA sense strand
gaacgaacacaagaagaua

SEQ ID NO: 1326949 - RNA, 19 nt, Homo sapiens
  misc_RNA (1)...(19): siRNA sense strand
gaaagugucuacugaucau

SEQ ID NO: 1326950 - RNA, 19 nt, Homo sapiens
  misc_RNA (1)...(19): siRNA sense strand
ggaggaagauaauaguugu

SEQ ID NO: 1326951 - RNA, 19 nt, Homo sapiens
  misc_RNA (1)...(19): siRNA sense strand
gaauauagcuuuucucaag

SEQ ID NO: 1326952 - RNA, 19 nt, Homo sapiens
  misc_RNA (1)...(19): siRNA sense strand
ggaagaagcuaaacaugcu

SEQ ID NO: 1326953 - RNA, 19 nt, Homo sapiens
  misc_RNA (1)...(19): siRNA sense strand
aaacaagucugcuucuuca

SEQ ID NO: 1326954 - RNA, 19 nt, Homo sapiens
  misc_RNA (1)...(19): siRNA sense strand
ggacacagagucucagaaa

SEQ ID NO: 1326955 - RNA, 19 nt, Homo sapiens
  misc_RNA (1)...(19): siRNA sense strand
ugcgacagcuucuuuguua

SEQ ID NO: 1326956 - RNA, 19 nt, Homo sapiens
  misc_RNA (1)...(19): siRNA sense strand
cagaagacauacagaaaga

SEQ ID NO: 1326957 - RNA, 19 nt, Homo sapiens
  misc_RNA (1)...(19): siRNA sense strand
gcaauucgaacugcauuua

SEQ ID NO: 1326958 - RNA, 19 nt, Homo sapiens
  misc_RNA (1)...(19): siRNA sense strand
gcuagaaguugaagcagaa

SEQ ID NO: 1326959 - RNA, 19 nt, Homo sapiens
  misc_RNA (1)...(19): siRNA sense strand
uaggaaagcugugauauca

SEQ ID NO: 1326960 - RNA, 19 nt, Homo sapiens
  misc_RNA (1)...(19): siRNA sense strand
ggagaaaccauccauuaug

SEQ ID NO: 1326961 - RNA, 19 nt, Homo sapiens
  misc_RNA (1)...(19): siRNA sense strand
gaaauuauugagccaguuu

SEQ ID NO: 1326962 - RNA, 19 nt, Homo sapiens
  misc_RNA (1)...(19): siRNA sense strand
gaaauguguugguucuuca

SEQ ID NO: 1326963 - RNA, 19 nt, Homo sapiens
  misc_RNA (1)...(19): siRNA sense strand
gauaccagccaacaauaua

SEQ ID NO: 1326964 - RNA, 19 nt, Homo sapiens
  misc_RNA (1)...(19): siRNA sense strand
ggcauuucauuauggauua

SEQ ID NO: 1326965 - RNA, 19 nt, Homo sapiens
  misc_RNA (1)...(19): siRNA sense strand
ucagugaucuuauuagcuu

SEQ ID NO: 1326966 - RNA, 19 nt, Homo sapiens
  misc_RNA (1)...(19): siRNA sense strand
ggaaacaacagauguauac

SEQ ID NO: 1326967 - RNA, 19 nt, Homo sapiens
  misc_RNA (1)...(19): siRNA sense strand
gauauacuccagugacuaa

SEQ ID NO: 1326968 - RNA, 19 nt, Homo sapiens
  misc_RNA (1)...(19): siRNA sense strand
gauacacaauugcaacuau

SEQ ID NO: 1326969 - RNA, 19 nt, Homo sapiens
  misc_RNA (1)...(19): siRNA sense strand
guguauagcuugccuuuca

SEQ ID NO: 1326970 - RNA, 19 nt, Homo sapiens
  misc_RNA (1)...(19): siRNA sense strand
ggucaugcauuuagaagau

SEQ ID NO: 1326971 - RNA, 19 nt, Homo sapiens
  misc_RNA (1)...(19): siRNA sense strand
uuucuuaugucccuucuua

SEQ ID NO: 1326972 - RNA, 19 nt, Homo sapiens
  misc_RNA (1)...(19): siRNA sense strand
agaaacugcuguuguagaa

SEQ ID NO: 1326973 - RNA, 19 nt, Homo sapiens
  misc_RNA (1)...(19): siRNA sense strand
gaagauaauaguuguggaa

SEQ ID NO: 1326974 - RNA, 19 nt, Homo sapiens
  misc_RNA (1)...(19): siRNA sense strand
cacaugcacuugauuuaaa

SEQ ID NO: 1326975 - RNA, 19 nt, Homo sapiens
  misc_RNA (1)...(19): siRNA sense strand
caagugacaugaaagaagu

SEQ ID NO: 1326976 - RNA, 19 nt, Homo sapiens
  misc_RNA (1)...(19): siRNA sense strand
ggcaaaagcacaauuauua

SEQ ID NO: 1326977 - RNA, 19 nt, Homo sapiens
  misc_RNA (1)...(19): siRNA sense strand
caacuauucuucauuaugc

SEQ ID NO: 1326978 - RNA, 19 nt, Homo sapiens
  misc_RNA (1)...(19): siRNA sense strand
gaaauuaugaggaguuauc

SEQ ID NO: 1326979 - RNA, 19 nt, Homo sapiens
  misc_RNA (1)...(19): siRNA sense strand
gcccauauccucuaauuau

SEQ ID NO: 1326980 - RNA, 19 nt, Homo sapiens
  misc_RNA (1)...(19): siRNA sense strand
ggaugaagaugaagauguc

SEQ ID NO: 1326981 - RNA, 19 nt, Homo sapiens
  misc_RNA (1)...(19): siRNA sense strand
caaugaggaugaagaugaa

SEQ ID NO: 1326982 - RNA, 19 nt, Homo sapiens
  misc_RNA (1)...(19): siRNA sense strand
uagguugccugauuucuuu

SEQ ID NO: 1326983 - RNA, 19 nt, Homo sapiens
  misc_RNA (1)...(19): siRNA sense strand
gcucacacuuaauaguaua

SEQ ID NO: 1326984 - RNA, 19 nt, Homo sapiens
  misc_RNA (1)...(19): siRNA sense strand
ggagucaacuaaagcuguu

SEQ ID NO: 1326985 - RNA, 19 nt, Homo sapiens
  misc_RNA (1)...(19): siRNA sense strand
guacaacaucuaaagagua

SEQ ID NO: 1326986 - RNA, 19 nt, Homo sapiens
  misc_RNA (1)...(19): siRNA sense strand
caguuauucuguucacuua

SEQ ID NO: 1326987 - RNA, 19 nt, Homo sapiens
  misc_RNA (1)...(19): siRNA sense strand
ggagacaaaccacauaaau

SEQ ID NO: 1326988 - RNA, 19 nt, Homo sapiens
  misc_RNA (1)...(19): siRNA sense strand
agaagugccuaauauagaa

SEQ ID NO: 1326989 - RNA, 19 nt, Homo sapiens
  misc_RNA (1)...(19): siRNA sense strand
caaagauacugcugcuaga

SEQ ID NO: 1326990 - RNA, 19 nt, Homo sapiens
  misc_RNA (1)...(19): siRNA sense strand
gaugaaauguuugaagcaa

SEQ ID NO: 1326991 - RNA, 19 nt, Homo sapiens
  misc_RNA (1)...(19): siRNA sense strand
gaaagaguacauugaugaa

SEQ ID NO: 1326992 - RNA, 19 nt, Homo sapiens
  misc_RNA (1)...(19): siRNA sense strand
gaauaacacaugcacuuga

SEQ ID NO: 1326993 - RNA, 19 nt, Homo sapiens
  misc_RNA (1)...(19): siRNA sense strand
uuacugcaaugccaccuua

SEQ ID NO: 1326994 - RNA, 19 nt, Homo sapiens
  misc_RNA (1)...(19): siRNA sense strand
aggaagaaauggauucaaa

SEQ ID NO: 1326995 - RNA, 19 nt, Homo sapiens
  misc_RNA (1)...(19): siRNA sense strand
gaaauugaccaagcagauu

SEQ ID NO: 1326996 - RNA, 19 nt, Homo sapiens
  misc_RNA (1)...(19): siRNA sense strand
uaacauccagucucucuaa

SEQ ID NO: 1326997 - RNA, 19 nt, Homo sapiens
  misc_RNA (1)...(19): siRNA sense strand
uaacacaugcacuugauuu

SEQ ID NO: 1326998 - RNA, 19 nt, Homo sapiens
  misc_RNA (1)...(19): siRNA sense strand
cuaaauacaucucuuucug

SEQ ID NO: 1326999 - RNA, 19 nt, Homo sapiens
  misc_RNA (1)...(19): siRNA sense strand
caacaguacuaugguuuau

SEQ ID NO: 1327000 - RNA, 19 nt, Homo sapiens
  misc_RNA (1)...(19): siRNA sense strand
uaaugacagugacuaugua

SEQ ID NO: 1327001 - RNA, 19 nt, Homo sapiens
  misc_RNA (1)...(19): siRNA sense strand
agaaagcugucauuaggaa

SEQ ID NO: 1327002 - RNA, 19 nt, Homo sapiens
  misc_RNA (1)...(19): siRNA sense strand
ugaaauguuugaagcaaga

SEQ ID NO: 1327003 - RNA, 19 nt, Homo sapiens
  misc_RNA (1)...(19): siRNA sense strand
gcacaggucaugcauuuag

SEQ ID NO: 1327004 - RNA, 19 nt, Homo sapiens
  misc_RNA (1)...(19): siRNA sense strand
gagcuggagucaacuaaag

SEQ ID NO: 1327005 - RNA, 19 nt, Homo sapiens
  misc_RNA (1)...(19): siRNA sense strand
gaacaguacaacaucuaaa

SEQ ID NO: 1327006 - RNA, 19 nt, Homo sapiens
  misc_RNA (1)...(19): siRNA sense strand
ggagauuauucuucagaga

SEQ ID NO: 1327007 - RNA, 19 nt, Homo sapiens
  misc_RNA (1)...(19): siRNA sense strand
gaacaggaaagaguacauu

SEQ ID NO: 1327008 - RNA, 19 nt, Homo sapiens
  misc_RNA (1)...(19): siRNA sense strand
ugaagaagugccuaauaua

SEQ ID NO: 1327009 - RNA, 19 nt, Homo sapiens
  misc_RNA (1)...(19): siRNA sense strand
aaacugcuguuguagaaau

SEQ ID NO: 1327010 - RNA, 19 nt, Homo sapiens
  misc_RNA (1)...(19): siRNA sense strand
gaacaagaggaggaagaua

SEQ ID NO: 1327011 - RNA, 19 nt, Homo sapiens
  misc_RNA (1)...(19): siRNA sense strand
cauggugucugggcaguua

SEQ ID NO: 1327012 - RNA, 19 nt, Homo sapiens
  misc_RNA (1)...(19): siRNA sense strand
gcaacuaaauacaucucuu

SEQ ID NO: 1327013 - RNA, 19 nt, Homo sapiens
  misc_RNA (1)...(19): siRNA sense strand
caacauauaccuggagcua

SEQ ID NO: 1327014 - RNA, 19 nt, Homo sapiens
  misc_RNA (1)...(19): siRNA sense strand
ucaaagauaaccaagcuaa

SEQ ID NO: 1327015 - RNA, 19 nt, Homo sapiens
  misc_RNA (1)...(19): siRNA sense strand
uauauucuauguccucuug

SEQ ID NO: 1327016 - RNA, 19 nt, Homo sapiens
  misc_RNA (1)...(19): siRNA sense strand
gcacauguggcgagcaauu

SEQ ID NO: 1327017 - RNA, 19 nt, Homo sapiens
  misc_RNA (1)...(19): siRNA sense strand
ggucauuuaucuauucugu

SEQ ID NO: 1327018 - RNA, 19 nt, Homo sapiens
  misc_RNA (1)...(19): siRNA sense strand
guucaguacucauuucaug

SEQ ID NO: 1327019 - RNA, 19 nt, Homo sapiens
  misc_RNA (1)...(19): siRNA sense strand
agacagucauucaaauuug

SEQ ID NO: 1327020 - RNA, 19 nt, Homo sapiens
  misc_RNA (1)...(19): siRNA sense strand
uuauggagcugucaaagga

SEQ ID NO: 1327021 - RNA, 19 nt, Homo sapiens
  misc_RNA (1)...(19): siRNA sense strand
gaacagagcuuacuuauuc

SEQ ID NO: 1327022 - RNA, 19 nt, Homo sapiens
  misc_RNA (1)...(19): siRNA sense strand
gaucaaagcuuauacucaa

SEQ ID NO: 1327023 - RNA, 19 nt, Homo sapiens
  misc_RNA (1)...(19): siRNA sense strand
gcauguacauagacaaaua

SEQ ID NO: 1327024 - RNA, 19 nt, Homo sapiens
  misc_RNA (1)...(19): siRNA sense strand
gggagaaacugcuguugua

SEQ ID NO: 1327025 - RNA, 19 nt, Homo sapiens
  misc_RNA (1)...(19): siRNA sense strand
ggagagaucuuaggacuau

SEQ ID NO: 1327026 - RNA, 19 nt, Homo sapiens
  misc_RNA (1)...(19): siRNA sense strand
caacagauguauacaauag

SEQ ID NO: 1327027 - RNA, 19 nt, Homo sapiens
  misc_RNA (1)...(19): siRNA sense strand
gaaacuaccugcaggaauc

SEQ ID NO: 1327028 - RNA, 19 nt, Homo sapiens
  misc_RNA (1)...(19): siRNA sense strand
ggaggcagaucaauaagaa

SEQ ID NO: 1327029 - RNA, 19 nt, Homo sapiens
  misc_RNA (1)...(19): siRNA sense strand
ugucaaagcugaaagacua

SEQ ID NO: 1327030 - RNA, 19 nt, Homo sapiens
  misc_RNA (1)...(19): siRNA sense strand
gaggagaaaccauccauua

SEQ ID NO: 1327031 - RNA, 19 nt, Homo sapiens
  misc_RNA (1)...(19): siRNA sense strand
ggaaggagcuggagucaac

SEQ ID NO: 1327032 - RNA, 19 nt, Homo sapiens
  misc_RNA (1)...(19): siRNA sense strand
acaagaagauagaguagua

SEQ ID NO: 1327033 - RNA, 19 nt, Homo sapiens
  misc_RNA (1)...(19): siRNA sense strand
ggaugaagcugacauucuu

SEQ ID NO: 1327034 - RNA, 19 nt, Homo sapiens
  misc_RNA (1)...(19): siRNA sense strand
caaaguagcagcauuguga

SEQ ID NO: 1327035 - RNA, 19 nt, Homo sapiens
  misc_RNA (1)...(19): siRNA sense strand
ucaaggacauggacaaauu

SEQ ID NO: 1327036 - RNA, 19 nt, Homo sapiens
  misc_RNA (1)...(19): siRNA sense strand
cauagaugcugccauuaua

SEQ ID NO: 1327037 - RNA, 19 nt, Homo sapiens
  misc_RNA (1)...(19): siRNA sense strand
ucagaagacuguaaagaaa

SEQ ID NO: 1327038 - RNA, 19 nt, Homo sapiens
  misc_RNA (1)...(19): siRNA sense strand
ggaaagaguacauugauga

SEQ ID NO: 1327039 - RNA, 19 nt, Homo sapiens
  misc_RNA (1)...(19): siRNA sense strand
gagacaaaccacauaaaua

SEQ ID NO: 1327040 - RNA, 19 nt, Homo sapiens
  misc_RNA (1)...(19): siRNA sense strand
ccaagcagauuauagugua

SEQ ID NO: 1327041 - RNA, 19 nt, Homo sapiens
  misc_RNA (1)...(19): siRNA sense strand
gaauuuggcuuacggagau

SEQ ID NO: 1327042 - RNA, 19 nt, Homo sapiens
  misc_RNA (1)...(19): siRNA sense strand
gaaaguaaaucagugagau

SEQ ID NO: 1327043 - RNA, 19 nt, Homo sapiens
  misc_RNA (1)...(19): siRNA sense strand
caaacuuguuccagacuua

SEQ ID NO: 1327044 - RNA, 19 nt, Homo sapiens
  misc_RNA (1)...(19): siRNA sense strand
gaagucauaagucgaauaa

SEQ ID NO: 1327045 - RNA, 19 nt, Homo sapiens
  misc_RNA (1)...(19): siRNA sense strand
acacagagucucagaaaua

SEQ ID NO: 1327046 - RNA, 19 nt, Homo sapiens
  misc_RNA (1)...(19): siRNA sense strand
aaagaaagcugucauuagg

SEQ ID NO: 1327047 - RNA, 19 nt, Homo sapiens
  misc_RNA (1)...(19): siRNA sense strand
gaagaagugccuaauauag

SEQ ID NO: 1327048 - RNA, 19 nt, Homo sapiens
  misc_RNA (1)...(19): siRNA sense strand
gaacgaacacaagaagaua

SEQ ID NO: 1327049 - RNA, 19 nt, Homo sapiens
  misc_RNA (1)...(19): siRNA sense strand
gaaagugucuacugaucau

SEQ ID NO: 1327050 - RNA, 19 nt, Homo sapiens
  misc_RNA (1)...(19): siRNA sense strand
ggaggaagauaauaguugu

SEQ ID NO: 1327051 - RNA, 19 nt, Homo sapiens
  misc_RNA (1)...(19): siRNA sense strand
gaauauagcuuuucucaag

SEQ ID NO: 1327052 - RNA, 19 nt, Homo sapiens
  misc_RNA (1)...(19): siRNA sense strand
ggaagaagcuaaacaugcu

SEQ ID NO: 1327053 - RNA, 19 nt, Homo sapiens
  misc_RNA (1)...(19): siRNA sense strand
aaacaagucugcuucuuca

SEQ ID NO: 1327054 - RNA, 19 nt, Homo sapiens
  misc_RNA (1)...(19): siRNA sense strand
ggacacagagucucagaaa

SEQ ID NO: 1327055 - RNA, 19 nt, Homo sapiens
  misc_RNA (1)...(19): siRNA sense strand
ugcgacagcuucuuuguua

SEQ ID NO: 1327056 - RNA, 19 nt, Homo sapiens
  misc_RNA (1)...(19): siRNA sense strand
cagaagacauacagaaaga

SEQ ID NO: 1327057 - RNA, 19 nt, Homo sapiens
  misc_RNA (1)...(19): siRNA sense strand
gcaauucgaacugcauuua

SEQ ID NO: 1327058 - RNA, 19 nt, Homo sapiens
  misc_RNA (1)...(19): siRNA sense strand
gcuagaaguugaagcagaa

SEQ ID NO: 1327059 - RNA, 19 nt, Homo sapiens
  misc_RNA (1)...(19): siRNA sense strand
uaggaaagcugugauauca

SEQ ID NO: 1327060 - RNA, 19 nt, Homo sapiens
  misc_RNA (1)...(19): siRNA sense strand
ggagaaaccauccauuaug

SEQ ID NO: 1327061 - RNA, 19 nt, Homo sapiens
  misc_RNA (1)...(19): siRNA sense strand
gaaauuauugagccaguuu

SEQ ID NO: 1327062 - RNA, 19 nt, Homo sapiens
  misc_RNA (1)...(19): siRNA sense strand
gaaauguguugguucuuca

SEQ ID NO: 1327063 - RNA, 19 nt, Homo sapiens
  misc_RNA (1)...(19): siRNA sense strand
gauaccagccaacaauaua

SEQ ID NO: 1327064 - RNA, 19 nt, Homo sapiens
  misc_RNA (1)...(19): siRNA sense strand
ggcauuucauuauggauua

SEQ ID NO: 1327065 - RNA, 19 nt, Homo sapiens
  misc_RNA (1)...(19): siRNA sense strand
ucagugaucuuauuagcuu

SEQ ID NO: 1327066 - RNA, 19 nt, Homo sapiens
  misc_RNA (1)...(19): siRNA sense strand
ggaaacaacagauguauac

SEQ ID NO: 1327067 - RNA, 19 nt, Homo sapiens
  misc_RNA (1)...(19): siRNA sense strand
gauauacuccagugacuaa

SEQ ID NO: 1327068 - RNA, 19 nt, Homo sapiens
  misc_RNA (1)...(19): siRNA sense strand
gauacacaauugcaacuau

SEQ ID NO: 1327069 - RNA, 19 nt, Homo sapiens
  misc_RNA (1)...(19): siRNA sense strand
guguauagcuugccuuuca

SEQ ID NO: 1327070 - RNA, 19 nt, Homo sapiens
  misc_RNA (1)...(19): siRNA sense strand
ggucaugcauuuagaagau

SEQ ID NO: 1327071 - RNA, 19 nt, Homo sapiens
  misc_RNA (1)...(19): siRNA sense strand
uuucuuaugucccuucuua

SEQ ID NO: 1327072 - RNA, 19 nt, Homo sapiens
  misc_RNA (1)...(19): siRNA sense strand
agaaacugcuguuguagaa

SEQ ID NO: 1327073 - RNA, 19 nt, Homo sapiens
  misc_RNA (1)...(19): siRNA sense strand
gaagauaauaguuguggaa

SEQ ID NO: 1327074 - RNA, 19 nt, Homo sapiens
  misc_RNA (1)...(19): siRNA sense strand
cacaugcacuugauuuaaa

SEQ ID NO: 1327075 - RNA, 19 nt, Homo sapiens
  misc_RNA (1)...(19): siRNA sense strand
caagugacaugaaagaagu

SEQ ID NO: 1327076 - RNA, 19 nt, Homo sapiens
  misc_RNA (1)...(19): siRNA sense strand
ggcaaaagcacaauuauua

SEQ ID NO: 1327077 - RNA, 19 nt, Homo sapiens
  misc_RNA (1)...(19): siRNA sense strand
caacuauucuucauuaugc

SEQ ID NO: 1327078 - RNA, 19 nt, Homo sapiens
  misc_RNA (1)...(19): siRNA sense strand
gaaauuaugaggaguuauc

SEQ ID NO: 1327079 - RNA, 19 nt, Homo sapiens
  misc_RNA (1)...(19): siRNA sense strand
gcccauauccucuaauuau

SEQ ID NO: 1327080 - RNA, 19 nt, Homo sapiens
  misc_RNA (1)...(19): siRNA sense strand
ggaugaagaugaagauguc

SEQ ID NO: 1327081 - RNA, 19 nt, Homo sapiens
  misc_RNA (1)...(19): siRNA sense strand
caaugaggaugaagaugaa

SEQ ID NO: 1327082 - RNA, 19 nt, Homo sapiens
  misc_RNA (1)...(19): siRNA sense strand
uagguugccugauuucuuu

SEQ ID NO: 1327083 - RNA, 19 nt, Homo sapiens
  misc_RNA (1)...(19): siRNA sense strand
gcucacacuuaauaguaua

SEQ ID NO: 1327084 - RNA, 19 nt, Homo sapiens
  misc_RNA (1)...(19): siRNA sense strand
ggagucaacuaaagcuguu

SEQ ID NO: 1327085 - RNA, 19 nt, Homo sapiens
  misc_RNA (1)...(19): siRNA sense strand
guacaacaucuaaagagua

SEQ ID NO: 1327086 - RNA, 19 nt, Homo sapiens
  misc_RNA (1)...(19): siRNA sense strand
caguuauucuguucacuua

SEQ ID NO: 1327087 - RNA, 19 nt, Homo sapiens
  misc_RNA (1)...(19): siRNA sense strand
ggagacaaaccacauaaau

SEQ ID NO: 1327088 - RNA, 19 nt, Homo sapiens
  misc_RNA (1)...(19): siRNA sense strand
agaagugccuaauauagaa

SEQ ID NO: 1327089 - RNA, 19 nt, Homo sapiens
  misc_RNA (1)...(19): siRNA sense strand
caaagauacugcugcuaga

SEQ ID NO: 1327090 - RNA, 19 nt, Homo sapiens
  misc_RNA (1)...(19): siRNA sense strand
gaugaaauguuugaagcaa

SEQ ID NO: 1327091 - RNA, 19 nt, Homo sapiens
  misc_RNA (1)...(19): siRNA sense strand
gaaagaguacauugaugaa

SEQ ID NO: 1327092 - RNA, 19 nt, Homo sapiens
  misc_RNA (1)...(19): siRNA sense strand
gaauaacacaugcacuuga

SEQ ID NO: 1327093 - RNA, 19 nt, Homo sapiens
  misc_RNA (1)...(19): siRNA sense strand
uuacugcaaugccaccuua

SEQ ID NO: 1327094 - RNA, 19 nt, Homo sapiens
  misc_RNA (1)...(19): siRNA sense strand
aggaagaaauggauucaaa

SEQ ID NO: 1327095 - RNA, 19 nt, Homo sapiens
  misc_RNA (1)...(19): siRNA sense strand
gaaauugaccaagcagauu

SEQ ID NO: 1327096 - RNA, 19 nt, Homo sapiens
  misc_RNA (1)...(19): siRNA sense strand
uaacauccagucucucuaa

SEQ ID NO: 1327097 - RNA, 19 nt, Homo sapiens
  misc_RNA (1)...(19): siRNA sense strand
uaacacaugcacuugauuu

SEQ ID NO: 1327098 - RNA, 19 nt, Homo sapiens
  misc_RNA (1)...(19): siRNA sense strand
cuaaauacaucucuuucug

SEQ ID NO: 1327099 - RNA, 19 nt, Homo sapiens
  misc_RNA (1)...(19): siRNA sense strand
caacaguacuaugguuuau

SEQ ID NO: 1327100 - RNA, 19 nt, Homo sapiens
  misc_RNA (1)...(19): siRNA sense strand
uaaugacagugacuaugua

SEQ ID NO: 1327101 - RNA, 19 nt, Homo sapiens
  misc_RNA (1)...(19): siRNA sense strand
agaaagcugucauuaggaa

SEQ ID NO: 1327102 - RNA, 19 nt, Homo sapiens
  misc_RNA (1)...(19): siRNA sense strand
ugaaauguuugaagcaaga

SEQ ID NO: 1327103 - RNA, 19 nt, Homo sapiens
  misc_RNA (1)...(19): siRNA sense strand
gcacaggucaugcauuuag

SEQ ID NO: 1327104 - RNA, 19 nt, Homo sapiens
  misc_RNA (1)...(19): siRNA sense strand
gagcuggagucaacuaaag

SEQ ID NO: 1327105 - RNA, 19 nt, Homo sapiens
  misc_RNA (1)...(19): siRNA sense strand
gaacaguacaacaucuaaa

SEQ ID NO: 1327106 - RNA, 19 nt, Homo sapiens
  misc_RNA (1)...(19): siRNA sense strand
ggagauuauucuucagaga

SEQ ID NO: 1327107 - RNA, 19 nt, Homo sapiens
  misc_RNA (1)...(19): siRNA sense strand
gaacaggaaagaguacauu

SEQ ID NO: 1327108 - RNA, 19 nt, Homo sapiens
  misc_RNA (1)...(19): siRNA sense strand
ugaagaagugccuaauaua

SEQ ID NO: 1327109 - RNA, 19 nt, Homo sapiens
  misc_RNA (1)...(19): siRNA sense strand
aaacugcuguuguagaaau

SEQ ID NO: 1327110 - RNA, 19 nt, Homo sapiens
  misc_RNA (1)...(19): siRNA sense strand
gaacaagaggaggaagaua

SEQ ID NO: 1327111 - RNA, 19 nt, Homo sapiens
  misc_RNA (1)...(19): siRNA sense strand
cauggugucugggcaguua

SEQ ID NO: 1327112 - RNA, 19 nt, Homo sapiens
  misc_RNA (1)...(19): siRNA sense strand
gcaacuaaauacaucucuu

SEQ ID NO: 1327113 - RNA, 19 nt, Homo sapiens
  misc_RNA (1)...(19): siRNA sense strand
caacauauaccuggagcua

SEQ ID NO: 1327114 - RNA, 19 nt, Homo sapiens
  misc_RNA (1)...(19): siRNA sense strand
ucaaagauaaccaagcuaa

SEQ ID NO: 1327115 - RNA, 19 nt, Homo sapiens
  misc_RNA (1)...(19): siRNA sense strand
uauauucuauguccucuug

SEQ ID NO: 1327116 - RNA, 19 nt, Homo sapiens
  misc_RNA (1)...(19): siRNA sense strand
gcacauguggcgagcaauu

SEQ ID NO: 1327117 - RNA, 19 nt, Homo sapiens
  misc_RNA (1)...(19): siRNA sense strand
ggucauuuaucuauucugu

SEQ ID NO: 1327118 - RNA, 19 nt, Homo sapiens
  misc_RNA (1)...(19): siRNA sense strand
guucaguacucauuucaug

SEQ ID NO: 1327119 - RNA, 19 nt, Homo sapiens
  misc_RNA (1)...(19): siRNA sense strand
agacagucauucaaauuug

SEQ ID NO: 1327120 - RNA, 19 nt, Homo sapiens
  misc_RNA (1)...(19): siRNA sense strand
uuauggagcugucaaagga

SEQ ID NO: 1327121 - RNA, 19 nt, Homo sapiens
  misc_RNA (1)...(19): siRNA sense strand
ggaaggaggugguguaaug

SEQ ID NO: 1327122 - RNA, 19 nt, Homo sapiens
  misc_RNA (1)...(19): siRNA sense strand
gacgaagacugguauauaa

SEQ ID NO: 1327123 - RNA, 19 nt, Homo sapiens
  misc_RNA (1)...(19): siRNA sense strand
ggaaagacgagaacuauuu

SEQ ID NO: 1327124 - RNA, 19 nt, Homo sapiens
  misc_RNA (1)...(19): siRNA sense strand
gaaagacgagaacuauuua

SEQ ID NO: 1327125 - RNA, 19 nt, Homo sapiens
  misc_RNA (1)...(19): siRNA sense strand
caagaacccaggauuaaua

SEQ ID NO: 1327126 - RNA, 19 nt, Homo sapiens
  misc_RNA (1)...(19): siRNA sense strand
ggacgaagacugguauaua

SEQ ID NO: 1327127 - RNA, 19 nt, Homo sapiens
  misc_RNA (1)...(19): siRNA sense strand
gagcaccucugcagcauga

SEQ ID NO: 1327128 - RNA, 19 nt, Homo sapiens
  misc_RNA (1)...(19): siRNA sense strand
gacgagaacuauuuauaug

SEQ ID NO: 1327129 - RNA, 19 nt, Homo sapiens
  misc_RNA (1)...(19): siRNA sense strand
gagagggacucacuuaugg

SEQ ID NO: 1327130 - RNA, 19 nt, Homo sapiens
  misc_RNA (1)...(19): siRNA sense strand
caacuaugguagcacagua

SEQ ID NO: 1327131 - RNA, 19 nt, Homo sapiens
  misc_RNA (1)...(19): siRNA sense strand
gacaagaacccaggauuaa

SEQ ID NO: 1327132 - RNA, 19 nt, Homo sapiens
  misc_RNA (1)...(19): siRNA sense strand
gccgagcuaugagauauua

SEQ ID NO: 1327133 - RNA, 19 nt, Homo sapiens
  misc_RNA (1)...(19): siRNA sense strand
agagucaccugauaugaaa

SEQ ID NO: 1327134 - RNA, 19 nt, Homo sapiens
  misc_RNA (1)...(19): siRNA sense strand
agacaagaacccaggauua

SEQ ID NO: 1327135 - RNA, 19 nt, Homo sapiens
  misc_RNA (1)...(19): siRNA sense strand
gagagaaaaugaaaacuga

SEQ ID NO: 1327136 - RNA, 19 nt, Homo sapiens
  misc_RNA (1)...(19): siRNA sense strand
gcuaugagauauuacuaca

SEQ ID NO: 1327137 - RNA, 19 nt, Homo sapiens
  misc_RNA (1)...(19): siRNA sense strand
gcccgaggauggagagaaa

SEQ ID NO: 1327138 - RNA, 19 nt, Homo sapiens
  misc_RNA (1)...(19): siRNA sense strand
aaacugagccuuccaucau

SEQ ID NO: 1327139 - RNA, 19 nt, Homo sapiens
  misc_RNA (1)...(19): siRNA sense strand
ggacucacuuaugggaauu

SEQ ID NO: 1327140 - RNA, 19 nt, Homo sapiens
  misc_RNA (1)...(19): siRNA sense strand
cagccgagcuaugagauau

SEQ ID NO: 1327141 - RNA, 19 nt, Homo sapiens
  misc_RNA (1)...(19): siRNA sense strand
gcaugaguuugcaggaguu

SEQ ID NO: 1327142 - RNA, 19 nt, Homo sapiens
  misc_RNA (1)...(19): siRNA sense strand
gaaggaggugguguaauga

SEQ ID NO: 1327143 - RNA, 19 nt, Homo sapiens
  misc_RNA (1)...(19): siRNA sense strand
gggacucacuuaugggaau

SEQ ID NO: 1327144 - RNA, 19 nt, Homo sapiens
  misc_RNA (1)...(19): siRNA sense strand
ugucaagacugaacaaacu

SEQ ID NO: 1327145 - RNA, 19 nt, Homo sapiens
  misc_RNA (1)...(19): siRNA sense strand
cgagagggacucacuuaug

SEQ ID NO: 1327146 - RNA, 19 nt, Homo sapiens
  misc_RNA (1)...(19): siRNA sense strand
gaacccaggauuaauaaaa

SEQ ID NO: 1327147 - RNA, 19 nt, Homo sapiens
  misc_RNA (1)...(19): siRNA sense strand
cgagaacuauuuauaugac

SEQ ID NO: 1327148 - RNA, 19 nt, Homo sapiens
  misc_RNA (1)...(19): siRNA sense strand
cagagucaccugauaugaa

SEQ ID NO: 1327149 - RNA, 19 nt, Homo sapiens
  misc_RNA (1)...(19): siRNA sense strand
ccagcuggaugccaauugu

SEQ ID NO: 1327150 - RNA, 19 nt, Homo sapiens
  misc_RNA (1)...(19): siRNA sense strand
cgaagacugguauauaaau

SEQ ID NO: 1327151 - RNA, 19 nt, Homo sapiens
  misc_RNA (1)...(19): siRNA sense strand
gagcuaugagauauuacua

SEQ ID NO: 1327152 - RNA, 19 nt, Homo sapiens
  misc_RNA (1)...(19): siRNA sense strand
gaggugguguaaugaaucu

SEQ ID NO: 1327153 - RNA, 19 nt, Homo sapiens
  misc_RNA (1)...(19): siRNA sense strand
gcagagucaccugauauga

SEQ ID NO: 1327154 - RNA, 19 nt, Homo sapiens
  misc_RNA (1)...(19): siRNA sense strand
acagcagcaugaccuauga

SEQ ID NO: 1327155 - RNA, 19 nt, Homo sapiens
  misc_RNA (1)...(19): siRNA sense strand
gcguguggauggacgaaga

SEQ ID NO: 1327156 - RNA, 19 nt, Homo sapiens
  misc_RNA (1)...(19): siRNA sense strand
ccaauuguaucccuuucca

SEQ ID NO: 1327157 - RNA, 19 nt, Homo sapiens
  misc_RNA (1)...(19): siRNA sense strand
ggcaguggcucagcuaugg

SEQ ID NO: 1327158 - RNA, 19 nt, Homo sapiens
  misc_RNA (1)...(19): siRNA sense strand
uccaagaguucgacaucaa

SEQ ID NO: 1327159 - RNA, 19 nt, Homo sapiens
  misc_RNA (1)...(19): siRNA sense strand
aagaacaacagcagcauga

SEQ ID NO: 1327160 - RNA, 19 nt, Homo sapiens
  misc_RNA (1)...(19): siRNA sense strand
gugcaguagugaccuguuc

SEQ ID NO: 1327161 - RNA, 19 nt, Homo sapiens
  misc_RNA (1)...(19): siRNA sense strand
caaacugagccuuccauca

SEQ ID NO: 1327162 - RNA, 19 nt, Homo sapiens
  misc_RNA (1)...(19): siRNA sense strand
ugcagcaucugaaguggaa

SEQ ID NO: 1327163 - RNA, 19 nt, Homo sapiens
  misc_RNA (1)...(19): siRNA sense strand
ggauggacgaagacuggua

SEQ ID NO: 1327164 - RNA, 19 nt, Homo sapiens
  misc_RNA (1)...(19): siRNA sense strand
aagaacccaggauuaauaa

SEQ ID NO: 1327165 - RNA, 19 nt, Homo sapiens
  misc_RNA (1)...(19): siRNA sense strand
ggaauucauccgcgacauc

SEQ ID NO: 1327166 - RNA, 19 nt, Homo sapiens
  misc_RNA (1)...(19): siRNA sense strand
uauaugacaccaacuaugg

SEQ ID NO: 1327167 - RNA, 19 nt, Homo sapiens
  misc_RNA (1)...(19): siRNA sense strand
ccucaguacuggaccaagu

SEQ ID NO: 1327168 - RNA, 19 nt, Homo sapiens
  misc_RNA (1)...(19): siRNA sense strand
ucacuuaugggaauucauc

SEQ ID NO: 1327169 - RNA, 19 nt, Homo sapiens
  misc_RNA (1)...(19): siRNA sense strand
gauggacgaagacugguau

SEQ ID NO: 1327170 - RNA, 19 nt, Homo sapiens
  misc_RNA (1)...(19): siRNA sense strand
gaaauucauccucaguacu

SEQ ID NO: 1327171 - RNA, 19 nt, Homo sapiens
  misc_RNA (1)...(19): siRNA sense strand
gcucagcuaugggguaaaa

SEQ ID NO: 1327172 - RNA, 19 nt, Homo sapiens
  misc_RNA (1)...(19): siRNA sense strand
gaacggccagugcaguagu

SEQ ID NO: 1327173 - RNA, 19 nt, Homo sapiens
  misc_RNA (1)...(19): siRNA sense strand
gagggcgucuucagguucu

SEQ ID NO: 1327174 - RNA, 19 nt, Homo sapiens
  misc_RNA (1)...(19): siRNA sense strand
ggaggugguguaaugaauc

SEQ ID NO: 1327175 - RNA, 19 nt, Homo sapiens
  misc_RNA (1)...(19): siRNA sense strand
caucaugaacaccuggaaa

SEQ ID NO: 1327176 - RNA, 19 nt, Homo sapiens
  misc_RNA (1)...(19): siRNA sense strand
gaacaaacugagccuucca

SEQ ID NO: 1327177 - RNA, 19 nt, Homo sapiens
  misc_RNA (1)...(19): siRNA sense strand
cccgagagggacucacuua

SEQ ID NO: 1327178 - RNA, 19 nt, Homo sapiens
  misc_RNA (1)...(19): siRNA sense strand
caacuugcagcaucugaag

SEQ ID NO: 1327179 - RNA, 19 nt, Homo sapiens
  misc_RNA (1)...(19): siRNA sense strand
ucagguucuugaaaucaga

SEQ ID NO: 1327180 - RNA, 19 nt, Homo sapiens
  misc_RNA (1)...(19): siRNA sense strand
cagacaagaacccaggauu

SEQ ID NO: 1327181 - RNA, 19 nt, Homo sapiens
  misc_RNA (1)...(19): siRNA sense strand
caauguuuccaguggguuu

SEQ ID NO: 1327182 - RNA, 19 nt, Homo sapiens
  misc_RNA (1)...(19): siRNA sense strand
caacagcagcaugaccuau

SEQ ID NO: 1327183 - RNA, 19 nt, Homo sapiens
  misc_RNA (1)...(19): siRNA sense strand
uggaacggccagugcagua

SEQ ID NO: 1327184 - RNA, 19 nt, Homo sapiens
  misc_RNA (1)...(19): siRNA sense strand
ucaagacugaacaaacuga

SEQ ID NO: 1327185 - RNA, 19 nt, Homo sapiens
  misc_RNA (1)...(19): siRNA sense strand
gcgagcaccucugcagcau

SEQ ID NO: 1327186 - RNA, 19 nt, Homo sapiens
  misc_RNA (1)...(19): siRNA sense strand
aaauucauccucaguacug

SEQ ID NO: 1327187 - RNA, 19 nt, Homo sapiens
  misc_RNA (1)...(19): siRNA sense strand
acugagccuuccaucauga

SEQ ID NO: 1327188 - RNA, 19 nt, Homo sapiens
  misc_RNA (1)...(19): siRNA sense strand
ccuggaaagacgagaacua

SEQ ID NO: 1327189 - RNA, 19 nt, Homo sapiens
  misc_RNA (1)...(19): siRNA sense strand
ggagagaaaaugaaaacug

SEQ ID NO: 1327190 - RNA, 19 nt, Homo sapiens
  misc_RNA (1)...(19): siRNA sense strand
acgaagacugguauauaaa

SEQ ID NO: 1327191 - RNA, 19 nt, Homo sapiens
  misc_RNA (1)...(19): siRNA sense strand
acaagaacccaggauuaau

SEQ ID NO: 1327192 - RNA, 19 nt, Homo sapiens
  misc_RNA (1)...(19): siRNA sense strand
aggaggugguguaaugaau

SEQ ID NO: 1327193 - RNA, 19 nt, Homo sapiens
  misc_RNA (1)...(19): siRNA sense strand
cagcuggaugccaauugua

SEQ ID NO: 1327194 - RNA, 19 nt, Homo sapiens
  misc_RNA (1)...(19): siRNA sense strand
gaggauggagagaaaauga

SEQ ID NO: 1327195 - RNA, 19 nt, Homo sapiens
  misc_RNA (1)...(19): siRNA sense strand
ggcagcuccucuacagcaa

SEQ ID NO: 1327196 - RNA, 19 nt, Homo sapiens
  misc_RNA (1)...(19): siRNA sense strand
ggacaccaaccagcuggau

SEQ ID NO: 1327197 - RNA, 19 nt, Homo sapiens
  misc_RNA (1)...(19): siRNA sense strand
ggaaggaggugguguaaug

SEQ ID NO: 1327198 - RNA, 19 nt, Homo sapiens
  misc_RNA (1)...(19): siRNA sense strand
gacgaagacugguauauaa

SEQ ID NO: 1327199 - RNA, 19 nt, Homo sapiens
  misc_RNA (1)...(19): siRNA sense strand
ggaaagacgagaacuauuu

SEQ ID NO: 1327200 - RNA, 19 nt, Homo sapiens
  misc_RNA (1)...(19): siRNA sense strand
gaaagacgagaacuauuua

SEQ ID NO: 1327201 - RNA, 19 nt, Homo sapiens
  misc_RNA (1)...(19): siRNA sense strand
caagaacccaggauuaaua

SEQ ID NO: 1327202 - RNA, 19 nt, Homo sapiens
  misc_RNA (1)...(19): siRNA sense strand
ggacgaagacugguauaua

SEQ ID NO: 1327203 - RNA, 19 nt, Homo sapiens
  misc_RNA (1)...(19): siRNA sense strand
gagcaccucugcagcauga

SEQ ID NO: 1327204 - RNA, 19 nt, Homo sapiens
  misc_RNA (1)...(19): siRNA sense strand
gacgagaacuauuuauaug

SEQ ID NO: 1327205 - RNA, 19 nt, Homo sapiens
  misc_RNA (1)...(19): siRNA sense strand
gagagggacucacuuaugg

SEQ ID NO: 1327206 - RNA, 19 nt, Homo sapiens
  misc_RNA (1)...(19): siRNA sense strand
caacuaugguagcacagua

SEQ ID NO: 1327207 - RNA, 19 nt, Homo sapiens
  misc_RNA (1)...(19): siRNA sense strand
gacaagaacccaggauuaa

SEQ ID NO: 1327208 - RNA, 19 nt, Homo sapiens
  misc_RNA (1)...(19): siRNA sense strand
gccgagcuaugagauauua

SEQ ID NO: 1327209 - RNA, 19 nt, Homo sapiens
  misc_RNA (1)...(19): siRNA sense strand
agagucaccugauaugaaa

SEQ ID NO: 1327210 - RNA, 19 nt, Homo sapiens
  misc_RNA (1)...(19): siRNA sense strand
agacaagaacccaggauua

SEQ ID NO: 1327211 - RNA, 19 nt, Homo sapiens
  misc_RNA (1)...(19): siRNA sense strand
gagagaaaaugaaaacuga

SEQ ID NO: 1327212 - RNA, 19 nt, Homo sapiens
  misc_RNA (1)...(19): siRNA sense strand
gcuaugagauauuacuaca

SEQ ID NO: 1327213 - RNA, 19 nt, Homo sapiens
  misc_RNA (1)...(19): siRNA sense strand
gcccgaggauggagagaaa

SEQ ID NO: 1327214 - RNA, 19 nt, Homo sapiens
  misc_RNA (1)...(19): siRNA sense strand
aaacugagccuuccaucau

SEQ ID NO: 1327215 - RNA, 19 nt, Homo sapiens
  misc_RNA (1)...(19): siRNA sense strand
ggacucacuuaugggaauu

SEQ ID NO: 1327216 - RNA, 19 nt, Homo sapiens
  misc_RNA (1)...(19): siRNA sense strand
cagccgagcuaugagauau

SEQ ID NO: 1327217 - RNA, 19 nt, Homo sapiens
  misc_RNA (1)...(19): siRNA sense strand
gcaugaguuugcaggaguu

SEQ ID NO: 1327218 - RNA, 19 nt, Homo sapiens
  misc_RNA (1)...(19): siRNA sense strand
gaaggaggugguguaauga

SEQ ID NO: 1327219 - RNA, 19 nt, Homo sapiens
  misc_RNA (1)...(19): siRNA sense strand
gggacucacuuaugggaau

SEQ ID NO: 1327220 - RNA, 19 nt, Homo sapiens
  misc_RNA (1)...(19): siRNA sense strand
ugucaagacugaacaaacu

SEQ ID NO: 1327221 - RNA, 19 nt, Homo sapiens
  misc_RNA (1)...(19): siRNA sense strand
cgagagggacucacuuaug

SEQ ID NO: 1327222 - RNA, 19 nt, Homo sapiens
  misc_RNA (1)...(19): siRNA sense strand
gaacccaggauuaauaaaa

SEQ ID NO: 1327223 - RNA, 19 nt, Homo sapiens
  misc_RNA (1)...(19): siRNA sense strand
cgagaacuauuuauaugac

SEQ ID NO: 1327224 - RNA, 19 nt, Homo sapiens
  misc_RNA (1)...(19): siRNA sense strand
cagagucaccugauaugaa

SEQ ID NO: 1327225 - RNA, 19 nt, Homo sapiens
  misc_RNA (1)...(19): siRNA sense strand
ccagcuggaugccaauugu

SEQ ID NO: 1327226 - RNA, 19 nt, Homo sapiens
  misc_RNA (1)...(19): siRNA sense strand
cgaagacugguauauaaau

SEQ ID NO: 1327227 - RNA, 19 nt, Homo sapiens
  misc_RNA (1)...(19): siRNA sense strand
gagcuaugagauauuacua

SEQ ID NO: 1327228 - RNA, 19 nt, Homo sapiens
  misc_RNA (1)...(19): siRNA sense strand
gaggugguguaaugaaucu

SEQ ID NO: 1327229 - RNA, 19 nt, Homo sapiens
  misc_RNA (1)...(19): siRNA sense strand
gcagagucaccugauauga

SEQ ID NO: 1327230 - RNA, 19 nt, Homo sapiens
  misc_RNA (1)...(19): siRNA sense strand
acagcagcaugaccuauga

SEQ ID NO: 1327231 - RNA, 19 nt, Homo sapiens
  misc_RNA (1)...(19): siRNA sense strand
gcguguggauggacgaaga

SEQ ID NO: 1327232 - RNA, 19 nt, Homo sapiens
  misc_RNA (1)...(19): siRNA sense strand
ccaauuguaucccuuucca

SEQ ID NO: 1327233 - RNA, 19 nt, Homo sapiens
  misc_RNA (1)...(19): siRNA sense strand
ggcaguggcucagcuaugg

SEQ ID NO: 1327234 - RNA, 19 nt, Homo sapiens
  misc_RNA (1)...(19): siRNA sense strand
uccaagaguucgacaucaa

SEQ ID NO: 1327235 - RNA, 19 nt, Homo sapiens
  misc_RNA (1)...(19): siRNA sense strand
aagaacaacagcagcauga

SEQ ID NO: 1327236 - RNA, 19 nt, Homo sapiens
  misc_RNA (1)...(19): siRNA sense strand
gugcaguagugaccuguuc

SEQ ID NO: 1327237 - RNA, 19 nt, Homo sapiens
  misc_RNA (1)...(19): siRNA sense strand
caaacugagccuuccauca

SEQ ID NO: 1327238 - RNA, 19 nt, Homo sapiens
  misc_RNA (1)...(19): siRNA sense strand
ugcagcaucugaaguggaa

SEQ ID NO: 1327239 - RNA, 19 nt, Homo sapiens
  misc_RNA (1)...(19): siRNA sense strand
ggauggacgaagacuggua

SEQ ID NO: 1327240 - RNA, 19 nt, Homo sapiens
  misc_RNA (1)...(19): siRNA sense strand
aagaacccaggauuaauaa

SEQ ID NO: 1327241 - RNA, 19 nt, Homo sapiens
  misc_RNA (1)...(19): siRNA sense strand
ggaauucauccgcgacauc

SEQ ID NO: 1327242 - RNA, 19 nt, Homo sapiens
  misc_RNA (1)...(19): siRNA sense strand
uauaugacaccaacuaugg

SEQ ID NO: 1327243 - RNA, 19 nt, Homo sapiens
  misc_RNA (1)...(19): siRNA sense strand
ccucaguacuggaccaagu

SEQ ID NO: 1327244 - RNA, 19 nt, Homo sapiens
  misc_RNA (1)...(19): siRNA sense strand
ucacuuaugggaauucauc

SEQ ID NO: 1327245 - RNA, 19 nt, Homo sapiens
  misc_RNA (1)...(19): siRNA sense strand
gauggacgaagacugguau

SEQ ID NO: 1327246 - RNA, 19 nt, Homo sapiens
  misc_RNA (1)...(19): siRNA sense strand
gaaauucauccucaguacu

SEQ ID NO: 1327247 - RNA, 19 nt, Homo sapiens
  misc_RNA (1)...(19): siRNA sense strand
gcucagcuaugggguaaaa

SEQ ID NO: 1327248 - RNA, 19 nt, Homo sapiens
  misc_RNA (1)...(19): siRNA sense strand
gaacggccagugcaguagu

SEQ ID NO: 1327249 - RNA, 19 nt, Homo sapiens
  misc_RNA (1)...(19): siRNA sense strand
gagggcgucuucagguucu

SEQ ID NO: 1327250 - RNA, 19 nt, Homo sapiens
  misc_RNA (1)...(19): siRNA sense strand
ggaggugguguaaugaauc

SEQ ID NO: 1327251 - RNA, 19 nt, Homo sapiens
  misc_RNA (1)...(19): siRNA sense strand
caucaugaacaccuggaaa

SEQ ID NO: 1327252 - RNA, 19 nt, Homo sapiens
  misc_RNA (1)...(19): siRNA sense strand
gaacaaacugagccuucca

SEQ ID NO: 1327253 - RNA, 19 nt, Homo sapiens
  misc_RNA (1)...(19): siRNA sense strand
cccgagagggacucacuua

SEQ ID NO: 1327254 - RNA, 19 nt, Homo sapiens
  misc_RNA (1)...(19): siRNA sense strand
caacuugcagcaucugaag

SEQ ID NO: 1327255 - RNA, 19 nt, Homo sapiens
  misc_RNA (1)...(19): siRNA sense strand
ucagguucuugaaaucaga

SEQ ID NO: 1327256 - RNA, 19 nt, Homo sapiens
  misc_RNA (1)...(19): siRNA sense strand
cagacaagaacccaggauu

SEQ ID NO: 1327257 - RNA, 19 nt, Homo sapiens
  misc_RNA (1)...(19): siRNA sense strand
caauguuuccaguggguuu

SEQ ID NO: 1327258 - RNA, 19 nt, Homo sapiens
  misc_RNA (1)...(19): siRNA sense strand
caacagcagcaugaccuau

SEQ ID NO: 1327259 - RNA, 19 nt, Homo sapiens
  misc_RNA (1)...(19): siRNA sense strand
uggaacggccagugcagua

SEQ ID NO: 1327260 - RNA, 19 nt, Homo sapiens
  misc_RNA (1)...(19): siRNA sense strand
ucaagacugaacaaacuga

SEQ ID NO: 1327261 - RNA, 19 nt, Homo sapiens
  misc_RNA (1)...(19): siRNA sense strand
gcgagcaccucugcagcau

SEQ ID NO: 1327262 - RNA, 19 nt, Homo sapiens
  misc_RNA (1)...(19): siRNA sense strand
aaauucauccucaguacug

SEQ ID NO: 1327263 - RNA, 19 nt, Homo sapiens
  misc_RNA (1)...(19): siRNA sense strand
acugagccuuccaucauga

SEQ ID NO: 1327264 - RNA, 19 nt, Homo sapiens
  misc_RNA (1)...(19): siRNA sense strand
ccuggaaagacgagaacua

SEQ ID NO: 1327265 - RNA, 19 nt, Homo sapiens
  misc_RNA (1)...(19): siRNA sense strand
ggagagaaaaugaaaacug

SEQ ID NO: 1327266 - RNA, 19 nt, Homo sapiens
  misc_RNA (1)...(19): siRNA sense strand
acgaagacugguauauaaa

SEQ ID NO: 1327267 - RNA, 19 nt, Homo sapiens
  misc_RNA (1)...(19): siRNA sense strand
acaagaacccaggauuaau

SEQ ID NO: 1327268 - RNA, 19 nt, Homo sapiens
  misc_RNA (1)...(19): siRNA sense strand
aggaggugguguaaugaau

SEQ ID NO: 1327269 - RNA, 19 nt, Homo sapiens
  misc_RNA (1)...(19): siRNA sense strand
cagcuggaugccaauugua

SEQ ID NO: 1327270 - RNA, 19 nt, Homo sapiens
  misc_RNA (1)...(19): siRNA sense strand
gaggauggagagaaaauga

SEQ ID NO: 1327271 - RNA, 19 nt, Homo sapiens
  misc_RNA (1)...(19): siRNA sense strand
ggcagcuccucuacagcaa

SEQ ID NO: 1327272 - RNA, 19 nt, Homo sapiens
  misc_RNA (1)...(19): siRNA sense strand
ggacaccaaccagcuggau

SEQ ID NO: 1327273 - RNA, 19 nt, Homo sapiens
  misc_RNA (1)...(19): siRNA sense strand
gaagugaggucauccuuga

SEQ ID NO: 1327274 - RNA, 19 nt, Homo sapiens
  misc_RNA (1)...(19): siRNA sense strand
gaacaucacugcuuguaag

SEQ ID NO: 1327275 - RNA, 19 nt, Homo sapiens
  misc_RNA (1)...(19): siRNA sense strand
gaacacagucuauuucauu

SEQ ID NO: 1327276 - RNA, 19 nt, Homo sapiens
  misc_RNA (1)...(19): siRNA sense strand
gcagggaucuaucuaaugu

SEQ ID NO: 1327277 - RNA, 19 nt, Homo sapiens
  misc_RNA (1)...(19): siRNA sense strand
uuaagguucuugugguuua

SEQ ID NO: 1327278 - RNA, 19 nt, Homo sapiens
  misc_RNA (1)...(19): siRNA sense strand
ccaaugacgucaacagugu

SEQ ID NO: 1327279 - RNA, 19 nt, Homo sapiens
  misc_RNA (1)...(19): siRNA sense strand
gaaaggaucaagaagacuu

SEQ ID NO: 1327280 - RNA, 19 nt, Homo sapiens
  misc_RNA (1)...(19): siRNA sense strand
acaaauacgugguggucua

SEQ ID NO: 1327281 - RNA, 19 nt, Homo sapiens
  misc_RNA (1)...(19): siRNA sense strand
auacauggcucuuauccaa

SEQ ID NO: 1327282 - RNA, 19 nt, Homo sapiens
  misc_RNA (1)...(19): siRNA sense strand
gcuacaacaugaucuaauc

SEQ ID NO: 1327283 - RNA, 19 nt, Homo sapiens
  misc_RNA (1)...(19): siRNA sense strand
gaugguaccuguggcaaga

SEQ ID NO: 1327284 - RNA, 19 nt, Homo sapiens
  misc_RNA (1)...(19): siRNA sense strand
cgacauaaaggaacaguug

SEQ ID NO: 1327285 - RNA, 19 nt, Homo sapiens
  misc_RNA (1)...(19): siRNA sense strand
acagauacauggcucuuau

SEQ ID NO: 1327286 - RNA, 19 nt, Homo sapiens
  misc_RNA (1)...(19): siRNA sense strand
gaaacaaacgcgagcuuca

SEQ ID NO: 1327287 - RNA, 19 nt, Homo sapiens
  misc_RNA (1)...(19): siRNA sense strand
aaagaaggcagcagacaaa

SEQ ID NO: 1327288 - RNA, 19 nt, Homo sapiens
  misc_RNA (1)...(19): siRNA sense strand
gaaggcagcagacaaaguc

SEQ ID NO: 1327289 - RNA, 19 nt, Homo sapiens
  misc_RNA (1)...(19): siRNA sense strand
uuacccaucugaaauaugu

SEQ ID NO: 1327290 - RNA, 19 nt, Homo sapiens
  misc_RNA (1)...(19): siRNA sense strand
gaagaaugaggagacagua

SEQ ID NO: 1327291 - RNA, 19 nt, Homo sapiens
  misc_RNA (1)...(19): siRNA sense strand
ccaaguaccaccucaugaa

SEQ ID NO: 1327292 - RNA, 19 nt, Homo sapiens
  misc_RNA (1)...(19): siRNA sense strand
ggaugccacugcuuucugu

SEQ ID NO: 1327293 - RNA, 19 nt, Homo sapiens
  misc_RNA (1)...(19): siRNA sense strand
cagaguggaugcuacaaca

SEQ ID NO: 1327294 - RNA, 19 nt, Homo sapiens
  misc_RNA (1)...(19): siRNA sense strand
ugaaggaugccacugcuuu

SEQ ID NO: 1327295 - RNA, 19 nt, Homo sapiens
  misc_RNA (1)...(19): siRNA sense strand
gguuuacccaucugaaaua

SEQ ID NO: 1327296 - RNA, 19 nt, Homo sapiens
  misc_RNA (1)...(19): siRNA sense strand
gcaaauaugaaugaagaug

SEQ ID NO: 1327297 - RNA, 19 nt, Homo sapiens
  misc_RNA (1)...(19): siRNA sense strand
caucacugcuuguaagaag

SEQ ID NO: 1327298 - RNA, 19 nt, Homo sapiens
  misc_RNA (1)...(19): siRNA sense strand
caauguggcucugaaacug

SEQ ID NO: 1327299 - RNA, 19 nt, Homo sapiens
  misc_RNA (1)...(19): siRNA sense strand
gaaugaggagacaguagaa

SEQ ID NO: 1327300 - RNA, 19 nt, Homo sapiens
  misc_RNA (1)...(19): siRNA sense strand
gagcugaacacagucuauu

SEQ ID NO: 1327301 - RNA, 19 nt, Homo sapiens
  misc_RNA (1)...(19): siRNA sense strand
cuaagaagccagauucauc

SEQ ID NO: 1327302 - RNA, 19 nt, Homo sapiens
  misc_RNA (1)...(19): siRNA sense strand
cauuaagguucuugugguu

SEQ ID NO: 1327303 - RNA, 19 nt, Homo sapiens
  misc_RNA (1)...(19): siRNA sense strand
aaagcaacuuccaguccua

SEQ ID NO: 1327304 - RNA, 19 nt, Homo sapiens
  misc_RNA (1)...(19): siRNA sense strand
uaagaagaaugaggagaca

SEQ ID NO: 1327305 - RNA, 19 nt, Homo sapiens
  misc_RNA (1)...(19): siRNA sense strand
guagaaccuguuacaacua

SEQ ID NO: 1327306 - RNA, 19 nt, Homo sapiens
  misc_RNA (1)...(19): siRNA sense strand
gaaggaugccacugcuuuc

SEQ ID NO: 1327307 - RNA, 19 nt, Homo sapiens
  misc_RNA (1)...(19): siRNA sense strand
caaagucgucuuccuucuu

SEQ ID NO: 1327308 - RNA, 19 nt, Homo sapiens
  misc_RNA (1)...(19): siRNA sense strand
uggcagggaucuaucuaau

SEQ ID NO: 1327309 - RNA, 19 nt, Homo sapiens
  misc_RNA (1)...(19): siRNA sense strand
gcgacugcauccgacauaa

SEQ ID NO: 1327310 - RNA, 19 nt, Homo sapiens
  misc_RNA (1)...(19): siRNA sense strand
uagaaccuguuacaacuag

SEQ ID NO: 1327311 - RNA, 19 nt, Homo sapiens
  misc_RNA (1)...(19): siRNA sense strand
gaguagaaccuguuacaac

SEQ ID NO: 1327312 - RNA, 19 nt, Homo sapiens
  misc_RNA (1)...(19): siRNA sense strand
guugaaggccaccaagauu

SEQ ID NO: 1327313 - RNA, 19 nt, Homo sapiens
  misc_RNA (1)...(19): siRNA sense strand
gcugaacacagucuauuuc

SEQ ID NO: 1327314 - RNA, 19 nt, Homo sapiens
  misc_RNA (1)...(19): siRNA sense strand
gaggagacaguagaaguga

SEQ ID NO: 1327315 - RNA, 19 nt, Homo sapiens
  misc_RNA (1)...(19): siRNA sense strand
gauccgaacaucacugcuu

SEQ ID NO: 1327316 - RNA, 19 nt, Homo sapiens
  misc_RNA (1)...(19): siRNA sense strand
ugaaggccaccaagauuug

SEQ ID NO: 1327317 - RNA, 19 nt, Homo sapiens
  misc_RNA (1)...(19): siRNA sense strand
gcccauaauauuccuaaug

SEQ ID NO: 1327318 - RNA, 19 nt, Homo sapiens
  misc_RNA (1)...(19): siRNA sense strand
ugugugaggugcaauuaca

SEQ ID NO: 1327319 - RNA, 19 nt, Homo sapiens
  misc_RNA (1)...(19): siRNA sense strand
gaaccuguuacaacuagug

SEQ ID NO: 1327320 - RNA, 19 nt, Homo sapiens
  misc_RNA (1)...(19): siRNA sense strand
gauggcugcugcuccuugu

SEQ ID NO: 1327321 - RNA, 19 nt, Homo sapiens
  misc_RNA (1)...(19): siRNA sense strand
gagagccgaccguucaaug

SEQ ID NO: 1327322 - RNA, 19 nt, Homo sapiens
  misc_RNA (1)...(19): siRNA sense strand
cccauaauauuccuaaugc

SEQ ID NO: 1327323 - RNA, 19 nt, Homo sapiens
  misc_RNA (1)...(19): siRNA sense strand
gaugcuacaacaugaucua

SEQ ID NO: 1327324 - RNA, 19 nt, Homo sapiens
  misc_RNA (1)...(19): siRNA sense strand
gaguggaugcuacaacaug

SEQ ID NO: 1327325 - RNA, 19 nt, Homo sapiens
  misc_RNA (1)...(19): siRNA sense strand
gcacgaaaggaucaagaag

SEQ ID NO: 1327326 - RNA, 19 nt, Homo sapiens
  misc_RNA (1)...(19): siRNA sense strand
cgacugcauccgacauaaa

SEQ ID NO: 1327327 - RNA, 19 nt, Homo sapiens
  misc_RNA (1)...(19): siRNA sense strand
gcccuuccaugucugugaa

SEQ ID NO: 1327328 - RNA, 19 nt, Homo sapiens
  misc_RNA (1)...(19): siRNA sense strand
aguagaaccuguuacaacu

SEQ ID NO: 1327329 - RNA, 19 nt, Homo sapiens
  misc_RNA (1)...(19): siRNA sense strand
uuucugcagugaucuaaga

SEQ ID NO: 1327330 - RNA, 19 nt, Homo sapiens
  misc_RNA (1)...(19): siRNA sense strand
cgaacaucacugcuuguaa

SEQ ID NO: 1327331 - RNA, 19 nt, Homo sapiens
  misc_RNA (1)...(19): siRNA sense strand
gagccgaccguucaaugug

SEQ ID NO: 1327332 - RNA, 19 nt, Homo sapiens
  misc_RNA (1)...(19): siRNA sense strand
gagcuucaguggugauucc

SEQ ID NO: 1327333 - RNA, 19 nt, Homo sapiens
  misc_RNA (1)...(19): siRNA sense strand
gcugugugaggugcaauua

SEQ ID NO: 1327334 - RNA, 19 nt, Homo sapiens
  misc_RNA (1)...(19): siRNA sense strand
acaggggacuauucaauuu

SEQ ID NO: 1327335 - RNA, 19 nt, Homo sapiens
  misc_RNA (1)...(19): siRNA sense strand
cacgaaaggaucaagaaga

SEQ ID NO: 1327336 - RNA, 19 nt, Homo sapiens
  misc_RNA (1)...(19): siRNA sense strand
acaaacaggcgucccuuuc

SEQ ID NO: 1327337 - RNA, 19 nt, Homo sapiens
  misc_RNA (1)...(19): siRNA sense strand
cauccgacauaaaggaaca

SEQ ID NO: 1327338 - RNA, 19 nt, Homo sapiens
  misc_RNA (1)...(19): siRNA sense strand
acauggcucuuauccaaca

SEQ ID NO: 1327339 - RNA, 19 nt, Homo sapiens
  misc_RNA (1)...(19): siRNA sense strand
agaaugaggagacaguaga

SEQ ID NO: 1327340 - RNA, 19 nt, Homo sapiens
  misc_RNA (1)...(19): siRNA sense strand
cagaggccuuccagacuca

SEQ ID NO: 1327341 - RNA, 19 nt, Homo sapiens
  misc_RNA (1)...(19): siRNA sense strand
gccagcauccgcuuguuga

SEQ ID NO: 1327342 - RNA, 19 nt, Homo sapiens
  misc_RNA (1)...(19): siRNA sense strand
aacacagucuauuucauug

SEQ ID NO: 1327343 - RNA, 19 nt, Homo sapiens
  misc_RNA (1)...(19): siRNA sense strand
gccuagaccacauaaugaa

SEQ ID NO: 1327344 - RNA, 19 nt, Homo sapiens
  misc_RNA (1)...(19): siRNA sense strand
acgaaaggaucaagaagac

SEQ ID NO: 1327345 - RNA, 19 nt, Homo sapiens
  misc_RNA (1)...(19): siRNA sense strand
uugaaggccaccaagauuu

SEQ ID NO: 1327346 - RNA, 19 nt, Homo sapiens
  misc_RNA (1)...(19): siRNA sense strand
aguaccaccucaugaagga

SEQ ID NO: 1327347 - RNA, 19 nt, Homo sapiens
  misc_RNA (1)...(19): siRNA sense strand
caaguaccaccucaugaag

SEQ ID NO: 1327348 - RNA, 19 nt, Homo sapiens
  misc_RNA (1)...(19): siRNA sense strand
gggcccauaauauuccuaa

SEQ ID NO: 1327349 - RNA, 19 nt, Homo sapiens
  misc_RNA (1)...(19): siRNA sense strand
gagggcagucccagugaga

SEQ ID NO: 1327350 - RNA, 19 nt, Homo sapiens
  misc_RNA (1)...(19): siRNA sense strand
aguggaugcuacaacauga

SEQ ID NO: 1327351 - RNA, 19 nt, Homo sapiens
  misc_RNA (1)...(19): siRNA sense strand
caaaaccauugcagaagug

SEQ ID NO: 1327352 - RNA, 19 nt, Homo sapiens
  misc_RNA (1)...(19): siRNA sense strand
caauuuguuacuucacuga

SEQ ID NO: 1327353 - RNA, 19 nt, Homo sapiens
  misc_RNA (1)...(19): siRNA sense strand
guuuacccaucugaaauau

SEQ ID NO: 1327354 - RNA, 19 nt, Homo sapiens
  misc_RNA (1)...(19): siRNA sense strand
ccacaccagaagaaacaaa

SEQ ID NO: 1327355 - RNA, 19 nt, Homo sapiens
  misc_RNA (1)...(19): siRNA sense strand
ggagacaguagaagugaac

SEQ ID NO: 1327356 - RNA, 19 nt, Homo sapiens
  misc_RNA (1)...(19): siRNA sense strand
ucacugcuuguaagaagaa

SEQ ID NO: 1327357 - RNA, 19 nt, Homo sapiens
  misc_RNA (1)...(19): siRNA sense strand
ccgaacaucacugcuugua

SEQ ID NO: 1327358 - RNA, 19 nt, Homo sapiens
  misc_RNA (1)...(19): siRNA sense strand
gaaggccaccaagauuugu

SEQ ID NO: 1327359 - RNA, 19 nt, Homo sapiens
  misc_RNA (1)...(19): siRNA sense strand
gaauguaagcuggguacuc

SEQ ID NO: 1327360 - RNA, 19 nt, Homo sapiens
  misc_RNA (1)...(19): siRNA sense strand
gugguuuacccaucugaaa

SEQ ID NO: 1327361 - RNA, 19 nt, Homo sapiens
  misc_RNA (1)...(19): siRNA sense strand
ugaggagacaguagaagug

SEQ ID NO: 1327362 - RNA, 19 nt, Homo sapiens
  misc_RNA (1)...(19): siRNA sense strand
cugccuagaccacauaaug

SEQ ID NO: 1327363 - RNA, 19 nt, Homo sapiens
  misc_RNA (1)...(19): siRNA sense strand
acaaagucgucuuccuucu

SEQ ID NO: 1327364 - RNA, 19 nt, Homo sapiens
  misc_RNA (1)...(19): siRNA sense strand
ucaaaaccauugcagaagu

SEQ ID NO: 1327365 - RNA, 19 nt, Homo sapiens
  misc_RNA (1)...(19): siRNA sense strand
ggcacgaaaggaucaagaa

SEQ ID NO: 1327366 - RNA, 19 nt, Homo sapiens
  misc_RNA (1)...(19): siRNA sense strand
cuagaccacauaaugaaau

SEQ ID NO: 1327367 - RNA, 19 nt, Homo sapiens
  misc_RNA (1)...(19): siRNA sense strand
caacaggggacuauucaau

SEQ ID NO: 1327368 - RNA, 19 nt, Homo sapiens
  misc_RNA (1)...(19): siRNA sense strand
aauacgugguggucuacuu

SEQ ID NO: 1327369 - RNA, 19 nt, Homo sapiens
  misc_RNA (1)...(19): siRNA sense strand
cgucuuccuucuuuccaau

SEQ ID NO: 1327370 - RNA, 19 nt, Homo sapiens
  misc_RNA (1)...(19): siRNA sense strand
ccuagaccacauaaugaaa

SEQ ID NO: 1327371 - RNA, 19 nt, Homo sapiens
  misc_RNA (1)...(19): siRNA sense strand
ggcagggaucuaucuaaug

SEQ ID NO: 1327372 - RNA, 19 nt, Homo sapiens
  misc_RNA (1)...(19): siRNA sense strand
auacgugguggucuacuuu

SEQ ID NO: 1327373 - RNA, 19 nt, Homo sapiens
  misc_RNA (1)...(19): siRNA sense strand
gaacaucacugcuuguaag

SEQ ID NO: 1327374 - RNA, 19 nt, Homo sapiens
  misc_RNA (1)...(19): siRNA sense strand
gaacacagucuauuucauu

SEQ ID NO: 1327375 - RNA, 19 nt, Homo sapiens
  misc_RNA (1)...(19): siRNA sense strand
auacauggcucuuauccaa

SEQ ID NO: 1327376 - RNA, 19 nt, Homo sapiens
  misc_RNA (1)...(19): siRNA sense strand
gcuacaacaugaucuaauc

SEQ ID NO: 1327377 - RNA, 19 nt, Homo sapiens
  misc_RNA (1)...(19): siRNA sense strand
acagauacauggcucuuau

SEQ ID NO: 1327378 - RNA, 19 nt, Homo sapiens
  misc_RNA (1)...(19): siRNA sense strand
gaaacaaacgcgagcuuca

SEQ ID NO: 1327379 - RNA, 19 nt, Homo sapiens
  misc_RNA (1)...(19): siRNA sense strand
gaagaaugaggagacagua

SEQ ID NO: 1327380 - RNA, 19 nt, Homo sapiens
  misc_RNA (1)...(19): siRNA sense strand
cagaguggaugcuacaaca

SEQ ID NO: 1327381 - RNA, 19 nt, Homo sapiens
  misc_RNA (1)...(19): siRNA sense strand
gcaaauaugaaugaagaug

SEQ ID NO: 1327382 - RNA, 19 nt, Homo sapiens
  misc_RNA (1)...(19): siRNA sense strand
caauguggcucugaaacug

SEQ ID NO: 1327383 - RNA, 19 nt, Homo sapiens
  misc_RNA (1)...(19): siRNA sense strand
caucacugcuuguaagaag

SEQ ID NO: 1327384 - RNA, 19 nt, Homo sapiens
  misc_RNA (1)...(19): siRNA sense strand
gaaugaggagacaguagaa

SEQ ID NO: 1327385 - RNA, 19 nt, Homo sapiens
  misc_RNA (1)...(19): siRNA sense strand
gagcugaacacagucuauu

SEQ ID NO: 1327386 - RNA, 19 nt, Homo sapiens
  misc_RNA (1)...(19): siRNA sense strand
aaagcaacuuccaguccua

SEQ ID NO: 1327387 - RNA, 19 nt, Homo sapiens
  misc_RNA (1)...(19): siRNA sense strand
uaagaagaaugaggagaca

SEQ ID NO: 1327388 - RNA, 19 nt, Homo sapiens
  misc_RNA (1)...(19): siRNA sense strand
guagaaccuguuacaacua

SEQ ID NO: 1327389 - RNA, 19 nt, Homo sapiens
  misc_RNA (1)...(19): siRNA sense strand
uagaaccuguuacaacuag

SEQ ID NO: 1327390 - RNA, 19 nt, Homo sapiens
  misc_RNA (1)...(19): siRNA sense strand
gaguagaaccuguuacaac

SEQ ID NO: 1327391 - RNA, 19 nt, Homo sapiens
  misc_RNA (1)...(19): siRNA sense strand
guugaaggccaccaagauu

SEQ ID NO: 1327392 - RNA, 19 nt, Homo sapiens
  misc_RNA (1)...(19): siRNA sense strand
gcugaacacagucuauuuc

SEQ ID NO: 1327393 - RNA, 19 nt, Homo sapiens
  misc_RNA (1)...(19): siRNA sense strand
gaggagacaguagaaguga

SEQ ID NO: 1327394 - RNA, 19 nt, Homo sapiens
  misc_RNA (1)...(19): siRNA sense strand
gauccgaacaucacugcuu

SEQ ID NO: 1327395 - RNA, 19 nt, Homo sapiens
  misc_RNA (1)...(19): siRNA sense strand
ugaaggccaccaagauuug

SEQ ID NO: 1327396 - RNA, 19 nt, Homo sapiens
  misc_RNA (1)...(19): siRNA sense strand
gcccauaauauuccuaaug

SEQ ID NO: 1327397 - RNA, 19 nt, Homo sapiens
  misc_RNA (1)...(19): siRNA sense strand
ugugugaggugcaauuaca

SEQ ID NO: 1327398 - RNA, 19 nt, Homo sapiens
  misc_RNA (1)...(19): siRNA sense strand
gaaccuguuacaacuagug

SEQ ID NO: 1327399 - RNA, 19 nt, Homo sapiens
  misc_RNA (1)...(19): siRNA sense strand
gagagccgaccguucaaug

SEQ ID NO: 1327400 - RNA, 19 nt, Homo sapiens
  misc_RNA (1)...(19): siRNA sense strand
gaguggaugcuacaacaug

SEQ ID NO: 1327401 - RNA, 19 nt, Homo sapiens
  misc_RNA (1)...(19): siRNA sense strand
gaugcuacaacaugaucua

SEQ ID NO: 1327402 - RNA, 19 nt, Homo sapiens
  misc_RNA (1)...(19): siRNA sense strand
gcccuuccaugucugugaa

SEQ ID NO: 1327403 - RNA, 19 nt, Homo sapiens
  misc_RNA (1)...(19): siRNA sense strand
cccauaauauuccuaaugc

SEQ ID NO: 1327404 - RNA, 19 nt, Homo sapiens
  misc_RNA (1)...(19): siRNA sense strand
aguagaaccuguuacaacu

SEQ ID NO: 1327405 - RNA, 19 nt, Homo sapiens
  misc_RNA (1)...(19): siRNA sense strand
cgaacaucacugcuuguaa

SEQ ID NO: 1327406 - RNA, 19 nt, Homo sapiens
  misc_RNA (1)...(19): siRNA sense strand
gagcuucaguggugauucc

SEQ ID NO: 1327407 - RNA, 19 nt, Homo sapiens
  misc_RNA (1)...(19): siRNA sense strand
gagccgaccguucaaugug

SEQ ID NO: 1327408 - RNA, 19 nt, Homo sapiens
  misc_RNA (1)...(19): siRNA sense strand
acaggggacuauucaauuu

SEQ ID NO: 1327409 - RNA, 19 nt, Homo sapiens
  misc_RNA (1)...(19): siRNA sense strand
acauggcucuuauccaaca

SEQ ID NO: 1327410 - RNA, 19 nt, Homo sapiens
  misc_RNA (1)...(19): siRNA sense strand
agaaugaggagacaguaga

SEQ ID NO: 1327411 - RNA, 19 nt, Homo sapiens
  misc_RNA (1)...(19): siRNA sense strand
gcugugugaggugcaauua

SEQ ID NO: 1327412 - RNA, 19 nt, Homo sapiens
  misc_RNA (1)...(19): siRNA sense strand
gccagcauccgcuuguuga

SEQ ID NO: 1327413 - RNA, 19 nt, Homo sapiens
  misc_RNA (1)...(19): siRNA sense strand
aacacagucuauuucauug

SEQ ID NO: 1327414 - RNA, 19 nt, Homo sapiens
  misc_RNA (1)...(19): siRNA sense strand
cagaggccuuccagacuca

SEQ ID NO: 1327415 - RNA, 19 nt, Homo sapiens
  misc_RNA (1)...(19): siRNA sense strand
gccuagaccacauaaugaa

SEQ ID NO: 1327416 - RNA, 19 nt, Homo sapiens
  misc_RNA (1)...(19): siRNA sense strand
uugaaggccaccaagauuu

SEQ ID NO: 1327417 - RNA, 19 nt, Homo sapiens
  misc_RNA (1)...(19): siRNA sense strand
aguggaugcuacaacauga

SEQ ID NO: 1327418 - RNA, 19 nt, Homo sapiens
  misc_RNA (1)...(19): siRNA sense strand
ccacaccagaagaaacaaa

SEQ ID NO: 1327419 - RNA, 19 nt, Homo sapiens
  misc_RNA (1)...(19): siRNA sense strand
ggagacaguagaagugaac

SEQ ID NO: 1327420 - RNA, 19 nt, Homo sapiens
  misc_RNA (1)...(19): siRNA sense strand
ucacugcuuguaagaagaa

SEQ ID NO: 1327421 - RNA, 19 nt, Homo sapiens
  misc_RNA (1)...(19): siRNA sense strand
gggcccauaauauuccuaa

SEQ ID NO: 1327422 - RNA, 19 nt, Homo sapiens
  misc_RNA (1)...(19): siRNA sense strand
gaaggccaccaagauuugu

SEQ ID NO: 1327423 - RNA, 19 nt, Homo sapiens
  misc_RNA (1)...(19): siRNA sense strand
ccgaacaucacugcuugua

SEQ ID NO: 1327424 - RNA, 19 nt, Homo sapiens
  misc_RNA (1)...(19): siRNA sense strand
gaauguaagcuggguacuc

SEQ ID NO: 1327425 - RNA, 19 nt, Homo sapiens
  misc_RNA (1)...(19): siRNA sense strand
ugaggagacaguagaagug

SEQ ID NO: 1327426 - RNA, 19 nt, Homo sapiens
  misc_RNA (1)...(19): siRNA sense strand
cugccuagaccacauaaug

SEQ ID NO: 1327427 - RNA, 19 nt, Homo sapiens
  misc_RNA (1)...(19): siRNA sense strand
cuagaccacauaaugaaau

SEQ ID NO: 1327428 - RNA, 19 nt, Homo sapiens
  misc_RNA (1)...(19): siRNA sense strand
caacaggggacuauucaau

SEQ ID NO: 1327429 - RNA, 19 nt, Homo sapiens
  misc_RNA (1)...(19): siRNA sense strand
ccuagaccacauaaugaaa

SEQ ID NO: 1327430 - RNA, 19 nt, Homo sapiens
  misc_RNA (1)...(19): siRNA sense strand
ucaguggugauuccaguga

SEQ ID NO: 1327431 - RNA, 19 nt, Homo sapiens
  misc_RNA (1)...(19): siRNA sense strand
uuccaugucugugaauuuc

SEQ ID NO: 1327432 - RNA, 19 nt, Homo sapiens
  misc_RNA (1)...(19): siRNA sense strand
ccgaguagaaccuguuaca

SEQ ID NO: 1327433 - RNA, 19 nt, Homo sapiens
  misc_RNA (1)...(19): siRNA sense strand
ugccuagaccacauaauga

SEQ ID NO: 1327434 - RNA, 19 nt, Homo sapiens
  misc_RNA (1)...(19): siRNA sense strand
gaagugaggucauccuuga

SEQ ID NO: 1327435 - RNA, 19 nt, Homo sapiens
  misc_RNA (1)...(19): siRNA sense strand
gaacaucacugcuuguaag

SEQ ID NO: 1327436 - RNA, 19 nt, Homo sapiens
  misc_RNA (1)...(19): siRNA sense strand
gaacacagucuauuucauu

SEQ ID NO: 1327437 - RNA, 19 nt, Homo sapiens
  misc_RNA (1)...(19): siRNA sense strand
gcagggaucuaucuaaugu

SEQ ID NO: 1327438 - RNA, 19 nt, Homo sapiens
  misc_RNA (1)...(19): siRNA sense strand
uuaagguucuugugguuua

SEQ ID NO: 1327439 - RNA, 19 nt, Homo sapiens
  misc_RNA (1)...(19): siRNA sense strand
ccaaugacgucaacagugu

SEQ ID NO: 1327440 - RNA, 19 nt, Homo sapiens
  misc_RNA (1)...(19): siRNA sense strand
gaaaggaucaagaagacuu

SEQ ID NO: 1327441 - RNA, 19 nt, Homo sapiens
  misc_RNA (1)...(19): siRNA sense strand
acaaauacgugguggucua

SEQ ID NO: 1327442 - RNA, 19 nt, Homo sapiens
  misc_RNA (1)...(19): siRNA sense strand
auacauggcucuuauccaa

SEQ ID NO: 1327443 - RNA, 19 nt, Homo sapiens
  misc_RNA (1)...(19): siRNA sense strand
gcuacaacaugaucuaauc

SEQ ID NO: 1327444 - RNA, 19 nt, Homo sapiens
  misc_RNA (1)...(19): siRNA sense strand
gaugguaccuguggcaaga

SEQ ID NO: 1327445 - RNA, 19 nt, Homo sapiens
  misc_RNA (1)...(19): siRNA sense strand
cgacauaaaggaacaguug

SEQ ID NO: 1327446 - RNA, 19 nt, Homo sapiens
  misc_RNA (1)...(19): siRNA sense strand
acagauacauggcucuuau

SEQ ID NO: 1327447 - RNA, 19 nt, Homo sapiens
  misc_RNA (1)...(19): siRNA sense strand
gaaacaaacgcgagcuuca

SEQ ID NO: 1327448 - RNA, 19 nt, Homo sapiens
  misc_RNA (1)...(19): siRNA sense strand
aaagaaggcagcagacaaa

SEQ ID NO: 1327449 - RNA, 19 nt, Homo sapiens
  misc_RNA (1)...(19): siRNA sense strand
gaaggcagcagacaaaguc

SEQ ID NO: 1327450 - RNA, 19 nt, Homo sapiens
  misc_RNA (1)...(19): siRNA sense strand
uuacccaucugaaauaugu

SEQ ID NO: 1327451 - RNA, 19 nt, Homo sapiens
  misc_RNA (1)...(19): siRNA sense strand
gaagaaugaggagacagua

SEQ ID NO: 1327452 - RNA, 19 nt, Homo sapiens
  misc_RNA (1)...(19): siRNA sense strand
ccaaguaccaccucaugaa

SEQ ID NO: 1327453 - RNA, 19 nt, Homo sapiens
  misc_RNA (1)...(19): siRNA sense strand
ggaugccacugcuuucugu

SEQ ID NO: 1327454 - RNA, 19 nt, Homo sapiens
  misc_RNA (1)...(19): siRNA sense strand
cagaguggaugcuacaaca

SEQ ID NO: 1327455 - RNA, 19 nt, Homo sapiens
  misc_RNA (1)...(19): siRNA sense strand
ugaaggaugccacugcuuu

SEQ ID NO: 1327456 - RNA, 19 nt, Homo sapiens
  misc_RNA (1)...(19): siRNA sense strand
gguuuacccaucugaaaua

SEQ ID NO: 1327457 - RNA, 19 nt, Homo sapiens
  misc_RNA (1)...(19): siRNA sense strand
gcaaauaugaaugaagaug

SEQ ID NO: 1327458 - RNA, 19 nt, Homo sapiens
  misc_RNA (1)...(19): siRNA sense strand
caucacugcuuguaagaag

SEQ ID NO: 1327459 - RNA, 19 nt, Homo sapiens
  misc_RNA (1)...(19): siRNA sense strand
caauguggcucugaaacug

SEQ ID NO: 1327460 - RNA, 19 nt, Homo sapiens
  misc_RNA (1)...(19): siRNA sense strand
gaaugaggagacaguagaa

SEQ ID NO: 1327461 - RNA, 19 nt, Homo sapiens
  misc_RNA (1)...(19): siRNA sense strand
gagcugaacacagucuauu

SEQ ID NO: 1327462 - RNA, 19 nt, Homo sapiens
  misc_RNA (1)...(19): siRNA sense strand
cuaagaagccagauucauc

SEQ ID NO: 1327463 - RNA, 19 nt, Homo sapiens
  misc_RNA (1)...(19): siRNA sense strand
cauuaagguucuugugguu

SEQ ID NO: 1327464 - RNA, 19 nt, Homo sapiens
  misc_RNA (1)...(19): siRNA sense strand
aaagcaacuuccaguccua

SEQ ID NO: 1327465 - RNA, 19 nt, Homo sapiens
  misc_RNA (1)...(19): siRNA sense strand
uaagaagaaugaggagaca

SEQ ID NO: 1327466 - RNA, 19 nt, Homo sapiens
  misc_RNA (1)...(19): siRNA sense strand
guagaaccuguuacaacua

SEQ ID NO: 1327467 - RNA, 19 nt, Homo sapiens
  misc_RNA (1)...(19): siRNA sense strand
gaaggaugccacugcuuuc

SEQ ID NO: 1327468 - RNA, 19 nt, Homo sapiens
  misc_RNA (1)...(19): siRNA sense strand
caaagucgucuuccuucuu

SEQ ID NO: 1327469 - RNA, 19 nt, Homo sapiens
  misc_RNA (1)...(19): siRNA sense strand
uggcagggaucuaucuaau

SEQ ID NO: 1327470 - RNA, 19 nt, Homo sapiens
  misc_RNA (1)...(19): siRNA sense strand
gcgacugcauccgacauaa

SEQ ID NO: 1327471 - RNA, 19 nt, Homo sapiens
  misc_RNA (1)...(19): siRNA sense strand
uagaaccuguuacaacuag

SEQ ID NO: 1327472 - RNA, 19 nt, Homo sapiens
  misc_RNA (1)...(19): siRNA sense strand
gaguagaaccuguuacaac

SEQ ID NO: 1327473 - RNA, 19 nt, Homo sapiens
  misc_RNA (1)...(19): siRNA sense strand
guugaaggccaccaagauu

SEQ ID NO: 1327474 - RNA, 19 nt, Homo sapiens
  misc_RNA (1)...(19): siRNA sense strand
gcugaacacagucuauuuc

SEQ ID NO: 1327475 - RNA, 19 nt, Homo sapiens
  misc_RNA (1)...(19): siRNA sense strand
gaggagacaguagaaguga

SEQ ID NO: 1327476 - RNA, 19 nt, Homo sapiens
  misc_RNA (1)...(19): siRNA sense strand
gauccgaacaucacugcuu

SEQ ID NO: 1327477 - RNA, 19 nt, Homo sapiens
  misc_RNA (1)...(19): siRNA sense strand
ugaaggccaccaagauuug

SEQ ID NO: 1327478 - RNA, 19 nt, Homo sapiens
  misc_RNA (1)...(19): siRNA sense strand
gcccauaauauuccuaaug

SEQ ID NO: 1327479 - RNA, 19 nt, Homo sapiens
  misc_RNA (1)...(19): siRNA sense strand
ugugugaggugcaauuaca

SEQ ID NO: 1327480 - RNA, 19 nt, Homo sapiens
  misc_RNA (1)...(19): siRNA sense strand
gaaccuguuacaacuagug

SEQ ID NO: 1327481 - RNA, 19 nt, Homo sapiens
  misc_RNA (1)...(19): siRNA sense strand
gauggcugcugcuccuugu

SEQ ID NO: 1327482 - RNA, 19 nt, Homo sapiens
  misc_RNA (1)...(19): siRNA sense strand
gagagccgaccguucaaug

SEQ ID NO: 1327483 - RNA, 19 nt, Homo sapiens
  misc_RNA (1)...(19): siRNA sense strand
cccauaauauuccuaaugc

SEQ ID NO: 1327484 - RNA, 19 nt, Homo sapiens
  misc_RNA (1)...(19): siRNA sense strand
gaugcuacaacaugaucua

SEQ ID NO: 1327485 - RNA, 19 nt, Homo sapiens
  misc_RNA (1)...(19): siRNA sense strand
gaguggaugcuacaacaug

SEQ ID NO: 1327486 - RNA, 19 nt, Homo sapiens
  misc_RNA (1)...(19): siRNA sense strand
gcacgaaaggaucaagaag

SEQ ID NO: 1327487 - RNA, 19 nt, Homo sapiens
  misc_RNA (1)...(19): siRNA sense strand
cgacugcauccgacauaaa

SEQ ID NO: 1327488 - RNA, 19 nt, Homo sapiens
  misc_RNA (1)...(19): siRNA sense strand
gcccuuccaugucugugaa

SEQ ID NO: 1327489 - RNA, 19 nt, Homo sapiens
  misc_RNA (1)...(19): siRNA sense strand
aguagaaccuguuacaacu

SEQ ID NO: 1327490 - RNA, 19 nt, Homo sapiens
  misc_RNA (1)...(19): siRNA sense strand
uuucugcagugaucuaaga

SEQ ID NO: 1327491 - RNA, 19 nt, Homo sapiens
  misc_RNA (1)...(19): siRNA sense strand
cgaacaucacugcuuguaa

SEQ ID NO: 1327492 - RNA, 19 nt, Homo sapiens
  misc_RNA (1)...(19): siRNA sense strand
gagccgaccguucaaugug

SEQ ID NO: 1327493 - RNA, 19 nt, Homo sapiens
  misc_RNA (1)...(19): siRNA sense strand
gagcuucaguggugauucc

SEQ ID NO: 1327494 - RNA, 19 nt, Homo sapiens
  misc_RNA (1)...(19): siRNA sense strand
gcugugugaggugcaauua

SEQ ID NO: 1327495 - RNA, 19 nt, Homo sapiens
  misc_RNA (1)...(19): siRNA sense strand
acaggggacuauucaauuu

SEQ ID NO: 1327496 - RNA, 19 nt, Homo sapiens
  misc_RNA (1)...(19): siRNA sense strand
cacgaaaggaucaagaaga

SEQ ID NO: 1327497 - RNA, 19 nt, Homo sapiens
  misc_RNA (1)...(19): siRNA sense strand
acaaacaggcgucccuuuc

SEQ ID NO: 1327498 - RNA, 19 nt, Homo sapiens
  misc_RNA (1)...(19): siRNA sense strand
cauccgacauaaaggaaca

SEQ ID NO: 1327499 - RNA, 19 nt, Homo sapiens
  misc_RNA (1)...(19): siRNA sense strand
acauggcucuuauccaaca

SEQ ID NO: 1327500 - RNA, 19 nt, Homo sapiens
  misc_RNA (1)...(19): siRNA sense strand
agaaugaggagacaguaga

SEQ ID NO: 1327501 - RNA, 19 nt, Homo sapiens
  misc_RNA (1)...(19): siRNA sense strand
cagaggccuuccagacuca

SEQ ID NO: 1327502 - RNA, 19 nt, Homo sapiens
  misc_RNA (1)...(19): siRNA sense strand
gccagcauccgcuuguuga

SEQ ID NO: 1327503 - RNA, 19 nt, Homo sapiens
  misc_RNA (1)...(19): siRNA sense strand
aacacagucuauuucauug

SEQ ID NO: 1327504 - RNA, 19 nt, Homo sapiens
  misc_RNA (1)...(19): siRNA sense strand
gccuagaccacauaaugaa

SEQ ID NO: 1327505 - RNA, 19 nt, Homo sapiens
  misc_RNA (1)...(19): siRNA sense strand
acgaaaggaucaagaagac

SEQ ID NO: 1327506 - RNA, 19 nt, Homo sapiens
  misc_RNA (1)...(19): siRNA sense strand
uugaaggccaccaagauuu

SEQ ID NO: 1327507 - RNA, 19 nt, Homo sapiens
  misc_RNA (1)...(19): siRNA sense strand
aguaccaccucaugaagga

SEQ ID NO: 1327508 - RNA, 19 nt, Homo sapiens
  misc_RNA (1)...(19): siRNA sense strand
caaguaccaccucaugaag

SEQ ID NO: 1327509 - RNA, 19 nt, Homo sapiens
  misc_RNA (1)...(19): siRNA sense strand
gggcccauaauauuccuaa

SEQ ID NO: 1327510 - RNA, 19 nt, Homo sapiens
  misc_RNA (1)...(19): siRNA sense strand
gagggcagucccagugaga

SEQ ID NO: 1327511 - RNA, 19 nt, Homo sapiens
  misc_RNA (1)...(19): siRNA sense strand
aguggaugcuacaacauga

SEQ ID NO: 1327512 - RNA, 19 nt, Homo sapiens
  misc_RNA (1)...(19): siRNA sense strand
caaaaccauugcagaagug

SEQ ID NO: 1327513 - RNA, 19 nt, Homo sapiens
  misc_RNA (1)...(19): siRNA sense strand
caauuuguuacuucacuga

SEQ ID NO: 1327514 - RNA, 19 nt, Homo sapiens
  misc_RNA (1)...(19): siRNA sense strand
guuuacccaucugaaauau

SEQ ID NO: 1327515 - RNA, 19 nt, Homo sapiens
  misc_RNA (1)...(19): siRNA sense strand
ccacaccagaagaaacaaa

SEQ ID NO: 1327516 - RNA, 19 nt, Homo sapiens
  misc_RNA (1)...(19): siRNA sense strand
ggagacaguagaagugaac

SEQ ID NO: 1327517 - RNA, 19 nt, Homo sapiens
  misc_RNA (1)...(19): siRNA sense strand
ucacugcuuguaagaagaa

SEQ ID NO: 1327518 - RNA, 19 nt, Homo sapiens
  misc_RNA (1)...(19): siRNA sense strand
ccgaacaucacugcuugua

SEQ ID NO: 1327519 - RNA, 19 nt, Homo sapiens
  misc_RNA (1)...(19): siRNA sense strand
gaaggccaccaagauuugu

SEQ ID NO: 1327520 - RNA, 19 nt, Homo sapiens
  misc_RNA (1)...(19): siRNA sense strand
gaauguaagcuggguacuc

SEQ ID NO: 1327521 - RNA, 19 nt, Homo sapiens
  misc_RNA (1)...(19): siRNA sense strand
gugguuuacccaucugaaa

SEQ ID NO: 1327522 - RNA, 19 nt, Homo sapiens
  misc_RNA (1)...(19): siRNA sense strand
ugaggagacaguagaagug

SEQ ID NO: 1327523 - RNA, 19 nt, Homo sapiens
  misc_RNA (1)...(19): siRNA sense strand
cugccuagaccacauaaug

SEQ ID NO: 1327524 - RNA, 19 nt, Homo sapiens
  misc_RNA (1)...(19): siRNA sense strand
acaaagucgucuuccuucu

SEQ ID NO: 1327525 - RNA, 19 nt, Homo sapiens
  misc_RNA (1)...(19): siRNA sense strand
ucaaaaccauugcagaagu

SEQ ID NO: 1327526 - RNA, 19 nt, Homo sapiens
  misc_RNA (1)...(19): siRNA sense strand
ggcacgaaaggaucaagaa

SEQ ID NO: 1327527 - RNA, 19 nt, Homo sapiens
  misc_RNA (1)...(19): siRNA sense strand
cuagaccacauaaugaaau

SEQ ID NO: 1327528 - RNA, 19 nt, Homo sapiens
  misc_RNA (1)...(19): siRNA sense strand
caacaggggacuauucaau

SEQ ID NO: 1327529 - RNA, 19 nt, Homo sapiens
  misc_RNA (1)...(19): siRNA sense strand
aauacgugguggucuacuu

SEQ ID NO: 1327530 - RNA, 19 nt, Homo sapiens
  misc_RNA (1)...(19): siRNA sense strand
cgucuuccuucuuuccaau

SEQ ID NO: 1327531 - RNA, 19 nt, Homo sapiens
  misc_RNA (1)...(19): siRNA sense strand
ccuagaccacauaaugaaa

SEQ ID NO: 1327532 - RNA, 19 nt, Homo sapiens
  misc_RNA (1)...(19): siRNA sense strand
ggcagggaucuaucuaaug

SEQ ID NO: 1327533 - RNA, 19 nt, Homo sapiens
  misc_RNA (1)...(19): siRNA sense strand
auacgugguggucuacuuu

SEQ ID NO: 1327534 - RNA, 19 nt, Homo sapiens
  misc_RNA (1)...(19): siRNA sense strand
gaacaucacugcuuguaag

SEQ ID NO: 1327535 - RNA, 19 nt, Homo sapiens
  misc_RNA (1)...(19): siRNA sense strand
gaacacagucuauuucauu

SEQ ID NO: 1327536 - RNA, 19 nt, Homo sapiens
  misc_RNA (1)...(19): siRNA sense strand
auacauggcucuuauccaa

SEQ ID NO: 1327537 - RNA, 19 nt, Homo sapiens
  misc_RNA (1)...(19): siRNA sense strand
gcuacaacaugaucuaauc

SEQ ID NO: 1327538 - RNA, 19 nt, Homo sapiens
  misc_RNA (1)...(19): siRNA sense strand
acagauacauggcucuuau

SEQ ID NO: 1327539 - RNA, 19 nt, Homo sapiens
  misc_RNA (1)...(19): siRNA sense strand
gaaacaaacgcgagcuuca

SEQ ID NO: 1327540 - RNA, 19 nt, Homo sapiens
  misc_RNA (1)...(19): siRNA sense strand
gaagaaugaggagacagua

SEQ ID NO: 1327541 - RNA, 19 nt, Homo sapiens
  misc_RNA (1)...(19): siRNA sense strand
cagaguggaugcuacaaca

SEQ ID NO: 1327542 - RNA, 19 nt, Homo sapiens
  misc_RNA (1)...(19): siRNA sense strand
gcaaauaugaaugaagaug

SEQ ID NO: 1327543 - RNA, 19 nt, Homo sapiens
  misc_RNA (1)...(19): siRNA sense strand
caauguggcucugaaacug

SEQ ID NO: 1327544 - RNA, 19 nt, Homo sapiens
  misc_RNA (1)...(19): siRNA sense strand
caucacugcuuguaagaag

SEQ ID NO: 1327545 - RNA, 19 nt, Homo sapiens
  misc_RNA (1)...(19): siRNA sense strand
gaaugaggagacaguagaa

SEQ ID NO: 1327546 - RNA, 19 nt, Homo sapiens
  misc_RNA (1)...(19): siRNA sense strand
gagcugaacacagucuauu

SEQ ID NO: 1327547 - RNA, 19 nt, Homo sapiens
  misc_RNA (1)...(19): siRNA sense strand
aaagcaacuuccaguccua

SEQ ID NO: 1327548 - RNA, 19 nt, Homo sapiens
  misc_RNA (1)...(19): siRNA sense strand
uaagaagaaugaggagaca

SEQ ID NO: 1327549 - RNA, 19 nt, Homo sapiens
  misc_RNA (1)...(19): siRNA sense strand
guagaaccuguuacaacua

SEQ ID NO: 1327550 - RNA, 19 nt, Homo sapiens
  misc_RNA (1)...(19): siRNA sense strand
uagaaccuguuacaacuag

SEQ ID NO: 1327551 - RNA, 19 nt, Homo sapiens
  misc_RNA (1)...(19): siRNA sense strand
gaguagaaccuguuacaac

SEQ ID NO: 1327552 - RNA, 19 nt, Homo sapiens
  misc_RNA (1)...(19): siRNA sense strand
guugaaggccaccaagauu

SEQ ID NO: 1327553 - RNA, 19 nt, Homo sapiens
  misc_RNA (1)...(19): siRNA sense strand
gcugaacacagucuauuuc

SEQ ID NO: 1327554 - RNA, 19 nt, Homo sapiens
  misc_RNA (1)...(19): siRNA sense strand
gaggagacaguagaaguga

SEQ ID NO: 1327555 - RNA, 19 nt, Homo sapiens
  misc_RNA (1)...(19): siRNA sense strand
gauccgaacaucacugcuu

SEQ ID NO: 1327556 - RNA, 19 nt, Homo sapiens
  misc_RNA (1)...(19): siRNA sense strand
ugaaggccaccaagauuug

SEQ ID NO: 1327557 - RNA, 19 nt, Homo sapiens
  misc_RNA (1)...(19): siRNA sense strand
gcccauaauauuccuaaug

SEQ ID NO: 1327558 - RNA, 19 nt, Homo sapiens
  misc_RNA (1)...(19): siRNA sense strand
ugugugaggugcaauuaca

SEQ ID NO: 1327559 - RNA, 19 nt, Homo sapiens
  misc_RNA (1)...(19): siRNA sense strand
gaaccuguuacaacuagug

SEQ ID NO: 1327560 - RNA, 19 nt, Homo sapiens
  misc_RNA (1)...(19): siRNA sense strand
gagagccgaccguucaaug

SEQ ID NO: 1327561 - RNA, 19 nt, Homo sapiens
  misc_RNA (1)...(19): siRNA sense strand
gaguggaugcuacaacaug

SEQ ID NO: 1327562 - RNA, 19 nt, Homo sapiens
  misc_RNA (1)...(19): siRNA sense strand
gaugcuacaacaugaucua

SEQ ID NO: 1327563 - RNA, 19 nt, Homo sapiens
  misc_RNA (1)...(19): siRNA sense strand
gcccuuccaugucugugaa

SEQ ID NO: 1327564 - RNA, 19 nt, Homo sapiens
  misc_RNA (1)...(19): siRNA sense strand
cccauaauauuccuaaugc

SEQ ID NO: 1327565 - RNA, 19 nt, Homo sapiens
  misc_RNA (1)...(19): siRNA sense strand
aguagaaccuguuacaacu

SEQ ID NO: 1327566 - RNA, 19 nt, Homo sapiens
  misc_RNA (1)...(19): siRNA sense strand
cgaacaucacugcuuguaa

SEQ ID NO: 1327567 - RNA, 19 nt, Homo sapiens
  misc_RNA (1)...(19): siRNA sense strand
gagcuucaguggugauucc

SEQ ID NO: 1327568 - RNA, 19 nt, Homo sapiens
  misc_RNA (1)...(19): siRNA sense strand
gagccgaccguucaaugug

SEQ ID NO: 1327569 - RNA, 19 nt, Homo sapiens
  misc_RNA (1)...(19): siRNA sense strand
acaggggacuauucaauuu

SEQ ID NO: 1327570 - RNA, 19 nt, Homo sapiens
  misc_RNA (1)...(19): siRNA sense strand
acauggcucuuauccaaca

SEQ ID NO: 1327571 - RNA, 19 nt, Homo sapiens
  misc_RNA (1)...(19): siRNA sense strand
agaaugaggagacaguaga

SEQ ID NO: 1327572 - RNA, 19 nt, Homo sapiens
  misc_RNA (1)...(19): siRNA sense strand
gcugugugaggugcaauua

SEQ ID NO: 1327573 - RNA, 19 nt, Homo sapiens
  misc_RNA (1)...(19): siRNA sense strand
gccagcauccgcuuguuga

SEQ ID NO: 1327574 - RNA, 19 nt, Homo sapiens
  misc_RNA (1)...(19): siRNA sense strand
aacacagucuauuucauug

SEQ ID NO: 1327575 - RNA, 19 nt, Homo sapiens
  misc_RNA (1)...(19): siRNA sense strand
cagaggccuuccagacuca

SEQ ID NO: 1327576 - RNA, 19 nt, Homo sapiens
  misc_RNA (1)...(19): siRNA sense strand
gccuagaccacauaaugaa

SEQ ID NO: 1327577 - RNA, 19 nt, Homo sapiens
  misc_RNA (1)...(19): siRNA sense strand
uugaaggccaccaagauuu

SEQ ID NO: 1327578 - RNA, 19 nt, Homo sapiens
  misc_RNA (1)...(19): siRNA sense strand
aguggaugcuacaacauga

SEQ ID NO: 1327579 - RNA, 19 nt, Homo sapiens
  misc_RNA (1)...(19): siRNA sense strand
ccacaccagaagaaacaaa

SEQ ID NO: 1327580 - RNA, 19 nt, Homo sapiens
  misc_RNA (1)...(19): siRNA sense strand
ggagacaguagaagugaac

SEQ ID NO: 1327581 - RNA, 19 nt, Homo sapiens
  misc_RNA (1)...(19): siRNA sense strand
ucacugcuuguaagaagaa

SEQ ID NO: 1327582 - RNA, 19 nt, Homo sapiens
  misc_RNA (1)...(19): siRNA sense strand
gggcccauaauauuccuaa

SEQ ID NO: 1327583 - RNA, 19 nt, Homo sapiens
  misc_RNA (1)...(19): siRNA sense strand
gaaggccaccaagauuugu

SEQ ID NO: 1327584 - RNA, 19 nt, Homo sapiens
  misc_RNA (1)...(19): siRNA sense strand
ccgaacaucacugcuugua

SEQ ID NO: 1327585 - RNA, 19 nt, Homo sapiens
  misc_RNA (1)...(19): siRNA sense strand
gaauguaagcuggguacuc

SEQ ID NO: 1327586 - RNA, 19 nt, Homo sapiens
  misc_RNA (1)...(19): siRNA sense strand
ugaggagacaguagaagug

SEQ ID NO: 1327587 - RNA, 19 nt, Homo sapiens
  misc_RNA (1)...(19): siRNA sense strand
cugccuagaccacauaaug

SEQ ID NO: 1327588 - RNA, 19 nt, Homo sapiens
  misc_RNA (1)...(19): siRNA sense strand
cuagaccacauaaugaaau

SEQ ID NO: 1327589 - RNA, 19 nt, Homo sapiens
  misc_RNA (1)...(19): siRNA sense strand
caacaggggacuauucaau

SEQ ID NO: 1327590 - RNA, 19 nt, Homo sapiens
  misc_RNA (1)...(19): siRNA sense strand
ccuagaccacauaaugaaa

SEQ ID NO: 1327591 - RNA, 19 nt, Homo sapiens
  misc_RNA (1)...(19): siRNA sense strand
ucaguggugauuccaguga

SEQ ID NO: 1327592 - RNA, 19 nt, Homo sapiens
  misc_RNA (1)...(19): siRNA sense strand
uuccaugucugugaauuuc

SEQ ID NO: 1327593 - RNA, 19 nt, Homo sapiens
  misc_RNA (1)...(19): siRNA sense strand
ccgaguagaaccuguuaca

SEQ ID NO: 1327594 - RNA, 19 nt, Homo sapiens
  misc_RNA (1)...(19): siRNA sense strand
ugccuagaccacauaauga

SEQ ID NO: 1327595 - RNA, 19 nt, Homo sapiens
  misc_RNA (1)...(19): siRNA sense strand
gaaccaggccgaucacuuc

SEQ ID NO: 1327596 - RNA, 19 nt, Homo sapiens
  misc_RNA (1)...(19): siRNA sense strand
ccaggccgaucacuucuug

SEQ ID NO: 1327597 - RNA, 19 nt, Homo sapiens
  misc_RNA (1)...(19): siRNA sense strand
cagcgaagcccagauaaga

SEQ ID NO: 1327598 - RNA, 19 nt, Homo sapiens
  misc_RNA (1)...(19): siRNA sense strand
caugugaguuucaacaagu

SEQ ID NO: 1327599 - RNA, 19 nt, Homo sapiens
  misc_RNA (1)...(19): siRNA sense strand
cuucagugcuuccuacaga

SEQ ID NO: 1327600 - RNA, 19 nt, Homo sapiens
  misc_RNA (1)...(19): siRNA sense strand
ugggaucaguuucauguga

SEQ ID NO: 1327601 - RNA, 19 nt, Homo sapiens
  misc_RNA (1)...(19): siRNA sense strand
gcccagcgaagcccagaua

SEQ ID NO: 1327602 - RNA, 19 nt, Homo sapiens
  misc_RNA (1)...(19): siRNA sense strand
ggaaccaggccgaucacuu

SEQ ID NO: 1327603 - RNA, 19 nt, Homo sapiens
  misc_RNA (1)...(19): siRNA sense strand
ccgguuaccugcucuacug

SEQ ID NO: 1327604 - RNA, 19 nt, Homo sapiens
  misc_RNA (1)...(19): siRNA sense strand
gcggguggcauacugcuuu

SEQ ID NO: 1327605 - RNA, 19 nt, Homo sapiens
  misc_RNA (1)...(19): siRNA sense strand
gucaucagcuuggaggauu

SEQ ID NO: 1327606 - RNA, 19 nt, Homo sapiens
  misc_RNA (1)...(19): siRNA sense strand
uggaggauuucauggagaa

SEQ ID NO: 1327607 - RNA, 19 nt, Homo sapiens
  misc_RNA (1)...(19): siRNA sense strand
cugagaagcggguggcaua

SEQ ID NO: 1327608 - RNA, 19 nt, Homo sapiens
  misc_RNA (1)...(19): siRNA sense strand
ggcauuuccuucagugcuu

SEQ ID NO: 1327609 - RNA, 19 nt, Homo sapiens
  misc_RNA (1)...(19): siRNA sense strand
ggauugaguaccagcauca

SEQ ID NO: 1327610 - RNA, 19 nt, Homo sapiens
  misc_RNA (1)...(19): siRNA sense strand
caucacaagccuccuuuca

SEQ ID NO: 1327611 - RNA, 19 nt, Homo sapiens
  misc_RNA (1)...(19): siRNA sense strand
gcgaagcccagauaagaag

SEQ ID NO: 1327612 - RNA, 19 nt, Homo sapiens
  misc_RNA (1)...(19): siRNA sense strand
ggcugucccuccuuggauu

SEQ ID NO: 1327613 - RNA, 19 nt, Homo sapiens
  misc_RNA (1)...(19): siRNA sense strand
agaagcggguggcauacug

SEQ ID NO: 1327614 - RNA, 19 nt, Homo sapiens
  misc_RNA (1)...(19): siRNA sense strand
ucaucagcuuggaggauuu

SEQ ID NO: 1327615 - RNA, 19 nt, Homo sapiens
  misc_RNA (1)...(19): siRNA sense strand
cagcuuggaggauuucaug

SEQ ID NO: 1327616 - RNA, 19 nt, Homo sapiens
  misc_RNA (1)...(19): siRNA sense strand
ggaucaguuucaugugagu

SEQ ID NO: 1327617 - RNA, 19 nt, Homo sapiens
  misc_RNA (1)...(19): siRNA sense strand
ucaugugaguuucaacaag

SEQ ID NO: 1327618 - RNA, 19 nt, Homo sapiens
  misc_RNA (1)...(19): siRNA sense strand
gcauuugcaaagcugcuaa

SEQ ID NO: 1327619 - RNA, 19 nt, Homo sapiens
  misc_RNA (1)...(19): siRNA sense strand
aagaagacgugccccauga

SEQ ID NO: 1327620 - RNA, 19 nt, Homo sapiens
  misc_RNA (1)...(19): siRNA sense strand
cuugggcucucuggcauuu

SEQ ID NO: 1327621 - RNA, 19 nt, Homo sapiens
  misc_RNA (1)...(19): siRNA sense strand
uuacaggcauuuccuucag

SEQ ID NO: 1327622 - RNA, 19 nt, Homo sapiens
  misc_RNA (1)...(19): siRNA sense strand
gcuuggaggauuucaugga

SEQ ID NO: 1327623 - RNA, 19 nt, Homo sapiens
  misc_RNA (1)...(19): siRNA sense strand
gaaccaggccgaucacuuc

SEQ ID NO: 1327624 - RNA, 19 nt, Homo sapiens
  misc_RNA (1)...(19): siRNA sense strand
ccaggccgaucacuucuug

SEQ ID NO: 1327625 - RNA, 19 nt, Homo sapiens
  misc_RNA (1)...(19): siRNA sense strand
cagcgaagcccagauaaga

SEQ ID NO: 1327626 - RNA, 19 nt, Homo sapiens
  misc_RNA (1)...(19): siRNA sense strand
caugugaguuucaacaagu

SEQ ID NO: 1327627 - RNA, 19 nt, Homo sapiens
  misc_RNA (1)...(19): siRNA sense strand
cuucagugcuuccuacaga

SEQ ID NO: 1327628 - RNA, 19 nt, Homo sapiens
  misc_RNA (1)...(19): siRNA sense strand
ugggaucaguuucauguga

SEQ ID NO: 1327629 - RNA, 19 nt, Homo sapiens
  misc_RNA (1)...(19): siRNA sense strand
gcccagcgaagcccagaua

SEQ ID NO: 1327630 - RNA, 19 nt, Homo sapiens
  misc_RNA (1)...(19): siRNA sense strand
ggaaccaggccgaucacuu

SEQ ID NO: 1327631 - RNA, 19 nt, Homo sapiens
  misc_RNA (1)...(19): siRNA sense strand
ccgguuaccugcucuacug

SEQ ID NO: 1327632 - RNA, 19 nt, Homo sapiens
  misc_RNA (1)...(19): siRNA sense strand
gcggguggcauacugcuuu

SEQ ID NO: 1327633 - RNA, 19 nt, Homo sapiens
  misc_RNA (1)...(19): siRNA sense strand
gucaucagcuuggaggauu

SEQ ID NO: 1327634 - RNA, 19 nt, Homo sapiens
  misc_RNA (1)...(19): siRNA sense strand
uggaggauuucauggagaa

SEQ ID NO: 1327635 - RNA, 19 nt, Homo sapiens
  misc_RNA (1)...(19): siRNA sense strand
cugagaagcggguggcaua

SEQ ID NO: 1327636 - RNA, 19 nt, Homo sapiens
  misc_RNA (1)...(19): siRNA sense strand
ggcauuuccuucagugcuu

SEQ ID NO: 1327637 - RNA, 19 nt, Homo sapiens
  misc_RNA (1)...(19): siRNA sense strand
ggauugaguaccagcauca

SEQ ID NO: 1327638 - RNA, 19 nt, Homo sapiens
  misc_RNA (1)...(19): siRNA sense strand
caucacaagccuccuuuca

SEQ ID NO: 1327639 - RNA, 19 nt, Homo sapiens
  misc_RNA (1)...(19): siRNA sense strand
gcgaagcccagauaagaag

SEQ ID NO: 1327640 - RNA, 19 nt, Homo sapiens
  misc_RNA (1)...(19): siRNA sense strand
ggcugucccuccuuggauu

SEQ ID NO: 1327641 - RNA, 19 nt, Homo sapiens
  misc_RNA (1)...(19): siRNA sense strand
agaagcggguggcauacug

SEQ ID NO: 1327642 - RNA, 19 nt, Homo sapiens
  misc_RNA (1)...(19): siRNA sense strand
ucaucagcuuggaggauuu

SEQ ID NO: 1327643 - RNA, 19 nt, Homo sapiens
  misc_RNA (1)...(19): siRNA sense strand
cagcuuggaggauuucaug

SEQ ID NO: 1327644 - RNA, 19 nt, Homo sapiens
  misc_RNA (1)...(19): siRNA sense strand
ggaucaguuucaugugagu

SEQ ID NO: 1327645 - RNA, 19 nt, Homo sapiens
  misc_RNA (1)...(19): siRNA sense strand
ucaugugaguuucaacaag

SEQ ID NO: 1327646 - RNA, 19 nt, Homo sapiens
  misc_RNA (1)...(19): siRNA sense strand
gcauuugcaaagcugcuaa

SEQ ID NO: 1327647 - RNA, 19 nt, Homo sapiens
  misc_RNA (1)...(19): siRNA sense strand
aagaagacgugccccauga

SEQ ID NO: 1327648 - RNA, 19 nt, Homo sapiens
  misc_RNA (1)...(19): siRNA sense strand
cuugggcucucuggcauuu

SEQ ID NO: 1327649 - RNA, 19 nt, Homo sapiens
  misc_RNA (1)...(19): siRNA sense strand
uuacaggcauuuccuucag

SEQ ID NO: 1327650 - RNA, 19 nt, Homo sapiens
  misc_RNA (1)...(19): siRNA sense strand
gcuuggaggauuucaugga

SEQ ID NO: 1327651 - RNA, 19 nt, Homo sapiens
  misc_RNA (1)...(19): siRNA sense strand
gaaaccggaugcugaguac

SEQ ID NO: 1327652 - RNA, 19 nt, Homo sapiens
  misc_RNA (1)...(19): siRNA sense strand
gaauggcuguucgagauga

SEQ ID NO: 1327653 - RNA, 19 nt, Homo sapiens
  misc_RNA (1)...(19): siRNA sense strand
ccaagaaaccaguuaugaa

SEQ ID NO: 1327654 - RNA, 19 nt, Homo sapiens
  misc_RNA (1)...(19): siRNA sense strand
caagaaaccaguuaugaag

SEQ ID NO: 1327655 - RNA, 19 nt, Homo sapiens
  misc_RNA (1)...(19): siRNA sense strand
gccaagaaaccaguuauga

SEQ ID NO: 1327656 - RNA, 19 nt, Homo sapiens
  misc_RNA (1)...(19): siRNA sense strand
cugaauggcuguucgagau

SEQ ID NO: 1327657 - RNA, 19 nt, Homo sapiens
  misc_RNA (1)...(19): siRNA sense strand
caaggaagggcaggaugua

SEQ ID NO: 1327658 - RNA, 19 nt, Homo sapiens
  misc_RNA (1)...(19): siRNA sense strand
ugaaaccggaugcugagua

SEQ ID NO: 1327659 - RNA, 19 nt, Homo sapiens
  misc_RNA (1)...(19): siRNA sense strand
ccaugggcgucaacaucua

SEQ ID NO: 1327660 - RNA, 19 nt, Homo sapiens
  misc_RNA (1)...(19): siRNA sense strand
gcgucaacaucuacaagga

SEQ ID NO: 1327661 - RNA, 19 nt, Homo sapiens
  misc_RNA (1)...(19): siRNA sense strand
cuguccagcucaccacaua

SEQ ID NO: 1327662 - RNA, 19 nt, Homo sapiens
  misc_RNA (1)...(19): siRNA sense strand
gaugcugaguacccugaau

SEQ ID NO: 1327663 - RNA, 19 nt, Homo sapiens
  misc_RNA (1)...(19): siRNA sense strand
cggcugagcaagaacaaga

SEQ ID NO: 1327664 - RNA, 19 nt, Homo sapiens
  misc_RNA (1)...(19): siRNA sense strand
ccgggauuaugccaagaaa

SEQ ID NO: 1327665 - RNA, 19 nt, Homo sapiens
  misc_RNA (1)...(19): siRNA sense strand
ugagcaagaacaagagguu

SEQ ID NO: 1327666 - RNA, 19 nt, Homo sapiens
  misc_RNA (1)...(19): siRNA sense strand
cgucaacaucuacaaggaa

SEQ ID NO: 1327667 - RNA, 19 nt, Homo sapiens
  misc_RNA (1)...(19): siRNA sense strand
acaaggaagggcaggaugu

SEQ ID NO: 1327668 - RNA, 19 nt, Homo sapiens
  misc_RNA (1)...(19): siRNA sense strand
gcacuuagauauauugcaa

SEQ ID NO: 1327669 - RNA, 19 nt, Homo sapiens
  misc_RNA (1)...(19): siRNA sense strand
gaacccugaugcuaaauug

SEQ ID NO: 1327670 - RNA, 19 nt, Homo sapiens
  misc_RNA (1)...(19): siRNA sense strand
ggacagcuaucaaccacuu

SEQ ID NO: 1327671 - RNA, 19 nt, Homo sapiens
  misc_RNA (1)...(19): siRNA sense strand
ccagcuagcucaggcaaua

SEQ ID NO: 1327672 - RNA, 19 nt, Homo sapiens
  misc_RNA (1)...(19): siRNA sense strand
gaaccggaagaucauauua

SEQ ID NO: 1327673 - RNA, 19 nt, Homo sapiens
  misc_RNA (1)...(19): siRNA sense strand
gcagaacgcggguguaaug

SEQ ID NO: 1327674 - RNA, 19 nt, Homo sapiens
  misc_RNA (1)...(19): siRNA sense strand
gcuaucaaccacuuaauaa

SEQ ID NO: 1327675 - RNA, 19 nt, Homo sapiens
  misc_RNA (1)...(19): siRNA sense strand
gaacgcggguguaaugucu

SEQ ID NO: 1327676 - RNA, 19 nt, Homo sapiens
  misc_RNA (1)...(19): siRNA sense strand
ggagacuggccaauuauaa

SEQ ID NO: 1327677 - RNA, 19 nt, Homo sapiens
  misc_RNA (1)...(19): siRNA sense strand
aaagcauucuccagaguua

SEQ ID NO: 1327678 - RNA, 19 nt, Homo sapiens
  misc_RNA (1)...(19): siRNA sense strand
uuucacagcugguaguuaa

SEQ ID NO: 1327679 - RNA, 19 nt, Homo sapiens
  misc_RNA (1)...(19): siRNA sense strand
ccaauauucugaaacaugu

SEQ ID NO: 1327680 - RNA, 19 nt, Homo sapiens
  misc_RNA (1)...(19): siRNA sense strand
gcaaagcauucuccagagu

SEQ ID NO: 1327681 - RNA, 19 nt, Homo sapiens
  misc_RNA (1)...(19): siRNA sense strand
gccagaaauugcuuugaaa

SEQ ID NO: 1327682 - RNA, 19 nt, Homo sapiens
  misc_RNA (1)...(19): siRNA sense strand
cagaagaaccggaagauca

SEQ ID NO: 1327683 - RNA, 19 nt, Homo sapiens
  misc_RNA (1)...(19): siRNA sense strand
cagaagcuguugugaagug

SEQ ID NO: 1327684 - RNA, 19 nt, Homo sapiens
  misc_RNA (1)...(19): siRNA sense strand
ugaaggacaaggaugaaua

SEQ ID NO: 1327685 - RNA, 19 nt, Homo sapiens
  misc_RNA (1)...(19): siRNA sense strand
uggcagaaaugguuguuga

SEQ ID NO: 1327686 - RNA, 19 nt, Homo sapiens
  misc_RNA (1)...(19): siRNA sense strand
caugaugcuugguuaugua

SEQ ID NO: 1327687 - RNA, 19 nt, Homo sapiens
  misc_RNA (1)...(19): siRNA sense strand
ucauaugcuuggaagauuu

SEQ ID NO: 1327688 - RNA, 19 nt, Homo sapiens
  misc_RNA (1)...(19): siRNA sense strand
gaagacacacuccugaaca

SEQ ID NO: 1327689 - RNA, 19 nt, Homo sapiens
  misc_RNA (1)...(19): siRNA sense strand
cugaggaucuccaaguaaa

SEQ ID NO: 1327690 - RNA, 19 nt, Homo sapiens
  misc_RNA (1)...(19): siRNA sense strand
ucaacagacugcugcuuug

SEQ ID NO: 1327691 - RNA, 19 nt, Homo sapiens
  misc_RNA (1)...(19): siRNA sense strand
uggauacgcuggucauaug

SEQ ID NO: 1327692 - RNA, 19 nt, Homo sapiens
  misc_RNA (1)...(19): siRNA sense strand
uuccacagcuuguuuauuc

SEQ ID NO: 1327693 - RNA, 19 nt, Homo sapiens
  misc_RNA (1)...(19): siRNA sense strand
ucagugauauugcaaagca

SEQ ID NO: 1327694 - RNA, 19 nt, Homo sapiens
  misc_RNA (1)...(19): siRNA sense strand
agaaaugguuguugaagca

SEQ ID NO: 1327695 - RNA, 19 nt, Homo sapiens
  misc_RNA (1)...(19): siRNA sense strand
ccugaacccugaugcuaaa

SEQ ID NO: 1327696 - RNA, 19 nt, Homo sapiens
  misc_RNA (1)...(19): siRNA sense strand
gaagaaccggaagaucaua

SEQ ID NO: 1327697 - RNA, 19 nt, Homo sapiens
  misc_RNA (1)...(19): siRNA sense strand
uaccagcccuugaaccauu

SEQ ID NO: 1327698 - RNA, 19 nt, Homo sapiens
  misc_RNA (1)...(19): siRNA sense strand
gcugcagccugggcacuua

SEQ ID NO: 1327699 - RNA, 19 nt, Homo sapiens
  misc_RNA (1)...(19): siRNA sense strand
cauaaagaauauccugcaa

SEQ ID NO: 1327700 - RNA, 19 nt, Homo sapiens
  misc_RNA (1)...(19): siRNA sense strand
uggcagucaucauuucuaa

SEQ ID NO: 1327701 - RNA, 19 nt, Homo sapiens
  misc_RNA (1)...(19): siRNA sense strand
guaaugucuuugcugagaa

SEQ ID NO: 1327702 - RNA, 19 nt, Homo sapiens
  misc_RNA (1)...(19): siRNA sense strand
aaacauacacccgagcuuu

SEQ ID NO: 1327703 - RNA, 19 nt, Homo sapiens
  misc_RNA (1)...(19): siRNA sense strand
ggacccaguucgugcagau

SEQ ID NO: 1327704 - RNA, 19 nt, Homo sapiens
  misc_RNA (1)...(19): siRNA sense strand
ggacagauuggaagacaca

SEQ ID NO: 1327705 - RNA, 19 nt, Homo sapiens
  misc_RNA (1)...(19): siRNA sense strand
gcuguugcagucacaaaua

SEQ ID NO: 1327706 - RNA, 19 nt, Homo sapiens
  misc_RNA (1)...(19): siRNA sense strand
ugccaguucugcuuucuuu

SEQ ID NO: 1327707 - RNA, 19 nt, Homo sapiens
  misc_RNA (1)...(19): siRNA sense strand
gagacuggccaauuauaau

SEQ ID NO: 1327708 - RNA, 19 nt, Homo sapiens
  misc_RNA (1)...(19): siRNA sense strand
guacaugucaacagaaagu

SEQ ID NO: 1327709 - RNA, 19 nt, Homo sapiens
  misc_RNA (1)...(19): siRNA sense strand
ggaugaauacgugaagaaa

SEQ ID NO: 1327710 - RNA, 19 nt, Homo sapiens
  misc_RNA (1)...(19): siRNA sense strand
gaaggacaaggaugaauac

SEQ ID NO: 1327711 - RNA, 19 nt, Homo sapiens
  misc_RNA (1)...(19): siRNA sense strand
uguaaugucuuugcugaga

SEQ ID NO: 1327712 - RNA, 19 nt, Homo sapiens
  misc_RNA (1)...(19): siRNA sense strand
gggagacuggccaauuaua

SEQ ID NO: 1327713 - RNA, 19 nt, Homo sapiens
  misc_RNA (1)...(19): siRNA sense strand
caguucugcuuucuuugua

SEQ ID NO: 1327714 - RNA, 19 nt, Homo sapiens
  misc_RNA (1)...(19): siRNA sense strand
ccugggcacuuagauauau

SEQ ID NO: 1327715 - RNA, 19 nt, Homo sapiens
  misc_RNA (1)...(19): siRNA sense strand
caucauuucuaagggugua

SEQ ID NO: 1327716 - RNA, 19 nt, Homo sapiens
  misc_RNA (1)...(19): siRNA sense strand
gcagucaucauuucuaagg

SEQ ID NO: 1327717 - RNA, 19 nt, Homo sapiens
  misc_RNA (1)...(19): siRNA sense strand
caaagcauucuccagaguu

SEQ ID NO: 1327718 - RNA, 19 nt, Homo sapiens
  misc_RNA (1)...(19): siRNA sense strand
agccagaaauugcuuugaa

SEQ ID NO: 1327719 - RNA, 19 nt, Homo sapiens
  misc_RNA (1)...(19): siRNA sense strand
gucauaugcuuggaagauu

SEQ ID NO: 1327720 - RNA, 19 nt, Homo sapiens
  misc_RNA (1)...(19): siRNA sense strand
gaaccauuucuauaugaug

SEQ ID NO: 1327721 - RNA, 19 nt, Homo sapiens
  misc_RNA (1)...(19): siRNA sense strand
cuacuuaccagcccuugaa

SEQ ID NO: 1327722 - RNA, 19 nt, Homo sapiens
  misc_RNA (1)...(19): siRNA sense strand
gacguggucccaacaauuc

SEQ ID NO: 1327723 - RNA, 19 nt, Homo sapiens
  misc_RNA (1)...(19): siRNA sense strand
ggucauaugcuuggaagau

SEQ ID NO: 1327724 - RNA, 19 nt, Homo sapiens
  misc_RNA (1)...(19): siRNA sense strand
ucaaccacuuaauaacuga

SEQ ID NO: 1327725 - RNA, 19 nt, Homo sapiens
  misc_RNA (1)...(19): siRNA sense strand
ugcaaguguucgagcaaua

SEQ ID NO: 1327726 - RNA, 19 nt, Homo sapiens
  misc_RNA (1)...(19): siRNA sense strand
agaguuagcacagacagua

SEQ ID NO: 1327727 - RNA, 19 nt, Homo sapiens
  misc_RNA (1)...(19): siRNA sense strand
cgacauucuuccacagcuu

SEQ ID NO: 1327728 - RNA, 19 nt, Homo sapiens
  misc_RNA (1)...(19): siRNA sense strand
gauuguggagcacuggaua

SEQ ID NO: 1327729 - RNA, 19 nt, Homo sapiens
  misc_RNA (1)...(19): siRNA sense strand
uagcagaagcuguugugaa

SEQ ID NO: 1327730 - RNA, 19 nt, Homo sapiens
  misc_RNA (1)...(19): siRNA sense strand
gcagaggguggacagcuau

SEQ ID NO: 1327731 - RNA, 19 nt, Homo sapiens
  misc_RNA (1)...(19): siRNA sense strand
cuugaaccauuucuauaug

SEQ ID NO: 1327732 - RNA, 19 nt, Homo sapiens
  misc_RNA (1)...(19): siRNA sense strand
agcagaagcuguugugaag

SEQ ID NO: 1327733 - RNA, 19 nt, Homo sapiens
  misc_RNA (1)...(19): siRNA sense strand
ugaccuagcagaagcuguu

SEQ ID NO: 1327734 - RNA, 19 nt, Homo sapiens
  misc_RNA (1)...(19): siRNA sense strand
ggaagacacacuccugaac

SEQ ID NO: 1327735 - RNA, 19 nt, Homo sapiens
  misc_RNA (1)...(19): siRNA sense strand
ucaugaugcuugguuaugu

SEQ ID NO: 1327736 - RNA, 19 nt, Homo sapiens
  misc_RNA (1)...(19): siRNA sense strand
uuagagagauugcaaaaca

SEQ ID NO: 1327737 - RNA, 19 nt, Homo sapiens
  misc_RNA (1)...(19): siRNA sense strand
gagcaguugguaaacauuc

SEQ ID NO: 1327738 - RNA, 19 nt, Homo sapiens
  misc_RNA (1)...(19): siRNA sense strand
gcagaaaugguuguugaag

SEQ ID NO: 1327739 - RNA, 19 nt, Homo sapiens
  misc_RNA (1)...(19): siRNA sense strand
uagcccagaugauccugaa

SEQ ID NO: 1327740 - RNA, 19 nt, Homo sapiens
  misc_RNA (1)...(19): siRNA sense strand
uaaauugaagcaucagauc

SEQ ID NO: 1327741 - RNA, 19 nt, Homo sapiens
  misc_RNA (1)...(19): siRNA sense strand
ccuugaaccauuucuauau

SEQ ID NO: 1327742 - RNA, 19 nt, Homo sapiens
  misc_RNA (1)...(19): siRNA sense strand
uaugaugcuccucccaaua

SEQ ID NO: 1327743 - RNA, 19 nt, Homo sapiens
  misc_RNA (1)...(19): siRNA sense strand
guugugaagugcgacauuc

SEQ ID NO: 1327744 - RNA, 19 nt, Homo sapiens
  misc_RNA (1)...(19): siRNA sense strand
gcccuugaaccauuucuau

SEQ ID NO: 1327745 - RNA, 19 nt, Homo sapiens
  misc_RNA (1)...(19): siRNA sense strand
cagccugggcacuuagaua

SEQ ID NO: 1327746 - RNA, 19 nt, Homo sapiens
  misc_RNA (1)...(19): siRNA sense strand
gcagcugccuuuguguuac

SEQ ID NO: 1327747 - RNA, 19 nt, Homo sapiens
  misc_RNA (1)...(19): siRNA sense strand
cacagcuuguuuauucauu

SEQ ID NO: 1327748 - RNA, 19 nt, Homo sapiens
  misc_RNA (1)...(19): siRNA sense strand
uaggacagauuggaagaca

SEQ ID NO: 1327749 - RNA, 19 nt, Homo sapiens
  misc_RNA (1)...(19): siRNA sense strand
acagcuuguuuauucauug

SEQ ID NO: 1327750 - RNA, 19 nt, Homo sapiens
  misc_RNA (1)...(19): siRNA sense strand
acgcggguguaaugucuuu

SEQ ID NO: 1327751 - RNA, 19 nt, Homo sapiens
  misc_RNA (1)...(19): siRNA sense strand
ugcagaggguggacagcua

SEQ ID NO: 1327752 - RNA, 19 nt, Homo sapiens
  misc_RNA (1)...(19): siRNA sense strand
ugaugcuccucccaauauu

SEQ ID NO: 1327753 - RNA, 19 nt, Homo sapiens
  misc_RNA (1)...(19): siRNA sense strand
ccaguucugcuuucuuugu

SEQ ID NO: 1327754 - RNA, 19 nt, Homo sapiens
  misc_RNA (1)...(19): siRNA sense strand
agacuggccaauuauaaug

SEQ ID NO: 1327755 - RNA, 19 nt, Homo sapiens
  misc_RNA (1)...(19): siRNA sense strand
ugaagcaucagauccuuuc

SEQ ID NO: 1327756 - RNA, 19 nt, Homo sapiens
  misc_RNA (1)...(19): siRNA sense strand
gcuucggcccucagugaua

SEQ ID NO: 1327757 - RNA, 19 nt, Homo sapiens
  misc_RNA (1)...(19): siRNA sense strand
aaccggaagaucauauuaa

SEQ ID NO: 1327758 - RNA, 19 nt, Homo sapiens
  misc_RNA (1)...(19): siRNA sense strand
gcuugggccuuaggacaga

SEQ ID NO: 1327759 - RNA, 19 nt, Homo sapiens
  misc_RNA (1)...(19): siRNA sense strand
uauccaggagccagaaauu

SEQ ID NO: 1327760 - RNA, 19 nt, Homo sapiens
  misc_RNA (1)...(19): siRNA sense strand
uuguacaugucaacagaaa

SEQ ID NO: 1327761 - RNA, 19 nt, Homo sapiens
  misc_RNA (1)...(19): siRNA sense strand
cuuuguacaugucaacaga

SEQ ID NO: 1327762 - RNA, 19 nt, Homo sapiens
  misc_RNA (1)...(19): siRNA sense strand
uuauaaugaugaccuagca

SEQ ID NO: 1327763 - RNA, 19 nt, Homo sapiens
  misc_RNA (1)...(19): siRNA sense strand
ccucagugauauugcaaag

SEQ ID NO: 1327764 - RNA, 19 nt, Homo sapiens
  misc_RNA (1)...(19): siRNA sense strand
gcaaguguucgagcaauac

SEQ ID NO: 1327765 - RNA, 19 nt, Homo sapiens
  misc_RNA (1)...(19): siRNA sense strand
gugguuggacaguucagua

SEQ ID NO: 1327766 - RNA, 19 nt, Homo sapiens
  misc_RNA (1)...(19): siRNA sense strand
acaugugguuggacaguuc

SEQ ID NO: 1327767 - RNA, 19 nt, Homo sapiens
  misc_RNA (1)...(19): siRNA sense strand
gacuggccaauuauaauga

SEQ ID NO: 1327768 - RNA, 19 nt, Homo sapiens
  misc_RNA (1)...(19): siRNA sense strand
gcacuuagauauauugcaa

SEQ ID NO: 1327769 - RNA, 19 nt, Homo sapiens
  misc_RNA (1)...(19): siRNA sense strand
gaacccugaugcuaaauug

SEQ ID NO: 1327770 - RNA, 19 nt, Homo sapiens
  misc_RNA (1)...(19): siRNA sense strand
ggacagcuaucaaccacuu

SEQ ID NO: 1327771 - RNA, 19 nt, Homo sapiens
  misc_RNA (1)...(19): siRNA sense strand
ccagcuagcucaggcaaua

SEQ ID NO: 1327772 - RNA, 19 nt, Homo sapiens
  misc_RNA (1)...(19): siRNA sense strand
gaaccggaagaucauauua

SEQ ID NO: 1327773 - RNA, 19 nt, Homo sapiens
  misc_RNA (1)...(19): siRNA sense strand
gcagaacgcggguguaaug

SEQ ID NO: 1327774 - RNA, 19 nt, Homo sapiens
  misc_RNA (1)...(19): siRNA sense strand
gaacgcggguguaaugucu

SEQ ID NO: 1327775 - RNA, 19 nt, Homo sapiens
  misc_RNA (1)...(19): siRNA sense strand
ggagacuggccaauuauaa

SEQ ID NO: 1327776 - RNA, 19 nt, Homo sapiens
  misc_RNA (1)...(19): siRNA sense strand
aaagcauucuccagaguua

SEQ ID NO: 1327777 - RNA, 19 nt, Homo sapiens
  misc_RNA (1)...(19): siRNA sense strand
uuucacagcugguaguuaa

SEQ ID NO: 1327778 - RNA, 19 nt, Homo sapiens
  misc_RNA (1)...(19): siRNA sense strand
ccaauauucugaaacaugu

SEQ ID NO: 1327779 - RNA, 19 nt, Homo sapiens
  misc_RNA (1)...(19): siRNA sense strand
gcaaagcauucuccagagu

SEQ ID NO: 1327780 - RNA, 19 nt, Homo sapiens
  misc_RNA (1)...(19): siRNA sense strand
gccagaaauugcuuugaaa

SEQ ID NO: 1327781 - RNA, 19 nt, Homo sapiens
  misc_RNA (1)...(19): siRNA sense strand
cagaagaaccggaagauca

SEQ ID NO: 1327782 - RNA, 19 nt, Homo sapiens
  misc_RNA (1)...(19): siRNA sense strand
cagaagcuguugugaagug

SEQ ID NO: 1327783 - RNA, 19 nt, Homo sapiens
  misc_RNA (1)...(19): siRNA sense strand
ugaaggacaaggaugaaua

SEQ ID NO: 1327784 - RNA, 19 nt, Homo sapiens
  misc_RNA (1)...(19): siRNA sense strand
uggcagaaaugguuguuga

SEQ ID NO: 1327785 - RNA, 19 nt, Homo sapiens
  misc_RNA (1)...(19): siRNA sense strand
caugaugcuugguuaugua

SEQ ID NO: 1327786 - RNA, 19 nt, Homo sapiens
  misc_RNA (1)...(19): siRNA sense strand
ucauaugcuuggaagauuu

SEQ ID NO: 1327787 - RNA, 19 nt, Homo sapiens
  misc_RNA (1)...(19): siRNA sense strand
gaagacacacuccugaaca

SEQ ID NO: 1327788 - RNA, 19 nt, Homo sapiens
  misc_RNA (1)...(19): siRNA sense strand
cugaggaucuccaaguaaa

SEQ ID NO: 1327789 - RNA, 19 nt, Homo sapiens
  misc_RNA (1)...(19): siRNA sense strand
ucaacagacugcugcuuug

SEQ ID NO: 1327790 - RNA, 19 nt, Homo sapiens
  misc_RNA (1)...(19): siRNA sense strand
uggauacgcuggucauaug

SEQ ID NO: 1327791 - RNA, 19 nt, Homo sapiens
  misc_RNA (1)...(19): siRNA sense strand
uuccacagcuuguuuauuc

SEQ ID NO: 1327792 - RNA, 19 nt, Homo sapiens
  misc_RNA (1)...(19): siRNA sense strand
ucagugauauugcaaagca

SEQ ID NO: 1327793 - RNA, 19 nt, Homo sapiens
  misc_RNA (1)...(19): siRNA sense strand
agaaaugguuguugaagca

SEQ ID NO: 1327794 - RNA, 19 nt, Homo sapiens
  misc_RNA (1)...(19): siRNA sense strand
ccugaacccugaugcuaaa

SEQ ID NO: 1327795 - RNA, 19 nt, Homo sapiens
  misc_RNA (1)...(19): siRNA sense strand
gaagaaccggaagaucaua

SEQ ID NO: 1327796 - RNA, 19 nt, Homo sapiens
  misc_RNA (1)...(19): siRNA sense strand
uaccagcccuugaaccauu

SEQ ID NO: 1327797 - RNA, 19 nt, Homo sapiens
  misc_RNA (1)...(19): siRNA sense strand
gcugcagccugggcacuua

SEQ ID NO: 1327798 - RNA, 19 nt, Homo sapiens
  misc_RNA (1)...(19): siRNA sense strand
cauaaagaauauccugcaa

SEQ ID NO: 1327799 - RNA, 19 nt, Homo sapiens
  misc_RNA (1)...(19): siRNA sense strand
uggcagucaucauuucuaa

SEQ ID NO: 1327800 - RNA, 19 nt, Homo sapiens
  misc_RNA (1)...(19): siRNA sense strand
guaaugucuuugcugagaa

SEQ ID NO: 1327801 - RNA, 19 nt, Homo sapiens
  misc_RNA (1)...(19): siRNA sense strand
aaacauacacccgagcuuu

SEQ ID NO: 1327802 - RNA, 19 nt, Homo sapiens
  misc_RNA (1)...(19): siRNA sense strand
ggacccaguucgugcagau

SEQ ID NO: 1327803 - RNA, 19 nt, Homo sapiens
  misc_RNA (1)...(19): siRNA sense strand
ggacagauuggaagacaca

SEQ ID NO: 1327804 - RNA, 19 nt, Homo sapiens
  misc_RNA (1)...(19): siRNA sense strand
gcuguugcagucacaaaua

SEQ ID NO: 1327805 - RNA, 19 nt, Homo sapiens
  misc_RNA (1)...(19): siRNA sense strand
ugccaguucugcuuucuuu

SEQ ID NO: 1327806 - RNA, 19 nt, Homo sapiens
  misc_RNA (1)...(19): siRNA sense strand
gagacuggccaauuauaau

SEQ ID NO: 1327807 - RNA, 19 nt, Homo sapiens
  misc_RNA (1)...(19): siRNA sense strand
guacaugucaacagaaagu

SEQ ID NO: 1327808 - RNA, 19 nt, Homo sapiens
  misc_RNA (1)...(19): siRNA sense strand
uguaaugucuuugcugaga

SEQ ID NO: 1327809 - RNA, 19 nt, Homo sapiens
  misc_RNA (1)...(19): siRNA sense strand
ggaugaauacgugaagaaa

SEQ ID NO: 1327810 - RNA, 19 nt, Homo sapiens
  misc_RNA (1)...(19): siRNA sense strand
gaaggacaaggaugaauac

SEQ ID NO: 1327811 - RNA, 19 nt, Homo sapiens
  misc_RNA (1)...(19): siRNA sense strand
gggagacuggccaauuaua

SEQ ID NO: 1327812 - RNA, 19 nt, Homo sapiens
  misc_RNA (1)...(19): siRNA sense strand
caguucugcuuucuuugua

SEQ ID NO: 1327813 - RNA, 19 nt, Homo sapiens
  misc_RNA (1)...(19): siRNA sense strand
ccugggcacuuagauauau

SEQ ID NO: 1327814 - RNA, 19 nt, Homo sapiens
  misc_RNA (1)...(19): siRNA sense strand
caucauuucuaagggugua

SEQ ID NO: 1327815 - RNA, 19 nt, Homo sapiens
  misc_RNA (1)...(19): siRNA sense strand
gcagucaucauuucuaagg

SEQ ID NO: 1327816 - RNA, 19 nt, Homo sapiens
  misc_RNA (1)...(19): siRNA sense strand
caaagcauucuccagaguu

SEQ ID NO: 1327817 - RNA, 19 nt, Homo sapiens
  misc_RNA (1)...(19): siRNA sense strand
agccagaaauugcuuugaa

SEQ ID NO: 1327818 - RNA, 19 nt, Homo sapiens
  misc_RNA (1)...(19): siRNA sense strand
gacguggucccaacaauuc

SEQ ID NO: 1327819 - RNA, 19 nt, Homo sapiens
  misc_RNA (1)...(19): siRNA sense strand
gaaccauuucuauaugaug

SEQ ID NO: 1327820 - RNA, 19 nt, Homo sapiens
  misc_RNA (1)...(19): siRNA sense strand
cuacuuaccagcccuugaa

SEQ ID NO: 1327821 - RNA, 19 nt, Homo sapiens
  misc_RNA (1)...(19): siRNA sense strand
gucauaugcuuggaagauu

SEQ ID NO: 1327822 - RNA, 19 nt, Homo sapiens
  misc_RNA (1)...(19): siRNA sense strand
ggucauaugcuuggaagau

SEQ ID NO: 1327823 - RNA, 19 nt, Homo sapiens
  misc_RNA (1)...(19): siRNA sense strand
ugcaaguguucgagcaaua

SEQ ID NO: 1327824 - RNA, 19 nt, Homo sapiens
  misc_RNA (1)...(19): siRNA sense strand
agaguuagcacagacagua

SEQ ID NO: 1327825 - RNA, 19 nt, Homo sapiens
  misc_RNA (1)...(19): siRNA sense strand
cgacauucuuccacagcuu

SEQ ID NO: 1327826 - RNA, 19 nt, Homo sapiens
  misc_RNA (1)...(19): siRNA sense strand
gauuguggagcacuggaua

SEQ ID NO: 1327827 - RNA, 19 nt, Homo sapiens
  misc_RNA (1)...(19): siRNA sense strand
uagcagaagcuguugugaa

SEQ ID NO: 1327828 - RNA, 19 nt, Homo sapiens
  misc_RNA (1)...(19): siRNA sense strand
gcagaggguggacagcuau

SEQ ID NO: 1327829 - RNA, 19 nt, Homo sapiens
  misc_RNA (1)...(19): siRNA sense strand
cuugaaccauuucuauaug

SEQ ID NO: 1327830 - RNA, 19 nt, Homo sapiens
  misc_RNA (1)...(19): siRNA sense strand
agcagaagcuguugugaag

SEQ ID NO: 1327831 - RNA, 19 nt, Homo sapiens
  misc_RNA (1)...(19): siRNA sense strand
ugaccuagcagaagcuguu

SEQ ID NO: 1327832 - RNA, 19 nt, Homo sapiens
  misc_RNA (1)...(19): siRNA sense strand
ggaagacacacuccugaac

SEQ ID NO: 1327833 - RNA, 19 nt, Homo sapiens
  misc_RNA (1)...(19): siRNA sense strand
ucaugaugcuugguuaugu

SEQ ID NO: 1327834 - RNA, 19 nt, Homo sapiens
  misc_RNA (1)...(19): siRNA sense strand
uuagagagauugcaaaaca

SEQ ID NO: 1327835 - RNA, 19 nt, Homo sapiens
  misc_RNA (1)...(19): siRNA sense strand
gagcaguugguaaacauuc

SEQ ID NO: 1327836 - RNA, 19 nt, Homo sapiens
  misc_RNA (1)...(19): siRNA sense strand
gcagaaaugguuguugaag

SEQ ID NO: 1327837 - RNA, 19 nt, Homo sapiens
  misc_RNA (1)...(19): siRNA sense strand
uagcccagaugauccugaa

SEQ ID NO: 1327838 - RNA, 19 nt, Homo sapiens
  misc_RNA (1)...(19): siRNA sense strand
uaaauugaagcaucagauc

SEQ ID NO: 1327839 - RNA, 19 nt, Homo sapiens
  misc_RNA (1)...(19): siRNA sense strand
ccuugaaccauuucuauau

SEQ ID NO: 1327840 - RNA, 19 nt, Homo sapiens
  misc_RNA (1)...(19): siRNA sense strand
uaugaugcuccucccaaua

SEQ ID NO: 1327841 - RNA, 19 nt, Homo sapiens
  misc_RNA (1)...(19): siRNA sense strand
guugugaagugcgacauuc

SEQ ID NO: 1327842 - RNA, 19 nt, Homo sapiens
  misc_RNA (1)...(19): siRNA sense strand
gcccuugaaccauuucuau

SEQ ID NO: 1327843 - RNA, 19 nt, Homo sapiens
  misc_RNA (1)...(19): siRNA sense strand
cagccugggcacuuagaua

SEQ ID NO: 1327844 - RNA, 19 nt, Homo sapiens
  misc_RNA (1)...(19): siRNA sense strand
gcagcugccuuuguguuac

SEQ ID NO: 1327845 - RNA, 19 nt, Homo sapiens
  misc_RNA (1)...(19): siRNA sense strand
cacagcuuguuuauucauu

SEQ ID NO: 1327846 - RNA, 19 nt, Homo sapiens
  misc_RNA (1)...(19): siRNA sense strand
uaggacagauuggaagaca

SEQ ID NO: 1327847 - RNA, 19 nt, Homo sapiens
  misc_RNA (1)...(19): siRNA sense strand
acagcuuguuuauucauug

SEQ ID NO: 1327848 - RNA, 19 nt, Homo sapiens
  misc_RNA (1)...(19): siRNA sense strand
gcuucggcccucagugaua

SEQ ID NO: 1327849 - RNA, 19 nt, Homo sapiens
  misc_RNA (1)...(19): siRNA sense strand
ugcagaggguggacagcua

SEQ ID NO: 1327850 - RNA, 19 nt, Homo sapiens
  misc_RNA (1)...(19): siRNA sense strand
ugaugcuccucccaauauu

SEQ ID NO: 1327851 - RNA, 19 nt, Homo sapiens
  misc_RNA (1)...(19): siRNA sense strand
ccaguucugcuuucuuugu

SEQ ID NO: 1327852 - RNA, 19 nt, Homo sapiens
  misc_RNA (1)...(19): siRNA sense strand
agacuggccaauuauaaug

SEQ ID NO: 1327853 - RNA, 19 nt, Homo sapiens
  misc_RNA (1)...(19): siRNA sense strand
acgcggguguaaugucuuu

SEQ ID NO: 1327854 - RNA, 19 nt, Homo sapiens
  misc_RNA (1)...(19): siRNA sense strand
ugaagcaucagauccuuuc

SEQ ID NO: 1327855 - RNA, 19 nt, Homo sapiens
  misc_RNA (1)...(19): siRNA sense strand
aaccggaagaucauauuaa

SEQ ID NO: 1327856 - RNA, 19 nt, Homo sapiens
  misc_RNA (1)...(19): siRNA sense strand
gcuugggccuuaggacaga

SEQ ID NO: 1327857 - RNA, 19 nt, Homo sapiens
  misc_RNA (1)...(19): siRNA sense strand
uauccaggagccagaaauu

SEQ ID NO: 1327858 - RNA, 19 nt, Homo sapiens
  misc_RNA (1)...(19): siRNA sense strand
uuguacaugucaacagaaa

SEQ ID NO: 1327859 - RNA, 19 nt, Homo sapiens
  misc_RNA (1)...(19): siRNA sense strand
cuuuguacaugucaacaga

SEQ ID NO: 1327860 - RNA, 19 nt, Homo sapiens
  misc_RNA (1)...(19): siRNA sense strand
uuauaaugaugaccuagca

SEQ ID NO: 1327861 - RNA, 19 nt, Homo sapiens
  misc_RNA (1)...(19): siRNA sense strand
ccucagugauauugcaaag

SEQ ID NO: 1327862 - RNA, 19 nt, Homo sapiens
  misc_RNA (1)...(19): siRNA sense strand
gcaaguguucgagcaauac

SEQ ID NO: 1327863 - RNA, 19 nt, Homo sapiens
  misc_RNA (1)...(19): siRNA sense strand
gugguuggacaguucagua

SEQ ID NO: 1327864 - RNA, 19 nt, Homo sapiens
  misc_RNA (1)...(19): siRNA sense strand
acaugugguuggacaguuc

SEQ ID NO: 1327865 - RNA, 19 nt, Homo sapiens
  misc_RNA (1)...(19): siRNA sense strand
gacuggccaauuauaauga

SEQ ID NO: 1327866 - RNA, 19 nt, Homo sapiens
  misc_RNA (1)...(19): siRNA sense strand
ucugaaacaugugguugga

SEQ ID NO: 1327867 - RNA, 19 nt, Homo sapiens
  misc_RNA (1)...(19): siRNA sense strand
guuggacaguucaguaagg

SEQ ID NO: 1327868 - RNA, 19 nt, Homo sapiens
  misc_RNA (1)...(19): siRNA sense strand
ggaaucagcuucucucauu

SEQ ID NO: 1327869 - RNA, 19 nt, Homo sapiens
  misc_RNA (1)...(19): siRNA sense strand
acaaguaccuucacacaaa

SEQ ID NO: 1327870 - RNA, 19 nt, Homo sapiens
  misc_RNA (1)...(19): siRNA sense strand
gaacucauccuucauuuca

SEQ ID NO: 1327871 - RNA, 19 nt, Homo sapiens
  misc_RNA (1)...(19): siRNA sense strand
gaagcuauaucaacaaugg

SEQ ID NO: 1327872 - RNA, 19 nt, Homo sapiens
  misc_RNA (1)...(19): siRNA sense strand
gaugauggcuucaacagau

SEQ ID NO: 1327873 - RNA, 19 nt, Homo sapiens
  misc_RNA (1)...(19): siRNA sense strand
gagguucgcugaguucuaa

SEQ ID NO: 1327874 - RNA, 19 nt, Homo sapiens
  misc_RNA (1)...(19): siRNA sense strand
gcacaagaccuaaauguca

SEQ ID NO: 1327875 - RNA, 19 nt, Homo sapiens
  misc_RNA (1)...(19): siRNA sense strand
caaauucccuucaccacaa

SEQ ID NO: 1327876 - RNA, 19 nt, Homo sapiens
  misc_RNA (1)...(19): siRNA sense strand
gaauugcugugcuguuuga

SEQ ID NO: 1327877 - RNA, 19 nt, Homo sapiens
  misc_RNA (1)...(19): siRNA sense strand
gaagaagugauucgaauga

SEQ ID NO: 1327878 - RNA, 19 nt, Homo sapiens
  misc_RNA (1)...(19): siRNA sense strand
ccacaugccuuccagauca

SEQ ID NO: 1327879 - RNA, 19 nt, Homo sapiens
  misc_RNA (1)...(19): siRNA sense strand
caacagauccauucaugaa

SEQ ID NO: 1327880 - RNA, 19 nt, Homo sapiens
  misc_RNA (1)...(19): siRNA sense strand
gauauuccacucuuagaua

SEQ ID NO: 1327881 - RNA, 19 nt, Homo sapiens
  misc_RNA (1)...(19): siRNA sense strand
gcaacucuccucuuguaua

SEQ ID NO: 1327882 - RNA, 19 nt, Homo sapiens
  misc_RNA (1)...(19): siRNA sense strand
aagcaacucuccucuugua

SEQ ID NO: 1327883 - RNA, 19 nt, Homo sapiens
  misc_RNA (1)...(19): siRNA sense strand
gcaaauaugucggcacagu

SEQ ID NO: 1327884 - RNA, 19 nt, Homo sapiens
  misc_RNA (1)...(19): siRNA sense strand
gaggaggaauuacaacuuc

SEQ ID NO: 1327885 - RNA, 19 nt, Homo sapiens
  misc_RNA (1)...(19): siRNA sense strand
gagauucuguaucauguug

SEQ ID NO: 1327886 - RNA, 19 nt, Homo sapiens
  misc_RNA (1)...(19): siRNA sense strand
gaaucagcuucucucauuu

SEQ ID NO: 1327887 - RNA, 19 nt, Homo sapiens
  misc_RNA (1)...(19): siRNA sense strand
gcacggaaucuaucucuga

SEQ ID NO: 1327888 - RNA, 19 nt, Homo sapiens
  misc_RNA (1)...(19): siRNA sense strand
cuggugaucuccuucuuua

SEQ ID NO: 1327889 - RNA, 19 nt, Homo sapiens
  misc_RNA (1)...(19): siRNA sense strand
gaacggguccuggaaauca

SEQ ID NO: 1327890 - RNA, 19 nt, Homo sapiens
  misc_RNA (1)...(19): siRNA sense strand
caccauggauuccgacuga

SEQ ID NO: 1327891 - RNA, 19 nt, Homo sapiens
  misc_RNA (1)...(19): siRNA sense strand
gccauuauguccuucaaga

SEQ ID NO: 1327892 - RNA, 19 nt, Homo sapiens
  misc_RNA (1)...(19): siRNA sense strand
gaagugauucgaaugaugu

SEQ ID NO: 1327893 - RNA, 19 nt, Homo sapiens
  misc_RNA (1)...(19): siRNA sense strand
uuacaaacgcgaucucuuu

SEQ ID NO: 1327894 - RNA, 19 nt, Homo sapiens
  misc_RNA (1)...(19): siRNA sense strand
aagacagacugaagaaauu

SEQ ID NO: 1327895 - RNA, 19 nt, Homo sapiens
  misc_RNA (1)...(19): siRNA sense strand
gaugucagaggaggaauua

SEQ ID NO: 1327896 - RNA, 19 nt, Homo sapiens
  misc_RNA (1)...(19): siRNA sense strand
aagaauugcugugcuguuu

SEQ ID NO: 1327897 - RNA, 19 nt, Homo sapiens
  misc_RNA (1)...(19): siRNA sense strand
ggaggaagcaaccauuuca

SEQ ID NO: 1327898 - RNA, 19 nt, Homo sapiens
  misc_RNA (1)...(19): siRNA sense strand
gcaaacuugugaagaccuu

SEQ ID NO: 1327899 - RNA, 19 nt, Homo sapiens
  misc_RNA (1)...(19): siRNA sense strand
gagcaucagccacaaguau

SEQ ID NO: 1327900 - RNA, 19 nt, Homo sapiens
  misc_RNA (1)...(19): siRNA sense strand
caacucuccucuuguauac

SEQ ID NO: 1327901 - RNA, 19 nt, Homo sapiens
  misc_RNA (1)...(19): siRNA sense strand
caauuacaguucugacuca

SEQ ID NO: 1327902 - RNA, 19 nt, Homo sapiens
  misc_RNA (1)...(19): siRNA sense strand
gaggaucaucaguuuauuu

SEQ ID NO: 1327903 - RNA, 19 nt, Homo sapiens
  misc_RNA (1)...(19): siRNA sense strand
ggacuugcaucaggaguag

SEQ ID NO: 1327904 - RNA, 19 nt, Homo sapiens
  misc_RNA (1)...(19): siRNA sense strand
ucacugauauuccacucuu

SEQ ID NO: 1327905 - RNA, 19 nt, Homo sapiens
  misc_RNA (1)...(19): siRNA sense strand
gucugcaggucauuaguua

SEQ ID NO: 1327906 - RNA, 19 nt, Homo sapiens
  misc_RNA (1)...(19): siRNA sense strand
cugaagaaauuuccagaau

SEQ ID NO: 1327907 - RNA, 19 nt, Homo sapiens
  misc_RNA (1)...(19): siRNA sense strand
acacaguccuugagagguu

SEQ ID NO: 1327908 - RNA, 19 nt, Homo sapiens
  misc_RNA (1)...(19): siRNA sense strand
cccagaggaucaucaguuu

SEQ ID NO: 1327909 - RNA, 19 nt, Homo sapiens
  misc_RNA (1)...(19): siRNA sense strand
gcuguuugcugaaaguguu

SEQ ID NO: 1327910 - RNA, 19 nt, Homo sapiens
  misc_RNA (1)...(19): siRNA sense strand
caaguaccuucacacaaau

SEQ ID NO: 1327911 - RNA, 19 nt, Homo sapiens
  misc_RNA (1)...(19): siRNA sense strand
gcaucagccacaaguauuu

SEQ ID NO: 1327912 - RNA, 19 nt, Homo sapiens
  misc_RNA (1)...(19): siRNA sense strand
cagaggaucaucaguuuau

SEQ ID NO: 1327913 - RNA, 19 nt, Homo sapiens
  misc_RNA (1)...(19): siRNA sense strand
ccaaagacagacugaagaa

SEQ ID NO: 1327914 - RNA, 19 nt, Homo sapiens
  misc_RNA (1)...(19): siRNA sense strand
cgaucucuuugaacaauuu

SEQ ID NO: 1327915 - RNA, 19 nt, Homo sapiens
  misc_RNA (1)...(19): siRNA sense strand
gcugaguucuaaugauguu

SEQ ID NO: 1327916 - RNA, 19 nt, Homo sapiens
  misc_RNA (1)...(19): siRNA sense strand
ggaaaucuuggugcacuaa

SEQ ID NO: 1327917 - RNA, 19 nt, Homo sapiens
  misc_RNA (1)...(19): siRNA sense strand
aaagacagacugaagaaau

SEQ ID NO: 1327918 - RNA, 19 nt, Homo sapiens
  misc_RNA (1)...(19): siRNA sense strand
gaacaauuucgaacucauc

SEQ ID NO: 1327919 - RNA, 19 nt, Homo sapiens
  misc_RNA (1)...(19): siRNA sense strand
aguagaagcuauaucaaca

SEQ ID NO: 1327920 - RNA, 19 nt, Homo sapiens
  misc_RNA (1)...(19): siRNA sense strand
cagaaccacaucuucauuu

SEQ ID NO: 1327921 - RNA, 19 nt, Homo sapiens
  misc_RNA (1)...(19): siRNA sense strand
gaagcaaccauuucagucu

SEQ ID NO: 1327922 - RNA, 19 nt, Homo sapiens
  misc_RNA (1)...(19): siRNA sense strand
cauguuggcucgcacagau

SEQ ID NO: 1327923 - RNA, 19 nt, Homo sapiens
  misc_RNA (1)...(19): siRNA sense strand
ggacugcuuuauggacuug

SEQ ID NO: 1327924 - RNA, 19 nt, Homo sapiens
  misc_RNA (1)...(19): siRNA sense strand
gaugcgagguccaugucuu

SEQ ID NO: 1327925 - RNA, 19 nt, Homo sapiens
  misc_RNA (1)...(19): siRNA sense strand
agaaccacaucuucauuug

SEQ ID NO: 1327926 - RNA, 19 nt, Homo sapiens
  misc_RNA (1)...(19): siRNA sense strand
aaucuuggugcacuaauua

SEQ ID NO: 1327927 - RNA, 19 nt, Homo sapiens
  misc_RNA (1)...(19): siRNA sense strand
gaagaauugcugugcuguu

SEQ ID NO: 1327928 - RNA, 19 nt, Homo sapiens
  misc_RNA (1)...(19): siRNA sense strand
ucgcugaguucuaaugaug

SEQ ID NO: 1327929 - RNA, 19 nt, Homo sapiens
  misc_RNA (1)...(19): siRNA sense strand
aaauaugucggcacaguuu

SEQ ID NO: 1327930 - RNA, 19 nt, Homo sapiens
  misc_RNA (1)...(19): siRNA sense strand
caauacaacaugacuagga

SEQ ID NO: 1327931 - RNA, 19 nt, Homo sapiens
  misc_RNA (1)...(19): siRNA sense strand
caaccagagucuccugcuu

SEQ ID NO: 1327932 - RNA, 19 nt, Homo sapiens
  misc_RNA (1)...(19): siRNA sense strand
uauacgcccugcuuuacaa

SEQ ID NO: 1327933 - RNA, 19 nt, Homo sapiens
  misc_RNA (1)...(19): siRNA sense strand
gcagacacacaaugcuuug

SEQ ID NO: 1327934 - RNA, 19 nt, Homo sapiens
  misc_RNA (1)...(19): siRNA sense strand
gauucuguaucauguugaa

SEQ ID NO: 1327935 - RNA, 19 nt, Homo sapiens
  misc_RNA (1)...(19): siRNA sense strand
ccagcaaacuugugaagac

SEQ ID NO: 1327936 - RNA, 19 nt, Homo sapiens
  misc_RNA (1)...(19): siRNA sense strand
aaaucuuggugcacuaauu

SEQ ID NO: 1327937 - RNA, 19 nt, Homo sapiens
  misc_RNA (1)...(19): siRNA sense strand
ugaaauaucaguagaagcu

SEQ ID NO: 1327938 - RNA, 19 nt, Homo sapiens
  misc_RNA (1)...(19): siRNA sense strand
agaagugauucgaaugaug

SEQ ID NO: 1327939 - RNA, 19 nt, Homo sapiens
  misc_RNA (1)...(19): siRNA sense strand
agaaaggaauucacaccau

SEQ ID NO: 1327940 - RNA, 19 nt, Homo sapiens
  misc_RNA (1)...(19): siRNA sense strand
caagauagcaguccuuucc

SEQ ID NO: 1327941 - RNA, 19 nt, Homo sapiens
  misc_RNA (1)...(19): siRNA sense strand
gaaauaucaguagaagcua

SEQ ID NO: 1327942 - RNA, 19 nt, Homo sapiens
  misc_RNA (1)...(19): siRNA sense strand
gcccagaggaucaucaguu

SEQ ID NO: 1327943 - RNA, 19 nt, Homo sapiens
  misc_RNA (1)...(19): siRNA sense strand
acagauccauucaugaagu

SEQ ID NO: 1327944 - RNA, 19 nt, Homo sapiens
  misc_RNA (1)...(19): siRNA sense strand
ccuuccagaucaacuuuaa

SEQ ID NO: 1327945 - RNA, 19 nt, Homo sapiens
  misc_RNA (1)...(19): siRNA sense strand
ccagaggaucaucaguuua

SEQ ID NO: 1327946 - RNA, 19 nt, Homo sapiens
  misc_RNA (1)...(19): siRNA sense strand
cgagacaaguaccuucaca

SEQ ID NO: 1327947 - RNA, 19 nt, Homo sapiens
  misc_RNA (1)...(19): siRNA sense strand
cuacagacaagccauuaug

SEQ ID NO: 1327948 - RNA, 19 nt, Homo sapiens
  misc_RNA (1)...(19): siRNA sense strand
uugaagaagugauucgaau

SEQ ID NO: 1327949 - RNA, 19 nt, Homo sapiens
  misc_RNA (1)...(19): siRNA sense strand
cacaagaccuaaaugucau

SEQ ID NO: 1327950 - RNA, 19 nt, Homo sapiens
  misc_RNA (1)...(19): siRNA sense strand
uucaagaacacacaagaua

SEQ ID NO: 1327951 - RNA, 19 nt, Homo sapiens
  misc_RNA (1)...(19): siRNA sense strand
ccauacaccagcaaacuug

SEQ ID NO: 1327952 - RNA, 19 nt, Homo sapiens
  misc_RNA (1)...(19): siRNA sense strand
ucgaacucauccuucauuu

SEQ ID NO: 1327953 - RNA, 19 nt, Homo sapiens
  misc_RNA (1)...(19): siRNA sense strand
caaauaugucggcacaguu

SEQ ID NO: 1327954 - RNA, 19 nt, Homo sapiens
  misc_RNA (1)...(19): siRNA sense strand
gacaaguaccuucacacaa

SEQ ID NO: 1327955 - RNA, 19 nt, Homo sapiens
  misc_RNA (1)...(19): siRNA sense strand
gaggaauuacaacuucauu

SEQ ID NO: 1327956 - RNA, 19 nt, Homo sapiens
  misc_RNA (1)...(19): siRNA sense strand
ggagcagcccgaggaguuu

SEQ ID NO: 1327957 - RNA, 19 nt, Homo sapiens
  misc_RNA (1)...(19): siRNA sense strand
caaagacagacugaagaaa

SEQ ID NO: 1327958 - RNA, 19 nt, Homo sapiens
  misc_RNA (1)...(19): siRNA sense strand
caucaacuccugccugaca

SEQ ID NO: 1327959 - RNA, 19 nt, Homo sapiens
  misc_RNA (1)...(19): siRNA sense strand
gaaugacccguucuggaau

SEQ ID NO: 1327960 - RNA, 19 nt, Homo sapiens
  misc_RNA (1)...(19): siRNA sense strand
uggcagcuuuagcaaauau

SEQ ID NO: 1327961 - RNA, 19 nt, Homo sapiens
  misc_RNA (1)...(19): siRNA sense strand
gguaauaagaaccauucaa

SEQ ID NO: 1327962 - RNA, 19 nt, Homo sapiens
  misc_RNA (1)...(19): siRNA sense strand
gcccuuauaauauuguuga

SEQ ID NO: 1327963 - RNA, 19 nt, Homo sapiens
  misc_RNA (1)...(19): siRNA sense strand
ccagaucaacuuuaauagu

SEQ ID NO: 1327964 - RNA, 19 nt, Homo sapiens
  misc_RNA (1)...(19): siRNA sense strand
gauguuccucuaccagauu

SEQ ID NO: 1327965 - RNA, 19 nt, Homo sapiens
  misc_RNA (1)...(19): siRNA sense strand
ucguugcgcugcccaaaga

SEQ ID NO: 1327966 - RNA, 19 nt, Homo sapiens
  misc_RNA (1)...(19): siRNA sense strand
gcgaucucuuugaacaauu

SEQ ID NO: 1327967 - RNA, 19 nt, Homo sapiens
  misc_RNA (1)...(19): siRNA sense strand
uaucaggcacggaaucuau

SEQ ID NO: 1327968 - RNA, 19 nt, Homo sapiens
  misc_RNA (1)...(19): siRNA sense strand
gcugaaagauuacgaguuu

SEQ ID NO: 1327969 - RNA, 19 nt, Homo sapiens
  misc_RNA (1)...(19): siRNA sense strand
aguaggagcugaaagauua

SEQ ID NO: 1327970 - RNA, 19 nt, Homo sapiens
  misc_RNA (1)...(19): siRNA sense strand
cguagaagcuuaugguaaa

SEQ ID NO: 1327971 - RNA, 19 nt, Homo sapiens
  misc_RNA (1)...(19): siRNA sense strand
aggagacucugaauucuua

SEQ ID NO: 1327972 - RNA, 19 nt, Homo sapiens
  misc_RNA (1)...(19): siRNA sense strand
gcacaguguucccuaaauc

SEQ ID NO: 1327973 - RNA, 19 nt, Homo sapiens
  misc_RNA (1)...(19): siRNA sense strand
ccagaaauguuacagugaa

SEQ ID NO: 1327974 - RNA, 19 nt, Homo sapiens
  misc_RNA (1)...(19): siRNA sense strand
ggaaaucaaugcagaagcu

SEQ ID NO: 1327975 - RNA, 19 nt, Homo sapiens
  misc_RNA (1)...(19): siRNA sense strand
gcucuucucugcagacaau

SEQ ID NO: 1327976 - RNA, 19 nt, Homo sapiens
  misc_RNA (1)...(19): siRNA sense strand
agacaauaaugaaguggua

SEQ ID NO: 1327977 - RNA, 19 nt, Homo sapiens
  misc_RNA (1)...(19): siRNA sense strand
gaaggagacucugaauucu

SEQ ID NO: 1327978 - RNA, 19 nt, Homo sapiens
  misc_RNA (1)...(19): siRNA sense strand
agacuaaagugcuaacuca

SEQ ID NO: 1327979 - RNA, 19 nt, Homo sapiens
  misc_RNA (1)...(19): siRNA sense strand
ggaaacgaugccuguauuu

SEQ ID NO: 1327980 - RNA, 19 nt, Homo sapiens
  misc_RNA (1)...(19): siRNA sense strand
cggaaacgaugccuguauu

SEQ ID NO: 1327981 - RNA, 19 nt, Homo sapiens
  misc_RNA (1)...(19): siRNA sense strand
ucaaagaacuaagguugga

SEQ ID NO: 1327982 - RNA, 19 nt, Homo sapiens
  misc_RNA (1)...(19): siRNA sense strand
gaacuucacaauugaugga

SEQ ID NO: 1327983 - RNA, 19 nt, Homo sapiens
  misc_RNA (1)...(19): siRNA sense strand
agaaggagacucugaauuc

SEQ ID NO: 1327984 - RNA, 19 nt, Homo sapiens
  misc_RNA (1)...(19): siRNA sense strand
gguaguaggagcugaaaga

SEQ ID NO: 1327985 - RNA, 19 nt, Homo sapiens
  misc_RNA (1)...(19): siRNA sense strand
ugcagaagcuggcaauaug

SEQ ID NO: 1327986 - RNA, 19 nt, Homo sapiens
  misc_RNA (1)...(19): siRNA sense strand
ugaccagacuaaagugcua

SEQ ID NO: 1327987 - RNA, 19 nt, Homo sapiens
  misc_RNA (1)...(19): siRNA sense strand
ccaacccggucucuaguga

SEQ ID NO: 1327988 - RNA, 19 nt, Homo sapiens
  misc_RNA (1)...(19): siRNA sense strand
ucaaugaccagacuaaagu

SEQ ID NO: 1327989 - RNA, 19 nt, Homo sapiens
  misc_RNA (1)...(19): siRNA sense strand
caaaaggaguggaaaucaa

SEQ ID NO: 1327990 - RNA, 19 nt, Homo sapiens
  misc_RNA (1)...(19): siRNA sense strand
gugcuaacucagcuuauaa

SEQ ID NO: 1327991 - RNA, 19 nt, Homo sapiens
  misc_RNA (1)...(19): siRNA sense strand
aaagugcuaacucagcuua

SEQ ID NO: 1327992 - RNA, 19 nt, Homo sapiens
  misc_RNA (1)...(19): siRNA sense strand
gcuagaaggagacucugaa

SEQ ID NO: 1327993 - RNA, 19 nt, Homo sapiens
  misc_RNA (1)...(19): siRNA sense strand
guccugcuccucaugauuu

SEQ ID NO: 1327994 - RNA, 19 nt, Homo sapiens
  misc_RNA (1)...(19): siRNA sense strand
aguguucccuaaaucuaua

SEQ ID NO: 1327995 - RNA, 19 nt, Homo sapiens
  misc_RNA (1)...(19): siRNA sense strand
gagcggagggcacaguguu

SEQ ID NO: 1327996 - RNA, 19 nt, Homo sapiens
  misc_RNA (1)...(19): siRNA sense strand
ggccacagguauacaaggu

SEQ ID NO: 1327997 - RNA, 19 nt, Homo sapiens
  misc_RNA (1)...(19): siRNA sense strand
ccaucuggauucucaaagu

SEQ ID NO: 1327998 - RNA, 19 nt, Homo sapiens
  misc_RNA (1)...(19): siRNA sense strand
cccuaaaucuauagaaaca

SEQ ID NO: 1327999 - RNA, 19 nt, Homo sapiens
  misc_RNA (1)...(19): siRNA sense strand
agugcuaacucagcuuaua

SEQ ID NO: 1328000 - RNA, 19 nt, Homo sapiens
  misc_RNA (1)...(19): siRNA sense strand
gcggaaacgaugccuguau

SEQ ID NO: 1328001 - RNA, 19 nt, Homo sapiens
  misc_RNA (1)...(19): siRNA sense strand
ggcacaguguucccuaaau

SEQ ID NO: 1328002 - RNA, 19 nt, Homo sapiens
  misc_RNA (1)...(19): siRNA sense strand
caauaaugaagugguagua

SEQ ID NO: 1328003 - RNA, 19 nt, Homo sapiens
  misc_RNA (1)...(19): siRNA sense strand
gggcagaccccuucaaaga

SEQ ID NO: 1328004 - RNA, 19 nt, Homo sapiens
  misc_RNA (1)...(19): siRNA sense strand
gccaugaccaucuggauuc

SEQ ID NO: 1328005 - RNA, 19 nt, Homo sapiens
  misc_RNA (1)...(19): siRNA sense strand
aaacgaugccuguauuucu

SEQ ID NO: 1328006 - RNA, 19 nt, Homo sapiens
  misc_RNA (1)...(19): siRNA sense strand
uauacaagguggggauuua

SEQ ID NO: 1328007 - RNA, 19 nt, Homo sapiens
  misc_RNA (1)...(19): siRNA sense strand
caucuggauucucaaaguc

SEQ ID NO: 1328008 - RNA, 19 nt, Homo sapiens
  misc_RNA (1)...(19): siRNA sense strand
gaccaucuggauucucaaa

SEQ ID NO: 1328009 - RNA, 19 nt, Homo sapiens
  misc_RNA (1)...(19): siRNA sense strand
aacgaugccuguauuucuu

SEQ ID NO: 1328010 - RNA, 19 nt, Homo sapiens
  misc_RNA (1)...(19): siRNA sense strand
cuucacaauugauggaaug

SEQ ID NO: 1328011 - RNA, 19 nt, Homo sapiens
  misc_RNA (1)...(19): siRNA sense strand
cuggugaacuuggccauga

SEQ ID NO: 1328012 - RNA, 19 nt, Homo sapiens
  misc_RNA (1)...(19): siRNA sense strand
auagaaacaccuaauguca

SEQ ID NO: 1328013 - RNA, 19 nt, Homo sapiens
  misc_RNA (1)...(19): siRNA sense strand
gggcacaguguucccuaaa

SEQ ID NO: 1328014 - RNA, 19 nt, Homo sapiens
  misc_RNA (1)...(19): siRNA sense strand
uagaaggagacucugaauu

SEQ ID NO: 1328015 - RNA, 19 nt, Homo sapiens
  misc_RNA (1)...(19): siRNA sense strand
gaaaccugaggaucacaga

SEQ ID NO: 1328016 - RNA, 19 nt, Homo sapiens
  misc_RNA (1)...(19): siRNA sense strand
ggccaugaccaucuggauu

SEQ ID NO: 1328017 - RNA, 19 nt, Homo sapiens
  misc_RNA (1)...(19): siRNA sense strand
ccguagaagcuuaugguaa

SEQ ID NO: 1328018 - RNA, 19 nt, Homo sapiens
  misc_RNA (1)...(19): siRNA sense strand
uaaugaagugguaguagga

SEQ ID NO: 1328019 - RNA, 19 nt, Homo sapiens
  misc_RNA (1)...(19): siRNA sense strand
gcagaagcuggcaauaugg

SEQ ID NO: 1328020 - RNA, 19 nt, Homo sapiens
  misc_RNA (1)...(19): siRNA sense strand
caaccucucuacgccaaag

SEQ ID NO: 1328021 - RNA, 19 nt, Homo sapiens
  misc_RNA (1)...(19): siRNA sense strand
cuauagaaacaccuaaugu

SEQ ID NO: 1328022 - RNA, 19 nt, Homo sapiens
  misc_RNA (1)...(19): siRNA sense strand
gccagaaauguuacaguga

SEQ ID NO: 1328023 - RNA, 19 nt, Homo sapiens
  misc_RNA (1)...(19): siRNA sense strand
uauagaaacaccuaauguc

SEQ ID NO: 1328024 - RNA, 19 nt, Homo sapiens
  misc_RNA (1)...(19): siRNA sense strand
caauugauggaaugggaaa

SEQ ID NO: 1328025 - RNA, 19 nt, Homo sapiens
  misc_RNA (1)...(19): siRNA sense strand
aaccugaggaucacagaaa

SEQ ID NO: 1328026 - RNA, 19 nt, Homo sapiens
  misc_RNA (1)...(19): siRNA sense strand
gcaccaugccuggcucugu

SEQ ID NO: 1328027 - RNA, 19 nt, Homo sapiens
  misc_RNA (1)...(19): siRNA sense strand
acaguguucccuaaaucua

SEQ ID NO: 1328028 - RNA, 19 nt, Homo sapiens
  misc_RNA (1)...(19): siRNA sense strand
ucucuacgccaaagaaauc

SEQ ID NO: 1328029 - RNA, 19 nt, Homo sapiens
  misc_RNA (1)...(19): siRNA sense strand
gaaugggaaaccugaggau

SEQ ID NO: 1328030 - RNA, 19 nt, Homo sapiens
  misc_RNA (1)...(19): siRNA sense strand
ucucugcagacaauaauga

SEQ ID NO: 1328031 - RNA, 19 nt, Homo sapiens
  misc_RNA (1)...(19): siRNA sense strand
uaguaggagcugaaagauu

SEQ ID NO: 1328032 - RNA, 19 nt, Homo sapiens
  misc_RNA (1)...(19): siRNA sense strand
gcagaccccuucaaagaac

SEQ ID NO: 1328033 - RNA, 19 nt, Homo sapiens
  misc_RNA (1)...(19): siRNA sense strand
cagaaauguuacagugaac

SEQ ID NO: 1328034 - RNA, 19 nt, Homo sapiens
  misc_RNA (1)...(19): siRNA sense strand
cagaagcuggcaauaugga

SEQ ID NO: 1328035 - RNA, 19 nt, Homo sapiens
  misc_RNA (1)...(19): siRNA sense strand
aacccggucucuagugaug

SEQ ID NO: 1328036 - RNA, 19 nt, Homo sapiens
  misc_RNA (1)...(19): siRNA sense strand
cgaugccuguauuucuuug

SEQ ID NO: 1328037 - RNA, 19 nt, Homo sapiens
  misc_RNA (1)...(19): siRNA sense strand
gcugaaagauuacgaguuu

SEQ ID NO: 1328038 - RNA, 19 nt, Homo sapiens
  misc_RNA (1)...(19): siRNA sense strand
aguaggagcugaaagauua

SEQ ID NO: 1328039 - RNA, 19 nt, Homo sapiens
  misc_RNA (1)...(19): siRNA sense strand
cguagaagcuuaugguaaa

SEQ ID NO: 1328040 - RNA, 19 nt, Homo sapiens
  misc_RNA (1)...(19): siRNA sense strand
aggagacucugaauucuua

SEQ ID NO: 1328041 - RNA, 19 nt, Homo sapiens
  misc_RNA (1)...(19): siRNA sense strand
gcacaguguucccuaaauc

SEQ ID NO: 1328042 - RNA, 19 nt, Homo sapiens
  misc_RNA (1)...(19): siRNA sense strand
ccagaaauguuacagugaa

SEQ ID NO: 1328043 - RNA, 19 nt, Homo sapiens
  misc_RNA (1)...(19): siRNA sense strand
ggaaaucaaugcagaagcu

SEQ ID NO: 1328044 - RNA, 19 nt, Homo sapiens
  misc_RNA (1)...(19): siRNA sense strand
gcucuucucugcagacaau

SEQ ID NO: 1328045 - RNA, 19 nt, Homo sapiens
  misc_RNA (1)...(19): siRNA sense strand
agacaauaaugaaguggua

SEQ ID NO: 1328046 - RNA, 19 nt, Homo sapiens
  misc_RNA (1)...(19): siRNA sense strand
gaaggagacucugaauucu

SEQ ID NO: 1328047 - RNA, 19 nt, Homo sapiens
  misc_RNA (1)...(19): siRNA sense strand
agacuaaagugcuaacuca

SEQ ID NO: 1328048 - RNA, 19 nt, Homo sapiens
  misc_RNA (1)...(19): siRNA sense strand
ggaaacgaugccuguauuu

SEQ ID NO: 1328049 - RNA, 19 nt, Homo sapiens
  misc_RNA (1)...(19): siRNA sense strand
cggaaacgaugccuguauu

SEQ ID NO: 1328050 - RNA, 19 nt, Homo sapiens
  misc_RNA (1)...(19): siRNA sense strand
ucaaagaacuaagguugga

SEQ ID NO: 1328051 - RNA, 19 nt, Homo sapiens
  misc_RNA (1)...(19): siRNA sense strand
gaacuucacaauugaugga

SEQ ID NO: 1328052 - RNA, 19 nt, Homo sapiens
  misc_RNA (1)...(19): siRNA sense strand
agaaggagacucugaauuc

SEQ ID NO: 1328053 - RNA, 19 nt, Homo sapiens
  misc_RNA (1)...(19): siRNA sense strand
gguaguaggagcugaaaga

SEQ ID NO: 1328054 - RNA, 19 nt, Homo sapiens
  misc_RNA (1)...(19): siRNA sense strand
ugcagaagcuggcaauaug

SEQ ID NO: 1328055 - RNA, 19 nt, Homo sapiens
  misc_RNA (1)...(19): siRNA sense strand
ugaccagacuaaagugcua

SEQ ID NO: 1328056 - RNA, 19 nt, Homo sapiens
  misc_RNA (1)...(19): siRNA sense strand
ccaacccggucucuaguga

SEQ ID NO: 1328057 - RNA, 19 nt, Homo sapiens
  misc_RNA (1)...(19): siRNA sense strand
ucaaugaccagacuaaagu

SEQ ID NO: 1328058 - RNA, 19 nt, Homo sapiens
  misc_RNA (1)...(19): siRNA sense strand
caaaaggaguggaaaucaa

SEQ ID NO: 1328059 - RNA, 19 nt, Homo sapiens
  misc_RNA (1)...(19): siRNA sense strand
gugcuaacucagcuuauaa

SEQ ID NO: 1328060 - RNA, 19 nt, Homo sapiens
  misc_RNA (1)...(19): siRNA sense strand
aaagugcuaacucagcuua

SEQ ID NO: 1328061 - RNA, 19 nt, Homo sapiens
  misc_RNA (1)...(19): siRNA sense strand
gcuagaaggagacucugaa

SEQ ID NO: 1328062 - RNA, 19 nt, Homo sapiens
  misc_RNA (1)...(19): siRNA sense strand
guccugcuccucaugauuu

SEQ ID NO: 1328063 - RNA, 19 nt, Homo sapiens
  misc_RNA (1)...(19): siRNA sense strand
aguguucccuaaaucuaua

SEQ ID NO: 1328064 - RNA, 19 nt, Homo sapiens
  misc_RNA (1)...(19): siRNA sense strand
gagcggagggcacaguguu

SEQ ID NO: 1328065 - RNA, 19 nt, Homo sapiens
  misc_RNA (1)...(19): siRNA sense strand
ggccacagguauacaaggu

SEQ ID NO: 1328066 - RNA, 19 nt, Homo sapiens
  misc_RNA (1)...(19): siRNA sense strand
ccaucuggauucucaaagu

SEQ ID NO: 1328067 - RNA, 19 nt, Homo sapiens
  misc_RNA (1)...(19): siRNA sense strand
cccuaaaucuauagaaaca

SEQ ID NO: 1328068 - RNA, 19 nt, Homo sapiens
  misc_RNA (1)...(19): siRNA sense strand
agugcuaacucagcuuaua

SEQ ID NO: 1328069 - RNA, 19 nt, Homo sapiens
  misc_RNA (1)...(19): siRNA sense strand
gcggaaacgaugccuguau

SEQ ID NO: 1328070 - RNA, 19 nt, Homo sapiens
  misc_RNA (1)...(19): siRNA sense strand
ggcacaguguucccuaaau

SEQ ID NO: 1328071 - RNA, 19 nt, Homo sapiens
  misc_RNA (1)...(19): siRNA sense strand
caauaaugaagugguagua

SEQ ID NO: 1328072 - RNA, 19 nt, Homo sapiens
  misc_RNA (1)...(19): siRNA sense strand
gggcagaccccuucaaaga

SEQ ID NO: 1328073 - RNA, 19 nt, Homo sapiens
  misc_RNA (1)...(19): siRNA sense strand
gccaugaccaucuggauuc

SEQ ID NO: 1328074 - RNA, 19 nt, Homo sapiens
  misc_RNA (1)...(19): siRNA sense strand
aaacgaugccuguauuucu

SEQ ID NO: 1328075 - RNA, 19 nt, Homo sapiens
  misc_RNA (1)...(19): siRNA sense strand
uauacaagguggggauuua

SEQ ID NO: 1328076 - RNA, 19 nt, Homo sapiens
  misc_RNA (1)...(19): siRNA sense strand
caucuggauucucaaaguc

SEQ ID NO: 1328077 - RNA, 19 nt, Homo sapiens
  misc_RNA (1)...(19): siRNA sense strand
gaccaucuggauucucaaa

SEQ ID NO: 1328078 - RNA, 19 nt, Homo sapiens
  misc_RNA (1)...(19): siRNA sense strand
aacgaugccuguauuucuu

SEQ ID NO: 1328079 - RNA, 19 nt, Homo sapiens
  misc_RNA (1)...(19): siRNA sense strand
cuucacaauugauggaaug

SEQ ID NO: 1328080 - RNA, 19 nt, Homo sapiens
  misc_RNA (1)...(19): siRNA sense strand
cuggugaacuuggccauga

SEQ ID NO: 1328081 - RNA, 19 nt, Homo sapiens
  misc_RNA (1)...(19): siRNA sense strand
auagaaacaccuaauguca

SEQ ID NO: 1328082 - RNA, 19 nt, Homo sapiens
  misc_RNA (1)...(19): siRNA sense strand
gggcacaguguucccuaaa

SEQ ID NO: 1328083 - RNA, 19 nt, Homo sapiens
  misc_RNA (1)...(19): siRNA sense strand
uagaaggagacucugaauu

SEQ ID NO: 1328084 - RNA, 19 nt, Homo sapiens
  misc_RNA (1)...(19): siRNA sense strand
gaaaccugaggaucacaga

SEQ ID NO: 1328085 - RNA, 19 nt, Homo sapiens
  misc_RNA (1)...(19): siRNA sense strand
ggccaugaccaucuggauu

SEQ ID NO: 1328086 - RNA, 19 nt, Homo sapiens
  misc_RNA (1)...(19): siRNA sense strand
ccguagaagcuuaugguaa

SEQ ID NO: 1328087 - RNA, 19 nt, Homo sapiens
  misc_RNA (1)...(19): siRNA sense strand
uaaugaagugguaguagga

SEQ ID NO: 1328088 - RNA, 19 nt, Homo sapiens
  misc_RNA (1)...(19): siRNA sense strand
gcagaagcuggcaauaugg

SEQ ID NO: 1328089 - RNA, 19 nt, Homo sapiens
  misc_RNA (1)...(19): siRNA sense strand
caaccucucuacgccaaag

SEQ ID NO: 1328090 - RNA, 19 nt, Homo sapiens
  misc_RNA (1)...(19): siRNA sense strand
cuauagaaacaccuaaugu

SEQ ID NO: 1328091 - RNA, 19 nt, Homo sapiens
  misc_RNA (1)...(19): siRNA sense strand
gccagaaauguuacaguga

SEQ ID NO: 1328092 - RNA, 19 nt, Homo sapiens
  misc_RNA (1)...(19): siRNA sense strand
uauagaaacaccuaauguc

SEQ ID NO: 1328093 - RNA, 19 nt, Homo sapiens
  misc_RNA (1)...(19): siRNA sense strand
caauugauggaaugggaaa

SEQ ID NO: 1328094 - RNA, 19 nt, Homo sapiens
  misc_RNA (1)...(19): siRNA sense strand
aaccugaggaucacagaaa

SEQ ID NO: 1328095 - RNA, 19 nt, Homo sapiens
  misc_RNA (1)...(19): siRNA sense strand
gcaccaugccuggcucugu

SEQ ID NO: 1328096 - RNA, 19 nt, Homo sapiens
  misc_RNA (1)...(19): siRNA sense strand
acaguguucccuaaaucua

SEQ ID NO: 1328097 - RNA, 19 nt, Homo sapiens
  misc_RNA (1)...(19): siRNA sense strand
ucucuacgccaaagaaauc

SEQ ID NO: 1328098 - RNA, 19 nt, Homo sapiens
  misc_RNA (1)...(19): siRNA sense strand
gaaugggaaaccugaggau

SEQ ID NO: 1328099 - RNA, 19 nt, Homo sapiens
  misc_RNA (1)...(19): siRNA sense strand
ucucugcagacaauaauga

SEQ ID NO: 1328100 - RNA, 19 nt, Homo sapiens
  misc_RNA (1)...(19): siRNA sense strand
uaguaggagcugaaagauu

SEQ ID NO: 1328101 - RNA, 19 nt, Homo sapiens
  misc_RNA (1)...(19): siRNA sense strand
gcagaccccuucaaagaac

SEQ ID NO: 1328102 - RNA, 19 nt, Homo sapiens
  misc_RNA (1)...(19): siRNA sense strand
cagaaauguuacagugaac

SEQ ID NO: 1328103 - RNA, 19 nt, Homo sapiens
  misc_RNA (1)...(19): siRNA sense strand
cagaagcuggcaauaugga

SEQ ID NO: 1328104 - RNA, 19 nt, Homo sapiens
  misc_RNA (1)...(19): siRNA sense strand
aacccggucucuagugaug

SEQ ID NO: 1328105 - RNA, 19 nt, Homo sapiens
  misc_RNA (1)...(19): siRNA sense strand
cgaugccuguauuucuuug

SEQ ID NO: 1328106 - RNA, 19 nt, Homo sapiens
  misc_RNA (1)...(19): siRNA sense strand
ggaagaagauauagaccaa

SEQ ID NO: 1328107 - RNA, 19 nt, Homo sapiens
  misc_RNA (1)...(19): siRNA sense strand
gaagaaccaccaacugaaa

SEQ ID NO: 1328108 - RNA, 19 nt, Homo sapiens
  misc_RNA (1)...(19): siRNA sense strand
gaagggaaaccacagcuuu

SEQ ID NO: 1328109 - RNA, 19 nt, Homo sapiens
  misc_RNA (1)...(19): siRNA sense strand
gccagagccucaacaagaa

SEQ ID NO: 1328110 - RNA, 19 nt, Homo sapiens
  misc_RNA (1)...(19): siRNA sense strand
aagaagauauagaccaaga

SEQ ID NO: 1328111 - RNA, 19 nt, Homo sapiens
  misc_RNA (1)...(19): siRNA sense strand
ucaagugccuaaccuggaa

SEQ ID NO: 1328112 - RNA, 19 nt, Homo sapiens
  misc_RNA (1)...(19): siRNA sense strand
gaagagagaagaugaucag

SEQ ID NO: 1328113 - RNA, 19 nt, Homo sapiens
  misc_RNA (1)...(19): siRNA sense strand
gaucauacaccuggucaga

SEQ ID NO: 1328114 - RNA, 19 nt, Homo sapiens
  misc_RNA (1)...(19): siRNA sense strand
aagaagaaccaccaacuga

SEQ ID NO: 1328115 - RNA, 19 nt, Homo sapiens
  misc_RNA (1)...(19): siRNA sense strand
agacgauguuuacgacuug

SEQ ID NO: 1328116 - RNA, 19 nt, Homo sapiens
  misc_RNA (1)...(19): siRNA sense strand
ucauacaccuggucagaag

SEQ ID NO: 1328117 - RNA, 19 nt, Homo sapiens
  misc_RNA (1)...(19): siRNA sense strand
ugccagagccucaacaaga

SEQ ID NO: 1328118 - RNA, 19 nt, Homo sapiens
  misc_RNA (1)...(19): siRNA sense strand
caagaagaaccaccaacug

SEQ ID NO: 1328119 - RNA, 19 nt, Homo sapiens
  misc_RNA (1)...(19): siRNA sense strand
ggagcugucucagucaaag

SEQ ID NO: 1328120 - RNA, 19 nt, Homo sapiens
  misc_RNA (1)...(19): siRNA sense strand
aagggaaaccacagcuuua

SEQ ID NO: 1328121 - RNA, 19 nt, Homo sapiens
  misc_RNA (1)...(19): siRNA sense strand
agaagaaccaccaacugaa

SEQ ID NO: 1328122 - RNA, 19 nt, Homo sapiens
  misc_RNA (1)...(19): siRNA sense strand
ggaagggaaaccacagcuu

SEQ ID NO: 1328123 - RNA, 19 nt, Homo sapiens
  misc_RNA (1)...(19): siRNA sense strand
ggaugaaugcggagauagu

SEQ ID NO: 1328124 - RNA, 19 nt, Homo sapiens
  misc_RNA (1)...(19): siRNA sense strand
aagacgauguuuacgacuu

SEQ ID NO: 1328125 - RNA, 19 nt, Homo sapiens
  misc_RNA (1)...(19): siRNA sense strand
caacaagaagaaccaccaa

SEQ ID NO: 1328126 - RNA, 19 nt, Homo sapiens
  misc_RNA (1)...(19): siRNA sense strand
gggugcagcugagauucaa

SEQ ID NO: 1328127 - RNA, 19 nt, Homo sapiens
  misc_RNA (1)...(19): siRNA sense strand
uggcgaggaagaagauaua

SEQ ID NO: 1328128 - RNA, 19 nt, Homo sapiens
  misc_RNA (1)...(19): siRNA sense strand
caggagcugucucagucaa

SEQ ID NO: 1328129 - RNA, 19 nt, Homo sapiens
  misc_RNA (1)...(19): siRNA sense strand
gcggagauaguccugaugu

SEQ ID NO: 1328130 - RNA, 19 nt, Homo sapiens
  misc_RNA (1)...(19): siRNA sense strand
agauauagaccaagacgau

SEQ ID NO: 1328131 - RNA, 19 nt, Homo sapiens
  misc_RNA (1)...(19): siRNA sense strand
ggucagaagagagaagaug

SEQ ID NO: 1328132 - RNA, 19 nt, Homo sapiens
  misc_RNA (1)...(19): siRNA sense strand
gcgaggaagaagauauaga

SEQ ID NO: 1328133 - RNA, 19 nt, Homo sapiens
  misc_RNA (1)...(19): siRNA sense strand
cgaggaagaagauauagac

SEQ ID NO: 1328134 - RNA, 19 nt, Homo sapiens
  misc_RNA (1)...(19): siRNA sense strand
agaccaagacgauguuuac

SEQ ID NO: 1328135 - RNA, 19 nt, Homo sapiens
  misc_RNA (1)...(19): siRNA sense strand
gucagaagagagaagauga

SEQ ID NO: 1328136 - RNA, 19 nt, Homo sapiens
  misc_RNA (1)...(19): siRNA sense strand
uagaccaagacgauguuua

SEQ ID NO: 1328137 - RNA, 19 nt, Homo sapiens
  misc_RNA (1)...(19): siRNA sense strand
ggggaugaaugcggagaua

SEQ ID NO: 1328138 - RNA, 19 nt, Homo sapiens
  misc_RNA (1)...(19): siRNA sense strand
gaaagucaggaucauacac

SEQ ID NO: 1328139 - RNA, 19 nt, Homo sapiens
  misc_RNA (1)...(19): siRNA sense strand
gaugaaugcggagauaguc

SEQ ID NO: 1328140 - RNA, 19 nt, Homo sapiens
  misc_RNA (1)...(19): siRNA sense strand
gaaccaccaacugaaaguc

SEQ ID NO: 1328141 - RNA, 19 nt, Homo sapiens
  misc_RNA (1)...(19): siRNA sense strand
agggaaaccacagcuuuaa

SEQ ID NO: 1328142 - RNA, 19 nt, Homo sapiens
  misc_RNA (1)...(19): siRNA sense strand
cgaggaagaucaacauaua

SEQ ID NO: 1328143 - RNA, 19 nt, Homo sapiens
  misc_RNA (1)...(19): siRNA sense strand
ucaagugccugaccuggaa

SEQ ID NO: 1328144 - RNA, 19 nt, Homo sapiens
  misc_RNA (1)...(19): siRNA sense strand
gaggaaccaccaacugaaa

SEQ ID NO: 1328145 - RNA, 19 nt, Homo sapiens
  misc_RNA (1)...(19): siRNA sense strand
gcgaggaagaucaacauau

SEQ ID NO: 1328146 - RNA, 19 nt, Homo sapiens
  misc_RNA (1)...(19): siRNA sense strand
ggagagagaagaagaucag

SEQ ID NO: 1328147 - RNA, 19 nt, Homo sapiens
  misc_RNA (1)...(19): siRNA sense strand
ggagcugucucagucaaag

SEQ ID NO: 1328148 - RNA, 19 nt, Homo sapiens
  misc_RNA (1)...(19): siRNA sense strand
caagaggaaccaccaacug

SEQ ID NO: 1328149 - RNA, 19 nt, Homo sapiens
  misc_RNA (1)...(19): siRNA sense strand
aagaggaaccaccaacuga

SEQ ID NO: 1328150 - RNA, 19 nt, Homo sapiens
  misc_RNA (1)...(19): siRNA sense strand
guggaaaugguccugauga

SEQ ID NO: 1328151 - RNA, 19 nt, Homo sapiens
  misc_RNA (1)...(19): siRNA sense strand
gaggaagaucaacauauag

SEQ ID NO: 1328152 - RNA, 19 nt, Homo sapiens
  misc_RNA (1)...(19): siRNA sense strand
gcaagaggaaccaccaacu

SEQ ID NO: 1328153 - RNA, 19 nt, Homo sapiens
  misc_RNA (1)...(19): siRNA sense strand
caggagcugucucagucaa

SEQ ID NO: 1328154 - RNA, 19 nt, Homo sapiens
  misc_RNA (1)...(19): siRNA sense strand
ggaaccaccaacugaaagu

SEQ ID NO: 1328155 - RNA, 19 nt, Homo sapiens
  misc_RNA (1)...(19): siRNA sense strand
gggugaauguggaaauggu

SEQ ID NO: 1328156 - RNA, 19 nt, Homo sapiens
  misc_RNA (1)...(19): siRNA sense strand
ggcgaggaagaucaacaua

SEQ ID NO: 1328157 - RNA, 19 nt, Homo sapiens
  misc_RNA (1)...(19): siRNA sense strand
agaggaaccaccaacugaa

SEQ ID NO: 1328158 - RNA, 19 nt, Homo sapiens
  misc_RNA (1)...(19): siRNA sense strand
gaaccaccaacugaaaguc

SEQ ID NO: 1328159 - RNA, 19 nt, Homo sapiens
  misc_RNA (1)...(19): siRNA sense strand
cgaggaagaucaacauaua

SEQ ID NO: 1328160 - RNA, 19 nt, Homo sapiens
  misc_RNA (1)...(19): siRNA sense strand
ucaagugccugaccuggaa

SEQ ID NO: 1328161 - RNA, 19 nt, Homo sapiens
  misc_RNA (1)...(19): siRNA sense strand
gaggaaccaccaacugaaa

SEQ ID NO: 1328162 - RNA, 19 nt, Homo sapiens
  misc_RNA (1)...(19): siRNA sense strand
gcgaggaagaucaacauau

SEQ ID NO: 1328163 - RNA, 19 nt, Homo sapiens
  misc_RNA (1)...(19): siRNA sense strand
ggagagagaagaagaucag

SEQ ID NO: 1328164 - RNA, 19 nt, Homo sapiens
  misc_RNA (1)...(19): siRNA sense strand
ggagcugucucagucaaag

SEQ ID NO: 1328165 - RNA, 19 nt, Homo sapiens
  misc_RNA (1)...(19): siRNA sense strand
caagaggaaccaccaacug

SEQ ID NO: 1328166 - RNA, 19 nt, Homo sapiens
  misc_RNA (1)...(19): siRNA sense strand
aagaggaaccaccaacuga

SEQ ID NO: 1328167 - RNA, 19 nt, Homo sapiens
  misc_RNA (1)...(19): siRNA sense strand
guggaaaugguccugauga

SEQ ID NO: 1328168 - RNA, 19 nt, Homo sapiens
  misc_RNA (1)...(19): siRNA sense strand
gaggaagaucaacauauag

SEQ ID NO: 1328169 - RNA, 19 nt, Homo sapiens
  misc_RNA (1)...(19): siRNA sense strand
gcaagaggaaccaccaacu

SEQ ID NO: 1328170 - RNA, 19 nt, Homo sapiens
  misc_RNA (1)...(19): siRNA sense strand
caggagcugucucagucaa

SEQ ID NO: 1328171 - RNA, 19 nt, Homo sapiens
  misc_RNA (1)...(19): siRNA sense strand
ggaaccaccaacugaaagu

SEQ ID NO: 1328172 - RNA, 19 nt, Homo sapiens
  misc_RNA (1)...(19): siRNA sense strand
gggugaauguggaaauggu

SEQ ID NO: 1328173 - RNA, 19 nt, Homo sapiens
  misc_RNA (1)...(19): siRNA sense strand
ggcgaggaagaucaacaua

SEQ ID NO: 1328174 - RNA, 19 nt, Homo sapiens
  misc_RNA (1)...(19): siRNA sense strand
agaggaaccaccaacugaa

SEQ ID NO: 1328175 - RNA, 19 nt, Homo sapiens
  misc_RNA (1)...(19): siRNA sense strand
gaaccaccaacugaaaguc

SEQ ID NO: 1328176 - RNA, 19 nt, Homo sapiens
  misc_RNA (1)...(19): siRNA sense strand
ggugguaccugcacauuug

SEQ ID NO: 1328177 - RNA, 19 nt, Homo sapiens
  misc_RNA (1)...(19): siRNA sense strand
gcacgucgguggcagcuau

SEQ ID NO: 1328178 - RNA, 19 nt, Homo sapiens
  misc_RNA (1)...(19): siRNA sense strand
gcacauuuguccaggaaga

SEQ ID NO: 1328179 - RNA, 19 nt, Homo sapiens
  misc_RNA (1)...(19): siRNA sense strand
ccagagggcugaagcuuag

SEQ ID NO: 1328180 - RNA, 19 nt, Homo sapiens
  misc_RNA (1)...(19): siRNA sense strand
agagaaggcucgcaagcaa

SEQ ID NO: 1328181 - RNA, 19 nt, Homo sapiens
  misc_RNA (1)...(19): siRNA sense strand
aaaccaaagcugagaguaa

SEQ ID NO: 1328182 - RNA, 19 nt, Homo sapiens
  misc_RNA (1)...(19): siRNA sense strand
ccagcaaggucaagaaugg

SEQ ID NO: 1328183 - RNA, 19 nt, Homo sapiens
  misc_RNA (1)...(19): siRNA sense strand
gccagagggcugaagcuua

SEQ ID NO: 1328184 - RNA, 19 nt, Homo sapiens
  misc_RNA (1)...(19): siRNA sense strand
ucaaauuaguucccaagca

SEQ ID NO: 1328185 - RNA, 19 nt, Homo sapiens
  misc_RNA (1)...(19): siRNA sense strand
ccacuggcagcuucaaauu

SEQ ID NO: 1328186 - RNA, 19 nt, Homo sapiens
  misc_RNA (1)...(19): siRNA sense strand
ucuacauccugcacaagua

SEQ ID NO: 1328187 - RNA, 19 nt, Homo sapiens
  misc_RNA (1)...(19): siRNA sense strand
acuggcagcuucaaauuag

SEQ ID NO: 1328188 - RNA, 19 nt, Homo sapiens
  misc_RNA (1)...(19): siRNA sense strand
caacgugggcaaggugaaa

SEQ ID NO: 1328189 - RNA, 19 nt, Homo sapiens
  misc_RNA (1)...(19): siRNA sense strand
aaccaaagcugagaguaag

SEQ ID NO: 1328190 - RNA, 19 nt, Homo sapiens
  misc_RNA (1)...(19): siRNA sense strand
cacuggcagcuucaaauua

SEQ ID NO: 1328191 - RNA, 19 nt, Homo sapiens
  misc_RNA (1)...(19): siRNA sense strand
ccaagaggccagcaaaggu

SEQ ID NO: 1328192 - RNA, 19 nt, Homo sapiens
  misc_RNA (1)...(19): siRNA sense strand
caaggccucaucauccaaa

SEQ ID NO: 1328193 - RNA, 19 nt, Homo sapiens
  misc_RNA (1)...(19): siRNA sense strand
gcugaggccuacaggaaaa

SEQ ID NO: 1328194 - RNA, 19 nt, Homo sapiens
  misc_RNA (1)...(19): siRNA sense strand
aagcugagaguaagaguuc

SEQ ID NO: 1328195 - RNA, 19 nt, Homo sapiens
  misc_RNA (1)...(19): siRNA sense strand
ggaaggcaaaggccaaagg

SEQ ID NO: 1328196 - RNA, 19 nt, Homo sapiens
  misc_RNA (1)...(19): siRNA sense strand
gagcgucaccagcgacauc

SEQ ID NO: 1328197 - RNA, 19 nt, Homo sapiens
  misc_RNA (1)...(19): siRNA sense strand
cugcacauuuguccaggaa

SEQ ID NO: 1328198 - RNA, 19 nt, Homo sapiens
  misc_RNA (1)...(19): siRNA sense strand
ggacguccuccgcuucaag

SEQ ID NO: 1328199 - RNA, 19 nt, Homo sapiens
  misc_RNA (1)...(19): siRNA sense strand
cagccaagaggccagcaaa

SEQ ID NO: 1328200 - RNA, 19 nt, Homo sapiens
  misc_RNA (1)...(19): siRNA sense strand
ggccucaucauccaaagug

SEQ ID NO: 1328201 - RNA, 19 nt, Homo sapiens
  misc_RNA (1)...(19): siRNA sense strand
gcugagaguaagaguucaa

SEQ ID NO: 1328202 - RNA, 19 nt, Homo sapiens
  misc_RNA (1)...(19): siRNA sense strand
gaaggaguuucacuacaau

SEQ ID NO: 1328203 - RNA, 19 nt, Homo sapiens
  misc_RNA (1)...(19): siRNA sense strand
agaaggaguuucacuacaa

SEQ ID NO: 1328204 - RNA, 19 nt, Homo sapiens
  misc_RNA (1)...(19): siRNA sense strand
gagaaggaguuucacuaca

SEQ ID NO: 1328205 - RNA, 19 nt, Homo sapiens
  misc_RNA (1)...(19): siRNA sense strand
gacaagggcuuugccacuu

SEQ ID NO: 1328206 - RNA, 19 nt, Homo sapiens
  misc_RNA (1)...(19): siRNA sense strand
ggagaggcagaucaagaua

SEQ ID NO: 1328207 - RNA, 19 nt, Homo sapiens
  misc_RNA (1)...(19): siRNA sense strand
ggaugcagcggaugaauuc

SEQ ID NO: 1328208 - RNA, 19 nt, Homo sapiens
  misc_RNA (1)...(19): siRNA sense strand
agaggcagaucaagauaug

SEQ ID NO: 1328209 - RNA, 19 nt, Homo sapiens
  misc_RNA (1)...(19): siRNA sense strand
ggagaaggaguuucacuac

SEQ ID NO: 1328210 - RNA, 19 nt, Homo sapiens
  misc_RNA (1)...(19): siRNA sense strand
cggacccgcugagacauua

SEQ ID NO: 1328211 - RNA, 19 nt, Homo sapiens
  misc_RNA (1)...(19): siRNA sense strand
gagaggcagaucaagauau

SEQ ID NO: 1328212 - RNA, 19 nt, Homo sapiens
  misc_RNA (1)...(19): siRNA sense strand
agacagaagagcagaagug

SEQ ID NO: 1328213 - RNA, 19 nt, Homo sapiens
  misc_RNA (1)...(19): siRNA sense strand
cgccagacauacacacguu

SEQ ID NO: 1328214 - RNA, 19 nt, Homo sapiens
  misc_RNA (1)...(19): siRNA sense strand
cgcuggagcuggagaagga

SEQ ID NO: 1328215 - RNA, 19 nt, Homo sapiens
  misc_RNA (1)...(19): siRNA sense strand
acaagggcuuugccacuuc

SEQ ID NO: 1328216 - RNA, 19 nt, Homo sapiens
  misc_RNA (1)...(19): siRNA sense strand
ugacggagaggcagaucaa

SEQ ID NO: 1328217 - RNA, 19 nt, Homo sapiens
  misc_RNA (1)...(19): siRNA sense strand
cggaugaauucgugcaaca

SEQ ID NO: 1328218 - RNA, 19 nt, Homo sapiens
  misc_RNA (1)...(19): siRNA sense strand
uggagaaggaguuucacua

SEQ ID NO: 1328219 - RNA, 19 nt, Homo sapiens
  misc_RNA (1)...(19): siRNA sense strand
gaugaauucgugcaacagu

SEQ ID NO: 1328220 - RNA, 19 nt, Homo sapiens
  misc_RNA (1)...(19): siRNA sense strand
ggccagcuaccgcucuauu

SEQ ID NO: 1328221 - RNA, 19 nt, Homo sapiens
  misc_RNA (1)...(19): siRNA sense strand
uuccagaaccgacgcauga

SEQ ID NO: 1328222 - RNA, 19 nt, Homo sapiens
  misc_RNA (1)...(19): siRNA sense strand
gccagacauacacacguua

SEQ ID NO: 1328223 - RNA, 19 nt, Homo sapiens
  misc_RNA (1)...(19): siRNA sense strand
cggagaggcagaucaagau

SEQ ID NO: 1328224 - RNA, 19 nt, Homo sapiens
  misc_RNA (1)...(19): siRNA sense strand
ggagcuggagaaggaguuu

SEQ ID NO: 1328225 - RNA, 19 nt, Homo sapiens
  misc_RNA (1)...(19): siRNA sense strand
cagaaccgacgcaugaagu

SEQ ID NO: 1328226 - RNA, 19 nt, Homo sapiens
  misc_RNA (1)...(19): siRNA sense strand
gcaggacaagagcguguuc

SEQ ID NO: 1328227 - RNA, 19 nt, Homo sapiens
  misc_RNA (1)...(19): siRNA sense strand
gacaagggcuuugccacuu

SEQ ID NO: 1328228 - RNA, 19 nt, Homo sapiens
  misc_RNA (1)...(19): siRNA sense strand
ggaugcagcggaugaauuc

SEQ ID NO: 1328229 - RNA, 19 nt, Homo sapiens
  misc_RNA (1)...(19): siRNA sense strand
cggacccgcugagacauua

SEQ ID NO: 1328230 - RNA, 19 nt, Homo sapiens
  misc_RNA (1)...(19): siRNA sense strand
agacagaagagcagaagug

SEQ ID NO: 1328231 - RNA, 19 nt, Homo sapiens
  misc_RNA (1)...(19): siRNA sense strand
acaagggcuuugccacuuc

SEQ ID NO: 1328232 - RNA, 19 nt, Homo sapiens
  misc_RNA (1)...(19): siRNA sense strand
cggaugaauucgugcaaca

SEQ ID NO: 1328233 - RNA, 19 nt, Homo sapiens
  misc_RNA (1)...(19): siRNA sense strand
gaugaauucgugcaacagu

SEQ ID NO: 1328234 - RNA, 19 nt, Homo sapiens
  misc_RNA (1)...(19): siRNA sense strand
ggccagcuaccgcucuauu

SEQ ID NO: 1328235 - RNA, 19 nt, Homo sapiens
  misc_RNA (1)...(19): siRNA sense strand
gcaggacaagagcguguuc

SEQ ID NO: 1328236 - RNA, 19 nt, Homo sapiens
  misc_RNA (1)...(19): siRNA sense strand
gaaggaguuucacuacaau

SEQ ID NO: 1328237 - RNA, 19 nt, Homo sapiens
  misc_RNA (1)...(19): siRNA sense strand
agaaggaguuucacuacaa

SEQ ID NO: 1328238 - RNA, 19 nt, Homo sapiens
  misc_RNA (1)...(19): siRNA sense strand
gagaaggaguuucacuaca

SEQ ID NO: 1328239 - RNA, 19 nt, Homo sapiens
  misc_RNA (1)...(19): siRNA sense strand
gacaagggcuuugccacuu

SEQ ID NO: 1328240 - RNA, 19 nt, Homo sapiens
  misc_RNA (1)...(19): siRNA sense strand
ggagaggcagaucaagaua

SEQ ID NO: 1328241 - RNA, 19 nt, Homo sapiens
  misc_RNA (1)...(19): siRNA sense strand
ggaugcagcggaugaauuc

SEQ ID NO: 1328242 - RNA, 19 nt, Homo sapiens
  misc_RNA (1)...(19): siRNA sense strand
agaggcagaucaagauaug

SEQ ID NO: 1328243 - RNA, 19 nt, Homo sapiens
  misc_RNA (1)...(19): siRNA sense strand
ggagaaggaguuucacuac

SEQ ID NO: 1328244 - RNA, 19 nt, Homo sapiens
  misc_RNA (1)...(19): siRNA sense strand
cggacccgcugagacauua

SEQ ID NO: 1328245 - RNA, 19 nt, Homo sapiens
  misc_RNA (1)...(19): siRNA sense strand
gagaggcagaucaagauau

SEQ ID NO: 1328246 - RNA, 19 nt, Homo sapiens
  misc_RNA (1)...(19): siRNA sense strand
agacagaagagcagaagug

SEQ ID NO: 1328247 - RNA, 19 nt, Homo sapiens
  misc_RNA (1)...(19): siRNA sense strand
cgccagacauacacacguu

SEQ ID NO: 1328248 - RNA, 19 nt, Homo sapiens
  misc_RNA (1)...(19): siRNA sense strand
cgcuggagcuggagaagga

SEQ ID NO: 1328249 - RNA, 19 nt, Homo sapiens
  misc_RNA (1)...(19): siRNA sense strand
acaagggcuuugccacuuc

SEQ ID NO: 1328250 - RNA, 19 nt, Homo sapiens
  misc_RNA (1)...(19): siRNA sense strand
ugacggagaggcagaucaa

SEQ ID NO: 1328251 - RNA, 19 nt, Homo sapiens
  misc_RNA (1)...(19): siRNA sense strand
cggaugaauucgugcaaca

SEQ ID NO: 1328252 - RNA, 19 nt, Homo sapiens
  misc_RNA (1)...(19): siRNA sense strand
uggagaaggaguuucacua

SEQ ID NO: 1328253 - RNA, 19 nt, Homo sapiens
  misc_RNA (1)...(19): siRNA sense strand
gaugaauucgugcaacagu

SEQ ID NO: 1328254 - RNA, 19 nt, Homo sapiens
  misc_RNA (1)...(19): siRNA sense strand
ggccagcuaccgcucuauu

SEQ ID NO: 1328255 - RNA, 19 nt, Homo sapiens
  misc_RNA (1)...(19): siRNA sense strand
uuccagaaccgacgcauga

SEQ ID NO: 1328256 - RNA, 19 nt, Homo sapiens
  misc_RNA (1)...(19): siRNA sense strand
gccagacauacacacguua

SEQ ID NO: 1328257 - RNA, 19 nt, Homo sapiens
  misc_RNA (1)...(19): siRNA sense strand
cggagaggcagaucaagau

SEQ ID NO: 1328258 - RNA, 19 nt, Homo sapiens
  misc_RNA (1)...(19): siRNA sense strand
ggagcuggagaaggaguuu

SEQ ID NO: 1328259 - RNA, 19 nt, Homo sapiens
  misc_RNA (1)...(19): siRNA sense strand
cagaaccgacgcaugaagu

SEQ ID NO: 1328260 - RNA, 19 nt, Homo sapiens
  misc_RNA (1)...(19): siRNA sense strand
gcaggacaagagcguguuc

SEQ ID NO: 1328261 - RNA, 19 nt, Homo sapiens
  misc_RNA (1)...(19): siRNA sense strand
gaaggaguuucacuacaau

SEQ ID NO: 1328262 - RNA, 19 nt, Homo sapiens
  misc_RNA (1)...(19): siRNA sense strand
agaaggaguuucacuacaa

SEQ ID NO: 1328263 - RNA, 19 nt, Homo sapiens
  misc_RNA (1)...(19): siRNA sense strand
gagaaggaguuucacuaca

SEQ ID NO: 1328264 - RNA, 19 nt, Homo sapiens
  misc_RNA (1)...(19): siRNA sense strand
gacaagggcuuugccacuu

SEQ ID NO: 1328265 - RNA, 19 nt, Homo sapiens
  misc_RNA (1)...(19): siRNA sense strand
ggagaggcagaucaagaua

SEQ ID NO: 1328266 - RNA, 19 nt, Homo sapiens
  misc_RNA (1)...(19): siRNA sense strand
ggaugcagcggaugaauuc

SEQ ID NO: 1328267 - RNA, 19 nt, Homo sapiens
  misc_RNA (1)...(19): siRNA sense strand
agaggcagaucaagauaug

SEQ ID NO: 1328268 - RNA, 19 nt, Homo sapiens
  misc_RNA (1)...(19): siRNA sense strand
ggagaaggaguuucacuac

SEQ ID NO: 1328269 - RNA, 19 nt, Homo sapiens
  misc_RNA (1)...(19): siRNA sense strand
cggacccgcugagacauua

SEQ ID NO: 1328270 - RNA, 19 nt, Homo sapiens
  misc_RNA (1)...(19): siRNA sense strand
gagaggcagaucaagauau

SEQ ID NO: 1328271 - RNA, 19 nt, Homo sapiens
  misc_RNA (1)...(19): siRNA sense strand
agacagaagagcagaagug

SEQ ID NO: 1328272 - RNA, 19 nt, Homo sapiens
  misc_RNA (1)...(19): siRNA sense strand
cgccagacauacacacguu

SEQ ID NO: 1328273 - RNA, 19 nt, Homo sapiens
  misc_RNA (1)...(19): siRNA sense strand
cgcuggagcuggagaagga

SEQ ID NO: 1328274 - RNA, 19 nt, Homo sapiens
  misc_RNA (1)...(19): siRNA sense strand
acaagggcuuugccacuuc

SEQ ID NO: 1328275 - RNA, 19 nt, Homo sapiens
  misc_RNA (1)...(19): siRNA sense strand
ugacggagaggcagaucaa

SEQ ID NO: 1328276 - RNA, 19 nt, Homo sapiens
  misc_RNA (1)...(19): siRNA sense strand
cggaugaauucgugcaaca

SEQ ID NO: 1328277 - RNA, 19 nt, Homo sapiens
  misc_RNA (1)...(19): siRNA sense strand
uggagaaggaguuucacua

SEQ ID NO: 1328278 - RNA, 19 nt, Homo sapiens
  misc_RNA (1)...(19): siRNA sense strand
gaugaauucgugcaacagu

SEQ ID NO: 1328279 - RNA, 19 nt, Homo sapiens
  misc_RNA (1)...(19): siRNA sense strand
ggccagcuaccgcucuauu

SEQ ID NO: 1328280 - RNA, 19 nt, Homo sapiens
  misc_RNA (1)...(19): siRNA sense strand
uuccagaaccgacgcauga

SEQ ID NO: 1328281 - RNA, 19 nt, Homo sapiens
  misc_RNA (1)...(19): siRNA sense strand
gccagacauacacacguua

SEQ ID NO: 1328282 - RNA, 19 nt, Homo sapiens
  misc_RNA (1)...(19): siRNA sense strand
cggagaggcagaucaagau

SEQ ID NO: 1328283 - RNA, 19 nt, Homo sapiens
  misc_RNA (1)...(19): siRNA sense strand
ggagcuggagaaggaguuu

SEQ ID NO: 1328284 - RNA, 19 nt, Homo sapiens
  misc_RNA (1)...(19): siRNA sense strand
cagaaccgacgcaugaagu

SEQ ID NO: 1328285 - RNA, 19 nt, Homo sapiens
  misc_RNA (1)...(19): siRNA sense strand
gcaggacaagagcguguuc

SEQ ID NO: 1328286 - RNA, 19 nt, Homo sapiens
  misc_RNA (1)...(19): siRNA sense strand
gacaagggcuuugccacuu

SEQ ID NO: 1328287 - RNA, 19 nt, Homo sapiens
  misc_RNA (1)...(19): siRNA sense strand
ggaugcagcggaugaauuc

SEQ ID NO: 1328288 - RNA, 19 nt, Homo sapiens
  misc_RNA (1)...(19): siRNA sense strand
cggacccgcugagacauua

SEQ ID NO: 1328289 - RNA, 19 nt, Homo sapiens
  misc_RNA (1)...(19): siRNA sense strand
agacagaagagcagaagug

SEQ ID NO: 1328290 - RNA, 19 nt, Homo sapiens
  misc_RNA (1)...(19): siRNA sense strand
acaagggcuuugccacuuc

SEQ ID NO: 1328291 - RNA, 19 nt, Homo sapiens
  misc_RNA (1)...(19): siRNA sense strand
cggaugaauucgugcaaca

SEQ ID NO: 1328292 - RNA, 19 nt, Homo sapiens
  misc_RNA (1)...(19): siRNA sense strand
gaugaauucgugcaacagu

SEQ ID NO: 1328293 - RNA, 19 nt, Homo sapiens
  misc_RNA (1)...(19): siRNA sense strand
ggccagcuaccgcucuauu

SEQ ID NO: 1328294 - RNA, 19 nt, Homo sapiens
  misc_RNA (1)...(19): siRNA sense strand
gcaggacaagagcguguuc

SEQ ID NO: 1328295 - RNA, 19 nt, Homo sapiens
  misc_RNA (1)...(19): siRNA sense strand
gaaggaguuucacuacaau

SEQ ID NO: 1328296 - RNA, 19 nt, Homo sapiens
  misc_RNA (1)...(19): siRNA sense strand
agaaggaguuucacuacaa

SEQ ID NO: 1328297 - RNA, 19 nt, Homo sapiens
  misc_RNA (1)...(19): siRNA sense strand
gagaaggaguuucacuaca

SEQ ID NO: 1328298 - RNA, 19 nt, Homo sapiens
  misc_RNA (1)...(19): siRNA sense strand
gacaagggcuuugccacuu

SEQ ID NO: 1328299 - RNA, 19 nt, Homo sapiens
  misc_RNA (1)...(19): siRNA sense strand
ggagaggcagaucaagaua

SEQ ID NO: 1328300 - RNA, 19 nt, Homo sapiens
  misc_RNA (1)...(19): siRNA sense strand
ggaugcagcggaugaauuc

SEQ ID NO: 1328301 - RNA, 19 nt, Homo sapiens
  misc_RNA (1)...(19): siRNA sense strand
agaggcagaucaagauaug

SEQ ID NO: 1328302 - RNA, 19 nt, Homo sapiens
  misc_RNA (1)...(19): siRNA sense strand
ggagaaggaguuucacuac

SEQ ID NO: 1328303 - RNA, 19 nt, Homo sapiens
  misc_RNA (1)...(19): siRNA sense strand
cggacccgcugagacauua

SEQ ID NO: 1328304 - RNA, 19 nt, Homo sapiens
  misc_RNA (1)...(19): siRNA sense strand
gagaggcagaucaagauau

SEQ ID NO: 1328305 - RNA, 19 nt, Homo sapiens
  misc_RNA (1)...(19): siRNA sense strand
agacagaagagcagaagug

SEQ ID NO: 1328306 - RNA, 19 nt, Homo sapiens
  misc_RNA (1)...(19): siRNA sense strand
cgccagacauacacacguu

SEQ ID NO: 1328307 - RNA, 19 nt, Homo sapiens
  misc_RNA (1)...(19): siRNA sense strand
cgcuggagcuggagaagga

SEQ ID NO: 1328308 - RNA, 19 nt, Homo sapiens
  misc_RNA (1)...(19): siRNA sense strand
acaagggcuuugccacuuc

SEQ ID NO: 1328309 - RNA, 19 nt, Homo sapiens
  misc_RNA (1)...(19): siRNA sense strand
ugacggagaggcagaucaa

SEQ ID NO: 1328310 - RNA, 19 nt, Homo sapiens
  misc_RNA (1)...(19): siRNA sense strand
cggaugaauucgugcaaca

SEQ ID NO: 1328311 - RNA, 19 nt, Homo sapiens
  misc_RNA (1)...(19): siRNA sense strand
uggagaaggaguuucacua

SEQ ID NO: 1328312 - RNA, 19 nt, Homo sapiens
  misc_RNA (1)...(19): siRNA sense strand
gaugaauucgugcaacagu

SEQ ID NO: 1328313 - RNA, 19 nt, Homo sapiens
  misc_RNA (1)...(19): siRNA sense strand
ggccagcuaccgcucuauu

SEQ ID NO: 1328314 - RNA, 19 nt, Homo sapiens
  misc_RNA (1)...(19): siRNA sense strand
uuccagaaccgacgcauga

SEQ ID NO: 1328315 - RNA, 19 nt, Homo sapiens
  misc_RNA (1)...(19): siRNA sense strand
gccagacauacacacguua

SEQ ID NO: 1328316 - RNA, 19 nt, Homo sapiens
  misc_RNA (1)...(19): siRNA sense strand
cggagaggcagaucaagau

SEQ ID NO: 1328317 - RNA, 19 nt, Homo sapiens
  misc_RNA (1)...(19): siRNA sense strand
ggagcuggagaaggaguuu

SEQ ID NO: 1328318 - RNA, 19 nt, Homo sapiens
  misc_RNA (1)...(19): siRNA sense strand
cagaaccgacgcaugaagu

SEQ ID NO: 1328319 - RNA, 19 nt, Homo sapiens
  misc_RNA (1)...(19): siRNA sense strand
gcaggacaagagcguguuc

SEQ ID NO: 1328320 - RNA, 19 nt, Homo sapiens
  misc_RNA (1)...(19): siRNA sense strand
gcacauaaaucagaagugu

SEQ ID NO: 1328321 - RNA, 19 nt, Homo sapiens
  misc_RNA (1)...(19): siRNA sense strand
gauccaagguuaugugguu

SEQ ID NO: 1328322 - RNA, 19 nt, Homo sapiens
  misc_RNA (1)...(19): siRNA sense strand
gcggacggauccaagguua

SEQ ID NO: 1328323 - RNA, 19 nt, Homo sapiens
  misc_RNA (1)...(19): siRNA sense strand
caaccacacucaggccuuu

SEQ ID NO: 1328324 - RNA, 19 nt, Homo sapiens
  misc_RNA (1)...(19): siRNA sense strand
uggaggcccuucaguauga

SEQ ID NO: 1328325 - RNA, 19 nt, Homo sapiens
  misc_RNA (1)...(19): siRNA sense strand
ucccauggauguugugaaa

SEQ ID NO: 1328326 - RNA, 19 nt, Homo sapiens
  misc_RNA (1)...(19): siRNA sense strand
aagguuaugugguuucuug

SEQ ID NO: 1328327 - RNA, 19 nt, Homo sapiens
  misc_RNA (1)...(19): siRNA sense strand
guacaguccucacccugau

SEQ ID NO: 1328328 - RNA, 19 nt, Homo sapiens
  misc_RNA (1)...(19): siRNA sense strand
cagugcagcuguucuggaa

SEQ ID NO: 1328329 - RNA, 19 nt, Homo sapiens
  misc_RNA (1)...(19): siRNA sense strand
ccucagggcuaugugauug

SEQ ID NO: 1328330 - RNA, 19 nt, Homo sapiens
  misc_RNA (1)...(19): siRNA sense strand
gaaacugcagccugacuug

SEQ ID NO: 1328331 - RNA, 19 nt, Homo sapiens
  misc_RNA (1)...(19): siRNA sense strand
cagccaggccugcacauaa

SEQ ID NO: 1328332 - RNA, 19 nt, Homo sapiens
  misc_RNA (1)...(19): siRNA sense strand
ggacggauccaagguuaug

SEQ ID NO: 1328333 - RNA, 19 nt, Homo sapiens
  misc_RNA (1)...(19): siRNA sense strand
caucgugacucccuuguac

SEQ ID NO: 1328334 - RNA, 19 nt, Homo sapiens
  misc_RNA (1)...(19): siRNA sense strand
acauaaaucagaaguguga

SEQ ID NO: 1328335 - RNA, 19 nt, Homo sapiens
  misc_RNA (1)...(19): siRNA sense strand
gagaacaucaggcccuuuc

SEQ ID NO: 1328336 - RNA, 19 nt, Homo sapiens
  misc_RNA (1)...(19): siRNA sense strand
ugccuacucucaagaaaug

SEQ ID NO: 1328337 - RNA, 19 nt, Homo sapiens
  misc_RNA (1)...(19): siRNA sense strand
caaccucuccugccucaug

SEQ ID NO: 1328338 - RNA, 19 nt, Homo sapiens
  misc_RNA (1)...(19): siRNA sense strand
cccaccagcuucacucuga

SEQ ID NO: 1328339 - RNA, 19 nt, Homo sapiens
  misc_RNA (1)...(19): siRNA sense strand
ggaaacugcagccugacuu

SEQ ID NO: 1328340 - RNA, 19 nt, Homo sapiens
  misc_RNA (1)...(19): siRNA sense strand
ccauggauguugugaaacu

SEQ ID NO: 1328341 - RNA, 19 nt, Homo sapiens
  misc_RNA (1)...(19): siRNA sense strand
gcacgccacccaucaccaa

SEQ ID NO: 1328342 - RNA, 19 nt, Homo sapiens
  misc_RNA (1)...(19): siRNA sense strand
agccaggccugcacauaaa

SEQ ID NO: 1328343 - RNA, 19 nt, Homo sapiens
  misc_RNA (1)...(19): siRNA sense strand
ccuggaggauggaacagaa

SEQ ID NO: 1328344 - RNA, 19 nt, Homo sapiens
  misc_RNA (1)...(19): siRNA sense strand
ggcagcagcgucugucuga

SEQ ID NO: 1328345 - RNA, 19 nt, Homo sapiens
  misc_RNA (1)...(19): siRNA sense strand
gcaacaagaccuggaggau

SEQ ID NO: 1328346 - RNA, 19 nt, Homo sapiens
  misc_RNA (1)...(19): siRNA sense strand
gcaacagccugcagauccu

SEQ ID NO: 1328347 - RNA, 19 nt, Homo sapiens
  misc_RNA (1)...(19): siRNA sense strand
ccccagagcugcaucuaaa

SEQ ID NO: 1328348 - RNA, 19 nt, Homo sapiens
  misc_RNA (1)...(19): siRNA sense strand
ccuuucagcucuaugagau

SEQ ID NO: 1328349 - RNA, 19 nt, Homo sapiens
  misc_RNA (1)...(19): siRNA sense strand
gaacaucaggcccuuucag

SEQ ID NO: 1328350 - RNA, 19 nt, Homo sapiens
  misc_RNA (1)...(19): siRNA sense strand
ggccuacacccugcagaua

SEQ ID NO: 1328351 - RNA, 19 nt, Homo sapiens
  misc_RNA (1)...(19): siRNA sense strand
ggaggaggaugaaaagaag

SEQ ID NO: 1328352 - RNA, 19 nt, Homo sapiens
  misc_RNA (1)...(19): siRNA sense strand
ggaccaacgcucagaacca

SEQ ID NO: 1328353 - RNA, 19 nt, Homo sapiens
  misc_RNA (1)...(19): siRNA sense strand
ggacccggagccacagauu

SEQ ID NO: 1328354 - RNA, 19 nt, Homo sapiens
  misc_RNA (1)...(19): siRNA sense strand
cagcagcgucugucugaug

SEQ ID NO: 1328355 - RNA, 19 nt, Homo sapiens
  misc_RNA (1)...(19): siRNA sense strand
uaaagcacauuggcaagac

SEQ ID NO: 1328356 - RNA, 19 nt, Homo sapiens
  misc_RNA (1)...(19): siRNA sense strand
ggccugcacauaaaucaga

SEQ ID NO: 1328357 - RNA, 19 nt, Homo sapiens
  misc_RNA (1)...(19): siRNA sense strand
cuaaagcacauuggcaaga

SEQ ID NO: 1328358 - RNA, 19 nt, Homo sapiens
  misc_RNA (1)...(19): siRNA sense strand
cugcuguuguaccagaaua

SEQ ID NO: 1328359 - RNA, 19 nt, Homo sapiens
  misc_RNA (1)...(19): siRNA sense strand
acccaggaaucuaucauca

SEQ ID NO: 1328360 - RNA, 19 nt, Homo sapiens
  misc_RNA (1)...(19): siRNA sense strand
gccuggagcugagaacuac

SEQ ID NO: 1328361 - RNA, 19 nt, Homo sapiens
  misc_RNA (1)...(19): siRNA sense strand
ccuuggaggcccuucagua

SEQ ID NO: 1328362 - RNA, 19 nt, Homo sapiens
  misc_RNA (1)...(19): siRNA sense strand
ggagaacaucaggcccuuu

SEQ ID NO: 1328363 - RNA, 19 nt, Homo sapiens
  misc_RNA (1)...(19): siRNA sense strand
ucccauaacagcucagaga

SEQ ID NO: 1328364 - RNA, 19 nt, Homo sapiens
  misc_RNA (1)...(19): siRNA sense strand
uaugccuacucucaagaaa

SEQ ID NO: 1328365 - RNA, 19 nt, Homo sapiens
  misc_RNA (1)...(19): siRNA sense strand
cuuggaggcccuucaguau

SEQ ID NO: 1328366 - RNA, 19 nt, Homo sapiens
  misc_RNA (1)...(19): siRNA sense strand
uuucagcucuaugagauca

SEQ ID NO: 1328367 - RNA, 19 nt, Homo sapiens
  misc_RNA (1)...(19): siRNA sense strand
ccuuguggccuauaacuca

SEQ ID NO: 1328368 - RNA, 19 nt, Homo sapiens
  misc_RNA (1)...(19): siRNA sense strand
ccaagguuaugugguuucu

SEQ ID NO: 1328369 - RNA, 19 nt, Homo sapiens
  misc_RNA (1)...(19): siRNA sense strand
gcacauaaaucagaagugu

SEQ ID NO: 1328370 - RNA, 19 nt, Homo sapiens
  misc_RNA (1)...(19): siRNA sense strand
gauccaagguuaugugguu

SEQ ID NO: 1328371 - RNA, 19 nt, Homo sapiens
  misc_RNA (1)...(19): siRNA sense strand
gcggacggauccaagguua

SEQ ID NO: 1328372 - RNA, 19 nt, Homo sapiens
  misc_RNA (1)...(19): siRNA sense strand
caaccacacucaggccuuu

SEQ ID NO: 1328373 - RNA, 19 nt, Homo sapiens
  misc_RNA (1)...(19): siRNA sense strand
uggaggcccuucaguauga

SEQ ID NO: 1328374 - RNA, 19 nt, Homo sapiens
  misc_RNA (1)...(19): siRNA sense strand
ucccauggauguugugaaa

SEQ ID NO: 1328375 - RNA, 19 nt, Homo sapiens
  misc_RNA (1)...(19): siRNA sense strand
aagguuaugugguuucuug

SEQ ID NO: 1328376 - RNA, 19 nt, Homo sapiens
  misc_RNA (1)...(19): siRNA sense strand
guacaguccucacccugau

SEQ ID NO: 1328377 - RNA, 19 nt, Homo sapiens
  misc_RNA (1)...(19): siRNA sense strand
cagugcagcuguucuggaa

SEQ ID NO: 1328378 - RNA, 19 nt, Homo sapiens
  misc_RNA (1)...(19): siRNA sense strand
ccucagggcuaugugauug

SEQ ID NO: 1328379 - RNA, 19 nt, Homo sapiens
  misc_RNA (1)...(19): siRNA sense strand
gaaacugcagccugacuug

SEQ ID NO: 1328380 - RNA, 19 nt, Homo sapiens
  misc_RNA (1)...(19): siRNA sense strand
cagccaggccugcacauaa

SEQ ID NO: 1328381 - RNA, 19 nt, Homo sapiens
  misc_RNA (1)...(19): siRNA sense strand
ggacggauccaagguuaug

SEQ ID NO: 1328382 - RNA, 19 nt, Homo sapiens
  misc_RNA (1)...(19): siRNA sense strand
caucgugacucccuuguac

SEQ ID NO: 1328383 - RNA, 19 nt, Homo sapiens
  misc_RNA (1)...(19): siRNA sense strand
acauaaaucagaaguguga

SEQ ID NO: 1328384 - RNA, 19 nt, Homo sapiens
  misc_RNA (1)...(19): siRNA sense strand
gagaacaucaggcccuuuc

SEQ ID NO: 1328385 - RNA, 19 nt, Homo sapiens
  misc_RNA (1)...(19): siRNA sense strand
ugccuacucucaagaaaug

SEQ ID NO: 1328386 - RNA, 19 nt, Homo sapiens
  misc_RNA (1)...(19): siRNA sense strand
caaccucuccugccucaug

SEQ ID NO: 1328387 - RNA, 19 nt, Homo sapiens
  misc_RNA (1)...(19): siRNA sense strand
cccaccagcuucacucuga

SEQ ID NO: 1328388 - RNA, 19 nt, Homo sapiens
  misc_RNA (1)...(19): siRNA sense strand
ggaaacugcagccugacuu

SEQ ID NO: 1328389 - RNA, 19 nt, Homo sapiens
  misc_RNA (1)...(19): siRNA sense strand
ccauggauguugugaaacu

SEQ ID NO: 1328390 - RNA, 19 nt, Homo sapiens
  misc_RNA (1)...(19): siRNA sense strand
gcacgccacccaucaccaa

SEQ ID NO: 1328391 - RNA, 19 nt, Homo sapiens
  misc_RNA (1)...(19): siRNA sense strand
agccaggccugcacauaaa

SEQ ID NO: 1328392 - RNA, 19 nt, Homo sapiens
  misc_RNA (1)...(19): siRNA sense strand
ccuggaggauggaacagaa

SEQ ID NO: 1328393 - RNA, 19 nt, Homo sapiens
  misc_RNA (1)...(19): siRNA sense strand
ggcagcagcgucugucuga

SEQ ID NO: 1328394 - RNA, 19 nt, Homo sapiens
  misc_RNA (1)...(19): siRNA sense strand
gcaacaagaccuggaggau

SEQ ID NO: 1328395 - RNA, 19 nt, Homo sapiens
  misc_RNA (1)...(19): siRNA sense strand
gcaacagccugcagauccu

SEQ ID NO: 1328396 - RNA, 19 nt, Homo sapiens
  misc_RNA (1)...(19): siRNA sense strand
ccccagagcugcaucuaaa

SEQ ID NO: 1328397 - RNA, 19 nt, Homo sapiens
  misc_RNA (1)...(19): siRNA sense strand
ccuuucagcucuaugagau

SEQ ID NO: 1328398 - RNA, 19 nt, Homo sapiens
  misc_RNA (1)...(19): siRNA sense strand
gaacaucaggcccuuucag

SEQ ID NO: 1328399 - RNA, 19 nt, Homo sapiens
  misc_RNA (1)...(19): siRNA sense strand
ggccuacacccugcagaua

SEQ ID NO: 1328400 - RNA, 19 nt, Homo sapiens
  misc_RNA (1)...(19): siRNA sense strand
ggaggaggaugaaaagaag

SEQ ID NO: 1328401 - RNA, 19 nt, Homo sapiens
  misc_RNA (1)...(19): siRNA sense strand
ggaccaacgcucagaacca

SEQ ID NO: 1328402 - RNA, 19 nt, Homo sapiens
  misc_RNA (1)...(19): siRNA sense strand
ggacccggagccacagauu

SEQ ID NO: 1328403 - RNA, 19 nt, Homo sapiens
  misc_RNA (1)...(19): siRNA sense strand
cagcagcgucugucugaug

SEQ ID NO: 1328404 - RNA, 19 nt, Homo sapiens
  misc_RNA (1)...(19): siRNA sense strand
uaaagcacauuggcaagac

SEQ ID NO: 1328405 - RNA, 19 nt, Homo sapiens
  misc_RNA (1)...(19): siRNA sense strand
ggccugcacauaaaucaga

SEQ ID NO: 1328406 - RNA, 19 nt, Homo sapiens
  misc_RNA (1)...(19): siRNA sense strand
cuaaagcacauuggcaaga

SEQ ID NO: 1328407 - RNA, 19 nt, Homo sapiens
  misc_RNA (1)...(19): siRNA sense strand
cugcuguuguaccagaaua

SEQ ID NO: 1328408 - RNA, 19 nt, Homo sapiens
  misc_RNA (1)...(19): siRNA sense strand
acccaggaaucuaucauca

SEQ ID NO: 1328409 - RNA, 19 nt, Homo sapiens
  misc_RNA (1)...(19): siRNA sense strand
gccuggagcugagaacuac

SEQ ID NO: 1328410 - RNA, 19 nt, Homo sapiens
  misc_RNA (1)...(19): siRNA sense strand
ccuuggaggcccuucagua

SEQ ID NO: 1328411 - RNA, 19 nt, Homo sapiens
  misc_RNA (1)...(19): siRNA sense strand
ggagaacaucaggcccuuu

SEQ ID NO: 1328412 - RNA, 19 nt, Homo sapiens
  misc_RNA (1)...(19): siRNA sense strand
ucccauaacagcucagaga

SEQ ID NO: 1328413 - RNA, 19 nt, Homo sapiens
  misc_RNA (1)...(19): siRNA sense strand
uaugccuacucucaagaaa

SEQ ID NO: 1328414 - RNA, 19 nt, Homo sapiens
  misc_RNA (1)...(19): siRNA sense strand
cuuggaggcccuucaguau

SEQ ID NO: 1328415 - RNA, 19 nt, Homo sapiens
  misc_RNA (1)...(19): siRNA sense strand
uuucagcucuaugagauca

SEQ ID NO: 1328416 - RNA, 19 nt, Homo sapiens
  misc_RNA (1)...(19): siRNA sense strand
ccuuguggccuauaacuca

SEQ ID NO: 1328417 - RNA, 19 nt, Homo sapiens
  misc_RNA (1)...(19): siRNA sense strand
ccaagguuaugugguuucu

SEQ ID NO: 1328418 - RNA, 19 nt, Homo sapiens
  misc_RNA (1)...(19): siRNA sense strand
gcacauaaaucagaagugu

SEQ ID NO: 1328419 - RNA, 19 nt, Homo sapiens
  misc_RNA (1)...(19): siRNA sense strand
gauccaagguuaugugguu

SEQ ID NO: 1328420 - RNA, 19 nt, Homo sapiens
  misc_RNA (1)...(19): siRNA sense strand
gcggacggauccaagguua

SEQ ID NO: 1328421 - RNA, 19 nt, Homo sapiens
  misc_RNA (1)...(19): siRNA sense strand
caaccacacucaggccuuu

SEQ ID NO: 1328422 - RNA, 19 nt, Homo sapiens
  misc_RNA (1)...(19): siRNA sense strand
uggaggcccuucaguauga

SEQ ID NO: 1328423 - RNA, 19 nt, Homo sapiens
  misc_RNA (1)...(19): siRNA sense strand
ucccauggauguugugaaa

SEQ ID NO: 1328424 - RNA, 19 nt, Homo sapiens
  misc_RNA (1)...(19): siRNA sense strand
aagguuaugugguuucuug

SEQ ID NO: 1328425 - RNA, 19 nt, Homo sapiens
  misc_RNA (1)...(19): siRNA sense strand
guacaguccucacccugau

SEQ ID NO: 1328426 - RNA, 19 nt, Homo sapiens
  misc_RNA (1)...(19): siRNA sense strand
cagugcagcuguucuggaa

SEQ ID NO: 1328427 - RNA, 19 nt, Homo sapiens
  misc_RNA (1)...(19): siRNA sense strand
ccucagggcuaugugauug

SEQ ID NO: 1328428 - RNA, 19 nt, Homo sapiens
  misc_RNA (1)...(19): siRNA sense strand
gaaacugcagccugacuug

SEQ ID NO: 1328429 - RNA, 19 nt, Homo sapiens
  misc_RNA (1)...(19): siRNA sense strand
cagccaggccugcacauaa

SEQ ID NO: 1328430 - RNA, 19 nt, Homo sapiens
  misc_RNA (1)...(19): siRNA sense strand
ggacggauccaagguuaug

SEQ ID NO: 1328431 - RNA, 19 nt, Homo sapiens
  misc_RNA (1)...(19): siRNA sense strand
caucgugacucccuuguac

SEQ ID NO: 1328432 - RNA, 19 nt, Homo sapiens
  misc_RNA (1)...(19): siRNA sense strand
acauaaaucagaaguguga

SEQ ID NO: 1328433 - RNA, 19 nt, Homo sapiens
  misc_RNA (1)...(19): siRNA sense strand
gagaacaucaggcccuuuc

SEQ ID NO: 1328434 - RNA, 19 nt, Homo sapiens
  misc_RNA (1)...(19): siRNA sense strand
ugccuacucucaagaaaug

SEQ ID NO: 1328435 - RNA, 19 nt, Homo sapiens
  misc_RNA (1)...(19): siRNA sense strand
caaccucuccugccucaug

SEQ ID NO: 1328436 - RNA, 19 nt, Homo sapiens
  misc_RNA (1)...(19): siRNA sense strand
cccaccagcuucacucuga

SEQ ID NO: 1328437 - RNA, 19 nt, Homo sapiens
  misc_RNA (1)...(19): siRNA sense strand
ggaaacugcagccugacuu

SEQ ID NO: 1328438 - RNA, 19 nt, Homo sapiens
  misc_RNA (1)...(19): siRNA sense strand
ccauggauguugugaaacu

SEQ ID NO: 1328439 - RNA, 19 nt, Homo sapiens
  misc_RNA (1)...(19): siRNA sense strand
gcacgccacccaucaccaa

SEQ ID NO: 1328440 - RNA, 19 nt, Homo sapiens
  misc_RNA (1)...(19): siRNA sense strand
agccaggccugcacauaaa

SEQ ID NO: 1328441 - RNA, 19 nt, Homo sapiens
  misc_RNA (1)...(19): siRNA sense strand
ccuggaggauggaacagaa

SEQ ID NO: 1328442 - RNA, 19 nt, Homo sapiens
  misc_RNA (1)...(19): siRNA sense strand
ggcagcagcgucugucuga

SEQ ID NO: 1328443 - RNA, 19 nt, Homo sapiens
  misc_RNA (1)...(19): siRNA sense strand
gcaacaagaccuggaggau

SEQ ID NO: 1328444 - RNA, 19 nt, Homo sapiens
  misc_RNA (1)...(19): siRNA sense strand
gcaacagccugcagauccu

SEQ ID NO: 1328445 - RNA, 19 nt, Homo sapiens
  misc_RNA (1)...(19): siRNA sense strand
ccccagagcugcaucuaaa

SEQ ID NO: 1328446 - RNA, 19 nt, Homo sapiens
  misc_RNA (1)...(19): siRNA sense strand
ccuuucagcucuaugagau

SEQ ID NO: 1328447 - RNA, 19 nt, Homo sapiens
  misc_RNA (1)...(19): siRNA sense strand
gaacaucaggcccuuucag

SEQ ID NO: 1328448 - RNA, 19 nt, Homo sapiens
  misc_RNA (1)...(19): siRNA sense strand
ggccuacacccugcagaua

SEQ ID NO: 1328449 - RNA, 19 nt, Homo sapiens
  misc_RNA (1)...(19): siRNA sense strand
ggaggaggaugaaaagaag

SEQ ID NO: 1328450 - RNA, 19 nt, Homo sapiens
  misc_RNA (1)...(19): siRNA sense strand
ggaccaacgcucagaacca

SEQ ID NO: 1328451 - RNA, 19 nt, Homo sapiens
  misc_RNA (1)...(19): siRNA sense strand
ggacccggagccacagauu

SEQ ID NO: 1328452 - RNA, 19 nt, Homo sapiens
  misc_RNA (1)...(19): siRNA sense strand
cagcagcgucugucugaug

SEQ ID NO: 1328453 - RNA, 19 nt, Homo sapiens
  misc_RNA (1)...(19): siRNA sense strand
uaaagcacauuggcaagac

SEQ ID NO: 1328454 - RNA, 19 nt, Homo sapiens
  misc_RNA (1)...(19): siRNA sense strand
ggccugcacauaaaucaga

SEQ ID NO: 1328455 - RNA, 19 nt, Homo sapiens
  misc_RNA (1)...(19): siRNA sense strand
cuaaagcacauuggcaaga

SEQ ID NO: 1328456 - RNA, 19 nt, Homo sapiens
  misc_RNA (1)...(19): siRNA sense strand
cugcuguuguaccagaaua

SEQ ID NO: 1328457 - RNA, 19 nt, Homo sapiens
  misc_RNA (1)...(19): siRNA sense strand
acccaggaaucuaucauca

SEQ ID NO: 1328458 - RNA, 19 nt, Homo sapiens
  misc_RNA (1)...(19): siRNA sense strand
gccuggagcugagaacuac

SEQ ID NO: 1328459 - RNA, 19 nt, Homo sapiens
  misc_RNA (1)...(19): siRNA sense strand
ccuuggaggcccuucagua

SEQ ID NO: 1328460 - RNA, 19 nt, Homo sapiens
  misc_RNA (1)...(19): siRNA sense strand
ggagaacaucaggcccuuu

SEQ ID NO: 1328461 - RNA, 19 nt, Homo sapiens
  misc_RNA (1)...(19): siRNA sense strand
ucccauaacagcucagaga

SEQ ID NO: 1328462 - RNA, 19 nt, Homo sapiens
  misc_RNA (1)...(19): siRNA sense strand
uaugccuacucucaagaaa

SEQ ID NO: 1328463 - RNA, 19 nt, Homo sapiens
  misc_RNA (1)...(19): siRNA sense strand
cuuggaggcccuucaguau

SEQ ID NO: 1328464 - RNA, 19 nt, Homo sapiens
  misc_RNA (1)...(19): siRNA sense strand
uuucagcucuaugagauca

SEQ ID NO: 1328465 - RNA, 19 nt, Homo sapiens
  misc_RNA (1)...(19): siRNA sense strand
ccuuguggccuauaacuca

SEQ ID NO: 1328466 - RNA, 19 nt, Homo sapiens
  misc_RNA (1)...(19): siRNA sense strand
ccaagguuaugugguuucu

SEQ ID NO: 1328467 - RNA, 19 nt, Homo sapiens
  misc_RNA (1)...(19): siRNA sense strand
gcacauaaaucagaagugu

SEQ ID NO: 1328468 - RNA, 19 nt, Homo sapiens
  misc_RNA (1)...(19): siRNA sense strand
gauccaagguuaugugguu

SEQ ID NO: 1328469 - RNA, 19 nt, Homo sapiens
  misc_RNA (1)...(19): siRNA sense strand
gcggacggauccaagguua

SEQ ID NO: 1328470 - RNA, 19 nt, Homo sapiens
  misc_RNA (1)...(19): siRNA sense strand
caggcgaucugcauacuuu

SEQ ID NO: 1328471 - RNA, 19 nt, Homo sapiens
  misc_RNA (1)...(19): siRNA sense strand
caaccacacucaggccuuu

SEQ ID NO: 1328472 - RNA, 19 nt, Homo sapiens
  misc_RNA (1)...(19): siRNA sense strand
uccuauaacuucaguauug

SEQ ID NO: 1328473 - RNA, 19 nt, Homo sapiens
  misc_RNA (1)...(19): siRNA sense strand
uggaggcccuucaguauga

SEQ ID NO: 1328474 - RNA, 19 nt, Homo sapiens
  misc_RNA (1)...(19): siRNA sense strand
ucccauggauguugugaaa

SEQ ID NO: 1328475 - RNA, 19 nt, Homo sapiens
  misc_RNA (1)...(19): siRNA sense strand
aagguuaugugguuucuug

SEQ ID NO: 1328476 - RNA, 19 nt, Homo sapiens
  misc_RNA (1)...(19): siRNA sense strand
guacaguccucacccugau

SEQ ID NO: 1328477 - RNA, 19 nt, Homo sapiens
  misc_RNA (1)...(19): siRNA sense strand
cagugcagcuguucuggaa

SEQ ID NO: 1328478 - RNA, 19 nt, Homo sapiens
  misc_RNA (1)...(19): siRNA sense strand
ccucagggcuaugugauug

SEQ ID NO: 1328479 - RNA, 19 nt, Homo sapiens
  misc_RNA (1)...(19): siRNA sense strand
gaaacugcagccugacuug

SEQ ID NO: 1328480 - RNA, 19 nt, Homo sapiens
  misc_RNA (1)...(19): siRNA sense strand
cagccaggccugcacauaa

SEQ ID NO: 1328481 - RNA, 19 nt, Homo sapiens
  misc_RNA (1)...(19): siRNA sense strand
ggacggauccaagguuaug

SEQ ID NO: 1328482 - RNA, 19 nt, Homo sapiens
  misc_RNA (1)...(19): siRNA sense strand
caucgugacucccuuguac

SEQ ID NO: 1328483 - RNA, 19 nt, Homo sapiens
  misc_RNA (1)...(19): siRNA sense strand
acauaaaucagaaguguga

SEQ ID NO: 1328484 - RNA, 19 nt, Homo sapiens
  misc_RNA (1)...(19): siRNA sense strand
gagaacaucaggcccuuuc

SEQ ID NO: 1328485 - RNA, 19 nt, Homo sapiens
  misc_RNA (1)...(19): siRNA sense strand
ugccuacucucaagaaaug

SEQ ID NO: 1328486 - RNA, 19 nt, Homo sapiens
  misc_RNA (1)...(19): siRNA sense strand
caaccucuccugccucaug

SEQ ID NO: 1328487 - RNA, 19 nt, Homo sapiens
  misc_RNA (1)...(19): siRNA sense strand
cccaccagcuucacucuga

SEQ ID NO: 1328488 - RNA, 19 nt, Homo sapiens
  misc_RNA (1)...(19): siRNA sense strand
ggaaacugcagccugacuu

SEQ ID NO: 1328489 - RNA, 19 nt, Homo sapiens
  misc_RNA (1)...(19): siRNA sense strand
ccauggauguugugaaacu

SEQ ID NO: 1328490 - RNA, 19 nt, Homo sapiens
  misc_RNA (1)...(19): siRNA sense strand
gcacgccacccaucaccaa

SEQ ID NO: 1328491 - RNA, 19 nt, Homo sapiens
  misc_RNA (1)...(19): siRNA sense strand
agccaggccugcacauaaa

SEQ ID NO: 1328492 - RNA, 19 nt, Homo sapiens
  misc_RNA (1)...(19): siRNA sense strand
ccuggaggauggaacagaa

SEQ ID NO: 1328493 - RNA, 19 nt, Homo sapiens
  misc_RNA (1)...(19): siRNA sense strand
ggcagcagcgucugucuga

SEQ ID NO: 1328494 - RNA, 19 nt, Homo sapiens
  misc_RNA (1)...(19): siRNA sense strand
gcaacaagaccuggaggau

SEQ ID NO: 1328495 - RNA, 19 nt, Homo sapiens
  misc_RNA (1)...(19): siRNA sense strand
gcaacagccugcagauccu

SEQ ID NO: 1328496 - RNA, 19 nt, Homo sapiens
  misc_RNA (1)...(19): siRNA sense strand
ccccagagcugcaucuaaa

SEQ ID NO: 1328497 - RNA, 19 nt, Homo sapiens
  misc_RNA (1)...(19): siRNA sense strand
ccuuucagcucuaugagau

SEQ ID NO: 1328498 - RNA, 19 nt, Homo sapiens
  misc_RNA (1)...(19): siRNA sense strand
gaacaucaggcccuuucag

SEQ ID NO: 1328499 - RNA, 19 nt, Homo sapiens
  misc_RNA (1)...(19): siRNA sense strand
ggccuacacccugcagaua

SEQ ID NO: 1328500 - RNA, 19 nt, Homo sapiens
  misc_RNA (1)...(19): siRNA sense strand
ggaggaggaugaaaagaag

SEQ ID NO: 1328501 - RNA, 19 nt, Homo sapiens
  misc_RNA (1)...(19): siRNA sense strand
ggaccaacgcucagaacca

SEQ ID NO: 1328502 - RNA, 19 nt, Homo sapiens
  misc_RNA (1)...(19): siRNA sense strand
gaucugcauacuuuaagga

SEQ ID NO: 1328503 - RNA, 19 nt, Homo sapiens
  misc_RNA (1)...(19): siRNA sense strand
ggacccggagccacagauu

SEQ ID NO: 1328504 - RNA, 19 nt, Homo sapiens
  misc_RNA (1)...(19): siRNA sense strand
ccuauaacuucaguauugu

SEQ ID NO: 1328505 - RNA, 19 nt, Homo sapiens
  misc_RNA (1)...(19): siRNA sense strand
ccaauggccuuuugugcuu

SEQ ID NO: 1328506 - RNA, 19 nt, Homo sapiens
  misc_RNA (1)...(19): siRNA sense strand
ggcgaucugcauacuuuaa

SEQ ID NO: 1328507 - RNA, 19 nt, Homo sapiens
  misc_RNA (1)...(19): siRNA sense strand
cagcagcgucugucugaug

SEQ ID NO: 1328508 - RNA, 19 nt, Homo sapiens
  misc_RNA (1)...(19): siRNA sense strand
uaaagcacauuggcaagac

SEQ ID NO: 1328509 - RNA, 19 nt, Homo sapiens
  misc_RNA (1)...(19): siRNA sense strand
ggccugcacauaaaucaga

SEQ ID NO: 1328510 - RNA, 19 nt, Homo sapiens
  misc_RNA (1)...(19): siRNA sense strand
cuaaagcacauuggcaaga

SEQ ID NO: 1328511 - RNA, 19 nt, Homo sapiens
  misc_RNA (1)...(19): siRNA sense strand
gugcuuguuuccuauaacu

SEQ ID NO: 1328512 - RNA, 19 nt, Homo sapiens
  misc_RNA (1)...(19): siRNA sense strand
cugcuguuguaccagaaua

SEQ ID NO: 1328513 - RNA, 19 nt, Homo sapiens
  misc_RNA (1)...(19): siRNA sense strand
acccaggaaucuaucauca

SEQ ID NO: 1328514 - RNA, 19 nt, Homo sapiens
  misc_RNA (1)...(19): siRNA sense strand
gccuggagcugagaacuac

SEQ ID NO: 1328515 - RNA, 19 nt, Homo sapiens
  misc_RNA (1)...(19): siRNA sense strand
ccuuggaggcccuucagua

SEQ ID NO: 1328516 - RNA, 19 nt, Homo sapiens
  misc_RNA (1)...(19): siRNA sense strand
ggagaacaucaggcccuuu

SEQ ID NO: 1328517 - RNA, 19 nt, Homo sapiens
  misc_RNA (1)...(19): siRNA sense strand
ucccauaacagcucagaga

SEQ ID NO: 1328518 - RNA, 19 nt, Homo sapiens
  misc_RNA (1)...(19): siRNA sense strand
uaugccuacucucaagaaa

SEQ ID NO: 1328519 - RNA, 19 nt, Homo sapiens
  misc_RNA (1)...(19): siRNA sense strand
gcuuguuuccuauaacuuc

SEQ ID NO: 1328520 - RNA, 19 nt, Homo sapiens
  misc_RNA (1)...(19): siRNA sense strand
cuuggaggcccuucaguau

SEQ ID NO: 1328521 - RNA, 19 nt, Homo sapiens
  misc_RNA (1)...(19): siRNA sense strand
uuucagcucuaugagauca

SEQ ID NO: 1328522 - RNA, 19 nt, Homo sapiens
  misc_RNA (1)...(19): siRNA sense strand
ccuuguggccuauaacuca

SEQ ID NO: 1328523 - RNA, 19 nt, Homo sapiens
  misc_RNA (1)...(19): siRNA sense strand
ccaagguuaugugguuucu

SEQ ID NO: 1328524 - RNA, 19 nt, Homo sapiens
  misc_RNA (1)...(19): siRNA sense strand
gcacauaaaucagaagugu

SEQ ID NO: 1328525 - RNA, 19 nt, Homo sapiens
  misc_RNA (1)...(19): siRNA sense strand
gauccaagguuaugugguu

SEQ ID NO: 1328526 - RNA, 19 nt, Homo sapiens
  misc_RNA (1)...(19): siRNA sense strand
gcggacggauccaagguua

SEQ ID NO: 1328527 - RNA, 19 nt, Homo sapiens
  misc_RNA (1)...(19): siRNA sense strand
caaccacacucaggccuuu

SEQ ID NO: 1328528 - RNA, 19 nt, Homo sapiens
  misc_RNA (1)...(19): siRNA sense strand
uggaggcccuucaguauga

SEQ ID NO: 1328529 - RNA, 19 nt, Homo sapiens
  misc_RNA (1)...(19): siRNA sense strand
ucccauggauguugugaaa

SEQ ID NO: 1328530 - RNA, 19 nt, Homo sapiens
  misc_RNA (1)...(19): siRNA sense strand
aagguuaugugguuucuug

SEQ ID NO: 1328531 - RNA, 19 nt, Homo sapiens
  misc_RNA (1)...(19): siRNA sense strand
guacaguccucacccugau

SEQ ID NO: 1328532 - RNA, 19 nt, Homo sapiens
  misc_RNA (1)...(19): siRNA sense strand
cagugcagcuguucuggaa

SEQ ID NO: 1328533 - RNA, 19 nt, Homo sapiens
  misc_RNA (1)...(19): siRNA sense strand
ccucagggcuaugugauug

SEQ ID NO: 1328534 - RNA, 19 nt, Homo sapiens
  misc_RNA (1)...(19): siRNA sense strand
gaaacugcagccugacuug

SEQ ID NO: 1328535 - RNA, 19 nt, Homo sapiens
  misc_RNA (1)...(19): siRNA sense strand
cagccaggccugcacauaa

SEQ ID NO: 1328536 - RNA, 19 nt, Homo sapiens
  misc_RNA (1)...(19): siRNA sense strand
ggacggauccaagguuaug

SEQ ID NO: 1328537 - RNA, 19 nt, Homo sapiens
  misc_RNA (1)...(19): siRNA sense strand
caucgugacucccuuguac

SEQ ID NO: 1328538 - RNA, 19 nt, Homo sapiens
  misc_RNA (1)...(19): siRNA sense strand
acauaaaucagaaguguga

SEQ ID NO: 1328539 - RNA, 19 nt, Homo sapiens
  misc_RNA (1)...(19): siRNA sense strand
gagaacaucaggcccuuuc

SEQ ID NO: 1328540 - RNA, 19 nt, Homo sapiens
  misc_RNA (1)...(19): siRNA sense strand
ugccuacucucaagaaaug

SEQ ID NO: 1328541 - RNA, 19 nt, Homo sapiens
  misc_RNA (1)...(19): siRNA sense strand
caaccucuccugccucaug

SEQ ID NO: 1328542 - RNA, 19 nt, Homo sapiens
  misc_RNA (1)...(19): siRNA sense strand
cccaccagcuucacucuga

SEQ ID NO: 1328543 - RNA, 19 nt, Homo sapiens
  misc_RNA (1)...(19): siRNA sense strand
ggaaacugcagccugacuu

SEQ ID NO: 1328544 - RNA, 19 nt, Homo sapiens
  misc_RNA (1)...(19): siRNA sense strand
ccauggauguugugaaacu

SEQ ID NO: 1328545 - RNA, 19 nt, Homo sapiens
  misc_RNA (1)...(19): siRNA sense strand
gcacgccacccaucaccaa

SEQ ID NO: 1328546 - RNA, 19 nt, Homo sapiens
  misc_RNA (1)...(19): siRNA sense strand
agccaggccugcacauaaa

SEQ ID NO: 1328547 - RNA, 19 nt, Homo sapiens
  misc_RNA (1)...(19): siRNA sense strand
ccuggaggauggaacagaa

SEQ ID NO: 1328548 - RNA, 19 nt, Homo sapiens
  misc_RNA (1)...(19): siRNA sense strand
ggcagcagcgucugucuga

SEQ ID NO: 1328549 - RNA, 19 nt, Homo sapiens
  misc_RNA (1)...(19): siRNA sense strand
gcaacaagaccuggaggau

SEQ ID NO: 1328550 - RNA, 19 nt, Homo sapiens
  misc_RNA (1)...(19): siRNA sense strand
gcaacagccugcagauccu

SEQ ID NO: 1328551 - RNA, 19 nt, Homo sapiens
  misc_RNA (1)...(19): siRNA sense strand
ccccagagcugcaucuaaa

SEQ ID NO: 1328552 - RNA, 19 nt, Homo sapiens
  misc_RNA (1)...(19): siRNA sense strand
ccuuucagcucuaugagau

SEQ ID NO: 1328553 - RNA, 19 nt, Homo sapiens
  misc_RNA (1)...(19): siRNA sense strand
gaacaucaggcccuuucag

SEQ ID NO: 1328554 - RNA, 19 nt, Homo sapiens
  misc_RNA (1)...(19): siRNA sense strand
ggccuacacccugcagaua

SEQ ID NO: 1328555 - RNA, 19 nt, Homo sapiens
  misc_RNA (1)...(19): siRNA sense strand
ggaggaggaugaaaagaag

SEQ ID NO: 1328556 - RNA, 19 nt, Homo sapiens
  misc_RNA (1)...(19): siRNA sense strand
ggaccaacgcucagaacca

SEQ ID NO: 1328557 - RNA, 19 nt, Homo sapiens
  misc_RNA (1)...(19): siRNA sense strand
ggacccggagccacagauu

SEQ ID NO: 1328558 - RNA, 19 nt, Homo sapiens
  misc_RNA (1)...(19): siRNA sense strand
cagcagcgucugucugaug

SEQ ID NO: 1328559 - RNA, 19 nt, Homo sapiens
  misc_RNA (1)...(19): siRNA sense strand
uaaagcacauuggcaagac

SEQ ID NO: 1328560 - RNA, 19 nt, Homo sapiens
  misc_RNA (1)...(19): siRNA sense strand
ggccugcacauaaaucaga

SEQ ID NO: 1328561 - RNA, 19 nt, Homo sapiens
  misc_RNA (1)...(19): siRNA sense strand
cuaaagcacauuggcaaga

SEQ ID NO: 1328562 - RNA, 19 nt, Homo sapiens
  misc_RNA (1)...(19): siRNA sense strand
cugcuguuguaccagaaua

SEQ ID NO: 1328563 - RNA, 19 nt, Homo sapiens
  misc_RNA (1)...(19): siRNA sense strand
acccaggaaucuaucauca

SEQ ID NO: 1328564 - RNA, 19 nt, Homo sapiens
  misc_RNA (1)...(19): siRNA sense strand
gccuggagcugagaacuac

SEQ ID NO: 1328565 - RNA, 19 nt, Homo sapiens
  misc_RNA (1)...(19): siRNA sense strand
ccuuggaggcccuucagua

SEQ ID NO: 1328566 - RNA, 19 nt, Homo sapiens
  misc_RNA (1)...(19): siRNA sense strand
ggagaacaucaggcccuuu

SEQ ID NO: 1328567 - RNA, 19 nt, Homo sapiens
  misc_RNA (1)...(19): siRNA sense strand
ucccauaacagcucagaga

SEQ ID NO: 1328568 - RNA, 19 nt, Homo sapiens
  misc_RNA (1)...(19): siRNA sense strand
uaugccuacucucaagaaa

SEQ ID NO: 1328569 - RNA, 19 nt, Homo sapiens
  misc_RNA (1)...(19): siRNA sense strand
cuuggaggcccuucaguau

SEQ ID NO: 1328570 - RNA, 19 nt, Homo sapiens
  misc_RNA (1)...(19): siRNA sense strand
uuucagcucuaugagauca

SEQ ID NO: 1328571 - RNA, 19 nt, Homo sapiens
  misc_RNA (1)...(19): siRNA sense strand
ccuuguggccuauaacuca

SEQ ID NO: 1328572 - RNA, 19 nt, Homo sapiens
  misc_RNA (1)...(19): siRNA sense strand
ccaagguuaugugguuucu

SEQ ID NO: 1328573 - RNA, 19 nt, Homo sapiens
  misc_RNA (1)...(19): siRNA sense strand
gcacauaaaucagaagugu

SEQ ID NO: 1328574 - RNA, 19 nt, Homo sapiens
  misc_RNA (1)...(19): siRNA sense strand
gauccaagguuaugugguu

SEQ ID NO: 1328575 - RNA, 19 nt, Homo sapiens
  misc_RNA (1)...(19): siRNA sense strand
gcggacggauccaagguua

SEQ ID NO: 1328576 - RNA, 19 nt, Homo sapiens
  misc_RNA (1)...(19): siRNA sense strand
caaccacacucaggccuuu

SEQ ID NO: 1328577 - RNA, 19 nt, Homo sapiens
  misc_RNA (1)...(19): siRNA sense strand
uggaggcccuucaguauga

SEQ ID NO: 1328578 - RNA, 19 nt, Homo sapiens
  misc_RNA (1)...(19): siRNA sense strand
ucccauggauguugugaaa

SEQ ID NO: 1328579 - RNA, 19 nt, Homo sapiens
  misc_RNA (1)...(19): siRNA sense strand
aagguuaugugguuucuug

SEQ ID NO: 1328580 - RNA, 19 nt, Homo sapiens
  misc_RNA (1)...(19): siRNA sense strand
guacaguccucacccugau

SEQ ID NO: 1328581 - RNA, 19 nt, Homo sapiens
  misc_RNA (1)...(19): siRNA sense strand
cagugcagcuguucuggaa

SEQ ID NO: 1328582 - RNA, 19 nt, Homo sapiens
  misc_RNA (1)...(19): siRNA sense strand
ccucagggcuaugugauug

SEQ ID NO: 1328583 - RNA, 19 nt, Homo sapiens
  misc_RNA (1)...(19): siRNA sense strand
gaaacugcagccugacuug

SEQ ID NO: 1328584 - RNA, 19 nt, Homo sapiens
  misc_RNA (1)...(19): siRNA sense strand
cagccaggccugcacauaa

SEQ ID NO: 1328585 - RNA, 19 nt, Homo sapiens
  misc_RNA (1)...(19): siRNA sense strand
ggacggauccaagguuaug

SEQ ID NO: 1328586 - RNA, 19 nt, Homo sapiens
  misc_RNA (1)...(19): siRNA sense strand
caucgugacucccuuguac

SEQ ID NO: 1328587 - RNA, 19 nt, Homo sapiens
  misc_RNA (1)...(19): siRNA sense strand
acauaaaucagaaguguga

SEQ ID NO: 1328588 - RNA, 19 nt, Homo sapiens
  misc_RNA (1)...(19): siRNA sense strand
gagaacaucaggcccuuuc

SEQ ID NO: 1328589 - RNA, 19 nt, Homo sapiens
  misc_RNA (1)...(19): siRNA sense strand
ugccuacucucaagaaaug

SEQ ID NO: 1328590 - RNA, 19 nt, Homo sapiens
  misc_RNA (1)...(19): siRNA sense strand
caaccucuccugccucaug

SEQ ID NO: 1328591 - RNA, 19 nt, Homo sapiens
  misc_RNA (1)...(19): siRNA sense strand
cccaccagcuucacucuga

SEQ ID NO: 1328592 - RNA, 19 nt, Homo sapiens
  misc_RNA (1)...(19): siRNA sense strand
ggaaacugcagccugacuu

SEQ ID NO: 1328593 - RNA, 19 nt, Homo sapiens
  misc_RNA (1)...(19): siRNA sense strand
ccauggauguugugaaacu

SEQ ID NO: 1328594 - RNA, 19 nt, Homo sapiens
  misc_RNA (1)...(19): siRNA sense strand
gcacgccacccaucaccaa

SEQ ID NO: 1328595 - RNA, 19 nt, Homo sapiens
  misc_RNA (1)...(19): siRNA sense strand
agccaggccugcacauaaa

SEQ ID NO: 1328596 - RNA, 19 nt, Homo sapiens
  misc_RNA (1)...(19): siRNA sense strand
ccuggaggauggaacagaa

SEQ ID NO: 1328597 - RNA, 19 nt, Homo sapiens
  misc_RNA (1)...(19): siRNA sense strand
ggcagcagcgucugucuga

SEQ ID NO: 1328598 - RNA, 19 nt, Homo sapiens
  misc_RNA (1)...(19): siRNA sense strand
gcaacaagaccuggaggau

SEQ ID NO: 1328599 - RNA, 19 nt, Homo sapiens
  misc_RNA (1)...(19): siRNA sense strand
gcaacagccugcagauccu

SEQ ID NO: 1328600 - RNA, 19 nt, Homo sapiens
  misc_RNA (1)...(19): siRNA sense strand
ccccagagcugcaucuaaa

SEQ ID NO: 1328601 - RNA, 19 nt, Homo sapiens
  misc_RNA (1)...(19): siRNA sense strand
ccuuucagcucuaugagau

SEQ ID NO: 1328602 - RNA, 19 nt, Homo sapiens
  misc_RNA (1)...(19): siRNA sense strand
gaacaucaggcccuuucag

SEQ ID NO: 1328603 - RNA, 19 nt, Homo sapiens
  misc_RNA (1)...(19): siRNA sense strand
ggccuacacccugcagaua

SEQ ID NO: 1328604 - RNA, 19 nt, Homo sapiens
  misc_RNA (1)...(19): siRNA sense strand
ggaggaggaugaaaagaag

SEQ ID NO: 1328605 - RNA, 19 nt, Homo sapiens
  misc_RNA (1)...(19): siRNA sense strand
ggaccaacgcucagaacca

SEQ ID NO: 1328606 - RNA, 19 nt, Homo sapiens
  misc_RNA (1)...(19): siRNA sense strand
ggacccggagccacagauu

SEQ ID NO: 1328607 - RNA, 19 nt, Homo sapiens
  misc_RNA (1)...(19): siRNA sense strand
cagcagcgucugucugaug

SEQ ID NO: 1328608 - RNA, 19 nt, Homo sapiens
  misc_RNA (1)...(19): siRNA sense strand
uaaagcacauuggcaagac

SEQ ID NO: 1328609 - RNA, 19 nt, Homo sapiens
  misc_RNA (1)...(19): siRNA sense strand
ggccugcacauaaaucaga

SEQ ID NO: 1328610 - RNA, 19 nt, Homo sapiens
  misc_RNA (1)...(19): siRNA sense strand
cuaaagcacauuggcaaga

SEQ ID NO: 1328611 - RNA, 19 nt, Homo sapiens
  misc_RNA (1)...(19): siRNA sense strand
cugcuguuguaccagaaua

SEQ ID NO: 1328612 - RNA, 19 nt, Homo sapiens
  misc_RNA (1)...(19): siRNA sense strand
acccaggaaucuaucauca

SEQ ID NO: 1328613 - RNA, 19 nt, Homo sapiens
  misc_RNA (1)...(19): siRNA sense strand
gccuggagcugagaacuac

SEQ ID NO: 1328614 - RNA, 19 nt, Homo sapiens
  misc_RNA (1)...(19): siRNA sense strand
ccuuggaggcccuucagua

SEQ ID NO: 1328615 - RNA, 19 nt, Homo sapiens
  misc_RNA (1)...(19): siRNA sense strand
ggagaacaucaggcccuuu

SEQ ID NO: 1328616 - RNA, 19 nt, Homo sapiens
  misc_RNA (1)...(19): siRNA sense strand
ucccauaacagcucagaga

SEQ ID NO: 1328617 - RNA, 19 nt, Homo sapiens
  misc_RNA (1)...(19): siRNA sense strand
uaugccuacucucaagaaa

SEQ ID NO: 1328618 - RNA, 19 nt, Homo sapiens
  misc_RNA (1)...(19): siRNA sense strand
cuuggaggcccuucaguau

SEQ ID NO: 1328619 - RNA, 19 nt, Homo sapiens
  misc_RNA (1)...(19): siRNA sense strand
uuucagcucuaugagauca

SEQ ID NO: 1328620 - RNA, 19 nt, Homo sapiens
  misc_RNA (1)...(19): siRNA sense strand
ccuuguggccuauaacuca

SEQ ID NO: 1328621 - RNA, 19 nt, Homo sapiens
  misc_RNA (1)...(19): siRNA sense strand
ccaagguuaugugguuucu

SEQ ID NO: 1328622 - RNA, 19 nt, Homo sapiens
  misc_RNA (1)...(19): siRNA sense strand
gcacauaaaucagaagugu

SEQ ID NO: 1328623 - RNA, 19 nt, Homo sapiens
  misc_RNA (1)...(19): siRNA sense strand
gauccaagguuaugugguu

SEQ ID NO: 1328624 - RNA, 19 nt, Homo sapiens
  misc_RNA (1)...(19): siRNA sense strand
gcggacggauccaagguua

SEQ ID NO: 1328625 - RNA, 19 nt, Homo sapiens
  misc_RNA (1)...(19): siRNA sense strand
caaccacacucaggccuuu

SEQ ID NO: 1328626 - RNA, 19 nt, Homo sapiens
  misc_RNA (1)...(19): siRNA sense strand
uggaggcccuucaguauga

SEQ ID NO: 1328627 - RNA, 19 nt, Homo sapiens
  misc_RNA (1)...(19): siRNA sense strand
ucccauggauguugugaaa

SEQ ID NO: 1328628 - RNA, 19 nt, Homo sapiens
  misc_RNA (1)...(19): siRNA sense strand
aagguuaugugguuucuug

SEQ ID NO: 1328629 - RNA, 19 nt, Homo sapiens
  misc_RNA (1)...(19): siRNA sense strand
guacaguccucacccugau

SEQ ID NO: 1328630 - RNA, 19 nt, Homo sapiens
  misc_RNA (1)...(19): siRNA sense strand
cagugcagcuguucuggaa

SEQ ID NO: 1328631 - RNA, 19 nt, Homo sapiens
  misc_RNA (1)...(19): siRNA sense strand
ccucagggcuaugugauug

SEQ ID NO: 1328632 - RNA, 19 nt, Homo sapiens
  misc_RNA (1)...(19): siRNA sense strand
gaaacugcagccugacuug

SEQ ID NO: 1328633 - RNA, 19 nt, Homo sapiens
  misc_RNA (1)...(19): siRNA sense strand
cagccaggccugcacauaa

SEQ ID NO: 1328634 - RNA, 19 nt, Homo sapiens
  misc_RNA (1)...(19): siRNA sense strand
ggacggauccaagguuaug

SEQ ID NO: 1328635 - RNA, 19 nt, Homo sapiens
  misc_RNA (1)...(19): siRNA sense strand
caucgugacucccuuguac

SEQ ID NO: 1328636 - RNA, 19 nt, Homo sapiens
  misc_RNA (1)...(19): siRNA sense strand
acauaaaucagaaguguga

SEQ ID NO: 1328637 - RNA, 19 nt, Homo sapiens
  misc_RNA (1)...(19): siRNA sense strand
gagaacaucaggcccuuuc

SEQ ID NO: 1328638 - RNA, 19 nt, Homo sapiens
  misc_RNA (1)...(19): siRNA sense strand
ugccuacucucaagaaaug

SEQ ID NO: 1328639 - RNA, 19 nt, Homo sapiens
  misc_RNA (1)...(19): siRNA sense strand
caaccucuccugccucaug

SEQ ID NO: 1328640 - RNA, 19 nt, Homo sapiens
  misc_RNA (1)...(19): siRNA sense strand
cccaccagcuucacucuga

SEQ ID NO: 1328641 - RNA, 19 nt, Homo sapiens
  misc_RNA (1)...(19): siRNA sense strand
ggaaacugcagccugacuu

SEQ ID NO: 1328642 - RNA, 19 nt, Homo sapiens
  misc_RNA (1)...(19): siRNA sense strand
ccauggauguugugaaacu

SEQ ID NO: 1328643 - RNA, 19 nt, Homo sapiens
  misc_RNA (1)...(19): siRNA sense strand
gcacgccacccaucaccaa

SEQ ID NO: 1328644 - RNA, 19 nt, Homo sapiens
  misc_RNA (1)...(19): siRNA sense strand
agccaggccugcacauaaa

SEQ ID NO: 1328645 - RNA, 19 nt, Homo sapiens
  misc_RNA (1)...(19): siRNA sense strand
ccuggaggauggaacagaa

SEQ ID NO: 1328646 - RNA, 19 nt, Homo sapiens
  misc_RNA (1)...(19): siRNA sense strand
ggcagcagcgucugucuga

SEQ ID NO: 1328647 - RNA, 19 nt, Homo sapiens
  misc_RNA (1)...(19): siRNA sense strand
gcaacaagaccuggaggau

SEQ ID NO: 1328648 - RNA, 19 nt, Homo sapiens
  misc_RNA (1)...(19): siRNA sense strand
gcaacagccugcagauccu

SEQ ID NO: 1328649 - RNA, 19 nt, Homo sapiens
  misc_RNA (1)...(19): siRNA sense strand
ccccagagcugcaucuaaa

SEQ ID NO: 1328650 - RNA, 19 nt, Homo sapiens
  misc_RNA (1)...(19): siRNA sense strand
ccuuucagcucuaugagau

SEQ ID NO: 1328651 - RNA, 19 nt, Homo sapiens
  misc_RNA (1)...(19): siRNA sense strand
gaacaucaggcccuuucag

SEQ ID NO: 1328652 - RNA, 19 nt, Homo sapiens
  misc_RNA (1)...(19): siRNA sense strand
ggccuacacccugcagaua

SEQ ID NO: 1328653 - RNA, 19 nt, Homo sapiens
  misc_RNA (1)...(19): siRNA sense strand
ggaggaggaugaaaagaag

SEQ ID NO: 1328654 - RNA, 19 nt, Homo sapiens
  misc_RNA (1)...(19): siRNA sense strand
ggaccaacgcucagaacca

SEQ ID NO: 1328655 - RNA, 19 nt, Homo sapiens
  misc_RNA (1)...(19): siRNA sense strand
ggacccggagccacagauu

SEQ ID NO: 1328656 - RNA, 19 nt, Homo sapiens
  misc_RNA (1)...(19): siRNA sense strand
cagcagcgucugucugaug

SEQ ID NO: 1328657 - RNA, 19 nt, Homo sapiens
  misc_RNA (1)...(19): siRNA sense strand
uaaagcacauuggcaagac

SEQ ID NO: 1328658 - RNA, 19 nt, Homo sapiens
  misc_RNA (1)...(19): siRNA sense strand
ggccugcacauaaaucaga

SEQ ID NO: 1328659 - RNA, 19 nt, Homo sapiens
  misc_RNA (1)...(19): siRNA sense strand
cuaaagcacauuggcaaga

SEQ ID NO: 1328660 - RNA, 19 nt, Homo sapiens
  misc_RNA (1)...(19): siRNA sense strand
cugcuguuguaccagaaua

SEQ ID NO: 1328661 - RNA, 19 nt, Homo sapiens
  misc_RNA (1)...(19): siRNA sense strand
acccaggaaucuaucauca

SEQ ID NO: 1328662 - RNA, 19 nt, Homo sapiens
  misc_RNA (1)...(19): siRNA sense strand
gccuggagcugagaacuac

SEQ ID NO: 1328663 - RNA, 19 nt, Homo sapiens
  misc_RNA (1)...(19): siRNA sense strand
ccuuggaggcccuucagua

SEQ ID NO: 1328664 - RNA, 19 nt, Homo sapiens
  misc_RNA (1)...(19): siRNA sense strand
ggagaacaucaggcccuuu

SEQ ID NO: 1328665 - RNA, 19 nt, Homo sapiens
  misc_RNA (1)...(19): siRNA sense strand
ucccauaacagcucagaga

SEQ ID NO: 1328666 - RNA, 19 nt, Homo sapiens
  misc_RNA (1)...(19): siRNA sense strand
uaugccuacucucaagaaa

SEQ ID NO: 1328667 - RNA, 19 nt, Homo sapiens
  misc_RNA (1)...(19): siRNA sense strand
cuuggaggcccuucaguau

SEQ ID NO: 1328668 - RNA, 19 nt, Homo sapiens
  misc_RNA (1)...(19): siRNA sense strand
uuucagcucuaugagauca

SEQ ID NO: 1328669 - RNA, 19 nt, Homo sapiens
  misc_RNA (1)...(19): siRNA sense strand
ccuuguggccuauaacuca

SEQ ID NO: 1328670 - RNA, 19 nt, Homo sapiens
  misc_RNA (1)...(19): siRNA sense strand
ccaagguuaugugguuucu

SEQ ID NO: 1328671 - RNA, 19 nt, Homo sapiens
  misc_RNA (1)...(19): siRNA sense strand
gcacauaaaucagaagugu

SEQ ID NO: 1328672 - RNA, 19 nt, Homo sapiens
  misc_RNA (1)...(19): siRNA sense strand
gauccaagguuaugugguu

SEQ ID NO: 1328673 - RNA, 19 nt, Homo sapiens
  misc_RNA (1)...(19): siRNA sense strand
gcggacggauccaagguua

SEQ ID NO: 1328674 - RNA, 19 nt, Homo sapiens
  misc_RNA (1)...(19): siRNA sense strand
caggcgaucugcauacuuu

SEQ ID NO: 1328675 - RNA, 19 nt, Homo sapiens
  misc_RNA (1)...(19): siRNA sense strand
caaccacacucaggccuuu

SEQ ID NO: 1328676 - RNA, 19 nt, Homo sapiens
  misc_RNA (1)...(19): siRNA sense strand
uccuauaacuucaguauug

SEQ ID NO: 1328677 - RNA, 19 nt, Homo sapiens
  misc_RNA (1)...(19): siRNA sense strand
uggaggcccuucaguauga

SEQ ID NO: 1328678 - RNA, 19 nt, Homo sapiens
  misc_RNA (1)...(19): siRNA sense strand
ucccauggauguugugaaa

SEQ ID NO: 1328679 - RNA, 19 nt, Homo sapiens
  misc_RNA (1)...(19): siRNA sense strand
aagguuaugugguuucuug

SEQ ID NO: 1328680 - RNA, 19 nt, Homo sapiens
  misc_RNA (1)...(19): siRNA sense strand
guacaguccucacccugau

SEQ ID NO: 1328681 - RNA, 19 nt, Homo sapiens
  misc_RNA (1)...(19): siRNA sense strand
cagugcagcuguucuggaa

SEQ ID NO: 1328682 - RNA, 19 nt, Homo sapiens
  misc_RNA (1)...(19): siRNA sense strand
ccucagggcuaugugauug

SEQ ID NO: 1328683 - RNA, 19 nt, Homo sapiens
  misc_RNA (1)...(19): siRNA sense strand
gaaacugcagccugacuug

SEQ ID NO: 1328684 - RNA, 19 nt, Homo sapiens
  misc_RNA (1)...(19): siRNA sense strand
cagccaggccugcacauaa

SEQ ID NO: 1328685 - RNA, 19 nt, Homo sapiens
  misc_RNA (1)...(19): siRNA sense strand
ggacggauccaagguuaug

SEQ ID NO: 1328686 - RNA, 19 nt, Homo sapiens
  misc_RNA (1)...(19): siRNA sense strand
caucgugacucccuuguac

SEQ ID NO: 1328687 - RNA, 19 nt, Homo sapiens
  misc_RNA (1)...(19): siRNA sense strand
acauaaaucagaaguguga

SEQ ID NO: 1328688 - RNA, 19 nt, Homo sapiens
  misc_RNA (1)...(19): siRNA sense strand
gagaacaucaggcccuuuc

SEQ ID NO: 1328689 - RNA, 19 nt, Homo sapiens
  misc_RNA (1)...(19): siRNA sense strand
ugccuacucucaagaaaug

SEQ ID NO: 1328690 - RNA, 19 nt, Homo sapiens
  misc_RNA (1)...(19): siRNA sense strand
caaccucuccugccucaug

SEQ ID NO: 1328691 - RNA, 19 nt, Homo sapiens
  misc_RNA (1)...(19): siRNA sense strand
cccaccagcuucacucuga

SEQ ID NO: 1328692 - RNA, 19 nt, Homo sapiens
  misc_RNA (1)...(19): siRNA sense strand
ggaaacugcagccugacuu

SEQ ID NO: 1328693 - RNA, 19 nt, Homo sapiens
  misc_RNA (1)...(19): siRNA sense strand
ccauggauguugugaaacu

SEQ ID NO: 1328694 - RNA, 19 nt, Homo sapiens
  misc_RNA (1)...(19): siRNA sense strand
gcacgccacccaucaccaa

SEQ ID NO: 1328695 - RNA, 19 nt, Homo sapiens
  misc_RNA (1)...(19): siRNA sense strand
agccaggccugcacauaaa

SEQ ID NO: 1328696 - RNA, 19 nt, Homo sapiens
  misc_RNA (1)...(19): siRNA sense strand
ccuggaggauggaacagaa

SEQ ID NO: 1328697 - RNA, 19 nt, Homo sapiens
  misc_RNA (1)...(19): siRNA sense strand
ggcagcagcgucugucuga

SEQ ID NO: 1328698 - RNA, 19 nt, Homo sapiens
  misc_RNA (1)...(19): siRNA sense strand
gcaacaagaccuggaggau

SEQ ID NO: 1328699 - RNA, 19 nt, Homo sapiens
  misc_RNA (1)...(19): siRNA sense strand
gcaacagccugcagauccu

SEQ ID NO: 1328700 - RNA, 19 nt, Homo sapiens
  misc_RNA (1)...(19): siRNA sense strand
ccccagagcugcaucuaaa

SEQ ID NO: 1328701 - RNA, 19 nt, Homo sapiens
  misc_RNA (1)...(19): siRNA sense strand
ccuuucagcucuaugagau

SEQ ID NO: 1328702 - RNA, 19 nt, Homo sapiens
  misc_RNA (1)...(19): siRNA sense strand
gaacaucaggcccuuucag

SEQ ID NO: 1328703 - RNA, 19 nt, Homo sapiens
  misc_RNA (1)...(19): siRNA sense strand
ggccuacacccugcagaua

SEQ ID NO: 1328704 - RNA, 19 nt, Homo sapiens
  misc_RNA (1)...(19): siRNA sense strand
ggaggaggaugaaaagaag

SEQ ID NO: 1328705 - RNA, 19 nt, Homo sapiens
  misc_RNA (1)...(19): siRNA sense strand
ggaccaacgcucagaacca

SEQ ID NO: 1328706 - RNA, 19 nt, Homo sapiens
  misc_RNA (1)...(19): siRNA sense strand
gaucugcauacuuuaagga

SEQ ID NO: 1328707 - RNA, 19 nt, Homo sapiens
  misc_RNA (1)...(19): siRNA sense strand
ggacccggagccacagauu

SEQ ID NO: 1328708 - RNA, 19 nt, Homo sapiens
  misc_RNA (1)...(19): siRNA sense strand
ccuauaacuucaguauugu

SEQ ID NO: 1328709 - RNA, 19 nt, Homo sapiens
  misc_RNA (1)...(19): siRNA sense strand
ccaauggccuuuugugcuu

SEQ ID NO: 1328710 - RNA, 19 nt, Homo sapiens
  misc_RNA (1)...(19): siRNA sense strand
ggcgaucugcauacuuuaa

SEQ ID NO: 1328711 - RNA, 19 nt, Homo sapiens
  misc_RNA (1)...(19): siRNA sense strand
cagcagcgucugucugaug

SEQ ID NO: 1328712 - RNA, 19 nt, Homo sapiens
  misc_RNA (1)...(19): siRNA sense strand
uaaagcacauuggcaagac

SEQ ID NO: 1328713 - RNA, 19 nt, Homo sapiens
  misc_RNA (1)...(19): siRNA sense strand
ggccugcacauaaaucaga

SEQ ID NO: 1328714 - RNA, 19 nt, Homo sapiens
  misc_RNA (1)...(19): siRNA sense strand
cuaaagcacauuggcaaga

SEQ ID NO: 1328715 - RNA, 19 nt, Homo sapiens
  misc_RNA (1)...(19): siRNA sense strand
gugcuuguuuccuauaacu

SEQ ID NO: 1328716 - RNA, 19 nt, Homo sapiens
  misc_RNA (1)...(19): siRNA sense strand
cugcuguuguaccagaaua

SEQ ID NO: 1328717 - RNA, 19 nt, Homo sapiens
  misc_RNA (1)...(19): siRNA sense strand
acccaggaaucuaucauca

SEQ ID NO: 1328718 - RNA, 19 nt, Homo sapiens
  misc_RNA (1)...(19): siRNA sense strand
gccuggagcugagaacuac

SEQ ID NO: 1328719 - RNA, 19 nt, Homo sapiens
  misc_RNA (1)...(19): siRNA sense strand
ccuuggaggcccuucagua

SEQ ID NO: 1328720 - RNA, 19 nt, Homo sapiens
  misc_RNA (1)...(19): siRNA sense strand
ggagaacaucaggcccuuu

SEQ ID NO: 1328721 - RNA, 19 nt, Homo sapiens
  misc_RNA (1)...(19): siRNA sense strand
ucccauaacagcucagaga

SEQ ID NO: 1328722 - RNA, 19 nt, Homo sapiens
  misc_RNA (1)...(19): siRNA sense strand
uaugccuacucucaagaaa

SEQ ID NO: 1328723 - RNA, 19 nt, Homo sapiens
  misc_RNA (1)...(19): siRNA sense strand
gcuuguuuccuauaacuuc

SEQ ID NO: 1328724 - RNA, 19 nt, Homo sapiens
  misc_RNA (1)...(19): siRNA sense strand
cuuggaggcccuucaguau

SEQ ID NO: 1328725 - RNA, 19 nt, Homo sapiens
  misc_RNA (1)...(19): siRNA sense strand
uuucagcucuaugagauca

SEQ ID NO: 1328726 - RNA, 19 nt, Homo sapiens
  misc_RNA (1)...(19): siRNA sense strand
ccuuguggccuauaacuca

SEQ ID NO: 1328727 - RNA, 19 nt, Homo sapiens
  misc_RNA (1)...(19): siRNA sense strand
ccaagguuaugugguuucu

SEQ ID NO: 1328728 - RNA, 19 nt, Homo sapiens
  misc_RNA (1)...(19): siRNA sense strand
aagaagagcugccaauuua

SEQ ID NO: 1328729 - RNA, 19 nt, Homo sapiens
  misc_RNA (1)...(19): siRNA sense strand
gcaagaggcucaagaagaa

SEQ ID NO: 1328730 - RNA, 19 nt, Homo sapiens
  misc_RNA (1)...(19): siRNA sense strand
gcaaaguacuuccaauuau

SEQ ID NO: 1328731 - RNA, 19 nt, Homo sapiens
  misc_RNA (1)...(19): siRNA sense strand
ccaaagaccuuccuucgaa

SEQ ID NO: 1328732 - RNA, 19 nt, Homo sapiens
  misc_RNA (1)...(19): siRNA sense strand
gaaauugugucuacaguuc

SEQ ID NO: 1328733 - RNA, 19 nt, Homo sapiens
  misc_RNA (1)...(19): siRNA sense strand
ugaaagagcucaaggugaa

SEQ ID NO: 1328734 - RNA, 19 nt, Homo sapiens
  misc_RNA (1)...(19): siRNA sense strand
gaaagcccauuuagagaaa

SEQ ID NO: 1328735 - RNA, 19 nt, Homo sapiens
  misc_RNA (1)...(19): siRNA sense strand
gaaagugauucagaagaua

SEQ ID NO: 1328736 - RNA, 19 nt, Homo sapiens
  misc_RNA (1)...(19): siRNA sense strand
gauaauagaugccacucaa

SEQ ID NO: 1328737 - RNA, 19 nt, Homo sapiens
  misc_RNA (1)...(19): siRNA sense strand
gaauaaagguggacagucu

SEQ ID NO: 1328738 - RNA, 19 nt, Homo sapiens
  misc_RNA (1)...(19): siRNA sense strand
gaacaccuuuguccuagaa

SEQ ID NO: 1328739 - RNA, 19 nt, Homo sapiens
  misc_RNA (1)...(19): siRNA sense strand
gagagguacucgaucauaa

SEQ ID NO: 1328740 - RNA, 19 nt, Homo sapiens
  misc_RNA (1)...(19): siRNA sense strand
gguagugaauuaagaauga

SEQ ID NO: 1328741 - RNA, 19 nt, Homo sapiens
  misc_RNA (1)...(19): siRNA sense strand
gaaagaagaggcaaguauu

SEQ ID NO: 1328742 - RNA, 19 nt, Homo sapiens
  misc_RNA (1)...(19): siRNA sense strand
aaccaaagauucagacaua

SEQ ID NO: 1328743 - RNA, 19 nt, Homo sapiens
  misc_RNA (1)...(19): siRNA sense strand
gaccagaaaucucuuuaga

SEQ ID NO: 1328744 - RNA, 19 nt, Homo sapiens
  misc_RNA (1)...(19): siRNA sense strand
gaaggaaugugccaagcaa

SEQ ID NO: 1328745 - RNA, 19 nt, Homo sapiens
  misc_RNA (1)...(19): siRNA sense strand
ggaagacagugauggugua

SEQ ID NO: 1328746 - RNA, 19 nt, Homo sapiens
  misc_RNA (1)...(19): siRNA sense strand
ggaauuagacucuuuaucu

SEQ ID NO: 1328747 - RNA, 19 nt, Homo sapiens
  misc_RNA (1)...(19): siRNA sense strand
cuagaugaauugccuauuu

SEQ ID NO: 1328748 - RNA, 19 nt, Homo sapiens
  misc_RNA (1)...(19): siRNA sense strand
ggacacaaguaucagcaaa

SEQ ID NO: 1328749 - RNA, 19 nt, Homo sapiens
  misc_RNA (1)...(19): siRNA sense strand
gaagaugucccaaauaagu

SEQ ID NO: 1328750 - RNA, 19 nt, Homo sapiens
  misc_RNA (1)...(19): siRNA sense strand
guagugaccuuccugauuc

SEQ ID NO: 1328751 - RNA, 19 nt, Homo sapiens
  misc_RNA (1)...(19): siRNA sense strand
cagaagagcucagaaacuu

SEQ ID NO: 1328752 - RNA, 19 nt, Homo sapiens
  misc_RNA (1)...(19): siRNA sense strand
gaacugggguuguguauga

SEQ ID NO: 1328753 - RNA, 19 nt, Homo sapiens
  misc_RNA (1)...(19): siRNA sense strand
gaagagcugccaauuuauu

SEQ ID NO: 1328754 - RNA, 19 nt, Homo sapiens
  misc_RNA (1)...(19): siRNA sense strand
gcucagaguuaacguuuga

SEQ ID NO: 1328755 - RNA, 19 nt, Homo sapiens
  misc_RNA (1)...(19): siRNA sense strand
cgacgagggucaucauauu

SEQ ID NO: 1328756 - RNA, 19 nt, Homo sapiens
  misc_RNA (1)...(19): siRNA sense strand
ggagauggguauucuagug

SEQ ID NO: 1328757 - RNA, 19 nt, Homo sapiens
  misc_RNA (1)...(19): siRNA sense strand
gcuagaagcucugauggaa

SEQ ID NO: 1328758 - RNA, 19 nt, Homo sapiens
  misc_RNA (1)...(19): siRNA sense strand
ccaguuauaugugauagua

SEQ ID NO: 1328759 - RNA, 19 nt, Homo sapiens
  misc_RNA (1)...(19): siRNA sense strand
guagaaauuugacagauca

SEQ ID NO: 1328760 - RNA, 19 nt, Homo sapiens
  misc_RNA (1)...(19): siRNA sense strand
caacagaccacuuuccaaa

SEQ ID NO: 1328761 - RNA, 19 nt, Homo sapiens
  misc_RNA (1)...(19): siRNA sense strand
cagcuucuguuaaucauuu

SEQ ID NO: 1328762 - RNA, 19 nt, Homo sapiens
  misc_RNA (1)...(19): siRNA sense strand
gcacagaagcugacacaga

SEQ ID NO: 1328763 - RNA, 19 nt, Homo sapiens
  misc_RNA (1)...(19): siRNA sense strand
gagaacaggcguaauaaug

SEQ ID NO: 1328764 - RNA, 19 nt, Homo sapiens
  misc_RNA (1)...(19): siRNA sense strand
ugguguaacuuaugcauua

SEQ ID NO: 1328765 - RNA, 19 nt, Homo sapiens
  misc_RNA (1)...(19): siRNA sense strand
gugagggucucucugauaa

SEQ ID NO: 1328766 - RNA, 19 nt, Homo sapiens
  misc_RNA (1)...(19): siRNA sense strand
uugaagaugucccaaauaa

SEQ ID NO: 1328767 - RNA, 19 nt, Homo sapiens
  misc_RNA (1)...(19): siRNA sense strand
ggaaagaagaggcaaguau

SEQ ID NO: 1328768 - RNA, 19 nt, Homo sapiens
  misc_RNA (1)...(19): siRNA sense strand
caagaagagcugccaauuu

SEQ ID NO: 1328769 - RNA, 19 nt, Homo sapiens
  misc_RNA (1)...(19): siRNA sense strand
gaaaguauagcaaguaaag

SEQ ID NO: 1328770 - RNA, 19 nt, Homo sapiens
  misc_RNA (1)...(19): siRNA sense strand
gacauauacuguacuuuga

SEQ ID NO: 1328771 - RNA, 19 nt, Homo sapiens
  misc_RNA (1)...(19): siRNA sense strand
gcauuaaagugugacagua

SEQ ID NO: 1328772 - RNA, 19 nt, Homo sapiens
  misc_RNA (1)...(19): siRNA sense strand
gaaaucaaacagucucauu

SEQ ID NO: 1328773 - RNA, 19 nt, Homo sapiens
  misc_RNA (1)...(19): siRNA sense strand
uaaaggagguauaucgaau

SEQ ID NO: 1328774 - RNA, 19 nt, Homo sapiens
  misc_RNA (1)...(19): siRNA sense strand
gaagucauacucacagaaa

SEQ ID NO: 1328775 - RNA, 19 nt, Homo sapiens
  misc_RNA (1)...(19): siRNA sense strand
gaaauaagcagcaauucca

SEQ ID NO: 1328776 - RNA, 19 nt, Homo sapiens
  misc_RNA (1)...(19): siRNA sense strand
gcaagcaccugaaauaagc

SEQ ID NO: 1328777 - RNA, 19 nt, Homo sapiens
  misc_RNA (1)...(19): siRNA sense strand
cauauugccugaaagaaga

SEQ ID NO: 1328778 - RNA, 19 nt, Homo sapiens
  misc_RNA (1)...(19): siRNA sense strand
gaaauagagcccaaagaga

SEQ ID NO: 1328779 - RNA, 19 nt, Homo sapiens
  misc_RNA (1)...(19): siRNA sense strand
gaaaccgucuccagucugu

SEQ ID NO: 1328780 - RNA, 19 nt, Homo sapiens
  misc_RNA (1)...(19): siRNA sense strand
ggaaagaaacaauaguaga

SEQ ID NO: 1328781 - RNA, 19 nt, Homo sapiens
  misc_RNA (1)...(19): siRNA sense strand
gaauugggaucaacaggau

SEQ ID NO: 1328782 - RNA, 19 nt, Homo sapiens
  misc_RNA (1)...(19): siRNA sense strand
gaugauagcaguauuccaa

SEQ ID NO: 1328783 - RNA, 19 nt, Homo sapiens
  misc_RNA (1)...(19): siRNA sense strand
acccaagucugauaaauuu

SEQ ID NO: 1328784 - RNA, 19 nt, Homo sapiens
  misc_RNA (1)...(19): siRNA sense strand
uaagaaggauucaguggau

SEQ ID NO: 1328785 - RNA, 19 nt, Homo sapiens
  misc_RNA (1)...(19): siRNA sense strand
gaaaaugccauguuacuuu

SEQ ID NO: 1328786 - RNA, 19 nt, Homo sapiens
  misc_RNA (1)...(19): siRNA sense strand
gagaagaauccggaaauuu

SEQ ID NO: 1328787 - RNA, 19 nt, Homo sapiens
  misc_RNA (1)...(19): siRNA sense strand
agaagggaauuccauauug

SEQ ID NO: 1328788 - RNA, 19 nt, Homo sapiens
  misc_RNA (1)...(19): siRNA sense strand
caagauaaacucaugucua

SEQ ID NO: 1328789 - RNA, 19 nt, Homo sapiens
  misc_RNA (1)...(19): siRNA sense strand
cacaacagcugccugaaug

SEQ ID NO: 1328790 - RNA, 19 nt, Homo sapiens
  misc_RNA (1)...(19): siRNA sense strand
ccugaagaaugaugagaua

SEQ ID NO: 1328791 - RNA, 19 nt, Homo sapiens
  misc_RNA (1)...(19): siRNA sense strand
gaggacaugugcauacuuc

SEQ ID NO: 1328792 - RNA, 19 nt, Homo sapiens
  misc_RNA (1)...(19): siRNA sense strand
ccaaagauucagacauaua

SEQ ID NO: 1328793 - RNA, 19 nt, Homo sapiens
  misc_RNA (1)...(19): siRNA sense strand
ucaaacagucucauucuuu

SEQ ID NO: 1328794 - RNA, 19 nt, Homo sapiens
  misc_RNA (1)...(19): siRNA sense strand
ccacagcgauggaaggaau

SEQ ID NO: 1328795 - RNA, 19 nt, Homo sapiens
  misc_RNA (1)...(19): siRNA sense strand
gaagaagggaauuccauau

SEQ ID NO: 1328796 - RNA, 19 nt, Homo sapiens
  misc_RNA (1)...(19): siRNA sense strand
gaaagagaaucuaaaagga

SEQ ID NO: 1328797 - RNA, 19 nt, Homo sapiens
  misc_RNA (1)...(19): siRNA sense strand
aaacuuagguugggacuuc

SEQ ID NO: 1328798 - RNA, 19 nt, Homo sapiens
  misc_RNA (1)...(19): siRNA sense strand
caaggagacauuuguauga

SEQ ID NO: 1328799 - RNA, 19 nt, Homo sapiens
  misc_RNA (1)...(19): siRNA sense strand
gaagucagaaagcccauuu

SEQ ID NO: 1328800 - RNA, 19 nt, Homo sapiens
  misc_RNA (1)...(19): siRNA sense strand
gccaagaacagccagauaa

SEQ ID NO: 1328801 - RNA, 19 nt, Homo sapiens
  misc_RNA (1)...(19): siRNA sense strand
ggacagaaagaaaguuaga

SEQ ID NO: 1328802 - RNA, 19 nt, Homo sapiens
  misc_RNA (1)...(19): siRNA sense strand
cagauucccuaacagauga

SEQ ID NO: 1328803 - RNA, 19 nt, Homo sapiens
  misc_RNA (1)...(19): siRNA sense strand
ugacucagaaguuguauuu

SEQ ID NO: 1328804 - RNA, 19 nt, Homo sapiens
  misc_RNA (1)...(19): siRNA sense strand
gaagggaauuccauauugc

SEQ ID NO: 1328805 - RNA, 19 nt, Homo sapiens
  misc_RNA (1)...(19): siRNA sense strand
uagcaacccuucuuugugu

SEQ ID NO: 1328806 - RNA, 19 nt, Homo sapiens
  misc_RNA (1)...(19): siRNA sense strand
cuacaguucaugaagauua

SEQ ID NO: 1328807 - RNA, 19 nt, Homo sapiens
  misc_RNA (1)...(19): siRNA sense strand
ccaccaagcugagcacaga

SEQ ID NO: 1328808 - RNA, 19 nt, Homo sapiens
  misc_RNA (1)...(19): siRNA sense strand
gaaaagaagcccagaaaug

SEQ ID NO: 1328809 - RNA, 19 nt, Homo sapiens
  misc_RNA (1)...(19): siRNA sense strand
gaugagagauuggagucaa

SEQ ID NO: 1328810 - RNA, 19 nt, Homo sapiens
  misc_RNA (1)...(19): siRNA sense strand
ccauguuacuuugaucuua

SEQ ID NO: 1328811 - RNA, 19 nt, Homo sapiens
  misc_RNA (1)...(19): siRNA sense strand
gcaagaagagcugccaauu

SEQ ID NO: 1328812 - RNA, 19 nt, Homo sapiens
  misc_RNA (1)...(19): siRNA sense strand
guuuaaagcucgagugaag

SEQ ID NO: 1328813 - RNA, 19 nt, Homo sapiens
  misc_RNA (1)...(19): siRNA sense strand
ggagagguacucgaucaua

SEQ ID NO: 1328814 - RNA, 19 nt, Homo sapiens
  misc_RNA (1)...(19): siRNA sense strand
gaagagcucagaaacuuag

SEQ ID NO: 1328815 - RNA, 19 nt, Homo sapiens
  misc_RNA (1)...(19): siRNA sense strand
aguaaagccuguccucaaa

SEQ ID NO: 1328816 - RNA, 19 nt, Homo sapiens
  misc_RNA (1)...(19): siRNA sense strand
ggagguauaucgaauucca

SEQ ID NO: 1328817 - RNA, 19 nt, Homo sapiens
  misc_RNA (1)...(19): siRNA sense strand
cacagacacucccaagaaa

SEQ ID NO: 1328818 - RNA, 19 nt, Homo sapiens
  misc_RNA (1)...(19): siRNA sense strand
cguuauaaaucuacccuuu

SEQ ID NO: 1328819 - RNA, 19 nt, Homo sapiens
  misc_RNA (1)...(19): siRNA sense strand
gaaggaguaugcacgaaac

SEQ ID NO: 1328820 - RNA, 19 nt, Homo sapiens
  misc_RNA (1)...(19): siRNA sense strand
ggaaauagagagugauucu

SEQ ID NO: 1328821 - RNA, 19 nt, Homo sapiens
  misc_RNA (1)...(19): siRNA sense strand
guacaagucauacagaugu

SEQ ID NO: 1328822 - RNA, 19 nt, Homo sapiens
  misc_RNA (1)...(19): siRNA sense strand
ucagaaagcccauuuagag

SEQ ID NO: 1328823 - RNA, 19 nt, Homo sapiens
  misc_RNA (1)...(19): siRNA sense strand
cuaguaagcuaccuacauc

SEQ ID NO: 1328824 - RNA, 19 nt, Homo sapiens
  misc_RNA (1)...(19): siRNA sense strand
gaaacuuaccugucuggaa

SEQ ID NO: 1328825 - RNA, 19 nt, Homo sapiens
  misc_RNA (1)...(19): siRNA sense strand
gguuagaauugaaacuuug

SEQ ID NO: 1328826 - RNA, 19 nt, Homo sapiens
  misc_RNA (1)...(19): siRNA sense strand
ggaguaugcacgaaacaaa

SEQ ID NO: 1328827 - RNA, 19 nt, Homo sapiens
  misc_RNA (1)...(19): siRNA sense strand
caacauagaagcuaguaag

SEQ ID NO: 1328828 - RNA, 19 nt, Homo sapiens
  misc_RNA (1)...(19): siRNA sense strand
gcaauaaacuuucuacaga

SEQ ID NO: 1328829 - RNA, 19 nt, Homo sapiens
  misc_RNA (1)...(19): siRNA sense strand
aagaagagcugccaauuua

SEQ ID NO: 1328830 - RNA, 19 nt, Homo sapiens
  misc_RNA (1)...(19): siRNA sense strand
gcaagaggcucaagaagaa

SEQ ID NO: 1328831 - RNA, 19 nt, Homo sapiens
  misc_RNA (1)...(19): siRNA sense strand
gcaaagaaguauucagaaa

SEQ ID NO: 1328832 - RNA, 19 nt, Homo sapiens
  misc_RNA (1)...(19): siRNA sense strand
ggacagaauuauaguguuu

SEQ ID NO: 1328833 - RNA, 19 nt, Homo sapiens
  misc_RNA (1)...(19): siRNA sense strand
gcaaaguacuuccaauuau

SEQ ID NO: 1328834 - RNA, 19 nt, Homo sapiens
  misc_RNA (1)...(19): siRNA sense strand
ccaaagaccuuccuucgaa

SEQ ID NO: 1328835 - RNA, 19 nt, Homo sapiens
  misc_RNA (1)...(19): siRNA sense strand
gaaauugugucuacaguuc

SEQ ID NO: 1328836 - RNA, 19 nt, Homo sapiens
  misc_RNA (1)...(19): siRNA sense strand
ugaaagagcucaaggugaa

SEQ ID NO: 1328837 - RNA, 19 nt, Homo sapiens
  misc_RNA (1)...(19): siRNA sense strand
gaaagcccauuuagagaaa

SEQ ID NO: 1328838 - RNA, 19 nt, Homo sapiens
  misc_RNA (1)...(19): siRNA sense strand
caaauaaucucuuggaucu

SEQ ID NO: 1328839 - RNA, 19 nt, Homo sapiens
  misc_RNA (1)...(19): siRNA sense strand
gaaagugauucagaagaua

SEQ ID NO: 1328840 - RNA, 19 nt, Homo sapiens
  misc_RNA (1)...(19): siRNA sense strand
gauaauagaugccacucaa

SEQ ID NO: 1328841 - RNA, 19 nt, Homo sapiens
  misc_RNA (1)...(19): siRNA sense strand
caaagaggacacugaauua

SEQ ID NO: 1328842 - RNA, 19 nt, Homo sapiens
  misc_RNA (1)...(19): siRNA sense strand
gaauaaagguggacagucu

SEQ ID NO: 1328843 - RNA, 19 nt, Homo sapiens
  misc_RNA (1)...(19): siRNA sense strand
gaaaagagaugucccaguu

SEQ ID NO: 1328844 - RNA, 19 nt, Homo sapiens
  misc_RNA (1)...(19): siRNA sense strand
gaacaccuuuguccuagaa

SEQ ID NO: 1328845 - RNA, 19 nt, Homo sapiens
  misc_RNA (1)...(19): siRNA sense strand
gagagguacucgaucauaa

SEQ ID NO: 1328846 - RNA, 19 nt, Homo sapiens
  misc_RNA (1)...(19): siRNA sense strand
gguagugaauuaagaauga

SEQ ID NO: 1328847 - RNA, 19 nt, Homo sapiens
  misc_RNA (1)...(19): siRNA sense strand
gaaagaagaggcaaguauu

SEQ ID NO: 1328848 - RNA, 19 nt, Homo sapiens
  misc_RNA (1)...(19): siRNA sense strand
aaccaaagauucagacaua

SEQ ID NO: 1328849 - RNA, 19 nt, Homo sapiens
  misc_RNA (1)...(19): siRNA sense strand
gaccagaaaucucuuuaga

SEQ ID NO: 1328850 - RNA, 19 nt, Homo sapiens
  misc_RNA (1)...(19): siRNA sense strand
gaaggaaugugccaagcaa

SEQ ID NO: 1328851 - RNA, 19 nt, Homo sapiens
  misc_RNA (1)...(19): siRNA sense strand
ggaagacagugauggugua

SEQ ID NO: 1328852 - RNA, 19 nt, Homo sapiens
  misc_RNA (1)...(19): siRNA sense strand
ggaauuagacucuuuaucu

SEQ ID NO: 1328853 - RNA, 19 nt, Homo sapiens
  misc_RNA (1)...(19): siRNA sense strand
cagaagggaagauuuauua

SEQ ID NO: 1328854 - RNA, 19 nt, Homo sapiens
  misc_RNA (1)...(19): siRNA sense strand
gaagacagcucgagaucca

SEQ ID NO: 1328855 - RNA, 19 nt, Homo sapiens
  misc_RNA (1)...(19): siRNA sense strand
cuagaugaauugccuauuu

SEQ ID NO: 1328856 - RNA, 19 nt, Homo sapiens
  misc_RNA (1)...(19): siRNA sense strand
ggacacaaguaucagcaaa

SEQ ID NO: 1328857 - RNA, 19 nt, Homo sapiens
  misc_RNA (1)...(19): siRNA sense strand
gaagaugucccaaauaagu

SEQ ID NO: 1328858 - RNA, 19 nt, Homo sapiens
  misc_RNA (1)...(19): siRNA sense strand
guagugaccuuccugauuc

SEQ ID NO: 1328859 - RNA, 19 nt, Homo sapiens
  misc_RNA (1)...(19): siRNA sense strand
cagaagagcucagaaacuu

SEQ ID NO: 1328860 - RNA, 19 nt, Homo sapiens
  misc_RNA (1)...(19): siRNA sense strand
gaacugggguuguguauga

SEQ ID NO: 1328861 - RNA, 19 nt, Homo sapiens
  misc_RNA (1)...(19): siRNA sense strand
gaagagcugccaauuuauu

SEQ ID NO: 1328862 - RNA, 19 nt, Homo sapiens
  misc_RNA (1)...(19): siRNA sense strand
gagcugaaguacuguaaga

SEQ ID NO: 1328863 - RNA, 19 nt, Homo sapiens
  misc_RNA (1)...(19): siRNA sense strand
gcucagaguuaacguuuga

SEQ ID NO: 1328864 - RNA, 19 nt, Homo sapiens
  misc_RNA (1)...(19): siRNA sense strand
ccaguuauaugugauagua

SEQ ID NO: 1328865 - RNA, 19 nt, Homo sapiens
  misc_RNA (1)...(19): siRNA sense strand
ccagagugaugguguagua

SEQ ID NO: 1328866 - RNA, 19 nt, Homo sapiens
  misc_RNA (1)...(19): siRNA sense strand
ggagauggguauucuagug

SEQ ID NO: 1328867 - RNA, 19 nt, Homo sapiens
  misc_RNA (1)...(19): siRNA sense strand
gcuagaagcucugauggaa

SEQ ID NO: 1328868 - RNA, 19 nt, Homo sapiens
  misc_RNA (1)...(19): siRNA sense strand
cgacgagggucaucauauu

SEQ ID NO: 1328869 - RNA, 19 nt, Homo sapiens
  misc_RNA (1)...(19): siRNA sense strand
guagaaauuugacagauca

SEQ ID NO: 1328870 - RNA, 19 nt, Homo sapiens
  misc_RNA (1)...(19): siRNA sense strand
ccagugaacuagcaaagaa

SEQ ID NO: 1328871 - RNA, 19 nt, Homo sapiens
  misc_RNA (1)...(19): siRNA sense strand
caacagaccacuuuccaaa

SEQ ID NO: 1328872 - RNA, 19 nt, Homo sapiens
  misc_RNA (1)...(19): siRNA sense strand
cagcuucuguuaaucauuu

SEQ ID NO: 1328873 - RNA, 19 nt, Homo sapiens
  misc_RNA (1)...(19): siRNA sense strand
gcacagaagcugacacaga

SEQ ID NO: 1328874 - RNA, 19 nt, Homo sapiens
  misc_RNA (1)...(19): siRNA sense strand
gagaacaggcguaauaaug

SEQ ID NO: 1328875 - RNA, 19 nt, Homo sapiens
  misc_RNA (1)...(19): siRNA sense strand
ugguguaacuuaugcauua

SEQ ID NO: 1328876 - RNA, 19 nt, Homo sapiens
  misc_RNA (1)...(19): siRNA sense strand
uaccacaacugaagacuuu

SEQ ID NO: 1328877 - RNA, 19 nt, Homo sapiens
  misc_RNA (1)...(19): siRNA sense strand
ggaaagaagaggcaaguau

SEQ ID NO: 1328878 - RNA, 19 nt, Homo sapiens
  misc_RNA (1)...(19): siRNA sense strand
gugagggucucucugauaa

SEQ ID NO: 1328879 - RNA, 19 nt, Homo sapiens
  misc_RNA (1)...(19): siRNA sense strand
uugaagaugucccaaauaa

SEQ ID NO: 1328880 - RNA, 19 nt, Homo sapiens
  misc_RNA (1)...(19): siRNA sense strand
caagaagagcugccaauuu

SEQ ID NO: 1328881 - RNA, 19 nt, Homo sapiens
  misc_RNA (1)...(19): siRNA sense strand
gaaaguauagcaaguaaag

SEQ ID NO: 1328882 - RNA, 19 nt, Homo sapiens
  misc_RNA (1)...(19): siRNA sense strand
gacauauacuguacuuuga

SEQ ID NO: 1328883 - RNA, 19 nt, Homo sapiens
  misc_RNA (1)...(19): siRNA sense strand
gcaaugagaaugugaaaca

SEQ ID NO: 1328884 - RNA, 19 nt, Homo sapiens
  misc_RNA (1)...(19): siRNA sense strand
caucaccacugcccuauga

SEQ ID NO: 1328885 - RNA, 19 nt, Homo sapiens
  misc_RNA (1)...(19): siRNA sense strand
gcauuaaagugugacagua

SEQ ID NO: 1328886 - RNA, 19 nt, Homo sapiens
  misc_RNA (1)...(19): siRNA sense strand
gaaaucaaacagucucauu

SEQ ID NO: 1328887 - RNA, 19 nt, Homo sapiens
  misc_RNA (1)...(19): siRNA sense strand
agaaguacaugcagaaguu

SEQ ID NO: 1328888 - RNA, 19 nt, Homo sapiens
  misc_RNA (1)...(19): siRNA sense strand
uaaaggagguauaucgaau

SEQ ID NO: 1328889 - RNA, 19 nt, Homo sapiens
  misc_RNA (1)...(19): siRNA sense strand
gaagucauacucacagaaa

SEQ ID NO: 1328890 - RNA, 19 nt, Homo sapiens
  misc_RNA (1)...(19): siRNA sense strand
gaaauaagcagcaauucca

SEQ ID NO: 1328891 - RNA, 19 nt, Homo sapiens
  misc_RNA (1)...(19): siRNA sense strand
gcaagcaccugaaauaagc

SEQ ID NO: 1328892 - RNA, 19 nt, Homo sapiens
  misc_RNA (1)...(19): siRNA sense strand
cauauugccugaaagaaga

SEQ ID NO: 1328893 - RNA, 19 nt, Homo sapiens
  misc_RNA (1)...(19): siRNA sense strand
ccaaagaggacacugaauu

SEQ ID NO: 1328894 - RNA, 19 nt, Homo sapiens
  misc_RNA (1)...(19): siRNA sense strand
gaaauagagcccaaagaga

SEQ ID NO: 1328895 - RNA, 19 nt, Homo sapiens
  misc_RNA (1)...(19): siRNA sense strand
gaaaccgucuccagucugu

SEQ ID NO: 1328896 - RNA, 19 nt, Homo sapiens
  misc_RNA (1)...(19): siRNA sense strand
ggaaagaaacaauaguaga

SEQ ID NO: 1328897 - RNA, 19 nt, Homo sapiens
  misc_RNA (1)...(19): siRNA sense strand
ugaauaaggagcugaagua

SEQ ID NO: 1328898 - RNA, 19 nt, Homo sapiens
  misc_RNA (1)...(19): siRNA sense strand
acagacaacuccaccaauu

SEQ ID NO: 1328899 - RNA, 19 nt, Homo sapiens
  misc_RNA (1)...(19): siRNA sense strand
ggaaguuguuugagcaaga

SEQ ID NO: 1328900 - RNA, 19 nt, Homo sapiens
  misc_RNA (1)...(19): siRNA sense strand
gaauugggaucaacaggau

SEQ ID NO: 1328901 - RNA, 19 nt, Homo sapiens
  misc_RNA (1)...(19): siRNA sense strand
gaugauagcaguauuccaa

SEQ ID NO: 1328902 - RNA, 19 nt, Homo sapiens
  misc_RNA (1)...(19): siRNA sense strand
agaagggaauuccauauug

SEQ ID NO: 1328903 - RNA, 19 nt, Homo sapiens
  misc_RNA (1)...(19): siRNA sense strand
gaagaauuaccacaacuga

SEQ ID NO: 1328904 - RNA, 19 nt, Homo sapiens
  misc_RNA (1)...(19): siRNA sense strand
ccagaugacagauaugaua

SEQ ID NO: 1328905 - RNA, 19 nt, Homo sapiens
  misc_RNA (1)...(19): siRNA sense strand
acccaagucugauaaauuu

SEQ ID NO: 1328906 - RNA, 19 nt, Homo sapiens
  misc_RNA (1)...(19): siRNA sense strand
uaagaaggauucaguggau

SEQ ID NO: 1328907 - RNA, 19 nt, Homo sapiens
  misc_RNA (1)...(19): siRNA sense strand
gaaaaugccauguuacuuu

SEQ ID NO: 1328908 - RNA, 19 nt, Homo sapiens
  misc_RNA (1)...(19): siRNA sense strand
gagaagaauccggaaauuu

SEQ ID NO: 1328909 - RNA, 19 nt, Homo sapiens
  misc_RNA (1)...(19): siRNA sense strand
caagauaaacucaugucua

SEQ ID NO: 1328910 - RNA, 19 nt, Homo sapiens
  misc_RNA (1)...(19): siRNA sense strand
aggaguacauuaagaagua

SEQ ID NO: 1328911 - RNA, 19 nt, Homo sapiens
  misc_RNA (1)...(19): siRNA sense strand
cacaacagcugccugaaug

SEQ ID NO: 1328912 - RNA, 19 nt, Homo sapiens
  misc_RNA (1)...(19): siRNA sense strand
ccugaagaaugaugagaua

SEQ ID NO: 1328913 - RNA, 19 nt, Homo sapiens
  misc_RNA (1)...(19): siRNA sense strand
gaggacaugugcauacuuc

SEQ ID NO: 1328914 - RNA, 19 nt, Homo sapiens
  misc_RNA (1)...(19): siRNA sense strand
ccaaagauucagacauaua

SEQ ID NO: 1328915 - RNA, 19 nt, Homo sapiens
  misc_RNA (1)...(19): siRNA sense strand
ucaaacagucucauucuuu

SEQ ID NO: 1328916 - RNA, 19 nt, Homo sapiens
  misc_RNA (1)...(19): siRNA sense strand
ccacagcgauggaaggaau

SEQ ID NO: 1328917 - RNA, 19 nt, Homo sapiens
  misc_RNA (1)...(19): siRNA sense strand
gaaagagaaucuaaaagga

SEQ ID NO: 1328918 - RNA, 19 nt, Homo sapiens
  misc_RNA (1)...(19): siRNA sense strand
gcagacaccuccagugaac

SEQ ID NO: 1328919 - RNA, 19 nt, Homo sapiens
  misc_RNA (1)...(19): siRNA sense strand
aaacuuagguugggacuuc

SEQ ID NO: 1328920 - RNA, 19 nt, Homo sapiens
  misc_RNA (1)...(19): siRNA sense strand
caaggagacauuuguauga

SEQ ID NO: 1328921 - RNA, 19 nt, Homo sapiens
  misc_RNA (1)...(19): siRNA sense strand
gaagaagggaauuccauau

SEQ ID NO: 1328922 - RNA, 19 nt, Homo sapiens
  misc_RNA (1)...(19): siRNA sense strand
ugacucagaaguuguauuu

SEQ ID NO: 1328923 - RNA, 19 nt, Homo sapiens
  misc_RNA (1)...(19): siRNA sense strand
auaaggagcugaaguacug

SEQ ID NO: 1328924 - RNA, 19 nt, Homo sapiens
  misc_RNA (1)...(19): siRNA sense strand
gaauuaaagaccgcaauaa

SEQ ID NO: 1328925 - RNA, 19 nt, Homo sapiens
  misc_RNA (1)...(19): siRNA sense strand
gccaagaacagccagauaa

SEQ ID NO: 1328926 - RNA, 19 nt, Homo sapiens
  misc_RNA (1)...(19): siRNA sense strand
ggacagaaagaaaguuaga

SEQ ID NO: 1328927 - RNA, 19 nt, Homo sapiens
  misc_RNA (1)...(19): siRNA sense strand
cagauucccuaacagauga

SEQ ID NO: 1328928 - RNA, 19 nt, Homo sapiens
  misc_RNA (1)...(19): siRNA sense strand
gagacacgcuucacugaua

SEQ ID NO: 1328929 - RNA, 19 nt, Homo sapiens
  misc_RNA (1)...(19): siRNA sense strand
caaaggcccucuuaugaug

SEQ ID NO: 1328930 - RNA, 19 nt, Homo sapiens
  misc_RNA (1)...(19): siRNA sense strand
uagaggacaugaugaagaa

SEQ ID NO: 1328931 - RNA, 19 nt, Homo sapiens
  misc_RNA (1)...(19): siRNA sense strand
uagagaaacuggacaucaa

SEQ ID NO: 1328932 - RNA, 19 nt, Homo sapiens
  misc_RNA (1)...(19): siRNA sense strand
cgcaagaucuggugcuuug

SEQ ID NO: 1328933 - RNA, 19 nt, Homo sapiens
  misc_RNA (1)...(19): siRNA sense strand
gaggagcucuaccagacuu

SEQ ID NO: 1328934 - RNA, 19 nt, Homo sapiens
  misc_RNA (1)...(19): siRNA sense strand
cgucagcccuguugucaga

SEQ ID NO: 1328935 - RNA, 19 nt, Homo sapiens
  misc_RNA (1)...(19): siRNA sense strand
cagcaaaacugauagagaa

SEQ ID NO: 1328936 - RNA, 19 nt, Homo sapiens
  misc_RNA (1)...(19): siRNA sense strand
gcugcgagcuccuguacga

SEQ ID NO: 1328937 - RNA, 19 nt, Homo sapiens
  misc_RNA (1)...(19): siRNA sense strand
acaacuuccuggacaaauu

SEQ ID NO: 1328938 - RNA, 19 nt, Homo sapiens
  misc_RNA (1)...(19): siRNA sense strand
gaagcaguuugccgagaug

SEQ ID NO: 1328939 - RNA, 19 nt, Homo sapiens
  misc_RNA (1)...(19): siRNA sense strand
cccaaaggcccucuuauga

SEQ ID NO: 1328940 - RNA, 19 nt, Homo sapiens
  misc_RNA (1)...(19): siRNA sense strand
gcaaguccacgcugacaga

SEQ ID NO: 1328941 - RNA, 19 nt, Homo sapiens
  misc_RNA (1)...(19): siRNA sense strand
guagaggacaugaugaaga

SEQ ID NO: 1328942 - RNA, 19 nt, Homo sapiens
  misc_RNA (1)...(19): siRNA sense strand
caacugccaucucccucuu

SEQ ID NO: 1328943 - RNA, 19 nt, Homo sapiens
  misc_RNA (1)...(19): siRNA sense strand
agaaagaggagacagcaaa

SEQ ID NO: 1328944 - RNA, 19 nt, Homo sapiens
  misc_RNA (1)...(19): siRNA sense strand
gaaacuggacaucaaacug

SEQ ID NO: 1328945 - RNA, 19 nt, Homo sapiens
  misc_RNA (1)...(19): siRNA sense strand
ccaaaggcccucuuaugau

SEQ ID NO: 1328946 - RNA, 19 nt, Homo sapiens
  misc_RNA (1)...(19): siRNA sense strand
agauguauguggccaaguu

SEQ ID NO: 1328947 - RNA, 19 nt, Homo sapiens
  misc_RNA (1)...(19): siRNA sense strand
caacuuccuggacaaauug

SEQ ID NO: 1328948 - RNA, 19 nt, Homo sapiens
  misc_RNA (1)...(19): siRNA sense strand
ggacaacuuccuggacaaa

SEQ ID NO: 1328949 - RNA, 19 nt, Homo sapiens
  misc_RNA (1)...(19): siRNA sense strand
gagcaggagcguugcauca

SEQ ID NO: 1328950 - RNA, 19 nt, Homo sapiens
  misc_RNA (1)...(19): siRNA sense strand
acaaccggcuguacaugaa

SEQ ID NO: 1328951 - RNA, 19 nt, Homo sapiens
  misc_RNA (1)...(19): siRNA sense strand
gcgagacggucagugaaga

SEQ ID NO: 1328952 - RNA, 19 nt, Homo sapiens
  misc_RNA (1)...(19): siRNA sense strand
ugaagcggcuggccaaguc

SEQ ID NO: 1328953 - RNA, 19 nt, Homo sapiens
  misc_RNA (1)...(19): siRNA sense strand
ggagacagcaaaacugaua

SEQ ID NO: 1328954 - RNA, 19 nt, Homo sapiens
  misc_RNA (1)...(19): siRNA sense strand
ccagagaacaaucuugaug

SEQ ID NO: 1328955 - RNA, 19 nt, Homo sapiens
  misc_RNA (1)...(19): siRNA sense strand
ggacaagaaggccaacauc

SEQ ID NO: 1328956 - RNA, 19 nt, Homo sapiens
  misc_RNA (1)...(19): siRNA sense strand
cagagaacaaucuugauga

SEQ ID NO: 1328957 - RNA, 19 nt, Homo sapiens
  misc_RNA (1)...(19): siRNA sense strand
gcaguuugccgagauguau

SEQ ID NO: 1328958 - RNA, 19 nt, Homo sapiens
  misc_RNA (1)...(19): siRNA sense strand
agagaacaaucuugaugau

SEQ ID NO: 1328959 - RNA, 19 nt, Homo sapiens
  misc_RNA (1)...(19): siRNA sense strand
ugaagcaguuugccgagau

SEQ ID NO: 1328960 - RNA, 19 nt, Homo sapiens
  misc_RNA (1)...(19): siRNA sense strand
gggagacacgcuucacuga

SEQ ID NO: 1328961 - RNA, 19 nt, Homo sapiens
  misc_RNA (1)...(19): siRNA sense strand
uaaaagcugugaccccaaa

SEQ ID NO: 1328962 - RNA, 19 nt, Homo sapiens
  misc_RNA (1)...(19): siRNA sense strand
gcgaggacaaggacaaaga

SEQ ID NO: 1328963 - RNA, 19 nt, Homo sapiens
  misc_RNA (1)...(19): siRNA sense strand
ggagaaugacuugaacuuc

SEQ ID NO: 1328964 - RNA, 19 nt, Homo sapiens
  misc_RNA (1)...(19): siRNA sense strand
gcgcaagggccugaaagaa

SEQ ID NO: 1328965 - RNA, 19 nt, Homo sapiens
  misc_RNA (1)...(19): siRNA sense strand
gagcguugcaucaccauca

SEQ ID NO: 1328966 - RNA, 19 nt, Homo sapiens
  misc_RNA (1)...(19): siRNA sense strand
gcccucuuaugauguauau

SEQ ID NO: 1328967 - RNA, 19 nt, Homo sapiens
  misc_RNA (1)...(19): siRNA sense strand
ggugccggcuuccucauca

SEQ ID NO: 1328968 - RNA, 19 nt, Homo sapiens
  misc_RNA (1)...(19): siRNA sense strand
gguggucgguggcaucuac

SEQ ID NO: 1328969 - RNA, 19 nt, Homo sapiens
  misc_RNA (1)...(19): siRNA sense strand
ccgaggacaucgauaaagg

SEQ ID NO: 1328970 - RNA, 19 nt, Homo sapiens
  misc_RNA (1)...(19): siRNA sense strand
ggucuccacuggccugaag

SEQ ID NO: 1328971 - RNA, 19 nt, Homo sapiens
  misc_RNA (1)...(19): siRNA sense strand
cagacucccuggugugcaa

SEQ ID NO: 1328972 - RNA, 19 nt, Homo sapiens
  misc_RNA (1)...(19): siRNA sense strand
caaggagggcgcacugugu

SEQ ID NO: 1328973 - RNA, 19 nt, Homo sapiens
  misc_RNA (1)...(19): siRNA sense strand
agucaccgauggcgcauug

SEQ ID NO: 1328974 - RNA, 19 nt, Homo sapiens
  misc_RNA (1)...(19): siRNA sense strand
gagaacaaucuugaugaug

SEQ ID NO: 1328975 - RNA, 19 nt, Homo sapiens
  misc_RNA (1)...(19): siRNA sense strand
caaggacaaagaaggcaaa

SEQ ID NO: 1328976 - RNA, 19 nt, Homo sapiens
  misc_RNA (1)...(19): siRNA sense strand
ggagacacgcuucacugau

SEQ ID NO: 1328977 - RNA, 19 nt, Homo sapiens
  misc_RNA (1)...(19): siRNA sense strand
ugcaguaccucaacgagau

SEQ ID NO: 1328978 - RNA, 19 nt, Homo sapiens
  misc_RNA (1)...(19): siRNA sense strand
gcacaaccggcuguacaug

SEQ ID NO: 1328979 - RNA, 19 nt, Homo sapiens
  misc_RNA (1)...(19): siRNA sense strand
gaaagaggagacagcaaaa

SEQ ID NO: 1328980 - RNA, 19 nt, Homo sapiens
  misc_RNA (1)...(19): siRNA sense strand
ccaucucccucuucuacga

SEQ ID NO: 1328981 - RNA, 19 nt, Homo sapiens
  misc_RNA (1)...(19): siRNA sense strand
acaugcgggugaugaaguu

SEQ ID NO: 1328982 - RNA, 19 nt, Homo sapiens
  misc_RNA (1)...(19): siRNA sense strand
agagaaacuggacaucaaa

SEQ ID NO: 1328983 - RNA, 19 nt, Homo sapiens
  misc_RNA (1)...(19): siRNA sense strand
gagacgccuuguugcagau

SEQ ID NO: 1328984 - RNA, 19 nt, Homo sapiens
  misc_RNA (1)...(19): siRNA sense strand
cacaaccggcuguacauga

SEQ ID NO: 1328985 - RNA, 19 nt, Homo sapiens
  misc_RNA (1)...(19): siRNA sense strand
aaggcccucuuaugaugua

SEQ ID NO: 1328986 - RNA, 19 nt, Homo sapiens
  misc_RNA (1)...(19): siRNA sense strand
ucaagccugugcugaugau

SEQ ID NO: 1328987 - RNA, 19 nt, Homo sapiens
  misc_RNA (1)...(19): siRNA sense strand
ggugccaaccuccgacaaa

SEQ ID NO: 1328988 - RNA, 19 nt, Homo sapiens
  misc_RNA (1)...(19): siRNA sense strand
cgaggacaaggacaaagaa

SEQ ID NO: 1328989 - RNA, 19 nt, Homo sapiens
  misc_RNA (1)...(19): siRNA sense strand
gugcugaugaugaacaaga

SEQ ID NO: 1328990 - RNA, 19 nt, Homo sapiens
  misc_RNA (1)...(19): siRNA sense strand
gcaucaccaucaagucaac

SEQ ID NO: 1328991 - RNA, 19 nt, Homo sapiens
  misc_RNA (1)...(19): siRNA sense strand
ggccgaggacaucgauaaa

SEQ ID NO: 1328992 - RNA, 19 nt, Homo sapiens
  misc_RNA (1)...(19): siRNA sense strand
gugaagacgggcaccauca

SEQ ID NO: 1328993 - RNA, 19 nt, Homo sapiens
  misc_RNA (1)...(19): siRNA sense strand
ggugguggacugcguguca

SEQ ID NO: 1328994 - RNA, 19 nt, Homo sapiens
  misc_RNA (1)...(19): siRNA sense strand
ucccugcccuggacaacuu

SEQ ID NO: 1328995 - RNA, 19 nt, Homo sapiens
  misc_RNA (1)...(19): siRNA sense strand
ccaacauccucaccgacau

SEQ ID NO: 1328996 - RNA, 19 nt, Homo sapiens
  misc_RNA (1)...(19): siRNA sense strand
ucacugauacccggaagga

SEQ ID NO: 1328997 - RNA, 19 nt, Homo sapiens
  misc_RNA (1)...(19): siRNA sense strand
ccaagggugugcaguaccu

SEQ ID NO: 1328998 - RNA, 19 nt, Homo sapiens
  misc_RNA (1)...(19): siRNA sense strand
caacauccucaccgacauc

SEQ ID NO: 1328999 - RNA, 19 nt, Homo sapiens
  misc_RNA (1)...(19): siRNA sense strand
gugccaaccuccgacaaag

SEQ ID NO: 1329000 - RNA, 19 nt, Homo sapiens
  misc_RNA (1)...(19): siRNA sense strand
uggccgaggacaucgauaa

SEQ ID NO: 1329001 - RNA, 19 nt, Homo sapiens
  misc_RNA (1)...(19): siRNA sense strand
gcacaacaugcgggugaug

SEQ ID NO: 1329002 - RNA, 19 nt, Homo sapiens
  misc_RNA (1)...(19): siRNA sense strand
agccugugcugaugaugaa

SEQ ID NO: 1329003 - RNA, 19 nt, Homo sapiens
  misc_RNA (1)...(19): siRNA sense strand
gaggagacagcaaaacuga

SEQ ID NO: 1329004 - RNA, 19 nt, Homo sapiens
  misc_RNA (1)...(19): siRNA sense strand
gcuaccuggccgagaagua

SEQ ID NO: 1329005 - RNA, 19 nt, Homo sapiens
  misc_RNA (1)...(19): siRNA sense strand
agacacgcuucacugauac

SEQ ID NO: 1329006 - RNA, 19 nt, Homo sapiens
  misc_RNA (1)...(19): siRNA sense strand
cggagaaugacuugaacuu

SEQ ID NO: 1329007 - RNA, 19 nt, Homo sapiens
  misc_RNA (1)...(19): siRNA sense strand
cgagcacgcgcacaacaug

SEQ ID NO: 1329008 - RNA, 19 nt, Homo sapiens
  misc_RNA (1)...(19): siRNA sense strand
ugaagccaauccagagaac

SEQ ID NO: 1329009 - RNA, 19 nt, Homo sapiens
  misc_RNA (1)...(19): siRNA sense strand
ggucgguucuacgccuuug

SEQ ID NO: 1329010 - RNA, 19 nt, Homo sapiens
  misc_RNA (1)...(19): siRNA sense strand
cgcaagggccugaaagaag

SEQ ID NO: 1329011 - RNA, 19 nt, Homo sapiens
  misc_RNA (1)...(19): siRNA sense strand
caagcgcaagggccugaaa

SEQ ID NO: 1329012 - RNA, 19 nt, Homo sapiens
  misc_RNA (1)...(19): siRNA sense strand
gaacauagcccuaguuuaa

SEQ ID NO: 1329013 - RNA, 19 nt, Homo sapiens
  misc_RNA (1)...(19): siRNA sense strand
gaaagcaacuucagaaaga

SEQ ID NO: 1329014 - RNA, 19 nt, Homo sapiens
  misc_RNA (1)...(19): siRNA sense strand
gaaagaaagcgcuauaaua

SEQ ID NO: 1329015 - RNA, 19 nt, Homo sapiens
  misc_RNA (1)...(19): siRNA sense strand
gaacagcaaucuaaggaaa

SEQ ID NO: 1329016 - RNA, 19 nt, Homo sapiens
  misc_RNA (1)...(19): siRNA sense strand
gaaacuagcccauuacaaa

SEQ ID NO: 1329017 - RNA, 19 nt, Homo sapiens
  misc_RNA (1)...(19): siRNA sense strand
caaaggaacuuaugggaaa

SEQ ID NO: 1329018 - RNA, 19 nt, Homo sapiens
  misc_RNA (1)...(19): siRNA sense strand
gaagagaacagcaaucuaa

SEQ ID NO: 1329019 - RNA, 19 nt, Homo sapiens
  misc_RNA (1)...(19): siRNA sense strand
gauauucccugauggauuu

SEQ ID NO: 1329020 - RNA, 19 nt, Homo sapiens
  misc_RNA (1)...(19): siRNA sense strand
ggaaaucacugagacaauu

SEQ ID NO: 1329021 - RNA, 19 nt, Homo sapiens
  misc_RNA (1)...(19): siRNA sense strand
caacagaaguagcaagaaa

SEQ ID NO: 1329022 - RNA, 19 nt, Homo sapiens
  misc_RNA (1)...(19): siRNA sense strand
gcaagaaacacucauaauu

SEQ ID NO: 1329023 - RNA, 19 nt, Homo sapiens
  misc_RNA (1)...(19): siRNA sense strand
agaagaaacuagcccauua

SEQ ID NO: 1329024 - RNA, 19 nt, Homo sapiens
  misc_RNA (1)...(19): siRNA sense strand
ucaaagaccuggaagagaa

SEQ ID NO: 1329025 - RNA, 19 nt, Homo sapiens
  misc_RNA (1)...(19): siRNA sense strand
gaaaggcaauaacauucua

SEQ ID NO: 1329026 - RNA, 19 nt, Homo sapiens
  misc_RNA (1)...(19): siRNA sense strand
ggaaagguccucuauaaug

SEQ ID NO: 1329027 - RNA, 19 nt, Homo sapiens
  misc_RNA (1)...(19): siRNA sense strand
uaaaggaaguguaucugua

SEQ ID NO: 1329028 - RNA, 19 nt, Homo sapiens
  misc_RNA (1)...(19): siRNA sense strand
ucagaucagugcauuguua

SEQ ID NO: 1329029 - RNA, 19 nt, Homo sapiens
  misc_RNA (1)...(19): siRNA sense strand
gcaaagaugugaugcuaca

SEQ ID NO: 1329030 - RNA, 19 nt, Homo sapiens
  misc_RNA (1)...(19): siRNA sense strand
guacaagacaucaugaaua

SEQ ID NO: 1329031 - RNA, 19 nt, Homo sapiens
  misc_RNA (1)...(19): siRNA sense strand
gagugaaacuaguagauuu

SEQ ID NO: 1329032 - RNA, 19 nt, Homo sapiens
  misc_RNA (1)...(19): siRNA sense strand
ggacgucucuuuaguugga

SEQ ID NO: 1329033 - RNA, 19 nt, Homo sapiens
  misc_RNA (1)...(19): siRNA sense strand
uaacaaccauucaaacuuc

SEQ ID NO: 1329034 - RNA, 19 nt, Homo sapiens
  misc_RNA (1)...(19): siRNA sense strand
ggaauucgacuacaagaaa

SEQ ID NO: 1329035 - RNA, 19 nt, Homo sapiens
  misc_RNA (1)...(19): siRNA sense strand
cacaaacgguugcaucaua

SEQ ID NO: 1329036 - RNA, 19 nt, Homo sapiens
  misc_RNA (1)...(19): siRNA sense strand
ggauauacuuuaagaagga

SEQ ID NO: 1329037 - RNA, 19 nt, Homo sapiens
  misc_RNA (1)...(19): siRNA sense strand
cagcauaucuagaaaggaa

SEQ ID NO: 1329038 - RNA, 19 nt, Homo sapiens
  misc_RNA (1)...(19): siRNA sense strand
uaaggaaaguggagaaaga

SEQ ID NO: 1329039 - RNA, 19 nt, Homo sapiens
  misc_RNA (1)...(19): siRNA sense strand
uaaugcaaguggauucuua

SEQ ID NO: 1329040 - RNA, 19 nt, Homo sapiens
  misc_RNA (1)...(19): siRNA sense strand
gcaauuggauaccacuuau

SEQ ID NO: 1329041 - RNA, 19 nt, Homo sapiens
  misc_RNA (1)...(19): siRNA sense strand
gaacacauccguaggaaca

SEQ ID NO: 1329042 - RNA, 19 nt, Homo sapiens
  misc_RNA (1)...(19): siRNA sense strand
gaaagguccucuauaaugc

SEQ ID NO: 1329043 - RNA, 19 nt, Homo sapiens
  misc_RNA (1)...(19): siRNA sense strand
ggaacagaaugaauaccua

SEQ ID NO: 1329044 - RNA, 19 nt, Homo sapiens
  misc_RNA (1)...(19): siRNA sense strand
ugaaggauguagaugauuu

SEQ ID NO: 1329045 - RNA, 19 nt, Homo sapiens
  misc_RNA (1)...(19): siRNA sense strand
gggcaaagaugugaugcua

SEQ ID NO: 1329046 - RNA, 19 nt, Homo sapiens
  misc_RNA (1)...(19): siRNA sense strand
aagaagacaucuguaguua

SEQ ID NO: 1329047 - RNA, 19 nt, Homo sapiens
  misc_RNA (1)...(19): siRNA sense strand
ccaaugcuguggagaguaa

SEQ ID NO: 1329048 - RNA, 19 nt, Homo sapiens
  misc_RNA (1)...(19): siRNA sense strand
gaaaggaagcuauugacaa

SEQ ID NO: 1329049 - RNA, 19 nt, Homo sapiens
  misc_RNA (1)...(19): siRNA sense strand
gagacacucuuccuacuga

SEQ ID NO: 1329050 - RNA, 19 nt, Homo sapiens
  misc_RNA (1)...(19): siRNA sense strand
ggauguagaugauuuagca

SEQ ID NO: 1329051 - RNA, 19 nt, Homo sapiens
  misc_RNA (1)...(19): siRNA sense strand
ugacaauucuagcagauuu

SEQ ID NO: 1329052 - RNA, 19 nt, Homo sapiens
  misc_RNA (1)...(19): siRNA sense strand
ggaaaucaauaacaucaag

SEQ ID NO: 1329053 - RNA, 19 nt, Homo sapiens
  misc_RNA (1)...(19): siRNA sense strand
ggaaguguaucuguaguga

SEQ ID NO: 1329054 - RNA, 19 nt, Homo sapiens
  misc_RNA (1)...(19): siRNA sense strand
caaaugaggacuucagaaa

SEQ ID NO: 1329055 - RNA, 19 nt, Homo sapiens
  misc_RNA (1)...(19): siRNA sense strand
gaacagaaugaauaccuaa

SEQ ID NO: 1329056 - RNA, 19 nt, Homo sapiens
  misc_RNA (1)...(19): siRNA sense strand
ggagcaacuugguaguaua

SEQ ID NO: 1329057 - RNA, 19 nt, Homo sapiens
  misc_RNA (1)...(19): siRNA sense strand
caccauaagccaauuaaua

SEQ ID NO: 1329058 - RNA, 19 nt, Homo sapiens
  misc_RNA (1)...(19): siRNA sense strand
gaagaaggauaacaaagac

SEQ ID NO: 1329059 - RNA, 19 nt, Homo sapiens
  misc_RNA (1)...(19): siRNA sense strand
gauucaagcuugugucaga

SEQ ID NO: 1329060 - RNA, 19 nt, Homo sapiens
  misc_RNA (1)...(19): siRNA sense strand
gagcagcugugcauuaaca

SEQ ID NO: 1329061 - RNA, 19 nt, Homo sapiens
  misc_RNA (1)...(19): siRNA sense strand
caacugaacaccagauuga

SEQ ID NO: 1329062 - RNA, 19 nt, Homo sapiens
  misc_RNA (1)...(19): siRNA sense strand
uaaaguaaauggagacaag

SEQ ID NO: 1329063 - RNA, 19 nt, Homo sapiens
  misc_RNA (1)...(19): siRNA sense strand
gaacuguguuucuuugcuu

SEQ ID NO: 1329064 - RNA, 19 nt, Homo sapiens
  misc_RNA (1)...(19): siRNA sense strand
gacaagagccacauuucua

SEQ ID NO: 1329065 - RNA, 19 nt, Homo sapiens
  misc_RNA (1)...(19): siRNA sense strand
gcugcaaucuugaauguug

SEQ ID NO: 1329066 - RNA, 19 nt, Homo sapiens
  misc_RNA (1)...(19): siRNA sense strand
gaaccuacacuuagccaaa

SEQ ID NO: 1329067 - RNA, 19 nt, Homo sapiens
  misc_RNA (1)...(19): siRNA sense strand
gaaggauguagaugauuua

SEQ ID NO: 1329068 - RNA, 19 nt, Homo sapiens
  misc_RNA (1)...(19): siRNA sense strand
ggaaagacagucagggaaa

SEQ ID NO: 1329069 - RNA, 19 nt, Homo sapiens
  misc_RNA (1)...(19): siRNA sense strand
ggaaagaaagcgcuauaau

SEQ ID NO: 1329070 - RNA, 19 nt, Homo sapiens
  misc_RNA (1)...(19): siRNA sense strand
cauacucgcugcaaucuug

SEQ ID NO: 1329071 - RNA, 19 nt, Homo sapiens
  misc_RNA (1)...(19): siRNA sense strand
gaucagugcauuguuauuu

SEQ ID NO: 1329072 - RNA, 19 nt, Homo sapiens
  misc_RNA (1)...(19): siRNA sense strand
ccucuaauauccaaucuga

SEQ ID NO: 1329073 - RNA, 19 nt, Homo sapiens
  misc_RNA (1)...(19): siRNA sense strand
uaaagcagcgguauucauu

SEQ ID NO: 1329074 - RNA, 19 nt, Homo sapiens
  misc_RNA (1)...(19): siRNA sense strand
guggagcaguuaaaucuaa

SEQ ID NO: 1329075 - RNA, 19 nt, Homo sapiens
  misc_RNA (1)...(19): siRNA sense strand
gcauuggcauucuugauau

SEQ ID NO: 1329076 - RNA, 19 nt, Homo sapiens
  misc_RNA (1)...(19): siRNA sense strand
gagcaauguuucaaaguca

SEQ ID NO: 1329077 - RNA, 19 nt, Homo sapiens
  misc_RNA (1)...(19): siRNA sense strand
gaacagcaauuggauacca

SEQ ID NO: 1329078 - RNA, 19 nt, Homo sapiens
  misc_RNA (1)...(19): siRNA sense strand
gcaugugguuuggcaauuu

SEQ ID NO: 1329079 - RNA, 19 nt, Homo sapiens
  misc_RNA (1)...(19): siRNA sense strand
gaaggcagcaguugaggaa

SEQ ID NO: 1329080 - RNA, 19 nt, Homo sapiens
  misc_RNA (1)...(19): siRNA sense strand
ggagaggaauugugaagag

SEQ ID NO: 1329081 - RNA, 19 nt, Homo sapiens
  misc_RNA (1)...(19): siRNA sense strand
caacaaaacuauccacaga

SEQ ID NO: 1329082 - RNA, 19 nt, Homo sapiens
  misc_RNA (1)...(19): siRNA sense strand
gaagacaucuguaguuacc

SEQ ID NO: 1329083 - RNA, 19 nt, Homo sapiens
  misc_RNA (1)...(19): siRNA sense strand
aagcuaugauccagaguua

SEQ ID NO: 1329084 - RNA, 19 nt, Homo sapiens
  misc_RNA (1)...(19): siRNA sense strand
ugaccagacucuuguagaa

SEQ ID NO: 1329085 - RNA, 19 nt, Homo sapiens
  misc_RNA (1)...(19): siRNA sense strand
acaauuauacgacccaaua

SEQ ID NO: 1329086 - RNA, 19 nt, Homo sapiens
  misc_RNA (1)...(19): siRNA sense strand
cacaaagcauuccaaacua

SEQ ID NO: 1329087 - RNA, 19 nt, Homo sapiens
  misc_RNA (1)...(19): siRNA sense strand
ggacuucaacauuugcaua

SEQ ID NO: 1329088 - RNA, 19 nt, Homo sapiens
  misc_RNA (1)...(19): siRNA sense strand
aaaggaagcuauugacaag

SEQ ID NO: 1329089 - RNA, 19 nt, Homo sapiens
  misc_RNA (1)...(19): siRNA sense strand
cagguaaucugccacauuc

SEQ ID NO: 1329090 - RNA, 19 nt, Homo sapiens
  misc_RNA (1)...(19): siRNA sense strand
cagaaugaauaccuaaaug

SEQ ID NO: 1329091 - RNA, 19 nt, Homo sapiens
  misc_RNA (1)...(19): siRNA sense strand
cagcauaaauucauuacuc

SEQ ID NO: 1329092 - RNA, 19 nt, Homo sapiens
  misc_RNA (1)...(19): siRNA sense strand
gaagaggggugaaagaaug

SEQ ID NO: 1329093 - RNA, 19 nt, Homo sapiens
  misc_RNA (1)...(19): siRNA sense strand
gcaguaacaaccauucaaa

SEQ ID NO: 1329094 - RNA, 19 nt, Homo sapiens
  misc_RNA (1)...(19): siRNA sense strand
gaacuucaaccgaccucua

SEQ ID NO: 1329095 - RNA, 19 nt, Homo sapiens
  misc_RNA (1)...(19): siRNA sense strand
ggaagagguuaagcaagaa

SEQ ID NO: 1329096 - RNA, 19 nt, Homo sapiens
  misc_RNA (1)...(19): siRNA sense strand
ggucagauucuaugggaua

SEQ ID NO: 1329097 - RNA, 19 nt, Homo sapiens
  misc_RNA (1)...(19): siRNA sense strand
uaacugggcucuuggaaaa

SEQ ID NO: 1329098 - RNA, 19 nt, Homo sapiens
  misc_RNA (1)...(19): siRNA sense strand
guagaagccuuuggcaaug

SEQ ID NO: 1329099 - RNA, 19 nt, Homo sapiens
  misc_RNA (1)...(19): siRNA sense strand
gagaagauuuuacaaguga

SEQ ID NO: 1329100 - RNA, 19 nt, Homo sapiens
  misc_RNA (1)...(19): siRNA sense strand
caaccgaccucuaauaucc

SEQ ID NO: 1329101 - RNA, 19 nt, Homo sapiens
  misc_RNA (1)...(19): siRNA sense strand
gaaagaggaagcuaugauc

SEQ ID NO: 1329102 - RNA, 19 nt, Homo sapiens
  misc_RNA (1)...(19): siRNA sense strand
ggagaaagaggaagcuaug

SEQ ID NO: 1329103 - RNA, 19 nt, Homo sapiens
  misc_RNA (1)...(19): siRNA sense strand
aggaagagguuaagcaaga

SEQ ID NO: 1329104 - RNA, 19 nt, Homo sapiens
  misc_RNA (1)...(19): siRNA sense strand
caaaaguguuccuuaagua

SEQ ID NO: 1329105 - RNA, 19 nt, Homo sapiens
  misc_RNA (1)...(19): siRNA sense strand
uggaaaggcuaauaacaga

SEQ ID NO: 1329106 - RNA, 19 nt, Homo sapiens
  misc_RNA (1)...(19): siRNA sense strand
ccacaaagcauuccaaacu

SEQ ID NO: 1329107 - RNA, 19 nt, Homo sapiens
  misc_RNA (1)...(19): siRNA sense strand
ugauggauuuguugucuaa

SEQ ID NO: 1329108 - RNA, 19 nt, Homo sapiens
  misc_RNA (1)...(19): siRNA sense strand
gaaagagaagcaugugguu

SEQ ID NO: 1329109 - RNA, 19 nt, Homo sapiens
  misc_RNA (1)...(19): siRNA sense strand
gaaaaugagacuuccuuua

SEQ ID NO: 1329110 - RNA, 19 nt, Homo sapiens
  misc_RNA (1)...(19): siRNA sense strand
gaaaguggagaaagaggaa

SEQ ID NO: 1329111 - RNA, 19 nt, Homo sapiens
  misc_RNA (1)...(19): siRNA sense strand
gagaacagcaaucuaagga

SEQ ID NO: 1329112 - RNA, 19 nt, Homo sapiens
  misc_RNA (1)...(19): siRNA sense strand
ggaaugaucuggugguuga

SEQ ID NO: 1329113 - RNA, 19 nt, Homo sapiens
  misc_RNA (1)...(19): siRNA sense strand
gagaaugaauccaaaguuu

SEQ ID NO: 1329114 - RNA, 19 nt, Homo sapiens
  misc_RNA (1)...(19): siRNA sense strand
ccaaagagcuggccgaguu

SEQ ID NO: 1329115 - RNA, 19 nt, Homo sapiens
  misc_RNA (1)...(19): siRNA sense strand
gcucgaagcuccuacauca

SEQ ID NO: 1329116 - RNA, 19 nt, Homo sapiens
  misc_RNA (1)...(19): siRNA sense strand
uggcaaaccuggagaauga

SEQ ID NO: 1329117 - RNA, 19 nt, Homo sapiens
  misc_RNA (1)...(19): siRNA sense strand
gagccaaguugaucaaauc

SEQ ID NO: 1329118 - RNA, 19 nt, Homo sapiens
  misc_RNA (1)...(19): siRNA sense strand
uacaacagcuuccaugaga

SEQ ID NO: 1329119 - RNA, 19 nt, Homo sapiens
  misc_RNA (1)...(19): siRNA sense strand
gggaugaccugccaagaca

SEQ ID NO: 1329120 - RNA, 19 nt, Homo sapiens
  misc_RNA (1)...(19): siRNA sense strand
agaaagaaauggugaugug

SEQ ID NO: 1329121 - RNA, 19 nt, Homo sapiens
  misc_RNA (1)...(19): siRNA sense strand
ugacagaauccaugacuaa

SEQ ID NO: 1329122 - RNA, 19 nt, Homo sapiens
  misc_RNA (1)...(19): siRNA sense strand
gaaugaauccaaaguuuag

SEQ ID NO: 1329123 - RNA, 19 nt, Homo sapiens
  misc_RNA (1)...(19): siRNA sense strand
caaccaacaugcagaacug

SEQ ID NO: 1329124 - RNA, 19 nt, Homo sapiens
  misc_RNA (1)...(19): siRNA sense strand
gaaagugcaauguucauca

SEQ ID NO: 1329125 - RNA, 19 nt, Homo sapiens
  misc_RNA (1)...(19): siRNA sense strand
aagaggaacuggaaauugu

SEQ ID NO: 1329126 - RNA, 19 nt, Homo sapiens
  misc_RNA (1)...(19): siRNA sense strand
ccagacggauaucaacgua

SEQ ID NO: 1329127 - RNA, 19 nt, Homo sapiens
  misc_RNA (1)...(19): siRNA sense strand
gggaaacugugccugaugu

SEQ ID NO: 1329128 - RNA, 19 nt, Homo sapiens
  misc_RNA (1)...(19): siRNA sense strand
gaaauggugauguggcaaa

SEQ ID NO: 1329129 - RNA, 19 nt, Homo sapiens
  misc_RNA (1)...(19): siRNA sense strand
gagcaaacagaaagaaaug

SEQ ID NO: 1329130 - RNA, 19 nt, Homo sapiens
  misc_RNA (1)...(19): siRNA sense strand
gacggaaagugcaauguuc

SEQ ID NO: 1329131 - RNA, 19 nt, Homo sapiens
  misc_RNA (1)...(19): siRNA sense strand
ccaaguugaucaaauccaa

SEQ ID NO: 1329132 - RNA, 19 nt, Homo sapiens
  misc_RNA (1)...(19): siRNA sense strand
ggagaaugaauccaaaguu

SEQ ID NO: 1329133 - RNA, 19 nt, Homo sapiens
  misc_RNA (1)...(19): siRNA sense strand
gccaugaaauuaaccaaca

SEQ ID NO: 1329134 - RNA, 19 nt, Homo sapiens
  misc_RNA (1)...(19): siRNA sense strand
augcagaacuggagacuga

SEQ ID NO: 1329135 - RNA, 19 nt, Homo sapiens
  misc_RNA (1)...(19): siRNA sense strand
ccagcaaacucaaccaaca

SEQ ID NO: 1329136 - RNA, 19 nt, Homo sapiens
  misc_RNA (1)...(19): siRNA sense strand
gaaguggagauucaaccua

SEQ ID NO: 1329137 - RNA, 19 nt, Homo sapiens
  misc_RNA (1)...(19): siRNA sense strand
gaagagcaaacagaaagaa

SEQ ID NO: 1329138 - RNA, 19 nt, Homo sapiens
  misc_RNA (1)...(19): siRNA sense strand
caaagaggaacuggaaauu

SEQ ID NO: 1329139 - RNA, 19 nt, Homo sapiens
  misc_RNA (1)...(19): siRNA sense strand
caaagagcuggccgaguua

SEQ ID NO: 1329140 - RNA, 19 nt, Homo sapiens
  misc_RNA (1)...(19): siRNA sense strand
ggaaauuguggucauccua

SEQ ID NO: 1329141 - RNA, 19 nt, Homo sapiens
  misc_RNA (1)...(19): siRNA sense strand
ggaaagacggaaagugcaa

SEQ ID NO: 1329142 - RNA, 19 nt, Homo sapiens
  misc_RNA (1)...(19): siRNA sense strand
ugucaccgcugaucauuag

SEQ ID NO: 1329143 - RNA, 19 nt, Homo sapiens
  misc_RNA (1)...(19): siRNA sense strand
aagcccagcugcccaaaga

SEQ ID NO: 1329144 - RNA, 19 nt, Homo sapiens
  misc_RNA (1)...(19): siRNA sense strand
ccaaagaggaacuggaaau

SEQ ID NO: 1329145 - RNA, 19 nt, Homo sapiens
  misc_RNA (1)...(19): siRNA sense strand
ggauaucaacguaggguau

SEQ ID NO: 1329146 - RNA, 19 nt, Homo sapiens
  misc_RNA (1)...(19): siRNA sense strand
gcccaaagaggaacuggaa

SEQ ID NO: 1329147 - RNA, 19 nt, Homo sapiens
  misc_RNA (1)...(19): siRNA sense strand
aaaggaaaauccagaggua

SEQ ID NO: 1329148 - RNA, 19 nt, Homo sapiens
  misc_RNA (1)...(19): siRNA sense strand
cagaauccaugacuaacgu

SEQ ID NO: 1329149 - RNA, 19 nt, Homo sapiens
  misc_RNA (1)...(19): siRNA sense strand
gcaaacagaaagaaauggu

SEQ ID NO: 1329150 - RNA, 19 nt, Homo sapiens
  misc_RNA (1)...(19): siRNA sense strand
agagguacgugaggaaaga

SEQ ID NO: 1329151 - RNA, 19 nt, Homo sapiens
  misc_RNA (1)...(19): siRNA sense strand
cuuaggaauucccacauug

SEQ ID NO: 1329152 - RNA, 19 nt, Homo sapiens
  misc_RNA (1)...(19): siRNA sense strand
cgauaucuucaccacauua

SEQ ID NO: 1329153 - RNA, 19 nt, Homo sapiens
  misc_RNA (1)...(19): siRNA sense strand
aaguggagauucaaccuau

SEQ ID NO: 1329154 - RNA, 19 nt, Homo sapiens
  misc_RNA (1)...(19): siRNA sense strand
ucuacgaaguugacuacaa

SEQ ID NO: 1329155 - RNA, 19 nt, Homo sapiens
  misc_RNA (1)...(19): siRNA sense strand
aaagaggaacuggaaauug

SEQ ID NO: 1329156 - RNA, 19 nt, Homo sapiens
  misc_RNA (1)...(19): siRNA sense strand
ccuuaggaauucccacauu

SEQ ID NO: 1329157 - RNA, 19 nt, Homo sapiens
  misc_RNA (1)...(19): siRNA sense strand
ugggaugcauguuuguaaa

SEQ ID NO: 1329158 - RNA, 19 nt, Homo sapiens
  misc_RNA (1)...(19): siRNA sense strand
ggucaucacagauaaaugc

SEQ ID NO: 1329159 - RNA, 19 nt, Homo sapiens
  misc_RNA (1)...(19): siRNA sense strand
gcuaccgggucaucacaga

SEQ ID NO: 1329160 - RNA, 19 nt, Homo sapiens
  misc_RNA (1)...(19): siRNA sense strand
gaaacugugccugauguuc

SEQ ID NO: 1329161 - RNA, 19 nt, Homo sapiens
  misc_RNA (1)...(19): siRNA sense strand
gauaucaacguaggguauu

SEQ ID NO: 1329162 - RNA, 19 nt, Homo sapiens
  misc_RNA (1)...(19): siRNA sense strand
gaaccagacggauaucaac

SEQ ID NO: 1329163 - RNA, 19 nt, Homo sapiens
  misc_RNA (1)...(19): siRNA sense strand
ucuggugguugaucgcaua

SEQ ID NO: 1329164 - RNA, 19 nt, Homo sapiens
  misc_RNA (1)...(19): siRNA sense strand
gaaccucgaagagcaaaca

SEQ ID NO: 1329165 - RNA, 19 nt, Homo sapiens
  misc_RNA (1)...(19): siRNA sense strand
acagugaccuggcucuuuu

SEQ ID NO: 1329166 - RNA, 19 nt, Homo sapiens
  misc_RNA (1)...(19): siRNA sense strand
agacagaaaccaccauugg

SEQ ID NO: 1329167 - RNA, 19 nt, Homo sapiens
  misc_RNA (1)...(19): siRNA sense strand
ggaaagugcaauguucauc

SEQ ID NO: 1329168 - RNA, 19 nt, Homo sapiens
  misc_RNA (1)...(19): siRNA sense strand
gcaaaccuggagaaugaau

SEQ ID NO: 1329169 - RNA, 19 nt, Homo sapiens
  misc_RNA (1)...(19): siRNA sense strand
ccucgaagagcaaacagaa

SEQ ID NO: 1329170 - RNA, 19 nt, Homo sapiens
  misc_RNA (1)...(19): siRNA sense strand
gggaugaccgucuguuucu

SEQ ID NO: 1329171 - RNA, 19 nt, Homo sapiens
  misc_RNA (1)...(19): siRNA sense strand
gugggaugcauguuuguaa

SEQ ID NO: 1329172 - RNA, 19 nt, Homo sapiens
  misc_RNA (1)...(19): siRNA sense strand
agacauggaccacauagag

SEQ ID NO: 1329173 - RNA, 19 nt, Homo sapiens
  misc_RNA (1)...(19): siRNA sense strand
gggagacauggaccacaua

SEQ ID NO: 1329174 - RNA, 19 nt, Homo sapiens
  misc_RNA (1)...(19): siRNA sense strand
ggugguugaucgcauacau

SEQ ID NO: 1329175 - RNA, 19 nt, Homo sapiens
  misc_RNA (1)...(19): siRNA sense strand
guggagauucaaccuauug

SEQ ID NO: 1329176 - RNA, 19 nt, Homo sapiens
  misc_RNA (1)...(19): siRNA sense strand
aaauuguggucauccuaga

SEQ ID NO: 1329177 - RNA, 19 nt, Homo sapiens
  misc_RNA (1)...(19): siRNA sense strand
uugaucaaauccaaacaga

SEQ ID NO: 1329178 - RNA, 19 nt, Homo sapiens
  misc_RNA (1)...(19): siRNA sense strand
gagacagaaaccaccauug

SEQ ID NO: 1329179 - RNA, 19 nt, Homo sapiens
  misc_RNA (1)...(19): siRNA sense strand
gaaagacggaaagugcaau

SEQ ID NO: 1329180 - RNA, 19 nt, Homo sapiens
  misc_RNA (1)...(19): siRNA sense strand
acuggagacugaagaggaa

SEQ ID NO: 1329181 - RNA, 19 nt, Homo sapiens
  misc_RNA (1)...(19): siRNA sense strand
cagcuuccaugagaccuau

SEQ ID NO: 1329182 - RNA, 19 nt, Homo sapiens
  misc_RNA (1)...(19): siRNA sense strand
auaucaacguaggguauua

SEQ ID NO: 1329183 - RNA, 19 nt, Homo sapiens
  misc_RNA (1)...(19): siRNA sense strand
ggaaacugugccugauguu

SEQ ID NO: 1329184 - RNA, 19 nt, Homo sapiens
  misc_RNA (1)...(19): siRNA sense strand
uaccgggucaucacagaua

SEQ ID NO: 1329185 - RNA, 19 nt, Homo sapiens
  misc_RNA (1)...(19): siRNA sense strand
gcaacgugagggagaccua

SEQ ID NO: 1329186 - RNA, 19 nt, Homo sapiens
  misc_RNA (1)...(19): siRNA sense strand
ggagacauggaccacauag

SEQ ID NO: 1329187 - RNA, 19 nt, Homo sapiens
  misc_RNA (1)...(19): siRNA sense strand
cgaagagcaaacagaaaga

SEQ ID NO: 1329188 - RNA, 19 nt, Homo sapiens
  misc_RNA (1)...(19): siRNA sense strand
agacggaaagugcaauguu

SEQ ID NO: 1329189 - RNA, 19 nt, Homo sapiens
  misc_RNA (1)...(19): siRNA sense strand
caaguugaucaaauccaaa

SEQ ID NO: 1329190 - RNA, 19 nt, Homo sapiens
  misc_RNA (1)...(19): siRNA sense strand
uaucuucaccacauuagug

SEQ ID NO: 1329191 - RNA, 19 nt, Homo sapiens
  misc_RNA (1)...(19): siRNA sense strand
cgaaagcccaguggccauu

SEQ ID NO: 1329192 - RNA, 19 nt, Homo sapiens
  misc_RNA (1)...(19): siRNA sense strand
ccauucaccagccaaaguu

SEQ ID NO: 1329193 - RNA, 19 nt, Homo sapiens
  misc_RNA (1)...(19): siRNA sense strand
cuaccugaccgauaucuuc

SEQ ID NO: 1329194 - RNA, 19 nt, Homo sapiens
  misc_RNA (1)...(19): siRNA sense strand
cauuagccaugaaauuaac

SEQ ID NO: 1329195 - RNA, 19 nt, Homo sapiens
  misc_RNA (1)...(19): siRNA sense strand
agagccaaguugaucaaau

SEQ ID NO: 1329196 - RNA, 19 nt, Homo sapiens
  misc_RNA (1)...(19): siRNA sense strand
ccgauaucuucaccacauu

SEQ ID NO: 1329197 - RNA, 19 nt, Homo sapiens
  misc_RNA (1)...(19): siRNA sense strand
cagccaaaguugccuaagc

SEQ ID NO: 1329198 - RNA, 19 nt, Homo sapiens
  misc_RNA (1)...(19): siRNA sense strand
gugguugaucgcauacaua

SEQ ID NO: 1329199 - RNA, 19 nt, Homo sapiens
  misc_RNA (1)...(19): siRNA sense strand
ugaaccagacggauaucaa

SEQ ID NO: 1329200 - RNA, 19 nt, Homo sapiens
  misc_RNA (1)...(19): siRNA sense strand
agccaaaguugccuaagca

SEQ ID NO: 1329201 - RNA, 19 nt, Homo sapiens
  misc_RNA (1)...(19): siRNA sense strand
ugaaauuaaccaacagagu

SEQ ID NO: 1329202 - RNA, 19 nt, Homo sapiens
  misc_RNA (1)...(19): siRNA sense strand
gucaugguuuacacaguga

SEQ ID NO: 1329203 - RNA, 19 nt, Homo sapiens
  misc_RNA (1)...(19): siRNA sense strand
ucgaagagcaaacagaaag

SEQ ID NO: 1329204 - RNA, 19 nt, Homo sapiens
  misc_RNA (1)...(19): siRNA sense strand
cugacagaauccaugacua

SEQ ID NO: 1329205 - RNA, 19 nt, Homo sapiens
  misc_RNA (1)...(19): siRNA sense strand
agacacaucagccgagauc

SEQ ID NO: 1329206 - RNA, 19 nt, Homo sapiens
  misc_RNA (1)...(19): siRNA sense strand
gaucggaccaaaaggaaaa

SEQ ID NO: 1329207 - RNA, 19 nt, Homo sapiens
  misc_RNA (1)...(19): siRNA sense strand
gauaucuucaccacauuag

SEQ ID NO: 1329208 - RNA, 19 nt, Homo sapiens
  misc_RNA (1)...(19): siRNA sense strand
cacagugaccuggcucuuu

SEQ ID NO: 1329209 - RNA, 19 nt, Homo sapiens
  misc_RNA (1)...(19): siRNA sense strand
caaacucaaccaacaugca

SEQ ID NO: 1329210 - RNA, 19 nt, Homo sapiens
  misc_RNA (1)...(19): siRNA sense strand
agagcaaacagaaagaaau

SEQ ID NO: 1329211 - RNA, 19 nt, Homo sapiens
  misc_RNA (1)...(19): siRNA sense strand
ggagacugaagaggaagaa

SEQ ID NO: 1329212 - RNA, 19 nt, Homo sapiens
  misc_RNA (1)...(19): siRNA sense strand
gaaacuacccaaagucgua

SEQ ID NO: 1329213 - RNA, 19 nt, Homo sapiens
  misc_RNA (1)...(19): siRNA sense strand
gagaccaaguguagcaaug

SEQ ID NO: 1329214 - RNA, 19 nt, Homo sapiens
  misc_RNA (1)...(19): siRNA sense strand
ggcagaaacuacccaaagu

SEQ ID NO: 1329215 - RNA, 19 nt, Homo sapiens
  misc_RNA (1)...(19): siRNA sense strand
ggacgugacaggccagugu

SEQ ID NO: 1329216 - RNA, 19 nt, Homo sapiens
  misc_RNA (1)...(19): siRNA sense strand
gcgacgggcaugccuguaa

SEQ ID NO: 1329217 - RNA, 19 nt, Homo sapiens
  misc_RNA (1)...(19): siRNA sense strand
ugaaggcccuguguacugu

SEQ ID NO: 1329218 - RNA, 19 nt, Homo sapiens
  misc_RNA (1)...(19): siRNA sense strand
gagcagcccucaccauccu

SEQ ID NO: 1329219 - RNA, 19 nt, Homo sapiens
  misc_RNA (1)...(19): siRNA sense strand
gcagaaacuacccaaaguc

SEQ ID NO: 1329220 - RNA, 19 nt, Homo sapiens
  misc_RNA (1)...(19): siRNA sense strand
ugacaggccaguguacuug

SEQ ID NO: 1329221 - RNA, 19 nt, Homo sapiens
  misc_RNA (1)...(19): siRNA sense strand
gcagugcgaggacgugaca

SEQ ID NO: 1329222 - RNA, 19 nt, Homo sapiens
  misc_RNA (1)...(19): siRNA sense strand
cagcggacacugcgacuuc

SEQ ID NO: 1329223 - RNA, 19 nt, Homo sapiens
  misc_RNA (1)...(19): siRNA sense strand
gcaaguguacgcgcugcaa

SEQ ID NO: 1329224 - RNA, 19 nt, Homo sapiens
  misc_RNA (1)...(19): siRNA sense strand
ggugcgagaccaaguguag

SEQ ID NO: 1329225 - RNA, 19 nt, Homo sapiens
  misc_RNA (1)...(19): siRNA sense strand
gggccuccuucuccucguu

SEQ ID NO: 1329226 - RNA, 19 nt, Homo sapiens
  misc_RNA (1)...(19): siRNA sense strand
gacgugacaggccagugua

SEQ ID NO: 1329227 - RNA, 19 nt, Homo sapiens
  misc_RNA (1)...(19): siRNA sense strand
ggacgcccagcgacaaauc

SEQ ID NO: 1329228 - RNA, 19 nt, Homo sapiens
  misc_RNA (1)...(19): siRNA sense strand
gcaacuccacgugcucaga

SEQ ID NO: 1329229 - RNA, 19 nt, Homo sapiens
  misc_RNA (1)...(19): siRNA sense strand
caugucaccggcaagugua

SEQ ID NO: 1329230 - RNA, 19 nt, Homo sapiens
  misc_RNA (1)...(19): siRNA sense strand
cgacgggcaugccuguaac

SEQ ID NO: 1329231 - RNA, 19 nt, Homo sapiens
  misc_RNA (1)...(19): siRNA sense strand
ccaugucaccggcaagugu

SEQ ID NO: 1329232 - RNA, 19 nt, Homo sapiens
  misc_RNA (1)...(19): siRNA sense strand
agccuaagguguccuggau

SEQ ID NO: 1329233 - RNA, 19 nt, Homo sapiens
  misc_RNA (1)...(19): siRNA sense strand
gaaacuacccaaagucgua

SEQ ID NO: 1329234 - RNA, 19 nt, Homo sapiens
  misc_RNA (1)...(19): siRNA sense strand
gagaccaaguguagcaaug

SEQ ID NO: 1329235 - RNA, 19 nt, Homo sapiens
  misc_RNA (1)...(19): siRNA sense strand
ggcagaaacuacccaaagu

SEQ ID NO: 1329236 - RNA, 19 nt, Homo sapiens
  misc_RNA (1)...(19): siRNA sense strand
ggacgugacaggccagugu

SEQ ID NO: 1329237 - RNA, 19 nt, Homo sapiens
  misc_RNA (1)...(19): siRNA sense strand
gcgacgggcaugccuguaa

SEQ ID NO: 1329238 - RNA, 19 nt, Homo sapiens
  misc_RNA (1)...(19): siRNA sense strand
ugaaggcccuguguacugu

SEQ ID NO: 1329239 - RNA, 19 nt, Homo sapiens
  misc_RNA (1)...(19): siRNA sense strand
gagcagcccucaccauccu

SEQ ID NO: 1329240 - RNA, 19 nt, Homo sapiens
  misc_RNA (1)...(19): siRNA sense strand
gcagaaacuacccaaaguc

SEQ ID NO: 1329241 - RNA, 19 nt, Homo sapiens
  misc_RNA (1)...(19): siRNA sense strand
ugacaggccaguguacuug

SEQ ID NO: 1329242 - RNA, 19 nt, Homo sapiens
  misc_RNA (1)...(19): siRNA sense strand
gcagugcgaggacgugaca

SEQ ID NO: 1329243 - RNA, 19 nt, Homo sapiens
  misc_RNA (1)...(19): siRNA sense strand
cagcggacacugcgacuuc

SEQ ID NO: 1329244 - RNA, 19 nt, Homo sapiens
  misc_RNA (1)...(19): siRNA sense strand
gcaaguguacgcgcugcaa

SEQ ID NO: 1329245 - RNA, 19 nt, Homo sapiens
  misc_RNA (1)...(19): siRNA sense strand
ggugcgagaccaaguguag

SEQ ID NO: 1329246 - RNA, 19 nt, Homo sapiens
  misc_RNA (1)...(19): siRNA sense strand
gggccuccuucuccucguu

SEQ ID NO: 1329247 - RNA, 19 nt, Homo sapiens
  misc_RNA (1)...(19): siRNA sense strand
gacgugacaggccagugua

SEQ ID NO: 1329248 - RNA, 19 nt, Homo sapiens
  misc_RNA (1)...(19): siRNA sense strand
ggacgcccagcgacaaauc

SEQ ID NO: 1329249 - RNA, 19 nt, Homo sapiens
  misc_RNA (1)...(19): siRNA sense strand
gcaacuccacgugcucaga

SEQ ID NO: 1329250 - RNA, 19 nt, Homo sapiens
  misc_RNA (1)...(19): siRNA sense strand
caugucaccggcaagugua

SEQ ID NO: 1329251 - RNA, 19 nt, Homo sapiens
  misc_RNA (1)...(19): siRNA sense strand
cgacgggcaugccuguaac

SEQ ID NO: 1329252 - RNA, 19 nt, Homo sapiens
  misc_RNA (1)...(19): siRNA sense strand
ccaugucaccggcaagugu

SEQ ID NO: 1329253 - RNA, 19 nt, Homo sapiens
  misc_RNA (1)...(19): siRNA sense strand
agccuaagguguccuggau

SEQ ID NO: 1329254 - RNA, 19 nt, Homo sapiens
  misc_RNA (1)...(19): siRNA sense strand
gaccaagccugaagucuca

SEQ ID NO: 1329255 - RNA, 19 nt, Homo sapiens
  misc_RNA (1)...(19): siRNA sense strand
gagcccaacucaccgcaaa

SEQ ID NO: 1329256 - RNA, 19 nt, Homo sapiens
  misc_RNA (1)...(19): siRNA sense strand
gaaccagugcugccaguca

SEQ ID NO: 1329257 - RNA, 19 nt, Homo sapiens
  misc_RNA (1)...(19): siRNA sense strand
aaucaaugcugcccaccaa

SEQ ID NO: 1329258 - RNA, 19 nt, Homo sapiens
  misc_RNA (1)...(19): siRNA sense strand
ccugaagucucaccccuua

SEQ ID NO: 1329259 - RNA, 19 nt, Homo sapiens
  misc_RNA (1)...(19): siRNA sense strand
ccaacucaccgcaaacuca

SEQ ID NO: 1329260 - RNA, 19 nt, Homo sapiens
  misc_RNA (1)...(19): siRNA sense strand
agucaaugcugcccaccaa

SEQ ID NO: 1329261 - RNA, 19 nt, Homo sapiens
  misc_RNA (1)...(19): siRNA sense strand
caggccaggugcugugguu

SEQ ID NO: 1329262 - RNA, 19 nt, Homo sapiens
  misc_RNA (1)...(19): siRNA sense strand
cccuuaacauggagucuga

SEQ ID NO: 1329263 - RNA, 19 nt, Homo sapiens
  misc_RNA (1)...(19): siRNA sense strand
guccaggccaagcaaauga

SEQ ID NO: 1329264 - RNA, 19 nt, Homo sapiens
  misc_RNA (1)...(19): siRNA sense strand
aaccagugcugccagucaa

SEQ ID NO: 1329265 - RNA, 19 nt, Homo sapiens
  misc_RNA (1)...(19): siRNA sense strand
ggccaggugcugugguuug

SEQ ID NO: 1329266 - RNA, 19 nt, Homo sapiens
  misc_RNA (1)...(19): siRNA sense strand
ggagaccaagccugaaguc

SEQ ID NO: 1329267 - RNA, 19 nt, Homo sapiens
  misc_RNA (1)...(19): siRNA sense strand
ccccauagcccacaaaaug

SEQ ID NO: 1329268 - RNA, 19 nt, Homo sapiens
  misc_RNA (1)...(19): siRNA sense strand
gaaacaaacugcagaaugu

SEQ ID NO: 1329269 - RNA, 19 nt, Homo sapiens
  misc_RNA (1)...(19): siRNA sense strand
acaaggaucuggauauuua

SEQ ID NO: 1329270 - RNA, 19 nt, Homo sapiens
  misc_RNA (1)...(19): siRNA sense strand
ggacaaagauaagcaaauu

SEQ ID NO: 1329271 - RNA, 19 nt, Homo sapiens
  misc_RNA (1)...(19): siRNA sense strand
ggacagacuugccaaauug

SEQ ID NO: 1329272 - RNA, 19 nt, Homo sapiens
  misc_RNA (1)...(19): siRNA sense strand
gaacaaggaucuggauauu

SEQ ID NO: 1329273 - RNA, 19 nt, Homo sapiens
  misc_RNA (1)...(19): siRNA sense strand
gcucagagauugugaaaug

SEQ ID NO: 1329274 - RNA, 19 nt, Homo sapiens
  misc_RNA (1)...(19): siRNA sense strand
ggaaauaccagaauuaaga

SEQ ID NO: 1329275 - RNA, 19 nt, Homo sapiens
  misc_RNA (1)...(19): siRNA sense strand
gaaaugaucaguucucuug

SEQ ID NO: 1329276 - RNA, 19 nt, Homo sapiens
  misc_RNA (1)...(19): siRNA sense strand
ugacaaagaugaacaaauc

SEQ ID NO: 1329277 - RNA, 19 nt, Homo sapiens
  misc_RNA (1)...(19): siRNA sense strand
gaagagaacauagacaaua

SEQ ID NO: 1329278 - RNA, 19 nt, Homo sapiens
  misc_RNA (1)...(19): siRNA sense strand
gaauagaggacaaagauaa

SEQ ID NO: 1329279 - RNA, 19 nt, Homo sapiens
  misc_RNA (1)...(19): siRNA sense strand
gaaagguuaugaagaagaa

SEQ ID NO: 1329280 - RNA, 19 nt, Homo sapiens
  misc_RNA (1)...(19): siRNA sense strand
gaaggaaauaccagaauua

SEQ ID NO: 1329281 - RNA, 19 nt, Homo sapiens
  misc_RNA (1)...(19): siRNA sense strand
agacaaagcugacaaagau

SEQ ID NO: 1329282 - RNA, 19 nt, Homo sapiens
  misc_RNA (1)...(19): siRNA sense strand
ggagaaagauaauagugaa

SEQ ID NO: 1329283 - RNA, 19 nt, Homo sapiens
  misc_RNA (1)...(19): siRNA sense strand
caaaggaaauugucaaauc

SEQ ID NO: 1329284 - RNA, 19 nt, Homo sapiens
  misc_RNA (1)...(19): siRNA sense strand
gaaauuaaagccuuggaua

SEQ ID NO: 1329285 - RNA, 19 nt, Homo sapiens
  misc_RNA (1)...(19): siRNA sense strand
ggagcagacuguggaauua

SEQ ID NO: 1329286 - RNA, 19 nt, Homo sapiens
  misc_RNA (1)...(19): siRNA sense strand
gaaagacgaccaucauuga

SEQ ID NO: 1329287 - RNA, 19 nt, Homo sapiens
  misc_RNA (1)...(19): siRNA sense strand
gaagagcaguuguccaguu

SEQ ID NO: 1329288 - RNA, 19 nt, Homo sapiens
  misc_RNA (1)...(19): siRNA sense strand
caacacagcuagaauugga

SEQ ID NO: 1329289 - RNA, 19 nt, Homo sapiens
  misc_RNA (1)...(19): siRNA sense strand
ccaaggcugugcuaaauaa

SEQ ID NO: 1329290 - RNA, 19 nt, Homo sapiens
  misc_RNA (1)...(19): siRNA sense strand
gaaagaagcaaauggagaa

SEQ ID NO: 1329291 - RNA, 19 nt, Homo sapiens
  misc_RNA (1)...(19): siRNA sense strand
acagaaagguuaugaagaa

SEQ ID NO: 1329292 - RNA, 19 nt, Homo sapiens
  misc_RNA (1)...(19): siRNA sense strand
gaaauugaccgagaaauga

SEQ ID NO: 1329293 - RNA, 19 nt, Homo sapiens
  misc_RNA (1)...(19): siRNA sense strand
gaaagguggcuacaagaua

SEQ ID NO: 1329294 - RNA, 19 nt, Homo sapiens
  misc_RNA (1)...(19): siRNA sense strand
agaagaaagugccaaagua

SEQ ID NO: 1329295 - RNA, 19 nt, Homo sapiens
  misc_RNA (1)...(19): siRNA sense strand
gcaacaagauacauuaaag

SEQ ID NO: 1329296 - RNA, 19 nt, Homo sapiens
  misc_RNA (1)...(19): siRNA sense strand
ggaauuauccacugaaguu

SEQ ID NO: 1329297 - RNA, 19 nt, Homo sapiens
  misc_RNA (1)...(19): siRNA sense strand
ggaauagacuuagaucgaa

SEQ ID NO: 1329298 - RNA, 19 nt, Homo sapiens
  misc_RNA (1)...(19): siRNA sense strand
ccaaccaacugaugaauga

SEQ ID NO: 1329299 - RNA, 19 nt, Homo sapiens
  misc_RNA (1)...(19): siRNA sense strand
gauaaaggaugcuaaagag

SEQ ID NO: 1329300 - RNA, 19 nt, Homo sapiens
  misc_RNA (1)...(19): siRNA sense strand
caagaaagguggcuacaag

SEQ ID NO: 1329301 - RNA, 19 nt, Homo sapiens
  misc_RNA (1)...(19): siRNA sense strand
aaagguggcuacaagauaa

SEQ ID NO: 1329302 - RNA, 19 nt, Homo sapiens
  misc_RNA (1)...(19): siRNA sense strand
gaaagaaaggaaauuggua

SEQ ID NO: 1329303 - RNA, 19 nt, Homo sapiens
  misc_RNA (1)...(19): siRNA sense strand
uaaccucacuguugggaua

SEQ ID NO: 1329304 - RNA, 19 nt, Homo sapiens
  misc_RNA (1)...(19): siRNA sense strand
guuaacaucuucaaaggaa

SEQ ID NO: 1329305 - RNA, 19 nt, Homo sapiens
  misc_RNA (1)...(19): siRNA sense strand
caaaugagcuaaaaucuga

SEQ ID NO: 1329306 - RNA, 19 nt, Homo sapiens
  misc_RNA (1)...(19): siRNA sense strand
gaagaaagugccaaaguau

SEQ ID NO: 1329307 - RNA, 19 nt, Homo sapiens
  misc_RNA (1)...(19): siRNA sense strand
gcaagcagaucgccaucaa

SEQ ID NO: 1329308 - RNA, 19 nt, Homo sapiens
  misc_RNA (1)...(19): siRNA sense strand
gaucagugcucagagauug

SEQ ID NO: 1329309 - RNA, 19 nt, Homo sapiens
  misc_RNA (1)...(19): siRNA sense strand
gacaagauauugauacaca

SEQ ID NO: 1329310 - RNA, 19 nt, Homo sapiens
  misc_RNA (1)...(19): siRNA sense strand
gaauugaaucguaagcuua

SEQ ID NO: 1329311 - RNA, 19 nt, Homo sapiens
  misc_RNA (1)...(19): siRNA sense strand
aaucagaacugcuuguuga

SEQ ID NO: 1329312 - RNA, 19 nt, Homo sapiens
  misc_RNA (1)...(19): siRNA sense strand
gaaacacucuuggguacaa

SEQ ID NO: 1329313 - RNA, 19 nt, Homo sapiens
  misc_RNA (1)...(19): siRNA sense strand
ggaaauugguagacuguca

SEQ ID NO: 1329314 - RNA, 19 nt, Homo sapiens
  misc_RNA (1)...(19): siRNA sense strand
gaaagaacuucgagaacca

SEQ ID NO: 1329315 - RNA, 19 nt, Homo sapiens
  misc_RNA (1)...(19): siRNA sense strand
aguaauagcucaacuaagu

SEQ ID NO: 1329316 - RNA, 19 nt, Homo sapiens
  misc_RNA (1)...(19): siRNA sense strand
ggaaagacgaccaucauug

SEQ ID NO: 1329317 - RNA, 19 nt, Homo sapiens
  misc_RNA (1)...(19): siRNA sense strand
aauaaugccugaagaagaa

SEQ ID NO: 1329318 - RNA, 19 nt, Homo sapiens
  misc_RNA (1)...(19): siRNA sense strand
cgacauagaagaacaagaa

SEQ ID NO: 1329319 - RNA, 19 nt, Homo sapiens
  misc_RNA (1)...(19): siRNA sense strand
ggacugggaagaauaauug

SEQ ID NO: 1329320 - RNA, 19 nt, Homo sapiens
  misc_RNA (1)...(19): siRNA sense strand
ucagaaauccuaaguaaga

SEQ ID NO: 1329321 - RNA, 19 nt, Homo sapiens
  misc_RNA (1)...(19): siRNA sense strand
gaagacuggcuacauagua

SEQ ID NO: 1329322 - RNA, 19 nt, Homo sapiens
  misc_RNA (1)...(19): siRNA sense strand
gacacaaggucagaaagua

SEQ ID NO: 1329323 - RNA, 19 nt, Homo sapiens
  misc_RNA (1)...(19): siRNA sense strand
cuucagauauccacuaauu

SEQ ID NO: 1329324 - RNA, 19 nt, Homo sapiens
  misc_RNA (1)...(19): siRNA sense strand
gggacagacuugccaaauu

SEQ ID NO: 1329325 - RNA, 19 nt, Homo sapiens
  misc_RNA (1)...(19): siRNA sense strand
caagguugcucaagaaaca

SEQ ID NO: 1329326 - RNA, 19 nt, Homo sapiens
  misc_RNA (1)...(19): siRNA sense strand
gaacauauccgagcuagag

SEQ ID NO: 1329327 - RNA, 19 nt, Homo sapiens
  misc_RNA (1)...(19): siRNA sense strand
aaucuaggcuucucaauca

SEQ ID NO: 1329328 - RNA, 19 nt, Homo sapiens
  misc_RNA (1)...(19): siRNA sense strand
gacaagcuguuugauguuu

SEQ ID NO: 1329329 - RNA, 19 nt, Homo sapiens
  misc_RNA (1)...(19): siRNA sense strand
ugaauuaaccucacuguug

SEQ ID NO: 1329330 - RNA, 19 nt, Homo sapiens
  misc_RNA (1)...(19): siRNA sense strand
acagauagaugagauaaga

SEQ ID NO: 1329331 - RNA, 19 nt, Homo sapiens
  misc_RNA (1)...(19): siRNA sense strand
uaaguaagaagcagaauga

SEQ ID NO: 1329332 - RNA, 19 nt, Homo sapiens
  misc_RNA (1)...(19): siRNA sense strand
caggauaaacugaaugaua

SEQ ID NO: 1329333 - RNA, 19 nt, Homo sapiens
  misc_RNA (1)...(19): siRNA sense strand
guacaauaaugccugaaga

SEQ ID NO: 1329334 - RNA, 19 nt, Homo sapiens
  misc_RNA (1)...(19): siRNA sense strand
ggcaaagcauaauugauuu

SEQ ID NO: 1329335 - RNA, 19 nt, Homo sapiens
  misc_RNA (1)...(19): siRNA sense strand
gaagacaagcuguuugaug

SEQ ID NO: 1329336 - RNA, 19 nt, Homo sapiens
  misc_RNA (1)...(19): siRNA sense strand
gaacaaggaacuagcuuca

SEQ ID NO: 1329337 - RNA, 19 nt, Homo sapiens
  misc_RNA (1)...(19): siRNA sense strand
gaaguaauaagucuccaaa

SEQ ID NO: 1329338 - RNA, 19 nt, Homo sapiens
  misc_RNA (1)...(19): siRNA sense strand
gaaaggaaauugguagacu

SEQ ID NO: 1329339 - RNA, 19 nt, Homo sapiens
  misc_RNA (1)...(19): siRNA sense strand
gaaguucagucuuuguaca

SEQ ID NO: 1329340 - RNA, 19 nt, Homo sapiens
  misc_RNA (1)...(19): siRNA sense strand
ucagugauuugcagucuaa

SEQ ID NO: 1329341 - RNA, 19 nt, Homo sapiens
  misc_RNA (1)...(19): siRNA sense strand
gcaauuucgugaugucaau

SEQ ID NO: 1329342 - RNA, 19 nt, Homo sapiens
  misc_RNA (1)...(19): siRNA sense strand
gaaguuggaagagaacaua

SEQ ID NO: 1329343 - RNA, 19 nt, Homo sapiens
  misc_RNA (1)...(19): siRNA sense strand
cuaauuggccuuuaaguga

SEQ ID NO: 1329344 - RNA, 19 nt, Homo sapiens
  misc_RNA (1)...(19): siRNA sense strand
gagacaagauauugauaca

SEQ ID NO: 1329345 - RNA, 19 nt, Homo sapiens
  misc_RNA (1)...(19): siRNA sense strand
aagagcaguuguccaguua

SEQ ID NO: 1329346 - RNA, 19 nt, Homo sapiens
  misc_RNA (1)...(19): siRNA sense strand
gaaagauaauagugaacug

SEQ ID NO: 1329347 - RNA, 19 nt, Homo sapiens
  misc_RNA (1)...(19): siRNA sense strand
ccugacagauguuacaauu

SEQ ID NO: 1329348 - RNA, 19 nt, Homo sapiens
  misc_RNA (1)...(19): siRNA sense strand
gcuagagauucauuaauuc

SEQ ID NO: 1329349 - RNA, 19 nt, Homo sapiens
  misc_RNA (1)...(19): siRNA sense strand
gaacuugauccauugaaga

SEQ ID NO: 1329350 - RNA, 19 nt, Homo sapiens
  misc_RNA (1)...(19): siRNA sense strand
uaagaaagaacuucgagaa

SEQ ID NO: 1329351 - RNA, 19 nt, Homo sapiens
  misc_RNA (1)...(19): siRNA sense strand
agaaggaaauaccagaauu

SEQ ID NO: 1329352 - RNA, 19 nt, Homo sapiens
  misc_RNA (1)...(19): siRNA sense strand
cuugaagacuggcuacaua

SEQ ID NO: 1329353 - RNA, 19 nt, Homo sapiens
  misc_RNA (1)...(19): siRNA sense strand
gaacaguaagggagaaaga

SEQ ID NO: 1329354 - RNA, 19 nt, Homo sapiens
  misc_RNA (1)...(19): siRNA sense strand
ggaauagaggacaaagaua

SEQ ID NO: 1329355 - RNA, 19 nt, Homo sapiens
  misc_RNA (1)...(19): siRNA sense strand
gguauuagccucacucauc

SEQ ID NO: 1329356 - RNA, 19 nt, Homo sapiens
  misc_RNA (1)...(19): siRNA sense strand
gaaccaaaggaaauacauu

SEQ ID NO: 1329357 - RNA, 19 nt, Homo sapiens
  misc_RNA (1)...(19): siRNA sense strand
gcgacuugcuccagauaaa

SEQ ID NO: 1329358 - RNA, 19 nt, Homo sapiens
  misc_RNA (1)...(19): siRNA sense strand
gacagaggcugaguuacaa

SEQ ID NO: 1329359 - RNA, 19 nt, Homo sapiens
  misc_RNA (1)...(19): siRNA sense strand
uaggcacagugaugaauua

SEQ ID NO: 1329360 - RNA, 19 nt, Homo sapiens
  misc_RNA (1)...(19): siRNA sense strand
gaagcagaaugagcugaaa

SEQ ID NO: 1329361 - RNA, 19 nt, Homo sapiens
  misc_RNA (1)...(19): siRNA sense strand
gggaagaauaauugaguua

SEQ ID NO: 1329362 - RNA, 19 nt, Homo sapiens
  misc_RNA (1)...(19): siRNA sense strand
ggagaaagaaaggaaauug

SEQ ID NO: 1329363 - RNA, 19 nt, Homo sapiens
  misc_RNA (1)...(19): siRNA sense strand
cagauaaacucaagucaac

SEQ ID NO: 1329364 - RNA, 19 nt, Homo sapiens
  misc_RNA (1)...(19): siRNA sense strand
gguaagcccuuuggaaaca

SEQ ID NO: 1329365 - RNA, 19 nt, Homo sapiens
  misc_RNA (1)...(19): siRNA sense strand
ucagauauccacuaauuug

SEQ ID NO: 1329366 - RNA, 19 nt, Homo sapiens
  misc_RNA (1)...(19): siRNA sense strand
agagaaacagcacaaguua

SEQ ID NO: 1329367 - RNA, 19 nt, Homo sapiens
  misc_RNA (1)...(19): siRNA sense strand
aaacucaagucaacagaau

SEQ ID NO: 1329368 - RNA, 19 nt, Homo sapiens
  misc_RNA (1)...(19): siRNA sense strand
gaaacaaacugcagaaugu

SEQ ID NO: 1329369 - RNA, 19 nt, Homo sapiens
  misc_RNA (1)...(19): siRNA sense strand
acaaggaucuggauauuua

SEQ ID NO: 1329370 - RNA, 19 nt, Homo sapiens
  misc_RNA (1)...(19): siRNA sense strand
ggacagacuugccaaauug

SEQ ID NO: 1329371 - RNA, 19 nt, Homo sapiens
  misc_RNA (1)...(19): siRNA sense strand
gaacaaggaucuggauauu

SEQ ID NO: 1329372 - RNA, 19 nt, Homo sapiens
  misc_RNA (1)...(19): siRNA sense strand
gcucagagauugugaaaug

SEQ ID NO: 1329373 - RNA, 19 nt, Homo sapiens
  misc_RNA (1)...(19): siRNA sense strand
ggaaauaccagaauuaaga

SEQ ID NO: 1329374 - RNA, 19 nt, Homo sapiens
  misc_RNA (1)...(19): siRNA sense strand
ugacaaagaugaacaaauc

SEQ ID NO: 1329375 - RNA, 19 nt, Homo sapiens
  misc_RNA (1)...(19): siRNA sense strand
gaagagaacauagacaaua

SEQ ID NO: 1329376 - RNA, 19 nt, Homo sapiens
  misc_RNA (1)...(19): siRNA sense strand
ggagaaagauaauagugaa

SEQ ID NO: 1329377 - RNA, 19 nt, Homo sapiens
  misc_RNA (1)...(19): siRNA sense strand
gaaagguuaugaagaagaa

SEQ ID NO: 1329378 - RNA, 19 nt, Homo sapiens
  misc_RNA (1)...(19): siRNA sense strand
gaaggaaauaccagaauua

SEQ ID NO: 1329379 - RNA, 19 nt, Homo sapiens
  misc_RNA (1)...(19): siRNA sense strand
agacaaagcugacaaagau

SEQ ID NO: 1329380 - RNA, 19 nt, Homo sapiens
  misc_RNA (1)...(19): siRNA sense strand
caaaggaaauugucaaauc

SEQ ID NO: 1329381 - RNA, 19 nt, Homo sapiens
  misc_RNA (1)...(19): siRNA sense strand
gaaauuaaagccuuggaua

SEQ ID NO: 1329382 - RNA, 19 nt, Homo sapiens
  misc_RNA (1)...(19): siRNA sense strand
ggagcagacuguggaauua

SEQ ID NO: 1329383 - RNA, 19 nt, Homo sapiens
  misc_RNA (1)...(19): siRNA sense strand
caacacagcuagaauugga

SEQ ID NO: 1329384 - RNA, 19 nt, Homo sapiens
  misc_RNA (1)...(19): siRNA sense strand
ccaaggcugugcuaaauaa

SEQ ID NO: 1329385 - RNA, 19 nt, Homo sapiens
  misc_RNA (1)...(19): siRNA sense strand
gaagagcaguuguccaguu

SEQ ID NO: 1329386 - RNA, 19 nt, Homo sapiens
  misc_RNA (1)...(19): siRNA sense strand
gaaagaagcaaauggagaa

SEQ ID NO: 1329387 - RNA, 19 nt, Homo sapiens
  misc_RNA (1)...(19): siRNA sense strand
acagaaagguuaugaagaa

SEQ ID NO: 1329388 - RNA, 19 nt, Homo sapiens
  misc_RNA (1)...(19): siRNA sense strand
gaaagguggcuacaagaua

SEQ ID NO: 1329389 - RNA, 19 nt, Homo sapiens
  misc_RNA (1)...(19): siRNA sense strand
agaagaaagugccaaagua

SEQ ID NO: 1329390 - RNA, 19 nt, Homo sapiens
  misc_RNA (1)...(19): siRNA sense strand
gcaacaagauacauuaaag

SEQ ID NO: 1329391 - RNA, 19 nt, Homo sapiens
  misc_RNA (1)...(19): siRNA sense strand
ggaauuauccacugaaguu

SEQ ID NO: 1329392 - RNA, 19 nt, Homo sapiens
  misc_RNA (1)...(19): siRNA sense strand
ggaauagacuuagaucgaa

SEQ ID NO: 1329393 - RNA, 19 nt, Homo sapiens
  misc_RNA (1)...(19): siRNA sense strand
ccaaccaacugaugaauga

SEQ ID NO: 1329394 - RNA, 19 nt, Homo sapiens
  misc_RNA (1)...(19): siRNA sense strand
gauaaaggaugcuaaagag

SEQ ID NO: 1329395 - RNA, 19 nt, Homo sapiens
  misc_RNA (1)...(19): siRNA sense strand
caagaaagguggcuacaag

SEQ ID NO: 1329396 - RNA, 19 nt, Homo sapiens
  misc_RNA (1)...(19): siRNA sense strand
aaagguggcuacaagauaa

SEQ ID NO: 1329397 - RNA, 19 nt, Homo sapiens
  misc_RNA (1)...(19): siRNA sense strand
gaaagaaaggaaauuggua

SEQ ID NO: 1329398 - RNA, 19 nt, Homo sapiens
  misc_RNA (1)...(19): siRNA sense strand
uaaccucacuguugggaua

SEQ ID NO: 1329399 - RNA, 19 nt, Homo sapiens
  misc_RNA (1)...(19): siRNA sense strand
guuaacaucuucaaaggaa

SEQ ID NO: 1329400 - RNA, 19 nt, Homo sapiens
  misc_RNA (1)...(19): siRNA sense strand
caaaugagcuaaaaucuga

SEQ ID NO: 1329401 - RNA, 19 nt, Homo sapiens
  misc_RNA (1)...(19): siRNA sense strand
gaagaaagugccaaaguau

SEQ ID NO: 1329402 - RNA, 19 nt, Homo sapiens
  misc_RNA (1)...(19): siRNA sense strand
gcaagcagaucgccaucaa

SEQ ID NO: 1329403 - RNA, 19 nt, Homo sapiens
  misc_RNA (1)...(19): siRNA sense strand
gaucagugcucagagauug

SEQ ID NO: 1329404 - RNA, 19 nt, Homo sapiens
  misc_RNA (1)...(19): siRNA sense strand
gacaagauauugauacaca

SEQ ID NO: 1329405 - RNA, 19 nt, Homo sapiens
  misc_RNA (1)...(19): siRNA sense strand
gaauugaaucguaagcuua

SEQ ID NO: 1329406 - RNA, 19 nt, Homo sapiens
  misc_RNA (1)...(19): siRNA sense strand
aaucagaacugcuuguuga

SEQ ID NO: 1329407 - RNA, 19 nt, Homo sapiens
  misc_RNA (1)...(19): siRNA sense strand
gaaacacucuuggguacaa

SEQ ID NO: 1329408 - RNA, 19 nt, Homo sapiens
  misc_RNA (1)...(19): siRNA sense strand
ggaaauugguagacuguca

SEQ ID NO: 1329409 - RNA, 19 nt, Homo sapiens
  misc_RNA (1)...(19): siRNA sense strand
gaaagaacuucgagaacca

SEQ ID NO: 1329410 - RNA, 19 nt, Homo sapiens
  misc_RNA (1)...(19): siRNA sense strand
aguaauagcucaacuaagu

SEQ ID NO: 1329411 - RNA, 19 nt, Homo sapiens
  misc_RNA (1)...(19): siRNA sense strand
aauaaugccugaagaagaa

SEQ ID NO: 1329412 - RNA, 19 nt, Homo sapiens
  misc_RNA (1)...(19): siRNA sense strand
cgacauagaagaacaagaa

SEQ ID NO: 1329413 - RNA, 19 nt, Homo sapiens
  misc_RNA (1)...(19): siRNA sense strand
ggacugggaagaauaauug

SEQ ID NO: 1329414 - RNA, 19 nt, Homo sapiens
  misc_RNA (1)...(19): siRNA sense strand
ucagaaauccuaaguaaga

SEQ ID NO: 1329415 - RNA, 19 nt, Homo sapiens
  misc_RNA (1)...(19): siRNA sense strand
gaagacuggcuacauagua

SEQ ID NO: 1329416 - RNA, 19 nt, Homo sapiens
  misc_RNA (1)...(19): siRNA sense strand
gacacaaggucagaaagua

SEQ ID NO: 1329417 - RNA, 19 nt, Homo sapiens
  misc_RNA (1)...(19): siRNA sense strand
cuucagauauccacuaauu

SEQ ID NO: 1329418 - RNA, 19 nt, Homo sapiens
  misc_RNA (1)...(19): siRNA sense strand
gggacagacuugccaaauu

SEQ ID NO: 1329419 - RNA, 19 nt, Homo sapiens
  misc_RNA (1)...(19): siRNA sense strand
gaacauauccgagcuagag

SEQ ID NO: 1329420 - RNA, 19 nt, Homo sapiens
  misc_RNA (1)...(19): siRNA sense strand
aaucuaggcuucucaauca

SEQ ID NO: 1329421 - RNA, 19 nt, Homo sapiens
  misc_RNA (1)...(19): siRNA sense strand
gacaagcuguuugauguuu

SEQ ID NO: 1329422 - RNA, 19 nt, Homo sapiens
  misc_RNA (1)...(19): siRNA sense strand
ugaauuaaccucacuguug

SEQ ID NO: 1329423 - RNA, 19 nt, Homo sapiens
  misc_RNA (1)...(19): siRNA sense strand
acagauagaugagauaaga

SEQ ID NO: 1329424 - RNA, 19 nt, Homo sapiens
  misc_RNA (1)...(19): siRNA sense strand
uaaguaagaagcagaauga

SEQ ID NO: 1329425 - RNA, 19 nt, Homo sapiens
  misc_RNA (1)...(19): siRNA sense strand
caggauaaacugaaugaua

SEQ ID NO: 1329426 - RNA, 19 nt, Homo sapiens
  misc_RNA (1)...(19): siRNA sense strand
guacaauaaugccugaaga

SEQ ID NO: 1329427 - RNA, 19 nt, Homo sapiens
  misc_RNA (1)...(19): siRNA sense strand
ggcaaagcauaauugauuu

SEQ ID NO: 1329428 - RNA, 19 nt, Homo sapiens
  misc_RNA (1)...(19): siRNA sense strand
gaagacaagcuguuugaug

SEQ ID NO: 1329429 - RNA, 19 nt, Homo sapiens
  misc_RNA (1)...(19): siRNA sense strand
gaacaaggaacuagcuuca

SEQ ID NO: 1329430 - RNA, 19 nt, Homo sapiens
  misc_RNA (1)...(19): siRNA sense strand
gaaguaauaagucuccaaa

SEQ ID NO: 1329431 - RNA, 19 nt, Homo sapiens
  misc_RNA (1)...(19): siRNA sense strand
gaaaggaaauugguagacu

SEQ ID NO: 1329432 - RNA, 19 nt, Homo sapiens
  misc_RNA (1)...(19): siRNA sense strand
gaaguucagucuuuguaca

SEQ ID NO: 1329433 - RNA, 19 nt, Homo sapiens
  misc_RNA (1)...(19): siRNA sense strand
ucagugauuugcagucuaa

SEQ ID NO: 1329434 - RNA, 19 nt, Homo sapiens
  misc_RNA (1)...(19): siRNA sense strand
gaaguuggaagagaacaua

SEQ ID NO: 1329435 - RNA, 19 nt, Homo sapiens
  misc_RNA (1)...(19): siRNA sense strand
aagagcaguuguccaguua

SEQ ID NO: 1329436 - RNA, 19 nt, Homo sapiens
  misc_RNA (1)...(19): siRNA sense strand
cuaauuggccuuuaaguga

SEQ ID NO: 1329437 - RNA, 19 nt, Homo sapiens
  misc_RNA (1)...(19): siRNA sense strand
gagacaagauauugauaca

SEQ ID NO: 1329438 - RNA, 19 nt, Homo sapiens
  misc_RNA (1)...(19): siRNA sense strand
gaaagauaauagugaacug

SEQ ID NO: 1329439 - RNA, 19 nt, Homo sapiens
  misc_RNA (1)...(19): siRNA sense strand
ccugacagauguuacaauu

SEQ ID NO: 1329440 - RNA, 19 nt, Homo sapiens
  misc_RNA (1)...(19): siRNA sense strand
gcuagagauucauuaauuc

SEQ ID NO: 1329441 - RNA, 19 nt, Homo sapiens
  misc_RNA (1)...(19): siRNA sense strand
gaacuugauccauugaaga

SEQ ID NO: 1329442 - RNA, 19 nt, Homo sapiens
  misc_RNA (1)...(19): siRNA sense strand
uaagaaagaacuucgagaa

SEQ ID NO: 1329443 - RNA, 19 nt, Homo sapiens
  misc_RNA (1)...(19): siRNA sense strand
agaaggaaauaccagaauu

SEQ ID NO: 1329444 - RNA, 19 nt, Homo sapiens
  misc_RNA (1)...(19): siRNA sense strand
cuugaagacuggcuacaua

SEQ ID NO: 1329445 - RNA, 19 nt, Homo sapiens
  misc_RNA (1)...(19): siRNA sense strand
gaacaguaagggagaaaga

SEQ ID NO: 1329446 - RNA, 19 nt, Homo sapiens
  misc_RNA (1)...(19): siRNA sense strand
ggagaaagaaaggaaauug

SEQ ID NO: 1329447 - RNA, 19 nt, Homo sapiens
  misc_RNA (1)...(19): siRNA sense strand
gguauuagccucacucauc

SEQ ID NO: 1329448 - RNA, 19 nt, Homo sapiens
  misc_RNA (1)...(19): siRNA sense strand
gcgacuugcuccagauaaa

SEQ ID NO: 1329449 - RNA, 19 nt, Homo sapiens
  misc_RNA (1)...(19): siRNA sense strand
gacagaggcugaguuacaa

SEQ ID NO: 1329450 - RNA, 19 nt, Homo sapiens
  misc_RNA (1)...(19): siRNA sense strand
uaggcacagugaugaauua

SEQ ID NO: 1329451 - RNA, 19 nt, Homo sapiens
  misc_RNA (1)...(19): siRNA sense strand
gaagcagaaugagcugaaa

SEQ ID NO: 1329452 - RNA, 19 nt, Homo sapiens
  misc_RNA (1)...(19): siRNA sense strand
gggaagaauaauugaguua

SEQ ID NO: 1329453 - RNA, 19 nt, Homo sapiens
  misc_RNA (1)...(19): siRNA sense strand
agaagcaaauggagaaaga

SEQ ID NO: 1329454 - RNA, 19 nt, Homo sapiens
  misc_RNA (1)...(19): siRNA sense strand
gguaagcccuuuggaaaca

SEQ ID NO: 1329455 - RNA, 19 nt, Homo sapiens
  misc_RNA (1)...(19): siRNA sense strand
ucagauauccacuaauuug

SEQ ID NO: 1329456 - RNA, 19 nt, Homo sapiens
  misc_RNA (1)...(19): siRNA sense strand
agagaaacagcacaaguua

SEQ ID NO: 1329457 - RNA, 19 nt, Homo sapiens
  misc_RNA (1)...(19): siRNA sense strand
gauucuaauuggccuuuaa

SEQ ID NO: 1329458 - RNA, 19 nt, Homo sapiens
  misc_RNA (1)...(19): siRNA sense strand
aaacucaagucaacagaau

SEQ ID NO: 1329459 - RNA, 19 nt, Homo sapiens
  misc_RNA (1)...(19): siRNA sense strand
cagauaaacucaagucaac

SEQ ID NO: 1329460 - RNA, 19 nt, Homo sapiens
  misc_RNA (1)...(19): siRNA sense strand
aagacaagcuguuugaugu

SEQ ID NO: 1329461 - RNA, 19 nt, Homo sapiens
  misc_RNA (1)...(19): siRNA sense strand
ggacugaugagcaacuaaa

SEQ ID NO: 1329462 - RNA, 19 nt, Homo sapiens
  misc_RNA (1)...(19): siRNA sense strand
gcaaauggagaaagauaau

SEQ ID NO: 1329463 - RNA, 19 nt, Homo sapiens
  misc_RNA (1)...(19): siRNA sense strand
guauuagccucacucauca

SEQ ID NO: 1329464 - RNA, 19 nt, Homo sapiens
  misc_RNA (1)...(19): siRNA sense strand
gauauccacuaauuugcaa

SEQ ID NO: 1329465 - RNA, 19 nt, Homo sapiens
  misc_RNA (1)...(19): siRNA sense strand
caacaacacguacccaaau

SEQ ID NO: 1329466 - RNA, 19 nt, Homo sapiens
  misc_RNA (1)...(19): siRNA sense strand
caucagaaguuggaagaga

SEQ ID NO: 1329467 - RNA, 19 nt, Homo sapiens
  misc_RNA (1)...(19): siRNA sense strand
ggaaaaguauagagaaaug

SEQ ID NO: 1329468 - RNA, 19 nt, Homo sapiens
  misc_RNA (1)...(19): siRNA sense strand
ggauagagauucugcagua

SEQ ID NO: 1329469 - RNA, 19 nt, Homo sapiens
  misc_RNA (1)...(19): siRNA sense strand
gaacagcugucacuucaac

SEQ ID NO: 1329470 - RNA, 19 nt, Homo sapiens
  misc_RNA (1)...(19): siRNA sense strand
ccacucaagauaacaauua

SEQ ID NO: 1329471 - RNA, 19 nt, Homo sapiens
  misc_RNA (1)...(19): siRNA sense strand
gagaauacgugaacaacag

SEQ ID NO: 1329472 - RNA, 19 nt, Homo sapiens
  misc_RNA (1)...(19): siRNA sense strand
ucacuucaacagacuauua

SEQ ID NO: 1329473 - RNA, 19 nt, Homo sapiens
  misc_RNA (1)...(19): siRNA sense strand
gauagagauucugcaguaa

SEQ ID NO: 1329474 - RNA, 19 nt, Homo sapiens
  misc_RNA (1)...(19): siRNA sense strand
gaacuaugagcagagaaua

SEQ ID NO: 1329475 - RNA, 19 nt, Homo sapiens
  misc_RNA (1)...(19): siRNA sense strand
ugaagacagugaaacaaga

SEQ ID NO: 1329476 - RNA, 19 nt, Homo sapiens
  misc_RNA (1)...(19): siRNA sense strand
gcaaaagacugagaacuau

SEQ ID NO: 1329477 - RNA, 19 nt, Homo sapiens
  misc_RNA (1)...(19): siRNA sense strand
gaagacagugaaacaagaa

SEQ ID NO: 1329478 - RNA, 19 nt, Homo sapiens
  misc_RNA (1)...(19): siRNA sense strand
gcaacucaauaaagcguau

SEQ ID NO: 1329479 - RNA, 19 nt, Homo sapiens
  misc_RNA (1)...(19): siRNA sense strand
gccacaagauaaagugauu

SEQ ID NO: 1329480 - RNA, 19 nt, Homo sapiens
  misc_RNA (1)...(19): siRNA sense strand
ugaauuccacucaagauaa

SEQ ID NO: 1329481 - RNA, 19 nt, Homo sapiens
  misc_RNA (1)...(19): siRNA sense strand
cggcaggcaugcauggaua

SEQ ID NO: 1329482 - RNA, 19 nt, Homo sapiens
  misc_RNA (1)...(19): siRNA sense strand
gauaaagugauuucaggaa

SEQ ID NO: 1329483 - RNA, 19 nt, Homo sapiens
  misc_RNA (1)...(19): siRNA sense strand
gaauuccacucaagauaac

SEQ ID NO: 1329484 - RNA, 19 nt, Homo sapiens
  misc_RNA (1)...(19): siRNA sense strand
gcagagaauacgugaacaa

SEQ ID NO: 1329485 - RNA, 19 nt, Homo sapiens
  misc_RNA (1)...(19): siRNA sense strand
gcgagcaacucaauaaagc

SEQ ID NO: 1329486 - RNA, 19 nt, Homo sapiens
  misc_RNA (1)...(19): siRNA sense strand
ucaguuacuucuugugaau

SEQ ID NO: 1329487 - RNA, 19 nt, Homo sapiens
  misc_RNA (1)...(19): siRNA sense strand
caacagacuauuauugaca

SEQ ID NO: 1329488 - RNA, 19 nt, Homo sapiens
  misc_RNA (1)...(19): siRNA sense strand
gcuaaaaucucaguuacuu

SEQ ID NO: 1329489 - RNA, 19 nt, Homo sapiens
  misc_RNA (1)...(19): siRNA sense strand
aggaacagcugucacuuca

SEQ ID NO: 1329490 - RNA, 19 nt, Homo sapiens
  misc_RNA (1)...(19): siRNA sense strand
gugaauuccacucaagaua

SEQ ID NO: 1329491 - RNA, 19 nt, Homo sapiens
  misc_RNA (1)...(19): siRNA sense strand
gagcagagaauacgugaac

SEQ ID NO: 1329492 - RNA, 19 nt, Homo sapiens
  misc_RNA (1)...(19): siRNA sense strand
aaagugauuucaggaauag

SEQ ID NO: 1329493 - RNA, 19 nt, Homo sapiens
  misc_RNA (1)...(19): siRNA sense strand
ugagaacuaugagcagaga

SEQ ID NO: 1329494 - RNA, 19 nt, Homo sapiens
  misc_RNA (1)...(19): siRNA sense strand
aaaucucaguuacuucuug

SEQ ID NO: 1329495 - RNA, 19 nt, Homo sapiens
  misc_RNA (1)...(19): siRNA sense strand
ucaggaauagcaagagaaa

SEQ ID NO: 1329496 - RNA, 19 nt, Homo sapiens
  misc_RNA (1)...(19): siRNA sense strand
gacagugaaacaagaaaga

SEQ ID NO: 1329497 - RNA, 19 nt, Homo sapiens
  misc_RNA (1)...(19): siRNA sense strand
uaauuugacucuugaucag

SEQ ID NO: 1329498 - RNA, 19 nt, Homo sapiens
  misc_RNA (1)...(19): siRNA sense strand
aggcaugcauggauagaga

SEQ ID NO: 1329499 - RNA, 19 nt, Homo sapiens
  misc_RNA (1)...(19): siRNA sense strand
gacuauuauugacaagcua

SEQ ID NO: 1329500 - RNA, 19 nt, Homo sapiens
  misc_RNA (1)...(19): siRNA sense strand
caagauaaagugauuucag

SEQ ID NO: 1329501 - RNA, 19 nt, Homo sapiens
  misc_RNA (1)...(19): siRNA sense strand
caagcuaaaaucucaguua

SEQ ID NO: 1329502 - RNA, 19 nt, Homo sapiens
  misc_RNA (1)...(19): siRNA sense strand
uugaucagccacaagauaa

SEQ ID NO: 1329503 - RNA, 19 nt, Homo sapiens
  misc_RNA (1)...(19): siRNA sense strand
uagagauucugcaguaaaa

SEQ ID NO: 1329504 - RNA, 19 nt, Homo sapiens
  misc_RNA (1)...(19): siRNA sense strand
cuucaacagacuauuauug

SEQ ID NO: 1329505 - RNA, 19 nt, Homo sapiens
  misc_RNA (1)...(19): siRNA sense strand
guguuccucugcuugaaga

SEQ ID NO: 1329506 - RNA, 19 nt, Homo sapiens
  misc_RNA (1)...(19): siRNA sense strand
gcuugaagacagugaaaca

SEQ ID NO: 1329507 - RNA, 19 nt, Homo sapiens
  misc_RNA (1)...(19): siRNA sense strand
gcaugcauggauagagauu

SEQ ID NO: 1329508 - RNA, 19 nt, Homo sapiens
  misc_RNA (1)...(19): siRNA sense strand
uuucaggaauagcaagaga

SEQ ID NO: 1329509 - RNA, 19 nt, Homo sapiens
  misc_RNA (1)...(19): siRNA sense strand
ccacaagauaaagugauuu

SEQ ID NO: 1329510 - RNA, 19 nt, Homo sapiens
  misc_RNA (1)...(19): siRNA sense strand
gaucagccacaagauaaag

SEQ ID NO: 1329511 - RNA, 19 nt, Homo sapiens
  misc_RNA (1)...(19): siRNA sense strand
caggaacagcugucacuuc

SEQ ID NO: 1329512 - RNA, 19 nt, Homo sapiens
  misc_RNA (1)...(19): siRNA sense strand
cacaagauaaagugauuuc

SEQ ID NO: 1329513 - RNA, 19 nt, Homo sapiens
  misc_RNA (1)...(19): siRNA sense strand
gcuguguuccucugcuuga

SEQ ID NO: 1329514 - RNA, 19 nt, Homo sapiens
  misc_RNA (1)...(19): siRNA sense strand
auagagauucugcaguaaa

SEQ ID NO: 1329515 - RNA, 19 nt, Homo sapiens
  misc_RNA (1)...(19): siRNA sense strand
aaucucaguuacuucuugu

SEQ ID NO: 1329516 - RNA, 19 nt, Homo sapiens
  misc_RNA (1)...(19): siRNA sense strand
ucucaguuacuucuuguga

SEQ ID NO: 1329517 - RNA, 19 nt, Homo sapiens
  misc_RNA (1)...(19): siRNA sense strand
agacuauuauugacaagcu

SEQ ID NO: 1329518 - RNA, 19 nt, Homo sapiens
  misc_RNA (1)...(19): siRNA sense strand
gauuucaggaauagcaaga

SEQ ID NO: 1329519 - RNA, 19 nt, Homo sapiens
  misc_RNA (1)...(19): siRNA sense strand
ggcgagcaacucaauaaag

SEQ ID NO: 1329520 - RNA, 19 nt, Homo sapiens
  misc_RNA (1)...(19): siRNA sense strand
ggauagagauucugcagua

SEQ ID NO: 1329521 - RNA, 19 nt, Homo sapiens
  misc_RNA (1)...(19): siRNA sense strand
gaacagcugucacuucaac

SEQ ID NO: 1329522 - RNA, 19 nt, Homo sapiens
  misc_RNA (1)...(19): siRNA sense strand
ccacucaagauaacaauua

SEQ ID NO: 1329523 - RNA, 19 nt, Homo sapiens
  misc_RNA (1)...(19): siRNA sense strand
gagaauacgugaacaacag

SEQ ID NO: 1329524 - RNA, 19 nt, Homo sapiens
  misc_RNA (1)...(19): siRNA sense strand
ucacuucaacagacuauua

SEQ ID NO: 1329525 - RNA, 19 nt, Homo sapiens
  misc_RNA (1)...(19): siRNA sense strand
gauagagauucugcaguaa

SEQ ID NO: 1329526 - RNA, 19 nt, Homo sapiens
  misc_RNA (1)...(19): siRNA sense strand
gaacuaugagcagagaaua

SEQ ID NO: 1329527 - RNA, 19 nt, Homo sapiens
  misc_RNA (1)...(19): siRNA sense strand
ugaagacagugaaacaaga

SEQ ID NO: 1329528 - RNA, 19 nt, Homo sapiens
  misc_RNA (1)...(19): siRNA sense strand
gcaaaagacugagaacuau

SEQ ID NO: 1329529 - RNA, 19 nt, Homo sapiens
  misc_RNA (1)...(19): siRNA sense strand
gaagacagugaaacaagaa

SEQ ID NO: 1329530 - RNA, 19 nt, Homo sapiens
  misc_RNA (1)...(19): siRNA sense strand
gcaacucaauaaagcguau

SEQ ID NO: 1329531 - RNA, 19 nt, Homo sapiens
  misc_RNA (1)...(19): siRNA sense strand
gccacaagauaaagugauu

SEQ ID NO: 1329532 - RNA, 19 nt, Homo sapiens
  misc_RNA (1)...(19): siRNA sense strand
ugaauuccacucaagauaa

SEQ ID NO: 1329533 - RNA, 19 nt, Homo sapiens
  misc_RNA (1)...(19): siRNA sense strand
cggcaggcaugcauggaua

SEQ ID NO: 1329534 - RNA, 19 nt, Homo sapiens
  misc_RNA (1)...(19): siRNA sense strand
gauaaagugauuucaggaa

SEQ ID NO: 1329535 - RNA, 19 nt, Homo sapiens
  misc_RNA (1)...(19): siRNA sense strand
gaauuccacucaagauaac

SEQ ID NO: 1329536 - RNA, 19 nt, Homo sapiens
  misc_RNA (1)...(19): siRNA sense strand
gcagagaauacgugaacaa

SEQ ID NO: 1329537 - RNA, 19 nt, Homo sapiens
  misc_RNA (1)...(19): siRNA sense strand
gcgagcaacucaauaaagc

SEQ ID NO: 1329538 - RNA, 19 nt, Homo sapiens
  misc_RNA (1)...(19): siRNA sense strand
ucaguuacuucuugugaau

SEQ ID NO: 1329539 - RNA, 19 nt, Homo sapiens
  misc_RNA (1)...(19): siRNA sense strand
caacagacuauuauugaca

SEQ ID NO: 1329540 - RNA, 19 nt, Homo sapiens
  misc_RNA (1)...(19): siRNA sense strand
gcuaaaaucucaguuacuu

SEQ ID NO: 1329541 - RNA, 19 nt, Homo sapiens
  misc_RNA (1)...(19): siRNA sense strand
aggaacagcugucacuuca

SEQ ID NO: 1329542 - RNA, 19 nt, Homo sapiens
  misc_RNA (1)...(19): siRNA sense strand
gugaauuccacucaagaua

SEQ ID NO: 1329543 - RNA, 19 nt, Homo sapiens
  misc_RNA (1)...(19): siRNA sense strand
gagcagagaauacgugaac

SEQ ID NO: 1329544 - RNA, 19 nt, Homo sapiens
  misc_RNA (1)...(19): siRNA sense strand
aaagugauuucaggaauag

SEQ ID NO: 1329545 - RNA, 19 nt, Homo sapiens
  misc_RNA (1)...(19): siRNA sense strand
ugagaacuaugagcagaga

SEQ ID NO: 1329546 - RNA, 19 nt, Homo sapiens
  misc_RNA (1)...(19): siRNA sense strand
aaaucucaguuacuucuug

SEQ ID NO: 1329547 - RNA, 19 nt, Homo sapiens
  misc_RNA (1)...(19): siRNA sense strand
ucaggaauagcaagagaaa

SEQ ID NO: 1329548 - RNA, 19 nt, Homo sapiens
  misc_RNA (1)...(19): siRNA sense strand
gacagugaaacaagaaaga

SEQ ID NO: 1329549 - RNA, 19 nt, Homo sapiens
  misc_RNA (1)...(19): siRNA sense strand
uaauuugacucuugaucag

SEQ ID NO: 1329550 - RNA, 19 nt, Homo sapiens
  misc_RNA (1)...(19): siRNA sense strand
aggcaugcauggauagaga

SEQ ID NO: 1329551 - RNA, 19 nt, Homo sapiens
  misc_RNA (1)...(19): siRNA sense strand
gacuauuauugacaagcua

SEQ ID NO: 1329552 - RNA, 19 nt, Homo sapiens
  misc_RNA (1)...(19): siRNA sense strand
caagauaaagugauuucag

SEQ ID NO: 1329553 - RNA, 19 nt, Homo sapiens
  misc_RNA (1)...(19): siRNA sense strand
caagcuaaaaucucaguua

SEQ ID NO: 1329554 - RNA, 19 nt, Homo sapiens
  misc_RNA (1)...(19): siRNA sense strand
uugaucagccacaagauaa

SEQ ID NO: 1329555 - RNA, 19 nt, Homo sapiens
  misc_RNA (1)...(19): siRNA sense strand
uagagauucugcaguaaaa

SEQ ID NO: 1329556 - RNA, 19 nt, Homo sapiens
  misc_RNA (1)...(19): siRNA sense strand
cuucaacagacuauuauug

SEQ ID NO: 1329557 - RNA, 19 nt, Homo sapiens
  misc_RNA (1)...(19): siRNA sense strand
guguuccucugcuugaaga

SEQ ID NO: 1329558 - RNA, 19 nt, Homo sapiens
  misc_RNA (1)...(19): siRNA sense strand
gcuugaagacagugaaaca

SEQ ID NO: 1329559 - RNA, 19 nt, Homo sapiens
  misc_RNA (1)...(19): siRNA sense strand
gcaugcauggauagagauu

SEQ ID NO: 1329560 - RNA, 19 nt, Homo sapiens
  misc_RNA (1)...(19): siRNA sense strand
uuucaggaauagcaagaga

SEQ ID NO: 1329561 - RNA, 19 nt, Homo sapiens
  misc_RNA (1)...(19): siRNA sense strand
ccacaagauaaagugauuu

SEQ ID NO: 1329562 - RNA, 19 nt, Homo sapiens
  misc_RNA (1)...(19): siRNA sense strand
gaucagccacaagauaaag

SEQ ID NO: 1329563 - RNA, 19 nt, Homo sapiens
  misc_RNA (1)...(19): siRNA sense strand
caggaacagcugucacuuc

SEQ ID NO: 1329564 - RNA, 19 nt, Homo sapiens
  misc_RNA (1)...(19): siRNA sense strand
cacaagauaaagugauuuc

SEQ ID NO: 1329565 - RNA, 19 nt, Homo sapiens
  misc_RNA (1)...(19): siRNA sense strand
gcuguguuccucugcuuga

SEQ ID NO: 1329566 - RNA, 19 nt, Homo sapiens
  misc_RNA (1)...(19): siRNA sense strand
auagagauucugcaguaaa

SEQ ID NO: 1329567 - RNA, 19 nt, Homo sapiens
  misc_RNA (1)...(19): siRNA sense strand
aaucucaguuacuucuugu

SEQ ID NO: 1329568 - RNA, 19 nt, Homo sapiens
  misc_RNA (1)...(19): siRNA sense strand
ucucaguuacuucuuguga

SEQ ID NO: 1329569 - RNA, 19 nt, Homo sapiens
  misc_RNA (1)...(19): siRNA sense strand
agacuauuauugacaagcu

SEQ ID NO: 1329570 - RNA, 19 nt, Homo sapiens
  misc_RNA (1)...(19): siRNA sense strand
gauuucaggaauagcaaga

SEQ ID NO: 1329571 - RNA, 19 nt, Homo sapiens
  misc_RNA (1)...(19): siRNA sense strand
ggcgagcaacucaauaaag

SEQ ID NO: 1329572 - RNA, 19 nt, Homo sapiens
  misc_RNA (1)...(19): siRNA sense strand
gccaugaacucgaaaguga

SEQ ID NO: 1329573 - RNA, 19 nt, Homo sapiens
  misc_RNA (1)...(19): siRNA sense strand
gaaggcgucuacaacaauu

SEQ ID NO: 1329574 - RNA, 19 nt, Homo sapiens
  misc_RNA (1)...(19): siRNA sense strand
ccaguuggcucgagagauu

SEQ ID NO: 1329575 - RNA, 19 nt, Homo sapiens
  misc_RNA (1)...(19): siRNA sense strand
gaggagaacuacgguguga

SEQ ID NO: 1329576 - RNA, 19 nt, Homo sapiens
  misc_RNA (1)...(19): siRNA sense strand
gggcuccacuugugaugua

SEQ ID NO: 1329577 - RNA, 19 nt, Homo sapiens
  misc_RNA (1)...(19): siRNA sense strand
auagcagucuuucuucuua

SEQ ID NO: 1329578 - RNA, 19 nt, Homo sapiens
  misc_RNA (1)...(19): siRNA sense strand
aaagacaaguucaccgauu

SEQ ID NO: 1329579 - RNA, 19 nt, Homo sapiens
  misc_RNA (1)...(19): siRNA sense strand
ucaagacgcuaagcucaaa

SEQ ID NO: 1329580 - RNA, 19 nt, Homo sapiens
  misc_RNA (1)...(19): siRNA sense strand
gaacuacggugugaagacu

SEQ ID NO: 1329581 - RNA, 19 nt, Homo sapiens
  misc_RNA (1)...(19): siRNA sense strand
acuaugaccucgagucuga

SEQ ID NO: 1329582 - RNA, 19 nt, Homo sapiens
  misc_RNA (1)...(19): siRNA sense strand
ggacagagcacaggaaagg

SEQ ID NO: 1329583 - RNA, 19 nt, Homo sapiens
  misc_RNA (1)...(19): siRNA sense strand
caacuaugcuacuaaagac

SEQ ID NO: 1329584 - RNA, 19 nt, Homo sapiens
  misc_RNA (1)...(19): siRNA sense strand
guucaccgauucagccauu

SEQ ID NO: 1329585 - RNA, 19 nt, Homo sapiens
  misc_RNA (1)...(19): siRNA sense strand
gaaauguucaaguucaaug

SEQ ID NO: 1329586 - RNA, 19 nt, Homo sapiens
  misc_RNA (1)...(19): siRNA sense strand
ucaacuaugcuacuaaaga

SEQ ID NO: 1329587 - RNA, 19 nt, Homo sapiens
  misc_RNA (1)...(19): siRNA sense strand
gugaagacuaccuaugaua

SEQ ID NO: 1329588 - RNA, 19 nt, Homo sapiens
  misc_RNA (1)...(19): siRNA sense strand
cuucaacuaugcuacuaaa

SEQ ID NO: 1329589 - RNA, 19 nt, Homo sapiens
  misc_RNA (1)...(19): siRNA sense strand
gcaacagcgacgacuauga

SEQ ID NO: 1329590 - RNA, 19 nt, Homo sapiens
  misc_RNA (1)...(19): siRNA sense strand
uaagccaagugaugucaug

SEQ ID NO: 1329591 - RNA, 19 nt, Homo sapiens
  misc_RNA (1)...(19): siRNA sense strand
gcacugaagaggagaagca

SEQ ID NO: 1329592 - RNA, 19 nt, Homo sapiens
  misc_RNA (1)...(19): siRNA sense strand
uaugauagcagucuuucuu

SEQ ID NO: 1329593 - RNA, 19 nt, Homo sapiens
  misc_RNA (1)...(19): siRNA sense strand
gccaagugaugucaugcuu

SEQ ID NO: 1329594 - RNA, 19 nt, Homo sapiens
  misc_RNA (1)...(19): siRNA sense strand
gugugaagacuaccuauga

SEQ ID NO: 1329595 - RNA, 19 nt, Homo sapiens
  misc_RNA (1)...(19): siRNA sense strand
gacgcuaagcucaaaguuu

SEQ ID NO: 1329596 - RNA, 19 nt, Homo sapiens
  misc_RNA (1)...(19): siRNA sense strand
gauagcagucuuucuucuu

SEQ ID NO: 1329597 - RNA, 19 nt, Homo sapiens
  misc_RNA (1)...(19): siRNA sense strand
cuuguucacuuccgaaaug

SEQ ID NO: 1329598 - RNA, 19 nt, Homo sapiens
  misc_RNA (1)...(19): siRNA sense strand
ggagaacuacggugugaag

SEQ ID NO: 1329599 - RNA, 19 nt, Homo sapiens
  misc_RNA (1)...(19): siRNA sense strand
ccauugccaugaacucgaa

SEQ ID NO: 1329600 - RNA, 19 nt, Homo sapiens
  misc_RNA (1)...(19): siRNA sense strand
gacuucaacuaugcuacua

SEQ ID NO: 1329601 - RNA, 19 nt, Homo sapiens
  misc_RNA (1)...(19): siRNA sense strand
cuuauacggugcccuuaga

SEQ ID NO: 1329602 - RNA, 19 nt, Homo sapiens
  misc_RNA (1)...(19): siRNA sense strand
aagacaaguucaccgauuc

SEQ ID NO: 1329603 - RNA, 19 nt, Homo sapiens
  misc_RNA (1)...(19): siRNA sense strand
cagcaacagcgacgacuau

SEQ ID NO: 1329604 - RNA, 19 nt, Homo sapiens
  misc_RNA (1)...(19): siRNA sense strand
caacagcgacgacuaugac

SEQ ID NO: 1329605 - RNA, 19 nt, Homo sapiens
  misc_RNA (1)...(19): siRNA sense strand
ugucaugcuuguucacuuc

SEQ ID NO: 1329606 - RNA, 19 nt, Homo sapiens
  misc_RNA (1)...(19): siRNA sense strand
agucugacauguccaaugg

SEQ ID NO: 1329607 - RNA, 19 nt, Homo sapiens
  misc_RNA (1)...(19): siRNA sense strand
uagcagucuuucuucuuau

SEQ ID NO: 1329608 - RNA, 19 nt, Homo sapiens
  misc_RNA (1)...(19): siRNA sense strand
uugaaggcgucuacaacaa

SEQ ID NO: 1329609 - RNA, 19 nt, Homo sapiens
  misc_RNA (1)...(19): siRNA sense strand
ggaucgccauggagaacga

SEQ ID NO: 1329610 - RNA, 19 nt, Homo sapiens
  misc_RNA (1)...(19): siRNA sense strand
agcagucuuucuucuuaua

SEQ ID NO: 1329611 - RNA, 19 nt, Homo sapiens
  misc_RNA (1)...(19): siRNA sense strand
guucacuuccgaaauguug

SEQ ID NO: 1329612 - RNA, 19 nt, Homo sapiens
  misc_RNA (1)...(19): siRNA sense strand
gcauuuccuuacagcuguu

SEQ ID NO: 1329613 - RNA, 19 nt, Homo sapiens
  misc_RNA (1)...(19): siRNA sense strand
cuuccgaaauguugacuuc

SEQ ID NO: 1329614 - RNA, 19 nt, Homo sapiens
  misc_RNA (1)...(19): siRNA sense strand
ugaaggcgucuacaacaau

SEQ ID NO: 1329615 - RNA, 19 nt, Homo sapiens
  misc_RNA (1)...(19): siRNA sense strand
ugugaagacuaccuaugau

SEQ ID NO: 1329616 - RNA, 19 nt, Homo sapiens
  misc_RNA (1)...(19): siRNA sense strand
ugauagcagucuuucuucu

SEQ ID NO: 1329617 - RNA, 19 nt, Homo sapiens
  misc_RNA (1)...(19): siRNA sense strand
gugaugucaugcuuguuca

SEQ ID NO: 1329618 - RNA, 19 nt, Homo sapiens
  misc_RNA (1)...(19): siRNA sense strand
aaaaugguaccacuuauga

SEQ ID NO: 1329619 - RNA, 19 nt, Homo sapiens
  misc_RNA (1)...(19): siRNA sense strand
gaaaaggacaacucagaag

SEQ ID NO: 1329620 - RNA, 19 nt, Homo sapiens
  misc_RNA (1)...(19): siRNA sense strand
gggagccgaaggcaucuug

SEQ ID NO: 1329621 - RNA, 19 nt, Homo sapiens
  misc_RNA (1)...(19): siRNA sense strand
gacgaugggcgcacugaag

SEQ ID NO: 1329622 - RNA, 19 nt, Homo sapiens
  misc_RNA (1)...(19): siRNA sense strand
caugaacucgaaagugaau

SEQ ID NO: 1329623 - RNA, 19 nt, Homo sapiens
  misc_RNA (1)...(19): siRNA sense strand
gaccucgagucugacaugu

SEQ ID NO: 1329624 - RNA, 19 nt, Homo sapiens
  misc_RNA (1)...(19): siRNA sense strand
ccacuugugauguaaaggu

SEQ ID NO: 1329625 - RNA, 19 nt, Homo sapiens
  misc_RNA (1)...(19): siRNA sense strand
ggaccccaaugaaauguuc

SEQ ID NO: 1329626 - RNA, 19 nt, Homo sapiens
  misc_RNA (1)...(19): siRNA sense strand
ggugugaagacuaccuaug

SEQ ID NO: 1329627 - RNA, 19 nt, Homo sapiens
  misc_RNA (1)...(19): siRNA sense strand
uauacggugcccuuagaaa

SEQ ID NO: 1329628 - RNA, 19 nt, Homo sapiens
  misc_RNA (1)...(19): siRNA sense strand
gccaugaacucgaaaguga

SEQ ID NO: 1329629 - RNA, 19 nt, Homo sapiens
  misc_RNA (1)...(19): siRNA sense strand
gaaggcgucuacaacaauu

SEQ ID NO: 1329630 - RNA, 19 nt, Homo sapiens
  misc_RNA (1)...(19): siRNA sense strand
ccaguuggcucgagagauu

SEQ ID NO: 1329631 - RNA, 19 nt, Homo sapiens
  misc_RNA (1)...(19): siRNA sense strand
gaggagaacuacgguguga

SEQ ID NO: 1329632 - RNA, 19 nt, Homo sapiens
  misc_RNA (1)...(19): siRNA sense strand
gggcuccacuugugaugua

SEQ ID NO: 1329633 - RNA, 19 nt, Homo sapiens
  misc_RNA (1)...(19): siRNA sense strand
gacggaagaucuuuuauuu

SEQ ID NO: 1329634 - RNA, 19 nt, Homo sapiens
  misc_RNA (1)...(19): siRNA sense strand
auagcagucuuucuucuua

SEQ ID NO: 1329635 - RNA, 19 nt, Homo sapiens
  misc_RNA (1)...(19): siRNA sense strand
aaagacaaguucaccgauu

SEQ ID NO: 1329636 - RNA, 19 nt, Homo sapiens
  misc_RNA (1)...(19): siRNA sense strand
ucaagacgcuaagcucaaa

SEQ ID NO: 1329637 - RNA, 19 nt, Homo sapiens
  misc_RNA (1)...(19): siRNA sense strand
gaacuacggugugaagacu

SEQ ID NO: 1329638 - RNA, 19 nt, Homo sapiens
  misc_RNA (1)...(19): siRNA sense strand
acuaugaccucgagucuga

SEQ ID NO: 1329639 - RNA, 19 nt, Homo sapiens
  misc_RNA (1)...(19): siRNA sense strand
caacuaugcuacuaaagac

SEQ ID NO: 1329640 - RNA, 19 nt, Homo sapiens
  misc_RNA (1)...(19): siRNA sense strand
ggacagagcacaggaaagg

SEQ ID NO: 1329641 - RNA, 19 nt, Homo sapiens
  misc_RNA (1)...(19): siRNA sense strand
guucaccgauucagccauu

SEQ ID NO: 1329642 - RNA, 19 nt, Homo sapiens
  misc_RNA (1)...(19): siRNA sense strand
gaaauguucaaguucaaug

SEQ ID NO: 1329643 - RNA, 19 nt, Homo sapiens
  misc_RNA (1)...(19): siRNA sense strand
ucaacuaugcuacuaaaga

SEQ ID NO: 1329644 - RNA, 19 nt, Homo sapiens
  misc_RNA (1)...(19): siRNA sense strand
gugaagacuaccuaugaua

SEQ ID NO: 1329645 - RNA, 19 nt, Homo sapiens
  misc_RNA (1)...(19): siRNA sense strand
cggaagaucuuuuauuuuc

SEQ ID NO: 1329646 - RNA, 19 nt, Homo sapiens
  misc_RNA (1)...(19): siRNA sense strand
cuucaacuaugcuacuaaa

SEQ ID NO: 1329647 - RNA, 19 nt, Homo sapiens
  misc_RNA (1)...(19): siRNA sense strand
gcaacagcgacgacuauga

SEQ ID NO: 1329648 - RNA, 19 nt, Homo sapiens
  misc_RNA (1)...(19): siRNA sense strand
uaagccaagugaugucaug

SEQ ID NO: 1329649 - RNA, 19 nt, Homo sapiens
  misc_RNA (1)...(19): siRNA sense strand
gcacugaagaggagaagca

SEQ ID NO: 1329650 - RNA, 19 nt, Homo sapiens
  misc_RNA (1)...(19): siRNA sense strand
uaugauagcagucuuucuu

SEQ ID NO: 1329651 - RNA, 19 nt, Homo sapiens
  misc_RNA (1)...(19): siRNA sense strand
gccaagugaugucaugcuu

SEQ ID NO: 1329652 - RNA, 19 nt, Homo sapiens
  misc_RNA (1)...(19): siRNA sense strand
gugugaagacuaccuauga

SEQ ID NO: 1329653 - RNA, 19 nt, Homo sapiens
  misc_RNA (1)...(19): siRNA sense strand
gacgcuaagcucaaaguuu

SEQ ID NO: 1329654 - RNA, 19 nt, Homo sapiens
  misc_RNA (1)...(19): siRNA sense strand
gauagcagucuuucuucuu

SEQ ID NO: 1329655 - RNA, 19 nt, Homo sapiens
  misc_RNA (1)...(19): siRNA sense strand
cuuguucacuuccgaaaug

SEQ ID NO: 1329656 - RNA, 19 nt, Homo sapiens
  misc_RNA (1)...(19): siRNA sense strand
ggagaacuacggugugaag

SEQ ID NO: 1329657 - RNA, 19 nt, Homo sapiens
  misc_RNA (1)...(19): siRNA sense strand
ccauugccaugaacucgaa

SEQ ID NO: 1329658 - RNA, 19 nt, Homo sapiens
  misc_RNA (1)...(19): siRNA sense strand
ggagacggaagaucuuuua

SEQ ID NO: 1329659 - RNA, 19 nt, Homo sapiens
  misc_RNA (1)...(19): siRNA sense strand
gacuucaacuaugcuacua

SEQ ID NO: 1329660 - RNA, 19 nt, Homo sapiens
  misc_RNA (1)...(19): siRNA sense strand
cuuauacggugcccuuaga

SEQ ID NO: 1329661 - RNA, 19 nt, Homo sapiens
  misc_RNA (1)...(19): siRNA sense strand
aagacaaguucaccgauuc

SEQ ID NO: 1329662 - RNA, 19 nt, Homo sapiens
  misc_RNA (1)...(19): siRNA sense strand
cagcaacagcgacgacuau

SEQ ID NO: 1329663 - RNA, 19 nt, Homo sapiens
  misc_RNA (1)...(19): siRNA sense strand
cccauccucucaucuauuc

SEQ ID NO: 1329664 - RNA, 19 nt, Homo sapiens
  misc_RNA (1)...(19): siRNA sense strand
caacagcgacgacuaugac

SEQ ID NO: 1329665 - RNA, 19 nt, Homo sapiens
  misc_RNA (1)...(19): siRNA sense strand
ugucaugcuuguucacuuc

SEQ ID NO: 1329666 - RNA, 19 nt, Homo sapiens
  misc_RNA (1)...(19): siRNA sense strand
agucugacauguccaaugg

SEQ ID NO: 1329667 - RNA, 19 nt, Homo sapiens
  misc_RNA (1)...(19): siRNA sense strand
uugaaggcgucuacaacaa

SEQ ID NO: 1329668 - RNA, 19 nt, Homo sapiens
  misc_RNA (1)...(19): siRNA sense strand
ggaucgccauggagaacga

SEQ ID NO: 1329669 - RNA, 19 nt, Homo sapiens
  misc_RNA (1)...(19): siRNA sense strand
agcagucuuucuucuuaua

SEQ ID NO: 1329670 - RNA, 19 nt, Homo sapiens
  misc_RNA (1)...(19): siRNA sense strand
uagcagucuuucuucuuau

SEQ ID NO: 1329671 - RNA, 19 nt, Homo sapiens
  misc_RNA (1)...(19): siRNA sense strand
guucacuuccgaaauguug

SEQ ID NO: 1329672 - RNA, 19 nt, Homo sapiens
  misc_RNA (1)...(19): siRNA sense strand
gcauuuccuuacagcuguu

SEQ ID NO: 1329673 - RNA, 19 nt, Homo sapiens
  misc_RNA (1)...(19): siRNA sense strand
cuuccgaaauguugacuuc

SEQ ID NO: 1329674 - RNA, 19 nt, Homo sapiens
  misc_RNA (1)...(19): siRNA sense strand
ugaaggcgucuacaacaau

SEQ ID NO: 1329675 - RNA, 19 nt, Homo sapiens
  misc_RNA (1)...(19): siRNA sense strand
ugugaagacuaccuaugau

SEQ ID NO: 1329676 - RNA, 19 nt, Homo sapiens
  misc_RNA (1)...(19): siRNA sense strand
ugauagcagucuuucuucu

SEQ ID NO: 1329677 - RNA, 19 nt, Homo sapiens
  misc_RNA (1)...(19): siRNA sense strand
gugaugucaugcuuguuca

SEQ ID NO: 1329678 - RNA, 19 nt, Homo sapiens
  misc_RNA (1)...(19): siRNA sense strand
aaaaugguaccacuuauga

SEQ ID NO: 1329679 - RNA, 19 nt, Homo sapiens
  misc_RNA (1)...(19): siRNA sense strand
gaaaaggacaacucagaag

SEQ ID NO: 1329680 - RNA, 19 nt, Homo sapiens
  misc_RNA (1)...(19): siRNA sense strand
caugaacucgaaagugaau

SEQ ID NO: 1329681 - RNA, 19 nt, Homo sapiens
  misc_RNA (1)...(19): siRNA sense strand
gacgaugggcgcacugaag

SEQ ID NO: 1329682 - RNA, 19 nt, Homo sapiens
  misc_RNA (1)...(19): siRNA sense strand
gggagccgaaggcaucuug

SEQ ID NO: 1329683 - RNA, 19 nt, Homo sapiens
  misc_RNA (1)...(19): siRNA sense strand
ccacuugugauguaaaggu

SEQ ID NO: 1329684 - RNA, 19 nt, Homo sapiens
  misc_RNA (1)...(19): siRNA sense strand
ggaccccaaugaaauguuc

SEQ ID NO: 1329685 - RNA, 19 nt, Homo sapiens
  misc_RNA (1)...(19): siRNA sense strand
gaccucgagucugacaugu

SEQ ID NO: 1329686 - RNA, 19 nt, Homo sapiens
  misc_RNA (1)...(19): siRNA sense strand
ggugugaagacuaccuaug

SEQ ID NO: 1329687 - RNA, 19 nt, Homo sapiens
  misc_RNA (1)...(19): siRNA sense strand
ccucccauccucucaucua

SEQ ID NO: 1329688 - RNA, 19 nt, Homo sapiens
  misc_RNA (1)...(19): siRNA sense strand
uauacggugcccuuagaaa

SEQ ID NO: 1329689 - RNA, 19 nt, Homo sapiens
  misc_RNA (1)...(19): siRNA sense strand
gccaugaacucgaaaguga

SEQ ID NO: 1329690 - RNA, 19 nt, Homo sapiens
  misc_RNA (1)...(19): siRNA sense strand
gaaggcgucuacaacaauu

SEQ ID NO: 1329691 - RNA, 19 nt, Homo sapiens
  misc_RNA (1)...(19): siRNA sense strand
ccaguuggcucgagagauu

SEQ ID NO: 1329692 - RNA, 19 nt, Homo sapiens
  misc_RNA (1)...(19): siRNA sense strand
gaggagaacuacgguguga

SEQ ID NO: 1329693 - RNA, 19 nt, Homo sapiens
  misc_RNA (1)...(19): siRNA sense strand
gggcuccacuugugaugua

SEQ ID NO: 1329694 - RNA, 19 nt, Homo sapiens
  misc_RNA (1)...(19): siRNA sense strand
auagcagucuuucuucuua

SEQ ID NO: 1329695 - RNA, 19 nt, Homo sapiens
  misc_RNA (1)...(19): siRNA sense strand
aaagacaaguucaccgauu

SEQ ID NO: 1329696 - RNA, 19 nt, Homo sapiens
  misc_RNA (1)...(19): siRNA sense strand
ucaagacgcuaagcucaaa

SEQ ID NO: 1329697 - RNA, 19 nt, Homo sapiens
  misc_RNA (1)...(19): siRNA sense strand
gaacuacggugugaagacu

SEQ ID NO: 1329698 - RNA, 19 nt, Homo sapiens
  misc_RNA (1)...(19): siRNA sense strand
acuaugaccucgagucuga

SEQ ID NO: 1329699 - RNA, 19 nt, Homo sapiens
  misc_RNA (1)...(19): siRNA sense strand
ggacagagcacaggaaagg

SEQ ID NO: 1329700 - RNA, 19 nt, Homo sapiens
  misc_RNA (1)...(19): siRNA sense strand
caacuaugcuacuaaagac

SEQ ID NO: 1329701 - RNA, 19 nt, Homo sapiens
  misc_RNA (1)...(19): siRNA sense strand
guucaccgauucagccauu

SEQ ID NO: 1329702 - RNA, 19 nt, Homo sapiens
  misc_RNA (1)...(19): siRNA sense strand
gaaauguucaaguucaaug

SEQ ID NO: 1329703 - RNA, 19 nt, Homo sapiens
  misc_RNA (1)...(19): siRNA sense strand
ucaacuaugcuacuaaaga

SEQ ID NO: 1329704 - RNA, 19 nt, Homo sapiens
  misc_RNA (1)...(19): siRNA sense strand
gugaagacuaccuaugaua

SEQ ID NO: 1329705 - RNA, 19 nt, Homo sapiens
  misc_RNA (1)...(19): siRNA sense strand
cuucaacuaugcuacuaaa

SEQ ID NO: 1329706 - RNA, 19 nt, Homo sapiens
  misc_RNA (1)...(19): siRNA sense strand
gcaacagcgacgacuauga

SEQ ID NO: 1329707 - RNA, 19 nt, Homo sapiens
  misc_RNA (1)...(19): siRNA sense strand
uaagccaagugaugucaug

SEQ ID NO: 1329708 - RNA, 19 nt, Homo sapiens
  misc_RNA (1)...(19): siRNA sense strand
gcacugaagaggagaagca

SEQ ID NO: 1329709 - RNA, 19 nt, Homo sapiens
  misc_RNA (1)...(19): siRNA sense strand
uaugauagcagucuuucuu

SEQ ID NO: 1329710 - RNA, 19 nt, Homo sapiens
  misc_RNA (1)...(19): siRNA sense strand
gccaagugaugucaugcuu

SEQ ID NO: 1329711 - RNA, 19 nt, Homo sapiens
  misc_RNA (1)...(19): siRNA sense strand
gugugaagacuaccuauga

SEQ ID NO: 1329712 - RNA, 19 nt, Homo sapiens
  misc_RNA (1)...(19): siRNA sense strand
gacgcuaagcucaaaguuu

SEQ ID NO: 1329713 - RNA, 19 nt, Homo sapiens
  misc_RNA (1)...(19): siRNA sense strand
gauagcagucuuucuucuu

SEQ ID NO: 1329714 - RNA, 19 nt, Homo sapiens
  misc_RNA (1)...(19): siRNA sense strand
cuuguucacuuccgaaaug

SEQ ID NO: 1329715 - RNA, 19 nt, Homo sapiens
  misc_RNA (1)...(19): siRNA sense strand
ggagaacuacggugugaag

SEQ ID NO: 1329716 - RNA, 19 nt, Homo sapiens
  misc_RNA (1)...(19): siRNA sense strand
ccauugccaugaacucgaa

SEQ ID NO: 1329717 - RNA, 19 nt, Homo sapiens
  misc_RNA (1)...(19): siRNA sense strand
gacuucaacuaugcuacua

SEQ ID NO: 1329718 - RNA, 19 nt, Homo sapiens
  misc_RNA (1)...(19): siRNA sense strand
cuuauacggugcccuuaga

SEQ ID NO: 1329719 - RNA, 19 nt, Homo sapiens
  misc_RNA (1)...(19): siRNA sense strand
aagacaaguucaccgauuc

SEQ ID NO: 1329720 - RNA, 19 nt, Homo sapiens
  misc_RNA (1)...(19): siRNA sense strand
cagcaacagcgacgacuau

SEQ ID NO: 1329721 - RNA, 19 nt, Homo sapiens
  misc_RNA (1)...(19): siRNA sense strand
caacagcgacgacuaugac

SEQ ID NO: 1329722 - RNA, 19 nt, Homo sapiens
  misc_RNA (1)...(19): siRNA sense strand
ugucaugcuuguucacuuc

SEQ ID NO: 1329723 - RNA, 19 nt, Homo sapiens
  misc_RNA (1)...(19): siRNA sense strand
agucugacauguccaaugg

SEQ ID NO: 1329724 - RNA, 19 nt, Homo sapiens
  misc_RNA (1)...(19): siRNA sense strand
uagcagucuuucuucuuau

SEQ ID NO: 1329725 - RNA, 19 nt, Homo sapiens
  misc_RNA (1)...(19): siRNA sense strand
uugaaggcgucuacaacaa

SEQ ID NO: 1329726 - RNA, 19 nt, Homo sapiens
  misc_RNA (1)...(19): siRNA sense strand
ggaucgccauggagaacga

SEQ ID NO: 1329727 - RNA, 19 nt, Homo sapiens
  misc_RNA (1)...(19): siRNA sense strand
agcagucuuucuucuuaua

SEQ ID NO: 1329728 - RNA, 19 nt, Homo sapiens
  misc_RNA (1)...(19): siRNA sense strand
guucacuuccgaaauguug

SEQ ID NO: 1329729 - RNA, 19 nt, Homo sapiens
  misc_RNA (1)...(19): siRNA sense strand
gcauuuccuuacagcuguu

SEQ ID NO: 1329730 - RNA, 19 nt, Homo sapiens
  misc_RNA (1)...(19): siRNA sense strand
cuuccgaaauguugacuuc

SEQ ID NO: 1329731 - RNA, 19 nt, Homo sapiens
  misc_RNA (1)...(19): siRNA sense strand
ugaaggcgucuacaacaau

SEQ ID NO: 1329732 - RNA, 19 nt, Homo sapiens
  misc_RNA (1)...(19): siRNA sense strand
ugugaagacuaccuaugau

SEQ ID NO: 1329733 - RNA, 19 nt, Homo sapiens
  misc_RNA (1)...(19): siRNA sense strand
ugauagcagucuuucuucu

SEQ ID NO: 1329734 - RNA, 19 nt, Homo sapiens
  misc_RNA (1)...(19): siRNA sense strand
gugaugucaugcuuguuca

SEQ ID NO: 1329735 - RNA, 19 nt, Homo sapiens
  misc_RNA (1)...(19): siRNA sense strand
aaaaugguaccacuuauga

SEQ ID NO: 1329736 - RNA, 19 nt, Homo sapiens
  misc_RNA (1)...(19): siRNA sense strand
gaaaaggacaacucagaag

SEQ ID NO: 1329737 - RNA, 19 nt, Homo sapiens
  misc_RNA (1)...(19): siRNA sense strand
gggagccgaaggcaucuug

SEQ ID NO: 1329738 - RNA, 19 nt, Homo sapiens
  misc_RNA (1)...(19): siRNA sense strand
gacgaugggcgcacugaag

SEQ ID NO: 1329739 - RNA, 19 nt, Homo sapiens
  misc_RNA (1)...(19): siRNA sense strand
caugaacucgaaagugaau

SEQ ID NO: 1329740 - RNA, 19 nt, Homo sapiens
  misc_RNA (1)...(19): siRNA sense strand
gaccucgagucugacaugu

SEQ ID NO: 1329741 - RNA, 19 nt, Homo sapiens
  misc_RNA (1)...(19): siRNA sense strand
ccacuugugauguaaaggu

SEQ ID NO: 1329742 - RNA, 19 nt, Homo sapiens
  misc_RNA (1)...(19): siRNA sense strand
ggaccccaaugaaauguuc

SEQ ID NO: 1329743 - RNA, 19 nt, Homo sapiens
  misc_RNA (1)...(19): siRNA sense strand
ggugugaagacuaccuaug

SEQ ID NO: 1329744 - RNA, 19 nt, Homo sapiens
  misc_RNA (1)...(19): siRNA sense strand
uauacggugcccuuagaaa

SEQ ID NO: 1329745 - RNA, 19 nt, Homo sapiens
  misc_RNA (1)...(19): siRNA sense strand
gccaugaacucgaaaguga

SEQ ID NO: 1329746 - RNA, 19 nt, Homo sapiens
  misc_RNA (1)...(19): siRNA sense strand
gaaggcgucuacaacaauu

SEQ ID NO: 1329747 - RNA, 19 nt, Homo sapiens
  misc_RNA (1)...(19): siRNA sense strand
ccaguuggcucgagagauu

SEQ ID NO: 1329748 - RNA, 19 nt, Homo sapiens
  misc_RNA (1)...(19): siRNA sense strand
gaggagaacuacgguguga

SEQ ID NO: 1329749 - RNA, 19 nt, Homo sapiens
  misc_RNA (1)...(19): siRNA sense strand
gggcuccacuugugaugua

SEQ ID NO: 1329750 - RNA, 19 nt, Homo sapiens
  misc_RNA (1)...(19): siRNA sense strand
auagcagucuuucuucuua

SEQ ID NO: 1329751 - RNA, 19 nt, Homo sapiens
  misc_RNA (1)...(19): siRNA sense strand
aaagacaaguucaccgauu

SEQ ID NO: 1329752 - RNA, 19 nt, Homo sapiens
  misc_RNA (1)...(19): siRNA sense strand
ucaagacgcuaagcucaaa

SEQ ID NO: 1329753 - RNA, 19 nt, Homo sapiens
  misc_RNA (1)...(19): siRNA sense strand
gaacuacggugugaagacu

SEQ ID NO: 1329754 - RNA, 19 nt, Homo sapiens
  misc_RNA (1)...(19): siRNA sense strand
acuaugaccucgagucuga

SEQ ID NO: 1329755 - RNA, 19 nt, Homo sapiens
  misc_RNA (1)...(19): siRNA sense strand
ggacagagcacaggaaagg

SEQ ID NO: 1329756 - RNA, 19 nt, Homo sapiens
  misc_RNA (1)...(19): siRNA sense strand
caacuaugcuacuaaagac

SEQ ID NO: 1329757 - RNA, 19 nt, Homo sapiens
  misc_RNA (1)...(19): siRNA sense strand
guucaccgauucagccauu

SEQ ID NO: 1329758 - RNA, 19 nt, Homo sapiens
  misc_RNA (1)...(19): siRNA sense strand
gaaauguucaaguucaaug

SEQ ID NO: 1329759 - RNA, 19 nt, Homo sapiens
  misc_RNA (1)...(19): siRNA sense strand
ucaacuaugcuacuaaaga

SEQ ID NO: 1329760 - RNA, 19 nt, Homo sapiens
  misc_RNA (1)...(19): siRNA sense strand
gugaagacuaccuaugaua

SEQ ID NO: 1329761 - RNA, 19 nt, Homo sapiens
  misc_RNA (1)...(19): siRNA sense strand
cuucaacuaugcuacuaaa

SEQ ID NO: 1329762 - RNA, 19 nt, Homo sapiens
  misc_RNA (1)...(19): siRNA sense strand
gcaacagcgacgacuauga

SEQ ID NO: 1329763 - RNA, 19 nt, Homo sapiens
  misc_RNA (1)...(19): siRNA sense strand
uaagccaagugaugucaug

SEQ ID NO: 1329764 - RNA, 19 nt, Homo sapiens
  misc_RNA (1)...(19): siRNA sense strand
gcacugaagaggagaagca

SEQ ID NO: 1329765 - RNA, 19 nt, Homo sapiens
  misc_RNA (1)...(19): siRNA sense strand
uaugauagcagucuuucuu

SEQ ID NO: 1329766 - RNA, 19 nt, Homo sapiens
  misc_RNA (1)...(19): siRNA sense strand
gccaagugaugucaugcuu

SEQ ID NO: 1329767 - RNA, 19 nt, Homo sapiens
  misc_RNA (1)...(19): siRNA sense strand
gugugaagacuaccuauga

SEQ ID NO: 1329768 - RNA, 19 nt, Homo sapiens
  misc_RNA (1)...(19): siRNA sense strand
gacgcuaagcucaaaguuu

SEQ ID NO: 1329769 - RNA, 19 nt, Homo sapiens
  misc_RNA (1)...(19): siRNA sense strand
gauagcagucuuucuucuu

SEQ ID NO: 1329770 - RNA, 19 nt, Homo sapiens
  misc_RNA (1)...(19): siRNA sense strand
cuuguucacuuccgaaaug

SEQ ID NO: 1329771 - RNA, 19 nt, Homo sapiens
  misc_RNA (1)...(19): siRNA sense strand
ggagaacuacggugugaag

SEQ ID NO: 1329772 - RNA, 19 nt, Homo sapiens
  misc_RNA (1)...(19): siRNA sense strand
ccauugccaugaacucgaa

SEQ ID NO: 1329773 - RNA, 19 nt, Homo sapiens
  misc_RNA (1)...(19): siRNA sense strand
gacuucaacuaugcuacua

SEQ ID NO: 1329774 - RNA, 19 nt, Homo sapiens
  misc_RNA (1)...(19): siRNA sense strand
cuuauacggugcccuuaga

SEQ ID NO: 1329775 - RNA, 19 nt, Homo sapiens
  misc_RNA (1)...(19): siRNA sense strand
aagacaaguucaccgauuc

SEQ ID NO: 1329776 - RNA, 19 nt, Homo sapiens
  misc_RNA (1)...(19): siRNA sense strand
cagcaacagcgacgacuau

SEQ ID NO: 1329777 - RNA, 19 nt, Homo sapiens
  misc_RNA (1)...(19): siRNA sense strand
caacagcgacgacuaugac

SEQ ID NO: 1329778 - RNA, 19 nt, Homo sapiens
  misc_RNA (1)...(19): siRNA sense strand
ugucaugcuuguucacuuc

SEQ ID NO: 1329779 - RNA, 19 nt, Homo sapiens
  misc_RNA (1)...(19): siRNA sense strand
agucugacauguccaaugg

SEQ ID NO: 1329780 - RNA, 19 nt, Homo sapiens
  misc_RNA (1)...(19): siRNA sense strand
uagcagucuuucuucuuau

SEQ ID NO: 1329781 - RNA, 19 nt, Homo sapiens
  misc_RNA (1)...(19): siRNA sense strand
uugaaggcgucuacaacaa

SEQ ID NO: 1329782 - RNA, 19 nt, Homo sapiens
  misc_RNA (1)...(19): siRNA sense strand
ggaucgccauggagaacga

SEQ ID NO: 1329783 - RNA, 19 nt, Homo sapiens
  misc_RNA (1)...(19): siRNA sense strand
agcagucuuucuucuuaua

SEQ ID NO: 1329784 - RNA, 19 nt, Homo sapiens
  misc_RNA (1)...(19): siRNA sense strand
guucacuuccgaaauguug

SEQ ID NO: 1329785 - RNA, 19 nt, Homo sapiens
  misc_RNA (1)...(19): siRNA sense strand
gcauuuccuuacagcuguu

SEQ ID NO: 1329786 - RNA, 19 nt, Homo sapiens
  misc_RNA (1)...(19): siRNA sense strand
cuuccgaaauguugacuuc

SEQ ID NO: 1329787 - RNA, 19 nt, Homo sapiens
  misc_RNA (1)...(19): siRNA sense strand
ugaaggcgucuacaacaau

SEQ ID NO: 1329788 - RNA, 19 nt, Homo sapiens
  misc_RNA (1)...(19): siRNA sense strand
ugugaagacuaccuaugau

SEQ ID NO: 1329789 - RNA, 19 nt, Homo sapiens
  misc_RNA (1)...(19): siRNA sense strand
ugauagcagucuuucuucu

SEQ ID NO: 1329790 - RNA, 19 nt, Homo sapiens
  misc_RNA (1)...(19): siRNA sense strand
gugaugucaugcuuguuca

SEQ ID NO: 1329791 - RNA, 19 nt, Homo sapiens
  misc_RNA (1)...(19): siRNA sense strand
aaaaugguaccacuuauga

SEQ ID NO: 1329792 - RNA, 19 nt, Homo sapiens
  misc_RNA (1)...(19): siRNA sense strand
gaaaaggacaacucagaag

SEQ ID NO: 1329793 - RNA, 19 nt, Homo sapiens
  misc_RNA (1)...(19): siRNA sense strand
gggagccgaaggcaucuug

SEQ ID NO: 1329794 - RNA, 19 nt, Homo sapiens
  misc_RNA (1)...(19): siRNA sense strand
gacgaugggcgcacugaag

SEQ ID NO: 1329795 - RNA, 19 nt, Homo sapiens
  misc_RNA (1)...(19): siRNA sense strand
caugaacucgaaagugaau

SEQ ID NO: 1329796 - RNA, 19 nt, Homo sapiens
  misc_RNA (1)...(19): siRNA sense strand
gaccucgagucugacaugu

SEQ ID NO: 1329797 - RNA, 19 nt, Homo sapiens
  misc_RNA (1)...(19): siRNA sense strand
ccacuugugauguaaaggu

SEQ ID NO: 1329798 - RNA, 19 nt, Homo sapiens
  misc_RNA (1)...(19): siRNA sense strand
ggaccccaaugaaauguuc

SEQ ID NO: 1329799 - RNA, 19 nt, Homo sapiens
  misc_RNA (1)...(19): siRNA sense strand
ggugugaagacuaccuaug

SEQ ID NO: 1329800 - RNA, 19 nt, Homo sapiens
  misc_RNA (1)...(19): siRNA sense strand
uauacggugcccuuagaaa

SEQ ID NO: 1329801 - RNA, 19 nt, Homo sapiens
  misc_RNA (1)...(19): siRNA sense strand
gccaugaacucgaaaguga

SEQ ID NO: 1329802 - RNA, 19 nt, Homo sapiens
  misc_RNA (1)...(19): siRNA sense strand
gaaggcgucuacaacaauu

SEQ ID NO: 1329803 - RNA, 19 nt, Homo sapiens
  misc_RNA (1)...(19): siRNA sense strand
ccaguuggcucgagagauu

SEQ ID NO: 1329804 - RNA, 19 nt, Homo sapiens
  misc_RNA (1)...(19): siRNA sense strand
gaggagaacuacgguguga

SEQ ID NO: 1329805 - RNA, 19 nt, Homo sapiens
  misc_RNA (1)...(19): siRNA sense strand
gggcuccacuugugaugua

SEQ ID NO: 1329806 - RNA, 19 nt, Homo sapiens
  misc_RNA (1)...(19): siRNA sense strand
auagcagucuuucuucuua

SEQ ID NO: 1329807 - RNA, 19 nt, Homo sapiens
  misc_RNA (1)...(19): siRNA sense strand
aaagacaaguucaccgauu

SEQ ID NO: 1329808 - RNA, 19 nt, Homo sapiens
  misc_RNA (1)...(19): siRNA sense strand
ucaagacgcuaagcucaaa

SEQ ID NO: 1329809 - RNA, 19 nt, Homo sapiens
  misc_RNA (1)...(19): siRNA sense strand
gaacuacggugugaagacu

SEQ ID NO: 1329810 - RNA, 19 nt, Homo sapiens
  misc_RNA (1)...(19): siRNA sense strand
acuaugaccucgagucuga

SEQ ID NO: 1329811 - RNA, 19 nt, Homo sapiens
  misc_RNA (1)...(19): siRNA sense strand
ggacagagcacaggaaagg

SEQ ID NO: 1329812 - RNA, 19 nt, Homo sapiens
  misc_RNA (1)...(19): siRNA sense strand
caacuaugcuacuaaagac

SEQ ID NO: 1329813 - RNA, 19 nt, Homo sapiens
  misc_RNA (1)...(19): siRNA sense strand
guucaccgauucagccauu

SEQ ID NO: 1329814 - RNA, 19 nt, Homo sapiens
  misc_RNA (1)...(19): siRNA sense strand
gaaauguucaaguucaaug

SEQ ID NO: 1329815 - RNA, 19 nt, Homo sapiens
  misc_RNA (1)...(19): siRNA sense strand
ucaacuaugcuacuaaaga

SEQ ID NO: 1329816 - RNA, 19 nt, Homo sapiens
  misc_RNA (1)...(19): siRNA sense strand
gugaagacuaccuaugaua

SEQ ID NO: 1329817 - RNA, 19 nt, Homo sapiens
  misc_RNA (1)...(19): siRNA sense strand
cuucaacuaugcuacuaaa

SEQ ID NO: 1329818 - RNA, 19 nt, Homo sapiens
  misc_RNA (1)...(19): siRNA sense strand
gcaacagcgacgacuauga

SEQ ID NO: 1329819 - RNA, 19 nt, Homo sapiens
  misc_RNA (1)...(19): siRNA sense strand
uaagccaagugaugucaug

SEQ ID NO: 1329820 - RNA, 19 nt, Homo sapiens
  misc_RNA (1)...(19): siRNA sense strand
gcacugaagaggagaagca

SEQ ID NO: 1329821 - RNA, 19 nt, Homo sapiens
  misc_RNA (1)...(19): siRNA sense strand
uaugauagcagucuuucuu

SEQ ID NO: 1329822 - RNA, 19 nt, Homo sapiens
  misc_RNA (1)...(19): siRNA sense strand
gccaagugaugucaugcuu

SEQ ID NO: 1329823 - RNA, 19 nt, Homo sapiens
  misc_RNA (1)...(19): siRNA sense strand
gugugaagacuaccuauga

SEQ ID NO: 1329824 - RNA, 19 nt, Homo sapiens
  misc_RNA (1)...(19): siRNA sense strand
gacgcuaagcucaaaguuu

SEQ ID NO: 1329825 - RNA, 19 nt, Homo sapiens
  misc_RNA (1)...(19): siRNA sense strand
gauagcagucuuucuucuu

SEQ ID NO: 1329826 - RNA, 19 nt, Homo sapiens
  misc_RNA (1)...(19): siRNA sense strand
cuuguucacuuccgaaaug

SEQ ID NO: 1329827 - RNA, 19 nt, Homo sapiens
  misc_RNA (1)...(19): siRNA sense strand
ggagaacuacggugugaag

SEQ ID NO: 1329828 - RNA, 19 nt, Homo sapiens
  misc_RNA (1)...(19): siRNA sense strand
ccauugccaugaacucgaa

SEQ ID NO: 1329829 - RNA, 19 nt, Homo sapiens
  misc_RNA (1)...(19): siRNA sense strand
gacuucaacuaugcuacua

SEQ ID NO: 1329830 - RNA, 19 nt, Homo sapiens
  misc_RNA (1)...(19): siRNA sense strand
cuuauacggugcccuuaga

SEQ ID NO: 1329831 - RNA, 19 nt, Homo sapiens
  misc_RNA (1)...(19): siRNA sense strand
aagacaaguucaccgauuc

SEQ ID NO: 1329832 - RNA, 19 nt, Homo sapiens
  misc_RNA (1)...(19): siRNA sense strand
cagcaacagcgacgacuau

SEQ ID NO: 1329833 - RNA, 19 nt, Homo sapiens
  misc_RNA (1)...(19): siRNA sense strand
caacagcgacgacuaugac

SEQ ID NO: 1329834 - RNA, 19 nt, Homo sapiens
  misc_RNA (1)...(19): siRNA sense strand
ugucaugcuuguucacuuc

SEQ ID NO: 1329835 - RNA, 19 nt, Homo sapiens
  misc_RNA (1)...(19): siRNA sense strand
agucugacauguccaaugg

SEQ ID NO: 1329836 - RNA, 19 nt, Homo sapiens
  misc_RNA (1)...(19): siRNA sense strand
uagcagucuuucuucuuau

SEQ ID NO: 1329837 - RNA, 19 nt, Homo sapiens
  misc_RNA (1)...(19): siRNA sense strand
uugaaggcgucuacaacaa

SEQ ID NO: 1329838 - RNA, 19 nt, Homo sapiens
  misc_RNA (1)...(19): siRNA sense strand
ggaucgccauggagaacga

SEQ ID NO: 1329839 - RNA, 19 nt, Homo sapiens
  misc_RNA (1)...(19): siRNA sense strand
agcagucuuucuucuuaua

SEQ ID NO: 1329840 - RNA, 19 nt, Homo sapiens
  misc_RNA (1)...(19): siRNA sense strand
guucacuuccgaaauguug

SEQ ID NO: 1329841 - RNA, 19 nt, Homo sapiens
  misc_RNA (1)...(19): siRNA sense strand
gcauuuccuuacagcuguu

SEQ ID NO: 1329842 - RNA, 19 nt, Homo sapiens
  misc_RNA (1)...(19): siRNA sense strand
cuuccgaaauguugacuuc

SEQ ID NO: 1329843 - RNA, 19 nt, Homo sapiens
  misc_RNA (1)...(19): siRNA sense strand
ugaaggcgucuacaacaau

SEQ ID NO: 1329844 - RNA, 19 nt, Homo sapiens
  misc_RNA (1)...(19): siRNA sense strand
ugugaagacuaccuaugau

SEQ ID NO: 1329845 - RNA, 19 nt, Homo sapiens
  misc_RNA (1)...(19): siRNA sense strand
ugauagcagucuuucuucu

SEQ ID NO: 1329846 - RNA, 19 nt, Homo sapiens
  misc_RNA (1)...(19): siRNA sense strand
gugaugucaugcuuguuca

SEQ ID NO: 1329847 - RNA, 19 nt, Homo sapiens
  misc_RNA (1)...(19): siRNA sense strand
aaaaugguaccacuuauga

SEQ ID NO: 1329848 - RNA, 19 nt, Homo sapiens
  misc_RNA (1)...(19): siRNA sense strand
gaaaaggacaacucagaag

SEQ ID NO: 1329849 - RNA, 19 nt, Homo sapiens
  misc_RNA (1)...(19): siRNA sense strand
gggagccgaaggcaucuug

SEQ ID NO: 1329850 - RNA, 19 nt, Homo sapiens
  misc_RNA (1)...(19): siRNA sense strand
gacgaugggcgcacugaag

SEQ ID NO: 1329851 - RNA, 19 nt, Homo sapiens
  misc_RNA (1)...(19): siRNA sense strand
caugaacucgaaagugaau

SEQ ID NO: 1329852 - RNA, 19 nt, Homo sapiens
  misc_RNA (1)...(19): siRNA sense strand
gaccucgagucugacaugu

SEQ ID NO: 1329853 - RNA, 19 nt, Homo sapiens
  misc_RNA (1)...(19): siRNA sense strand
ccacuugugauguaaaggu

SEQ ID NO: 1329854 - RNA, 19 nt, Homo sapiens
  misc_RNA (1)...(19): siRNA sense strand
ggaccccaaugaaauguuc

SEQ ID NO: 1329855 - RNA, 19 nt, Homo sapiens
  misc_RNA (1)...(19): siRNA sense strand
ggugugaagacuaccuaug

SEQ ID NO: 1329856 - RNA, 19 nt, Homo sapiens
  misc_RNA (1)...(19): siRNA sense strand
uauacggugcccuuagaaa

SEQ ID NO: 1329857 - RNA, 19 nt, Homo sapiens
  misc_RNA (1)...(19): siRNA sense strand
gccaugaacucgaaaguga

SEQ ID NO: 1329858 - RNA, 19 nt, Homo sapiens
  misc_RNA (1)...(19): siRNA sense strand
gaaggcgucuacaacaauu

SEQ ID NO: 1329859 - RNA, 19 nt, Homo sapiens
  misc_RNA (1)...(19): siRNA sense strand
ccaguuggcucgagagauu

SEQ ID NO: 1329860 - RNA, 19 nt, Homo sapiens
  misc_RNA (1)...(19): siRNA sense strand
gaggagaacuacgguguga

SEQ ID NO: 1329861 - RNA, 19 nt, Homo sapiens
  misc_RNA (1)...(19): siRNA sense strand
gggcuccacuugugaugua

SEQ ID NO: 1329862 - RNA, 19 nt, Homo sapiens
  misc_RNA (1)...(19): siRNA sense strand
auagcagucuuucuucuua

SEQ ID NO: 1329863 - RNA, 19 nt, Homo sapiens
  misc_RNA (1)...(19): siRNA sense strand
aaagacaaguucaccgauu

SEQ ID NO: 1329864 - RNA, 19 nt, Homo sapiens
  misc_RNA (1)...(19): siRNA sense strand
ucaagacgcuaagcucaaa

SEQ ID NO: 1329865 - RNA, 19 nt, Homo sapiens
  misc_RNA (1)...(19): siRNA sense strand
gaacuacggugugaagacu

SEQ ID NO: 1329866 - RNA, 19 nt, Homo sapiens
  misc_RNA (1)...(19): siRNA sense strand
acuaugaccucgagucuga

SEQ ID NO: 1329867 - RNA, 19 nt, Homo sapiens
  misc_RNA (1)...(19): siRNA sense strand
ggacagagcacaggaaagg

SEQ ID NO: 1329868 - RNA, 19 nt, Homo sapiens
  misc_RNA (1)...(19): siRNA sense strand
caacuaugcuacuaaagac

SEQ ID NO: 1329869 - RNA, 19 nt, Homo sapiens
  misc_RNA (1)...(19): siRNA sense strand
guucaccgauucagccauu

SEQ ID NO: 1329870 - RNA, 19 nt, Homo sapiens
  misc_RNA (1)...(19): siRNA sense strand
gaaauguucaaguucaaug

SEQ ID NO: 1329871 - RNA, 19 nt, Homo sapiens
  misc_RNA (1)...(19): siRNA sense strand
ucaacuaugcuacuaaaga

SEQ ID NO: 1329872 - RNA, 19 nt, Homo sapiens
  misc_RNA (1)...(19): siRNA sense strand
gugaagacuaccuaugaua

SEQ ID NO: 1329873 - RNA, 19 nt, Homo sapiens
  misc_RNA (1)...(19): siRNA sense strand
cuucaacuaugcuacuaaa

SEQ ID NO: 1329874 - RNA, 19 nt, Homo sapiens
  misc_RNA (1)...(19): siRNA sense strand
gcaacagcgacgacuauga

SEQ ID NO: 1329875 - RNA, 19 nt, Homo sapiens
  misc_RNA (1)...(19): siRNA sense strand
uaagccaagugaugucaug

SEQ ID NO: 1329876 - RNA, 19 nt, Homo sapiens
  misc_RNA (1)...(19): siRNA sense strand
gcacugaagaggagaagca

SEQ ID NO: 1329877 - RNA, 19 nt, Homo sapiens
  misc_RNA (1)...(19): siRNA sense strand
uaugauagcagucuuucuu

SEQ ID NO: 1329878 - RNA, 19 nt, Homo sapiens
  misc_RNA (1)...(19): siRNA sense strand
gccaagugaugucaugcuu

SEQ ID NO: 1329879 - RNA, 19 nt, Homo sapiens
  misc_RNA (1)...(19): siRNA sense strand
gugugaagacuaccuauga

SEQ ID NO: 1329880 - RNA, 19 nt, Homo sapiens
  misc_RNA (1)...(19): siRNA sense strand
gacgcuaagcucaaaguuu

SEQ ID NO: 1329881 - RNA, 19 nt, Homo sapiens
  misc_RNA (1)...(19): siRNA sense strand
gauagcagucuuucuucuu

SEQ ID NO: 1329882 - RNA, 19 nt, Homo sapiens
  misc_RNA (1)...(19): siRNA sense strand
cuuguucacuuccgaaaug

SEQ ID NO: 1329883 - RNA, 19 nt, Homo sapiens
  misc_RNA (1)...(19): siRNA sense strand
ggagaacuacggugugaag

SEQ ID NO: 1329884 - RNA, 19 nt, Homo sapiens
  misc_RNA (1)...(19): siRNA sense strand
ccauugccaugaacucgaa

SEQ ID NO: 1329885 - RNA, 19 nt, Homo sapiens
  misc_RNA (1)...(19): siRNA sense strand
gacuucaacuaugcuacua

SEQ ID NO: 1329886 - RNA, 19 nt, Homo sapiens
  misc_RNA (1)...(19): siRNA sense strand
cuuauacggugcccuuaga

SEQ ID NO: 1329887 - RNA, 19 nt, Homo sapiens
  misc_RNA (1)...(19): siRNA sense strand
aagacaaguucaccgauuc

SEQ ID NO: 1329888 - RNA, 19 nt, Homo sapiens
  misc_RNA (1)...(19): siRNA sense strand
cagcaacagcgacgacuau

SEQ ID NO: 1329889 - RNA, 19 nt, Homo sapiens
  misc_RNA (1)...(19): siRNA sense strand
caacagcgacgacuaugac

SEQ ID NO: 1329890 - RNA, 19 nt, Homo sapiens
  misc_RNA (1)...(19): siRNA sense strand
ugucaugcuuguucacuuc

SEQ ID NO: 1329891 - RNA, 19 nt, Homo sapiens
  misc_RNA (1)...(19): siRNA sense strand
agucugacauguccaaugg

SEQ ID NO: 1329892 - RNA, 19 nt, Homo sapiens
  misc_RNA (1)...(19): siRNA sense strand
uagcagucuuucuucuuau

SEQ ID NO: 1329893 - RNA, 19 nt, Homo sapiens
  misc_RNA (1)...(19): siRNA sense strand
uugaaggcgucuacaacaa

SEQ ID NO: 1329894 - RNA, 19 nt, Homo sapiens
  misc_RNA (1)...(19): siRNA sense strand
ggaucgccauggagaacga

SEQ ID NO: 1329895 - RNA, 19 nt, Homo sapiens
  misc_RNA (1)...(19): siRNA sense strand
agcagucuuucuucuuaua

SEQ ID NO: 1329896 - RNA, 19 nt, Homo sapiens
  misc_RNA (1)...(19): siRNA sense strand
guucacuuccgaaauguug

SEQ ID NO: 1329897 - RNA, 19 nt, Homo sapiens
  misc_RNA (1)...(19): siRNA sense strand
gcauuuccuuacagcuguu

SEQ ID NO: 1329898 - RNA, 19 nt, Homo sapiens
  misc_RNA (1)...(19): siRNA sense strand
cuuccgaaauguugacuuc

SEQ ID NO: 1329899 - RNA, 19 nt, Homo sapiens
  misc_RNA (1)...(19): siRNA sense strand
ugaaggcgucuacaacaau

SEQ ID NO: 1329900 - RNA, 19 nt, Homo sapiens
  misc_RNA (1)...(19): siRNA sense strand
ugugaagacuaccuaugau

SEQ ID NO: 1329901 - RNA, 19 nt, Homo sapiens
  misc_RNA (1)...(19): siRNA sense strand
ugauagcagucuuucuucu

SEQ ID NO: 1329902 - RNA, 19 nt, Homo sapiens
  misc_RNA (1)...(19): siRNA sense strand
gugaugucaugcuuguuca

SEQ ID NO: 1329903 - RNA, 19 nt, Homo sapiens
  misc_RNA (1)...(19): siRNA sense strand
aaaaugguaccacuuauga

SEQ ID NO: 1329904 - RNA, 19 nt, Homo sapiens
  misc_RNA (1)...(19): siRNA sense strand
gaaaaggacaacucagaag

SEQ ID NO: 1329905 - RNA, 19 nt, Homo sapiens
  misc_RNA (1)...(19): siRNA sense strand
gggagccgaaggcaucuug

SEQ ID NO: 1329906 - RNA, 19 nt, Homo sapiens
  misc_RNA (1)...(19): siRNA sense strand
gacgaugggcgcacugaag

SEQ ID NO: 1329907 - RNA, 19 nt, Homo sapiens
  misc_RNA (1)...(19): siRNA sense strand
caugaacucgaaagugaau

SEQ ID NO: 1329908 - RNA, 19 nt, Homo sapiens
  misc_RNA (1)...(19): siRNA sense strand
gaccucgagucugacaugu

SEQ ID NO: 1329909 - RNA, 19 nt, Homo sapiens
  misc_RNA (1)...(19): siRNA sense strand
ccacuugugauguaaaggu

SEQ ID NO: 1329910 - RNA, 19 nt, Homo sapiens
  misc_RNA (1)...(19): siRNA sense strand
ggaccccaaugaaauguuc

SEQ ID NO: 1329911 - RNA, 19 nt, Homo sapiens
  misc_RNA (1)...(19): siRNA sense strand
ggugugaagacuaccuaug

SEQ ID NO: 1329912 - RNA, 19 nt, Homo sapiens
  misc_RNA (1)...(19): siRNA sense strand
uauacggugcccuuagaaa

SEQ ID NO: 1329913 - RNA, 19 nt, Homo sapiens
  misc_RNA (1)...(19): siRNA sense strand
gccaugaacucgaaaguga

SEQ ID NO: 1329914 - RNA, 19 nt, Homo sapiens
  misc_RNA (1)...(19): siRNA sense strand
gaaggcgucuacaacaauu

SEQ ID NO: 1329915 - RNA, 19 nt, Homo sapiens
  misc_RNA (1)...(19): siRNA sense strand
ccaguuggcucgagagauu

SEQ ID NO: 1329916 - RNA, 19 nt, Homo sapiens
  misc_RNA (1)...(19): siRNA sense strand
gaggagaacuacgguguga

SEQ ID NO: 1329917 - RNA, 19 nt, Homo sapiens
  misc_RNA (1)...(19): siRNA sense strand
gggcuccacuugugaugua

SEQ ID NO: 1329918 - RNA, 19 nt, Homo sapiens
  misc_RNA (1)...(19): siRNA sense strand
auagcagucuuucuucuua

SEQ ID NO: 1329919 - RNA, 19 nt, Homo sapiens
  misc_RNA (1)...(19): siRNA sense strand
aaagacaaguucaccgauu

SEQ ID NO: 1329920 - RNA, 19 nt, Homo sapiens
  misc_RNA (1)...(19): siRNA sense strand
ucaagacgcuaagcucaaa

SEQ ID NO: 1329921 - RNA, 19 nt, Homo sapiens
  misc_RNA (1)...(19): siRNA sense strand
gaacuacggugugaagacu

SEQ ID NO: 1329922 - RNA, 19 nt, Homo sapiens
  misc_RNA (1)...(19): siRNA sense strand
acuaugaccucgagucuga

SEQ ID NO: 1329923 - RNA, 19 nt, Homo sapiens
  misc_RNA (1)...(19): siRNA sense strand
ggacagagcacaggaaagg

SEQ ID NO: 1329924 - RNA, 19 nt, Homo sapiens
  misc_RNA (1)...(19): siRNA sense strand
caacuaugcuacuaaagac

SEQ ID NO: 1329925 - RNA, 19 nt, Homo sapiens
  misc_RNA (1)...(19): siRNA sense strand
guucaccgauucagccauu

SEQ ID NO: 1329926 - RNA, 19 nt, Homo sapiens
  misc_RNA (1)...(19): siRNA sense strand
gaaauguucaaguucaaug

SEQ ID NO: 1329927 - RNA, 19 nt, Homo sapiens
  misc_RNA (1)...(19): siRNA sense strand
ucaacuaugcuacuaaaga

SEQ ID NO: 1329928 - RNA, 19 nt, Homo sapiens
  misc_RNA (1)...(19): siRNA sense strand
gugaagacuaccuaugaua

SEQ ID NO: 1329929 - RNA, 19 nt, Homo sapiens
  misc_RNA (1)...(19): siRNA sense strand
cuucaacuaugcuacuaaa

SEQ ID NO: 1329930 - RNA, 19 nt, Homo sapiens
  misc_RNA (1)...(19): siRNA sense strand
gcaacagcgacgacuauga

SEQ ID NO: 1329931 - RNA, 19 nt, Homo sapiens
  misc_RNA (1)...(19): siRNA sense strand
uaagccaagugaugucaug

SEQ ID NO: 1329932 - RNA, 19 nt, Homo sapiens
  misc_RNA (1)...(19): siRNA sense strand
gcacugaagaggagaagca

SEQ ID NO: 1329933 - RNA, 19 nt, Homo sapiens
  misc_RNA (1)...(19): siRNA sense strand
uaugauagcagucuuucuu

SEQ ID NO: 1329934 - RNA, 19 nt, Homo sapiens
  misc_RNA (1)...(19): siRNA sense strand
gccaagugaugucaugcuu

SEQ ID NO: 1329935 - RNA, 19 nt, Homo sapiens
  misc_RNA (1)...(19): siRNA sense strand
gugugaagacuaccuauga

SEQ ID NO: 1329936 - RNA, 19 nt, Homo sapiens
  misc_RNA (1)...(19): siRNA sense strand
gacgcuaagcucaaaguuu

SEQ ID NO: 1329937 - RNA, 19 nt, Homo sapiens
  misc_RNA (1)...(19): siRNA sense strand
gauagcagucuuucuucuu

SEQ ID NO: 1329938 - RNA, 19 nt, Homo sapiens
  misc_RNA (1)...(19): siRNA sense strand
cuuguucacuuccgaaaug

SEQ ID NO: 1329939 - RNA, 19 nt, Homo sapiens
  misc_RNA (1)...(19): siRNA sense strand
ggagaacuacggugugaag

SEQ ID NO: 1329940 - RNA, 19 nt, Homo sapiens
  misc_RNA (1)...(19): siRNA sense strand
ccauugccaugaacucgaa

SEQ ID NO: 1329941 - RNA, 19 nt, Homo sapiens
  misc_RNA (1)...(19): siRNA sense strand
gacuucaacuaugcuacua

SEQ ID NO: 1329942 - RNA, 19 nt, Homo sapiens
  misc_RNA (1)...(19): siRNA sense strand
cuuauacggugcccuuaga

SEQ ID NO: 1329943 - RNA, 19 nt, Homo sapiens
  misc_RNA (1)...(19): siRNA sense strand
aagacaaguucaccgauuc

SEQ ID NO: 1329944 - RNA, 19 nt, Homo sapiens
  misc_RNA (1)...(19): siRNA sense strand
cagcaacagcgacgacuau

SEQ ID NO: 1329945 - RNA, 19 nt, Homo sapiens
  misc_RNA (1)...(19): siRNA sense strand
caacagcgacgacuaugac

SEQ ID NO: 1329946 - RNA, 19 nt, Homo sapiens
  misc_RNA (1)...(19): siRNA sense strand
ugucaugcuuguucacuuc

SEQ ID NO: 1329947 - RNA, 19 nt, Homo sapiens
  misc_RNA (1)...(19): siRNA sense strand
agucugacauguccaaugg

SEQ ID NO: 1329948 - RNA, 19 nt, Homo sapiens
  misc_RNA (1)...(19): siRNA sense strand
uagcagucuuucuucuuau

SEQ ID NO: 1329949 - RNA, 19 nt, Homo sapiens
  misc_RNA (1)...(19): siRNA sense strand
uugaaggcgucuacaacaa

SEQ ID NO: 1329950 - RNA, 19 nt, Homo sapiens
  misc_RNA (1)...(19): siRNA sense strand
ggaucgccauggagaacga

SEQ ID NO: 1329951 - RNA, 19 nt, Homo sapiens
  misc_RNA (1)...(19): siRNA sense strand
agcagucuuucuucuuaua

SEQ ID NO: 1329952 - RNA, 19 nt, Homo sapiens
  misc_RNA (1)...(19): siRNA sense strand
guucacuuccgaaauguug

SEQ ID NO: 1329953 - RNA, 19 nt, Homo sapiens
  misc_RNA (1)...(19): siRNA sense strand
gcauuuccuuacagcuguu

SEQ ID NO: 1329954 - RNA, 19 nt, Homo sapiens
  misc_RNA (1)...(19): siRNA sense strand
cuuccgaaauguugacuuc

SEQ ID NO: 1329955 - RNA, 19 nt, Homo sapiens
  misc_RNA (1)...(19): siRNA sense strand
ugaaggcgucuacaacaau

SEQ ID NO: 1329956 - RNA, 19 nt, Homo sapiens
  misc_RNA (1)...(19): siRNA sense strand
ugugaagacuaccuaugau

SEQ ID NO: 1329957 - RNA, 19 nt, Homo sapiens
  misc_RNA (1)...(19): siRNA sense strand
ugauagcagucuuucuucu

SEQ ID NO: 1329958 - RNA, 19 nt, Homo sapiens
  misc_RNA (1)...(19): siRNA sense strand
gugaugucaugcuuguuca

SEQ ID NO: 1329959 - RNA, 19 nt, Homo sapiens
  misc_RNA (1)...(19): siRNA sense strand
aaaaugguaccacuuauga

SEQ ID NO: 1329960 - RNA, 19 nt, Homo sapiens
  misc_RNA (1)...(19): siRNA sense strand
gaaaaggacaacucagaag

SEQ ID NO: 1329961 - RNA, 19 nt, Homo sapiens
  misc_RNA (1)...(19): siRNA sense strand
gggagccgaaggcaucuug

SEQ ID NO: 1329962 - RNA, 19 nt, Homo sapiens
  misc_RNA (1)...(19): siRNA sense strand
gacgaugggcgcacugaag

SEQ ID NO: 1329963 - RNA, 19 nt, Homo sapiens
  misc_RNA (1)...(19): siRNA sense strand
caugaacucgaaagugaau

SEQ ID NO: 1329964 - RNA, 19 nt, Homo sapiens
  misc_RNA (1)...(19): siRNA sense strand
gaccucgagucugacaugu

SEQ ID NO: 1329965 - RNA, 19 nt, Homo sapiens
  misc_RNA (1)...(19): siRNA sense strand
ccacuugugauguaaaggu

SEQ ID NO: 1329966 - RNA, 19 nt, Homo sapiens
  misc_RNA (1)...(19): siRNA sense strand
ggaccccaaugaaauguuc

SEQ ID NO: 1329967 - RNA, 19 nt, Homo sapiens
  misc_RNA (1)...(19): siRNA sense strand
ggugugaagacuaccuaug

SEQ ID NO: 1329968 - RNA, 19 nt, Homo sapiens
  misc_RNA (1)...(19): siRNA sense strand
uauacggugcccuuagaaa

SEQ ID NO: 1329969 - RNA, 19 nt, Homo sapiens
  misc_RNA (1)...(19): siRNA sense strand
gccaugaacucgaaaguga

SEQ ID NO: 1329970 - RNA, 19 nt, Homo sapiens
  misc_RNA (1)...(19): siRNA sense strand
gaaggcgucuacaacaauu

SEQ ID NO: 1329971 - RNA, 19 nt, Homo sapiens
  misc_RNA (1)...(19): siRNA sense strand
ccaguuggcucgagagauu

SEQ ID NO: 1329972 - RNA, 19 nt, Homo sapiens
  misc_RNA (1)...(19): siRNA sense strand
gaggagaacuacgguguga

SEQ ID NO: 1329973 - RNA, 19 nt, Homo sapiens
  misc_RNA (1)...(19): siRNA sense strand
gggcuccacuugugaugua

SEQ ID NO: 1329974 - RNA, 19 nt, Homo sapiens
  misc_RNA (1)...(19): siRNA sense strand
gacggaagaucuuuuauuu

SEQ ID NO: 1329975 - RNA, 19 nt, Homo sapiens
  misc_RNA (1)...(19): siRNA sense strand
auagcagucuuucuucuua

SEQ ID NO: 1329976 - RNA, 19 nt, Homo sapiens
  misc_RNA (1)...(19): siRNA sense strand
aaagacaaguucaccgauu

SEQ ID NO: 1329977 - RNA, 19 nt, Homo sapiens
  misc_RNA (1)...(19): siRNA sense strand
ucaagacgcuaagcucaaa

SEQ ID NO: 1329978 - RNA, 19 nt, Homo sapiens
  misc_RNA (1)...(19): siRNA sense strand
gaacuacggugugaagacu

SEQ ID NO: 1329979 - RNA, 19 nt, Homo sapiens
  misc_RNA (1)...(19): siRNA sense strand
acuaugaccucgagucuga

SEQ ID NO: 1329980 - RNA, 19 nt, Homo sapiens
  misc_RNA (1)...(19): siRNA sense strand
caacuaugcuacuaaagac

SEQ ID NO: 1329981 - RNA, 19 nt, Homo sapiens
  misc_RNA (1)...(19): siRNA sense strand
ggacagagcacaggaaagg

SEQ ID NO: 1329982 - RNA, 19 nt, Homo sapiens
  misc_RNA (1)...(19): siRNA sense strand
guucaccgauucagccauu

SEQ ID NO: 1329983 - RNA, 19 nt, Homo sapiens
  misc_RNA (1)...(19): siRNA sense strand
gaaauguucaaguucaaug

SEQ ID NO: 1329984 - RNA, 19 nt, Homo sapiens
  misc_RNA (1)...(19): siRNA sense strand
ucaacuaugcuacuaaaga

SEQ ID NO: 1329985 - RNA, 19 nt, Homo sapiens
  misc_RNA (1)...(19): siRNA sense strand
gugaagacuaccuaugaua

SEQ ID NO: 1329986 - RNA, 19 nt, Homo sapiens
  misc_RNA (1)...(19): siRNA sense strand
cggaagaucuuuuauuuuc

SEQ ID NO: 1329987 - RNA, 19 nt, Homo sapiens
  misc_RNA (1)...(19): siRNA sense strand
cuucaacuaugcuacuaaa

SEQ ID NO: 1329988 - RNA, 19 nt, Homo sapiens
  misc_RNA (1)...(19): siRNA sense strand
gcaacagcgacgacuauga

SEQ ID NO: 1329989 - RNA, 19 nt, Homo sapiens
  misc_RNA (1)...(19): siRNA sense strand
uaagccaagugaugucaug

SEQ ID NO: 1329990 - RNA, 19 nt, Homo sapiens
  misc_RNA (1)...(19): siRNA sense strand
gcacugaagaggagaagca

SEQ ID NO: 1329991 - RNA, 19 nt, Homo sapiens
  misc_RNA (1)...(19): siRNA sense strand
uaugauagcagucuuucuu

SEQ ID NO: 1329992 - RNA, 19 nt, Homo sapiens
  misc_RNA (1)...(19): siRNA sense strand
gccaagugaugucaugcuu

SEQ ID NO: 1329993 - RNA, 19 nt, Homo sapiens
  misc_RNA (1)...(19): siRNA sense strand
gugugaagacuaccuauga

SEQ ID NO: 1329994 - RNA, 19 nt, Homo sapiens
  misc_RNA (1)...(19): siRNA sense strand
gacgcuaagcucaaaguuu

SEQ ID NO: 1329995 - RNA, 19 nt, Homo sapiens
  misc_RNA (1)...(19): siRNA sense strand
gauagcagucuuucuucuu

SEQ ID NO: 1329996 - RNA, 19 nt, Homo sapiens
  misc_RNA (1)...(19): siRNA sense strand
cuuguucacuuccgaaaug

SEQ ID NO: 1329997 - RNA, 19 nt, Homo sapiens
  misc_RNA (1)...(19): siRNA sense strand
ggagaacuacggugugaag

SEQ ID NO: 1329998 - RNA, 19 nt, Homo sapiens
  misc_RNA (1)...(19): siRNA sense strand
ccauugccaugaacucgaa

SEQ ID NO: 1329999 - RNA, 19 nt, Homo sapiens
  misc_RNA (1)...(19): siRNA sense strand
ggagacggaagaucuuuua

SEQ ID NO: 1330000 - RNA, 19 nt, Homo sapiens
  misc_RNA (1)...(19): siRNA sense strand
gacuucaacuaugcuacua

SEQ ID NO: 1330001 - RNA, 19 nt, Homo sapiens
  misc_RNA (1)...(19): siRNA sense strand
cuuauacggugcccuuaga

SEQ ID NO: 1330002 - RNA, 19 nt, Homo sapiens
  misc_RNA (1)...(19): siRNA sense strand
aagacaaguucaccgauuc

SEQ ID NO: 1330003 - RNA, 19 nt, Homo sapiens
  misc_RNA (1)...(19): siRNA sense strand
cagcaacagcgacgacuau

SEQ ID NO: 1330004 - RNA, 19 nt, Homo sapiens
  misc_RNA (1)...(19): siRNA sense strand
cccauccucucaucuauuc

SEQ ID NO: 1330005 - RNA, 19 nt, Homo sapiens
  misc_RNA (1)...(19): siRNA sense strand
caacagcgacgacuaugac

SEQ ID NO: 1330006 - RNA, 19 nt, Homo sapiens
  misc_RNA (1)...(19): siRNA sense strand
ugucaugcuuguucacuuc

SEQ ID NO: 1330007 - RNA, 19 nt, Homo sapiens
  misc_RNA (1)...(19): siRNA sense strand
agucugacauguccaaugg

SEQ ID NO: 1330008 - RNA, 19 nt, Homo sapiens
  misc_RNA (1)...(19): siRNA sense strand
uugaaggcgucuacaacaa

SEQ ID NO: 1330009 - RNA, 19 nt, Homo sapiens
  misc_RNA (1)...(19): siRNA sense strand
ggaucgccauggagaacga

SEQ ID NO: 1330010 - RNA, 19 nt, Homo sapiens
  misc_RNA (1)...(19): siRNA sense strand
agcagucuuucuucuuaua

SEQ ID NO: 1330011 - RNA, 19 nt, Homo sapiens
  misc_RNA (1)...(19): siRNA sense strand
uagcagucuuucuucuuau

SEQ ID NO: 1330012 - RNA, 19 nt, Homo sapiens
  misc_RNA (1)...(19): siRNA sense strand
guucacuuccgaaauguug

SEQ ID NO: 1330013 - RNA, 19 nt, Homo sapiens
  misc_RNA (1)...(19): siRNA sense strand
gcauuuccuuacagcuguu

SEQ ID NO: 1330014 - RNA, 19 nt, Homo sapiens
  misc_RNA (1)...(19): siRNA sense strand
cuuccgaaauguugacuuc

SEQ ID NO: 1330015 - RNA, 19 nt, Homo sapiens
  misc_RNA (1)...(19): siRNA sense strand
ugaaggcgucuacaacaau

SEQ ID NO: 1330016 - RNA, 19 nt, Homo sapiens
  misc_RNA (1)...(19): siRNA sense strand
ugugaagacuaccuaugau

SEQ ID NO: 1330017 - RNA, 19 nt, Homo sapiens
  misc_RNA (1)...(19): siRNA sense strand
ugauagcagucuuucuucu

SEQ ID NO: 1330018 - RNA, 19 nt, Homo sapiens
  misc_RNA (1)...(19): siRNA sense strand
gugaugucaugcuuguuca

SEQ ID NO: 1330019 - RNA, 19 nt, Homo sapiens
  misc_RNA (1)...(19): siRNA sense strand
aaaaugguaccacuuauga

SEQ ID NO: 1330020 - RNA, 19 nt, Homo sapiens
  misc_RNA (1)...(19): siRNA sense strand
gaaaaggacaacucagaag

SEQ ID NO: 1330021 - RNA, 19 nt, Homo sapiens
  misc_RNA (1)...(19): siRNA sense strand
caugaacucgaaagugaau

SEQ ID NO: 1330022 - RNA, 19 nt, Homo sapiens
  misc_RNA (1)...(19): siRNA sense strand
gacgaugggcgcacugaag

SEQ ID NO: 1330023 - RNA, 19 nt, Homo sapiens
  misc_RNA (1)...(19): siRNA sense strand
gggagccgaaggcaucuug

SEQ ID NO: 1330024 - RNA, 19 nt, Homo sapiens
  misc_RNA (1)...(19): siRNA sense strand
ccacuugugauguaaaggu

SEQ ID NO: 1330025 - RNA, 19 nt, Homo sapiens
  misc_RNA (1)...(19): siRNA sense strand
ggaccccaaugaaauguuc

SEQ ID NO: 1330026 - RNA, 19 nt, Homo sapiens
  misc_RNA (1)...(19): siRNA sense strand
gaccucgagucugacaugu

SEQ ID NO: 1330027 - RNA, 19 nt, Homo sapiens
  misc_RNA (1)...(19): siRNA sense strand
ggugugaagacuaccuaug

SEQ ID NO: 1330028 - RNA, 19 nt, Homo sapiens
  misc_RNA (1)...(19): siRNA sense strand
ccucccauccucucaucua

SEQ ID NO: 1330029 - RNA, 19 nt, Homo sapiens
  misc_RNA (1)...(19): siRNA sense strand
uauacggugcccuuagaaa

SEQ ID NO: 1330030 - RNA, 19 nt, Homo sapiens
  misc_RNA (1)...(19): siRNA sense strand
gccaugaacucgaaaguga

SEQ ID NO: 1330031 - RNA, 19 nt, Homo sapiens
  misc_RNA (1)...(19): siRNA sense strand
gaaggcgucuacaacaauu

SEQ ID NO: 1330032 - RNA, 19 nt, Homo sapiens
  misc_RNA (1)...(19): siRNA sense strand
ccaguuggcucgagagauu

SEQ ID NO: 1330033 - RNA, 19 nt, Homo sapiens
  misc_RNA (1)...(19): siRNA sense strand
gaggagaacuacgguguga

SEQ ID NO: 1330034 - RNA, 19 nt, Homo sapiens
  misc_RNA (1)...(19): siRNA sense strand
gggcuccacuugugaugua

SEQ ID NO: 1330035 - RNA, 19 nt, Homo sapiens
  misc_RNA (1)...(19): siRNA sense strand
auagcagucuuucuucuua

SEQ ID NO: 1330036 - RNA, 19 nt, Homo sapiens
  misc_RNA (1)...(19): siRNA sense strand
aaagacaaguucaccgauu

SEQ ID NO: 1330037 - RNA, 19 nt, Homo sapiens
  misc_RNA (1)...(19): siRNA sense strand
ucaagacgcuaagcucaaa

SEQ ID NO: 1330038 - RNA, 19 nt, Homo sapiens
  misc_RNA (1)...(19): siRNA sense strand
gaacuacggugugaagacu

SEQ ID NO: 1330039 - RNA, 19 nt, Homo sapiens
  misc_RNA (1)...(19): siRNA sense strand
acuaugaccucgagucuga

SEQ ID NO: 1330040 - RNA, 19 nt, Homo sapiens
  misc_RNA (1)...(19): siRNA sense strand
ggacagagcacaggaaagg

SEQ ID NO: 1330041 - RNA, 19 nt, Homo sapiens
  misc_RNA (1)...(19): siRNA sense strand
caacuaugcuacuaaagac

SEQ ID NO: 1330042 - RNA, 19 nt, Homo sapiens
  misc_RNA (1)...(19): siRNA sense strand
guucaccgauucagccauu

SEQ ID NO: 1330043 - RNA, 19 nt, Homo sapiens
  misc_RNA (1)...(19): siRNA sense strand
gaaauguucaaguucaaug

SEQ ID NO: 1330044 - RNA, 19 nt, Homo sapiens
  misc_RNA (1)...(19): siRNA sense strand
ucaacuaugcuacuaaaga

SEQ ID NO: 1330045 - RNA, 19 nt, Homo sapiens
  misc_RNA (1)...(19): siRNA sense strand
gugaagacuaccuaugaua

SEQ ID NO: 1330046 - RNA, 19 nt, Homo sapiens
  misc_RNA (1)...(19): siRNA sense strand
cuucaacuaugcuacuaaa

SEQ ID NO: 1330047 - RNA, 19 nt, Homo sapiens
  misc_RNA (1)...(19): siRNA sense strand
gcaacagcgacgacuauga

SEQ ID NO: 1330048 - RNA, 19 nt, Homo sapiens
  misc_RNA (1)...(19): siRNA sense strand
uaagccaagugaugucaug

SEQ ID NO: 1330049 - RNA, 19 nt, Homo sapiens
  misc_RNA (1)...(19): siRNA sense strand
gcacugaagaggagaagca

SEQ ID NO: 1330050 - RNA, 19 nt, Homo sapiens
  misc_RNA (1)...(19): siRNA sense strand
uaugauagcagucuuucuu

SEQ ID NO: 1330051 - RNA, 19 nt, Homo sapiens
  misc_RNA (1)...(19): siRNA sense strand
gccaagugaugucaugcuu

SEQ ID NO: 1330052 - RNA, 19 nt, Homo sapiens
  misc_RNA (1)...(19): siRNA sense strand
gugugaagacuaccuauga

SEQ ID NO: 1330053 - RNA, 19 nt, Homo sapiens
  misc_RNA (1)...(19): siRNA sense strand
gacgcuaagcucaaaguuu

SEQ ID NO: 1330054 - RNA, 19 nt, Homo sapiens
  misc_RNA (1)...(19): siRNA sense strand
gauagcagucuuucuucuu

SEQ ID NO: 1330055 - RNA, 19 nt, Homo sapiens
  misc_RNA (1)...(19): siRNA sense strand
cuuguucacuuccgaaaug

SEQ ID NO: 1330056 - RNA, 19 nt, Homo sapiens
  misc_RNA (1)...(19): siRNA sense strand
ggagaacuacggugugaag

SEQ ID NO: 1330057 - RNA, 19 nt, Homo sapiens
  misc_RNA (1)...(19): siRNA sense strand
ccauugccaugaacucgaa

SEQ ID NO: 1330058 - RNA, 19 nt, Homo sapiens
  misc_RNA (1)...(19): siRNA sense strand
gacuucaacuaugcuacua

SEQ ID NO: 1330059 - RNA, 19 nt, Homo sapiens
  misc_RNA (1)...(19): siRNA sense strand
cuuauacggugcccuuaga

SEQ ID NO: 1330060 - RNA, 19 nt, Homo sapiens
  misc_RNA (1)...(19): siRNA sense strand
aagacaaguucaccgauuc

SEQ ID NO: 1330061 - RNA, 19 nt, Homo sapiens
  misc_RNA (1)...(19): siRNA sense strand
cagcaacagcgacgacuau

SEQ ID NO: 1330062 - RNA, 19 nt, Homo sapiens
  misc_RNA (1)...(19): siRNA sense strand
caacagcgacgacuaugac

SEQ ID NO: 1330063 - RNA, 19 nt, Homo sapiens
  misc_RNA (1)...(19): siRNA sense strand
ugucaugcuuguucacuuc

SEQ ID NO: 1330064 - RNA, 19 nt, Homo sapiens
  misc_RNA (1)...(19): siRNA sense strand
agucugacauguccaaugg

SEQ ID NO: 1330065 - RNA, 19 nt, Homo sapiens
  misc_RNA (1)...(19): siRNA sense strand
uagcagucuuucuucuuau

SEQ ID NO: 1330066 - RNA, 19 nt, Homo sapiens
  misc_RNA (1)...(19): siRNA sense strand
uugaaggcgucuacaacaa

SEQ ID NO: 1330067 - RNA, 19 nt, Homo sapiens
  misc_RNA (1)...(19): siRNA sense strand
ggaucgccauggagaacga

SEQ ID NO: 1330068 - RNA, 19 nt, Homo sapiens
  misc_RNA (1)...(19): siRNA sense strand
agcagucuuucuucuuaua

SEQ ID NO: 1330069 - RNA, 19 nt, Homo sapiens
  misc_RNA (1)...(19): siRNA sense strand
guucacuuccgaaauguug

SEQ ID NO: 1330070 - RNA, 19 nt, Homo sapiens
  misc_RNA (1)...(19): siRNA sense strand
gcauuuccuuacagcuguu

SEQ ID NO: 1330071 - RNA, 19 nt, Homo sapiens
  misc_RNA (1)...(19): siRNA sense strand
cuuccgaaauguugacuuc

SEQ ID NO: 1330072 - RNA, 19 nt, Homo sapiens
  misc_RNA (1)...(19): siRNA sense strand
ugaaggcgucuacaacaau

SEQ ID NO: 1330073 - RNA, 19 nt, Homo sapiens
  misc_RNA (1)...(19): siRNA sense strand
ugugaagacuaccuaugau

SEQ ID NO: 1330074 - RNA, 19 nt, Homo sapiens
  misc_RNA (1)...(19): siRNA sense strand
ugauagcagucuuucuucu

SEQ ID NO: 1330075 - RNA, 19 nt, Homo sapiens
  misc_RNA (1)...(19): siRNA sense strand
gugaugucaugcuuguuca

SEQ ID NO: 1330076 - RNA, 19 nt, Homo sapiens
  misc_RNA (1)...(19): siRNA sense strand
aaaaugguaccacuuauga

SEQ ID NO: 1330077 - RNA, 19 nt, Homo sapiens
  misc_RNA (1)...(19): siRNA sense strand
gaaaaggacaacucagaag

SEQ ID NO: 1330078 - RNA, 19 nt, Homo sapiens
  misc_RNA (1)...(19): siRNA sense strand
gggagccgaaggcaucuug

SEQ ID NO: 1330079 - RNA, 19 nt, Homo sapiens
  misc_RNA (1)...(19): siRNA sense strand
gacgaugggcgcacugaag

SEQ ID NO: 1330080 - RNA, 19 nt, Homo sapiens
  misc_RNA (1)...(19): siRNA sense strand
caugaacucgaaagugaau

SEQ ID NO: 1330081 - RNA, 19 nt, Homo sapiens
  misc_RNA (1)...(19): siRNA sense strand
gaccucgagucugacaugu

SEQ ID NO: 1330082 - RNA, 19 nt, Homo sapiens
  misc_RNA (1)...(19): siRNA sense strand
ccacuugugauguaaaggu

SEQ ID NO: 1330083 - RNA, 19 nt, Homo sapiens
  misc_RNA (1)...(19): siRNA sense strand
ggaccccaaugaaauguuc

SEQ ID NO: 1330084 - RNA, 19 nt, Homo sapiens
  misc_RNA (1)...(19): siRNA sense strand
ggugugaagacuaccuaug

SEQ ID NO: 1330085 - RNA, 19 nt, Homo sapiens
  misc_RNA (1)...(19): siRNA sense strand
uauacggugcccuuagaaa

SEQ ID NO: 1330086 - RNA, 19 nt, Homo sapiens
  misc_RNA (1)...(19): siRNA sense strand
gccaugaacucgaaaguga

SEQ ID NO: 1330087 - RNA, 19 nt, Homo sapiens
  misc_RNA (1)...(19): siRNA sense strand
gaaggcgucuacaacaauu

SEQ ID NO: 1330088 - RNA, 19 nt, Homo sapiens
  misc_RNA (1)...(19): siRNA sense strand
ccaguuggcucgagagauu

SEQ ID NO: 1330089 - RNA, 19 nt, Homo sapiens
  misc_RNA (1)...(19): siRNA sense strand
gaggagaacuacgguguga

SEQ ID NO: 1330090 - RNA, 19 nt, Homo sapiens
  misc_RNA (1)...(19): siRNA sense strand
gggcuccacuugugaugua

SEQ ID NO: 1330091 - RNA, 19 nt, Homo sapiens
  misc_RNA (1)...(19): siRNA sense strand
auagcagucuuucuucuua

SEQ ID NO: 1330092 - RNA, 19 nt, Homo sapiens
  misc_RNA (1)...(19): siRNA sense strand
aaagacaaguucaccgauu

SEQ ID NO: 1330093 - RNA, 19 nt, Homo sapiens
  misc_RNA (1)...(19): siRNA sense strand
ucaagacgcuaagcucaaa

SEQ ID NO: 1330094 - RNA, 19 nt, Homo sapiens
  misc_RNA (1)...(19): siRNA sense strand
gaacuacggugugaagacu

SEQ ID NO: 1330095 - RNA, 19 nt, Homo sapiens
  misc_RNA (1)...(19): siRNA sense strand
acuaugaccucgagucuga

SEQ ID NO: 1330096 - RNA, 19 nt, Homo sapiens
  misc_RNA (1)...(19): siRNA sense strand
ggacagagcacaggaaagg

SEQ ID NO: 1330097 - RNA, 19 nt, Homo sapiens
  misc_RNA (1)...(19): siRNA sense strand
caacuaugcuacuaaagac

SEQ ID NO: 1330098 - RNA, 19 nt, Homo sapiens
  misc_RNA (1)...(19): siRNA sense strand
guucaccgauucagccauu

SEQ ID NO: 1330099 - RNA, 19 nt, Homo sapiens
  misc_RNA (1)...(19): siRNA sense strand
gaaauguucaaguucaaug

SEQ ID NO: 1330100 - RNA, 19 nt, Homo sapiens
  misc_RNA (1)...(19): siRNA sense strand
ucaacuaugcuacuaaaga

SEQ ID NO: 1330101 - RNA, 19 nt, Homo sapiens
  misc_RNA (1)...(19): siRNA sense strand
gugaagacuaccuaugaua

SEQ ID NO: 1330102 - RNA, 19 nt, Homo sapiens
  misc_RNA (1)...(19): siRNA sense strand
cuucaacuaugcuacuaaa

SEQ ID NO: 1330103 - RNA, 19 nt, Homo sapiens
  misc_RNA (1)...(19): siRNA sense strand
gcaacagcgacgacuauga

SEQ ID NO: 1330104 - RNA, 19 nt, Homo sapiens
  misc_RNA (1)...(19): siRNA sense strand
uaagccaagugaugucaug

SEQ ID NO: 1330105 - RNA, 19 nt, Homo sapiens
  misc_RNA (1)...(19): siRNA sense strand
gcacugaagaggagaagca

SEQ ID NO: 1330106 - RNA, 19 nt, Homo sapiens
  misc_RNA (1)...(19): siRNA sense strand
uaugauagcagucuuucuu

SEQ ID NO: 1330107 - RNA, 19 nt, Homo sapiens
  misc_RNA (1)...(19): siRNA sense strand
gccaagugaugucaugcuu

SEQ ID NO: 1330108 - RNA, 19 nt, Homo sapiens
  misc_RNA (1)...(19): siRNA sense strand
gugugaagacuaccuauga

SEQ ID NO: 1330109 - RNA, 19 nt, Homo sapiens
  misc_RNA (1)...(19): siRNA sense strand
gacgcuaagcucaaaguuu

SEQ ID NO: 1330110 - RNA, 19 nt, Homo sapiens
  misc_RNA (1)...(19): siRNA sense strand
gauagcagucuuucuucuu

SEQ ID NO: 1330111 - RNA, 19 nt, Homo sapiens
  misc_RNA (1)...(19): siRNA sense strand
cuuguucacuuccgaaaug

SEQ ID NO: 1330112 - RNA, 19 nt, Homo sapiens
  misc_RNA (1)...(19): siRNA sense strand
ggagaacuacggugugaag

SEQ ID NO: 1330113 - RNA, 19 nt, Homo sapiens
  misc_RNA (1)...(19): siRNA sense strand
ccauugccaugaacucgaa

SEQ ID NO: 1330114 - RNA, 19 nt, Homo sapiens
  misc_RNA (1)...(19): siRNA sense strand
gacuucaacuaugcuacua

SEQ ID NO: 1330115 - RNA, 19 nt, Homo sapiens
  misc_RNA (1)...(19): siRNA sense strand
cuuauacggugcccuuaga

SEQ ID NO: 1330116 - RNA, 19 nt, Homo sapiens
  misc_RNA (1)...(19): siRNA sense strand
aagacaaguucaccgauuc

SEQ ID NO: 1330117 - RNA, 19 nt, Homo sapiens
  misc_RNA (1)...(19): siRNA sense strand
cagcaacagcgacgacuau

SEQ ID NO: 1330118 - RNA, 19 nt, Homo sapiens
  misc_RNA (1)...(19): siRNA sense strand
caacagcgacgacuaugac

SEQ ID NO: 1330119 - RNA, 19 nt, Homo sapiens
  misc_RNA (1)...(19): siRNA sense strand
ugucaugcuuguucacuuc

SEQ ID NO: 1330120 - RNA, 19 nt, Homo sapiens
  misc_RNA (1)...(19): siRNA sense strand
agucugacauguccaaugg

SEQ ID NO: 1330121 - RNA, 19 nt, Homo sapiens
  misc_RNA (1)...(19): siRNA sense strand
uagcagucuuucuucuuau

SEQ ID NO: 1330122 - RNA, 19 nt, Homo sapiens
  misc_RNA (1)...(19): siRNA sense strand
uugaaggcgucuacaacaa

SEQ ID NO: 1330123 - RNA, 19 nt, Homo sapiens
  misc_RNA (1)...(19): siRNA sense strand
ggaucgccauggagaacga

SEQ ID NO: 1330124 - RNA, 19 nt, Homo sapiens
  misc_RNA (1)...(19): siRNA sense strand
agcagucuuucuucuuaua

SEQ ID NO: 1330125 - RNA, 19 nt, Homo sapiens
  misc_RNA (1)...(19): siRNA sense strand
guucacuuccgaaauguug

SEQ ID NO: 1330126 - RNA, 19 nt, Homo sapiens
  misc_RNA (1)...(19): siRNA sense strand
gcauuuccuuacagcuguu

SEQ ID NO: 1330127 - RNA, 19 nt, Homo sapiens
  misc_RNA (1)...(19): siRNA sense strand
cuuccgaaauguugacuuc

SEQ ID NO: 1330128 - RNA, 19 nt, Homo sapiens
  misc_RNA (1)...(19): siRNA sense strand
ugaaggcgucuacaacaau

SEQ ID NO: 1330129 - RNA, 19 nt, Homo sapiens
  misc_RNA (1)...(19): siRNA sense strand
ugugaagacuaccuaugau

SEQ ID NO: 1330130 - RNA, 19 nt, Homo sapiens
  misc_RNA (1)...(19): siRNA sense strand
ugauagcagucuuucuucu

SEQ ID NO: 1330131 - RNA, 19 nt, Homo sapiens
  misc_RNA (1)...(19): siRNA sense strand
gugaugucaugcuuguuca

SEQ ID NO: 1330132 - RNA, 19 nt, Homo sapiens
  misc_RNA (1)...(19): siRNA sense strand
aaaaugguaccacuuauga

SEQ ID NO: 1330133 - RNA, 19 nt, Homo sapiens
  misc_RNA (1)...(19): siRNA sense strand
gaaaaggacaacucagaag

SEQ ID NO: 1330134 - RNA, 19 nt, Homo sapiens
  misc_RNA (1)...(19): siRNA sense strand
gggagccgaaggcaucuug

SEQ ID NO: 1330135 - RNA, 19 nt, Homo sapiens
  misc_RNA (1)...(19): siRNA sense strand
gacgaugggcgcacugaag

SEQ ID NO: 1330136 - RNA, 19 nt, Homo sapiens
  misc_RNA (1)...(19): siRNA sense strand
caugaacucgaaagugaau

SEQ ID NO: 1330137 - RNA, 19 nt, Homo sapiens
  misc_RNA (1)...(19): siRNA sense strand
gaccucgagucugacaugu

SEQ ID NO: 1330138 - RNA, 19 nt, Homo sapiens
  misc_RNA (1)...(19): siRNA sense strand
ccacuugugauguaaaggu

SEQ ID NO: 1330139 - RNA, 19 nt, Homo sapiens
  misc_RNA (1)...(19): siRNA sense strand
ggaccccaaugaaauguuc

SEQ ID NO: 1330140 - RNA, 19 nt, Homo sapiens
  misc_RNA (1)...(19): siRNA sense strand
ggugugaagacuaccuaug

SEQ ID NO: 1330141 - RNA, 19 nt, Homo sapiens
  misc_RNA (1)...(19): siRNA sense strand
uauacggugcccuuagaaa

SEQ ID NO: 1330142 - RNA, 19 nt, Homo sapiens
  misc_RNA (1)...(19): siRNA sense strand
gccaugaacucgaaaguga

SEQ ID NO: 1330143 - RNA, 19 nt, Homo sapiens
  misc_RNA (1)...(19): siRNA sense strand
gaaggcgucuacaacaauu

SEQ ID NO: 1330144 - RNA, 19 nt, Homo sapiens
  misc_RNA (1)...(19): siRNA sense strand
ccaguuggcucgagagauu

SEQ ID NO: 1330145 - RNA, 19 nt, Homo sapiens
  misc_RNA (1)...(19): siRNA sense strand
gaggagaacuacgguguga

SEQ ID NO: 1330146 - RNA, 19 nt, Homo sapiens
  misc_RNA (1)...(19): siRNA sense strand
gggcuccacuugugaugua

SEQ ID NO: 1330147 - RNA, 19 nt, Homo sapiens
  misc_RNA (1)...(19): siRNA sense strand
auagcagucuuucuucuua

SEQ ID NO: 1330148 - RNA, 19 nt, Homo sapiens
  misc_RNA (1)...(19): siRNA sense strand
aaagacaaguucaccgauu

SEQ ID NO: 1330149 - RNA, 19 nt, Homo sapiens
  misc_RNA (1)...(19): siRNA sense strand
ucaagacgcuaagcucaaa

SEQ ID NO: 1330150 - RNA, 19 nt, Homo sapiens
  misc_RNA (1)...(19): siRNA sense strand
gaacuacggugugaagacu

SEQ ID NO: 1330151 - RNA, 19 nt, Homo sapiens
  misc_RNA (1)...(19): siRNA sense strand
acuaugaccucgagucuga

SEQ ID NO: 1330152 - RNA, 19 nt, Homo sapiens
  misc_RNA (1)...(19): siRNA sense strand
ggacagagcacaggaaagg

SEQ ID NO: 1330153 - RNA, 19 nt, Homo sapiens
  misc_RNA (1)...(19): siRNA sense strand
caacuaugcuacuaaagac

SEQ ID NO: 1330154 - RNA, 19 nt, Homo sapiens
  misc_RNA (1)...(19): siRNA sense strand
guucaccgauucagccauu

SEQ ID NO: 1330155 - RNA, 19 nt, Homo sapiens
  misc_RNA (1)...(19): siRNA sense strand
gaaauguucaaguucaaug

SEQ ID NO: 1330156 - RNA, 19 nt, Homo sapiens
  misc_RNA (1)...(19): siRNA sense strand
ucaacuaugcuacuaaaga

SEQ ID NO: 1330157 - RNA, 19 nt, Homo sapiens
  misc_RNA (1)...(19): siRNA sense strand
gugaagacuaccuaugaua

SEQ ID NO: 1330158 - RNA, 19 nt, Homo sapiens
  misc_RNA (1)...(19): siRNA sense strand
cuucaacuaugcuacuaaa

SEQ ID NO: 1330159 - RNA, 19 nt, Homo sapiens
  misc_RNA (1)...(19): siRNA sense strand
gcaacagcgacgacuauga

SEQ ID NO: 1330160 - RNA, 19 nt, Homo sapiens
  misc_RNA (1)...(19): siRNA sense strand
uaagccaagugaugucaug

SEQ ID NO: 1330161 - RNA, 19 nt, Homo sapiens
  misc_RNA (1)...(19): siRNA sense strand
gcacugaagaggagaagca

SEQ ID NO: 1330162 - RNA, 19 nt, Homo sapiens
  misc_RNA (1)...(19): siRNA sense strand
uaugauagcagucuuucuu

SEQ ID NO: 1330163 - RNA, 19 nt, Homo sapiens
  misc_RNA (1)...(19): siRNA sense strand
gccaagugaugucaugcuu

SEQ ID NO: 1330164 - RNA, 19 nt, Homo sapiens
  misc_RNA (1)...(19): siRNA sense strand
gugugaagacuaccuauga

SEQ ID NO: 1330165 - RNA, 19 nt, Homo sapiens
  misc_RNA (1)...(19): siRNA sense strand
gacgcuaagcucaaaguuu

SEQ ID NO: 1330166 - RNA, 19 nt, Homo sapiens
  misc_RNA (1)...(19): siRNA sense strand
gauagcagucuuucuucuu

SEQ ID NO: 1330167 - RNA, 19 nt, Homo sapiens
  misc_RNA (1)...(19): siRNA sense strand
cuuguucacuuccgaaaug

SEQ ID NO: 1330168 - RNA, 19 nt, Homo sapiens
  misc_RNA (1)...(19): siRNA sense strand
ggagaacuacggugugaag

SEQ ID NO: 1330169 - RNA, 19 nt, Homo sapiens
  misc_RNA (1)...(19): siRNA sense strand
ccauugccaugaacucgaa

SEQ ID NO: 1330170 - RNA, 19 nt, Homo sapiens
  misc_RNA (1)...(19): siRNA sense strand
gacuucaacuaugcuacua

SEQ ID NO: 1330171 - RNA, 19 nt, Homo sapiens
  misc_RNA (1)...(19): siRNA sense strand
cuuauacggugcccuuaga

SEQ ID NO: 1330172 - RNA, 19 nt, Homo sapiens
  misc_RNA (1)...(19): siRNA sense strand
aagacaaguucaccgauuc

SEQ ID NO: 1330173 - RNA, 19 nt, Homo sapiens
  misc_RNA (1)...(19): siRNA sense strand
cagcaacagcgacgacuau

SEQ ID NO: 1330174 - RNA, 19 nt, Homo sapiens
  misc_RNA (1)...(19): siRNA sense strand
caacagcgacgacuaugac

SEQ ID NO: 1330175 - RNA, 19 nt, Homo sapiens
  misc_RNA (1)...(19): siRNA sense strand
ugucaugcuuguucacuuc

SEQ ID NO: 1330176 - RNA, 19 nt, Homo sapiens
  misc_RNA (1)...(19): siRNA sense strand
agucugacauguccaaugg

SEQ ID NO: 1330177 - RNA, 19 nt, Homo sapiens
  misc_RNA (1)...(19): siRNA sense strand
uagcagucuuucuucuuau

SEQ ID NO: 1330178 - RNA, 19 nt, Homo sapiens
  misc_RNA (1)...(19): siRNA sense strand
uugaaggcgucuacaacaa

SEQ ID NO: 1330179 - RNA, 19 nt, Homo sapiens
  misc_RNA (1)...(19): siRNA sense strand
ggaucgccauggagaacga

SEQ ID NO: 1330180 - RNA, 19 nt, Homo sapiens
  misc_RNA (1)...(19): siRNA sense strand
agcagucuuucuucuuaua

SEQ ID NO: 1330181 - RNA, 19 nt, Homo sapiens
  misc_RNA (1)...(19): siRNA sense strand
guucacuuccgaaauguug

SEQ ID NO: 1330182 - RNA, 19 nt, Homo sapiens
  misc_RNA (1)...(19): siRNA sense strand
gcauuuccuuacagcuguu

SEQ ID NO: 1330183 - RNA, 19 nt, Homo sapiens
  misc_RNA (1)...(19): siRNA sense strand
cuuccgaaauguugacuuc

SEQ ID NO: 1330184 - RNA, 19 nt, Homo sapiens
  misc_RNA (1)...(19): siRNA sense strand
ugaaggcgucuacaacaau

SEQ ID NO: 1330185 - RNA, 19 nt, Homo sapiens
  misc_RNA (1)...(19): siRNA sense strand
ugugaagacuaccuaugau

SEQ ID NO: 1330186 - RNA, 19 nt, Homo sapiens
  misc_RNA (1)...(19): siRNA sense strand
ugauagcagucuuucuucu

SEQ ID NO: 1330187 - RNA, 19 nt, Homo sapiens
  misc_RNA (1)...(19): siRNA sense strand
gugaugucaugcuuguuca

SEQ ID NO: 1330188 - RNA, 19 nt, Homo sapiens
  misc_RNA (1)...(19): siRNA sense strand
aaaaugguaccacuuauga

SEQ ID NO: 1330189 - RNA, 19 nt, Homo sapiens
  misc_RNA (1)...(19): siRNA sense strand
gaaaaggacaacucagaag

SEQ ID NO: 1330190 - RNA, 19 nt, Homo sapiens
  misc_RNA (1)...(19): siRNA sense strand
gggagccgaaggcaucuug

SEQ ID NO: 1330191 - RNA, 19 nt, Homo sapiens
  misc_RNA (1)...(19): siRNA sense strand
gacgaugggcgcacugaag

SEQ ID NO: 1330192 - RNA, 19 nt, Homo sapiens
  misc_RNA (1)...(19): siRNA sense strand
caugaacucgaaagugaau

SEQ ID NO: 1330193 - RNA, 19 nt, Homo sapiens
  misc_RNA (1)...(19): siRNA sense strand
gaccucgagucugacaugu

SEQ ID NO: 1330194 - RNA, 19 nt, Homo sapiens
  misc_RNA (1)...(19): siRNA sense strand
ccacuugugauguaaaggu

SEQ ID NO: 1330195 - RNA, 19 nt, Homo sapiens
  misc_RNA (1)...(19): siRNA sense strand
ggaccccaaugaaauguuc

SEQ ID NO: 1330196 - RNA, 19 nt, Homo sapiens
  misc_RNA (1)...(19): siRNA sense strand
ggugugaagacuaccuaug

SEQ ID NO: 1330197 - RNA, 19 nt, Homo sapiens
  misc_RNA (1)...(19): siRNA sense strand
uauacggugcccuuagaaa

SEQ ID NO: 1330198 - RNA, 19 nt, Homo sapiens
  misc_RNA (1)...(19): siRNA sense strand
gccaugaacucgaaaguga

SEQ ID NO: 1330199 - RNA, 19 nt, Homo sapiens
  misc_RNA (1)...(19): siRNA sense strand
gaaggcgucuacaacaauu

SEQ ID NO: 1330200 - RNA, 19 nt, Homo sapiens
  misc_RNA (1)...(19): siRNA sense strand
ccaguuggcucgagagauu

SEQ ID NO: 1330201 - RNA, 19 nt, Homo sapiens
  misc_RNA (1)...(19): siRNA sense strand
gaggagaacuacgguguga

SEQ ID NO: 1330202 - RNA, 19 nt, Homo sapiens
  misc_RNA (1)...(19): siRNA sense strand
gggcuccacuugugaugua

SEQ ID NO: 1330203 - RNA, 19 nt, Homo sapiens
  misc_RNA (1)...(19): siRNA sense strand
auagcagucuuucuucuua

SEQ ID NO: 1330204 - RNA, 19 nt, Homo sapiens
  misc_RNA (1)...(19): siRNA sense strand
aaagacaaguucaccgauu

SEQ ID NO: 1330205 - RNA, 19 nt, Homo sapiens
  misc_RNA (1)...(19): siRNA sense strand
ucaagacgcuaagcucaaa

SEQ ID NO: 1330206 - RNA, 19 nt, Homo sapiens
  misc_RNA (1)...(19): siRNA sense strand
gaacuacggugugaagacu

SEQ ID NO: 1330207 - RNA, 19 nt, Homo sapiens
  misc_RNA (1)...(19): siRNA sense strand
acuaugaccucgagucuga

SEQ ID NO: 1330208 - RNA, 19 nt, Homo sapiens
  misc_RNA (1)...(19): siRNA sense strand
ggacagagcacaggaaagg

SEQ ID NO: 1330209 - RNA, 19 nt, Homo sapiens
  misc_RNA (1)...(19): siRNA sense strand
caacuaugcuacuaaagac

SEQ ID NO: 1330210 - RNA, 19 nt, Homo sapiens
  misc_RNA (1)...(19): siRNA sense strand
guucaccgauucagccauu

SEQ ID NO: 1330211 - RNA, 19 nt, Homo sapiens
  misc_RNA (1)...(19): siRNA sense strand
gaaauguucaaguucaaug

SEQ ID NO: 1330212 - RNA, 19 nt, Homo sapiens
  misc_RNA (1)...(19): siRNA sense strand
ucaacuaugcuacuaaaga

SEQ ID NO: 1330213 - RNA, 19 nt, Homo sapiens
  misc_RNA (1)...(19): siRNA sense strand
gugaagacuaccuaugaua

SEQ ID NO: 1330214 - RNA, 19 nt, Homo sapiens
  misc_RNA (1)...(19): siRNA sense strand
cuucaacuaugcuacuaaa

SEQ ID NO: 1330215 - RNA, 19 nt, Homo sapiens
  misc_RNA (1)...(19): siRNA sense strand
gcaacagcgacgacuauga

SEQ ID NO: 1330216 - RNA, 19 nt, Homo sapiens
  misc_RNA (1)...(19): siRNA sense strand
uaagccaagugaugucaug

SEQ ID NO: 1330217 - RNA, 19 nt, Homo sapiens
  misc_RNA (1)...(19): siRNA sense strand
gcacugaagaggagaagca

SEQ ID NO: 1330218 - RNA, 19 nt, Homo sapiens
  misc_RNA (1)...(19): siRNA sense strand
uaugauagcagucuuucuu

SEQ ID NO: 1330219 - RNA, 19 nt, Homo sapiens
  misc_RNA (1)...(19): siRNA sense strand
gccaagugaugucaugcuu

SEQ ID NO: 1330220 - RNA, 19 nt, Homo sapiens
  misc_RNA (1)...(19): siRNA sense strand
gugugaagacuaccuauga

SEQ ID NO: 1330221 - RNA, 19 nt, Homo sapiens
  misc_RNA (1)...(19): siRNA sense strand
gacgcuaagcucaaaguuu

SEQ ID NO: 1330222 - RNA, 19 nt, Homo sapiens
  misc_RNA (1)...(19): siRNA sense strand
gauagcagucuuucuucuu

SEQ ID NO: 1330223 - RNA, 19 nt, Homo sapiens
  misc_RNA (1)...(19): siRNA sense strand
cuuguucacuuccgaaaug

SEQ ID NO: 1330224 - RNA, 19 nt, Homo sapiens
  misc_RNA (1)...(19): siRNA sense strand
ggagaacuacggugugaag

SEQ ID NO: 1330225 - RNA, 19 nt, Homo sapiens
  misc_RNA (1)...(19): siRNA sense strand
ccauugccaugaacucgaa

SEQ ID NO: 1330226 - RNA, 19 nt, Homo sapiens
  misc_RNA (1)...(19): siRNA sense strand
gacuucaacuaugcuacua

SEQ ID NO: 1330227 - RNA, 19 nt, Homo sapiens
  misc_RNA (1)...(19): siRNA sense strand
cuuauacggugcccuuaga

SEQ ID NO: 1330228 - RNA, 19 nt, Homo sapiens
  misc_RNA (1)...(19): siRNA sense strand
aagacaaguucaccgauuc

SEQ ID NO: 1330229 - RNA, 19 nt, Homo sapiens
  misc_RNA (1)...(19): siRNA sense strand
cagcaacagcgacgacuau

SEQ ID NO: 1330230 - RNA, 19 nt, Homo sapiens
  misc_RNA (1)...(19): siRNA sense strand
caacagcgacgacuaugac

SEQ ID NO: 1330231 - RNA, 19 nt, Homo sapiens
  misc_RNA (1)...(19): siRNA sense strand
ugucaugcuuguucacuuc

SEQ ID NO: 1330232 - RNA, 19 nt, Homo sapiens
  misc_RNA (1)...(19): siRNA sense strand
agucugacauguccaaugg

SEQ ID NO: 1330233 - RNA, 19 nt, Homo sapiens
  misc_RNA (1)...(19): siRNA sense strand
uagcagucuuucuucuuau

SEQ ID NO: 1330234 - RNA, 19 nt, Homo sapiens
  misc_RNA (1)...(19): siRNA sense strand
uugaaggcgucuacaacaa

SEQ ID NO: 1330235 - RNA, 19 nt, Homo sapiens
  misc_RNA (1)...(19): siRNA sense strand
ggaucgccauggagaacga

SEQ ID NO: 1330236 - RNA, 19 nt, Homo sapiens
  misc_RNA (1)...(19): siRNA sense strand
agcagucuuucuucuuaua

SEQ ID NO: 1330237 - RNA, 19 nt, Homo sapiens
  misc_RNA (1)...(19): siRNA sense strand
guucacuuccgaaauguug

SEQ ID NO: 1330238 - RNA, 19 nt, Homo sapiens
  misc_RNA (1)...(19): siRNA sense strand
gcauuuccuuacagcuguu

SEQ ID NO: 1330239 - RNA, 19 nt, Homo sapiens
  misc_RNA (1)...(19): siRNA sense strand
cuuccgaaauguugacuuc

SEQ ID NO: 1330240 - RNA, 19 nt, Homo sapiens
  misc_RNA (1)...(19): siRNA sense strand
ugaaggcgucuacaacaau

SEQ ID NO: 1330241 - RNA, 19 nt, Homo sapiens
  misc_RNA (1)...(19): siRNA sense strand
ugugaagacuaccuaugau

SEQ ID NO: 1330242 - RNA, 19 nt, Homo sapiens
  misc_RNA (1)...(19): siRNA sense strand
ugauagcagucuuucuucu

SEQ ID NO: 1330243 - RNA, 19 nt, Homo sapiens
  misc_RNA (1)...(19): siRNA sense strand
gugaugucaugcuuguuca

SEQ ID NO: 1330244 - RNA, 19 nt, Homo sapiens
  misc_RNA (1)...(19): siRNA sense strand
aaaaugguaccacuuauga

SEQ ID NO: 1330245 - RNA, 19 nt, Homo sapiens
  misc_RNA (1)...(19): siRNA sense strand
gaaaaggacaacucagaag

SEQ ID NO: 1330246 - RNA, 19 nt, Homo sapiens
  misc_RNA (1)...(19): siRNA sense strand
gggagccgaaggcaucuug

SEQ ID NO: 1330247 - RNA, 19 nt, Homo sapiens
  misc_RNA (1)...(19): siRNA sense strand
gacgaugggcgcacugaag

SEQ ID NO: 1330248 - RNA, 19 nt, Homo sapiens
  misc_RNA (1)...(19): siRNA sense strand
caugaacucgaaagugaau

SEQ ID NO: 1330249 - RNA, 19 nt, Homo sapiens
  misc_RNA (1)...(19): siRNA sense strand
gaccucgagucugacaugu

SEQ ID NO: 1330250 - RNA, 19 nt, Homo sapiens
  misc_RNA (1)...(19): siRNA sense strand
ccacuugugauguaaaggu

SEQ ID NO: 1330251 - RNA, 19 nt, Homo sapiens
  misc_RNA (1)...(19): siRNA sense strand
ggaccccaaugaaauguuc

SEQ ID NO: 1330252 - RNA, 19 nt, Homo sapiens
  misc_RNA (1)...(19): siRNA sense strand
ggugugaagacuaccuaug

SEQ ID NO: 1330253 - RNA, 19 nt, Homo sapiens
  misc_RNA (1)...(19): siRNA sense strand
uauacggugcccuuagaaa

SEQ ID NO: 1330254 - RNA, 19 nt, Homo sapiens
  misc_RNA (1)...(19): siRNA sense strand
ggacaacaguacccuagug

SEQ ID NO: 1330255 - RNA, 19 nt, Homo sapiens
  misc_RNA (1)...(19): siRNA sense strand
caaccuacggcuggaauuu

SEQ ID NO: 1330256 - RNA, 19 nt, Homo sapiens
  misc_RNA (1)...(19): siRNA sense strand
cgaccacauucacaaccua

SEQ ID NO: 1330257 - RNA, 19 nt, Homo sapiens
  misc_RNA (1)...(19): siRNA sense strand
gccugcaccuagccaguuu

SEQ ID NO: 1330258 - RNA, 19 nt, Homo sapiens
  misc_RNA (1)...(19): siRNA sense strand
ugcgcgaggugcauuguuu

SEQ ID NO: 1330259 - RNA, 19 nt, Homo sapiens
  misc_RNA (1)...(19): siRNA sense strand
gcaccuauacccucaagcu

SEQ ID NO: 1330260 - RNA, 19 nt, Homo sapiens
  misc_RNA (1)...(19): siRNA sense strand
gcgcaccuauacccucaag

SEQ ID NO: 1330261 - RNA, 19 nt, Homo sapiens
  misc_RNA (1)...(19): siRNA sense strand
accuacggcuggaauuuga

SEQ ID NO: 1330262 - RNA, 19 nt, Homo sapiens
  misc_RNA (1)...(19): siRNA sense strand
aauuugagccaucgaggaa

SEQ ID NO: 1330263 - RNA, 19 nt, Homo sapiens
  misc_RNA (1)...(19): siRNA sense strand
gccaugaacucgaaaguga

SEQ ID NO: 1330264 - RNA, 19 nt, Homo sapiens
  misc_RNA (1)...(19): siRNA sense strand
gaaggcgucuacaacaauu

SEQ ID NO: 1330265 - RNA, 19 nt, Homo sapiens
  misc_RNA (1)...(19): siRNA sense strand
ccaguuggcucgagagauu

SEQ ID NO: 1330266 - RNA, 19 nt, Homo sapiens
  misc_RNA (1)...(19): siRNA sense strand
gaggagaacuacgguguga

SEQ ID NO: 1330267 - RNA, 19 nt, Homo sapiens
  misc_RNA (1)...(19): siRNA sense strand
gggcuccacuugugaugua

SEQ ID NO: 1330268 - RNA, 19 nt, Homo sapiens
  misc_RNA (1)...(19): siRNA sense strand
auagcagucuuucuucuua

SEQ ID NO: 1330269 - RNA, 19 nt, Homo sapiens
  misc_RNA (1)...(19): siRNA sense strand
aaagacaaguucaccgauu

SEQ ID NO: 1330270 - RNA, 19 nt, Homo sapiens
  misc_RNA (1)...(19): siRNA sense strand
ucaagacgcuaagcucaaa

SEQ ID NO: 1330271 - RNA, 19 nt, Homo sapiens
  misc_RNA (1)...(19): siRNA sense strand
gaacuacggugugaagacu

SEQ ID NO: 1330272 - RNA, 19 nt, Homo sapiens
  misc_RNA (1)...(19): siRNA sense strand
acuaugaccucgagucuga

SEQ ID NO: 1330273 - RNA, 19 nt, Homo sapiens
  misc_RNA (1)...(19): siRNA sense strand
ggacagagcacaggaaagg

SEQ ID NO: 1330274 - RNA, 19 nt, Homo sapiens
  misc_RNA (1)...(19): siRNA sense strand
caacuaugcuacuaaagac

SEQ ID NO: 1330275 - RNA, 19 nt, Homo sapiens
  misc_RNA (1)...(19): siRNA sense strand
guucaccgauucagccauu

SEQ ID NO: 1330276 - RNA, 19 nt, Homo sapiens
  misc_RNA (1)...(19): siRNA sense strand
gaaauguucaaguucaaug

SEQ ID NO: 1330277 - RNA, 19 nt, Homo sapiens
  misc_RNA (1)...(19): siRNA sense strand
ucaacuaugcuacuaaaga

SEQ ID NO: 1330278 - RNA, 19 nt, Homo sapiens
  misc_RNA (1)...(19): siRNA sense strand
gugaagacuaccuaugaua

SEQ ID NO: 1330279 - RNA, 19 nt, Homo sapiens
  misc_RNA (1)...(19): siRNA sense strand
cuucaacuaugcuacuaaa

SEQ ID NO: 1330280 - RNA, 19 nt, Homo sapiens
  misc_RNA (1)...(19): siRNA sense strand
gcaacagcgacgacuauga

SEQ ID NO: 1330281 - RNA, 19 nt, Homo sapiens
  misc_RNA (1)...(19): siRNA sense strand
uaagccaagugaugucaug

SEQ ID NO: 1330282 - RNA, 19 nt, Homo sapiens
  misc_RNA (1)...(19): siRNA sense strand
gcacugaagaggagaagca

SEQ ID NO: 1330283 - RNA, 19 nt, Homo sapiens
  misc_RNA (1)...(19): siRNA sense strand
uaugauagcagucuuucuu

SEQ ID NO: 1330284 - RNA, 19 nt, Homo sapiens
  misc_RNA (1)...(19): siRNA sense strand
gccaagugaugucaugcuu

SEQ ID NO: 1330285 - RNA, 19 nt, Homo sapiens
  misc_RNA (1)...(19): siRNA sense strand
gugugaagacuaccuauga

SEQ ID NO: 1330286 - RNA, 19 nt, Homo sapiens
  misc_RNA (1)...(19): siRNA sense strand
gacgcuaagcucaaaguuu

SEQ ID NO: 1330287 - RNA, 19 nt, Homo sapiens
  misc_RNA (1)...(19): siRNA sense strand
gauagcagucuuucuucuu

SEQ ID NO: 1330288 - RNA, 19 nt, Homo sapiens
  misc_RNA (1)...(19): siRNA sense strand
cuuguucacuuccgaaaug

SEQ ID NO: 1330289 - RNA, 19 nt, Homo sapiens
  misc_RNA (1)...(19): siRNA sense strand
ggagaacuacggugugaag

SEQ ID NO: 1330290 - RNA, 19 nt, Homo sapiens
  misc_RNA (1)...(19): siRNA sense strand
ccauugccaugaacucgaa

SEQ ID NO: 1330291 - RNA, 19 nt, Homo sapiens
  misc_RNA (1)...(19): siRNA sense strand
gacuucaacuaugcuacua

SEQ ID NO: 1330292 - RNA, 19 nt, Homo sapiens
  misc_RNA (1)...(19): siRNA sense strand
cuuauacggugcccuuaga

SEQ ID NO: 1330293 - RNA, 19 nt, Homo sapiens
  misc_RNA (1)...(19): siRNA sense strand
aagacaaguucaccgauuc

SEQ ID NO: 1330294 - RNA, 19 nt, Homo sapiens
  misc_RNA (1)...(19): siRNA sense strand
cagcaacagcgacgacuau

SEQ ID NO: 1330295 - RNA, 19 nt, Homo sapiens
  misc_RNA (1)...(19): siRNA sense strand
caacagcgacgacuaugac

SEQ ID NO: 1330296 - RNA, 19 nt, Homo sapiens
  misc_RNA (1)...(19): siRNA sense strand
ugucaugcuuguucacuuc

SEQ ID NO: 1330297 - RNA, 19 nt, Homo sapiens
  misc_RNA (1)...(19): siRNA sense strand
agucugacauguccaaugg

SEQ ID NO: 1330298 - RNA, 19 nt, Homo sapiens
  misc_RNA (1)...(19): siRNA sense strand
uagcagucuuucuucuuau

SEQ ID NO: 1330299 - RNA, 19 nt, Homo sapiens
  misc_RNA (1)...(19): siRNA sense strand
uugaaggcgucuacaacaa

SEQ ID NO: 1330300 - RNA, 19 nt, Homo sapiens
  misc_RNA (1)...(19): siRNA sense strand
ggaucgccauggagaacga

SEQ ID NO: 1330301 - RNA, 19 nt, Homo sapiens
  misc_RNA (1)...(19): siRNA sense strand
agcagucuuucuucuuaua

SEQ ID NO: 1330302 - RNA, 19 nt, Homo sapiens
  misc_RNA (1)...(19): siRNA sense strand
guucacuuccgaaauguug

SEQ ID NO: 1330303 - RNA, 19 nt, Homo sapiens
  misc_RNA (1)...(19): siRNA sense strand
gcauuuccuuacagcuguu

SEQ ID NO: 1330304 - RNA, 19 nt, Homo sapiens
  misc_RNA (1)...(19): siRNA sense strand
cuuccgaaauguugacuuc

SEQ ID NO: 1330305 - RNA, 19 nt, Homo sapiens
  misc_RNA (1)...(19): siRNA sense strand
ugaaggcgucuacaacaau

SEQ ID NO: 1330306 - RNA, 19 nt, Homo sapiens
  misc_RNA (1)...(19): siRNA sense strand
ugugaagacuaccuaugau

SEQ ID NO: 1330307 - RNA, 19 nt, Homo sapiens
  misc_RNA (1)...(19): siRNA sense strand
ugauagcagucuuucuucu

SEQ ID NO: 1330308 - RNA, 19 nt, Homo sapiens
  misc_RNA (1)...(19): siRNA sense strand
gugaugucaugcuuguuca

SEQ ID NO: 1330309 - RNA, 19 nt, Homo sapiens
  misc_RNA (1)...(19): siRNA sense strand
aaaaugguaccacuuauga

SEQ ID NO: 1330310 - RNA, 19 nt, Homo sapiens
  misc_RNA (1)...(19): siRNA sense strand
gaaaaggacaacucagaag

SEQ ID NO: 1330311 - RNA, 19 nt, Homo sapiens
  misc_RNA (1)...(19): siRNA sense strand
gggagccgaaggcaucuug

SEQ ID NO: 1330312 - RNA, 19 nt, Homo sapiens
  misc_RNA (1)...(19): siRNA sense strand
gacgaugggcgcacugaag

SEQ ID NO: 1330313 - RNA, 19 nt, Homo sapiens
  misc_RNA (1)...(19): siRNA sense strand
caugaacucgaaagugaau

SEQ ID NO: 1330314 - RNA, 19 nt, Homo sapiens
  misc_RNA (1)...(19): siRNA sense strand
gaccucgagucugacaugu

SEQ ID NO: 1330315 - RNA, 19 nt, Homo sapiens
  misc_RNA (1)...(19): siRNA sense strand
ccacuugugauguaaaggu

SEQ ID NO: 1330316 - RNA, 19 nt, Homo sapiens
  misc_RNA (1)...(19): siRNA sense strand
ggaccccaaugaaauguuc

SEQ ID NO: 1330317 - RNA, 19 nt, Homo sapiens
  misc_RNA (1)...(19): siRNA sense strand
ggugugaagacuaccuaug

SEQ ID NO: 1330318 - RNA, 19 nt, Homo sapiens
  misc_RNA (1)...(19): siRNA sense strand
uauacggugcccuuagaaa

SEQ ID NO: 1330319 - RNA, 19 nt, Homo sapiens
  misc_RNA (1)...(19): siRNA sense strand
gccaugaacucgaaaguga

SEQ ID NO: 1330320 - RNA, 19 nt, Homo sapiens
  misc_RNA (1)...(19): siRNA sense strand
gaaggcgucuacaacaauu

SEQ ID NO: 1330321 - RNA, 19 nt, Homo sapiens
  misc_RNA (1)...(19): siRNA sense strand
ccaguuggcucgagagauu

SEQ ID NO: 1330322 - RNA, 19 nt, Homo sapiens
  misc_RNA (1)...(19): siRNA sense strand
gaggagaacuacgguguga

SEQ ID NO: 1330323 - RNA, 19 nt, Homo sapiens
  misc_RNA (1)...(19): siRNA sense strand
gggcuccacuugugaugua

SEQ ID NO: 1330324 - RNA, 19 nt, Homo sapiens
  misc_RNA (1)...(19): siRNA sense strand
gacggaagaucuuuuauuu

SEQ ID NO: 1330325 - RNA, 19 nt, Homo sapiens
  misc_RNA (1)...(19): siRNA sense strand
auagcagucuuucuucuua

SEQ ID NO: 1330326 - RNA, 19 nt, Homo sapiens
  misc_RNA (1)...(19): siRNA sense strand
aaagacaaguucaccgauu

SEQ ID NO: 1330327 - RNA, 19 nt, Homo sapiens
  misc_RNA (1)...(19): siRNA sense strand
ucaagacgcuaagcucaaa

SEQ ID NO: 1330328 - RNA, 19 nt, Homo sapiens
  misc_RNA (1)...(19): siRNA sense strand
gaacuacggugugaagacu

SEQ ID NO: 1330329 - RNA, 19 nt, Homo sapiens
  misc_RNA (1)...(19): siRNA sense strand
acuaugaccucgagucuga

SEQ ID NO: 1330330 - RNA, 19 nt, Homo sapiens
  misc_RNA (1)...(19): siRNA sense strand
caacuaugcuacuaaagac

SEQ ID NO: 1330331 - RNA, 19 nt, Homo sapiens
  misc_RNA (1)...(19): siRNA sense strand
ggacagagcacaggaaagg

SEQ ID NO: 1330332 - RNA, 19 nt, Homo sapiens
  misc_RNA (1)...(19): siRNA sense strand
guucaccgauucagccauu

SEQ ID NO: 1330333 - RNA, 19 nt, Homo sapiens
  misc_RNA (1)...(19): siRNA sense strand
gaaauguucaaguucaaug

SEQ ID NO: 1330334 - RNA, 19 nt, Homo sapiens
  misc_RNA (1)...(19): siRNA sense strand
ucaacuaugcuacuaaaga

SEQ ID NO: 1330335 - RNA, 19 nt, Homo sapiens
  misc_RNA (1)...(19): siRNA sense strand
gugaagacuaccuaugaua

SEQ ID NO: 1330336 - RNA, 19 nt, Homo sapiens
  misc_RNA (1)...(19): siRNA sense strand
cggaagaucuuuuauuuuc

SEQ ID NO: 1330337 - RNA, 19 nt, Homo sapiens
  misc_RNA (1)...(19): siRNA sense strand
cuucaacuaugcuacuaaa

SEQ ID NO: 1330338 - RNA, 19 nt, Homo sapiens
  misc_RNA (1)...(19): siRNA sense strand
gcaacagcgacgacuauga

SEQ ID NO: 1330339 - RNA, 19 nt, Homo sapiens
  misc_RNA (1)...(19): siRNA sense strand
uaagccaagugaugucaug

SEQ ID NO: 1330340 - RNA, 19 nt, Homo sapiens
  misc_RNA (1)...(19): siRNA sense strand
gcacugaagaggagaagca

SEQ ID NO: 1330341 - RNA, 19 nt, Homo sapiens
  misc_RNA (1)...(19): siRNA sense strand
uaugauagcagucuuucuu

SEQ ID NO: 1330342 - RNA, 19 nt, Homo sapiens
  misc_RNA (1)...(19): siRNA sense strand
gccaagugaugucaugcuu

SEQ ID NO: 1330343 - RNA, 19 nt, Homo sapiens
  misc_RNA (1)...(19): siRNA sense strand
gugugaagacuaccuauga

SEQ ID NO: 1330344 - RNA, 19 nt, Homo sapiens
  misc_RNA (1)...(19): siRNA sense strand
gacgcuaagcucaaaguuu

SEQ ID NO: 1330345 - RNA, 19 nt, Homo sapiens
  misc_RNA (1)...(19): siRNA sense strand
gauagcagucuuucuucuu

SEQ ID NO: 1330346 - RNA, 19 nt, Homo sapiens
  misc_RNA (1)...(19): siRNA sense strand
cuuguucacuuccgaaaug

SEQ ID NO: 1330347 - RNA, 19 nt, Homo sapiens
  misc_RNA (1)...(19): siRNA sense strand
ggagaacuacggugugaag

SEQ ID NO: 1330348 - RNA, 19 nt, Homo sapiens
  misc_RNA (1)...(19): siRNA sense strand
ccauugccaugaacucgaa

SEQ ID NO: 1330349 - RNA, 19 nt, Homo sapiens
  misc_RNA (1)...(19): siRNA sense strand
ggagacggaagaucuuuua

SEQ ID NO: 1330350 - RNA, 19 nt, Homo sapiens
  misc_RNA (1)...(19): siRNA sense strand
gacuucaacuaugcuacua

SEQ ID NO: 1330351 - RNA, 19 nt, Homo sapiens
  misc_RNA (1)...(19): siRNA sense strand
cuuauacggugcccuuaga

SEQ ID NO: 1330352 - RNA, 19 nt, Homo sapiens
  misc_RNA (1)...(19): siRNA sense strand
aagacaaguucaccgauuc

SEQ ID NO: 1330353 - RNA, 19 nt, Homo sapiens
  misc_RNA (1)...(19): siRNA sense strand
cagcaacagcgacgacuau

SEQ ID NO: 1330354 - RNA, 19 nt, Homo sapiens
  misc_RNA (1)...(19): siRNA sense strand
cccauccucucaucuauuc

SEQ ID NO: 1330355 - RNA, 19 nt, Homo sapiens
  misc_RNA (1)...(19): siRNA sense strand
caacagcgacgacuaugac

SEQ ID NO: 1330356 - RNA, 19 nt, Homo sapiens
  misc_RNA (1)...(19): siRNA sense strand
ugucaugcuuguucacuuc

SEQ ID NO: 1330357 - RNA, 19 nt, Homo sapiens
  misc_RNA (1)...(19): siRNA sense strand
agucugacauguccaaugg

SEQ ID NO: 1330358 - RNA, 19 nt, Homo sapiens
  misc_RNA (1)...(19): siRNA sense strand
uugaaggcgucuacaacaa

SEQ ID NO: 1330359 - RNA, 19 nt, Homo sapiens
  misc_RNA (1)...(19): siRNA sense strand
ggaucgccauggagaacga

SEQ ID NO: 1330360 - RNA, 19 nt, Homo sapiens
  misc_RNA (1)...(19): siRNA sense strand
agcagucuuucuucuuaua

SEQ ID NO: 1330361 - RNA, 19 nt, Homo sapiens
  misc_RNA (1)...(19): siRNA sense strand
uagcagucuuucuucuuau

SEQ ID NO: 1330362 - RNA, 19 nt, Homo sapiens
  misc_RNA (1)...(19): siRNA sense strand
guucacuuccgaaauguug

SEQ ID NO: 1330363 - RNA, 19 nt, Homo sapiens
  misc_RNA (1)...(19): siRNA sense strand
gcauuuccuuacagcuguu

SEQ ID NO: 1330364 - RNA, 19 nt, Homo sapiens
  misc_RNA (1)...(19): siRNA sense strand
cuuccgaaauguugacuuc

SEQ ID NO: 1330365 - RNA, 19 nt, Homo sapiens
  misc_RNA (1)...(19): siRNA sense strand
ugaaggcgucuacaacaau

SEQ ID NO: 1330366 - RNA, 19 nt, Homo sapiens
  misc_RNA (1)...(19): siRNA sense strand
ugugaagacuaccuaugau

SEQ ID NO: 1330367 - RNA, 19 nt, Homo sapiens
  misc_RNA (1)...(19): siRNA sense strand
ugauagcagucuuucuucu

SEQ ID NO: 1330368 - RNA, 19 nt, Homo sapiens
  misc_RNA (1)...(19): siRNA sense strand
gugaugucaugcuuguuca

SEQ ID NO: 1330369 - RNA, 19 nt, Homo sapiens
  misc_RNA (1)...(19): siRNA sense strand
aaaaugguaccacuuauga

SEQ ID NO: 1330370 - RNA, 19 nt, Homo sapiens
  misc_RNA (1)...(19): siRNA sense strand
gaaaaggacaacucagaag

SEQ ID NO: 1330371 - RNA, 19 nt, Homo sapiens
  misc_RNA (1)...(19): siRNA sense strand
caugaacucgaaagugaau

SEQ ID NO: 1330372 - RNA, 19 nt, Homo sapiens
  misc_RNA (1)...(19): siRNA sense strand
gacgaugggcgcacugaag

SEQ ID NO: 1330373 - RNA, 19 nt, Homo sapiens
  misc_RNA (1)...(19): siRNA sense strand
gggagccgaaggcaucuug

SEQ ID NO: 1330374 - RNA, 19 nt, Homo sapiens
  misc_RNA (1)...(19): siRNA sense strand
ccacuugugauguaaaggu

SEQ ID NO: 1330375 - RNA, 19 nt, Homo sapiens
  misc_RNA (1)...(19): siRNA sense strand
ggaccccaaugaaauguuc

SEQ ID NO: 1330376 - RNA, 19 nt, Homo sapiens
  misc_RNA (1)...(19): siRNA sense strand
gaccucgagucugacaugu

SEQ ID NO: 1330377 - RNA, 19 nt, Homo sapiens
  misc_RNA (1)...(19): siRNA sense strand
ggugugaagacuaccuaug

SEQ ID NO: 1330378 - RNA, 19 nt, Homo sapiens
  misc_RNA (1)...(19): siRNA sense strand
ccucccauccucucaucua

SEQ ID NO: 1330379 - RNA, 19 nt, Homo sapiens
  misc_RNA (1)...(19): siRNA sense strand
uauacggugcccuuagaaa

SEQ ID NO: 1330380 - RNA, 19 nt, Homo sapiens
  misc_RNA (1)...(19): siRNA sense strand
gccaugaacucgaaaguga

SEQ ID NO: 1330381 - RNA, 19 nt, Homo sapiens
  misc_RNA (1)...(19): siRNA sense strand
gaaggcgucuacaacaauu

SEQ ID NO: 1330382 - RNA, 19 nt, Homo sapiens
  misc_RNA (1)...(19): siRNA sense strand
ccaguuggcucgagagauu

SEQ ID NO: 1330383 - RNA, 19 nt, Homo sapiens
  misc_RNA (1)...(19): siRNA sense strand
gaggagaacuacgguguga

SEQ ID NO: 1330384 - RNA, 19 nt, Homo sapiens
  misc_RNA (1)...(19): siRNA sense strand
gggcuccacuugugaugua

SEQ ID NO: 1330385 - RNA, 19 nt, Homo sapiens
  misc_RNA (1)...(19): siRNA sense strand
auagcagucuuucuucuua

SEQ ID NO: 1330386 - RNA, 19 nt, Homo sapiens
  misc_RNA (1)...(19): siRNA sense strand
aaagacaaguucaccgauu

SEQ ID NO: 1330387 - RNA, 19 nt, Homo sapiens
  misc_RNA (1)...(19): siRNA sense strand
ucaagacgcuaagcucaaa

SEQ ID NO: 1330388 - RNA, 19 nt, Homo sapiens
  misc_RNA (1)...(19): siRNA sense strand
gaacuacggugugaagacu

SEQ ID NO: 1330389 - RNA, 19 nt, Homo sapiens
  misc_RNA (1)...(19): siRNA sense strand
acuaugaccucgagucuga

SEQ ID NO: 1330390 - RNA, 19 nt, Homo sapiens
  misc_RNA (1)...(19): siRNA sense strand
ggacagagcacaggaaagg

SEQ ID NO: 1330391 - RNA, 19 nt, Homo sapiens
  misc_RNA (1)...(19): siRNA sense strand
caacuaugcuacuaaagac

SEQ ID NO: 1330392 - RNA, 19 nt, Homo sapiens
  misc_RNA (1)...(19): siRNA sense strand
guucaccgauucagccauu

SEQ ID NO: 1330393 - RNA, 19 nt, Homo sapiens
  misc_RNA (1)...(19): siRNA sense strand
gaaauguucaaguucaaug

SEQ ID NO: 1330394 - RNA, 19 nt, Homo sapiens
  misc_RNA (1)...(19): siRNA sense strand
ucaacuaugcuacuaaaga

SEQ ID NO: 1330395 - RNA, 19 nt, Homo sapiens
  misc_RNA (1)...(19): siRNA sense strand
gugaagacuaccuaugaua

SEQ ID NO: 1330396 - RNA, 19 nt, Homo sapiens
  misc_RNA (1)...(19): siRNA sense strand
cuucaacuaugcuacuaaa

SEQ ID NO: 1330397 - RNA, 19 nt, Homo sapiens
  misc_RNA (1)...(19): siRNA sense strand
gcaacagcgacgacuauga

SEQ ID NO: 1330398 - RNA, 19 nt, Homo sapiens
  misc_RNA (1)...(19): siRNA sense strand
uaagccaagugaugucaug

SEQ ID NO: 1330399 - RNA, 19 nt, Homo sapiens
  misc_RNA (1)...(19): siRNA sense strand
gcacugaagaggagaagca

SEQ ID NO: 1330400 - RNA, 19 nt, Homo sapiens
  misc_RNA (1)...(19): siRNA sense strand
uaugauagcagucuuucuu

SEQ ID NO: 1330401 - RNA, 19 nt, Homo sapiens
  misc_RNA (1)...(19): siRNA sense strand
gccaagugaugucaugcuu

SEQ ID NO: 1330402 - RNA, 19 nt, Homo sapiens
  misc_RNA (1)...(19): siRNA sense strand
gugugaagacuaccuauga

SEQ ID NO: 1330403 - RNA, 19 nt, Homo sapiens
  misc_RNA (1)...(19): siRNA sense strand
gacgcuaagcucaaaguuu

SEQ ID NO: 1330404 - RNA, 19 nt, Homo sapiens
  misc_RNA (1)...(19): siRNA sense strand
gauagcagucuuucuucuu

SEQ ID NO: 1330405 - RNA, 19 nt, Homo sapiens
  misc_RNA (1)...(19): siRNA sense strand
cuuguucacuuccgaaaug

SEQ ID NO: 1330406 - RNA, 19 nt, Homo sapiens
  misc_RNA (1)...(19): siRNA sense strand
ggagaacuacggugugaag

SEQ ID NO: 1330407 - RNA, 19 nt, Homo sapiens
  misc_RNA (1)...(19): siRNA sense strand
ccauugccaugaacucgaa

SEQ ID NO: 1330408 - RNA, 19 nt, Homo sapiens
  misc_RNA (1)...(19): siRNA sense strand
gacuucaacuaugcuacua

SEQ ID NO: 1330409 - RNA, 19 nt, Homo sapiens
  misc_RNA (1)...(19): siRNA sense strand
cuuauacggugcccuuaga

SEQ ID NO: 1330410 - RNA, 19 nt, Homo sapiens
  misc_RNA (1)...(19): siRNA sense strand
aagacaaguucaccgauuc

SEQ ID NO: 1330411 - RNA, 19 nt, Homo sapiens
  misc_RNA (1)...(19): siRNA sense strand
cagcaacagcgacgacuau

SEQ ID NO: 1330412 - RNA, 19 nt, Homo sapiens
  misc_RNA (1)...(19): siRNA sense strand
caacagcgacgacuaugac

SEQ ID NO: 1330413 - RNA, 19 nt, Homo sapiens
  misc_RNA (1)...(19): siRNA sense strand
ugucaugcuuguucacuuc

SEQ ID NO: 1330414 - RNA, 19 nt, Homo sapiens
  misc_RNA (1)...(19): siRNA sense strand
agucugacauguccaaugg

SEQ ID NO: 1330415 - RNA, 19 nt, Homo sapiens
  misc_RNA (1)...(19): siRNA sense strand
uagcagucuuucuucuuau

SEQ ID NO: 1330416 - RNA, 19 nt, Homo sapiens
  misc_RNA (1)...(19): siRNA sense strand
uugaaggcgucuacaacaa

SEQ ID NO: 1330417 - RNA, 19 nt, Homo sapiens
  misc_RNA (1)...(19): siRNA sense strand
ggaucgccauggagaacga

SEQ ID NO: 1330418 - RNA, 19 nt, Homo sapiens
  misc_RNA (1)...(19): siRNA sense strand
agcagucuuucuucuuaua

SEQ ID NO: 1330419 - RNA, 19 nt, Homo sapiens
  misc_RNA (1)...(19): siRNA sense strand
guucacuuccgaaauguug

SEQ ID NO: 1330420 - RNA, 19 nt, Homo sapiens
  misc_RNA (1)...(19): siRNA sense strand
gcauuuccuuacagcuguu

SEQ ID NO: 1330421 - RNA, 19 nt, Homo sapiens
  misc_RNA (1)...(19): siRNA sense strand
cuuccgaaauguugacuuc

SEQ ID NO: 1330422 - RNA, 19 nt, Homo sapiens
  misc_RNA (1)...(19): siRNA sense strand
ugaaggcgucuacaacaau

SEQ ID NO: 1330423 - RNA, 19 nt, Homo sapiens
  misc_RNA (1)...(19): siRNA sense strand
ugugaagacuaccuaugau

SEQ ID NO: 1330424 - RNA, 19 nt, Homo sapiens
  misc_RNA (1)...(19): siRNA sense strand
ugauagcagucuuucuucu

SEQ ID NO: 1330425 - RNA, 19 nt, Homo sapiens
  misc_RNA (1)...(19): siRNA sense strand
gugaugucaugcuuguuca

SEQ ID NO: 1330426 - RNA, 19 nt, Homo sapiens
  misc_RNA (1)...(19): siRNA sense strand
aaaaugguaccacuuauga

SEQ ID NO: 1330427 - RNA, 19 nt, Homo sapiens
  misc_RNA (1)...(19): siRNA sense strand
gaaaaggacaacucagaag

SEQ ID NO: 1330428 - RNA, 19 nt, Homo sapiens
  misc_RNA (1)...(19): siRNA sense strand
gggagccgaaggcaucuug

SEQ ID NO: 1330429 - RNA, 19 nt, Homo sapiens
  misc_RNA (1)...(19): siRNA sense strand
gacgaugggcgcacugaag

SEQ ID NO: 1330430 - RNA, 19 nt, Homo sapiens
  misc_RNA (1)...(19): siRNA sense strand
caugaacucgaaagugaau

SEQ ID NO: 1330431 - RNA, 19 nt, Homo sapiens
  misc_RNA (1)...(19): siRNA sense strand
gaccucgagucugacaugu

SEQ ID NO: 1330432 - RNA, 19 nt, Homo sapiens
  misc_RNA (1)...(19): siRNA sense strand
ccacuugugauguaaaggu

SEQ ID NO: 1330433 - RNA, 19 nt, Homo sapiens
  misc_RNA (1)...(19): siRNA sense strand
ggaccccaaugaaauguuc

SEQ ID NO: 1330434 - RNA, 19 nt, Homo sapiens
  misc_RNA (1)...(19): siRNA sense strand
ggugugaagacuaccuaug

SEQ ID NO: 1330435 - RNA, 19 nt, Homo sapiens
  misc_RNA (1)...(19): siRNA sense strand
uauacggugcccuuagaaa

SEQ ID NO: 1330436 - RNA, 19 nt, Homo sapiens
  misc_RNA (1)...(19): siRNA sense strand
gccaugaacucgaaaguga

SEQ ID NO: 1330437 - RNA, 19 nt, Homo sapiens
  misc_RNA (1)...(19): siRNA sense strand
gaaggcgucuacaacaauu

SEQ ID NO: 1330438 - RNA, 19 nt, Homo sapiens
  misc_RNA (1)...(19): siRNA sense strand
ccaguuggcucgagagauu

SEQ ID NO: 1330439 - RNA, 19 nt, Homo sapiens
  misc_RNA (1)...(19): siRNA sense strand
gaggagaacuacgguguga

SEQ ID NO: 1330440 - RNA, 19 nt, Homo sapiens
  misc_RNA (1)...(19): siRNA sense strand
gggcuccacuugugaugua

SEQ ID NO: 1330441 - RNA, 19 nt, Homo sapiens
  misc_RNA (1)...(19): siRNA sense strand
auagcagucuuucuucuua

SEQ ID NO: 1330442 - RNA, 19 nt, Homo sapiens
  misc_RNA (1)...(19): siRNA sense strand
aaagacaaguucaccgauu

SEQ ID NO: 1330443 - RNA, 19 nt, Homo sapiens
  misc_RNA (1)...(19): siRNA sense strand
ucaagacgcuaagcucaaa

SEQ ID NO: 1330444 - RNA, 19 nt, Homo sapiens
  misc_RNA (1)...(19): siRNA sense strand
gaacuacggugugaagacu

SEQ ID NO: 1330445 - RNA, 19 nt, Homo sapiens
  misc_RNA (1)...(19): siRNA sense strand
acuaugaccucgagucuga

SEQ ID NO: 1330446 - RNA, 19 nt, Homo sapiens
  misc_RNA (1)...(19): siRNA sense strand
ggacagagcacaggaaagg

SEQ ID NO: 1330447 - RNA, 19 nt, Homo sapiens
  misc_RNA (1)...(19): siRNA sense strand
caacuaugcuacuaaagac

SEQ ID NO: 1330448 - RNA, 19 nt, Homo sapiens
  misc_RNA (1)...(19): siRNA sense strand
guucaccgauucagccauu

SEQ ID NO: 1330449 - RNA, 19 nt, Homo sapiens
  misc_RNA (1)...(19): siRNA sense strand
gaaauguucaaguucaaug

SEQ ID NO: 1330450 - RNA, 19 nt, Homo sapiens
  misc_RNA (1)...(19): siRNA sense strand
ucaacuaugcuacuaaaga

SEQ ID NO: 1330451 - RNA, 19 nt, Homo sapiens
  misc_RNA (1)...(19): siRNA sense strand
gugaagacuaccuaugaua

SEQ ID NO: 1330452 - RNA, 19 nt, Homo sapiens
  misc_RNA (1)...(19): siRNA sense strand
cuucaacuaugcuacuaaa

SEQ ID NO: 1330453 - RNA, 19 nt, Homo sapiens
  misc_RNA (1)...(19): siRNA sense strand
gcaacagcgacgacuauga

SEQ ID NO: 1330454 - RNA, 19 nt, Homo sapiens
  misc_RNA (1)...(19): siRNA sense strand
uaagccaagugaugucaug

SEQ ID NO: 1330455 - RNA, 19 nt, Homo sapiens
  misc_RNA (1)...(19): siRNA sense strand
gcacugaagaggagaagca

SEQ ID NO: 1330456 - RNA, 19 nt, Homo sapiens
  misc_RNA (1)...(19): siRNA sense strand
uaugauagcagucuuucuu

SEQ ID NO: 1330457 - RNA, 19 nt, Homo sapiens
  misc_RNA (1)...(19): siRNA sense strand
gccaagugaugucaugcuu

SEQ ID NO: 1330458 - RNA, 19 nt, Homo sapiens
  misc_RNA (1)...(19): siRNA sense strand
gugugaagacuaccuauga

SEQ ID NO: 1330459 - RNA, 19 nt, Homo sapiens
  misc_RNA (1)...(19): siRNA sense strand
gacgcuaagcucaaaguuu

SEQ ID NO: 1330460 - RNA, 19 nt, Homo sapiens
  misc_RNA (1)...(19): siRNA sense strand
gauagcagucuuucuucuu

SEQ ID NO: 1330461 - RNA, 19 nt, Homo sapiens
  misc_RNA (1)...(19): siRNA sense strand
cuuguucacuuccgaaaug

SEQ ID NO: 1330462 - RNA, 19 nt, Homo sapiens
  misc_RNA (1)...(19): siRNA sense strand
ggagaacuacggugugaag

SEQ ID NO: 1330463 - RNA, 19 nt, Homo sapiens
  misc_RNA (1)...(19): siRNA sense strand
ccauugccaugaacucgaa

SEQ ID NO: 1330464 - RNA, 19 nt, Homo sapiens
  misc_RNA (1)...(19): siRNA sense strand
gacuucaacuaugcuacua

SEQ ID NO: 1330465 - RNA, 19 nt, Homo sapiens
  misc_RNA (1)...(19): siRNA sense strand
cuuauacggugcccuuaga

SEQ ID NO: 1330466 - RNA, 19 nt, Homo sapiens
  misc_RNA (1)...(19): siRNA sense strand
aagacaaguucaccgauuc

SEQ ID NO: 1330467 - RNA, 19 nt, Homo sapiens
  misc_RNA (1)...(19): siRNA sense strand
cagcaacagcgacgacuau

SEQ ID NO: 1330468 - RNA, 19 nt, Homo sapiens
  misc_RNA (1)...(19): siRNA sense strand
caacagcgacgacuaugac

SEQ ID NO: 1330469 - RNA, 19 nt, Homo sapiens
  misc_RNA (1)...(19): siRNA sense strand
ugucaugcuuguucacuuc

SEQ ID NO: 1330470 - RNA, 19 nt, Homo sapiens
  misc_RNA (1)...(19): siRNA sense strand
agucugacauguccaaugg

SEQ ID NO: 1330471 - RNA, 19 nt, Homo sapiens
  misc_RNA (1)...(19): siRNA sense strand
uagcagucuuucuucuuau

SEQ ID NO: 1330472 - RNA, 19 nt, Homo sapiens
  misc_RNA (1)...(19): siRNA sense strand
uugaaggcgucuacaacaa

SEQ ID NO: 1330473 - RNA, 19 nt, Homo sapiens
  misc_RNA (1)...(19): siRNA sense strand
ggaucgccauggagaacga

SEQ ID NO: 1330474 - RNA, 19 nt, Homo sapiens
  misc_RNA (1)...(19): siRNA sense strand
agcagucuuucuucuuaua

SEQ ID NO: 1330475 - RNA, 19 nt, Homo sapiens
  misc_RNA (1)...(19): siRNA sense strand
guucacuuccgaaauguug

SEQ ID NO: 1330476 - RNA, 19 nt, Homo sapiens
  misc_RNA (1)...(19): siRNA sense strand
gcauuuccuuacagcuguu

SEQ ID NO: 1330477 - RNA, 19 nt, Homo sapiens
  misc_RNA (1)...(19): siRNA sense strand
cuuccgaaauguugacuuc

SEQ ID NO: 1330478 - RNA, 19 nt, Homo sapiens
  misc_RNA (1)...(19): siRNA sense strand
ugaaggcgucuacaacaau

SEQ ID NO: 1330479 - RNA, 19 nt, Homo sapiens
  misc_RNA (1)...(19): siRNA sense strand
ugugaagacuaccuaugau

SEQ ID NO: 1330480 - RNA, 19 nt, Homo sapiens
  misc_RNA (1)...(19): siRNA sense strand
ugauagcagucuuucuucu

SEQ ID NO: 1330481 - RNA, 19 nt, Homo sapiens
  misc_RNA (1)...(19): siRNA sense strand
gugaugucaugcuuguuca

SEQ ID NO: 1330482 - RNA, 19 nt, Homo sapiens
  misc_RNA (1)...(19): siRNA sense strand
aaaaugguaccacuuauga

SEQ ID NO: 1330483 - RNA, 19 nt, Homo sapiens
  misc_RNA (1)...(19): siRNA sense strand
gaaaaggacaacucagaag

SEQ ID NO: 1330484 - RNA, 19 nt, Homo sapiens
  misc_RNA (1)...(19): siRNA sense strand
gggagccgaaggcaucuug

SEQ ID NO: 1330485 - RNA, 19 nt, Homo sapiens
  misc_RNA (1)...(19): siRNA sense strand
gacgaugggcgcacugaag

SEQ ID NO: 1330486 - RNA, 19 nt, Homo sapiens
  misc_RNA (1)...(19): siRNA sense strand
caugaacucgaaagugaau

SEQ ID NO: 1330487 - RNA, 19 nt, Homo sapiens
  misc_RNA (1)...(19): siRNA sense strand
gaccucgagucugacaugu

SEQ ID NO: 1330488 - RNA, 19 nt, Homo sapiens
  misc_RNA (1)...(19): siRNA sense strand
ccacuugugauguaaaggu

SEQ ID NO: 1330489 - RNA, 19 nt, Homo sapiens
  misc_RNA (1)...(19): siRNA sense strand
ggaccccaaugaaauguuc

SEQ ID NO: 1330490 - RNA, 19 nt, Homo sapiens
  misc_RNA (1)...(19): siRNA sense strand
ggugugaagacuaccuaug

SEQ ID NO: 1330491 - RNA, 19 nt, Homo sapiens
  misc_RNA (1)...(19): siRNA sense strand
uauacggugcccuuagaaa

SEQ ID NO: 1330492 - RNA, 19 nt, Homo sapiens
  misc_RNA (1)...(19): siRNA sense strand
gccaugaacucgaaaguga

SEQ ID NO: 1330493 - RNA, 19 nt, Homo sapiens
  misc_RNA (1)...(19): siRNA sense strand
gaaggcgucuacaacaauu

SEQ ID NO: 1330494 - RNA, 19 nt, Homo sapiens
  misc_RNA (1)...(19): siRNA sense strand
ccaguuggcucgagagauu

SEQ ID NO: 1330495 - RNA, 19 nt, Homo sapiens
  misc_RNA (1)...(19): siRNA sense strand
gaggagaacuacgguguga

SEQ ID NO: 1330496 - RNA, 19 nt, Homo sapiens
  misc_RNA (1)...(19): siRNA sense strand
gggcuccacuugugaugua

SEQ ID NO: 1330497 - RNA, 19 nt, Homo sapiens
  misc_RNA (1)...(19): siRNA sense strand
auagcagucuuucuucuua

SEQ ID NO: 1330498 - RNA, 19 nt, Homo sapiens
  misc_RNA (1)...(19): siRNA sense strand
aaagacaaguucaccgauu

SEQ ID NO: 1330499 - RNA, 19 nt, Homo sapiens
  misc_RNA (1)...(19): siRNA sense strand
ucaagacgcuaagcucaaa

SEQ ID NO: 1330500 - RNA, 19 nt, Homo sapiens
  misc_RNA (1)...(19): siRNA sense strand
gaacuacggugugaagacu

SEQ ID NO: 1330501 - RNA, 19 nt, Homo sapiens
  misc_RNA (1)...(19): siRNA sense strand
acuaugaccucgagucuga

SEQ ID NO: 1330502 - RNA, 19 nt, Homo sapiens
  misc_RNA (1)...(19): siRNA sense strand
ggacagagcacaggaaagg

SEQ ID NO: 1330503 - RNA, 19 nt, Homo sapiens
  misc_RNA (1)...(19): siRNA sense strand
caacuaugcuacuaaagac

SEQ ID NO: 1330504 - RNA, 19 nt, Homo sapiens
  misc_RNA (1)...(19): siRNA sense strand
guucaccgauucagccauu

SEQ ID NO: 1330505 - RNA, 19 nt, Homo sapiens
  misc_RNA (1)...(19): siRNA sense strand
gaaauguucaaguucaaug

SEQ ID NO: 1330506 - RNA, 19 nt, Homo sapiens
  misc_RNA (1)...(19): siRNA sense strand
ucaacuaugcuacuaaaga

SEQ ID NO: 1330507 - RNA, 19 nt, Homo sapiens
  misc_RNA (1)...(19): siRNA sense strand
gugaagacuaccuaugaua

SEQ ID NO: 1330508 - RNA, 19 nt, Homo sapiens
  misc_RNA (1)...(19): siRNA sense strand
cuucaacuaugcuacuaaa

SEQ ID NO: 1330509 - RNA, 19 nt, Homo sapiens
  misc_RNA (1)...(19): siRNA sense strand
gcaacagcgacgacuauga

SEQ ID NO: 1330510 - RNA, 19 nt, Homo sapiens
  misc_RNA (1)...(19): siRNA sense strand
uaagccaagugaugucaug

SEQ ID NO: 1330511 - RNA, 19 nt, Homo sapiens
  misc_RNA (1)...(19): siRNA sense strand
gcacugaagaggagaagca

SEQ ID NO: 1330512 - RNA, 19 nt, Homo sapiens
  misc_RNA (1)...(19): siRNA sense strand
uaugauagcagucuuucuu

SEQ ID NO: 1330513 - RNA, 19 nt, Homo sapiens
  misc_RNA (1)...(19): siRNA sense strand
gccaagugaugucaugcuu

SEQ ID NO: 1330514 - RNA, 19 nt, Homo sapiens
  misc_RNA (1)...(19): siRNA sense strand
gugugaagacuaccuauga

SEQ ID NO: 1330515 - RNA, 19 nt, Homo sapiens
  misc_RNA (1)...(19): siRNA sense strand
gacgcuaagcucaaaguuu

SEQ ID NO: 1330516 - RNA, 19 nt, Homo sapiens
  misc_RNA (1)...(19): siRNA sense strand
gauagcagucuuucuucuu

SEQ ID NO: 1330517 - RNA, 19 nt, Homo sapiens
  misc_RNA (1)...(19): siRNA sense strand
cuuguucacuuccgaaaug

SEQ ID NO: 1330518 - RNA, 19 nt, Homo sapiens
  misc_RNA (1)...(19): siRNA sense strand
ggagaacuacggugugaag

SEQ ID NO: 1330519 - RNA, 19 nt, Homo sapiens
  misc_RNA (1)...(19): siRNA sense strand
ccauugccaugaacucgaa

SEQ ID NO: 1330520 - RNA, 19 nt, Homo sapiens
  misc_RNA (1)...(19): siRNA sense strand
gacuucaacuaugcuacua

SEQ ID NO: 1330521 - RNA, 19 nt, Homo sapiens
  misc_RNA (1)...(19): siRNA sense strand
cuuauacggugcccuuaga

SEQ ID NO: 1330522 - RNA, 19 nt, Homo sapiens
  misc_RNA (1)...(19): siRNA sense strand
aagacaaguucaccgauuc

SEQ ID NO: 1330523 - RNA, 19 nt, Homo sapiens
  misc_RNA (1)...(19): siRNA sense strand
cagcaacagcgacgacuau

SEQ ID NO: 1330524 - RNA, 19 nt, Homo sapiens
  misc_RNA (1)...(19): siRNA sense strand
caacagcgacgacuaugac

SEQ ID NO: 1330525 - RNA, 19 nt, Homo sapiens
  misc_RNA (1)...(19): siRNA sense strand
ugucaugcuuguucacuuc

SEQ ID NO: 1330526 - RNA, 19 nt, Homo sapiens
  misc_RNA (1)...(19): siRNA sense strand
agucugacauguccaaugg

SEQ ID NO: 1330527 - RNA, 19 nt, Homo sapiens
  misc_RNA (1)...(19): siRNA sense strand
uagcagucuuucuucuuau

SEQ ID NO: 1330528 - RNA, 19 nt, Homo sapiens
  misc_RNA (1)...(19): siRNA sense strand
uugaaggcgucuacaacaa

SEQ ID NO: 1330529 - RNA, 19 nt, Homo sapiens
  misc_RNA (1)...(19): siRNA sense strand
ggaucgccauggagaacga

SEQ ID NO: 1330530 - RNA, 19 nt, Homo sapiens
  misc_RNA (1)...(19): siRNA sense strand
agcagucuuucuucuuaua

SEQ ID NO: 1330531 - RNA, 19 nt, Homo sapiens
  misc_RNA (1)...(19): siRNA sense strand
guucacuuccgaaauguug

SEQ ID NO: 1330532 - RNA, 19 nt, Homo sapiens
  misc_RNA (1)...(19): siRNA sense strand
gcauuuccuuacagcuguu

SEQ ID NO: 1330533 - RNA, 19 nt, Homo sapiens
  misc_RNA (1)...(19): siRNA sense strand
cuuccgaaauguugacuuc

SEQ ID NO: 1330534 - RNA, 19 nt, Homo sapiens
  misc_RNA (1)...(19): siRNA sense strand
ugaaggcgucuacaacaau

SEQ ID NO: 1330535 - RNA, 19 nt, Homo sapiens
  misc_RNA (1)...(19): siRNA sense strand
ugugaagacuaccuaugau

SEQ ID NO: 1330536 - RNA, 19 nt, Homo sapiens
  misc_RNA (1)...(19): siRNA sense strand
ugauagcagucuuucuucu

SEQ ID NO: 1330537 - RNA, 19 nt, Homo sapiens
  misc_RNA (1)...(19): siRNA sense strand
gugaugucaugcuuguuca

SEQ ID NO: 1330538 - RNA, 19 nt, Homo sapiens
  misc_RNA (1)...(19): siRNA sense strand
aaaaugguaccacuuauga

SEQ ID NO: 1330539 - RNA, 19 nt, Homo sapiens
  misc_RNA (1)...(19): siRNA sense strand
gaaaaggacaacucagaag

SEQ ID NO: 1330540 - RNA, 19 nt, Homo sapiens
  misc_RNA (1)...(19): siRNA sense strand
gggagccgaaggcaucuug

SEQ ID NO: 1330541 - RNA, 19 nt, Homo sapiens
  misc_RNA (1)...(19): siRNA sense strand
gacgaugggcgcacugaag

SEQ ID NO: 1330542 - RNA, 19 nt, Homo sapiens
  misc_RNA (1)...(19): siRNA sense strand
caugaacucgaaagugaau

SEQ ID NO: 1330543 - RNA, 19 nt, Homo sapiens
  misc_RNA (1)...(19): siRNA sense strand
gaccucgagucugacaugu

SEQ ID NO: 1330544 - RNA, 19 nt, Homo sapiens
  misc_RNA (1)...(19): siRNA sense strand
ccacuugugauguaaaggu

SEQ ID NO: 1330545 - RNA, 19 nt, Homo sapiens
  misc_RNA (1)...(19): siRNA sense strand
ggaccccaaugaaauguuc

SEQ ID NO: 1330546 - RNA, 19 nt, Homo sapiens
  misc_RNA (1)...(19): siRNA sense strand
ggugugaagacuaccuaug

SEQ ID NO: 1330547 - RNA, 19 nt, Homo sapiens
  misc_RNA (1)...(19): siRNA sense strand
uauacggugcccuuagaaa

SEQ ID NO: 1330548 - RNA, 19 nt, Homo sapiens
  misc_RNA (1)...(19): siRNA sense strand
gccaugaacucgaaaguga

SEQ ID NO: 1330549 - RNA, 19 nt, Homo sapiens
  misc_RNA (1)...(19): siRNA sense strand
gaaggcgucuacaacaauu

SEQ ID NO: 1330550 - RNA, 19 nt, Homo sapiens
  misc_RNA (1)...(19): siRNA sense strand
ccaguuggcucgagagauu

SEQ ID NO: 1330551 - RNA, 19 nt, Homo sapiens
  misc_RNA (1)...(19): siRNA sense strand
gaggagaacuacgguguga

SEQ ID NO: 1330552 - RNA, 19 nt, Homo sapiens
  misc_RNA (1)...(19): siRNA sense strand
gggcuccacuugugaugua

SEQ ID NO: 1330553 - RNA, 19 nt, Homo sapiens
  misc_RNA (1)...(19): siRNA sense strand
auagcagucuuucuucuua

SEQ ID NO: 1330554 - RNA, 19 nt, Homo sapiens
  misc_RNA (1)...(19): siRNA sense strand
aaagacaaguucaccgauu

SEQ ID NO: 1330555 - RNA, 19 nt, Homo sapiens
  misc_RNA (1)...(19): siRNA sense strand
ucaagacgcuaagcucaaa

SEQ ID NO: 1330556 - RNA, 19 nt, Homo sapiens
  misc_RNA (1)...(19): siRNA sense strand
gaacuacggugugaagacu

SEQ ID NO: 1330557 - RNA, 19 nt, Homo sapiens
  misc_RNA (1)...(19): siRNA sense strand
acuaugaccucgagucuga

SEQ ID NO: 1330558 - RNA, 19 nt, Homo sapiens
  misc_RNA (1)...(19): siRNA sense strand
ggacagagcacaggaaagg

SEQ ID NO: 1330559 - RNA, 19 nt, Homo sapiens
  misc_RNA (1)...(19): siRNA sense strand
caacuaugcuacuaaagac

SEQ ID NO: 1330560 - RNA, 19 nt, Homo sapiens
  misc_RNA (1)...(19): siRNA sense strand
guucaccgauucagccauu

SEQ ID NO: 1330561 - RNA, 19 nt, Homo sapiens
  misc_RNA (1)...(19): siRNA sense strand
gaaauguucaaguucaaug

SEQ ID NO: 1330562 - RNA, 19 nt, Homo sapiens
  misc_RNA (1)...(19): siRNA sense strand
ucaacuaugcuacuaaaga

SEQ ID NO: 1330563 - RNA, 19 nt, Homo sapiens
  misc_RNA (1)...(19): siRNA sense strand
gugaagacuaccuaugaua

SEQ ID NO: 1330564 - RNA, 19 nt, Homo sapiens
  misc_RNA (1)...(19): siRNA sense strand
cuucaacuaugcuacuaaa

SEQ ID NO: 1330565 - RNA, 19 nt, Homo sapiens
  misc_RNA (1)...(19): siRNA sense strand
gcaacagcgacgacuauga

SEQ ID NO: 1330566 - RNA, 19 nt, Homo sapiens
  misc_RNA (1)...(19): siRNA sense strand
uaagccaagugaugucaug

SEQ ID NO: 1330567 - RNA, 19 nt, Homo sapiens
  misc_RNA (1)...(19): siRNA sense strand
gcacugaagaggagaagca

SEQ ID NO: 1330568 - RNA, 19 nt, Homo sapiens
  misc_RNA (1)...(19): siRNA sense strand
uaugauagcagucuuucuu

SEQ ID NO: 1330569 - RNA, 19 nt, Homo sapiens
  misc_RNA (1)...(19): siRNA sense strand
gccaagugaugucaugcuu

SEQ ID NO: 1330570 - RNA, 19 nt, Homo sapiens
  misc_RNA (1)...(19): siRNA sense strand
gugugaagacuaccuauga

SEQ ID NO: 1330571 - RNA, 19 nt, Homo sapiens
  misc_RNA (1)...(19): siRNA sense strand
gacgcuaagcucaaaguuu

SEQ ID NO: 1330572 - RNA, 19 nt, Homo sapiens
  misc_RNA (1)...(19): siRNA sense strand
gauagcagucuuucuucuu

SEQ ID NO: 1330573 - RNA, 19 nt, Homo sapiens
  misc_RNA (1)...(19): siRNA sense strand
cuuguucacuuccgaaaug

SEQ ID NO: 1330574 - RNA, 19 nt, Homo sapiens
  misc_RNA (1)...(19): siRNA sense strand
ggagaacuacggugugaag

SEQ ID NO: 1330575 - RNA, 19 nt, Homo sapiens
  misc_RNA (1)...(19): siRNA sense strand
ccauugccaugaacucgaa

SEQ ID NO: 1330576 - RNA, 19 nt, Homo sapiens
  misc_RNA (1)...(19): siRNA sense strand
gacuucaacuaugcuacua

SEQ ID NO: 1330577 - RNA, 19 nt, Homo sapiens
  misc_RNA (1)...(19): siRNA sense strand
cuuauacggugcccuuaga

SEQ ID NO: 1330578 - RNA, 19 nt, Homo sapiens
  misc_RNA (1)...(19): siRNA sense strand
aagacaaguucaccgauuc

SEQ ID NO: 1330579 - RNA, 19 nt, Homo sapiens
  misc_RNA (1)...(19): siRNA sense strand
cagcaacagcgacgacuau

SEQ ID NO: 1330580 - RNA, 19 nt, Homo sapiens
  misc_RNA (1)...(19): siRNA sense strand
caacagcgacgacuaugac

SEQ ID NO: 1330581 - RNA, 19 nt, Homo sapiens
  misc_RNA (1)...(19): siRNA sense strand
ugucaugcuuguucacuuc

SEQ ID NO: 1330582 - RNA, 19 nt, Homo sapiens
  misc_RNA (1)...(19): siRNA sense strand
agucugacauguccaaugg

SEQ ID NO: 1330583 - RNA, 19 nt, Homo sapiens
  misc_RNA (1)...(19): siRNA sense strand
uagcagucuuucuucuuau

SEQ ID NO: 1330584 - RNA, 19 nt, Homo sapiens
  misc_RNA (1)...(19): siRNA sense strand
uugaaggcgucuacaacaa

SEQ ID NO: 1330585 - RNA, 19 nt, Homo sapiens
  misc_RNA (1)...(19): siRNA sense strand
ggaucgccauggagaacga

SEQ ID NO: 1330586 - RNA, 19 nt, Homo sapiens
  misc_RNA (1)...(19): siRNA sense strand
agcagucuuucuucuuaua

SEQ ID NO: 1330587 - RNA, 19 nt, Homo sapiens
  misc_RNA (1)...(19): siRNA sense strand
guucacuuccgaaauguug

SEQ ID NO: 1330588 - RNA, 19 nt, Homo sapiens
  misc_RNA (1)...(19): siRNA sense strand
gcauuuccuuacagcuguu

SEQ ID NO: 1330589 - RNA, 19 nt, Homo sapiens
  misc_RNA (1)...(19): siRNA sense strand
cuuccgaaauguugacuuc

SEQ ID NO: 1330590 - RNA, 19 nt, Homo sapiens
  misc_RNA (1)...(19): siRNA sense strand
ugaaggcgucuacaacaau

SEQ ID NO: 1330591 - RNA, 19 nt, Homo sapiens
  misc_RNA (1)...(19): siRNA sense strand
ugugaagacuaccuaugau

SEQ ID NO: 1330592 - RNA, 19 nt, Homo sapiens
  misc_RNA (1)...(19): siRNA sense strand
ugauagcagucuuucuucu

SEQ ID NO: 1330593 - RNA, 19 nt, Homo sapiens
  misc_RNA (1)...(19): siRNA sense strand
gugaugucaugcuuguuca

SEQ ID NO: 1330594 - RNA, 19 nt, Homo sapiens
  misc_RNA (1)...(19): siRNA sense strand
aaaaugguaccacuuauga

SEQ ID NO: 1330595 - RNA, 19 nt, Homo sapiens
  misc_RNA (1)...(19): siRNA sense strand
gaaaaggacaacucagaag

SEQ ID NO: 1330596 - RNA, 19 nt, Homo sapiens
  misc_RNA (1)...(19): siRNA sense strand
gggagccgaaggcaucuug

SEQ ID NO: 1330597 - RNA, 19 nt, Homo sapiens
  misc_RNA (1)...(19): siRNA sense strand
gacgaugggcgcacugaag

SEQ ID NO: 1330598 - RNA, 19 nt, Homo sapiens
  misc_RNA (1)...(19): siRNA sense strand
caugaacucgaaagugaau

SEQ ID NO: 1330599 - RNA, 19 nt, Homo sapiens
  misc_RNA (1)...(19): siRNA sense strand
gaccucgagucugacaugu

SEQ ID NO: 1330600 - RNA, 19 nt, Homo sapiens
  misc_RNA (1)...(19): siRNA sense strand
ccacuugugauguaaaggu

SEQ ID NO: 1330601 - RNA, 19 nt, Homo sapiens
  misc_RNA (1)...(19): siRNA sense strand
ggaccccaaugaaauguuc

SEQ ID NO: 1330602 - RNA, 19 nt, Homo sapiens
  misc_RNA (1)...(19): siRNA sense strand
ggugugaagacuaccuaug

SEQ ID NO: 1330603 - RNA, 19 nt, Homo sapiens
  misc_RNA (1)...(19): siRNA sense strand
uauacggugcccuuagaaa

SEQ ID NO: 1330604 - RNA, 19 nt, Homo sapiens
  misc_RNA (1)...(19): siRNA sense strand
caacugagcaaucccaaga

SEQ ID NO: 1330605 - RNA, 19 nt, Homo sapiens
  misc_RNA (1)...(19): siRNA sense strand
caagaagagcugcaacaaa

SEQ ID NO: 1330606 - RNA, 19 nt, Homo sapiens
  misc_RNA (1)...(19): siRNA sense strand
aagaagagcugcaacaaaa

SEQ ID NO: 1330607 - RNA, 19 nt, Homo sapiens
  misc_RNA (1)...(19): siRNA sense strand
ggagaagccguuccagugu

SEQ ID NO: 1330608 - RNA, 19 nt, Homo sapiens
  misc_RNA (1)...(19): siRNA sense strand
gcacaugggagccuucaag

SEQ ID NO: 1330609 - RNA, 19 nt, Homo sapiens
  misc_RNA (1)...(19): siRNA sense strand
caaugaaugguacguguga

SEQ ID NO: 1330610 - RNA, 19 nt, Homo sapiens
  misc_RNA (1)...(19): siRNA sense strand
cuucaaggccaaauacaaa

SEQ ID NO: 1330611 - RNA, 19 nt, Homo sapiens
  misc_RNA (1)...(19): siRNA sense strand
agaagccguuccaguguga

SEQ ID NO: 1330612 - RNA, 19 nt, Homo sapiens
  misc_RNA (1)...(19): siRNA sense strand
aauaugaacauggguauga

SEQ ID NO: 1330613 - RNA, 19 nt, Homo sapiens
  misc_RNA (1)...(19): siRNA sense strand
gcaucaagcaggagcuaau

SEQ ID NO: 1330614 - RNA, 19 nt, Homo sapiens
  misc_RNA (1)...(19): siRNA sense strand
ccgagaaccucaagaucca

SEQ ID NO: 1330615 - RNA, 19 nt, Homo sapiens
  misc_RNA (1)...(19): siRNA sense strand
ccaagaagagcugcaacaa

SEQ ID NO: 1330616 - RNA, 19 nt, Homo sapiens
  misc_RNA (1)...(19): siRNA sense strand
gcacguuggcuccuacucu

SEQ ID NO: 1330617 - RNA, 19 nt, Homo sapiens
  misc_RNA (1)...(19): siRNA sense strand
ccaaauacaaacuggucaa

SEQ ID NO: 1330618 - RNA, 19 nt, Homo sapiens
  misc_RNA (1)...(19): siRNA sense strand
ugcacgagcuggugacaca

SEQ ID NO: 1330619 - RNA, 19 nt, Homo sapiens
  misc_RNA (1)...(19): siRNA sense strand
gcuccgagaaccucaagau

SEQ ID NO: 1330620 - RNA, 19 nt, Homo sapiens
  misc_RNA (1)...(19): siRNA sense strand
gcaaccacgucugcuucug

SEQ ID NO: 1330621 - RNA, 19 nt, Homo sapiens
  misc_RNA (1)...(19): siRNA sense strand
gcacggcucgcagaaugug

SEQ ID NO: 1330622 - RNA, 19 nt, Homo sapiens
  misc_RNA (1)...(19): siRNA sense strand
gaauaugaacauggguaug

SEQ ID NO: 1330623 - RNA, 19 nt, Homo sapiens
  misc_RNA (1)...(19): siRNA sense strand
cggcgcaacuccacaacca

SEQ ID NO: 1330624 - RNA, 19 nt, Homo sapiens
  misc_RNA (1)...(19): siRNA sense strand
ugaauaugaacauggguau

SEQ ID NO: 1330625 - RNA, 19 nt, Homo sapiens
  misc_RNA (1)...(19): siRNA sense strand
ugagcaaucccaagaagag

SEQ ID NO: 1330626 - RNA, 19 nt, Homo sapiens
  misc_RNA (1)...(19): siRNA sense strand
caacuccacccgggacuuc

SEQ ID NO: 1330627 - RNA, 19 nt, Homo sapiens
  misc_RNA (1)...(19): siRNA sense strand
gcagcgacaggaagaagca

SEQ ID NO: 1330628 - RNA, 19 nt, Homo sapiens
  misc_RNA (1)...(19): siRNA sense strand
gcaagaugugcgacaaguc

SEQ ID NO: 1330629 - RNA, 19 nt, Homo sapiens
  misc_RNA (1)...(19): siRNA sense strand
acagcggccucuccuccaa

SEQ ID NO: 1330630 - RNA, 19 nt, Homo sapiens
  misc_RNA (1)...(19): siRNA sense strand
gaugcaggaccgugaacug

SEQ ID NO: 1330631 - RNA, 19 nt, Homo sapiens
  misc_RNA (1)...(19): siRNA sense strand
gaaggucacuauguucaug

SEQ ID NO: 1330632 - RNA, 19 nt, Homo sapiens
  misc_RNA (1)...(19): siRNA sense strand
aaaccucgguggaaaguca

SEQ ID NO: 1330633 - RNA, 19 nt, Homo sapiens
  misc_RNA (1)...(19): siRNA sense strand
aauggaaggucacuauguu

SEQ ID NO: 1330634 - RNA, 19 nt, Homo sapiens
  misc_RNA (1)...(19): siRNA sense strand
gaaaauggaaggucacuau

SEQ ID NO: 1330635 - RNA, 19 nt, Homo sapiens
  misc_RNA (1)...(19): siRNA sense strand
ggaacaucauugcaacaca

SEQ ID NO: 1330636 - RNA, 19 nt, Homo sapiens
  misc_RNA (1)...(19): siRNA sense strand
ggaagaauaaaugucugua

SEQ ID NO: 1330637 - RNA, 19 nt, Homo sapiens
  misc_RNA (1)...(19): siRNA sense strand
ucagauacgcauccaagaa

SEQ ID NO: 1330638 - RNA, 19 nt, Homo sapiens
  misc_RNA (1)...(19): siRNA sense strand
gcugugcucuacaagacuu

SEQ ID NO: 1330639 - RNA, 19 nt, Homo sapiens
  misc_RNA (1)...(19): siRNA sense strand
ggcagacgccaaggcauua

SEQ ID NO: 1330640 - RNA, 19 nt, Homo sapiens
  misc_RNA (1)...(19): siRNA sense strand
aaacugguagcuaugcuuu

SEQ ID NO: 1330641 - RNA, 19 nt, Homo sapiens
  misc_RNA (1)...(19): siRNA sense strand
caagggugcugugcucuac

SEQ ID NO: 1330642 - RNA, 19 nt, Homo sapiens
  misc_RNA (1)...(19): siRNA sense strand
uccaagaagucggguggua

SEQ ID NO: 1330643 - RNA, 19 nt, Homo sapiens
  misc_RNA (1)...(19): siRNA sense strand
acugguagcuaugcuuuga

SEQ ID NO: 1330644 - RNA, 19 nt, Homo sapiens
  misc_RNA (1)...(19): siRNA sense strand
gcugggaacaucauugcaa

SEQ ID NO: 1330645 - RNA, 19 nt, Homo sapiens
  misc_RNA (1)...(19): siRNA sense strand
ccuucaaacugguagcuau

SEQ ID NO: 1330646 - RNA, 19 nt, Homo sapiens
  misc_RNA (1)...(19): siRNA sense strand
gcagacgccaaggcauuaa

SEQ ID NO: 1330647 - RNA, 19 nt, Homo sapiens
  misc_RNA (1)...(19): siRNA sense strand
gugcugugcucuacaagac

SEQ ID NO: 1330648 - RNA, 19 nt, Homo sapiens
  misc_RNA (1)...(19): siRNA sense strand
gccaaggcauuaagaaaau

SEQ ID NO: 1330649 - RNA, 19 nt, Homo sapiens
  misc_RNA (1)...(19): siRNA sense strand
ccaagggugcugugcucua

SEQ ID NO: 1330650 - RNA, 19 nt, Homo sapiens
  misc_RNA (1)...(19): siRNA sense strand
cagauacgcauccaagaag

SEQ ID NO: 1330651 - RNA, 19 nt, Homo sapiens
  misc_RNA (1)...(19): siRNA sense strand
gggaagaauaaaugucugu

SEQ ID NO: 1330652 - RNA, 19 nt, Homo sapiens
  misc_RNA (1)...(19): siRNA sense strand
aaauggaaggucacuaugu

SEQ ID NO: 1330653 - RNA, 19 nt, Homo sapiens
  misc_RNA (1)...(19): siRNA sense strand
acacggaggcuguggaucu

SEQ ID NO: 1330654 - RNA, 19 nt, Homo sapiens
  misc_RNA (1)...(19): siRNA sense strand
ggaaggucacuauguucau

SEQ ID NO: 1330655 - RNA, 19 nt, Homo sapiens
  misc_RNA (1)...(19): siRNA sense strand
gguguugggaagaauaaau

SEQ ID NO: 1330656 - RNA, 19 nt, Homo sapiens
  misc_RNA (1)...(19): siRNA sense strand
ugagggcaccuucaaacug

SEQ ID NO: 1330657 - RNA, 19 nt, Homo sapiens
  misc_RNA (1)...(19): siRNA sense strand
caaacugguagcuaugcuu

SEQ ID NO: 1330658 - RNA, 19 nt, Homo sapiens
  misc_RNA (1)...(19): siRNA sense strand
gggcaccuucaaacuggua

SEQ ID NO: 1330659 - RNA, 19 nt, Homo sapiens
  misc_RNA (1)...(19): siRNA sense strand
gaaggucacuauguucaug

SEQ ID NO: 1330660 - RNA, 19 nt, Homo sapiens
  misc_RNA (1)...(19): siRNA sense strand
ggaacaucauugcaacaca

SEQ ID NO: 1330661 - RNA, 19 nt, Homo sapiens
  misc_RNA (1)...(19): siRNA sense strand
ggaagaauaaaugucugua

SEQ ID NO: 1330662 - RNA, 19 nt, Homo sapiens
  misc_RNA (1)...(19): siRNA sense strand
gcugugcucuacaagacuu

SEQ ID NO: 1330663 - RNA, 19 nt, Homo sapiens
  misc_RNA (1)...(19): siRNA sense strand
aaacugguagcuaugcuuu

SEQ ID NO: 1330664 - RNA, 19 nt, Homo sapiens
  misc_RNA (1)...(19): siRNA sense strand
caagggugcugugcucuac

SEQ ID NO: 1330665 - RNA, 19 nt, Homo sapiens
  misc_RNA (1)...(19): siRNA sense strand
acugguagcuaugcuuuga

SEQ ID NO: 1330666 - RNA, 19 nt, Homo sapiens
  misc_RNA (1)...(19): siRNA sense strand
gcugggaacaucauugcaa

SEQ ID NO: 1330667 - RNA, 19 nt, Homo sapiens
  misc_RNA (1)...(19): siRNA sense strand
ccuucaaacugguagcuau

SEQ ID NO: 1330668 - RNA, 19 nt, Homo sapiens
  misc_RNA (1)...(19): siRNA sense strand
gugcugugcucuacaagac

SEQ ID NO: 1330669 - RNA, 19 nt, Homo sapiens
  misc_RNA (1)...(19): siRNA sense strand
ccaagggugcugugcucua

SEQ ID NO: 1330670 - RNA, 19 nt, Homo sapiens
  misc_RNA (1)...(19): siRNA sense strand
gggaagaauaaaugucugu

SEQ ID NO: 1330671 - RNA, 19 nt, Homo sapiens
  misc_RNA (1)...(19): siRNA sense strand
ggaaggucacuauguucau

SEQ ID NO: 1330672 - RNA, 19 nt, Homo sapiens
  misc_RNA (1)...(19): siRNA sense strand
acacggaggcuguggaucu

SEQ ID NO: 1330673 - RNA, 19 nt, Homo sapiens
  misc_RNA (1)...(19): siRNA sense strand
gguguugggaagaauaaau

SEQ ID NO: 1330674 - RNA, 19 nt, Homo sapiens
  misc_RNA (1)...(19): siRNA sense strand
ugagggcaccuucaaacug

SEQ ID NO: 1330675 - RNA, 19 nt, Homo sapiens
  misc_RNA (1)...(19): siRNA sense strand
caaacugguagcuaugcuu

SEQ ID NO: 1330676 - RNA, 19 nt, Homo sapiens
  misc_RNA (1)...(19): siRNA sense strand
gggcaccuucaaacuggua

SEQ ID NO: 1330677 - RNA, 19 nt, Homo sapiens
  misc_RNA (1)...(19): siRNA sense strand
gaaggucacuauguucaug

SEQ ID NO: 1330678 - RNA, 19 nt, Homo sapiens
  misc_RNA (1)...(19): siRNA sense strand
aaaccucgguggaaaguca

SEQ ID NO: 1330679 - RNA, 19 nt, Homo sapiens
  misc_RNA (1)...(19): siRNA sense strand
aauggaaggucacuauguu

SEQ ID NO: 1330680 - RNA, 19 nt, Homo sapiens
  misc_RNA (1)...(19): siRNA sense strand
gaaaauggaaggucacuau

SEQ ID NO: 1330681 - RNA, 19 nt, Homo sapiens
  misc_RNA (1)...(19): siRNA sense strand
ggaacaucauugcaacaca

SEQ ID NO: 1330682 - RNA, 19 nt, Homo sapiens
  misc_RNA (1)...(19): siRNA sense strand
ucagauacgcauccaagaa

SEQ ID NO: 1330683 - RNA, 19 nt, Homo sapiens
  misc_RNA (1)...(19): siRNA sense strand
ggcagacgccaaggcauua

SEQ ID NO: 1330684 - RNA, 19 nt, Homo sapiens
  misc_RNA (1)...(19): siRNA sense strand
uccaagaagucggguggua

SEQ ID NO: 1330685 - RNA, 19 nt, Homo sapiens
  misc_RNA (1)...(19): siRNA sense strand
gcugggaacaucauugcaa

SEQ ID NO: 1330686 - RNA, 19 nt, Homo sapiens
  misc_RNA (1)...(19): siRNA sense strand
gcagacgccaaggcauuaa

SEQ ID NO: 1330687 - RNA, 19 nt, Homo sapiens
  misc_RNA (1)...(19): siRNA sense strand
gccaaggcauuaagaaaau

SEQ ID NO: 1330688 - RNA, 19 nt, Homo sapiens
  misc_RNA (1)...(19): siRNA sense strand
cagauacgcauccaagaag

SEQ ID NO: 1330689 - RNA, 19 nt, Homo sapiens
  misc_RNA (1)...(19): siRNA sense strand
aaauggaaggucacuaugu

SEQ ID NO: 1330690 - RNA, 19 nt, Homo sapiens
  misc_RNA (1)...(19): siRNA sense strand
ggaaggucacuauguucau

SEQ ID NO: 1330691 - RNA, 19 nt, Homo sapiens
  misc_RNA (1)...(19): siRNA sense strand
gaaggucacuauguucaug

SEQ ID NO: 1330692 - RNA, 19 nt, Homo sapiens
  misc_RNA (1)...(19): siRNA sense strand
aaaccucgguggaaaguca

SEQ ID NO: 1330693 - RNA, 19 nt, Homo sapiens
  misc_RNA (1)...(19): siRNA sense strand
aauggaaggucacuauguu

SEQ ID NO: 1330694 - RNA, 19 nt, Homo sapiens
  misc_RNA (1)...(19): siRNA sense strand
gaaaauggaaggucacuau

SEQ ID NO: 1330695 - RNA, 19 nt, Homo sapiens
  misc_RNA (1)...(19): siRNA sense strand
ggaacaucauugcaacaca

SEQ ID NO: 1330696 - RNA, 19 nt, Homo sapiens
  misc_RNA (1)...(19): siRNA sense strand
ggaagaauaaaugucugua

SEQ ID NO: 1330697 - RNA, 19 nt, Homo sapiens
  misc_RNA (1)...(19): siRNA sense strand
ucagauacgcauccaagaa

SEQ ID NO: 1330698 - RNA, 19 nt, Homo sapiens
  misc_RNA (1)...(19): siRNA sense strand
gcugugcucuacaagacuu

SEQ ID NO: 1330699 - RNA, 19 nt, Homo sapiens
  misc_RNA (1)...(19): siRNA sense strand
ggcagacgccaaggcauua

SEQ ID NO: 1330700 - RNA, 19 nt, Homo sapiens
  misc_RNA (1)...(19): siRNA sense strand
aaacugguagcuaugcuuu

SEQ ID NO: 1330701 - RNA, 19 nt, Homo sapiens
  misc_RNA (1)...(19): siRNA sense strand
caagggugcugugcucuac

SEQ ID NO: 1330702 - RNA, 19 nt, Homo sapiens
  misc_RNA (1)...(19): siRNA sense strand
uccaagaagucggguggua

SEQ ID NO: 1330703 - RNA, 19 nt, Homo sapiens
  misc_RNA (1)...(19): siRNA sense strand
acugguagcuaugcuuuga

SEQ ID NO: 1330704 - RNA, 19 nt, Homo sapiens
  misc_RNA (1)...(19): siRNA sense strand
gcugggaacaucauugcaa

SEQ ID NO: 1330705 - RNA, 19 nt, Homo sapiens
  misc_RNA (1)...(19): siRNA sense strand
ccuucaaacugguagcuau

SEQ ID NO: 1330706 - RNA, 19 nt, Homo sapiens
  misc_RNA (1)...(19): siRNA sense strand
gcagacgccaaggcauuaa

SEQ ID NO: 1330707 - RNA, 19 nt, Homo sapiens
  misc_RNA (1)...(19): siRNA sense strand
gugcugugcucuacaagac

SEQ ID NO: 1330708 - RNA, 19 nt, Homo sapiens
  misc_RNA (1)...(19): siRNA sense strand
gccaaggcauuaagaaaau

SEQ ID NO: 1330709 - RNA, 19 nt, Homo sapiens
  misc_RNA (1)...(19): siRNA sense strand
ccaagggugcugugcucua

SEQ ID NO: 1330710 - RNA, 19 nt, Homo sapiens
  misc_RNA (1)...(19): siRNA sense strand
cagauacgcauccaagaag

SEQ ID NO: 1330711 - RNA, 19 nt, Homo sapiens
  misc_RNA (1)...(19): siRNA sense strand
gggaagaauaaaugucugu

SEQ ID NO: 1330712 - RNA, 19 nt, Homo sapiens
  misc_RNA (1)...(19): siRNA sense strand
aaauggaaggucacuaugu

SEQ ID NO: 1330713 - RNA, 19 nt, Homo sapiens
  misc_RNA (1)...(19): siRNA sense strand
acacggaggcuguggaucu

SEQ ID NO: 1330714 - RNA, 19 nt, Homo sapiens
  misc_RNA (1)...(19): siRNA sense strand
ggaaggucacuauguucau

SEQ ID NO: 1330715 - RNA, 19 nt, Homo sapiens
  misc_RNA (1)...(19): siRNA sense strand
gguguugggaagaauaaau

SEQ ID NO: 1330716 - RNA, 19 nt, Homo sapiens
  misc_RNA (1)...(19): siRNA sense strand
ugagggcaccuucaaacug

SEQ ID NO: 1330717 - RNA, 19 nt, Homo sapiens
  misc_RNA (1)...(19): siRNA sense strand
caaacugguagcuaugcuu

SEQ ID NO: 1330718 - RNA, 19 nt, Homo sapiens
  misc_RNA (1)...(19): siRNA sense strand
gggcaccuucaaacuggua

SEQ ID NO: 1330719 - RNA, 19 nt, Homo sapiens
  misc_RNA (1)...(19): siRNA sense strand
gaaggucacuauguucaug

SEQ ID NO: 1330720 - RNA, 19 nt, Homo sapiens
  misc_RNA (1)...(19): siRNA sense strand
ggaacaucauugcaacaca

SEQ ID NO: 1330721 - RNA, 19 nt, Homo sapiens
  misc_RNA (1)...(19): siRNA sense strand
ggaagaauaaaugucugua

SEQ ID NO: 1330722 - RNA, 19 nt, Homo sapiens
  misc_RNA (1)...(19): siRNA sense strand
gcugugcucuacaagacuu

SEQ ID NO: 1330723 - RNA, 19 nt, Homo sapiens
  misc_RNA (1)...(19): siRNA sense strand
aaacugguagcuaugcuuu

SEQ ID NO: 1330724 - RNA, 19 nt, Homo sapiens
  misc_RNA (1)...(19): siRNA sense strand
caagggugcugugcucuac

SEQ ID NO: 1330725 - RNA, 19 nt, Homo sapiens
  misc_RNA (1)...(19): siRNA sense strand
acugguagcuaugcuuuga

SEQ ID NO: 1330726 - RNA, 19 nt, Homo sapiens
  misc_RNA (1)...(19): siRNA sense strand
gcugggaacaucauugcaa

SEQ ID NO: 1330727 - RNA, 19 nt, Homo sapiens
  misc_RNA (1)...(19): siRNA sense strand
ccuucaaacugguagcuau

SEQ ID NO: 1330728 - RNA, 19 nt, Homo sapiens
  misc_RNA (1)...(19): siRNA sense strand
gugcugugcucuacaagac

SEQ ID NO: 1330729 - RNA, 19 nt, Homo sapiens
  misc_RNA (1)...(19): siRNA sense strand
ccaagggugcugugcucua

SEQ ID NO: 1330730 - RNA, 19 nt, Homo sapiens
  misc_RNA (1)...(19): siRNA sense strand
gggaagaauaaaugucugu

SEQ ID NO: 1330731 - RNA, 19 nt, Homo sapiens
  misc_RNA (1)...(19): siRNA sense strand
ggaaggucacuauguucau

SEQ ID NO: 1330732 - RNA, 19 nt, Homo sapiens
  misc_RNA (1)...(19): siRNA sense strand
acacggaggcuguggaucu

SEQ ID NO: 1330733 - RNA, 19 nt, Homo sapiens
  misc_RNA (1)...(19): siRNA sense strand
gguguugggaagaauaaau

SEQ ID NO: 1330734 - RNA, 19 nt, Homo sapiens
  misc_RNA (1)...(19): siRNA sense strand
ugagggcaccuucaaacug

SEQ ID NO: 1330735 - RNA, 19 nt, Homo sapiens
  misc_RNA (1)...(19): siRNA sense strand
caaacugguagcuaugcuu

SEQ ID NO: 1330736 - RNA, 19 nt, Homo sapiens
  misc_RNA (1)...(19): siRNA sense strand
gggcaccuucaaacuggua

SEQ ID NO: 1330737 - RNA, 19 nt, Homo sapiens
  misc_RNA (1)...(19): siRNA sense strand
gaaggucacuauguucaug

SEQ ID NO: 1330738 - RNA, 19 nt, Homo sapiens
  misc_RNA (1)...(19): siRNA sense strand
aaaccucgguggaaaguca

SEQ ID NO: 1330739 - RNA, 19 nt, Homo sapiens
  misc_RNA (1)...(19): siRNA sense strand
aauggaaggucacuauguu

SEQ ID NO: 1330740 - RNA, 19 nt, Homo sapiens
  misc_RNA (1)...(19): siRNA sense strand
gaaaauggaaggucacuau

SEQ ID NO: 1330741 - RNA, 19 nt, Homo sapiens
  misc_RNA (1)...(19): siRNA sense strand
ggaacaucauugcaacaca

SEQ ID NO: 1330742 - RNA, 19 nt, Homo sapiens
  misc_RNA (1)...(19): siRNA sense strand
ucagauacgcauccaagaa

SEQ ID NO: 1330743 - RNA, 19 nt, Homo sapiens
  misc_RNA (1)...(19): siRNA sense strand
ggcagacgccaaggcauua

SEQ ID NO: 1330744 - RNA, 19 nt, Homo sapiens
  misc_RNA (1)...(19): siRNA sense strand
uccaagaagucggguggua

SEQ ID NO: 1330745 - RNA, 19 nt, Homo sapiens
  misc_RNA (1)...(19): siRNA sense strand
gcugggaacaucauugcaa

SEQ ID NO: 1330746 - RNA, 19 nt, Homo sapiens
  misc_RNA (1)...(19): siRNA sense strand
gcagacgccaaggcauuaa

SEQ ID NO: 1330747 - RNA, 19 nt, Homo sapiens
  misc_RNA (1)...(19): siRNA sense strand
gccaaggcauuaagaaaau

SEQ ID NO: 1330748 - RNA, 19 nt, Homo sapiens
  misc_RNA (1)...(19): siRNA sense strand
cagauacgcauccaagaag

SEQ ID NO: 1330749 - RNA, 19 nt, Homo sapiens
  misc_RNA (1)...(19): siRNA sense strand
aaauggaaggucacuaugu

SEQ ID NO: 1330750 - RNA, 19 nt, Homo sapiens
  misc_RNA (1)...(19): siRNA sense strand
ggaaggucacuauguucau

SEQ ID NO: 1330751 - RNA, 19 nt, Homo sapiens
  misc_RNA (1)...(19): siRNA sense strand
gcacggagguuucacauca

SEQ ID NO: 1330752 - RNA, 19 nt, Homo sapiens
  misc_RNA (1)...(19): siRNA sense strand
gcacaaccauacuguuaag

SEQ ID NO: 1330753 - RNA, 19 nt, Homo sapiens
  misc_RNA (1)...(19): siRNA sense strand
ggaaagagugaauaugugu

SEQ ID NO: 1330754 - RNA, 19 nt, Homo sapiens
  misc_RNA (1)...(19): siRNA sense strand
cgaaacauacggccauaaa

SEQ ID NO: 1330755 - RNA, 19 nt, Homo sapiens
  misc_RNA (1)...(19): siRNA sense strand
ccgcacaaccauacuguua

SEQ ID NO: 1330756 - RNA, 19 nt, Homo sapiens
  misc_RNA (1)...(19): siRNA sense strand
gaaggcuccuggaaagagu

SEQ ID NO: 1330757 - RNA, 19 nt, Homo sapiens
  misc_RNA (1)...(19): siRNA sense strand
ggagguuucacaucauauu

SEQ ID NO: 1330758 - RNA, 19 nt, Homo sapiens
  misc_RNA (1)...(19): siRNA sense strand
agugcaagcugccaagaaa

SEQ ID NO: 1330759 - RNA, 19 nt, Homo sapiens
  misc_RNA (1)...(19): siRNA sense strand
guuaagcaguggaugaaag

SEQ ID NO: 1330760 - RNA, 19 nt, Homo sapiens
  misc_RNA (1)...(19): siRNA sense strand
gagguuucacaucauauuu

SEQ ID NO: 1330761 - RNA, 19 nt, Homo sapiens
  misc_RNA (1)...(19): siRNA sense strand
uggaaagagugaauaugug

SEQ ID NO: 1330762 - RNA, 19 nt, Homo sapiens
  misc_RNA (1)...(19): siRNA sense strand
ggcccuacaugccucagaa

SEQ ID NO: 1330763 - RNA, 19 nt, Homo sapiens
  misc_RNA (1)...(19): siRNA sense strand
acggagguuucacaucaua

SEQ ID NO: 1330764 - RNA, 19 nt, Homo sapiens
  misc_RNA (1)...(19): siRNA sense strand
gcugucauccuucauguca

SEQ ID NO: 1330765 - RNA, 19 nt, Homo sapiens
  misc_RNA (1)...(19): siRNA sense strand
gaaauguuugccacaggaa

SEQ ID NO: 1330766 - RNA, 19 nt, Homo sapiens
  misc_RNA (1)...(19): siRNA sense strand
cacgaaacauacggccaua

SEQ ID NO: 1330767 - RNA, 19 nt, Homo sapiens
  misc_RNA (1)...(19): siRNA sense strand
cacaucauauuuccagaag

SEQ ID NO: 1330768 - RNA, 19 nt, Homo sapiens
  misc_RNA (1)...(19): siRNA sense strand
ucacaucauauuuccagaa

SEQ ID NO: 1330769 - RNA, 19 nt, Homo sapiens
  misc_RNA (1)...(19): siRNA sense strand
gaaacauacggccauaaaa

SEQ ID NO: 1330770 - RNA, 19 nt, Homo sapiens
  misc_RNA (1)...(19): siRNA sense strand
ggcaagaggaacaguaaca

SEQ ID NO: 1330771 - RNA, 19 nt, Homo sapiens
  misc_RNA (1)...(19): siRNA sense strand
cuggaaagagugaauaugu

SEQ ID NO: 1330772 - RNA, 19 nt, Homo sapiens
  misc_RNA (1)...(19): siRNA sense strand
cccauugccuccagcuguu

SEQ ID NO: 1330773 - RNA, 19 nt, Homo sapiens
  misc_RNA (1)...(19): siRNA sense strand
gucaagcgcagaagaaucu

SEQ ID NO: 1330774 - RNA, 19 nt, Homo sapiens
  misc_RNA (1)...(19): siRNA sense strand
caugucaagcgcagaagaa

SEQ ID NO: 1330775 - RNA, 19 nt, Homo sapiens
  misc_RNA (1)...(19): siRNA sense strand
agagaggacucgccaucgu

SEQ ID NO: 1330776 - RNA, 19 nt, Homo sapiens
  misc_RNA (1)...(19): siRNA sense strand
ugucauccuucaugucaag

SEQ ID NO: 1330777 - RNA, 19 nt, Homo sapiens
  misc_RNA (1)...(19): siRNA sense strand
cgcacaaccauacuguuaa

SEQ ID NO: 1330778 - RNA, 19 nt, Homo sapiens
  misc_RNA (1)...(19): siRNA sense strand
gcaagaggaacaguaacag

SEQ ID NO: 1330779 - RNA, 19 nt, Homo sapiens
  misc_RNA (1)...(19): siRNA sense strand
cauggcaagaggaacagua

SEQ ID NO: 1330780 - RNA, 19 nt, Homo sapiens
  misc_RNA (1)...(19): siRNA sense strand
uggcugcugucauccuuca

SEQ ID NO: 1330781 - RNA, 19 nt, Homo sapiens
  misc_RNA (1)...(19): siRNA sense strand
gcacggagguuucacauca

SEQ ID NO: 1330782 - RNA, 19 nt, Homo sapiens
  misc_RNA (1)...(19): siRNA sense strand
gcacaaccauacuguuaag

SEQ ID NO: 1330783 - RNA, 19 nt, Homo sapiens
  misc_RNA (1)...(19): siRNA sense strand
ggaaagagugaauaugugu

SEQ ID NO: 1330784 - RNA, 19 nt, Homo sapiens
  misc_RNA (1)...(19): siRNA sense strand
cgaaacauacggccauaaa

SEQ ID NO: 1330785 - RNA, 19 nt, Homo sapiens
  misc_RNA (1)...(19): siRNA sense strand
ccgcacaaccauacuguua

SEQ ID NO: 1330786 - RNA, 19 nt, Homo sapiens
  misc_RNA (1)...(19): siRNA sense strand
gaaggcuccuggaaagagu

SEQ ID NO: 1330787 - RNA, 19 nt, Homo sapiens
  misc_RNA (1)...(19): siRNA sense strand
ggagguuucacaucauauu

SEQ ID NO: 1330788 - RNA, 19 nt, Homo sapiens
  misc_RNA (1)...(19): siRNA sense strand
agugcaagcugccaagaaa

SEQ ID NO: 1330789 - RNA, 19 nt, Homo sapiens
  misc_RNA (1)...(19): siRNA sense strand
guuaagcaguggaugaaag

SEQ ID NO: 1330790 - RNA, 19 nt, Homo sapiens
  misc_RNA (1)...(19): siRNA sense strand
gagguuucacaucauauuu

SEQ ID NO: 1330791 - RNA, 19 nt, Homo sapiens
  misc_RNA (1)...(19): siRNA sense strand
uggaaagagugaauaugug

SEQ ID NO: 1330792 - RNA, 19 nt, Homo sapiens
  misc_RNA (1)...(19): siRNA sense strand
ggcccuacaugccucagaa

SEQ ID NO: 1330793 - RNA, 19 nt, Homo sapiens
  misc_RNA (1)...(19): siRNA sense strand
acggagguuucacaucaua

SEQ ID NO: 1330794 - RNA, 19 nt, Homo sapiens
  misc_RNA (1)...(19): siRNA sense strand
gcugucauccuucauguca

SEQ ID NO: 1330795 - RNA, 19 nt, Homo sapiens
  misc_RNA (1)...(19): siRNA sense strand
gaaauguuugccacaggaa

SEQ ID NO: 1330796 - RNA, 19 nt, Homo sapiens
  misc_RNA (1)...(19): siRNA sense strand
cacgaaacauacggccaua

SEQ ID NO: 1330797 - RNA, 19 nt, Homo sapiens
  misc_RNA (1)...(19): siRNA sense strand
cacaucauauuuccagaag

SEQ ID NO: 1330798 - RNA, 19 nt, Homo sapiens
  misc_RNA (1)...(19): siRNA sense strand
ucacaucauauuuccagaa

SEQ ID NO: 1330799 - RNA, 19 nt, Homo sapiens
  misc_RNA (1)...(19): siRNA sense strand
gaaacauacggccauaaaa

SEQ ID NO: 1330800 - RNA, 19 nt, Homo sapiens
  misc_RNA (1)...(19): siRNA sense strand
ggcaagaggaacaguaaca

SEQ ID NO: 1330801 - RNA, 19 nt, Homo sapiens
  misc_RNA (1)...(19): siRNA sense strand
cuggaaagagugaauaugu

SEQ ID NO: 1330802 - RNA, 19 nt, Homo sapiens
  misc_RNA (1)...(19): siRNA sense strand
cccauugccuccagcuguu

SEQ ID NO: 1330803 - RNA, 19 nt, Homo sapiens
  misc_RNA (1)...(19): siRNA sense strand
gucaagcgcagaagaaucu

SEQ ID NO: 1330804 - RNA, 19 nt, Homo sapiens
  misc_RNA (1)...(19): siRNA sense strand
caugucaagcgcagaagaa

SEQ ID NO: 1330805 - RNA, 19 nt, Homo sapiens
  misc_RNA (1)...(19): siRNA sense strand
agagaggacucgccaucgu

SEQ ID NO: 1330806 - RNA, 19 nt, Homo sapiens
  misc_RNA (1)...(19): siRNA sense strand
ugucauccuucaugucaag

SEQ ID NO: 1330807 - RNA, 19 nt, Homo sapiens
  misc_RNA (1)...(19): siRNA sense strand
cgcacaaccauacuguuaa

SEQ ID NO: 1330808 - RNA, 19 nt, Homo sapiens
  misc_RNA (1)...(19): siRNA sense strand
gcaagaggaacaguaacag

SEQ ID NO: 1330809 - RNA, 19 nt, Homo sapiens
  misc_RNA (1)...(19): siRNA sense strand
cauggcaagaggaacagua

SEQ ID NO: 1330810 - RNA, 19 nt, Homo sapiens
  misc_RNA (1)...(19): siRNA sense strand
uggcugcugucauccuuca

SEQ ID NO: 1330811 - RNA, 19 nt, Homo sapiens
  misc_RNA (1)...(19): siRNA sense strand
caacaaagauucucagcuu

SEQ ID NO: 1330812 - RNA, 19 nt, Homo sapiens
  misc_RNA (1)...(19): siRNA sense strand
gaagaaagguggucgaaaa

SEQ ID NO: 1330813 - RNA, 19 nt, Homo sapiens
  misc_RNA (1)...(19): siRNA sense strand
ggacagaccucaggagaca

SEQ ID NO: 1330814 - RNA, 19 nt, Homo sapiens
  misc_RNA (1)...(19): siRNA sense strand
ggaugggacucaacaaaga

SEQ ID NO: 1330815 - RNA, 19 nt, Homo sapiens
  misc_RNA (1)...(19): siRNA sense strand
ucacacugcuguccucuaa

SEQ ID NO: 1330816 - RNA, 19 nt, Homo sapiens
  misc_RNA (1)...(19): siRNA sense strand
gaaagugccgucccugaaa

SEQ ID NO: 1330817 - RNA, 19 nt, Homo sapiens
  misc_RNA (1)...(19): siRNA sense strand
gaaagguggucgaaaauga

SEQ ID NO: 1330818 - RNA, 19 nt, Homo sapiens
  misc_RNA (1)...(19): siRNA sense strand
cacaggagccggaaagaua

SEQ ID NO: 1330819 - RNA, 19 nt, Homo sapiens
  misc_RNA (1)...(19): siRNA sense strand
ggauaaaggagaagucuau

SEQ ID NO: 1330820 - RNA, 19 nt, Homo sapiens
  misc_RNA (1)...(19): siRNA sense strand
aaacaggucugggucacua

SEQ ID NO: 1330821 - RNA, 19 nt, Homo sapiens
  misc_RNA (1)...(19): siRNA sense strand
aaggagagcuguuuguaug

SEQ ID NO: 1330822 - RNA, 19 nt, Homo sapiens
  misc_RNA (1)...(19): siRNA sense strand
ggaaagugccgucccugaa

SEQ ID NO: 1330823 - RNA, 19 nt, Homo sapiens
  misc_RNA (1)...(19): siRNA sense strand
gcaugggaaacaauucuua

SEQ ID NO: 1330824 - RNA, 19 nt, Homo sapiens
  misc_RNA (1)...(19): siRNA sense strand
acacugcuguccucuaaga

SEQ ID NO: 1330825 - RNA, 19 nt, Homo sapiens
  misc_RNA (1)...(19): siRNA sense strand
gggcgugccuuccuuugug

SEQ ID NO: 1330826 - RNA, 19 nt, Homo sapiens
  misc_RNA (1)...(19): siRNA sense strand
caaagauucucagcuugga

SEQ ID NO: 1330827 - RNA, 19 nt, Homo sapiens
  misc_RNA (1)...(19): siRNA sense strand
cacgggcugugcaguguua

SEQ ID NO: 1330828 - RNA, 19 nt, Homo sapiens
  misc_RNA (1)...(19): siRNA sense strand
gagugaacguuauccaagu

SEQ ID NO: 1330829 - RNA, 19 nt, Homo sapiens
  misc_RNA (1)...(19): siRNA sense strand
aaacggagaaggacauguu

SEQ ID NO: 1330830 - RNA, 19 nt, Homo sapiens
  misc_RNA (1)...(19): siRNA sense strand
cgagcucacucucuugugu

SEQ ID NO: 1330831 - RNA, 19 nt, Homo sapiens
  misc_RNA (1)...(19): siRNA sense strand
ggaguucaacccagaaauc

SEQ ID NO: 1330832 - RNA, 19 nt, Homo sapiens
  misc_RNA (1)...(19): siRNA sense strand
ggaagaaagguggucgaaa

SEQ ID NO: 1330833 - RNA, 19 nt, Homo sapiens
  misc_RNA (1)...(19): siRNA sense strand
ggucugggucacuacaaua

SEQ ID NO: 1330834 - RNA, 19 nt, Homo sapiens
  misc_RNA (1)...(19): siRNA sense strand
gggcuacgaguauguguug

SEQ ID NO: 1330835 - RNA, 19 nt, Homo sapiens
  misc_RNA (1)...(19): siRNA sense strand
aaagugccgucccugaaau

SEQ ID NO: 1330836 - RNA, 19 nt, Homo sapiens
  misc_RNA (1)...(19): siRNA sense strand
gaaauuuacagugaaaguc

SEQ ID NO: 1330837 - RNA, 19 nt, Homo sapiens
  misc_RNA (1)...(19): siRNA sense strand
ugccgucccugaaaugauu

SEQ ID NO: 1330838 - RNA, 19 nt, Homo sapiens
  misc_RNA (1)...(19): siRNA sense strand
gaagucuauucuuguggau

SEQ ID NO: 1330839 - RNA, 19 nt, Homo sapiens
  misc_RNA (1)...(19): siRNA sense strand
cggccgagcucacucucuu

SEQ ID NO: 1330840 - RNA, 19 nt, Homo sapiens
  misc_RNA (1)...(19): siRNA sense strand
cuauggaauucuugggaaa

SEQ ID NO: 1330841 - RNA, 19 nt, Homo sapiens
  misc_RNA (1)...(19): siRNA sense strand
gauaaaggagaagucuauu

SEQ ID NO: 1330842 - RNA, 19 nt, Homo sapiens
  misc_RNA (1)...(19): siRNA sense strand
gacugcggauguuacgaaa

SEQ ID NO: 1330843 - RNA, 19 nt, Homo sapiens
  misc_RNA (1)...(19): siRNA sense strand
aaaggagagcuguuuguau

SEQ ID NO: 1330844 - RNA, 19 nt, Homo sapiens
  misc_RNA (1)...(19): siRNA sense strand
acaggagccggaaagauaa

SEQ ID NO: 1330845 - RNA, 19 nt, Homo sapiens
  misc_RNA (1)...(19): siRNA sense strand
cugcggauguuacgaaagu

SEQ ID NO: 1330846 - RNA, 19 nt, Homo sapiens
  misc_RNA (1)...(19): siRNA sense strand
ccucuaagacugcggaugu

SEQ ID NO: 1330847 - RNA, 19 nt, Homo sapiens
  misc_RNA (1)...(19): siRNA sense strand
gaccaguauuucccaugga

SEQ ID NO: 1330848 - RNA, 19 nt, Homo sapiens
  misc_RNA (1)...(19): siRNA sense strand
uugcugcacugaccaacaa

SEQ ID NO: 1330849 - RNA, 19 nt, Homo sapiens
  misc_RNA (1)...(19): siRNA sense strand
gggaugggacucaacaaag

SEQ ID NO: 1330850 - RNA, 19 nt, Homo sapiens
  misc_RNA (1)...(19): siRNA sense strand
gagcuggaccaaaagauuu

SEQ ID NO: 1330851 - RNA, 19 nt, Homo sapiens
  misc_RNA (1)...(19): siRNA sense strand
ccugacggauaaaggagaa

SEQ ID NO: 1330852 - RNA, 19 nt, Homo sapiens
  misc_RNA (1)...(19): siRNA sense strand
gauuccacccacucucuuu

SEQ ID NO: 1330853 - RNA, 19 nt, Homo sapiens
  misc_RNA (1)...(19): siRNA sense strand
gggagugaacguuauccaa

SEQ ID NO: 1330854 - RNA, 19 nt, Homo sapiens
  misc_RNA (1)...(19): siRNA sense strand
cugggucacuacaauauca

SEQ ID NO: 1330855 - RNA, 19 nt, Homo sapiens
  misc_RNA (1)...(19): siRNA sense strand
uaugggcaauguggaagaa

SEQ ID NO: 1330856 - RNA, 19 nt, Homo sapiens
  misc_RNA (1)...(19): siRNA sense strand
agugaacguuauccaaguu

SEQ ID NO: 1330857 - RNA, 19 nt, Homo sapiens
  misc_RNA (1)...(19): siRNA sense strand
gucuguuccugacggauaa

SEQ ID NO: 1330858 - RNA, 19 nt, Homo sapiens
  misc_RNA (1)...(19): siRNA sense strand
gagcucacucucuuguguu

SEQ ID NO: 1330859 - RNA, 19 nt, Homo sapiens
  misc_RNA (1)...(19): siRNA sense strand
gccuggagcuggaccaaaa

SEQ ID NO: 1330860 - RNA, 19 nt, Homo sapiens
  misc_RNA (1)...(19): siRNA sense strand
gcagcuggccucugucacu

SEQ ID NO: 1330861 - RNA, 19 nt, Homo sapiens
  misc_RNA (1)...(19): siRNA sense strand
ucuaagacugcggauguua

SEQ ID NO: 1330862 - RNA, 19 nt, Homo sapiens
  misc_RNA (1)...(19): siRNA sense strand
ucucuuguguugacugaca

SEQ ID NO: 1330863 - RNA, 19 nt, Homo sapiens
  misc_RNA (1)...(19): siRNA sense strand
agacugcggauguuacgaa

SEQ ID NO: 1330864 - RNA, 19 nt, Homo sapiens
  misc_RNA (1)...(19): siRNA sense strand
gaugggacucaacaaagau

SEQ ID NO: 1330865 - RNA, 19 nt, Homo sapiens
  misc_RNA (1)...(19): siRNA sense strand
uggcgggagugaacguuau

SEQ ID NO: 1330866 - RNA, 19 nt, Homo sapiens
  misc_RNA (1)...(19): siRNA sense strand
caugggaaacaauucuuau

SEQ ID NO: 1330867 - RNA, 19 nt, Homo sapiens
  misc_RNA (1)...(19): siRNA sense strand
auucucagcuuggauuuca

SEQ ID NO: 1330868 - RNA, 19 nt, Homo sapiens
  misc_RNA (1)...(19): siRNA sense strand
aagauucucagcuuggauu

SEQ ID NO: 1330869 - RNA, 19 nt, Homo sapiens
  misc_RNA (1)...(19): siRNA sense strand
ucaggaucauagucuguuc

SEQ ID NO: 1330870 - RNA, 19 nt, Homo sapiens
  misc_RNA (1)...(19): siRNA sense strand
ggucaggaucauagucugu

SEQ ID NO: 1330871 - RNA, 19 nt, Homo sapiens
  misc_RNA (1)...(19): siRNA sense strand
caacaaagauucucagcuu

SEQ ID NO: 1330872 - RNA, 19 nt, Homo sapiens
  misc_RNA (1)...(19): siRNA sense strand
gaagaaagguggucgaaaa

SEQ ID NO: 1330873 - RNA, 19 nt, Homo sapiens
  misc_RNA (1)...(19): siRNA sense strand
ggacagaccucaggagaca

SEQ ID NO: 1330874 - RNA, 19 nt, Homo sapiens
  misc_RNA (1)...(19): siRNA sense strand
ggaugggacucaacaaaga

SEQ ID NO: 1330875 - RNA, 19 nt, Homo sapiens
  misc_RNA (1)...(19): siRNA sense strand
ucacacugcuguccucuaa

SEQ ID NO: 1330876 - RNA, 19 nt, Homo sapiens
  misc_RNA (1)...(19): siRNA sense strand
gaaagugccgucccugaaa

SEQ ID NO: 1330877 - RNA, 19 nt, Homo sapiens
  misc_RNA (1)...(19): siRNA sense strand
gaaagguggucgaaaauga

SEQ ID NO: 1330878 - RNA, 19 nt, Homo sapiens
  misc_RNA (1)...(19): siRNA sense strand
cacaggagccggaaagaua

SEQ ID NO: 1330879 - RNA, 19 nt, Homo sapiens
  misc_RNA (1)...(19): siRNA sense strand
ggauaaaggagaagucuau

SEQ ID NO: 1330880 - RNA, 19 nt, Homo sapiens
  misc_RNA (1)...(19): siRNA sense strand
aaacaggucugggucacua

SEQ ID NO: 1330881 - RNA, 19 nt, Homo sapiens
  misc_RNA (1)...(19): siRNA sense strand
aaggagagcuguuuguaug

SEQ ID NO: 1330882 - RNA, 19 nt, Homo sapiens
  misc_RNA (1)...(19): siRNA sense strand
ggaaagugccgucccugaa

SEQ ID NO: 1330883 - RNA, 19 nt, Homo sapiens
  misc_RNA (1)...(19): siRNA sense strand
gcaugggaaacaauucuua

SEQ ID NO: 1330884 - RNA, 19 nt, Homo sapiens
  misc_RNA (1)...(19): siRNA sense strand
acacugcuguccucuaaga

SEQ ID NO: 1330885 - RNA, 19 nt, Homo sapiens
  misc_RNA (1)...(19): siRNA sense strand
gggcgugccuuccuuugug

SEQ ID NO: 1330886 - RNA, 19 nt, Homo sapiens
  misc_RNA (1)...(19): siRNA sense strand
caaagauucucagcuugga

SEQ ID NO: 1330887 - RNA, 19 nt, Homo sapiens
  misc_RNA (1)...(19): siRNA sense strand
cacgggcugugcaguguua

SEQ ID NO: 1330888 - RNA, 19 nt, Homo sapiens
  misc_RNA (1)...(19): siRNA sense strand
gagugaacguuauccaagu

SEQ ID NO: 1330889 - RNA, 19 nt, Homo sapiens
  misc_RNA (1)...(19): siRNA sense strand
aaacggagaaggacauguu

SEQ ID NO: 1330890 - RNA, 19 nt, Homo sapiens
  misc_RNA (1)...(19): siRNA sense strand
cgagcucacucucuugugu

SEQ ID NO: 1330891 - RNA, 19 nt, Homo sapiens
  misc_RNA (1)...(19): siRNA sense strand
ggaguucaacccagaaauc

SEQ ID NO: 1330892 - RNA, 19 nt, Homo sapiens
  misc_RNA (1)...(19): siRNA sense strand
ggaagaaagguggucgaaa

SEQ ID NO: 1330893 - RNA, 19 nt, Homo sapiens
  misc_RNA (1)...(19): siRNA sense strand
ggucugggucacuacaaua

SEQ ID NO: 1330894 - RNA, 19 nt, Homo sapiens
  misc_RNA (1)...(19): siRNA sense strand
gggcuacgaguauguguug

SEQ ID NO: 1330895 - RNA, 19 nt, Homo sapiens
  misc_RNA (1)...(19): siRNA sense strand
aaagugccgucccugaaau

SEQ ID NO: 1330896 - RNA, 19 nt, Homo sapiens
  misc_RNA (1)...(19): siRNA sense strand
gaaauuuacagugaaaguc

SEQ ID NO: 1330897 - RNA, 19 nt, Homo sapiens
  misc_RNA (1)...(19): siRNA sense strand
ugccgucccugaaaugauu

SEQ ID NO: 1330898 - RNA, 19 nt, Homo sapiens
  misc_RNA (1)...(19): siRNA sense strand
gaagucuauucuuguggau

SEQ ID NO: 1330899 - RNA, 19 nt, Homo sapiens
  misc_RNA (1)...(19): siRNA sense strand
cggccgagcucacucucuu

SEQ ID NO: 1330900 - RNA, 19 nt, Homo sapiens
  misc_RNA (1)...(19): siRNA sense strand
cuauggaauucuugggaaa

SEQ ID NO: 1330901 - RNA, 19 nt, Homo sapiens
  misc_RNA (1)...(19): siRNA sense strand
gauaaaggagaagucuauu

SEQ ID NO: 1330902 - RNA, 19 nt, Homo sapiens
  misc_RNA (1)...(19): siRNA sense strand
gacugcggauguuacgaaa

SEQ ID NO: 1330903 - RNA, 19 nt, Homo sapiens
  misc_RNA (1)...(19): siRNA sense strand
aaaggagagcuguuuguau

SEQ ID NO: 1330904 - RNA, 19 nt, Homo sapiens
  misc_RNA (1)...(19): siRNA sense strand
acaggagccggaaagauaa

SEQ ID NO: 1330905 - RNA, 19 nt, Homo sapiens
  misc_RNA (1)...(19): siRNA sense strand
cugcggauguuacgaaagu

SEQ ID NO: 1330906 - RNA, 19 nt, Homo sapiens
  misc_RNA (1)...(19): siRNA sense strand
ccucuaagacugcggaugu

SEQ ID NO: 1330907 - RNA, 19 nt, Homo sapiens
  misc_RNA (1)...(19): siRNA sense strand
gaccaguauuucccaugga

SEQ ID NO: 1330908 - RNA, 19 nt, Homo sapiens
  misc_RNA (1)...(19): siRNA sense strand
uugcugcacugaccaacaa

SEQ ID NO: 1330909 - RNA, 19 nt, Homo sapiens
  misc_RNA (1)...(19): siRNA sense strand
gggaugggacucaacaaag

SEQ ID NO: 1330910 - RNA, 19 nt, Homo sapiens
  misc_RNA (1)...(19): siRNA sense strand
gagcuggaccaaaagauuu

SEQ ID NO: 1330911 - RNA, 19 nt, Homo sapiens
  misc_RNA (1)...(19): siRNA sense strand
ccugacggauaaaggagaa

SEQ ID NO: 1330912 - RNA, 19 nt, Homo sapiens
  misc_RNA (1)...(19): siRNA sense strand
gauuccacccacucucuuu

SEQ ID NO: 1330913 - RNA, 19 nt, Homo sapiens
  misc_RNA (1)...(19): siRNA sense strand
gggagugaacguuauccaa

SEQ ID NO: 1330914 - RNA, 19 nt, Homo sapiens
  misc_RNA (1)...(19): siRNA sense strand
cugggucacuacaauauca

SEQ ID NO: 1330915 - RNA, 19 nt, Homo sapiens
  misc_RNA (1)...(19): siRNA sense strand
uaugggcaauguggaagaa

SEQ ID NO: 1330916 - RNA, 19 nt, Homo sapiens
  misc_RNA (1)...(19): siRNA sense strand
agugaacguuauccaaguu

SEQ ID NO: 1330917 - RNA, 19 nt, Homo sapiens
  misc_RNA (1)...(19): siRNA sense strand
gucuguuccugacggauaa

SEQ ID NO: 1330918 - RNA, 19 nt, Homo sapiens
  misc_RNA (1)...(19): siRNA sense strand
gagcucacucucuuguguu

SEQ ID NO: 1330919 - RNA, 19 nt, Homo sapiens
  misc_RNA (1)...(19): siRNA sense strand
gccuggagcuggaccaaaa

SEQ ID NO: 1330920 - RNA, 19 nt, Homo sapiens
  misc_RNA (1)...(19): siRNA sense strand
gcagcuggccucugucacu

SEQ ID NO: 1330921 - RNA, 19 nt, Homo sapiens
  misc_RNA (1)...(19): siRNA sense strand
ucuaagacugcggauguua

SEQ ID NO: 1330922 - RNA, 19 nt, Homo sapiens
  misc_RNA (1)...(19): siRNA sense strand
ucucuuguguugacugaca

SEQ ID NO: 1330923 - RNA, 19 nt, Homo sapiens
  misc_RNA (1)...(19): siRNA sense strand
agacugcggauguuacgaa

SEQ ID NO: 1330924 - RNA, 19 nt, Homo sapiens
  misc_RNA (1)...(19): siRNA sense strand
gaugggacucaacaaagau

SEQ ID NO: 1330925 - RNA, 19 nt, Homo sapiens
  misc_RNA (1)...(19): siRNA sense strand
uggcgggagugaacguuau

SEQ ID NO: 1330926 - RNA, 19 nt, Homo sapiens
  misc_RNA (1)...(19): siRNA sense strand
caugggaaacaauucuuau

SEQ ID NO: 1330927 - RNA, 19 nt, Homo sapiens
  misc_RNA (1)...(19): siRNA sense strand
auucucagcuuggauuuca

SEQ ID NO: 1330928 - RNA, 19 nt, Homo sapiens
  misc_RNA (1)...(19): siRNA sense strand
aagauucucagcuuggauu

SEQ ID NO: 1330929 - RNA, 19 nt, Homo sapiens
  misc_RNA (1)...(19): siRNA sense strand
ucaggaucauagucuguuc

SEQ ID NO: 1330930 - RNA, 19 nt, Homo sapiens
  misc_RNA (1)...(19): siRNA sense strand
ggucaggaucauagucugu

SEQ ID NO: 1330931 - RNA, 19 nt, Homo sapiens
  misc_RNA (1)...(19): siRNA sense strand
ccaacaagcuggacuuuga

SEQ ID NO: 1330932 - RNA, 19 nt, Homo sapiens
  misc_RNA (1)...(19): siRNA sense strand
gaaaucagcucaccucacu

SEQ ID NO: 1330933 - RNA, 19 nt, Homo sapiens
  misc_RNA (1)...(19): siRNA sense strand
ugaagaagcuguaccugaa

SEQ ID NO: 1330934 - RNA, 19 nt, Homo sapiens
  misc_RNA (1)...(19): siRNA sense strand
caaccucacugaccuacua

SEQ ID NO: 1330935 - RNA, 19 nt, Homo sapiens
  misc_RNA (1)...(19): siRNA sense strand
gcaagcagguuaucaacga

SEQ ID NO: 1330936 - RNA, 19 nt, Homo sapiens
  misc_RNA (1)...(19): siRNA sense strand
ccaaguuccugucccauuu

SEQ ID NO: 1330937 - RNA, 19 nt, Homo sapiens
  misc_RNA (1)...(19): siRNA sense strand
gcacagaagcccuaugaug

SEQ ID NO: 1330938 - RNA, 19 nt, Homo sapiens
  misc_RNA (1)...(19): siRNA sense strand
ccaacagucugaagaauuc

SEQ ID NO: 1330939 - RNA, 19 nt, Homo sapiens
  misc_RNA (1)...(19): siRNA sense strand
gccaggagcucccagaguu

SEQ ID NO: 1330940 - RNA, 19 nt, Homo sapiens
  misc_RNA (1)...(19): siRNA sense strand
aagaugaccuggcagauga

SEQ ID NO: 1330941 - RNA, 19 nt, Homo sapiens
  misc_RNA (1)...(19): siRNA sense strand
ucaccaaccuggaagaguu

SEQ ID NO: 1330942 - RNA, 19 nt, Homo sapiens
  misc_RNA (1)...(19): siRNA sense strand
gccaagaggucuacaugug

SEQ ID NO: 1330943 - RNA, 19 nt, Homo sapiens
  misc_RNA (1)...(19): siRNA sense strand
cauccacgcugucaacuug

SEQ ID NO: 1330944 - RNA, 19 nt, Homo sapiens
  misc_RNA (1)...(19): siRNA sense strand
ccaaccagcucuucaucaa

SEQ ID NO: 1330945 - RNA, 19 nt, Homo sapiens
  misc_RNA (1)...(19): siRNA sense strand
gaugaaggcugaccucacu

SEQ ID NO: 1330946 - RNA, 19 nt, Homo sapiens
  misc_RNA (1)...(19): siRNA sense strand
gaggcugacugcuacauug

SEQ ID NO: 1330947 - RNA, 19 nt, Homo sapiens
  misc_RNA (1)...(19): siRNA sense strand
gaagaaagaccagaugaag

SEQ ID NO: 1330948 - RNA, 19 nt, Homo sapiens
  misc_RNA (1)...(19): siRNA sense strand
gaauugggacgauguguug

SEQ ID NO: 1330949 - RNA, 19 nt, Homo sapiens
  misc_RNA (1)...(19): siRNA sense strand
uaacaagaaugagcggaaa

SEQ ID NO: 1330950 - RNA, 19 nt, Homo sapiens
  misc_RNA (1)...(19): siRNA sense strand
gggaggagaugggcgauga

SEQ ID NO: 1330951 - RNA, 19 nt, Homo sapiens
  misc_RNA (1)...(19): siRNA sense strand
ucacugcccucagccauuu

SEQ ID NO: 1330952 - RNA, 19 nt, Homo sapiens
  misc_RNA (1)...(19): siRNA sense strand
ugagaaaugcuccgacuuu

SEQ ID NO: 1330953 - RNA, 19 nt, Homo sapiens
  misc_RNA (1)...(19): siRNA sense strand
ggagaucuacuacuggauu

SEQ ID NO: 1330954 - RNA, 19 nt, Homo sapiens
  misc_RNA (1)...(19): siRNA sense strand
cacagaagcccuaugauga

SEQ ID NO: 1330955 - RNA, 19 nt, Homo sapiens
  misc_RNA (1)...(19): siRNA sense strand
gagaagaaagaccagauga

SEQ ID NO: 1330956 - RNA, 19 nt, Homo sapiens
  misc_RNA (1)...(19): siRNA sense strand
caggauguaucguguguau

SEQ ID NO: 1330957 - RNA, 19 nt, Homo sapiens
  misc_RNA (1)...(19): siRNA sense strand
gaaacacacacgucucuuc

SEQ ID NO: 1330958 - RNA, 19 nt, Homo sapiens
  misc_RNA (1)...(19): siRNA sense strand
gcccaaagcugaggaaacu

SEQ ID NO: 1330959 - RNA, 19 nt, Homo sapiens
  misc_RNA (1)...(19): siRNA sense strand
ucaagaccuuucuggauga

SEQ ID NO: 1330960 - RNA, 19 nt, Homo sapiens
  misc_RNA (1)...(19): siRNA sense strand
gagaucuacuacuggauug

SEQ ID NO: 1330961 - RNA, 19 nt, Homo sapiens
  misc_RNA (1)...(19): siRNA sense strand
caacgagaagggcuacuuu

SEQ ID NO: 1330962 - RNA, 19 nt, Homo sapiens
  misc_RNA (1)...(19): siRNA sense strand
ggagaaggccgagggcaaa

SEQ ID NO: 1330963 - RNA, 19 nt, Homo sapiens
  misc_RNA (1)...(19): siRNA sense strand
ccucugagaucaagaagca

SEQ ID NO: 1330964 - RNA, 19 nt, Homo sapiens
  misc_RNA (1)...(19): siRNA sense strand
gugaggagccugagaacuu

SEQ ID NO: 1330965 - RNA, 19 nt, Homo sapiens
  misc_RNA (1)...(19): siRNA sense strand
ggaaagggaaggcugagau

SEQ ID NO: 1330966 - RNA, 19 nt, Homo sapiens
  misc_RNA (1)...(19): siRNA sense strand
gcacaugcgguccaaggaa

SEQ ID NO: 1330967 - RNA, 19 nt, Homo sapiens
  misc_RNA (1)...(19): siRNA sense strand
gggcaaagaaggcgaggaa

SEQ ID NO: 1330968 - RNA, 19 nt, Homo sapiens
  misc_RNA (1)...(19): siRNA sense strand
ugaagggcaugucagaugu

SEQ ID NO: 1330969 - RNA, 19 nt, Homo sapiens
  misc_RNA (1)...(19): siRNA sense strand
gcagaagacauccugaaca

SEQ ID NO: 1330970 - RNA, 19 nt, Homo sapiens
  misc_RNA (1)...(19): siRNA sense strand
cuggaacacuugucuguga

SEQ ID NO: 1330971 - RNA, 19 nt, Homo sapiens
  misc_RNA (1)...(19): siRNA sense strand
ggagaacgccaagaacaug

SEQ ID NO: 1330972 - RNA, 19 nt, Homo sapiens
  misc_RNA (1)...(19): siRNA sense strand
ggaguggaacgaagaccua

SEQ ID NO: 1330973 - RNA, 19 nt, Homo sapiens
  misc_RNA (1)...(19): siRNA sense strand
caacgacaucuccuacauu

SEQ ID NO: 1330974 - RNA, 19 nt, Homo sapiens
  misc_RNA (1)...(19): siRNA sense strand
aacgacaucuccuacauug

SEQ ID NO: 1330975 - RNA, 19 nt, Homo sapiens
  misc_RNA (1)...(19): siRNA sense strand
gaaggccgagggcaaagaa

SEQ ID NO: 1330976 - RNA, 19 nt, Homo sapiens
  misc_RNA (1)...(19): siRNA sense strand
ugcagaagcuggaacacuu

SEQ ID NO: 1330977 - RNA, 19 nt, Homo sapiens
  misc_RNA (1)...(19): siRNA sense strand
ggauguaucguguguaugg

SEQ ID NO: 1330978 - RNA, 19 nt, Homo sapiens
  misc_RNA (1)...(19): siRNA sense strand
aagaagcuguaccugaauu

SEQ ID NO: 1330979 - RNA, 19 nt, Homo sapiens
  misc_RNA (1)...(19): siRNA sense strand
cgugaagccuccaauaugg

SEQ ID NO: 1330980 - RNA, 19 nt, Homo sapiens
  misc_RNA (1)...(19): siRNA sense strand
gcucaagaccuuucuggau

SEQ ID NO: 1330981 - RNA, 19 nt, Homo sapiens
  misc_RNA (1)...(19): siRNA sense strand
ccaaagcugaggaaacuug

SEQ ID NO: 1330982 - RNA, 19 nt, Homo sapiens
  misc_RNA (1)...(19): siRNA sense strand
guaccugaauuccaacaag

SEQ ID NO: 1330983 - RNA, 19 nt, Homo sapiens
  misc_RNA (1)...(19): siRNA sense strand
gaagaagcuguaccugaau

SEQ ID NO: 1330984 - RNA, 19 nt, Homo sapiens
  misc_RNA (1)...(19): siRNA sense strand
gagaaaugcuccgacuuuu

SEQ ID NO: 1330985 - RNA, 19 nt, Homo sapiens
  misc_RNA (1)...(19): siRNA sense strand
gaaagggaaggcugagauc

SEQ ID NO: 1330986 - RNA, 19 nt, Homo sapiens
  misc_RNA (1)...(19): siRNA sense strand
agaagcacgugccugaaga

SEQ ID NO: 1330987 - RNA, 19 nt, Homo sapiens
  misc_RNA (1)...(19): siRNA sense strand
gaagcccuaugaugacgau

SEQ ID NO: 1330988 - RNA, 19 nt, Homo sapiens
  misc_RNA (1)...(19): siRNA sense strand
caaguuggcagaagacauc

SEQ ID NO: 1330989 - RNA, 19 nt, Homo sapiens
  misc_RNA (1)...(19): siRNA sense strand
gagccaacagucugaagaa

SEQ ID NO: 1330990 - RNA, 19 nt, Homo sapiens
  misc_RNA (1)...(19): siRNA sense strand
gccaacagucugaagaauu

SEQ ID NO: 1330991 - RNA, 19 nt, Homo sapiens
  misc_RNA (1)...(19): siRNA sense strand
aggccaaguucaagaauug

SEQ ID NO: 1330992 - RNA, 19 nt, Homo sapiens
  misc_RNA (1)...(19): siRNA sense strand
ugccacagaucaacuacaa

SEQ ID NO: 1330993 - RNA, 19 nt, Homo sapiens
  misc_RNA (1)...(19): siRNA sense strand
gaaacgcgacgccgagaag

SEQ ID NO: 1330994 - RNA, 19 nt, Homo sapiens
  misc_RNA (1)...(19): siRNA sense strand
gcuagacaauggccaagag

SEQ ID NO: 1330995 - RNA, 19 nt, Homo sapiens
  misc_RNA (1)...(19): siRNA sense strand
caagcagguuaucaacgaa

SEQ ID NO: 1330996 - RNA, 19 nt, Homo sapiens
  misc_RNA (1)...(19): siRNA sense strand
cagaagacauccugaacac

SEQ ID NO: 1330997 - RNA, 19 nt, Homo sapiens
  misc_RNA (1)...(19): siRNA sense strand
guggaucuguccugcaaug

SEQ ID NO: 1330998 - RNA, 19 nt, Homo sapiens
  misc_RNA (1)...(19): siRNA sense strand
caagaugaccuggcagaug

SEQ ID NO: 1330999 - RNA, 19 nt, Homo sapiens
  misc_RNA (1)...(19): siRNA sense strand
gcagaagcuggaacacuug

SEQ ID NO: 1331000 - RNA, 19 nt, Homo sapiens
  misc_RNA (1)...(19): siRNA sense strand
caaagaaggcgaggaagca

SEQ ID NO: 1331001 - RNA, 19 nt, Homo sapiens
  misc_RNA (1)...(19): siRNA sense strand
gagcugaugccaagaaugc

SEQ ID NO: 1331002 - RNA, 19 nt, Homo sapiens
  misc_RNA (1)...(19): siRNA sense strand
cgacaucuccuacauugag

SEQ ID NO: 1331003 - RNA, 19 nt, Homo sapiens
  misc_RNA (1)...(19): siRNA sense strand
gcgaugagagcgaggaguu

SEQ ID NO: 1331004 - RNA, 19 nt, Homo sapiens
  misc_RNA (1)...(19): siRNA sense strand
ucacugaccuacuauaccu

SEQ ID NO: 1331005 - RNA, 19 nt, Homo sapiens
  misc_RNA (1)...(19): siRNA sense strand
ggaccgagggcuagacauc

SEQ ID NO: 1331006 - RNA, 19 nt, Homo sapiens
  misc_RNA (1)...(19): siRNA sense strand
ggagaucgagguccuggau

SEQ ID NO: 1331007 - RNA, 19 nt, Homo sapiens
  misc_RNA (1)...(19): siRNA sense strand
ggagcugucccugugcaua

SEQ ID NO: 1331008 - RNA, 19 nt, Homo sapiens
  misc_RNA (1)...(19): siRNA sense strand
ugacgcagcagcaggagaa

SEQ ID NO: 1331009 - RNA, 19 nt, Homo sapiens
  misc_RNA (1)...(19): siRNA sense strand
gagaaugucaaggccauga

SEQ ID NO: 1331010 - RNA, 19 nt, Homo sapiens
  misc_RNA (1)...(19): siRNA sense strand
acaacgacaucuccuacau

SEQ ID NO: 1331011 - RNA, 19 nt, Homo sapiens
  misc_RNA (1)...(19): siRNA sense strand
ugaggagccugagaacuuc

SEQ ID NO: 1331012 - RNA, 19 nt, Homo sapiens
  misc_RNA (1)...(19): siRNA sense strand
agaacaugcuggugcugaa

SEQ ID NO: 1331013 - RNA, 19 nt, Homo sapiens
  misc_RNA (1)...(19): siRNA sense strand
gaaccugucccgaaaucag

SEQ ID NO: 1331014 - RNA, 19 nt, Homo sapiens
  misc_RNA (1)...(19): siRNA sense strand
caaccagggcaucguguau

SEQ ID NO: 1331015 - RNA, 19 nt, Homo sapiens
  misc_RNA (1)...(19): siRNA sense strand
aaaagaacaucaaguugga

SEQ ID NO: 1331016 - RNA, 19 nt, Homo sapiens
  misc_RNA (1)...(19): siRNA sense strand
gcugucaacuugcgcaacu

SEQ ID NO: 1331017 - RNA, 19 nt, Homo sapiens
  misc_RNA (1)...(19): siRNA sense strand
gaagggcaugucagauguu

SEQ ID NO: 1331018 - RNA, 19 nt, Homo sapiens
  misc_RNA (1)...(19): siRNA sense strand
ucccagaagccauccauuu

SEQ ID NO: 1331019 - RNA, 19 nt, Homo sapiens
  misc_RNA (1)...(19): siRNA sense strand
caagaggaaguucaucauc

SEQ ID NO: 1331020 - RNA, 19 nt, Homo sapiens
  misc_RNA (1)...(19): siRNA sense strand
uagacggcauggaggguuu

SEQ ID NO: 1331021 - RNA, 19 nt, Homo sapiens
  misc_RNA (1)...(19): siRNA sense strand
gguccgacguguucaucug

SEQ ID NO: 1331022 - RNA, 19 nt, Homo sapiens
  misc_RNA (1)...(19): siRNA sense strand
gcagagaaaauuaacaaga

SEQ ID NO: 1331023 - RNA, 19 nt, Homo sapiens
  misc_RNA (1)...(19): siRNA sense strand
gcacuggccucugcuaccu

SEQ ID NO: 1331024 - RNA, 19 nt, Homo sapiens
  misc_RNA (1)...(19): siRNA sense strand
ucaacugggagaucuacua

SEQ ID NO: 1331025 - RNA, 19 nt, Homo sapiens
  misc_RNA (1)...(19): siRNA sense strand
gacagcggcucccucaacu

SEQ ID NO: 1331026 - RNA, 19 nt, Homo sapiens
  misc_RNA (1)...(19): siRNA sense strand
gagcugucccugugcauag

SEQ ID NO: 1331027 - RNA, 19 nt, Homo sapiens
  misc_RNA (1)...(19): siRNA sense strand
gccgugaagccuccaauau

SEQ ID NO: 1331028 - RNA, 19 nt, Homo sapiens
  misc_RNA (1)...(19): siRNA sense strand
cccuauggcucgcaagaug

SEQ ID NO: 1331029 - RNA, 19 nt, Homo sapiens
  misc_RNA (1)...(19): siRNA sense strand
gguacaacaucgacuucuc

SEQ ID NO: 1331030 - RNA, 19 nt, Homo sapiens
  misc_RNA (1)...(19): siRNA sense strand
uggcucaccuucaccuuca

SEQ ID NO: 1331031 - RNA, 19 nt, Homo sapiens
  misc_RNA (1)...(19): siRNA sense strand
guucgacaauggcagcuuu

SEQ ID NO: 1331032 - RNA, 19 nt, Homo sapiens
  misc_RNA (1)...(19): siRNA sense strand
gagaggaggaagaugaaga

SEQ ID NO: 1331033 - RNA, 19 nt, Homo sapiens
  misc_RNA (1)...(19): siRNA sense strand
gccacaaccucucgcugaa

SEQ ID NO: 1331034 - RNA, 19 nt, Homo sapiens
  misc_RNA (1)...(19): siRNA sense strand
ggaggcggaugcaucucuu

SEQ ID NO: 1331035 - RNA, 19 nt, Homo sapiens
  misc_RNA (1)...(19): siRNA sense strand
caucugcgccuucauuagu

SEQ ID NO: 1331036 - RNA, 19 nt, Homo sapiens
  misc_RNA (1)...(19): siRNA sense strand
gaacagcauccgccacaac

SEQ ID NO: 1331037 - RNA, 19 nt, Homo sapiens
  misc_RNA (1)...(19): siRNA sense strand
ggcaucugcgccuucauua

SEQ ID NO: 1331038 - RNA, 19 nt, Homo sapiens
  misc_RNA (1)...(19): siRNA sense strand
ggaagacgguaaaaucgau

SEQ ID NO: 1331039 - RNA, 19 nt, Homo sapiens
  misc_RNA (1)...(19): siRNA sense strand
gggagaggaggaagaugaa

SEQ ID NO: 1331040 - RNA, 19 nt, Homo sapiens
  misc_RNA (1)...(19): siRNA sense strand
caggacauguucgacaaug

SEQ ID NO: 1331041 - RNA, 19 nt, Homo sapiens
  misc_RNA (1)...(19): siRNA sense strand
gcauccuccucgcuaccua

SEQ ID NO: 1331042 - RNA, 19 nt, Homo sapiens
  misc_RNA (1)...(19): siRNA sense strand
gcaucucuuucagcauuga

SEQ ID NO: 1331043 - RNA, 19 nt, Homo sapiens
  misc_RNA (1)...(19): siRNA sense strand
cccaggacauguucgacaa

SEQ ID NO: 1331044 - RNA, 19 nt, Homo sapiens
  misc_RNA (1)...(19): siRNA sense strand
ugggagaggaggaagauga

SEQ ID NO: 1331045 - RNA, 19 nt, Homo sapiens
  misc_RNA (1)...(19): siRNA sense strand
cggcaucugcgccuucauu

SEQ ID NO: 1331046 - RNA, 19 nt, Homo sapiens
  misc_RNA (1)...(19): siRNA sense strand
gcggaugcaucucuuucag

SEQ ID NO: 1331047 - RNA, 19 nt, Homo sapiens
  misc_RNA (1)...(19): siRNA sense strand
caccauggccauccugcaa

SEQ ID NO: 1331048 - RNA, 19 nt, Homo sapiens
  misc_RNA (1)...(19): siRNA sense strand
ccauggccauccugcaaag

SEQ ID NO: 1331049 - RNA, 19 nt, Homo sapiens
  misc_RNA (1)...(19): siRNA sense strand
gugcugcagcccucacuug

SEQ ID NO: 1331050 - RNA, 19 nt, Homo sapiens
  misc_RNA (1)...(19): siRNA sense strand
agaaagacguggaagauuu

SEQ ID NO: 1331051 - RNA, 19 nt, Homo sapiens
  misc_RNA (1)...(19): siRNA sense strand
caaccugccuuacuuugua

SEQ ID NO: 1331052 - RNA, 19 nt, Homo sapiens
  misc_RNA (1)...(19): siRNA sense strand
gcagaaagacguggaagau

SEQ ID NO: 1331053 - RNA, 19 nt, Homo sapiens
  misc_RNA (1)...(19): siRNA sense strand
uggagucuguggaugaaua

SEQ ID NO: 1331054 - RNA, 19 nt, Homo sapiens
  misc_RNA (1)...(19): siRNA sense strand
ggaugaauaucaguuugug

SEQ ID NO: 1331055 - RNA, 19 nt, Homo sapiens
  misc_RNA (1)...(19): siRNA sense strand
cccaaagcaugaacauuau

SEQ ID NO: 1331056 - RNA, 19 nt, Homo sapiens
  misc_RNA (1)...(19): siRNA sense strand
cacccaaccugccuuacuu

SEQ ID NO: 1331057 - RNA, 19 nt, Homo sapiens
  misc_RNA (1)...(19): siRNA sense strand
gaaagacguggaagauuuu

SEQ ID NO: 1331058 - RNA, 19 nt, Homo sapiens
  misc_RNA (1)...(19): siRNA sense strand
ccagggcccuccagauuac

SEQ ID NO: 1331059 - RNA, 19 nt, Homo sapiens
  misc_RNA (1)...(19): siRNA sense strand
guggaugaauaucaguuug

SEQ ID NO: 1331060 - RNA, 19 nt, Homo sapiens
  misc_RNA (1)...(19): siRNA sense strand
gcucucggaugcacaacau

SEQ ID NO: 1331061 - RNA, 19 nt, Homo sapiens
  misc_RNA (1)...(19): siRNA sense strand
cccagggcccuccagauua

SEQ ID NO: 1331062 - RNA, 19 nt, Homo sapiens
  misc_RNA (1)...(19): siRNA sense strand
ccccaaagcaugaacauua

SEQ ID NO: 1331063 - RNA, 19 nt, Homo sapiens
  misc_RNA (1)...(19): siRNA sense strand
gcaaccggcagaugacugu

SEQ ID NO: 1331064 - RNA, 19 nt, Homo sapiens
  misc_RNA (1)...(19): siRNA sense strand
cagaaagacguggaagauu

SEQ ID NO: 1331065 - RNA, 19 nt, Homo sapiens
  misc_RNA (1)...(19): siRNA sense strand
acagguacccuacggauca

SEQ ID NO: 1331066 - RNA, 19 nt, Homo sapiens
  misc_RNA (1)...(19): siRNA sense strand
cauggcaaccggcagauga

SEQ ID NO: 1331067 - RNA, 19 nt, Homo sapiens
  misc_RNA (1)...(19): siRNA sense strand
ccagguuuguggagucugu

SEQ ID NO: 1331068 - RNA, 19 nt, Homo sapiens
  misc_RNA (1)...(19): siRNA sense strand
ugacugugauccggaaagu

SEQ ID NO: 1331069 - RNA, 19 nt, Homo sapiens
  misc_RNA (1)...(19): siRNA sense strand
guuuguggagcgccuguua

SEQ ID NO: 1331070 - RNA, 19 nt, Homo sapiens
  misc_RNA (1)...(19): siRNA sense strand
ggagucuguggaugaauau

SEQ ID NO: 1331071 - RNA, 19 nt, Homo sapiens
  misc_RNA (1)...(19): siRNA sense strand
aagcaugaacauuauccua

SEQ ID NO: 1331072 - RNA, 19 nt, Homo sapiens
  misc_RNA (1)...(19): siRNA sense strand
ccaaccugccuuacuuugu

SEQ ID NO: 1331073 - RNA, 19 nt, Homo sapiens
  misc_RNA (1)...(19): siRNA sense strand
acccagggcccuccagauu

SEQ ID NO: 1331074 - RNA, 19 nt, Homo sapiens
  misc_RNA (1)...(19): siRNA sense strand
caacauccccgucuacaag

SEQ ID NO: 1331075 - RNA, 19 nt, Homo sapiens
  misc_RNA (1)...(19): siRNA sense strand
uguggagucuguggaugaa

SEQ ID NO: 1331076 - RNA, 19 nt, Homo sapiens
  misc_RNA (1)...(19): siRNA sense strand
ggaagaagcuaaugaugga

SEQ ID NO: 1331077 - RNA, 19 nt, Homo sapiens
  misc_RNA (1)...(19): siRNA sense strand
ggacagaauuggaugaugu

SEQ ID NO: 1331078 - RNA, 19 nt, Homo sapiens
  misc_RNA (1)...(19): siRNA sense strand
aaacaaagccugacucaug

SEQ ID NO: 1331079 - RNA, 19 nt, Homo sapiens
  misc_RNA (1)...(19): siRNA sense strand
caacacaccugcuaagaag

SEQ ID NO: 1331080 - RNA, 19 nt, Homo sapiens
  misc_RNA (1)...(19): siRNA sense strand
gaagaaguauugcugucaa

SEQ ID NO: 1331081 - RNA, 19 nt, Homo sapiens
  misc_RNA (1)...(19): siRNA sense strand
ccacaagacuuacauccuu

SEQ ID NO: 1331082 - RNA, 19 nt, Homo sapiens
  misc_RNA (1)...(19): siRNA sense strand
caaacgagauggaacugaa

SEQ ID NO: 1331083 - RNA, 19 nt, Homo sapiens
  misc_RNA (1)...(19): siRNA sense strand
gccaggagauucagcagua

SEQ ID NO: 1331084 - RNA, 19 nt, Homo sapiens
  misc_RNA (1)...(19): siRNA sense strand
ggaccucucgucuuacuua

SEQ ID NO: 1331085 - RNA, 19 nt, Homo sapiens
  misc_RNA (1)...(19): siRNA sense strand
gcacaaggacugcaaguuc

SEQ ID NO: 1331086 - RNA, 19 nt, Homo sapiens
  misc_RNA (1)...(19): siRNA sense strand
gugcgcagcuucauuguug

SEQ ID NO: 1331087 - RNA, 19 nt, Homo sapiens
  misc_RNA (1)...(19): siRNA sense strand
cagcauggauagaauagaa

SEQ ID NO: 1331088 - RNA, 19 nt, Homo sapiens
  misc_RNA (1)...(19): siRNA sense strand
gcaaguuccugauccuaga

SEQ ID NO: 1331089 - RNA, 19 nt, Homo sapiens
  misc_RNA (1)...(19): siRNA sense strand
ggucaucgaugcucacugu

SEQ ID NO: 1331090 - RNA, 19 nt, Homo sapiens
  misc_RNA (1)...(19): siRNA sense strand
gaauuugcaucuucuucaa

SEQ ID NO: 1331091 - RNA, 19 nt, Homo sapiens
  misc_RNA (1)...(19): siRNA sense strand
agacaaaggugaccaaguc

SEQ ID NO: 1331092 - RNA, 19 nt, Homo sapiens
  misc_RNA (1)...(19): siRNA sense strand
ggacagcauggauagaaua

SEQ ID NO: 1331093 - RNA, 19 nt, Homo sapiens
  misc_RNA (1)...(19): siRNA sense strand
aaagcaagcugccuacaau

SEQ ID NO: 1331094 - RNA, 19 nt, Homo sapiens
  misc_RNA (1)...(19): siRNA sense strand
gagcagaccuggacaaaau

SEQ ID NO: 1331095 - RNA, 19 nt, Homo sapiens
  misc_RNA (1)...(19): siRNA sense strand
aaauugggcugcacaguga

SEQ ID NO: 1331096 - RNA, 19 nt, Homo sapiens
  misc_RNA (1)...(19): siRNA sense strand
gagcaaggccucccagguu

SEQ ID NO: 1331097 - RNA, 19 nt, Homo sapiens
  misc_RNA (1)...(19): siRNA sense strand
uacauaaacucaacuggaa

SEQ ID NO: 1331098 - RNA, 19 nt, Homo sapiens
  misc_RNA (1)...(19): siRNA sense strand
cacaagacuuacauccuua

SEQ ID NO: 1331099 - RNA, 19 nt, Homo sapiens
  misc_RNA (1)...(19): siRNA sense strand
acaguaaccacaagacuua

SEQ ID NO: 1331100 - RNA, 19 nt, Homo sapiens
  misc_RNA (1)...(19): siRNA sense strand
ugaagucacugagagaauu

SEQ ID NO: 1331101 - RNA, 19 nt, Homo sapiens
  misc_RNA (1)...(19): siRNA sense strand
gaucaucaaguaccaugua

SEQ ID NO: 1331102 - RNA, 19 nt, Homo sapiens
  misc_RNA (1)...(19): siRNA sense strand
gcuccgaggugaaguagga

SEQ ID NO: 1331103 - RNA, 19 nt, Homo sapiens
  misc_RNA (1)...(19): siRNA sense strand
gaaaggaaaacucacguua

SEQ ID NO: 1331104 - RNA, 19 nt, Homo sapiens
  misc_RNA (1)...(19): siRNA sense strand
ggaguacccucggaaggaa

SEQ ID NO: 1331105 - RNA, 19 nt, Homo sapiens
  misc_RNA (1)...(19): siRNA sense strand
uggaugauguuaagcguuu

SEQ ID NO: 1331106 - RNA, 19 nt, Homo sapiens
  misc_RNA (1)...(19): siRNA sense strand
gcagagcgaugaccuuuug

SEQ ID NO: 1331107 - RNA, 19 nt, Homo sapiens
  misc_RNA (1)...(19): siRNA sense strand
agaaggagaagaaguauug

SEQ ID NO: 1331108 - RNA, 19 nt, Homo sapiens
  misc_RNA (1)...(19): siRNA sense strand
ggagccggcuggagaaaca

SEQ ID NO: 1331109 - RNA, 19 nt, Homo sapiens
  misc_RNA (1)...(19): siRNA sense strand
gugacaguauuagaucuua

SEQ ID NO: 1331110 - RNA, 19 nt, Homo sapiens
  misc_RNA (1)...(19): siRNA sense strand
cuggagaucuggauuacaa

SEQ ID NO: 1331111 - RNA, 19 nt, Homo sapiens
  misc_RNA (1)...(19): siRNA sense strand
gcagaaggcggcauguaug

SEQ ID NO: 1331112 - RNA, 19 nt, Homo sapiens
  misc_RNA (1)...(19): siRNA sense strand
ugagagaauugucacugaa

SEQ ID NO: 1331113 - RNA, 19 nt, Homo sapiens
  misc_RNA (1)...(19): siRNA sense strand
caacaccaaugccuacucu

SEQ ID NO: 1331114 - RNA, 19 nt, Homo sapiens
  misc_RNA (1)...(19): siRNA sense strand
agaauuggaugauguuaag

SEQ ID NO: 1331115 - RNA, 19 nt, Homo sapiens
  misc_RNA (1)...(19): siRNA sense strand
ggccaugccuccaccucua

SEQ ID NO: 1331116 - RNA, 19 nt, Homo sapiens
  misc_RNA (1)...(19): siRNA sense strand
ggaauuugcaucuucuuca

SEQ ID NO: 1331117 - RNA, 19 nt, Homo sapiens
  misc_RNA (1)...(19): siRNA sense strand
gaugugcgcagcuucauug

SEQ ID NO: 1331118 - RNA, 19 nt, Homo sapiens
  misc_RNA (1)...(19): siRNA sense strand
cugcagauauccacagcua

SEQ ID NO: 1331119 - RNA, 19 nt, Homo sapiens
  misc_RNA (1)...(19): siRNA sense strand
gaccaccacugcagauauc

SEQ ID NO: 1331120 - RNA, 19 nt, Homo sapiens
  misc_RNA (1)...(19): siRNA sense strand
gcagauauccacagcuaca

SEQ ID NO: 1331121 - RNA, 19 nt, Homo sapiens
  misc_RNA (1)...(19): siRNA sense strand
caaaggugaccaagucuau

SEQ ID NO: 1331122 - RNA, 19 nt, Homo sapiens
  misc_RNA (1)...(19): siRNA sense strand
gagagaauugucacugaaa

SEQ ID NO: 1331123 - RNA, 19 nt, Homo sapiens
  misc_RNA (1)...(19): siRNA sense strand
uggaugagcuggagaggau

SEQ ID NO: 1331124 - RNA, 19 nt, Homo sapiens
  misc_RNA (1)...(19): siRNA sense strand
ccacccagguccacaagga

SEQ ID NO: 1331125 - RNA, 19 nt, Homo sapiens
  misc_RNA (1)...(19): siRNA sense strand
caagccacguugugagcua

SEQ ID NO: 1331126 - RNA, 19 nt, Homo sapiens
  misc_RNA (1)...(19): siRNA sense strand
gggagauccuggcauggaa

SEQ ID NO: 1331127 - RNA, 19 nt, Homo sapiens
  misc_RNA (1)...(19): siRNA sense strand
ggaccuaucacaacaacau

SEQ ID NO: 1331128 - RNA, 19 nt, Homo sapiens
  misc_RNA (1)...(19): siRNA sense strand
cggagaaggagaagaagua

SEQ ID NO: 1331129 - RNA, 19 nt, Homo sapiens
  misc_RNA (1)...(19): siRNA sense strand
guagucgcauucucagcua

SEQ ID NO: 1331130 - RNA, 19 nt, Homo sapiens
  misc_RNA (1)...(19): siRNA sense strand
cugaguacaugcagaguga

SEQ ID NO: 1331131 - RNA, 19 nt, Homo sapiens
  misc_RNA (1)...(19): siRNA sense strand
gggcggagaaggagaagaa

SEQ ID NO: 1331132 - RNA, 19 nt, Homo sapiens
  misc_RNA (1)...(19): siRNA sense strand
ggacuucuuccaaacuuau

SEQ ID NO: 1331133 - RNA, 19 nt, Homo sapiens
  misc_RNA (1)...(19): siRNA sense strand
ggcagcagcggcuacauaa

SEQ ID NO: 1331134 - RNA, 19 nt, Homo sapiens
  misc_RNA (1)...(19): siRNA sense strand
cccaggacaucaagaaguu

SEQ ID NO: 1331135 - RNA, 19 nt, Homo sapiens
  misc_RNA (1)...(19): siRNA sense strand
caggcaagaucgugacuuc

SEQ ID NO: 1331136 - RNA, 19 nt, Homo sapiens
  misc_RNA (1)...(19): siRNA sense strand
ugaaggcgcguguggauga

SEQ ID NO: 1331137 - RNA, 19 nt, Homo sapiens
  misc_RNA (1)...(19): siRNA sense strand
ggacagcgggaaggucuuu

SEQ ID NO: 1331138 - RNA, 19 nt, Homo sapiens
  misc_RNA (1)...(19): siRNA sense strand
gaucguuccuguccaacuc

SEQ ID NO: 1331139 - RNA, 19 nt, Homo sapiens
  misc_RNA (1)...(19): siRNA sense strand
ugacuuugcuggagaucug

SEQ ID NO: 1331140 - RNA, 19 nt, Homo sapiens
  misc_RNA (1)...(19): siRNA sense strand
gcucaucccuccucaacac

SEQ ID NO: 1331141 - RNA, 19 nt, Homo sapiens
  misc_RNA (1)...(19): siRNA sense strand
gcagagugacaguauuaga

SEQ ID NO: 1331142 - RNA, 19 nt, Homo sapiens
  misc_RNA (1)...(19): siRNA sense strand
gcucuuggcauuccuagug

SEQ ID NO: 1331143 - RNA, 19 nt, Homo sapiens
  misc_RNA (1)...(19): siRNA sense strand
cccaagaggugaacaaggu

SEQ ID NO: 1331144 - RNA, 19 nt, Homo sapiens
  misc_RNA (1)...(19): siRNA sense strand
gcacauccuccucaguguu

SEQ ID NO: 1331145 - RNA, 19 nt, Homo sapiens
  misc_RNA (1)...(19): siRNA sense strand
ucagcuacaugucgaguuc

SEQ ID NO: 1331146 - RNA, 19 nt, Homo sapiens
  misc_RNA (1)...(19): siRNA sense strand
gaagucacugagagaauug

SEQ ID NO: 1331147 - RNA, 19 nt, Homo sapiens
  misc_RNA (1)...(19): siRNA sense strand
aaagacaacacaccugcua

SEQ ID NO: 1331148 - RNA, 19 nt, Homo sapiens
  misc_RNA (1)...(19): siRNA sense strand
uauuagaucuuaccuaucc

SEQ ID NO: 1331149 - RNA, 19 nt, Homo sapiens
  misc_RNA (1)...(19): siRNA sense strand
gagaucuggauuacaauga

SEQ ID NO: 1331150 - RNA, 19 nt, Homo sapiens
  misc_RNA (1)...(19): siRNA sense strand
gaucagcuaccucacaagu

SEQ ID NO: 1331151 - RNA, 19 nt, Homo sapiens
  misc_RNA (1)...(19): siRNA sense strand
gagcugaguagucgcauuc

SEQ ID NO: 1331152 - RNA, 19 nt, Homo sapiens
  misc_RNA (1)...(19): siRNA sense strand
gucaguaccuacgucagua

SEQ ID NO: 1331153 - RNA, 19 nt, Homo sapiens
  misc_RNA (1)...(19): siRNA sense strand
cagaauuggaugauguuaa

SEQ ID NO: 1331154 - RNA, 19 nt, Homo sapiens
  misc_RNA (1)...(19): siRNA sense strand
uccuacagcucuuccauga

SEQ ID NO: 1331155 - RNA, 19 nt, Homo sapiens
  misc_RNA (1)...(19): siRNA sense strand
agcaguacaucucugagua

SEQ ID NO: 1331156 - RNA, 19 nt, Homo sapiens
  misc_RNA (1)...(19): siRNA sense strand
ccagggaccucagggacuu

SEQ ID NO: 1331157 - RNA, 19 nt, Homo sapiens
  misc_RNA (1)...(19): siRNA sense strand
gggacagcauggauagaau

SEQ ID NO: 1331158 - RNA, 19 nt, Homo sapiens
  misc_RNA (1)...(19): siRNA sense strand
gggagucgaucggcaagug

SEQ ID NO: 1331159 - RNA, 19 nt, Homo sapiens
  misc_RNA (1)...(19): siRNA sense strand
gcgaugaccuuuugcacaa

SEQ ID NO: 1331160 - RNA, 19 nt, Homo sapiens
  misc_RNA (1)...(19): siRNA sense strand
aggaagcccuggcccuaaa

SEQ ID NO: 1331161 - RNA, 19 nt, Homo sapiens
  misc_RNA (1)...(19): siRNA sense strand
gaggaagcccuggcccuaa

SEQ ID NO: 1331162 - RNA, 19 nt, Homo sapiens
  misc_RNA (1)...(19): siRNA sense strand
cugagagaauugucacuga

SEQ ID NO: 1331163 - RNA, 19 nt, Homo sapiens
  misc_RNA (1)...(19): siRNA sense strand
ggaucagucuucggaguuc

SEQ ID NO: 1331164 - RNA, 19 nt, Homo sapiens
  misc_RNA (1)...(19): siRNA sense strand
ggagaucuggauuacaaug

SEQ ID NO: 1331165 - RNA, 19 nt, Homo sapiens
  misc_RNA (1)...(19): siRNA sense strand
ggaccugucaccaccauca

SEQ ID NO: 1331166 - RNA, 19 nt, Homo sapiens
  misc_RNA (1)...(19): siRNA sense strand
caaaggugauccggguguu

SEQ ID NO: 1331167 - RNA, 19 nt, Homo sapiens
  misc_RNA (1)...(19): siRNA sense strand
uuacugggaugccuggaau

SEQ ID NO: 1331168 - RNA, 19 nt, Homo sapiens
  misc_RNA (1)...(19): siRNA sense strand
gagccuggcaugagagguu

SEQ ID NO: 1331169 - RNA, 19 nt, Homo sapiens
  misc_RNA (1)...(19): siRNA sense strand
gaggaagaagcuaaugaug

SEQ ID NO: 1331170 - RNA, 19 nt, Homo sapiens
  misc_RNA (1)...(19): siRNA sense strand
aggaggagcucuggauguu

SEQ ID NO: 1331171 - RNA, 19 nt, Homo sapiens
  misc_RNA (1)...(19): siRNA sense strand
caaacacgagagagugaaa

SEQ ID NO: 1331172 - RNA, 19 nt, Homo sapiens
  misc_RNA (1)...(19): siRNA sense strand
gagaaggagaagaaguauu

SEQ ID NO: 1331173 - RNA, 19 nt, Homo sapiens
  misc_RNA (1)...(19): siRNA sense strand
gagagugaaauucgaguuc

SEQ ID NO: 1331174 - RNA, 19 nt, Homo sapiens
  misc_RNA (1)...(19): siRNA sense strand
cugcggaccucauggacuu

SEQ ID NO: 1331175 - RNA, 19 nt, Homo sapiens
  misc_RNA (1)...(19): siRNA sense strand
ggagaaggagaagaaguau

SEQ ID NO: 1331176 - RNA, 19 nt, Homo sapiens
  misc_RNA (1)...(19): siRNA sense strand
ggaagaagcuaaugaugga

SEQ ID NO: 1331177 - RNA, 19 nt, Homo sapiens
  misc_RNA (1)...(19): siRNA sense strand
ggacagaauuggaugaugu

SEQ ID NO: 1331178 - RNA, 19 nt, Homo sapiens
  misc_RNA (1)...(19): siRNA sense strand
aaacaaagccugacucaug

SEQ ID NO: 1331179 - RNA, 19 nt, Homo sapiens
  misc_RNA (1)...(19): siRNA sense strand
caacacaccugcuaagaag

SEQ ID NO: 1331180 - RNA, 19 nt, Homo sapiens
  misc_RNA (1)...(19): siRNA sense strand
gaagaaguauugcugucaa

SEQ ID NO: 1331181 - RNA, 19 nt, Homo sapiens
  misc_RNA (1)...(19): siRNA sense strand
ccacaagacuuacauccuu

SEQ ID NO: 1331182 - RNA, 19 nt, Homo sapiens
  misc_RNA (1)...(19): siRNA sense strand
caaacgagauggaacugaa

SEQ ID NO: 1331183 - RNA, 19 nt, Homo sapiens
  misc_RNA (1)...(19): siRNA sense strand
gccaggagauucagcagua

SEQ ID NO: 1331184 - RNA, 19 nt, Homo sapiens
  misc_RNA (1)...(19): siRNA sense strand
ggaccucucgucuuacuua

SEQ ID NO: 1331185 - RNA, 19 nt, Homo sapiens
  misc_RNA (1)...(19): siRNA sense strand
gcacaaggacugcaaguuc

SEQ ID NO: 1331186 - RNA, 19 nt, Homo sapiens
  misc_RNA (1)...(19): siRNA sense strand
gugcgcagcuucauuguug

SEQ ID NO: 1331187 - RNA, 19 nt, Homo sapiens
  misc_RNA (1)...(19): siRNA sense strand
cagcauggauagaauagaa

SEQ ID NO: 1331188 - RNA, 19 nt, Homo sapiens
  misc_RNA (1)...(19): siRNA sense strand
gcaaguuccugauccuaga

SEQ ID NO: 1331189 - RNA, 19 nt, Homo sapiens
  misc_RNA (1)...(19): siRNA sense strand
ggucaucgaugcucacugu

SEQ ID NO: 1331190 - RNA, 19 nt, Homo sapiens
  misc_RNA (1)...(19): siRNA sense strand
gaauuugcaucuucuucaa

SEQ ID NO: 1331191 - RNA, 19 nt, Homo sapiens
  misc_RNA (1)...(19): siRNA sense strand
agacaaaggugaccaaguc

SEQ ID NO: 1331192 - RNA, 19 nt, Homo sapiens
  misc_RNA (1)...(19): siRNA sense strand
ggacagcauggauagaaua

SEQ ID NO: 1331193 - RNA, 19 nt, Homo sapiens
  misc_RNA (1)...(19): siRNA sense strand
aaagcaagcugccuacaau

SEQ ID NO: 1331194 - RNA, 19 nt, Homo sapiens
  misc_RNA (1)...(19): siRNA sense strand
gagcagaccuggacaaaau

SEQ ID NO: 1331195 - RNA, 19 nt, Homo sapiens
  misc_RNA (1)...(19): siRNA sense strand
aaauugggcugcacaguga

SEQ ID NO: 1331196 - RNA, 19 nt, Homo sapiens
  misc_RNA (1)...(19): siRNA sense strand
gagcaaggccucccagguu

SEQ ID NO: 1331197 - RNA, 19 nt, Homo sapiens
  misc_RNA (1)...(19): siRNA sense strand
uacauaaacucaacuggaa

SEQ ID NO: 1331198 - RNA, 19 nt, Homo sapiens
  misc_RNA (1)...(19): siRNA sense strand
cacaagacuuacauccuua

SEQ ID NO: 1331199 - RNA, 19 nt, Homo sapiens
  misc_RNA (1)...(19): siRNA sense strand
acaguaaccacaagacuua

SEQ ID NO: 1331200 - RNA, 19 nt, Homo sapiens
  misc_RNA (1)...(19): siRNA sense strand
ugaagucacugagagaauu

SEQ ID NO: 1331201 - RNA, 19 nt, Homo sapiens
  misc_RNA (1)...(19): siRNA sense strand
gaucaucaaguaccaugua

SEQ ID NO: 1331202 - RNA, 19 nt, Homo sapiens
  misc_RNA (1)...(19): siRNA sense strand
gcuccgaggugaaguagga

SEQ ID NO: 1331203 - RNA, 19 nt, Homo sapiens
  misc_RNA (1)...(19): siRNA sense strand
gaaaggaaaacucacguua

SEQ ID NO: 1331204 - RNA, 19 nt, Homo sapiens
  misc_RNA (1)...(19): siRNA sense strand
ggaguacccucggaaggaa

SEQ ID NO: 1331205 - RNA, 19 nt, Homo sapiens
  misc_RNA (1)...(19): siRNA sense strand
uggaugauguuaagcguuu

SEQ ID NO: 1331206 - RNA, 19 nt, Homo sapiens
  misc_RNA (1)...(19): siRNA sense strand
gcagagcgaugaccuuuug

SEQ ID NO: 1331207 - RNA, 19 nt, Homo sapiens
  misc_RNA (1)...(19): siRNA sense strand
agaaggagaagaaguauug

SEQ ID NO: 1331208 - RNA, 19 nt, Homo sapiens
  misc_RNA (1)...(19): siRNA sense strand
ggagccggcuggagaaaca

SEQ ID NO: 1331209 - RNA, 19 nt, Homo sapiens
  misc_RNA (1)...(19): siRNA sense strand
gugacaguauuagaucuua

SEQ ID NO: 1331210 - RNA, 19 nt, Homo sapiens
  misc_RNA (1)...(19): siRNA sense strand
cuggagaucuggauuacaa

SEQ ID NO: 1331211 - RNA, 19 nt, Homo sapiens
  misc_RNA (1)...(19): siRNA sense strand
gcagaaggcggcauguaug

SEQ ID NO: 1331212 - RNA, 19 nt, Homo sapiens
  misc_RNA (1)...(19): siRNA sense strand
ugagagaauugucacugaa

SEQ ID NO: 1331213 - RNA, 19 nt, Homo sapiens
  misc_RNA (1)...(19): siRNA sense strand
caacaccaaugccuacucu

SEQ ID NO: 1331214 - RNA, 19 nt, Homo sapiens
  misc_RNA (1)...(19): siRNA sense strand
agaauuggaugauguuaag

SEQ ID NO: 1331215 - RNA, 19 nt, Homo sapiens
  misc_RNA (1)...(19): siRNA sense strand
ggccaugccuccaccucua

SEQ ID NO: 1331216 - RNA, 19 nt, Homo sapiens
  misc_RNA (1)...(19): siRNA sense strand
ggaauuugcaucuucuuca

SEQ ID NO: 1331217 - RNA, 19 nt, Homo sapiens
  misc_RNA (1)...(19): siRNA sense strand
gaugugcgcagcuucauug

SEQ ID NO: 1331218 - RNA, 19 nt, Homo sapiens
  misc_RNA (1)...(19): siRNA sense strand
cugcagauauccacagcua

SEQ ID NO: 1331219 - RNA, 19 nt, Homo sapiens
  misc_RNA (1)...(19): siRNA sense strand
gaccaccacugcagauauc

SEQ ID NO: 1331220 - RNA, 19 nt, Homo sapiens
  misc_RNA (1)...(19): siRNA sense strand
gcagauauccacagcuaca

SEQ ID NO: 1331221 - RNA, 19 nt, Homo sapiens
  misc_RNA (1)...(19): siRNA sense strand
caaaggugaccaagucuau

SEQ ID NO: 1331222 - RNA, 19 nt, Homo sapiens
  misc_RNA (1)...(19): siRNA sense strand
gagagaauugucacugaaa

SEQ ID NO: 1331223 - RNA, 19 nt, Homo sapiens
  misc_RNA (1)...(19): siRNA sense strand
uggaugagcuggagaggau

SEQ ID NO: 1331224 - RNA, 19 nt, Homo sapiens
  misc_RNA (1)...(19): siRNA sense strand
ccacccagguccacaagga

SEQ ID NO: 1331225 - RNA, 19 nt, Homo sapiens
  misc_RNA (1)...(19): siRNA sense strand
caagccacguugugagcua

SEQ ID NO: 1331226 - RNA, 19 nt, Homo sapiens
  misc_RNA (1)...(19): siRNA sense strand
gggagauccuggcauggaa

SEQ ID NO: 1331227 - RNA, 19 nt, Homo sapiens
  misc_RNA (1)...(19): siRNA sense strand
ggaccuaucacaacaacau

SEQ ID NO: 1331228 - RNA, 19 nt, Homo sapiens
  misc_RNA (1)...(19): siRNA sense strand
cggagaaggagaagaagua

SEQ ID NO: 1331229 - RNA, 19 nt, Homo sapiens
  misc_RNA (1)...(19): siRNA sense strand
guagucgcauucucagcua

SEQ ID NO: 1331230 - RNA, 19 nt, Homo sapiens
  misc_RNA (1)...(19): siRNA sense strand
cugaguacaugcagaguga

SEQ ID NO: 1331231 - RNA, 19 nt, Homo sapiens
  misc_RNA (1)...(19): siRNA sense strand
gggcggagaaggagaagaa

SEQ ID NO: 1331232 - RNA, 19 nt, Homo sapiens
  misc_RNA (1)...(19): siRNA sense strand
ggacuucuuccaaacuuau

SEQ ID NO: 1331233 - RNA, 19 nt, Homo sapiens
  misc_RNA (1)...(19): siRNA sense strand
ggcagcagcggcuacauaa

SEQ ID NO: 1331234 - RNA, 19 nt, Homo sapiens
  misc_RNA (1)...(19): siRNA sense strand
cccaggacaucaagaaguu

SEQ ID NO: 1331235 - RNA, 19 nt, Homo sapiens
  misc_RNA (1)...(19): siRNA sense strand
caggcaagaucgugacuuc

SEQ ID NO: 1331236 - RNA, 19 nt, Homo sapiens
  misc_RNA (1)...(19): siRNA sense strand
ugaaggcgcguguggauga

SEQ ID NO: 1331237 - RNA, 19 nt, Homo sapiens
  misc_RNA (1)...(19): siRNA sense strand
ggacagcgggaaggucuuu

SEQ ID NO: 1331238 - RNA, 19 nt, Homo sapiens
  misc_RNA (1)...(19): siRNA sense strand
gaucguuccuguccaacuc

SEQ ID NO: 1331239 - RNA, 19 nt, Homo sapiens
  misc_RNA (1)...(19): siRNA sense strand
ugacuuugcuggagaucug

SEQ ID NO: 1331240 - RNA, 19 nt, Homo sapiens
  misc_RNA (1)...(19): siRNA sense strand
gcucaucccuccucaacac

SEQ ID NO: 1331241 - RNA, 19 nt, Homo sapiens
  misc_RNA (1)...(19): siRNA sense strand
gcagagugacaguauuaga

SEQ ID NO: 1331242 - RNA, 19 nt, Homo sapiens
  misc_RNA (1)...(19): siRNA sense strand
gcucuuggcauuccuagug

SEQ ID NO: 1331243 - RNA, 19 nt, Homo sapiens
  misc_RNA (1)...(19): siRNA sense strand
cccaagaggugaacaaggu

SEQ ID NO: 1331244 - RNA, 19 nt, Homo sapiens
  misc_RNA (1)...(19): siRNA sense strand
gcacauccuccucaguguu

SEQ ID NO: 1331245 - RNA, 19 nt, Homo sapiens
  misc_RNA (1)...(19): siRNA sense strand
ucagcuacaugucgaguuc

SEQ ID NO: 1331246 - RNA, 19 nt, Homo sapiens
  misc_RNA (1)...(19): siRNA sense strand
gaagucacugagagaauug

SEQ ID NO: 1331247 - RNA, 19 nt, Homo sapiens
  misc_RNA (1)...(19): siRNA sense strand
aaagacaacacaccugcua

SEQ ID NO: 1331248 - RNA, 19 nt, Homo sapiens
  misc_RNA (1)...(19): siRNA sense strand
uauuagaucuuaccuaucc

SEQ ID NO: 1331249 - RNA, 19 nt, Homo sapiens
  misc_RNA (1)...(19): siRNA sense strand
gagaucuggauuacaauga

SEQ ID NO: 1331250 - RNA, 19 nt, Homo sapiens
  misc_RNA (1)...(19): siRNA sense strand
gaucagcuaccucacaagu

SEQ ID NO: 1331251 - RNA, 19 nt, Homo sapiens
  misc_RNA (1)...(19): siRNA sense strand
gagcugaguagucgcauuc

SEQ ID NO: 1331252 - RNA, 19 nt, Homo sapiens
  misc_RNA (1)...(19): siRNA sense strand
gucaguaccuacgucagua

SEQ ID NO: 1331253 - RNA, 19 nt, Homo sapiens
  misc_RNA (1)...(19): siRNA sense strand
cagaauuggaugauguuaa

SEQ ID NO: 1331254 - RNA, 19 nt, Homo sapiens
  misc_RNA (1)...(19): siRNA sense strand
uccuacagcucuuccauga

SEQ ID NO: 1331255 - RNA, 19 nt, Homo sapiens
  misc_RNA (1)...(19): siRNA sense strand
agcaguacaucucugagua

SEQ ID NO: 1331256 - RNA, 19 nt, Homo sapiens
  misc_RNA (1)...(19): siRNA sense strand
ccagggaccucagggacuu

SEQ ID NO: 1331257 - RNA, 19 nt, Homo sapiens
  misc_RNA (1)...(19): siRNA sense strand
gggacagcauggauagaau

SEQ ID NO: 1331258 - RNA, 19 nt, Homo sapiens
  misc_RNA (1)...(19): siRNA sense strand
gggagucgaucggcaagug

SEQ ID NO: 1331259 - RNA, 19 nt, Homo sapiens
  misc_RNA (1)...(19): siRNA sense strand
gcgaugaccuuuugcacaa

SEQ ID NO: 1331260 - RNA, 19 nt, Homo sapiens
  misc_RNA (1)...(19): siRNA sense strand
aggaagcccuggcccuaaa

SEQ ID NO: 1331261 - RNA, 19 nt, Homo sapiens
  misc_RNA (1)...(19): siRNA sense strand
gaggaagcccuggcccuaa

SEQ ID NO: 1331262 - RNA, 19 nt, Homo sapiens
  misc_RNA (1)...(19): siRNA sense strand
cugagagaauugucacuga

SEQ ID NO: 1331263 - RNA, 19 nt, Homo sapiens
  misc_RNA (1)...(19): siRNA sense strand
ggaucagucuucggaguuc

SEQ ID NO: 1331264 - RNA, 19 nt, Homo sapiens
  misc_RNA (1)...(19): siRNA sense strand
ggagaucuggauuacaaug

SEQ ID NO: 1331265 - RNA, 19 nt, Homo sapiens
  misc_RNA (1)...(19): siRNA sense strand
ggaccugucaccaccauca

SEQ ID NO: 1331266 - RNA, 19 nt, Homo sapiens
  misc_RNA (1)...(19): siRNA sense strand
caaaggugauccggguguu

SEQ ID NO: 1331267 - RNA, 19 nt, Homo sapiens
  misc_RNA (1)...(19): siRNA sense strand
uuacugggaugccuggaau

SEQ ID NO: 1331268 - RNA, 19 nt, Homo sapiens
  misc_RNA (1)...(19): siRNA sense strand
gagccuggcaugagagguu

SEQ ID NO: 1331269 - RNA, 19 nt, Homo sapiens
  misc_RNA (1)...(19): siRNA sense strand
gaggaagaagcuaaugaug

SEQ ID NO: 1331270 - RNA, 19 nt, Homo sapiens
  misc_RNA (1)...(19): siRNA sense strand
aggaggagcucuggauguu

SEQ ID NO: 1331271 - RNA, 19 nt, Homo sapiens
  misc_RNA (1)...(19): siRNA sense strand
caaacacgagagagugaaa

SEQ ID NO: 1331272 - RNA, 19 nt, Homo sapiens
  misc_RNA (1)...(19): siRNA sense strand
gagaaggagaagaaguauu

SEQ ID NO: 1331273 - RNA, 19 nt, Homo sapiens
  misc_RNA (1)...(19): siRNA sense strand
gagagugaaauucgaguuc

SEQ ID NO: 1331274 - RNA, 19 nt, Homo sapiens
  misc_RNA (1)...(19): siRNA sense strand
cugcggaccucauggacuu

SEQ ID NO: 1331275 - RNA, 19 nt, Homo sapiens
  misc_RNA (1)...(19): siRNA sense strand
ggagaaggagaagaaguau

SEQ ID NO: 1331276 - RNA, 19 nt, Homo sapiens
  misc_RNA (1)...(19): siRNA sense strand
gaaacaaacugcagaaugu

SEQ ID NO: 1331277 - RNA, 19 nt, Homo sapiens
  misc_RNA (1)...(19): siRNA sense strand
acaaggaucuggauauuua

SEQ ID NO: 1331278 - RNA, 19 nt, Homo sapiens
  misc_RNA (1)...(19): siRNA sense strand
ggacaaagauaagcaaauu

SEQ ID NO: 1331279 - RNA, 19 nt, Homo sapiens
  misc_RNA (1)...(19): siRNA sense strand
ggacagacuugccaaauug

SEQ ID NO: 1331280 - RNA, 19 nt, Homo sapiens
  misc_RNA (1)...(19): siRNA sense strand
gaacaaggaucuggauauu

SEQ ID NO: 1331281 - RNA, 19 nt, Homo sapiens
  misc_RNA (1)...(19): siRNA sense strand
gcucagagauugugaaaug

SEQ ID NO: 1331282 - RNA, 19 nt, Homo sapiens
  misc_RNA (1)...(19): siRNA sense strand
ggaaauaccagaauuaaga

SEQ ID NO: 1331283 - RNA, 19 nt, Homo sapiens
  misc_RNA (1)...(19): siRNA sense strand
gaaaugaucaguucucuug

SEQ ID NO: 1331284 - RNA, 19 nt, Homo sapiens
  misc_RNA (1)...(19): siRNA sense strand
ugacaaagaugaacaaauc

SEQ ID NO: 1331285 - RNA, 19 nt, Homo sapiens
  misc_RNA (1)...(19): siRNA sense strand
gaagagaacauagacaaua

SEQ ID NO: 1331286 - RNA, 19 nt, Homo sapiens
  misc_RNA (1)...(19): siRNA sense strand
gaauagaggacaaagauaa

SEQ ID NO: 1331287 - RNA, 19 nt, Homo sapiens
  misc_RNA (1)...(19): siRNA sense strand
gaaagguuaugaagaagaa

SEQ ID NO: 1331288 - RNA, 19 nt, Homo sapiens
  misc_RNA (1)...(19): siRNA sense strand
gaaggaaauaccagaauua

SEQ ID NO: 1331289 - RNA, 19 nt, Homo sapiens
  misc_RNA (1)...(19): siRNA sense strand
agacaaagcugacaaagau

SEQ ID NO: 1331290 - RNA, 19 nt, Homo sapiens
  misc_RNA (1)...(19): siRNA sense strand
ggagaaagauaauagugaa

SEQ ID NO: 1331291 - RNA, 19 nt, Homo sapiens
  misc_RNA (1)...(19): siRNA sense strand
caaaggaaauugucaaauc

SEQ ID NO: 1331292 - RNA, 19 nt, Homo sapiens
  misc_RNA (1)...(19): siRNA sense strand
gaaauuaaagccuuggaua

SEQ ID NO: 1331293 - RNA, 19 nt, Homo sapiens
  misc_RNA (1)...(19): siRNA sense strand
ggagcagacuguggaauua

SEQ ID NO: 1331294 - RNA, 19 nt, Homo sapiens
  misc_RNA (1)...(19): siRNA sense strand
gaaagacgaccaucauuga

SEQ ID NO: 1331295 - RNA, 19 nt, Homo sapiens
  misc_RNA (1)...(19): siRNA sense strand
gaagagcaguuguccaguu

SEQ ID NO: 1331296 - RNA, 19 nt, Homo sapiens
  misc_RNA (1)...(19): siRNA sense strand
caacacagcuagaauugga

SEQ ID NO: 1331297 - RNA, 19 nt, Homo sapiens
  misc_RNA (1)...(19): siRNA sense strand
ccaaggcugugcuaaauaa

SEQ ID NO: 1331298 - RNA, 19 nt, Homo sapiens
  misc_RNA (1)...(19): siRNA sense strand
gaaagaagcaaauggagaa

SEQ ID NO: 1331299 - RNA, 19 nt, Homo sapiens
  misc_RNA (1)...(19): siRNA sense strand
acagaaagguuaugaagaa

SEQ ID NO: 1331300 - RNA, 19 nt, Homo sapiens
  misc_RNA (1)...(19): siRNA sense strand
gaaauugaccgagaaauga

SEQ ID NO: 1331301 - RNA, 19 nt, Homo sapiens
  misc_RNA (1)...(19): siRNA sense strand
gaaagguggcuacaagaua

SEQ ID NO: 1331302 - RNA, 19 nt, Homo sapiens
  misc_RNA (1)...(19): siRNA sense strand
agaagaaagugccaaagua

SEQ ID NO: 1331303 - RNA, 19 nt, Homo sapiens
  misc_RNA (1)...(19): siRNA sense strand
gcaacaagauacauuaaag

SEQ ID NO: 1331304 - RNA, 19 nt, Homo sapiens
  misc_RNA (1)...(19): siRNA sense strand
ggaauuauccacugaaguu

SEQ ID NO: 1331305 - RNA, 19 nt, Homo sapiens
  misc_RNA (1)...(19): siRNA sense strand
ggaauagacuuagaucgaa

SEQ ID NO: 1331306 - RNA, 19 nt, Homo sapiens
  misc_RNA (1)...(19): siRNA sense strand
ccaaccaacugaugaauga

SEQ ID NO: 1331307 - RNA, 19 nt, Homo sapiens
  misc_RNA (1)...(19): siRNA sense strand
gauaaaggaugcuaaagag

SEQ ID NO: 1331308 - RNA, 19 nt, Homo sapiens
  misc_RNA (1)...(19): siRNA sense strand
caagaaagguggcuacaag

SEQ ID NO: 1331309 - RNA, 19 nt, Homo sapiens
  misc_RNA (1)...(19): siRNA sense strand
aaagguggcuacaagauaa

SEQ ID NO: 1331310 - RNA, 19 nt, Homo sapiens
  misc_RNA (1)...(19): siRNA sense strand
gaaagaaaggaaauuggua

SEQ ID NO: 1331311 - RNA, 19 nt, Homo sapiens
  misc_RNA (1)...(19): siRNA sense strand
uaaccucacuguugggaua

SEQ ID NO: 1331312 - RNA, 19 nt, Homo sapiens
  misc_RNA (1)...(19): siRNA sense strand
guuaacaucuucaaaggaa

SEQ ID NO: 1331313 - RNA, 19 nt, Homo sapiens
  misc_RNA (1)...(19): siRNA sense strand
caaaugagcuaaaaucuga

SEQ ID NO: 1331314 - RNA, 19 nt, Homo sapiens
  misc_RNA (1)...(19): siRNA sense strand
gaagaaagugccaaaguau

SEQ ID NO: 1331315 - RNA, 19 nt, Homo sapiens
  misc_RNA (1)...(19): siRNA sense strand
gcaagcagaucgccaucaa

SEQ ID NO: 1331316 - RNA, 19 nt, Homo sapiens
  misc_RNA (1)...(19): siRNA sense strand
gaucagugcucagagauug

SEQ ID NO: 1331317 - RNA, 19 nt, Homo sapiens
  misc_RNA (1)...(19): siRNA sense strand
gacaagauauugauacaca

SEQ ID NO: 1331318 - RNA, 19 nt, Homo sapiens
  misc_RNA (1)...(19): siRNA sense strand
gaauugaaucguaagcuua

SEQ ID NO: 1331319 - RNA, 19 nt, Homo sapiens
  misc_RNA (1)...(19): siRNA sense strand
aaucagaacugcuuguuga

SEQ ID NO: 1331320 - RNA, 19 nt, Homo sapiens
  misc_RNA (1)...(19): siRNA sense strand
gaaacacucuuggguacaa

SEQ ID NO: 1331321 - RNA, 19 nt, Homo sapiens
  misc_RNA (1)...(19): siRNA sense strand
ggaaauugguagacuguca

SEQ ID NO: 1331322 - RNA, 19 nt, Homo sapiens
  misc_RNA (1)...(19): siRNA sense strand
gaaagaacuucgagaacca

SEQ ID NO: 1331323 - RNA, 19 nt, Homo sapiens
  misc_RNA (1)...(19): siRNA sense strand
aguaauagcucaacuaagu

SEQ ID NO: 1331324 - RNA, 19 nt, Homo sapiens
  misc_RNA (1)...(19): siRNA sense strand
ggaaagacgaccaucauug

SEQ ID NO: 1331325 - RNA, 19 nt, Homo sapiens
  misc_RNA (1)...(19): siRNA sense strand
aauaaugccugaagaagaa

SEQ ID NO: 1331326 - RNA, 19 nt, Homo sapiens
  misc_RNA (1)...(19): siRNA sense strand
cgacauagaagaacaagaa

SEQ ID NO: 1331327 - RNA, 19 nt, Homo sapiens
  misc_RNA (1)...(19): siRNA sense strand
ggacugggaagaauaauug

SEQ ID NO: 1331328 - RNA, 19 nt, Homo sapiens
  misc_RNA (1)...(19): siRNA sense strand
ucagaaauccuaaguaaga

SEQ ID NO: 1331329 - RNA, 19 nt, Homo sapiens
  misc_RNA (1)...(19): siRNA sense strand
gaagacuggcuacauagua

SEQ ID NO: 1331330 - RNA, 19 nt, Homo sapiens
  misc_RNA (1)...(19): siRNA sense strand
gacacaaggucagaaagua

SEQ ID NO: 1331331 - RNA, 19 nt, Homo sapiens
  misc_RNA (1)...(19): siRNA sense strand
cuucagauauccacuaauu

SEQ ID NO: 1331332 - RNA, 19 nt, Homo sapiens
  misc_RNA (1)...(19): siRNA sense strand
gggacagacuugccaaauu

SEQ ID NO: 1331333 - RNA, 19 nt, Homo sapiens
  misc_RNA (1)...(19): siRNA sense strand
caagguugcucaagaaaca

SEQ ID NO: 1331334 - RNA, 19 nt, Homo sapiens
  misc_RNA (1)...(19): siRNA sense strand
gaacauauccgagcuagag

SEQ ID NO: 1331335 - RNA, 19 nt, Homo sapiens
  misc_RNA (1)...(19): siRNA sense strand
aaucuaggcuucucaauca

SEQ ID NO: 1331336 - RNA, 19 nt, Homo sapiens
  misc_RNA (1)...(19): siRNA sense strand
gacaagcuguuugauguuu

SEQ ID NO: 1331337 - RNA, 19 nt, Homo sapiens
  misc_RNA (1)...(19): siRNA sense strand
ugaauuaaccucacuguug

SEQ ID NO: 1331338 - RNA, 19 nt, Homo sapiens
  misc_RNA (1)...(19): siRNA sense strand
acagauagaugagauaaga

SEQ ID NO: 1331339 - RNA, 19 nt, Homo sapiens
  misc_RNA (1)...(19): siRNA sense strand
uaaguaagaagcagaauga

SEQ ID NO: 1331340 - RNA, 19 nt, Homo sapiens
  misc_RNA (1)...(19): siRNA sense strand
caggauaaacugaaugaua

SEQ ID NO: 1331341 - RNA, 19 nt, Homo sapiens
  misc_RNA (1)...(19): siRNA sense strand
guacaauaaugccugaaga

SEQ ID NO: 1331342 - RNA, 19 nt, Homo sapiens
  misc_RNA (1)...(19): siRNA sense strand
ggcaaagcauaauugauuu

SEQ ID NO: 1331343 - RNA, 19 nt, Homo sapiens
  misc_RNA (1)...(19): siRNA sense strand
gaagacaagcuguuugaug

SEQ ID NO: 1331344 - RNA, 19 nt, Homo sapiens
  misc_RNA (1)...(19): siRNA sense strand
gaacaaggaacuagcuuca

SEQ ID NO: 1331345 - RNA, 19 nt, Homo sapiens
  misc_RNA (1)...(19): siRNA sense strand
gaaguaauaagucuccaaa

SEQ ID NO: 1331346 - RNA, 19 nt, Homo sapiens
  misc_RNA (1)...(19): siRNA sense strand
gaaaggaaauugguagacu

SEQ ID NO: 1331347 - RNA, 19 nt, Homo sapiens
  misc_RNA (1)...(19): siRNA sense strand
gaaguucagucuuuguaca

SEQ ID NO: 1331348 - RNA, 19 nt, Homo sapiens
  misc_RNA (1)...(19): siRNA sense strand
ucagugauuugcagucuaa

SEQ ID NO: 1331349 - RNA, 19 nt, Homo sapiens
  misc_RNA (1)...(19): siRNA sense strand
gcaauuucgugaugucaau

SEQ ID NO: 1331350 - RNA, 19 nt, Homo sapiens
  misc_RNA (1)...(19): siRNA sense strand
gaaguuggaagagaacaua

SEQ ID NO: 1331351 - RNA, 19 nt, Homo sapiens
  misc_RNA (1)...(19): siRNA sense strand
cuaauuggccuuuaaguga

SEQ ID NO: 1331352 - RNA, 19 nt, Homo sapiens
  misc_RNA (1)...(19): siRNA sense strand
gagacaagauauugauaca

SEQ ID NO: 1331353 - RNA, 19 nt, Homo sapiens
  misc_RNA (1)...(19): siRNA sense strand
aagagcaguuguccaguua

SEQ ID NO: 1331354 - RNA, 19 nt, Homo sapiens
  misc_RNA (1)...(19): siRNA sense strand
gaaagauaauagugaacug

SEQ ID NO: 1331355 - RNA, 19 nt, Homo sapiens
  misc_RNA (1)...(19): siRNA sense strand
ccugacagauguuacaauu

SEQ ID NO: 1331356 - RNA, 19 nt, Homo sapiens
  misc_RNA (1)...(19): siRNA sense strand
gcuagagauucauuaauuc

SEQ ID NO: 1331357 - RNA, 19 nt, Homo sapiens
  misc_RNA (1)...(19): siRNA sense strand
gaacuugauccauugaaga

SEQ ID NO: 1331358 - RNA, 19 nt, Homo sapiens
  misc_RNA (1)...(19): siRNA sense strand
uaagaaagaacuucgagaa

SEQ ID NO: 1331359 - RNA, 19 nt, Homo sapiens
  misc_RNA (1)...(19): siRNA sense strand
agaaggaaauaccagaauu

SEQ ID NO: 1331360 - RNA, 19 nt, Homo sapiens
  misc_RNA (1)...(19): siRNA sense strand
cuugaagacuggcuacaua

SEQ ID NO: 1331361 - RNA, 19 nt, Homo sapiens
  misc_RNA (1)...(19): siRNA sense strand
gaacaguaagggagaaaga

SEQ ID NO: 1331362 - RNA, 19 nt, Homo sapiens
  misc_RNA (1)...(19): siRNA sense strand
ggaauagaggacaaagaua

SEQ ID NO: 1331363 - RNA, 19 nt, Homo sapiens
  misc_RNA (1)...(19): siRNA sense strand
gguauuagccucacucauc

SEQ ID NO: 1331364 - RNA, 19 nt, Homo sapiens
  misc_RNA (1)...(19): siRNA sense strand
gaaccaaaggaaauacauu

SEQ ID NO: 1331365 - RNA, 19 nt, Homo sapiens
  misc_RNA (1)...(19): siRNA sense strand
gcgacuugcuccagauaaa

SEQ ID NO: 1331366 - RNA, 19 nt, Homo sapiens
  misc_RNA (1)...(19): siRNA sense strand
gacagaggcugaguuacaa

SEQ ID NO: 1331367 - RNA, 19 nt, Homo sapiens
  misc_RNA (1)...(19): siRNA sense strand
uaggcacagugaugaauua

SEQ ID NO: 1331368 - RNA, 19 nt, Homo sapiens
  misc_RNA (1)...(19): siRNA sense strand
gaagcagaaugagcugaaa

SEQ ID NO: 1331369 - RNA, 19 nt, Homo sapiens
  misc_RNA (1)...(19): siRNA sense strand
gggaagaauaauugaguua

SEQ ID NO: 1331370 - RNA, 19 nt, Homo sapiens
  misc_RNA (1)...(19): siRNA sense strand
ggagaaagaaaggaaauug

SEQ ID NO: 1331371 - RNA, 19 nt, Homo sapiens
  misc_RNA (1)...(19): siRNA sense strand
cagauaaacucaagucaac

SEQ ID NO: 1331372 - RNA, 19 nt, Homo sapiens
  misc_RNA (1)...(19): siRNA sense strand
gguaagcccuuuggaaaca

SEQ ID NO: 1331373 - RNA, 19 nt, Homo sapiens
  misc_RNA (1)...(19): siRNA sense strand
ucagauauccacuaauuug

SEQ ID NO: 1331374 - RNA, 19 nt, Homo sapiens
  misc_RNA (1)...(19): siRNA sense strand
agagaaacagcacaaguua

SEQ ID NO: 1331375 - RNA, 19 nt, Homo sapiens
  misc_RNA (1)...(19): siRNA sense strand
aaacucaagucaacagaau

SEQ ID NO: 1331376 - RNA, 19 nt, Homo sapiens
  misc_RNA (1)...(19): siRNA sense strand
gaaacaaacugcagaaugu

SEQ ID NO: 1331377 - RNA, 19 nt, Homo sapiens
  misc_RNA (1)...(19): siRNA sense strand
acaaggaucuggauauuua

SEQ ID NO: 1331378 - RNA, 19 nt, Homo sapiens
  misc_RNA (1)...(19): siRNA sense strand
ggacagacuugccaaauug

SEQ ID NO: 1331379 - RNA, 19 nt, Homo sapiens
  misc_RNA (1)...(19): siRNA sense strand
gaacaaggaucuggauauu

SEQ ID NO: 1331380 - RNA, 19 nt, Homo sapiens
  misc_RNA (1)...(19): siRNA sense strand
gcucagagauugugaaaug

SEQ ID NO: 1331381 - RNA, 19 nt, Homo sapiens
  misc_RNA (1)...(19): siRNA sense strand
ggaaauaccagaauuaaga

SEQ ID NO: 1331382 - RNA, 19 nt, Homo sapiens
  misc_RNA (1)...(19): siRNA sense strand
ugacaaagaugaacaaauc

SEQ ID NO: 1331383 - RNA, 19 nt, Homo sapiens
  misc_RNA (1)...(19): siRNA sense strand
gaagagaacauagacaaua

SEQ ID NO: 1331384 - RNA, 19 nt, Homo sapiens
  misc_RNA (1)...(19): siRNA sense strand
ggagaaagauaauagugaa

SEQ ID NO: 1331385 - RNA, 19 nt, Homo sapiens
  misc_RNA (1)...(19): siRNA sense strand
gaaagguuaugaagaagaa

SEQ ID NO: 1331386 - RNA, 19 nt, Homo sapiens
  misc_RNA (1)...(19): siRNA sense strand
gaaggaaauaccagaauua

SEQ ID NO: 1331387 - RNA, 19 nt, Homo sapiens
  misc_RNA (1)...(19): siRNA sense strand
agacaaagcugacaaagau

SEQ ID NO: 1331388 - RNA, 19 nt, Homo sapiens
  misc_RNA (1)...(19): siRNA sense strand
caaaggaaauugucaaauc

SEQ ID NO: 1331389 - RNA, 19 nt, Homo sapiens
  misc_RNA (1)...(19): siRNA sense strand
gaaauuaaagccuuggaua

SEQ ID NO: 1331390 - RNA, 19 nt, Homo sapiens
  misc_RNA (1)...(19): siRNA sense strand
ggagcagacuguggaauua

SEQ ID NO: 1331391 - RNA, 19 nt, Homo sapiens
  misc_RNA (1)...(19): siRNA sense strand
caacacagcuagaauugga

SEQ ID NO: 1331392 - RNA, 19 nt, Homo sapiens
  misc_RNA (1)...(19): siRNA sense strand
ccaaggcugugcuaaauaa

SEQ ID NO: 1331393 - RNA, 19 nt, Homo sapiens
  misc_RNA (1)...(19): siRNA sense strand
gaagagcaguuguccaguu

SEQ ID NO: 1331394 - RNA, 19 nt, Homo sapiens
  misc_RNA (1)...(19): siRNA sense strand
gaaagaagcaaauggagaa

SEQ ID NO: 1331395 - RNA, 19 nt, Homo sapiens
  misc_RNA (1)...(19): siRNA sense strand
acagaaagguuaugaagaa

SEQ ID NO: 1331396 - RNA, 19 nt, Homo sapiens
  misc_RNA (1)...(19): siRNA sense strand
gaaagguggcuacaagaua

SEQ ID NO: 1331397 - RNA, 19 nt, Homo sapiens
  misc_RNA (1)...(19): siRNA sense strand
agaagaaagugccaaagua

SEQ ID NO: 1331398 - RNA, 19 nt, Homo sapiens
  misc_RNA (1)...(19): siRNA sense strand
gcaacaagauacauuaaag

SEQ ID NO: 1331399 - RNA, 19 nt, Homo sapiens
  misc_RNA (1)...(19): siRNA sense strand
ggaauuauccacugaaguu

SEQ ID NO: 1331400 - RNA, 19 nt, Homo sapiens
  misc_RNA (1)...(19): siRNA sense strand
ggaauagacuuagaucgaa

SEQ ID NO: 1331401 - RNA, 19 nt, Homo sapiens
  misc_RNA (1)...(19): siRNA sense strand
ccaaccaacugaugaauga

SEQ ID NO: 1331402 - RNA, 19 nt, Homo sapiens
  misc_RNA (1)...(19): siRNA sense strand
gauaaaggaugcuaaagag

SEQ ID NO: 1331403 - RNA, 19 nt, Homo sapiens
  misc_RNA (1)...(19): siRNA sense strand
caagaaagguggcuacaag

SEQ ID NO: 1331404 - RNA, 19 nt, Homo sapiens
  misc_RNA (1)...(19): siRNA sense strand
aaagguggcuacaagauaa

SEQ ID NO: 1331405 - RNA, 19 nt, Homo sapiens
  misc_RNA (1)...(19): siRNA sense strand
gaaagaaaggaaauuggua

SEQ ID NO: 1331406 - RNA, 19 nt, Homo sapiens
  misc_RNA (1)...(19): siRNA sense strand
uaaccucacuguugggaua

SEQ ID NO: 1331407 - RNA, 19 nt, Homo sapiens
  misc_RNA (1)...(19): siRNA sense strand
guuaacaucuucaaaggaa

SEQ ID NO: 1331408 - RNA, 19 nt, Homo sapiens
  misc_RNA (1)...(19): siRNA sense strand
caaaugagcuaaaaucuga

SEQ ID NO: 1331409 - RNA, 19 nt, Homo sapiens
  misc_RNA (1)...(19): siRNA sense strand
gaagaaagugccaaaguau

SEQ ID NO: 1331410 - RNA, 19 nt, Homo sapiens
  misc_RNA (1)...(19): siRNA sense strand
gcaagcagaucgccaucaa

SEQ ID NO: 1331411 - RNA, 19 nt, Homo sapiens
  misc_RNA (1)...(19): siRNA sense strand
gaucagugcucagagauug

SEQ ID NO: 1331412 - RNA, 19 nt, Homo sapiens
  misc_RNA (1)...(19): siRNA sense strand
gacaagauauugauacaca

SEQ ID NO: 1331413 - RNA, 19 nt, Homo sapiens
  misc_RNA (1)...(19): siRNA sense strand
gaauugaaucguaagcuua

SEQ ID NO: 1331414 - RNA, 19 nt, Homo sapiens
  misc_RNA (1)...(19): siRNA sense strand
aaucagaacugcuuguuga

SEQ ID NO: 1331415 - RNA, 19 nt, Homo sapiens
  misc_RNA (1)...(19): siRNA sense strand
gaaacacucuuggguacaa

SEQ ID NO: 1331416 - RNA, 19 nt, Homo sapiens
  misc_RNA (1)...(19): siRNA sense strand
ggaaauugguagacuguca

SEQ ID NO: 1331417 - RNA, 19 nt, Homo sapiens
  misc_RNA (1)...(19): siRNA sense strand
gaaagaacuucgagaacca

SEQ ID NO: 1331418 - RNA, 19 nt, Homo sapiens
  misc_RNA (1)...(19): siRNA sense strand
aguaauagcucaacuaagu

SEQ ID NO: 1331419 - RNA, 19 nt, Homo sapiens
  misc_RNA (1)...(19): siRNA sense strand
aauaaugccugaagaagaa

SEQ ID NO: 1331420 - RNA, 19 nt, Homo sapiens
  misc_RNA (1)...(19): siRNA sense strand
cgacauagaagaacaagaa

SEQ ID NO: 1331421 - RNA, 19 nt, Homo sapiens
  misc_RNA (1)...(19): siRNA sense strand
ggacugggaagaauaauug

SEQ ID NO: 1331422 - RNA, 19 nt, Homo sapiens
  misc_RNA (1)...(19): siRNA sense strand
ucagaaauccuaaguaaga

SEQ ID NO: 1331423 - RNA, 19 nt, Homo sapiens
  misc_RNA (1)...(19): siRNA sense strand
gaagacuggcuacauagua

SEQ ID NO: 1331424 - RNA, 19 nt, Homo sapiens
  misc_RNA (1)...(19): siRNA sense strand
gacacaaggucagaaagua

SEQ ID NO: 1331425 - RNA, 19 nt, Homo sapiens
  misc_RNA (1)...(19): siRNA sense strand
cuucagauauccacuaauu

SEQ ID NO: 1331426 - RNA, 19 nt, Homo sapiens
  misc_RNA (1)...(19): siRNA sense strand
gggacagacuugccaaauu

SEQ ID NO: 1331427 - RNA, 19 nt, Homo sapiens
  misc_RNA (1)...(19): siRNA sense strand
gaacauauccgagcuagag

SEQ ID NO: 1331428 - RNA, 19 nt, Homo sapiens
  misc_RNA (1)...(19): siRNA sense strand
aaucuaggcuucucaauca

SEQ ID NO: 1331429 - RNA, 19 nt, Homo sapiens
  misc_RNA (1)...(19): siRNA sense strand
gacaagcuguuugauguuu

SEQ ID NO: 1331430 - RNA, 19 nt, Homo sapiens
  misc_RNA (1)...(19): siRNA sense strand
ugaauuaaccucacuguug

SEQ ID NO: 1331431 - RNA, 19 nt, Homo sapiens
  misc_RNA (1)...(19): siRNA sense strand
acagauagaugagauaaga

SEQ ID NO: 1331432 - RNA, 19 nt, Homo sapiens
  misc_RNA (1)...(19): siRNA sense strand
uaaguaagaagcagaauga

SEQ ID NO: 1331433 - RNA, 19 nt, Homo sapiens
  misc_RNA (1)...(19): siRNA sense strand
caggauaaacugaaugaua

SEQ ID NO: 1331434 - RNA, 19 nt, Homo sapiens
  misc_RNA (1)...(19): siRNA sense strand
guacaauaaugccugaaga

SEQ ID NO: 1331435 - RNA, 19 nt, Homo sapiens
  misc_RNA (1)...(19): siRNA sense strand
ggcaaagcauaauugauuu

SEQ ID NO: 1331436 - RNA, 19 nt, Homo sapiens
  misc_RNA (1)...(19): siRNA sense strand
gaagacaagcuguuugaug

SEQ ID NO: 1331437 - RNA, 19 nt, Homo sapiens
  misc_RNA (1)...(19): siRNA sense strand
gaacaaggaacuagcuuca

SEQ ID NO: 1331438 - RNA, 19 nt, Homo sapiens
  misc_RNA (1)...(19): siRNA sense strand
gaaguaauaagucuccaaa

SEQ ID NO: 1331439 - RNA, 19 nt, Homo sapiens
  misc_RNA (1)...(19): siRNA sense strand
gaaaggaaauugguagacu

SEQ ID NO: 1331440 - RNA, 19 nt, Homo sapiens
  misc_RNA (1)...(19): siRNA sense strand
gaaguucagucuuuguaca

SEQ ID NO: 1331441 - RNA, 19 nt, Homo sapiens
  misc_RNA (1)...(19): siRNA sense strand
ucagugauuugcagucuaa

SEQ ID NO: 1331442 - RNA, 19 nt, Homo sapiens
  misc_RNA (1)...(19): siRNA sense strand
gaaguuggaagagaacaua

SEQ ID NO: 1331443 - RNA, 19 nt, Homo sapiens
  misc_RNA (1)...(19): siRNA sense strand
aagagcaguuguccaguua

SEQ ID NO: 1331444 - RNA, 19 nt, Homo sapiens
  misc_RNA (1)...(19): siRNA sense strand
cuaauuggccuuuaaguga

SEQ ID NO: 1331445 - RNA, 19 nt, Homo sapiens
  misc_RNA (1)...(19): siRNA sense strand
gagacaagauauugauaca

SEQ ID NO: 1331446 - RNA, 19 nt, Homo sapiens
  misc_RNA (1)...(19): siRNA sense strand
gaaagauaauagugaacug

SEQ ID NO: 1331447 - RNA, 19 nt, Homo sapiens
  misc_RNA (1)...(19): siRNA sense strand
ccugacagauguuacaauu

SEQ ID NO: 1331448 - RNA, 19 nt, Homo sapiens
  misc_RNA (1)...(19): siRNA sense strand
gcuagagauucauuaauuc

SEQ ID NO: 1331449 - RNA, 19 nt, Homo sapiens
  misc_RNA (1)...(19): siRNA sense strand
gaacuugauccauugaaga

SEQ ID NO: 1331450 - RNA, 19 nt, Homo sapiens
  misc_RNA (1)...(19): siRNA sense strand
uaagaaagaacuucgagaa

SEQ ID NO: 1331451 - RNA, 19 nt, Homo sapiens
  misc_RNA (1)...(19): siRNA sense strand
agaaggaaauaccagaauu

SEQ ID NO: 1331452 - RNA, 19 nt, Homo sapiens
  misc_RNA (1)...(19): siRNA sense strand
cuugaagacuggcuacaua

SEQ ID NO: 1331453 - RNA, 19 nt, Homo sapiens
  misc_RNA (1)...(19): siRNA sense strand
gaacaguaagggagaaaga

SEQ ID NO: 1331454 - RNA, 19 nt, Homo sapiens
  misc_RNA (1)...(19): siRNA sense strand
ggagaaagaaaggaaauug

SEQ ID NO: 1331455 - RNA, 19 nt, Homo sapiens
  misc_RNA (1)...(19): siRNA sense strand
gguauuagccucacucauc

SEQ ID NO: 1331456 - RNA, 19 nt, Homo sapiens
  misc_RNA (1)...(19): siRNA sense strand
gcgacuugcuccagauaaa

SEQ ID NO: 1331457 - RNA, 19 nt, Homo sapiens
  misc_RNA (1)...(19): siRNA sense strand
gacagaggcugaguuacaa

SEQ ID NO: 1331458 - RNA, 19 nt, Homo sapiens
  misc_RNA (1)...(19): siRNA sense strand
uaggcacagugaugaauua

SEQ ID NO: 1331459 - RNA, 19 nt, Homo sapiens
  misc_RNA (1)...(19): siRNA sense strand
gaagcagaaugagcugaaa

SEQ ID NO: 1331460 - RNA, 19 nt, Homo sapiens
  misc_RNA (1)...(19): siRNA sense strand
gggaagaauaauugaguua

SEQ ID NO: 1331461 - RNA, 19 nt, Homo sapiens
  misc_RNA (1)...(19): siRNA sense strand
agaagcaaauggagaaaga

SEQ ID NO: 1331462 - RNA, 19 nt, Homo sapiens
  misc_RNA (1)...(19): siRNA sense strand
gguaagcccuuuggaaaca

SEQ ID NO: 1331463 - RNA, 19 nt, Homo sapiens
  misc_RNA (1)...(19): siRNA sense strand
ucagauauccacuaauuug

SEQ ID NO: 1331464 - RNA, 19 nt, Homo sapiens
  misc_RNA (1)...(19): siRNA sense strand
agagaaacagcacaaguua

SEQ ID NO: 1331465 - RNA, 19 nt, Homo sapiens
  misc_RNA (1)...(19): siRNA sense strand
gauucuaauuggccuuuaa

SEQ ID NO: 1331466 - RNA, 19 nt, Homo sapiens
  misc_RNA (1)...(19): siRNA sense strand
aaacucaagucaacagaau

SEQ ID NO: 1331467 - RNA, 19 nt, Homo sapiens
  misc_RNA (1)...(19): siRNA sense strand
cagauaaacucaagucaac

SEQ ID NO: 1331468 - RNA, 19 nt, Homo sapiens
  misc_RNA (1)...(19): siRNA sense strand
aagacaagcuguuugaugu

SEQ ID NO: 1331469 - RNA, 19 nt, Homo sapiens
  misc_RNA (1)...(19): siRNA sense strand
ggacugaugagcaacuaaa

SEQ ID NO: 1331470 - RNA, 19 nt, Homo sapiens
  misc_RNA (1)...(19): siRNA sense strand
gcaaauggagaaagauaau

SEQ ID NO: 1331471 - RNA, 19 nt, Homo sapiens
  misc_RNA (1)...(19): siRNA sense strand
guauuagccucacucauca

SEQ ID NO: 1331472 - RNA, 19 nt, Homo sapiens
  misc_RNA (1)...(19): siRNA sense strand
gauauccacuaauuugcaa

SEQ ID NO: 1331473 - RNA, 19 nt, Homo sapiens
  misc_RNA (1)...(19): siRNA sense strand
caacaacacguacccaaau

SEQ ID NO: 1331474 - RNA, 19 nt, Homo sapiens
  misc_RNA (1)...(19): siRNA sense strand
caucagaaguuggaagaga

SEQ ID NO: 1331475 - RNA, 19 nt, Homo sapiens
  misc_RNA (1)...(19): siRNA sense strand
ggaaaaguauagagaaaug

SEQ ID NO: 1331476 - RNA, 19 nt, Homo sapiens
  misc_RNA (1)...(19): siRNA sense strand
ugaccgaacuggacacuaa

SEQ ID NO: 1331477 - RNA, 19 nt, Homo sapiens
  misc_RNA (1)...(19): siRNA sense strand
gaacuggacacuaaagaug

SEQ ID NO: 1331478 - RNA, 19 nt, Homo sapiens
  misc_RNA (1)...(19): siRNA sense strand
ugacaugucugggaaagaa

SEQ ID NO: 1331479 - RNA, 19 nt, Homo sapiens
  misc_RNA (1)...(19): siRNA sense strand
aagaugaggcugagcauua

SEQ ID NO: 1331480 - RNA, 19 nt, Homo sapiens
  misc_RNA (1)...(19): siRNA sense strand
gaagauggaugccccuuug

SEQ ID NO: 1331481 - RNA, 19 nt, Homo sapiens
  misc_RNA (1)...(19): siRNA sense strand
gaggagguccgcacacuug

SEQ ID NO: 1331482 - RNA, 19 nt, Homo sapiens
  misc_RNA (1)...(19): siRNA sense strand
gaaaggugacagacgauuc

SEQ ID NO: 1331483 - RNA, 19 nt, Homo sapiens
  misc_RNA (1)...(19): siRNA sense strand
uggaugcccugcugaagaa

SEQ ID NO: 1331484 - RNA, 19 nt, Homo sapiens
  misc_RNA (1)...(19): siRNA sense strand
ccaagauccaggaauauga

SEQ ID NO: 1331485 - RNA, 19 nt, Homo sapiens
  misc_RNA (1)...(19): siRNA sense strand
ucagugugccgcauacuaa

SEQ ID NO: 1331486 - RNA, 19 nt, Homo sapiens
  misc_RNA (1)...(19): siRNA sense strand
ccgcacacuugaggaguua

SEQ ID NO: 1331487 - RNA, 19 nt, Homo sapiens
  misc_RNA (1)...(19): siRNA sense strand
caagauccaggaauaugaa

SEQ ID NO: 1331488 - RNA, 19 nt, Homo sapiens
  misc_RNA (1)...(19): siRNA sense strand
agcccaagauccaggaaua

SEQ ID NO: 1331489 - RNA, 19 nt, Homo sapiens
  misc_RNA (1)...(19): siRNA sense strand
agaacaagcccuucagugu

SEQ ID NO: 1331490 - RNA, 19 nt, Homo sapiens
  misc_RNA (1)...(19): siRNA sense strand
gaagaugaggcugagcauu

SEQ ID NO: 1331491 - RNA, 19 nt, Homo sapiens
  misc_RNA (1)...(19): siRNA sense strand
ggauaagaaaggugacaga

SEQ ID NO: 1331492 - RNA, 19 nt, Homo sapiens
  misc_RNA (1)...(19): siRNA sense strand
caucaaggaggagcuaauu

SEQ ID NO: 1331493 - RNA, 19 nt, Homo sapiens
  misc_RNA (1)...(19): siRNA sense strand
cgacuggcaggauaagaaa

SEQ ID NO: 1331494 - RNA, 19 nt, Homo sapiens
  misc_RNA (1)...(19): siRNA sense strand
caagaagaaaggccucaug

SEQ ID NO: 1331495 - RNA, 19 nt, Homo sapiens
  misc_RNA (1)...(19): siRNA sense strand
gcccacaaccgcaccaaga

SEQ ID NO: 1331496 - RNA, 19 nt, Homo sapiens
  misc_RNA (1)...(19): siRNA sense strand
gaagggaaggcaggacaug

SEQ ID NO: 1331497 - RNA, 19 nt, Homo sapiens
  misc_RNA (1)...(19): siRNA sense strand
ggaagcccaagaagcagaa

SEQ ID NO: 1331498 - RNA, 19 nt, Homo sapiens
  misc_RNA (1)...(19): siRNA sense strand
gcaguuccacgacuucaag

SEQ ID NO: 1331499 - RNA, 19 nt, Homo sapiens
  misc_RNA (1)...(19): siRNA sense strand
caagaagcagaaacuggaa

SEQ ID NO: 1331500 - RNA, 19 nt, Homo sapiens
  misc_RNA (1)...(19): siRNA sense strand
gcccuacugugcugacauc

SEQ ID NO: 1331501 - RNA, 19 nt, Homo sapiens
  misc_RNA (1)...(19): siRNA sense strand
cagaggacuccgaggauga

SEQ ID NO: 1331502 - RNA, 19 nt, Homo sapiens
  misc_RNA (1)...(19): siRNA sense strand
ugacagacgauuccugaag

SEQ ID NO: 1331503 - RNA, 19 nt, Homo sapiens
  misc_RNA (1)...(19): siRNA sense strand
guggaugcccugcugaaga

SEQ ID NO: 1331504 - RNA, 19 nt, Homo sapiens
  misc_RNA (1)...(19): siRNA sense strand
ggcuguggcugacaagaag

SEQ ID NO: 1331505 - RNA, 19 nt, Homo sapiens
  misc_RNA (1)...(19): siRNA sense strand
agucugaggcccagcauga

SEQ ID NO: 1331506 - RNA, 19 nt, Homo sapiens
  misc_RNA (1)...(19): siRNA sense strand
aggcugagcauuacaagau

SEQ ID NO: 1331507 - RNA, 19 nt, Homo sapiens
  misc_RNA (1)...(19): siRNA sense strand
ucgagaccaugaacuugga

SEQ ID NO: 1331508 - RNA, 19 nt, Homo sapiens
  misc_RNA (1)...(19): siRNA sense strand
cgaacuggacacuaaagau

SEQ ID NO: 1331509 - RNA, 19 nt, Homo sapiens
  misc_RNA (1)...(19): siRNA sense strand
gaccgaacuggacacuaaa

SEQ ID NO: 1331510 - RNA, 19 nt, Homo sapiens
  misc_RNA (1)...(19): siRNA sense strand
caggacggcccaaauccaa

SEQ ID NO: 1331511 - RNA, 19 nt, Homo sapiens
  misc_RNA (1)...(19): siRNA sense strand
ucaccgacuggcaggauaa

SEQ ID NO: 1331512 - RNA, 19 nt, Homo sapiens
  misc_RNA (1)...(19): siRNA sense strand
ccgacuggcaggauaagaa

SEQ ID NO: 1331513 - RNA, 19 nt, Homo sapiens
  misc_RNA (1)...(19): siRNA sense strand
gaacagccggaagauggau

SEQ ID NO: 1331514 - RNA, 19 nt, Homo sapiens
  misc_RNA (1)...(19): siRNA sense strand
ucaaggaggagcuaauugc

SEQ ID NO: 1331515 - RNA, 19 nt, Homo sapiens
  misc_RNA (1)...(19): siRNA sense strand
gcaucaaggaggagcuaau

SEQ ID NO: 1331516 - RNA, 19 nt, Homo sapiens
  misc_RNA (1)...(19): siRNA sense strand
ggacacuaaagauguggau

SEQ ID NO: 1331517 - RNA, 19 nt, Homo sapiens
  misc_RNA (1)...(19): siRNA sense strand
gcugagcugaaggcacuua

SEQ ID NO: 1331518 - RNA, 19 nt, Homo sapiens
  misc_RNA (1)...(19): siRNA sense strand
ugagguccuugcugagcuu

SEQ ID NO: 1331519 - RNA, 19 nt, Homo sapiens
  misc_RNA (1)...(19): siRNA sense strand
ggaagggaaggcaggacau

SEQ ID NO: 1331520 - RNA, 19 nt, Homo sapiens
  misc_RNA (1)...(19): siRNA sense strand
agaugaggcugagcauuac

SEQ ID NO: 1331521 - RNA, 19 nt, Homo sapiens
  misc_RNA (1)...(19): siRNA sense strand
ugaccgaacuggacacuaa

SEQ ID NO: 1331522 - RNA, 19 nt, Homo sapiens
  misc_RNA (1)...(19): siRNA sense strand
gaacuggacacuaaagaug

SEQ ID NO: 1331523 - RNA, 19 nt, Homo sapiens
  misc_RNA (1)...(19): siRNA sense strand
ugacaugucugggaaagaa

SEQ ID NO: 1331524 - RNA, 19 nt, Homo sapiens
  misc_RNA (1)...(19): siRNA sense strand
aagaugaggcugagcauua

SEQ ID NO: 1331525 - RNA, 19 nt, Homo sapiens
  misc_RNA (1)...(19): siRNA sense strand
gaagauggaugccccuuug

SEQ ID NO: 1331526 - RNA, 19 nt, Homo sapiens
  misc_RNA (1)...(19): siRNA sense strand
gaggagguccgcacacuug

SEQ ID NO: 1331527 - RNA, 19 nt, Homo sapiens
  misc_RNA (1)...(19): siRNA sense strand
gaaaggugacagacgauuc

SEQ ID NO: 1331528 - RNA, 19 nt, Homo sapiens
  misc_RNA (1)...(19): siRNA sense strand
uggaugcccugcugaagaa

SEQ ID NO: 1331529 - RNA, 19 nt, Homo sapiens
  misc_RNA (1)...(19): siRNA sense strand
ccaagauccaggaauauga

SEQ ID NO: 1331530 - RNA, 19 nt, Homo sapiens
  misc_RNA (1)...(19): siRNA sense strand
ucagugugccgcauacuaa

SEQ ID NO: 1331531 - RNA, 19 nt, Homo sapiens
  misc_RNA (1)...(19): siRNA sense strand
ccgcacacuugaggaguua

SEQ ID NO: 1331532 - RNA, 19 nt, Homo sapiens
  misc_RNA (1)...(19): siRNA sense strand
caagauccaggaauaugaa

SEQ ID NO: 1331533 - RNA, 19 nt, Homo sapiens
  misc_RNA (1)...(19): siRNA sense strand
agcccaagauccaggaaua

SEQ ID NO: 1331534 - RNA, 19 nt, Homo sapiens
  misc_RNA (1)...(19): siRNA sense strand
agaacaagcccuucagugu

SEQ ID NO: 1331535 - RNA, 19 nt, Homo sapiens
  misc_RNA (1)...(19): siRNA sense strand
gaagaugaggcugagcauu

SEQ ID NO: 1331536 - RNA, 19 nt, Homo sapiens
  misc_RNA (1)...(19): siRNA sense strand
ggauaagaaaggugacaga

SEQ ID NO: 1331537 - RNA, 19 nt, Homo sapiens
  misc_RNA (1)...(19): siRNA sense strand
caucaaggaggagcuaauu

SEQ ID NO: 1331538 - RNA, 19 nt, Homo sapiens
  misc_RNA (1)...(19): siRNA sense strand
cgacuggcaggauaagaaa

SEQ ID NO: 1331539 - RNA, 19 nt, Homo sapiens
  misc_RNA (1)...(19): siRNA sense strand
caagaagaaaggccucaug

SEQ ID NO: 1331540 - RNA, 19 nt, Homo sapiens
  misc_RNA (1)...(19): siRNA sense strand
gcccacaaccgcaccaaga

SEQ ID NO: 1331541 - RNA, 19 nt, Homo sapiens
  misc_RNA (1)...(19): siRNA sense strand
gaagggaaggcaggacaug

SEQ ID NO: 1331542 - RNA, 19 nt, Homo sapiens
  misc_RNA (1)...(19): siRNA sense strand
ggaagcccaagaagcagaa

SEQ ID NO: 1331543 - RNA, 19 nt, Homo sapiens
  misc_RNA (1)...(19): siRNA sense strand
gcaguuccacgacuucaag

SEQ ID NO: 1331544 - RNA, 19 nt, Homo sapiens
  misc_RNA (1)...(19): siRNA sense strand
caagaagcagaaacuggaa

SEQ ID NO: 1331545 - RNA, 19 nt, Homo sapiens
  misc_RNA (1)...(19): siRNA sense strand
gcccuacugugcugacauc

SEQ ID NO: 1331546 - RNA, 19 nt, Homo sapiens
  misc_RNA (1)...(19): siRNA sense strand
cagaggacuccgaggauga

SEQ ID NO: 1331547 - RNA, 19 nt, Homo sapiens
  misc_RNA (1)...(19): siRNA sense strand
ugacagacgauuccugaag

SEQ ID NO: 1331548 - RNA, 19 nt, Homo sapiens
  misc_RNA (1)...(19): siRNA sense strand
guggaugcccugcugaaga

SEQ ID NO: 1331549 - RNA, 19 nt, Homo sapiens
  misc_RNA (1)...(19): siRNA sense strand
ggcuguggcugacaagaag

SEQ ID NO: 1331550 - RNA, 19 nt, Homo sapiens
  misc_RNA (1)...(19): siRNA sense strand
agucugaggcccagcauga

SEQ ID NO: 1331551 - RNA, 19 nt, Homo sapiens
  misc_RNA (1)...(19): siRNA sense strand
aggcugagcauuacaagau

SEQ ID NO: 1331552 - RNA, 19 nt, Homo sapiens
  misc_RNA (1)...(19): siRNA sense strand
ucgagaccaugaacuugga

SEQ ID NO: 1331553 - RNA, 19 nt, Homo sapiens
  misc_RNA (1)...(19): siRNA sense strand
cgaacuggacacuaaagau

SEQ ID NO: 1331554 - RNA, 19 nt, Homo sapiens
  misc_RNA (1)...(19): siRNA sense strand
gaccgaacuggacacuaaa

SEQ ID NO: 1331555 - RNA, 19 nt, Homo sapiens
  misc_RNA (1)...(19): siRNA sense strand
caggacggcccaaauccaa

SEQ ID NO: 1331556 - RNA, 19 nt, Homo sapiens
  misc_RNA (1)...(19): siRNA sense strand
ucaccgacuggcaggauaa

SEQ ID NO: 1331557 - RNA, 19 nt, Homo sapiens
  misc_RNA (1)...(19): siRNA sense strand
ccgacuggcaggauaagaa

SEQ ID NO: 1331558 - RNA, 19 nt, Homo sapiens
  misc_RNA (1)...(19): siRNA sense strand
gaacagccggaagauggau

SEQ ID NO: 1331559 - RNA, 19 nt, Homo sapiens
  misc_RNA (1)...(19): siRNA sense strand
ucaaggaggagcuaauugc

SEQ ID NO: 1331560 - RNA, 19 nt, Homo sapiens
  misc_RNA (1)...(19): siRNA sense strand
gcaucaaggaggagcuaau

SEQ ID NO: 1331561 - RNA, 19 nt, Homo sapiens
  misc_RNA (1)...(19): siRNA sense strand
ggacacuaaagauguggau

SEQ ID NO: 1331562 - RNA, 19 nt, Homo sapiens
  misc_RNA (1)...(19): siRNA sense strand
gcugagcugaaggcacuua

SEQ ID NO: 1331563 - RNA, 19 nt, Homo sapiens
  misc_RNA (1)...(19): siRNA sense strand
ugagguccuugcugagcuu

SEQ ID NO: 1331564 - RNA, 19 nt, Homo sapiens
  misc_RNA (1)...(19): siRNA sense strand
ggaagggaaggcaggacau

SEQ ID NO: 1331565 - RNA, 19 nt, Homo sapiens
  misc_RNA (1)...(19): siRNA sense strand
agaugaggcugagcauuac

SEQ ID NO: 1331566 - RNA, 19 nt, Homo sapiens
  misc_RNA (1)...(19): siRNA sense strand
ugaccgaacuggacacuaa

SEQ ID NO: 1331567 - RNA, 19 nt, Homo sapiens
  misc_RNA (1)...(19): siRNA sense strand
gaacuggacacuaaagaug

SEQ ID NO: 1331568 - RNA, 19 nt, Homo sapiens
  misc_RNA (1)...(19): siRNA sense strand
ugacaugucugggaaagaa

SEQ ID NO: 1331569 - RNA, 19 nt, Homo sapiens
  misc_RNA (1)...(19): siRNA sense strand
aagaugaggcugagcauua

SEQ ID NO: 1331570 - RNA, 19 nt, Homo sapiens
  misc_RNA (1)...(19): siRNA sense strand
gaagauggaugccccuuug

SEQ ID NO: 1331571 - RNA, 19 nt, Homo sapiens
  misc_RNA (1)...(19): siRNA sense strand
gaggagguccgcacacuug

SEQ ID NO: 1331572 - RNA, 19 nt, Homo sapiens
  misc_RNA (1)...(19): siRNA sense strand
gaaaggugacagacgauuc

SEQ ID NO: 1331573 - RNA, 19 nt, Homo sapiens
  misc_RNA (1)...(19): siRNA sense strand
uggaugcccugcugaagaa

SEQ ID NO: 1331574 - RNA, 19 nt, Homo sapiens
  misc_RNA (1)...(19): siRNA sense strand
ccaagauccaggaauauga

SEQ ID NO: 1331575 - RNA, 19 nt, Homo sapiens
  misc_RNA (1)...(19): siRNA sense strand
ucagugugccgcauacuaa

SEQ ID NO: 1331576 - RNA, 19 nt, Homo sapiens
  misc_RNA (1)...(19): siRNA sense strand
ccgcacacuugaggaguua

SEQ ID NO: 1331577 - RNA, 19 nt, Homo sapiens
  misc_RNA (1)...(19): siRNA sense strand
caagauccaggaauaugaa

SEQ ID NO: 1331578 - RNA, 19 nt, Homo sapiens
  misc_RNA (1)...(19): siRNA sense strand
agcccaagauccaggaaua

SEQ ID NO: 1331579 - RNA, 19 nt, Homo sapiens
  misc_RNA (1)...(19): siRNA sense strand
agaacaagcccuucagugu

SEQ ID NO: 1331580 - RNA, 19 nt, Homo sapiens
  misc_RNA (1)...(19): siRNA sense strand
gaagaugaggcugagcauu

SEQ ID NO: 1331581 - RNA, 19 nt, Homo sapiens
  misc_RNA (1)...(19): siRNA sense strand
ggauaagaaaggugacaga

SEQ ID NO: 1331582 - RNA, 19 nt, Homo sapiens
  misc_RNA (1)...(19): siRNA sense strand
caucaaggaggagcuaauu

SEQ ID NO: 1331583 - RNA, 19 nt, Homo sapiens
  misc_RNA (1)...(19): siRNA sense strand
cgacuggcaggauaagaaa

SEQ ID NO: 1331584 - RNA, 19 nt, Homo sapiens
  misc_RNA (1)...(19): siRNA sense strand
caagaagaaaggccucaug

SEQ ID NO: 1331585 - RNA, 19 nt, Homo sapiens
  misc_RNA (1)...(19): siRNA sense strand
gcccacaaccgcaccaaga

SEQ ID NO: 1331586 - RNA, 19 nt, Homo sapiens
  misc_RNA (1)...(19): siRNA sense strand
gaagggaaggcaggacaug

SEQ ID NO: 1331587 - RNA, 19 nt, Homo sapiens
  misc_RNA (1)...(19): siRNA sense strand
ggaagcccaagaagcagaa

SEQ ID NO: 1331588 - RNA, 19 nt, Homo sapiens
  misc_RNA (1)...(19): siRNA sense strand
gcaguuccacgacuucaag

SEQ ID NO: 1331589 - RNA, 19 nt, Homo sapiens
  misc_RNA (1)...(19): siRNA sense strand
caagaagcagaaacuggaa

SEQ ID NO: 1331590 - RNA, 19 nt, Homo sapiens
  misc_RNA (1)...(19): siRNA sense strand
gcccuacugugcugacauc

SEQ ID NO: 1331591 - RNA, 19 nt, Homo sapiens
  misc_RNA (1)...(19): siRNA sense strand
cagaggacuccgaggauga

SEQ ID NO: 1331592 - RNA, 19 nt, Homo sapiens
  misc_RNA (1)...(19): siRNA sense strand
ugacagacgauuccugaag

SEQ ID NO: 1331593 - RNA, 19 nt, Homo sapiens
  misc_RNA (1)...(19): siRNA sense strand
guggaugcccugcugaaga

SEQ ID NO: 1331594 - RNA, 19 nt, Homo sapiens
  misc_RNA (1)...(19): siRNA sense strand
ggcuguggcugacaagaag

SEQ ID NO: 1331595 - RNA, 19 nt, Homo sapiens
  misc_RNA (1)...(19): siRNA sense strand
agucugaggcccagcauga

SEQ ID NO: 1331596 - RNA, 19 nt, Homo sapiens
  misc_RNA (1)...(19): siRNA sense strand
aggcugagcauuacaagau

SEQ ID NO: 1331597 - RNA, 19 nt, Homo sapiens
  misc_RNA (1)...(19): siRNA sense strand
ucgagaccaugaacuugga

SEQ ID NO: 1331598 - RNA, 19 nt, Homo sapiens
  misc_RNA (1)...(19): siRNA sense strand
cgaacuggacacuaaagau

SEQ ID NO: 1331599 - RNA, 19 nt, Homo sapiens
  misc_RNA (1)...(19): siRNA sense strand
gaccgaacuggacacuaaa

SEQ ID NO: 1331600 - RNA, 19 nt, Homo sapiens
  misc_RNA (1)...(19): siRNA sense strand
caggacggcccaaauccaa

SEQ ID NO: 1331601 - RNA, 19 nt, Homo sapiens
  misc_RNA (1)...(19): siRNA sense strand
ucaccgacuggcaggauaa

SEQ ID NO: 1331602 - RNA, 19 nt, Homo sapiens
  misc_RNA (1)...(19): siRNA sense strand
ccgacuggcaggauaagaa

SEQ ID NO: 1331603 - RNA, 19 nt, Homo sapiens
  misc_RNA (1)...(19): siRNA sense strand
gaacagccggaagauggau

SEQ ID NO: 1331604 - RNA, 19 nt, Homo sapiens
  misc_RNA (1)...(19): siRNA sense strand
ucaaggaggagcuaauugc

SEQ ID NO: 1331605 - RNA, 19 nt, Homo sapiens
  misc_RNA (1)...(19): siRNA sense strand
gcaucaaggaggagcuaau

SEQ ID NO: 1331606 - RNA, 19 nt, Homo sapiens
  misc_RNA (1)...(19): siRNA sense strand
ggacacuaaagauguggau

SEQ ID NO: 1331607 - RNA, 19 nt, Homo sapiens
  misc_RNA (1)...(19): siRNA sense strand
gcugagcugaaggcacuua

SEQ ID NO: 1331608 - RNA, 19 nt, Homo sapiens
  misc_RNA (1)...(19): siRNA sense strand
ugagguccuugcugagcuu

SEQ ID NO: 1331609 - RNA, 19 nt, Homo sapiens
  misc_RNA (1)...(19): siRNA sense strand
ggaagggaaggcaggacau

SEQ ID NO: 1331610 - RNA, 19 nt, Homo sapiens
  misc_RNA (1)...(19): siRNA sense strand
agaugaggcugagcauuac

SEQ ID NO: 1331611 - RNA, 19 nt, Homo sapiens
  misc_RNA (1)...(19): siRNA sense strand
ugaccgaacuggacacuaa

SEQ ID NO: 1331612 - RNA, 19 nt, Homo sapiens
  misc_RNA (1)...(19): siRNA sense strand
gaacuggacacuaaagaug

SEQ ID NO: 1331613 - RNA, 19 nt, Homo sapiens
  misc_RNA (1)...(19): siRNA sense strand
ugacaugucugggaaagaa

SEQ ID NO: 1331614 - RNA, 19 nt, Homo sapiens
  misc_RNA (1)...(19): siRNA sense strand
aagaugaggcugagcauua

SEQ ID NO: 1331615 - RNA, 19 nt, Homo sapiens
  misc_RNA (1)...(19): siRNA sense strand
gaagauggaugccccuuug

SEQ ID NO: 1331616 - RNA, 19 nt, Homo sapiens
  misc_RNA (1)...(19): siRNA sense strand
gaggagguccgcacacuug

SEQ ID NO: 1331617 - RNA, 19 nt, Homo sapiens
  misc_RNA (1)...(19): siRNA sense strand
gaaaggugacagacgauuc

SEQ ID NO: 1331618 - RNA, 19 nt, Homo sapiens
  misc_RNA (1)...(19): siRNA sense strand
uggaugcccugcugaagaa

SEQ ID NO: 1331619 - RNA, 19 nt, Homo sapiens
  misc_RNA (1)...(19): siRNA sense strand
ccaagauccaggaauauga

SEQ ID NO: 1331620 - RNA, 19 nt, Homo sapiens
  misc_RNA (1)...(19): siRNA sense strand
ucagugugccgcauacuaa

SEQ ID NO: 1331621 - RNA, 19 nt, Homo sapiens
  misc_RNA (1)...(19): siRNA sense strand
ccgcacacuugaggaguua

SEQ ID NO: 1331622 - RNA, 19 nt, Homo sapiens
  misc_RNA (1)...(19): siRNA sense strand
caagauccaggaauaugaa

SEQ ID NO: 1331623 - RNA, 19 nt, Homo sapiens
  misc_RNA (1)...(19): siRNA sense strand
agcccaagauccaggaaua

SEQ ID NO: 1331624 - RNA, 19 nt, Homo sapiens
  misc_RNA (1)...(19): siRNA sense strand
agaacaagcccuucagugu

SEQ ID NO: 1331625 - RNA, 19 nt, Homo sapiens
  misc_RNA (1)...(19): siRNA sense strand
gaagaugaggcugagcauu

SEQ ID NO: 1331626 - RNA, 19 nt, Homo sapiens
  misc_RNA (1)...(19): siRNA sense strand
ggauaagaaaggugacaga

SEQ ID NO: 1331627 - RNA, 19 nt, Homo sapiens
  misc_RNA (1)...(19): siRNA sense strand
caucaaggaggagcuaauu

SEQ ID NO: 1331628 - RNA, 19 nt, Homo sapiens
  misc_RNA (1)...(19): siRNA sense strand
cgacuggcaggauaagaaa

SEQ ID NO: 1331629 - RNA, 19 nt, Homo sapiens
  misc_RNA (1)...(19): siRNA sense strand
caagaagaaaggccucaug

SEQ ID NO: 1331630 - RNA, 19 nt, Homo sapiens
  misc_RNA (1)...(19): siRNA sense strand
gcccacaaccgcaccaaga

SEQ ID NO: 1331631 - RNA, 19 nt, Homo sapiens
  misc_RNA (1)...(19): siRNA sense strand
gaagggaaggcaggacaug

SEQ ID NO: 1331632 - RNA, 19 nt, Homo sapiens
  misc_RNA (1)...(19): siRNA sense strand
ggaagcccaagaagcagaa

SEQ ID NO: 1331633 - RNA, 19 nt, Homo sapiens
  misc_RNA (1)...(19): siRNA sense strand
gcaguuccacgacuucaag

SEQ ID NO: 1331634 - RNA, 19 nt, Homo sapiens
  misc_RNA (1)...(19): siRNA sense strand
caagaagcagaaacuggaa

SEQ ID NO: 1331635 - RNA, 19 nt, Homo sapiens
  misc_RNA (1)...(19): siRNA sense strand
gcccuacugugcugacauc

SEQ ID NO: 1331636 - RNA, 19 nt, Homo sapiens
  misc_RNA (1)...(19): siRNA sense strand
cagaggacuccgaggauga

SEQ ID NO: 1331637 - RNA, 19 nt, Homo sapiens
  misc_RNA (1)...(19): siRNA sense strand
ugacagacgauuccugaag

SEQ ID NO: 1331638 - RNA, 19 nt, Homo sapiens
  misc_RNA (1)...(19): siRNA sense strand
guggaugcccugcugaaga

SEQ ID NO: 1331639 - RNA, 19 nt, Homo sapiens
  misc_RNA (1)...(19): siRNA sense strand
ggcuguggcugacaagaag

SEQ ID NO: 1331640 - RNA, 19 nt, Homo sapiens
  misc_RNA (1)...(19): siRNA sense strand
agucugaggcccagcauga

SEQ ID NO: 1331641 - RNA, 19 nt, Homo sapiens
  misc_RNA (1)...(19): siRNA sense strand
aggcugagcauuacaagau

SEQ ID NO: 1331642 - RNA, 19 nt, Homo sapiens
  misc_RNA (1)...(19): siRNA sense strand
ucgagaccaugaacuugga

SEQ ID NO: 1331643 - RNA, 19 nt, Homo sapiens
  misc_RNA (1)...(19): siRNA sense strand
cgaacuggacacuaaagau

SEQ ID NO: 1331644 - RNA, 19 nt, Homo sapiens
  misc_RNA (1)...(19): siRNA sense strand
gaccgaacuggacacuaaa

SEQ ID NO: 1331645 - RNA, 19 nt, Homo sapiens
  misc_RNA (1)...(19): siRNA sense strand
caggacggcccaaauccaa

SEQ ID NO: 1331646 - RNA, 19 nt, Homo sapiens
  misc_RNA (1)...(19): siRNA sense strand
ucaccgacuggcaggauaa

SEQ ID NO: 1331647 - RNA, 19 nt, Homo sapiens
  misc_RNA (1)...(19): siRNA sense strand
ccgacuggcaggauaagaa

SEQ ID NO: 1331648 - RNA, 19 nt, Homo sapiens
  misc_RNA (1)...(19): siRNA sense strand
gaacagccggaagauggau

SEQ ID NO: 1331649 - RNA, 19 nt, Homo sapiens
  misc_RNA (1)...(19): siRNA sense strand
ucaaggaggagcuaauugc

SEQ ID NO: 1331650 - RNA, 19 nt, Homo sapiens
  misc_RNA (1)...(19): siRNA sense strand
gcaucaaggaggagcuaau

SEQ ID NO: 1331651 - RNA, 19 nt, Homo sapiens
  misc_RNA (1)...(19): siRNA sense strand
ggacacuaaagauguggau

SEQ ID NO: 1331652 - RNA, 19 nt, Homo sapiens
  misc_RNA (1)...(19): siRNA sense strand
gcugagcugaaggcacuua

SEQ ID NO: 1331653 - RNA, 19 nt, Homo sapiens
  misc_RNA (1)...(19): siRNA sense strand
ugagguccuugcugagcuu

SEQ ID NO: 1331654 - RNA, 19 nt, Homo sapiens
  misc_RNA (1)...(19): siRNA sense strand
ggaagggaaggcaggacau

SEQ ID NO: 1331655 - RNA, 19 nt, Homo sapiens
  misc_RNA (1)...(19): siRNA sense strand
agaugaggcugagcauuac

SEQ ID NO: 1331656 - RNA, 19 nt, Homo sapiens
  misc_RNA (1)...(19): siRNA sense strand
ugaccgaacuggacacuaa

SEQ ID NO: 1331657 - RNA, 19 nt, Homo sapiens
  misc_RNA (1)...(19): siRNA sense strand
gaacuggacacuaaagaug

SEQ ID NO: 1331658 - RNA, 19 nt, Homo sapiens
  misc_RNA (1)...(19): siRNA sense strand
ugacaugucugggaaagaa

SEQ ID NO: 1331659 - RNA, 19 nt, Homo sapiens
  misc_RNA (1)...(19): siRNA sense strand
aagaugaggcugagcauua

SEQ ID NO: 1331660 - RNA, 19 nt, Homo sapiens
  misc_RNA (1)...(19): siRNA sense strand
gaagauggaugccccuuug

SEQ ID NO: 1331661 - RNA, 19 nt, Homo sapiens
  misc_RNA (1)...(19): siRNA sense strand
gaggagguccgcacacuug

SEQ ID NO: 1331662 - RNA, 19 nt, Homo sapiens
  misc_RNA (1)...(19): siRNA sense strand
gaaaggugacagacgauuc

SEQ ID NO: 1331663 - RNA, 19 nt, Homo sapiens
  misc_RNA (1)...(19): siRNA sense strand
uggaugcccugcugaagaa

SEQ ID NO: 1331664 - RNA, 19 nt, Homo sapiens
  misc_RNA (1)...(19): siRNA sense strand
ccaagauccaggaauauga

SEQ ID NO: 1331665 - RNA, 19 nt, Homo sapiens
  misc_RNA (1)...(19): siRNA sense strand
ucagugugccgcauacuaa

SEQ ID NO: 1331666 - RNA, 19 nt, Homo sapiens
  misc_RNA (1)...(19): siRNA sense strand
ccgcacacuugaggaguua

SEQ ID NO: 1331667 - RNA, 19 nt, Homo sapiens
  misc_RNA (1)...(19): siRNA sense strand
caagauccaggaauaugaa

SEQ ID NO: 1331668 - RNA, 19 nt, Homo sapiens
  misc_RNA (1)...(19): siRNA sense strand
agcccaagauccaggaaua

SEQ ID NO: 1331669 - RNA, 19 nt, Homo sapiens
  misc_RNA (1)...(19): siRNA sense strand
agaacaagcccuucagugu

SEQ ID NO: 1331670 - RNA, 19 nt, Homo sapiens
  misc_RNA (1)...(19): siRNA sense strand
gaagaugaggcugagcauu

SEQ ID NO: 1331671 - RNA, 19 nt, Homo sapiens
  misc_RNA (1)...(19): siRNA sense strand
ggauaagaaaggugacaga

SEQ ID NO: 1331672 - RNA, 19 nt, Homo sapiens
  misc_RNA (1)...(19): siRNA sense strand
caucaaggaggagcuaauu

SEQ ID NO: 1331673 - RNA, 19 nt, Homo sapiens
  misc_RNA (1)...(19): siRNA sense strand
cgacuggcaggauaagaaa

SEQ ID NO: 1331674 - RNA, 19 nt, Homo sapiens
  misc_RNA (1)...(19): siRNA sense strand
caagaagaaaggccucaug

SEQ ID NO: 1331675 - RNA, 19 nt, Homo sapiens
  misc_RNA (1)...(19): siRNA sense strand
gcccacaaccgcaccaaga

SEQ ID NO: 1331676 - RNA, 19 nt, Homo sapiens
  misc_RNA (1)...(19): siRNA sense strand
gaagggaaggcaggacaug

SEQ ID NO: 1331677 - RNA, 19 nt, Homo sapiens
  misc_RNA (1)...(19): siRNA sense strand
ggaagcccaagaagcagaa

SEQ ID NO: 1331678 - RNA, 19 nt, Homo sapiens
  misc_RNA (1)...(19): siRNA sense strand
gcaguuccacgacuucaag

SEQ ID NO: 1331679 - RNA, 19 nt, Homo sapiens
  misc_RNA (1)...(19): siRNA sense strand
caagaagcagaaacuggaa

SEQ ID NO: 1331680 - RNA, 19 nt, Homo sapiens
  misc_RNA (1)...(19): siRNA sense strand
gcccuacugugcugacauc

SEQ ID NO: 1331681 - RNA, 19 nt, Homo sapiens
  misc_RNA (1)...(19): siRNA sense strand
cagaggacuccgaggauga

SEQ ID NO: 1331682 - RNA, 19 nt, Homo sapiens
  misc_RNA (1)...(19): siRNA sense strand
ugacagacgauuccugaag

SEQ ID NO: 1331683 - RNA, 19 nt, Homo sapiens
  misc_RNA (1)...(19): siRNA sense strand
guggaugcccugcugaaga

SEQ ID NO: 1331684 - RNA, 19 nt, Homo sapiens
  misc_RNA (1)...(19): siRNA sense strand
ggcuguggcugacaagaag

SEQ ID NO: 1331685 - RNA, 19 nt, Homo sapiens
  misc_RNA (1)...(19): siRNA sense strand
agucugaggcccagcauga

SEQ ID NO: 1331686 - RNA, 19 nt, Homo sapiens
  misc_RNA (1)...(19): siRNA sense strand
aggcugagcauuacaagau

SEQ ID NO: 1331687 - RNA, 19 nt, Homo sapiens
  misc_RNA (1)...(19): siRNA sense strand
ucgagaccaugaacuugga

SEQ ID NO: 1331688 - RNA, 19 nt, Homo sapiens
  misc_RNA (1)...(19): siRNA sense strand
cgaacuggacacuaaagau

SEQ ID NO: 1331689 - RNA, 19 nt, Homo sapiens
  misc_RNA (1)...(19): siRNA sense strand
gaccgaacuggacacuaaa

SEQ ID NO: 1331690 - RNA, 19 nt, Homo sapiens
  misc_RNA (1)...(19): siRNA sense strand
caggacggcccaaauccaa

SEQ ID NO: 1331691 - RNA, 19 nt, Homo sapiens
  misc_RNA (1)...(19): siRNA sense strand
ucaccgacuggcaggauaa

SEQ ID NO: 1331692 - RNA, 19 nt, Homo sapiens
  misc_RNA (1)...(19): siRNA sense strand
ccgacuggcaggauaagaa

SEQ ID NO: 1331693 - RNA, 19 nt, Homo sapiens
  misc_RNA (1)...(19): siRNA sense strand
gaacagccggaagauggau

SEQ ID NO: 1331694 - RNA, 19 nt, Homo sapiens
  misc_RNA (1)...(19): siRNA sense strand
ucaaggaggagcuaauugc

SEQ ID NO: 1331695 - RNA, 19 nt, Homo sapiens
  misc_RNA (1)...(19): siRNA sense strand
gcaucaaggaggagcuaau

SEQ ID NO: 1331696 - RNA, 19 nt, Homo sapiens
  misc_RNA (1)...(19): siRNA sense strand
ggacacuaaagauguggau

SEQ ID NO: 1331697 - RNA, 19 nt, Homo sapiens
  misc_RNA (1)...(19): siRNA sense strand
gcugagcugaaggcacuua

SEQ ID NO: 1331698 - RNA, 19 nt, Homo sapiens
  misc_RNA (1)...(19): siRNA sense strand
ugagguccuugcugagcuu

SEQ ID NO: 1331699 - RNA, 19 nt, Homo sapiens
  misc_RNA (1)...(19): siRNA sense strand
ggaagggaaggcaggacau

SEQ ID NO: 1331700 - RNA, 19 nt, Homo sapiens
  misc_RNA (1)...(19): siRNA sense strand
agaugaggcugagcauuac

SEQ ID NO: 1331701 - RNA, 19 nt, Homo sapiens
  misc_RNA (1)...(19): siRNA sense strand
ugaccgaacuggacacuaa

SEQ ID NO: 1331702 - RNA, 19 nt, Homo sapiens
  misc_RNA (1)...(19): siRNA sense strand
gaacuggacacuaaagaug

SEQ ID NO: 1331703 - RNA, 19 nt, Homo sapiens
  misc_RNA (1)...(19): siRNA sense strand
ugacaugucugggaaagaa

SEQ ID NO: 1331704 - RNA, 19 nt, Homo sapiens
  misc_RNA (1)...(19): siRNA sense strand
aagaugaggcugagcauua

SEQ ID NO: 1331705 - RNA, 19 nt, Homo sapiens
  misc_RNA (1)...(19): siRNA sense strand
gaagauggaugccccuuug

SEQ ID NO: 1331706 - RNA, 19 nt, Homo sapiens
  misc_RNA (1)...(19): siRNA sense strand
gaggagguccgcacacuug

SEQ ID NO: 1331707 - RNA, 19 nt, Homo sapiens
  misc_RNA (1)...(19): siRNA sense strand
gaaaggugacagacgauuc

SEQ ID NO: 1331708 - RNA, 19 nt, Homo sapiens
  misc_RNA (1)...(19): siRNA sense strand
uggaugcccugcugaagaa

SEQ ID NO: 1331709 - RNA, 19 nt, Homo sapiens
  misc_RNA (1)...(19): siRNA sense strand
ccaagauccaggaauauga

SEQ ID NO: 1331710 - RNA, 19 nt, Homo sapiens
  misc_RNA (1)...(19): siRNA sense strand
ucagugugccgcauacuaa

SEQ ID NO: 1331711 - RNA, 19 nt, Homo sapiens
  misc_RNA (1)...(19): siRNA sense strand
ccgcacacuugaggaguua

SEQ ID NO: 1331712 - RNA, 19 nt, Homo sapiens
  misc_RNA (1)...(19): siRNA sense strand
caagauccaggaauaugaa

SEQ ID NO: 1331713 - RNA, 19 nt, Homo sapiens
  misc_RNA (1)...(19): siRNA sense strand
agcccaagauccaggaaua

SEQ ID NO: 1331714 - RNA, 19 nt, Homo sapiens
  misc_RNA (1)...(19): siRNA sense strand
agaacaagcccuucagugu

SEQ ID NO: 1331715 - RNA, 19 nt, Homo sapiens
  misc_RNA (1)...(19): siRNA sense strand
gaagaugaggcugagcauu

SEQ ID NO: 1331716 - RNA, 19 nt, Homo sapiens
  misc_RNA (1)...(19): siRNA sense strand
ggauaagaaaggugacaga

SEQ ID NO: 1331717 - RNA, 19 nt, Homo sapiens
  misc_RNA (1)...(19): siRNA sense strand
caucaaggaggagcuaauu

SEQ ID NO: 1331718 - RNA, 19 nt, Homo sapiens
  misc_RNA (1)...(19): siRNA sense strand
cgacuggcaggauaagaaa

SEQ ID NO: 1331719 - RNA, 19 nt, Homo sapiens
  misc_RNA (1)...(19): siRNA sense strand
caagaagaaaggccucaug

SEQ ID NO: 1331720 - RNA, 19 nt, Homo sapiens
  misc_RNA (1)...(19): siRNA sense strand
gcccacaaccgcaccaaga

SEQ ID NO: 1331721 - RNA, 19 nt, Homo sapiens
  misc_RNA (1)...(19): siRNA sense strand
gaagggaaggcaggacaug

SEQ ID NO: 1331722 - RNA, 19 nt, Homo sapiens
  misc_RNA (1)...(19): siRNA sense strand
ggaagcccaagaagcagaa

SEQ ID NO: 1331723 - RNA, 19 nt, Homo sapiens
  misc_RNA (1)...(19): siRNA sense strand
gcaguuccacgacuucaag

SEQ ID NO: 1331724 - RNA, 19 nt, Homo sapiens
  misc_RNA (1)...(19): siRNA sense strand
caagaagcagaaacuggaa

SEQ ID NO: 1331725 - RNA, 19 nt, Homo sapiens
  misc_RNA (1)...(19): siRNA sense strand
gcccuacugugcugacauc

SEQ ID NO: 1331726 - RNA, 19 nt, Homo sapiens
  misc_RNA (1)...(19): siRNA sense strand
cagaggacuccgaggauga

SEQ ID NO: 1331727 - RNA, 19 nt, Homo sapiens
  misc_RNA (1)...(19): siRNA sense strand
ugacagacgauuccugaag

SEQ ID NO: 1331728 - RNA, 19 nt, Homo sapiens
  misc_RNA (1)...(19): siRNA sense strand
guggaugcccugcugaaga

SEQ ID NO: 1331729 - RNA, 19 nt, Homo sapiens
  misc_RNA (1)...(19): siRNA sense strand
ggcuguggcugacaagaag

SEQ ID NO: 1331730 - RNA, 19 nt, Homo sapiens
  misc_RNA (1)...(19): siRNA sense strand
agucugaggcccagcauga

SEQ ID NO: 1331731 - RNA, 19 nt, Homo sapiens
  misc_RNA (1)...(19): siRNA sense strand
aggcugagcauuacaagau

SEQ ID NO: 1331732 - RNA, 19 nt, Homo sapiens
  misc_RNA (1)...(19): siRNA sense strand
ucgagaccaugaacuugga

SEQ ID NO: 1331733 - RNA, 19 nt, Homo sapiens
  misc_RNA (1)...(19): siRNA sense strand
cgaacuggacacuaaagau

SEQ ID NO: 1331734 - RNA, 19 nt, Homo sapiens
  misc_RNA (1)...(19): siRNA sense strand
gaccgaacuggacacuaaa

SEQ ID NO: 1331735 - RNA, 19 nt, Homo sapiens
  misc_RNA (1)...(19): siRNA sense strand
caggacggcccaaauccaa

SEQ ID NO: 1331736 - RNA, 19 nt, Homo sapiens
  misc_RNA (1)...(19): siRNA sense strand
ucaccgacuggcaggauaa

SEQ ID NO: 1331737 - RNA, 19 nt, Homo sapiens
  misc_RNA (1)...(19): siRNA sense strand
ccgacuggcaggauaagaa

SEQ ID NO: 1331738 - RNA, 19 nt, Homo sapiens
  misc_RNA (1)...(19): siRNA sense strand
gaacagccggaagauggau

SEQ ID NO: 1331739 - RNA, 19 nt, Homo sapiens
  misc_RNA (1)...(19): siRNA sense strand
ucaaggaggagcuaauugc

SEQ ID NO: 1331740 - RNA, 19 nt, Homo sapiens
  misc_RNA (1)...(19): siRNA sense strand
gcaucaaggaggagcuaau

SEQ ID NO: 1331741 - RNA, 19 nt, Homo sapiens
  misc_RNA (1)...(19): siRNA sense strand
ggacacuaaagauguggau

SEQ ID NO: 1331742 - RNA, 19 nt, Homo sapiens
  misc_RNA (1)...(19): siRNA sense strand
gcugagcugaaggcacuua

SEQ ID NO: 1331743 - RNA, 19 nt, Homo sapiens
  misc_RNA (1)...(19): siRNA sense strand
ugagguccuugcugagcuu

SEQ ID NO: 1331744 - RNA, 19 nt, Homo sapiens
  misc_RNA (1)...(19): siRNA sense strand
ggaagggaaggcaggacau

SEQ ID NO: 1331745 - RNA, 19 nt, Homo sapiens
  misc_RNA (1)...(19): siRNA sense strand
agaugaggcugagcauuac

SEQ ID NO: 1331746 - RNA, 19 nt, Homo sapiens
  misc_RNA (1)...(19): siRNA sense strand
gaacaggccaaccacauuu

SEQ ID NO: 1331747 - RNA, 19 nt, Homo sapiens
  misc_RNA (1)...(19): siRNA sense strand
gauuacggcuuuaccgaaa

SEQ ID NO: 1331748 - RNA, 19 nt, Homo sapiens
  misc_RNA (1)...(19): siRNA sense strand
gcaugaaccugacggugaa

SEQ ID NO: 1331749 - RNA, 19 nt, Homo sapiens
  misc_RNA (1)...(19): siRNA sense strand
gaaggucuuugcuagauca

SEQ ID NO: 1331750 - RNA, 19 nt, Homo sapiens
  misc_RNA (1)...(19): siRNA sense strand
ggaaacgauuacggcuuua

SEQ ID NO: 1331751 - RNA, 19 nt, Homo sapiens
  misc_RNA (1)...(19): siRNA sense strand
ggaacaggccaaccacauu

SEQ ID NO: 1331752 - RNA, 19 nt, Homo sapiens
  misc_RNA (1)...(19): siRNA sense strand
ggucuuugcuagaucagaa

SEQ ID NO: 1331753 - RNA, 19 nt, Homo sapiens
  misc_RNA (1)...(19): siRNA sense strand
gggaaggucuuugcuagau

SEQ ID NO: 1331754 - RNA, 19 nt, Homo sapiens
  misc_RNA (1)...(19): siRNA sense strand
cuucaaagccaaauacaaa

SEQ ID NO: 1331755 - RNA, 19 nt, Homo sapiens
  misc_RNA (1)...(19): siRNA sense strand
aggaaacgauuacggcuuu

SEQ ID NO: 1331756 - RNA, 19 nt, Homo sapiens
  misc_RNA (1)...(19): siRNA sense strand
aacaggagcucaucugcaa

SEQ ID NO: 1331757 - RNA, 19 nt, Homo sapiens
  misc_RNA (1)...(19): siRNA sense strand
ggugaugaggaaacgauua

SEQ ID NO: 1331758 - RNA, 19 nt, Homo sapiens
  misc_RNA (1)...(19): siRNA sense strand
ggaaggucuuugcuagauc

SEQ ID NO: 1331759 - RNA, 19 nt, Homo sapiens
  misc_RNA (1)...(19): siRNA sense strand
gcccuucccuuguccuuuc

SEQ ID NO: 1331760 - RNA, 19 nt, Homo sapiens
  misc_RNA (1)...(19): siRNA sense strand
aaagccaaauacaaacuug

SEQ ID NO: 1331761 - RNA, 19 nt, Homo sapiens
  misc_RNA (1)...(19): siRNA sense strand
uagcagcucuggacaccau

SEQ ID NO: 1331762 - RNA, 19 nt, Homo sapiens
  misc_RNA (1)...(19): siRNA sense strand
caaagccaaauacaaacuu

SEQ ID NO: 1331763 - RNA, 19 nt, Homo sapiens
  misc_RNA (1)...(19): siRNA sense strand
gaacucacacaggcgagaa

SEQ ID NO: 1331764 - RNA, 19 nt, Homo sapiens
  misc_RNA (1)...(19): siRNA sense strand
cuuaaagagucaaguagca

SEQ ID NO: 1331765 - RNA, 19 nt, Homo sapiens
  misc_RNA (1)...(19): siRNA sense strand
gcagcgaccguaagaagca

SEQ ID NO: 1331766 - RNA, 19 nt, Homo sapiens
  misc_RNA (1)...(19): siRNA sense strand
caacagcagcgaccguaag

SEQ ID NO: 1331767 - RNA, 19 nt, Homo sapiens
  misc_RNA (1)...(19): siRNA sense strand
cagcagcgaccguaagaag

SEQ ID NO: 1331768 - RNA, 19 nt, Homo sapiens
  misc_RNA (1)...(19): siRNA sense strand
acacuagcgacaagccaua

SEQ ID NO: 1331769 - RNA, 19 nt, Homo sapiens
  misc_RNA (1)...(19): siRNA sense strand
ucaaacaggagcucaucug

SEQ ID NO: 1331770 - RNA, 19 nt, Homo sapiens
  misc_RNA (1)...(19): siRNA sense strand
uaccgaaacacucuuaaag

SEQ ID NO: 1331771 - RNA, 19 nt, Homo sapiens
  misc_RNA (1)...(19): siRNA sense strand
uuaccgaaacacucuuaaa

SEQ ID NO: 1331772 - RNA, 19 nt, Homo sapiens
  misc_RNA (1)...(19): siRNA sense strand
ccaacagcagcgaccguaa

SEQ ID NO: 1331773 - RNA, 19 nt, Homo sapiens
  misc_RNA (1)...(19): siRNA sense strand
gaaacgauuacggcuuuac

SEQ ID NO: 1331774 - RNA, 19 nt, Homo sapiens
  misc_RNA (1)...(19): siRNA sense strand
uuacggcuuuaccgaaaca

SEQ ID NO: 1331775 - RNA, 19 nt, Homo sapiens
  misc_RNA (1)...(19): siRNA sense strand
ggaggagauugacgacauu

SEQ ID NO: 1331776 - RNA, 19 nt, Homo sapiens
  misc_RNA (1)...(19): siRNA sense strand
gacauuggcuaugcgcuau

SEQ ID NO: 1331777 - RNA, 19 nt, Homo sapiens
  misc_RNA (1)...(19): siRNA sense strand
gaagcggcguagcgacgaa

SEQ ID NO: 1331778 - RNA, 19 nt, Homo sapiens
  misc_RNA (1)...(19): siRNA sense strand
agaagggccugcagaaacu

SEQ ID NO: 1331779 - RNA, 19 nt, Homo sapiens
  misc_RNA (1)...(19): siRNA sense strand
gggaggacaacguggauug

SEQ ID NO: 1331780 - RNA, 19 nt, Homo sapiens
  misc_RNA (1)...(19): siRNA sense strand
gggaugaggaugacaccaa

SEQ ID NO: 1331781 - RNA, 19 nt, Homo sapiens
  misc_RNA (1)...(19): siRNA sense strand
ccagaagggccugcagaaa

SEQ ID NO: 1331782 - RNA, 19 nt, Homo sapiens
  misc_RNA (1)...(19): siRNA sense strand
gcuauacaguggccuacag

SEQ ID NO: 1331783 - RNA, 19 nt, Homo sapiens
  misc_RNA (1)...(19): siRNA sense strand
ggagcugcaggccuacuuu

SEQ ID NO: 1331784 - RNA, 19 nt, Homo sapiens
  misc_RNA (1)...(19): siRNA sense strand
gcccuuagccagccagugu

SEQ ID NO: 1331785 - RNA, 19 nt, Homo sapiens
  misc_RNA (1)...(19): siRNA sense strand
cagaagggccugcagaaac

SEQ ID NO: 1331786 - RNA, 19 nt, Homo sapiens
  misc_RNA (1)...(19): siRNA sense strand
ugacgaccgccuccucuug

SEQ ID NO: 1331787 - RNA, 19 nt, Homo sapiens
  misc_RNA (1)...(19): siRNA sense strand
aggaggagauugacgacau

SEQ ID NO: 1331788 - RNA, 19 nt, Homo sapiens
  misc_RNA (1)...(19): siRNA sense strand
ucccggaacugcccuuugg

SEQ ID NO: 1331789 - RNA, 19 nt, Homo sapiens
  misc_RNA (1)...(19): siRNA sense strand
gauugacgacauuggcuau

SEQ ID NO: 1331790 - RNA, 19 nt, Homo sapiens
  misc_RNA (1)...(19): siRNA sense strand
gaggacaacguggauugga

SEQ ID NO: 1331791 - RNA, 19 nt, Homo sapiens
  misc_RNA (1)...(19): siRNA sense strand
gagcugcaggccuacuuuc

SEQ ID NO: 1331792 - RNA, 19 nt, Homo sapiens
  misc_RNA (1)...(19): siRNA sense strand
ggaggagauugacgacauu

SEQ ID NO: 1331793 - RNA, 19 nt, Homo sapiens
  misc_RNA (1)...(19): siRNA sense strand
gacauuggcuaugcgcuau

SEQ ID NO: 1331794 - RNA, 19 nt, Homo sapiens
  misc_RNA (1)...(19): siRNA sense strand
gaagcggcguagcgacgaa

SEQ ID NO: 1331795 - RNA, 19 nt, Homo sapiens
  misc_RNA (1)...(19): siRNA sense strand
agaagggccugcagaaacu

SEQ ID NO: 1331796 - RNA, 19 nt, Homo sapiens
  misc_RNA (1)...(19): siRNA sense strand
gggaggacaacguggauug

SEQ ID NO: 1331797 - RNA, 19 nt, Homo sapiens
  misc_RNA (1)...(19): siRNA sense strand
gggaugaggaugacaccaa

SEQ ID NO: 1331798 - RNA, 19 nt, Homo sapiens
  misc_RNA (1)...(19): siRNA sense strand
ccagaagggccugcagaaa

SEQ ID NO: 1331799 - RNA, 19 nt, Homo sapiens
  misc_RNA (1)...(19): siRNA sense strand
gcuauacaguggccuacag

SEQ ID NO: 1331800 - RNA, 19 nt, Homo sapiens
  misc_RNA (1)...(19): siRNA sense strand
ggagcugcaggccuacuuu

SEQ ID NO: 1331801 - RNA, 19 nt, Homo sapiens
  misc_RNA (1)...(19): siRNA sense strand
gcccuuagccagccagugu

SEQ ID NO: 1331802 - RNA, 19 nt, Homo sapiens
  misc_RNA (1)...(19): siRNA sense strand
cagaagggccugcagaaac

SEQ ID NO: 1331803 - RNA, 19 nt, Homo sapiens
  misc_RNA (1)...(19): siRNA sense strand
ugacgaccgccuccucuug

SEQ ID NO: 1331804 - RNA, 19 nt, Homo sapiens
  misc_RNA (1)...(19): siRNA sense strand
aggaggagauugacgacau

SEQ ID NO: 1331805 - RNA, 19 nt, Homo sapiens
  misc_RNA (1)...(19): siRNA sense strand
ucccggaacugcccuuugg

SEQ ID NO: 1331806 - RNA, 19 nt, Homo sapiens
  misc_RNA (1)...(19): siRNA sense strand
gauugacgacauuggcuau

SEQ ID NO: 1331807 - RNA, 19 nt, Homo sapiens
  misc_RNA (1)...(19): siRNA sense strand
gaggacaacguggauugga

SEQ ID NO: 1331808 - RNA, 19 nt, Homo sapiens
  misc_RNA (1)...(19): siRNA sense strand
gagcugcaggccuacuuuc

SEQ ID NO: 1331809 - RNA, 19 nt, Homo sapiens
  misc_RNA (1)...(19): siRNA sense strand
gcagaggacaagcuucuua

SEQ ID NO: 1331810 - RNA, 19 nt, Homo sapiens
  misc_RNA (1)...(19): siRNA sense strand
cuagguggcugcauugaug

SEQ ID NO: 1331811 - RNA, 19 nt, Homo sapiens
  misc_RNA (1)...(19): siRNA sense strand
ugauggcugugacugaaua

SEQ ID NO: 1331812 - RNA, 19 nt, Homo sapiens
  misc_RNA (1)...(19): siRNA sense strand
gcugauggcugugacugaa

SEQ ID NO: 1331813 - RNA, 19 nt, Homo sapiens
  misc_RNA (1)...(19): siRNA sense strand
gagcaacgcgagaaggauu

SEQ ID NO: 1331814 - RNA, 19 nt, Homo sapiens
  misc_RNA (1)...(19): siRNA sense strand
gcugcuagguggcugcauu

SEQ ID NO: 1331815 - RNA, 19 nt, Homo sapiens
  misc_RNA (1)...(19): siRNA sense strand
gaagccagauccugacacu

SEQ ID NO: 1331816 - RNA, 19 nt, Homo sapiens
  misc_RNA (1)...(19): siRNA sense strand
ccaggacaaccgaaugaua

SEQ ID NO: 1331817 - RNA, 19 nt, Homo sapiens
  misc_RNA (1)...(19): siRNA sense strand
aaacacaagauccugauga

SEQ ID NO: 1331818 - RNA, 19 nt, Homo sapiens
  misc_RNA (1)...(19): siRNA sense strand
gugaagagcccaaggucaa

SEQ ID NO: 1331819 - RNA, 19 nt, Homo sapiens
  misc_RNA (1)...(19): siRNA sense strand
ggcagggcuuuaucaacua

SEQ ID NO: 1331820 - RNA, 19 nt, Homo sapiens
  misc_RNA (1)...(19): siRNA sense strand
ggagauagcagcaguuuuc

SEQ ID NO: 1331821 - RNA, 19 nt, Homo sapiens
  misc_RNA (1)...(19): siRNA sense strand
gagagcaacgcgagaagga

SEQ ID NO: 1331822 - RNA, 19 nt, Homo sapiens
  misc_RNA (1)...(19): siRNA sense strand
gacaccagcugcggaaaca

SEQ ID NO: 1331823 - RNA, 19 nt, Homo sapiens
  misc_RNA (1)...(19): siRNA sense strand
aacacaagauccugaugaa

SEQ ID NO: 1331824 - RNA, 19 nt, Homo sapiens
  misc_RNA (1)...(19): siRNA sense strand
ggaaacacaagauccugau

SEQ ID NO: 1331825 - RNA, 19 nt, Homo sapiens
  misc_RNA (1)...(19): siRNA sense strand
caggacaaccgaaugauag

SEQ ID NO: 1331826 - RNA, 19 nt, Homo sapiens
  misc_RNA (1)...(19): siRNA sense strand
gcaggcagggcuuuaucaa

SEQ ID NO: 1331827 - RNA, 19 nt, Homo sapiens
  misc_RNA (1)...(19): siRNA sense strand
acaagauccugaugaaggu

SEQ ID NO: 1331828 - RNA, 19 nt, Homo sapiens
  misc_RNA (1)...(19): siRNA sense strand
gaaacacaagauccugaug

SEQ ID NO: 1331829 - RNA, 19 nt, Homo sapiens
  misc_RNA (1)...(19): siRNA sense strand
aggcagggcuuuaucaacu

SEQ ID NO: 1331830 - RNA, 19 nt, Homo sapiens
  misc_RNA (1)...(19): siRNA sense strand
gcagggcuuuaucaacuac

SEQ ID NO: 1331831 - RNA, 19 nt, Homo sapiens
  misc_RNA (1)...(19): siRNA sense strand
gaggacaagcuucuuaugc

SEQ ID NO: 1331832 - RNA, 19 nt, Homo sapiens
  misc_RNA (1)...(19): siRNA sense strand
gccagauccugacacuguu

SEQ ID NO: 1331833 - RNA, 19 nt, Homo sapiens
  misc_RNA (1)...(19): siRNA sense strand
cuuaaggacugugccauuc

SEQ ID NO: 1331834 - RNA, 19 nt, Homo sapiens
  misc_RNA (1)...(19): siRNA sense strand
ggcugugacugaauauauc

SEQ ID NO: 1331835 - RNA, 19 nt, Homo sapiens
  misc_RNA (1)...(19): siRNA sense strand
acacuguuccggacucgua

SEQ ID NO: 1331836 - RNA, 19 nt, Homo sapiens
  misc_RNA (1)...(19): siRNA sense strand
ccuccagacuguccgcuau

SEQ ID NO: 1331837 - RNA, 19 nt, Homo sapiens
  misc_RNA (1)...(19): siRNA sense strand
caaaaucugcugccccuuu

SEQ ID NO: 1331838 - RNA, 19 nt, Homo sapiens
  misc_RNA (1)...(19): siRNA sense strand
ccacccuguuggaccagua

SEQ ID NO: 1331839 - RNA, 19 nt, Homo sapiens
  misc_RNA (1)...(19): siRNA sense strand
acaugcugcuggucaguga

SEQ ID NO: 1331840 - RNA, 19 nt, Homo sapiens
  misc_RNA (1)...(19): siRNA sense strand
cagaggacaagcuucuuau

SEQ ID NO: 1331841 - RNA, 19 nt, Homo sapiens
  misc_RNA (1)...(19): siRNA sense strand
gaggauuccaaguaccaaa

SEQ ID NO: 1331842 - RNA, 19 nt, Homo sapiens
  misc_RNA (1)...(19): siRNA sense strand
caaggucaaggagauggua

SEQ ID NO: 1331843 - RNA, 19 nt, Homo sapiens
  misc_RNA (1)...(19): siRNA sense strand
ucagagagcaacgcgagaa

SEQ ID NO: 1331844 - RNA, 19 nt, Homo sapiens
  misc_RNA (1)...(19): siRNA sense strand
uggcugugacugaauauau

SEQ ID NO: 1331845 - RNA, 19 nt, Homo sapiens
  misc_RNA (1)...(19): siRNA sense strand
ugccuacccuccagacugu

SEQ ID NO: 1331846 - RNA, 19 nt, Homo sapiens
  misc_RNA (1)...(19): siRNA sense strand
gcagaggacaagcuucuua

SEQ ID NO: 1331847 - RNA, 19 nt, Homo sapiens
  misc_RNA (1)...(19): siRNA sense strand
cuagguggcugcauugaug

SEQ ID NO: 1331848 - RNA, 19 nt, Homo sapiens
  misc_RNA (1)...(19): siRNA sense strand
ugauggcugugacugaaua

SEQ ID NO: 1331849 - RNA, 19 nt, Homo sapiens
  misc_RNA (1)...(19): siRNA sense strand
gcugauggcugugacugaa

SEQ ID NO: 1331850 - RNA, 19 nt, Homo sapiens
  misc_RNA (1)...(19): siRNA sense strand
gagcaacgcgagaaggauu

SEQ ID NO: 1331851 - RNA, 19 nt, Homo sapiens
  misc_RNA (1)...(19): siRNA sense strand
gcugcuagguggcugcauu

SEQ ID NO: 1331852 - RNA, 19 nt, Homo sapiens
  misc_RNA (1)...(19): siRNA sense strand
gaagccagauccugacacu

SEQ ID NO: 1331853 - RNA, 19 nt, Homo sapiens
  misc_RNA (1)...(19): siRNA sense strand
ccaggacaaccgaaugaua

SEQ ID NO: 1331854 - RNA, 19 nt, Homo sapiens
  misc_RNA (1)...(19): siRNA sense strand
aaacacaagauccugauga

SEQ ID NO: 1331855 - RNA, 19 nt, Homo sapiens
  misc_RNA (1)...(19): siRNA sense strand
gugaagagcccaaggucaa

SEQ ID NO: 1331856 - RNA, 19 nt, Homo sapiens
  misc_RNA (1)...(19): siRNA sense strand
ggcagggcuuuaucaacua

SEQ ID NO: 1331857 - RNA, 19 nt, Homo sapiens
  misc_RNA (1)...(19): siRNA sense strand
ggagauagcagcaguuuuc

SEQ ID NO: 1331858 - RNA, 19 nt, Homo sapiens
  misc_RNA (1)...(19): siRNA sense strand
gagagcaacgcgagaagga

SEQ ID NO: 1331859 - RNA, 19 nt, Homo sapiens
  misc_RNA (1)...(19): siRNA sense strand
gacaccagcugcggaaaca

SEQ ID NO: 1331860 - RNA, 19 nt, Homo sapiens
  misc_RNA (1)...(19): siRNA sense strand
aacacaagauccugaugaa

SEQ ID NO: 1331861 - RNA, 19 nt, Homo sapiens
  misc_RNA (1)...(19): siRNA sense strand
ggaaacacaagauccugau

SEQ ID NO: 1331862 - RNA, 19 nt, Homo sapiens
  misc_RNA (1)...(19): siRNA sense strand
caggacaaccgaaugauag

SEQ ID NO: 1331863 - RNA, 19 nt, Homo sapiens
  misc_RNA (1)...(19): siRNA sense strand
gcaggcagggcuuuaucaa

SEQ ID NO: 1331864 - RNA, 19 nt, Homo sapiens
  misc_RNA (1)...(19): siRNA sense strand
acaagauccugaugaaggu

SEQ ID NO: 1331865 - RNA, 19 nt, Homo sapiens
  misc_RNA (1)...(19): siRNA sense strand
gaaacacaagauccugaug

SEQ ID NO: 1331866 - RNA, 19 nt, Homo sapiens
  misc_RNA (1)...(19): siRNA sense strand
aggcagggcuuuaucaacu

SEQ ID NO: 1331867 - RNA, 19 nt, Homo sapiens
  misc_RNA (1)...(19): siRNA sense strand
gcagggcuuuaucaacuac

SEQ ID NO: 1331868 - RNA, 19 nt, Homo sapiens
  misc_RNA (1)...(19): siRNA sense strand
gaggacaagcuucuuaugc

SEQ ID NO: 1331869 - RNA, 19 nt, Homo sapiens
  misc_RNA (1)...(19): siRNA sense strand
gccagauccugacacuguu

SEQ ID NO: 1331870 - RNA, 19 nt, Homo sapiens
  misc_RNA (1)...(19): siRNA sense strand
cuuaaggacugugccauuc

SEQ ID NO: 1331871 - RNA, 19 nt, Homo sapiens
  misc_RNA (1)...(19): siRNA sense strand
ggcugugacugaauauauc

SEQ ID NO: 1331872 - RNA, 19 nt, Homo sapiens
  misc_RNA (1)...(19): siRNA sense strand
acacuguuccggacucgua

SEQ ID NO: 1331873 - RNA, 19 nt, Homo sapiens
  misc_RNA (1)...(19): siRNA sense strand
ccuccagacuguccgcuau

SEQ ID NO: 1331874 - RNA, 19 nt, Homo sapiens
  misc_RNA (1)...(19): siRNA sense strand
caaaaucugcugccccuuu

SEQ ID NO: 1331875 - RNA, 19 nt, Homo sapiens
  misc_RNA (1)...(19): siRNA sense strand
ccacccuguuggaccagua

SEQ ID NO: 1331876 - RNA, 19 nt, Homo sapiens
  misc_RNA (1)...(19): siRNA sense strand
acaugcugcuggucaguga

SEQ ID NO: 1331877 - RNA, 19 nt, Homo sapiens
  misc_RNA (1)...(19): siRNA sense strand
cagaggacaagcuucuuau

SEQ ID NO: 1331878 - RNA, 19 nt, Homo sapiens
  misc_RNA (1)...(19): siRNA sense strand
gaggauuccaaguaccaaa

SEQ ID NO: 1331879 - RNA, 19 nt, Homo sapiens
  misc_RNA (1)...(19): siRNA sense strand
caaggucaaggagauggua

SEQ ID NO: 1331880 - RNA, 19 nt, Homo sapiens
  misc_RNA (1)...(19): siRNA sense strand
ucagagagcaacgcgagaa

SEQ ID NO: 1331881 - RNA, 19 nt, Homo sapiens
  misc_RNA (1)...(19): siRNA sense strand
uggcugugacugaauauau

SEQ ID NO: 1331882 - RNA, 19 nt, Homo sapiens
  misc_RNA (1)...(19): siRNA sense strand
ugccuacccuccagacugu

SEQ ID NO: 1331883 - RNA, 19 nt, Homo sapiens
  misc_RNA (1)...(19): siRNA sense strand
gcacggcgcuguaugaucu

SEQ ID NO: 1331884 - RNA, 19 nt, Homo sapiens
  misc_RNA (1)...(19): siRNA sense strand
gaguaucgguccaugaaag

SEQ ID NO: 1331885 - RNA, 19 nt, Homo sapiens
  misc_RNA (1)...(19): siRNA sense strand
gcaaacggcaggaguaucg

SEQ ID NO: 1331886 - RNA, 19 nt, Homo sapiens
  misc_RNA (1)...(19): siRNA sense strand
aaaucaaggcggcuuacua

SEQ ID NO: 1331887 - RNA, 19 nt, Homo sapiens
  misc_RNA (1)...(19): siRNA sense strand
uuacuaccgucagugcuuu

SEQ ID NO: 1331888 - RNA, 19 nt, Homo sapiens
  misc_RNA (1)...(19): siRNA sense strand
ccacgcaggcccaaaucaa

SEQ ID NO: 1331889 - RNA, 19 nt, Homo sapiens
  misc_RNA (1)...(19): siRNA sense strand
cagggcgacugcucguauu

SEQ ID NO: 1331890 - RNA, 19 nt, Homo sapiens
  misc_RNA (1)...(19): siRNA sense strand
caacuuugacgccuucuac

SEQ ID NO: 1331891 - RNA, 19 nt, Homo sapiens
  misc_RNA (1)...(19): siRNA sense strand
ggaguaucgguccaugaaa

SEQ ID NO: 1331892 - RNA, 19 nt, Homo sapiens
  misc_RNA (1)...(19): siRNA sense strand
cgcacgauguucaacuuug

SEQ ID NO: 1331893 - RNA, 19 nt, Homo sapiens
  misc_RNA (1)...(19): siRNA sense strand
caucaucggcuuuuauauu

SEQ ID NO: 1331894 - RNA, 19 nt, Homo sapiens
  misc_RNA (1)...(19): siRNA sense strand
gcgccaaccgcacgauguu

SEQ ID NO: 1331895 - RNA, 19 nt, Homo sapiens
  misc_RNA (1)...(19): siRNA sense strand
agacacggcugccauuuuc

SEQ ID NO: 1331896 - RNA, 19 nt, Homo sapiens
  misc_RNA (1)...(19): siRNA sense strand
ccagggcgacugcucguau

SEQ ID NO: 1331897 - RNA, 19 nt, Homo sapiens
  misc_RNA (1)...(19): siRNA sense strand
aaucaaggcggcuuacuac

SEQ ID NO: 1331898 - RNA, 19 nt, Homo sapiens
  misc_RNA (1)...(19): siRNA sense strand
cacccuccgucgcaaguau

SEQ ID NO: 1331899 - RNA, 19 nt, Homo sapiens
  misc_RNA (1)...(19): siRNA sense strand
cgagacacggcugccauuu

SEQ ID NO: 1331900 - RNA, 19 nt, Homo sapiens
  misc_RNA (1)...(19): siRNA sense strand
gagacacggcugccauuuu

SEQ ID NO: 1331901 - RNA, 19 nt, Homo sapiens
  misc_RNA (1)...(19): siRNA sense strand
gaaugucucccuccugaua

SEQ ID NO: 1331902 - RNA, 19 nt, Homo sapiens
  misc_RNA (1)...(19): siRNA sense strand
gaaguugaguucuggaaac

SEQ ID NO: 1331903 - RNA, 19 nt, Homo sapiens
  misc_RNA (1)...(19): siRNA sense strand
guuaucaucguccaaguuu

SEQ ID NO: 1331904 - RNA, 19 nt, Homo sapiens
  misc_RNA (1)...(19): siRNA sense strand
gcccucaugcuguaaagaa

SEQ ID NO: 1331905 - RNA, 19 nt, Homo sapiens
  misc_RNA (1)...(19): siRNA sense strand
uaucaucguccaaguuuag

SEQ ID NO: 1331906 - RNA, 19 nt, Homo sapiens
  misc_RNA (1)...(19): siRNA sense strand
uuaucaucguccaaguuua

SEQ ID NO: 1331907 - RNA, 19 nt, Homo sapiens
  misc_RNA (1)...(19): siRNA sense strand
cccaucagcagcaguaaga

SEQ ID NO: 1331908 - RNA, 19 nt, Homo sapiens
  misc_RNA (1)...(19): siRNA sense strand
gcuguaaagaaguugaguu

SEQ ID NO: 1331909 - RNA, 19 nt, Homo sapiens
  misc_RNA (1)...(19): siRNA sense strand
cagcagcaguaagaggaau

SEQ ID NO: 1331910 - RNA, 19 nt, Homo sapiens
  misc_RNA (1)...(19): siRNA sense strand
gaaguugaguucuggaaac

SEQ ID NO: 1331911 - RNA, 19 nt, Homo sapiens
  misc_RNA (1)...(19): siRNA sense strand
guuaucaucguccaaguuu

SEQ ID NO: 1331912 - RNA, 19 nt, Homo sapiens
  misc_RNA (1)...(19): siRNA sense strand
gcccucaugcuguaaagaa

SEQ ID NO: 1331913 - RNA, 19 nt, Homo sapiens
  misc_RNA (1)...(19): siRNA sense strand
uaucaucguccaaguuuag

SEQ ID NO: 1331914 - RNA, 19 nt, Homo sapiens
  misc_RNA (1)...(19): siRNA sense strand
uuaucaucguccaaguuua

SEQ ID NO: 1331915 - RNA, 19 nt, Homo sapiens
  misc_RNA (1)...(19): siRNA sense strand
gcuguaaagaaguugaguu

SEQ ID NO: 1331916 - RNA, 19 nt, Homo sapiens
  misc_RNA (1)...(19): siRNA sense strand
ccacagagcuuaccucaaa

SEQ ID NO: 1331917 - RNA, 19 nt, Homo sapiens
  misc_RNA (1)...(19): siRNA sense strand
gcaaacaaguggauugaaa

SEQ ID NO: 1331918 - RNA, 19 nt, Homo sapiens
  misc_RNA (1)...(19): siRNA sense strand
uaaagcaccuuaacaauga

SEQ ID NO: 1331919 - RNA, 19 nt, Homo sapiens
  misc_RNA (1)...(19): siRNA sense strand
gacaggcaguuaacacuua

SEQ ID NO: 1331920 - RNA, 19 nt, Homo sapiens
  misc_RNA (1)...(19): siRNA sense strand
gaaauuuacagcugguuua

SEQ ID NO: 1331921 - RNA, 19 nt, Homo sapiens
  misc_RNA (1)...(19): siRNA sense strand
gaugaagacugcccaaugu

SEQ ID NO: 1331922 - RNA, 19 nt, Homo sapiens
  misc_RNA (1)...(19): siRNA sense strand
cagcagagauggaagauca

SEQ ID NO: 1331923 - RNA, 19 nt, Homo sapiens
  misc_RNA (1)...(19): siRNA sense strand
gaaagcauuugugaagauu

SEQ ID NO: 1331924 - RNA, 19 nt, Homo sapiens
  misc_RNA (1)...(19): siRNA sense strand
gcaguuacaucuucagcuu

SEQ ID NO: 1331925 - RNA, 19 nt, Homo sapiens
  misc_RNA (1)...(19): siRNA sense strand
acagagagauugaagaaga

SEQ ID NO: 1331926 - RNA, 19 nt, Homo sapiens
  misc_RNA (1)...(19): siRNA sense strand
gaugucagaccuccauuua

SEQ ID NO: 1331927 - RNA, 19 nt, Homo sapiens
  misc_RNA (1)...(19): siRNA sense strand
ggcuagaccucacuacuaa

SEQ ID NO: 1331928 - RNA, 19 nt, Homo sapiens
  misc_RNA (1)...(19): siRNA sense strand
caaagcaucaccaccaaua

SEQ ID NO: 1331929 - RNA, 19 nt, Homo sapiens
  misc_RNA (1)...(19): siRNA sense strand
gcagagagcaguuuaccuu

SEQ ID NO: 1331930 - RNA, 19 nt, Homo sapiens
  misc_RNA (1)...(19): siRNA sense strand
aagaagagccuuuaucuga

SEQ ID NO: 1331931 - RNA, 19 nt, Homo sapiens
  misc_RNA (1)...(19): siRNA sense strand
ggaaugagcacucuaagca

SEQ ID NO: 1331932 - RNA, 19 nt, Homo sapiens
  misc_RNA (1)...(19): siRNA sense strand
gcaguacgucauaaucuua

SEQ ID NO: 1331933 - RNA, 19 nt, Homo sapiens
  misc_RNA (1)...(19): siRNA sense strand
gaagagccuuuaucugaag

SEQ ID NO: 1331934 - RNA, 19 nt, Homo sapiens
  misc_RNA (1)...(19): siRNA sense strand
gacaacagcuaaucacagu

SEQ ID NO: 1331935 - RNA, 19 nt, Homo sapiens
  misc_RNA (1)...(19): siRNA sense strand
gacaccagcucugaaguaa

SEQ ID NO: 1331936 - RNA, 19 nt, Homo sapiens
  misc_RNA (1)...(19): siRNA sense strand
ggacagucuucaguucuaa

SEQ ID NO: 1331937 - RNA, 19 nt, Homo sapiens
  misc_RNA (1)...(19): siRNA sense strand
gagcagugauaaacagaga

SEQ ID NO: 1331938 - RNA, 19 nt, Homo sapiens
  misc_RNA (1)...(19): siRNA sense strand
ggaaguccaaccuuaguaa

SEQ ID NO: 1331939 - RNA, 19 nt, Homo sapiens
  misc_RNA (1)...(19): siRNA sense strand
gcaaauggccaggcuguga

SEQ ID NO: 1331940 - RNA, 19 nt, Homo sapiens
  misc_RNA (1)...(19): siRNA sense strand
gcagguggugcaacaguua

SEQ ID NO: 1331941 - RNA, 19 nt, Homo sapiens
  misc_RNA (1)...(19): siRNA sense strand
cgacagagagauugaagaa

SEQ ID NO: 1331942 - RNA, 19 nt, Homo sapiens
  misc_RNA (1)...(19): siRNA sense strand
gaaagaagugacuggaguu

SEQ ID NO: 1331943 - RNA, 19 nt, Homo sapiens
  misc_RNA (1)...(19): siRNA sense strand
gaaacagcaagagcaguua

SEQ ID NO: 1331944 - RNA, 19 nt, Homo sapiens
  misc_RNA (1)...(19): siRNA sense strand
agaagagccuuuaucugaa

SEQ ID NO: 1331945 - RNA, 19 nt, Homo sapiens
  misc_RNA (1)...(19): siRNA sense strand
caaggaagagccagugauu

SEQ ID NO: 1331946 - RNA, 19 nt, Homo sapiens
  misc_RNA (1)...(19): siRNA sense strand
aacaggaaguccaaccuua

SEQ ID NO: 1331947 - RNA, 19 nt, Homo sapiens
  misc_RNA (1)...(19): siRNA sense strand
gcagcaacuuggaagaaug

SEQ ID NO: 1331948 - RNA, 19 nt, Homo sapiens
  misc_RNA (1)...(19): siRNA sense strand
ugaaagcauuugugaagau

SEQ ID NO: 1331949 - RNA, 19 nt, Homo sapiens
  misc_RNA (1)...(19): siRNA sense strand
gggcuagaccucacuacua

SEQ ID NO: 1331950 - RNA, 19 nt, Homo sapiens
  misc_RNA (1)...(19): siRNA sense strand
gacuguggaugaaguagaa

SEQ ID NO: 1331951 - RNA, 19 nt, Homo sapiens
  misc_RNA (1)...(19): siRNA sense strand
gcgaacgucuucaagcaau

SEQ ID NO: 1331952 - RNA, 19 nt, Homo sapiens
  misc_RNA (1)...(19): siRNA sense strand
ucagaccuccauuuacuua

SEQ ID NO: 1331953 - RNA, 19 nt, Homo sapiens
  misc_RNA (1)...(19): siRNA sense strand
cgacagagacaauaagcaa

SEQ ID NO: 1331954 - RNA, 19 nt, Homo sapiens
  misc_RNA (1)...(19): siRNA sense strand
ugacagcaauggaaacagu

SEQ ID NO: 1331955 - RNA, 19 nt, Homo sapiens
  misc_RNA (1)...(19): siRNA sense strand
ggaugaagacugcccaaug

SEQ ID NO: 1331956 - RNA, 19 nt, Homo sapiens
  misc_RNA (1)...(19): siRNA sense strand
gaagaagagccuuuaucug

SEQ ID NO: 1331957 - RNA, 19 nt, Homo sapiens
  misc_RNA (1)...(19): siRNA sense strand
gcagauccuucagcaacaa

SEQ ID NO: 1331958 - RNA, 19 nt, Homo sapiens
  misc_RNA (1)...(19): siRNA sense strand
gaaguccaaccuuaguaaa

SEQ ID NO: 1331959 - RNA, 19 nt, Homo sapiens
  misc_RNA (1)...(19): siRNA sense strand
ucagacaaauacaacauuc

SEQ ID NO: 1331960 - RNA, 19 nt, Homo sapiens
  misc_RNA (1)...(19): siRNA sense strand
gcaacagcauccuggaaag

SEQ ID NO: 1331961 - RNA, 19 nt, Homo sapiens
  misc_RNA (1)...(19): siRNA sense strand
gaauggacagucuucaguu

SEQ ID NO: 1331962 - RNA, 19 nt, Homo sapiens
  misc_RNA (1)...(19): siRNA sense strand
uaaaucuggugucuagugu

SEQ ID NO: 1331963 - RNA, 19 nt, Homo sapiens
  misc_RNA (1)...(19): siRNA sense strand
ggugcaacaguuagaaaua

SEQ ID NO: 1331964 - RNA, 19 nt, Homo sapiens
  misc_RNA (1)...(19): siRNA sense strand
uaagagcagugauaaacag

SEQ ID NO: 1331965 - RNA, 19 nt, Homo sapiens
  misc_RNA (1)...(19): siRNA sense strand
agagagcaguuuaccuuug

SEQ ID NO: 1331966 - RNA, 19 nt, Homo sapiens
  misc_RNA (1)...(19): siRNA sense strand
gaaguaagcacaguagaac

SEQ ID NO: 1331967 - RNA, 19 nt, Homo sapiens
  misc_RNA (1)...(19): siRNA sense strand
gaagacgacagagagauug

SEQ ID NO: 1331968 - RNA, 19 nt, Homo sapiens
  misc_RNA (1)...(19): siRNA sense strand
aauccuggacugauaaaua

SEQ ID NO: 1331969 - RNA, 19 nt, Homo sapiens
  misc_RNA (1)...(19): siRNA sense strand
aaguaauccuggacugaua

SEQ ID NO: 1331970 - RNA, 19 nt, Homo sapiens
  misc_RNA (1)...(19): siRNA sense strand
ugacaccagcucugaagua

SEQ ID NO: 1331971 - RNA, 19 nt, Homo sapiens
  misc_RNA (1)...(19): siRNA sense strand
gcuacaagcccuucuccaa

SEQ ID NO: 1331972 - RNA, 19 nt, Homo sapiens
  misc_RNA (1)...(19): siRNA sense strand
gaacgucuucaagcaauga

SEQ ID NO: 1331973 - RNA, 19 nt, Homo sapiens
  misc_RNA (1)...(19): siRNA sense strand
auccuggacugauaaauaa

SEQ ID NO: 1331974 - RNA, 19 nt, Homo sapiens
  misc_RNA (1)...(19): siRNA sense strand
gagagcaguuuaccuuugc

SEQ ID NO: 1331975 - RNA, 19 nt, Homo sapiens
  misc_RNA (1)...(19): siRNA sense strand
gcagcaaacaaguggauug

SEQ ID NO: 1331976 - RNA, 19 nt, Homo sapiens
  misc_RNA (1)...(19): siRNA sense strand
gauugaagaagagccuuua

SEQ ID NO: 1331977 - RNA, 19 nt, Homo sapiens
  misc_RNA (1)...(19): siRNA sense strand
gcuaaucacaguccagaau

SEQ ID NO: 1331978 - RNA, 19 nt, Homo sapiens
  misc_RNA (1)...(19): siRNA sense strand
ugucagaccuccauuuacu

SEQ ID NO: 1331979 - RNA, 19 nt, Homo sapiens
  misc_RNA (1)...(19): siRNA sense strand
gugaaagcauuugugaaga

SEQ ID NO: 1331980 - RNA, 19 nt, Homo sapiens
  misc_RNA (1)...(19): siRNA sense strand
cuuaaguccugcugagauu

SEQ ID NO: 1331981 - RNA, 19 nt, Homo sapiens
  misc_RNA (1)...(19): siRNA sense strand
ugaaguaagcacaguagaa

SEQ ID NO: 1331982 - RNA, 19 nt, Homo sapiens
  misc_RNA (1)...(19): siRNA sense strand
caaacaaguggauugaaau

SEQ ID NO: 1331983 - RNA, 19 nt, Homo sapiens
  misc_RNA (1)...(19): siRNA sense strand
cagaagcgaaggucacaaa

SEQ ID NO: 1331984 - RNA, 19 nt, Homo sapiens
  misc_RNA (1)...(19): siRNA sense strand
gucaccaugucgaagaaua

SEQ ID NO: 1331985 - RNA, 19 nt, Homo sapiens
  misc_RNA (1)...(19): siRNA sense strand
gcccaaaccaucucccaaa

SEQ ID NO: 1331986 - RNA, 19 nt, Homo sapiens
  misc_RNA (1)...(19): siRNA sense strand
ucacaguccagaauuagaa

SEQ ID NO: 1331987 - RNA, 19 nt, Homo sapiens
  misc_RNA (1)...(19): siRNA sense strand
ugaagaagagccuuuaucu

SEQ ID NO: 1331988 - RNA, 19 nt, Homo sapiens
  misc_RNA (1)...(19): siRNA sense strand
agaauuagaagacgacaga

SEQ ID NO: 1331989 - RNA, 19 nt, Homo sapiens
  misc_RNA (1)...(19): siRNA sense strand
uacaagcccuucuccaaca

SEQ ID NO: 1331990 - RNA, 19 nt, Homo sapiens
  misc_RNA (1)...(19): siRNA sense strand
uuacacggacauuugcuua

SEQ ID NO: 1331991 - RNA, 19 nt, Homo sapiens
  misc_RNA (1)...(19): siRNA sense strand
gccaggcugugaaagcauu

SEQ ID NO: 1331992 - RNA, 19 nt, Homo sapiens
  misc_RNA (1)...(19): siRNA sense strand
ccaccaauaacucaucauu

SEQ ID NO: 1331993 - RNA, 19 nt, Homo sapiens
  misc_RNA (1)...(19): siRNA sense strand
gcaguuauggaaagaagug

SEQ ID NO: 1331994 - RNA, 19 nt, Homo sapiens
  misc_RNA (1)...(19): siRNA sense strand
agaaugcaguacgucauaa

SEQ ID NO: 1331995 - RNA, 19 nt, Homo sapiens
  misc_RNA (1)...(19): siRNA sense strand
caaaccaucucccaaaccu

SEQ ID NO: 1331996 - RNA, 19 nt, Homo sapiens
  misc_RNA (1)...(19): siRNA sense strand
gagacaauaagcaacaguu

SEQ ID NO: 1331997 - RNA, 19 nt, Homo sapiens
  misc_RNA (1)...(19): siRNA sense strand
gcugugaaagcauuuguga

SEQ ID NO: 1331998 - RNA, 19 nt, Homo sapiens
  misc_RNA (1)...(19): siRNA sense strand
gcagcaacaacaacaacaa

SEQ ID NO: 1331999 - RNA, 19 nt, Homo sapiens
  misc_RNA (1)...(19): siRNA sense strand
auaagcaacaguucaauga

SEQ ID NO: 1332000 - RNA, 19 nt, Homo sapiens
  misc_RNA (1)...(19): siRNA sense strand
gaagaaugcaguacgucau

SEQ ID NO: 1332001 - RNA, 19 nt, Homo sapiens
  misc_RNA (1)...(19): siRNA sense strand
agaccuccauuuacuuaug

SEQ ID NO: 1332002 - RNA, 19 nt, Homo sapiens
  misc_RNA (1)...(19): siRNA sense strand
gacaauaagcaacaguuca

SEQ ID NO: 1332003 - RNA, 19 nt, Homo sapiens
  misc_RNA (1)...(19): siRNA sense strand
caucagaaauugccccaaa

SEQ ID NO: 1332004 - RNA, 19 nt, Homo sapiens
  misc_RNA (1)...(19): siRNA sense strand
gaaggcgacauucagacaa

SEQ ID NO: 1332005 - RNA, 19 nt, Homo sapiens
  misc_RNA (1)...(19): siRNA sense strand
gugcaacaguuagaaauac

SEQ ID NO: 1332006 - RNA, 19 nt, Homo sapiens
  misc_RNA (1)...(19): siRNA sense strand
caaauggccaggcugugaa

SEQ ID NO: 1332007 - RNA, 19 nt, Homo sapiens
  misc_RNA (1)...(19): siRNA sense strand
uggacagucuucaguucua

SEQ ID NO: 1332008 - RNA, 19 nt, Homo sapiens
  misc_RNA (1)...(19): siRNA sense strand
acucaucauuccauaguga

SEQ ID NO: 1332009 - RNA, 19 nt, Homo sapiens
  misc_RNA (1)...(19): siRNA sense strand
uaacucaucauuccauagu

SEQ ID NO: 1332010 - RNA, 19 nt, Homo sapiens
  misc_RNA (1)...(19): siRNA sense strand
gcagcagcuucuccagaug

SEQ ID NO: 1332011 - RNA, 19 nt, Homo sapiens
  misc_RNA (1)...(19): siRNA sense strand
gaaauugccccaaacuaug

SEQ ID NO: 1332012 - RNA, 19 nt, Homo sapiens
  misc_RNA (1)...(19): siRNA sense strand
caauccacgucaaggaaga

SEQ ID NO: 1332013 - RNA, 19 nt, Homo sapiens
  misc_RNA (1)...(19): siRNA sense strand
caguuuaccuuugcuaagu

SEQ ID NO: 1332014 - RNA, 19 nt, Homo sapiens
  misc_RNA (1)...(19): siRNA sense strand
aaucuuagccugcacaagu

SEQ ID NO: 1332015 - RNA, 19 nt, Homo sapiens
  misc_RNA (1)...(19): siRNA sense strand
aagaaugcaguacgucaua

SEQ ID NO: 1332016 - RNA, 19 nt, Homo sapiens
  misc_RNA (1)...(19): siRNA sense strand
ccacagagcuuaccucaaa

SEQ ID NO: 1332017 - RNA, 19 nt, Homo sapiens
  misc_RNA (1)...(19): siRNA sense strand
gcaaacaaguggauugaaa

SEQ ID NO: 1332018 - RNA, 19 nt, Homo sapiens
  misc_RNA (1)...(19): siRNA sense strand
uaaagcaccuuaacaauga

SEQ ID NO: 1332019 - RNA, 19 nt, Homo sapiens
  misc_RNA (1)...(19): siRNA sense strand
gacaggcaguuaacacuua

SEQ ID NO: 1332020 - RNA, 19 nt, Homo sapiens
  misc_RNA (1)...(19): siRNA sense strand
gaaauuuacagcugguuua

SEQ ID NO: 1332021 - RNA, 19 nt, Homo sapiens
  misc_RNA (1)...(19): siRNA sense strand
gaugaagacugcccaaugu

SEQ ID NO: 1332022 - RNA, 19 nt, Homo sapiens
  misc_RNA (1)...(19): siRNA sense strand
cagcagagauggaagauca

SEQ ID NO: 1332023 - RNA, 19 nt, Homo sapiens
  misc_RNA (1)...(19): siRNA sense strand
gaaagcauuugugaagauu

SEQ ID NO: 1332024 - RNA, 19 nt, Homo sapiens
  misc_RNA (1)...(19): siRNA sense strand
gcaguuacaucuucagcuu

SEQ ID NO: 1332025 - RNA, 19 nt, Homo sapiens
  misc_RNA (1)...(19): siRNA sense strand
acagagagauugaagaaga

SEQ ID NO: 1332026 - RNA, 19 nt, Homo sapiens
  misc_RNA (1)...(19): siRNA sense strand
gaugucagaccuccauuua

SEQ ID NO: 1332027 - RNA, 19 nt, Homo sapiens
  misc_RNA (1)...(19): siRNA sense strand
ggcuagaccucacuacuaa

SEQ ID NO: 1332028 - RNA, 19 nt, Homo sapiens
  misc_RNA (1)...(19): siRNA sense strand
caaagcaucaccaccaaua

SEQ ID NO: 1332029 - RNA, 19 nt, Homo sapiens
  misc_RNA (1)...(19): siRNA sense strand
gcagagagcaguuuaccuu

SEQ ID NO: 1332030 - RNA, 19 nt, Homo sapiens
  misc_RNA (1)...(19): siRNA sense strand
aagaagagccuuuaucuga

SEQ ID NO: 1332031 - RNA, 19 nt, Homo sapiens
  misc_RNA (1)...(19): siRNA sense strand
ggaaugagcacucuaagca

SEQ ID NO: 1332032 - RNA, 19 nt, Homo sapiens
  misc_RNA (1)...(19): siRNA sense strand
gcaguacgucauaaucuua

SEQ ID NO: 1332033 - RNA, 19 nt, Homo sapiens
  misc_RNA (1)...(19): siRNA sense strand
gaagagccuuuaucugaag

SEQ ID NO: 1332034 - RNA, 19 nt, Homo sapiens
  misc_RNA (1)...(19): siRNA sense strand
gacaacagcuaaucacagu

SEQ ID NO: 1332035 - RNA, 19 nt, Homo sapiens
  misc_RNA (1)...(19): siRNA sense strand
gacaccagcucugaaguaa

SEQ ID NO: 1332036 - RNA, 19 nt, Homo sapiens
  misc_RNA (1)...(19): siRNA sense strand
ggacagucuucaguucuaa

SEQ ID NO: 1332037 - RNA, 19 nt, Homo sapiens
  misc_RNA (1)...(19): siRNA sense strand
gagcagugauaaacagaga

SEQ ID NO: 1332038 - RNA, 19 nt, Homo sapiens
  misc_RNA (1)...(19): siRNA sense strand
ggaaguccaaccuuaguaa

SEQ ID NO: 1332039 - RNA, 19 nt, Homo sapiens
  misc_RNA (1)...(19): siRNA sense strand
gcaaauggccaggcuguga

SEQ ID NO: 1332040 - RNA, 19 nt, Homo sapiens
  misc_RNA (1)...(19): siRNA sense strand
gcagguggugcaacaguua

SEQ ID NO: 1332041 - RNA, 19 nt, Homo sapiens
  misc_RNA (1)...(19): siRNA sense strand
cgacagagagauugaagaa

SEQ ID NO: 1332042 - RNA, 19 nt, Homo sapiens
  misc_RNA (1)...(19): siRNA sense strand
gaaagaagugacuggaguu

SEQ ID NO: 1332043 - RNA, 19 nt, Homo sapiens
  misc_RNA (1)...(19): siRNA sense strand
gaaacagcaagagcaguua

SEQ ID NO: 1332044 - RNA, 19 nt, Homo sapiens
  misc_RNA (1)...(19): siRNA sense strand
agaagagccuuuaucugaa

SEQ ID NO: 1332045 - RNA, 19 nt, Homo sapiens
  misc_RNA (1)...(19): siRNA sense strand
caaggaagagccagugauu

SEQ ID NO: 1332046 - RNA, 19 nt, Homo sapiens
  misc_RNA (1)...(19): siRNA sense strand
aacaggaaguccaaccuua

SEQ ID NO: 1332047 - RNA, 19 nt, Homo sapiens
  misc_RNA (1)...(19): siRNA sense strand
gcagcaacuuggaagaaug

SEQ ID NO: 1332048 - RNA, 19 nt, Homo sapiens
  misc_RNA (1)...(19): siRNA sense strand
ugaaagcauuugugaagau

SEQ ID NO: 1332049 - RNA, 19 nt, Homo sapiens
  misc_RNA (1)...(19): siRNA sense strand
gggcuagaccucacuacua

SEQ ID NO: 1332050 - RNA, 19 nt, Homo sapiens
  misc_RNA (1)...(19): siRNA sense strand
gacuguggaugaaguagaa

SEQ ID NO: 1332051 - RNA, 19 nt, Homo sapiens
  misc_RNA (1)...(19): siRNA sense strand
gcgaacgucuucaagcaau

SEQ ID NO: 1332052 - RNA, 19 nt, Homo sapiens
  misc_RNA (1)...(19): siRNA sense strand
ucagaccuccauuuacuua

SEQ ID NO: 1332053 - RNA, 19 nt, Homo sapiens
  misc_RNA (1)...(19): siRNA sense strand
cgacagagacaauaagcaa

SEQ ID NO: 1332054 - RNA, 19 nt, Homo sapiens
  misc_RNA (1)...(19): siRNA sense strand
ugacagcaauggaaacagu

SEQ ID NO: 1332055 - RNA, 19 nt, Homo sapiens
  misc_RNA (1)...(19): siRNA sense strand
ggaugaagacugcccaaug

SEQ ID NO: 1332056 - RNA, 19 nt, Homo sapiens
  misc_RNA (1)...(19): siRNA sense strand
gaagaagagccuuuaucug

SEQ ID NO: 1332057 - RNA, 19 nt, Homo sapiens
  misc_RNA (1)...(19): siRNA sense strand
gcagauccuucagcaacaa

SEQ ID NO: 1332058 - RNA, 19 nt, Homo sapiens
  misc_RNA (1)...(19): siRNA sense strand
gaaguccaaccuuaguaaa

SEQ ID NO: 1332059 - RNA, 19 nt, Homo sapiens
  misc_RNA (1)...(19): siRNA sense strand
ucagacaaauacaacauuc

SEQ ID NO: 1332060 - RNA, 19 nt, Homo sapiens
  misc_RNA (1)...(19): siRNA sense strand
gcaacagcauccuggaaag

SEQ ID NO: 1332061 - RNA, 19 nt, Homo sapiens
  misc_RNA (1)...(19): siRNA sense strand
gaauggacagucuucaguu

SEQ ID NO: 1332062 - RNA, 19 nt, Homo sapiens
  misc_RNA (1)...(19): siRNA sense strand
uaaaucuggugucuagugu

SEQ ID NO: 1332063 - RNA, 19 nt, Homo sapiens
  misc_RNA (1)...(19): siRNA sense strand
ggugcaacaguuagaaaua

SEQ ID NO: 1332064 - RNA, 19 nt, Homo sapiens
  misc_RNA (1)...(19): siRNA sense strand
uaagagcagugauaaacag

SEQ ID NO: 1332065 - RNA, 19 nt, Homo sapiens
  misc_RNA (1)...(19): siRNA sense strand
agagagcaguuuaccuuug

SEQ ID NO: 1332066 - RNA, 19 nt, Homo sapiens
  misc_RNA (1)...(19): siRNA sense strand
gaaguaagcacaguagaac

SEQ ID NO: 1332067 - RNA, 19 nt, Homo sapiens
  misc_RNA (1)...(19): siRNA sense strand
gaagacgacagagagauug

SEQ ID NO: 1332068 - RNA, 19 nt, Homo sapiens
  misc_RNA (1)...(19): siRNA sense strand
aauccuggacugauaaaua

SEQ ID NO: 1332069 - RNA, 19 nt, Homo sapiens
  misc_RNA (1)...(19): siRNA sense strand
aaguaauccuggacugaua

SEQ ID NO: 1332070 - RNA, 19 nt, Homo sapiens
  misc_RNA (1)...(19): siRNA sense strand
ugacaccagcucugaagua

SEQ ID NO: 1332071 - RNA, 19 nt, Homo sapiens
  misc_RNA (1)...(19): siRNA sense strand
gcuacaagcccuucuccaa

SEQ ID NO: 1332072 - RNA, 19 nt, Homo sapiens
  misc_RNA (1)...(19): siRNA sense strand
gaacgucuucaagcaauga

SEQ ID NO: 1332073 - RNA, 19 nt, Homo sapiens
  misc_RNA (1)...(19): siRNA sense strand
auccuggacugauaaauaa

SEQ ID NO: 1332074 - RNA, 19 nt, Homo sapiens
  misc_RNA (1)...(19): siRNA sense strand
gagagcaguuuaccuuugc

SEQ ID NO: 1332075 - RNA, 19 nt, Homo sapiens
  misc_RNA (1)...(19): siRNA sense strand
gcagcaaacaaguggauug

SEQ ID NO: 1332076 - RNA, 19 nt, Homo sapiens
  misc_RNA (1)...(19): siRNA sense strand
gauugaagaagagccuuua

SEQ ID NO: 1332077 - RNA, 19 nt, Homo sapiens
  misc_RNA (1)...(19): siRNA sense strand
gcuaaucacaguccagaau

SEQ ID NO: 1332078 - RNA, 19 nt, Homo sapiens
  misc_RNA (1)...(19): siRNA sense strand
ugucagaccuccauuuacu

SEQ ID NO: 1332079 - RNA, 19 nt, Homo sapiens
  misc_RNA (1)...(19): siRNA sense strand
gugaaagcauuugugaaga

SEQ ID NO: 1332080 - RNA, 19 nt, Homo sapiens
  misc_RNA (1)...(19): siRNA sense strand
cuuaaguccugcugagauu

SEQ ID NO: 1332081 - RNA, 19 nt, Homo sapiens
  misc_RNA (1)...(19): siRNA sense strand
ugaaguaagcacaguagaa

SEQ ID NO: 1332082 - RNA, 19 nt, Homo sapiens
  misc_RNA (1)...(19): siRNA sense strand
caaacaaguggauugaaau

SEQ ID NO: 1332083 - RNA, 19 nt, Homo sapiens
  misc_RNA (1)...(19): siRNA sense strand
cagaagcgaaggucacaaa

SEQ ID NO: 1332084 - RNA, 19 nt, Homo sapiens
  misc_RNA (1)...(19): siRNA sense strand
gucaccaugucgaagaaua

SEQ ID NO: 1332085 - RNA, 19 nt, Homo sapiens
  misc_RNA (1)...(19): siRNA sense strand
gcccaaaccaucucccaaa

SEQ ID NO: 1332086 - RNA, 19 nt, Homo sapiens
  misc_RNA (1)...(19): siRNA sense strand
ucacaguccagaauuagaa

SEQ ID NO: 1332087 - RNA, 19 nt, Homo sapiens
  misc_RNA (1)...(19): siRNA sense strand
ugaagaagagccuuuaucu

SEQ ID NO: 1332088 - RNA, 19 nt, Homo sapiens
  misc_RNA (1)...(19): siRNA sense strand
agaauuagaagacgacaga

SEQ ID NO: 1332089 - RNA, 19 nt, Homo sapiens
  misc_RNA (1)...(19): siRNA sense strand
uacaagcccuucuccaaca

SEQ ID NO: 1332090 - RNA, 19 nt, Homo sapiens
  misc_RNA (1)...(19): siRNA sense strand
uuacacggacauuugcuua

SEQ ID NO: 1332091 - RNA, 19 nt, Homo sapiens
  misc_RNA (1)...(19): siRNA sense strand
gccaggcugugaaagcauu

SEQ ID NO: 1332092 - RNA, 19 nt, Homo sapiens
  misc_RNA (1)...(19): siRNA sense strand
ccaccaauaacucaucauu

SEQ ID NO: 1332093 - RNA, 19 nt, Homo sapiens
  misc_RNA (1)...(19): siRNA sense strand
gcaguuauggaaagaagug

SEQ ID NO: 1332094 - RNA, 19 nt, Homo sapiens
  misc_RNA (1)...(19): siRNA sense strand
agaaugcaguacgucauaa

SEQ ID NO: 1332095 - RNA, 19 nt, Homo sapiens
  misc_RNA (1)...(19): siRNA sense strand
caaaccaucucccaaaccu

SEQ ID NO: 1332096 - RNA, 19 nt, Homo sapiens
  misc_RNA (1)...(19): siRNA sense strand
gagacaauaagcaacaguu

SEQ ID NO: 1332097 - RNA, 19 nt, Homo sapiens
  misc_RNA (1)...(19): siRNA sense strand
gcugugaaagcauuuguga

SEQ ID NO: 1332098 - RNA, 19 nt, Homo sapiens
  misc_RNA (1)...(19): siRNA sense strand
gcagcaacaacaacaacaa

SEQ ID NO: 1332099 - RNA, 19 nt, Homo sapiens
  misc_RNA (1)...(19): siRNA sense strand
auaagcaacaguucaauga

SEQ ID NO: 1332100 - RNA, 19 nt, Homo sapiens
  misc_RNA (1)...(19): siRNA sense strand
gaagaaugcaguacgucau

SEQ ID NO: 1332101 - RNA, 19 nt, Homo sapiens
  misc_RNA (1)...(19): siRNA sense strand
agaccuccauuuacuuaug

SEQ ID NO: 1332102 - RNA, 19 nt, Homo sapiens
  misc_RNA (1)...(19): siRNA sense strand
gacaauaagcaacaguuca

SEQ ID NO: 1332103 - RNA, 19 nt, Homo sapiens
  misc_RNA (1)...(19): siRNA sense strand
caucagaaauugccccaaa

SEQ ID NO: 1332104 - RNA, 19 nt, Homo sapiens
  misc_RNA (1)...(19): siRNA sense strand
gaaggcgacauucagacaa

SEQ ID NO: 1332105 - RNA, 19 nt, Homo sapiens
  misc_RNA (1)...(19): siRNA sense strand
gugcaacaguuagaaauac

SEQ ID NO: 1332106 - RNA, 19 nt, Homo sapiens
  misc_RNA (1)...(19): siRNA sense strand
caaauggccaggcugugaa

SEQ ID NO: 1332107 - RNA, 19 nt, Homo sapiens
  misc_RNA (1)...(19): siRNA sense strand
uggacagucuucaguucua

SEQ ID NO: 1332108 - RNA, 19 nt, Homo sapiens
  misc_RNA (1)...(19): siRNA sense strand
acucaucauuccauaguga

SEQ ID NO: 1332109 - RNA, 19 nt, Homo sapiens
  misc_RNA (1)...(19): siRNA sense strand
uaacucaucauuccauagu

SEQ ID NO: 1332110 - RNA, 19 nt, Homo sapiens
  misc_RNA (1)...(19): siRNA sense strand
gcagcagcuucuccagaug

SEQ ID NO: 1332111 - RNA, 19 nt, Homo sapiens
  misc_RNA (1)...(19): siRNA sense strand
gaaauugccccaaacuaug

SEQ ID NO: 1332112 - RNA, 19 nt, Homo sapiens
  misc_RNA (1)...(19): siRNA sense strand
caauccacgucaaggaaga

SEQ ID NO: 1332113 - RNA, 19 nt, Homo sapiens
  misc_RNA (1)...(19): siRNA sense strand
caguuuaccuuugcuaagu

SEQ ID NO: 1332114 - RNA, 19 nt, Homo sapiens
  misc_RNA (1)...(19): siRNA sense strand
aaucuuagccugcacaagu

SEQ ID NO: 1332115 - RNA, 19 nt, Homo sapiens
  misc_RNA (1)...(19): siRNA sense strand
aagaaugcaguacgucaua

SEQ ID NO: 1332116 - RNA, 19 nt, Homo sapiens
  misc_RNA (1)...(19): siRNA sense strand
ccacagagcuuaccucaaa

SEQ ID NO: 1332117 - RNA, 19 nt, Homo sapiens
  misc_RNA (1)...(19): siRNA sense strand
uaaagcaccuuaacaauga

SEQ ID NO: 1332118 - RNA, 19 nt, Homo sapiens
  misc_RNA (1)...(19): siRNA sense strand
gacaggcaguuaacacuua

SEQ ID NO: 1332119 - RNA, 19 nt, Homo sapiens
  misc_RNA (1)...(19): siRNA sense strand
gaaauuuacagcugguuua

SEQ ID NO: 1332120 - RNA, 19 nt, Homo sapiens
  misc_RNA (1)...(19): siRNA sense strand
gaugaagacugcccaaugu

SEQ ID NO: 1332121 - RNA, 19 nt, Homo sapiens
  misc_RNA (1)...(19): siRNA sense strand
gaaagcauuugugaagauu

SEQ ID NO: 1332122 - RNA, 19 nt, Homo sapiens
  misc_RNA (1)...(19): siRNA sense strand
gcaguuacaucuucagcuu

SEQ ID NO: 1332123 - RNA, 19 nt, Homo sapiens
  misc_RNA (1)...(19): siRNA sense strand
acagagagauugaagaaga

SEQ ID NO: 1332124 - RNA, 19 nt, Homo sapiens
  misc_RNA (1)...(19): siRNA sense strand
gaugucagaccuccauuua

SEQ ID NO: 1332125 - RNA, 19 nt, Homo sapiens
  misc_RNA (1)...(19): siRNA sense strand
ggcuagaccucacuacuaa

SEQ ID NO: 1332126 - RNA, 19 nt, Homo sapiens
  misc_RNA (1)...(19): siRNA sense strand
caaagcaucaccaccaaua

SEQ ID NO: 1332127 - RNA, 19 nt, Homo sapiens
  misc_RNA (1)...(19): siRNA sense strand
gcagagagcaguuuaccuu

SEQ ID NO: 1332128 - RNA, 19 nt, Homo sapiens
  misc_RNA (1)...(19): siRNA sense strand
aagaagagccuuuaucuga

SEQ ID NO: 1332129 - RNA, 19 nt, Homo sapiens
  misc_RNA (1)...(19): siRNA sense strand
gcaguacgucauaaucuua

SEQ ID NO: 1332130 - RNA, 19 nt, Homo sapiens
  misc_RNA (1)...(19): siRNA sense strand
gaagagccuuuaucugaag

SEQ ID NO: 1332131 - RNA, 19 nt, Homo sapiens
  misc_RNA (1)...(19): siRNA sense strand
gacaacagcuaaucacagu

SEQ ID NO: 1332132 - RNA, 19 nt, Homo sapiens
  misc_RNA (1)...(19): siRNA sense strand
ggacagucuucaguucuaa

SEQ ID NO: 1332133 - RNA, 19 nt, Homo sapiens
  misc_RNA (1)...(19): siRNA sense strand
ggaaguccaaccuuaguaa

SEQ ID NO: 1332134 - RNA, 19 nt, Homo sapiens
  misc_RNA (1)...(19): siRNA sense strand
gcaaauggccaggcuguga

SEQ ID NO: 1332135 - RNA, 19 nt, Homo sapiens
  misc_RNA (1)...(19): siRNA sense strand
gcagguggugcaacaguua

SEQ ID NO: 1332136 - RNA, 19 nt, Homo sapiens
  misc_RNA (1)...(19): siRNA sense strand
cgacagagagauugaagaa

SEQ ID NO: 1332137 - RNA, 19 nt, Homo sapiens
  misc_RNA (1)...(19): siRNA sense strand
gaaagaagugacuggaguu

SEQ ID NO: 1332138 - RNA, 19 nt, Homo sapiens
  misc_RNA (1)...(19): siRNA sense strand
gaaacagcaagagcaguua

SEQ ID NO: 1332139 - RNA, 19 nt, Homo sapiens
  misc_RNA (1)...(19): siRNA sense strand
agaagagccuuuaucugaa

SEQ ID NO: 1332140 - RNA, 19 nt, Homo sapiens
  misc_RNA (1)...(19): siRNA sense strand
caaggaagagccagugauu

SEQ ID NO: 1332141 - RNA, 19 nt, Homo sapiens
  misc_RNA (1)...(19): siRNA sense strand
aacaggaaguccaaccuua

SEQ ID NO: 1332142 - RNA, 19 nt, Homo sapiens
  misc_RNA (1)...(19): siRNA sense strand
gcagcaacuuggaagaaug

SEQ ID NO: 1332143 - RNA, 19 nt, Homo sapiens
  misc_RNA (1)...(19): siRNA sense strand
ugaaagcauuugugaagau

SEQ ID NO: 1332144 - RNA, 19 nt, Homo sapiens
  misc_RNA (1)...(19): siRNA sense strand
gggcuagaccucacuacua

SEQ ID NO: 1332145 - RNA, 19 nt, Homo sapiens
  misc_RNA (1)...(19): siRNA sense strand
gacuguggaugaaguagaa

SEQ ID NO: 1332146 - RNA, 19 nt, Homo sapiens
  misc_RNA (1)...(19): siRNA sense strand
gcgaacgucuucaagcaau

SEQ ID NO: 1332147 - RNA, 19 nt, Homo sapiens
  misc_RNA (1)...(19): siRNA sense strand
ucagaccuccauuuacuua

SEQ ID NO: 1332148 - RNA, 19 nt, Homo sapiens
  misc_RNA (1)...(19): siRNA sense strand
ugacagcaauggaaacagu

SEQ ID NO: 1332149 - RNA, 19 nt, Homo sapiens
  misc_RNA (1)...(19): siRNA sense strand
ggaugaagacugcccaaug

SEQ ID NO: 1332150 - RNA, 19 nt, Homo sapiens
  misc_RNA (1)...(19): siRNA sense strand
gaagaagagccuuuaucug

SEQ ID NO: 1332151 - RNA, 19 nt, Homo sapiens
  misc_RNA (1)...(19): siRNA sense strand
gcaacagcauccuggaaag

SEQ ID NO: 1332152 - RNA, 19 nt, Homo sapiens
  misc_RNA (1)...(19): siRNA sense strand
gaaguccaaccuuaguaaa

SEQ ID NO: 1332153 - RNA, 19 nt, Homo sapiens
  misc_RNA (1)...(19): siRNA sense strand
ucagacaaauacaacauuc

SEQ ID NO: 1332154 - RNA, 19 nt, Homo sapiens
  misc_RNA (1)...(19): siRNA sense strand
gcagauccuucagcaacaa

SEQ ID NO: 1332155 - RNA, 19 nt, Homo sapiens
  misc_RNA (1)...(19): siRNA sense strand
gaauggacagucuucaguu

SEQ ID NO: 1332156 - RNA, 19 nt, Homo sapiens
  misc_RNA (1)...(19): siRNA sense strand
uaaaucuggugucuagugu

SEQ ID NO: 1332157 - RNA, 19 nt, Homo sapiens
  misc_RNA (1)...(19): siRNA sense strand
ggugcaacaguuagaaaua

SEQ ID NO: 1332158 - RNA, 19 nt, Homo sapiens
  misc_RNA (1)...(19): siRNA sense strand
agagagcaguuuaccuuug

SEQ ID NO: 1332159 - RNA, 19 nt, Homo sapiens
  misc_RNA (1)...(19): siRNA sense strand
gcuacaagcccuucuccaa

SEQ ID NO: 1332160 - RNA, 19 nt, Homo sapiens
  misc_RNA (1)...(19): siRNA sense strand
gaagacgacagagagauug

SEQ ID NO: 1332161 - RNA, 19 nt, Homo sapiens
  misc_RNA (1)...(19): siRNA sense strand
aauccuggacugauaaaua

SEQ ID NO: 1332162 - RNA, 19 nt, Homo sapiens
  misc_RNA (1)...(19): siRNA sense strand
aaguaauccuggacugaua

SEQ ID NO: 1332163 - RNA, 19 nt, Homo sapiens
  misc_RNA (1)...(19): siRNA sense strand
gaacgucuucaagcaauga

SEQ ID NO: 1332164 - RNA, 19 nt, Homo sapiens
  misc_RNA (1)...(19): siRNA sense strand
auccuggacugauaaauaa

SEQ ID NO: 1332165 - RNA, 19 nt, Homo sapiens
  misc_RNA (1)...(19): siRNA sense strand
gagagcaguuuaccuuugc

SEQ ID NO: 1332166 - RNA, 19 nt, Homo sapiens
  misc_RNA (1)...(19): siRNA sense strand
cuuaaguccugcugagauu

SEQ ID NO: 1332167 - RNA, 19 nt, Homo sapiens
  misc_RNA (1)...(19): siRNA sense strand
gauugaagaagagccuuua

SEQ ID NO: 1332168 - RNA, 19 nt, Homo sapiens
  misc_RNA (1)...(19): siRNA sense strand
gcuaaucacaguccagaau

SEQ ID NO: 1332169 - RNA, 19 nt, Homo sapiens
  misc_RNA (1)...(19): siRNA sense strand
ugucagaccuccauuuacu

SEQ ID NO: 1332170 - RNA, 19 nt, Homo sapiens
  misc_RNA (1)...(19): siRNA sense strand
gugaaagcauuugugaaga

SEQ ID NO: 1332171 - RNA, 19 nt, Homo sapiens
  misc_RNA (1)...(19): siRNA sense strand
gcccaaaccaucucccaaa

SEQ ID NO: 1332172 - RNA, 19 nt, Homo sapiens
  misc_RNA (1)...(19): siRNA sense strand
cagaagcgaaggucacaaa

SEQ ID NO: 1332173 - RNA, 19 nt, Homo sapiens
  misc_RNA (1)...(19): siRNA sense strand
gucaccaugucgaagaaua

SEQ ID NO: 1332174 - RNA, 19 nt, Homo sapiens
  misc_RNA (1)...(19): siRNA sense strand
ucacaguccagaauuagaa

SEQ ID NO: 1332175 - RNA, 19 nt, Homo sapiens
  misc_RNA (1)...(19): siRNA sense strand
ugaagaagagccuuuaucu

SEQ ID NO: 1332176 - RNA, 19 nt, Homo sapiens
  misc_RNA (1)...(19): siRNA sense strand
agaauuagaagacgacaga

SEQ ID NO: 1332177 - RNA, 19 nt, Homo sapiens
  misc_RNA (1)...(19): siRNA sense strand
ccaccaauaacucaucauu

SEQ ID NO: 1332178 - RNA, 19 nt, Homo sapiens
  misc_RNA (1)...(19): siRNA sense strand
uacaagcccuucuccaaca

SEQ ID NO: 1332179 - RNA, 19 nt, Homo sapiens
  misc_RNA (1)...(19): siRNA sense strand
uuacacggacauuugcuua

SEQ ID NO: 1332180 - RNA, 19 nt, Homo sapiens
  misc_RNA (1)...(19): siRNA sense strand
gccaggcugugaaagcauu

SEQ ID NO: 1332181 - RNA, 19 nt, Homo sapiens
  misc_RNA (1)...(19): siRNA sense strand
gcaguuauggaaagaagug

SEQ ID NO: 1332182 - RNA, 19 nt, Homo sapiens
  misc_RNA (1)...(19): siRNA sense strand
agaaugcaguacgucauaa

SEQ ID NO: 1332183 - RNA, 19 nt, Homo sapiens
  misc_RNA (1)...(19): siRNA sense strand
caaaccaucucccaaaccu

SEQ ID NO: 1332184 - RNA, 19 nt, Homo sapiens
  misc_RNA (1)...(19): siRNA sense strand
gcugugaaagcauuuguga

SEQ ID NO: 1332185 - RNA, 19 nt, Homo sapiens
  misc_RNA (1)...(19): siRNA sense strand
gcagcaacaacaacaacaa

SEQ ID NO: 1332186 - RNA, 19 nt, Homo sapiens
  misc_RNA (1)...(19): siRNA sense strand
gaagaaugcaguacgucau

SEQ ID NO: 1332187 - RNA, 19 nt, Homo sapiens
  misc_RNA (1)...(19): siRNA sense strand
agaccuccauuuacuuaug

SEQ ID NO: 1332188 - RNA, 19 nt, Homo sapiens
  misc_RNA (1)...(19): siRNA sense strand
caucagaaauugccccaaa

SEQ ID NO: 1332189 - RNA, 19 nt, Homo sapiens
  misc_RNA (1)...(19): siRNA sense strand
gaaggcgacauucagacaa

SEQ ID NO: 1332190 - RNA, 19 nt, Homo sapiens
  misc_RNA (1)...(19): siRNA sense strand
gugcaacaguuagaaauac

SEQ ID NO: 1332191 - RNA, 19 nt, Homo sapiens
  misc_RNA (1)...(19): siRNA sense strand
caaauggccaggcugugaa

SEQ ID NO: 1332192 - RNA, 19 nt, Homo sapiens
  misc_RNA (1)...(19): siRNA sense strand
uggacagucuucaguucua

SEQ ID NO: 1332193 - RNA, 19 nt, Homo sapiens
  misc_RNA (1)...(19): siRNA sense strand
acucaucauuccauaguga

SEQ ID NO: 1332194 - RNA, 19 nt, Homo sapiens
  misc_RNA (1)...(19): siRNA sense strand
uaacucaucauuccauagu

SEQ ID NO: 1332195 - RNA, 19 nt, Homo sapiens
  misc_RNA (1)...(19): siRNA sense strand
gcagcagcuucuccagaug

SEQ ID NO: 1332196 - RNA, 19 nt, Homo sapiens
  misc_RNA (1)...(19): siRNA sense strand
aacaauuccuccucgacua

SEQ ID NO: 1332197 - RNA, 19 nt, Homo sapiens
  misc_RNA (1)...(19): siRNA sense strand
caauccacgucaaggaaga

SEQ ID NO: 1332198 - RNA, 19 nt, Homo sapiens
  misc_RNA (1)...(19): siRNA sense strand
caguuuaccuuugcuaagu

SEQ ID NO: 1332199 - RNA, 19 nt, Homo sapiens
  misc_RNA (1)...(19): siRNA sense strand
aaucuuagccugcacaagu

SEQ ID NO: 1332200 - RNA, 19 nt, Homo sapiens
  misc_RNA (1)...(19): siRNA sense strand
aagaaugcaguacgucaua

SEQ ID NO: 1332201 - RNA, 19 nt, Homo sapiens
  misc_RNA (1)...(19): siRNA sense strand
gaaauugccccaaacuaug

SEQ ID NO: 1332202 - RNA, 19 nt, Homo sapiens
  misc_RNA (1)...(19): siRNA sense strand
gaacgcgaacgucuucaag

SEQ ID NO: 1332203 - RNA, 19 nt, Homo sapiens
  misc_RNA (1)...(19): siRNA sense strand
cauagugaauggacagucu

SEQ ID NO: 1332204 - RNA, 19 nt, Homo sapiens
  misc_RNA (1)...(19): siRNA sense strand
agaccucacuacuaacaau

SEQ ID NO: 1332205 - RNA, 19 nt, Homo sapiens
  misc_RNA (1)...(19): siRNA sense strand
agaaacagcaagagcaguu

SEQ ID NO: 1332206 - RNA, 19 nt, Homo sapiens
  misc_RNA (1)...(19): siRNA sense strand
ccacgaagaccucaauggu

SEQ ID NO: 1332207 - RNA, 19 nt, Homo sapiens
  misc_RNA (1)...(19): siRNA sense strand
ugaaguagaauaccagaag

SEQ ID NO: 1332208 - RNA, 19 nt, Homo sapiens
  misc_RNA (1)...(19): siRNA sense strand
cagcaguuauggaaagaag

SEQ ID NO: 1332209 - RNA, 19 nt, Homo sapiens
  misc_RNA (1)...(19): siRNA sense strand
ggacugauaaauaaugcau

SEQ ID NO: 1332210 - RNA, 19 nt, Homo sapiens
  misc_RNA (1)...(19): siRNA sense strand
guaaugcagcaacuuggaa

SEQ ID NO: 1332211 - RNA, 19 nt, Homo sapiens
  misc_RNA (1)...(19): siRNA sense strand
aaggcgacauucagacaaa

SEQ ID NO: 1332212 - RNA, 19 nt, Homo sapiens
  misc_RNA (1)...(19): siRNA sense strand
aaucuggugucuaguguca

SEQ ID NO: 1332213 - RNA, 19 nt, Homo sapiens
  misc_RNA (1)...(19): siRNA sense strand
gccauggaguuugcaaaug

SEQ ID NO: 1332214 - RNA, 19 nt, Homo sapiens
  misc_RNA (1)...(19): siRNA sense strand
gcgaaggucacaaaagaua

SEQ ID NO: 1332215 - RNA, 19 nt, Homo sapiens
  misc_RNA (1)...(19): siRNA sense strand
uaacaggaaguccaaccuu

SEQ ID NO: 1332216 - RNA, 19 nt, Homo sapiens
  misc_RNA (1)...(19): siRNA sense strand
ccacagagcuuaccucaaa

SEQ ID NO: 1332217 - RNA, 19 nt, Homo sapiens
  misc_RNA (1)...(19): siRNA sense strand
uaaagcaccuuaacaauga

SEQ ID NO: 1332218 - RNA, 19 nt, Homo sapiens
  misc_RNA (1)...(19): siRNA sense strand
gacaggcaguuaacacuua

SEQ ID NO: 1332219 - RNA, 19 nt, Homo sapiens
  misc_RNA (1)...(19): siRNA sense strand
gaaauuuacagcugguuua

SEQ ID NO: 1332220 - RNA, 19 nt, Homo sapiens
  misc_RNA (1)...(19): siRNA sense strand
gaugaagacugcccaaugu

SEQ ID NO: 1332221 - RNA, 19 nt, Homo sapiens
  misc_RNA (1)...(19): siRNA sense strand
gaaagcauuugugaagauu

SEQ ID NO: 1332222 - RNA, 19 nt, Homo sapiens
  misc_RNA (1)...(19): siRNA sense strand
gcaguuacaucuucagcuu

SEQ ID NO: 1332223 - RNA, 19 nt, Homo sapiens
  misc_RNA (1)...(19): siRNA sense strand
acagagagauugaagaaga

SEQ ID NO: 1332224 - RNA, 19 nt, Homo sapiens
  misc_RNA (1)...(19): siRNA sense strand
gaugucagaccuccauuua

SEQ ID NO: 1332225 - RNA, 19 nt, Homo sapiens
  misc_RNA (1)...(19): siRNA sense strand
ggcuagaccucacuacuaa

SEQ ID NO: 1332226 - RNA, 19 nt, Homo sapiens
  misc_RNA (1)...(19): siRNA sense strand
caaagcaucaccaccaaua

SEQ ID NO: 1332227 - RNA, 19 nt, Homo sapiens
  misc_RNA (1)...(19): siRNA sense strand
gcagagagcaguuuaccuu

SEQ ID NO: 1332228 - RNA, 19 nt, Homo sapiens
  misc_RNA (1)...(19): siRNA sense strand
aagaagagccuuuaucuga

SEQ ID NO: 1332229 - RNA, 19 nt, Homo sapiens
  misc_RNA (1)...(19): siRNA sense strand
gcaguacgucauaaucuua

SEQ ID NO: 1332230 - RNA, 19 nt, Homo sapiens
  misc_RNA (1)...(19): siRNA sense strand
gaagagccuuuaucugaag

SEQ ID NO: 1332231 - RNA, 19 nt, Homo sapiens
  misc_RNA (1)...(19): siRNA sense strand
gacaacagcuaaucacagu

SEQ ID NO: 1332232 - RNA, 19 nt, Homo sapiens
  misc_RNA (1)...(19): siRNA sense strand
ggacagucuucaguucuaa

SEQ ID NO: 1332233 - RNA, 19 nt, Homo sapiens
  misc_RNA (1)...(19): siRNA sense strand
ggaaguccaaccuuaguaa

SEQ ID NO: 1332234 - RNA, 19 nt, Homo sapiens
  misc_RNA (1)...(19): siRNA sense strand
gcaaauggccaggcuguga

SEQ ID NO: 1332235 - RNA, 19 nt, Homo sapiens
  misc_RNA (1)...(19): siRNA sense strand
gcagguggugcaacaguua

SEQ ID NO: 1332236 - RNA, 19 nt, Homo sapiens
  misc_RNA (1)...(19): siRNA sense strand
cgacagagagauugaagaa

SEQ ID NO: 1332237 - RNA, 19 nt, Homo sapiens
  misc_RNA (1)...(19): siRNA sense strand
gaaagaagugacuggaguu

SEQ ID NO: 1332238 - RNA, 19 nt, Homo sapiens
  misc_RNA (1)...(19): siRNA sense strand
gaaacagcaagagcaguua

SEQ ID NO: 1332239 - RNA, 19 nt, Homo sapiens
  misc_RNA (1)...(19): siRNA sense strand
agaagagccuuuaucugaa

SEQ ID NO: 1332240 - RNA, 19 nt, Homo sapiens
  misc_RNA (1)...(19): siRNA sense strand
caaggaagagccagugauu

SEQ ID NO: 1332241 - RNA, 19 nt, Homo sapiens
  misc_RNA (1)...(19): siRNA sense strand
aacaggaaguccaaccuua

SEQ ID NO: 1332242 - RNA, 19 nt, Homo sapiens
  misc_RNA (1)...(19): siRNA sense strand
gcagcaacuuggaagaaug

SEQ ID NO: 1332243 - RNA, 19 nt, Homo sapiens
  misc_RNA (1)...(19): siRNA sense strand
ugaaagcauuugugaagau

SEQ ID NO: 1332244 - RNA, 19 nt, Homo sapiens
  misc_RNA (1)...(19): siRNA sense strand
gggcuagaccucacuacua

SEQ ID NO: 1332245 - RNA, 19 nt, Homo sapiens
  misc_RNA (1)...(19): siRNA sense strand
gacuguggaugaaguagaa

SEQ ID NO: 1332246 - RNA, 19 nt, Homo sapiens
  misc_RNA (1)...(19): siRNA sense strand
gcgaacgucuucaagcaau

SEQ ID NO: 1332247 - RNA, 19 nt, Homo sapiens
  misc_RNA (1)...(19): siRNA sense strand
ucagaccuccauuuacuua

SEQ ID NO: 1332248 - RNA, 19 nt, Homo sapiens
  misc_RNA (1)...(19): siRNA sense strand
ugacagcaauggaaacagu

SEQ ID NO: 1332249 - RNA, 19 nt, Homo sapiens
  misc_RNA (1)...(19): siRNA sense strand
ggaugaagacugcccaaug

SEQ ID NO: 1332250 - RNA, 19 nt, Homo sapiens
  misc_RNA (1)...(19): siRNA sense strand
gaagaagagccuuuaucug

SEQ ID NO: 1332251 - RNA, 19 nt, Homo sapiens
  misc_RNA (1)...(19): siRNA sense strand
gcaacagcauccuggaaag

SEQ ID NO: 1332252 - RNA, 19 nt, Homo sapiens
  misc_RNA (1)...(19): siRNA sense strand
gaaguccaaccuuaguaaa

SEQ ID NO: 1332253 - RNA, 19 nt, Homo sapiens
  misc_RNA (1)...(19): siRNA sense strand
ucagacaaauacaacauuc

SEQ ID NO: 1332254 - RNA, 19 nt, Homo sapiens
  misc_RNA (1)...(19): siRNA sense strand
gcagauccuucagcaacaa

SEQ ID NO: 1332255 - RNA, 19 nt, Homo sapiens
  misc_RNA (1)...(19): siRNA sense strand
gaauggacagucuucaguu

SEQ ID NO: 1332256 - RNA, 19 nt, Homo sapiens
  misc_RNA (1)...(19): siRNA sense strand
uaaaucuggugucuagugu

SEQ ID NO: 1332257 - RNA, 19 nt, Homo sapiens
  misc_RNA (1)...(19): siRNA sense strand
ggugcaacaguuagaaaua

SEQ ID NO: 1332258 - RNA, 19 nt, Homo sapiens
  misc_RNA (1)...(19): siRNA sense strand
agagagcaguuuaccuuug

SEQ ID NO: 1332259 - RNA, 19 nt, Homo sapiens
  misc_RNA (1)...(19): siRNA sense strand
gcuacaagcccuucuccaa

SEQ ID NO: 1332260 - RNA, 19 nt, Homo sapiens
  misc_RNA (1)...(19): siRNA sense strand
gaagacgacagagagauug

SEQ ID NO: 1332261 - RNA, 19 nt, Homo sapiens
  misc_RNA (1)...(19): siRNA sense strand
aauccuggacugauaaaua

SEQ ID NO: 1332262 - RNA, 19 nt, Homo sapiens
  misc_RNA (1)...(19): siRNA sense strand
aaguaauccuggacugaua

SEQ ID NO: 1332263 - RNA, 19 nt, Homo sapiens
  misc_RNA (1)...(19): siRNA sense strand
gaacgucuucaagcaauga

SEQ ID NO: 1332264 - RNA, 19 nt, Homo sapiens
  misc_RNA (1)...(19): siRNA sense strand
auccuggacugauaaauaa

SEQ ID NO: 1332265 - RNA, 19 nt, Homo sapiens
  misc_RNA (1)...(19): siRNA sense strand
gagagcaguuuaccuuugc

SEQ ID NO: 1332266 - RNA, 19 nt, Homo sapiens
  misc_RNA (1)...(19): siRNA sense strand
cuuaaguccugcugagauu

SEQ ID NO: 1332267 - RNA, 19 nt, Homo sapiens
  misc_RNA (1)...(19): siRNA sense strand
gauugaagaagagccuuua

SEQ ID NO: 1332268 - RNA, 19 nt, Homo sapiens
  misc_RNA (1)...(19): siRNA sense strand
gcuaaucacaguccagaau

SEQ ID NO: 1332269 - RNA, 19 nt, Homo sapiens
  misc_RNA (1)...(19): siRNA sense strand
ugucagaccuccauuuacu

SEQ ID NO: 1332270 - RNA, 19 nt, Homo sapiens
  misc_RNA (1)...(19): siRNA sense strand
gugaaagcauuugugaaga

SEQ ID NO: 1332271 - RNA, 19 nt, Homo sapiens
  misc_RNA (1)...(19): siRNA sense strand
gcccaaaccaucucccaaa

SEQ ID NO: 1332272 - RNA, 19 nt, Homo sapiens
  misc_RNA (1)...(19): siRNA sense strand
cagaagcgaaggucacaaa

SEQ ID NO: 1332273 - RNA, 19 nt, Homo sapiens
  misc_RNA (1)...(19): siRNA sense strand
gucaccaugucgaagaaua

SEQ ID NO: 1332274 - RNA, 19 nt, Homo sapiens
  misc_RNA (1)...(19): siRNA sense strand
ucacaguccagaauuagaa

SEQ ID NO: 1332275 - RNA, 19 nt, Homo sapiens
  misc_RNA (1)...(19): siRNA sense strand
ugaagaagagccuuuaucu

SEQ ID NO: 1332276 - RNA, 19 nt, Homo sapiens
  misc_RNA (1)...(19): siRNA sense strand
agaauuagaagacgacaga

SEQ ID NO: 1332277 - RNA, 19 nt, Homo sapiens
  misc_RNA (1)...(19): siRNA sense strand
ccaccaauaacucaucauu

SEQ ID NO: 1332278 - RNA, 19 nt, Homo sapiens
  misc_RNA (1)...(19): siRNA sense strand
uacaagcccuucuccaaca

SEQ ID NO: 1332279 - RNA, 19 nt, Homo sapiens
  misc_RNA (1)...(19): siRNA sense strand
uuacacggacauuugcuua

SEQ ID NO: 1332280 - RNA, 19 nt, Homo sapiens
  misc_RNA (1)...(19): siRNA sense strand
gccaggcugugaaagcauu

SEQ ID NO: 1332281 - RNA, 19 nt, Homo sapiens
  misc_RNA (1)...(19): siRNA sense strand
gcaguuauggaaagaagug

SEQ ID NO: 1332282 - RNA, 19 nt, Homo sapiens
  misc_RNA (1)...(19): siRNA sense strand
agaaugcaguacgucauaa

SEQ ID NO: 1332283 - RNA, 19 nt, Homo sapiens
  misc_RNA (1)...(19): siRNA sense strand
caaaccaucucccaaaccu

SEQ ID NO: 1332284 - RNA, 19 nt, Homo sapiens
  misc_RNA (1)...(19): siRNA sense strand
gcugugaaagcauuuguga

SEQ ID NO: 1332285 - RNA, 19 nt, Homo sapiens
  misc_RNA (1)...(19): siRNA sense strand
gcagcaacaacaacaacaa

SEQ ID NO: 1332286 - RNA, 19 nt, Homo sapiens
  misc_RNA (1)...(19): siRNA sense strand
gaagaaugcaguacgucau

SEQ ID NO: 1332287 - RNA, 19 nt, Homo sapiens
  misc_RNA (1)...(19): siRNA sense strand
agaccuccauuuacuuaug

SEQ ID NO: 1332288 - RNA, 19 nt, Homo sapiens
  misc_RNA (1)...(19): siRNA sense strand
caucagaaauugccccaaa

SEQ ID NO: 1332289 - RNA, 19 nt, Homo sapiens
  misc_RNA (1)...(19): siRNA sense strand
gaaggcgacauucagacaa

SEQ ID NO: 1332290 - RNA, 19 nt, Homo sapiens
  misc_RNA (1)...(19): siRNA sense strand
gugcaacaguuagaaauac

SEQ ID NO: 1332291 - RNA, 19 nt, Homo sapiens
  misc_RNA (1)...(19): siRNA sense strand
caaauggccaggcugugaa

SEQ ID NO: 1332292 - RNA, 19 nt, Homo sapiens
  misc_RNA (1)...(19): siRNA sense strand
uggacagucuucaguucua

SEQ ID NO: 1332293 - RNA, 19 nt, Homo sapiens
  misc_RNA (1)...(19): siRNA sense strand
acucaucauuccauaguga

SEQ ID NO: 1332294 - RNA, 19 nt, Homo sapiens
  misc_RNA (1)...(19): siRNA sense strand
uaacucaucauuccauagu

SEQ ID NO: 1332295 - RNA, 19 nt, Homo sapiens
  misc_RNA (1)...(19): siRNA sense strand
gcagcagcuucuccagaug

SEQ ID NO: 1332296 - RNA, 19 nt, Homo sapiens
  misc_RNA (1)...(19): siRNA sense strand
aacaauuccuccucgacua

SEQ ID NO: 1332297 - RNA, 19 nt, Homo sapiens
  misc_RNA (1)...(19): siRNA sense strand
caauccacgucaaggaaga

SEQ ID NO: 1332298 - RNA, 19 nt, Homo sapiens
  misc_RNA (1)...(19): siRNA sense strand
caguuuaccuuugcuaagu

SEQ ID NO: 1332299 - RNA, 19 nt, Homo sapiens
  misc_RNA (1)...(19): siRNA sense strand
aaucuuagccugcacaagu

SEQ ID NO: 1332300 - RNA, 19 nt, Homo sapiens
  misc_RNA (1)...(19): siRNA sense strand
aagaaugcaguacgucaua

SEQ ID NO: 1332301 - RNA, 19 nt, Homo sapiens
  misc_RNA (1)...(19): siRNA sense strand
gaaauugccccaaacuaug

SEQ ID NO: 1332302 - RNA, 19 nt, Homo sapiens
  misc_RNA (1)...(19): siRNA sense strand
gaacgcgaacgucuucaag

SEQ ID NO: 1332303 - RNA, 19 nt, Homo sapiens
  misc_RNA (1)...(19): siRNA sense strand
cauagugaauggacagucu

SEQ ID NO: 1332304 - RNA, 19 nt, Homo sapiens
  misc_RNA (1)...(19): siRNA sense strand
agaccucacuacuaacaau

SEQ ID NO: 1332305 - RNA, 19 nt, Homo sapiens
  misc_RNA (1)...(19): siRNA sense strand
agaaacagcaagagcaguu

SEQ ID NO: 1332306 - RNA, 19 nt, Homo sapiens
  misc_RNA (1)...(19): siRNA sense strand
ccacgaagaccucaauggu

SEQ ID NO: 1332307 - RNA, 19 nt, Homo sapiens
  misc_RNA (1)...(19): siRNA sense strand
ugaaguagaauaccagaag

SEQ ID NO: 1332308 - RNA, 19 nt, Homo sapiens
  misc_RNA (1)...(19): siRNA sense strand
cagcaguuauggaaagaag

SEQ ID NO: 1332309 - RNA, 19 nt, Homo sapiens
  misc_RNA (1)...(19): siRNA sense strand
ggacugauaaauaaugcau

SEQ ID NO: 1332310 - RNA, 19 nt, Homo sapiens
  misc_RNA (1)...(19): siRNA sense strand
guaaugcagcaacuuggaa

SEQ ID NO: 1332311 - RNA, 19 nt, Homo sapiens
  misc_RNA (1)...(19): siRNA sense strand
aaggcgacauucagacaaa

SEQ ID NO: 1332312 - RNA, 19 nt, Homo sapiens
  misc_RNA (1)...(19): siRNA sense strand
aaucuggugucuaguguca

SEQ ID NO: 1332313 - RNA, 19 nt, Homo sapiens
  misc_RNA (1)...(19): siRNA sense strand
gccauggaguuugcaaaug

SEQ ID NO: 1332314 - RNA, 19 nt, Homo sapiens
  misc_RNA (1)...(19): siRNA sense strand
gcgaaggucacaaaagaua

SEQ ID NO: 1332315 - RNA, 19 nt, Homo sapiens
  misc_RNA (1)...(19): siRNA sense strand
uaacaggaaguccaaccuu

SEQ ID NO: 1332316 - RNA, 19 nt, Homo sapiens
  misc_RNA (1)...(19): siRNA sense strand
gcuuagagcaagugaggaa

SEQ ID NO: 1332317 - RNA, 19 nt, Homo sapiens
  misc_RNA (1)...(19): siRNA sense strand
ggcagcagauggaagaacu

SEQ ID NO: 1332318 - RNA, 19 nt, Homo sapiens
  misc_RNA (1)...(19): siRNA sense strand
gauggaagaacugggaaug

SEQ ID NO: 1332319 - RNA, 19 nt, Homo sapiens
  misc_RNA (1)...(19): siRNA sense strand
ggccuucgccucugcuuuc

SEQ ID NO: 1332320 - RNA, 19 nt, Homo sapiens
  misc_RNA (1)...(19): siRNA sense strand
ccucccaucugcagagcuu

SEQ ID NO: 1332321 - RNA, 19 nt, Homo sapiens
  misc_RNA (1)...(19): siRNA sense strand
uagagcaagugaggaagau

SEQ ID NO: 1332322 - RNA, 19 nt, Homo sapiens
  misc_RNA (1)...(19): siRNA sense strand
gcuuagagcaagugaggaa

SEQ ID NO: 1332323 - RNA, 19 nt, Homo sapiens
  misc_RNA (1)...(19): siRNA sense strand
ggcagcagauggaagaacu

SEQ ID NO: 1332324 - RNA, 19 nt, Homo sapiens
  misc_RNA (1)...(19): siRNA sense strand
gauggaagaacugggaaug

SEQ ID NO: 1332325 - RNA, 19 nt, Homo sapiens
  misc_RNA (1)...(19): siRNA sense strand
ggccuucgccucugcuuuc

SEQ ID NO: 1332326 - RNA, 19 nt, Homo sapiens
  misc_RNA (1)...(19): siRNA sense strand
ccucccaucugcagagcuu

SEQ ID NO: 1332327 - RNA, 19 nt, Homo sapiens
  misc_RNA (1)...(19): siRNA sense strand
uagagcaagugaggaagau

SEQ ID NO: 1332328 - RNA, 19 nt, Homo sapiens
  misc_RNA (1)...(19): siRNA sense strand
gcuuagagcaagugaggaa

SEQ ID NO: 1332329 - RNA, 19 nt, Homo sapiens
  misc_RNA (1)...(19): siRNA sense strand
ggcagcagauggaagaacu

SEQ ID NO: 1332330 - RNA, 19 nt, Homo sapiens
  misc_RNA (1)...(19): siRNA sense strand
gauggaagaacugggaaug

SEQ ID NO: 1332331 - RNA, 19 nt, Homo sapiens
  misc_RNA (1)...(19): siRNA sense strand
ggccuucgccucugcuuuc

SEQ ID NO: 1332332 - RNA, 19 nt, Homo sapiens
  misc_RNA (1)...(19): siRNA sense strand
ccucccaucugcagagcuu

SEQ ID NO: 1332333 - RNA, 19 nt, Homo sapiens
  misc_RNA (1)...(19): siRNA sense strand
uagagcaagugaggaagau

SEQ ID NO: 1332334 - RNA, 19 nt, Homo sapiens
  misc_RNA (1)...(19): siRNA sense strand
cagcuacccugaacaguaa

SEQ ID NO: 1332335 - RNA, 19 nt, Homo sapiens
  misc_RNA (1)...(19): siRNA sense strand
ccaacaaccuggugcacua

SEQ ID NO: 1332336 - RNA, 19 nt, Homo sapiens
  misc_RNA (1)...(19): siRNA sense strand
gcacuacucguccuucgaa

SEQ ID NO: 1332337 - RNA, 19 nt, Homo sapiens
  misc_RNA (1)...(19): siRNA sense strand
gugcaggugugguucaaga

SEQ ID NO: 1332338 - RNA, 19 nt, Homo sapiens
  misc_RNA (1)...(19): siRNA sense strand
auacccagcuggacacuga

SEQ ID NO: 1332339 - RNA, 19 nt, Homo sapiens
  misc_RNA (1)...(19): siRNA sense strand
gcagucagccagugaguca

SEQ ID NO: 1332340 - RNA, 19 nt, Homo sapiens
  misc_RNA (1)...(19): siRNA sense strand
gagcuucaccugagucugu

SEQ ID NO: 1332341 - RNA, 19 nt, Homo sapiens
  misc_RNA (1)...(19): siRNA sense strand
gugagaggcuggccaugug

SEQ ID NO: 1332342 - RNA, 19 nt, Homo sapiens
  misc_RNA (1)...(19): siRNA sense strand
aggaacagcuccagaagca

SEQ ID NO: 1332343 - RNA, 19 nt, Homo sapiens
  misc_RNA (1)...(19): siRNA sense strand
gaaggaacagcuccagaag

SEQ ID NO: 1332344 - RNA, 19 nt, Homo sapiens
  misc_RNA (1)...(19): siRNA sense strand
gggccaaguuccggaagaa

SEQ ID NO: 1332345 - RNA, 19 nt, Homo sapiens
  misc_RNA (1)...(19): siRNA sense strand
ucgauacgcugcccaacug

SEQ ID NO: 1332346 - RNA, 19 nt, Homo sapiens
  misc_RNA (1)...(19): siRNA sense strand
agaaggaacagcuccagaa

SEQ ID NO: 1332347 - RNA, 19 nt, Homo sapiens
  misc_RNA (1)...(19): siRNA sense strand
ccacaagcaucgagaaccu

SEQ ID NO: 1332348 - RNA, 19 nt, Homo sapiens
  misc_RNA (1)...(19): siRNA sense strand
gcaauuccgccagcacaug

SEQ ID NO: 1332349 - RNA, 19 nt, Homo sapiens
  misc_RNA (1)...(19): siRNA sense strand
gaagacucacuacccagau

SEQ ID NO: 1332350 - RNA, 19 nt, Homo sapiens
  misc_RNA (1)...(19): siRNA sense strand
cuacccagauguggugaug

SEQ ID NO: 1332351 - RNA, 19 nt, Homo sapiens
  misc_RNA (1)...(19): siRNA sense strand
gagucugucugagcaguca

SEQ ID NO: 1332352 - RNA, 19 nt, Homo sapiens
  misc_RNA (1)...(19): siRNA sense strand
aggccuggcuccugcauca

SEQ ID NO: 1332353 - RNA, 19 nt, Homo sapiens
  misc_RNA (1)...(19): siRNA sense strand
ucacucagcgccauguaca

SEQ ID NO: 1332354 - RNA, 19 nt, Homo sapiens
  misc_RNA (1)...(19): siRNA sense strand
aagacucacuacccagaug

SEQ ID NO: 1332355 - RNA, 19 nt, Homo sapiens
  misc_RNA (1)...(19): siRNA sense strand
cuaccggccuucagugcau

SEQ ID NO: 1332356 - RNA, 19 nt, Homo sapiens
  misc_RNA (1)...(19): siRNA sense strand
gauguggugaugcgugaga

SEQ ID NO: 1332357 - RNA, 19 nt, Homo sapiens
  misc_RNA (1)...(19): siRNA sense strand
caucuuggaggcccguuau

SEQ ID NO: 1332358 - RNA, 19 nt, Homo sapiens
  misc_RNA (1)...(19): siRNA sense strand
cagcuacccugaacaguaa

SEQ ID NO: 1332359 - RNA, 19 nt, Homo sapiens
  misc_RNA (1)...(19): siRNA sense strand
ccaacaaccuggugcacua

SEQ ID NO: 1332360 - RNA, 19 nt, Homo sapiens
  misc_RNA (1)...(19): siRNA sense strand
gcacuacucguccuucgaa

SEQ ID NO: 1332361 - RNA, 19 nt, Homo sapiens
  misc_RNA (1)...(19): siRNA sense strand
gugcaggugugguucaaga

SEQ ID NO: 1332362 - RNA, 19 nt, Homo sapiens
  misc_RNA (1)...(19): siRNA sense strand
auacccagcuggacacuga

SEQ ID NO: 1332363 - RNA, 19 nt, Homo sapiens
  misc_RNA (1)...(19): siRNA sense strand
gcagucagccagugaguca

SEQ ID NO: 1332364 - RNA, 19 nt, Homo sapiens
  misc_RNA (1)...(19): siRNA sense strand
gagcuucaccugagucugu

SEQ ID NO: 1332365 - RNA, 19 nt, Homo sapiens
  misc_RNA (1)...(19): siRNA sense strand
gugagaggcuggccaugug

SEQ ID NO: 1332366 - RNA, 19 nt, Homo sapiens
  misc_RNA (1)...(19): siRNA sense strand
aggaacagcuccagaagca

SEQ ID NO: 1332367 - RNA, 19 nt, Homo sapiens
  misc_RNA (1)...(19): siRNA sense strand
gaaggaacagcuccagaag

SEQ ID NO: 1332368 - RNA, 19 nt, Homo sapiens
  misc_RNA (1)...(19): siRNA sense strand
gggccaaguuccggaagaa

SEQ ID NO: 1332369 - RNA, 19 nt, Homo sapiens
  misc_RNA (1)...(19): siRNA sense strand
ucgauacgcugcccaacug

SEQ ID NO: 1332370 - RNA, 19 nt, Homo sapiens
  misc_RNA (1)...(19): siRNA sense strand
agaaggaacagcuccagaa

SEQ ID NO: 1332371 - RNA, 19 nt, Homo sapiens
  misc_RNA (1)...(19): siRNA sense strand
ccacaagcaucgagaaccu

SEQ ID NO: 1332372 - RNA, 19 nt, Homo sapiens
  misc_RNA (1)...(19): siRNA sense strand
gcaauuccgccagcacaug

SEQ ID NO: 1332373 - RNA, 19 nt, Homo sapiens
  misc_RNA (1)...(19): siRNA sense strand
gaagacucacuacccagau

SEQ ID NO: 1332374 - RNA, 19 nt, Homo sapiens
  misc_RNA (1)...(19): siRNA sense strand
cuacccagauguggugaug

SEQ ID NO: 1332375 - RNA, 19 nt, Homo sapiens
  misc_RNA (1)...(19): siRNA sense strand
gagucugucugagcaguca

SEQ ID NO: 1332376 - RNA, 19 nt, Homo sapiens
  misc_RNA (1)...(19): siRNA sense strand
aggccuggcuccugcauca

SEQ ID NO: 1332377 - RNA, 19 nt, Homo sapiens
  misc_RNA (1)...(19): siRNA sense strand
ucacucagcgccauguaca

SEQ ID NO: 1332378 - RNA, 19 nt, Homo sapiens
  misc_RNA (1)...(19): siRNA sense strand
aagacucacuacccagaug

SEQ ID NO: 1332379 - RNA, 19 nt, Homo sapiens
  misc_RNA (1)...(19): siRNA sense strand
cuaccggccuucagugcau

SEQ ID NO: 1332380 - RNA, 19 nt, Homo sapiens
  misc_RNA (1)...(19): siRNA sense strand
gauguggugaugcgugaga

SEQ ID NO: 1332381 - RNA, 19 nt, Homo sapiens
  misc_RNA (1)...(19): siRNA sense strand
caucuuggaggcccguuau

SEQ ID NO: 1332382 - RNA, 19 nt, Homo sapiens
  misc_RNA (1)...(19): siRNA sense strand
cgacauagcugaggacuug

SEQ ID NO: 1332383 - RNA, 19 nt, Homo sapiens
  misc_RNA (1)...(19): siRNA sense strand
gacaauaccuacuaugcaa

SEQ ID NO: 1332384 - RNA, 19 nt, Homo sapiens
  misc_RNA (1)...(19): siRNA sense strand
gggaaggccuuggauguuu

SEQ ID NO: 1332385 - RNA, 19 nt, Homo sapiens
  misc_RNA (1)...(19): siRNA sense strand
caagaucgcugacuuuggu

SEQ ID NO: 1332386 - RNA, 19 nt, Homo sapiens
  misc_RNA (1)...(19): siRNA sense strand
gaaauugccauccucaaga

SEQ ID NO: 1332387 - RNA, 19 nt, Homo sapiens
  misc_RNA (1)...(19): siRNA sense strand
ugaagaccaugauacguaa

SEQ ID NO: 1332388 - RNA, 19 nt, Homo sapiens
  misc_RNA (1)...(19): siRNA sense strand
ucaaaccacucucugaaga

SEQ ID NO: 1332389 - RNA, 19 nt, Homo sapiens
  misc_RNA (1)...(19): siRNA sense strand
caaguuggccuacaaugaa

SEQ ID NO: 1332390 - RNA, 19 nt, Homo sapiens
  misc_RNA (1)...(19): siRNA sense strand
caaugaaggugcuguccaa

SEQ ID NO: 1332391 - RNA, 19 nt, Homo sapiens
  misc_RNA (1)...(19): siRNA sense strand
acaguaagaucaagaguca

SEQ ID NO: 1332392 - RNA, 19 nt, Homo sapiens
  misc_RNA (1)...(19): siRNA sense strand
ggaaggccuuggauguuug

SEQ ID NO: 1332393 - RNA, 19 nt, Homo sapiens
  misc_RNA (1)...(19): siRNA sense strand
ucaaaggcaucgaguacuu

SEQ ID NO: 1332394 - RNA, 19 nt, Homo sapiens
  misc_RNA (1)...(19): siRNA sense strand
gagcagguguaccaggaaa

SEQ ID NO: 1332395 - RNA, 19 nt, Homo sapiens
  misc_RNA (1)...(19): siRNA sense strand
gugaagaccaugauacgua

SEQ ID NO: 1332396 - RNA, 19 nt, Homo sapiens
  misc_RNA (1)...(19): siRNA sense strand
ggaagugcccacccucaaa

SEQ ID NO: 1332397 - RNA, 19 nt, Homo sapiens
  misc_RNA (1)...(19): siRNA sense strand
ccaaugaggaccaucugua

SEQ ID NO: 1332398 - RNA, 19 nt, Homo sapiens
  misc_RNA (1)...(19): siRNA sense strand
gaucaaaggcaucgaguac

SEQ ID NO: 1332399 - RNA, 19 nt, Homo sapiens
  misc_RNA (1)...(19): siRNA sense strand
caaaggcaucgaguacuua

SEQ ID NO: 1332400 - RNA, 19 nt, Homo sapiens
  misc_RNA (1)...(19): siRNA sense strand
ggaaauugccauccucaag

SEQ ID NO: 1332401 - RNA, 19 nt, Homo sapiens
  misc_RNA (1)...(19): siRNA sense strand
aguauacccugaaggauga

SEQ ID NO: 1332402 - RNA, 19 nt, Homo sapiens
  misc_RNA (1)...(19): siRNA sense strand
ggaggaacgcucacuguca

SEQ ID NO: 1332403 - RNA, 19 nt, Homo sapiens
  misc_RNA (1)...(19): siRNA sense strand
ggcauggaguccuucauug

SEQ ID NO: 1332404 - RNA, 19 nt, Homo sapiens
  misc_RNA (1)...(19): siRNA sense strand
aaauugccauccucaagaa

SEQ ID NO: 1332405 - RNA, 19 nt, Homo sapiens
  misc_RNA (1)...(19): siRNA sense strand
gggcauggaguccuucauu

SEQ ID NO: 1332406 - RNA, 19 nt, Homo sapiens
  misc_RNA (1)...(19): siRNA sense strand
ccugaaggaugaaauugga

SEQ ID NO: 1332407 - RNA, 19 nt, Homo sapiens
  misc_RNA (1)...(19): siRNA sense strand
guacuuacacuaccagaag

SEQ ID NO: 1332408 - RNA, 19 nt, Homo sapiens
  misc_RNA (1)...(19): siRNA sense strand
ucaaguuggccuacaauga

SEQ ID NO: 1332409 - RNA, 19 nt, Homo sapiens
  misc_RNA (1)...(19): siRNA sense strand
ccuauggugucgucaaguu

SEQ ID NO: 1332410 - RNA, 19 nt, Homo sapiens
  misc_RNA (1)...(19): siRNA sense strand
cauccaccgugacaucaaa

SEQ ID NO: 1332411 - RNA, 19 nt, Homo sapiens
  misc_RNA (1)...(19): siRNA sense strand
gagcggaucauguguuuac

SEQ ID NO: 1332412 - RNA, 19 nt, Homo sapiens
  misc_RNA (1)...(19): siRNA sense strand
gcagguguaccaggaaauu

SEQ ID NO: 1332413 - RNA, 19 nt, Homo sapiens
  misc_RNA (1)...(19): siRNA sense strand
caucaagaucgcugacuuu

SEQ ID NO: 1332414 - RNA, 19 nt, Homo sapiens
  misc_RNA (1)...(19): siRNA sense strand
gaucauccaccgugacauc

SEQ ID NO: 1332415 - RNA, 19 nt, Homo sapiens
  misc_RNA (1)...(19): siRNA sense strand
gcauggaguccuucauugu

SEQ ID NO: 1332416 - RNA, 19 nt, Homo sapiens
  misc_RNA (1)...(19): siRNA sense strand
gugacgcgcuccucuccaa

SEQ ID NO: 1332417 - RNA, 19 nt, Homo sapiens
  misc_RNA (1)...(19): siRNA sense strand
acgagcggaucauguguuu

SEQ ID NO: 1332418 - RNA, 19 nt, Homo sapiens
  misc_RNA (1)...(19): siRNA sense strand
acacuauacugcuuugucu

SEQ ID NO: 1332419 - RNA, 19 nt, Homo sapiens
  misc_RNA (1)...(19): siRNA sense strand
ugguggagguccuggauga

SEQ ID NO: 1332420 - RNA, 19 nt, Homo sapiens
  misc_RNA (1)...(19): siRNA sense strand
gucagcgccuggaaacuug

SEQ ID NO: 1332421 - RNA, 19 nt, Homo sapiens
  misc_RNA (1)...(19): siRNA sense strand
ggacuugaaggaccugauc

SEQ ID NO: 1332422 - RNA, 19 nt, Homo sapiens
  misc_RNA (1)...(19): siRNA sense strand
guacaugguguucgaacug

SEQ ID NO: 1332423 - RNA, 19 nt, Homo sapiens
  misc_RNA (1)...(19): siRNA sense strand
ggccgacaguggagucuca

SEQ ID NO: 1332424 - RNA, 19 nt, Homo sapiens
  misc_RNA (1)...(19): siRNA sense strand
ccucaaaccacucucugaa

SEQ ID NO: 1332425 - RNA, 19 nt, Homo sapiens
  misc_RNA (1)...(19): siRNA sense strand
ccaggcccguuucuacuuc

SEQ ID NO: 1332426 - RNA, 19 nt, Homo sapiens
  misc_RNA (1)...(19): siRNA sense strand
cccguaugcuggacaagaa

SEQ ID NO: 1332427 - RNA, 19 nt, Homo sapiens
  misc_RNA (1)...(19): siRNA sense strand
gcaucgaguacuuacacua

SEQ ID NO: 1332428 - RNA, 19 nt, Homo sapiens
  misc_RNA (1)...(19): siRNA sense strand
ugaaggaugaaauuggaaa

SEQ ID NO: 1332429 - RNA, 19 nt, Homo sapiens
  misc_RNA (1)...(19): siRNA sense strand
uagcugaggacuugaagga

SEQ ID NO: 1332430 - RNA, 19 nt, Homo sapiens
  misc_RNA (1)...(19): siRNA sense strand
gaagugcccacccucaaac

SEQ ID NO: 1332431 - RNA, 19 nt, Homo sapiens
  misc_RNA (1)...(19): siRNA sense strand
gguggcagccuggacauga

SEQ ID NO: 1332432 - RNA, 19 nt, Homo sapiens
  misc_RNA (1)...(19): siRNA sense strand
caauaccuacuaugcaaug

SEQ ID NO: 1332433 - RNA, 19 nt, Homo sapiens
  misc_RNA (1)...(19): siRNA sense strand
acaucaagaucgcugacuu

SEQ ID NO: 1332434 - RNA, 19 nt, Homo sapiens
  misc_RNA (1)...(19): siRNA sense strand
ggaucguggugccggaaau

SEQ ID NO: 1332435 - RNA, 19 nt, Homo sapiens
  misc_RNA (1)...(19): siRNA sense strand
aaguuggccuacaaugaaa

SEQ ID NO: 1332436 - RNA, 19 nt, Homo sapiens
  misc_RNA (1)...(19): siRNA sense strand
gaagaccaugauacguaaa

SEQ ID NO: 1332437 - RNA, 19 nt, Homo sapiens
  misc_RNA (1)...(19): siRNA sense strand
cugaagaccaggcccguuu

SEQ ID NO: 1332438 - RNA, 19 nt, Homo sapiens
  misc_RNA (1)...(19): siRNA sense strand
guggcagccuggacaugaa

SEQ ID NO: 1332439 - RNA, 19 nt, Homo sapiens
  misc_RNA (1)...(19): siRNA sense strand
ugacaauaccuacuaugca

SEQ ID NO: 1332440 - RNA, 19 nt, Homo sapiens
  misc_RNA (1)...(19): siRNA sense strand
gcaagcugucucugcaaga

SEQ ID NO: 1332441 - RNA, 19 nt, Homo sapiens
  misc_RNA (1)...(19): siRNA sense strand
gaccugaucacccguaugc

SEQ ID NO: 1332442 - RNA, 19 nt, Homo sapiens
  misc_RNA (1)...(19): siRNA sense strand
acuauacugcuuugucuuu

SEQ ID NO: 1332443 - RNA, 19 nt, Homo sapiens
  misc_RNA (1)...(19): siRNA sense strand
ggcagcagcagcagcgaaa

SEQ ID NO: 1332444 - RNA, 19 nt, Homo sapiens
  misc_RNA (1)...(19): siRNA sense strand
ugugagcaaugaauucaag

SEQ ID NO: 1332445 - RNA, 19 nt, Homo sapiens
  misc_RNA (1)...(19): siRNA sense strand
ugaggaccaucuguacaug

SEQ ID NO: 1332446 - RNA, 19 nt, Homo sapiens
  misc_RNA (1)...(19): siRNA sense strand
gaaggaugaaauuggaaag

SEQ ID NO: 1332447 - RNA, 19 nt, Homo sapiens
  misc_RNA (1)...(19): siRNA sense strand
auacguaaacgcuccuuug

SEQ ID NO: 1332448 - RNA, 19 nt, Homo sapiens
  misc_RNA (1)...(19): siRNA sense strand
caaugaggaccaucuguac

SEQ ID NO: 1332449 - RNA, 19 nt, Homo sapiens
  misc_RNA (1)...(19): siRNA sense strand
uaccuacuaugcaaugaag

SEQ ID NO: 1332450 - RNA, 19 nt, Homo sapiens
  misc_RNA (1)...(19): siRNA sense strand
ggacgagcggaucaugugu

SEQ ID NO: 1332451 - RNA, 19 nt, Homo sapiens
  misc_RNA (1)...(19): siRNA sense strand
cuauacugcuuugucuuug

SEQ ID NO: 1332452 - RNA, 19 nt, Homo sapiens
  misc_RNA (1)...(19): siRNA sense strand
gugacacuauacugcuuug

SEQ ID NO: 1332453 - RNA, 19 nt, Homo sapiens
  misc_RNA (1)...(19): siRNA sense strand
ugacuuuggugugagcaau

SEQ ID NO: 1332454 - RNA, 19 nt, Homo sapiens
  misc_RNA (1)...(19): siRNA sense strand
ggugugagcaaugaauuca

SEQ ID NO: 1332455 - RNA, 19 nt, Homo sapiens
  misc_RNA (1)...(19): siRNA sense strand
cauggaguccuucauugug

SEQ ID NO: 1332456 - RNA, 19 nt, Homo sapiens
  misc_RNA (1)...(19): siRNA sense strand
gaagaccaggcccguuucu

SEQ ID NO: 1332457 - RNA, 19 nt, Homo sapiens
  misc_RNA (1)...(19): siRNA sense strand
gacgagcggaucauguguu

SEQ ID NO: 1332458 - RNA, 19 nt, Homo sapiens
  misc_RNA (1)...(19): siRNA sense strand
ugucagcgccuggaaacuu

SEQ ID NO: 1332459 - RNA, 19 nt, Homo sapiens
  misc_RNA (1)...(19): siRNA sense strand
gauacguaaacgcuccuuu

SEQ ID NO: 1332460 - RNA, 19 nt, Homo sapiens
  misc_RNA (1)...(19): siRNA sense strand
caucgaguacuuacacuac

SEQ ID NO: 1332461 - RNA, 19 nt, Homo sapiens
  misc_RNA (1)...(19): siRNA sense strand
ucacccguaugcuggacaa

SEQ ID NO: 1332462 - RNA, 19 nt, Homo sapiens
  misc_RNA (1)...(19): siRNA sense strand
cgacauagcugaggacuug

SEQ ID NO: 1332463 - RNA, 19 nt, Homo sapiens
  misc_RNA (1)...(19): siRNA sense strand
gacaauaccuacuaugcaa

SEQ ID NO: 1332464 - RNA, 19 nt, Homo sapiens
  misc_RNA (1)...(19): siRNA sense strand
gggaaggccuuggauguuu

SEQ ID NO: 1332465 - RNA, 19 nt, Homo sapiens
  misc_RNA (1)...(19): siRNA sense strand
caagaucgcugacuuuggu

SEQ ID NO: 1332466 - RNA, 19 nt, Homo sapiens
  misc_RNA (1)...(19): siRNA sense strand
gaaauugccauccucaaga

SEQ ID NO: 1332467 - RNA, 19 nt, Homo sapiens
  misc_RNA (1)...(19): siRNA sense strand
ugaagaccaugauacguaa

SEQ ID NO: 1332468 - RNA, 19 nt, Homo sapiens
  misc_RNA (1)...(19): siRNA sense strand
ucaaaccacucucugaaga

SEQ ID NO: 1332469 - RNA, 19 nt, Homo sapiens
  misc_RNA (1)...(19): siRNA sense strand
caaguuggccuacaaugaa

SEQ ID NO: 1332470 - RNA, 19 nt, Homo sapiens
  misc_RNA (1)...(19): siRNA sense strand
caaugaaggugcuguccaa

SEQ ID NO: 1332471 - RNA, 19 nt, Homo sapiens
  misc_RNA (1)...(19): siRNA sense strand
acaguaagaucaagaguca

SEQ ID NO: 1332472 - RNA, 19 nt, Homo sapiens
  misc_RNA (1)...(19): siRNA sense strand
ggaaggccuuggauguuug

SEQ ID NO: 1332473 - RNA, 19 nt, Homo sapiens
  misc_RNA (1)...(19): siRNA sense strand
ucaaaggcaucgaguacuu

SEQ ID NO: 1332474 - RNA, 19 nt, Homo sapiens
  misc_RNA (1)...(19): siRNA sense strand
gagcagguguaccaggaaa

SEQ ID NO: 1332475 - RNA, 19 nt, Homo sapiens
  misc_RNA (1)...(19): siRNA sense strand
gugaagaccaugauacgua

SEQ ID NO: 1332476 - RNA, 19 nt, Homo sapiens
  misc_RNA (1)...(19): siRNA sense strand
ggaagugcccacccucaaa

SEQ ID NO: 1332477 - RNA, 19 nt, Homo sapiens
  misc_RNA (1)...(19): siRNA sense strand
ccaaugaggaccaucugua

SEQ ID NO: 1332478 - RNA, 19 nt, Homo sapiens
  misc_RNA (1)...(19): siRNA sense strand
gaucaaaggcaucgaguac

SEQ ID NO: 1332479 - RNA, 19 nt, Homo sapiens
  misc_RNA (1)...(19): siRNA sense strand
caaaggcaucgaguacuua

SEQ ID NO: 1332480 - RNA, 19 nt, Homo sapiens
  misc_RNA (1)...(19): siRNA sense strand
ggaaauugccauccucaag

SEQ ID NO: 1332481 - RNA, 19 nt, Homo sapiens
  misc_RNA (1)...(19): siRNA sense strand
aguauacccugaaggauga

SEQ ID NO: 1332482 - RNA, 19 nt, Homo sapiens
  misc_RNA (1)...(19): siRNA sense strand
ggaggaacgcucacuguca

SEQ ID NO: 1332483 - RNA, 19 nt, Homo sapiens
  misc_RNA (1)...(19): siRNA sense strand
ggcauggaguccuucauug

SEQ ID NO: 1332484 - RNA, 19 nt, Homo sapiens
  misc_RNA (1)...(19): siRNA sense strand
aaauugccauccucaagaa

SEQ ID NO: 1332485 - RNA, 19 nt, Homo sapiens
  misc_RNA (1)...(19): siRNA sense strand
gggcauggaguccuucauu

SEQ ID NO: 1332486 - RNA, 19 nt, Homo sapiens
  misc_RNA (1)...(19): siRNA sense strand
ccugaaggaugaaauugga

SEQ ID NO: 1332487 - RNA, 19 nt, Homo sapiens
  misc_RNA (1)...(19): siRNA sense strand
guacuuacacuaccagaag

SEQ ID NO: 1332488 - RNA, 19 nt, Homo sapiens
  misc_RNA (1)...(19): siRNA sense strand
ucaaguuggccuacaauga

SEQ ID NO: 1332489 - RNA, 19 nt, Homo sapiens
  misc_RNA (1)...(19): siRNA sense strand
ccuauggugucgucaaguu

SEQ ID NO: 1332490 - RNA, 19 nt, Homo sapiens
  misc_RNA (1)...(19): siRNA sense strand
cauccaccgugacaucaaa

SEQ ID NO: 1332491 - RNA, 19 nt, Homo sapiens
  misc_RNA (1)...(19): siRNA sense strand
gagcggaucauguguuuac

SEQ ID NO: 1332492 - RNA, 19 nt, Homo sapiens
  misc_RNA (1)...(19): siRNA sense strand
gcagguguaccaggaaauu

SEQ ID NO: 1332493 - RNA, 19 nt, Homo sapiens
  misc_RNA (1)...(19): siRNA sense strand
caucaagaucgcugacuuu

SEQ ID NO: 1332494 - RNA, 19 nt, Homo sapiens
  misc_RNA (1)...(19): siRNA sense strand
gaucauccaccgugacauc

SEQ ID NO: 1332495 - RNA, 19 nt, Homo sapiens
  misc_RNA (1)...(19): siRNA sense strand
gcauggaguccuucauugu

SEQ ID NO: 1332496 - RNA, 19 nt, Homo sapiens
  misc_RNA (1)...(19): siRNA sense strand
gugacgcgcuccucuccaa

SEQ ID NO: 1332497 - RNA, 19 nt, Homo sapiens
  misc_RNA (1)...(19): siRNA sense strand
acgagcggaucauguguuu

SEQ ID NO: 1332498 - RNA, 19 nt, Homo sapiens
  misc_RNA (1)...(19): siRNA sense strand
acacuauacugcuuugucu

SEQ ID NO: 1332499 - RNA, 19 nt, Homo sapiens
  misc_RNA (1)...(19): siRNA sense strand
ugguggagguccuggauga

SEQ ID NO: 1332500 - RNA, 19 nt, Homo sapiens
  misc_RNA (1)...(19): siRNA sense strand
gucagcgccuggaaacuug

SEQ ID NO: 1332501 - RNA, 19 nt, Homo sapiens
  misc_RNA (1)...(19): siRNA sense strand
ggacuugaaggaccugauc

SEQ ID NO: 1332502 - RNA, 19 nt, Homo sapiens
  misc_RNA (1)...(19): siRNA sense strand
guacaugguguucgaacug

SEQ ID NO: 1332503 - RNA, 19 nt, Homo sapiens
  misc_RNA (1)...(19): siRNA sense strand
ggccgacaguggagucuca

SEQ ID NO: 1332504 - RNA, 19 nt, Homo sapiens
  misc_RNA (1)...(19): siRNA sense strand
ccucaaaccacucucugaa

SEQ ID NO: 1332505 - RNA, 19 nt, Homo sapiens
  misc_RNA (1)...(19): siRNA sense strand
ccaggcccguuucuacuuc

SEQ ID NO: 1332506 - RNA, 19 nt, Homo sapiens
  misc_RNA (1)...(19): siRNA sense strand
cccguaugcuggacaagaa

SEQ ID NO: 1332507 - RNA, 19 nt, Homo sapiens
  misc_RNA (1)...(19): siRNA sense strand
gcaucgaguacuuacacua

SEQ ID NO: 1332508 - RNA, 19 nt, Homo sapiens
  misc_RNA (1)...(19): siRNA sense strand
ugaaggaugaaauuggaaa

SEQ ID NO: 1332509 - RNA, 19 nt, Homo sapiens
  misc_RNA (1)...(19): siRNA sense strand
uagcugaggacuugaagga

SEQ ID NO: 1332510 - RNA, 19 nt, Homo sapiens
  misc_RNA (1)...(19): siRNA sense strand
gaagugcccacccucaaac

SEQ ID NO: 1332511 - RNA, 19 nt, Homo sapiens
  misc_RNA (1)...(19): siRNA sense strand
gguggcagccuggacauga

SEQ ID NO: 1332512 - RNA, 19 nt, Homo sapiens
  misc_RNA (1)...(19): siRNA sense strand
caauaccuacuaugcaaug

SEQ ID NO: 1332513 - RNA, 19 nt, Homo sapiens
  misc_RNA (1)...(19): siRNA sense strand
acaucaagaucgcugacuu

SEQ ID NO: 1332514 - RNA, 19 nt, Homo sapiens
  misc_RNA (1)...(19): siRNA sense strand
ggaucguggugccggaaau

SEQ ID NO: 1332515 - RNA, 19 nt, Homo sapiens
  misc_RNA (1)...(19): siRNA sense strand
aaguuggccuacaaugaaa

SEQ ID NO: 1332516 - RNA, 19 nt, Homo sapiens
  misc_RNA (1)...(19): siRNA sense strand
gaagaccaugauacguaaa

SEQ ID NO: 1332517 - RNA, 19 nt, Homo sapiens
  misc_RNA (1)...(19): siRNA sense strand
cugaagaccaggcccguuu

SEQ ID NO: 1332518 - RNA, 19 nt, Homo sapiens
  misc_RNA (1)...(19): siRNA sense strand
guggcagccuggacaugaa

SEQ ID NO: 1332519 - RNA, 19 nt, Homo sapiens
  misc_RNA (1)...(19): siRNA sense strand
ugacaauaccuacuaugca

SEQ ID NO: 1332520 - RNA, 19 nt, Homo sapiens
  misc_RNA (1)...(19): siRNA sense strand
gcaagcugucucugcaaga

SEQ ID NO: 1332521 - RNA, 19 nt, Homo sapiens
  misc_RNA (1)...(19): siRNA sense strand
gaccugaucacccguaugc

SEQ ID NO: 1332522 - RNA, 19 nt, Homo sapiens
  misc_RNA (1)...(19): siRNA sense strand
acuauacugcuuugucuuu

SEQ ID NO: 1332523 - RNA, 19 nt, Homo sapiens
  misc_RNA (1)...(19): siRNA sense strand
ggcagcagcagcagcgaaa

SEQ ID NO: 1332524 - RNA, 19 nt, Homo sapiens
  misc_RNA (1)...(19): siRNA sense strand
ugugagcaaugaauucaag

SEQ ID NO: 1332525 - RNA, 19 nt, Homo sapiens
  misc_RNA (1)...(19): siRNA sense strand
ugaggaccaucuguacaug

SEQ ID NO: 1332526 - RNA, 19 nt, Homo sapiens
  misc_RNA (1)...(19): siRNA sense strand
gaaggaugaaauuggaaag

SEQ ID NO: 1332527 - RNA, 19 nt, Homo sapiens
  misc_RNA (1)...(19): siRNA sense strand
auacguaaacgcuccuuug

SEQ ID NO: 1332528 - RNA, 19 nt, Homo sapiens
  misc_RNA (1)...(19): siRNA sense strand
caaugaggaccaucuguac

SEQ ID NO: 1332529 - RNA, 19 nt, Homo sapiens
  misc_RNA (1)...(19): siRNA sense strand
uaccuacuaugcaaugaag

SEQ ID NO: 1332530 - RNA, 19 nt, Homo sapiens
  misc_RNA (1)...(19): siRNA sense strand
ggacgagcggaucaugugu

SEQ ID NO: 1332531 - RNA, 19 nt, Homo sapiens
  misc_RNA (1)...(19): siRNA sense strand
cuauacugcuuugucuuug

SEQ ID NO: 1332532 - RNA, 19 nt, Homo sapiens
  misc_RNA (1)...(19): siRNA sense strand
gugacacuauacugcuuug

SEQ ID NO: 1332533 - RNA, 19 nt, Homo sapiens
  misc_RNA (1)...(19): siRNA sense strand
ugacuuuggugugagcaau

SEQ ID NO: 1332534 - RNA, 19 nt, Homo sapiens
  misc_RNA (1)...(19): siRNA sense strand
ggugugagcaaugaauuca

SEQ ID NO: 1332535 - RNA, 19 nt, Homo sapiens
  misc_RNA (1)...(19): siRNA sense strand
cauggaguccuucauugug

SEQ ID NO: 1332536 - RNA, 19 nt, Homo sapiens
  misc_RNA (1)...(19): siRNA sense strand
gaagaccaggcccguuucu

SEQ ID NO: 1332537 - RNA, 19 nt, Homo sapiens
  misc_RNA (1)...(19): siRNA sense strand
gacgagcggaucauguguu

SEQ ID NO: 1332538 - RNA, 19 nt, Homo sapiens
  misc_RNA (1)...(19): siRNA sense strand
ugucagcgccuggaaacuu

SEQ ID NO: 1332539 - RNA, 19 nt, Homo sapiens
  misc_RNA (1)...(19): siRNA sense strand
gauacguaaacgcuccuuu

SEQ ID NO: 1332540 - RNA, 19 nt, Homo sapiens
  misc_RNA (1)...(19): siRNA sense strand
caucgaguacuuacacuac

SEQ ID NO: 1332541 - RNA, 19 nt, Homo sapiens
  misc_RNA (1)...(19): siRNA sense strand
ucacccguaugcuggacaa

SEQ ID NO: 1332542 - RNA, 19 nt, Homo sapiens
  misc_RNA (1)...(19): siRNA sense strand
cgacauagcugaggacuug

SEQ ID NO: 1332543 - RNA, 19 nt, Homo sapiens
  misc_RNA (1)...(19): siRNA sense strand
gacaauaccuacuaugcaa

SEQ ID NO: 1332544 - RNA, 19 nt, Homo sapiens
  misc_RNA (1)...(19): siRNA sense strand
gggaaggccuuggauguuu

SEQ ID NO: 1332545 - RNA, 19 nt, Homo sapiens
  misc_RNA (1)...(19): siRNA sense strand
caagaucgcugacuuuggu

SEQ ID NO: 1332546 - RNA, 19 nt, Homo sapiens
  misc_RNA (1)...(19): siRNA sense strand
gaaauugccauccucaaga

SEQ ID NO: 1332547 - RNA, 19 nt, Homo sapiens
  misc_RNA (1)...(19): siRNA sense strand
ugaagaccaugauacguaa

SEQ ID NO: 1332548 - RNA, 19 nt, Homo sapiens
  misc_RNA (1)...(19): siRNA sense strand
ucaaaccacucucugaaga

SEQ ID NO: 1332549 - RNA, 19 nt, Homo sapiens
  misc_RNA (1)...(19): siRNA sense strand
caaguuggccuacaaugaa

SEQ ID NO: 1332550 - RNA, 19 nt, Homo sapiens
  misc_RNA (1)...(19): siRNA sense strand
caaugaaggugcuguccaa

SEQ ID NO: 1332551 - RNA, 19 nt, Homo sapiens
  misc_RNA (1)...(19): siRNA sense strand
acaguaagaucaagaguca

SEQ ID NO: 1332552 - RNA, 19 nt, Homo sapiens
  misc_RNA (1)...(19): siRNA sense strand
ggaaggccuuggauguuug

SEQ ID NO: 1332553 - RNA, 19 nt, Homo sapiens
  misc_RNA (1)...(19): siRNA sense strand
ucaaaggcaucgaguacuu

SEQ ID NO: 1332554 - RNA, 19 nt, Homo sapiens
  misc_RNA (1)...(19): siRNA sense strand
gagcagguguaccaggaaa

SEQ ID NO: 1332555 - RNA, 19 nt, Homo sapiens
  misc_RNA (1)...(19): siRNA sense strand
gugaagaccaugauacgua

SEQ ID NO: 1332556 - RNA, 19 nt, Homo sapiens
  misc_RNA (1)...(19): siRNA sense strand
ggaagugcccacccucaaa

SEQ ID NO: 1332557 - RNA, 19 nt, Homo sapiens
  misc_RNA (1)...(19): siRNA sense strand
ccaaugaggaccaucugua

SEQ ID NO: 1332558 - RNA, 19 nt, Homo sapiens
  misc_RNA (1)...(19): siRNA sense strand
gaucaaaggcaucgaguac

SEQ ID NO: 1332559 - RNA, 19 nt, Homo sapiens
  misc_RNA (1)...(19): siRNA sense strand
caaaggcaucgaguacuua

SEQ ID NO: 1332560 - RNA, 19 nt, Homo sapiens
  misc_RNA (1)...(19): siRNA sense strand
ggaaauugccauccucaag

SEQ ID NO: 1332561 - RNA, 19 nt, Homo sapiens
  misc_RNA (1)...(19): siRNA sense strand
aguauacccugaaggauga

SEQ ID NO: 1332562 - RNA, 19 nt, Homo sapiens
  misc_RNA (1)...(19): siRNA sense strand
ggaggaacgcucacuguca

SEQ ID NO: 1332563 - RNA, 19 nt, Homo sapiens
  misc_RNA (1)...(19): siRNA sense strand
ggcauggaguccuucauug

SEQ ID NO: 1332564 - RNA, 19 nt, Homo sapiens
  misc_RNA (1)...(19): siRNA sense strand
aaauugccauccucaagaa

SEQ ID NO: 1332565 - RNA, 19 nt, Homo sapiens
  misc_RNA (1)...(19): siRNA sense strand
gggcauggaguccuucauu

SEQ ID NO: 1332566 - RNA, 19 nt, Homo sapiens
  misc_RNA (1)...(19): siRNA sense strand
ccugaaggaugaaauugga

SEQ ID NO: 1332567 - RNA, 19 nt, Homo sapiens
  misc_RNA (1)...(19): siRNA sense strand
guacuuacacuaccagaag

SEQ ID NO: 1332568 - RNA, 19 nt, Homo sapiens
  misc_RNA (1)...(19): siRNA sense strand
ucaaguuggccuacaauga

SEQ ID NO: 1332569 - RNA, 19 nt, Homo sapiens
  misc_RNA (1)...(19): siRNA sense strand
ccuauggugucgucaaguu

SEQ ID NO: 1332570 - RNA, 19 nt, Homo sapiens
  misc_RNA (1)...(19): siRNA sense strand
cauccaccgugacaucaaa

SEQ ID NO: 1332571 - RNA, 19 nt, Homo sapiens
  misc_RNA (1)...(19): siRNA sense strand
gagcggaucauguguuuac

SEQ ID NO: 1332572 - RNA, 19 nt, Homo sapiens
  misc_RNA (1)...(19): siRNA sense strand
gcagguguaccaggaaauu

SEQ ID NO: 1332573 - RNA, 19 nt, Homo sapiens
  misc_RNA (1)...(19): siRNA sense strand
caucaagaucgcugacuuu

SEQ ID NO: 1332574 - RNA, 19 nt, Homo sapiens
  misc_RNA (1)...(19): siRNA sense strand
gaucauccaccgugacauc

SEQ ID NO: 1332575 - RNA, 19 nt, Homo sapiens
  misc_RNA (1)...(19): siRNA sense strand
gcauggaguccuucauugu

SEQ ID NO: 1332576 - RNA, 19 nt, Homo sapiens
  misc_RNA (1)...(19): siRNA sense strand
gugacgcgcuccucuccaa

SEQ ID NO: 1332577 - RNA, 19 nt, Homo sapiens
  misc_RNA (1)...(19): siRNA sense strand
acgagcggaucauguguuu

SEQ ID NO: 1332578 - RNA, 19 nt, Homo sapiens
  misc_RNA (1)...(19): siRNA sense strand
acacuauacugcuuugucu

SEQ ID NO: 1332579 - RNA, 19 nt, Homo sapiens
  misc_RNA (1)...(19): siRNA sense strand
ugguggagguccuggauga

SEQ ID NO: 1332580 - RNA, 19 nt, Homo sapiens
  misc_RNA (1)...(19): siRNA sense strand
gucagcgccuggaaacuug

SEQ ID NO: 1332581 - RNA, 19 nt, Homo sapiens
  misc_RNA (1)...(19): siRNA sense strand
ggacuugaaggaccugauc

SEQ ID NO: 1332582 - RNA, 19 nt, Homo sapiens
  misc_RNA (1)...(19): siRNA sense strand
guacaugguguucgaacug

SEQ ID NO: 1332583 - RNA, 19 nt, Homo sapiens
  misc_RNA (1)...(19): siRNA sense strand
ggccgacaguggagucuca

SEQ ID NO: 1332584 - RNA, 19 nt, Homo sapiens
  misc_RNA (1)...(19): siRNA sense strand
ccucaaaccacucucugaa

SEQ ID NO: 1332585 - RNA, 19 nt, Homo sapiens
  misc_RNA (1)...(19): siRNA sense strand
ccaggcccguuucuacuuc

SEQ ID NO: 1332586 - RNA, 19 nt, Homo sapiens
  misc_RNA (1)...(19): siRNA sense strand
cccguaugcuggacaagaa

SEQ ID NO: 1332587 - RNA, 19 nt, Homo sapiens
  misc_RNA (1)...(19): siRNA sense strand
gcaucgaguacuuacacua

SEQ ID NO: 1332588 - RNA, 19 nt, Homo sapiens
  misc_RNA (1)...(19): siRNA sense strand
ugaaggaugaaauuggaaa

SEQ ID NO: 1332589 - RNA, 19 nt, Homo sapiens
  misc_RNA (1)...(19): siRNA sense strand
uagcugaggacuugaagga

SEQ ID NO: 1332590 - RNA, 19 nt, Homo sapiens
  misc_RNA (1)...(19): siRNA sense strand
gaagugcccacccucaaac

SEQ ID NO: 1332591 - RNA, 19 nt, Homo sapiens
  misc_RNA (1)...(19): siRNA sense strand
gguggcagccuggacauga

SEQ ID NO: 1332592 - RNA, 19 nt, Homo sapiens
  misc_RNA (1)...(19): siRNA sense strand
caauaccuacuaugcaaug

SEQ ID NO: 1332593 - RNA, 19 nt, Homo sapiens
  misc_RNA (1)...(19): siRNA sense strand
acaucaagaucgcugacuu

SEQ ID NO: 1332594 - RNA, 19 nt, Homo sapiens
  misc_RNA (1)...(19): siRNA sense strand
ggaucguggugccggaaau

SEQ ID NO: 1332595 - RNA, 19 nt, Homo sapiens
  misc_RNA (1)...(19): siRNA sense strand
aaguuggccuacaaugaaa

SEQ ID NO: 1332596 - RNA, 19 nt, Homo sapiens
  misc_RNA (1)...(19): siRNA sense strand
gaagaccaugauacguaaa

SEQ ID NO: 1332597 - RNA, 19 nt, Homo sapiens
  misc_RNA (1)...(19): siRNA sense strand
cugaagaccaggcccguuu

SEQ ID NO: 1332598 - RNA, 19 nt, Homo sapiens
  misc_RNA (1)...(19): siRNA sense strand
guggcagccuggacaugaa

SEQ ID NO: 1332599 - RNA, 19 nt, Homo sapiens
  misc_RNA (1)...(19): siRNA sense strand
ugacaauaccuacuaugca

SEQ ID NO: 1332600 - RNA, 19 nt, Homo sapiens
  misc_RNA (1)...(19): siRNA sense strand
gcaagcugucucugcaaga

SEQ ID NO: 1332601 - RNA, 19 nt, Homo sapiens
  misc_RNA (1)...(19): siRNA sense strand
gaccugaucacccguaugc

SEQ ID NO: 1332602 - RNA, 19 nt, Homo sapiens
  misc_RNA (1)...(19): siRNA sense strand
acuauacugcuuugucuuu

SEQ ID NO: 1332603 - RNA, 19 nt, Homo sapiens
  misc_RNA (1)...(19): siRNA sense strand
ggcagcagcagcagcgaaa

SEQ ID NO: 1332604 - RNA, 19 nt, Homo sapiens
  misc_RNA (1)...(19): siRNA sense strand
ugugagcaaugaauucaag

SEQ ID NO: 1332605 - RNA, 19 nt, Homo sapiens
  misc_RNA (1)...(19): siRNA sense strand
ugaggaccaucuguacaug

SEQ ID NO: 1332606 - RNA, 19 nt, Homo sapiens
  misc_RNA (1)...(19): siRNA sense strand
gaaggaugaaauuggaaag

SEQ ID NO: 1332607 - RNA, 19 nt, Homo sapiens
  misc_RNA (1)...(19): siRNA sense strand
auacguaaacgcuccuuug

SEQ ID NO: 1332608 - RNA, 19 nt, Homo sapiens
  misc_RNA (1)...(19): siRNA sense strand
caaugaggaccaucuguac

SEQ ID NO: 1332609 - RNA, 19 nt, Homo sapiens
  misc_RNA (1)...(19): siRNA sense strand
uaccuacuaugcaaugaag

SEQ ID NO: 1332610 - RNA, 19 nt, Homo sapiens
  misc_RNA (1)...(19): siRNA sense strand
ggacgagcggaucaugugu

SEQ ID NO: 1332611 - RNA, 19 nt, Homo sapiens
  misc_RNA (1)...(19): siRNA sense strand
cuauacugcuuugucuuug

SEQ ID NO: 1332612 - RNA, 19 nt, Homo sapiens
  misc_RNA (1)...(19): siRNA sense strand
gugacacuauacugcuuug

SEQ ID NO: 1332613 - RNA, 19 nt, Homo sapiens
  misc_RNA (1)...(19): siRNA sense strand
ugacuuuggugugagcaau

SEQ ID NO: 1332614 - RNA, 19 nt, Homo sapiens
  misc_RNA (1)...(19): siRNA sense strand
ggugugagcaaugaauuca

SEQ ID NO: 1332615 - RNA, 19 nt, Homo sapiens
  misc_RNA (1)...(19): siRNA sense strand
cauggaguccuucauugug

SEQ ID NO: 1332616 - RNA, 19 nt, Homo sapiens
  misc_RNA (1)...(19): siRNA sense strand
gaagaccaggcccguuucu

SEQ ID NO: 1332617 - RNA, 19 nt, Homo sapiens
  misc_RNA (1)...(19): siRNA sense strand
gacgagcggaucauguguu

SEQ ID NO: 1332618 - RNA, 19 nt, Homo sapiens
  misc_RNA (1)...(19): siRNA sense strand
ugucagcgccuggaaacuu

SEQ ID NO: 1332619 - RNA, 19 nt, Homo sapiens
  misc_RNA (1)...(19): siRNA sense strand
gauacguaaacgcuccuuu

SEQ ID NO: 1332620 - RNA, 19 nt, Homo sapiens
  misc_RNA (1)...(19): siRNA sense strand
caucgaguacuuacacuac

SEQ ID NO: 1332621 - RNA, 19 nt, Homo sapiens
  misc_RNA (1)...(19): siRNA sense strand
ucacccguaugcuggacaa

SEQ ID NO: 1332622 - RNA, 19 nt, Homo sapiens
  misc_RNA (1)...(19): siRNA sense strand
cgacauagcugaggacuug

SEQ ID NO: 1332623 - RNA, 19 nt, Homo sapiens
  misc_RNA (1)...(19): siRNA sense strand
gacaauaccuacuaugcaa

SEQ ID NO: 1332624 - RNA, 19 nt, Homo sapiens
  misc_RNA (1)...(19): siRNA sense strand
gggaaggccuuggauguuu

SEQ ID NO: 1332625 - RNA, 19 nt, Homo sapiens
  misc_RNA (1)...(19): siRNA sense strand
caagaucgcugacuuuggu

SEQ ID NO: 1332626 - RNA, 19 nt, Homo sapiens
  misc_RNA (1)...(19): siRNA sense strand
gaaauugccauccucaaga

SEQ ID NO: 1332627 - RNA, 19 nt, Homo sapiens
  misc_RNA (1)...(19): siRNA sense strand
ugaagaccaugauacguaa

SEQ ID NO: 1332628 - RNA, 19 nt, Homo sapiens
  misc_RNA (1)...(19): siRNA sense strand
ucaaaccacucucugaaga

SEQ ID NO: 1332629 - RNA, 19 nt, Homo sapiens
  misc_RNA (1)...(19): siRNA sense strand
caaguuggccuacaaugaa

SEQ ID NO: 1332630 - RNA, 19 nt, Homo sapiens
  misc_RNA (1)...(19): siRNA sense strand
caaugaaggugcuguccaa

SEQ ID NO: 1332631 - RNA, 19 nt, Homo sapiens
  misc_RNA (1)...(19): siRNA sense strand
acaguaagaucaagaguca

SEQ ID NO: 1332632 - RNA, 19 nt, Homo sapiens
  misc_RNA (1)...(19): siRNA sense strand
ggaaggccuuggauguuug

SEQ ID NO: 1332633 - RNA, 19 nt, Homo sapiens
  misc_RNA (1)...(19): siRNA sense strand
ucaaaggcaucgaguacuu

SEQ ID NO: 1332634 - RNA, 19 nt, Homo sapiens
  misc_RNA (1)...(19): siRNA sense strand
gagcagguguaccaggaaa

SEQ ID NO: 1332635 - RNA, 19 nt, Homo sapiens
  misc_RNA (1)...(19): siRNA sense strand
gugaagaccaugauacgua

SEQ ID NO: 1332636 - RNA, 19 nt, Homo sapiens
  misc_RNA (1)...(19): siRNA sense strand
ggaagugcccacccucaaa

SEQ ID NO: 1332637 - RNA, 19 nt, Homo sapiens
  misc_RNA (1)...(19): siRNA sense strand
ccaaugaggaccaucugua

SEQ ID NO: 1332638 - RNA, 19 nt, Homo sapiens
  misc_RNA (1)...(19): siRNA sense strand
gaucaaaggcaucgaguac

SEQ ID NO: 1332639 - RNA, 19 nt, Homo sapiens
  misc_RNA (1)...(19): siRNA sense strand
caaaggcaucgaguacuua

SEQ ID NO: 1332640 - RNA, 19 nt, Homo sapiens
  misc_RNA (1)...(19): siRNA sense strand
ggaaauugccauccucaag

SEQ ID NO: 1332641 - RNA, 19 nt, Homo sapiens
  misc_RNA (1)...(19): siRNA sense strand
aguauacccugaaggauga

SEQ ID NO: 1332642 - RNA, 19 nt, Homo sapiens
  misc_RNA (1)...(19): siRNA sense strand
ggaggaacgcucacuguca

SEQ ID NO: 1332643 - RNA, 19 nt, Homo sapiens
  misc_RNA (1)...(19): siRNA sense strand
ggcauggaguccuucauug

SEQ ID NO: 1332644 - RNA, 19 nt, Homo sapiens
  misc_RNA (1)...(19): siRNA sense strand
aaauugccauccucaagaa

SEQ ID NO: 1332645 - RNA, 19 nt, Homo sapiens
  misc_RNA (1)...(19): siRNA sense strand
gggcauggaguccuucauu

SEQ ID NO: 1332646 - RNA, 19 nt, Homo sapiens
  misc_RNA (1)...(19): siRNA sense strand
ccugaaggaugaaauugga

SEQ ID NO: 1332647 - RNA, 19 nt, Homo sapiens
  misc_RNA (1)...(19): siRNA sense strand
guacuuacacuaccagaag

SEQ ID NO: 1332648 - RNA, 19 nt, Homo sapiens
  misc_RNA (1)...(19): siRNA sense strand
ucaaguuggccuacaauga

SEQ ID NO: 1332649 - RNA, 19 nt, Homo sapiens
  misc_RNA (1)...(19): siRNA sense strand
ccuauggugucgucaaguu

SEQ ID NO: 1332650 - RNA, 19 nt, Homo sapiens
  misc_RNA (1)...(19): siRNA sense strand
cauccaccgugacaucaaa

SEQ ID NO: 1332651 - RNA, 19 nt, Homo sapiens
  misc_RNA (1)...(19): siRNA sense strand
gagcggaucauguguuuac

SEQ ID NO: 1332652 - RNA, 19 nt, Homo sapiens
  misc_RNA (1)...(19): siRNA sense strand
gcagguguaccaggaaauu

SEQ ID NO: 1332653 - RNA, 19 nt, Homo sapiens
  misc_RNA (1)...(19): siRNA sense strand
caucaagaucgcugacuuu

SEQ ID NO: 1332654 - RNA, 19 nt, Homo sapiens
  misc_RNA (1)...(19): siRNA sense strand
gaucauccaccgugacauc

SEQ ID NO: 1332655 - RNA, 19 nt, Homo sapiens
  misc_RNA (1)...(19): siRNA sense strand
gcauggaguccuucauugu

SEQ ID NO: 1332656 - RNA, 19 nt, Homo sapiens
  misc_RNA (1)...(19): siRNA sense strand
gugacgcgcuccucuccaa

SEQ ID NO: 1332657 - RNA, 19 nt, Homo sapiens
  misc_RNA (1)...(19): siRNA sense strand
acgagcggaucauguguuu

SEQ ID NO: 1332658 - RNA, 19 nt, Homo sapiens
  misc_RNA (1)...(19): siRNA sense strand
acacuauacugcuuugucu

SEQ ID NO: 1332659 - RNA, 19 nt, Homo sapiens
  misc_RNA (1)...(19): siRNA sense strand
ugguggagguccuggauga

SEQ ID NO: 1332660 - RNA, 19 nt, Homo sapiens
  misc_RNA (1)...(19): siRNA sense strand
gucagcgccuggaaacuug

SEQ ID NO: 1332661 - RNA, 19 nt, Homo sapiens
  misc_RNA (1)...(19): siRNA sense strand
ggacuugaaggaccugauc

SEQ ID NO: 1332662 - RNA, 19 nt, Homo sapiens
  misc_RNA (1)...(19): siRNA sense strand
guacaugguguucgaacug

SEQ ID NO: 1332663 - RNA, 19 nt, Homo sapiens
  misc_RNA (1)...(19): siRNA sense strand
ggccgacaguggagucuca

SEQ ID NO: 1332664 - RNA, 19 nt, Homo sapiens
  misc_RNA (1)...(19): siRNA sense strand
ccucaaaccacucucugaa

SEQ ID NO: 1332665 - RNA, 19 nt, Homo sapiens
  misc_RNA (1)...(19): siRNA sense strand
ccaggcccguuucuacuuc

SEQ ID NO: 1332666 - RNA, 19 nt, Homo sapiens
  misc_RNA (1)...(19): siRNA sense strand
cccguaugcuggacaagaa

SEQ ID NO: 1332667 - RNA, 19 nt, Homo sapiens
  misc_RNA (1)...(19): siRNA sense strand
gcaucgaguacuuacacua

SEQ ID NO: 1332668 - RNA, 19 nt, Homo sapiens
  misc_RNA (1)...(19): siRNA sense strand
ugaaggaugaaauuggaaa

SEQ ID NO: 1332669 - RNA, 19 nt, Homo sapiens
  misc_RNA (1)...(19): siRNA sense strand
uagcugaggacuugaagga

SEQ ID NO: 1332670 - RNA, 19 nt, Homo sapiens
  misc_RNA (1)...(19): siRNA sense strand
gaagugcccacccucaaac

SEQ ID NO: 1332671 - RNA, 19 nt, Homo sapiens
  misc_RNA (1)...(19): siRNA sense strand
gguggcagccuggacauga

SEQ ID NO: 1332672 - RNA, 19 nt, Homo sapiens
  misc_RNA (1)...(19): siRNA sense strand
caauaccuacuaugcaaug

SEQ ID NO: 1332673 - RNA, 19 nt, Homo sapiens
  misc_RNA (1)...(19): siRNA sense strand
acaucaagaucgcugacuu

SEQ ID NO: 1332674 - RNA, 19 nt, Homo sapiens
  misc_RNA (1)...(19): siRNA sense strand
ggaucguggugccggaaau

SEQ ID NO: 1332675 - RNA, 19 nt, Homo sapiens
  misc_RNA (1)...(19): siRNA sense strand
aaguuggccuacaaugaaa

SEQ ID NO: 1332676 - RNA, 19 nt, Homo sapiens
  misc_RNA (1)...(19): siRNA sense strand
gaagaccaugauacguaaa

SEQ ID NO: 1332677 - RNA, 19 nt, Homo sapiens
  misc_RNA (1)...(19): siRNA sense strand
cugaagaccaggcccguuu

SEQ ID NO: 1332678 - RNA, 19 nt, Homo sapiens
  misc_RNA (1)...(19): siRNA sense strand
guggcagccuggacaugaa

SEQ ID NO: 1332679 - RNA, 19 nt, Homo sapiens
  misc_RNA (1)...(19): siRNA sense strand
ugacaauaccuacuaugca

SEQ ID NO: 1332680 - RNA, 19 nt, Homo sapiens
  misc_RNA (1)...(19): siRNA sense strand
gcaagcugucucugcaaga

SEQ ID NO: 1332681 - RNA, 19 nt, Homo sapiens
  misc_RNA (1)...(19): siRNA sense strand
gaccugaucacccguaugc

SEQ ID NO: 1332682 - RNA, 19 nt, Homo sapiens
  misc_RNA (1)...(19): siRNA sense strand
acuauacugcuuugucuuu

SEQ ID NO: 1332683 - RNA, 19 nt, Homo sapiens
  misc_RNA (1)...(19): siRNA sense strand
ggcagcagcagcagcgaaa

SEQ ID NO: 1332684 - RNA, 19 nt, Homo sapiens
  misc_RNA (1)...(19): siRNA sense strand
ugugagcaaugaauucaag

SEQ ID NO: 1332685 - RNA, 19 nt, Homo sapiens
  misc_RNA (1)...(19): siRNA sense strand
ugaggaccaucuguacaug

SEQ ID NO: 1332686 - RNA, 19 nt, Homo sapiens
  misc_RNA (1)...(19): siRNA sense strand
gaaggaugaaauuggaaag

SEQ ID NO: 1332687 - RNA, 19 nt, Homo sapiens
  misc_RNA (1)...(19): siRNA sense strand
auacguaaacgcuccuuug

SEQ ID NO: 1332688 - RNA, 19 nt, Homo sapiens
  misc_RNA (1)...(19): siRNA sense strand
caaugaggaccaucuguac

SEQ ID NO: 1332689 - RNA, 19 nt, Homo sapiens
  misc_RNA (1)...(19): siRNA sense strand
uaccuacuaugcaaugaag

SEQ ID NO: 1332690 - RNA, 19 nt, Homo sapiens
  misc_RNA (1)...(19): siRNA sense strand
ggacgagcggaucaugugu

SEQ ID NO: 1332691 - RNA, 19 nt, Homo sapiens
  misc_RNA (1)...(19): siRNA sense strand
cuauacugcuuugucuuug

SEQ ID NO: 1332692 - RNA, 19 nt, Homo sapiens
  misc_RNA (1)...(19): siRNA sense strand
gugacacuauacugcuuug

SEQ ID NO: 1332693 - RNA, 19 nt, Homo sapiens
  misc_RNA (1)...(19): siRNA sense strand
ugacuuuggugugagcaau

SEQ ID NO: 1332694 - RNA, 19 nt, Homo sapiens
  misc_RNA (1)...(19): siRNA sense strand
ggugugagcaaugaauuca

SEQ ID NO: 1332695 - RNA, 19 nt, Homo sapiens
  misc_RNA (1)...(19): siRNA sense strand
cauggaguccuucauugug

SEQ ID NO: 1332696 - RNA, 19 nt, Homo sapiens
  misc_RNA (1)...(19): siRNA sense strand
gaagaccaggcccguuucu

SEQ ID NO: 1332697 - RNA, 19 nt, Homo sapiens
  misc_RNA (1)...(19): siRNA sense strand
gacgagcggaucauguguu

SEQ ID NO: 1332698 - RNA, 19 nt, Homo sapiens
  misc_RNA (1)...(19): siRNA sense strand
ugucagcgccuggaaacuu

SEQ ID NO: 1332699 - RNA, 19 nt, Homo sapiens
  misc_RNA (1)...(19): siRNA sense strand
gauacguaaacgcuccuuu

SEQ ID NO: 1332700 - RNA, 19 nt, Homo sapiens
  misc_RNA (1)...(19): siRNA sense strand
caucgaguacuuacacuac

SEQ ID NO: 1332701 - RNA, 19 nt, Homo sapiens
  misc_RNA (1)...(19): siRNA sense strand
ucacccguaugcuggacaa

SEQ ID NO: 1332702 - RNA, 19 nt, Homo sapiens
  misc_RNA (1)...(19): siRNA sense strand
cgacauagcugaggacuug

SEQ ID NO: 1332703 - RNA, 19 nt, Homo sapiens
  misc_RNA (1)...(19): siRNA sense strand
gacaauaccuacuaugcaa

SEQ ID NO: 1332704 - RNA, 19 nt, Homo sapiens
  misc_RNA (1)...(19): siRNA sense strand
gggaaggccuuggauguuu

SEQ ID NO: 1332705 - RNA, 19 nt, Homo sapiens
  misc_RNA (1)...(19): siRNA sense strand
caagaucgcugacuuuggu

SEQ ID NO: 1332706 - RNA, 19 nt, Homo sapiens
  misc_RNA (1)...(19): siRNA sense strand
gaaauugccauccucaaga

SEQ ID NO: 1332707 - RNA, 19 nt, Homo sapiens
  misc_RNA (1)...(19): siRNA sense strand
ugaagaccaugauacguaa

SEQ ID NO: 1332708 - RNA, 19 nt, Homo sapiens
  misc_RNA (1)...(19): siRNA sense strand
ucaaaccacucucugaaga

SEQ ID NO: 1332709 - RNA, 19 nt, Homo sapiens
  misc_RNA (1)...(19): siRNA sense strand
caaguuggccuacaaugaa

SEQ ID NO: 1332710 - RNA, 19 nt, Homo sapiens
  misc_RNA (1)...(19): siRNA sense strand
caaugaaggugcuguccaa

SEQ ID NO: 1332711 - RNA, 19 nt, Homo sapiens
  misc_RNA (1)...(19): siRNA sense strand
acaguaagaucaagaguca

SEQ ID NO: 1332712 - RNA, 19 nt, Homo sapiens
  misc_RNA (1)...(19): siRNA sense strand
ggaaggccuuggauguuug

SEQ ID NO: 1332713 - RNA, 19 nt, Homo sapiens
  misc_RNA (1)...(19): siRNA sense strand
ucaaaggcaucgaguacuu

SEQ ID NO: 1332714 - RNA, 19 nt, Homo sapiens
  misc_RNA (1)...(19): siRNA sense strand
gagcagguguaccaggaaa

SEQ ID NO: 1332715 - RNA, 19 nt, Homo sapiens
  misc_RNA (1)...(19): siRNA sense strand
gugaagaccaugauacgua

SEQ ID NO: 1332716 - RNA, 19 nt, Homo sapiens
  misc_RNA (1)...(19): siRNA sense strand
ggaagugcccacccucaaa

SEQ ID NO: 1332717 - RNA, 19 nt, Homo sapiens
  misc_RNA (1)...(19): siRNA sense strand
ccaaugaggaccaucugua

SEQ ID NO: 1332718 - RNA, 19 nt, Homo sapiens
  misc_RNA (1)...(19): siRNA sense strand
gaucaaaggcaucgaguac

SEQ ID NO: 1332719 - RNA, 19 nt, Homo sapiens
  misc_RNA (1)...(19): siRNA sense strand
caaaggcaucgaguacuua

SEQ ID NO: 1332720 - RNA, 19 nt, Homo sapiens
  misc_RNA (1)...(19): siRNA sense strand
ggaaauugccauccucaag

SEQ ID NO: 1332721 - RNA, 19 nt, Homo sapiens
  misc_RNA (1)...(19): siRNA sense strand
aguauacccugaaggauga

SEQ ID NO: 1332722 - RNA, 19 nt, Homo sapiens
  misc_RNA (1)...(19): siRNA sense strand
ggaggaacgcucacuguca

SEQ ID NO: 1332723 - RNA, 19 nt, Homo sapiens
  misc_RNA (1)...(19): siRNA sense strand
ggcauggaguccuucauug

SEQ ID NO: 1332724 - RNA, 19 nt, Homo sapiens
  misc_RNA (1)...(19): siRNA sense strand
aaauugccauccucaagaa

SEQ ID NO: 1332725 - RNA, 19 nt, Homo sapiens
  misc_RNA (1)...(19): siRNA sense strand
gggcauggaguccuucauu

SEQ ID NO: 1332726 - RNA, 19 nt, Homo sapiens
  misc_RNA (1)...(19): siRNA sense strand
ccugaaggaugaaauugga

SEQ ID NO: 1332727 - RNA, 19 nt, Homo sapiens
  misc_RNA (1)...(19): siRNA sense strand
guacuuacacuaccagaag

SEQ ID NO: 1332728 - RNA, 19 nt, Homo sapiens
  misc_RNA (1)...(19): siRNA sense strand
ucaaguuggccuacaauga

SEQ ID NO: 1332729 - RNA, 19 nt, Homo sapiens
  misc_RNA (1)...(19): siRNA sense strand
ccuauggugucgucaaguu

SEQ ID NO: 1332730 - RNA, 19 nt, Homo sapiens
  misc_RNA (1)...(19): siRNA sense strand
cauccaccgugacaucaaa

SEQ ID NO: 1332731 - RNA, 19 nt, Homo sapiens
  misc_RNA (1)...(19): siRNA sense strand
gagcggaucauguguuuac

SEQ ID NO: 1332732 - RNA, 19 nt, Homo sapiens
  misc_RNA (1)...(19): siRNA sense strand
gcagguguaccaggaaauu

SEQ ID NO: 1332733 - RNA, 19 nt, Homo sapiens
  misc_RNA (1)...(19): siRNA sense strand
caucaagaucgcugacuuu

SEQ ID NO: 1332734 - RNA, 19 nt, Homo sapiens
  misc_RNA (1)...(19): siRNA sense strand
gaucauccaccgugacauc

SEQ ID NO: 1332735 - RNA, 19 nt, Homo sapiens
  misc_RNA (1)...(19): siRNA sense strand
gcauggaguccuucauugu

SEQ ID NO: 1332736 - RNA, 19 nt, Homo sapiens
  misc_RNA (1)...(19): siRNA sense strand
gugacgcgcuccucuccaa

SEQ ID NO: 1332737 - RNA, 19 nt, Homo sapiens
  misc_RNA (1)...(19): siRNA sense strand
acgagcggaucauguguuu

SEQ ID NO: 1332738 - RNA, 19 nt, Homo sapiens
  misc_RNA (1)...(19): siRNA sense strand
acacuauacugcuuugucu

SEQ ID NO: 1332739 - RNA, 19 nt, Homo sapiens
  misc_RNA (1)...(19): siRNA sense strand
ugguggagguccuggauga

SEQ ID NO: 1332740 - RNA, 19 nt, Homo sapiens
  misc_RNA (1)...(19): siRNA sense strand
gucagcgccuggaaacuug

SEQ ID NO: 1332741 - RNA, 19 nt, Homo sapiens
  misc_RNA (1)...(19): siRNA sense strand
ggacuugaaggaccugauc

SEQ ID NO: 1332742 - RNA, 19 nt, Homo sapiens
  misc_RNA (1)...(19): siRNA sense strand
guacaugguguucgaacug

SEQ ID NO: 1332743 - RNA, 19 nt, Homo sapiens
  misc_RNA (1)...(19): siRNA sense strand
ggccgacaguggagucuca

SEQ ID NO: 1332744 - RNA, 19 nt, Homo sapiens
  misc_RNA (1)...(19): siRNA sense strand
ccucaaaccacucucugaa

SEQ ID NO: 1332745 - RNA, 19 nt, Homo sapiens
  misc_RNA (1)...(19): siRNA sense strand
ccaggcccguuucuacuuc

SEQ ID NO: 1332746 - RNA, 19 nt, Homo sapiens
  misc_RNA (1)...(19): siRNA sense strand
cccguaugcuggacaagaa

SEQ ID NO: 1332747 - RNA, 19 nt, Homo sapiens
  misc_RNA (1)...(19): siRNA sense strand
gcaucgaguacuuacacua

SEQ ID NO: 1332748 - RNA, 19 nt, Homo sapiens
  misc_RNA (1)...(19): siRNA sense strand
ugaaggaugaaauuggaaa

SEQ ID NO: 1332749 - RNA, 19 nt, Homo sapiens
  misc_RNA (1)...(19): siRNA sense strand
uagcugaggacuugaagga

SEQ ID NO: 1332750 - RNA, 19 nt, Homo sapiens
  misc_RNA (1)...(19): siRNA sense strand
gaagugcccacccucaaac

SEQ ID NO: 1332751 - RNA, 19 nt, Homo sapiens
  misc_RNA (1)...(19): siRNA sense strand
gguggcagccuggacauga

SEQ ID NO: 1332752 - RNA, 19 nt, Homo sapiens
  misc_RNA (1)...(19): siRNA sense strand
caauaccuacuaugcaaug

SEQ ID NO: 1332753 - RNA, 19 nt, Homo sapiens
  misc_RNA (1)...(19): siRNA sense strand
acaucaagaucgcugacuu

SEQ ID NO: 1332754 - RNA, 19 nt, Homo sapiens
  misc_RNA (1)...(19): siRNA sense strand
ggaucguggugccggaaau

SEQ ID NO: 1332755 - RNA, 19 nt, Homo sapiens
  misc_RNA (1)...(19): siRNA sense strand
aaguuggccuacaaugaaa

SEQ ID NO: 1332756 - RNA, 19 nt, Homo sapiens
  misc_RNA (1)...(19): siRNA sense strand
gaagaccaugauacguaaa

SEQ ID NO: 1332757 - RNA, 19 nt, Homo sapiens
  misc_RNA (1)...(19): siRNA sense strand
cugaagaccaggcccguuu

SEQ ID NO: 1332758 - RNA, 19 nt, Homo sapiens
  misc_RNA (1)...(19): siRNA sense strand
guggcagccuggacaugaa

SEQ ID NO: 1332759 - RNA, 19 nt, Homo sapiens
  misc_RNA (1)...(19): siRNA sense strand
ugacaauaccuacuaugca

SEQ ID NO: 1332760 - RNA, 19 nt, Homo sapiens
  misc_RNA (1)...(19): siRNA sense strand
gcaagcugucucugcaaga

SEQ ID NO: 1332761 - RNA, 19 nt, Homo sapiens
  misc_RNA (1)...(19): siRNA sense strand
gaccugaucacccguaugc

SEQ ID NO: 1332762 - RNA, 19 nt, Homo sapiens
  misc_RNA (1)...(19): siRNA sense strand
acuauacugcuuugucuuu

SEQ ID NO: 1332763 - RNA, 19 nt, Homo sapiens
  misc_RNA (1)...(19): siRNA sense strand
ggcagcagcagcagcgaaa

SEQ ID NO: 1332764 - RNA, 19 nt, Homo sapiens
  misc_RNA (1)...(19): siRNA sense strand
ugugagcaaugaauucaag

SEQ ID NO: 1332765 - RNA, 19 nt, Homo sapiens
  misc_RNA (1)...(19): siRNA sense strand
ugaggaccaucuguacaug

SEQ ID NO: 1332766 - RNA, 19 nt, Homo sapiens
  misc_RNA (1)...(19): siRNA sense strand
gaaggaugaaauuggaaag

SEQ ID NO: 1332767 - RNA, 19 nt, Homo sapiens
  misc_RNA (1)...(19): siRNA sense strand
auacguaaacgcuccuuug

SEQ ID NO: 1332768 - RNA, 19 nt, Homo sapiens
  misc_RNA (1)...(19): siRNA sense strand
caaugaggaccaucuguac

SEQ ID NO: 1332769 - RNA, 19 nt, Homo sapiens
  misc_RNA (1)...(19): siRNA sense strand
uaccuacuaugcaaugaag

SEQ ID NO: 1332770 - RNA, 19 nt, Homo sapiens
  misc_RNA (1)...(19): siRNA sense strand
ggacgagcggaucaugugu

SEQ ID NO: 1332771 - RNA, 19 nt, Homo sapiens
  misc_RNA (1)...(19): siRNA sense strand
cuauacugcuuugucuuug

SEQ ID NO: 1332772 - RNA, 19 nt, Homo sapiens
  misc_RNA (1)...(19): siRNA sense strand
gugacacuauacugcuuug

SEQ ID NO: 1332773 - RNA, 19 nt, Homo sapiens
  misc_RNA (1)...(19): siRNA sense strand
ugacuuuggugugagcaau

SEQ ID NO: 1332774 - RNA, 19 nt, Homo sapiens
  misc_RNA (1)...(19): siRNA sense strand
ggugugagcaaugaauuca

SEQ ID NO: 1332775 - RNA, 19 nt, Homo sapiens
  misc_RNA (1)...(19): siRNA sense strand
cauggaguccuucauugug

SEQ ID NO: 1332776 - RNA, 19 nt, Homo sapiens
  misc_RNA (1)...(19): siRNA sense strand
gaagaccaggcccguuucu

SEQ ID NO: 1332777 - RNA, 19 nt, Homo sapiens
  misc_RNA (1)...(19): siRNA sense strand
gacgagcggaucauguguu

SEQ ID NO: 1332778 - RNA, 19 nt, Homo sapiens
  misc_RNA (1)...(19): siRNA sense strand
ugucagcgccuggaaacuu

SEQ ID NO: 1332779 - RNA, 19 nt, Homo sapiens
  misc_RNA (1)...(19): siRNA sense strand
gauacguaaacgcuccuuu

SEQ ID NO: 1332780 - RNA, 19 nt, Homo sapiens
  misc_RNA (1)...(19): siRNA sense strand
caucgaguacuuacacuac

SEQ ID NO: 1332781 - RNA, 19 nt, Homo sapiens
  misc_RNA (1)...(19): siRNA sense strand
ucacccguaugcuggacaa

SEQ ID NO: 1332782 - RNA, 19 nt, Homo sapiens
  misc_RNA (1)...(19): siRNA sense strand
cgacauagcugaggacuug

SEQ ID NO: 1332783 - RNA, 19 nt, Homo sapiens
  misc_RNA (1)...(19): siRNA sense strand
gacaauaccuacuaugcaa

SEQ ID NO: 1332784 - RNA, 19 nt, Homo sapiens
  misc_RNA (1)...(19): siRNA sense strand
gggaaggccuuggauguuu

SEQ ID NO: 1332785 - RNA, 19 nt, Homo sapiens
  misc_RNA (1)...(19): siRNA sense strand
caagaucgcugacuuuggu

SEQ ID NO: 1332786 - RNA, 19 nt, Homo sapiens
  misc_RNA (1)...(19): siRNA sense strand
gaaauugccauccucaaga

SEQ ID NO: 1332787 - RNA, 19 nt, Homo sapiens
  misc_RNA (1)...(19): siRNA sense strand
ugaagaccaugauacguaa

SEQ ID NO: 1332788 - RNA, 19 nt, Homo sapiens
  misc_RNA (1)...(19): siRNA sense strand
ucaaaccacucucugaaga

SEQ ID NO: 1332789 - RNA, 19 nt, Homo sapiens
  misc_RNA (1)...(19): siRNA sense strand
caaguuggccuacaaugaa

SEQ ID NO: 1332790 - RNA, 19 nt, Homo sapiens
  misc_RNA (1)...(19): siRNA sense strand
caaugaaggugcuguccaa

SEQ ID NO: 1332791 - RNA, 19 nt, Homo sapiens
  misc_RNA (1)...(19): siRNA sense strand
acaguaagaucaagaguca

SEQ ID NO: 1332792 - RNA, 19 nt, Homo sapiens
  misc_RNA (1)...(19): siRNA sense strand
ggaaggccuuggauguuug

SEQ ID NO: 1332793 - RNA, 19 nt, Homo sapiens
  misc_RNA (1)...(19): siRNA sense strand
ucaaaggcaucgaguacuu

SEQ ID NO: 1332794 - RNA, 19 nt, Homo sapiens
  misc_RNA (1)...(19): siRNA sense strand
gagcagguguaccaggaaa

SEQ ID NO: 1332795 - RNA, 19 nt, Homo sapiens
  misc_RNA (1)...(19): siRNA sense strand
gugaagaccaugauacgua

SEQ ID NO: 1332796 - RNA, 19 nt, Homo sapiens
  misc_RNA (1)...(19): siRNA sense strand
ggaagugcccacccucaaa

SEQ ID NO: 1332797 - RNA, 19 nt, Homo sapiens
  misc_RNA (1)...(19): siRNA sense strand
ccaaugaggaccaucugua

SEQ ID NO: 1332798 - RNA, 19 nt, Homo sapiens
  misc_RNA (1)...(19): siRNA sense strand
gaucaaaggcaucgaguac

SEQ ID NO: 1332799 - RNA, 19 nt, Homo sapiens
  misc_RNA (1)...(19): siRNA sense strand
caaaggcaucgaguacuua

SEQ ID NO: 1332800 - RNA, 19 nt, Homo sapiens
  misc_RNA (1)...(19): siRNA sense strand
ggaaauugccauccucaag

SEQ ID NO: 1332801 - RNA, 19 nt, Homo sapiens
  misc_RNA (1)...(19): siRNA sense strand
aguauacccugaaggauga

SEQ ID NO: 1332802 - RNA, 19 nt, Homo sapiens
  misc_RNA (1)...(19): siRNA sense strand
ggaggaacgcucacuguca

SEQ ID NO: 1332803 - RNA, 19 nt, Homo sapiens
  misc_RNA (1)...(19): siRNA sense strand
ggcauggaguccuucauug

SEQ ID NO: 1332804 - RNA, 19 nt, Homo sapiens
  misc_RNA (1)...(19): siRNA sense strand
aaauugccauccucaagaa

SEQ ID NO: 1332805 - RNA, 19 nt, Homo sapiens
  misc_RNA (1)...(19): siRNA sense strand
gggcauggaguccuucauu

SEQ ID NO: 1332806 - RNA, 19 nt, Homo sapiens
  misc_RNA (1)...(19): siRNA sense strand
ccugaaggaugaaauugga

SEQ ID NO: 1332807 - RNA, 19 nt, Homo sapiens
  misc_RNA (1)...(19): siRNA sense strand
guacuuacacuaccagaag

SEQ ID NO: 1332808 - RNA, 19 nt, Homo sapiens
  misc_RNA (1)...(19): siRNA sense strand
ucaaguuggccuacaauga

SEQ ID NO: 1332809 - RNA, 19 nt, Homo sapiens
  misc_RNA (1)...(19): siRNA sense strand
ccuauggugucgucaaguu

SEQ ID NO: 1332810 - RNA, 19 nt, Homo sapiens
  misc_RNA (1)...(19): siRNA sense strand
cauccaccgugacaucaaa

SEQ ID NO: 1332811 - RNA, 19 nt, Homo sapiens
  misc_RNA (1)...(19): siRNA sense strand
gagcggaucauguguuuac

SEQ ID NO: 1332812 - RNA, 19 nt, Homo sapiens
  misc_RNA (1)...(19): siRNA sense strand
gcagguguaccaggaaauu

SEQ ID NO: 1332813 - RNA, 19 nt, Homo sapiens
  misc_RNA (1)...(19): siRNA sense strand
caucaagaucgcugacuuu

SEQ ID NO: 1332814 - RNA, 19 nt, Homo sapiens
  misc_RNA (1)...(19): siRNA sense strand
gaucauccaccgugacauc

SEQ ID NO: 1332815 - RNA, 19 nt, Homo sapiens
  misc_RNA (1)...(19): siRNA sense strand
gcauggaguccuucauugu

SEQ ID NO: 1332816 - RNA, 19 nt, Homo sapiens
  misc_RNA (1)...(19): siRNA sense strand
gugacgcgcuccucuccaa

SEQ ID NO: 1332817 - RNA, 19 nt, Homo sapiens
  misc_RNA (1)...(19): siRNA sense strand
acgagcggaucauguguuu

SEQ ID NO: 1332818 - RNA, 19 nt, Homo sapiens
  misc_RNA (1)...(19): siRNA sense strand
acacuauacugcuuugucu

SEQ ID NO: 1332819 - RNA, 19 nt, Homo sapiens
  misc_RNA (1)...(19): siRNA sense strand
ugguggagguccuggauga

SEQ ID NO: 1332820 - RNA, 19 nt, Homo sapiens
  misc_RNA (1)...(19): siRNA sense strand
gucagcgccuggaaacuug

SEQ ID NO: 1332821 - RNA, 19 nt, Homo sapiens
  misc_RNA (1)...(19): siRNA sense strand
ggacuugaaggaccugauc

SEQ ID NO: 1332822 - RNA, 19 nt, Homo sapiens
  misc_RNA (1)...(19): siRNA sense strand
guacaugguguucgaacug

SEQ ID NO: 1332823 - RNA, 19 nt, Homo sapiens
  misc_RNA (1)...(19): siRNA sense strand
ggccgacaguggagucuca

SEQ ID NO: 1332824 - RNA, 19 nt, Homo sapiens
  misc_RNA (1)...(19): siRNA sense strand
ccucaaaccacucucugaa

SEQ ID NO: 1332825 - RNA, 19 nt, Homo sapiens
  misc_RNA (1)...(19): siRNA sense strand
ccaggcccguuucuacuuc

SEQ ID NO: 1332826 - RNA, 19 nt, Homo sapiens
  misc_RNA (1)...(19): siRNA sense strand
cccguaugcuggacaagaa

SEQ ID NO: 1332827 - RNA, 19 nt, Homo sapiens
  misc_RNA (1)...(19): siRNA sense strand
gcaucgaguacuuacacua

SEQ ID NO: 1332828 - RNA, 19 nt, Homo sapiens
  misc_RNA (1)...(19): siRNA sense strand
ugaaggaugaaauuggaaa

SEQ ID NO: 1332829 - RNA, 19 nt, Homo sapiens
  misc_RNA (1)...(19): siRNA sense strand
uagcugaggacuugaagga

SEQ ID NO: 1332830 - RNA, 19 nt, Homo sapiens
  misc_RNA (1)...(19): siRNA sense strand
gaagugcccacccucaaac

SEQ ID NO: 1332831 - RNA, 19 nt, Homo sapiens
  misc_RNA (1)...(19): siRNA sense strand
gguggcagccuggacauga

SEQ ID NO: 1332832 - RNA, 19 nt, Homo sapiens
  misc_RNA (1)...(19): siRNA sense strand
caauaccuacuaugcaaug

SEQ ID NO: 1332833 - RNA, 19 nt, Homo sapiens
  misc_RNA (1)...(19): siRNA sense strand
acaucaagaucgcugacuu

SEQ ID NO: 1332834 - RNA, 19 nt, Homo sapiens
  misc_RNA (1)...(19): siRNA sense strand
ggaucguggugccggaaau

SEQ ID NO: 1332835 - RNA, 19 nt, Homo sapiens
  misc_RNA (1)...(19): siRNA sense strand
aaguuggccuacaaugaaa

SEQ ID NO: 1332836 - RNA, 19 nt, Homo sapiens
  misc_RNA (1)...(19): siRNA sense strand
gaagaccaugauacguaaa

SEQ ID NO: 1332837 - RNA, 19 nt, Homo sapiens
  misc_RNA (1)...(19): siRNA sense strand
cugaagaccaggcccguuu

SEQ ID NO: 1332838 - RNA, 19 nt, Homo sapiens
  misc_RNA (1)...(19): siRNA sense strand
guggcagccuggacaugaa

SEQ ID NO: 1332839 - RNA, 19 nt, Homo sapiens
  misc_RNA (1)...(19): siRNA sense strand
ugacaauaccuacuaugca

SEQ ID NO: 1332840 - RNA, 19 nt, Homo sapiens
  misc_RNA (1)...(19): siRNA sense strand
gcaagcugucucugcaaga

SEQ ID NO: 1332841 - RNA, 19 nt, Homo sapiens
  misc_RNA (1)...(19): siRNA sense strand
gaccugaucacccguaugc

SEQ ID NO: 1332842 - RNA, 19 nt, Homo sapiens
  misc_RNA (1)...(19): siRNA sense strand
acuauacugcuuugucuuu

SEQ ID NO: 1332843 - RNA, 19 nt, Homo sapiens
  misc_RNA (1)...(19): siRNA sense strand
ggcagcagcagcagcgaaa

SEQ ID NO: 1332844 - RNA, 19 nt, Homo sapiens
  misc_RNA (1)...(19): siRNA sense strand
ugugagcaaugaauucaag

SEQ ID NO: 1332845 - RNA, 19 nt, Homo sapiens
  misc_RNA (1)...(19): siRNA sense strand
ugaggaccaucuguacaug

SEQ ID NO: 1332846 - RNA, 19 nt, Homo sapiens
  misc_RNA (1)...(19): siRNA sense strand
gaaggaugaaauuggaaag

SEQ ID NO: 1332847 - RNA, 19 nt, Homo sapiens
  misc_RNA (1)...(19): siRNA sense strand
auacguaaacgcuccuuug

SEQ ID NO: 1332848 - RNA, 19 nt, Homo sapiens
  misc_RNA (1)...(19): siRNA sense strand
caaugaggaccaucuguac

SEQ ID NO: 1332849 - RNA, 19 nt, Homo sapiens
  misc_RNA (1)...(19): siRNA sense strand
uaccuacuaugcaaugaag

SEQ ID NO: 1332850 - RNA, 19 nt, Homo sapiens
  misc_RNA (1)...(19): siRNA sense strand
ggacgagcggaucaugugu

SEQ ID NO: 1332851 - RNA, 19 nt, Homo sapiens
  misc_RNA (1)...(19): siRNA sense strand
cuauacugcuuugucuuug

SEQ ID NO: 1332852 - RNA, 19 nt, Homo sapiens
  misc_RNA (1)...(19): siRNA sense strand
gugacacuauacugcuuug

SEQ ID NO: 1332853 - RNA, 19 nt, Homo sapiens
  misc_RNA (1)...(19): siRNA sense strand
ugacuuuggugugagcaau

SEQ ID NO: 1332854 - RNA, 19 nt, Homo sapiens
  misc_RNA (1)...(19): siRNA sense strand
ggugugagcaaugaauuca

SEQ ID NO: 1332855 - RNA, 19 nt, Homo sapiens
  misc_RNA (1)...(19): siRNA sense strand
cauggaguccuucauugug

SEQ ID NO: 1332856 - RNA, 19 nt, Homo sapiens
  misc_RNA (1)...(19): siRNA sense strand
gaagaccaggcccguuucu

SEQ ID NO: 1332857 - RNA, 19 nt, Homo sapiens
  misc_RNA (1)...(19): siRNA sense strand
gacgagcggaucauguguu

SEQ ID NO: 1332858 - RNA, 19 nt, Homo sapiens
  misc_RNA (1)...(19): siRNA sense strand
ugucagcgccuggaaacuu

SEQ ID NO: 1332859 - RNA, 19 nt, Homo sapiens
  misc_RNA (1)...(19): siRNA sense strand
gauacguaaacgcuccuuu

SEQ ID NO: 1332860 - RNA, 19 nt, Homo sapiens
  misc_RNA (1)...(19): siRNA sense strand
caucgaguacuuacacuac

SEQ ID NO: 1332861 - RNA, 19 nt, Homo sapiens
  misc_RNA (1)...(19): siRNA sense strand
ucacccguaugcuggacaa

SEQ ID NO: 1332862 - RNA, 19 nt, Homo sapiens
  misc_RNA (1)...(19): siRNA sense strand
cgacauagcugaggacuug

SEQ ID NO: 1332863 - RNA, 19 nt, Homo sapiens
  misc_RNA (1)...(19): siRNA sense strand
gacaauaccuacuaugcaa

SEQ ID NO: 1332864 - RNA, 19 nt, Homo sapiens
  misc_RNA (1)...(19): siRNA sense strand
gggaaggccuuggauguuu

SEQ ID NO: 1332865 - RNA, 19 nt, Homo sapiens
  misc_RNA (1)...(19): siRNA sense strand
caagaucgcugacuuuggu

SEQ ID NO: 1332866 - RNA, 19 nt, Homo sapiens
  misc_RNA (1)...(19): siRNA sense strand
gaaauugccauccucaaga

SEQ ID NO: 1332867 - RNA, 19 nt, Homo sapiens
  misc_RNA (1)...(19): siRNA sense strand
ugaagaccaugauacguaa

SEQ ID NO: 1332868 - RNA, 19 nt, Homo sapiens
  misc_RNA (1)...(19): siRNA sense strand
ucaaaccacucucugaaga

SEQ ID NO: 1332869 - RNA, 19 nt, Homo sapiens
  misc_RNA (1)...(19): siRNA sense strand
caaguuggccuacaaugaa

SEQ ID NO: 1332870 - RNA, 19 nt, Homo sapiens
  misc_RNA (1)...(19): siRNA sense strand
caaugaaggugcuguccaa

SEQ ID NO: 1332871 - RNA, 19 nt, Homo sapiens
  misc_RNA (1)...(19): siRNA sense strand
acaguaagaucaagaguca

SEQ ID NO: 1332872 - RNA, 19 nt, Homo sapiens
  misc_RNA (1)...(19): siRNA sense strand
ggaaggccuuggauguuug

SEQ ID NO: 1332873 - RNA, 19 nt, Homo sapiens
  misc_RNA (1)...(19): siRNA sense strand
ucaaaggcaucgaguacuu

SEQ ID NO: 1332874 - RNA, 19 nt, Homo sapiens
  misc_RNA (1)...(19): siRNA sense strand
gagcagguguaccaggaaa

SEQ ID NO: 1332875 - RNA, 19 nt, Homo sapiens
  misc_RNA (1)...(19): siRNA sense strand
gugaagaccaugauacgua

SEQ ID NO: 1332876 - RNA, 19 nt, Homo sapiens
  misc_RNA (1)...(19): siRNA sense strand
ggaagugcccacccucaaa

SEQ ID NO: 1332877 - RNA, 19 nt, Homo sapiens
  misc_RNA (1)...(19): siRNA sense strand
ccaaugaggaccaucugua

SEQ ID NO: 1332878 - RNA, 19 nt, Homo sapiens
  misc_RNA (1)...(19): siRNA sense strand
gaucaaaggcaucgaguac

SEQ ID NO: 1332879 - RNA, 19 nt, Homo sapiens
  misc_RNA (1)...(19): siRNA sense strand
caaaggcaucgaguacuua

SEQ ID NO: 1332880 - RNA, 19 nt, Homo sapiens
  misc_RNA (1)...(19): siRNA sense strand
ggaaauugccauccucaag

SEQ ID NO: 1332881 - RNA, 19 nt, Homo sapiens
  misc_RNA (1)...(19): siRNA sense strand
aguauacccugaaggauga

SEQ ID NO: 1332882 - RNA, 19 nt, Homo sapiens
  misc_RNA (1)...(19): siRNA sense strand
ggaggaacgcucacuguca

SEQ ID NO: 1332883 - RNA, 19 nt, Homo sapiens
  misc_RNA (1)...(19): siRNA sense strand
ggcauggaguccuucauug

SEQ ID NO: 1332884 - RNA, 19 nt, Homo sapiens
  misc_RNA (1)...(19): siRNA sense strand
aaauugccauccucaagaa

SEQ ID NO: 1332885 - RNA, 19 nt, Homo sapiens
  misc_RNA (1)...(19): siRNA sense strand
gggcauggaguccuucauu

SEQ ID NO: 1332886 - RNA, 19 nt, Homo sapiens
  misc_RNA (1)...(19): siRNA sense strand
ccugaaggaugaaauugga

SEQ ID NO: 1332887 - RNA, 19 nt, Homo sapiens
  misc_RNA (1)...(19): siRNA sense strand
guacuuacacuaccagaag

SEQ ID NO: 1332888 - RNA, 19 nt, Homo sapiens
  misc_RNA (1)...(19): siRNA sense strand
ucaaguuggccuacaauga

SEQ ID NO: 1332889 - RNA, 19 nt, Homo sapiens
  misc_RNA (1)...(19): siRNA sense strand
ccuauggugucgucaaguu

SEQ ID NO: 1332890 - RNA, 19 nt, Homo sapiens
  misc_RNA (1)...(19): siRNA sense strand
cauccaccgugacaucaaa

SEQ ID NO: 1332891 - RNA, 19 nt, Homo sapiens
  misc_RNA (1)...(19): siRNA sense strand
gagcggaucauguguuuac

SEQ ID NO: 1332892 - RNA, 19 nt, Homo sapiens
  misc_RNA (1)...(19): siRNA sense strand
gcagguguaccaggaaauu

SEQ ID NO: 1332893 - RNA, 19 nt, Homo sapiens
  misc_RNA (1)...(19): siRNA sense strand
caucaagaucgcugacuuu

SEQ ID NO: 1332894 - RNA, 19 nt, Homo sapiens
  misc_RNA (1)...(19): siRNA sense strand
gaucauccaccgugacauc

SEQ ID NO: 1332895 - RNA, 19 nt, Homo sapiens
  misc_RNA (1)...(19): siRNA sense strand
gcauggaguccuucauugu

SEQ ID NO: 1332896 - RNA, 19 nt, Homo sapiens
  misc_RNA (1)...(19): siRNA sense strand
gugacgcgcuccucuccaa

SEQ ID NO: 1332897 - RNA, 19 nt, Homo sapiens
  misc_RNA (1)...(19): siRNA sense strand
acgagcggaucauguguuu

SEQ ID NO: 1332898 - RNA, 19 nt, Homo sapiens
  misc_RNA (1)...(19): siRNA sense strand
acacuauacugcuuugucu

SEQ ID NO: 1332899 - RNA, 19 nt, Homo sapiens
  misc_RNA (1)...(19): siRNA sense strand
ugguggagguccuggauga

SEQ ID NO: 1332900 - RNA, 19 nt, Homo sapiens
  misc_RNA (1)...(19): siRNA sense strand
gucagcgccuggaaacuug

SEQ ID NO: 1332901 - RNA, 19 nt, Homo sapiens
  misc_RNA (1)...(19): siRNA sense strand
ggacuugaaggaccugauc

SEQ ID NO: 1332902 - RNA, 19 nt, Homo sapiens
  misc_RNA (1)...(19): siRNA sense strand
guacaugguguucgaacug

SEQ ID NO: 1332903 - RNA, 19 nt, Homo sapiens
  misc_RNA (1)...(19): siRNA sense strand
ggccgacaguggagucuca

SEQ ID NO: 1332904 - RNA, 19 nt, Homo sapiens
  misc_RNA (1)...(19): siRNA sense strand
ccucaaaccacucucugaa

SEQ ID NO: 1332905 - RNA, 19 nt, Homo sapiens
  misc_RNA (1)...(19): siRNA sense strand
ccaggcccguuucuacuuc

SEQ ID NO: 1332906 - RNA, 19 nt, Homo sapiens
  misc_RNA (1)...(19): siRNA sense strand
cccguaugcuggacaagaa

SEQ ID NO: 1332907 - RNA, 19 nt, Homo sapiens
  misc_RNA (1)...(19): siRNA sense strand
gcaucgaguacuuacacua

SEQ ID NO: 1332908 - RNA, 19 nt, Homo sapiens
  misc_RNA (1)...(19): siRNA sense strand
ugaaggaugaaauuggaaa

SEQ ID NO: 1332909 - RNA, 19 nt, Homo sapiens
  misc_RNA (1)...(19): siRNA sense strand
uagcugaggacuugaagga

SEQ ID NO: 1332910 - RNA, 19 nt, Homo sapiens
  misc_RNA (1)...(19): siRNA sense strand
gaagugcccacccucaaac

SEQ ID NO: 1332911 - RNA, 19 nt, Homo sapiens
  misc_RNA (1)...(19): siRNA sense strand
gguggcagccuggacauga

SEQ ID NO: 1332912 - RNA, 19 nt, Homo sapiens
  misc_RNA (1)...(19): siRNA sense strand
caauaccuacuaugcaaug

SEQ ID NO: 1332913 - RNA, 19 nt, Homo sapiens
  misc_RNA (1)...(19): siRNA sense strand
acaucaagaucgcugacuu

SEQ ID NO: 1332914 - RNA, 19 nt, Homo sapiens
  misc_RNA (1)...(19): siRNA sense strand
ggaucguggugccggaaau

SEQ ID NO: 1332915 - RNA, 19 nt, Homo sapiens
  misc_RNA (1)...(19): siRNA sense strand
aaguuggccuacaaugaaa

SEQ ID NO: 1332916 - RNA, 19 nt, Homo sapiens
  misc_RNA (1)...(19): siRNA sense strand
gaagaccaugauacguaaa

SEQ ID NO: 1332917 - RNA, 19 nt, Homo sapiens
  misc_RNA (1)...(19): siRNA sense strand
cugaagaccaggcccguuu

SEQ ID NO: 1332918 - RNA, 19 nt, Homo sapiens
  misc_RNA (1)...(19): siRNA sense strand
guggcagccuggacaugaa

SEQ ID NO: 1332919 - RNA, 19 nt, Homo sapiens
  misc_RNA (1)...(19): siRNA sense strand
ugacaauaccuacuaugca

SEQ ID NO: 1332920 - RNA, 19 nt, Homo sapiens
  misc_RNA (1)...(19): siRNA sense strand
gcaagcugucucugcaaga

SEQ ID NO: 1332921 - RNA, 19 nt, Homo sapiens
  misc_RNA (1)...(19): siRNA sense strand
gaccugaucacccguaugc

SEQ ID NO: 1332922 - RNA, 19 nt, Homo sapiens
  misc_RNA (1)...(19): siRNA sense strand
acuauacugcuuugucuuu

SEQ ID NO: 1332923 - RNA, 19 nt, Homo sapiens
  misc_RNA (1)...(19): siRNA sense strand
ggcagcagcagcagcgaaa

SEQ ID NO: 1332924 - RNA, 19 nt, Homo sapiens
  misc_RNA (1)...(19): siRNA sense strand
ugugagcaaugaauucaag

SEQ ID NO: 1332925 - RNA, 19 nt, Homo sapiens
  misc_RNA (1)...(19): siRNA sense strand
ugaggaccaucuguacaug

SEQ ID NO: 1332926 - RNA, 19 nt, Homo sapiens
  misc_RNA (1)...(19): siRNA sense strand
gaaggaugaaauuggaaag

SEQ ID NO: 1332927 - RNA, 19 nt, Homo sapiens
  misc_RNA (1)...(19): siRNA sense strand
auacguaaacgcuccuuug

SEQ ID NO: 1332928 - RNA, 19 nt, Homo sapiens
  misc_RNA (1)...(19): siRNA sense strand
caaugaggaccaucuguac

SEQ ID NO: 1332929 - RNA, 19 nt, Homo sapiens
  misc_RNA (1)...(19): siRNA sense strand
uaccuacuaugcaaugaag

SEQ ID NO: 1332930 - RNA, 19 nt, Homo sapiens
  misc_RNA (1)...(19): siRNA sense strand
ggacgagcggaucaugugu

SEQ ID NO: 1332931 - RNA, 19 nt, Homo sapiens
  misc_RNA (1)...(19): siRNA sense strand
cuauacugcuuugucuuug

SEQ ID NO: 1332932 - RNA, 19 nt, Homo sapiens
  misc_RNA (1)...(19): siRNA sense strand
gugacacuauacugcuuug

SEQ ID NO: 1332933 - RNA, 19 nt, Homo sapiens
  misc_RNA (1)...(19): siRNA sense strand
ugacuuuggugugagcaau

SEQ ID NO: 1332934 - RNA, 19 nt, Homo sapiens
  misc_RNA (1)...(19): siRNA sense strand
ggugugagcaaugaauuca

SEQ ID NO: 1332935 - RNA, 19 nt, Homo sapiens
  misc_RNA (1)...(19): siRNA sense strand
cauggaguccuucauugug

SEQ ID NO: 1332936 - RNA, 19 nt, Homo sapiens
  misc_RNA (1)...(19): siRNA sense strand
gaagaccaggcccguuucu

SEQ ID NO: 1332937 - RNA, 19 nt, Homo sapiens
  misc_RNA (1)...(19): siRNA sense strand
gacgagcggaucauguguu

SEQ ID NO: 1332938 - RNA, 19 nt, Homo sapiens
  misc_RNA (1)...(19): siRNA sense strand
ugucagcgccuggaaacuu

SEQ ID NO: 1332939 - RNA, 19 nt, Homo sapiens
  misc_RNA (1)...(19): siRNA sense strand
gauacguaaacgcuccuuu

SEQ ID NO: 1332940 - RNA, 19 nt, Homo sapiens
  misc_RNA (1)...(19): siRNA sense strand
caucgaguacuuacacuac

SEQ ID NO: 1332941 - RNA, 19 nt, Homo sapiens
  misc_RNA (1)...(19): siRNA sense strand
ucacccguaugcuggacaa

SEQ ID NO: 1332942 - RNA, 19 nt, Homo sapiens
  misc_RNA (1)...(19): siRNA sense strand
gaagcugggcuguguggua

SEQ ID NO: 1332943 - RNA, 19 nt, Homo sapiens
  misc_RNA (1)...(19): siRNA sense strand
cugcagggcuuccucuuuc

SEQ ID NO: 1332944 - RNA, 19 nt, Homo sapiens
  misc_RNA (1)...(19): siRNA sense strand
guccaggccuguccgaaug

SEQ ID NO: 1332945 - RNA, 19 nt, Homo sapiens
  misc_RNA (1)...(19): siRNA sense strand
cuacgcuucugccgcauga

SEQ ID NO: 1332946 - RNA, 19 nt, Homo sapiens
  misc_RNA (1)...(19): siRNA sense strand
ggacuucccggacgaguac

SEQ ID NO: 1332947 - RNA, 19 nt, Homo sapiens
  misc_RNA (1)...(19): siRNA sense strand
aggagaagcugggcugugu

SEQ ID NO: 1332948 - RNA, 19 nt, Homo sapiens
  misc_RNA (1)...(19): siRNA sense strand
ccgaaugcuuccaggugaa

SEQ ID NO: 1332949 - RNA, 19 nt, Homo sapiens
  misc_RNA (1)...(19): siRNA sense strand
agacagaggagggcaucua

SEQ ID NO: 1332950 - RNA, 19 nt, Homo sapiens
  misc_RNA (1)...(19): siRNA sense strand
gaccagacgcagcaacaca

SEQ ID NO: 1332951 - RNA, 19 nt, Homo sapiens
  misc_RNA (1)...(19): siRNA sense strand
acugugaccagaucuguuu

SEQ ID NO: 1332952 - RNA, 19 nt, Homo sapiens
  misc_RNA (1)...(19): siRNA sense strand
gggaugcuuuguggacuca

SEQ ID NO: 1332953 - RNA, 19 nt, Homo sapiens
  misc_RNA (1)...(19): siRNA sense strand
agacgcagcaacacagcua

SEQ ID NO: 1332954 - RNA, 19 nt, Homo sapiens
  misc_RNA (1)...(19): siRNA sense strand
cagaggagggcaucuacug

SEQ ID NO: 1332955 - RNA, 19 nt, Homo sapiens
  misc_RNA (1)...(19): siRNA sense strand
gcacaacuucugccguaac

SEQ ID NO: 1332956 - RNA, 19 nt, Homo sapiens
  misc_RNA (1)...(19): siRNA sense strand
caccgacugugaccagauc

SEQ ID NO: 1332957 - RNA, 19 nt, Homo sapiens
  misc_RNA (1)...(19): siRNA sense strand
gcugggcgucuaugaagug

SEQ ID NO: 1332958 - RNA, 19 nt, Homo sapiens
  misc_RNA (1)...(19): siRNA sense strand
cugcagggcuuccucuuuc

SEQ ID NO: 1332959 - RNA, 19 nt, Homo sapiens
  misc_RNA (1)...(19): siRNA sense strand
guccaggccuguccgaaug

SEQ ID NO: 1332960 - RNA, 19 nt, Homo sapiens
  misc_RNA (1)...(19): siRNA sense strand
cuacgcuucugccgcauga

SEQ ID NO: 1332961 - RNA, 19 nt, Homo sapiens
  misc_RNA (1)...(19): siRNA sense strand
ggacuucccggacgaguac

SEQ ID NO: 1332962 - RNA, 19 nt, Homo sapiens
  misc_RNA (1)...(19): siRNA sense strand
ccgaaugcuuccaggugaa

SEQ ID NO: 1332963 - RNA, 19 nt, Homo sapiens
  misc_RNA (1)...(19): siRNA sense strand
agacagaggagggcaucua

SEQ ID NO: 1332964 - RNA, 19 nt, Homo sapiens
  misc_RNA (1)...(19): siRNA sense strand
gaccagacgcagcaacaca

SEQ ID NO: 1332965 - RNA, 19 nt, Homo sapiens
  misc_RNA (1)...(19): siRNA sense strand
acugugaccagaucuguuu

SEQ ID NO: 1332966 - RNA, 19 nt, Homo sapiens
  misc_RNA (1)...(19): siRNA sense strand
gggaugcuuuguggacuca

SEQ ID NO: 1332967 - RNA, 19 nt, Homo sapiens
  misc_RNA (1)...(19): siRNA sense strand
agacgcagcaacacagcua

SEQ ID NO: 1332968 - RNA, 19 nt, Homo sapiens
  misc_RNA (1)...(19): siRNA sense strand
cagaggagggcaucuacug

SEQ ID NO: 1332969 - RNA, 19 nt, Homo sapiens
  misc_RNA (1)...(19): siRNA sense strand
gcacaacuucugccguaac

SEQ ID NO: 1332970 - RNA, 19 nt, Homo sapiens
  misc_RNA (1)...(19): siRNA sense strand
caccgacugugaccagauc

SEQ ID NO: 1332971 - RNA, 19 nt, Homo sapiens
  misc_RNA (1)...(19): siRNA sense strand
gcugggcgucuaugaagug

SEQ ID NO: 1332972 - RNA, 19 nt, Homo sapiens
  misc_RNA (1)...(19): siRNA sense strand
cugcagggcuuccucuuuc

SEQ ID NO: 1332973 - RNA, 19 nt, Homo sapiens
  misc_RNA (1)...(19): siRNA sense strand
guccaggccuguccgaaug

SEQ ID NO: 1332974 - RNA, 19 nt, Homo sapiens
  misc_RNA (1)...(19): siRNA sense strand
cuacgcuucugccgcauga

SEQ ID NO: 1332975 - RNA, 19 nt, Homo sapiens
  misc_RNA (1)...(19): siRNA sense strand
ggacuucccggacgaguac

SEQ ID NO: 1332976 - RNA, 19 nt, Homo sapiens
  misc_RNA (1)...(19): siRNA sense strand
ccgaaugcuuccaggugaa

SEQ ID NO: 1332977 - RNA, 19 nt, Homo sapiens
  misc_RNA (1)...(19): siRNA sense strand
agacagaggagggcaucua

SEQ ID NO: 1332978 - RNA, 19 nt, Homo sapiens
  misc_RNA (1)...(19): siRNA sense strand
gaccagacgcagcaacaca

SEQ ID NO: 1332979 - RNA, 19 nt, Homo sapiens
  misc_RNA (1)...(19): siRNA sense strand
acugugaccagaucuguuu

SEQ ID NO: 1332980 - RNA, 19 nt, Homo sapiens
  misc_RNA (1)...(19): siRNA sense strand
gggaugcuuuguggacuca

SEQ ID NO: 1332981 - RNA, 19 nt, Homo sapiens
  misc_RNA (1)...(19): siRNA sense strand
agacgcagcaacacagcua

SEQ ID NO: 1332982 - RNA, 19 nt, Homo sapiens
  misc_RNA (1)...(19): siRNA sense strand
cagaggagggcaucuacug

SEQ ID NO: 1332983 - RNA, 19 nt, Homo sapiens
  misc_RNA (1)...(19): siRNA sense strand
gcacaacuucugccguaac

SEQ ID NO: 1332984 - RNA, 19 nt, Homo sapiens
  misc_RNA (1)...(19): siRNA sense strand
caccgacugugaccagauc

SEQ ID NO: 1332985 - RNA, 19 nt, Homo sapiens
  misc_RNA (1)...(19): siRNA sense strand
gcugggcgucuaugaagug

SEQ ID NO: 1332986 - RNA, 19 nt, Homo sapiens
  misc_RNA (1)...(19): siRNA sense strand
gaagcugggcuguguggua

SEQ ID NO: 1332987 - RNA, 19 nt, Homo sapiens
  misc_RNA (1)...(19): siRNA sense strand
gcucaucuccgcucucuga

SEQ ID NO: 1332988 - RNA, 19 nt, Homo sapiens
  misc_RNA (1)...(19): siRNA sense strand
guccaggccuguccgaaug

SEQ ID NO: 1332989 - RNA, 19 nt, Homo sapiens
  misc_RNA (1)...(19): siRNA sense strand
cugcagggcuuccucuuuc

SEQ ID NO: 1332990 - RNA, 19 nt, Homo sapiens
  misc_RNA (1)...(19): siRNA sense strand
cuacgcuucugccgcauga

SEQ ID NO: 1332991 - RNA, 19 nt, Homo sapiens
  misc_RNA (1)...(19): siRNA sense strand
ggacuucccggacgaguac

SEQ ID NO: 1332992 - RNA, 19 nt, Homo sapiens
  misc_RNA (1)...(19): siRNA sense strand
aggagaagcugggcugugu

SEQ ID NO: 1332993 - RNA, 19 nt, Homo sapiens
  misc_RNA (1)...(19): siRNA sense strand
ccgaaugcuuccaggugaa

SEQ ID NO: 1332994 - RNA, 19 nt, Homo sapiens
  misc_RNA (1)...(19): siRNA sense strand
agacagaggagggcaucua

SEQ ID NO: 1332995 - RNA, 19 nt, Homo sapiens
  misc_RNA (1)...(19): siRNA sense strand
gaccagacgcagcaacaca

SEQ ID NO: 1332996 - RNA, 19 nt, Homo sapiens
  misc_RNA (1)...(19): siRNA sense strand
acugugaccagaucuguuu

SEQ ID NO: 1332997 - RNA, 19 nt, Homo sapiens
  misc_RNA (1)...(19): siRNA sense strand
gggaugcuuuguggacuca

SEQ ID NO: 1332998 - RNA, 19 nt, Homo sapiens
  misc_RNA (1)...(19): siRNA sense strand
agacgcagcaacacagcua

SEQ ID NO: 1332999 - RNA, 19 nt, Homo sapiens
  misc_RNA (1)...(19): siRNA sense strand
cagaggagggcaucuacug

SEQ ID NO: 1333000 - RNA, 19 nt, Homo sapiens
  misc_RNA (1)...(19): siRNA sense strand
gcacaacuucugccguaac

SEQ ID NO: 1333001 - RNA, 19 nt, Homo sapiens
  misc_RNA (1)...(19): siRNA sense strand
caccgacugugaccagauc

SEQ ID NO: 1333002 - RNA, 19 nt, Homo sapiens
  misc_RNA (1)...(19): siRNA sense strand
gcugggcgucuaugaagug

SEQ ID NO: 1333003 - RNA, 19 nt, Homo sapiens
  misc_RNA (1)...(19): siRNA sense strand
ucccugcgcucgcucaucu

SEQ ID NO: 1333004 - RNA, 19 nt, Homo sapiens
  misc_RNA (1)...(19): siRNA sense strand
caacaaggcuguguacaug

SEQ ID NO: 1333005 - RNA, 19 nt, Homo sapiens
  misc_RNA (1)...(19): siRNA sense strand
caacaucuccuggcucuuu

SEQ ID NO: 1333006 - RNA, 19 nt, Homo sapiens
  misc_RNA (1)...(19): siRNA sense strand
cagaggagcuccaggcaau

SEQ ID NO: 1333007 - RNA, 19 nt, Homo sapiens
  misc_RNA (1)...(19): siRNA sense strand
ggagaugccugaggaugga

SEQ ID NO: 1333008 - RNA, 19 nt, Homo sapiens
  misc_RNA (1)...(19): siRNA sense strand
ccaagagacugcccugcaa

SEQ ID NO: 1333009 - RNA, 19 nt, Homo sapiens
  misc_RNA (1)...(19): siRNA sense strand
gcacaccuucccacucuuu

SEQ ID NO: 1333010 - RNA, 19 nt, Homo sapiens
  misc_RNA (1)...(19): siRNA sense strand
caacaugaacacccuguau

SEQ ID NO: 1333011 - RNA, 19 nt, Homo sapiens
  misc_RNA (1)...(19): siRNA sense strand
ucaucaagguucugcugua

SEQ ID NO: 1333012 - RNA, 19 nt, Homo sapiens
  misc_RNA (1)...(19): siRNA sense strand
ugucuggccuucaccguuu

SEQ ID NO: 1333013 - RNA, 19 nt, Homo sapiens
  misc_RNA (1)...(19): siRNA sense strand
cgcauugucucucuuaugu

SEQ ID NO: 1333014 - RNA, 19 nt, Homo sapiens
  misc_RNA (1)...(19): siRNA sense strand
cauugucucucuuauguuc

SEQ ID NO: 1333015 - RNA, 19 nt, Homo sapiens
  misc_RNA (1)...(19): siRNA sense strand
gugcacaccuucccacucu

SEQ ID NO: 1333016 - RNA, 19 nt, Homo sapiens
  misc_RNA (1)...(19): siRNA sense strand
caugagacaguucaagaaa

SEQ ID NO: 1333017 - RNA, 19 nt, Homo sapiens
  misc_RNA (1)...(19): siRNA sense strand
ucaccaucuucaucaagua

SEQ ID NO: 1333018 - RNA, 19 nt, Homo sapiens
  misc_RNA (1)...(19): siRNA sense strand
cuucuucucuuccucaaau

SEQ ID NO: 1333019 - RNA, 19 nt, Homo sapiens
  misc_RNA (1)...(19): siRNA sense strand
ucaagguucugcuguacau

SEQ ID NO: 1333020 - RNA, 19 nt, Homo sapiens
  misc_RNA (1)...(19): siRNA sense strand
gcauggcaguccuguacau

SEQ ID NO: 1333021 - RNA, 19 nt, Homo sapiens
  misc_RNA (1)...(19): siRNA sense strand
ccaggcauguucccacugu

SEQ ID NO: 1333022 - RNA, 19 nt, Homo sapiens
  misc_RNA (1)...(19): siRNA sense strand
ggacaacaaggcuguguac

SEQ ID NO: 1333023 - RNA, 19 nt, Homo sapiens
  misc_RNA (1)...(19): siRNA sense strand
gcaaggugaugggcaaggu

SEQ ID NO: 1333024 - RNA, 19 nt, Homo sapiens
  misc_RNA (1)...(19): siRNA sense strand
caacugagggcagcagaga

SEQ ID NO: 1333025 - RNA, 19 nt, Homo sapiens
  misc_RNA (1)...(19): siRNA sense strand
ugaggaccguguggacuuu

SEQ ID NO: 1333026 - RNA, 19 nt, Homo sapiens
  misc_RNA (1)...(19): siRNA sense strand
guugcacucuucacucuuc

SEQ ID NO: 1333027 - RNA, 19 nt, Homo sapiens
  misc_RNA (1)...(19): siRNA sense strand
ggugacuggugccaagaga

SEQ ID NO: 1333028 - RNA, 19 nt, Homo sapiens
  misc_RNA (1)...(19): siRNA sense strand
ugagacaguucaagaaagc

SEQ ID NO: 1333029 - RNA, 19 nt, Homo sapiens
  misc_RNA (1)...(19): siRNA sense strand
gccaugagacaguucaaga

SEQ ID NO: 1333030 - RNA, 19 nt, Homo sapiens
  misc_RNA (1)...(19): siRNA sense strand
ugaggagacugccacuaca

SEQ ID NO: 1333031 - RNA, 19 nt, Homo sapiens
  misc_RNA (1)...(19): siRNA sense strand
gcaacaugaacacccugua

SEQ ID NO: 1333032 - RNA, 19 nt, Homo sapiens
  misc_RNA (1)...(19): siRNA sense strand
gauggagcaccuucuggaa

SEQ ID NO: 1333033 - RNA, 19 nt, Homo sapiens
  misc_RNA (1)...(19): siRNA sense strand
cgagccauccgcaacauga

SEQ ID NO: 1333034 - RNA, 19 nt, Homo sapiens
  misc_RNA (1)...(19): siRNA sense strand
gaacgcagccccaacaucu

SEQ ID NO: 1333035 - RNA, 19 nt, Homo sapiens
  misc_RNA (1)...(19): siRNA sense strand
gcacucuucacucuucuuc

SEQ ID NO: 1333036 - RNA, 19 nt, Homo sapiens
  misc_RNA (1)...(19): siRNA sense strand
ccaugagacaguucaagaa

SEQ ID NO: 1333037 - RNA, 19 nt, Homo sapiens
  misc_RNA (1)...(19): siRNA sense strand
ucaccgugcuggccuccuu

SEQ ID NO: 1333038 - RNA, 19 nt, Homo sapiens
  misc_RNA (1)...(19): siRNA sense strand
gaacacccuguauccagau

SEQ ID NO: 1333039 - RNA, 19 nt, Homo sapiens
  misc_RNA (1)...(19): siRNA sense strand
cagcauggcaguccuguac

SEQ ID NO: 1333040 - RNA, 19 nt, Homo sapiens
  misc_RNA (1)...(19): siRNA sense strand
caucaagguucugcuguac

SEQ ID NO: 1333041 - RNA, 19 nt, Homo sapiens
  misc_RNA (1)...(19): siRNA sense strand
uuacaggcuucaucaaggu

SEQ ID NO: 1333042 - RNA, 19 nt, Homo sapiens
  misc_RNA (1)...(19): siRNA sense strand
gcagcugguguuuggcuuu

SEQ ID NO: 1333043 - RNA, 19 nt, Homo sapiens
  misc_RNA (1)...(19): siRNA sense strand
cagcugguguuuggcuuug

SEQ ID NO: 1333044 - RNA, 19 nt, Homo sapiens
  misc_RNA (1)...(19): siRNA sense strand
gguguuuggcuuugaguau

SEQ ID NO: 1333045 - RNA, 19 nt, Homo sapiens
  misc_RNA (1)...(19): siRNA sense strand
ucacgccuacuaccucaaa

SEQ ID NO: 1333046 - RNA, 19 nt, Homo sapiens
  misc_RNA (1)...(19): siRNA sense strand
cauccaggccuuuguccuu

SEQ ID NO: 1333047 - RNA, 19 nt, Homo sapiens
  misc_RNA (1)...(19): siRNA sense strand
guguuuggcuuugaguaug

SEQ ID NO: 1333048 - RNA, 19 nt, Homo sapiens
  misc_RNA (1)...(19): siRNA sense strand
gggacaacaaggcugugua

SEQ ID NO: 1333049 - RNA, 19 nt, Homo sapiens
  misc_RNA (1)...(19): siRNA sense strand
ccaucuucaucaaguaugu

SEQ ID NO: 1333050 - RNA, 19 nt, Homo sapiens
  misc_RNA (1)...(19): siRNA sense strand
gccuccagcuccugaguca

SEQ ID NO: 1333051 - RNA, 19 nt, Homo sapiens
  misc_RNA (1)...(19): siRNA sense strand
acaacaaggcuguguacau

SEQ ID NO: 1333052 - RNA, 19 nt, Homo sapiens
  misc_RNA (1)...(19): siRNA sense strand
gaugggcaagguguucuuu

SEQ ID NO: 1333053 - RNA, 19 nt, Homo sapiens
  misc_RNA (1)...(19): siRNA sense strand
gaggaccguguggacuuua

SEQ ID NO: 1333054 - RNA, 19 nt, Homo sapiens
  misc_RNA (1)...(19): siRNA sense strand
gcaaccacauuuuccauac

SEQ ID NO: 1333055 - RNA, 19 nt, Homo sapiens
  misc_RNA (1)...(19): siRNA sense strand
guacauccaggccuuuguc

SEQ ID NO: 1333056 - RNA, 19 nt, Homo sapiens
  misc_RNA (1)...(19): siRNA sense strand
gugcucaccaucuucauca

SEQ ID NO: 1333057 - RNA, 19 nt, Homo sapiens
  misc_RNA (1)...(19): siRNA sense strand
ccgcuuuguugcacucuuc

SEQ ID NO: 1333058 - RNA, 19 nt, Homo sapiens
  misc_RNA (1)...(19): siRNA sense strand
ugcugcagaucaaccagua

SEQ ID NO: 1333059 - RNA, 19 nt, Homo sapiens
  misc_RNA (1)...(19): siRNA sense strand
ccgccaugcugcagaucaa

SEQ ID NO: 1333060 - RNA, 19 nt, Homo sapiens
  misc_RNA (1)...(19): siRNA sense strand
cauccuggacuuccucuuc

SEQ ID NO: 1333061 - RNA, 19 nt, Homo sapiens
  misc_RNA (1)...(19): siRNA sense strand
caucaucugccgagaagag

SEQ ID NO: 1333062 - RNA, 19 nt, Homo sapiens
  misc_RNA (1)...(19): siRNA sense strand
ccaccugccguauggaugu

SEQ ID NO: 1333063 - RNA, 19 nt, Homo sapiens
  misc_RNA (1)...(19): siRNA sense strand
ggauggagagcccgaugca

SEQ ID NO: 1333064 - RNA, 19 nt, Homo sapiens
  misc_RNA (1)...(19): siRNA sense strand
ugaccaucaugaucaaggu

SEQ ID NO: 1333065 - RNA, 19 nt, Homo sapiens
  misc_RNA (1)...(19): siRNA sense strand
gagccauccgcaacaugaa

SEQ ID NO: 1333066 - RNA, 19 nt, Homo sapiens
  misc_RNA (1)...(19): siRNA sense strand
caacaaggcuguguacaug

SEQ ID NO: 1333067 - RNA, 19 nt, Homo sapiens
  misc_RNA (1)...(19): siRNA sense strand
caacaucuccuggcucuuu

SEQ ID NO: 1333068 - RNA, 19 nt, Homo sapiens
  misc_RNA (1)...(19): siRNA sense strand
cagaggagcuccaggcaau

SEQ ID NO: 1333069 - RNA, 19 nt, Homo sapiens
  misc_RNA (1)...(19): siRNA sense strand
ggagaugccugaggaugga

SEQ ID NO: 1333070 - RNA, 19 nt, Homo sapiens
  misc_RNA (1)...(19): siRNA sense strand
ccaagagacugcccugcaa

SEQ ID NO: 1333071 - RNA, 19 nt, Homo sapiens
  misc_RNA (1)...(19): siRNA sense strand
gcacaccuucccacucuuu

SEQ ID NO: 1333072 - RNA, 19 nt, Homo sapiens
  misc_RNA (1)...(19): siRNA sense strand
caacaugaacacccuguau

SEQ ID NO: 1333073 - RNA, 19 nt, Homo sapiens
  misc_RNA (1)...(19): siRNA sense strand
ucaucaagguucugcugua

SEQ ID NO: 1333074 - RNA, 19 nt, Homo sapiens
  misc_RNA (1)...(19): siRNA sense strand
ugucuggccuucaccguuu

SEQ ID NO: 1333075 - RNA, 19 nt, Homo sapiens
  misc_RNA (1)...(19): siRNA sense strand
cgcauugucucucuuaugu

SEQ ID NO: 1333076 - RNA, 19 nt, Homo sapiens
  misc_RNA (1)...(19): siRNA sense strand
cauugucucucuuauguuc

SEQ ID NO: 1333077 - RNA, 19 nt, Homo sapiens
  misc_RNA (1)...(19): siRNA sense strand
gugcacaccuucccacucu

SEQ ID NO: 1333078 - RNA, 19 nt, Homo sapiens
  misc_RNA (1)...(19): siRNA sense strand
caugagacaguucaagaaa

SEQ ID NO: 1333079 - RNA, 19 nt, Homo sapiens
  misc_RNA (1)...(19): siRNA sense strand
ucaccaucuucaucaagua

SEQ ID NO: 1333080 - RNA, 19 nt, Homo sapiens
  misc_RNA (1)...(19): siRNA sense strand
cuucuucucuuccucaaau

SEQ ID NO: 1333081 - RNA, 19 nt, Homo sapiens
  misc_RNA (1)...(19): siRNA sense strand
ucaagguucugcuguacau

SEQ ID NO: 1333082 - RNA, 19 nt, Homo sapiens
  misc_RNA (1)...(19): siRNA sense strand
gcauggcaguccuguacau

SEQ ID NO: 1333083 - RNA, 19 nt, Homo sapiens
  misc_RNA (1)...(19): siRNA sense strand
ccaggcauguucccacugu

SEQ ID NO: 1333084 - RNA, 19 nt, Homo sapiens
  misc_RNA (1)...(19): siRNA sense strand
ggacaacaaggcuguguac

SEQ ID NO: 1333085 - RNA, 19 nt, Homo sapiens
  misc_RNA (1)...(19): siRNA sense strand
gcaaggugaugggcaaggu

SEQ ID NO: 1333086 - RNA, 19 nt, Homo sapiens
  misc_RNA (1)...(19): siRNA sense strand
caacugagggcagcagaga

SEQ ID NO: 1333087 - RNA, 19 nt, Homo sapiens
  misc_RNA (1)...(19): siRNA sense strand
ugaggaccguguggacuuu

SEQ ID NO: 1333088 - RNA, 19 nt, Homo sapiens
  misc_RNA (1)...(19): siRNA sense strand
guugcacucuucacucuuc

SEQ ID NO: 1333089 - RNA, 19 nt, Homo sapiens
  misc_RNA (1)...(19): siRNA sense strand
ggugacuggugccaagaga

SEQ ID NO: 1333090 - RNA, 19 nt, Homo sapiens
  misc_RNA (1)...(19): siRNA sense strand
ugagacaguucaagaaagc

SEQ ID NO: 1333091 - RNA, 19 nt, Homo sapiens
  misc_RNA (1)...(19): siRNA sense strand
gccaugagacaguucaaga

SEQ ID NO: 1333092 - RNA, 19 nt, Homo sapiens
  misc_RNA (1)...(19): siRNA sense strand
ugaggagacugccacuaca

SEQ ID NO: 1333093 - RNA, 19 nt, Homo sapiens
  misc_RNA (1)...(19): siRNA sense strand
gcaacaugaacacccugua

SEQ ID NO: 1333094 - RNA, 19 nt, Homo sapiens
  misc_RNA (1)...(19): siRNA sense strand
gauggagcaccuucuggaa

SEQ ID NO: 1333095 - RNA, 19 nt, Homo sapiens
  misc_RNA (1)...(19): siRNA sense strand
cgagccauccgcaacauga

SEQ ID NO: 1333096 - RNA, 19 nt, Homo sapiens
  misc_RNA (1)...(19): siRNA sense strand
gaacgcagccccaacaucu

SEQ ID NO: 1333097 - RNA, 19 nt, Homo sapiens
  misc_RNA (1)...(19): siRNA sense strand
gcacucuucacucuucuuc

SEQ ID NO: 1333098 - RNA, 19 nt, Homo sapiens
  misc_RNA (1)...(19): siRNA sense strand
ccaugagacaguucaagaa

SEQ ID NO: 1333099 - RNA, 19 nt, Homo sapiens
  misc_RNA (1)...(19): siRNA sense strand
ucaccgugcuggccuccuu

SEQ ID NO: 1333100 - RNA, 19 nt, Homo sapiens
  misc_RNA (1)...(19): siRNA sense strand
gaacacccuguauccagau

SEQ ID NO: 1333101 - RNA, 19 nt, Homo sapiens
  misc_RNA (1)...(19): siRNA sense strand
cagcauggcaguccuguac

SEQ ID NO: 1333102 - RNA, 19 nt, Homo sapiens
  misc_RNA (1)...(19): siRNA sense strand
caucaagguucugcuguac

SEQ ID NO: 1333103 - RNA, 19 nt, Homo sapiens
  misc_RNA (1)...(19): siRNA sense strand
uuacaggcuucaucaaggu

SEQ ID NO: 1333104 - RNA, 19 nt, Homo sapiens
  misc_RNA (1)...(19): siRNA sense strand
gcagcugguguuuggcuuu

SEQ ID NO: 1333105 - RNA, 19 nt, Homo sapiens
  misc_RNA (1)...(19): siRNA sense strand
cagcugguguuuggcuuug

SEQ ID NO: 1333106 - RNA, 19 nt, Homo sapiens
  misc_RNA (1)...(19): siRNA sense strand
gguguuuggcuuugaguau

SEQ ID NO: 1333107 - RNA, 19 nt, Homo sapiens
  misc_RNA (1)...(19): siRNA sense strand
ucacgccuacuaccucaaa

SEQ ID NO: 1333108 - RNA, 19 nt, Homo sapiens
  misc_RNA (1)...(19): siRNA sense strand
cauccaggccuuuguccuu

SEQ ID NO: 1333109 - RNA, 19 nt, Homo sapiens
  misc_RNA (1)...(19): siRNA sense strand
guguuuggcuuugaguaug

SEQ ID NO: 1333110 - RNA, 19 nt, Homo sapiens
  misc_RNA (1)...(19): siRNA sense strand
gggacaacaaggcugugua

SEQ ID NO: 1333111 - RNA, 19 nt, Homo sapiens
  misc_RNA (1)...(19): siRNA sense strand
ccaucuucaucaaguaugu

SEQ ID NO: 1333112 - RNA, 19 nt, Homo sapiens
  misc_RNA (1)...(19): siRNA sense strand
gccuccagcuccugaguca

SEQ ID NO: 1333113 - RNA, 19 nt, Homo sapiens
  misc_RNA (1)...(19): siRNA sense strand
acaacaaggcuguguacau

SEQ ID NO: 1333114 - RNA, 19 nt, Homo sapiens
  misc_RNA (1)...(19): siRNA sense strand
gaugggcaagguguucuuu

SEQ ID NO: 1333115 - RNA, 19 nt, Homo sapiens
  misc_RNA (1)...(19): siRNA sense strand
gaggaccguguggacuuua

SEQ ID NO: 1333116 - RNA, 19 nt, Homo sapiens
  misc_RNA (1)...(19): siRNA sense strand
gcaaccacauuuuccauac

SEQ ID NO: 1333117 - RNA, 19 nt, Homo sapiens
  misc_RNA (1)...(19): siRNA sense strand
guacauccaggccuuuguc

SEQ ID NO: 1333118 - RNA, 19 nt, Homo sapiens
  misc_RNA (1)...(19): siRNA sense strand
gugcucaccaucuucauca

SEQ ID NO: 1333119 - RNA, 19 nt, Homo sapiens
  misc_RNA (1)...(19): siRNA sense strand
ccgcuuuguugcacucuuc

SEQ ID NO: 1333120 - RNA, 19 nt, Homo sapiens
  misc_RNA (1)...(19): siRNA sense strand
ugcugcagaucaaccagua

SEQ ID NO: 1333121 - RNA, 19 nt, Homo sapiens
  misc_RNA (1)...(19): siRNA sense strand
ccgccaugcugcagaucaa

SEQ ID NO: 1333122 - RNA, 19 nt, Homo sapiens
  misc_RNA (1)...(19): siRNA sense strand
cauccuggacuuccucuuc

SEQ ID NO: 1333123 - RNA, 19 nt, Homo sapiens
  misc_RNA (1)...(19): siRNA sense strand
caucaucugccgagaagag

SEQ ID NO: 1333124 - RNA, 19 nt, Homo sapiens
  misc_RNA (1)...(19): siRNA sense strand
ccaccugccguauggaugu

SEQ ID NO: 1333125 - RNA, 19 nt, Homo sapiens
  misc_RNA (1)...(19): siRNA sense strand
ggauggagagcccgaugca

SEQ ID NO: 1333126 - RNA, 19 nt, Homo sapiens
  misc_RNA (1)...(19): siRNA sense strand
ugaccaucaugaucaaggu

SEQ ID NO: 1333127 - RNA, 19 nt, Homo sapiens
  misc_RNA (1)...(19): siRNA sense strand
gagccauccgcaacaugaa

SEQ ID NO: 1333128 - RNA, 19 nt, Homo sapiens
  misc_RNA (1)...(19): siRNA sense strand
gcucaucgcucagaagaaa

SEQ ID NO: 1333129 - RNA, 19 nt, Homo sapiens
  misc_RNA (1)...(19): siRNA sense strand
gaagaaacgggaaauugaa

SEQ ID NO: 1333130 - RNA, 19 nt, Homo sapiens
  misc_RNA (1)...(19): siRNA sense strand
agaagaaacgggaaauuga

SEQ ID NO: 1333131 - RNA, 19 nt, Homo sapiens
  misc_RNA (1)...(19): siRNA sense strand
cagaagaaacgggaaauug

SEQ ID NO: 1333132 - RNA, 19 nt, Homo sapiens
  misc_RNA (1)...(19): siRNA sense strand
gaagaggucccugcucauc

SEQ ID NO: 1333133 - RNA, 19 nt, Homo sapiens
  misc_RNA (1)...(19): siRNA sense strand
ggacgaggaggaggacuau

SEQ ID NO: 1333134 - RNA, 19 nt, Homo sapiens
  misc_RNA (1)...(19): siRNA sense strand
gcucagaagaaacgggaaa

SEQ ID NO: 1333135 - RNA, 19 nt, Homo sapiens
  misc_RNA (1)...(19): siRNA sense strand
agaaagccaagcagaauca

SEQ ID NO: 1333136 - RNA, 19 nt, Homo sapiens
  misc_RNA (1)...(19): siRNA sense strand
ggaaauugaagccaaaaug

SEQ ID NO: 1333137 - RNA, 19 nt, Homo sapiens
  misc_RNA (1)...(19): siRNA sense strand
acagaaagccaagcagaau

SEQ ID NO: 1333138 - RNA, 19 nt, Homo sapiens
  misc_RNA (1)...(19): siRNA sense strand
acgaggaggaggacuauga

SEQ ID NO: 1333139 - RNA, 19 nt, Homo sapiens
  misc_RNA (1)...(19): siRNA sense strand
gagcaguggcuggagauca

SEQ ID NO: 1333140 - RNA, 19 nt, Homo sapiens
  misc_RNA (1)...(19): siRNA sense strand
ucagaagaaacgggaaauu

SEQ ID NO: 1333141 - RNA, 19 nt, Homo sapiens
  misc_RNA (1)...(19): siRNA sense strand
agcaguggcuggagaucaa

SEQ ID NO: 1333142 - RNA, 19 nt, Homo sapiens
  misc_RNA (1)...(19): siRNA sense strand
gaaauugaagccaaaaugg

SEQ ID NO: 1333143 - RNA, 19 nt, Homo sapiens
  misc_RNA (1)...(19): siRNA sense strand
acgggaaauugaagccaaa

SEQ ID NO: 1333144 - RNA, 19 nt, Homo sapiens
  misc_RNA (1)...(19): siRNA sense strand
ggaagaggucccugcucau

SEQ ID NO: 1333145 - RNA, 19 nt, Homo sapiens
  misc_RNA (1)...(19): siRNA sense strand
cagaaagccaagcagaauc

SEQ ID NO: 1333146 - RNA, 19 nt, Homo sapiens
  misc_RNA (1)...(19): siRNA sense strand
ggaaagugauagagaaauu

SEQ ID NO: 1333147 - RNA, 19 nt, Homo sapiens
  misc_RNA (1)...(19): siRNA sense strand
gaagguggcugagauaaga

SEQ ID NO: 1333148 - RNA, 19 nt, Homo sapiens
  misc_RNA (1)...(19): siRNA sense strand
gacagaagcuggaggaguu

SEQ ID NO: 1333149 - RNA, 19 nt, Homo sapiens
  misc_RNA (1)...(19): siRNA sense strand
ggaagaagguggcugagau

SEQ ID NO: 1333150 - RNA, 19 nt, Homo sapiens
  misc_RNA (1)...(19): siRNA sense strand
gcucaucgcucagaagaaa

SEQ ID NO: 1333151 - RNA, 19 nt, Homo sapiens
  misc_RNA (1)...(19): siRNA sense strand
gcagggaauuccucuacua

SEQ ID NO: 1333152 - RNA, 19 nt, Homo sapiens
  misc_RNA (1)...(19): siRNA sense strand
gaagaagguggcugagaua

SEQ ID NO: 1333153 - RNA, 19 nt, Homo sapiens
  misc_RNA (1)...(19): siRNA sense strand
gcauucagcuuucuguaug

SEQ ID NO: 1333154 - RNA, 19 nt, Homo sapiens
  misc_RNA (1)...(19): siRNA sense strand
gaagaaacgggaaauugaa

SEQ ID NO: 1333155 - RNA, 19 nt, Homo sapiens
  misc_RNA (1)...(19): siRNA sense strand
gaaccaggcauucagcuuu

SEQ ID NO: 1333156 - RNA, 19 nt, Homo sapiens
  misc_RNA (1)...(19): siRNA sense strand
uaacccagcauuugcauuu

SEQ ID NO: 1333157 - RNA, 19 nt, Homo sapiens
  misc_RNA (1)...(19): siRNA sense strand
gcauggagauggauaagac

SEQ ID NO: 1333158 - RNA, 19 nt, Homo sapiens
  misc_RNA (1)...(19): siRNA sense strand
gaaaggaagcacagaaguc

SEQ ID NO: 1333159 - RNA, 19 nt, Homo sapiens
  misc_RNA (1)...(19): siRNA sense strand
ccaaggaggacgacgagua

SEQ ID NO: 1333160 - RNA, 19 nt, Homo sapiens
  misc_RNA (1)...(19): siRNA sense strand
cagacggccuuacuacuga

SEQ ID NO: 1333161 - RNA, 19 nt, Homo sapiens
  misc_RNA (1)...(19): siRNA sense strand
gcacggcuaugacagugau

SEQ ID NO: 1333162 - RNA, 19 nt, Homo sapiens
  misc_RNA (1)...(19): siRNA sense strand
ccgagcagcugacaaagau

SEQ ID NO: 1333163 - RNA, 19 nt, Homo sapiens
  misc_RNA (1)...(19): siRNA sense strand
agaagaaacgggaaauuga

SEQ ID NO: 1333164 - RNA, 19 nt, Homo sapiens
  misc_RNA (1)...(19): siRNA sense strand
gaaagugauagagaaauug

SEQ ID NO: 1333165 - RNA, 19 nt, Homo sapiens
  misc_RNA (1)...(19): siRNA sense strand
cagaagaaacgggaaauug

SEQ ID NO: 1333166 - RNA, 19 nt, Homo sapiens
  misc_RNA (1)...(19): siRNA sense strand
ccauugcccuccagaacaa

SEQ ID NO: 1333167 - RNA, 19 nt, Homo sapiens
  misc_RNA (1)...(19): siRNA sense strand
caaggaggacgacgaguau

SEQ ID NO: 1333168 - RNA, 19 nt, Homo sapiens
  misc_RNA (1)...(19): siRNA sense strand
agaagaagcagcugaagga

SEQ ID NO: 1333169 - RNA, 19 nt, Homo sapiens
  misc_RNA (1)...(19): siRNA sense strand
uaagaaaggaagcacagaa

SEQ ID NO: 1333170 - RNA, 19 nt, Homo sapiens
  misc_RNA (1)...(19): siRNA sense strand
gaagaggucccugcucauc

SEQ ID NO: 1333171 - RNA, 19 nt, Homo sapiens
  misc_RNA (1)...(19): siRNA sense strand
ucaagaacccagugaacaa

SEQ ID NO: 1333172 - RNA, 19 nt, Homo sapiens
  misc_RNA (1)...(19): siRNA sense strand
gggaauuccucuacuacag

SEQ ID NO: 1333173 - RNA, 19 nt, Homo sapiens
  misc_RNA (1)...(19): siRNA sense strand
gggccgagcagcugacaaa

SEQ ID NO: 1333174 - RNA, 19 nt, Homo sapiens
  misc_RNA (1)...(19): siRNA sense strand
ggacgaagaggucaagaac

SEQ ID NO: 1333175 - RNA, 19 nt, Homo sapiens
  misc_RNA (1)...(19): siRNA sense strand
cagacgagcuggaaaaguu

SEQ ID NO: 1333176 - RNA, 19 nt, Homo sapiens
  misc_RNA (1)...(19): siRNA sense strand
caaggauaacccagcauuu

SEQ ID NO: 1333177 - RNA, 19 nt, Homo sapiens
  misc_RNA (1)...(19): siRNA sense strand
aaaguuggccagguucaua

SEQ ID NO: 1333178 - RNA, 19 nt, Homo sapiens
  misc_RNA (1)...(19): siRNA sense strand
gcacuucaucggagacuuc

SEQ ID NO: 1333179 - RNA, 19 nt, Homo sapiens
  misc_RNA (1)...(19): siRNA sense strand
ggagaaggcaguccaacag

SEQ ID NO: 1333180 - RNA, 19 nt, Homo sapiens
  misc_RNA (1)...(19): siRNA sense strand
gauaagaauagcagggaau

SEQ ID NO: 1333181 - RNA, 19 nt, Homo sapiens
  misc_RNA (1)...(19): siRNA sense strand
ugaaggagcagcaggagau

SEQ ID NO: 1333182 - RNA, 19 nt, Homo sapiens
  misc_RNA (1)...(19): siRNA sense strand
gcucccaccugcugaacug

SEQ ID NO: 1333183 - RNA, 19 nt, Homo sapiens
  misc_RNA (1)...(19): siRNA sense strand
ugaugaagaugggcuggaa

SEQ ID NO: 1333184 - RNA, 19 nt, Homo sapiens
  misc_RNA (1)...(19): siRNA sense strand
ggacgaggaggaggacuau

SEQ ID NO: 1333185 - RNA, 19 nt, Homo sapiens
  misc_RNA (1)...(19): siRNA sense strand
cagaaaaguuggccagguu

SEQ ID NO: 1333186 - RNA, 19 nt, Homo sapiens
  misc_RNA (1)...(19): siRNA sense strand
ccagacggccuuacuacug

SEQ ID NO: 1333187 - RNA, 19 nt, Homo sapiens
  misc_RNA (1)...(19): siRNA sense strand
gcucagaagaaacgggaaa

SEQ ID NO: 1333188 - RNA, 19 nt, Homo sapiens
  misc_RNA (1)...(19): siRNA sense strand
ggcagccucucagaaaguu

SEQ ID NO: 1333189 - RNA, 19 nt, Homo sapiens
  misc_RNA (1)...(19): siRNA sense strand
ucaaggggcucggcuauga

SEQ ID NO: 1333190 - RNA, 19 nt, Homo sapiens
  misc_RNA (1)...(19): siRNA sense strand
agaaagccaagcagaauca

SEQ ID NO: 1333191 - RNA, 19 nt, Homo sapiens
  misc_RNA (1)...(19): siRNA sense strand
cagccaccgugaagaggaa

SEQ ID NO: 1333192 - RNA, 19 nt, Homo sapiens
  misc_RNA (1)...(19): siRNA sense strand
aaguagcuauggaggacua

SEQ ID NO: 1333193 - RNA, 19 nt, Homo sapiens
  misc_RNA (1)...(19): siRNA sense strand
ggaaauugaagccaaaaug

SEQ ID NO: 1333194 - RNA, 19 nt, Homo sapiens
  misc_RNA (1)...(19): siRNA sense strand
uacaaguacuaccgacaga

SEQ ID NO: 1333195 - RNA, 19 nt, Homo sapiens
  misc_RNA (1)...(19): siRNA sense strand
ggcauucagcuuucuguau

SEQ ID NO: 1333196 - RNA, 19 nt, Homo sapiens
  misc_RNA (1)...(19): siRNA sense strand
uggcugagauaagaaagga

SEQ ID NO: 1333197 - RNA, 19 nt, Homo sapiens
  misc_RNA (1)...(19): siRNA sense strand
aaggauaacccagcauuug

SEQ ID NO: 1333198 - RNA, 19 nt, Homo sapiens
  misc_RNA (1)...(19): siRNA sense strand
auggaggacuacaaggaua

SEQ ID NO: 1333199 - RNA, 19 nt, Homo sapiens
  misc_RNA (1)...(19): siRNA sense strand
gggagaaggcaguccaaca

SEQ ID NO: 1333200 - RNA, 19 nt, Homo sapiens
  misc_RNA (1)...(19): siRNA sense strand
acagaaagccaagcagaau

SEQ ID NO: 1333201 - RNA, 19 nt, Homo sapiens
  misc_RNA (1)...(19): siRNA sense strand
gugaagaggaagcggaaga

SEQ ID NO: 1333202 - RNA, 19 nt, Homo sapiens
  misc_RNA (1)...(19): siRNA sense strand
cauucagcuuucuguauga

SEQ ID NO: 1333203 - RNA, 19 nt, Homo sapiens
  misc_RNA (1)...(19): siRNA sense strand
gaaccuugcagaaaaguug

SEQ ID NO: 1333204 - RNA, 19 nt, Homo sapiens
  misc_RNA (1)...(19): siRNA sense strand
ggauaacccagcauuugca

SEQ ID NO: 1333205 - RNA, 19 nt, Homo sapiens
  misc_RNA (1)...(19): siRNA sense strand
acaaggauaacccagcauu

SEQ ID NO: 1333206 - RNA, 19 nt, Homo sapiens
  misc_RNA (1)...(19): siRNA sense strand
gcgcuggcuucggcauuga

SEQ ID NO: 1333207 - RNA, 19 nt, Homo sapiens
  misc_RNA (1)...(19): siRNA sense strand
gcaucaagaacccagugaa

SEQ ID NO: 1333208 - RNA, 19 nt, Homo sapiens
  misc_RNA (1)...(19): siRNA sense strand
gccugaagaggauaaggua

SEQ ID NO: 1333209 - RNA, 19 nt, Homo sapiens
  misc_RNA (1)...(19): siRNA sense strand
acgaggaggaggacuauga

SEQ ID NO: 1333210 - RNA, 19 nt, Homo sapiens
  misc_RNA (1)...(19): siRNA sense strand
ugaagaggauaagguagag

SEQ ID NO: 1333211 - RNA, 19 nt, Homo sapiens
  misc_RNA (1)...(19): siRNA sense strand
caaguacuaccgacagaag

SEQ ID NO: 1333212 - RNA, 19 nt, Homo sapiens
  misc_RNA (1)...(19): siRNA sense strand
uuucagacgcccagaagaa

SEQ ID NO: 1333213 - RNA, 19 nt, Homo sapiens
  misc_RNA (1)...(19): siRNA sense strand
gagcaguggcuggagauca

SEQ ID NO: 1333214 - RNA, 19 nt, Homo sapiens
  misc_RNA (1)...(19): siRNA sense strand
gaaauugaagccaaaaugg

SEQ ID NO: 1333215 - RNA, 19 nt, Homo sapiens
  misc_RNA (1)...(19): siRNA sense strand
gccgagcagcugacaaaga

SEQ ID NO: 1333216 - RNA, 19 nt, Homo sapiens
  misc_RNA (1)...(19): siRNA sense strand
ucagaagaaacgggaaauu

SEQ ID NO: 1333217 - RNA, 19 nt, Homo sapiens
  misc_RNA (1)...(19): siRNA sense strand
ccucgccucugucaguuca

SEQ ID NO: 1333218 - RNA, 19 nt, Homo sapiens
  misc_RNA (1)...(19): siRNA sense strand
agcaguggcuggagaucaa

SEQ ID NO: 1333219 - RNA, 19 nt, Homo sapiens
  misc_RNA (1)...(19): siRNA sense strand
aaccaggcauucagcuuuc

SEQ ID NO: 1333220 - RNA, 19 nt, Homo sapiens
  misc_RNA (1)...(19): siRNA sense strand
cagaguacaaggaguucaa

SEQ ID NO: 1333221 - RNA, 19 nt, Homo sapiens
  misc_RNA (1)...(19): siRNA sense strand
gaaggagcagcaggagaug

SEQ ID NO: 1333222 - RNA, 19 nt, Homo sapiens
  misc_RNA (1)...(19): siRNA sense strand
ggaagccugugggucuagu

SEQ ID NO: 1333223 - RNA, 19 nt, Homo sapiens
  misc_RNA (1)...(19): siRNA sense strand
cugaagaggauaagguaga

SEQ ID NO: 1333224 - RNA, 19 nt, Homo sapiens
  misc_RNA (1)...(19): siRNA sense strand
caagaacccagugaacaag

SEQ ID NO: 1333225 - RNA, 19 nt, Homo sapiens
  misc_RNA (1)...(19): siRNA sense strand
caagcugacuguggagaac

SEQ ID NO: 1333226 - RNA, 19 nt, Homo sapiens
  misc_RNA (1)...(19): siRNA sense strand
gccgugagccugacuacuc

SEQ ID NO: 1333227 - RNA, 19 nt, Homo sapiens
  misc_RNA (1)...(19): siRNA sense strand
ggauaagaccagggaaugg

SEQ ID NO: 1333228 - RNA, 19 nt, Homo sapiens
  misc_RNA (1)...(19): siRNA sense strand
cucggaaagugauagagaa

SEQ ID NO: 1333229 - RNA, 19 nt, Homo sapiens
  misc_RNA (1)...(19): siRNA sense strand
gcuggaggaguuccggaaa

SEQ ID NO: 1333230 - RNA, 19 nt, Homo sapiens
  misc_RNA (1)...(19): siRNA sense strand
ggaagaggucccugcucau

SEQ ID NO: 1333231 - RNA, 19 nt, Homo sapiens
  misc_RNA (1)...(19): siRNA sense strand
acgggaaauugaagccaaa

SEQ ID NO: 1333232 - RNA, 19 nt, Homo sapiens
  misc_RNA (1)...(19): siRNA sense strand
agcaggagaugcagcagau

SEQ ID NO: 1333233 - RNA, 19 nt, Homo sapiens
  misc_RNA (1)...(19): siRNA sense strand
uggaggacuacaaggauaa

SEQ ID NO: 1333234 - RNA, 19 nt, Homo sapiens
  misc_RNA (1)...(19): siRNA sense strand
caggagaugcagcagaugu

SEQ ID NO: 1333235 - RNA, 19 nt, Homo sapiens
  misc_RNA (1)...(19): siRNA sense strand
cagaaagccaagcagaauc

SEQ ID NO: 1333236 - RNA, 19 nt, Homo sapiens
  misc_RNA (1)...(19): siRNA sense strand
gcucaucgcucagaagaaa

SEQ ID NO: 1333237 - RNA, 19 nt, Homo sapiens
  misc_RNA (1)...(19): siRNA sense strand
gaagaaacgggaaauugaa

SEQ ID NO: 1333238 - RNA, 19 nt, Homo sapiens
  misc_RNA (1)...(19): siRNA sense strand
agaagaaacgggaaauuga

SEQ ID NO: 1333239 - RNA, 19 nt, Homo sapiens
  misc_RNA (1)...(19): siRNA sense strand
cagaagaaacgggaaauug

SEQ ID NO: 1333240 - RNA, 19 nt, Homo sapiens
  misc_RNA (1)...(19): siRNA sense strand
gaagaggucccugcucauc

SEQ ID NO: 1333241 - RNA, 19 nt, Homo sapiens
  misc_RNA (1)...(19): siRNA sense strand
gcucagaagaaacgggaaa

SEQ ID NO: 1333242 - RNA, 19 nt, Homo sapiens
  misc_RNA (1)...(19): siRNA sense strand
agaaagccaagcagaauca

SEQ ID NO: 1333243 - RNA, 19 nt, Homo sapiens
  misc_RNA (1)...(19): siRNA sense strand
ggaaauugaagccaaaaug

SEQ ID NO: 1333244 - RNA, 19 nt, Homo sapiens
  misc_RNA (1)...(19): siRNA sense strand
acagaaagccaagcagaau

SEQ ID NO: 1333245 - RNA, 19 nt, Homo sapiens
  misc_RNA (1)...(19): siRNA sense strand
ucagaagaaacgggaaauu

SEQ ID NO: 1333246 - RNA, 19 nt, Homo sapiens
  misc_RNA (1)...(19): siRNA sense strand
gaaauugaagccaaaaugg

SEQ ID NO: 1333247 - RNA, 19 nt, Homo sapiens
  misc_RNA (1)...(19): siRNA sense strand
acgggaaauugaagccaaa

SEQ ID NO: 1333248 - RNA, 19 nt, Homo sapiens
  misc_RNA (1)...(19): siRNA sense strand
ggaagaggucccugcucau

SEQ ID NO: 1333249 - RNA, 19 nt, Homo sapiens
  misc_RNA (1)...(19): siRNA sense strand
cagaaagccaagcagaauc

SEQ ID NO: 1333250 - RNA, 19 nt, Homo sapiens
  misc_RNA (1)...(19): siRNA sense strand
gaacuuaucuggacaggaa

SEQ ID NO: 1333251 - RNA, 19 nt, Homo sapiens
  misc_RNA (1)...(19): siRNA sense strand
ggacggugcugcuggauuu

SEQ ID NO: 1333252 - RNA, 19 nt, Homo sapiens
  misc_RNA (1)...(19): siRNA sense strand
gggaauuccugcaaguuua

SEQ ID NO: 1333253 - RNA, 19 nt, Homo sapiens
  misc_RNA (1)...(19): siRNA sense strand
ccacuuacccucaaagaaa

SEQ ID NO: 1333254 - RNA, 19 nt, Homo sapiens
  misc_RNA (1)...(19): siRNA sense strand
gcaauggccuggacuacau

SEQ ID NO: 1333255 - RNA, 19 nt, Homo sapiens
  misc_RNA (1)...(19): siRNA sense strand
guacuacccuaucaauaug

SEQ ID NO: 1333256 - RNA, 19 nt, Homo sapiens
  misc_RNA (1)...(19): siRNA sense strand
uaugauggcuuccacauuc

SEQ ID NO: 1333257 - RNA, 19 nt, Homo sapiens
  misc_RNA (1)...(19): siRNA sense strand
gggaugccaccgacaauua

SEQ ID NO: 1333258 - RNA, 19 nt, Homo sapiens
  misc_RNA (1)...(19): siRNA sense strand
ggccacagaugccagcuuu

SEQ ID NO: 1333259 - RNA, 19 nt, Homo sapiens
  misc_RNA (1)...(19): siRNA sense strand
ggaaggagaacaaacugaa

SEQ ID NO: 1333260 - RNA, 19 nt, Homo sapiens
  misc_RNA (1)...(19): siRNA sense strand
cagaaagaaugcccuccua

SEQ ID NO: 1333261 - RNA, 19 nt, Homo sapiens
  misc_RNA (1)...(19): siRNA sense strand
ccagcuuuaucaucaaaua

SEQ ID NO: 1333262 - RNA, 19 nt, Homo sapiens
  misc_RNA (1)...(19): siRNA sense strand
gagaccagauggaguggaa

SEQ ID NO: 1333263 - RNA, 19 nt, Homo sapiens
  misc_RNA (1)...(19): siRNA sense strand
ccagguggauaaaguuuga

SEQ ID NO: 1333264 - RNA, 19 nt, Homo sapiens
  misc_RNA (1)...(19): siRNA sense strand
gaaaguguccaaucagauc

SEQ ID NO: 1333265 - RNA, 19 nt, Homo sapiens
  misc_RNA (1)...(19): siRNA sense strand
gaugaucggugccuucaag

SEQ ID NO: 1333266 - RNA, 19 nt, Homo sapiens
  misc_RNA (1)...(19): siRNA sense strand
gggacagccucucaucauu

SEQ ID NO: 1333267 - RNA, 19 nt, Homo sapiens
  misc_RNA (1)...(19): siRNA sense strand
gcagaagcaugaaugacau

SEQ ID NO: 1333268 - RNA, 19 nt, Homo sapiens
  misc_RNA (1)...(19): siRNA sense strand
gaaagaaugcccuccuauc

SEQ ID NO: 1333269 - RNA, 19 nt, Homo sapiens
  misc_RNA (1)...(19): siRNA sense strand
gaccagaagggacaucuuu

SEQ ID NO: 1333270 - RNA, 19 nt, Homo sapiens
  misc_RNA (1)...(19): siRNA sense strand
gcccagagcagaagcauga

SEQ ID NO: 1333271 - RNA, 19 nt, Homo sapiens
  misc_RNA (1)...(19): siRNA sense strand
gcaaaauccuacaaugaaa

SEQ ID NO: 1333272 - RNA, 19 nt, Homo sapiens
  misc_RNA (1)...(19): siRNA sense strand
aagccaaacuucaucacua

SEQ ID NO: 1333273 - RNA, 19 nt, Homo sapiens
  misc_RNA (1)...(19): siRNA sense strand
gacagcagcauggaucuua

SEQ ID NO: 1333274 - RNA, 19 nt, Homo sapiens
  misc_RNA (1)...(19): siRNA sense strand
gcuucuggauuucaucuuu

SEQ ID NO: 1333275 - RNA, 19 nt, Homo sapiens
  misc_RNA (1)...(19): siRNA sense strand
gagaguaaccggcaucauc

SEQ ID NO: 1333276 - RNA, 19 nt, Homo sapiens
  misc_RNA (1)...(19): siRNA sense strand
guccaucucugccauccua

SEQ ID NO: 1333277 - RNA, 19 nt, Homo sapiens
  misc_RNA (1)...(19): siRNA sense strand
gaaagcuggaccacacuaa

SEQ ID NO: 1333278 - RNA, 19 nt, Homo sapiens
  misc_RNA (1)...(19): siRNA sense strand
caaacuucaucacuaccua

SEQ ID NO: 1333279 - RNA, 19 nt, Homo sapiens
  misc_RNA (1)...(19): siRNA sense strand
ggagauuuccggaucagaa

SEQ ID NO: 1333280 - RNA, 19 nt, Homo sapiens
  misc_RNA (1)...(19): siRNA sense strand
ggacccaaauauccggauu

SEQ ID NO: 1333281 - RNA, 19 nt, Homo sapiens
  misc_RNA (1)...(19): siRNA sense strand
caccaacgcuucucuguac

SEQ ID NO: 1333282 - RNA, 19 nt, Homo sapiens
  misc_RNA (1)...(19): siRNA sense strand
uggauacucugcagcauga

SEQ ID NO: 1333283 - RNA, 19 nt, Homo sapiens
  misc_RNA (1)...(19): siRNA sense strand
uuauaaagauucccaugga

SEQ ID NO: 1333284 - RNA, 19 nt, Homo sapiens
  misc_RNA (1)...(19): siRNA sense strand
ggaggagauuuccggauca

SEQ ID NO: 1333285 - RNA, 19 nt, Homo sapiens
  misc_RNA (1)...(19): siRNA sense strand
gaauacaaccguguucaau

SEQ ID NO: 1333286 - RNA, 19 nt, Homo sapiens
  misc_RNA (1)...(19): siRNA sense strand
gacaacauccucccagaga

SEQ ID NO: 1333287 - RNA, 19 nt, Homo sapiens
  misc_RNA (1)...(19): siRNA sense strand
gcaaauuacggacgucugu

SEQ ID NO: 1333288 - RNA, 19 nt, Homo sapiens
  misc_RNA (1)...(19): siRNA sense strand
acaagaagaggaagagaaa

SEQ ID NO: 1333289 - RNA, 19 nt, Homo sapiens
  misc_RNA (1)...(19): siRNA sense strand
gaccuggccuggauugaca

SEQ ID NO: 1333290 - RNA, 19 nt, Homo sapiens
  misc_RNA (1)...(19): siRNA sense strand
ggacagccucucaucauuc

SEQ ID NO: 1333291 - RNA, 19 nt, Homo sapiens
  misc_RNA (1)...(19): siRNA sense strand
ucagugacguggccuacaa

SEQ ID NO: 1333292 - RNA, 19 nt, Homo sapiens
  misc_RNA (1)...(19): siRNA sense strand
gcucauguccuucauccuu

SEQ ID NO: 1333293 - RNA, 19 nt, Homo sapiens
  misc_RNA (1)...(19): siRNA sense strand
gauguucuguggaaucgau

SEQ ID NO: 1333294 - RNA, 19 nt, Homo sapiens
  misc_RNA (1)...(19): siRNA sense strand
ggagucagccagguggaua

SEQ ID NO: 1333295 - RNA, 19 nt, Homo sapiens
  misc_RNA (1)...(19): siRNA sense strand
gacaagaagaggaagagaa

SEQ ID NO: 1333296 - RNA, 19 nt, Homo sapiens
  misc_RNA (1)...(19): siRNA sense strand
cuuaucagcuucaucuuca

SEQ ID NO: 1333297 - RNA, 19 nt, Homo sapiens
  misc_RNA (1)...(19): siRNA sense strand
ggacuucaagccaaacuuc

SEQ ID NO: 1333298 - RNA, 19 nt, Homo sapiens
  misc_RNA (1)...(19): siRNA sense strand
gcuaccaucuggaccuguu

SEQ ID NO: 1333299 - RNA, 19 nt, Homo sapiens
  misc_RNA (1)...(19): siRNA sense strand
ggaaagcuggaccacacua

SEQ ID NO: 1333300 - RNA, 19 nt, Homo sapiens
  misc_RNA (1)...(19): siRNA sense strand
ggaauuccugcaaguuuau

SEQ ID NO: 1333301 - RNA, 19 nt, Homo sapiens
  misc_RNA (1)...(19): siRNA sense strand
ccacagaugccagcuuuau

SEQ ID NO: 1333302 - RNA, 19 nt, Homo sapiens
  misc_RNA (1)...(19): siRNA sense strand
ccacauugggcuuccagua

SEQ ID NO: 1333303 - RNA, 19 nt, Homo sapiens
  misc_RNA (1)...(19): siRNA sense strand
ccuccucccucgguuauaa

SEQ ID NO: 1333304 - RNA, 19 nt, Homo sapiens
  misc_RNA (1)...(19): siRNA sense strand
agaggaaguugcccugguu

SEQ ID NO: 1333305 - RNA, 19 nt, Homo sapiens
  misc_RNA (1)...(19): siRNA sense strand
guucuucgguggccugugu

SEQ ID NO: 1333306 - RNA, 19 nt, Homo sapiens
  misc_RNA (1)...(19): siRNA sense strand
guggauaaaguuugaagaa

SEQ ID NO: 1333307 - RNA, 19 nt, Homo sapiens
  misc_RNA (1)...(19): siRNA sense strand
ggaaaguguccaaucagau

SEQ ID NO: 1333308 - RNA, 19 nt, Homo sapiens
  misc_RNA (1)...(19): siRNA sense strand
gagcaaaauccuacaauga

SEQ ID NO: 1333309 - RNA, 19 nt, Homo sapiens
  misc_RNA (1)...(19): siRNA sense strand
gcccauccaccgcuccuua

SEQ ID NO: 1333310 - RNA, 19 nt, Homo sapiens
  misc_RNA (1)...(19): siRNA sense strand
gacaagaggaaaucugugu

SEQ ID NO: 1333311 - RNA, 19 nt, Homo sapiens
  misc_RNA (1)...(19): siRNA sense strand
gcuuugugcuccuuuaugg

SEQ ID NO: 1333312 - RNA, 19 nt, Homo sapiens
  misc_RNA (1)...(19): siRNA sense strand
gguggccugugucuggaua

SEQ ID NO: 1333313 - RNA, 19 nt, Homo sapiens
  misc_RNA (1)...(19): siRNA sense strand
ggagaaggcugggguagga

SEQ ID NO: 1333314 - RNA, 19 nt, Homo sapiens
  misc_RNA (1)...(19): siRNA sense strand
caaguacuacccuaucaau

SEQ ID NO: 1333315 - RNA, 19 nt, Homo sapiens
  misc_RNA (1)...(19): siRNA sense strand
gacagccucucaucauucu

SEQ ID NO: 1333316 - RNA, 19 nt, Homo sapiens
  misc_RNA (1)...(19): siRNA sense strand
caagaggaaaucuguguuc

SEQ ID NO: 1333317 - RNA, 19 nt, Homo sapiens
  misc_RNA (1)...(19): siRNA sense strand
ugaagaagauccccaagga

SEQ ID NO: 1333318 - RNA, 19 nt, Homo sapiens
  misc_RNA (1)...(19): siRNA sense strand
guacccacuuacccucaaa

SEQ ID NO: 1333319 - RNA, 19 nt, Homo sapiens
  misc_RNA (1)...(19): siRNA sense strand
ggaguuccgccucuggauu

SEQ ID NO: 1333320 - RNA, 19 nt, Homo sapiens
  misc_RNA (1)...(19): siRNA sense strand
uugaugaauuucuggauga

SEQ ID NO: 1333321 - RNA, 19 nt, Homo sapiens
  misc_RNA (1)...(19): siRNA sense strand
ggaugccaccgacaauuau

SEQ ID NO: 1333322 - RNA, 19 nt, Homo sapiens
  misc_RNA (1)...(19): siRNA sense strand
agacagacaagaagaggaa

SEQ ID NO: 1333323 - RNA, 19 nt, Homo sapiens
  misc_RNA (1)...(19): siRNA sense strand
ccaugacccugacccugaa

SEQ ID NO: 1333324 - RNA, 19 nt, Homo sapiens
  misc_RNA (1)...(19): siRNA sense strand
gaucggugccuucaaguac

SEQ ID NO: 1333325 - RNA, 19 nt, Homo sapiens
  misc_RNA (1)...(19): siRNA sense strand
ucagccagguggauaaagu

SEQ ID NO: 1333326 - RNA, 19 nt, Homo sapiens
  misc_RNA (1)...(19): siRNA sense strand
ucacugccgucauugucaa

SEQ ID NO: 1333327 - RNA, 19 nt, Homo sapiens
  misc_RNA (1)...(19): siRNA sense strand
ggcccauccucaucuuuga

SEQ ID NO: 1333328 - RNA, 19 nt, Homo sapiens
  misc_RNA (1)...(19): siRNA sense strand
aaacacagaccagcggaaa

SEQ ID NO: 1333329 - RNA, 19 nt, Homo sapiens
  misc_RNA (1)...(19): siRNA sense strand
ggacaguggcuccuuacca

SEQ ID NO: 1333330 - RNA, 19 nt, Homo sapiens
  misc_RNA (1)...(19): siRNA sense strand
ucauugagaagcagauuga

SEQ ID NO: 1333331 - RNA, 19 nt, Homo sapiens
  misc_RNA (1)...(19): siRNA sense strand
cuuccuggcucccauccua

SEQ ID NO: 1333332 - RNA, 19 nt, Homo sapiens
  misc_RNA (1)...(19): siRNA sense strand
ugacgggaaucucugucuu

SEQ ID NO: 1333333 - RNA, 19 nt, Homo sapiens
  misc_RNA (1)...(19): siRNA sense strand
gaaggagaacaaacugaag

SEQ ID NO: 1333334 - RNA, 19 nt, Homo sapiens
  misc_RNA (1)...(19): siRNA sense strand
aguacuacccuaucaauau

SEQ ID NO: 1333335 - RNA, 19 nt, Homo sapiens
  misc_RNA (1)...(19): siRNA sense strand
gaguuccgccucuggauug

SEQ ID NO: 1333336 - RNA, 19 nt, Homo sapiens
  misc_RNA (1)...(19): siRNA sense strand
ccagaagggacaucuuuca

SEQ ID NO: 1333337 - RNA, 19 nt, Homo sapiens
  misc_RNA (1)...(19): siRNA sense strand
gaucgcaggaauugaugaa

SEQ ID NO: 1333338 - RNA, 19 nt, Homo sapiens
  misc_RNA (1)...(19): siRNA sense strand
acagaugccagcuuuauca

SEQ ID NO: 1333339 - RNA, 19 nt, Homo sapiens
  misc_RNA (1)...(19): siRNA sense strand
uugcaacccucaugguaga

SEQ ID NO: 1333340 - RNA, 19 nt, Homo sapiens
  misc_RNA (1)...(19): siRNA sense strand
acaacauccucccagagaa

SEQ ID NO: 1333341 - RNA, 19 nt, Homo sapiens
  misc_RNA (1)...(19): siRNA sense strand
uaaccggcaucaucgucuu

SEQ ID NO: 1333342 - RNA, 19 nt, Homo sapiens
  misc_RNA (1)...(19): siRNA sense strand
auacaaccguguucaaugc

SEQ ID NO: 1333343 - RNA, 19 nt, Homo sapiens
  misc_RNA (1)...(19): siRNA sense strand
aaauauaucacccgcuuca

SEQ ID NO: 1333344 - RNA, 19 nt, Homo sapiens
  misc_RNA (1)...(19): siRNA sense strand
gccucaagauggagacaga

SEQ ID NO: 1333345 - RNA, 19 nt, Homo sapiens
  misc_RNA (1)...(19): siRNA sense strand
cauugcaacccucauggua

SEQ ID NO: 1333346 - RNA, 19 nt, Homo sapiens
  misc_RNA (1)...(19): siRNA sense strand
caacauccucccagagaag

SEQ ID NO: 1333347 - RNA, 19 nt, Homo sapiens
  misc_RNA (1)...(19): siRNA sense strand
gaucacugccgucauuguc

SEQ ID NO: 1333348 - RNA, 19 nt, Homo sapiens
  misc_RNA (1)...(19): siRNA sense strand
caccaacgcgaucaccuuu

SEQ ID NO: 1333349 - RNA, 19 nt, Homo sapiens
  misc_RNA (1)...(19): siRNA sense strand
ucaucuaccucggcuguau

SEQ ID NO: 1333350 - RNA, 19 nt, Homo sapiens
  misc_RNA (1)...(19): siRNA sense strand
gaacuuaucuggacaggaa

SEQ ID NO: 1333351 - RNA, 19 nt, Homo sapiens
  misc_RNA (1)...(19): siRNA sense strand
ggacggugcugcuggauuu

SEQ ID NO: 1333352 - RNA, 19 nt, Homo sapiens
  misc_RNA (1)...(19): siRNA sense strand
gggaauuccugcaaguuua

SEQ ID NO: 1333353 - RNA, 19 nt, Homo sapiens
  misc_RNA (1)...(19): siRNA sense strand
ccacuuacccucaaagaaa

SEQ ID NO: 1333354 - RNA, 19 nt, Homo sapiens
  misc_RNA (1)...(19): siRNA sense strand
gcaauggccuggacuacau

SEQ ID NO: 1333355 - RNA, 19 nt, Homo sapiens
  misc_RNA (1)...(19): siRNA sense strand
guacuacccuaucaauaug

SEQ ID NO: 1333356 - RNA, 19 nt, Homo sapiens
  misc_RNA (1)...(19): siRNA sense strand
uaugauggcuuccacauuc

SEQ ID NO: 1333357 - RNA, 19 nt, Homo sapiens
  misc_RNA (1)...(19): siRNA sense strand
gggaugccaccgacaauua

SEQ ID NO: 1333358 - RNA, 19 nt, Homo sapiens
  misc_RNA (1)...(19): siRNA sense strand
ggccacagaugccagcuuu

SEQ ID NO: 1333359 - RNA, 19 nt, Homo sapiens
  misc_RNA (1)...(19): siRNA sense strand
ggaaggagaacaaacugaa

SEQ ID NO: 1333360 - RNA, 19 nt, Homo sapiens
  misc_RNA (1)...(19): siRNA sense strand
cagaaagaaugcccuccua

SEQ ID NO: 1333361 - RNA, 19 nt, Homo sapiens
  misc_RNA (1)...(19): siRNA sense strand
ccagcuuuaucaucaaaua

SEQ ID NO: 1333362 - RNA, 19 nt, Homo sapiens
  misc_RNA (1)...(19): siRNA sense strand
gagaccagauggaguggaa

SEQ ID NO: 1333363 - RNA, 19 nt, Homo sapiens
  misc_RNA (1)...(19): siRNA sense strand
ccagguggauaaaguuuga

SEQ ID NO: 1333364 - RNA, 19 nt, Homo sapiens
  misc_RNA (1)...(19): siRNA sense strand
gaugaucggugccuucaag

SEQ ID NO: 1333365 - RNA, 19 nt, Homo sapiens
  misc_RNA (1)...(19): siRNA sense strand
gggacagccucucaucauu

SEQ ID NO: 1333366 - RNA, 19 nt, Homo sapiens
  misc_RNA (1)...(19): siRNA sense strand
gcagaagcaugaaugacau

SEQ ID NO: 1333367 - RNA, 19 nt, Homo sapiens
  misc_RNA (1)...(19): siRNA sense strand
gaaagaaugcccuccuauc

SEQ ID NO: 1333368 - RNA, 19 nt, Homo sapiens
  misc_RNA (1)...(19): siRNA sense strand
gaccagaagggacaucuuu

SEQ ID NO: 1333369 - RNA, 19 nt, Homo sapiens
  misc_RNA (1)...(19): siRNA sense strand
gcccagagcagaagcauga

SEQ ID NO: 1333370 - RNA, 19 nt, Homo sapiens
  misc_RNA (1)...(19): siRNA sense strand
gcaaaauccuacaaugaaa

SEQ ID NO: 1333371 - RNA, 19 nt, Homo sapiens
  misc_RNA (1)...(19): siRNA sense strand
aagccaaacuucaucacua

SEQ ID NO: 1333372 - RNA, 19 nt, Homo sapiens
  misc_RNA (1)...(19): siRNA sense strand
gacagcagcauggaucuua

SEQ ID NO: 1333373 - RNA, 19 nt, Homo sapiens
  misc_RNA (1)...(19): siRNA sense strand
gcuucuggauuucaucuuu

SEQ ID NO: 1333374 - RNA, 19 nt, Homo sapiens
  misc_RNA (1)...(19): siRNA sense strand
gagaguaaccggcaucauc

SEQ ID NO: 1333375 - RNA, 19 nt, Homo sapiens
  misc_RNA (1)...(19): siRNA sense strand
ggagauuuccggaucagaa

SEQ ID NO: 1333376 - RNA, 19 nt, Homo sapiens
  misc_RNA (1)...(19): siRNA sense strand
gaaagcuggaccacacuaa

SEQ ID NO: 1333377 - RNA, 19 nt, Homo sapiens
  misc_RNA (1)...(19): siRNA sense strand
caaacuucaucacuaccua

SEQ ID NO: 1333378 - RNA, 19 nt, Homo sapiens
  misc_RNA (1)...(19): siRNA sense strand
guccaucucugccauccua

SEQ ID NO: 1333379 - RNA, 19 nt, Homo sapiens
  misc_RNA (1)...(19): siRNA sense strand
ggacccaaauauccggauu

SEQ ID NO: 1333380 - RNA, 19 nt, Homo sapiens
  misc_RNA (1)...(19): siRNA sense strand
caccaacgcuucucuguac

SEQ ID NO: 1333381 - RNA, 19 nt, Homo sapiens
  misc_RNA (1)...(19): siRNA sense strand
uggauacucugcagcauga

SEQ ID NO: 1333382 - RNA, 19 nt, Homo sapiens
  misc_RNA (1)...(19): siRNA sense strand
ggaggagauuuccggauca

SEQ ID NO: 1333383 - RNA, 19 nt, Homo sapiens
  misc_RNA (1)...(19): siRNA sense strand
gaauacaaccguguucaau

SEQ ID NO: 1333384 - RNA, 19 nt, Homo sapiens
  misc_RNA (1)...(19): siRNA sense strand
gcaaauuacggacgucugu

SEQ ID NO: 1333385 - RNA, 19 nt, Homo sapiens
  misc_RNA (1)...(19): siRNA sense strand
ggacagccucucaucauuc

SEQ ID NO: 1333386 - RNA, 19 nt, Homo sapiens
  misc_RNA (1)...(19): siRNA sense strand
ucagugacguggccuacaa

SEQ ID NO: 1333387 - RNA, 19 nt, Homo sapiens
  misc_RNA (1)...(19): siRNA sense strand
gcucauguccuucauccuu

SEQ ID NO: 1333388 - RNA, 19 nt, Homo sapiens
  misc_RNA (1)...(19): siRNA sense strand
gauguucuguggaaucgau

SEQ ID NO: 1333389 - RNA, 19 nt, Homo sapiens
  misc_RNA (1)...(19): siRNA sense strand
ggagucagccagguggaua

SEQ ID NO: 1333390 - RNA, 19 nt, Homo sapiens
  misc_RNA (1)...(19): siRNA sense strand
cuuaucagcuucaucuuca

SEQ ID NO: 1333391 - RNA, 19 nt, Homo sapiens
  misc_RNA (1)...(19): siRNA sense strand
ggacuucaagccaaacuuc

SEQ ID NO: 1333392 - RNA, 19 nt, Homo sapiens
  misc_RNA (1)...(19): siRNA sense strand
gcuaccaucuggaccuguu

SEQ ID NO: 1333393 - RNA, 19 nt, Homo sapiens
  misc_RNA (1)...(19): siRNA sense strand
ggaaagcuggaccacacua

SEQ ID NO: 1333394 - RNA, 19 nt, Homo sapiens
  misc_RNA (1)...(19): siRNA sense strand
ggaauuccugcaaguuuau

SEQ ID NO: 1333395 - RNA, 19 nt, Homo sapiens
  misc_RNA (1)...(19): siRNA sense strand
ccacagaugccagcuuuau

SEQ ID NO: 1333396 - RNA, 19 nt, Homo sapiens
  misc_RNA (1)...(19): siRNA sense strand
guucuucgguggccugugu

SEQ ID NO: 1333397 - RNA, 19 nt, Homo sapiens
  misc_RNA (1)...(19): siRNA sense strand
ccacauugggcuuccagua

SEQ ID NO: 1333398 - RNA, 19 nt, Homo sapiens
  misc_RNA (1)...(19): siRNA sense strand
agaggaaguugcccugguu

SEQ ID NO: 1333399 - RNA, 19 nt, Homo sapiens
  misc_RNA (1)...(19): siRNA sense strand
guggauaaaguuugaagaa

SEQ ID NO: 1333400 - RNA, 19 nt, Homo sapiens
  misc_RNA (1)...(19): siRNA sense strand
gagcaaaauccuacaauga

SEQ ID NO: 1333401 - RNA, 19 nt, Homo sapiens
  misc_RNA (1)...(19): siRNA sense strand
gcccauccaccgcuccuua

SEQ ID NO: 1333402 - RNA, 19 nt, Homo sapiens
  misc_RNA (1)...(19): siRNA sense strand
gacaagaggaaaucugugu

SEQ ID NO: 1333403 - RNA, 19 nt, Homo sapiens
  misc_RNA (1)...(19): siRNA sense strand
gcuuugugcuccuuuaugg

SEQ ID NO: 1333404 - RNA, 19 nt, Homo sapiens
  misc_RNA (1)...(19): siRNA sense strand
gguggccugugucuggaua

SEQ ID NO: 1333405 - RNA, 19 nt, Homo sapiens
  misc_RNA (1)...(19): siRNA sense strand
ggagaaggcugggguagga

SEQ ID NO: 1333406 - RNA, 19 nt, Homo sapiens
  misc_RNA (1)...(19): siRNA sense strand
caaguacuacccuaucaau

SEQ ID NO: 1333407 - RNA, 19 nt, Homo sapiens
  misc_RNA (1)...(19): siRNA sense strand
gacagccucucaucauucu

SEQ ID NO: 1333408 - RNA, 19 nt, Homo sapiens
  misc_RNA (1)...(19): siRNA sense strand
caagaggaaaucuguguuc

SEQ ID NO: 1333409 - RNA, 19 nt, Homo sapiens
  misc_RNA (1)...(19): siRNA sense strand
ugaagaagauccccaagga

SEQ ID NO: 1333410 - RNA, 19 nt, Homo sapiens
  misc_RNA (1)...(19): siRNA sense strand
uugaugaauuucuggauga

SEQ ID NO: 1333411 - RNA, 19 nt, Homo sapiens
  misc_RNA (1)...(19): siRNA sense strand
guacccacuuacccucaaa

SEQ ID NO: 1333412 - RNA, 19 nt, Homo sapiens
  misc_RNA (1)...(19): siRNA sense strand
ggaguuccgccucuggauu

SEQ ID NO: 1333413 - RNA, 19 nt, Homo sapiens
  misc_RNA (1)...(19): siRNA sense strand
ggaugccaccgacaauuau

SEQ ID NO: 1333414 - RNA, 19 nt, Homo sapiens
  misc_RNA (1)...(19): siRNA sense strand
ccaugacccugacccugaa

SEQ ID NO: 1333415 - RNA, 19 nt, Homo sapiens
  misc_RNA (1)...(19): siRNA sense strand
gaucggugccuucaaguac

SEQ ID NO: 1333416 - RNA, 19 nt, Homo sapiens
  misc_RNA (1)...(19): siRNA sense strand
ucagccagguggauaaagu

SEQ ID NO: 1333417 - RNA, 19 nt, Homo sapiens
  misc_RNA (1)...(19): siRNA sense strand
ucacugccgucauugucaa

SEQ ID NO: 1333418 - RNA, 19 nt, Homo sapiens
  misc_RNA (1)...(19): siRNA sense strand
ggcccauccucaucuuuga

SEQ ID NO: 1333419 - RNA, 19 nt, Homo sapiens
  misc_RNA (1)...(19): siRNA sense strand
aaacacagaccagcggaaa

SEQ ID NO: 1333420 - RNA, 19 nt, Homo sapiens
  misc_RNA (1)...(19): siRNA sense strand
ggacaguggcuccuuacca

SEQ ID NO: 1333421 - RNA, 19 nt, Homo sapiens
  misc_RNA (1)...(19): siRNA sense strand
ucauugagaagcagauuga

SEQ ID NO: 1333422 - RNA, 19 nt, Homo sapiens
  misc_RNA (1)...(19): siRNA sense strand
cuuccuggcucccauccua

SEQ ID NO: 1333423 - RNA, 19 nt, Homo sapiens
  misc_RNA (1)...(19): siRNA sense strand
ugacgggaaucucugucuu

SEQ ID NO: 1333424 - RNA, 19 nt, Homo sapiens
  misc_RNA (1)...(19): siRNA sense strand
gaaggagaacaaacugaag

SEQ ID NO: 1333425 - RNA, 19 nt, Homo sapiens
  misc_RNA (1)...(19): siRNA sense strand
aguacuacccuaucaauau

SEQ ID NO: 1333426 - RNA, 19 nt, Homo sapiens
  misc_RNA (1)...(19): siRNA sense strand
gaguuccgccucuggauug

SEQ ID NO: 1333427 - RNA, 19 nt, Homo sapiens
  misc_RNA (1)...(19): siRNA sense strand
ccagaagggacaucuuuca

SEQ ID NO: 1333428 - RNA, 19 nt, Homo sapiens
  misc_RNA (1)...(19): siRNA sense strand
gaucgcaggaauugaugaa

SEQ ID NO: 1333429 - RNA, 19 nt, Homo sapiens
  misc_RNA (1)...(19): siRNA sense strand
acagaugccagcuuuauca

SEQ ID NO: 1333430 - RNA, 19 nt, Homo sapiens
  misc_RNA (1)...(19): siRNA sense strand
uugcaacccucaugguaga

SEQ ID NO: 1333431 - RNA, 19 nt, Homo sapiens
  misc_RNA (1)...(19): siRNA sense strand
uaaccggcaucaucgucuu

SEQ ID NO: 1333432 - RNA, 19 nt, Homo sapiens
  misc_RNA (1)...(19): siRNA sense strand
auacaaccguguucaaugc

SEQ ID NO: 1333433 - RNA, 19 nt, Homo sapiens
  misc_RNA (1)...(19): siRNA sense strand
aaauauaucacccgcuuca

SEQ ID NO: 1333434 - RNA, 19 nt, Homo sapiens
  misc_RNA (1)...(19): siRNA sense strand
gccucaagauggagacaga

SEQ ID NO: 1333435 - RNA, 19 nt, Homo sapiens
  misc_RNA (1)...(19): siRNA sense strand
cauugcaacccucauggua

SEQ ID NO: 1333436 - RNA, 19 nt, Homo sapiens
  misc_RNA (1)...(19): siRNA sense strand
gaucacugccgucauuguc

SEQ ID NO: 1333437 - RNA, 19 nt, Homo sapiens
  misc_RNA (1)...(19): siRNA sense strand
caccaacgcgaucaccuuu

SEQ ID NO: 1333438 - RNA, 19 nt, Homo sapiens
  misc_RNA (1)...(19): siRNA sense strand
ucaucuaccucggcuguau

SEQ ID NO: 1333439 - RNA, 19 nt, Homo sapiens
  misc_RNA (1)...(19): siRNA sense strand
uuuggacaguggcuccuua

SEQ ID NO: 1333440 - RNA, 19 nt, Homo sapiens
  misc_RNA (1)...(19): siRNA sense strand
agaaggagugucugagcua

SEQ ID NO: 1333441 - RNA, 19 nt, Homo sapiens
  misc_RNA (1)...(19): siRNA sense strand
acccaaauauccggauuga

SEQ ID NO: 1333442 - RNA, 19 nt, Homo sapiens
  misc_RNA (1)...(19): siRNA sense strand
cuucaucacuaccuacaag

SEQ ID NO: 1333443 - RNA, 19 nt, Homo sapiens
  misc_RNA (1)...(19): siRNA sense strand
cuaucaauauggacuucaa

SEQ ID NO: 1333444 - RNA, 19 nt, Homo sapiens
  misc_RNA (1)...(19): siRNA sense strand
ccucuucgacuucagcaaa

SEQ ID NO: 1333445 - RNA, 19 nt, Homo sapiens
  misc_RNA (1)...(19): siRNA sense strand
gggcccauccucaucuuug

SEQ ID NO: 1333446 - RNA, 19 nt, Homo sapiens
  misc_RNA (1)...(19): siRNA sense strand
gccugugucuggauaucaa

SEQ ID NO: 1333447 - RNA, 19 nt, Homo sapiens
  misc_RNA (1)...(19): siRNA sense strand
acaccaacgcuucucugua

SEQ ID NO: 1333448 - RNA, 19 nt, Homo sapiens
  misc_RNA (1)...(19): siRNA sense strand
gauccugggccucaucauc

SEQ ID NO: 1333449 - RNA, 19 nt, Homo sapiens
  misc_RNA (1)...(19): siRNA sense strand
ccacaucgacagccucaag

SEQ ID NO: 1333450 - RNA, 19 nt, Homo sapiens
  misc_RNA (1)...(19): siRNA sense strand
gaacuuaucuggacaggaa

SEQ ID NO: 1333451 - RNA, 19 nt, Homo sapiens
  misc_RNA (1)...(19): siRNA sense strand
ggacggugcugcuggauuu

SEQ ID NO: 1333452 - RNA, 19 nt, Homo sapiens
  misc_RNA (1)...(19): siRNA sense strand
gggaauuccugcaaguuua

SEQ ID NO: 1333453 - RNA, 19 nt, Homo sapiens
  misc_RNA (1)...(19): siRNA sense strand
ccacuuacccucaaagaaa

SEQ ID NO: 1333454 - RNA, 19 nt, Homo sapiens
  misc_RNA (1)...(19): siRNA sense strand
gcaauggccuggacuacau

SEQ ID NO: 1333455 - RNA, 19 nt, Homo sapiens
  misc_RNA (1)...(19): siRNA sense strand
guacuacccuaucaauaug

SEQ ID NO: 1333456 - RNA, 19 nt, Homo sapiens
  misc_RNA (1)...(19): siRNA sense strand
uaugauggcuuccacauuc

SEQ ID NO: 1333457 - RNA, 19 nt, Homo sapiens
  misc_RNA (1)...(19): siRNA sense strand
gggaugccaccgacaauua

SEQ ID NO: 1333458 - RNA, 19 nt, Homo sapiens
  misc_RNA (1)...(19): siRNA sense strand
ggccacagaugccagcuuu

SEQ ID NO: 1333459 - RNA, 19 nt, Homo sapiens
  misc_RNA (1)...(19): siRNA sense strand
ggaaggagaacaaacugaa

SEQ ID NO: 1333460 - RNA, 19 nt, Homo sapiens
  misc_RNA (1)...(19): siRNA sense strand
cagaaagaaugcccuccua

SEQ ID NO: 1333461 - RNA, 19 nt, Homo sapiens
  misc_RNA (1)...(19): siRNA sense strand
ccagcuuuaucaucaaaua

SEQ ID NO: 1333462 - RNA, 19 nt, Homo sapiens
  misc_RNA (1)...(19): siRNA sense strand
gagaccagauggaguggaa

SEQ ID NO: 1333463 - RNA, 19 nt, Homo sapiens
  misc_RNA (1)...(19): siRNA sense strand
ccagguggauaaaguuuga

SEQ ID NO: 1333464 - RNA, 19 nt, Homo sapiens
  misc_RNA (1)...(19): siRNA sense strand
gaaaguguccaaucagauc

SEQ ID NO: 1333465 - RNA, 19 nt, Homo sapiens
  misc_RNA (1)...(19): siRNA sense strand
gaugaucggugccuucaag

SEQ ID NO: 1333466 - RNA, 19 nt, Homo sapiens
  misc_RNA (1)...(19): siRNA sense strand
gggacagccucucaucauu

SEQ ID NO: 1333467 - RNA, 19 nt, Homo sapiens
  misc_RNA (1)...(19): siRNA sense strand
gcagaagcaugaaugacau

SEQ ID NO: 1333468 - RNA, 19 nt, Homo sapiens
  misc_RNA (1)...(19): siRNA sense strand
gaaagaaugcccuccuauc

SEQ ID NO: 1333469 - RNA, 19 nt, Homo sapiens
  misc_RNA (1)...(19): siRNA sense strand
gaccagaagggacaucuuu

SEQ ID NO: 1333470 - RNA, 19 nt, Homo sapiens
  misc_RNA (1)...(19): siRNA sense strand
gcccagagcagaagcauga

SEQ ID NO: 1333471 - RNA, 19 nt, Homo sapiens
  misc_RNA (1)...(19): siRNA sense strand
gcaaaauccuacaaugaaa

SEQ ID NO: 1333472 - RNA, 19 nt, Homo sapiens
  misc_RNA (1)...(19): siRNA sense strand
aagccaaacuucaucacua

SEQ ID NO: 1333473 - RNA, 19 nt, Homo sapiens
  misc_RNA (1)...(19): siRNA sense strand
gacagcagcauggaucuua

SEQ ID NO: 1333474 - RNA, 19 nt, Homo sapiens
  misc_RNA (1)...(19): siRNA sense strand
gcuucuggauuucaucuuu

SEQ ID NO: 1333475 - RNA, 19 nt, Homo sapiens
  misc_RNA (1)...(19): siRNA sense strand
gagaguaaccggcaucauc

SEQ ID NO: 1333476 - RNA, 19 nt, Homo sapiens
  misc_RNA (1)...(19): siRNA sense strand
guccaucucugccauccua

SEQ ID NO: 1333477 - RNA, 19 nt, Homo sapiens
  misc_RNA (1)...(19): siRNA sense strand
gaaagcuggaccacacuaa

SEQ ID NO: 1333478 - RNA, 19 nt, Homo sapiens
  misc_RNA (1)...(19): siRNA sense strand
caaacuucaucacuaccua

SEQ ID NO: 1333479 - RNA, 19 nt, Homo sapiens
  misc_RNA (1)...(19): siRNA sense strand
ggagauuuccggaucagaa

SEQ ID NO: 1333480 - RNA, 19 nt, Homo sapiens
  misc_RNA (1)...(19): siRNA sense strand
ggacccaaauauccggauu

SEQ ID NO: 1333481 - RNA, 19 nt, Homo sapiens
  misc_RNA (1)...(19): siRNA sense strand
caccaacgcuucucuguac

SEQ ID NO: 1333482 - RNA, 19 nt, Homo sapiens
  misc_RNA (1)...(19): siRNA sense strand
uggauacucugcagcauga

SEQ ID NO: 1333483 - RNA, 19 nt, Homo sapiens
  misc_RNA (1)...(19): siRNA sense strand
uuauaaagauucccaugga

SEQ ID NO: 1333484 - RNA, 19 nt, Homo sapiens
  misc_RNA (1)...(19): siRNA sense strand
ggaggagauuuccggauca

SEQ ID NO: 1333485 - RNA, 19 nt, Homo sapiens
  misc_RNA (1)...(19): siRNA sense strand
gaauacaaccguguucaau

SEQ ID NO: 1333486 - RNA, 19 nt, Homo sapiens
  misc_RNA (1)...(19): siRNA sense strand
gacaacauccucccagaga

SEQ ID NO: 1333487 - RNA, 19 nt, Homo sapiens
  misc_RNA (1)...(19): siRNA sense strand
gcaaauuacggacgucugu

SEQ ID NO: 1333488 - RNA, 19 nt, Homo sapiens
  misc_RNA (1)...(19): siRNA sense strand
acaagaagaggaagagaaa

SEQ ID NO: 1333489 - RNA, 19 nt, Homo sapiens
  misc_RNA (1)...(19): siRNA sense strand
gaccuggccuggauugaca

SEQ ID NO: 1333490 - RNA, 19 nt, Homo sapiens
  misc_RNA (1)...(19): siRNA sense strand
ggacagccucucaucauuc

SEQ ID NO: 1333491 - RNA, 19 nt, Homo sapiens
  misc_RNA (1)...(19): siRNA sense strand
ucagugacguggccuacaa

SEQ ID NO: 1333492 - RNA, 19 nt, Homo sapiens
  misc_RNA (1)...(19): siRNA sense strand
gcucauguccuucauccuu

SEQ ID NO: 1333493 - RNA, 19 nt, Homo sapiens
  misc_RNA (1)...(19): siRNA sense strand
gauguucuguggaaucgau

SEQ ID NO: 1333494 - RNA, 19 nt, Homo sapiens
  misc_RNA (1)...(19): siRNA sense strand
ggagucagccagguggaua

SEQ ID NO: 1333495 - RNA, 19 nt, Homo sapiens
  misc_RNA (1)...(19): siRNA sense strand
gacaagaagaggaagagaa

SEQ ID NO: 1333496 - RNA, 19 nt, Homo sapiens
  misc_RNA (1)...(19): siRNA sense strand
cuuaucagcuucaucuuca

SEQ ID NO: 1333497 - RNA, 19 nt, Homo sapiens
  misc_RNA (1)...(19): siRNA sense strand
ggacuucaagccaaacuuc

SEQ ID NO: 1333498 - RNA, 19 nt, Homo sapiens
  misc_RNA (1)...(19): siRNA sense strand
gcuaccaucuggaccuguu

SEQ ID NO: 1333499 - RNA, 19 nt, Homo sapiens
  misc_RNA (1)...(19): siRNA sense strand
ggaaagcuggaccacacua

SEQ ID NO: 1333500 - RNA, 19 nt, Homo sapiens
  misc_RNA (1)...(19): siRNA sense strand
ggaauuccugcaaguuuau

SEQ ID NO: 1333501 - RNA, 19 nt, Homo sapiens
  misc_RNA (1)...(19): siRNA sense strand
ccacagaugccagcuuuau

SEQ ID NO: 1333502 - RNA, 19 nt, Homo sapiens
  misc_RNA (1)...(19): siRNA sense strand
ccacauugggcuuccagua

SEQ ID NO: 1333503 - RNA, 19 nt, Homo sapiens
  misc_RNA (1)...(19): siRNA sense strand
ccuccucccucgguuauaa

SEQ ID NO: 1333504 - RNA, 19 nt, Homo sapiens
  misc_RNA (1)...(19): siRNA sense strand
agaggaaguugcccugguu

SEQ ID NO: 1333505 - RNA, 19 nt, Homo sapiens
  misc_RNA (1)...(19): siRNA sense strand
guucuucgguggccugugu

SEQ ID NO: 1333506 - RNA, 19 nt, Homo sapiens
  misc_RNA (1)...(19): siRNA sense strand
guggauaaaguuugaagaa

SEQ ID NO: 1333507 - RNA, 19 nt, Homo sapiens
  misc_RNA (1)...(19): siRNA sense strand
ggaaaguguccaaucagau

SEQ ID NO: 1333508 - RNA, 19 nt, Homo sapiens
  misc_RNA (1)...(19): siRNA sense strand
gagcaaaauccuacaauga

SEQ ID NO: 1333509 - RNA, 19 nt, Homo sapiens
  misc_RNA (1)...(19): siRNA sense strand
gcccauccaccgcuccuua

SEQ ID NO: 1333510 - RNA, 19 nt, Homo sapiens
  misc_RNA (1)...(19): siRNA sense strand
gacaagaggaaaucugugu

SEQ ID NO: 1333511 - RNA, 19 nt, Homo sapiens
  misc_RNA (1)...(19): siRNA sense strand
gcuuugugcuccuuuaugg

SEQ ID NO: 1333512 - RNA, 19 nt, Homo sapiens
  misc_RNA (1)...(19): siRNA sense strand
gguggccugugucuggaua

SEQ ID NO: 1333513 - RNA, 19 nt, Homo sapiens
  misc_RNA (1)...(19): siRNA sense strand
ggagaaggcugggguagga

SEQ ID NO: 1333514 - RNA, 19 nt, Homo sapiens
  misc_RNA (1)...(19): siRNA sense strand
caaguacuacccuaucaau

SEQ ID NO: 1333515 - RNA, 19 nt, Homo sapiens
  misc_RNA (1)...(19): siRNA sense strand
gacagccucucaucauucu

SEQ ID NO: 1333516 - RNA, 19 nt, Homo sapiens
  misc_RNA (1)...(19): siRNA sense strand
caagaggaaaucuguguuc

SEQ ID NO: 1333517 - RNA, 19 nt, Homo sapiens
  misc_RNA (1)...(19): siRNA sense strand
ugaagaagauccccaagga

SEQ ID NO: 1333518 - RNA, 19 nt, Homo sapiens
  misc_RNA (1)...(19): siRNA sense strand
guacccacuuacccucaaa

SEQ ID NO: 1333519 - RNA, 19 nt, Homo sapiens
  misc_RNA (1)...(19): siRNA sense strand
ggaguuccgccucuggauu

SEQ ID NO: 1333520 - RNA, 19 nt, Homo sapiens
  misc_RNA (1)...(19): siRNA sense strand
uugaugaauuucuggauga

SEQ ID NO: 1333521 - RNA, 19 nt, Homo sapiens
  misc_RNA (1)...(19): siRNA sense strand
ggaugccaccgacaauuau

SEQ ID NO: 1333522 - RNA, 19 nt, Homo sapiens
  misc_RNA (1)...(19): siRNA sense strand
agacagacaagaagaggaa

SEQ ID NO: 1333523 - RNA, 19 nt, Homo sapiens
  misc_RNA (1)...(19): siRNA sense strand
ccaugacccugacccugaa

SEQ ID NO: 1333524 - RNA, 19 nt, Homo sapiens
  misc_RNA (1)...(19): siRNA sense strand
gaucggugccuucaaguac

SEQ ID NO: 1333525 - RNA, 19 nt, Homo sapiens
  misc_RNA (1)...(19): siRNA sense strand
ucagccagguggauaaagu

SEQ ID NO: 1333526 - RNA, 19 nt, Homo sapiens
  misc_RNA (1)...(19): siRNA sense strand
ucacugccgucauugucaa

SEQ ID NO: 1333527 - RNA, 19 nt, Homo sapiens
  misc_RNA (1)...(19): siRNA sense strand
ggcccauccucaucuuuga

SEQ ID NO: 1333528 - RNA, 19 nt, Homo sapiens
  misc_RNA (1)...(19): siRNA sense strand
aaacacagaccagcggaaa

SEQ ID NO: 1333529 - RNA, 19 nt, Homo sapiens
  misc_RNA (1)...(19): siRNA sense strand
ggacaguggcuccuuacca

SEQ ID NO: 1333530 - RNA, 19 nt, Homo sapiens
  misc_RNA (1)...(19): siRNA sense strand
ucauugagaagcagauuga

SEQ ID NO: 1333531 - RNA, 19 nt, Homo sapiens
  misc_RNA (1)...(19): siRNA sense strand
cuuccuggcucccauccua

SEQ ID NO: 1333532 - RNA, 19 nt, Homo sapiens
  misc_RNA (1)...(19): siRNA sense strand
ugacgggaaucucugucuu

SEQ ID NO: 1333533 - RNA, 19 nt, Homo sapiens
  misc_RNA (1)...(19): siRNA sense strand
gaaggagaacaaacugaag

SEQ ID NO: 1333534 - RNA, 19 nt, Homo sapiens
  misc_RNA (1)...(19): siRNA sense strand
aguacuacccuaucaauau

SEQ ID NO: 1333535 - RNA, 19 nt, Homo sapiens
  misc_RNA (1)...(19): siRNA sense strand
gaguuccgccucuggauug

SEQ ID NO: 1333536 - RNA, 19 nt, Homo sapiens
  misc_RNA (1)...(19): siRNA sense strand
ccagaagggacaucuuuca

SEQ ID NO: 1333537 - RNA, 19 nt, Homo sapiens
  misc_RNA (1)...(19): siRNA sense strand
gaucgcaggaauugaugaa

SEQ ID NO: 1333538 - RNA, 19 nt, Homo sapiens
  misc_RNA (1)...(19): siRNA sense strand
acagaugccagcuuuauca

SEQ ID NO: 1333539 - RNA, 19 nt, Homo sapiens
  misc_RNA (1)...(19): siRNA sense strand
uugcaacccucaugguaga

SEQ ID NO: 1333540 - RNA, 19 nt, Homo sapiens
  misc_RNA (1)...(19): siRNA sense strand
acaacauccucccagagaa

SEQ ID NO: 1333541 - RNA, 19 nt, Homo sapiens
  misc_RNA (1)...(19): siRNA sense strand
uaaccggcaucaucgucuu

SEQ ID NO: 1333542 - RNA, 19 nt, Homo sapiens
  misc_RNA (1)...(19): siRNA sense strand
auacaaccguguucaaugc

SEQ ID NO: 1333543 - RNA, 19 nt, Homo sapiens
  misc_RNA (1)...(19): siRNA sense strand
aaauauaucacccgcuuca

SEQ ID NO: 1333544 - RNA, 19 nt, Homo sapiens
  misc_RNA (1)...(19): siRNA sense strand
gccucaagauggagacaga

SEQ ID NO: 1333545 - RNA, 19 nt, Homo sapiens
  misc_RNA (1)...(19): siRNA sense strand
cauugcaacccucauggua

SEQ ID NO: 1333546 - RNA, 19 nt, Homo sapiens
  misc_RNA (1)...(19): siRNA sense strand
caacauccucccagagaag

SEQ ID NO: 1333547 - RNA, 19 nt, Homo sapiens
  misc_RNA (1)...(19): siRNA sense strand
gaucacugccgucauuguc

SEQ ID NO: 1333548 - RNA, 19 nt, Homo sapiens
  misc_RNA (1)...(19): siRNA sense strand
caccaacgcgaucaccuuu

SEQ ID NO: 1333549 - RNA, 19 nt, Homo sapiens
  misc_RNA (1)...(19): siRNA sense strand
ucaucuaccucggcuguau

SEQ ID NO: 1333550 - RNA, 19 nt, Homo sapiens
  misc_RNA (1)...(19): siRNA sense strand
gaacuuaucuggacaggaa

SEQ ID NO: 1333551 - RNA, 19 nt, Homo sapiens
  misc_RNA (1)...(19): siRNA sense strand
ggacggugcugcuggauuu

SEQ ID NO: 1333552 - RNA, 19 nt, Homo sapiens
  misc_RNA (1)...(19): siRNA sense strand
gggaauuccugcaaguuua

SEQ ID NO: 1333553 - RNA, 19 nt, Homo sapiens
  misc_RNA (1)...(19): siRNA sense strand
ccacuuacccucaaagaaa

SEQ ID NO: 1333554 - RNA, 19 nt, Homo sapiens
  misc_RNA (1)...(19): siRNA sense strand
gcaauggccuggacuacau

SEQ ID NO: 1333555 - RNA, 19 nt, Homo sapiens
  misc_RNA (1)...(19): siRNA sense strand
guacuacccuaucaauaug

SEQ ID NO: 1333556 - RNA, 19 nt, Homo sapiens
  misc_RNA (1)...(19): siRNA sense strand
uaugauggcuuccacauuc

SEQ ID NO: 1333557 - RNA, 19 nt, Homo sapiens
  misc_RNA (1)...(19): siRNA sense strand
gggaugccaccgacaauua

SEQ ID NO: 1333558 - RNA, 19 nt, Homo sapiens
  misc_RNA (1)...(19): siRNA sense strand
ggccacagaugccagcuuu

SEQ ID NO: 1333559 - RNA, 19 nt, Homo sapiens
  misc_RNA (1)...(19): siRNA sense strand
ggaaggagaacaaacugaa

SEQ ID NO: 1333560 - RNA, 19 nt, Homo sapiens
  misc_RNA (1)...(19): siRNA sense strand
cagaaagaaugcccuccua

SEQ ID NO: 1333561 - RNA, 19 nt, Homo sapiens
  misc_RNA (1)...(19): siRNA sense strand
ccagcuuuaucaucaaaua

SEQ ID NO: 1333562 - RNA, 19 nt, Homo sapiens
  misc_RNA (1)...(19): siRNA sense strand
gagaccagauggaguggaa

SEQ ID NO: 1333563 - RNA, 19 nt, Homo sapiens
  misc_RNA (1)...(19): siRNA sense strand
ccagguggauaaaguuuga

SEQ ID NO: 1333564 - RNA, 19 nt, Homo sapiens
  misc_RNA (1)...(19): siRNA sense strand
gaaaguguccaaucagauc

SEQ ID NO: 1333565 - RNA, 19 nt, Homo sapiens
  misc_RNA (1)...(19): siRNA sense strand
gaugaucggugccuucaag

SEQ ID NO: 1333566 - RNA, 19 nt, Homo sapiens
  misc_RNA (1)...(19): siRNA sense strand
gggacagccucucaucauu

SEQ ID NO: 1333567 - RNA, 19 nt, Homo sapiens
  misc_RNA (1)...(19): siRNA sense strand
gcagaagcaugaaugacau

SEQ ID NO: 1333568 - RNA, 19 nt, Homo sapiens
  misc_RNA (1)...(19): siRNA sense strand
gaaagaaugcccuccuauc

SEQ ID NO: 1333569 - RNA, 19 nt, Homo sapiens
  misc_RNA (1)...(19): siRNA sense strand
gaccagaagggacaucuuu

SEQ ID NO: 1333570 - RNA, 19 nt, Homo sapiens
  misc_RNA (1)...(19): siRNA sense strand
gcccagagcagaagcauga

SEQ ID NO: 1333571 - RNA, 19 nt, Homo sapiens
  misc_RNA (1)...(19): siRNA sense strand
gcaaaauccuacaaugaaa

SEQ ID NO: 1333572 - RNA, 19 nt, Homo sapiens
  misc_RNA (1)...(19): siRNA sense strand
aagccaaacuucaucacua

SEQ ID NO: 1333573 - RNA, 19 nt, Homo sapiens
  misc_RNA (1)...(19): siRNA sense strand
gacagcagcauggaucuua

SEQ ID NO: 1333574 - RNA, 19 nt, Homo sapiens
  misc_RNA (1)...(19): siRNA sense strand
gcuucuggauuucaucuuu

SEQ ID NO: 1333575 - RNA, 19 nt, Homo sapiens
  misc_RNA (1)...(19): siRNA sense strand
gagaguaaccggcaucauc

SEQ ID NO: 1333576 - RNA, 19 nt, Homo sapiens
  misc_RNA (1)...(19): siRNA sense strand
guccaucucugccauccua

SEQ ID NO: 1333577 - RNA, 19 nt, Homo sapiens
  misc_RNA (1)...(19): siRNA sense strand
gaaagcuggaccacacuaa

SEQ ID NO: 1333578 - RNA, 19 nt, Homo sapiens
  misc_RNA (1)...(19): siRNA sense strand
caaacuucaucacuaccua

SEQ ID NO: 1333579 - RNA, 19 nt, Homo sapiens
  misc_RNA (1)...(19): siRNA sense strand
ggagauuuccggaucagaa

SEQ ID NO: 1333580 - RNA, 19 nt, Homo sapiens
  misc_RNA (1)...(19): siRNA sense strand
ggacccaaauauccggauu

SEQ ID NO: 1333581 - RNA, 19 nt, Homo sapiens
  misc_RNA (1)...(19): siRNA sense strand
caccaacgcuucucuguac

SEQ ID NO: 1333582 - RNA, 19 nt, Homo sapiens
  misc_RNA (1)...(19): siRNA sense strand
uggauacucugcagcauga

SEQ ID NO: 1333583 - RNA, 19 nt, Homo sapiens
  misc_RNA (1)...(19): siRNA sense strand
uuauaaagauucccaugga

SEQ ID NO: 1333584 - RNA, 19 nt, Homo sapiens
  misc_RNA (1)...(19): siRNA sense strand
ggaggagauuuccggauca

SEQ ID NO: 1333585 - RNA, 19 nt, Homo sapiens
  misc_RNA (1)...(19): siRNA sense strand
gaauacaaccguguucaau

SEQ ID NO: 1333586 - RNA, 19 nt, Homo sapiens
  misc_RNA (1)...(19): siRNA sense strand
gacaacauccucccagaga

SEQ ID NO: 1333587 - RNA, 19 nt, Homo sapiens
  misc_RNA (1)...(19): siRNA sense strand
gcaaauuacggacgucugu

SEQ ID NO: 1333588 - RNA, 19 nt, Homo sapiens
  misc_RNA (1)...(19): siRNA sense strand
acaagaagaggaagagaaa

SEQ ID NO: 1333589 - RNA, 19 nt, Homo sapiens
  misc_RNA (1)...(19): siRNA sense strand
gaccuggccuggauugaca

SEQ ID NO: 1333590 - RNA, 19 nt, Homo sapiens
  misc_RNA (1)...(19): siRNA sense strand
ggacagccucucaucauuc

SEQ ID NO: 1333591 - RNA, 19 nt, Homo sapiens
  misc_RNA (1)...(19): siRNA sense strand
ucagugacguggccuacaa

SEQ ID NO: 1333592 - RNA, 19 nt, Homo sapiens
  misc_RNA (1)...(19): siRNA sense strand
gcucauguccuucauccuu

SEQ ID NO: 1333593 - RNA, 19 nt, Homo sapiens
  misc_RNA (1)...(19): siRNA sense strand
gauguucuguggaaucgau

SEQ ID NO: 1333594 - RNA, 19 nt, Homo sapiens
  misc_RNA (1)...(19): siRNA sense strand
ggagucagccagguggaua

SEQ ID NO: 1333595 - RNA, 19 nt, Homo sapiens
  misc_RNA (1)...(19): siRNA sense strand
gacaagaagaggaagagaa

SEQ ID NO: 1333596 - RNA, 19 nt, Homo sapiens
  misc_RNA (1)...(19): siRNA sense strand
cuuaucagcuucaucuuca

SEQ ID NO: 1333597 - RNA, 19 nt, Homo sapiens
  misc_RNA (1)...(19): siRNA sense strand
ggacuucaagccaaacuuc

SEQ ID NO: 1333598 - RNA, 19 nt, Homo sapiens
  misc_RNA (1)...(19): siRNA sense strand
gcuaccaucuggaccuguu

SEQ ID NO: 1333599 - RNA, 19 nt, Homo sapiens
  misc_RNA (1)...(19): siRNA sense strand
ggaaagcuggaccacacua

SEQ ID NO: 1333600 - RNA, 19 nt, Homo sapiens
  misc_RNA (1)...(19): siRNA sense strand
ggaauuccugcaaguuuau

SEQ ID NO: 1333601 - RNA, 19 nt, Homo sapiens
  misc_RNA (1)...(19): siRNA sense strand
ccacagaugccagcuuuau

SEQ ID NO: 1333602 - RNA, 19 nt, Homo sapiens
  misc_RNA (1)...(19): siRNA sense strand
ccacauugggcuuccagua

SEQ ID NO: 1333603 - RNA, 19 nt, Homo sapiens
  misc_RNA (1)...(19): siRNA sense strand
ccuccucccucgguuauaa

SEQ ID NO: 1333604 - RNA, 19 nt, Homo sapiens
  misc_RNA (1)...(19): siRNA sense strand
agaggaaguugcccugguu

SEQ ID NO: 1333605 - RNA, 19 nt, Homo sapiens
  misc_RNA (1)...(19): siRNA sense strand
guucuucgguggccugugu

SEQ ID NO: 1333606 - RNA, 19 nt, Homo sapiens
  misc_RNA (1)...(19): siRNA sense strand
guggauaaaguuugaagaa

SEQ ID NO: 1333607 - RNA, 19 nt, Homo sapiens
  misc_RNA (1)...(19): siRNA sense strand
ggaaaguguccaaucagau

SEQ ID NO: 1333608 - RNA, 19 nt, Homo sapiens
  misc_RNA (1)...(19): siRNA sense strand
gagcaaaauccuacaauga

SEQ ID NO: 1333609 - RNA, 19 nt, Homo sapiens
  misc_RNA (1)...(19): siRNA sense strand
gcccauccaccgcuccuua

SEQ ID NO: 1333610 - RNA, 19 nt, Homo sapiens
  misc_RNA (1)...(19): siRNA sense strand
gacaagaggaaaucugugu

SEQ ID NO: 1333611 - RNA, 19 nt, Homo sapiens
  misc_RNA (1)...(19): siRNA sense strand
gcuuugugcuccuuuaugg

SEQ ID NO: 1333612 - RNA, 19 nt, Homo sapiens
  misc_RNA (1)...(19): siRNA sense strand
gguggccugugucuggaua

SEQ ID NO: 1333613 - RNA, 19 nt, Homo sapiens
  misc_RNA (1)...(19): siRNA sense strand
ggagaaggcugggguagga

SEQ ID NO: 1333614 - RNA, 19 nt, Homo sapiens
  misc_RNA (1)...(19): siRNA sense strand
caaguacuacccuaucaau

SEQ ID NO: 1333615 - RNA, 19 nt, Homo sapiens
  misc_RNA (1)...(19): siRNA sense strand
gacagccucucaucauucu

SEQ ID NO: 1333616 - RNA, 19 nt, Homo sapiens
  misc_RNA (1)...(19): siRNA sense strand
caagaggaaaucuguguuc

SEQ ID NO: 1333617 - RNA, 19 nt, Homo sapiens
  misc_RNA (1)...(19): siRNA sense strand
ugaagaagauccccaagga

SEQ ID NO: 1333618 - RNA, 19 nt, Homo sapiens
  misc_RNA (1)...(19): siRNA sense strand
guacccacuuacccucaaa

SEQ ID NO: 1333619 - RNA, 19 nt, Homo sapiens
  misc_RNA (1)...(19): siRNA sense strand
ggaguuccgccucuggauu

SEQ ID NO: 1333620 - RNA, 19 nt, Homo sapiens
  misc_RNA (1)...(19): siRNA sense strand
uugaugaauuucuggauga

SEQ ID NO: 1333621 - RNA, 19 nt, Homo sapiens
  misc_RNA (1)...(19): siRNA sense strand
ggaugccaccgacaauuau

SEQ ID NO: 1333622 - RNA, 19 nt, Homo sapiens
  misc_RNA (1)...(19): siRNA sense strand
agacagacaagaagaggaa

SEQ ID NO: 1333623 - RNA, 19 nt, Homo sapiens
  misc_RNA (1)...(19): siRNA sense strand
ccaugacccugacccugaa

SEQ ID NO: 1333624 - RNA, 19 nt, Homo sapiens
  misc_RNA (1)...(19): siRNA sense strand
gaucggugccuucaaguac

SEQ ID NO: 1333625 - RNA, 19 nt, Homo sapiens
  misc_RNA (1)...(19): siRNA sense strand
ucagccagguggauaaagu

SEQ ID NO: 1333626 - RNA, 19 nt, Homo sapiens
  misc_RNA (1)...(19): siRNA sense strand
ucacugccgucauugucaa

SEQ ID NO: 1333627 - RNA, 19 nt, Homo sapiens
  misc_RNA (1)...(19): siRNA sense strand
ggcccauccucaucuuuga

SEQ ID NO: 1333628 - RNA, 19 nt, Homo sapiens
  misc_RNA (1)...(19): siRNA sense strand
aaacacagaccagcggaaa

SEQ ID NO: 1333629 - RNA, 19 nt, Homo sapiens
  misc_RNA (1)...(19): siRNA sense strand
ggacaguggcuccuuacca

SEQ ID NO: 1333630 - RNA, 19 nt, Homo sapiens
  misc_RNA (1)...(19): siRNA sense strand
ucauugagaagcagauuga

SEQ ID NO: 1333631 - RNA, 19 nt, Homo sapiens
  misc_RNA (1)...(19): siRNA sense strand
cuuccuggcucccauccua

SEQ ID NO: 1333632 - RNA, 19 nt, Homo sapiens
  misc_RNA (1)...(19): siRNA sense strand
ugacgggaaucucugucuu

SEQ ID NO: 1333633 - RNA, 19 nt, Homo sapiens
  misc_RNA (1)...(19): siRNA sense strand
gaaggagaacaaacugaag

SEQ ID NO: 1333634 - RNA, 19 nt, Homo sapiens
  misc_RNA (1)...(19): siRNA sense strand
aguacuacccuaucaauau

SEQ ID NO: 1333635 - RNA, 19 nt, Homo sapiens
  misc_RNA (1)...(19): siRNA sense strand
gaguuccgccucuggauug

SEQ ID NO: 1333636 - RNA, 19 nt, Homo sapiens
  misc_RNA (1)...(19): siRNA sense strand
ccagaagggacaucuuuca

SEQ ID NO: 1333637 - RNA, 19 nt, Homo sapiens
  misc_RNA (1)...(19): siRNA sense strand
gaucgcaggaauugaugaa

SEQ ID NO: 1333638 - RNA, 19 nt, Homo sapiens
  misc_RNA (1)...(19): siRNA sense strand
acagaugccagcuuuauca

SEQ ID NO: 1333639 - RNA, 19 nt, Homo sapiens
  misc_RNA (1)...(19): siRNA sense strand
uugcaacccucaugguaga

SEQ ID NO: 1333640 - RNA, 19 nt, Homo sapiens
  misc_RNA (1)...(19): siRNA sense strand
acaacauccucccagagaa

SEQ ID NO: 1333641 - RNA, 19 nt, Homo sapiens
  misc_RNA (1)...(19): siRNA sense strand
uaaccggcaucaucgucuu

SEQ ID NO: 1333642 - RNA, 19 nt, Homo sapiens
  misc_RNA (1)...(19): siRNA sense strand
auacaaccguguucaaugc

SEQ ID NO: 1333643 - RNA, 19 nt, Homo sapiens
  misc_RNA (1)...(19): siRNA sense strand
aaauauaucacccgcuuca

SEQ ID NO: 1333644 - RNA, 19 nt, Homo sapiens
  misc_RNA (1)...(19): siRNA sense strand
gccucaagauggagacaga

SEQ ID NO: 1333645 - RNA, 19 nt, Homo sapiens
  misc_RNA (1)...(19): siRNA sense strand
cauugcaacccucauggua

SEQ ID NO: 1333646 - RNA, 19 nt, Homo sapiens
  misc_RNA (1)...(19): siRNA sense strand
caacauccucccagagaag

SEQ ID NO: 1333647 - RNA, 19 nt, Homo sapiens
  misc_RNA (1)...(19): siRNA sense strand
gaucacugccgucauuguc

SEQ ID NO: 1333648 - RNA, 19 nt, Homo sapiens
  misc_RNA (1)...(19): siRNA sense strand
caccaacgcgaucaccuuu

SEQ ID NO: 1333649 - RNA, 19 nt, Homo sapiens
  misc_RNA (1)...(19): siRNA sense strand
ucaucuaccucggcuguau

SEQ ID NO: 1333650 - RNA, 19 nt, Homo sapiens
  misc_RNA (1)...(19): siRNA sense strand
ugaccgaacuggacacuaa

SEQ ID NO: 1333651 - RNA, 19 nt, Homo sapiens
  misc_RNA (1)...(19): siRNA sense strand
gaacuggacacuaaagaug

SEQ ID NO: 1333652 - RNA, 19 nt, Homo sapiens
  misc_RNA (1)...(19): siRNA sense strand
ugacaugucugggaaagaa

SEQ ID NO: 1333653 - RNA, 19 nt, Homo sapiens
  misc_RNA (1)...(19): siRNA sense strand
aagaugaggcugagcauua

SEQ ID NO: 1333654 - RNA, 19 nt, Homo sapiens
  misc_RNA (1)...(19): siRNA sense strand
gaagauggaugccccuuug

SEQ ID NO: 1333655 - RNA, 19 nt, Homo sapiens
  misc_RNA (1)...(19): siRNA sense strand
gaggagguccgcacacuug

SEQ ID NO: 1333656 - RNA, 19 nt, Homo sapiens
  misc_RNA (1)...(19): siRNA sense strand
gaaaggugacagacgauuc

SEQ ID NO: 1333657 - RNA, 19 nt, Homo sapiens
  misc_RNA (1)...(19): siRNA sense strand
uggaugcccugcugaagaa

SEQ ID NO: 1333658 - RNA, 19 nt, Homo sapiens
  misc_RNA (1)...(19): siRNA sense strand
ccaagauccaggaauauga

SEQ ID NO: 1333659 - RNA, 19 nt, Homo sapiens
  misc_RNA (1)...(19): siRNA sense strand
ucagugugccgcauacuaa

SEQ ID NO: 1333660 - RNA, 19 nt, Homo sapiens
  misc_RNA (1)...(19): siRNA sense strand
ccgcacacuugaggaguua

SEQ ID NO: 1333661 - RNA, 19 nt, Homo sapiens
  misc_RNA (1)...(19): siRNA sense strand
caagauccaggaauaugaa

SEQ ID NO: 1333662 - RNA, 19 nt, Homo sapiens
  misc_RNA (1)...(19): siRNA sense strand
agcccaagauccaggaaua

SEQ ID NO: 1333663 - RNA, 19 nt, Homo sapiens
  misc_RNA (1)...(19): siRNA sense strand
agaacaagcccuucagugu

SEQ ID NO: 1333664 - RNA, 19 nt, Homo sapiens
  misc_RNA (1)...(19): siRNA sense strand
gaagaugaggcugagcauu

SEQ ID NO: 1333665 - RNA, 19 nt, Homo sapiens
  misc_RNA (1)...(19): siRNA sense strand
ggauaagaaaggugacaga

SEQ ID NO: 1333666 - RNA, 19 nt, Homo sapiens
  misc_RNA (1)...(19): siRNA sense strand
caucaaggaggagcuaauu

SEQ ID NO: 1333667 - RNA, 19 nt, Homo sapiens
  misc_RNA (1)...(19): siRNA sense strand
cgacuggcaggauaagaaa

SEQ ID NO: 1333668 - RNA, 19 nt, Homo sapiens
  misc_RNA (1)...(19): siRNA sense strand
caagaagaaaggccucaug

SEQ ID NO: 1333669 - RNA, 19 nt, Homo sapiens
  misc_RNA (1)...(19): siRNA sense strand
gcccacaaccgcaccaaga

SEQ ID NO: 1333670 - RNA, 19 nt, Homo sapiens
  misc_RNA (1)...(19): siRNA sense strand
gaagggaaggcaggacaug

SEQ ID NO: 1333671 - RNA, 19 nt, Homo sapiens
  misc_RNA (1)...(19): siRNA sense strand
ggaagcccaagaagcagaa

SEQ ID NO: 1333672 - RNA, 19 nt, Homo sapiens
  misc_RNA (1)...(19): siRNA sense strand
gcaguuccacgacuucaag

SEQ ID NO: 1333673 - RNA, 19 nt, Homo sapiens
  misc_RNA (1)...(19): siRNA sense strand
caagaagcagaaacuggaa

SEQ ID NO: 1333674 - RNA, 19 nt, Homo sapiens
  misc_RNA (1)...(19): siRNA sense strand
gcccuacugugcugacauc

SEQ ID NO: 1333675 - RNA, 19 nt, Homo sapiens
  misc_RNA (1)...(19): siRNA sense strand
cagaggacuccgaggauga

SEQ ID NO: 1333676 - RNA, 19 nt, Homo sapiens
  misc_RNA (1)...(19): siRNA sense strand
ugacagacgauuccugaag

SEQ ID NO: 1333677 - RNA, 19 nt, Homo sapiens
  misc_RNA (1)...(19): siRNA sense strand
guggaugcccugcugaaga

SEQ ID NO: 1333678 - RNA, 19 nt, Homo sapiens
  misc_RNA (1)...(19): siRNA sense strand
ggcuguggcugacaagaag

SEQ ID NO: 1333679 - RNA, 19 nt, Homo sapiens
  misc_RNA (1)...(19): siRNA sense strand
agucugaggcccagcauga

SEQ ID NO: 1333680 - RNA, 19 nt, Homo sapiens
  misc_RNA (1)...(19): siRNA sense strand
aggcugagcauuacaagau

SEQ ID NO: 1333681 - RNA, 19 nt, Homo sapiens
  misc_RNA (1)...(19): siRNA sense strand
ucgagaccaugaacuugga

SEQ ID NO: 1333682 - RNA, 19 nt, Homo sapiens
  misc_RNA (1)...(19): siRNA sense strand
cgaacuggacacuaaagau

SEQ ID NO: 1333683 - RNA, 19 nt, Homo sapiens
  misc_RNA (1)...(19): siRNA sense strand
gaccgaacuggacacuaaa

SEQ ID NO: 1333684 - RNA, 19 nt, Homo sapiens
  misc_RNA (1)...(19): siRNA sense strand
caggacggcccaaauccaa

SEQ ID NO: 1333685 - RNA, 19 nt, Homo sapiens
  misc_RNA (1)...(19): siRNA sense strand
ucaccgacuggcaggauaa

SEQ ID NO: 1333686 - RNA, 19 nt, Homo sapiens
  misc_RNA (1)...(19): siRNA sense strand
ccgacuggcaggauaagaa

SEQ ID NO: 1333687 - RNA, 19 nt, Homo sapiens
  misc_RNA (1)...(19): siRNA sense strand
gaacagccggaagauggau

SEQ ID NO: 1333688 - RNA, 19 nt, Homo sapiens
  misc_RNA (1)...(19): siRNA sense strand
ucaaggaggagcuaauugc

SEQ ID NO: 1333689 - RNA, 19 nt, Homo sapiens
  misc_RNA (1)...(19): siRNA sense strand
gcaucaaggaggagcuaau

SEQ ID NO: 1333690 - RNA, 19 nt, Homo sapiens
  misc_RNA (1)...(19): siRNA sense strand
ggacacuaaagauguggau

SEQ ID NO: 1333691 - RNA, 19 nt, Homo sapiens
  misc_RNA (1)...(19): siRNA sense strand
gcugagcugaaggcacuua

SEQ ID NO: 1333692 - RNA, 19 nt, Homo sapiens
  misc_RNA (1)...(19): siRNA sense strand
ugagguccuugcugagcuu

SEQ ID NO: 1333693 - RNA, 19 nt, Homo sapiens
  misc_RNA (1)...(19): siRNA sense strand
ggaagggaaggcaggacau

SEQ ID NO: 1333694 - RNA, 19 nt, Homo sapiens
  misc_RNA (1)...(19): siRNA sense strand
agaugaggcugagcauuac

SEQ ID NO: 1333695 - RNA, 19 nt, Homo sapiens
  misc_RNA (1)...(19): siRNA sense strand
ugaccgaacuggacacuaa

SEQ ID NO: 1333696 - RNA, 19 nt, Homo sapiens
  misc_RNA (1)...(19): siRNA sense strand
gaacuggacacuaaagaug

SEQ ID NO: 1333697 - RNA, 19 nt, Homo sapiens
  misc_RNA (1)...(19): siRNA sense strand
ugacaugucugggaaagaa

SEQ ID NO: 1333698 - RNA, 19 nt, Homo sapiens
  misc_RNA (1)...(19): siRNA sense strand
aagaugaggcugagcauua

SEQ ID NO: 1333699 - RNA, 19 nt, Homo sapiens
  misc_RNA (1)...(19): siRNA sense strand
gaagauggaugccccuuug

SEQ ID NO: 1333700 - RNA, 19 nt, Homo sapiens
  misc_RNA (1)...(19): siRNA sense strand
gaggagguccgcacacuug

SEQ ID NO: 1333701 - RNA, 19 nt, Homo sapiens
  misc_RNA (1)...(19): siRNA sense strand
gaaaggugacagacgauuc

SEQ ID NO: 1333702 - RNA, 19 nt, Homo sapiens
  misc_RNA (1)...(19): siRNA sense strand
uggaugcccugcugaagaa

SEQ ID NO: 1333703 - RNA, 19 nt, Homo sapiens
  misc_RNA (1)...(19): siRNA sense strand
ccaagauccaggaauauga

SEQ ID NO: 1333704 - RNA, 19 nt, Homo sapiens
  misc_RNA (1)...(19): siRNA sense strand
ucagugugccgcauacuaa

SEQ ID NO: 1333705 - RNA, 19 nt, Homo sapiens
  misc_RNA (1)...(19): siRNA sense strand
ccgcacacuugaggaguua

SEQ ID NO: 1333706 - RNA, 19 nt, Homo sapiens
  misc_RNA (1)...(19): siRNA sense strand
caagauccaggaauaugaa

SEQ ID NO: 1333707 - RNA, 19 nt, Homo sapiens
  misc_RNA (1)...(19): siRNA sense strand
agcccaagauccaggaaua

SEQ ID NO: 1333708 - RNA, 19 nt, Homo sapiens
  misc_RNA (1)...(19): siRNA sense strand
agaacaagcccuucagugu

SEQ ID NO: 1333709 - RNA, 19 nt, Homo sapiens
  misc_RNA (1)...(19): siRNA sense strand
gaagaugaggcugagcauu

SEQ ID NO: 1333710 - RNA, 19 nt, Homo sapiens
  misc_RNA (1)...(19): siRNA sense strand
ggauaagaaaggugacaga

SEQ ID NO: 1333711 - RNA, 19 nt, Homo sapiens
  misc_RNA (1)...(19): siRNA sense strand
caucaaggaggagcuaauu

SEQ ID NO: 1333712 - RNA, 19 nt, Homo sapiens
  misc_RNA (1)...(19): siRNA sense strand
cgacuggcaggauaagaaa

SEQ ID NO: 1333713 - RNA, 19 nt, Homo sapiens
  misc_RNA (1)...(19): siRNA sense strand
caagaagaaaggccucaug

SEQ ID NO: 1333714 - RNA, 19 nt, Homo sapiens
  misc_RNA (1)...(19): siRNA sense strand
gcccacaaccgcaccaaga

SEQ ID NO: 1333715 - RNA, 19 nt, Homo sapiens
  misc_RNA (1)...(19): siRNA sense strand
gaagggaaggcaggacaug

SEQ ID NO: 1333716 - RNA, 19 nt, Homo sapiens
  misc_RNA (1)...(19): siRNA sense strand
ggaagcccaagaagcagaa

SEQ ID NO: 1333717 - RNA, 19 nt, Homo sapiens
  misc_RNA (1)...(19): siRNA sense strand
gcaguuccacgacuucaag

SEQ ID NO: 1333718 - RNA, 19 nt, Homo sapiens
  misc_RNA (1)...(19): siRNA sense strand
caagaagcagaaacuggaa

SEQ ID NO: 1333719 - RNA, 19 nt, Homo sapiens
  misc_RNA (1)...(19): siRNA sense strand
gcccuacugugcugacauc

SEQ ID NO: 1333720 - RNA, 19 nt, Homo sapiens
  misc_RNA (1)...(19): siRNA sense strand
cagaggacuccgaggauga

SEQ ID NO: 1333721 - RNA, 19 nt, Homo sapiens
  misc_RNA (1)...(19): siRNA sense strand
ugacagacgauuccugaag

SEQ ID NO: 1333722 - RNA, 19 nt, Homo sapiens
  misc_RNA (1)...(19): siRNA sense strand
guggaugcccugcugaaga

SEQ ID NO: 1333723 - RNA, 19 nt, Homo sapiens
  misc_RNA (1)...(19): siRNA sense strand
ggcuguggcugacaagaag

SEQ ID NO: 1333724 - RNA, 19 nt, Homo sapiens
  misc_RNA (1)...(19): siRNA sense strand
agucugaggcccagcauga

SEQ ID NO: 1333725 - RNA, 19 nt, Homo sapiens
  misc_RNA (1)...(19): siRNA sense strand
aggcugagcauuacaagau

SEQ ID NO: 1333726 - RNA, 19 nt, Homo sapiens
  misc_RNA (1)...(19): siRNA sense strand
ucgagaccaugaacuugga

SEQ ID NO: 1333727 - RNA, 19 nt, Homo sapiens
  misc_RNA (1)...(19): siRNA sense strand
cgaacuggacacuaaagau

SEQ ID NO: 1333728 - RNA, 19 nt, Homo sapiens
  misc_RNA (1)...(19): siRNA sense strand
gaccgaacuggacacuaaa

SEQ ID NO: 1333729 - RNA, 19 nt, Homo sapiens
  misc_RNA (1)...(19): siRNA sense strand
caggacggcccaaauccaa

SEQ ID NO: 1333730 - RNA, 19 nt, Homo sapiens
  misc_RNA (1)...(19): siRNA sense strand
ucaccgacuggcaggauaa

SEQ ID NO: 1333731 - RNA, 19 nt, Homo sapiens
  misc_RNA (1)...(19): siRNA sense strand
ccgacuggcaggauaagaa

SEQ ID NO: 1333732 - RNA, 19 nt, Homo sapiens
  misc_RNA (1)...(19): siRNA sense strand
gaacagccggaagauggau

SEQ ID NO: 1333733 - RNA, 19 nt, Homo sapiens
  misc_RNA (1)...(19): siRNA sense strand
ucaaggaggagcuaauugc

SEQ ID NO: 1333734 - RNA, 19 nt, Homo sapiens
  misc_RNA (1)...(19): siRNA sense strand
gcaucaaggaggagcuaau

SEQ ID NO: 1333735 - RNA, 19 nt, Homo sapiens
  misc_RNA (1)...(19): siRNA sense strand
ggacacuaaagauguggau

SEQ ID NO: 1333736 - RNA, 19 nt, Homo sapiens
  misc_RNA (1)...(19): siRNA sense strand
gcugagcugaaggcacuua

SEQ ID NO: 1333737 - RNA, 19 nt, Homo sapiens
  misc_RNA (1)...(19): siRNA sense strand
ugagguccuugcugagcuu

SEQ ID NO: 1333738 - RNA, 19 nt, Homo sapiens
  misc_RNA (1)...(19): siRNA sense strand
ggaagggaaggcaggacau

SEQ ID NO: 1333739 - RNA, 19 nt, Homo sapiens
  misc_RNA (1)...(19): siRNA sense strand
agaugaggcugagcauuac

SEQ ID NO: 1333740 - RNA, 19 nt, Homo sapiens
  misc_RNA (1)...(19): siRNA sense strand
ugaccgaacuggacacuaa

SEQ ID NO: 1333741 - RNA, 19 nt, Homo sapiens
  misc_RNA (1)...(19): siRNA sense strand
gaacuggacacuaaagaug

SEQ ID NO: 1333742 - RNA, 19 nt, Homo sapiens
  misc_RNA (1)...(19): siRNA sense strand
ugacaugucugggaaagaa

SEQ ID NO: 1333743 - RNA, 19 nt, Homo sapiens
  misc_RNA (1)...(19): siRNA sense strand
aagaugaggcugagcauua

SEQ ID NO: 1333744 - RNA, 19 nt, Homo sapiens
  misc_RNA (1)...(19): siRNA sense strand
gaagauggaugccccuuug

SEQ ID NO: 1333745 - RNA, 19 nt, Homo sapiens
  misc_RNA (1)...(19): siRNA sense strand
gaggagguccgcacacuug

SEQ ID NO: 1333746 - RNA, 19 nt, Homo sapiens
  misc_RNA (1)...(19): siRNA sense strand
gaaaggugacagacgauuc

SEQ ID NO: 1333747 - RNA, 19 nt, Homo sapiens
  misc_RNA (1)...(19): siRNA sense strand
uggaugcccugcugaagaa

SEQ ID NO: 1333748 - RNA, 19 nt, Homo sapiens
  misc_RNA (1)...(19): siRNA sense strand
ccaagauccaggaauauga

SEQ ID NO: 1333749 - RNA, 19 nt, Homo sapiens
  misc_RNA (1)...(19): siRNA sense strand
ucagugugccgcauacuaa

SEQ ID NO: 1333750 - RNA, 19 nt, Homo sapiens
  misc_RNA (1)...(19): siRNA sense strand
ccgcacacuugaggaguua

SEQ ID NO: 1333751 - RNA, 19 nt, Homo sapiens
  misc_RNA (1)...(19): siRNA sense strand
caagauccaggaauaugaa

SEQ ID NO: 1333752 - RNA, 19 nt, Homo sapiens
  misc_RNA (1)...(19): siRNA sense strand
agcccaagauccaggaaua

SEQ ID NO: 1333753 - RNA, 19 nt, Homo sapiens
  misc_RNA (1)...(19): siRNA sense strand
agaacaagcccuucagugu

SEQ ID NO: 1333754 - RNA, 19 nt, Homo sapiens
  misc_RNA (1)...(19): siRNA sense strand
gaagaugaggcugagcauu

SEQ ID NO: 1333755 - RNA, 19 nt, Homo sapiens
  misc_RNA (1)...(19): siRNA sense strand
ggauaagaaaggugacaga

SEQ ID NO: 1333756 - RNA, 19 nt, Homo sapiens
  misc_RNA (1)...(19): siRNA sense strand
caucaaggaggagcuaauu

SEQ ID NO: 1333757 - RNA, 19 nt, Homo sapiens
  misc_RNA (1)...(19): siRNA sense strand
cgacuggcaggauaagaaa

SEQ ID NO: 1333758 - RNA, 19 nt, Homo sapiens
  misc_RNA (1)...(19): siRNA sense strand
caagaagaaaggccucaug

SEQ ID NO: 1333759 - RNA, 19 nt, Homo sapiens
  misc_RNA (1)...(19): siRNA sense strand
gcccacaaccgcaccaaga

SEQ ID NO: 1333760 - RNA, 19 nt, Homo sapiens
  misc_RNA (1)...(19): siRNA sense strand
gaagggaaggcaggacaug

SEQ ID NO: 1333761 - RNA, 19 nt, Homo sapiens
  misc_RNA (1)...(19): siRNA sense strand
ggaagcccaagaagcagaa

SEQ ID NO: 1333762 - RNA, 19 nt, Homo sapiens
  misc_RNA (1)...(19): siRNA sense strand
gcaguuccacgacuucaag

SEQ ID NO: 1333763 - RNA, 19 nt, Homo sapiens
  misc_RNA (1)...(19): siRNA sense strand
caagaagcagaaacuggaa

SEQ ID NO: 1333764 - RNA, 19 nt, Homo sapiens
  misc_RNA (1)...(19): siRNA sense strand
gcccuacugugcugacauc

SEQ ID NO: 1333765 - RNA, 19 nt, Homo sapiens
  misc_RNA (1)...(19): siRNA sense strand
cagaggacuccgaggauga

SEQ ID NO: 1333766 - RNA, 19 nt, Homo sapiens
  misc_RNA (1)...(19): siRNA sense strand
ugacagacgauuccugaag

SEQ ID NO: 1333767 - RNA, 19 nt, Homo sapiens
  misc_RNA (1)...(19): siRNA sense strand
guggaugcccugcugaaga

SEQ ID NO: 1333768 - RNA, 19 nt, Homo sapiens
  misc_RNA (1)...(19): siRNA sense strand
ggcuguggcugacaagaag

SEQ ID NO: 1333769 - RNA, 19 nt, Homo sapiens
  misc_RNA (1)...(19): siRNA sense strand
agucugaggcccagcauga

SEQ ID NO: 1333770 - RNA, 19 nt, Homo sapiens
  misc_RNA (1)...(19): siRNA sense strand
aggcugagcauuacaagau

SEQ ID NO: 1333771 - RNA, 19 nt, Homo sapiens
  misc_RNA (1)...(19): siRNA sense strand
ucgagaccaugaacuugga

SEQ ID NO: 1333772 - RNA, 19 nt, Homo sapiens
  misc_RNA (1)...(19): siRNA sense strand
cgaacuggacacuaaagau

SEQ ID NO: 1333773 - RNA, 19 nt, Homo sapiens
  misc_RNA (1)...(19): siRNA sense strand
gaccgaacuggacacuaaa

SEQ ID NO: 1333774 - RNA, 19 nt, Homo sapiens
  misc_RNA (1)...(19): siRNA sense strand
caggacggcccaaauccaa

SEQ ID NO: 1333775 - RNA, 19 nt, Homo sapiens
  misc_RNA (1)...(19): siRNA sense strand
ucaccgacuggcaggauaa

SEQ ID NO: 1333776 - RNA, 19 nt, Homo sapiens
  misc_RNA (1)...(19): siRNA sense strand
ccgacuggcaggauaagaa

SEQ ID NO: 1333777 - RNA, 19 nt, Homo sapiens
  misc_RNA (1)...(19): siRNA sense strand
gaacagccggaagauggau

SEQ ID NO: 1333778 - RNA, 19 nt, Homo sapiens
  misc_RNA (1)...(19): siRNA sense strand
ucaaggaggagcuaauugc

SEQ ID NO: 1333779 - RNA, 19 nt, Homo sapiens
  misc_RNA (1)...(19): siRNA sense strand
gcaucaaggaggagcuaau

SEQ ID NO: 1333780 - RNA, 19 nt, Homo sapiens
  misc_RNA (1)...(19): siRNA sense strand
ggacacuaaagauguggau

SEQ ID NO: 1333781 - RNA, 19 nt, Homo sapiens
  misc_RNA (1)...(19): siRNA sense strand
gcugagcugaaggcacuua

SEQ ID NO: 1333782 - RNA, 19 nt, Homo sapiens
  misc_RNA (1)...(19): siRNA sense strand
ugagguccuugcugagcuu

SEQ ID NO: 1333783 - RNA, 19 nt, Homo sapiens
  misc_RNA (1)...(19): siRNA sense strand
ggaagggaaggcaggacau

SEQ ID NO: 1333784 - RNA, 19 nt, Homo sapiens
  misc_RNA (1)...(19): siRNA sense strand
agaugaggcugagcauuac

SEQ ID NO: 1333785 - RNA, 19 nt, Homo sapiens
  misc_RNA (1)...(19): siRNA sense strand
ccacagagcuuaccucaaa

SEQ ID NO: 1333786 - RNA, 19 nt, Homo sapiens
  misc_RNA (1)...(19): siRNA sense strand
gcaaacaaguggauugaaa

SEQ ID NO: 1333787 - RNA, 19 nt, Homo sapiens
  misc_RNA (1)...(19): siRNA sense strand
uaaagcaccuuaacaauga

SEQ ID NO: 1333788 - RNA, 19 nt, Homo sapiens
  misc_RNA (1)...(19): siRNA sense strand
gacaggcaguuaacacuua

SEQ ID NO: 1333789 - RNA, 19 nt, Homo sapiens
  misc_RNA (1)...(19): siRNA sense strand
gaaauuuacagcugguuua

SEQ ID NO: 1333790 - RNA, 19 nt, Homo sapiens
  misc_RNA (1)...(19): siRNA sense strand
gaugaagacugcccaaugu

SEQ ID NO: 1333791 - RNA, 19 nt, Homo sapiens
  misc_RNA (1)...(19): siRNA sense strand
cagcagagauggaagauca

SEQ ID NO: 1333792 - RNA, 19 nt, Homo sapiens
  misc_RNA (1)...(19): siRNA sense strand
gaaagcauuugugaagauu

SEQ ID NO: 1333793 - RNA, 19 nt, Homo sapiens
  misc_RNA (1)...(19): siRNA sense strand
gcaguuacaucuucagcuu

SEQ ID NO: 1333794 - RNA, 19 nt, Homo sapiens
  misc_RNA (1)...(19): siRNA sense strand
acagagagauugaagaaga

SEQ ID NO: 1333795 - RNA, 19 nt, Homo sapiens
  misc_RNA (1)...(19): siRNA sense strand
gaugucagaccuccauuua

SEQ ID NO: 1333796 - RNA, 19 nt, Homo sapiens
  misc_RNA (1)...(19): siRNA sense strand
ggcuagaccucacuacuaa

SEQ ID NO: 1333797 - RNA, 19 nt, Homo sapiens
  misc_RNA (1)...(19): siRNA sense strand
caaagcaucaccaccaaua

SEQ ID NO: 1333798 - RNA, 19 nt, Homo sapiens
  misc_RNA (1)...(19): siRNA sense strand
gcagagagcaguuuaccuu

SEQ ID NO: 1333799 - RNA, 19 nt, Homo sapiens
  misc_RNA (1)...(19): siRNA sense strand
aagaagagccuuuaucuga

SEQ ID NO: 1333800 - RNA, 19 nt, Homo sapiens
  misc_RNA (1)...(19): siRNA sense strand
ggaaugagcacucuaagca

SEQ ID NO: 1333801 - RNA, 19 nt, Homo sapiens
  misc_RNA (1)...(19): siRNA sense strand
gcaguacgucauaaucuua

SEQ ID NO: 1333802 - RNA, 19 nt, Homo sapiens
  misc_RNA (1)...(19): siRNA sense strand
gaagagccuuuaucugaag

SEQ ID NO: 1333803 - RNA, 19 nt, Homo sapiens
  misc_RNA (1)...(19): siRNA sense strand
gacaacagcuaaucacagu

SEQ ID NO: 1333804 - RNA, 19 nt, Homo sapiens
  misc_RNA (1)...(19): siRNA sense strand
gacaccagcucugaaguaa

SEQ ID NO: 1333805 - RNA, 19 nt, Homo sapiens
  misc_RNA (1)...(19): siRNA sense strand
ggacagucuucaguucuaa

SEQ ID NO: 1333806 - RNA, 19 nt, Homo sapiens
  misc_RNA (1)...(19): siRNA sense strand
gagcagugauaaacagaga

SEQ ID NO: 1333807 - RNA, 19 nt, Homo sapiens
  misc_RNA (1)...(19): siRNA sense strand
ggaaguccaaccuuaguaa

SEQ ID NO: 1333808 - RNA, 19 nt, Homo sapiens
  misc_RNA (1)...(19): siRNA sense strand
gcaaauggccaggcuguga

SEQ ID NO: 1333809 - RNA, 19 nt, Homo sapiens
  misc_RNA (1)...(19): siRNA sense strand
gcagguggugcaacaguua

SEQ ID NO: 1333810 - RNA, 19 nt, Homo sapiens
  misc_RNA (1)...(19): siRNA sense strand
cgacagagagauugaagaa

SEQ ID NO: 1333811 - RNA, 19 nt, Homo sapiens
  misc_RNA (1)...(19): siRNA sense strand
gaaagaagugacuggaguu

SEQ ID NO: 1333812 - RNA, 19 nt, Homo sapiens
  misc_RNA (1)...(19): siRNA sense strand
gaaacagcaagagcaguua

SEQ ID NO: 1333813 - RNA, 19 nt, Homo sapiens
  misc_RNA (1)...(19): siRNA sense strand
agaagagccuuuaucugaa

SEQ ID NO: 1333814 - RNA, 19 nt, Homo sapiens
  misc_RNA (1)...(19): siRNA sense strand
caaggaagagccagugauu

SEQ ID NO: 1333815 - RNA, 19 nt, Homo sapiens
  misc_RNA (1)...(19): siRNA sense strand
aacaggaaguccaaccuua

SEQ ID NO: 1333816 - RNA, 19 nt, Homo sapiens
  misc_RNA (1)...(19): siRNA sense strand
gcagcaacuuggaagaaug

SEQ ID NO: 1333817 - RNA, 19 nt, Homo sapiens
  misc_RNA (1)...(19): siRNA sense strand
ugaaagcauuugugaagau

SEQ ID NO: 1333818 - RNA, 19 nt, Homo sapiens
  misc_RNA (1)...(19): siRNA sense strand
gggcuagaccucacuacua

SEQ ID NO: 1333819 - RNA, 19 nt, Homo sapiens
  misc_RNA (1)...(19): siRNA sense strand
gacuguggaugaaguagaa

SEQ ID NO: 1333820 - RNA, 19 nt, Homo sapiens
  misc_RNA (1)...(19): siRNA sense strand
gcgaacgucuucaagcaau

SEQ ID NO: 1333821 - RNA, 19 nt, Homo sapiens
  misc_RNA (1)...(19): siRNA sense strand
ucagaccuccauuuacuua

SEQ ID NO: 1333822 - RNA, 19 nt, Homo sapiens
  misc_RNA (1)...(19): siRNA sense strand
cgacagagacaauaagcaa

SEQ ID NO: 1333823 - RNA, 19 nt, Homo sapiens
  misc_RNA (1)...(19): siRNA sense strand
ugacagcaauggaaacagu

SEQ ID NO: 1333824 - RNA, 19 nt, Homo sapiens
  misc_RNA (1)...(19): siRNA sense strand
ggaugaagacugcccaaug

SEQ ID NO: 1333825 - RNA, 19 nt, Homo sapiens
  misc_RNA (1)...(19): siRNA sense strand
gaagaagagccuuuaucug

SEQ ID NO: 1333826 - RNA, 19 nt, Homo sapiens
  misc_RNA (1)...(19): siRNA sense strand
gcagauccuucagcaacaa

SEQ ID NO: 1333827 - RNA, 19 nt, Homo sapiens
  misc_RNA (1)...(19): siRNA sense strand
gaaguccaaccuuaguaaa

SEQ ID NO: 1333828 - RNA, 19 nt, Homo sapiens
  misc_RNA (1)...(19): siRNA sense strand
ucagacaaauacaacauuc

SEQ ID NO: 1333829 - RNA, 19 nt, Homo sapiens
  misc_RNA (1)...(19): siRNA sense strand
gcaacagcauccuggaaag

SEQ ID NO: 1333830 - RNA, 19 nt, Homo sapiens
  misc_RNA (1)...(19): siRNA sense strand
gaauggacagucuucaguu

SEQ ID NO: 1333831 - RNA, 19 nt, Homo sapiens
  misc_RNA (1)...(19): siRNA sense strand
uaaaucuggugucuagugu

SEQ ID NO: 1333832 - RNA, 19 nt, Homo sapiens
  misc_RNA (1)...(19): siRNA sense strand
ggugcaacaguuagaaaua

SEQ ID NO: 1333833 - RNA, 19 nt, Homo sapiens
  misc_RNA (1)...(19): siRNA sense strand
uaagagcagugauaaacag

SEQ ID NO: 1333834 - RNA, 19 nt, Homo sapiens
  misc_RNA (1)...(19): siRNA sense strand
agagagcaguuuaccuuug

SEQ ID NO: 1333835 - RNA, 19 nt, Homo sapiens
  misc_RNA (1)...(19): siRNA sense strand
gaaguaagcacaguagaac

SEQ ID NO: 1333836 - RNA, 19 nt, Homo sapiens
  misc_RNA (1)...(19): siRNA sense strand
gaagacgacagagagauug

SEQ ID NO: 1333837 - RNA, 19 nt, Homo sapiens
  misc_RNA (1)...(19): siRNA sense strand
aauccuggacugauaaaua

SEQ ID NO: 1333838 - RNA, 19 nt, Homo sapiens
  misc_RNA (1)...(19): siRNA sense strand
aaguaauccuggacugaua

SEQ ID NO: 1333839 - RNA, 19 nt, Homo sapiens
  misc_RNA (1)...(19): siRNA sense strand
ugacaccagcucugaagua

SEQ ID NO: 1333840 - RNA, 19 nt, Homo sapiens
  misc_RNA (1)...(19): siRNA sense strand
gcuacaagcccuucuccaa

SEQ ID NO: 1333841 - RNA, 19 nt, Homo sapiens
  misc_RNA (1)...(19): siRNA sense strand
gaacgucuucaagcaauga

SEQ ID NO: 1333842 - RNA, 19 nt, Homo sapiens
  misc_RNA (1)...(19): siRNA sense strand
auccuggacugauaaauaa

SEQ ID NO: 1333843 - RNA, 19 nt, Homo sapiens
  misc_RNA (1)...(19): siRNA sense strand
gagagcaguuuaccuuugc

SEQ ID NO: 1333844 - RNA, 19 nt, Homo sapiens
  misc_RNA (1)...(19): siRNA sense strand
gcagcaaacaaguggauug

SEQ ID NO: 1333845 - RNA, 19 nt, Homo sapiens
  misc_RNA (1)...(19): siRNA sense strand
gauugaagaagagccuuua

SEQ ID NO: 1333846 - RNA, 19 nt, Homo sapiens
  misc_RNA (1)...(19): siRNA sense strand
gcuaaucacaguccagaau

SEQ ID NO: 1333847 - RNA, 19 nt, Homo sapiens
  misc_RNA (1)...(19): siRNA sense strand
ugucagaccuccauuuacu

SEQ ID NO: 1333848 - RNA, 19 nt, Homo sapiens
  misc_RNA (1)...(19): siRNA sense strand
gugaaagcauuugugaaga

SEQ ID NO: 1333849 - RNA, 19 nt, Homo sapiens
  misc_RNA (1)...(19): siRNA sense strand
cuuaaguccugcugagauu

SEQ ID NO: 1333850 - RNA, 19 nt, Homo sapiens
  misc_RNA (1)...(19): siRNA sense strand
ugaaguaagcacaguagaa

SEQ ID NO: 1333851 - RNA, 19 nt, Homo sapiens
  misc_RNA (1)...(19): siRNA sense strand
caaacaaguggauugaaau

SEQ ID NO: 1333852 - RNA, 19 nt, Homo sapiens
  misc_RNA (1)...(19): siRNA sense strand
cagaagcgaaggucacaaa

SEQ ID NO: 1333853 - RNA, 19 nt, Homo sapiens
  misc_RNA (1)...(19): siRNA sense strand
gucaccaugucgaagaaua

SEQ ID NO: 1333854 - RNA, 19 nt, Homo sapiens
  misc_RNA (1)...(19): siRNA sense strand
gcccaaaccaucucccaaa

SEQ ID NO: 1333855 - RNA, 19 nt, Homo sapiens
  misc_RNA (1)...(19): siRNA sense strand
ucacaguccagaauuagaa

SEQ ID NO: 1333856 - RNA, 19 nt, Homo sapiens
  misc_RNA (1)...(19): siRNA sense strand
ugaagaagagccuuuaucu

SEQ ID NO: 1333857 - RNA, 19 nt, Homo sapiens
  misc_RNA (1)...(19): siRNA sense strand
agaauuagaagacgacaga

SEQ ID NO: 1333858 - RNA, 19 nt, Homo sapiens
  misc_RNA (1)...(19): siRNA sense strand
uacaagcccuucuccaaca

SEQ ID NO: 1333859 - RNA, 19 nt, Homo sapiens
  misc_RNA (1)...(19): siRNA sense strand
uuacacggacauuugcuua

SEQ ID NO: 1333860 - RNA, 19 nt, Homo sapiens
  misc_RNA (1)...(19): siRNA sense strand
gccaggcugugaaagcauu

SEQ ID NO: 1333861 - RNA, 19 nt, Homo sapiens
  misc_RNA (1)...(19): siRNA sense strand
ccaccaauaacucaucauu

SEQ ID NO: 1333862 - RNA, 19 nt, Homo sapiens
  misc_RNA (1)...(19): siRNA sense strand
gcaguuauggaaagaagug

SEQ ID NO: 1333863 - RNA, 19 nt, Homo sapiens
  misc_RNA (1)...(19): siRNA sense strand
agaaugcaguacgucauaa

SEQ ID NO: 1333864 - RNA, 19 nt, Homo sapiens
  misc_RNA (1)...(19): siRNA sense strand
caaaccaucucccaaaccu

SEQ ID NO: 1333865 - RNA, 19 nt, Homo sapiens
  misc_RNA (1)...(19): siRNA sense strand
gagacaauaagcaacaguu

SEQ ID NO: 1333866 - RNA, 19 nt, Homo sapiens
  misc_RNA (1)...(19): siRNA sense strand
gcugugaaagcauuuguga

SEQ ID NO: 1333867 - RNA, 19 nt, Homo sapiens
  misc_RNA (1)...(19): siRNA sense strand
gcagcaacaacaacaacaa

SEQ ID NO: 1333868 - RNA, 19 nt, Homo sapiens
  misc_RNA (1)...(19): siRNA sense strand
auaagcaacaguucaauga

SEQ ID NO: 1333869 - RNA, 19 nt, Homo sapiens
  misc_RNA (1)...(19): siRNA sense strand
gaagaaugcaguacgucau

SEQ ID NO: 1333870 - RNA, 19 nt, Homo sapiens
  misc_RNA (1)...(19): siRNA sense strand
agaccuccauuuacuuaug

SEQ ID NO: 1333871 - RNA, 19 nt, Homo sapiens
  misc_RNA (1)...(19): siRNA sense strand
gacaauaagcaacaguuca

SEQ ID NO: 1333872 - RNA, 19 nt, Homo sapiens
  misc_RNA (1)...(19): siRNA sense strand
caucagaaauugccccaaa

SEQ ID NO: 1333873 - RNA, 19 nt, Homo sapiens
  misc_RNA (1)...(19): siRNA sense strand
gaaggcgacauucagacaa

SEQ ID NO: 1333874 - RNA, 19 nt, Homo sapiens
  misc_RNA (1)...(19): siRNA sense strand
gugcaacaguuagaaauac

SEQ ID NO: 1333875 - RNA, 19 nt, Homo sapiens
  misc_RNA (1)...(19): siRNA sense strand
caaauggccaggcugugaa

SEQ ID NO: 1333876 - RNA, 19 nt, Homo sapiens
  misc_RNA (1)...(19): siRNA sense strand
uggacagucuucaguucua

SEQ ID NO: 1333877 - RNA, 19 nt, Homo sapiens
  misc_RNA (1)...(19): siRNA sense strand
acucaucauuccauaguga

SEQ ID NO: 1333878 - RNA, 19 nt, Homo sapiens
  misc_RNA (1)...(19): siRNA sense strand
uaacucaucauuccauagu

SEQ ID NO: 1333879 - RNA, 19 nt, Homo sapiens
  misc_RNA (1)...(19): siRNA sense strand
gcagcagcuucuccagaug

SEQ ID NO: 1333880 - RNA, 19 nt, Homo sapiens
  misc_RNA (1)...(19): siRNA sense strand
gaaauugccccaaacuaug

SEQ ID NO: 1333881 - RNA, 19 nt, Homo sapiens
  misc_RNA (1)...(19): siRNA sense strand
caauccacgucaaggaaga

SEQ ID NO: 1333882 - RNA, 19 nt, Homo sapiens
  misc_RNA (1)...(19): siRNA sense strand
caguuuaccuuugcuaagu

SEQ ID NO: 1333883 - RNA, 19 nt, Homo sapiens
  misc_RNA (1)...(19): siRNA sense strand
aaucuuagccugcacaagu

SEQ ID NO: 1333884 - RNA, 19 nt, Homo sapiens
  misc_RNA (1)...(19): siRNA sense strand
aagaaugcaguacgucaua

SEQ ID NO: 1333885 - RNA, 19 nt, Homo sapiens
  misc_RNA (1)...(19): siRNA sense strand
ccacagagcuuaccucaaa

SEQ ID NO: 1333886 - RNA, 19 nt, Homo sapiens
  misc_RNA (1)...(19): siRNA sense strand
gcaaacaaguggauugaaa

SEQ ID NO: 1333887 - RNA, 19 nt, Homo sapiens
  misc_RNA (1)...(19): siRNA sense strand
uaaagcaccuuaacaauga

SEQ ID NO: 1333888 - RNA, 19 nt, Homo sapiens
  misc_RNA (1)...(19): siRNA sense strand
gacaggcaguuaacacuua

SEQ ID NO: 1333889 - RNA, 19 nt, Homo sapiens
  misc_RNA (1)...(19): siRNA sense strand
gaaauuuacagcugguuua

SEQ ID NO: 1333890 - RNA, 19 nt, Homo sapiens
  misc_RNA (1)...(19): siRNA sense strand
gaugaagacugcccaaugu

SEQ ID NO: 1333891 - RNA, 19 nt, Homo sapiens
  misc_RNA (1)...(19): siRNA sense strand
cagcagagauggaagauca

SEQ ID NO: 1333892 - RNA, 19 nt, Homo sapiens
  misc_RNA (1)...(19): siRNA sense strand
gaaagcauuugugaagauu

SEQ ID NO: 1333893 - RNA, 19 nt, Homo sapiens
  misc_RNA (1)...(19): siRNA sense strand
gcaguuacaucuucagcuu

SEQ ID NO: 1333894 - RNA, 19 nt, Homo sapiens
  misc_RNA (1)...(19): siRNA sense strand
acagagagauugaagaaga

SEQ ID NO: 1333895 - RNA, 19 nt, Homo sapiens
  misc_RNA (1)...(19): siRNA sense strand
gaugucagaccuccauuua

SEQ ID NO: 1333896 - RNA, 19 nt, Homo sapiens
  misc_RNA (1)...(19): siRNA sense strand
ggcuagaccucacuacuaa

SEQ ID NO: 1333897 - RNA, 19 nt, Homo sapiens
  misc_RNA (1)...(19): siRNA sense strand
caaagcaucaccaccaaua

SEQ ID NO: 1333898 - RNA, 19 nt, Homo sapiens
  misc_RNA (1)...(19): siRNA sense strand
gcagagagcaguuuaccuu

SEQ ID NO: 1333899 - RNA, 19 nt, Homo sapiens
  misc_RNA (1)...(19): siRNA sense strand
aagaagagccuuuaucuga

SEQ ID NO: 1333900 - RNA, 19 nt, Homo sapiens
  misc_RNA (1)...(19): siRNA sense strand
ggaaugagcacucuaagca

SEQ ID NO: 1333901 - RNA, 19 nt, Homo sapiens
  misc_RNA (1)...(19): siRNA sense strand
gcaguacgucauaaucuua

SEQ ID NO: 1333902 - RNA, 19 nt, Homo sapiens
  misc_RNA (1)...(19): siRNA sense strand
gaagagccuuuaucugaag

SEQ ID NO: 1333903 - RNA, 19 nt, Homo sapiens
  misc_RNA (1)...(19): siRNA sense strand
gacaacagcuaaucacagu

SEQ ID NO: 1333904 - RNA, 19 nt, Homo sapiens
  misc_RNA (1)...(19): siRNA sense strand
gacaccagcucugaaguaa

SEQ ID NO: 1333905 - RNA, 19 nt, Homo sapiens
  misc_RNA (1)...(19): siRNA sense strand
ggacagucuucaguucuaa

SEQ ID NO: 1333906 - RNA, 19 nt, Homo sapiens
  misc_RNA (1)...(19): siRNA sense strand
gagcagugauaaacagaga

SEQ ID NO: 1333907 - RNA, 19 nt, Homo sapiens
  misc_RNA (1)...(19): siRNA sense strand
ggaaguccaaccuuaguaa

SEQ ID NO: 1333908 - RNA, 19 nt, Homo sapiens
  misc_RNA (1)...(19): siRNA sense strand
gcaaauggccaggcuguga

SEQ ID NO: 1333909 - RNA, 19 nt, Homo sapiens
  misc_RNA (1)...(19): siRNA sense strand
gcagguggugcaacaguua

SEQ ID NO: 1333910 - RNA, 19 nt, Homo sapiens
  misc_RNA (1)...(19): siRNA sense strand
cgacagagagauugaagaa

SEQ ID NO: 1333911 - RNA, 19 nt, Homo sapiens
  misc_RNA (1)...(19): siRNA sense strand
gaaagaagugacuggaguu

SEQ ID NO: 1333912 - RNA, 19 nt, Homo sapiens
  misc_RNA (1)...(19): siRNA sense strand
gaaacagcaagagcaguua

SEQ ID NO: 1333913 - RNA, 19 nt, Homo sapiens
  misc_RNA (1)...(19): siRNA sense strand
agaagagccuuuaucugaa

SEQ ID NO: 1333914 - RNA, 19 nt, Homo sapiens
  misc_RNA (1)...(19): siRNA sense strand
caaggaagagccagugauu

SEQ ID NO: 1333915 - RNA, 19 nt, Homo sapiens
  misc_RNA (1)...(19): siRNA sense strand
aacaggaaguccaaccuua

SEQ ID NO: 1333916 - RNA, 19 nt, Homo sapiens
  misc_RNA (1)...(19): siRNA sense strand
gcagcaacuuggaagaaug

SEQ ID NO: 1333917 - RNA, 19 nt, Homo sapiens
  misc_RNA (1)...(19): siRNA sense strand
ugaaagcauuugugaagau

SEQ ID NO: 1333918 - RNA, 19 nt, Homo sapiens
  misc_RNA (1)...(19): siRNA sense strand
gggcuagaccucacuacua

SEQ ID NO: 1333919 - RNA, 19 nt, Homo sapiens
  misc_RNA (1)...(19): siRNA sense strand
gacuguggaugaaguagaa

SEQ ID NO: 1333920 - RNA, 19 nt, Homo sapiens
  misc_RNA (1)...(19): siRNA sense strand
gcgaacgucuucaagcaau

SEQ ID NO: 1333921 - RNA, 19 nt, Homo sapiens
  misc_RNA (1)...(19): siRNA sense strand
ucagaccuccauuuacuua

SEQ ID NO: 1333922 - RNA, 19 nt, Homo sapiens
  misc_RNA (1)...(19): siRNA sense strand
cgacagagacaauaagcaa

SEQ ID NO: 1333923 - RNA, 19 nt, Homo sapiens
  misc_RNA (1)...(19): siRNA sense strand
ugacagcaauggaaacagu

SEQ ID NO: 1333924 - RNA, 19 nt, Homo sapiens
  misc_RNA (1)...(19): siRNA sense strand
ggaugaagacugcccaaug

SEQ ID NO: 1333925 - RNA, 19 nt, Homo sapiens
  misc_RNA (1)...(19): siRNA sense strand
gaagaagagccuuuaucug

SEQ ID NO: 1333926 - RNA, 19 nt, Homo sapiens
  misc_RNA (1)...(19): siRNA sense strand
gcagauccuucagcaacaa

SEQ ID NO: 1333927 - RNA, 19 nt, Homo sapiens
  misc_RNA (1)...(19): siRNA sense strand
gaaguccaaccuuaguaaa

SEQ ID NO: 1333928 - RNA, 19 nt, Homo sapiens
  misc_RNA (1)...(19): siRNA sense strand
ucagacaaauacaacauuc

SEQ ID NO: 1333929 - RNA, 19 nt, Homo sapiens
  misc_RNA (1)...(19): siRNA sense strand
gcaacagcauccuggaaag

SEQ ID NO: 1333930 - RNA, 19 nt, Homo sapiens
  misc_RNA (1)...(19): siRNA sense strand
gaauggacagucuucaguu

SEQ ID NO: 1333931 - RNA, 19 nt, Homo sapiens
  misc_RNA (1)...(19): siRNA sense strand
uaaaucuggugucuagugu

SEQ ID NO: 1333932 - RNA, 19 nt, Homo sapiens
  misc_RNA (1)...(19): siRNA sense strand
ggugcaacaguuagaaaua

SEQ ID NO: 1333933 - RNA, 19 nt, Homo sapiens
  misc_RNA (1)...(19): siRNA sense strand
uaagagcagugauaaacag

SEQ ID NO: 1333934 - RNA, 19 nt, Homo sapiens
  misc_RNA (1)...(19): siRNA sense strand
agagagcaguuuaccuuug

SEQ ID NO: 1333935 - RNA, 19 nt, Homo sapiens
  misc_RNA (1)...(19): siRNA sense strand
gaaguaagcacaguagaac

SEQ ID NO: 1333936 - RNA, 19 nt, Homo sapiens
  misc_RNA (1)...(19): siRNA sense strand
gaagacgacagagagauug

SEQ ID NO: 1333937 - RNA, 19 nt, Homo sapiens
  misc_RNA (1)...(19): siRNA sense strand
aauccuggacugauaaaua

SEQ ID NO: 1333938 - RNA, 19 nt, Homo sapiens
  misc_RNA (1)...(19): siRNA sense strand
aaguaauccuggacugaua

SEQ ID NO: 1333939 - RNA, 19 nt, Homo sapiens
  misc_RNA (1)...(19): siRNA sense strand
ugacaccagcucugaagua

SEQ ID NO: 1333940 - RNA, 19 nt, Homo sapiens
  misc_RNA (1)...(19): siRNA sense strand
gcuacaagcccuucuccaa

SEQ ID NO: 1333941 - RNA, 19 nt, Homo sapiens
  misc_RNA (1)...(19): siRNA sense strand
gaacgucuucaagcaauga

SEQ ID NO: 1333942 - RNA, 19 nt, Homo sapiens
  misc_RNA (1)...(19): siRNA sense strand
auccuggacugauaaauaa

SEQ ID NO: 1333943 - RNA, 19 nt, Homo sapiens
  misc_RNA (1)...(19): siRNA sense strand
gagagcaguuuaccuuugc

SEQ ID NO: 1333944 - RNA, 19 nt, Homo sapiens
  misc_RNA (1)...(19): siRNA sense strand
gcagcaaacaaguggauug

SEQ ID NO: 1333945 - RNA, 19 nt, Homo sapiens
  misc_RNA (1)...(19): siRNA sense strand
gauugaagaagagccuuua

SEQ ID NO: 1333946 - RNA, 19 nt, Homo sapiens
  misc_RNA (1)...(19): siRNA sense strand
gcuaaucacaguccagaau

SEQ ID NO: 1333947 - RNA, 19 nt, Homo sapiens
  misc_RNA (1)...(19): siRNA sense strand
ugucagaccuccauuuacu

SEQ ID NO: 1333948 - RNA, 19 nt, Homo sapiens
  misc_RNA (1)...(19): siRNA sense strand
gugaaagcauuugugaaga

SEQ ID NO: 1333949 - RNA, 19 nt, Homo sapiens
  misc_RNA (1)...(19): siRNA sense strand
cuuaaguccugcugagauu

SEQ ID NO: 1333950 - RNA, 19 nt, Homo sapiens
  misc_RNA (1)...(19): siRNA sense strand
ugaaguaagcacaguagaa

SEQ ID NO: 1333951 - RNA, 19 nt, Homo sapiens
  misc_RNA (1)...(19): siRNA sense strand
caaacaaguggauugaaau

SEQ ID NO: 1333952 - RNA, 19 nt, Homo sapiens
  misc_RNA (1)...(19): siRNA sense strand
cagaagcgaaggucacaaa

SEQ ID NO: 1333953 - RNA, 19 nt, Homo sapiens
  misc_RNA (1)...(19): siRNA sense strand
gucaccaugucgaagaaua

SEQ ID NO: 1333954 - RNA, 19 nt, Homo sapiens
  misc_RNA (1)...(19): siRNA sense strand
gcccaaaccaucucccaaa

SEQ ID NO: 1333955 - RNA, 19 nt, Homo sapiens
  misc_RNA (1)...(19): siRNA sense strand
ucacaguccagaauuagaa

SEQ ID NO: 1333956 - RNA, 19 nt, Homo sapiens
  misc_RNA (1)...(19): siRNA sense strand
ugaagaagagccuuuaucu

SEQ ID NO: 1333957 - RNA, 19 nt, Homo sapiens
  misc_RNA (1)...(19): siRNA sense strand
agaauuagaagacgacaga

SEQ ID NO: 1333958 - RNA, 19 nt, Homo sapiens
  misc_RNA (1)...(19): siRNA sense strand
uacaagcccuucuccaaca

SEQ ID NO: 1333959 - RNA, 19 nt, Homo sapiens
  misc_RNA (1)...(19): siRNA sense strand
uuacacggacauuugcuua

SEQ ID NO: 1333960 - RNA, 19 nt, Homo sapiens
  misc_RNA (1)...(19): siRNA sense strand
gccaggcugugaaagcauu

SEQ ID NO: 1333961 - RNA, 19 nt, Homo sapiens
  misc_RNA (1)...(19): siRNA sense strand
ccaccaauaacucaucauu

SEQ ID NO: 1333962 - RNA, 19 nt, Homo sapiens
  misc_RNA (1)...(19): siRNA sense strand
gcaguuauggaaagaagug

SEQ ID NO: 1333963 - RNA, 19 nt, Homo sapiens
  misc_RNA (1)...(19): siRNA sense strand
agaaugcaguacgucauaa

SEQ ID NO: 1333964 - RNA, 19 nt, Homo sapiens
  misc_RNA (1)...(19): siRNA sense strand
caaaccaucucccaaaccu

SEQ ID NO: 1333965 - RNA, 19 nt, Homo sapiens
  misc_RNA (1)...(19): siRNA sense strand
gagacaauaagcaacaguu

SEQ ID NO: 1333966 - RNA, 19 nt, Homo sapiens
  misc_RNA (1)...(19): siRNA sense strand
gcugugaaagcauuuguga

SEQ ID NO: 1333967 - RNA, 19 nt, Homo sapiens
  misc_RNA (1)...(19): siRNA sense strand
gcagcaacaacaacaacaa

SEQ ID NO: 1333968 - RNA, 19 nt, Homo sapiens
  misc_RNA (1)...(19): siRNA sense strand
auaagcaacaguucaauga

SEQ ID NO: 1333969 - RNA, 19 nt, Homo sapiens
  misc_RNA (1)...(19): siRNA sense strand
gaagaaugcaguacgucau

SEQ ID NO: 1333970 - RNA, 19 nt, Homo sapiens
  misc_RNA (1)...(19): siRNA sense strand
agaccuccauuuacuuaug

SEQ ID NO: 1333971 - RNA, 19 nt, Homo sapiens
  misc_RNA (1)...(19): siRNA sense strand
gacaauaagcaacaguuca

SEQ ID NO: 1333972 - RNA, 19 nt, Homo sapiens
  misc_RNA (1)...(19): siRNA sense strand
caucagaaauugccccaaa

SEQ ID NO: 1333973 - RNA, 19 nt, Homo sapiens
  misc_RNA (1)...(19): siRNA sense strand
gaaggcgacauucagacaa

SEQ ID NO: 1333974 - RNA, 19 nt, Homo sapiens
  misc_RNA (1)...(19): siRNA sense strand
gugcaacaguuagaaauac

SEQ ID NO: 1333975 - RNA, 19 nt, Homo sapiens
  misc_RNA (1)...(19): siRNA sense strand
caaauggccaggcugugaa

SEQ ID NO: 1333976 - RNA, 19 nt, Homo sapiens
  misc_RNA (1)...(19): siRNA sense strand
uggacagucuucaguucua

SEQ ID NO: 1333977 - RNA, 19 nt, Homo sapiens
  misc_RNA (1)...(19): siRNA sense strand
acucaucauuccauaguga

SEQ ID NO: 1333978 - RNA, 19 nt, Homo sapiens
  misc_RNA (1)...(19): siRNA sense strand
uaacucaucauuccauagu

SEQ ID NO: 1333979 - RNA, 19 nt, Homo sapiens
  misc_RNA (1)...(19): siRNA sense strand
gcagcagcuucuccagaug

SEQ ID NO: 1333980 - RNA, 19 nt, Homo sapiens
  misc_RNA (1)...(19): siRNA sense strand
gaaauugccccaaacuaug

SEQ ID NO: 1333981 - RNA, 19 nt, Homo sapiens
  misc_RNA (1)...(19): siRNA sense strand
caauccacgucaaggaaga

SEQ ID NO: 1333982 - RNA, 19 nt, Homo sapiens
  misc_RNA (1)...(19): siRNA sense strand
caguuuaccuuugcuaagu

SEQ ID NO: 1333983 - RNA, 19 nt, Homo sapiens
  misc_RNA (1)...(19): siRNA sense strand
aaucuuagccugcacaagu

SEQ ID NO: 1333984 - RNA, 19 nt, Homo sapiens
  misc_RNA (1)...(19): siRNA sense strand
aagaaugcaguacgucaua

SEQ ID NO: 1333985 - RNA, 19 nt, Homo sapiens
  misc_RNA (1)...(19): siRNA sense strand
ccacagagcuuaccucaaa

SEQ ID NO: 1333986 - RNA, 19 nt, Homo sapiens
  misc_RNA (1)...(19): siRNA sense strand
uaaagcaccuuaacaauga

SEQ ID NO: 1333987 - RNA, 19 nt, Homo sapiens
  misc_RNA (1)...(19): siRNA sense strand
gacaggcaguuaacacuua

SEQ ID NO: 1333988 - RNA, 19 nt, Homo sapiens
  misc_RNA (1)...(19): siRNA sense strand
gaaauuuacagcugguuua

SEQ ID NO: 1333989 - RNA, 19 nt, Homo sapiens
  misc_RNA (1)...(19): siRNA sense strand
gaugaagacugcccaaugu

SEQ ID NO: 1333990 - RNA, 19 nt, Homo sapiens
  misc_RNA (1)...(19): siRNA sense strand
gaaagcauuugugaagauu

SEQ ID NO: 1333991 - RNA, 19 nt, Homo sapiens
  misc_RNA (1)...(19): siRNA sense strand
gcaguuacaucuucagcuu

SEQ ID NO: 1333992 - RNA, 19 nt, Homo sapiens
  misc_RNA (1)...(19): siRNA sense strand
acagagagauugaagaaga

SEQ ID NO: 1333993 - RNA, 19 nt, Homo sapiens
  misc_RNA (1)...(19): siRNA sense strand
gaugucagaccuccauuua

SEQ ID NO: 1333994 - RNA, 19 nt, Homo sapiens
  misc_RNA (1)...(19): siRNA sense strand
ggcuagaccucacuacuaa

SEQ ID NO: 1333995 - RNA, 19 nt, Homo sapiens
  misc_RNA (1)...(19): siRNA sense strand
caaagcaucaccaccaaua

SEQ ID NO: 1333996 - RNA, 19 nt, Homo sapiens
  misc_RNA (1)...(19): siRNA sense strand
gcagagagcaguuuaccuu

SEQ ID NO: 1333997 - RNA, 19 nt, Homo sapiens
  misc_RNA (1)...(19): siRNA sense strand
aagaagagccuuuaucuga

SEQ ID NO: 1333998 - RNA, 19 nt, Homo sapiens
  misc_RNA (1)...(19): siRNA sense strand
gcaguacgucauaaucuua

SEQ ID NO: 1333999 - RNA, 19 nt, Homo sapiens
  misc_RNA (1)...(19): siRNA sense strand
gaagagccuuuaucugaag

SEQ ID NO: 1334000 - RNA, 19 nt, Homo sapiens
  misc_RNA (1)...(19): siRNA sense strand
gacaacagcuaaucacagu

SEQ ID NO: 1334001 - RNA, 19 nt, Homo sapiens
  misc_RNA (1)...(19): siRNA sense strand
ggacagucuucaguucuaa

SEQ ID NO: 1334002 - RNA, 19 nt, Homo sapiens
  misc_RNA (1)...(19): siRNA sense strand
ggaaguccaaccuuaguaa

SEQ ID NO: 1334003 - RNA, 19 nt, Homo sapiens
  misc_RNA (1)...(19): siRNA sense strand
gcaaauggccaggcuguga

SEQ ID NO: 1334004 - RNA, 19 nt, Homo sapiens
  misc_RNA (1)...(19): siRNA sense strand
gcagguggugcaacaguua

SEQ ID NO: 1334005 - RNA, 19 nt, Homo sapiens
  misc_RNA (1)...(19): siRNA sense strand
cgacagagagauugaagaa

SEQ ID NO: 1334006 - RNA, 19 nt, Homo sapiens
  misc_RNA (1)...(19): siRNA sense strand
gaaagaagugacuggaguu

SEQ ID NO: 1334007 - RNA, 19 nt, Homo sapiens
  misc_RNA (1)...(19): siRNA sense strand
gaaacagcaagagcaguua

SEQ ID NO: 1334008 - RNA, 19 nt, Homo sapiens
  misc_RNA (1)...(19): siRNA sense strand
agaagagccuuuaucugaa

SEQ ID NO: 1334009 - RNA, 19 nt, Homo sapiens
  misc_RNA (1)...(19): siRNA sense strand
caaggaagagccagugauu

SEQ ID NO: 1334010 - RNA, 19 nt, Homo sapiens
  misc_RNA (1)...(19): siRNA sense strand
aacaggaaguccaaccuua

SEQ ID NO: 1334011 - RNA, 19 nt, Homo sapiens
  misc_RNA (1)...(19): siRNA sense strand
gcagcaacuuggaagaaug

SEQ ID NO: 1334012 - RNA, 19 nt, Homo sapiens
  misc_RNA (1)...(19): siRNA sense strand
ugaaagcauuugugaagau

SEQ ID NO: 1334013 - RNA, 19 nt, Homo sapiens
  misc_RNA (1)...(19): siRNA sense strand
gggcuagaccucacuacua

SEQ ID NO: 1334014 - RNA, 19 nt, Homo sapiens
  misc_RNA (1)...(19): siRNA sense strand
gacuguggaugaaguagaa

SEQ ID NO: 1334015 - RNA, 19 nt, Homo sapiens
  misc_RNA (1)...(19): siRNA sense strand
gcgaacgucuucaagcaau

SEQ ID NO: 1334016 - RNA, 19 nt, Homo sapiens
  misc_RNA (1)...(19): siRNA sense strand
ucagaccuccauuuacuua

SEQ ID NO: 1334017 - RNA, 19 nt, Homo sapiens
  misc_RNA (1)...(19): siRNA sense strand
ugacagcaauggaaacagu

SEQ ID NO: 1334018 - RNA, 19 nt, Homo sapiens
  misc_RNA (1)...(19): siRNA sense strand
ggaugaagacugcccaaug

SEQ ID NO: 1334019 - RNA, 19 nt, Homo sapiens
  misc_RNA (1)...(19): siRNA sense strand
gaagaagagccuuuaucug

SEQ ID NO: 1334020 - RNA, 19 nt, Homo sapiens
  misc_RNA (1)...(19): siRNA sense strand
gcaacagcauccuggaaag

SEQ ID NO: 1334021 - RNA, 19 nt, Homo sapiens
  misc_RNA (1)...(19): siRNA sense strand
gaaguccaaccuuaguaaa

SEQ ID NO: 1334022 - RNA, 19 nt, Homo sapiens
  misc_RNA (1)...(19): siRNA sense strand
ucagacaaauacaacauuc

SEQ ID NO: 1334023 - RNA, 19 nt, Homo sapiens
  misc_RNA (1)...(19): siRNA sense strand
gcagauccuucagcaacaa

SEQ ID NO: 1334024 - RNA, 19 nt, Homo sapiens
  misc_RNA (1)...(19): siRNA sense strand
gaauggacagucuucaguu

SEQ ID NO: 1334025 - RNA, 19 nt, Homo sapiens
  misc_RNA (1)...(19): siRNA sense strand
uaaaucuggugucuagugu

SEQ ID NO: 1334026 - RNA, 19 nt, Homo sapiens
  misc_RNA (1)...(19): siRNA sense strand
ggugcaacaguuagaaaua

SEQ ID NO: 1334027 - RNA, 19 nt, Homo sapiens
  misc_RNA (1)...(19): siRNA sense strand
agagagcaguuuaccuuug

SEQ ID NO: 1334028 - RNA, 19 nt, Homo sapiens
  misc_RNA (1)...(19): siRNA sense strand
gcuacaagcccuucuccaa

SEQ ID NO: 1334029 - RNA, 19 nt, Homo sapiens
  misc_RNA (1)...(19): siRNA sense strand
gaagacgacagagagauug

SEQ ID NO: 1334030 - RNA, 19 nt, Homo sapiens
  misc_RNA (1)...(19): siRNA sense strand
aauccuggacugauaaaua

SEQ ID NO: 1334031 - RNA, 19 nt, Homo sapiens
  misc_RNA (1)...(19): siRNA sense strand
aaguaauccuggacugaua

SEQ ID NO: 1334032 - RNA, 19 nt, Homo sapiens
  misc_RNA (1)...(19): siRNA sense strand
gaacgucuucaagcaauga

SEQ ID NO: 1334033 - RNA, 19 nt, Homo sapiens
  misc_RNA (1)...(19): siRNA sense strand
auccuggacugauaaauaa

SEQ ID NO: 1334034 - RNA, 19 nt, Homo sapiens
  misc_RNA (1)...(19): siRNA sense strand
gagagcaguuuaccuuugc

SEQ ID NO: 1334035 - RNA, 19 nt, Homo sapiens
  misc_RNA (1)...(19): siRNA sense strand
cuuaaguccugcugagauu

SEQ ID NO: 1334036 - RNA, 19 nt, Homo sapiens
  misc_RNA (1)...(19): siRNA sense strand
gauugaagaagagccuuua

SEQ ID NO: 1334037 - RNA, 19 nt, Homo sapiens
  misc_RNA (1)...(19): siRNA sense strand
gcuaaucacaguccagaau

SEQ ID NO: 1334038 - RNA, 19 nt, Homo sapiens
  misc_RNA (1)...(19): siRNA sense strand
ugucagaccuccauuuacu

SEQ ID NO: 1334039 - RNA, 19 nt, Homo sapiens
  misc_RNA (1)...(19): siRNA sense strand
gugaaagcauuugugaaga

SEQ ID NO: 1334040 - RNA, 19 nt, Homo sapiens
  misc_RNA (1)...(19): siRNA sense strand
gcccaaaccaucucccaaa

SEQ ID NO: 1334041 - RNA, 19 nt, Homo sapiens
  misc_RNA (1)...(19): siRNA sense strand
cagaagcgaaggucacaaa

SEQ ID NO: 1334042 - RNA, 19 nt, Homo sapiens
  misc_RNA (1)...(19): siRNA sense strand
gucaccaugucgaagaaua

SEQ ID NO: 1334043 - RNA, 19 nt, Homo sapiens
  misc_RNA (1)...(19): siRNA sense strand
ucacaguccagaauuagaa

SEQ ID NO: 1334044 - RNA, 19 nt, Homo sapiens
  misc_RNA (1)...(19): siRNA sense strand
ugaagaagagccuuuaucu

SEQ ID NO: 1334045 - RNA, 19 nt, Homo sapiens
  misc_RNA (1)...(19): siRNA sense strand
agaauuagaagacgacaga

SEQ ID NO: 1334046 - RNA, 19 nt, Homo sapiens
  misc_RNA (1)...(19): siRNA sense strand
ccaccaauaacucaucauu

SEQ ID NO: 1334047 - RNA, 19 nt, Homo sapiens
  misc_RNA (1)...(19): siRNA sense strand
uacaagcccuucuccaaca

SEQ ID NO: 1334048 - RNA, 19 nt, Homo sapiens
  misc_RNA (1)...(19): siRNA sense strand
uuacacggacauuugcuua

SEQ ID NO: 1334049 - RNA, 19 nt, Homo sapiens
  misc_RNA (1)...(19): siRNA sense strand
gccaggcugugaaagcauu

SEQ ID NO: 1334050 - RNA, 19 nt, Homo sapiens
  misc_RNA (1)...(19): siRNA sense strand
gcaguuauggaaagaagug

SEQ ID NO: 1334051 - RNA, 19 nt, Homo sapiens
  misc_RNA (1)...(19): siRNA sense strand
agaaugcaguacgucauaa

SEQ ID NO: 1334052 - RNA, 19 nt, Homo sapiens
  misc_RNA (1)...(19): siRNA sense strand
caaaccaucucccaaaccu

SEQ ID NO: 1334053 - RNA, 19 nt, Homo sapiens
  misc_RNA (1)...(19): siRNA sense strand
gcugugaaagcauuuguga

SEQ ID NO: 1334054 - RNA, 19 nt, Homo sapiens
  misc_RNA (1)...(19): siRNA sense strand
gcagcaacaacaacaacaa

SEQ ID NO: 1334055 - RNA, 19 nt, Homo sapiens
  misc_RNA (1)...(19): siRNA sense strand
gaagaaugcaguacgucau

SEQ ID NO: 1334056 - RNA, 19 nt, Homo sapiens
  misc_RNA (1)...(19): siRNA sense strand
agaccuccauuuacuuaug

SEQ ID NO: 1334057 - RNA, 19 nt, Homo sapiens
  misc_RNA (1)...(19): siRNA sense strand
caucagaaauugccccaaa

SEQ ID NO: 1334058 - RNA, 19 nt, Homo sapiens
  misc_RNA (1)...(19): siRNA sense strand
gaaggcgacauucagacaa

SEQ ID NO: 1334059 - RNA, 19 nt, Homo sapiens
  misc_RNA (1)...(19): siRNA sense strand
gugcaacaguuagaaauac

SEQ ID NO: 1334060 - RNA, 19 nt, Homo sapiens
  misc_RNA (1)...(19): siRNA sense strand
caaauggccaggcugugaa

SEQ ID NO: 1334061 - RNA, 19 nt, Homo sapiens
  misc_RNA (1)...(19): siRNA sense strand
uggacagucuucaguucua

SEQ ID NO: 1334062 - RNA, 19 nt, Homo sapiens
  misc_RNA (1)...(19): siRNA sense strand
acucaucauuccauaguga

SEQ ID NO: 1334063 - RNA, 19 nt, Homo sapiens
  misc_RNA (1)...(19): siRNA sense strand
uaacucaucauuccauagu

SEQ ID NO: 1334064 - RNA, 19 nt, Homo sapiens
  misc_RNA (1)...(19): siRNA sense strand
gcagcagcuucuccagaug

SEQ ID NO: 1334065 - RNA, 19 nt, Homo sapiens
  misc_RNA (1)...(19): siRNA sense strand
aacaauuccuccucgacua

SEQ ID NO: 1334066 - RNA, 19 nt, Homo sapiens
  misc_RNA (1)...(19): siRNA sense strand
caauccacgucaaggaaga

SEQ ID NO: 1334067 - RNA, 19 nt, Homo sapiens
  misc_RNA (1)...(19): siRNA sense strand
caguuuaccuuugcuaagu

SEQ ID NO: 1334068 - RNA, 19 nt, Homo sapiens
  misc_RNA (1)...(19): siRNA sense strand
aaucuuagccugcacaagu

SEQ ID NO: 1334069 - RNA, 19 nt, Homo sapiens
  misc_RNA (1)...(19): siRNA sense strand
aagaaugcaguacgucaua

SEQ ID NO: 1334070 - RNA, 19 nt, Homo sapiens
  misc_RNA (1)...(19): siRNA sense strand
gaaauugccccaaacuaug

SEQ ID NO: 1334071 - RNA, 19 nt, Homo sapiens
  misc_RNA (1)...(19): siRNA sense strand
gaacgcgaacgucuucaag

SEQ ID NO: 1334072 - RNA, 19 nt, Homo sapiens
  misc_RNA (1)...(19): siRNA sense strand
cauagugaauggacagucu

SEQ ID NO: 1334073 - RNA, 19 nt, Homo sapiens
  misc_RNA (1)...(19): siRNA sense strand
agaccucacuacuaacaau

SEQ ID NO: 1334074 - RNA, 19 nt, Homo sapiens
  misc_RNA (1)...(19): siRNA sense strand
agaaacagcaagagcaguu

SEQ ID NO: 1334075 - RNA, 19 nt, Homo sapiens
  misc_RNA (1)...(19): siRNA sense strand
ccacgaagaccucaauggu

SEQ ID NO: 1334076 - RNA, 19 nt, Homo sapiens
  misc_RNA (1)...(19): siRNA sense strand
ugaaguagaauaccagaag

SEQ ID NO: 1334077 - RNA, 19 nt, Homo sapiens
  misc_RNA (1)...(19): siRNA sense strand
cagcaguuauggaaagaag

SEQ ID NO: 1334078 - RNA, 19 nt, Homo sapiens
  misc_RNA (1)...(19): siRNA sense strand
ggacugauaaauaaugcau

SEQ ID NO: 1334079 - RNA, 19 nt, Homo sapiens
  misc_RNA (1)...(19): siRNA sense strand
guaaugcagcaacuuggaa

SEQ ID NO: 1334080 - RNA, 19 nt, Homo sapiens
  misc_RNA (1)...(19): siRNA sense strand
aaggcgacauucagacaaa

SEQ ID NO: 1334081 - RNA, 19 nt, Homo sapiens
  misc_RNA (1)...(19): siRNA sense strand
aaucuggugucuaguguca

SEQ ID NO: 1334082 - RNA, 19 nt, Homo sapiens
  misc_RNA (1)...(19): siRNA sense strand
gccauggaguuugcaaaug

SEQ ID NO: 1334083 - RNA, 19 nt, Homo sapiens
  misc_RNA (1)...(19): siRNA sense strand
gcgaaggucacaaaagaua

SEQ ID NO: 1334084 - RNA, 19 nt, Homo sapiens
  misc_RNA (1)...(19): siRNA sense strand
uaacaggaaguccaaccuu

SEQ ID NO: 1334085 - RNA, 19 nt, Homo sapiens
  misc_RNA (1)...(19): siRNA sense strand
ccacagagcuuaccucaaa

SEQ ID NO: 1334086 - RNA, 19 nt, Homo sapiens
  misc_RNA (1)...(19): siRNA sense strand
uaaagcaccuuaacaauga

SEQ ID NO: 1334087 - RNA, 19 nt, Homo sapiens
  misc_RNA (1)...(19): siRNA sense strand
gacaggcaguuaacacuua

SEQ ID NO: 1334088 - RNA, 19 nt, Homo sapiens
  misc_RNA (1)...(19): siRNA sense strand
gaaauuuacagcugguuua

SEQ ID NO: 1334089 - RNA, 19 nt, Homo sapiens
  misc_RNA (1)...(19): siRNA sense strand
gaugaagacugcccaaugu

SEQ ID NO: 1334090 - RNA, 19 nt, Homo sapiens
  misc_RNA (1)...(19): siRNA sense strand
gaaagcauuugugaagauu

SEQ ID NO: 1334091 - RNA, 19 nt, Homo sapiens
  misc_RNA (1)...(19): siRNA sense strand
gcaguuacaucuucagcuu

SEQ ID NO: 1334092 - RNA, 19 nt, Homo sapiens
  misc_RNA (1)...(19): siRNA sense strand
acagagagauugaagaaga

SEQ ID NO: 1334093 - RNA, 19 nt, Homo sapiens
  misc_RNA (1)...(19): siRNA sense strand
gaugucagaccuccauuua

SEQ ID NO: 1334094 - RNA, 19 nt, Homo sapiens
  misc_RNA (1)...(19): siRNA sense strand
ggcuagaccucacuacuaa

SEQ ID NO: 1334095 - RNA, 19 nt, Homo sapiens
  misc_RNA (1)...(19): siRNA sense strand
caaagcaucaccaccaaua

SEQ ID NO: 1334096 - RNA, 19 nt, Homo sapiens
  misc_RNA (1)...(19): siRNA sense strand
gcagagagcaguuuaccuu

SEQ ID NO: 1334097 - RNA, 19 nt, Homo sapiens
  misc_RNA (1)...(19): siRNA sense strand
aagaagagccuuuaucuga

SEQ ID NO: 1334098 - RNA, 19 nt, Homo sapiens
  misc_RNA (1)...(19): siRNA sense strand
gcaguacgucauaaucuua

SEQ ID NO: 1334099 - RNA, 19 nt, Homo sapiens
  misc_RNA (1)...(19): siRNA sense strand
gaagagccuuuaucugaag

SEQ ID NO: 1334100 - RNA, 19 nt, Homo sapiens
  misc_RNA (1)...(19): siRNA sense strand
gacaacagcuaaucacagu

SEQ ID NO: 1334101 - RNA, 19 nt, Homo sapiens
  misc_RNA (1)...(19): siRNA sense strand
ggacagucuucaguucuaa

SEQ ID NO: 1334102 - RNA, 19 nt, Homo sapiens
  misc_RNA (1)...(19): siRNA sense strand
ggaaguccaaccuuaguaa

SEQ ID NO: 1334103 - RNA, 19 nt, Homo sapiens
  misc_RNA (1)...(19): siRNA sense strand
gcaaauggccaggcuguga

SEQ ID NO: 1334104 - RNA, 19 nt, Homo sapiens
  misc_RNA (1)...(19): siRNA sense strand
gcagguggugcaacaguua

SEQ ID NO: 1334105 - RNA, 19 nt, Homo sapiens
  misc_RNA (1)...(19): siRNA sense strand
cgacagagagauugaagaa

SEQ ID NO: 1334106 - RNA, 19 nt, Homo sapiens
  misc_RNA (1)...(19): siRNA sense strand
gaaagaagugacuggaguu

SEQ ID NO: 1334107 - RNA, 19 nt, Homo sapiens
  misc_RNA (1)...(19): siRNA sense strand
gaaacagcaagagcaguua

SEQ ID NO: 1334108 - RNA, 19 nt, Homo sapiens
  misc_RNA (1)...(19): siRNA sense strand
agaagagccuuuaucugaa

SEQ ID NO: 1334109 - RNA, 19 nt, Homo sapiens
  misc_RNA (1)...(19): siRNA sense strand
caaggaagagccagugauu

SEQ ID NO: 1334110 - RNA, 19 nt, Homo sapiens
  misc_RNA (1)...(19): siRNA sense strand
aacaggaaguccaaccuua

SEQ ID NO: 1334111 - RNA, 19 nt, Homo sapiens
  misc_RNA (1)...(19): siRNA sense strand
gcagcaacuuggaagaaug

SEQ ID NO: 1334112 - RNA, 19 nt, Homo sapiens
  misc_RNA (1)...(19): siRNA sense strand
ugaaagcauuugugaagau

SEQ ID NO: 1334113 - RNA, 19 nt, Homo sapiens
  misc_RNA (1)...(19): siRNA sense strand
gggcuagaccucacuacua

SEQ ID NO: 1334114 - RNA, 19 nt, Homo sapiens
  misc_RNA (1)...(19): siRNA sense strand
gacuguggaugaaguagaa

SEQ ID NO: 1334115 - RNA, 19 nt, Homo sapiens
  misc_RNA (1)...(19): siRNA sense strand
gcgaacgucuucaagcaau

SEQ ID NO: 1334116 - RNA, 19 nt, Homo sapiens
  misc_RNA (1)...(19): siRNA sense strand
ucagaccuccauuuacuua

SEQ ID NO: 1334117 - RNA, 19 nt, Homo sapiens
  misc_RNA (1)...(19): siRNA sense strand
ugacagcaauggaaacagu

SEQ ID NO: 1334118 - RNA, 19 nt, Homo sapiens
  misc_RNA (1)...(19): siRNA sense strand
ggaugaagacugcccaaug

SEQ ID NO: 1334119 - RNA, 19 nt, Homo sapiens
  misc_RNA (1)...(19): siRNA sense strand
gaagaagagccuuuaucug

SEQ ID NO: 1334120 - RNA, 19 nt, Homo sapiens
  misc_RNA (1)...(19): siRNA sense strand
gcaacagcauccuggaaag

SEQ ID NO: 1334121 - RNA, 19 nt, Homo sapiens
  misc_RNA (1)...(19): siRNA sense strand
gaaguccaaccuuaguaaa

SEQ ID NO: 1334122 - RNA, 19 nt, Homo sapiens
  misc_RNA (1)...(19): siRNA sense strand
ucagacaaauacaacauuc

SEQ ID NO: 1334123 - RNA, 19 nt, Homo sapiens
  misc_RNA (1)...(19): siRNA sense strand
gcagauccuucagcaacaa

SEQ ID NO: 1334124 - RNA, 19 nt, Homo sapiens
  misc_RNA (1)...(19): siRNA sense strand
gaauggacagucuucaguu

SEQ ID NO: 1334125 - RNA, 19 nt, Homo sapiens
  misc_RNA (1)...(19): siRNA sense strand
uaaaucuggugucuagugu

SEQ ID NO: 1334126 - RNA, 19 nt, Homo sapiens
  misc_RNA (1)...(19): siRNA sense strand
ggugcaacaguuagaaaua

SEQ ID NO: 1334127 - RNA, 19 nt, Homo sapiens
  misc_RNA (1)...(19): siRNA sense strand
agagagcaguuuaccuuug

SEQ ID NO: 1334128 - RNA, 19 nt, Homo sapiens
  misc_RNA (1)...(19): siRNA sense strand
gcuacaagcccuucuccaa

SEQ ID NO: 1334129 - RNA, 19 nt, Homo sapiens
  misc_RNA (1)...(19): siRNA sense strand
gaagacgacagagagauug

SEQ ID NO: 1334130 - RNA, 19 nt, Homo sapiens
  misc_RNA (1)...(19): siRNA sense strand
aauccuggacugauaaaua

SEQ ID NO: 1334131 - RNA, 19 nt, Homo sapiens
  misc_RNA (1)...(19): siRNA sense strand
aaguaauccuggacugaua

SEQ ID NO: 1334132 - RNA, 19 nt, Homo sapiens
  misc_RNA (1)...(19): siRNA sense strand
gaacgucuucaagcaauga

SEQ ID NO: 1334133 - RNA, 19 nt, Homo sapiens
  misc_RNA (1)...(19): siRNA sense strand
auccuggacugauaaauaa

SEQ ID NO: 1334134 - RNA, 19 nt, Homo sapiens
  misc_RNA (1)...(19): siRNA sense strand
gagagcaguuuaccuuugc

SEQ ID NO: 1334135 - RNA, 19 nt, Homo sapiens
  misc_RNA (1)...(19): siRNA sense strand
cuuaaguccugcugagauu

SEQ ID NO: 1334136 - RNA, 19 nt, Homo sapiens
  misc_RNA (1)...(19): siRNA sense strand
gauugaagaagagccuuua

SEQ ID NO: 1334137 - RNA, 19 nt, Homo sapiens
  misc_RNA (1)...(19): siRNA sense strand
gcuaaucacaguccagaau

SEQ ID NO: 1334138 - RNA, 19 nt, Homo sapiens
  misc_RNA (1)...(19): siRNA sense strand
ugucagaccuccauuuacu

SEQ ID NO: 1334139 - RNA, 19 nt, Homo sapiens
  misc_RNA (1)...(19): siRNA sense strand
gugaaagcauuugugaaga

SEQ ID NO: 1334140 - RNA, 19 nt, Homo sapiens
  misc_RNA (1)...(19): siRNA sense strand
gcccaaaccaucucccaaa

SEQ ID NO: 1334141 - RNA, 19 nt, Homo sapiens
  misc_RNA (1)...(19): siRNA sense strand
cagaagcgaaggucacaaa

SEQ ID NO: 1334142 - RNA, 19 nt, Homo sapiens
  misc_RNA (1)...(19): siRNA sense strand
gucaccaugucgaagaaua

SEQ ID NO: 1334143 - RNA, 19 nt, Homo sapiens
  misc_RNA (1)...(19): siRNA sense strand
ucacaguccagaauuagaa

SEQ ID NO: 1334144 - RNA, 19 nt, Homo sapiens
  misc_RNA (1)...(19): siRNA sense strand
ugaagaagagccuuuaucu

SEQ ID NO: 1334145 - RNA, 19 nt, Homo sapiens
  misc_RNA (1)...(19): siRNA sense strand
agaauuagaagacgacaga

SEQ ID NO: 1334146 - RNA, 19 nt, Homo sapiens
  misc_RNA (1)...(19): siRNA sense strand
ccaccaauaacucaucauu

SEQ ID NO: 1334147 - RNA, 19 nt, Homo sapiens
  misc_RNA (1)...(19): siRNA sense strand
uacaagcccuucuccaaca

SEQ ID NO: 1334148 - RNA, 19 nt, Homo sapiens
  misc_RNA (1)...(19): siRNA sense strand
uuacacggacauuugcuua

SEQ ID NO: 1334149 - RNA, 19 nt, Homo sapiens
  misc_RNA (1)...(19): siRNA sense strand
gccaggcugugaaagcauu

SEQ ID NO: 1334150 - RNA, 19 nt, Homo sapiens
  misc_RNA (1)...(19): siRNA sense strand
gcaguuauggaaagaagug

SEQ ID NO: 1334151 - RNA, 19 nt, Homo sapiens
  misc_RNA (1)...(19): siRNA sense strand
agaaugcaguacgucauaa

SEQ ID NO: 1334152 - RNA, 19 nt, Homo sapiens
  misc_RNA (1)...(19): siRNA sense strand
caaaccaucucccaaaccu

SEQ ID NO: 1334153 - RNA, 19 nt, Homo sapiens
  misc_RNA (1)...(19): siRNA sense strand
gcugugaaagcauuuguga

SEQ ID NO: 1334154 - RNA, 19 nt, Homo sapiens
  misc_RNA (1)...(19): siRNA sense strand
gcagcaacaacaacaacaa

SEQ ID NO: 1334155 - RNA, 19 nt, Homo sapiens
  misc_RNA (1)...(19): siRNA sense strand
gaagaaugcaguacgucau

SEQ ID NO: 1334156 - RNA, 19 nt, Homo sapiens
  misc_RNA (1)...(19): siRNA sense strand
agaccuccauuuacuuaug

SEQ ID NO: 1334157 - RNA, 19 nt, Homo sapiens
  misc_RNA (1)...(19): siRNA sense strand
caucagaaauugccccaaa

SEQ ID NO: 1334158 - RNA, 19 nt, Homo sapiens
  misc_RNA (1)...(19): siRNA sense strand
gaaggcgacauucagacaa

SEQ ID NO: 1334159 - RNA, 19 nt, Homo sapiens
  misc_RNA (1)...(19): siRNA sense strand
gugcaacaguuagaaauac

SEQ ID NO: 1334160 - RNA, 19 nt, Homo sapiens
  misc_RNA (1)...(19): siRNA sense strand
caaauggccaggcugugaa

SEQ ID NO: 1334161 - RNA, 19 nt, Homo sapiens
  misc_RNA (1)...(19): siRNA sense strand
uggacagucuucaguucua

SEQ ID NO: 1334162 - RNA, 19 nt, Homo sapiens
  misc_RNA (1)...(19): siRNA sense strand
acucaucauuccauaguga

SEQ ID NO: 1334163 - RNA, 19 nt, Homo sapiens
  misc_RNA (1)...(19): siRNA sense strand
uaacucaucauuccauagu

SEQ ID NO: 1334164 - RNA, 19 nt, Homo sapiens
  misc_RNA (1)...(19): siRNA sense strand
gcagcagcuucuccagaug

SEQ ID NO: 1334165 - RNA, 19 nt, Homo sapiens
  misc_RNA (1)...(19): siRNA sense strand
aacaauuccuccucgacua

SEQ ID NO: 1334166 - RNA, 19 nt, Homo sapiens
  misc_RNA (1)...(19): siRNA sense strand
caauccacgucaaggaaga

SEQ ID NO: 1334167 - RNA, 19 nt, Homo sapiens
  misc_RNA (1)...(19): siRNA sense strand
caguuuaccuuugcuaagu

SEQ ID NO: 1334168 - RNA, 19 nt, Homo sapiens
  misc_RNA (1)...(19): siRNA sense strand
aaucuuagccugcacaagu

SEQ ID NO: 1334169 - RNA, 19 nt, Homo sapiens
  misc_RNA (1)...(19): siRNA sense strand
aagaaugcaguacgucaua

SEQ ID NO: 1334170 - RNA, 19 nt, Homo sapiens
  misc_RNA (1)...(19): siRNA sense strand
gaaauugccccaaacuaug

SEQ ID NO: 1334171 - RNA, 19 nt, Homo sapiens
  misc_RNA (1)...(19): siRNA sense strand
gaacgcgaacgucuucaag

SEQ ID NO: 1334172 - RNA, 19 nt, Homo sapiens
  misc_RNA (1)...(19): siRNA sense strand
cauagugaauggacagucu

SEQ ID NO: 1334173 - RNA, 19 nt, Homo sapiens
  misc_RNA (1)...(19): siRNA sense strand
agaccucacuacuaacaau

SEQ ID NO: 1334174 - RNA, 19 nt, Homo sapiens
  misc_RNA (1)...(19): siRNA sense strand
agaaacagcaagagcaguu

SEQ ID NO: 1334175 - RNA, 19 nt, Homo sapiens
  misc_RNA (1)...(19): siRNA sense strand
ccacgaagaccucaauggu

SEQ ID NO: 1334176 - RNA, 19 nt, Homo sapiens
  misc_RNA (1)...(19): siRNA sense strand
ugaaguagaauaccagaag

SEQ ID NO: 1334177 - RNA, 19 nt, Homo sapiens
  misc_RNA (1)...(19): siRNA sense strand
cagcaguuauggaaagaag

SEQ ID NO: 1334178 - RNA, 19 nt, Homo sapiens
  misc_RNA (1)...(19): siRNA sense strand
ggacugauaaauaaugcau

SEQ ID NO: 1334179 - RNA, 19 nt, Homo sapiens
  misc_RNA (1)...(19): siRNA sense strand
guaaugcagcaacuuggaa

SEQ ID NO: 1334180 - RNA, 19 nt, Homo sapiens
  misc_RNA (1)...(19): siRNA sense strand
aaggcgacauucagacaaa

SEQ ID NO: 1334181 - RNA, 19 nt, Homo sapiens
  misc_RNA (1)...(19): siRNA sense strand
aaucuggugucuaguguca

SEQ ID NO: 1334182 - RNA, 19 nt, Homo sapiens
  misc_RNA (1)...(19): siRNA sense strand
gccauggaguuugcaaaug

SEQ ID NO: 1334183 - RNA, 19 nt, Homo sapiens
  misc_RNA (1)...(19): siRNA sense strand
gcgaaggucacaaaagaua

SEQ ID NO: 1334184 - RNA, 19 nt, Homo sapiens
  misc_RNA (1)...(19): siRNA sense strand
uaacaggaaguccaaccuu

SEQ ID NO: 1334185 - RNA, 19 nt, Homo sapiens
  misc_RNA (1)...(19): siRNA sense strand
ccacagagcuuaccucaaa

SEQ ID NO: 1334186 - RNA, 19 nt, Homo sapiens
  misc_RNA (1)...(19): siRNA sense strand
gcaaacaaguggauugaaa

SEQ ID NO: 1334187 - RNA, 19 nt, Homo sapiens
  misc_RNA (1)...(19): siRNA sense strand
uaaagcaccuuaacaauga

SEQ ID NO: 1334188 - RNA, 19 nt, Homo sapiens
  misc_RNA (1)...(19): siRNA sense strand
gacaggcaguuaacacuua

SEQ ID NO: 1334189 - RNA, 19 nt, Homo sapiens
  misc_RNA (1)...(19): siRNA sense strand
gaaauuuacagcugguuua

SEQ ID NO: 1334190 - RNA, 19 nt, Homo sapiens
  misc_RNA (1)...(19): siRNA sense strand
gaugaagacugcccaaugu

SEQ ID NO: 1334191 - RNA, 19 nt, Homo sapiens
  misc_RNA (1)...(19): siRNA sense strand
cagcagagauggaagauca

SEQ ID NO: 1334192 - RNA, 19 nt, Homo sapiens
  misc_RNA (1)...(19): siRNA sense strand
gaaagcauuugugaagauu

SEQ ID NO: 1334193 - RNA, 19 nt, Homo sapiens
  misc_RNA (1)...(19): siRNA sense strand
gcaguuacaucuucagcuu

SEQ ID NO: 1334194 - RNA, 19 nt, Homo sapiens
  misc_RNA (1)...(19): siRNA sense strand
acagagagauugaagaaga

SEQ ID NO: 1334195 - RNA, 19 nt, Homo sapiens
  misc_RNA (1)...(19): siRNA sense strand
gaugucagaccuccauuua

SEQ ID NO: 1334196 - RNA, 19 nt, Homo sapiens
  misc_RNA (1)...(19): siRNA sense strand
ggcuagaccucacuacuaa

SEQ ID NO: 1334197 - RNA, 19 nt, Homo sapiens
  misc_RNA (1)...(19): siRNA sense strand
caaagcaucaccaccaaua

SEQ ID NO: 1334198 - RNA, 19 nt, Homo sapiens
  misc_RNA (1)...(19): siRNA sense strand
gcagagagcaguuuaccuu

SEQ ID NO: 1334199 - RNA, 19 nt, Homo sapiens
  misc_RNA (1)...(19): siRNA sense strand
aagaagagccuuuaucuga

SEQ ID NO: 1334200 - RNA, 19 nt, Homo sapiens
  misc_RNA (1)...(19): siRNA sense strand
ggaaugagcacucuaagca

SEQ ID NO: 1334201 - RNA, 19 nt, Homo sapiens
  misc_RNA (1)...(19): siRNA sense strand
gcaguacgucauaaucuua

SEQ ID NO: 1334202 - RNA, 19 nt, Homo sapiens
  misc_RNA (1)...(19): siRNA sense strand
gaagagccuuuaucugaag

SEQ ID NO: 1334203 - RNA, 19 nt, Homo sapiens
  misc_RNA (1)...(19): siRNA sense strand
gacaacagcuaaucacagu

SEQ ID NO: 1334204 - RNA, 19 nt, Homo sapiens
  misc_RNA (1)...(19): siRNA sense strand
gacaccagcucugaaguaa

SEQ ID NO: 1334205 - RNA, 19 nt, Homo sapiens
  misc_RNA (1)...(19): siRNA sense strand
ggacagucuucaguucuaa

SEQ ID NO: 1334206 - RNA, 19 nt, Homo sapiens
  misc_RNA (1)...(19): siRNA sense strand
gagcagugauaaacagaga

SEQ ID NO: 1334207 - RNA, 19 nt, Homo sapiens
  misc_RNA (1)...(19): siRNA sense strand
ggaaguccaaccuuaguaa

SEQ ID NO: 1334208 - RNA, 19 nt, Homo sapiens
  misc_RNA (1)...(19): siRNA sense strand
gcaaauggccaggcuguga

SEQ ID NO: 1334209 - RNA, 19 nt, Homo sapiens
  misc_RNA (1)...(19): siRNA sense strand
gcagguggugcaacaguua

SEQ ID NO: 1334210 - RNA, 19 nt, Homo sapiens
  misc_RNA (1)...(19): siRNA sense strand
cgacagagagauugaagaa

SEQ ID NO: 1334211 - RNA, 19 nt, Homo sapiens
  misc_RNA (1)...(19): siRNA sense strand
gaaagaagugacuggaguu

SEQ ID NO: 1334212 - RNA, 19 nt, Homo sapiens
  misc_RNA (1)...(19): siRNA sense strand
gaaacagcaagagcaguua

SEQ ID NO: 1334213 - RNA, 19 nt, Homo sapiens
  misc_RNA (1)...(19): siRNA sense strand
agaagagccuuuaucugaa

SEQ ID NO: 1334214 - RNA, 19 nt, Homo sapiens
  misc_RNA (1)...(19): siRNA sense strand
caaggaagagccagugauu

SEQ ID NO: 1334215 - RNA, 19 nt, Homo sapiens
  misc_RNA (1)...(19): siRNA sense strand
aacaggaaguccaaccuua

SEQ ID NO: 1334216 - RNA, 19 nt, Homo sapiens
  misc_RNA (1)...(19): siRNA sense strand
gcagcaacuuggaagaaug

SEQ ID NO: 1334217 - RNA, 19 nt, Homo sapiens
  misc_RNA (1)...(19): siRNA sense strand
ugaaagcauuugugaagau

SEQ ID NO: 1334218 - RNA, 19 nt, Homo sapiens
  misc_RNA (1)...(19): siRNA sense strand
gggcuagaccucacuacua

SEQ ID NO: 1334219 - RNA, 19 nt, Homo sapiens
  misc_RNA (1)...(19): siRNA sense strand
gacuguggaugaaguagaa

SEQ ID NO: 1334220 - RNA, 19 nt, Homo sapiens
  misc_RNA (1)...(19): siRNA sense strand
gcgaacgucuucaagcaau

SEQ ID NO: 1334221 - RNA, 19 nt, Homo sapiens
  misc_RNA (1)...(19): siRNA sense strand
ucagaccuccauuuacuua

SEQ ID NO: 1334222 - RNA, 19 nt, Homo sapiens
  misc_RNA (1)...(19): siRNA sense strand
cgacagagacaauaagcaa

SEQ ID NO: 1334223 - RNA, 19 nt, Homo sapiens
  misc_RNA (1)...(19): siRNA sense strand
ugacagcaauggaaacagu

SEQ ID NO: 1334224 - RNA, 19 nt, Homo sapiens
  misc_RNA (1)...(19): siRNA sense strand
ggaugaagacugcccaaug

SEQ ID NO: 1334225 - RNA, 19 nt, Homo sapiens
  misc_RNA (1)...(19): siRNA sense strand
gaagaagagccuuuaucug

SEQ ID NO: 1334226 - RNA, 19 nt, Homo sapiens
  misc_RNA (1)...(19): siRNA sense strand
gcagauccuucagcaacaa

SEQ ID NO: 1334227 - RNA, 19 nt, Homo sapiens
  misc_RNA (1)...(19): siRNA sense strand
gaaguccaaccuuaguaaa

SEQ ID NO: 1334228 - RNA, 19 nt, Homo sapiens
  misc_RNA (1)...(19): siRNA sense strand
ucagacaaauacaacauuc

SEQ ID NO: 1334229 - RNA, 19 nt, Homo sapiens
  misc_RNA (1)...(19): siRNA sense strand
gcaacagcauccuggaaag

SEQ ID NO: 1334230 - RNA, 19 nt, Homo sapiens
  misc_RNA (1)...(19): siRNA sense strand
gaauggacagucuucaguu

SEQ ID NO: 1334231 - RNA, 19 nt, Homo sapiens
  misc_RNA (1)...(19): siRNA sense strand
uaaaucuggugucuagugu

SEQ ID NO: 1334232 - RNA, 19 nt, Homo sapiens
  misc_RNA (1)...(19): siRNA sense strand
ggugcaacaguuagaaaua

SEQ ID NO: 1334233 - RNA, 19 nt, Homo sapiens
  misc_RNA (1)...(19): siRNA sense strand
uaagagcagugauaaacag

SEQ ID NO: 1334234 - RNA, 19 nt, Homo sapiens
  misc_RNA (1)...(19): siRNA sense strand
agagagcaguuuaccuuug

SEQ ID NO: 1334235 - RNA, 19 nt, Homo sapiens
  misc_RNA (1)...(19): siRNA sense strand
gaaguaagcacaguagaac

SEQ ID NO: 1334236 - RNA, 19 nt, Homo sapiens
  misc_RNA (1)...(19): siRNA sense strand
gaagacgacagagagauug

SEQ ID NO: 1334237 - RNA, 19 nt, Homo sapiens
  misc_RNA (1)...(19): siRNA sense strand
aauccuggacugauaaaua

SEQ ID NO: 1334238 - RNA, 19 nt, Homo sapiens
  misc_RNA (1)...(19): siRNA sense strand
aaguaauccuggacugaua

SEQ ID NO: 1334239 - RNA, 19 nt, Homo sapiens
  misc_RNA (1)...(19): siRNA sense strand
ugacaccagcucugaagua

SEQ ID NO: 1334240 - RNA, 19 nt, Homo sapiens
  misc_RNA (1)...(19): siRNA sense strand
gcuacaagcccuucuccaa

SEQ ID NO: 1334241 - RNA, 19 nt, Homo sapiens
  misc_RNA (1)...(19): siRNA sense strand
gaacgucuucaagcaauga

SEQ ID NO: 1334242 - RNA, 19 nt, Homo sapiens
  misc_RNA (1)...(19): siRNA sense strand
auccuggacugauaaauaa

SEQ ID NO: 1334243 - RNA, 19 nt, Homo sapiens
  misc_RNA (1)...(19): siRNA sense strand
gagagcaguuuaccuuugc

SEQ ID NO: 1334244 - RNA, 19 nt, Homo sapiens
  misc_RNA (1)...(19): siRNA sense strand
gcagcaaacaaguggauug

SEQ ID NO: 1334245 - RNA, 19 nt, Homo sapiens
  misc_RNA (1)...(19): siRNA sense strand
gauugaagaagagccuuua

SEQ ID NO: 1334246 - RNA, 19 nt, Homo sapiens
  misc_RNA (1)...(19): siRNA sense strand
gcuaaucacaguccagaau

SEQ ID NO: 1334247 - RNA, 19 nt, Homo sapiens
  misc_RNA (1)...(19): siRNA sense strand
ugucagaccuccauuuacu

SEQ ID NO: 1334248 - RNA, 19 nt, Homo sapiens
  misc_RNA (1)...(19): siRNA sense strand
gugaaagcauuugugaaga

SEQ ID NO: 1334249 - RNA, 19 nt, Homo sapiens
  misc_RNA (1)...(19): siRNA sense strand
cuuaaguccugcugagauu

SEQ ID NO: 1334250 - RNA, 19 nt, Homo sapiens
  misc_RNA (1)...(19): siRNA sense strand
ugaaguaagcacaguagaa

SEQ ID NO: 1334251 - RNA, 19 nt, Homo sapiens
  misc_RNA (1)...(19): siRNA sense strand
caaacaaguggauugaaau

SEQ ID NO: 1334252 - RNA, 19 nt, Homo sapiens
  misc_RNA (1)...(19): siRNA sense strand
cagaagcgaaggucacaaa

SEQ ID NO: 1334253 - RNA, 19 nt, Homo sapiens
  misc_RNA (1)...(19): siRNA sense strand
gucaccaugucgaagaaua

SEQ ID NO: 1334254 - RNA, 19 nt, Homo sapiens
  misc_RNA (1)...(19): siRNA sense strand
gcccaaaccaucucccaaa

SEQ ID NO: 1334255 - RNA, 19 nt, Homo sapiens
  misc_RNA (1)...(19): siRNA sense strand
ucacaguccagaauuagaa

SEQ ID NO: 1334256 - RNA, 19 nt, Homo sapiens
  misc_RNA (1)...(19): siRNA sense strand
ugaagaagagccuuuaucu

SEQ ID NO: 1334257 - RNA, 19 nt, Homo sapiens
  misc_RNA (1)...(19): siRNA sense strand
agaauuagaagacgacaga

SEQ ID NO: 1334258 - RNA, 19 nt, Homo sapiens
  misc_RNA (1)...(19): siRNA sense strand
uacaagcccuucuccaaca

SEQ ID NO: 1334259 - RNA, 19 nt, Homo sapiens
  misc_RNA (1)...(19): siRNA sense strand
uuacacggacauuugcuua

SEQ ID NO: 1334260 - RNA, 19 nt, Homo sapiens
  misc_RNA (1)...(19): siRNA sense strand
gccaggcugugaaagcauu

SEQ ID NO: 1334261 - RNA, 19 nt, Homo sapiens
  misc_RNA (1)...(19): siRNA sense strand
ccaccaauaacucaucauu

SEQ ID NO: 1334262 - RNA, 19 nt, Homo sapiens
  misc_RNA (1)...(19): siRNA sense strand
gcaguuauggaaagaagug

SEQ ID NO: 1334263 - RNA, 19 nt, Homo sapiens
  misc_RNA (1)...(19): siRNA sense strand
agaaugcaguacgucauaa

SEQ ID NO: 1334264 - RNA, 19 nt, Homo sapiens
  misc_RNA (1)...(19): siRNA sense strand
caaaccaucucccaaaccu

SEQ ID NO: 1334265 - RNA, 19 nt, Homo sapiens
  misc_RNA (1)...(19): siRNA sense strand
gagacaauaagcaacaguu

SEQ ID NO: 1334266 - RNA, 19 nt, Homo sapiens
  misc_RNA (1)...(19): siRNA sense strand
gcugugaaagcauuuguga

SEQ ID NO: 1334267 - RNA, 19 nt, Homo sapiens
  misc_RNA (1)...(19): siRNA sense strand
gcagcaacaacaacaacaa

SEQ ID NO: 1334268 - RNA, 19 nt, Homo sapiens
  misc_RNA (1)...(19): siRNA sense strand
auaagcaacaguucaauga

SEQ ID NO: 1334269 - RNA, 19 nt, Homo sapiens
  misc_RNA (1)...(19): siRNA sense strand
gaagaaugcaguacgucau

SEQ ID NO: 1334270 - RNA, 19 nt, Homo sapiens
  misc_RNA (1)...(19): siRNA sense strand
agaccuccauuuacuuaug

SEQ ID NO: 1334271 - RNA, 19 nt, Homo sapiens
  misc_RNA (1)...(19): siRNA sense strand
gacaauaagcaacaguuca

SEQ ID NO: 1334272 - RNA, 19 nt, Homo sapiens
  misc_RNA (1)...(19): siRNA sense strand
caucagaaauugccccaaa

SEQ ID NO: 1334273 - RNA, 19 nt, Homo sapiens
  misc_RNA (1)...(19): siRNA sense strand
gaaggcgacauucagacaa

SEQ ID NO: 1334274 - RNA, 19 nt, Homo sapiens
  misc_RNA (1)...(19): siRNA sense strand
gugcaacaguuagaaauac

SEQ ID NO: 1334275 - RNA, 19 nt, Homo sapiens
  misc_RNA (1)...(19): siRNA sense strand
caaauggccaggcugugaa

SEQ ID NO: 1334276 - RNA, 19 nt, Homo sapiens
  misc_RNA (1)...(19): siRNA sense strand
uggacagucuucaguucua

SEQ ID NO: 1334277 - RNA, 19 nt, Homo sapiens
  misc_RNA (1)...(19): siRNA sense strand
acucaucauuccauaguga

SEQ ID NO: 1334278 - RNA, 19 nt, Homo sapiens
  misc_RNA (1)...(19): siRNA sense strand
uaacucaucauuccauagu

SEQ ID NO: 1334279 - RNA, 19 nt, Homo sapiens
  misc_RNA (1)...(19): siRNA sense strand
gcagcagcuucuccagaug

SEQ ID NO: 1334280 - RNA, 19 nt, Homo sapiens
  misc_RNA (1)...(19): siRNA sense strand
gaaauugccccaaacuaug

SEQ ID NO: 1334281 - RNA, 19 nt, Homo sapiens
  misc_RNA (1)...(19): siRNA sense strand
caauccacgucaaggaaga

SEQ ID NO: 1334282 - RNA, 19 nt, Homo sapiens
  misc_RNA (1)...(19): siRNA sense strand
caguuuaccuuugcuaagu

SEQ ID NO: 1334283 - RNA, 19 nt, Homo sapiens
  misc_RNA (1)...(19): siRNA sense strand
aaucuuagccugcacaagu

SEQ ID NO: 1334284 - RNA, 19 nt, Homo sapiens
  misc_RNA (1)...(19): siRNA sense strand
aagaaugcaguacgucaua

SEQ ID NO: 1334285 - RNA, 19 nt, Homo sapiens
  misc_RNA (1)...(19): siRNA sense strand
ccacagagcuuaccucaaa

SEQ ID NO: 1334286 - RNA, 19 nt, Homo sapiens
  misc_RNA (1)...(19): siRNA sense strand
gcaaacaaguggauugaaa

SEQ ID NO: 1334287 - RNA, 19 nt, Homo sapiens
  misc_RNA (1)...(19): siRNA sense strand
uaaagcaccuuaacaauga

SEQ ID NO: 1334288 - RNA, 19 nt, Homo sapiens
  misc_RNA (1)...(19): siRNA sense strand
gacaggcaguuaacacuua

SEQ ID NO: 1334289 - RNA, 19 nt, Homo sapiens
  misc_RNA (1)...(19): siRNA sense strand
gaaauuuacagcugguuua

SEQ ID NO: 1334290 - RNA, 19 nt, Homo sapiens
  misc_RNA (1)...(19): siRNA sense strand
gaugaagacugcccaaugu

SEQ ID NO: 1334291 - RNA, 19 nt, Homo sapiens
  misc_RNA (1)...(19): siRNA sense strand
cagcagagauggaagauca

SEQ ID NO: 1334292 - RNA, 19 nt, Homo sapiens
  misc_RNA (1)...(19): siRNA sense strand
gaaagcauuugugaagauu

SEQ ID NO: 1334293 - RNA, 19 nt, Homo sapiens
  misc_RNA (1)...(19): siRNA sense strand
gcaguuacaucuucagcuu

SEQ ID NO: 1334294 - RNA, 19 nt, Homo sapiens
  misc_RNA (1)...(19): siRNA sense strand
acagagagauugaagaaga

SEQ ID NO: 1334295 - RNA, 19 nt, Homo sapiens
  misc_RNA (1)...(19): siRNA sense strand
gaugucagaccuccauuua

SEQ ID NO: 1334296 - RNA, 19 nt, Homo sapiens
  misc_RNA (1)...(19): siRNA sense strand
ggcuagaccucacuacuaa

SEQ ID NO: 1334297 - RNA, 19 nt, Homo sapiens
  misc_RNA (1)...(19): siRNA sense strand
caaagcaucaccaccaaua

SEQ ID NO: 1334298 - RNA, 19 nt, Homo sapiens
  misc_RNA (1)...(19): siRNA sense strand
gcagagagcaguuuaccuu

SEQ ID NO: 1334299 - RNA, 19 nt, Homo sapiens
  misc_RNA (1)...(19): siRNA sense strand
aagaagagccuuuaucuga

SEQ ID NO: 1334300 - RNA, 19 nt, Homo sapiens
  misc_RNA (1)...(19): siRNA sense strand
ggaaugagcacucuaagca

SEQ ID NO: 1334301 - RNA, 19 nt, Homo sapiens
  misc_RNA (1)...(19): siRNA sense strand
gcaguacgucauaaucuua

SEQ ID NO: 1334302 - RNA, 19 nt, Homo sapiens
  misc_RNA (1)...(19): siRNA sense strand
gaagagccuuuaucugaag

SEQ ID NO: 1334303 - RNA, 19 nt, Homo sapiens
  misc_RNA (1)...(19): siRNA sense strand
gacaacagcuaaucacagu

SEQ ID NO: 1334304 - RNA, 19 nt, Homo sapiens
  misc_RNA (1)...(19): siRNA sense strand
gacaccagcucugaaguaa

SEQ ID NO: 1334305 - RNA, 19 nt, Homo sapiens
  misc_RNA (1)...(19): siRNA sense strand
ggacagucuucaguucuaa

SEQ ID NO: 1334306 - RNA, 19 nt, Homo sapiens
  misc_RNA (1)...(19): siRNA sense strand
gagcagugauaaacagaga

SEQ ID NO: 1334307 - RNA, 19 nt, Homo sapiens
  misc_RNA (1)...(19): siRNA sense strand
ggaaguccaaccuuaguaa

SEQ ID NO: 1334308 - RNA, 19 nt, Homo sapiens
  misc_RNA (1)...(19): siRNA sense strand
gcaaauggccaggcuguga

SEQ ID NO: 1334309 - RNA, 19 nt, Homo sapiens
  misc_RNA (1)...(19): siRNA sense strand
gcagguggugcaacaguua

SEQ ID NO: 1334310 - RNA, 19 nt, Homo sapiens
  misc_RNA (1)...(19): siRNA sense strand
cgacagagagauugaagaa

SEQ ID NO: 1334311 - RNA, 19 nt, Homo sapiens
  misc_RNA (1)...(19): siRNA sense strand
gaaagaagugacuggaguu

SEQ ID NO: 1334312 - RNA, 19 nt, Homo sapiens
  misc_RNA (1)...(19): siRNA sense strand
gaaacagcaagagcaguua

SEQ ID NO: 1334313 - RNA, 19 nt, Homo sapiens
  misc_RNA (1)...(19): siRNA sense strand
agaagagccuuuaucugaa

SEQ ID NO: 1334314 - RNA, 19 nt, Homo sapiens
  misc_RNA (1)...(19): siRNA sense strand
caaggaagagccagugauu

SEQ ID NO: 1334315 - RNA, 19 nt, Homo sapiens
  misc_RNA (1)...(19): siRNA sense strand
aacaggaaguccaaccuua

SEQ ID NO: 1334316 - RNA, 19 nt, Homo sapiens
  misc_RNA (1)...(19): siRNA sense strand
gcagcaacuuggaagaaug

SEQ ID NO: 1334317 - RNA, 19 nt, Homo sapiens
  misc_RNA (1)...(19): siRNA sense strand
ugaaagcauuugugaagau

SEQ ID NO: 1334318 - RNA, 19 nt, Homo sapiens
  misc_RNA (1)...(19): siRNA sense strand
gggcuagaccucacuacua

SEQ ID NO: 1334319 - RNA, 19 nt, Homo sapiens
  misc_RNA (1)...(19): siRNA sense strand
gacuguggaugaaguagaa

SEQ ID NO: 1334320 - RNA, 19 nt, Homo sapiens
  misc_RNA (1)...(19): siRNA sense strand
gcgaacgucuucaagcaau

SEQ ID NO: 1334321 - RNA, 19 nt, Homo sapiens
  misc_RNA (1)...(19): siRNA sense strand
ucagaccuccauuuacuua

SEQ ID NO: 1334322 - RNA, 19 nt, Homo sapiens
  misc_RNA (1)...(19): siRNA sense strand
cgacagagacaauaagcaa

SEQ ID NO: 1334323 - RNA, 19 nt, Homo sapiens
  misc_RNA (1)...(19): siRNA sense strand
ugacagcaauggaaacagu

SEQ ID NO: 1334324 - RNA, 19 nt, Homo sapiens
  misc_RNA (1)...(19): siRNA sense strand
ggaugaagacugcccaaug

SEQ ID NO: 1334325 - RNA, 19 nt, Homo sapiens
  misc_RNA (1)...(19): siRNA sense strand
gaagaagagccuuuaucug

SEQ ID NO: 1334326 - RNA, 19 nt, Homo sapiens
  misc_RNA (1)...(19): siRNA sense strand
gcagauccuucagcaacaa

SEQ ID NO: 1334327 - RNA, 19 nt, Homo sapiens
  misc_RNA (1)...(19): siRNA sense strand
gaaguccaaccuuaguaaa

SEQ ID NO: 1334328 - RNA, 19 nt, Homo sapiens
  misc_RNA (1)...(19): siRNA sense strand
ucagacaaauacaacauuc

SEQ ID NO: 1334329 - RNA, 19 nt, Homo sapiens
  misc_RNA (1)...(19): siRNA sense strand
gcaacagcauccuggaaag

SEQ ID NO: 1334330 - RNA, 19 nt, Homo sapiens
  misc_RNA (1)...(19): siRNA sense strand
gaauggacagucuucaguu

SEQ ID NO: 1334331 - RNA, 19 nt, Homo sapiens
  misc_RNA (1)...(19): siRNA sense strand
uaaaucuggugucuagugu

SEQ ID NO: 1334332 - RNA, 19 nt, Homo sapiens
  misc_RNA (1)...(19): siRNA sense strand
ggugcaacaguuagaaaua

SEQ ID NO: 1334333 - RNA, 19 nt, Homo sapiens
  misc_RNA (1)...(19): siRNA sense strand
uaagagcagugauaaacag

SEQ ID NO: 1334334 - RNA, 19 nt, Homo sapiens
  misc_RNA (1)...(19): siRNA sense strand
agagagcaguuuaccuuug

SEQ ID NO: 1334335 - RNA, 19 nt, Homo sapiens
  misc_RNA (1)...(19): siRNA sense strand
gaaguaagcacaguagaac

SEQ ID NO: 1334336 - RNA, 19 nt, Homo sapiens
  misc_RNA (1)...(19): siRNA sense strand
gaagacgacagagagauug

SEQ ID NO: 1334337 - RNA, 19 nt, Homo sapiens
  misc_RNA (1)...(19): siRNA sense strand
aauccuggacugauaaaua

SEQ ID NO: 1334338 - RNA, 19 nt, Homo sapiens
  misc_RNA (1)...(19): siRNA sense strand
aaguaauccuggacugaua

SEQ ID NO: 1334339 - RNA, 19 nt, Homo sapiens
  misc_RNA (1)...(19): siRNA sense strand
ugacaccagcucugaagua

SEQ ID NO: 1334340 - RNA, 19 nt, Homo sapiens
  misc_RNA (1)...(19): siRNA sense strand
gcuacaagcccuucuccaa

SEQ ID NO: 1334341 - RNA, 19 nt, Homo sapiens
  misc_RNA (1)...(19): siRNA sense strand
gaacgucuucaagcaauga

SEQ ID NO: 1334342 - RNA, 19 nt, Homo sapiens
  misc_RNA (1)...(19): siRNA sense strand
auccuggacugauaaauaa

SEQ ID NO: 1334343 - RNA, 19 nt, Homo sapiens
  misc_RNA (1)...(19): siRNA sense strand
gagagcaguuuaccuuugc

SEQ ID NO: 1334344 - RNA, 19 nt, Homo sapiens
  misc_RNA (1)...(19): siRNA sense strand
gcagcaaacaaguggauug

SEQ ID NO: 1334345 - RNA, 19 nt, Homo sapiens
  misc_RNA (1)...(19): siRNA sense strand
gauugaagaagagccuuua

SEQ ID NO: 1334346 - RNA, 19 nt, Homo sapiens
  misc_RNA (1)...(19): siRNA sense strand
gcuaaucacaguccagaau

SEQ ID NO: 1334347 - RNA, 19 nt, Homo sapiens
  misc_RNA (1)...(19): siRNA sense strand
ugucagaccuccauuuacu

SEQ ID NO: 1334348 - RNA, 19 nt, Homo sapiens
  misc_RNA (1)...(19): siRNA sense strand
gugaaagcauuugugaaga

SEQ ID NO: 1334349 - RNA, 19 nt, Homo sapiens
  misc_RNA (1)...(19): siRNA sense strand
cuuaaguccugcugagauu

SEQ ID NO: 1334350 - RNA, 19 nt, Homo sapiens
  misc_RNA (1)...(19): siRNA sense strand
ugaaguaagcacaguagaa

SEQ ID NO: 1334351 - RNA, 19 nt, Homo sapiens
  misc_RNA (1)...(19): siRNA sense strand
caaacaaguggauugaaau

SEQ ID NO: 1334352 - RNA, 19 nt, Homo sapiens
  misc_RNA (1)...(19): siRNA sense strand
cagaagcgaaggucacaaa

SEQ ID NO: 1334353 - RNA, 19 nt, Homo sapiens
  misc_RNA (1)...(19): siRNA sense strand
gucaccaugucgaagaaua

SEQ ID NO: 1334354 - RNA, 19 nt, Homo sapiens
  misc_RNA (1)...(19): siRNA sense strand
gcccaaaccaucucccaaa

SEQ ID NO: 1334355 - RNA, 19 nt, Homo sapiens
  misc_RNA (1)...(19): siRNA sense strand
ucacaguccagaauuagaa

SEQ ID NO: 1334356 - RNA, 19 nt, Homo sapiens
  misc_RNA (1)...(19): siRNA sense strand
ugaagaagagccuuuaucu

SEQ ID NO: 1334357 - RNA, 19 nt, Homo sapiens
  misc_RNA (1)...(19): siRNA sense strand
agaauuagaagacgacaga

SEQ ID NO: 1334358 - RNA, 19 nt, Homo sapiens
  misc_RNA (1)...(19): siRNA sense strand
uacaagcccuucuccaaca

SEQ ID NO: 1334359 - RNA, 19 nt, Homo sapiens
  misc_RNA (1)...(19): siRNA sense strand
uuacacggacauuugcuua

SEQ ID NO: 1334360 - RNA, 19 nt, Homo sapiens
  misc_RNA (1)...(19): siRNA sense strand
gccaggcugugaaagcauu

SEQ ID NO: 1334361 - RNA, 19 nt, Homo sapiens
  misc_RNA (1)...(19): siRNA sense strand
ccaccaauaacucaucauu

SEQ ID NO: 1334362 - RNA, 19 nt, Homo sapiens
  misc_RNA (1)...(19): siRNA sense strand
gcaguuauggaaagaagug

SEQ ID NO: 1334363 - RNA, 19 nt, Homo sapiens
  misc_RNA (1)...(19): siRNA sense strand
agaaugcaguacgucauaa

SEQ ID NO: 1334364 - RNA, 19 nt, Homo sapiens
  misc_RNA (1)...(19): siRNA sense strand
caaaccaucucccaaaccu

SEQ ID NO: 1334365 - RNA, 19 nt, Homo sapiens
  misc_RNA (1)...(19): siRNA sense strand
gagacaauaagcaacaguu

SEQ ID NO: 1334366 - RNA, 19 nt, Homo sapiens
  misc_RNA (1)...(19): siRNA sense strand
gcugugaaagcauuuguga

SEQ ID NO: 1334367 - RNA, 19 nt, Homo sapiens
  misc_RNA (1)...(19): siRNA sense strand
gcagcaacaacaacaacaa

SEQ ID NO: 1334368 - RNA, 19 nt, Homo sapiens
  misc_RNA (1)...(19): siRNA sense strand
auaagcaacaguucaauga

SEQ ID NO: 1334369 - RNA, 19 nt, Homo sapiens
  misc_RNA (1)...(19): siRNA sense strand
gaagaaugcaguacgucau

SEQ ID NO: 1334370 - RNA, 19 nt, Homo sapiens
  misc_RNA (1)...(19): siRNA sense strand
agaccuccauuuacuuaug

SEQ ID NO: 1334371 - RNA, 19 nt, Homo sapiens
  misc_RNA (1)...(19): siRNA sense strand
gacaauaagcaacaguuca

SEQ ID NO: 1334372 - RNA, 19 nt, Homo sapiens
  misc_RNA (1)...(19): siRNA sense strand
caucagaaauugccccaaa

SEQ ID NO: 1334373 - RNA, 19 nt, Homo sapiens
  misc_RNA (1)...(19): siRNA sense strand
gaaggcgacauucagacaa

SEQ ID NO: 1334374 - RNA, 19 nt, Homo sapiens
  misc_RNA (1)...(19): siRNA sense strand
gugcaacaguuagaaauac

SEQ ID NO: 1334375 - RNA, 19 nt, Homo sapiens
  misc_RNA (1)...(19): siRNA sense strand
caaauggccaggcugugaa

SEQ ID NO: 1334376 - RNA, 19 nt, Homo sapiens
  misc_RNA (1)...(19): siRNA sense strand
uggacagucuucaguucua

SEQ ID NO: 1334377 - RNA, 19 nt, Homo sapiens
  misc_RNA (1)...(19): siRNA sense strand
acucaucauuccauaguga

SEQ ID NO: 1334378 - RNA, 19 nt, Homo sapiens
  misc_RNA (1)...(19): siRNA sense strand
uaacucaucauuccauagu

SEQ ID NO: 1334379 - RNA, 19 nt, Homo sapiens
  misc_RNA (1)...(19): siRNA sense strand
gcagcagcuucuccagaug

SEQ ID NO: 1334380 - RNA, 19 nt, Homo sapiens
  misc_RNA (1)...(19): siRNA sense strand
gaaauugccccaaacuaug

SEQ ID NO: 1334381 - RNA, 19 nt, Homo sapiens
  misc_RNA (1)...(19): siRNA sense strand
caauccacgucaaggaaga

SEQ ID NO: 1334382 - RNA, 19 nt, Homo sapiens
  misc_RNA (1)...(19): siRNA sense strand
caguuuaccuuugcuaagu

SEQ ID NO: 1334383 - RNA, 19 nt, Homo sapiens
  misc_RNA (1)...(19): siRNA sense strand
aaucuuagccugcacaagu

SEQ ID NO: 1334384 - RNA, 19 nt, Homo sapiens
  misc_RNA (1)...(19): siRNA sense strand
aagaaugcaguacgucaua

SEQ ID NO: 1334385 - RNA, 19 nt, Homo sapiens
  misc_RNA (1)...(19): siRNA sense strand
ccacagagcuuaccucaaa

SEQ ID NO: 1334386 - RNA, 19 nt, Homo sapiens
  misc_RNA (1)...(19): siRNA sense strand
uaaagcaccuuaacaauga

SEQ ID NO: 1334387 - RNA, 19 nt, Homo sapiens
  misc_RNA (1)...(19): siRNA sense strand
gacaggcaguuaacacuua

SEQ ID NO: 1334388 - RNA, 19 nt, Homo sapiens
  misc_RNA (1)...(19): siRNA sense strand
gaaauuuacagcugguuua

SEQ ID NO: 1334389 - RNA, 19 nt, Homo sapiens
  misc_RNA (1)...(19): siRNA sense strand
gaugaagacugcccaaugu

SEQ ID NO: 1334390 - RNA, 19 nt, Homo sapiens
  misc_RNA (1)...(19): siRNA sense strand
gaaagcauuugugaagauu

SEQ ID NO: 1334391 - RNA, 19 nt, Homo sapiens
  misc_RNA (1)...(19): siRNA sense strand
gcaguuacaucuucagcuu

SEQ ID NO: 1334392 - RNA, 19 nt, Homo sapiens
  misc_RNA (1)...(19): siRNA sense strand
acagagagauugaagaaga

SEQ ID NO: 1334393 - RNA, 19 nt, Homo sapiens
  misc_RNA (1)...(19): siRNA sense strand
gaugucagaccuccauuua

SEQ ID NO: 1334394 - RNA, 19 nt, Homo sapiens
  misc_RNA (1)...(19): siRNA sense strand
ggcuagaccucacuacuaa

SEQ ID NO: 1334395 - RNA, 19 nt, Homo sapiens
  misc_RNA (1)...(19): siRNA sense strand
caaagcaucaccaccaaua

SEQ ID NO: 1334396 - RNA, 19 nt, Homo sapiens
  misc_RNA (1)...(19): siRNA sense strand
gcagagagcaguuuaccuu

SEQ ID NO: 1334397 - RNA, 19 nt, Homo sapiens
  misc_RNA (1)...(19): siRNA sense strand
aagaagagccuuuaucuga

SEQ ID NO: 1334398 - RNA, 19 nt, Homo sapiens
  misc_RNA (1)...(19): siRNA sense strand
gcaguacgucauaaucuua

SEQ ID NO: 1334399 - RNA, 19 nt, Homo sapiens
  misc_RNA (1)...(19): siRNA sense strand
gaagagccuuuaucugaag

SEQ ID NO: 1334400 - RNA, 19 nt, Homo sapiens
  misc_RNA (1)...(19): siRNA sense strand
gacaacagcuaaucacagu

SEQ ID NO: 1334401 - RNA, 19 nt, Homo sapiens
  misc_RNA (1)...(19): siRNA sense strand
ggacagucuucaguucuaa

SEQ ID NO: 1334402 - RNA, 19 nt, Homo sapiens
  misc_RNA (1)...(19): siRNA sense strand
ggaaguccaaccuuaguaa

SEQ ID NO: 1334403 - RNA, 19 nt, Homo sapiens
  misc_RNA (1)...(19): siRNA sense strand
gcaaauggccaggcuguga

SEQ ID NO: 1334404 - RNA, 19 nt, Homo sapiens
  misc_RNA (1)...(19): siRNA sense strand
gcagguggugcaacaguua

SEQ ID NO: 1334405 - RNA, 19 nt, Homo sapiens
  misc_RNA (1)...(19): siRNA sense strand
cgacagagagauugaagaa

SEQ ID NO: 1334406 - RNA, 19 nt, Homo sapiens
  misc_RNA (1)...(19): siRNA sense strand
gaaagaagugacuggaguu

SEQ ID NO: 1334407 - RNA, 19 nt, Homo sapiens
  misc_RNA (1)...(19): siRNA sense strand
gaaacagcaagagcaguua

SEQ ID NO: 1334408 - RNA, 19 nt, Homo sapiens
  misc_RNA (1)...(19): siRNA sense strand
agaagagccuuuaucugaa

SEQ ID NO: 1334409 - RNA, 19 nt, Homo sapiens
  misc_RNA (1)...(19): siRNA sense strand
caaggaagagccagugauu

SEQ ID NO: 1334410 - RNA, 19 nt, Homo sapiens
  misc_RNA (1)...(19): siRNA sense strand
aacaggaaguccaaccuua

SEQ ID NO: 1334411 - RNA, 19 nt, Homo sapiens
  misc_RNA (1)...(19): siRNA sense strand
gcagcaacuuggaagaaug

SEQ ID NO: 1334412 - RNA, 19 nt, Homo sapiens
  misc_RNA (1)...(19): siRNA sense strand
ugaaagcauuugugaagau

SEQ ID NO: 1334413 - RNA, 19 nt, Homo sapiens
  misc_RNA (1)...(19): siRNA sense strand
gggcuagaccucacuacua

SEQ ID NO: 1334414 - RNA, 19 nt, Homo sapiens
  misc_RNA (1)...(19): siRNA sense strand
gacuguggaugaaguagaa

SEQ ID NO: 1334415 - RNA, 19 nt, Homo sapiens
  misc_RNA (1)...(19): siRNA sense strand
gcgaacgucuucaagcaau

SEQ ID NO: 1334416 - RNA, 19 nt, Homo sapiens
  misc_RNA (1)...(19): siRNA sense strand
ucagaccuccauuuacuua

SEQ ID NO: 1334417 - RNA, 19 nt, Homo sapiens
  misc_RNA (1)...(19): siRNA sense strand
ugacagcaauggaaacagu

SEQ ID NO: 1334418 - RNA, 19 nt, Homo sapiens
  misc_RNA (1)...(19): siRNA sense strand
ggaugaagacugcccaaug

SEQ ID NO: 1334419 - RNA, 19 nt, Homo sapiens
  misc_RNA (1)...(19): siRNA sense strand
gaagaagagccuuuaucug

SEQ ID NO: 1334420 - RNA, 19 nt, Homo sapiens
  misc_RNA (1)...(19): siRNA sense strand
gcaacagcauccuggaaag

SEQ ID NO: 1334421 - RNA, 19 nt, Homo sapiens
  misc_RNA (1)...(19): siRNA sense strand
gaaguccaaccuuaguaaa

SEQ ID NO: 1334422 - RNA, 19 nt, Homo sapiens
  misc_RNA (1)...(19): siRNA sense strand
ucagacaaauacaacauuc

SEQ ID NO: 1334423 - RNA, 19 nt, Homo sapiens
  misc_RNA (1)...(19): siRNA sense strand
gcagauccuucagcaacaa

SEQ ID NO: 1334424 - RNA, 19 nt, Homo sapiens
  misc_RNA (1)...(19): siRNA sense strand
gaauggacagucuucaguu

SEQ ID NO: 1334425 - RNA, 19 nt, Homo sapiens
  misc_RNA (1)...(19): siRNA sense strand
uaaaucuggugucuagugu

SEQ ID NO: 1334426 - RNA, 19 nt, Homo sapiens
  misc_RNA (1)...(19): siRNA sense strand
ggugcaacaguuagaaaua

SEQ ID NO: 1334427 - RNA, 19 nt, Homo sapiens
  misc_RNA (1)...(19): siRNA sense strand
agagagcaguuuaccuuug

SEQ ID NO: 1334428 - RNA, 19 nt, Homo sapiens
  misc_RNA (1)...(19): siRNA sense strand
gcuacaagcccuucuccaa

SEQ ID NO: 1334429 - RNA, 19 nt, Homo sapiens
  misc_RNA (1)...(19): siRNA sense strand
gaagacgacagagagauug

SEQ ID NO: 1334430 - RNA, 19 nt, Homo sapiens
  misc_RNA (1)...(19): siRNA sense strand
aauccuggacugauaaaua

SEQ ID NO: 1334431 - RNA, 19 nt, Homo sapiens
  misc_RNA (1)...(19): siRNA sense strand
aaguaauccuggacugaua

SEQ ID NO: 1334432 - RNA, 19 nt, Homo sapiens
  misc_RNA (1)...(19): siRNA sense strand
gaacgucuucaagcaauga

SEQ ID NO: 1334433 - RNA, 19 nt, Homo sapiens
  misc_RNA (1)...(19): siRNA sense strand
auccuggacugauaaauaa

SEQ ID NO: 1334434 - RNA, 19 nt, Homo sapiens
  misc_RNA (1)...(19): siRNA sense strand
gagagcaguuuaccuuugc

SEQ ID NO: 1334435 - RNA, 19 nt, Homo sapiens
  misc_RNA (1)...(19): siRNA sense strand
cuuaaguccugcugagauu

SEQ ID NO: 1334436 - RNA, 19 nt, Homo sapiens
  misc_RNA (1)...(19): siRNA sense strand
gauugaagaagagccuuua

SEQ ID NO: 1334437 - RNA, 19 nt, Homo sapiens
  misc_RNA (1)...(19): siRNA sense strand
gcuaaucacaguccagaau

SEQ ID NO: 1334438 - RNA, 19 nt, Homo sapiens
  misc_RNA (1)...(19): siRNA sense strand
ugucagaccuccauuuacu

SEQ ID NO: 1334439 - RNA, 19 nt, Homo sapiens
  misc_RNA (1)...(19): siRNA sense strand
gugaaagcauuugugaaga

SEQ ID NO: 1334440 - RNA, 19 nt, Homo sapiens
  misc_RNA (1)...(19): siRNA sense strand
gcccaaaccaucucccaaa

SEQ ID NO: 1334441 - RNA, 19 nt, Homo sapiens
  misc_RNA (1)...(19): siRNA sense strand
cagaagcgaaggucacaaa

SEQ ID NO: 1334442 - RNA, 19 nt, Homo sapiens
  misc_RNA (1)...(19): siRNA sense strand
gucaccaugucgaagaaua

SEQ ID NO: 1334443 - RNA, 19 nt, Homo sapiens
  misc_RNA (1)...(19): siRNA sense strand
ucacaguccagaauuagaa

SEQ ID NO: 1334444 - RNA, 19 nt, Homo sapiens
  misc_RNA (1)...(19): siRNA sense strand
ugaagaagagccuuuaucu

SEQ ID NO: 1334445 - RNA, 19 nt, Homo sapiens
  misc_RNA (1)...(19): siRNA sense strand
agaauuagaagacgacaga

SEQ ID NO: 1334446 - RNA, 19 nt, Homo sapiens
  misc_RNA (1)...(19): siRNA sense strand
ccaccaauaacucaucauu

SEQ ID NO: 1334447 - RNA, 19 nt, Homo sapiens
  misc_RNA (1)...(19): siRNA sense strand
uacaagcccuucuccaaca

SEQ ID NO: 1334448 - RNA, 19 nt, Homo sapiens
  misc_RNA (1)...(19): siRNA sense strand
uuacacggacauuugcuua

SEQ ID NO: 1334449 - RNA, 19 nt, Homo sapiens
  misc_RNA (1)...(19): siRNA sense strand
gccaggcugugaaagcauu

SEQ ID NO: 1334450 - RNA, 19 nt, Homo sapiens
  misc_RNA (1)...(19): siRNA sense strand
gcaguuauggaaagaagug

SEQ ID NO: 1334451 - RNA, 19 nt, Homo sapiens
  misc_RNA (1)...(19): siRNA sense strand
agaaugcaguacgucauaa

SEQ ID NO: 1334452 - RNA, 19 nt, Homo sapiens
  misc_RNA (1)...(19): siRNA sense strand
caaaccaucucccaaaccu

SEQ ID NO: 1334453 - RNA, 19 nt, Homo sapiens
  misc_RNA (1)...(19): siRNA sense strand
gcugugaaagcauuuguga

SEQ ID NO: 1334454 - RNA, 19 nt, Homo sapiens
  misc_RNA (1)...(19): siRNA sense strand
gcagcaacaacaacaacaa

SEQ ID NO: 1334455 - RNA, 19 nt, Homo sapiens
  misc_RNA (1)...(19): siRNA sense strand
gaagaaugcaguacgucau

SEQ ID NO: 1334456 - RNA, 19 nt, Homo sapiens
  misc_RNA (1)...(19): siRNA sense strand
agaccuccauuuacuuaug

SEQ ID NO: 1334457 - RNA, 19 nt, Homo sapiens
  misc_RNA (1)...(19): siRNA sense strand
caucagaaauugccccaaa

SEQ ID NO: 1334458 - RNA, 19 nt, Homo sapiens
  misc_RNA (1)...(19): siRNA sense strand
gaaggcgacauucagacaa

SEQ ID NO: 1334459 - RNA, 19 nt, Homo sapiens
  misc_RNA (1)...(19): siRNA sense strand
gugcaacaguuagaaauac

SEQ ID NO: 1334460 - RNA, 19 nt, Homo sapiens
  misc_RNA (1)...(19): siRNA sense strand
caaauggccaggcugugaa

SEQ ID NO: 1334461 - RNA, 19 nt, Homo sapiens
  misc_RNA (1)...(19): siRNA sense strand
uggacagucuucaguucua

SEQ ID NO: 1334462 - RNA, 19 nt, Homo sapiens
  misc_RNA (1)...(19): siRNA sense strand
acucaucauuccauaguga

SEQ ID NO: 1334463 - RNA, 19 nt, Homo sapiens
  misc_RNA (1)...(19): siRNA sense strand
uaacucaucauuccauagu

SEQ ID NO: 1334464 - RNA, 19 nt, Homo sapiens
  misc_RNA (1)...(19): siRNA sense strand
gcagcagcuucuccagaug

SEQ ID NO: 1334465 - RNA, 19 nt, Homo sapiens
  misc_RNA (1)...(19): siRNA sense strand
aacaauuccuccucgacua

SEQ ID NO: 1334466 - RNA, 19 nt, Homo sapiens
  misc_RNA (1)...(19): siRNA sense strand
caauccacgucaaggaaga

SEQ ID NO: 1334467 - RNA, 19 nt, Homo sapiens
  misc_RNA (1)...(19): siRNA sense strand
caguuuaccuuugcuaagu

SEQ ID NO: 1334468 - RNA, 19 nt, Homo sapiens
  misc_RNA (1)...(19): siRNA sense strand
aaucuuagccugcacaagu

SEQ ID NO: 1334469 - RNA, 19 nt, Homo sapiens
  misc_RNA (1)...(19): siRNA sense strand
aagaaugcaguacgucaua

SEQ ID NO: 1334470 - RNA, 19 nt, Homo sapiens
  misc_RNA (1)...(19): siRNA sense strand
gaaauugccccaaacuaug

SEQ ID NO: 1334471 - RNA, 19 nt, Homo sapiens
  misc_RNA (1)...(19): siRNA sense strand
gaacgcgaacgucuucaag

SEQ ID NO: 1334472 - RNA, 19 nt, Homo sapiens
  misc_RNA (1)...(19): siRNA sense strand
cauagugaauggacagucu

SEQ ID NO: 1334473 - RNA, 19 nt, Homo sapiens
  misc_RNA (1)...(19): siRNA sense strand
agaccucacuacuaacaau

SEQ ID NO: 1334474 - RNA, 19 nt, Homo sapiens
  misc_RNA (1)...(19): siRNA sense strand
agaaacagcaagagcaguu

SEQ ID NO: 1334475 - RNA, 19 nt, Homo sapiens
  misc_RNA (1)...(19): siRNA sense strand
ccacgaagaccucaauggu

SEQ ID NO: 1334476 - RNA, 19 nt, Homo sapiens
  misc_RNA (1)...(19): siRNA sense strand
ugaaguagaauaccagaag

SEQ ID NO: 1334477 - RNA, 19 nt, Homo sapiens
  misc_RNA (1)...(19): siRNA sense strand
cagcaguuauggaaagaag

SEQ ID NO: 1334478 - RNA, 19 nt, Homo sapiens
  misc_RNA (1)...(19): siRNA sense strand
ggacugauaaauaaugcau

SEQ ID NO: 1334479 - RNA, 19 nt, Homo sapiens
  misc_RNA (1)...(19): siRNA sense strand
guaaugcagcaacuuggaa

SEQ ID NO: 1334480 - RNA, 19 nt, Homo sapiens
  misc_RNA (1)...(19): siRNA sense strand
aaggcgacauucagacaaa

SEQ ID NO: 1334481 - RNA, 19 nt, Homo sapiens
  misc_RNA (1)...(19): siRNA sense strand
aaucuggugucuaguguca

SEQ ID NO: 1334482 - RNA, 19 nt, Homo sapiens
  misc_RNA (1)...(19): siRNA sense strand
gccauggaguuugcaaaug

SEQ ID NO: 1334483 - RNA, 19 nt, Homo sapiens
  misc_RNA (1)...(19): siRNA sense strand
gcgaaggucacaaaagaua

SEQ ID NO: 1334484 - RNA, 19 nt, Homo sapiens
  misc_RNA (1)...(19): siRNA sense strand
uaacaggaaguccaaccuu

SEQ ID NO: 1334485 - RNA, 19 nt, Homo sapiens
  misc_RNA (1)...(19): siRNA sense strand
ccacagagcuuaccucaaa

SEQ ID NO: 1334486 - RNA, 19 nt, Homo sapiens
  misc_RNA (1)...(19): siRNA sense strand
uaaagcaccuuaacaauga

SEQ ID NO: 1334487 - RNA, 19 nt, Homo sapiens
  misc_RNA (1)...(19): siRNA sense strand
gacaggcaguuaacacuua

SEQ ID NO: 1334488 - RNA, 19 nt, Homo sapiens
  misc_RNA (1)...(19): siRNA sense strand
gaaauuuacagcugguuua

SEQ ID NO: 1334489 - RNA, 19 nt, Homo sapiens
  misc_RNA (1)...(19): siRNA sense strand
gaugaagacugcccaaugu

SEQ ID NO: 1334490 - RNA, 19 nt, Homo sapiens
  misc_RNA (1)...(19): siRNA sense strand
gaaagcauuugugaagauu

SEQ ID NO: 1334491 - RNA, 19 nt, Homo sapiens
  misc_RNA (1)...(19): siRNA sense strand
gcaguuacaucuucagcuu

SEQ ID NO: 1334492 - RNA, 19 nt, Homo sapiens
  misc_RNA (1)...(19): siRNA sense strand
acagagagauugaagaaga

SEQ ID NO: 1334493 - RNA, 19 nt, Homo sapiens
  misc_RNA (1)...(19): siRNA sense strand
gaugucagaccuccauuua

SEQ ID NO: 1334494 - RNA, 19 nt, Homo sapiens
  misc_RNA (1)...(19): siRNA sense strand
ggcuagaccucacuacuaa

SEQ ID NO: 1334495 - RNA, 19 nt, Homo sapiens
  misc_RNA (1)...(19): siRNA sense strand
caaagcaucaccaccaaua

SEQ ID NO: 1334496 - RNA, 19 nt, Homo sapiens
  misc_RNA (1)...(19): siRNA sense strand
gcagagagcaguuuaccuu

SEQ ID NO: 1334497 - RNA, 19 nt, Homo sapiens
  misc_RNA (1)...(19): siRNA sense strand
aagaagagccuuuaucuga

SEQ ID NO: 1334498 - RNA, 19 nt, Homo sapiens
  misc_RNA (1)...(19): siRNA sense strand
gcaguacgucauaaucuua

SEQ ID NO: 1334499 - RNA, 19 nt, Homo sapiens
  misc_RNA (1)...(19): siRNA sense strand
gaagagccuuuaucugaag

SEQ ID NO: 1334500 - RNA, 19 nt, Homo sapiens
  misc_RNA (1)...(19): siRNA sense strand
gacaacagcuaaucacagu

SEQ ID NO: 1334501 - RNA, 19 nt, Homo sapiens
  misc_RNA (1)...(19): siRNA sense strand
ggacagucuucaguucuaa

SEQ ID NO: 1334502 - RNA, 19 nt, Homo sapiens
  misc_RNA (1)...(19): siRNA sense strand
ggaaguccaaccuuaguaa

SEQ ID NO: 1334503 - RNA, 19 nt, Homo sapiens
  misc_RNA (1)...(19): siRNA sense strand
gcaaauggccaggcuguga

SEQ ID NO: 1334504 - RNA, 19 nt, Homo sapiens
  misc_RNA (1)...(19): siRNA sense strand
gcagguggugcaacaguua

SEQ ID NO: 1334505 - RNA, 19 nt, Homo sapiens
  misc_RNA (1)...(19): siRNA sense strand
cgacagagagauugaagaa

SEQ ID NO: 1334506 - RNA, 19 nt, Homo sapiens
  misc_RNA (1)...(19): siRNA sense strand
gaaagaagugacuggaguu

SEQ ID NO: 1334507 - RNA, 19 nt, Homo sapiens
  misc_RNA (1)...(19): siRNA sense strand
gaaacagcaagagcaguua

SEQ ID NO: 1334508 - RNA, 19 nt, Homo sapiens
  misc_RNA (1)...(19): siRNA sense strand
agaagagccuuuaucugaa

SEQ ID NO: 1334509 - RNA, 19 nt, Homo sapiens
  misc_RNA (1)...(19): siRNA sense strand
caaggaagagccagugauu

SEQ ID NO: 1334510 - RNA, 19 nt, Homo sapiens
  misc_RNA (1)...(19): siRNA sense strand
aacaggaaguccaaccuua

SEQ ID NO: 1334511 - RNA, 19 nt, Homo sapiens
  misc_RNA (1)...(19): siRNA sense strand
gcagcaacuuggaagaaug

SEQ ID NO: 1334512 - RNA, 19 nt, Homo sapiens
  misc_RNA (1)...(19): siRNA sense strand
ugaaagcauuugugaagau

SEQ ID NO: 1334513 - RNA, 19 nt, Homo sapiens
  misc_RNA (1)...(19): siRNA sense strand
gggcuagaccucacuacua

SEQ ID NO: 1334514 - RNA, 19 nt, Homo sapiens
  misc_RNA (1)...(19): siRNA sense strand
gacuguggaugaaguagaa

SEQ ID NO: 1334515 - RNA, 19 nt, Homo sapiens
  misc_RNA (1)...(19): siRNA sense strand
gcgaacgucuucaagcaau

SEQ ID NO: 1334516 - RNA, 19 nt, Homo sapiens
  misc_RNA (1)...(19): siRNA sense strand
ucagaccuccauuuacuua

SEQ ID NO: 1334517 - RNA, 19 nt, Homo sapiens
  misc_RNA (1)...(19): siRNA sense strand
ugacagcaauggaaacagu

SEQ ID NO: 1334518 - RNA, 19 nt, Homo sapiens
  misc_RNA (1)...(19): siRNA sense strand
ggaugaagacugcccaaug

SEQ ID NO: 1334519 - RNA, 19 nt, Homo sapiens
  misc_RNA (1)...(19): siRNA sense strand
gaagaagagccuuuaucug

SEQ ID NO: 1334520 - RNA, 19 nt, Homo sapiens
  misc_RNA (1)...(19): siRNA sense strand
gcaacagcauccuggaaag

SEQ ID NO: 1334521 - RNA, 19 nt, Homo sapiens
  misc_RNA (1)...(19): siRNA sense strand
gaaguccaaccuuaguaaa

SEQ ID NO: 1334522 - RNA, 19 nt, Homo sapiens
  misc_RNA (1)...(19): siRNA sense strand
ucagacaaauacaacauuc

SEQ ID NO: 1334523 - RNA, 19 nt, Homo sapiens
  misc_RNA (1)...(19): siRNA sense strand
gcagauccuucagcaacaa

SEQ ID NO: 1334524 - RNA, 19 nt, Homo sapiens
  misc_RNA (1)...(19): siRNA sense strand
gaauggacagucuucaguu

SEQ ID NO: 1334525 - RNA, 19 nt, Homo sapiens
  misc_RNA (1)...(19): siRNA sense strand
uaaaucuggugucuagugu

SEQ ID NO: 1334526 - RNA, 19 nt, Homo sapiens
  misc_RNA (1)...(19): siRNA sense strand
ggugcaacaguuagaaaua

SEQ ID NO: 1334527 - RNA, 19 nt, Homo sapiens
  misc_RNA (1)...(19): siRNA sense strand
agagagcaguuuaccuuug

SEQ ID NO: 1334528 - RNA, 19 nt, Homo sapiens
  misc_RNA (1)...(19): siRNA sense strand
gcuacaagcccuucuccaa

SEQ ID NO: 1334529 - RNA, 19 nt, Homo sapiens
  misc_RNA (1)...(19): siRNA sense strand
gaagacgacagagagauug

SEQ ID NO: 1334530 - RNA, 19 nt, Homo sapiens
  misc_RNA (1)...(19): siRNA sense strand
aauccuggacugauaaaua

SEQ ID NO: 1334531 - RNA, 19 nt, Homo sapiens
  misc_RNA (1)...(19): siRNA sense strand
aaguaauccuggacugaua

SEQ ID NO: 1334532 - RNA, 19 nt, Homo sapiens
  misc_RNA (1)...(19): siRNA sense strand
gaacgucuucaagcaauga

SEQ ID NO: 1334533 - RNA, 19 nt, Homo sapiens
  misc_RNA (1)...(19): siRNA sense strand
auccuggacugauaaauaa

SEQ ID NO: 1334534 - RNA, 19 nt, Homo sapiens
  misc_RNA (1)...(19): siRNA sense strand
gagagcaguuuaccuuugc

SEQ ID NO: 1334535 - RNA, 19 nt, Homo sapiens
  misc_RNA (1)...(19): siRNA sense strand
cuuaaguccugcugagauu

SEQ ID NO: 1334536 - RNA, 19 nt, Homo sapiens
  misc_RNA (1)...(19): siRNA sense strand
gauugaagaagagccuuua

SEQ ID NO: 1334537 - RNA, 19 nt, Homo sapiens
  misc_RNA (1)...(19): siRNA sense strand
gcuaaucacaguccagaau

SEQ ID NO: 1334538 - RNA, 19 nt, Homo sapiens
  misc_RNA (1)...(19): siRNA sense strand
ugucagaccuccauuuacu

SEQ ID NO: 1334539 - RNA, 19 nt, Homo sapiens
  misc_RNA (1)...(19): siRNA sense strand
gugaaagcauuugugaaga

SEQ ID NO: 1334540 - RNA, 19 nt, Homo sapiens
  misc_RNA (1)...(19): siRNA sense strand
gcccaaaccaucucccaaa

SEQ ID NO: 1334541 - RNA, 19 nt, Homo sapiens
  misc_RNA (1)...(19): siRNA sense strand
cagaagcgaaggucacaaa

SEQ ID NO: 1334542 - RNA, 19 nt, Homo sapiens
  misc_RNA (1)...(19): siRNA sense strand
gucaccaugucgaagaaua

SEQ ID NO: 1334543 - RNA, 19 nt, Homo sapiens
  misc_RNA (1)...(19): siRNA sense strand
ucacaguccagaauuagaa

SEQ ID NO: 1334544 - RNA, 19 nt, Homo sapiens
  misc_RNA (1)...(19): siRNA sense strand
ugaagaagagccuuuaucu

SEQ ID NO: 1334545 - RNA, 19 nt, Homo sapiens
  misc_RNA (1)...(19): siRNA sense strand
agaauuagaagacgacaga

SEQ ID NO: 1334546 - RNA, 19 nt, Homo sapiens
  misc_RNA (1)...(19): siRNA sense strand
ccaccaauaacucaucauu

SEQ ID NO: 1334547 - RNA, 19 nt, Homo sapiens
  misc_RNA (1)...(19): siRNA sense strand
uacaagcccuucuccaaca

SEQ ID NO: 1334548 - RNA, 19 nt, Homo sapiens
  misc_RNA (1)...(19): siRNA sense strand
uuacacggacauuugcuua

SEQ ID NO: 1334549 - RNA, 19 nt, Homo sapiens
  misc_RNA (1)...(19): siRNA sense strand
gccaggcugugaaagcauu

SEQ ID NO: 1334550 - RNA, 19 nt, Homo sapiens
  misc_RNA (1)...(19): siRNA sense strand
gcaguuauggaaagaagug

SEQ ID NO: 1334551 - RNA, 19 nt, Homo sapiens
  misc_RNA (1)...(19): siRNA sense strand
agaaugcaguacgucauaa

SEQ ID NO: 1334552 - RNA, 19 nt, Homo sapiens
  misc_RNA (1)...(19): siRNA sense strand
caaaccaucucccaaaccu

SEQ ID NO: 1334553 - RNA, 19 nt, Homo sapiens
  misc_RNA (1)...(19): siRNA sense strand
gcugugaaagcauuuguga

SEQ ID NO: 1334554 - RNA, 19 nt, Homo sapiens
  misc_RNA (1)...(19): siRNA sense strand
gcagcaacaacaacaacaa

SEQ ID NO: 1334555 - RNA, 19 nt, Homo sapiens
  misc_RNA (1)...(19): siRNA sense strand
gaagaaugcaguacgucau

SEQ ID NO: 1334556 - RNA, 19 nt, Homo sapiens
  misc_RNA (1)...(19): siRNA sense strand
agaccuccauuuacuuaug

SEQ ID NO: 1334557 - RNA, 19 nt, Homo sapiens
  misc_RNA (1)...(19): siRNA sense strand
caucagaaauugccccaaa

SEQ ID NO: 1334558 - RNA, 19 nt, Homo sapiens
  misc_RNA (1)...(19): siRNA sense strand
gaaggcgacauucagacaa

SEQ ID NO: 1334559 - RNA, 19 nt, Homo sapiens
  misc_RNA (1)...(19): siRNA sense strand
gugcaacaguuagaaauac

SEQ ID NO: 1334560 - RNA, 19 nt, Homo sapiens
  misc_RNA (1)...(19): siRNA sense strand
caaauggccaggcugugaa

SEQ ID NO: 1334561 - RNA, 19 nt, Homo sapiens
  misc_RNA (1)...(19): siRNA sense strand
uggacagucuucaguucua

SEQ ID NO: 1334562 - RNA, 19 nt, Homo sapiens
  misc_RNA (1)...(19): siRNA sense strand
acucaucauuccauaguga

SEQ ID NO: 1334563 - RNA, 19 nt, Homo sapiens
  misc_RNA (1)...(19): siRNA sense strand
uaacucaucauuccauagu

SEQ ID NO: 1334564 - RNA, 19 nt, Homo sapiens
  misc_RNA (1)...(19): siRNA sense strand
gcagcagcuucuccagaug

SEQ ID NO: 1334565 - RNA, 19 nt, Homo sapiens
  misc_RNA (1)...(19): siRNA sense strand
aacaauuccuccucgacua

SEQ ID NO: 1334566 - RNA, 19 nt, Homo sapiens
  misc_RNA (1)...(19): siRNA sense strand
caauccacgucaaggaaga

SEQ ID NO: 1334567 - RNA, 19 nt, Homo sapiens
  misc_RNA (1)...(19): siRNA sense strand
caguuuaccuuugcuaagu

SEQ ID NO: 1334568 - RNA, 19 nt, Homo sapiens
  misc_RNA (1)...(19): siRNA sense strand
aaucuuagccugcacaagu

SEQ ID NO: 1334569 - RNA, 19 nt, Homo sapiens
  misc_RNA (1)...(19): siRNA sense strand
aagaaugcaguacgucaua

SEQ ID NO: 1334570 - RNA, 19 nt, Homo sapiens
  misc_RNA (1)...(19): siRNA sense strand
gaaauugccccaaacuaug

SEQ ID NO: 1334571 - RNA, 19 nt, Homo sapiens
  misc_RNA (1)...(19): siRNA sense strand
gaacgcgaacgucuucaag

SEQ ID NO: 1334572 - RNA, 19 nt, Homo sapiens
  misc_RNA (1)...(19): siRNA sense strand
cauagugaauggacagucu

SEQ ID NO: 1334573 - RNA, 19 nt, Homo sapiens
  misc_RNA (1)...(19): siRNA sense strand
agaccucacuacuaacaau

SEQ ID NO: 1334574 - RNA, 19 nt, Homo sapiens
  misc_RNA (1)...(19): siRNA sense strand
agaaacagcaagagcaguu

SEQ ID NO: 1334575 - RNA, 19 nt, Homo sapiens
  misc_RNA (1)...(19): siRNA sense strand
ccacgaagaccucaauggu

SEQ ID NO: 1334576 - RNA, 19 nt, Homo sapiens
  misc_RNA (1)...(19): siRNA sense strand
ugaaguagaauaccagaag

SEQ ID NO: 1334577 - RNA, 19 nt, Homo sapiens
  misc_RNA (1)...(19): siRNA sense strand
cagcaguuauggaaagaag

SEQ ID NO: 1334578 - RNA, 19 nt, Homo sapiens
  misc_RNA (1)...(19): siRNA sense strand
ggacugauaaauaaugcau

SEQ ID NO: 1334579 - RNA, 19 nt, Homo sapiens
  misc_RNA (1)...(19): siRNA sense strand
guaaugcagcaacuuggaa

SEQ ID NO: 1334580 - RNA, 19 nt, Homo sapiens
  misc_RNA (1)...(19): siRNA sense strand
aaggcgacauucagacaaa

SEQ ID NO: 1334581 - RNA, 19 nt, Homo sapiens
  misc_RNA (1)...(19): siRNA sense strand
aaucuggugucuaguguca

SEQ ID NO: 1334582 - RNA, 19 nt, Homo sapiens
  misc_RNA (1)...(19): siRNA sense strand
gccauggaguuugcaaaug

SEQ ID NO: 1334583 - RNA, 19 nt, Homo sapiens
  misc_RNA (1)...(19): siRNA sense strand
gcgaaggucacaaaagaua

SEQ ID NO: 1334584 - RNA, 19 nt, Homo sapiens
  misc_RNA (1)...(19): siRNA sense strand
uaacaggaaguccaaccuu

SEQ ID NO: 1334585 - RNA, 19 nt, Homo sapiens
  misc_RNA (1)...(19): siRNA sense strand
ccacgaaggccacugcaaa

SEQ ID NO: 1334586 - RNA, 19 nt, Homo sapiens
  misc_RNA (1)...(19): siRNA sense strand
cgagugggacugcaugugu

SEQ ID NO: 1334587 - RNA, 19 nt, Homo sapiens
  misc_RNA (1)...(19): siRNA sense strand
caggggaaauucaguuuug

SEQ ID NO: 1334588 - RNA, 19 nt, Homo sapiens
  misc_RNA (1)...(19): siRNA sense strand
ccacgaaggccacugcaaa

SEQ ID NO: 1334589 - RNA, 19 nt, Homo sapiens
  misc_RNA (1)...(19): siRNA sense strand
ggagagagagacacaguca

SEQ ID NO: 1334590 - RNA, 19 nt, Homo sapiens
  misc_RNA (1)...(19): siRNA sense strand
agagagagacacagucaug

SEQ ID NO: 1334591 - RNA, 19 nt, Homo sapiens
  misc_RNA (1)...(19): siRNA sense strand
ggagggagagagagacaca

SEQ ID NO: 1334592 - RNA, 19 nt, Homo sapiens
  misc_RNA (1)...(19): siRNA sense strand
cgagugggacugcaugugu

SEQ ID NO: 1334593 - RNA, 19 nt, Homo sapiens
  misc_RNA (1)...(19): siRNA sense strand
caggggaaauucaguuuug

SEQ ID NO: 1334594 - RNA, 19 nt, Homo sapiens
  misc_RNA (1)...(19): siRNA sense strand
gcagaagugggugcaggaa

SEQ ID NO: 1334595 - RNA, 19 nt, Homo sapiens
  misc_RNA (1)...(19): siRNA sense strand
ccacgaaggccacugcaaa

SEQ ID NO: 1334596 - RNA, 19 nt, Homo sapiens
  misc_RNA (1)...(19): siRNA sense strand
cgagugggacugcaugugu

SEQ ID NO: 1334597 - RNA, 19 nt, Homo sapiens
  misc_RNA (1)...(19): siRNA sense strand
caggggaaauucaguuuug

SEQ ID NO: 1334598 - RNA, 19 nt, Homo sapiens
  misc_RNA (1)...(19): siRNA sense strand
ccacgaaggccacugcaaa

SEQ ID NO: 1334599 - RNA, 19 nt, Homo sapiens
  misc_RNA (1)...(19): siRNA sense strand
cgagugggacugcaugugu

SEQ ID NO: 1334600 - RNA, 19 nt, Homo sapiens
  misc_RNA (1)...(19): siRNA sense strand
caggggaaauucaguuuug

SEQ ID NO: 1334601 - RNA, 19 nt, Homo sapiens
  misc_RNA (1)...(19): siRNA sense strand
ccacgaaggccacugcaaa

SEQ ID NO: 1334602 - RNA, 19 nt, Homo sapiens
  misc_RNA (1)...(19): siRNA sense strand
ggagagagagacacaguca

SEQ ID NO: 1334603 - RNA, 19 nt, Homo sapiens
  misc_RNA (1)...(19): siRNA sense strand
agagagagacacagucaug

SEQ ID NO: 1334604 - RNA, 19 nt, Homo sapiens
  misc_RNA (1)...(19): siRNA sense strand
ggagggagagagagacaca

SEQ ID NO: 1334605 - RNA, 19 nt, Homo sapiens
  misc_RNA (1)...(19): siRNA sense strand
cgagugggacugcaugugu

SEQ ID NO: 1334606 - RNA, 19 nt, Homo sapiens
  misc_RNA (1)...(19): siRNA sense strand
caggggaaauucaguuuug

SEQ ID NO: 1334607 - RNA, 19 nt, Homo sapiens
  misc_RNA (1)...(19): siRNA sense strand
gcagaagugggugcaggaa

SEQ ID NO: 1334608 - RNA, 19 nt, Homo sapiens
  misc_RNA (1)...(19): siRNA sense strand
ccacgaaggccacugcaaa

SEQ ID NO: 1334609 - RNA, 19 nt, Homo sapiens
  misc_RNA (1)...(19): siRNA sense strand
cgagugggacugcaugugu

SEQ ID NO: 1334610 - RNA, 19 nt, Homo sapiens
  misc_RNA (1)...(19): siRNA sense strand
caggggaaauucaguuuug

SEQ ID NO: 1334611 - RNA, 19 nt, Homo sapiens
  misc_RNA (1)...(19): siRNA sense strand
gcaacucucucuccauuaa

SEQ ID NO: 1334612 - RNA, 19 nt, Homo sapiens
  misc_RNA (1)...(19): siRNA sense strand
gaagugagagccauuaauu

SEQ ID NO: 1334613 - RNA, 19 nt, Homo sapiens
  misc_RNA (1)...(19): siRNA sense strand
gagagaagcccaucuauuc

SEQ ID NO: 1334614 - RNA, 19 nt, Homo sapiens
  misc_RNA (1)...(19): siRNA sense strand
gcacuuaauuaaagcagaa

SEQ ID NO: 1334615 - RNA, 19 nt, Homo sapiens
  misc_RNA (1)...(19): siRNA sense strand
cagaagagcccaagaagaa

SEQ ID NO: 1334616 - RNA, 19 nt, Homo sapiens
  misc_RNA (1)...(19): siRNA sense strand
ggagagaagcccaucuauu

SEQ ID NO: 1334617 - RNA, 19 nt, Homo sapiens
  misc_RNA (1)...(19): siRNA sense strand
cgaggaaaguuaugcaaug

SEQ ID NO: 1334618 - RNA, 19 nt, Homo sapiens
  misc_RNA (1)...(19): siRNA sense strand
ccauagaaguguugcaguu

SEQ ID NO: 1334619 - RNA, 19 nt, Homo sapiens
  misc_RNA (1)...(19): siRNA sense strand
ccaaagcagucuuccugaa

SEQ ID NO: 1334620 - RNA, 19 nt, Homo sapiens
  misc_RNA (1)...(19): siRNA sense strand
auucaaagcucgaccagaa

SEQ ID NO: 1334621 - RNA, 19 nt, Homo sapiens
  misc_RNA (1)...(19): siRNA sense strand
ggacagauuaugaauaugg

SEQ ID NO: 1334622 - RNA, 19 nt, Homo sapiens
  misc_RNA (1)...(19): siRNA sense strand
gaagaacuguuggccaagu

SEQ ID NO: 1334623 - RNA, 19 nt, Homo sapiens
  misc_RNA (1)...(19): siRNA sense strand
gaagagcccaagaagaaga

SEQ ID NO: 1334624 - RNA, 19 nt, Homo sapiens
  misc_RNA (1)...(19): siRNA sense strand
ugaaggagcacacugaaga

SEQ ID NO: 1334625 - RNA, 19 nt, Homo sapiens
  misc_RNA (1)...(19): siRNA sense strand
ccaagaagaagaagggaaa

SEQ ID NO: 1334626 - RNA, 19 nt, Homo sapiens
  misc_RNA (1)...(19): siRNA sense strand
gcagaagagcccaagaaga

SEQ ID NO: 1334627 - RNA, 19 nt, Homo sapiens
  misc_RNA (1)...(19): siRNA sense strand
gcaagccuuuucucucuua

SEQ ID NO: 1334628 - RNA, 19 nt, Homo sapiens
  misc_RNA (1)...(19): siRNA sense strand
gaaggagcacacugaagaa

SEQ ID NO: 1334629 - RNA, 19 nt, Homo sapiens
  misc_RNA (1)...(19): siRNA sense strand
ggggacagauuaugaauau

SEQ ID NO: 1334630 - RNA, 19 nt, Homo sapiens
  misc_RNA (1)...(19): siRNA sense strand
gauaugacccuggcagaga

SEQ ID NO: 1334631 - RNA, 19 nt, Homo sapiens
  misc_RNA (1)...(19): siRNA sense strand
cugcaacucucucuccauu

SEQ ID NO: 1334632 - RNA, 19 nt, Homo sapiens
  misc_RNA (1)...(19): siRNA sense strand
auauucaucugacugcaua

SEQ ID NO: 1334633 - RNA, 19 nt, Homo sapiens
  misc_RNA (1)...(19): siRNA sense strand
uaaagucgaggaaaguuau

SEQ ID NO: 1334634 - RNA, 19 nt, Homo sapiens
  misc_RNA (1)...(19): siRNA sense strand
ggagcacacugaagaagac

SEQ ID NO: 1334635 - RNA, 19 nt, Homo sapiens
  misc_RNA (1)...(19): siRNA sense strand
caucugacugcauaugaua

SEQ ID NO: 1334636 - RNA, 19 nt, Homo sapiens
  misc_RNA (1)...(19): siRNA sense strand
gcccaucuauucuguaggu

SEQ ID NO: 1334637 - RNA, 19 nt, Homo sapiens
  misc_RNA (1)...(19): siRNA sense strand
gugcuacguuugcagaaau

SEQ ID NO: 1334638 - RNA, 19 nt, Homo sapiens
  misc_RNA (1)...(19): siRNA sense strand
ccauuaaagucgaggaaag

SEQ ID NO: 1334639 - RNA, 19 nt, Homo sapiens
  misc_RNA (1)...(19): siRNA sense strand
ggaagugagagccauuaau

SEQ ID NO: 1334640 - RNA, 19 nt, Homo sapiens
  misc_RNA (1)...(19): siRNA sense strand
gaggaaaguuaugcaaugc

SEQ ID NO: 1334641 - RNA, 19 nt, Homo sapiens
  misc_RNA (1)...(19): siRNA sense strand
uuaaagucgaggaaaguua

SEQ ID NO: 1334642 - RNA, 19 nt, Homo sapiens
  misc_RNA (1)...(19): siRNA sense strand
guuaugcaaugccaaccaa

SEQ ID NO: 1334643 - RNA, 19 nt, Homo sapiens
  misc_RNA (1)...(19): siRNA sense strand
agugagagccauuaauuug

SEQ ID NO: 1334644 - RNA, 19 nt, Homo sapiens
  misc_RNA (1)...(19): siRNA sense strand
caggagagaagcccaucua

SEQ ID NO: 1334645 - RNA, 19 nt, Homo sapiens
  misc_RNA (1)...(19): siRNA sense strand
agagaguuaugcccaguau

SEQ ID NO: 1334646 - RNA, 19 nt, Homo sapiens
  misc_RNA (1)...(19): siRNA sense strand
guucagaucagcgguuuga

SEQ ID NO: 1334647 - RNA, 19 nt, Homo sapiens
  misc_RNA (1)...(19): siRNA sense strand
ccacggcauuggaaaguac

SEQ ID NO: 1334648 - RNA, 19 nt, Homo sapiens
  misc_RNA (1)...(19): siRNA sense strand
agaguuaugcccaguaugu

SEQ ID NO: 1334649 - RNA, 19 nt, Homo sapiens
  misc_RNA (1)...(19): siRNA sense strand
aagcagaagagcccaagaa

SEQ ID NO: 1334650 - RNA, 19 nt, Homo sapiens
  misc_RNA (1)...(19): siRNA sense strand
gagcgagugguucagauca

SEQ ID NO: 1334651 - RNA, 19 nt, Homo sapiens
  misc_RNA (1)...(19): siRNA sense strand
gaagcccaucuauucugua

SEQ ID NO: 1334652 - RNA, 19 nt, Homo sapiens
  misc_RNA (1)...(19): siRNA sense strand
gcaggaccaaggcagcaaa

SEQ ID NO: 1334653 - RNA, 19 nt, Homo sapiens
  misc_RNA (1)...(19): siRNA sense strand
cugaggaacaauaccauuu

SEQ ID NO: 1334654 - RNA, 19 nt, Homo sapiens
  misc_RNA (1)...(19): siRNA sense strand
cuccuggacucagugcuua

SEQ ID NO: 1334655 - RNA, 19 nt, Homo sapiens
  misc_RNA (1)...(19): siRNA sense strand
cgguuugagugcuacguuu

SEQ ID NO: 1334656 - RNA, 19 nt, Homo sapiens
  misc_RNA (1)...(19): siRNA sense strand
cucuuaagguuuagaacuu

SEQ ID NO: 1334657 - RNA, 19 nt, Homo sapiens
  misc_RNA (1)...(19): siRNA sense strand
cuucaagggacgauucaaa

SEQ ID NO: 1334658 - RNA, 19 nt, Homo sapiens
  misc_RNA (1)...(19): siRNA sense strand
caacucucucuccauuaaa

SEQ ID NO: 1334659 - RNA, 19 nt, Homo sapiens
  misc_RNA (1)...(19): siRNA sense strand
gaagaagaagggaaaagug

SEQ ID NO: 1334660 - RNA, 19 nt, Homo sapiens
  misc_RNA (1)...(19): siRNA sense strand
cauagaaguguugcaguug

SEQ ID NO: 1334661 - RNA, 19 nt, Homo sapiens
  misc_RNA (1)...(19): siRNA sense strand
gaagaagggaaaaguggaa

SEQ ID NO: 1334662 - RNA, 19 nt, Homo sapiens
  misc_RNA (1)...(19): siRNA sense strand
agaacuggaagaacuguug

SEQ ID NO: 1334663 - RNA, 19 nt, Homo sapiens
  misc_RNA (1)...(19): siRNA sense strand
aagcccaucuauucuguag

SEQ ID NO: 1334664 - RNA, 19 nt, Homo sapiens
  misc_RNA (1)...(19): siRNA sense strand
ggaccaaggcagcaaaaug

SEQ ID NO: 1334665 - RNA, 19 nt, Homo sapiens
  misc_RNA (1)...(19): siRNA sense strand
aagugagagccauuaauuu

SEQ ID NO: 1334666 - RNA, 19 nt, Homo sapiens
  misc_RNA (1)...(19): siRNA sense strand
guggaagugagagccauua

SEQ ID NO: 1334667 - RNA, 19 nt, Homo sapiens
  misc_RNA (1)...(19): siRNA sense strand
guucacaaccucugcaacu

SEQ ID NO: 1334668 - RNA, 19 nt, Homo sapiens
  misc_RNA (1)...(19): siRNA sense strand
ccaaaaccauagaaguguu

SEQ ID NO: 1334669 - RNA, 19 nt, Homo sapiens
  misc_RNA (1)...(19): siRNA sense strand
gcauuggaaaguacaagca

SEQ ID NO: 1334670 - RNA, 19 nt, Homo sapiens
  misc_RNA (1)...(19): siRNA sense strand
ucagaucagcgguuugagu

SEQ ID NO: 1334671 - RNA, 19 nt, Homo sapiens
  misc_RNA (1)...(19): siRNA sense strand
uucuguagguggaauucua

SEQ ID NO: 1334672 - RNA, 19 nt, Homo sapiens
  misc_RNA (1)...(19): siRNA sense strand
gcuccuggacucagugcuu

SEQ ID NO: 1334673 - RNA, 19 nt, Homo sapiens
  misc_RNA (1)...(19): siRNA sense strand
guuaugcccaguauguuca

SEQ ID NO: 1334674 - RNA, 19 nt, Homo sapiens
  misc_RNA (1)...(19): siRNA sense strand
gaguuaugcccaguauguu

SEQ ID NO: 1334675 - RNA, 19 nt, Homo sapiens
  misc_RNA (1)...(19): siRNA sense strand
cagagaguuaugcccagua

SEQ ID NO: 1334676 - RNA, 19 nt, Homo sapiens
  misc_RNA (1)...(19): siRNA sense strand
uagguggaauucuacuaag

SEQ ID NO: 1334677 - RNA, 19 nt, Homo sapiens
  misc_RNA (1)...(19): siRNA sense strand
gcuuagagcaagugaggaa

SEQ ID NO: 1334678 - RNA, 19 nt, Homo sapiens
  misc_RNA (1)...(19): siRNA sense strand
ggcagcagauggaagaacu

SEQ ID NO: 1334679 - RNA, 19 nt, Homo sapiens
  misc_RNA (1)...(19): siRNA sense strand
gauggaagaacugggaaug

SEQ ID NO: 1334680 - RNA, 19 nt, Homo sapiens
  misc_RNA (1)...(19): siRNA sense strand
ggccuucgccucugcuuuc

SEQ ID NO: 1334681 - RNA, 19 nt, Homo sapiens
  misc_RNA (1)...(19): siRNA sense strand
ccucccaucugcagagcuu

SEQ ID NO: 1334682 - RNA, 19 nt, Homo sapiens
  misc_RNA (1)...(19): siRNA sense strand
uagagcaagugaggaagau

SEQ ID NO: 1334683 - RNA, 19 nt, Homo sapiens
  misc_RNA (1)...(19): siRNA sense strand
gcuuagagcaagugaggaa

SEQ ID NO: 1334684 - RNA, 19 nt, Homo sapiens
  misc_RNA (1)...(19): siRNA sense strand
ggcagcagauggaagaacu

SEQ ID NO: 1334685 - RNA, 19 nt, Homo sapiens
  misc_RNA (1)...(19): siRNA sense strand
gauggaagaacugggaaug

SEQ ID NO: 1334686 - RNA, 19 nt, Homo sapiens
  misc_RNA (1)...(19): siRNA sense strand
ggccuucgccucugcuuuc

SEQ ID NO: 1334687 - RNA, 19 nt, Homo sapiens
  misc_RNA (1)...(19): siRNA sense strand
ccucccaucugcagagcuu

SEQ ID NO: 1334688 - RNA, 19 nt, Homo sapiens
  misc_RNA (1)...(19): siRNA sense strand
uagagcaagugaggaagau

SEQ ID NO: 1334689 - RNA, 19 nt, Homo sapiens
  misc_RNA (1)...(19): siRNA sense strand
gcuuagagcaagugaggaa

SEQ ID NO: 1334690 - RNA, 19 nt, Homo sapiens
  misc_RNA (1)...(19): siRNA sense strand
ggcagcagauggaagaacu

SEQ ID NO: 1334691 - RNA, 19 nt, Homo sapiens
  misc_RNA (1)...(19): siRNA sense strand
gauggaagaacugggaaug

SEQ ID NO: 1334692 - RNA, 19 nt, Homo sapiens
  misc_RNA (1)...(19): siRNA sense strand
ggccuucgccucugcuuuc

SEQ ID NO: 1334693 - RNA, 19 nt, Homo sapiens
  misc_RNA (1)...(19): siRNA sense strand
ccucccaucugcagagcuu

SEQ ID NO: 1334694 - RNA, 19 nt, Homo sapiens
  misc_RNA (1)...(19): siRNA sense strand
uagagcaagugaggaagau

SEQ ID NO: 1334695 - RNA, 19 nt, Homo sapiens
  misc_RNA (1)...(19): siRNA sense strand
aggaagagcucagguggaa

SEQ ID NO: 1334696 - RNA, 19 nt, Homo sapiens
  misc_RNA (1)...(19): siRNA sense strand
ccagggcucugaugagucu

SEQ ID NO: 1334697 - RNA, 19 nt, Homo sapiens
  misc_RNA (1)...(19): siRNA sense strand
gaagagcucagguggaaaa

SEQ ID NO: 1334698 - RNA, 19 nt, Homo sapiens
  misc_RNA (1)...(19): siRNA sense strand
ugagguauuucuccacauc

SEQ ID NO: 1334699 - RNA, 19 nt, Homo sapiens
  misc_RNA (1)...(19): siRNA sense strand
gagcucagguggaaaagga

SEQ ID NO: 1334700 - RNA, 19 nt, Homo sapiens
  misc_RNA (1)...(19): siRNA sense strand
ccuacgacggcaaggauua

SEQ ID NO: 1334701 - RNA, 19 nt, Homo sapiens
  misc_RNA (1)...(19): siRNA sense strand
aggauuacaucgcccugaa

SEQ ID NO: 1334702 - RNA, 19 nt, Homo sapiens
  misc_RNA (1)...(19): siRNA sense strand
gaccaggccagcaggagau

SEQ ID NO: 1334703 - RNA, 19 nt, Homo sapiens
  misc_RNA (1)...(19): siRNA sense strand
cccacuccaugagguauuu

SEQ ID NO: 1334704 - RNA, 19 nt, Homo sapiens
  misc_RNA (1)...(19): siRNA sense strand
gcucccacuccaugaggua

SEQ ID NO: 1334705 - RNA, 19 nt, Homo sapiens
  misc_RNA (1)...(19): siRNA sense strand
gaacuuaucuggacaggaa

SEQ ID NO: 1334706 - RNA, 19 nt, Homo sapiens
  misc_RNA (1)...(19): siRNA sense strand
ggacggugcugcuggauuu

SEQ ID NO: 1334707 - RNA, 19 nt, Homo sapiens
  misc_RNA (1)...(19): siRNA sense strand
gggaauuccugcaaguuua

SEQ ID NO: 1334708 - RNA, 19 nt, Homo sapiens
  misc_RNA (1)...(19): siRNA sense strand
ccacuuacccucaaagaaa

SEQ ID NO: 1334709 - RNA, 19 nt, Homo sapiens
  misc_RNA (1)...(19): siRNA sense strand
gcaauggccuggacuacau

SEQ ID NO: 1334710 - RNA, 19 nt, Homo sapiens
  misc_RNA (1)...(19): siRNA sense strand
guacuacccuaucaauaug

SEQ ID NO: 1334711 - RNA, 19 nt, Homo sapiens
  misc_RNA (1)...(19): siRNA sense strand
uaugauggcuuccacauuc

SEQ ID NO: 1334712 - RNA, 19 nt, Homo sapiens
  misc_RNA (1)...(19): siRNA sense strand
gggaugccaccgacaauua

SEQ ID NO: 1334713 - RNA, 19 nt, Homo sapiens
  misc_RNA (1)...(19): siRNA sense strand
ggccacagaugccagcuuu

SEQ ID NO: 1334714 - RNA, 19 nt, Homo sapiens
  misc_RNA (1)...(19): siRNA sense strand
ggaaggagaacaaacugaa

SEQ ID NO: 1334715 - RNA, 19 nt, Homo sapiens
  misc_RNA (1)...(19): siRNA sense strand
cagaaagaaugcccuccua

SEQ ID NO: 1334716 - RNA, 19 nt, Homo sapiens
  misc_RNA (1)...(19): siRNA sense strand
ccagcuuuaucaucaaaua

SEQ ID NO: 1334717 - RNA, 19 nt, Homo sapiens
  misc_RNA (1)...(19): siRNA sense strand
gagaccagauggaguggaa

SEQ ID NO: 1334718 - RNA, 19 nt, Homo sapiens
  misc_RNA (1)...(19): siRNA sense strand
ccagguggauaaaguuuga

SEQ ID NO: 1334719 - RNA, 19 nt, Homo sapiens
  misc_RNA (1)...(19): siRNA sense strand
gaaaguguccaaucagauc

SEQ ID NO: 1334720 - RNA, 19 nt, Homo sapiens
  misc_RNA (1)...(19): siRNA sense strand
gaugaucggugccuucaag

SEQ ID NO: 1334721 - RNA, 19 nt, Homo sapiens
  misc_RNA (1)...(19): siRNA sense strand
gggacagccucucaucauu

SEQ ID NO: 1334722 - RNA, 19 nt, Homo sapiens
  misc_RNA (1)...(19): siRNA sense strand
gcagaagcaugaaugacau

SEQ ID NO: 1334723 - RNA, 19 nt, Homo sapiens
  misc_RNA (1)...(19): siRNA sense strand
gaaagaaugcccuccuauc

SEQ ID NO: 1334724 - RNA, 19 nt, Homo sapiens
  misc_RNA (1)...(19): siRNA sense strand
gaccagaagggacaucuuu

SEQ ID NO: 1334725 - RNA, 19 nt, Homo sapiens
  misc_RNA (1)...(19): siRNA sense strand
gcccagagcagaagcauga

SEQ ID NO: 1334726 - RNA, 19 nt, Homo sapiens
  misc_RNA (1)...(19): siRNA sense strand
gcaaaauccuacaaugaaa

SEQ ID NO: 1334727 - RNA, 19 nt, Homo sapiens
  misc_RNA (1)...(19): siRNA sense strand
aagccaaacuucaucacua

SEQ ID NO: 1334728 - RNA, 19 nt, Homo sapiens
  misc_RNA (1)...(19): siRNA sense strand
gacagcagcauggaucuua

SEQ ID NO: 1334729 - RNA, 19 nt, Homo sapiens
  misc_RNA (1)...(19): siRNA sense strand
gcuucuggauuucaucuuu

SEQ ID NO: 1334730 - RNA, 19 nt, Homo sapiens
  misc_RNA (1)...(19): siRNA sense strand
gagaguaaccggcaucauc

SEQ ID NO: 1334731 - RNA, 19 nt, Homo sapiens
  misc_RNA (1)...(19): siRNA sense strand
guccaucucugccauccua

SEQ ID NO: 1334732 - RNA, 19 nt, Homo sapiens
  misc_RNA (1)...(19): siRNA sense strand
gaaagcuggaccacacuaa

SEQ ID NO: 1334733 - RNA, 19 nt, Homo sapiens
  misc_RNA (1)...(19): siRNA sense strand
caaacuucaucacuaccua

SEQ ID NO: 1334734 - RNA, 19 nt, Homo sapiens
  misc_RNA (1)...(19): siRNA sense strand
ggagauuuccggaucagaa

SEQ ID NO: 1334735 - RNA, 19 nt, Homo sapiens
  misc_RNA (1)...(19): siRNA sense strand
ggacccaaauauccggauu

SEQ ID NO: 1334736 - RNA, 19 nt, Homo sapiens
  misc_RNA (1)...(19): siRNA sense strand
caccaacgcuucucuguac

SEQ ID NO: 1334737 - RNA, 19 nt, Homo sapiens
  misc_RNA (1)...(19): siRNA sense strand
uggauacucugcagcauga

SEQ ID NO: 1334738 - RNA, 19 nt, Homo sapiens
  misc_RNA (1)...(19): siRNA sense strand
uuauaaagauucccaugga

SEQ ID NO: 1334739 - RNA, 19 nt, Homo sapiens
  misc_RNA (1)...(19): siRNA sense strand
ggaggagauuuccggauca

SEQ ID NO: 1334740 - RNA, 19 nt, Homo sapiens
  misc_RNA (1)...(19): siRNA sense strand
gaauacaaccguguucaau

SEQ ID NO: 1334741 - RNA, 19 nt, Homo sapiens
  misc_RNA (1)...(19): siRNA sense strand
gacaacauccucccagaga

SEQ ID NO: 1334742 - RNA, 19 nt, Homo sapiens
  misc_RNA (1)...(19): siRNA sense strand
gcaaauuacggacgucugu

SEQ ID NO: 1334743 - RNA, 19 nt, Homo sapiens
  misc_RNA (1)...(19): siRNA sense strand
acaagaagaggaagagaaa

SEQ ID NO: 1334744 - RNA, 19 nt, Homo sapiens
  misc_RNA (1)...(19): siRNA sense strand
gaccuggccuggauugaca

SEQ ID NO: 1334745 - RNA, 19 nt, Homo sapiens
  misc_RNA (1)...(19): siRNA sense strand
ggacagccucucaucauuc

SEQ ID NO: 1334746 - RNA, 19 nt, Homo sapiens
  misc_RNA (1)...(19): siRNA sense strand
ucagugacguggccuacaa

SEQ ID NO: 1334747 - RNA, 19 nt, Homo sapiens
  misc_RNA (1)...(19): siRNA sense strand
gcucauguccuucauccuu

SEQ ID NO: 1334748 - RNA, 19 nt, Homo sapiens
  misc_RNA (1)...(19): siRNA sense strand
gauguucuguggaaucgau

SEQ ID NO: 1334749 - RNA, 19 nt, Homo sapiens
  misc_RNA (1)...(19): siRNA sense strand
ggagucagccagguggaua

SEQ ID NO: 1334750 - RNA, 19 nt, Homo sapiens
  misc_RNA (1)...(19): siRNA sense strand
gacaagaagaggaagagaa

SEQ ID NO: 1334751 - RNA, 19 nt, Homo sapiens
  misc_RNA (1)...(19): siRNA sense strand
cuuaucagcuucaucuuca

SEQ ID NO: 1334752 - RNA, 19 nt, Homo sapiens
  misc_RNA (1)...(19): siRNA sense strand
ggacuucaagccaaacuuc

SEQ ID NO: 1334753 - RNA, 19 nt, Homo sapiens
  misc_RNA (1)...(19): siRNA sense strand
gcuaccaucuggaccuguu

SEQ ID NO: 1334754 - RNA, 19 nt, Homo sapiens
  misc_RNA (1)...(19): siRNA sense strand
ggaaagcuggaccacacua

SEQ ID NO: 1334755 - RNA, 19 nt, Homo sapiens
  misc_RNA (1)...(19): siRNA sense strand
ggaauuccugcaaguuuau

SEQ ID NO: 1334756 - RNA, 19 nt, Homo sapiens
  misc_RNA (1)...(19): siRNA sense strand
ccacagaugccagcuuuau

SEQ ID NO: 1334757 - RNA, 19 nt, Homo sapiens
  misc_RNA (1)...(19): siRNA sense strand
ccacauugggcuuccagua

SEQ ID NO: 1334758 - RNA, 19 nt, Homo sapiens
  misc_RNA (1)...(19): siRNA sense strand
ccuccucccucgguuauaa

SEQ ID NO: 1334759 - RNA, 19 nt, Homo sapiens
  misc_RNA (1)...(19): siRNA sense strand
agaggaaguugcccugguu

SEQ ID NO: 1334760 - RNA, 19 nt, Homo sapiens
  misc_RNA (1)...(19): siRNA sense strand
guucuucgguggccugugu

SEQ ID NO: 1334761 - RNA, 19 nt, Homo sapiens
  misc_RNA (1)...(19): siRNA sense strand
guggauaaaguuugaagaa

SEQ ID NO: 1334762 - RNA, 19 nt, Homo sapiens
  misc_RNA (1)...(19): siRNA sense strand
ggaaaguguccaaucagau

SEQ ID NO: 1334763 - RNA, 19 nt, Homo sapiens
  misc_RNA (1)...(19): siRNA sense strand
gagcaaaauccuacaauga

SEQ ID NO: 1334764 - RNA, 19 nt, Homo sapiens
  misc_RNA (1)...(19): siRNA sense strand
gcccauccaccgcuccuua

SEQ ID NO: 1334765 - RNA, 19 nt, Homo sapiens
  misc_RNA (1)...(19): siRNA sense strand
gacaagaggaaaucugugu

SEQ ID NO: 1334766 - RNA, 19 nt, Homo sapiens
  misc_RNA (1)...(19): siRNA sense strand
gcuuugugcuccuuuaugg

SEQ ID NO: 1334767 - RNA, 19 nt, Homo sapiens
  misc_RNA (1)...(19): siRNA sense strand
gguggccugugucuggaua

SEQ ID NO: 1334768 - RNA, 19 nt, Homo sapiens
  misc_RNA (1)...(19): siRNA sense strand
ggagaaggcugggguagga

SEQ ID NO: 1334769 - RNA, 19 nt, Homo sapiens
  misc_RNA (1)...(19): siRNA sense strand
caaguacuacccuaucaau

SEQ ID NO: 1334770 - RNA, 19 nt, Homo sapiens
  misc_RNA (1)...(19): siRNA sense strand
gacagccucucaucauucu

SEQ ID NO: 1334771 - RNA, 19 nt, Homo sapiens
  misc_RNA (1)...(19): siRNA sense strand
caagaggaaaucuguguuc

SEQ ID NO: 1334772 - RNA, 19 nt, Homo sapiens
  misc_RNA (1)...(19): siRNA sense strand
ugaagaagauccccaagga

SEQ ID NO: 1334773 - RNA, 19 nt, Homo sapiens
  misc_RNA (1)...(19): siRNA sense strand
guacccacuuacccucaaa

SEQ ID NO: 1334774 - RNA, 19 nt, Homo sapiens
  misc_RNA (1)...(19): siRNA sense strand
ggaguuccgccucuggauu

SEQ ID NO: 1334775 - RNA, 19 nt, Homo sapiens
  misc_RNA (1)...(19): siRNA sense strand
uugaugaauuucuggauga

SEQ ID NO: 1334776 - RNA, 19 nt, Homo sapiens
  misc_RNA (1)...(19): siRNA sense strand
ggaugccaccgacaauuau

SEQ ID NO: 1334777 - RNA, 19 nt, Homo sapiens
  misc_RNA (1)...(19): siRNA sense strand
agacagacaagaagaggaa

SEQ ID NO: 1334778 - RNA, 19 nt, Homo sapiens
  misc_RNA (1)...(19): siRNA sense strand
ccaugacccugacccugaa

SEQ ID NO: 1334779 - RNA, 19 nt, Homo sapiens
  misc_RNA (1)...(19): siRNA sense strand
gaucggugccuucaaguac

SEQ ID NO: 1334780 - RNA, 19 nt, Homo sapiens
  misc_RNA (1)...(19): siRNA sense strand
ucagccagguggauaaagu

SEQ ID NO: 1334781 - RNA, 19 nt, Homo sapiens
  misc_RNA (1)...(19): siRNA sense strand
ucacugccgucauugucaa

SEQ ID NO: 1334782 - RNA, 19 nt, Homo sapiens
  misc_RNA (1)...(19): siRNA sense strand
ggcccauccucaucuuuga

SEQ ID NO: 1334783 - RNA, 19 nt, Homo sapiens
  misc_RNA (1)...(19): siRNA sense strand
aaacacagaccagcggaaa

SEQ ID NO: 1334784 - RNA, 19 nt, Homo sapiens
  misc_RNA (1)...(19): siRNA sense strand
ggacaguggcuccuuacca

SEQ ID NO: 1334785 - RNA, 19 nt, Homo sapiens
  misc_RNA (1)...(19): siRNA sense strand
ucauugagaagcagauuga

SEQ ID NO: 1334786 - RNA, 19 nt, Homo sapiens
  misc_RNA (1)...(19): siRNA sense strand
cuuccuggcucccauccua

SEQ ID NO: 1334787 - RNA, 19 nt, Homo sapiens
  misc_RNA (1)...(19): siRNA sense strand
ugacgggaaucucugucuu

SEQ ID NO: 1334788 - RNA, 19 nt, Homo sapiens
  misc_RNA (1)...(19): siRNA sense strand
gaaggagaacaaacugaag

SEQ ID NO: 1334789 - RNA, 19 nt, Homo sapiens
  misc_RNA (1)...(19): siRNA sense strand
aguacuacccuaucaauau

SEQ ID NO: 1334790 - RNA, 19 nt, Homo sapiens
  misc_RNA (1)...(19): siRNA sense strand
gaguuccgccucuggauug

SEQ ID NO: 1334791 - RNA, 19 nt, Homo sapiens
  misc_RNA (1)...(19): siRNA sense strand
ccagaagggacaucuuuca

SEQ ID NO: 1334792 - RNA, 19 nt, Homo sapiens
  misc_RNA (1)...(19): siRNA sense strand
gaucgcaggaauugaugaa

SEQ ID NO: 1334793 - RNA, 19 nt, Homo sapiens
  misc_RNA (1)...(19): siRNA sense strand
acagaugccagcuuuauca

SEQ ID NO: 1334794 - RNA, 19 nt, Homo sapiens
  misc_RNA (1)...(19): siRNA sense strand
uugcaacccucaugguaga

SEQ ID NO: 1334795 - RNA, 19 nt, Homo sapiens
  misc_RNA (1)...(19): siRNA sense strand
acaacauccucccagagaa

SEQ ID NO: 1334796 - RNA, 19 nt, Homo sapiens
  misc_RNA (1)...(19): siRNA sense strand
uaaccggcaucaucgucuu

SEQ ID NO: 1334797 - RNA, 19 nt, Homo sapiens
  misc_RNA (1)...(19): siRNA sense strand
auacaaccguguucaaugc

SEQ ID NO: 1334798 - RNA, 19 nt, Homo sapiens
  misc_RNA (1)...(19): siRNA sense strand
aaauauaucacccgcuuca

SEQ ID NO: 1334799 - RNA, 19 nt, Homo sapiens
  misc_RNA (1)...(19): siRNA sense strand
gccucaagauggagacaga

SEQ ID NO: 1334800 - RNA, 19 nt, Homo sapiens
  misc_RNA (1)...(19): siRNA sense strand
cauugcaacccucauggua

SEQ ID NO: 1334801 - RNA, 19 nt, Homo sapiens
  misc_RNA (1)...(19): siRNA sense strand
caacauccucccagagaag

SEQ ID NO: 1334802 - RNA, 19 nt, Homo sapiens
  misc_RNA (1)...(19): siRNA sense strand
gaucacugccgucauuguc

SEQ ID NO: 1334803 - RNA, 19 nt, Homo sapiens
  misc_RNA (1)...(19): siRNA sense strand
caccaacgcgaucaccuuu

SEQ ID NO: 1334804 - RNA, 19 nt, Homo sapiens
  misc_RNA (1)...(19): siRNA sense strand
ucaucuaccucggcuguau

SEQ ID NO: 1334805 - RNA, 19 nt, Homo sapiens
  misc_RNA (1)...(19): siRNA sense strand
gaacuuaucuggacaggaa

SEQ ID NO: 1334806 - RNA, 19 nt, Homo sapiens
  misc_RNA (1)...(19): siRNA sense strand
ggacggugcugcuggauuu

SEQ ID NO: 1334807 - RNA, 19 nt, Homo sapiens
  misc_RNA (1)...(19): siRNA sense strand
gggaauuccugcaaguuua

SEQ ID NO: 1334808 - RNA, 19 nt, Homo sapiens
  misc_RNA (1)...(19): siRNA sense strand
ccacuuacccucaaagaaa

SEQ ID NO: 1334809 - RNA, 19 nt, Homo sapiens
  misc_RNA (1)...(19): siRNA sense strand
gcaauggccuggacuacau

SEQ ID NO: 1334810 - RNA, 19 nt, Homo sapiens
  misc_RNA (1)...(19): siRNA sense strand
guacuacccuaucaauaug

SEQ ID NO: 1334811 - RNA, 19 nt, Homo sapiens
  misc_RNA (1)...(19): siRNA sense strand
uaugauggcuuccacauuc

SEQ ID NO: 1334812 - RNA, 19 nt, Homo sapiens
  misc_RNA (1)...(19): siRNA sense strand
gggaugccaccgacaauua

SEQ ID NO: 1334813 - RNA, 19 nt, Homo sapiens
  misc_RNA (1)...(19): siRNA sense strand
ggccacagaugccagcuuu

SEQ ID NO: 1334814 - RNA, 19 nt, Homo sapiens
  misc_RNA (1)...(19): siRNA sense strand
ggaaggagaacaaacugaa

SEQ ID NO: 1334815 - RNA, 19 nt, Homo sapiens
  misc_RNA (1)...(19): siRNA sense strand
cagaaagaaugcccuccua

SEQ ID NO: 1334816 - RNA, 19 nt, Homo sapiens
  misc_RNA (1)...(19): siRNA sense strand
ccagcuuuaucaucaaaua

SEQ ID NO: 1334817 - RNA, 19 nt, Homo sapiens
  misc_RNA (1)...(19): siRNA sense strand
gagaccagauggaguggaa

SEQ ID NO: 1334818 - RNA, 19 nt, Homo sapiens
  misc_RNA (1)...(19): siRNA sense strand
ccagguggauaaaguuuga

SEQ ID NO: 1334819 - RNA, 19 nt, Homo sapiens
  misc_RNA (1)...(19): siRNA sense strand
gaugaucggugccuucaag

SEQ ID NO: 1334820 - RNA, 19 nt, Homo sapiens
  misc_RNA (1)...(19): siRNA sense strand
gggacagccucucaucauu

SEQ ID NO: 1334821 - RNA, 19 nt, Homo sapiens
  misc_RNA (1)...(19): siRNA sense strand
gcagaagcaugaaugacau

SEQ ID NO: 1334822 - RNA, 19 nt, Homo sapiens
  misc_RNA (1)...(19): siRNA sense strand
gaaagaaugcccuccuauc

SEQ ID NO: 1334823 - RNA, 19 nt, Homo sapiens
  misc_RNA (1)...(19): siRNA sense strand
gaccagaagggacaucuuu

SEQ ID NO: 1334824 - RNA, 19 nt, Homo sapiens
  misc_RNA (1)...(19): siRNA sense strand
gcccagagcagaagcauga

SEQ ID NO: 1334825 - RNA, 19 nt, Homo sapiens
  misc_RNA (1)...(19): siRNA sense strand
gcaaaauccuacaaugaaa

SEQ ID NO: 1334826 - RNA, 19 nt, Homo sapiens
  misc_RNA (1)...(19): siRNA sense strand
aagccaaacuucaucacua

SEQ ID NO: 1334827 - RNA, 19 nt, Homo sapiens
  misc_RNA (1)...(19): siRNA sense strand
gacagcagcauggaucuua

SEQ ID NO: 1334828 - RNA, 19 nt, Homo sapiens
  misc_RNA (1)...(19): siRNA sense strand
gcuucuggauuucaucuuu

SEQ ID NO: 1334829 - RNA, 19 nt, Homo sapiens
  misc_RNA (1)...(19): siRNA sense strand
gagaguaaccggcaucauc

SEQ ID NO: 1334830 - RNA, 19 nt, Homo sapiens
  misc_RNA (1)...(19): siRNA sense strand
ggagauuuccggaucagaa

SEQ ID NO: 1334831 - RNA, 19 nt, Homo sapiens
  misc_RNA (1)...(19): siRNA sense strand
gaaagcuggaccacacuaa

SEQ ID NO: 1334832 - RNA, 19 nt, Homo sapiens
  misc_RNA (1)...(19): siRNA sense strand
caaacuucaucacuaccua

SEQ ID NO: 1334833 - RNA, 19 nt, Homo sapiens
  misc_RNA (1)...(19): siRNA sense strand
guccaucucugccauccua

SEQ ID NO: 1334834 - RNA, 19 nt, Homo sapiens
  misc_RNA (1)...(19): siRNA sense strand
ggacccaaauauccggauu

SEQ ID NO: 1334835 - RNA, 19 nt, Homo sapiens
  misc_RNA (1)...(19): siRNA sense strand
caccaacgcuucucuguac

SEQ ID NO: 1334836 - RNA, 19 nt, Homo sapiens
  misc_RNA (1)...(19): siRNA sense strand
uggauacucugcagcauga

SEQ ID NO: 1334837 - RNA, 19 nt, Homo sapiens
  misc_RNA (1)...(19): siRNA sense strand
ggaggagauuuccggauca

SEQ ID NO: 1334838 - RNA, 19 nt, Homo sapiens
  misc_RNA (1)...(19): siRNA sense strand
gaauacaaccguguucaau

SEQ ID NO: 1334839 - RNA, 19 nt, Homo sapiens
  misc_RNA (1)...(19): siRNA sense strand
gcaaauuacggacgucugu

SEQ ID NO: 1334840 - RNA, 19 nt, Homo sapiens
  misc_RNA (1)...(19): siRNA sense strand
ggacagccucucaucauuc

SEQ ID NO: 1334841 - RNA, 19 nt, Homo sapiens
  misc_RNA (1)...(19): siRNA sense strand
ucagugacguggccuacaa

SEQ ID NO: 1334842 - RNA, 19 nt, Homo sapiens
  misc_RNA (1)...(19): siRNA sense strand
gcucauguccuucauccuu

SEQ ID NO: 1334843 - RNA, 19 nt, Homo sapiens
  misc_RNA (1)...(19): siRNA sense strand
gauguucuguggaaucgau

SEQ ID NO: 1334844 - RNA, 19 nt, Homo sapiens
  misc_RNA (1)...(19): siRNA sense strand
ggagucagccagguggaua

SEQ ID NO: 1334845 - RNA, 19 nt, Homo sapiens
  misc_RNA (1)...(19): siRNA sense strand
cuuaucagcuucaucuuca

SEQ ID NO: 1334846 - RNA, 19 nt, Homo sapiens
  misc_RNA (1)...(19): siRNA sense strand
ggacuucaagccaaacuuc

SEQ ID NO: 1334847 - RNA, 19 nt, Homo sapiens
  misc_RNA (1)...(19): siRNA sense strand
gcuaccaucuggaccuguu

SEQ ID NO: 1334848 - RNA, 19 nt, Homo sapiens
  misc_RNA (1)...(19): siRNA sense strand
ggaaagcuggaccacacua

SEQ ID NO: 1334849 - RNA, 19 nt, Homo sapiens
  misc_RNA (1)...(19): siRNA sense strand
ggaauuccugcaaguuuau

SEQ ID NO: 1334850 - RNA, 19 nt, Homo sapiens
  misc_RNA (1)...(19): siRNA sense strand
ccacagaugccagcuuuau

SEQ ID NO: 1334851 - RNA, 19 nt, Homo sapiens
  misc_RNA (1)...(19): siRNA sense strand
guucuucgguggccugugu

SEQ ID NO: 1334852 - RNA, 19 nt, Homo sapiens
  misc_RNA (1)...(19): siRNA sense strand
ccacauugggcuuccagua

SEQ ID NO: 1334853 - RNA, 19 nt, Homo sapiens
  misc_RNA (1)...(19): siRNA sense strand
agaggaaguugcccugguu

SEQ ID NO: 1334854 - RNA, 19 nt, Homo sapiens
  misc_RNA (1)...(19): siRNA sense strand
guggauaaaguuugaagaa

SEQ ID NO: 1334855 - RNA, 19 nt, Homo sapiens
  misc_RNA (1)...(19): siRNA sense strand
gagcaaaauccuacaauga

SEQ ID NO: 1334856 - RNA, 19 nt, Homo sapiens
  misc_RNA (1)...(19): siRNA sense strand
gcccauccaccgcuccuua

SEQ ID NO: 1334857 - RNA, 19 nt, Homo sapiens
  misc_RNA (1)...(19): siRNA sense strand
gacaagaggaaaucugugu

SEQ ID NO: 1334858 - RNA, 19 nt, Homo sapiens
  misc_RNA (1)...(19): siRNA sense strand
gcuuugugcuccuuuaugg

SEQ ID NO: 1334859 - RNA, 19 nt, Homo sapiens
  misc_RNA (1)...(19): siRNA sense strand
gguggccugugucuggaua

SEQ ID NO: 1334860 - RNA, 19 nt, Homo sapiens
  misc_RNA (1)...(19): siRNA sense strand
ggagaaggcugggguagga

SEQ ID NO: 1334861 - RNA, 19 nt, Homo sapiens
  misc_RNA (1)...(19): siRNA sense strand
caaguacuacccuaucaau

SEQ ID NO: 1334862 - RNA, 19 nt, Homo sapiens
  misc_RNA (1)...(19): siRNA sense strand
gacagccucucaucauucu

SEQ ID NO: 1334863 - RNA, 19 nt, Homo sapiens
  misc_RNA (1)...(19): siRNA sense strand
caagaggaaaucuguguuc

SEQ ID NO: 1334864 - RNA, 19 nt, Homo sapiens
  misc_RNA (1)...(19): siRNA sense strand
ugaagaagauccccaagga

SEQ ID NO: 1334865 - RNA, 19 nt, Homo sapiens
  misc_RNA (1)...(19): siRNA sense strand
uugaugaauuucuggauga

SEQ ID NO: 1334866 - RNA, 19 nt, Homo sapiens
  misc_RNA (1)...(19): siRNA sense strand
guacccacuuacccucaaa

SEQ ID NO: 1334867 - RNA, 19 nt, Homo sapiens
  misc_RNA (1)...(19): siRNA sense strand
ggaguuccgccucuggauu

SEQ ID NO: 1334868 - RNA, 19 nt, Homo sapiens
  misc_RNA (1)...(19): siRNA sense strand
ggaugccaccgacaauuau

SEQ ID NO: 1334869 - RNA, 19 nt, Homo sapiens
  misc_RNA (1)...(19): siRNA sense strand
ccaugacccugacccugaa

SEQ ID NO: 1334870 - RNA, 19 nt, Homo sapiens
  misc_RNA (1)...(19): siRNA sense strand
gaucggugccuucaaguac

SEQ ID NO: 1334871 - RNA, 19 nt, Homo sapiens
  misc_RNA (1)...(19): siRNA sense strand
ucagccagguggauaaagu

SEQ ID NO: 1334872 - RNA, 19 nt, Homo sapiens
  misc_RNA (1)...(19): siRNA sense strand
ucacugccgucauugucaa

SEQ ID NO: 1334873 - RNA, 19 nt, Homo sapiens
  misc_RNA (1)...(19): siRNA sense strand
ggcccauccucaucuuuga

SEQ ID NO: 1334874 - RNA, 19 nt, Homo sapiens
  misc_RNA (1)...(19): siRNA sense strand
aaacacagaccagcggaaa

SEQ ID NO: 1334875 - RNA, 19 nt, Homo sapiens
  misc_RNA (1)...(19): siRNA sense strand
ggacaguggcuccuuacca

SEQ ID NO: 1334876 - RNA, 19 nt, Homo sapiens
  misc_RNA (1)...(19): siRNA sense strand
ucauugagaagcagauuga

SEQ ID NO: 1334877 - RNA, 19 nt, Homo sapiens
  misc_RNA (1)...(19): siRNA sense strand
cuuccuggcucccauccua

SEQ ID NO: 1334878 - RNA, 19 nt, Homo sapiens
  misc_RNA (1)...(19): siRNA sense strand
ugacgggaaucucugucuu

SEQ ID NO: 1334879 - RNA, 19 nt, Homo sapiens
  misc_RNA (1)...(19): siRNA sense strand
gaaggagaacaaacugaag

SEQ ID NO: 1334880 - RNA, 19 nt, Homo sapiens
  misc_RNA (1)...(19): siRNA sense strand
aguacuacccuaucaauau

SEQ ID NO: 1334881 - RNA, 19 nt, Homo sapiens
  misc_RNA (1)...(19): siRNA sense strand
gaguuccgccucuggauug

SEQ ID NO: 1334882 - RNA, 19 nt, Homo sapiens
  misc_RNA (1)...(19): siRNA sense strand
ccagaagggacaucuuuca

SEQ ID NO: 1334883 - RNA, 19 nt, Homo sapiens
  misc_RNA (1)...(19): siRNA sense strand
gaucgcaggaauugaugaa

SEQ ID NO: 1334884 - RNA, 19 nt, Homo sapiens
  misc_RNA (1)...(19): siRNA sense strand
acagaugccagcuuuauca

SEQ ID NO: 1334885 - RNA, 19 nt, Homo sapiens
  misc_RNA (1)...(19): siRNA sense strand
uugcaacccucaugguaga

SEQ ID NO: 1334886 - RNA, 19 nt, Homo sapiens
  misc_RNA (1)...(19): siRNA sense strand
uaaccggcaucaucgucuu

SEQ ID NO: 1334887 - RNA, 19 nt, Homo sapiens
  misc_RNA (1)...(19): siRNA sense strand
auacaaccguguucaaugc

SEQ ID NO: 1334888 - RNA, 19 nt, Homo sapiens
  misc_RNA (1)...(19): siRNA sense strand
aaauauaucacccgcuuca

SEQ ID NO: 1334889 - RNA, 19 nt, Homo sapiens
  misc_RNA (1)...(19): siRNA sense strand
gccucaagauggagacaga

SEQ ID NO: 1334890 - RNA, 19 nt, Homo sapiens
  misc_RNA (1)...(19): siRNA sense strand
cauugcaacccucauggua

SEQ ID NO: 1334891 - RNA, 19 nt, Homo sapiens
  misc_RNA (1)...(19): siRNA sense strand
gaucacugccgucauuguc

SEQ ID NO: 1334892 - RNA, 19 nt, Homo sapiens
  misc_RNA (1)...(19): siRNA sense strand
caccaacgcgaucaccuuu

SEQ ID NO: 1334893 - RNA, 19 nt, Homo sapiens
  misc_RNA (1)...(19): siRNA sense strand
ucaucuaccucggcuguau

SEQ ID NO: 1334894 - RNA, 19 nt, Homo sapiens
  misc_RNA (1)...(19): siRNA sense strand
uuuggacaguggcuccuua

SEQ ID NO: 1334895 - RNA, 19 nt, Homo sapiens
  misc_RNA (1)...(19): siRNA sense strand
agaaggagugucugagcua

SEQ ID NO: 1334896 - RNA, 19 nt, Homo sapiens
  misc_RNA (1)...(19): siRNA sense strand
acccaaauauccggauuga

SEQ ID NO: 1334897 - RNA, 19 nt, Homo sapiens
  misc_RNA (1)...(19): siRNA sense strand
cuucaucacuaccuacaag

SEQ ID NO: 1334898 - RNA, 19 nt, Homo sapiens
  misc_RNA (1)...(19): siRNA sense strand
cuaucaauauggacuucaa

SEQ ID NO: 1334899 - RNA, 19 nt, Homo sapiens
  misc_RNA (1)...(19): siRNA sense strand
ccucuucgacuucagcaaa

SEQ ID NO: 1334900 - RNA, 19 nt, Homo sapiens
  misc_RNA (1)...(19): siRNA sense strand
gggcccauccucaucuuug

SEQ ID NO: 1334901 - RNA, 19 nt, Homo sapiens
  misc_RNA (1)...(19): siRNA sense strand
gccugugucuggauaucaa

SEQ ID NO: 1334902 - RNA, 19 nt, Homo sapiens
  misc_RNA (1)...(19): siRNA sense strand
acaccaacgcuucucugua

SEQ ID NO: 1334903 - RNA, 19 nt, Homo sapiens
  misc_RNA (1)...(19): siRNA sense strand
gauccugggccucaucauc

SEQ ID NO: 1334904 - RNA, 19 nt, Homo sapiens
  misc_RNA (1)...(19): siRNA sense strand
ccacaucgacagccucaag

SEQ ID NO: 1334905 - RNA, 19 nt, Homo sapiens
  misc_RNA (1)...(19): siRNA sense strand
gaacuuaucuggacaggaa

SEQ ID NO: 1334906 - RNA, 19 nt, Homo sapiens
  misc_RNA (1)...(19): siRNA sense strand
ggacggugcugcuggauuu

SEQ ID NO: 1334907 - RNA, 19 nt, Homo sapiens
  misc_RNA (1)...(19): siRNA sense strand
gggaauuccugcaaguuua

SEQ ID NO: 1334908 - RNA, 19 nt, Homo sapiens
  misc_RNA (1)...(19): siRNA sense strand
ccacuuacccucaaagaaa

SEQ ID NO: 1334909 - RNA, 19 nt, Homo sapiens
  misc_RNA (1)...(19): siRNA sense strand
gcaauggccuggacuacau

SEQ ID NO: 1334910 - RNA, 19 nt, Homo sapiens
  misc_RNA (1)...(19): siRNA sense strand
guacuacccuaucaauaug

SEQ ID NO: 1334911 - RNA, 19 nt, Homo sapiens
  misc_RNA (1)...(19): siRNA sense strand
uaugauggcuuccacauuc

SEQ ID NO: 1334912 - RNA, 19 nt, Homo sapiens
  misc_RNA (1)...(19): siRNA sense strand
gggaugccaccgacaauua

SEQ ID NO: 1334913 - RNA, 19 nt, Homo sapiens
  misc_RNA (1)...(19): siRNA sense strand
ggccacagaugccagcuuu

SEQ ID NO: 1334914 - RNA, 19 nt, Homo sapiens
  misc_RNA (1)...(19): siRNA sense strand
ggaaggagaacaaacugaa

SEQ ID NO: 1334915 - RNA, 19 nt, Homo sapiens
  misc_RNA (1)...(19): siRNA sense strand
cagaaagaaugcccuccua

SEQ ID NO: 1334916 - RNA, 19 nt, Homo sapiens
  misc_RNA (1)...(19): siRNA sense strand
ccagcuuuaucaucaaaua

SEQ ID NO: 1334917 - RNA, 19 nt, Homo sapiens
  misc_RNA (1)...(19): siRNA sense strand
gagaccagauggaguggaa

SEQ ID NO: 1334918 - RNA, 19 nt, Homo sapiens
  misc_RNA (1)...(19): siRNA sense strand
ccagguggauaaaguuuga

SEQ ID NO: 1334919 - RNA, 19 nt, Homo sapiens
  misc_RNA (1)...(19): siRNA sense strand
gaaaguguccaaucagauc

SEQ ID NO: 1334920 - RNA, 19 nt, Homo sapiens
  misc_RNA (1)...(19): siRNA sense strand
gaugaucggugccuucaag

SEQ ID NO: 1334921 - RNA, 19 nt, Homo sapiens
  misc_RNA (1)...(19): siRNA sense strand
gggacagccucucaucauu

SEQ ID NO: 1334922 - RNA, 19 nt, Homo sapiens
  misc_RNA (1)...(19): siRNA sense strand
gcagaagcaugaaugacau

SEQ ID NO: 1334923 - RNA, 19 nt, Homo sapiens
  misc_RNA (1)...(19): siRNA sense strand
gaaagaaugcccuccuauc

SEQ ID NO: 1334924 - RNA, 19 nt, Homo sapiens
  misc_RNA (1)...(19): siRNA sense strand
gaccagaagggacaucuuu

SEQ ID NO: 1334925 - RNA, 19 nt, Homo sapiens
  misc_RNA (1)...(19): siRNA sense strand
gcccagagcagaagcauga

SEQ ID NO: 1334926 - RNA, 19 nt, Homo sapiens
  misc_RNA (1)...(19): siRNA sense strand
gcaaaauccuacaaugaaa

SEQ ID NO: 1334927 - RNA, 19 nt, Homo sapiens
  misc_RNA (1)...(19): siRNA sense strand
aagccaaacuucaucacua

SEQ ID NO: 1334928 - RNA, 19 nt, Homo sapiens
  misc_RNA (1)...(19): siRNA sense strand
gacagcagcauggaucuua

SEQ ID NO: 1334929 - RNA, 19 nt, Homo sapiens
  misc_RNA (1)...(19): siRNA sense strand
gcuucuggauuucaucuuu

SEQ ID NO: 1334930 - RNA, 19 nt, Homo sapiens
  misc_RNA (1)...(19): siRNA sense strand
gagaguaaccggcaucauc

SEQ ID NO: 1334931 - RNA, 19 nt, Homo sapiens
  misc_RNA (1)...(19): siRNA sense strand
guccaucucugccauccua

SEQ ID NO: 1334932 - RNA, 19 nt, Homo sapiens
  misc_RNA (1)...(19): siRNA sense strand
gaaagcuggaccacacuaa

SEQ ID NO: 1334933 - RNA, 19 nt, Homo sapiens
  misc_RNA (1)...(19): siRNA sense strand
caaacuucaucacuaccua

SEQ ID NO: 1334934 - RNA, 19 nt, Homo sapiens
  misc_RNA (1)...(19): siRNA sense strand
ggagauuuccggaucagaa

SEQ ID NO: 1334935 - RNA, 19 nt, Homo sapiens
  misc_RNA (1)...(19): siRNA sense strand
ggacccaaauauccggauu

SEQ ID NO: 1334936 - RNA, 19 nt, Homo sapiens
  misc_RNA (1)...(19): siRNA sense strand
caccaacgcuucucuguac

SEQ ID NO: 1334937 - RNA, 19 nt, Homo sapiens
  misc_RNA (1)...(19): siRNA sense strand
uggauacucugcagcauga

SEQ ID NO: 1334938 - RNA, 19 nt, Homo sapiens
  misc_RNA (1)...(19): siRNA sense strand
uuauaaagauucccaugga

SEQ ID NO: 1334939 - RNA, 19 nt, Homo sapiens
  misc_RNA (1)...(19): siRNA sense strand
ggaggagauuuccggauca

SEQ ID NO: 1334940 - RNA, 19 nt, Homo sapiens
  misc_RNA (1)...(19): siRNA sense strand
gaauacaaccguguucaau

SEQ ID NO: 1334941 - RNA, 19 nt, Homo sapiens
  misc_RNA (1)...(19): siRNA sense strand
gacaacauccucccagaga

SEQ ID NO: 1334942 - RNA, 19 nt, Homo sapiens
  misc_RNA (1)...(19): siRNA sense strand
gcaaauuacggacgucugu

SEQ ID NO: 1334943 - RNA, 19 nt, Homo sapiens
  misc_RNA (1)...(19): siRNA sense strand
acaagaagaggaagagaaa

SEQ ID NO: 1334944 - RNA, 19 nt, Homo sapiens
  misc_RNA (1)...(19): siRNA sense strand
gaccuggccuggauugaca

SEQ ID NO: 1334945 - RNA, 19 nt, Homo sapiens
  misc_RNA (1)...(19): siRNA sense strand
ggacagccucucaucauuc

SEQ ID NO: 1334946 - RNA, 19 nt, Homo sapiens
  misc_RNA (1)...(19): siRNA sense strand
ucagugacguggccuacaa

SEQ ID NO: 1334947 - RNA, 19 nt, Homo sapiens
  misc_RNA (1)...(19): siRNA sense strand
gcucauguccuucauccuu

SEQ ID NO: 1334948 - RNA, 19 nt, Homo sapiens
  misc_RNA (1)...(19): siRNA sense strand
gauguucuguggaaucgau

SEQ ID NO: 1334949 - RNA, 19 nt, Homo sapiens
  misc_RNA (1)...(19): siRNA sense strand
ggagucagccagguggaua

SEQ ID NO: 1334950 - RNA, 19 nt, Homo sapiens
  misc_RNA (1)...(19): siRNA sense strand
gacaagaagaggaagagaa

SEQ ID NO: 1334951 - RNA, 19 nt, Homo sapiens
  misc_RNA (1)...(19): siRNA sense strand
cuuaucagcuucaucuuca

SEQ ID NO: 1334952 - RNA, 19 nt, Homo sapiens
  misc_RNA (1)...(19): siRNA sense strand
ggacuucaagccaaacuuc

SEQ ID NO: 1334953 - RNA, 19 nt, Homo sapiens
  misc_RNA (1)...(19): siRNA sense strand
gcuaccaucuggaccuguu

SEQ ID NO: 1334954 - RNA, 19 nt, Homo sapiens
  misc_RNA (1)...(19): siRNA sense strand
ggaaagcuggaccacacua

SEQ ID NO: 1334955 - RNA, 19 nt, Homo sapiens
  misc_RNA (1)...(19): siRNA sense strand
ggaauuccugcaaguuuau

SEQ ID NO: 1334956 - RNA, 19 nt, Homo sapiens
  misc_RNA (1)...(19): siRNA sense strand
ccacagaugccagcuuuau

SEQ ID NO: 1334957 - RNA, 19 nt, Homo sapiens
  misc_RNA (1)...(19): siRNA sense strand
ccacauugggcuuccagua

SEQ ID NO: 1334958 - RNA, 19 nt, Homo sapiens
  misc_RNA (1)...(19): siRNA sense strand
ccuccucccucgguuauaa

SEQ ID NO: 1334959 - RNA, 19 nt, Homo sapiens
  misc_RNA (1)...(19): siRNA sense strand
agaggaaguugcccugguu

SEQ ID NO: 1334960 - RNA, 19 nt, Homo sapiens
  misc_RNA (1)...(19): siRNA sense strand
guucuucgguggccugugu

SEQ ID NO: 1334961 - RNA, 19 nt, Homo sapiens
  misc_RNA (1)...(19): siRNA sense strand
guggauaaaguuugaagaa

SEQ ID NO: 1334962 - RNA, 19 nt, Homo sapiens
  misc_RNA (1)...(19): siRNA sense strand
ggaaaguguccaaucagau

SEQ ID NO: 1334963 - RNA, 19 nt, Homo sapiens
  misc_RNA (1)...(19): siRNA sense strand
gagcaaaauccuacaauga

SEQ ID NO: 1334964 - RNA, 19 nt, Homo sapiens
  misc_RNA (1)...(19): siRNA sense strand
gcccauccaccgcuccuua

SEQ ID NO: 1334965 - RNA, 19 nt, Homo sapiens
  misc_RNA (1)...(19): siRNA sense strand
gacaagaggaaaucugugu

SEQ ID NO: 1334966 - RNA, 19 nt, Homo sapiens
  misc_RNA (1)...(19): siRNA sense strand
gcuuugugcuccuuuaugg

SEQ ID NO: 1334967 - RNA, 19 nt, Homo sapiens
  misc_RNA (1)...(19): siRNA sense strand
gguggccugugucuggaua

SEQ ID NO: 1334968 - RNA, 19 nt, Homo sapiens
  misc_RNA (1)...(19): siRNA sense strand
ggagaaggcugggguagga

SEQ ID NO: 1334969 - RNA, 19 nt, Homo sapiens
  misc_RNA (1)...(19): siRNA sense strand
caaguacuacccuaucaau

SEQ ID NO: 1334970 - RNA, 19 nt, Homo sapiens
  misc_RNA (1)...(19): siRNA sense strand
gacagccucucaucauucu

SEQ ID NO: 1334971 - RNA, 19 nt, Homo sapiens
  misc_RNA (1)...(19): siRNA sense strand
caagaggaaaucuguguuc

SEQ ID NO: 1334972 - RNA, 19 nt, Homo sapiens
  misc_RNA (1)...(19): siRNA sense strand
ugaagaagauccccaagga

SEQ ID NO: 1334973 - RNA, 19 nt, Homo sapiens
  misc_RNA (1)...(19): siRNA sense strand
guacccacuuacccucaaa

SEQ ID NO: 1334974 - RNA, 19 nt, Homo sapiens
  misc_RNA (1)...(19): siRNA sense strand
ggaguuccgccucuggauu

SEQ ID NO: 1334975 - RNA, 19 nt, Homo sapiens
  misc_RNA (1)...(19): siRNA sense strand
uugaugaauuucuggauga

SEQ ID NO: 1334976 - RNA, 19 nt, Homo sapiens
  misc_RNA (1)...(19): siRNA sense strand
ggaugccaccgacaauuau

SEQ ID NO: 1334977 - RNA, 19 nt, Homo sapiens
  misc_RNA (1)...(19): siRNA sense strand
agacagacaagaagaggaa

SEQ ID NO: 1334978 - RNA, 19 nt, Homo sapiens
  misc_RNA (1)...(19): siRNA sense strand
ccaugacccugacccugaa

SEQ ID NO: 1334979 - RNA, 19 nt, Homo sapiens
  misc_RNA (1)...(19): siRNA sense strand
gaucggugccuucaaguac

SEQ ID NO: 1334980 - RNA, 19 nt, Homo sapiens
  misc_RNA (1)...(19): siRNA sense strand
ucagccagguggauaaagu

SEQ ID NO: 1334981 - RNA, 19 nt, Homo sapiens
  misc_RNA (1)...(19): siRNA sense strand
ucacugccgucauugucaa

SEQ ID NO: 1334982 - RNA, 19 nt, Homo sapiens
  misc_RNA (1)...(19): siRNA sense strand
ggcccauccucaucuuuga

SEQ ID NO: 1334983 - RNA, 19 nt, Homo sapiens
  misc_RNA (1)...(19): siRNA sense strand
aaacacagaccagcggaaa

SEQ ID NO: 1334984 - RNA, 19 nt, Homo sapiens
  misc_RNA (1)...(19): siRNA sense strand
ggacaguggcuccuuacca

SEQ ID NO: 1334985 - RNA, 19 nt, Homo sapiens
  misc_RNA (1)...(19): siRNA sense strand
ucauugagaagcagauuga

SEQ ID NO: 1334986 - RNA, 19 nt, Homo sapiens
  misc_RNA (1)...(19): siRNA sense strand
cuuccuggcucccauccua

SEQ ID NO: 1334987 - RNA, 19 nt, Homo sapiens
  misc_RNA (1)...(19): siRNA sense strand
ugacgggaaucucugucuu

SEQ ID NO: 1334988 - RNA, 19 nt, Homo sapiens
  misc_RNA (1)...(19): siRNA sense strand
gaaggagaacaaacugaag

SEQ ID NO: 1334989 - RNA, 19 nt, Homo sapiens
  misc_RNA (1)...(19): siRNA sense strand
aguacuacccuaucaauau

SEQ ID NO: 1334990 - RNA, 19 nt, Homo sapiens
  misc_RNA (1)...(19): siRNA sense strand
gaguuccgccucuggauug

SEQ ID NO: 1334991 - RNA, 19 nt, Homo sapiens
  misc_RNA (1)...(19): siRNA sense strand
ccagaagggacaucuuuca

SEQ ID NO: 1334992 - RNA, 19 nt, Homo sapiens
  misc_RNA (1)...(19): siRNA sense strand
gaucgcaggaauugaugaa

SEQ ID NO: 1334993 - RNA, 19 nt, Homo sapiens
  misc_RNA (1)...(19): siRNA sense strand
acagaugccagcuuuauca

SEQ ID NO: 1334994 - RNA, 19 nt, Homo sapiens
  misc_RNA (1)...(19): siRNA sense strand
uugcaacccucaugguaga

SEQ ID NO: 1334995 - RNA, 19 nt, Homo sapiens
  misc_RNA (1)...(19): siRNA sense strand
acaacauccucccagagaa

SEQ ID NO: 1334996 - RNA, 19 nt, Homo sapiens
  misc_RNA (1)...(19): siRNA sense strand
uaaccggcaucaucgucuu

SEQ ID NO: 1334997 - RNA, 19 nt, Homo sapiens
  misc_RNA (1)...(19): siRNA sense strand
auacaaccguguucaaugc

SEQ ID NO: 1334998 - RNA, 19 nt, Homo sapiens
  misc_RNA (1)...(19): siRNA sense strand
aaauauaucacccgcuuca

SEQ ID NO: 1334999 - RNA, 19 nt, Homo sapiens
  misc_RNA (1)...(19): siRNA sense strand
gccucaagauggagacaga

SEQ ID NO: 1335000 - RNA, 19 nt, Homo sapiens
  misc_RNA (1)...(19): siRNA sense strand
cauugcaacccucauggua

SEQ ID NO: 1335001 - RNA, 19 nt, Homo sapiens
  misc_RNA (1)...(19): siRNA sense strand
caacauccucccagagaag

SEQ ID NO: 1335002 - RNA, 19 nt, Homo sapiens
  misc_RNA (1)...(19): siRNA sense strand
gaucacugccgucauuguc

SEQ ID NO: 1335003 - RNA, 19 nt, Homo sapiens
  misc_RNA (1)...(19): siRNA sense strand
caccaacgcgaucaccuuu

SEQ ID NO: 1335004 - RNA, 19 nt, Homo sapiens
  misc_RNA (1)...(19): siRNA sense strand
ucaucuaccucggcuguau

SEQ ID NO: 1335005 - RNA, 19 nt, Homo sapiens
  misc_RNA (1)...(19): siRNA sense strand
gaacuuaucuggacaggaa

SEQ ID NO: 1335006 - RNA, 19 nt, Homo sapiens
  misc_RNA (1)...(19): siRNA sense strand
ggacggugcugcuggauuu

SEQ ID NO: 1335007 - RNA, 19 nt, Homo sapiens
  misc_RNA (1)...(19): siRNA sense strand
gggaauuccugcaaguuua

SEQ ID NO: 1335008 - RNA, 19 nt, Homo sapiens
  misc_RNA (1)...(19): siRNA sense strand
ccacuuacccucaaagaaa

SEQ ID NO: 1335009 - RNA, 19 nt, Homo sapiens
  misc_RNA (1)...(19): siRNA sense strand
gcaauggccuggacuacau

SEQ ID NO: 1335010 - RNA, 19 nt, Homo sapiens
  misc_RNA (1)...(19): siRNA sense strand
guacuacccuaucaauaug

SEQ ID NO: 1335011 - RNA, 19 nt, Homo sapiens
  misc_RNA (1)...(19): siRNA sense strand
uaugauggcuuccacauuc

SEQ ID NO: 1335012 - RNA, 19 nt, Homo sapiens
  misc_RNA (1)...(19): siRNA sense strand
gggaugccaccgacaauua

SEQ ID NO: 1335013 - RNA, 19 nt, Homo sapiens
  misc_RNA (1)...(19): siRNA sense strand
ggccacagaugccagcuuu

SEQ ID NO: 1335014 - RNA, 19 nt, Homo sapiens
  misc_RNA (1)...(19): siRNA sense strand
ggaaggagaacaaacugaa

SEQ ID NO: 1335015 - RNA, 19 nt, Homo sapiens
  misc_RNA (1)...(19): siRNA sense strand
cagaaagaaugcccuccua

SEQ ID NO: 1335016 - RNA, 19 nt, Homo sapiens
  misc_RNA (1)...(19): siRNA sense strand
ccagcuuuaucaucaaaua

SEQ ID NO: 1335017 - RNA, 19 nt, Homo sapiens
  misc_RNA (1)...(19): siRNA sense strand
gagaccagauggaguggaa

SEQ ID NO: 1335018 - RNA, 19 nt, Homo sapiens
  misc_RNA (1)...(19): siRNA sense strand
ccagguggauaaaguuuga

SEQ ID NO: 1335019 - RNA, 19 nt, Homo sapiens
  misc_RNA (1)...(19): siRNA sense strand
gaaaguguccaaucagauc

SEQ ID NO: 1335020 - RNA, 19 nt, Homo sapiens
  misc_RNA (1)...(19): siRNA sense strand
gaugaucggugccuucaag

SEQ ID NO: 1335021 - RNA, 19 nt, Homo sapiens
  misc_RNA (1)...(19): siRNA sense strand
gggacagccucucaucauu

SEQ ID NO: 1335022 - RNA, 19 nt, Homo sapiens
  misc_RNA (1)...(19): siRNA sense strand
gcagaagcaugaaugacau

SEQ ID NO: 1335023 - RNA, 19 nt, Homo sapiens
  misc_RNA (1)...(19): siRNA sense strand
gaaagaaugcccuccuauc

SEQ ID NO: 1335024 - RNA, 19 nt, Homo sapiens
  misc_RNA (1)...(19): siRNA sense strand
gaccagaagggacaucuuu

SEQ ID NO: 1335025 - RNA, 19 nt, Homo sapiens
  misc_RNA (1)...(19): siRNA sense strand
gcccagagcagaagcauga

SEQ ID NO: 1335026 - RNA, 19 nt, Homo sapiens
  misc_RNA (1)...(19): siRNA sense strand
gcaaaauccuacaaugaaa

SEQ ID NO: 1335027 - RNA, 19 nt, Homo sapiens
  misc_RNA (1)...(19): siRNA sense strand
aagccaaacuucaucacua

SEQ ID NO: 1335028 - RNA, 19 nt, Homo sapiens
  misc_RNA (1)...(19): siRNA sense strand
gacagcagcauggaucuua

SEQ ID NO: 1335029 - RNA, 19 nt, Homo sapiens
  misc_RNA (1)...(19): siRNA sense strand
gcuucuggauuucaucuuu

SEQ ID NO: 1335030 - RNA, 19 nt, Homo sapiens
  misc_RNA (1)...(19): siRNA sense strand
gagaguaaccggcaucauc

SEQ ID NO: 1335031 - RNA, 19 nt, Homo sapiens
  misc_RNA (1)...(19): siRNA sense strand
guccaucucugccauccua

SEQ ID NO: 1335032 - RNA, 19 nt, Homo sapiens
  misc_RNA (1)...(19): siRNA sense strand
gaaagcuggaccacacuaa

SEQ ID NO: 1335033 - RNA, 19 nt, Homo sapiens
  misc_RNA (1)...(19): siRNA sense strand
caaacuucaucacuaccua

SEQ ID NO: 1335034 - RNA, 19 nt, Homo sapiens
  misc_RNA (1)...(19): siRNA sense strand
ggagauuuccggaucagaa

SEQ ID NO: 1335035 - RNA, 19 nt, Homo sapiens
  misc_RNA (1)...(19): siRNA sense strand
ggacccaaauauccggauu

SEQ ID NO: 1335036 - RNA, 19 nt, Homo sapiens
  misc_RNA (1)...(19): siRNA sense strand
caccaacgcuucucuguac

SEQ ID NO: 1335037 - RNA, 19 nt, Homo sapiens
  misc_RNA (1)...(19): siRNA sense strand
uggauacucugcagcauga

SEQ ID NO: 1335038 - RNA, 19 nt, Homo sapiens
  misc_RNA (1)...(19): siRNA sense strand
uuauaaagauucccaugga

SEQ ID NO: 1335039 - RNA, 19 nt, Homo sapiens
  misc_RNA (1)...(19): siRNA sense strand
ggaggagauuuccggauca

SEQ ID NO: 1335040 - RNA, 19 nt, Homo sapiens
  misc_RNA (1)...(19): siRNA sense strand
gaauacaaccguguucaau

SEQ ID NO: 1335041 - RNA, 19 nt, Homo sapiens
  misc_RNA (1)...(19): siRNA sense strand
gacaacauccucccagaga

SEQ ID NO: 1335042 - RNA, 19 nt, Homo sapiens
  misc_RNA (1)...(19): siRNA sense strand
gcaaauuacggacgucugu

SEQ ID NO: 1335043 - RNA, 19 nt, Homo sapiens
  misc_RNA (1)...(19): siRNA sense strand
acaagaagaggaagagaaa

SEQ ID NO: 1335044 - RNA, 19 nt, Homo sapiens
  misc_RNA (1)...(19): siRNA sense strand
gaccuggccuggauugaca

SEQ ID NO: 1335045 - RNA, 19 nt, Homo sapiens
  misc_RNA (1)...(19): siRNA sense strand
ggacagccucucaucauuc

SEQ ID NO: 1335046 - RNA, 19 nt, Homo sapiens
  misc_RNA (1)...(19): siRNA sense strand
ucagugacguggccuacaa

SEQ ID NO: 1335047 - RNA, 19 nt, Homo sapiens
  misc_RNA (1)...(19): siRNA sense strand
gcucauguccuucauccuu

SEQ ID NO: 1335048 - RNA, 19 nt, Homo sapiens
  misc_RNA (1)...(19): siRNA sense strand
gauguucuguggaaucgau

SEQ ID NO: 1335049 - RNA, 19 nt, Homo sapiens
  misc_RNA (1)...(19): siRNA sense strand
ggagucagccagguggaua

SEQ ID NO: 1335050 - RNA, 19 nt, Homo sapiens
  misc_RNA (1)...(19): siRNA sense strand
gacaagaagaggaagagaa

SEQ ID NO: 1335051 - RNA, 19 nt, Homo sapiens
  misc_RNA (1)...(19): siRNA sense strand
cuuaucagcuucaucuuca

SEQ ID NO: 1335052 - RNA, 19 nt, Homo sapiens
  misc_RNA (1)...(19): siRNA sense strand
ggacuucaagccaaacuuc

SEQ ID NO: 1335053 - RNA, 19 nt, Homo sapiens
  misc_RNA (1)...(19): siRNA sense strand
gcuaccaucuggaccuguu

SEQ ID NO: 1335054 - RNA, 19 nt, Homo sapiens
  misc_RNA (1)...(19): siRNA sense strand
ggaaagcuggaccacacua

SEQ ID NO: 1335055 - RNA, 19 nt, Homo sapiens
  misc_RNA (1)...(19): siRNA sense strand
ggaauuccugcaaguuuau

SEQ ID NO: 1335056 - RNA, 19 nt, Homo sapiens
  misc_RNA (1)...(19): siRNA sense strand
ccacagaugccagcuuuau

SEQ ID NO: 1335057 - RNA, 19 nt, Homo sapiens
  misc_RNA (1)...(19): siRNA sense strand
ccacauugggcuuccagua

SEQ ID NO: 1335058 - RNA, 19 nt, Homo sapiens
  misc_RNA (1)...(19): siRNA sense strand
ccuccucccucgguuauaa

SEQ ID NO: 1335059 - RNA, 19 nt, Homo sapiens
  misc_RNA (1)...(19): siRNA sense strand
agaggaaguugcccugguu

SEQ ID NO: 1335060 - RNA, 19 nt, Homo sapiens
  misc_RNA (1)...(19): siRNA sense strand
guucuucgguggccugugu

SEQ ID NO: 1335061 - RNA, 19 nt, Homo sapiens
  misc_RNA (1)...(19): siRNA sense strand
guggauaaaguuugaagaa

SEQ ID NO: 1335062 - RNA, 19 nt, Homo sapiens
  misc_RNA (1)...(19): siRNA sense strand
ggaaaguguccaaucagau

SEQ ID NO: 1335063 - RNA, 19 nt, Homo sapiens
  misc_RNA (1)...(19): siRNA sense strand
gagcaaaauccuacaauga

SEQ ID NO: 1335064 - RNA, 19 nt, Homo sapiens
  misc_RNA (1)...(19): siRNA sense strand
gcccauccaccgcuccuua

SEQ ID NO: 1335065 - RNA, 19 nt, Homo sapiens
  misc_RNA (1)...(19): siRNA sense strand
gacaagaggaaaucugugu

SEQ ID NO: 1335066 - RNA, 19 nt, Homo sapiens
  misc_RNA (1)...(19): siRNA sense strand
gcuuugugcuccuuuaugg

SEQ ID NO: 1335067 - RNA, 19 nt, Homo sapiens
  misc_RNA (1)...(19): siRNA sense strand
gguggccugugucuggaua

SEQ ID NO: 1335068 - RNA, 19 nt, Homo sapiens
  misc_RNA (1)...(19): siRNA sense strand
ggagaaggcugggguagga

SEQ ID NO: 1335069 - RNA, 19 nt, Homo sapiens
  misc_RNA (1)...(19): siRNA sense strand
caaguacuacccuaucaau

SEQ ID NO: 1335070 - RNA, 19 nt, Homo sapiens
  misc_RNA (1)...(19): siRNA sense strand
gacagccucucaucauucu

SEQ ID NO: 1335071 - RNA, 19 nt, Homo sapiens
  misc_RNA (1)...(19): siRNA sense strand
caagaggaaaucuguguuc

SEQ ID NO: 1335072 - RNA, 19 nt, Homo sapiens
  misc_RNA (1)...(19): siRNA sense strand
ugaagaagauccccaagga

SEQ ID NO: 1335073 - RNA, 19 nt, Homo sapiens
  misc_RNA (1)...(19): siRNA sense strand
guacccacuuacccucaaa

SEQ ID NO: 1335074 - RNA, 19 nt, Homo sapiens
  misc_RNA (1)...(19): siRNA sense strand
ggaguuccgccucuggauu

SEQ ID NO: 1335075 - RNA, 19 nt, Homo sapiens
  misc_RNA (1)...(19): siRNA sense strand
uugaugaauuucuggauga

SEQ ID NO: 1335076 - RNA, 19 nt, Homo sapiens
  misc_RNA (1)...(19): siRNA sense strand
ggaugccaccgacaauuau

SEQ ID NO: 1335077 - RNA, 19 nt, Homo sapiens
  misc_RNA (1)...(19): siRNA sense strand
agacagacaagaagaggaa

SEQ ID NO: 1335078 - RNA, 19 nt, Homo sapiens
  misc_RNA (1)...(19): siRNA sense strand
ccaugacccugacccugaa

SEQ ID NO: 1335079 - RNA, 19 nt, Homo sapiens
  misc_RNA (1)...(19): siRNA sense strand
gaucggugccuucaaguac

SEQ ID NO: 1335080 - RNA, 19 nt, Homo sapiens
  misc_RNA (1)...(19): siRNA sense strand
ucagccagguggauaaagu

SEQ ID NO: 1335081 - RNA, 19 nt, Homo sapiens
  misc_RNA (1)...(19): siRNA sense strand
ucacugccgucauugucaa

SEQ ID NO: 1335082 - RNA, 19 nt, Homo sapiens
  misc_RNA (1)...(19): siRNA sense strand
ggcccauccucaucuuuga

SEQ ID NO: 1335083 - RNA, 19 nt, Homo sapiens
  misc_RNA (1)...(19): siRNA sense strand
aaacacagaccagcggaaa

SEQ ID NO: 1335084 - RNA, 19 nt, Homo sapiens
  misc_RNA (1)...(19): siRNA sense strand
ggacaguggcuccuuacca

SEQ ID NO: 1335085 - RNA, 19 nt, Homo sapiens
  misc_RNA (1)...(19): siRNA sense strand
ucauugagaagcagauuga

SEQ ID NO: 1335086 - RNA, 19 nt, Homo sapiens
  misc_RNA (1)...(19): siRNA sense strand
cuuccuggcucccauccua

SEQ ID NO: 1335087 - RNA, 19 nt, Homo sapiens
  misc_RNA (1)...(19): siRNA sense strand
ugacgggaaucucugucuu

SEQ ID NO: 1335088 - RNA, 19 nt, Homo sapiens
  misc_RNA (1)...(19): siRNA sense strand
gaaggagaacaaacugaag

SEQ ID NO: 1335089 - RNA, 19 nt, Homo sapiens
  misc_RNA (1)...(19): siRNA sense strand
aguacuacccuaucaauau

SEQ ID NO: 1335090 - RNA, 19 nt, Homo sapiens
  misc_RNA (1)...(19): siRNA sense strand
gaguuccgccucuggauug

SEQ ID NO: 1335091 - RNA, 19 nt, Homo sapiens
  misc_RNA (1)...(19): siRNA sense strand
ccagaagggacaucuuuca

SEQ ID NO: 1335092 - RNA, 19 nt, Homo sapiens
  misc_RNA (1)...(19): siRNA sense strand
gaucgcaggaauugaugaa

SEQ ID NO: 1335093 - RNA, 19 nt, Homo sapiens
  misc_RNA (1)...(19): siRNA sense strand
acagaugccagcuuuauca

SEQ ID NO: 1335094 - RNA, 19 nt, Homo sapiens
  misc_RNA (1)...(19): siRNA sense strand
uugcaacccucaugguaga

SEQ ID NO: 1335095 - RNA, 19 nt, Homo sapiens
  misc_RNA (1)...(19): siRNA sense strand
acaacauccucccagagaa

SEQ ID NO: 1335096 - RNA, 19 nt, Homo sapiens
  misc_RNA (1)...(19): siRNA sense strand
uaaccggcaucaucgucuu

SEQ ID NO: 1335097 - RNA, 19 nt, Homo sapiens
  misc_RNA (1)...(19): siRNA sense strand
auacaaccguguucaaugc

SEQ ID NO: 1335098 - RNA, 19 nt, Homo sapiens
  misc_RNA (1)...(19): siRNA sense strand
aaauauaucacccgcuuca

SEQ ID NO: 1335099 - RNA, 19 nt, Homo sapiens
  misc_RNA (1)...(19): siRNA sense strand
gccucaagauggagacaga

SEQ ID NO: 1335100 - RNA, 19 nt, Homo sapiens
  misc_RNA (1)...(19): siRNA sense strand
cauugcaacccucauggua

SEQ ID NO: 1335101 - RNA, 19 nt, Homo sapiens
  misc_RNA (1)...(19): siRNA sense strand
caacauccucccagagaag

SEQ ID NO: 1335102 - RNA, 19 nt, Homo sapiens
  misc_RNA (1)...(19): siRNA sense strand
gaucacugccgucauuguc

SEQ ID NO: 1335103 - RNA, 19 nt, Homo sapiens
  misc_RNA (1)...(19): siRNA sense strand
caccaacgcgaucaccuuu

SEQ ID NO: 1335104 - RNA, 19 nt, Homo sapiens
  misc_RNA (1)...(19): siRNA sense strand
ucaucuaccucggcuguau

SEQ ID NO: 1335105 - RNA, 19 nt, Homo sapiens
  misc_RNA (1)...(19): siRNA sense strand
gaacagagcuaaguaugag

SEQ ID NO: 1335106 - RNA, 19 nt, Homo sapiens
  misc_RNA (1)...(19): siRNA sense strand
ggaauucuccaaucauaua

SEQ ID NO: 1335107 - RNA, 19 nt, Homo sapiens
  misc_RNA (1)...(19): siRNA sense strand
caacaacuggcaaagaaua

SEQ ID NO: 1335108 - RNA, 19 nt, Homo sapiens
  misc_RNA (1)...(19): siRNA sense strand
acaaugcucuucuugguuu

SEQ ID NO: 1335109 - RNA, 19 nt, Homo sapiens
  misc_RNA (1)...(19): siRNA sense strand
uggaaaggcucagaguuua

SEQ ID NO: 1335110 - RNA, 19 nt, Homo sapiens
  misc_RNA (1)...(19): siRNA sense strand
ccaagccagugauauuuaa

SEQ ID NO: 1335111 - RNA, 19 nt, Homo sapiens
  misc_RNA (1)...(19): siRNA sense strand
ggaagaagagggagaagga

SEQ ID NO: 1335112 - RNA, 19 nt, Homo sapiens
  misc_RNA (1)...(19): siRNA sense strand
aaggagggcuggaaacaaa

SEQ ID NO: 1335113 - RNA, 19 nt, Homo sapiens
  misc_RNA (1)...(19): siRNA sense strand
ggaacagagcuaaguauga

SEQ ID NO: 1335114 - RNA, 19 nt, Homo sapiens
  misc_RNA (1)...(19): siRNA sense strand
ucacggaauucuccaauca

SEQ ID NO: 1335115 - RNA, 19 nt, Homo sapiens
  misc_RNA (1)...(19): siRNA sense strand
acaagggacucuaaccaaa

SEQ ID NO: 1335116 - RNA, 19 nt, Homo sapiens
  misc_RNA (1)...(19): siRNA sense strand
ccacaaugcucuucuuggu

SEQ ID NO: 1335117 - RNA, 19 nt, Homo sapiens
  misc_RNA (1)...(19): siRNA sense strand
gaaaggcuucuguuacuuc

SEQ ID NO: 1335118 - RNA, 19 nt, Homo sapiens
  misc_RNA (1)...(19): siRNA sense strand
ccaagaagcagaaacacuu

SEQ ID NO: 1335119 - RNA, 19 nt, Homo sapiens
  misc_RNA (1)...(19): siRNA sense strand
gaagacgacacgcuuugaa

SEQ ID NO: 1335120 - RNA, 19 nt, Homo sapiens
  misc_RNA (1)...(19): siRNA sense strand
gaaaggcucagaguuuaga

SEQ ID NO: 1335121 - RNA, 19 nt, Homo sapiens
  misc_RNA (1)...(19): siRNA sense strand
ggcaaagaauaaccuguug

SEQ ID NO: 1335122 - RNA, 19 nt, Homo sapiens
  misc_RNA (1)...(19): siRNA sense strand
ggacaaugaggaagaggaa

SEQ ID NO: 1335123 - RNA, 19 nt, Homo sapiens
  misc_RNA (1)...(19): siRNA sense strand
gccaagccagugauauuua

SEQ ID NO: 1335124 - RNA, 19 nt, Homo sapiens
  misc_RNA (1)...(19): siRNA sense strand
ggagaaggagggcuggaaa

SEQ ID NO: 1335125 - RNA, 19 nt, Homo sapiens
  misc_RNA (1)...(19): siRNA sense strand
ggaugucccugcgggcuuu

SEQ ID NO: 1335126 - RNA, 19 nt, Homo sapiens
  misc_RNA (1)...(19): siRNA sense strand
ccaacgagcccauggaugu

SEQ ID NO: 1335127 - RNA, 19 nt, Homo sapiens
  misc_RNA (1)...(19): siRNA sense strand
acggaauucuccaaucaua

SEQ ID NO: 1335128 - RNA, 19 nt, Homo sapiens
  misc_RNA (1)...(19): siRNA sense strand
uuagguaucuugucaaacu

SEQ ID NO: 1335129 - RNA, 19 nt, Homo sapiens
  misc_RNA (1)...(19): siRNA sense strand
gaccaucggcuuuagguau

SEQ ID NO: 1335130 - RNA, 19 nt, Homo sapiens
  misc_RNA (1)...(19): siRNA sense strand
gcaauggguccggcuguuu

SEQ ID NO: 1335131 - RNA, 19 nt, Homo sapiens
  misc_RNA (1)...(19): siRNA sense strand
gaaggagggcuggaaacaa

SEQ ID NO: 1335132 - RNA, 19 nt, Homo sapiens
  misc_RNA (1)...(19): siRNA sense strand
gccaguacuuguuccaguu

SEQ ID NO: 1335133 - RNA, 19 nt, Homo sapiens
  misc_RNA (1)...(19): siRNA sense strand
guagccgaguggacaauga

SEQ ID NO: 1335134 - RNA, 19 nt, Homo sapiens
  misc_RNA (1)...(19): siRNA sense strand
gcagcuugccgcucuagaa

SEQ ID NO: 1335135 - RNA, 19 nt, Homo sapiens
  misc_RNA (1)...(19): siRNA sense strand
gcacaagggacucuaacca

SEQ ID NO: 1335136 - RNA, 19 nt, Homo sapiens
  misc_RNA (1)...(19): siRNA sense strand
ggccaagccagugauauuu

SEQ ID NO: 1335137 - RNA, 19 nt, Homo sapiens
  misc_RNA (1)...(19): siRNA sense strand
ccacucaacccaagaagca

SEQ ID NO: 1335138 - RNA, 19 nt, Homo sapiens
  misc_RNA (1)...(19): siRNA sense strand
ggaaaggcucagaguuuag

SEQ ID NO: 1335139 - RNA, 19 nt, Homo sapiens
  misc_RNA (1)...(19): siRNA sense strand
uguguuggcuguggaaaga

SEQ ID NO: 1335140 - RNA, 19 nt, Homo sapiens
  misc_RNA (1)...(19): siRNA sense strand
gggaacagagcuaaguaug

SEQ ID NO: 1335141 - RNA, 19 nt, Homo sapiens
  misc_RNA (1)...(19): siRNA sense strand
aaaggguggucuccagaau

SEQ ID NO: 1335142 - RNA, 19 nt, Homo sapiens
  misc_RNA (1)...(19): siRNA sense strand
ggcuuuagguaucuuguca

SEQ ID NO: 1335143 - RNA, 19 nt, Homo sapiens
  misc_RNA (1)...(19): siRNA sense strand
uuggaaaggcucagaguuu

SEQ ID NO: 1335144 - RNA, 19 nt, Homo sapiens
  misc_RNA (1)...(19): siRNA sense strand
ucuguuacuucacggaauu

SEQ ID NO: 1335145 - RNA, 19 nt, Homo sapiens
  misc_RNA (1)...(19): siRNA sense strand
caaaggguggucuccagaa

SEQ ID NO: 1335146 - RNA, 19 nt, Homo sapiens
  misc_RNA (1)...(19): siRNA sense strand
ccaagguggugggaacaga

SEQ ID NO: 1335147 - RNA, 19 nt, Homo sapiens
  misc_RNA (1)...(19): siRNA sense strand
cuuuagguaucuugucaaa

SEQ ID NO: 1335148 - RNA, 19 nt, Homo sapiens
  misc_RNA (1)...(19): siRNA sense strand
caaggccaagccagugaua

SEQ ID NO: 1335149 - RNA, 19 nt, Homo sapiens
  misc_RNA (1)...(19): siRNA sense strand
gaccuuuaaucuguuggaa

SEQ ID NO: 1335150 - RNA, 19 nt, Homo sapiens
  misc_RNA (1)...(19): siRNA sense strand
gcagcagcuugccgcucua

SEQ ID NO: 1335151 - RNA, 19 nt, Homo sapiens
  misc_RNA (1)...(19): siRNA sense strand
gcugaagacgacacgcuuu

SEQ ID NO: 1335152 - RNA, 19 nt, Homo sapiens
  misc_RNA (1)...(19): siRNA sense strand
aaaggcuucuguuacuuca

SEQ ID NO: 1335153 - RNA, 19 nt, Homo sapiens
  misc_RNA (1)...(19): siRNA sense strand
ggagggcuggaaacaaaug

SEQ ID NO: 1335154 - RNA, 19 nt, Homo sapiens
  misc_RNA (1)...(19): siRNA sense strand
ccugacaacuugcugaaaa

SEQ ID NO: 1335155 - RNA, 19 nt, Homo sapiens
  misc_RNA (1)...(19): siRNA sense strand
gcuugccgcucuagaaggu

SEQ ID NO: 1335156 - RNA, 19 nt, Homo sapiens
  misc_RNA (1)...(19): siRNA sense strand
uggcaaagaauaaccuguu

SEQ ID NO: 1335157 - RNA, 19 nt, Homo sapiens
  misc_RNA (1)...(19): siRNA sense strand
ccugaaggaugcuguacca

SEQ ID NO: 1335158 - RNA, 19 nt, Homo sapiens
  misc_RNA (1)...(19): siRNA sense strand
cacaagggacucuaaccaa

SEQ ID NO: 1335159 - RNA, 19 nt, Homo sapiens
  misc_RNA (1)...(19): siRNA sense strand
acaaugaggaagaggaaga

SEQ ID NO: 1335160 - RNA, 19 nt, Homo sapiens
  misc_RNA (1)...(19): siRNA sense strand
gcaaagauuccccgaagug

SEQ ID NO: 1335161 - RNA, 19 nt, Homo sapiens
  misc_RNA (1)...(19): siRNA sense strand
agacgacacgcuuugaaga

SEQ ID NO: 1335162 - RNA, 19 nt, Homo sapiens
  misc_RNA (1)...(19): siRNA sense strand
caagggacucuaaccaaag

SEQ ID NO: 1335163 - RNA, 19 nt, Homo sapiens
  misc_RNA (1)...(19): siRNA sense strand
ggugugcgccguugacaag

SEQ ID NO: 1335164 - RNA, 19 nt, Homo sapiens
  misc_RNA (1)...(19): siRNA sense strand
gaagcagaaacacuugaag

SEQ ID NO: 1335165 - RNA, 19 nt, Homo sapiens
  misc_RNA (1)...(19): siRNA sense strand
ucacuaaacgcagcaaugg

SEQ ID NO: 1335166 - RNA, 19 nt, Homo sapiens
  misc_RNA (1)...(19): siRNA sense strand
gaguggacaaugaggaaga

SEQ ID NO: 1335167 - RNA, 19 nt, Homo sapiens
  misc_RNA (1)...(19): siRNA sense strand
gaugacaauggccacaaug

SEQ ID NO: 1335168 - RNA, 19 nt, Homo sapiens
  misc_RNA (1)...(19): siRNA sense strand
guucuugccagaugacaau

SEQ ID NO: 1335169 - RNA, 19 nt, Homo sapiens
  misc_RNA (1)...(19): siRNA sense strand
caagccagugauauuuaaa

SEQ ID NO: 1335170 - RNA, 19 nt, Homo sapiens
  misc_RNA (1)...(19): siRNA sense strand
gugggaacagagcuaagua

SEQ ID NO: 1335171 - RNA, 19 nt, Homo sapiens
  misc_RNA (1)...(19): siRNA sense strand
agaugacaauggccacaau

SEQ ID NO: 1335172 - RNA, 19 nt, Homo sapiens
  misc_RNA (1)...(19): siRNA sense strand
uguuggcuguggaaagaaa

SEQ ID NO: 1335173 - RNA, 19 nt, Homo sapiens
  misc_RNA (1)...(19): siRNA sense strand
caaugaggaagaggaagaa

SEQ ID NO: 1335174 - RNA, 19 nt, Homo sapiens
  misc_RNA (1)...(19): siRNA sense strand
ugaggaagaggaagaagag

SEQ ID NO: 1335175 - RNA, 19 nt, Homo sapiens
  misc_RNA (1)...(19): siRNA sense strand
gcaggaccagcuucugauc

SEQ ID NO: 1335176 - RNA, 19 nt, Homo sapiens
  misc_RNA (1)...(19): siRNA sense strand
agagguucuugccagauga

SEQ ID NO: 1335177 - RNA, 19 nt, Homo sapiens
  misc_RNA (1)...(19): siRNA sense strand
gggagaaggagggcuggaa

SEQ ID NO: 1335178 - RNA, 19 nt, Homo sapiens
  misc_RNA (1)...(19): siRNA sense strand
gguggccucuggagaacca

SEQ ID NO: 1335179 - RNA, 19 nt, Homo sapiens
  misc_RNA (1)...(19): siRNA sense strand
uaugagagcgcaggcaugu

SEQ ID NO: 1335180 - RNA, 19 nt, Homo sapiens
  misc_RNA (1)...(19): siRNA sense strand
ugaagacgacacgcuuuga

SEQ ID NO: 1335181 - RNA, 19 nt, Homo sapiens
  misc_RNA (1)...(19): siRNA sense strand
aggccaagccagugauauu

SEQ ID NO: 1335182 - RNA, 19 nt, Homo sapiens
  misc_RNA (1)...(19): siRNA sense strand
agaagcagaaacacuugaa

SEQ ID NO: 1335183 - RNA, 19 nt, Homo sapiens
  misc_RNA (1)...(19): siRNA sense strand
gcaaggccaagccagugau

SEQ ID NO: 1335184 - RNA, 19 nt, Homo sapiens
  misc_RNA (1)...(19): siRNA sense strand
gucuguuccugacaacuug

SEQ ID NO: 1335185 - RNA, 19 nt, Homo sapiens
  misc_RNA (1)...(19): siRNA sense strand
gaacagagcuaaguaugag

SEQ ID NO: 1335186 - RNA, 19 nt, Homo sapiens
  misc_RNA (1)...(19): siRNA sense strand
ggaauucuccaaucauaua

SEQ ID NO: 1335187 - RNA, 19 nt, Homo sapiens
  misc_RNA (1)...(19): siRNA sense strand
caacaacuggcaaagaaua

SEQ ID NO: 1335188 - RNA, 19 nt, Homo sapiens
  misc_RNA (1)...(19): siRNA sense strand
acaaugcucuucuugguuu

SEQ ID NO: 1335189 - RNA, 19 nt, Homo sapiens
  misc_RNA (1)...(19): siRNA sense strand
uggaaaggcucagaguuua

SEQ ID NO: 1335190 - RNA, 19 nt, Homo sapiens
  misc_RNA (1)...(19): siRNA sense strand
ccaagccagugauauuuaa

SEQ ID NO: 1335191 - RNA, 19 nt, Homo sapiens
  misc_RNA (1)...(19): siRNA sense strand
ggaagaagagggagaagga

SEQ ID NO: 1335192 - RNA, 19 nt, Homo sapiens
  misc_RNA (1)...(19): siRNA sense strand
aaggagggcuggaaacaaa

SEQ ID NO: 1335193 - RNA, 19 nt, Homo sapiens
  misc_RNA (1)...(19): siRNA sense strand
ggaacagagcuaaguauga

SEQ ID NO: 1335194 - RNA, 19 nt, Homo sapiens
  misc_RNA (1)...(19): siRNA sense strand
ucacggaauucuccaauca

SEQ ID NO: 1335195 - RNA, 19 nt, Homo sapiens
  misc_RNA (1)...(19): siRNA sense strand
acaagggacucuaaccaaa

SEQ ID NO: 1335196 - RNA, 19 nt, Homo sapiens
  misc_RNA (1)...(19): siRNA sense strand
ccacaaugcucuucuuggu

SEQ ID NO: 1335197 - RNA, 19 nt, Homo sapiens
  misc_RNA (1)...(19): siRNA sense strand
gaaaggcuucuguuacuuc

SEQ ID NO: 1335198 - RNA, 19 nt, Homo sapiens
  misc_RNA (1)...(19): siRNA sense strand
ccaagaagcagaaacacuu

SEQ ID NO: 1335199 - RNA, 19 nt, Homo sapiens
  misc_RNA (1)...(19): siRNA sense strand
gaagacgacacgcuuugaa

SEQ ID NO: 1335200 - RNA, 19 nt, Homo sapiens
  misc_RNA (1)...(19): siRNA sense strand
gaaaggcucagaguuuaga

SEQ ID NO: 1335201 - RNA, 19 nt, Homo sapiens
  misc_RNA (1)...(19): siRNA sense strand
ggcaaagaauaaccuguug

SEQ ID NO: 1335202 - RNA, 19 nt, Homo sapiens
  misc_RNA (1)...(19): siRNA sense strand
ggacaaugaggaagaggaa

SEQ ID NO: 1335203 - RNA, 19 nt, Homo sapiens
  misc_RNA (1)...(19): siRNA sense strand
gccaagccagugauauuua

SEQ ID NO: 1335204 - RNA, 19 nt, Homo sapiens
  misc_RNA (1)...(19): siRNA sense strand
ggagaaggagggcuggaaa

SEQ ID NO: 1335205 - RNA, 19 nt, Homo sapiens
  misc_RNA (1)...(19): siRNA sense strand
ggaugucccugcgggcuuu

SEQ ID NO: 1335206 - RNA, 19 nt, Homo sapiens
  misc_RNA (1)...(19): siRNA sense strand
ccaacgagcccauggaugu

SEQ ID NO: 1335207 - RNA, 19 nt, Homo sapiens
  misc_RNA (1)...(19): siRNA sense strand
acggaauucuccaaucaua

SEQ ID NO: 1335208 - RNA, 19 nt, Homo sapiens
  misc_RNA (1)...(19): siRNA sense strand
uuagguaucuugucaaacu

SEQ ID NO: 1335209 - RNA, 19 nt, Homo sapiens
  misc_RNA (1)...(19): siRNA sense strand
gaccaucggcuuuagguau

SEQ ID NO: 1335210 - RNA, 19 nt, Homo sapiens
  misc_RNA (1)...(19): siRNA sense strand
gcaauggguccggcuguuu

SEQ ID NO: 1335211 - RNA, 19 nt, Homo sapiens
  misc_RNA (1)...(19): siRNA sense strand
gaaggagggcuggaaacaa

SEQ ID NO: 1335212 - RNA, 19 nt, Homo sapiens
  misc_RNA (1)...(19): siRNA sense strand
gccaguacuuguuccaguu

SEQ ID NO: 1335213 - RNA, 19 nt, Homo sapiens
  misc_RNA (1)...(19): siRNA sense strand
guagccgaguggacaauga

SEQ ID NO: 1335214 - RNA, 19 nt, Homo sapiens
  misc_RNA (1)...(19): siRNA sense strand
gcagcuugccgcucuagaa

SEQ ID NO: 1335215 - RNA, 19 nt, Homo sapiens
  misc_RNA (1)...(19): siRNA sense strand
gcacaagggacucuaacca

SEQ ID NO: 1335216 - RNA, 19 nt, Homo sapiens
  misc_RNA (1)...(19): siRNA sense strand
ggccaagccagugauauuu

SEQ ID NO: 1335217 - RNA, 19 nt, Homo sapiens
  misc_RNA (1)...(19): siRNA sense strand
ccacucaacccaagaagca

SEQ ID NO: 1335218 - RNA, 19 nt, Homo sapiens
  misc_RNA (1)...(19): siRNA sense strand
ggaaaggcucagaguuuag

SEQ ID NO: 1335219 - RNA, 19 nt, Homo sapiens
  misc_RNA (1)...(19): siRNA sense strand
uguguuggcuguggaaaga

SEQ ID NO: 1335220 - RNA, 19 nt, Homo sapiens
  misc_RNA (1)...(19): siRNA sense strand
gggaacagagcuaaguaug

SEQ ID NO: 1335221 - RNA, 19 nt, Homo sapiens
  misc_RNA (1)...(19): siRNA sense strand
aaaggguggucuccagaau

SEQ ID NO: 1335222 - RNA, 19 nt, Homo sapiens
  misc_RNA (1)...(19): siRNA sense strand
ggcuuuagguaucuuguca

SEQ ID NO: 1335223 - RNA, 19 nt, Homo sapiens
  misc_RNA (1)...(19): siRNA sense strand
uuggaaaggcucagaguuu

SEQ ID NO: 1335224 - RNA, 19 nt, Homo sapiens
  misc_RNA (1)...(19): siRNA sense strand
ucuguuacuucacggaauu

SEQ ID NO: 1335225 - RNA, 19 nt, Homo sapiens
  misc_RNA (1)...(19): siRNA sense strand
caaaggguggucuccagaa

SEQ ID NO: 1335226 - RNA, 19 nt, Homo sapiens
  misc_RNA (1)...(19): siRNA sense strand
ccaagguggugggaacaga

SEQ ID NO: 1335227 - RNA, 19 nt, Homo sapiens
  misc_RNA (1)...(19): siRNA sense strand
cuuuagguaucuugucaaa

SEQ ID NO: 1335228 - RNA, 19 nt, Homo sapiens
  misc_RNA (1)...(19): siRNA sense strand
caaggccaagccagugaua

SEQ ID NO: 1335229 - RNA, 19 nt, Homo sapiens
  misc_RNA (1)...(19): siRNA sense strand
gaccuuuaaucuguuggaa

SEQ ID NO: 1335230 - RNA, 19 nt, Homo sapiens
  misc_RNA (1)...(19): siRNA sense strand
gcagcagcuugccgcucua

SEQ ID NO: 1335231 - RNA, 19 nt, Homo sapiens
  misc_RNA (1)...(19): siRNA sense strand
gcugaagacgacacgcuuu

SEQ ID NO: 1335232 - RNA, 19 nt, Homo sapiens
  misc_RNA (1)...(19): siRNA sense strand
aaaggcuucuguuacuuca

SEQ ID NO: 1335233 - RNA, 19 nt, Homo sapiens
  misc_RNA (1)...(19): siRNA sense strand
ggagggcuggaaacaaaug

SEQ ID NO: 1335234 - RNA, 19 nt, Homo sapiens
  misc_RNA (1)...(19): siRNA sense strand
ccugacaacuugcugaaaa

SEQ ID NO: 1335235 - RNA, 19 nt, Homo sapiens
  misc_RNA (1)...(19): siRNA sense strand
gcuugccgcucuagaaggu

SEQ ID NO: 1335236 - RNA, 19 nt, Homo sapiens
  misc_RNA (1)...(19): siRNA sense strand
uggcaaagaauaaccuguu

SEQ ID NO: 1335237 - RNA, 19 nt, Homo sapiens
  misc_RNA (1)...(19): siRNA sense strand
ccugaaggaugcuguacca

SEQ ID NO: 1335238 - RNA, 19 nt, Homo sapiens
  misc_RNA (1)...(19): siRNA sense strand
cacaagggacucuaaccaa

SEQ ID NO: 1335239 - RNA, 19 nt, Homo sapiens
  misc_RNA (1)...(19): siRNA sense strand
acaaugaggaagaggaaga

SEQ ID NO: 1335240 - RNA, 19 nt, Homo sapiens
  misc_RNA (1)...(19): siRNA sense strand
gcaaagauuccccgaagug

SEQ ID NO: 1335241 - RNA, 19 nt, Homo sapiens
  misc_RNA (1)...(19): siRNA sense strand
agacgacacgcuuugaaga

SEQ ID NO: 1335242 - RNA, 19 nt, Homo sapiens
  misc_RNA (1)...(19): siRNA sense strand
caagggacucuaaccaaag

SEQ ID NO: 1335243 - RNA, 19 nt, Homo sapiens
  misc_RNA (1)...(19): siRNA sense strand
ggugugcgccguugacaag

SEQ ID NO: 1335244 - RNA, 19 nt, Homo sapiens
  misc_RNA (1)...(19): siRNA sense strand
gaagcagaaacacuugaag

SEQ ID NO: 1335245 - RNA, 19 nt, Homo sapiens
  misc_RNA (1)...(19): siRNA sense strand
ucacuaaacgcagcaaugg

SEQ ID NO: 1335246 - RNA, 19 nt, Homo sapiens
  misc_RNA (1)...(19): siRNA sense strand
gaguggacaaugaggaaga

SEQ ID NO: 1335247 - RNA, 19 nt, Homo sapiens
  misc_RNA (1)...(19): siRNA sense strand
gaugacaauggccacaaug

SEQ ID NO: 1335248 - RNA, 19 nt, Homo sapiens
  misc_RNA (1)...(19): siRNA sense strand
guucuugccagaugacaau

SEQ ID NO: 1335249 - RNA, 19 nt, Homo sapiens
  misc_RNA (1)...(19): siRNA sense strand
caagccagugauauuuaaa

SEQ ID NO: 1335250 - RNA, 19 nt, Homo sapiens
  misc_RNA (1)...(19): siRNA sense strand
gugggaacagagcuaagua

SEQ ID NO: 1335251 - RNA, 19 nt, Homo sapiens
  misc_RNA (1)...(19): siRNA sense strand
agaugacaauggccacaau

SEQ ID NO: 1335252 - RNA, 19 nt, Homo sapiens
  misc_RNA (1)...(19): siRNA sense strand
uguuggcuguggaaagaaa

SEQ ID NO: 1335253 - RNA, 19 nt, Homo sapiens
  misc_RNA (1)...(19): siRNA sense strand
caaugaggaagaggaagaa

SEQ ID NO: 1335254 - RNA, 19 nt, Homo sapiens
  misc_RNA (1)...(19): siRNA sense strand
ugaggaagaggaagaagag

SEQ ID NO: 1335255 - RNA, 19 nt, Homo sapiens
  misc_RNA (1)...(19): siRNA sense strand
gcaggaccagcuucugauc

SEQ ID NO: 1335256 - RNA, 19 nt, Homo sapiens
  misc_RNA (1)...(19): siRNA sense strand
agagguucuugccagauga

SEQ ID NO: 1335257 - RNA, 19 nt, Homo sapiens
  misc_RNA (1)...(19): siRNA sense strand
gggagaaggagggcuggaa

SEQ ID NO: 1335258 - RNA, 19 nt, Homo sapiens
  misc_RNA (1)...(19): siRNA sense strand
gguggccucuggagaacca

SEQ ID NO: 1335259 - RNA, 19 nt, Homo sapiens
  misc_RNA (1)...(19): siRNA sense strand
uaugagagcgcaggcaugu

SEQ ID NO: 1335260 - RNA, 19 nt, Homo sapiens
  misc_RNA (1)...(19): siRNA sense strand
ugaagacgacacgcuuuga

SEQ ID NO: 1335261 - RNA, 19 nt, Homo sapiens
  misc_RNA (1)...(19): siRNA sense strand
aggccaagccagugauauu

SEQ ID NO: 1335262 - RNA, 19 nt, Homo sapiens
  misc_RNA (1)...(19): siRNA sense strand
agaagcagaaacacuugaa

SEQ ID NO: 1335263 - RNA, 19 nt, Homo sapiens
  misc_RNA (1)...(19): siRNA sense strand
gcaaggccaagccagugau

SEQ ID NO: 1335264 - RNA, 19 nt, Homo sapiens
  misc_RNA (1)...(19): siRNA sense strand
gucuguuccugacaacuug

SEQ ID NO: 1335265 - RNA, 19 nt, Homo sapiens
  misc_RNA (1)...(19): siRNA sense strand
gaacagagcuaaguaugag

SEQ ID NO: 1335266 - RNA, 19 nt, Homo sapiens
  misc_RNA (1)...(19): siRNA sense strand
ggaauucuccaaucauaua

SEQ ID NO: 1335267 - RNA, 19 nt, Homo sapiens
  misc_RNA (1)...(19): siRNA sense strand
caacaacuggcaaagaaua

SEQ ID NO: 1335268 - RNA, 19 nt, Homo sapiens
  misc_RNA (1)...(19): siRNA sense strand
acaaugcucuucuugguuu

SEQ ID NO: 1335269 - RNA, 19 nt, Homo sapiens
  misc_RNA (1)...(19): siRNA sense strand
uggaaaggcucagaguuua

SEQ ID NO: 1335270 - RNA, 19 nt, Homo sapiens
  misc_RNA (1)...(19): siRNA sense strand
ccaagccagugauauuuaa

SEQ ID NO: 1335271 - RNA, 19 nt, Homo sapiens
  misc_RNA (1)...(19): siRNA sense strand
ggaagaagagggagaagga

SEQ ID NO: 1335272 - RNA, 19 nt, Homo sapiens
  misc_RNA (1)...(19): siRNA sense strand
aaggagggcuggaaacaaa

SEQ ID NO: 1335273 - RNA, 19 nt, Homo sapiens
  misc_RNA (1)...(19): siRNA sense strand
ggaacagagcuaaguauga

SEQ ID NO: 1335274 - RNA, 19 nt, Homo sapiens
  misc_RNA (1)...(19): siRNA sense strand
ucacggaauucuccaauca

SEQ ID NO: 1335275 - RNA, 19 nt, Homo sapiens
  misc_RNA (1)...(19): siRNA sense strand
acaagggacucuaaccaaa

SEQ ID NO: 1335276 - RNA, 19 nt, Homo sapiens
  misc_RNA (1)...(19): siRNA sense strand
ccacaaugcucuucuuggu

SEQ ID NO: 1335277 - RNA, 19 nt, Homo sapiens
  misc_RNA (1)...(19): siRNA sense strand
gaaaggcuucuguuacuuc

SEQ ID NO: 1335278 - RNA, 19 nt, Homo sapiens
  misc_RNA (1)...(19): siRNA sense strand
ccaagaagcagaaacacuu

SEQ ID NO: 1335279 - RNA, 19 nt, Homo sapiens
  misc_RNA (1)...(19): siRNA sense strand
gaagacgacacgcuuugaa

SEQ ID NO: 1335280 - RNA, 19 nt, Homo sapiens
  misc_RNA (1)...(19): siRNA sense strand
gaaaggcucagaguuuaga

SEQ ID NO: 1335281 - RNA, 19 nt, Homo sapiens
  misc_RNA (1)...(19): siRNA sense strand
ggcaaagaauaaccuguug

SEQ ID NO: 1335282 - RNA, 19 nt, Homo sapiens
  misc_RNA (1)...(19): siRNA sense strand
ggacaaugaggaagaggaa

SEQ ID NO: 1335283 - RNA, 19 nt, Homo sapiens
  misc_RNA (1)...(19): siRNA sense strand
gccaagccagugauauuua

SEQ ID NO: 1335284 - RNA, 19 nt, Homo sapiens
  misc_RNA (1)...(19): siRNA sense strand
ggagaaggagggcuggaaa

SEQ ID NO: 1335285 - RNA, 19 nt, Homo sapiens
  misc_RNA (1)...(19): siRNA sense strand
ggaugucccugcgggcuuu

SEQ ID NO: 1335286 - RNA, 19 nt, Homo sapiens
  misc_RNA (1)...(19): siRNA sense strand
ccaacgagcccauggaugu

SEQ ID NO: 1335287 - RNA, 19 nt, Homo sapiens
  misc_RNA (1)...(19): siRNA sense strand
acggaauucuccaaucaua

SEQ ID NO: 1335288 - RNA, 19 nt, Homo sapiens
  misc_RNA (1)...(19): siRNA sense strand
uuagguaucuugucaaacu

SEQ ID NO: 1335289 - RNA, 19 nt, Homo sapiens
  misc_RNA (1)...(19): siRNA sense strand
gaccaucggcuuuagguau

SEQ ID NO: 1335290 - RNA, 19 nt, Homo sapiens
  misc_RNA (1)...(19): siRNA sense strand
gcaauggguccggcuguuu

SEQ ID NO: 1335291 - RNA, 19 nt, Homo sapiens
  misc_RNA (1)...(19): siRNA sense strand
gaaggagggcuggaaacaa

SEQ ID NO: 1335292 - RNA, 19 nt, Homo sapiens
  misc_RNA (1)...(19): siRNA sense strand
gccaguacuuguuccaguu

SEQ ID NO: 1335293 - RNA, 19 nt, Homo sapiens
  misc_RNA (1)...(19): siRNA sense strand
guagccgaguggacaauga

SEQ ID NO: 1335294 - RNA, 19 nt, Homo sapiens
  misc_RNA (1)...(19): siRNA sense strand
gcagcuugccgcucuagaa

SEQ ID NO: 1335295 - RNA, 19 nt, Homo sapiens
  misc_RNA (1)...(19): siRNA sense strand
gcacaagggacucuaacca

SEQ ID NO: 1335296 - RNA, 19 nt, Homo sapiens
  misc_RNA (1)...(19): siRNA sense strand
ggccaagccagugauauuu

SEQ ID NO: 1335297 - RNA, 19 nt, Homo sapiens
  misc_RNA (1)...(19): siRNA sense strand
ccacucaacccaagaagca

SEQ ID NO: 1335298 - RNA, 19 nt, Homo sapiens
  misc_RNA (1)...(19): siRNA sense strand
ggaaaggcucagaguuuag

SEQ ID NO: 1335299 - RNA, 19 nt, Homo sapiens
  misc_RNA (1)...(19): siRNA sense strand
uguguuggcuguggaaaga

SEQ ID NO: 1335300 - RNA, 19 nt, Homo sapiens
  misc_RNA (1)...(19): siRNA sense strand
gggaacagagcuaaguaug

SEQ ID NO: 1335301 - RNA, 19 nt, Homo sapiens
  misc_RNA (1)...(19): siRNA sense strand
aaaggguggucuccagaau

SEQ ID NO: 1335302 - RNA, 19 nt, Homo sapiens
  misc_RNA (1)...(19): siRNA sense strand
ggcuuuagguaucuuguca

SEQ ID NO: 1335303 - RNA, 19 nt, Homo sapiens
  misc_RNA (1)...(19): siRNA sense strand
uuggaaaggcucagaguuu

SEQ ID NO: 1335304 - RNA, 19 nt, Homo sapiens
  misc_RNA (1)...(19): siRNA sense strand
ucuguuacuucacggaauu

SEQ ID NO: 1335305 - RNA, 19 nt, Homo sapiens
  misc_RNA (1)...(19): siRNA sense strand
caaaggguggucuccagaa

SEQ ID NO: 1335306 - RNA, 19 nt, Homo sapiens
  misc_RNA (1)...(19): siRNA sense strand
ccaagguggugggaacaga

SEQ ID NO: 1335307 - RNA, 19 nt, Homo sapiens
  misc_RNA (1)...(19): siRNA sense strand
cuuuagguaucuugucaaa

SEQ ID NO: 1335308 - RNA, 19 nt, Homo sapiens
  misc_RNA (1)...(19): siRNA sense strand
caaggccaagccagugaua

SEQ ID NO: 1335309 - RNA, 19 nt, Homo sapiens
  misc_RNA (1)...(19): siRNA sense strand
gaccuuuaaucuguuggaa

SEQ ID NO: 1335310 - RNA, 19 nt, Homo sapiens
  misc_RNA (1)...(19): siRNA sense strand
gcagcagcuugccgcucua

SEQ ID NO: 1335311 - RNA, 19 nt, Homo sapiens
  misc_RNA (1)...(19): siRNA sense strand
gcugaagacgacacgcuuu

SEQ ID NO: 1335312 - RNA, 19 nt, Homo sapiens
  misc_RNA (1)...(19): siRNA sense strand
aaaggcuucuguuacuuca

SEQ ID NO: 1335313 - RNA, 19 nt, Homo sapiens
  misc_RNA (1)...(19): siRNA sense strand
ggagggcuggaaacaaaug

SEQ ID NO: 1335314 - RNA, 19 nt, Homo sapiens
  misc_RNA (1)...(19): siRNA sense strand
ccugacaacuugcugaaaa

SEQ ID NO: 1335315 - RNA, 19 nt, Homo sapiens
  misc_RNA (1)...(19): siRNA sense strand
gcuugccgcucuagaaggu

SEQ ID NO: 1335316 - RNA, 19 nt, Homo sapiens
  misc_RNA (1)...(19): siRNA sense strand
uggcaaagaauaaccuguu

SEQ ID NO: 1335317 - RNA, 19 nt, Homo sapiens
  misc_RNA (1)...(19): siRNA sense strand
ccugaaggaugcuguacca

SEQ ID NO: 1335318 - RNA, 19 nt, Homo sapiens
  misc_RNA (1)...(19): siRNA sense strand
cacaagggacucuaaccaa

SEQ ID NO: 1335319 - RNA, 19 nt, Homo sapiens
  misc_RNA (1)...(19): siRNA sense strand
acaaugaggaagaggaaga

SEQ ID NO: 1335320 - RNA, 19 nt, Homo sapiens
  misc_RNA (1)...(19): siRNA sense strand
gcaaagauuccccgaagug

SEQ ID NO: 1335321 - RNA, 19 nt, Homo sapiens
  misc_RNA (1)...(19): siRNA sense strand
agacgacacgcuuugaaga

SEQ ID NO: 1335322 - RNA, 19 nt, Homo sapiens
  misc_RNA (1)...(19): siRNA sense strand
caagggacucuaaccaaag

SEQ ID NO: 1335323 - RNA, 19 nt, Homo sapiens
  misc_RNA (1)...(19): siRNA sense strand
ggugugcgccguugacaag

SEQ ID NO: 1335324 - RNA, 19 nt, Homo sapiens
  misc_RNA (1)...(19): siRNA sense strand
gaagcagaaacacuugaag

SEQ ID NO: 1335325 - RNA, 19 nt, Homo sapiens
  misc_RNA (1)...(19): siRNA sense strand
ucacuaaacgcagcaaugg

SEQ ID NO: 1335326 - RNA, 19 nt, Homo sapiens
  misc_RNA (1)...(19): siRNA sense strand
gaguggacaaugaggaaga

SEQ ID NO: 1335327 - RNA, 19 nt, Homo sapiens
  misc_RNA (1)...(19): siRNA sense strand
gaugacaauggccacaaug

SEQ ID NO: 1335328 - RNA, 19 nt, Homo sapiens
  misc_RNA (1)...(19): siRNA sense strand
guucuugccagaugacaau

SEQ ID NO: 1335329 - RNA, 19 nt, Homo sapiens
  misc_RNA (1)...(19): siRNA sense strand
caagccagugauauuuaaa

SEQ ID NO: 1335330 - RNA, 19 nt, Homo sapiens
  misc_RNA (1)...(19): siRNA sense strand
gugggaacagagcuaagua

SEQ ID NO: 1335331 - RNA, 19 nt, Homo sapiens
  misc_RNA (1)...(19): siRNA sense strand
agaugacaauggccacaau

SEQ ID NO: 1335332 - RNA, 19 nt, Homo sapiens
  misc_RNA (1)...(19): siRNA sense strand
uguuggcuguggaaagaaa

SEQ ID NO: 1335333 - RNA, 19 nt, Homo sapiens
  misc_RNA (1)...(19): siRNA sense strand
caaugaggaagaggaagaa

SEQ ID NO: 1335334 - RNA, 19 nt, Homo sapiens
  misc_RNA (1)...(19): siRNA sense strand
ugaggaagaggaagaagag

SEQ ID NO: 1335335 - RNA, 19 nt, Homo sapiens
  misc_RNA (1)...(19): siRNA sense strand
gcaggaccagcuucugauc

SEQ ID NO: 1335336 - RNA, 19 nt, Homo sapiens
  misc_RNA (1)...(19): siRNA sense strand
agagguucuugccagauga

SEQ ID NO: 1335337 - RNA, 19 nt, Homo sapiens
  misc_RNA (1)...(19): siRNA sense strand
gggagaaggagggcuggaa

SEQ ID NO: 1335338 - RNA, 19 nt, Homo sapiens
  misc_RNA (1)...(19): siRNA sense strand
gguggccucuggagaacca

SEQ ID NO: 1335339 - RNA, 19 nt, Homo sapiens
  misc_RNA (1)...(19): siRNA sense strand
uaugagagcgcaggcaugu

SEQ ID NO: 1335340 - RNA, 19 nt, Homo sapiens
  misc_RNA (1)...(19): siRNA sense strand
ugaagacgacacgcuuuga

SEQ ID NO: 1335341 - RNA, 19 nt, Homo sapiens
  misc_RNA (1)...(19): siRNA sense strand
aggccaagccagugauauu

SEQ ID NO: 1335342 - RNA, 19 nt, Homo sapiens
  misc_RNA (1)...(19): siRNA sense strand
agaagcagaaacacuugaa

SEQ ID NO: 1335343 - RNA, 19 nt, Homo sapiens
  misc_RNA (1)...(19): siRNA sense strand
gcaaggccaagccagugau

SEQ ID NO: 1335344 - RNA, 19 nt, Homo sapiens
  misc_RNA (1)...(19): siRNA sense strand
gucuguuccugacaacuug

SEQ ID NO: 1335345 - RNA, 19 nt, Homo sapiens
  misc_RNA (1)...(19): siRNA sense strand
agacagaucugcaugaaca

SEQ ID NO: 1335346 - RNA, 19 nt, Homo sapiens
  misc_RNA (1)...(19): siRNA sense strand
gcacaccgccuugcacaua

SEQ ID NO: 1335347 - RNA, 19 nt, Homo sapiens
  misc_RNA (1)...(19): siRNA sense strand
ggaagaucuuugccuuuga

SEQ ID NO: 1335348 - RNA, 19 nt, Homo sapiens
  misc_RNA (1)...(19): siRNA sense strand
ucacuuggcugcucuucug

SEQ ID NO: 1335349 - RNA, 19 nt, Homo sapiens
  misc_RNA (1)...(19): siRNA sense strand
gaagaucuuugccuuugac

SEQ ID NO: 1335350 - RNA, 19 nt, Homo sapiens
  misc_RNA (1)...(19): siRNA sense strand
caaagcaucagcaccagaa

SEQ ID NO: 1335351 - RNA, 19 nt, Homo sapiens
  misc_RNA (1)...(19): siRNA sense strand
cuucuucguugcuguaauu

SEQ ID NO: 1335352 - RNA, 19 nt, Homo sapiens
  misc_RNA (1)...(19): siRNA sense strand
cuucguugcuguaauugaa

SEQ ID NO: 1335353 - RNA, 19 nt, Homo sapiens
  misc_RNA (1)...(19): siRNA sense strand
caauaaagaccagucacuu

SEQ ID NO: 1335354 - RNA, 19 nt, Homo sapiens
  misc_RNA (1)...(19): siRNA sense strand
gcaauaaagaccagucacu

SEQ ID NO: 1335355 - RNA, 19 nt, Homo sapiens
  misc_RNA (1)...(19): siRNA sense strand
aauaaagaccagucacuug

SEQ ID NO: 1335356 - RNA, 19 nt, Homo sapiens
  misc_RNA (1)...(19): siRNA sense strand
gccaggaggagaaugaaga

SEQ ID NO: 1335357 - RNA, 19 nt, Homo sapiens
  misc_RNA (1)...(19): siRNA sense strand
gcaugaacacccacuguac

SEQ ID NO: 1335358 - RNA, 19 nt, Homo sapiens
  misc_RNA (1)...(19): siRNA sense strand
agagaaagaagagagcaaa

SEQ ID NO: 1335359 - RNA, 19 nt, Homo sapiens
  misc_RNA (1)...(19): siRNA sense strand
uaauugaacgggucgagau

SEQ ID NO: 1335360 - RNA, 19 nt, Homo sapiens
  misc_RNA (1)...(19): siRNA sense strand
agacagaucugcaugaaca

SEQ ID NO: 1335361 - RNA, 19 nt, Homo sapiens
  misc_RNA (1)...(19): siRNA sense strand
gcacaccgccuugcacaua

SEQ ID NO: 1335362 - RNA, 19 nt, Homo sapiens
  misc_RNA (1)...(19): siRNA sense strand
ggaagaucuuugccuuuga

SEQ ID NO: 1335363 - RNA, 19 nt, Homo sapiens
  misc_RNA (1)...(19): siRNA sense strand
ucacuuggcugcucuucug

SEQ ID NO: 1335364 - RNA, 19 nt, Homo sapiens
  misc_RNA (1)...(19): siRNA sense strand
gaagaucuuugccuuugac

SEQ ID NO: 1335365 - RNA, 19 nt, Homo sapiens
  misc_RNA (1)...(19): siRNA sense strand
caaagcaucagcaccagaa

SEQ ID NO: 1335366 - RNA, 19 nt, Homo sapiens
  misc_RNA (1)...(19): siRNA sense strand
cuucuucguugcuguaauu

SEQ ID NO: 1335367 - RNA, 19 nt, Homo sapiens
  misc_RNA (1)...(19): siRNA sense strand
cuucguugcuguaauugaa

SEQ ID NO: 1335368 - RNA, 19 nt, Homo sapiens
  misc_RNA (1)...(19): siRNA sense strand
caauaaagaccagucacuu

SEQ ID NO: 1335369 - RNA, 19 nt, Homo sapiens
  misc_RNA (1)...(19): siRNA sense strand
gcaauaaagaccagucacu

SEQ ID NO: 1335370 - RNA, 19 nt, Homo sapiens
  misc_RNA (1)...(19): siRNA sense strand
aauaaagaccagucacuug

SEQ ID NO: 1335371 - RNA, 19 nt, Homo sapiens
  misc_RNA (1)...(19): siRNA sense strand
gccaggaggagaaugaaga

SEQ ID NO: 1335372 - RNA, 19 nt, Homo sapiens
  misc_RNA (1)...(19): siRNA sense strand
gcaugaacacccacuguac

SEQ ID NO: 1335373 - RNA, 19 nt, Homo sapiens
  misc_RNA (1)...(19): siRNA sense strand
agagaaagaagagagcaaa

SEQ ID NO: 1335374 - RNA, 19 nt, Homo sapiens
  misc_RNA (1)...(19): siRNA sense strand
uaauugaacgggucgagau

SEQ ID NO: 1335375 - RNA, 19 nt, Homo sapiens
  misc_RNA (1)...(19): siRNA sense strand
cggcucgucuacuccaugu

SEQ ID NO: 1335376 - RNA, 19 nt, Homo sapiens
  misc_RNA (1)...(19): siRNA sense strand
agacagaucugcaugaaca

SEQ ID NO: 1335377 - RNA, 19 nt, Homo sapiens
  misc_RNA (1)...(19): siRNA sense strand
ggaagaucuuugccuuuga

SEQ ID NO: 1335378 - RNA, 19 nt, Homo sapiens
  misc_RNA (1)...(19): siRNA sense strand
ucacuuggcugcucuucug

SEQ ID NO: 1335379 - RNA, 19 nt, Homo sapiens
  misc_RNA (1)...(19): siRNA sense strand
gaagaucuuugccuuugac

SEQ ID NO: 1335380 - RNA, 19 nt, Homo sapiens
  misc_RNA (1)...(19): siRNA sense strand
caauaaagaccagucacuu

SEQ ID NO: 1335381 - RNA, 19 nt, Homo sapiens
  misc_RNA (1)...(19): siRNA sense strand
gcaauaaagaccagucacu

SEQ ID NO: 1335382 - RNA, 19 nt, Homo sapiens
  misc_RNA (1)...(19): siRNA sense strand
aauaaagaccagucacuug

SEQ ID NO: 1335383 - RNA, 19 nt, Homo sapiens
  misc_RNA (1)...(19): siRNA sense strand
gccaggaggagaaugaaga

SEQ ID NO: 1335384 - RNA, 19 nt, Homo sapiens
  misc_RNA (1)...(19): siRNA sense strand
gcaugaacacccacuguac

SEQ ID NO: 1335385 - RNA, 19 nt, Homo sapiens
  misc_RNA (1)...(19): siRNA sense strand
cuucuucguugcuguaauu

SEQ ID NO: 1335386 - RNA, 19 nt, Homo sapiens
  misc_RNA (1)...(19): siRNA sense strand
cuucguugcuguaauugaa

SEQ ID NO: 1335387 - RNA, 19 nt, Homo sapiens
  misc_RNA (1)...(19): siRNA sense strand
gccaggaggagaaugaaga

SEQ ID NO: 1335388 - RNA, 19 nt, Homo sapiens
  misc_RNA (1)...(19): siRNA sense strand
ggaggagaaugcaauauua

SEQ ID NO: 1335389 - RNA, 19 nt, Homo sapiens
  misc_RNA (1)...(19): siRNA sense strand
ccaaagcgcuuaauagauu

SEQ ID NO: 1335390 - RNA, 19 nt, Homo sapiens
  misc_RNA (1)...(19): siRNA sense strand
ggaugucacuuucaacuua

SEQ ID NO: 1335391 - RNA, 19 nt, Homo sapiens
  misc_RNA (1)...(19): siRNA sense strand
caaagaagaugaacagaga

SEQ ID NO: 1335392 - RNA, 19 nt, Homo sapiens
  misc_RNA (1)...(19): siRNA sense strand
gaacuugucuccaaauaca

SEQ ID NO: 1335393 - RNA, 19 nt, Homo sapiens
  misc_RNA (1)...(19): siRNA sense strand
gcucauaucuggaccaaau

SEQ ID NO: 1335394 - RNA, 19 nt, Homo sapiens
  misc_RNA (1)...(19): siRNA sense strand
ggaaggaugucacuuucaa

SEQ ID NO: 1335395 - RNA, 19 nt, Homo sapiens
  misc_RNA (1)...(19): siRNA sense strand
gcacaggcuugaagaaaga

SEQ ID NO: 1335396 - RNA, 19 nt, Homo sapiens
  misc_RNA (1)...(19): siRNA sense strand
gaaaggaucaguugccaaa

SEQ ID NO: 1335397 - RNA, 19 nt, Homo sapiens
  misc_RNA (1)...(19): siRNA sense strand
gagacaagguuauuucaug

SEQ ID NO: 1335398 - RNA, 19 nt, Homo sapiens
  misc_RNA (1)...(19): siRNA sense strand
agaaauguaugcagacuuu

SEQ ID NO: 1335399 - RNA, 19 nt, Homo sapiens
  misc_RNA (1)...(19): siRNA sense strand
gaacacagaacuaguuuca

SEQ ID NO: 1335400 - RNA, 19 nt, Homo sapiens
  misc_RNA (1)...(19): siRNA sense strand
ggaauggaauggugugaug

SEQ ID NO: 1335401 - RNA, 19 nt, Homo sapiens
  misc_RNA (1)...(19): siRNA sense strand
acacagaacuaguuucaga

SEQ ID NO: 1335402 - RNA, 19 nt, Homo sapiens
  misc_RNA (1)...(19): siRNA sense strand
gaaguugccuauaaucaag

SEQ ID NO: 1335403 - RNA, 19 nt, Homo sapiens
  misc_RNA (1)...(19): siRNA sense strand
caaauacagucccagaguu

SEQ ID NO: 1335404 - RNA, 19 nt, Homo sapiens
  misc_RNA (1)...(19): siRNA sense strand
ccaagaaguugccuauaau

SEQ ID NO: 1335405 - RNA, 19 nt, Homo sapiens
  misc_RNA (1)...(19): siRNA sense strand
gacaacaaauagcauggua

SEQ ID NO: 1335406 - RNA, 19 nt, Homo sapiens
  misc_RNA (1)...(19): siRNA sense strand
caaaugauacugaagagaa

SEQ ID NO: 1335407 - RNA, 19 nt, Homo sapiens
  misc_RNA (1)...(19): siRNA sense strand
ggcaagaagcacagaauua

SEQ ID NO: 1335408 - RNA, 19 nt, Homo sapiens
  misc_RNA (1)...(19): siRNA sense strand
ggagaaugcuggguuuaug

SEQ ID NO: 1335409 - RNA, 19 nt, Homo sapiens
  misc_RNA (1)...(19): siRNA sense strand
caaauagcaugguagaauc

SEQ ID NO: 1335410 - RNA, 19 nt, Homo sapiens
  misc_RNA (1)...(19): siRNA sense strand
ggaaggagaaggaaauuca

SEQ ID NO: 1335411 - RNA, 19 nt, Homo sapiens
  misc_RNA (1)...(19): siRNA sense strand
gaagaugaacagagaaaga

SEQ ID NO: 1335412 - RNA, 19 nt, Homo sapiens
  misc_RNA (1)...(19): siRNA sense strand
cacagcagcucgggaaaua

SEQ ID NO: 1335413 - RNA, 19 nt, Homo sapiens
  misc_RNA (1)...(19): siRNA sense strand
gaaauucagugggagacaa

SEQ ID NO: 1335414 - RNA, 19 nt, Homo sapiens
  misc_RNA (1)...(19): siRNA sense strand
cagaauuacugccgagauu

SEQ ID NO: 1335415 - RNA, 19 nt, Homo sapiens
  misc_RNA (1)...(19): siRNA sense strand
ggaaggaaaggaucaguug

SEQ ID NO: 1335416 - RNA, 19 nt, Homo sapiens
  misc_RNA (1)...(19): siRNA sense strand
ggaauggugugauguaugc

SEQ ID NO: 1335417 - RNA, 19 nt, Homo sapiens
  misc_RNA (1)...(19): siRNA sense strand
gaaggucuauccucacagu

SEQ ID NO: 1335418 - RNA, 19 nt, Homo sapiens
  misc_RNA (1)...(19): siRNA sense strand
gcacaagagcguuaucaug

SEQ ID NO: 1335419 - RNA, 19 nt, Homo sapiens
  misc_RNA (1)...(19): siRNA sense strand
gauggagaaugcuggguuu

SEQ ID NO: 1335420 - RNA, 19 nt, Homo sapiens
  misc_RNA (1)...(19): siRNA sense strand
gaugucacuuucaacuuaa

SEQ ID NO: 1335421 - RNA, 19 nt, Homo sapiens
  misc_RNA (1)...(19): siRNA sense strand
gaacagagaaagaaaauug

SEQ ID NO: 1335422 - RNA, 19 nt, Homo sapiens
  misc_RNA (1)...(19): siRNA sense strand
ucaaagagacaacaaauag

SEQ ID NO: 1335423 - RNA, 19 nt, Homo sapiens
  misc_RNA (1)...(19): siRNA sense strand
accaagaaguugccuauaa

SEQ ID NO: 1335424 - RNA, 19 nt, Homo sapiens
  misc_RNA (1)...(19): siRNA sense strand
gaagagaacacagaacuag

SEQ ID NO: 1335425 - RNA, 19 nt, Homo sapiens
  misc_RNA (1)...(19): siRNA sense strand
agacaagguuauuucauga

SEQ ID NO: 1335426 - RNA, 19 nt, Homo sapiens
  misc_RNA (1)...(19): siRNA sense strand
gugaacuugucuccaaaua

SEQ ID NO: 1335427 - RNA, 19 nt, Homo sapiens
  misc_RNA (1)...(19): siRNA sense strand
aauaucaucuuccacacua

SEQ ID NO: 1335428 - RNA, 19 nt, Homo sapiens
  misc_RNA (1)...(19): siRNA sense strand
gaggagaaugcaauauuaa

SEQ ID NO: 1335429 - RNA, 19 nt, Homo sapiens
  misc_RNA (1)...(19): siRNA sense strand
gaugcaauauaucaaccua

SEQ ID NO: 1335430 - RNA, 19 nt, Homo sapiens
  misc_RNA (1)...(19): siRNA sense strand
gaaaggaaggagaaggaaa

SEQ ID NO: 1335431 - RNA, 19 nt, Homo sapiens
  misc_RNA (1)...(19): siRNA sense strand
ucccguagaugcaauauau

SEQ ID NO: 1335432 - RNA, 19 nt, Homo sapiens
  misc_RNA (1)...(19): siRNA sense strand
gaucagaacgaguaugaau

SEQ ID NO: 1335433 - RNA, 19 nt, Homo sapiens
  misc_RNA (1)...(19): siRNA sense strand
caacaaauagcaugguaga

SEQ ID NO: 1335434 - RNA, 19 nt, Homo sapiens
  misc_RNA (1)...(19): siRNA sense strand
gcagggcugugucucaugu

SEQ ID NO: 1335435 - RNA, 19 nt, Homo sapiens
  misc_RNA (1)...(19): siRNA sense strand
ugaggaaguuggaagauca

SEQ ID NO: 1335436 - RNA, 19 nt, Homo sapiens
  misc_RNA (1)...(19): siRNA sense strand
ggaauuaggaggagaaugc

SEQ ID NO: 1335437 - RNA, 19 nt, Homo sapiens
  misc_RNA (1)...(19): siRNA sense strand
caacguuuauucuugaaag

SEQ ID NO: 1335438 - RNA, 19 nt, Homo sapiens
  misc_RNA (1)...(19): siRNA sense strand
gagaaaggaaggagaagga

SEQ ID NO: 1335439 - RNA, 19 nt, Homo sapiens
  misc_RNA (1)...(19): siRNA sense strand
agaagaaagugaggaaguu

SEQ ID NO: 1335440 - RNA, 19 nt, Homo sapiens
  misc_RNA (1)...(19): siRNA sense strand
gcaagaagcacagaauuac

SEQ ID NO: 1335441 - RNA, 19 nt, Homo sapiens
  misc_RNA (1)...(19): siRNA sense strand
gagaacacagaacuaguuu

SEQ ID NO: 1335442 - RNA, 19 nt, Homo sapiens
  misc_RNA (1)...(19): siRNA sense strand
agaacuaguuucagaagga

SEQ ID NO: 1335443 - RNA, 19 nt, Homo sapiens
  misc_RNA (1)...(19): siRNA sense strand
gaugaaccauuacugaaac

SEQ ID NO: 1335444 - RNA, 19 nt, Homo sapiens
  misc_RNA (1)...(19): siRNA sense strand
gagaaugcuggguuuauga

SEQ ID NO: 1335445 - RNA, 19 nt, Homo sapiens
  misc_RNA (1)...(19): siRNA sense strand
gaacauuacauucucacau

SEQ ID NO: 1335446 - RNA, 19 nt, Homo sapiens
  misc_RNA (1)...(19): siRNA sense strand
gaugaacauuacauucuca

SEQ ID NO: 1335447 - RNA, 19 nt, Homo sapiens
  misc_RNA (1)...(19): siRNA sense strand
gagcagguuucccaucauc

SEQ ID NO: 1335448 - RNA, 19 nt, Homo sapiens
  misc_RNA (1)...(19): siRNA sense strand
ucacuuaauucuuccuugu

SEQ ID NO: 1335449 - RNA, 19 nt, Homo sapiens
  misc_RNA (1)...(19): siRNA sense strand
gaggagcacaagagcguua

SEQ ID NO: 1335450 - RNA, 19 nt, Homo sapiens
  misc_RNA (1)...(19): siRNA sense strand
cagcagugaagaugaauuu

SEQ ID NO: 1335451 - RNA, 19 nt, Homo sapiens
  misc_RNA (1)...(19): siRNA sense strand
gaagaaagugaggaaguug

SEQ ID NO: 1335452 - RNA, 19 nt, Homo sapiens
  misc_RNA (1)...(19): siRNA sense strand
gcagugaagaugaauuuua

SEQ ID NO: 1335453 - RNA, 19 nt, Homo sapiens
  misc_RNA (1)...(19): siRNA sense strand
gagcauuagugaccagaag

SEQ ID NO: 1335454 - RNA, 19 nt, Homo sapiens
  misc_RNA (1)...(19): siRNA sense strand
guaguucuuccaacguuua

SEQ ID NO: 1335455 - RNA, 19 nt, Homo sapiens
  misc_RNA (1)...(19): siRNA sense strand
uggaagaucagaacgagua

SEQ ID NO: 1335456 - RNA, 19 nt, Homo sapiens
  misc_RNA (1)...(19): siRNA sense strand
ggacaucaucagacuccua

SEQ ID NO: 1335457 - RNA, 19 nt, Homo sapiens
  misc_RNA (1)...(19): siRNA sense strand
caagguuauuucaugaaga

SEQ ID NO: 1335458 - RNA, 19 nt, Homo sapiens
  misc_RNA (1)...(19): siRNA sense strand
acacuaaacccuucuaugg

SEQ ID NO: 1335459 - RNA, 19 nt, Homo sapiens
  misc_RNA (1)...(19): siRNA sense strand
gauaccacagaaucacuua

SEQ ID NO: 1335460 - RNA, 19 nt, Homo sapiens
  misc_RNA (1)...(19): siRNA sense strand
gcagaagcccgagaaagga

SEQ ID NO: 1335461 - RNA, 19 nt, Homo sapiens
  misc_RNA (1)...(19): siRNA sense strand
acaaauagcaugguagaau

SEQ ID NO: 1335462 - RNA, 19 nt, Homo sapiens
  misc_RNA (1)...(19): siRNA sense strand
gugcaaauaucaucuucca

SEQ ID NO: 1335463 - RNA, 19 nt, Homo sapiens
  misc_RNA (1)...(19): siRNA sense strand
acaauucaaugcucauauc

SEQ ID NO: 1335464 - RNA, 19 nt, Homo sapiens
  misc_RNA (1)...(19): siRNA sense strand
gaagauacaauucaaugcu

SEQ ID NO: 1335465 - RNA, 19 nt, Homo sapiens
  misc_RNA (1)...(19): siRNA sense strand
gaugcugaccuguuugauu

SEQ ID NO: 1335466 - RNA, 19 nt, Homo sapiens
  misc_RNA (1)...(19): siRNA sense strand
cacgugaacuugucuccaa

SEQ ID NO: 1335467 - RNA, 19 nt, Homo sapiens
  misc_RNA (1)...(19): siRNA sense strand
ucaugaagauggagaaugc

SEQ ID NO: 1335468 - RNA, 19 nt, Homo sapiens
  misc_RNA (1)...(19): siRNA sense strand
uuaugaugcugaugaauuc

SEQ ID NO: 1335469 - RNA, 19 nt, Homo sapiens
  misc_RNA (1)...(19): siRNA sense strand
caucucuugucgcagguua

SEQ ID NO: 1335470 - RNA, 19 nt, Homo sapiens
  misc_RNA (1)...(19): siRNA sense strand
gguaguucuuccaacguuu

SEQ ID NO: 1335471 - RNA, 19 nt, Homo sapiens
  misc_RNA (1)...(19): siRNA sense strand
caaagcgcuuaauagauuc

SEQ ID NO: 1335472 - RNA, 19 nt, Homo sapiens
  misc_RNA (1)...(19): siRNA sense strand
caagugaugcugaccuguu

SEQ ID NO: 1335473 - RNA, 19 nt, Homo sapiens
  misc_RNA (1)...(19): siRNA sense strand
ugaugaaccauuacugaaa

SEQ ID NO: 1335474 - RNA, 19 nt, Homo sapiens
  misc_RNA (1)...(19): siRNA sense strand
gggcaagaagcacagaauu

SEQ ID NO: 1335475 - RNA, 19 nt, Homo sapiens
  misc_RNA (1)...(19): siRNA sense strand
cuuccaacguuuauucuug

SEQ ID NO: 1335476 - RNA, 19 nt, Homo sapiens
  misc_RNA (1)...(19): siRNA sense strand
agacuuggaauggaucuua

SEQ ID NO: 1335477 - RNA, 19 nt, Homo sapiens
  misc_RNA (1)...(19): siRNA sense strand
caagagcguuaucaugcau

SEQ ID NO: 1335478 - RNA, 19 nt, Homo sapiens
  misc_RNA (1)...(19): siRNA sense strand
aagugaugcugaccuguuu

SEQ ID NO: 1335479 - RNA, 19 nt, Homo sapiens
  misc_RNA (1)...(19): siRNA sense strand
augcugaccuguuugauuc

SEQ ID NO: 1335480 - RNA, 19 nt, Homo sapiens
  misc_RNA (1)...(19): siRNA sense strand
aaugcuggguuuaugauga

SEQ ID NO: 1335481 - RNA, 19 nt, Homo sapiens
  misc_RNA (1)...(19): siRNA sense strand
gaaguuggaagaucagaac

SEQ ID NO: 1335482 - RNA, 19 nt, Homo sapiens
  misc_RNA (1)...(19): siRNA sense strand
agacuaugaugaacauuac

SEQ ID NO: 1335483 - RNA, 19 nt, Homo sapiens
  misc_RNA (1)...(19): siRNA sense strand
agagaacacagaacuaguu

SEQ ID NO: 1335484 - RNA, 19 nt, Homo sapiens
  misc_RNA (1)...(19): siRNA sense strand
ucccaaggaucgaaugguu

SEQ ID NO: 1335485 - RNA, 19 nt, Homo sapiens
  misc_RNA (1)...(19): siRNA sense strand
ggaccuguuugugagcauu

SEQ ID NO: 1335486 - RNA, 19 nt, Homo sapiens
  misc_RNA (1)...(19): siRNA sense strand
ugauucacaugaugacaga

SEQ ID NO: 1335487 - RNA, 19 nt, Homo sapiens
  misc_RNA (1)...(19): siRNA sense strand
uaugaugaaccauuacuga

SEQ ID NO: 1335488 - RNA, 19 nt, Homo sapiens
  misc_RNA (1)...(19): siRNA sense strand
ggaggagaaugcaauauua

SEQ ID NO: 1335489 - RNA, 19 nt, Homo sapiens
  misc_RNA (1)...(19): siRNA sense strand
ccaaagcgcuuaauagauu

SEQ ID NO: 1335490 - RNA, 19 nt, Homo sapiens
  misc_RNA (1)...(19): siRNA sense strand
ggaugucacuuucaacuua

SEQ ID NO: 1335491 - RNA, 19 nt, Homo sapiens
  misc_RNA (1)...(19): siRNA sense strand
gaacuugucuccaaauaca

SEQ ID NO: 1335492 - RNA, 19 nt, Homo sapiens
  misc_RNA (1)...(19): siRNA sense strand
gcucauaucuggaccaaau

SEQ ID NO: 1335493 - RNA, 19 nt, Homo sapiens
  misc_RNA (1)...(19): siRNA sense strand
ggaaggaugucacuuucaa

SEQ ID NO: 1335494 - RNA, 19 nt, Homo sapiens
  misc_RNA (1)...(19): siRNA sense strand
gcacaggcuugaagaaaga

SEQ ID NO: 1335495 - RNA, 19 nt, Homo sapiens
  misc_RNA (1)...(19): siRNA sense strand
gaaaggaucaguugccaaa

SEQ ID NO: 1335496 - RNA, 19 nt, Homo sapiens
  misc_RNA (1)...(19): siRNA sense strand
gagacaagguuauuucaug

SEQ ID NO: 1335497 - RNA, 19 nt, Homo sapiens
  misc_RNA (1)...(19): siRNA sense strand
agaaauguaugcagacuuu

SEQ ID NO: 1335498 - RNA, 19 nt, Homo sapiens
  misc_RNA (1)...(19): siRNA sense strand
gaacacagaacuaguuuca

SEQ ID NO: 1335499 - RNA, 19 nt, Homo sapiens
  misc_RNA (1)...(19): siRNA sense strand
ggaauggaauggugugaug

SEQ ID NO: 1335500 - RNA, 19 nt, Homo sapiens
  misc_RNA (1)...(19): siRNA sense strand
acacagaacuaguuucaga

SEQ ID NO: 1335501 - RNA, 19 nt, Homo sapiens
  misc_RNA (1)...(19): siRNA sense strand
gaaguugccuauaaucaag

SEQ ID NO: 1335502 - RNA, 19 nt, Homo sapiens
  misc_RNA (1)...(19): siRNA sense strand
caaauacagucccagaguu

SEQ ID NO: 1335503 - RNA, 19 nt, Homo sapiens
  misc_RNA (1)...(19): siRNA sense strand
ccaagaaguugccuauaau

SEQ ID NO: 1335504 - RNA, 19 nt, Homo sapiens
  misc_RNA (1)...(19): siRNA sense strand
caaaugauacugaagagaa

SEQ ID NO: 1335505 - RNA, 19 nt, Homo sapiens
  misc_RNA (1)...(19): siRNA sense strand
ggcaagaagcacagaauua

SEQ ID NO: 1335506 - RNA, 19 nt, Homo sapiens
  misc_RNA (1)...(19): siRNA sense strand
ggagaaugcuggguuuaug

SEQ ID NO: 1335507 - RNA, 19 nt, Homo sapiens
  misc_RNA (1)...(19): siRNA sense strand
ggaaggagaaggaaauuca

SEQ ID NO: 1335508 - RNA, 19 nt, Homo sapiens
  misc_RNA (1)...(19): siRNA sense strand
cacagcagcucgggaaaua

SEQ ID NO: 1335509 - RNA, 19 nt, Homo sapiens
  misc_RNA (1)...(19): siRNA sense strand
gaaauucagugggagacaa

SEQ ID NO: 1335510 - RNA, 19 nt, Homo sapiens
  misc_RNA (1)...(19): siRNA sense strand
cagaauuacugccgagauu

SEQ ID NO: 1335511 - RNA, 19 nt, Homo sapiens
  misc_RNA (1)...(19): siRNA sense strand
ggaaggaaaggaucaguug

SEQ ID NO: 1335512 - RNA, 19 nt, Homo sapiens
  misc_RNA (1)...(19): siRNA sense strand
ggaauggugugauguaugc

SEQ ID NO: 1335513 - RNA, 19 nt, Homo sapiens
  misc_RNA (1)...(19): siRNA sense strand
gaaggucuauccucacagu

SEQ ID NO: 1335514 - RNA, 19 nt, Homo sapiens
  misc_RNA (1)...(19): siRNA sense strand
gcacaagagcguuaucaug

SEQ ID NO: 1335515 - RNA, 19 nt, Homo sapiens
  misc_RNA (1)...(19): siRNA sense strand
gauggagaaugcuggguuu

SEQ ID NO: 1335516 - RNA, 19 nt, Homo sapiens
  misc_RNA (1)...(19): siRNA sense strand
gaugucacuuucaacuuaa

SEQ ID NO: 1335517 - RNA, 19 nt, Homo sapiens
  misc_RNA (1)...(19): siRNA sense strand
accaagaaguugccuauaa

SEQ ID NO: 1335518 - RNA, 19 nt, Homo sapiens
  misc_RNA (1)...(19): siRNA sense strand
gaagagaacacagaacuag

SEQ ID NO: 1335519 - RNA, 19 nt, Homo sapiens
  misc_RNA (1)...(19): siRNA sense strand
agacaagguuauuucauga

SEQ ID NO: 1335520 - RNA, 19 nt, Homo sapiens
  misc_RNA (1)...(19): siRNA sense strand
gugaacuugucuccaaaua

SEQ ID NO: 1335521 - RNA, 19 nt, Homo sapiens
  misc_RNA (1)...(19): siRNA sense strand
aauaucaucuuccacacua

SEQ ID NO: 1335522 - RNA, 19 nt, Homo sapiens
  misc_RNA (1)...(19): siRNA sense strand
gaggagaaugcaauauuaa

SEQ ID NO: 1335523 - RNA, 19 nt, Homo sapiens
  misc_RNA (1)...(19): siRNA sense strand
gaugcaauauaucaaccua

SEQ ID NO: 1335524 - RNA, 19 nt, Homo sapiens
  misc_RNA (1)...(19): siRNA sense strand
gaaaggaaggagaaggaaa

SEQ ID NO: 1335525 - RNA, 19 nt, Homo sapiens
  misc_RNA (1)...(19): siRNA sense strand
ucccguagaugcaauauau

SEQ ID NO: 1335526 - RNA, 19 nt, Homo sapiens
  misc_RNA (1)...(19): siRNA sense strand
gaucagaacgaguaugaau

SEQ ID NO: 1335527 - RNA, 19 nt, Homo sapiens
  misc_RNA (1)...(19): siRNA sense strand
gcagggcugugucucaugu

SEQ ID NO: 1335528 - RNA, 19 nt, Homo sapiens
  misc_RNA (1)...(19): siRNA sense strand
ugaggaaguuggaagauca

SEQ ID NO: 1335529 - RNA, 19 nt, Homo sapiens
  misc_RNA (1)...(19): siRNA sense strand
ggaauuaggaggagaaugc

SEQ ID NO: 1335530 - RNA, 19 nt, Homo sapiens
  misc_RNA (1)...(19): siRNA sense strand
caacguuuauucuugaaag

SEQ ID NO: 1335531 - RNA, 19 nt, Homo sapiens
  misc_RNA (1)...(19): siRNA sense strand
gagaaaggaaggagaagga

SEQ ID NO: 1335532 - RNA, 19 nt, Homo sapiens
  misc_RNA (1)...(19): siRNA sense strand
agaagaaagugaggaaguu

SEQ ID NO: 1335533 - RNA, 19 nt, Homo sapiens
  misc_RNA (1)...(19): siRNA sense strand
gcaagaagcacagaauuac

SEQ ID NO: 1335534 - RNA, 19 nt, Homo sapiens
  misc_RNA (1)...(19): siRNA sense strand
gagaacacagaacuaguuu

SEQ ID NO: 1335535 - RNA, 19 nt, Homo sapiens
  misc_RNA (1)...(19): siRNA sense strand
agaacuaguuucagaagga

SEQ ID NO: 1335536 - RNA, 19 nt, Homo sapiens
  misc_RNA (1)...(19): siRNA sense strand
gaugaaccauuacugaaac

SEQ ID NO: 1335537 - RNA, 19 nt, Homo sapiens
  misc_RNA (1)...(19): siRNA sense strand
gagaaugcuggguuuauga

SEQ ID NO: 1335538 - RNA, 19 nt, Homo sapiens
  misc_RNA (1)...(19): siRNA sense strand
gaacauuacauucucacau

SEQ ID NO: 1335539 - RNA, 19 nt, Homo sapiens
  misc_RNA (1)...(19): siRNA sense strand
gaugaacauuacauucuca

SEQ ID NO: 1335540 - RNA, 19 nt, Homo sapiens
  misc_RNA (1)...(19): siRNA sense strand
gagcagguuucccaucauc

SEQ ID NO: 1335541 - RNA, 19 nt, Homo sapiens
  misc_RNA (1)...(19): siRNA sense strand
ucacuuaauucuuccuugu

SEQ ID NO: 1335542 - RNA, 19 nt, Homo sapiens
  misc_RNA (1)...(19): siRNA sense strand
gaggagcacaagagcguua

SEQ ID NO: 1335543 - RNA, 19 nt, Homo sapiens
  misc_RNA (1)...(19): siRNA sense strand
cagcagugaagaugaauuu

SEQ ID NO: 1335544 - RNA, 19 nt, Homo sapiens
  misc_RNA (1)...(19): siRNA sense strand
gaagaaagugaggaaguug

SEQ ID NO: 1335545 - RNA, 19 nt, Homo sapiens
  misc_RNA (1)...(19): siRNA sense strand
gcagugaagaugaauuuua

SEQ ID NO: 1335546 - RNA, 19 nt, Homo sapiens
  misc_RNA (1)...(19): siRNA sense strand
gagcauuagugaccagaag

SEQ ID NO: 1335547 - RNA, 19 nt, Homo sapiens
  misc_RNA (1)...(19): siRNA sense strand
guaguucuuccaacguuua

SEQ ID NO: 1335548 - RNA, 19 nt, Homo sapiens
  misc_RNA (1)...(19): siRNA sense strand
uggaagaucagaacgagua

SEQ ID NO: 1335549 - RNA, 19 nt, Homo sapiens
  misc_RNA (1)...(19): siRNA sense strand
ggacaucaucagacuccua

SEQ ID NO: 1335550 - RNA, 19 nt, Homo sapiens
  misc_RNA (1)...(19): siRNA sense strand
caagguuauuucaugaaga

SEQ ID NO: 1335551 - RNA, 19 nt, Homo sapiens
  misc_RNA (1)...(19): siRNA sense strand
acacuaaacccuucuaugg

SEQ ID NO: 1335552 - RNA, 19 nt, Homo sapiens
  misc_RNA (1)...(19): siRNA sense strand
gauaccacagaaucacuua

SEQ ID NO: 1335553 - RNA, 19 nt, Homo sapiens
  misc_RNA (1)...(19): siRNA sense strand
gcagaagcccgagaaagga

SEQ ID NO: 1335554 - RNA, 19 nt, Homo sapiens
  misc_RNA (1)...(19): siRNA sense strand
gugcaaauaucaucuucca

SEQ ID NO: 1335555 - RNA, 19 nt, Homo sapiens
  misc_RNA (1)...(19): siRNA sense strand
acaauucaaugcucauauc

SEQ ID NO: 1335556 - RNA, 19 nt, Homo sapiens
  misc_RNA (1)...(19): siRNA sense strand
gaagauacaauucaaugcu

SEQ ID NO: 1335557 - RNA, 19 nt, Homo sapiens
  misc_RNA (1)...(19): siRNA sense strand
gaugcugaccuguuugauu

SEQ ID NO: 1335558 - RNA, 19 nt, Homo sapiens
  misc_RNA (1)...(19): siRNA sense strand
cacgugaacuugucuccaa

SEQ ID NO: 1335559 - RNA, 19 nt, Homo sapiens
  misc_RNA (1)...(19): siRNA sense strand
ucaugaagauggagaaugc

SEQ ID NO: 1335560 - RNA, 19 nt, Homo sapiens
  misc_RNA (1)...(19): siRNA sense strand
uuaugaugcugaugaauuc

SEQ ID NO: 1335561 - RNA, 19 nt, Homo sapiens
  misc_RNA (1)...(19): siRNA sense strand
caucucuugucgcagguua

SEQ ID NO: 1335562 - RNA, 19 nt, Homo sapiens
  misc_RNA (1)...(19): siRNA sense strand
gguaguucuuccaacguuu

SEQ ID NO: 1335563 - RNA, 19 nt, Homo sapiens
  misc_RNA (1)...(19): siRNA sense strand
caaagcgcuuaauagauuc

SEQ ID NO: 1335564 - RNA, 19 nt, Homo sapiens
  misc_RNA (1)...(19): siRNA sense strand
caagugaugcugaccuguu

SEQ ID NO: 1335565 - RNA, 19 nt, Homo sapiens
  misc_RNA (1)...(19): siRNA sense strand
ugaugaaccauuacugaaa

SEQ ID NO: 1335566 - RNA, 19 nt, Homo sapiens
  misc_RNA (1)...(19): siRNA sense strand
gggcaagaagcacagaauu

SEQ ID NO: 1335567 - RNA, 19 nt, Homo sapiens
  misc_RNA (1)...(19): siRNA sense strand
cuuccaacguuuauucuug

SEQ ID NO: 1335568 - RNA, 19 nt, Homo sapiens
  misc_RNA (1)...(19): siRNA sense strand
agacuuggaauggaucuua

SEQ ID NO: 1335569 - RNA, 19 nt, Homo sapiens
  misc_RNA (1)...(19): siRNA sense strand
caagagcguuaucaugcau

SEQ ID NO: 1335570 - RNA, 19 nt, Homo sapiens
  misc_RNA (1)...(19): siRNA sense strand
aagugaugcugaccuguuu

SEQ ID NO: 1335571 - RNA, 19 nt, Homo sapiens
  misc_RNA (1)...(19): siRNA sense strand
augcugaccuguuugauuc

SEQ ID NO: 1335572 - RNA, 19 nt, Homo sapiens
  misc_RNA (1)...(19): siRNA sense strand
aaugcuggguuuaugauga

SEQ ID NO: 1335573 - RNA, 19 nt, Homo sapiens
  misc_RNA (1)...(19): siRNA sense strand
gaaguuggaagaucagaac

SEQ ID NO: 1335574 - RNA, 19 nt, Homo sapiens
  misc_RNA (1)...(19): siRNA sense strand
agacuaugaugaacauuac

SEQ ID NO: 1335575 - RNA, 19 nt, Homo sapiens
  misc_RNA (1)...(19): siRNA sense strand
agagaacacagaacuaguu

SEQ ID NO: 1335576 - RNA, 19 nt, Homo sapiens
  misc_RNA (1)...(19): siRNA sense strand
ucccaaggaucgaaugguu

SEQ ID NO: 1335577 - RNA, 19 nt, Homo sapiens
  misc_RNA (1)...(19): siRNA sense strand
ggaccuguuugugagcauu

SEQ ID NO: 1335578 - RNA, 19 nt, Homo sapiens
  misc_RNA (1)...(19): siRNA sense strand
ugauucacaugaugacaga

SEQ ID NO: 1335579 - RNA, 19 nt, Homo sapiens
  misc_RNA (1)...(19): siRNA sense strand
ccaaauacagucccagagu

SEQ ID NO: 1335580 - RNA, 19 nt, Homo sapiens
  misc_RNA (1)...(19): siRNA sense strand
uaugaugaaccauuacuga

SEQ ID NO: 1335581 - RNA, 19 nt, Homo sapiens
  misc_RNA (1)...(19): siRNA sense strand
ucaagaagaaagugaggaa

SEQ ID NO: 1335582 - RNA, 19 nt, Homo sapiens
  misc_RNA (1)...(19): siRNA sense strand
gguuagacuuggaauggau

SEQ ID NO: 1335583 - RNA, 19 nt, Homo sapiens
  misc_RNA (1)...(19): siRNA sense strand
gcacauccggaccuguuug

SEQ ID NO: 1335584 - RNA, 19 nt, Homo sapiens
  misc_RNA (1)...(19): siRNA sense strand
aaaggaaggagaaggaaau

SEQ ID NO: 1335585 - RNA, 19 nt, Homo sapiens
  misc_RNA (1)...(19): siRNA sense strand
ugaagagaacacagaacua

SEQ ID NO: 1335586 - RNA, 19 nt, Homo sapiens
  misc_RNA (1)...(19): siRNA sense strand
ggaaguuggaagaucagaa

SEQ ID NO: 1335587 - RNA, 19 nt, Homo sapiens
  misc_RNA (1)...(19): siRNA sense strand
aagaucagaacgaguauga

SEQ ID NO: 1335588 - RNA, 19 nt, Homo sapiens
  misc_RNA (1)...(19): siRNA sense strand
ggaggagaaugcaauauua

SEQ ID NO: 1335589 - RNA, 19 nt, Homo sapiens
  misc_RNA (1)...(19): siRNA sense strand
ccaaagcgcuuaauagauu

SEQ ID NO: 1335590 - RNA, 19 nt, Homo sapiens
  misc_RNA (1)...(19): siRNA sense strand
ggaugucacuuucaacuua

SEQ ID NO: 1335591 - RNA, 19 nt, Homo sapiens
  misc_RNA (1)...(19): siRNA sense strand
gaacuugucuccaaauaca

SEQ ID NO: 1335592 - RNA, 19 nt, Homo sapiens
  misc_RNA (1)...(19): siRNA sense strand
gcucauaucuggaccaaau

SEQ ID NO: 1335593 - RNA, 19 nt, Homo sapiens
  misc_RNA (1)...(19): siRNA sense strand
ggaaggaugucacuuucaa

SEQ ID NO: 1335594 - RNA, 19 nt, Homo sapiens
  misc_RNA (1)...(19): siRNA sense strand
gcacaggcuugaagaaaga

SEQ ID NO: 1335595 - RNA, 19 nt, Homo sapiens
  misc_RNA (1)...(19): siRNA sense strand
gaaaggaucaguugccaaa

SEQ ID NO: 1335596 - RNA, 19 nt, Homo sapiens
  misc_RNA (1)...(19): siRNA sense strand
gagacaagguuauuucaug

SEQ ID NO: 1335597 - RNA, 19 nt, Homo sapiens
  misc_RNA (1)...(19): siRNA sense strand
agaaauguaugcagacuuu

SEQ ID NO: 1335598 - RNA, 19 nt, Homo sapiens
  misc_RNA (1)...(19): siRNA sense strand
gaacacagaacuaguuuca

SEQ ID NO: 1335599 - RNA, 19 nt, Homo sapiens
  misc_RNA (1)...(19): siRNA sense strand
ggaauggaauggugugaug

SEQ ID NO: 1335600 - RNA, 19 nt, Homo sapiens
  misc_RNA (1)...(19): siRNA sense strand
acacagaacuaguuucaga

SEQ ID NO: 1335601 - RNA, 19 nt, Homo sapiens
  misc_RNA (1)...(19): siRNA sense strand
gaaguugccuauaaucaag

SEQ ID NO: 1335602 - RNA, 19 nt, Homo sapiens
  misc_RNA (1)...(19): siRNA sense strand
caaauacagucccagaguu

SEQ ID NO: 1335603 - RNA, 19 nt, Homo sapiens
  misc_RNA (1)...(19): siRNA sense strand
ccaagaaguugccuauaau

SEQ ID NO: 1335604 - RNA, 19 nt, Homo sapiens
  misc_RNA (1)...(19): siRNA sense strand
caaaugauacugaagagaa

SEQ ID NO: 1335605 - RNA, 19 nt, Homo sapiens
  misc_RNA (1)...(19): siRNA sense strand
ggcaagaagcacagaauua

SEQ ID NO: 1335606 - RNA, 19 nt, Homo sapiens
  misc_RNA (1)...(19): siRNA sense strand
ggagaaugcuggguuuaug

SEQ ID NO: 1335607 - RNA, 19 nt, Homo sapiens
  misc_RNA (1)...(19): siRNA sense strand
ggaaggagaaggaaauuca

SEQ ID NO: 1335608 - RNA, 19 nt, Homo sapiens
  misc_RNA (1)...(19): siRNA sense strand
cacagcagcucgggaaaua

SEQ ID NO: 1335609 - RNA, 19 nt, Homo sapiens
  misc_RNA (1)...(19): siRNA sense strand
gaaauucagugggagacaa

SEQ ID NO: 1335610 - RNA, 19 nt, Homo sapiens
  misc_RNA (1)...(19): siRNA sense strand
cagaauuacugccgagauu

SEQ ID NO: 1335611 - RNA, 19 nt, Homo sapiens
  misc_RNA (1)...(19): siRNA sense strand
ggaaggaaaggaucaguug

SEQ ID NO: 1335612 - RNA, 19 nt, Homo sapiens
  misc_RNA (1)...(19): siRNA sense strand
ggaauggugugauguaugc

SEQ ID NO: 1335613 - RNA, 19 nt, Homo sapiens
  misc_RNA (1)...(19): siRNA sense strand
gaaggucuauccucacagu

SEQ ID NO: 1335614 - RNA, 19 nt, Homo sapiens
  misc_RNA (1)...(19): siRNA sense strand
gcacaagagcguuaucaug

SEQ ID NO: 1335615 - RNA, 19 nt, Homo sapiens
  misc_RNA (1)...(19): siRNA sense strand
gauggagaaugcuggguuu

SEQ ID NO: 1335616 - RNA, 19 nt, Homo sapiens
  misc_RNA (1)...(19): siRNA sense strand
gaugucacuuucaacuuaa

SEQ ID NO: 1335617 - RNA, 19 nt, Homo sapiens
  misc_RNA (1)...(19): siRNA sense strand
accaagaaguugccuauaa

SEQ ID NO: 1335618 - RNA, 19 nt, Homo sapiens
  misc_RNA (1)...(19): siRNA sense strand
gaagagaacacagaacuag

SEQ ID NO: 1335619 - RNA, 19 nt, Homo sapiens
  misc_RNA (1)...(19): siRNA sense strand
agacaagguuauuucauga

SEQ ID NO: 1335620 - RNA, 19 nt, Homo sapiens
  misc_RNA (1)...(19): siRNA sense strand
gugaacuugucuccaaaua

SEQ ID NO: 1335621 - RNA, 19 nt, Homo sapiens
  misc_RNA (1)...(19): siRNA sense strand
aauaucaucuuccacacua

SEQ ID NO: 1335622 - RNA, 19 nt, Homo sapiens
  misc_RNA (1)...(19): siRNA sense strand
gaggagaaugcaauauuaa

SEQ ID NO: 1335623 - RNA, 19 nt, Homo sapiens
  misc_RNA (1)...(19): siRNA sense strand
gaugcaauauaucaaccua

SEQ ID NO: 1335624 - RNA, 19 nt, Homo sapiens
  misc_RNA (1)...(19): siRNA sense strand
gaaaggaaggagaaggaaa

SEQ ID NO: 1335625 - RNA, 19 nt, Homo sapiens
  misc_RNA (1)...(19): siRNA sense strand
ucccguagaugcaauauau

SEQ ID NO: 1335626 - RNA, 19 nt, Homo sapiens
  misc_RNA (1)...(19): siRNA sense strand
gaucagaacgaguaugaau

SEQ ID NO: 1335627 - RNA, 19 nt, Homo sapiens
  misc_RNA (1)...(19): siRNA sense strand
gcagggcugugucucaugu

SEQ ID NO: 1335628 - RNA, 19 nt, Homo sapiens
  misc_RNA (1)...(19): siRNA sense strand
ugaggaaguuggaagauca

SEQ ID NO: 1335629 - RNA, 19 nt, Homo sapiens
  misc_RNA (1)...(19): siRNA sense strand
ggaauuaggaggagaaugc

SEQ ID NO: 1335630 - RNA, 19 nt, Homo sapiens
  misc_RNA (1)...(19): siRNA sense strand
caacguuuauucuugaaag

SEQ ID NO: 1335631 - RNA, 19 nt, Homo sapiens
  misc_RNA (1)...(19): siRNA sense strand
gagaaaggaaggagaagga

SEQ ID NO: 1335632 - RNA, 19 nt, Homo sapiens
  misc_RNA (1)...(19): siRNA sense strand
agaagaaagugaggaaguu

SEQ ID NO: 1335633 - RNA, 19 nt, Homo sapiens
  misc_RNA (1)...(19): siRNA sense strand
gcaagaagcacagaauuac

SEQ ID NO: 1335634 - RNA, 19 nt, Homo sapiens
  misc_RNA (1)...(19): siRNA sense strand
gagaacacagaacuaguuu

SEQ ID NO: 1335635 - RNA, 19 nt, Homo sapiens
  misc_RNA (1)...(19): siRNA sense strand
agaacuaguuucagaagga

SEQ ID NO: 1335636 - RNA, 19 nt, Homo sapiens
  misc_RNA (1)...(19): siRNA sense strand
gaugaaccauuacugaaac

SEQ ID NO: 1335637 - RNA, 19 nt, Homo sapiens
  misc_RNA (1)...(19): siRNA sense strand
gagaaugcuggguuuauga

SEQ ID NO: 1335638 - RNA, 19 nt, Homo sapiens
  misc_RNA (1)...(19): siRNA sense strand
gaacauuacauucucacau

SEQ ID NO: 1335639 - RNA, 19 nt, Homo sapiens
  misc_RNA (1)...(19): siRNA sense strand
gaugaacauuacauucuca

SEQ ID NO: 1335640 - RNA, 19 nt, Homo sapiens
  misc_RNA (1)...(19): siRNA sense strand
gagcagguuucccaucauc

SEQ ID NO: 1335641 - RNA, 19 nt, Homo sapiens
  misc_RNA (1)...(19): siRNA sense strand
ucacuuaauucuuccuugu

SEQ ID NO: 1335642 - RNA, 19 nt, Homo sapiens
  misc_RNA (1)...(19): siRNA sense strand
gaggagcacaagagcguua

SEQ ID NO: 1335643 - RNA, 19 nt, Homo sapiens
  misc_RNA (1)...(19): siRNA sense strand
cagcagugaagaugaauuu

SEQ ID NO: 1335644 - RNA, 19 nt, Homo sapiens
  misc_RNA (1)...(19): siRNA sense strand
gaagaaagugaggaaguug

SEQ ID NO: 1335645 - RNA, 19 nt, Homo sapiens
  misc_RNA (1)...(19): siRNA sense strand
gcagugaagaugaauuuua

SEQ ID NO: 1335646 - RNA, 19 nt, Homo sapiens
  misc_RNA (1)...(19): siRNA sense strand
gagcauuagugaccagaag

SEQ ID NO: 1335647 - RNA, 19 nt, Homo sapiens
  misc_RNA (1)...(19): siRNA sense strand
guaguucuuccaacguuua

SEQ ID NO: 1335648 - RNA, 19 nt, Homo sapiens
  misc_RNA (1)...(19): siRNA sense strand
uggaagaucagaacgagua

SEQ ID NO: 1335649 - RNA, 19 nt, Homo sapiens
  misc_RNA (1)...(19): siRNA sense strand
ggacaucaucagacuccua

SEQ ID NO: 1335650 - RNA, 19 nt, Homo sapiens
  misc_RNA (1)...(19): siRNA sense strand
caagguuauuucaugaaga

SEQ ID NO: 1335651 - RNA, 19 nt, Homo sapiens
  misc_RNA (1)...(19): siRNA sense strand
acacuaaacccuucuaugg

SEQ ID NO: 1335652 - RNA, 19 nt, Homo sapiens
  misc_RNA (1)...(19): siRNA sense strand
gauaccacagaaucacuua

SEQ ID NO: 1335653 - RNA, 19 nt, Homo sapiens
  misc_RNA (1)...(19): siRNA sense strand
gcagaagcccgagaaagga

SEQ ID NO: 1335654 - RNA, 19 nt, Homo sapiens
  misc_RNA (1)...(19): siRNA sense strand
gugcaaauaucaucuucca

SEQ ID NO: 1335655 - RNA, 19 nt, Homo sapiens
  misc_RNA (1)...(19): siRNA sense strand
acaauucaaugcucauauc

SEQ ID NO: 1335656 - RNA, 19 nt, Homo sapiens
  misc_RNA (1)...(19): siRNA sense strand
gaagauacaauucaaugcu

SEQ ID NO: 1335657 - RNA, 19 nt, Homo sapiens
  misc_RNA (1)...(19): siRNA sense strand
gaugcugaccuguuugauu

SEQ ID NO: 1335658 - RNA, 19 nt, Homo sapiens
  misc_RNA (1)...(19): siRNA sense strand
cacgugaacuugucuccaa

SEQ ID NO: 1335659 - RNA, 19 nt, Homo sapiens
  misc_RNA (1)...(19): siRNA sense strand
ucaugaagauggagaaugc

SEQ ID NO: 1335660 - RNA, 19 nt, Homo sapiens
  misc_RNA (1)...(19): siRNA sense strand
uuaugaugcugaugaauuc

SEQ ID NO: 1335661 - RNA, 19 nt, Homo sapiens
  misc_RNA (1)...(19): siRNA sense strand
caucucuugucgcagguua

SEQ ID NO: 1335662 - RNA, 19 nt, Homo sapiens
  misc_RNA (1)...(19): siRNA sense strand
gguaguucuuccaacguuu

SEQ ID NO: 1335663 - RNA, 19 nt, Homo sapiens
  misc_RNA (1)...(19): siRNA sense strand
caaagcgcuuaauagauuc

SEQ ID NO: 1335664 - RNA, 19 nt, Homo sapiens
  misc_RNA (1)...(19): siRNA sense strand
caagugaugcugaccuguu

SEQ ID NO: 1335665 - RNA, 19 nt, Homo sapiens
  misc_RNA (1)...(19): siRNA sense strand
ugaugaaccauuacugaaa

SEQ ID NO: 1335666 - RNA, 19 nt, Homo sapiens
  misc_RNA (1)...(19): siRNA sense strand
gggcaagaagcacagaauu

SEQ ID NO: 1335667 - RNA, 19 nt, Homo sapiens
  misc_RNA (1)...(19): siRNA sense strand
cuuccaacguuuauucuug

SEQ ID NO: 1335668 - RNA, 19 nt, Homo sapiens
  misc_RNA (1)...(19): siRNA sense strand
agacuuggaauggaucuua

SEQ ID NO: 1335669 - RNA, 19 nt, Homo sapiens
  misc_RNA (1)...(19): siRNA sense strand
caagagcguuaucaugcau

SEQ ID NO: 1335670 - RNA, 19 nt, Homo sapiens
  misc_RNA (1)...(19): siRNA sense strand
aagugaugcugaccuguuu

SEQ ID NO: 1335671 - RNA, 19 nt, Homo sapiens
  misc_RNA (1)...(19): siRNA sense strand
augcugaccuguuugauuc

SEQ ID NO: 1335672 - RNA, 19 nt, Homo sapiens
  misc_RNA (1)...(19): siRNA sense strand
aaugcuggguuuaugauga

SEQ ID NO: 1335673 - RNA, 19 nt, Homo sapiens
  misc_RNA (1)...(19): siRNA sense strand
gaaguuggaagaucagaac

SEQ ID NO: 1335674 - RNA, 19 nt, Homo sapiens
  misc_RNA (1)...(19): siRNA sense strand
agacuaugaugaacauuac

SEQ ID NO: 1335675 - RNA, 19 nt, Homo sapiens
  misc_RNA (1)...(19): siRNA sense strand
agagaacacagaacuaguu

SEQ ID NO: 1335676 - RNA, 19 nt, Homo sapiens
  misc_RNA (1)...(19): siRNA sense strand
ucccaaggaucgaaugguu

SEQ ID NO: 1335677 - RNA, 19 nt, Homo sapiens
  misc_RNA (1)...(19): siRNA sense strand
ggaccuguuugugagcauu

SEQ ID NO: 1335678 - RNA, 19 nt, Homo sapiens
  misc_RNA (1)...(19): siRNA sense strand
ugauucacaugaugacaga

SEQ ID NO: 1335679 - RNA, 19 nt, Homo sapiens
  misc_RNA (1)...(19): siRNA sense strand
ccaaauacagucccagagu

SEQ ID NO: 1335680 - RNA, 19 nt, Homo sapiens
  misc_RNA (1)...(19): siRNA sense strand
uaugaugaaccauuacuga

SEQ ID NO: 1335681 - RNA, 19 nt, Homo sapiens
  misc_RNA (1)...(19): siRNA sense strand
ucaagaagaaagugaggaa

SEQ ID NO: 1335682 - RNA, 19 nt, Homo sapiens
  misc_RNA (1)...(19): siRNA sense strand
gguuagacuuggaauggau

SEQ ID NO: 1335683 - RNA, 19 nt, Homo sapiens
  misc_RNA (1)...(19): siRNA sense strand
gcacauccggaccuguuug

SEQ ID NO: 1335684 - RNA, 19 nt, Homo sapiens
  misc_RNA (1)...(19): siRNA sense strand
aaaggaaggagaaggaaau

SEQ ID NO: 1335685 - RNA, 19 nt, Homo sapiens
  misc_RNA (1)...(19): siRNA sense strand
ugaagagaacacagaacua

SEQ ID NO: 1335686 - RNA, 19 nt, Homo sapiens
  misc_RNA (1)...(19): siRNA sense strand
ggaaguuggaagaucagaa

SEQ ID NO: 1335687 - RNA, 19 nt, Homo sapiens
  misc_RNA (1)...(19): siRNA sense strand
aagaucagaacgaguauga

SEQ ID NO: 1335688 - RNA, 19 nt, Homo sapiens
  misc_RNA (1)...(19): siRNA sense strand
ggaggagaaugcaauauua

SEQ ID NO: 1335689 - RNA, 19 nt, Homo sapiens
  misc_RNA (1)...(19): siRNA sense strand
ccaaagcgcuuaauagauu

SEQ ID NO: 1335690 - RNA, 19 nt, Homo sapiens
  misc_RNA (1)...(19): siRNA sense strand
ggaugucacuuucaacuua

SEQ ID NO: 1335691 - RNA, 19 nt, Homo sapiens
  misc_RNA (1)...(19): siRNA sense strand
gaacuugucuccaaauaca

SEQ ID NO: 1335692 - RNA, 19 nt, Homo sapiens
  misc_RNA (1)...(19): siRNA sense strand
gcucauaucuggaccaaau

SEQ ID NO: 1335693 - RNA, 19 nt, Homo sapiens
  misc_RNA (1)...(19): siRNA sense strand
ggaaggaugucacuuucaa

SEQ ID NO: 1335694 - RNA, 19 nt, Homo sapiens
  misc_RNA (1)...(19): siRNA sense strand
gcacaggcuugaagaaaga

SEQ ID NO: 1335695 - RNA, 19 nt, Homo sapiens
  misc_RNA (1)...(19): siRNA sense strand
gaaaggaucaguugccaaa

SEQ ID NO: 1335696 - RNA, 19 nt, Homo sapiens
  misc_RNA (1)...(19): siRNA sense strand
gagacaagguuauuucaug

SEQ ID NO: 1335697 - RNA, 19 nt, Homo sapiens
  misc_RNA (1)...(19): siRNA sense strand
agaaauguaugcagacuuu

SEQ ID NO: 1335698 - RNA, 19 nt, Homo sapiens
  misc_RNA (1)...(19): siRNA sense strand
gaacacagaacuaguuuca

SEQ ID NO: 1335699 - RNA, 19 nt, Homo sapiens
  misc_RNA (1)...(19): siRNA sense strand
ggaauggaauggugugaug

SEQ ID NO: 1335700 - RNA, 19 nt, Homo sapiens
  misc_RNA (1)...(19): siRNA sense strand
acacagaacuaguuucaga

SEQ ID NO: 1335701 - RNA, 19 nt, Homo sapiens
  misc_RNA (1)...(19): siRNA sense strand
gaaguugccuauaaucaag

SEQ ID NO: 1335702 - RNA, 19 nt, Homo sapiens
  misc_RNA (1)...(19): siRNA sense strand
caaauacagucccagaguu

SEQ ID NO: 1335703 - RNA, 19 nt, Homo sapiens
  misc_RNA (1)...(19): siRNA sense strand
ccaagaaguugccuauaau

SEQ ID NO: 1335704 - RNA, 19 nt, Homo sapiens
  misc_RNA (1)...(19): siRNA sense strand
caaaugauacugaagagaa

SEQ ID NO: 1335705 - RNA, 19 nt, Homo sapiens
  misc_RNA (1)...(19): siRNA sense strand
ggcaagaagcacagaauua

SEQ ID NO: 1335706 - RNA, 19 nt, Homo sapiens
  misc_RNA (1)...(19): siRNA sense strand
ggagaaugcuggguuuaug

SEQ ID NO: 1335707 - RNA, 19 nt, Homo sapiens
  misc_RNA (1)...(19): siRNA sense strand
ggaaggagaaggaaauuca

SEQ ID NO: 1335708 - RNA, 19 nt, Homo sapiens
  misc_RNA (1)...(19): siRNA sense strand
cacagcagcucgggaaaua

SEQ ID NO: 1335709 - RNA, 19 nt, Homo sapiens
  misc_RNA (1)...(19): siRNA sense strand
gaaauucagugggagacaa

SEQ ID NO: 1335710 - RNA, 19 nt, Homo sapiens
  misc_RNA (1)...(19): siRNA sense strand
cagaauuacugccgagauu

SEQ ID NO: 1335711 - RNA, 19 nt, Homo sapiens
  misc_RNA (1)...(19): siRNA sense strand
ggaaggaaaggaucaguug

SEQ ID NO: 1335712 - RNA, 19 nt, Homo sapiens
  misc_RNA (1)...(19): siRNA sense strand
ggaauggugugauguaugc

SEQ ID NO: 1335713 - RNA, 19 nt, Homo sapiens
  misc_RNA (1)...(19): siRNA sense strand
gaaggucuauccucacagu

SEQ ID NO: 1335714 - RNA, 19 nt, Homo sapiens
  misc_RNA (1)...(19): siRNA sense strand
gcacaagagcguuaucaug

SEQ ID NO: 1335715 - RNA, 19 nt, Homo sapiens
  misc_RNA (1)...(19): siRNA sense strand
gauggagaaugcuggguuu

SEQ ID NO: 1335716 - RNA, 19 nt, Homo sapiens
  misc_RNA (1)...(19): siRNA sense strand
gaugucacuuucaacuuaa

SEQ ID NO: 1335717 - RNA, 19 nt, Homo sapiens
  misc_RNA (1)...(19): siRNA sense strand
accaagaaguugccuauaa

SEQ ID NO: 1335718 - RNA, 19 nt, Homo sapiens
  misc_RNA (1)...(19): siRNA sense strand
gaagagaacacagaacuag

SEQ ID NO: 1335719 - RNA, 19 nt, Homo sapiens
  misc_RNA (1)...(19): siRNA sense strand
agacaagguuauuucauga

SEQ ID NO: 1335720 - RNA, 19 nt, Homo sapiens
  misc_RNA (1)...(19): siRNA sense strand
gugaacuugucuccaaaua

SEQ ID NO: 1335721 - RNA, 19 nt, Homo sapiens
  misc_RNA (1)...(19): siRNA sense strand
aauaucaucuuccacacua

SEQ ID NO: 1335722 - RNA, 19 nt, Homo sapiens
  misc_RNA (1)...(19): siRNA sense strand
gaggagaaugcaauauuaa

SEQ ID NO: 1335723 - RNA, 19 nt, Homo sapiens
  misc_RNA (1)...(19): siRNA sense strand
gaugcaauauaucaaccua

SEQ ID NO: 1335724 - RNA, 19 nt, Homo sapiens
  misc_RNA (1)...(19): siRNA sense strand
gaaaggaaggagaaggaaa

SEQ ID NO: 1335725 - RNA, 19 nt, Homo sapiens
  misc_RNA (1)...(19): siRNA sense strand
ucccguagaugcaauauau

SEQ ID NO: 1335726 - RNA, 19 nt, Homo sapiens
  misc_RNA (1)...(19): siRNA sense strand
gaucagaacgaguaugaau

SEQ ID NO: 1335727 - RNA, 19 nt, Homo sapiens
  misc_RNA (1)...(19): siRNA sense strand
gcagggcugugucucaugu

SEQ ID NO: 1335728 - RNA, 19 nt, Homo sapiens
  misc_RNA (1)...(19): siRNA sense strand
ugaggaaguuggaagauca

SEQ ID NO: 1335729 - RNA, 19 nt, Homo sapiens
  misc_RNA (1)...(19): siRNA sense strand
ggaauuaggaggagaaugc

SEQ ID NO: 1335730 - RNA, 19 nt, Homo sapiens
  misc_RNA (1)...(19): siRNA sense strand
caacguuuauucuugaaag

SEQ ID NO: 1335731 - RNA, 19 nt, Homo sapiens
  misc_RNA (1)...(19): siRNA sense strand
gagaaaggaaggagaagga

SEQ ID NO: 1335732 - RNA, 19 nt, Homo sapiens
  misc_RNA (1)...(19): siRNA sense strand
agaagaaagugaggaaguu

SEQ ID NO: 1335733 - RNA, 19 nt, Homo sapiens
  misc_RNA (1)...(19): siRNA sense strand
gcaagaagcacagaauuac

SEQ ID NO: 1335734 - RNA, 19 nt, Homo sapiens
  misc_RNA (1)...(19): siRNA sense strand
gagaacacagaacuaguuu

SEQ ID NO: 1335735 - RNA, 19 nt, Homo sapiens
  misc_RNA (1)...(19): siRNA sense strand
agaacuaguuucagaagga

SEQ ID NO: 1335736 - RNA, 19 nt, Homo sapiens
  misc_RNA (1)...(19): siRNA sense strand
gaugaaccauuacugaaac

SEQ ID NO: 1335737 - RNA, 19 nt, Homo sapiens
  misc_RNA (1)...(19): siRNA sense strand
gagaaugcuggguuuauga

SEQ ID NO: 1335738 - RNA, 19 nt, Homo sapiens
  misc_RNA (1)...(19): siRNA sense strand
gaacauuacauucucacau

SEQ ID NO: 1335739 - RNA, 19 nt, Homo sapiens
  misc_RNA (1)...(19): siRNA sense strand
gaugaacauuacauucuca

SEQ ID NO: 1335740 - RNA, 19 nt, Homo sapiens
  misc_RNA (1)...(19): siRNA sense strand
gagcagguuucccaucauc

SEQ ID NO: 1335741 - RNA, 19 nt, Homo sapiens
  misc_RNA (1)...(19): siRNA sense strand
ucacuuaauucuuccuugu

SEQ ID NO: 1335742 - RNA, 19 nt, Homo sapiens
  misc_RNA (1)...(19): siRNA sense strand
gaggagcacaagagcguua

SEQ ID NO: 1335743 - RNA, 19 nt, Homo sapiens
  misc_RNA (1)...(19): siRNA sense strand
cagcagugaagaugaauuu

SEQ ID NO: 1335744 - RNA, 19 nt, Homo sapiens
  misc_RNA (1)...(19): siRNA sense strand
gaagaaagugaggaaguug

SEQ ID NO: 1335745 - RNA, 19 nt, Homo sapiens
  misc_RNA (1)...(19): siRNA sense strand
gcagugaagaugaauuuua

SEQ ID NO: 1335746 - RNA, 19 nt, Homo sapiens
  misc_RNA (1)...(19): siRNA sense strand
gagcauuagugaccagaag

SEQ ID NO: 1335747 - RNA, 19 nt, Homo sapiens
  misc_RNA (1)...(19): siRNA sense strand
guaguucuuccaacguuua

SEQ ID NO: 1335748 - RNA, 19 nt, Homo sapiens
  misc_RNA (1)...(19): siRNA sense strand
uggaagaucagaacgagua

SEQ ID NO: 1335749 - RNA, 19 nt, Homo sapiens
  misc_RNA (1)...(19): siRNA sense strand
ggacaucaucagacuccua

SEQ ID NO: 1335750 - RNA, 19 nt, Homo sapiens
  misc_RNA (1)...(19): siRNA sense strand
caagguuauuucaugaaga

SEQ ID NO: 1335751 - RNA, 19 nt, Homo sapiens
  misc_RNA (1)...(19): siRNA sense strand
acacuaaacccuucuaugg

SEQ ID NO: 1335752 - RNA, 19 nt, Homo sapiens
  misc_RNA (1)...(19): siRNA sense strand
gauaccacagaaucacuua

SEQ ID NO: 1335753 - RNA, 19 nt, Homo sapiens
  misc_RNA (1)...(19): siRNA sense strand
gcagaagcccgagaaagga

SEQ ID NO: 1335754 - RNA, 19 nt, Homo sapiens
  misc_RNA (1)...(19): siRNA sense strand
gugcaaauaucaucuucca

SEQ ID NO: 1335755 - RNA, 19 nt, Homo sapiens
  misc_RNA (1)...(19): siRNA sense strand
acaauucaaugcucauauc

SEQ ID NO: 1335756 - RNA, 19 nt, Homo sapiens
  misc_RNA (1)...(19): siRNA sense strand
gaagauacaauucaaugcu

SEQ ID NO: 1335757 - RNA, 19 nt, Homo sapiens
  misc_RNA (1)...(19): siRNA sense strand
gaugcugaccuguuugauu

SEQ ID NO: 1335758 - RNA, 19 nt, Homo sapiens
  misc_RNA (1)...(19): siRNA sense strand
cacgugaacuugucuccaa

SEQ ID NO: 1335759 - RNA, 19 nt, Homo sapiens
  misc_RNA (1)...(19): siRNA sense strand
ucaugaagauggagaaugc

SEQ ID NO: 1335760 - RNA, 19 nt, Homo sapiens
  misc_RNA (1)...(19): siRNA sense strand
uuaugaugcugaugaauuc

SEQ ID NO: 1335761 - RNA, 19 nt, Homo sapiens
  misc_RNA (1)...(19): siRNA sense strand
caucucuugucgcagguua

SEQ ID NO: 1335762 - RNA, 19 nt, Homo sapiens
  misc_RNA (1)...(19): siRNA sense strand
gguaguucuuccaacguuu

SEQ ID NO: 1335763 - RNA, 19 nt, Homo sapiens
  misc_RNA (1)...(19): siRNA sense strand
caaagcgcuuaauagauuc

SEQ ID NO: 1335764 - RNA, 19 nt, Homo sapiens
  misc_RNA (1)...(19): siRNA sense strand
caagugaugcugaccuguu

SEQ ID NO: 1335765 - RNA, 19 nt, Homo sapiens
  misc_RNA (1)...(19): siRNA sense strand
ugaugaaccauuacugaaa

SEQ ID NO: 1335766 - RNA, 19 nt, Homo sapiens
  misc_RNA (1)...(19): siRNA sense strand
gggcaagaagcacagaauu

SEQ ID NO: 1335767 - RNA, 19 nt, Homo sapiens
  misc_RNA (1)...(19): siRNA sense strand
cuuccaacguuuauucuug

SEQ ID NO: 1335768 - RNA, 19 nt, Homo sapiens
  misc_RNA (1)...(19): siRNA sense strand
agacuuggaauggaucuua

SEQ ID NO: 1335769 - RNA, 19 nt, Homo sapiens
  misc_RNA (1)...(19): siRNA sense strand
caagagcguuaucaugcau

SEQ ID NO: 1335770 - RNA, 19 nt, Homo sapiens
  misc_RNA (1)...(19): siRNA sense strand
aagugaugcugaccuguuu

SEQ ID NO: 1335771 - RNA, 19 nt, Homo sapiens
  misc_RNA (1)...(19): siRNA sense strand
augcugaccuguuugauuc

SEQ ID NO: 1335772 - RNA, 19 nt, Homo sapiens
  misc_RNA (1)...(19): siRNA sense strand
aaugcuggguuuaugauga

SEQ ID NO: 1335773 - RNA, 19 nt, Homo sapiens
  misc_RNA (1)...(19): siRNA sense strand
gaaguuggaagaucagaac

SEQ ID NO: 1335774 - RNA, 19 nt, Homo sapiens
  misc_RNA (1)...(19): siRNA sense strand
agacuaugaugaacauuac

SEQ ID NO: 1335775 - RNA, 19 nt, Homo sapiens
  misc_RNA (1)...(19): siRNA sense strand
agagaacacagaacuaguu

SEQ ID NO: 1335776 - RNA, 19 nt, Homo sapiens
  misc_RNA (1)...(19): siRNA sense strand
ucccaaggaucgaaugguu

SEQ ID NO: 1335777 - RNA, 19 nt, Homo sapiens
  misc_RNA (1)...(19): siRNA sense strand
ggaccuguuugugagcauu

SEQ ID NO: 1335778 - RNA, 19 nt, Homo sapiens
  misc_RNA (1)...(19): siRNA sense strand
ugauucacaugaugacaga

SEQ ID NO: 1335779 - RNA, 19 nt, Homo sapiens
  misc_RNA (1)...(19): siRNA sense strand
ccaaauacagucccagagu

SEQ ID NO: 1335780 - RNA, 19 nt, Homo sapiens
  misc_RNA (1)...(19): siRNA sense strand
uaugaugaaccauuacuga

SEQ ID NO: 1335781 - RNA, 19 nt, Homo sapiens
  misc_RNA (1)...(19): siRNA sense strand
ucaagaagaaagugaggaa

SEQ ID NO: 1335782 - RNA, 19 nt, Homo sapiens
  misc_RNA (1)...(19): siRNA sense strand
gguuagacuuggaauggau

SEQ ID NO: 1335783 - RNA, 19 nt, Homo sapiens
  misc_RNA (1)...(19): siRNA sense strand
gcacauccggaccuguuug

SEQ ID NO: 1335784 - RNA, 19 nt, Homo sapiens
  misc_RNA (1)...(19): siRNA sense strand
aaaggaaggagaaggaaau

SEQ ID NO: 1335785 - RNA, 19 nt, Homo sapiens
  misc_RNA (1)...(19): siRNA sense strand
ugaagagaacacagaacua

SEQ ID NO: 1335786 - RNA, 19 nt, Homo sapiens
  misc_RNA (1)...(19): siRNA sense strand
ggaaguuggaagaucagaa

SEQ ID NO: 1335787 - RNA, 19 nt, Homo sapiens
  misc_RNA (1)...(19): siRNA sense strand
aagaucagaacgaguauga

SEQ ID NO: 1335788 - RNA, 19 nt, Homo sapiens
  misc_RNA (1)...(19): siRNA sense strand
ggaggagaaugcaauauua

SEQ ID NO: 1335789 - RNA, 19 nt, Homo sapiens
  misc_RNA (1)...(19): siRNA sense strand
ccaaagcgcuuaauagauu

SEQ ID NO: 1335790 - RNA, 19 nt, Homo sapiens
  misc_RNA (1)...(19): siRNA sense strand
ggaugucacuuucaacuua

SEQ ID NO: 1335791 - RNA, 19 nt, Homo sapiens
  misc_RNA (1)...(19): siRNA sense strand
caaagaagaugaacagaga

SEQ ID NO: 1335792 - RNA, 19 nt, Homo sapiens
  misc_RNA (1)...(19): siRNA sense strand
gaacuugucuccaaauaca

SEQ ID NO: 1335793 - RNA, 19 nt, Homo sapiens
  misc_RNA (1)...(19): siRNA sense strand
gcucauaucuggaccaaau

SEQ ID NO: 1335794 - RNA, 19 nt, Homo sapiens
  misc_RNA (1)...(19): siRNA sense strand
ggaaggaugucacuuucaa

SEQ ID NO: 1335795 - RNA, 19 nt, Homo sapiens
  misc_RNA (1)...(19): siRNA sense strand
gcacaggcuugaagaaaga

SEQ ID NO: 1335796 - RNA, 19 nt, Homo sapiens
  misc_RNA (1)...(19): siRNA sense strand
gaaaggaucaguugccaaa

SEQ ID NO: 1335797 - RNA, 19 nt, Homo sapiens
  misc_RNA (1)...(19): siRNA sense strand
gagacaagguuauuucaug

SEQ ID NO: 1335798 - RNA, 19 nt, Homo sapiens
  misc_RNA (1)...(19): siRNA sense strand
agaaauguaugcagacuuu

SEQ ID NO: 1335799 - RNA, 19 nt, Homo sapiens
  misc_RNA (1)...(19): siRNA sense strand
gaacacagaacuaguuuca

SEQ ID NO: 1335800 - RNA, 19 nt, Homo sapiens
  misc_RNA (1)...(19): siRNA sense strand
ggaauggaauggugugaug

SEQ ID NO: 1335801 - RNA, 19 nt, Homo sapiens
  misc_RNA (1)...(19): siRNA sense strand
acacagaacuaguuucaga

SEQ ID NO: 1335802 - RNA, 19 nt, Homo sapiens
  misc_RNA (1)...(19): siRNA sense strand
gaaguugccuauaaucaag

SEQ ID NO: 1335803 - RNA, 19 nt, Homo sapiens
  misc_RNA (1)...(19): siRNA sense strand
caaauacagucccagaguu

SEQ ID NO: 1335804 - RNA, 19 nt, Homo sapiens
  misc_RNA (1)...(19): siRNA sense strand
ccaagaaguugccuauaau

SEQ ID NO: 1335805 - RNA, 19 nt, Homo sapiens
  misc_RNA (1)...(19): siRNA sense strand
gacaacaaauagcauggua

SEQ ID NO: 1335806 - RNA, 19 nt, Homo sapiens
  misc_RNA (1)...(19): siRNA sense strand
caaaugauacugaagagaa

SEQ ID NO: 1335807 - RNA, 19 nt, Homo sapiens
  misc_RNA (1)...(19): siRNA sense strand
ggcaagaagcacagaauua

SEQ ID NO: 1335808 - RNA, 19 nt, Homo sapiens
  misc_RNA (1)...(19): siRNA sense strand
ggagaaugcuggguuuaug

SEQ ID NO: 1335809 - RNA, 19 nt, Homo sapiens
  misc_RNA (1)...(19): siRNA sense strand
caaauagcaugguagaauc

SEQ ID NO: 1335810 - RNA, 19 nt, Homo sapiens
  misc_RNA (1)...(19): siRNA sense strand
ggaaggagaaggaaauuca

SEQ ID NO: 1335811 - RNA, 19 nt, Homo sapiens
  misc_RNA (1)...(19): siRNA sense strand
gaagaugaacagagaaaga

SEQ ID NO: 1335812 - RNA, 19 nt, Homo sapiens
  misc_RNA (1)...(19): siRNA sense strand
cacagcagcucgggaaaua

SEQ ID NO: 1335813 - RNA, 19 nt, Homo sapiens
  misc_RNA (1)...(19): siRNA sense strand
gaaauucagugggagacaa

SEQ ID NO: 1335814 - RNA, 19 nt, Homo sapiens
  misc_RNA (1)...(19): siRNA sense strand
cagaauuacugccgagauu

SEQ ID NO: 1335815 - RNA, 19 nt, Homo sapiens
  misc_RNA (1)...(19): siRNA sense strand
ggaaggaaaggaucaguug

SEQ ID NO: 1335816 - RNA, 19 nt, Homo sapiens
  misc_RNA (1)...(19): siRNA sense strand
ggaauggugugauguaugc

SEQ ID NO: 1335817 - RNA, 19 nt, Homo sapiens
  misc_RNA (1)...(19): siRNA sense strand
gaaggucuauccucacagu

SEQ ID NO: 1335818 - RNA, 19 nt, Homo sapiens
  misc_RNA (1)...(19): siRNA sense strand
gcacaagagcguuaucaug

SEQ ID NO: 1335819 - RNA, 19 nt, Homo sapiens
  misc_RNA (1)...(19): siRNA sense strand
gauggagaaugcuggguuu

SEQ ID NO: 1335820 - RNA, 19 nt, Homo sapiens
  misc_RNA (1)...(19): siRNA sense strand
gaugucacuuucaacuuaa

SEQ ID NO: 1335821 - RNA, 19 nt, Homo sapiens
  misc_RNA (1)...(19): siRNA sense strand
gaacagagaaagaaaauug

SEQ ID NO: 1335822 - RNA, 19 nt, Homo sapiens
  misc_RNA (1)...(19): siRNA sense strand
ucaaagagacaacaaauag

SEQ ID NO: 1335823 - RNA, 19 nt, Homo sapiens
  misc_RNA (1)...(19): siRNA sense strand
accaagaaguugccuauaa

SEQ ID NO: 1335824 - RNA, 19 nt, Homo sapiens
  misc_RNA (1)...(19): siRNA sense strand
gaagagaacacagaacuag

SEQ ID NO: 1335825 - RNA, 19 nt, Homo sapiens
  misc_RNA (1)...(19): siRNA sense strand
agacaagguuauuucauga

SEQ ID NO: 1335826 - RNA, 19 nt, Homo sapiens
  misc_RNA (1)...(19): siRNA sense strand
gugaacuugucuccaaaua

SEQ ID NO: 1335827 - RNA, 19 nt, Homo sapiens
  misc_RNA (1)...(19): siRNA sense strand
aauaucaucuuccacacua

SEQ ID NO: 1335828 - RNA, 19 nt, Homo sapiens
  misc_RNA (1)...(19): siRNA sense strand
gaggagaaugcaauauuaa

SEQ ID NO: 1335829 - RNA, 19 nt, Homo sapiens
  misc_RNA (1)...(19): siRNA sense strand
gaugcaauauaucaaccua

SEQ ID NO: 1335830 - RNA, 19 nt, Homo sapiens
  misc_RNA (1)...(19): siRNA sense strand
gaaaggaaggagaaggaaa

SEQ ID NO: 1335831 - RNA, 19 nt, Homo sapiens
  misc_RNA (1)...(19): siRNA sense strand
ucccguagaugcaauauau

SEQ ID NO: 1335832 - RNA, 19 nt, Homo sapiens
  misc_RNA (1)...(19): siRNA sense strand
gaucagaacgaguaugaau

SEQ ID NO: 1335833 - RNA, 19 nt, Homo sapiens
  misc_RNA (1)...(19): siRNA sense strand
caacaaauagcaugguaga

SEQ ID NO: 1335834 - RNA, 19 nt, Homo sapiens
  misc_RNA (1)...(19): siRNA sense strand
gcagggcugugucucaugu

SEQ ID NO: 1335835 - RNA, 19 nt, Homo sapiens
  misc_RNA (1)...(19): siRNA sense strand
ugaggaaguuggaagauca

SEQ ID NO: 1335836 - RNA, 19 nt, Homo sapiens
  misc_RNA (1)...(19): siRNA sense strand
ggaauuaggaggagaaugc

SEQ ID NO: 1335837 - RNA, 19 nt, Homo sapiens
  misc_RNA (1)...(19): siRNA sense strand
caacguuuauucuugaaag

SEQ ID NO: 1335838 - RNA, 19 nt, Homo sapiens
  misc_RNA (1)...(19): siRNA sense strand
gagaaaggaaggagaagga

SEQ ID NO: 1335839 - RNA, 19 nt, Homo sapiens
  misc_RNA (1)...(19): siRNA sense strand
agaagaaagugaggaaguu

SEQ ID NO: 1335840 - RNA, 19 nt, Homo sapiens
  misc_RNA (1)...(19): siRNA sense strand
gcaagaagcacagaauuac

SEQ ID NO: 1335841 - RNA, 19 nt, Homo sapiens
  misc_RNA (1)...(19): siRNA sense strand
gagaacacagaacuaguuu

SEQ ID NO: 1335842 - RNA, 19 nt, Homo sapiens
  misc_RNA (1)...(19): siRNA sense strand
agaacuaguuucagaagga

SEQ ID NO: 1335843 - RNA, 19 nt, Homo sapiens
  misc_RNA (1)...(19): siRNA sense strand
gaugaaccauuacugaaac

SEQ ID NO: 1335844 - RNA, 19 nt, Homo sapiens
  misc_RNA (1)...(19): siRNA sense strand
gagaaugcuggguuuauga

SEQ ID NO: 1335845 - RNA, 19 nt, Homo sapiens
  misc_RNA (1)...(19): siRNA sense strand
gaacauuacauucucacau

SEQ ID NO: 1335846 - RNA, 19 nt, Homo sapiens
  misc_RNA (1)...(19): siRNA sense strand
gaugaacauuacauucuca

SEQ ID NO: 1335847 - RNA, 19 nt, Homo sapiens
  misc_RNA (1)...(19): siRNA sense strand
gagcagguuucccaucauc

SEQ ID NO: 1335848 - RNA, 19 nt, Homo sapiens
  misc_RNA (1)...(19): siRNA sense strand
ucacuuaauucuuccuugu

SEQ ID NO: 1335849 - RNA, 19 nt, Homo sapiens
  misc_RNA (1)...(19): siRNA sense strand
gaggagcacaagagcguua

SEQ ID NO: 1335850 - RNA, 19 nt, Homo sapiens
  misc_RNA (1)...(19): siRNA sense strand
cagcagugaagaugaauuu

SEQ ID NO: 1335851 - RNA, 19 nt, Homo sapiens
  misc_RNA (1)...(19): siRNA sense strand
gaagaaagugaggaaguug

SEQ ID NO: 1335852 - RNA, 19 nt, Homo sapiens
  misc_RNA (1)...(19): siRNA sense strand
gcagugaagaugaauuuua

SEQ ID NO: 1335853 - RNA, 19 nt, Homo sapiens
  misc_RNA (1)...(19): siRNA sense strand
gagcauuagugaccagaag

SEQ ID NO: 1335854 - RNA, 19 nt, Homo sapiens
  misc_RNA (1)...(19): siRNA sense strand
guaguucuuccaacguuua

SEQ ID NO: 1335855 - RNA, 19 nt, Homo sapiens
  misc_RNA (1)...(19): siRNA sense strand
uggaagaucagaacgagua

SEQ ID NO: 1335856 - RNA, 19 nt, Homo sapiens
  misc_RNA (1)...(19): siRNA sense strand
ggacaucaucagacuccua

SEQ ID NO: 1335857 - RNA, 19 nt, Homo sapiens
  misc_RNA (1)...(19): siRNA sense strand
caagguuauuucaugaaga

SEQ ID NO: 1335858 - RNA, 19 nt, Homo sapiens
  misc_RNA (1)...(19): siRNA sense strand
acacuaaacccuucuaugg

SEQ ID NO: 1335859 - RNA, 19 nt, Homo sapiens
  misc_RNA (1)...(19): siRNA sense strand
gauaccacagaaucacuua

SEQ ID NO: 1335860 - RNA, 19 nt, Homo sapiens
  misc_RNA (1)...(19): siRNA sense strand
gcagaagcccgagaaagga

SEQ ID NO: 1335861 - RNA, 19 nt, Homo sapiens
  misc_RNA (1)...(19): siRNA sense strand
acaaauagcaugguagaau

SEQ ID NO: 1335862 - RNA, 19 nt, Homo sapiens
  misc_RNA (1)...(19): siRNA sense strand
gugcaaauaucaucuucca

SEQ ID NO: 1335863 - RNA, 19 nt, Homo sapiens
  misc_RNA (1)...(19): siRNA sense strand
acaauucaaugcucauauc

SEQ ID NO: 1335864 - RNA, 19 nt, Homo sapiens
  misc_RNA (1)...(19): siRNA sense strand
gaagauacaauucaaugcu

SEQ ID NO: 1335865 - RNA, 19 nt, Homo sapiens
  misc_RNA (1)...(19): siRNA sense strand
gaugcugaccuguuugauu

SEQ ID NO: 1335866 - RNA, 19 nt, Homo sapiens
  misc_RNA (1)...(19): siRNA sense strand
cacgugaacuugucuccaa

SEQ ID NO: 1335867 - RNA, 19 nt, Homo sapiens
  misc_RNA (1)...(19): siRNA sense strand
ucaugaagauggagaaugc

SEQ ID NO: 1335868 - RNA, 19 nt, Homo sapiens
  misc_RNA (1)...(19): siRNA sense strand
uuaugaugcugaugaauuc

SEQ ID NO: 1335869 - RNA, 19 nt, Homo sapiens
  misc_RNA (1)...(19): siRNA sense strand
caucucuugucgcagguua

SEQ ID NO: 1335870 - RNA, 19 nt, Homo sapiens
  misc_RNA (1)...(19): siRNA sense strand
gguaguucuuccaacguuu

SEQ ID NO: 1335871 - RNA, 19 nt, Homo sapiens
  misc_RNA (1)...(19): siRNA sense strand
caaagcgcuuaauagauuc

SEQ ID NO: 1335872 - RNA, 19 nt, Homo sapiens
  misc_RNA (1)...(19): siRNA sense strand
caagugaugcugaccuguu

SEQ ID NO: 1335873 - RNA, 19 nt, Homo sapiens
  misc_RNA (1)...(19): siRNA sense strand
ugaugaaccauuacugaaa

SEQ ID NO: 1335874 - RNA, 19 nt, Homo sapiens
  misc_RNA (1)...(19): siRNA sense strand
gggcaagaagcacagaauu

SEQ ID NO: 1335875 - RNA, 19 nt, Homo sapiens
  misc_RNA (1)...(19): siRNA sense strand
cuuccaacguuuauucuug

SEQ ID NO: 1335876 - RNA, 19 nt, Homo sapiens
  misc_RNA (1)...(19): siRNA sense strand
agacuuggaauggaucuua

SEQ ID NO: 1335877 - RNA, 19 nt, Homo sapiens
  misc_RNA (1)...(19): siRNA sense strand
caagagcguuaucaugcau

SEQ ID NO: 1335878 - RNA, 19 nt, Homo sapiens
  misc_RNA (1)...(19): siRNA sense strand
aagugaugcugaccuguuu

SEQ ID NO: 1335879 - RNA, 19 nt, Homo sapiens
  misc_RNA (1)...(19): siRNA sense strand
augcugaccuguuugauuc

SEQ ID NO: 1335880 - RNA, 19 nt, Homo sapiens
  misc_RNA (1)...(19): siRNA sense strand
aaugcuggguuuaugauga

SEQ ID NO: 1335881 - RNA, 19 nt, Homo sapiens
  misc_RNA (1)...(19): siRNA sense strand
gaaguuggaagaucagaac

SEQ ID NO: 1335882 - RNA, 19 nt, Homo sapiens
  misc_RNA (1)...(19): siRNA sense strand
agacuaugaugaacauuac

SEQ ID NO: 1335883 - RNA, 19 nt, Homo sapiens
  misc_RNA (1)...(19): siRNA sense strand
agagaacacagaacuaguu

SEQ ID NO: 1335884 - RNA, 19 nt, Homo sapiens
  misc_RNA (1)...(19): siRNA sense strand
ucccaaggaucgaaugguu

SEQ ID NO: 1335885 - RNA, 19 nt, Homo sapiens
  misc_RNA (1)...(19): siRNA sense strand
ggaccuguuugugagcauu

SEQ ID NO: 1335886 - RNA, 19 nt, Homo sapiens
  misc_RNA (1)...(19): siRNA sense strand
ugauucacaugaugacaga

SEQ ID NO: 1335887 - RNA, 19 nt, Homo sapiens
  misc_RNA (1)...(19): siRNA sense strand
uaugaugaaccauuacuga

SEQ ID NO: 1335888 - RNA, 19 nt, Homo sapiens
  misc_RNA (1)...(19): siRNA sense strand
ggaggagaaugcaauauua

SEQ ID NO: 1335889 - RNA, 19 nt, Homo sapiens
  misc_RNA (1)...(19): siRNA sense strand
ccaaagcgcuuaauagauu

SEQ ID NO: 1335890 - RNA, 19 nt, Homo sapiens
  misc_RNA (1)...(19): siRNA sense strand
ggaugucacuuucaacuua

SEQ ID NO: 1335891 - RNA, 19 nt, Homo sapiens
  misc_RNA (1)...(19): siRNA sense strand
caaagaagaugaacagaga

SEQ ID NO: 1335892 - RNA, 19 nt, Homo sapiens
  misc_RNA (1)...(19): siRNA sense strand
gaacuugucuccaaauaca

SEQ ID NO: 1335893 - RNA, 19 nt, Homo sapiens
  misc_RNA (1)...(19): siRNA sense strand
gcucauaucuggaccaaau

SEQ ID NO: 1335894 - RNA, 19 nt, Homo sapiens
  misc_RNA (1)...(19): siRNA sense strand
ggaaggaugucacuuucaa

SEQ ID NO: 1335895 - RNA, 19 nt, Homo sapiens
  misc_RNA (1)...(19): siRNA sense strand
gcacaggcuugaagaaaga

SEQ ID NO: 1335896 - RNA, 19 nt, Homo sapiens
  misc_RNA (1)...(19): siRNA sense strand
gaaaggaucaguugccaaa

SEQ ID NO: 1335897 - RNA, 19 nt, Homo sapiens
  misc_RNA (1)...(19): siRNA sense strand
gagacaagguuauuucaug

SEQ ID NO: 1335898 - RNA, 19 nt, Homo sapiens
  misc_RNA (1)...(19): siRNA sense strand
agaaauguaugcagacuuu

SEQ ID NO: 1335899 - RNA, 19 nt, Homo sapiens
  misc_RNA (1)...(19): siRNA sense strand
gaacacagaacuaguuuca

SEQ ID NO: 1335900 - RNA, 19 nt, Homo sapiens
  misc_RNA (1)...(19): siRNA sense strand
ggaauggaauggugugaug

SEQ ID NO: 1335901 - RNA, 19 nt, Homo sapiens
  misc_RNA (1)...(19): siRNA sense strand
acacagaacuaguuucaga

SEQ ID NO: 1335902 - RNA, 19 nt, Homo sapiens
  misc_RNA (1)...(19): siRNA sense strand
gaaguugccuauaaucaag

SEQ ID NO: 1335903 - RNA, 19 nt, Homo sapiens
  misc_RNA (1)...(19): siRNA sense strand
caaauacagucccagaguu

SEQ ID NO: 1335904 - RNA, 19 nt, Homo sapiens
  misc_RNA (1)...(19): siRNA sense strand
ccaagaaguugccuauaau

SEQ ID NO: 1335905 - RNA, 19 nt, Homo sapiens
  misc_RNA (1)...(19): siRNA sense strand
gacaacaaauagcauggua

SEQ ID NO: 1335906 - RNA, 19 nt, Homo sapiens
  misc_RNA (1)...(19): siRNA sense strand
caaaugauacugaagagaa

SEQ ID NO: 1335907 - RNA, 19 nt, Homo sapiens
  misc_RNA (1)...(19): siRNA sense strand
ggcaagaagcacagaauua

SEQ ID NO: 1335908 - RNA, 19 nt, Homo sapiens
  misc_RNA (1)...(19): siRNA sense strand
ggagaaugcuggguuuaug

SEQ ID NO: 1335909 - RNA, 19 nt, Homo sapiens
  misc_RNA (1)...(19): siRNA sense strand
caaauagcaugguagaauc

SEQ ID NO: 1335910 - RNA, 19 nt, Homo sapiens
  misc_RNA (1)...(19): siRNA sense strand
ggaaggagaaggaaauuca

SEQ ID NO: 1335911 - RNA, 19 nt, Homo sapiens
  misc_RNA (1)...(19): siRNA sense strand
gaagaugaacagagaaaga

SEQ ID NO: 1335912 - RNA, 19 nt, Homo sapiens
  misc_RNA (1)...(19): siRNA sense strand
cacagcagcucgggaaaua

SEQ ID NO: 1335913 - RNA, 19 nt, Homo sapiens
  misc_RNA (1)...(19): siRNA sense strand
gaaauucagugggagacaa

SEQ ID NO: 1335914 - RNA, 19 nt, Homo sapiens
  misc_RNA (1)...(19): siRNA sense strand
cagaauuacugccgagauu

SEQ ID NO: 1335915 - RNA, 19 nt, Homo sapiens
  misc_RNA (1)...(19): siRNA sense strand
ggaaggaaaggaucaguug

SEQ ID NO: 1335916 - RNA, 19 nt, Homo sapiens
  misc_RNA (1)...(19): siRNA sense strand
ggaauggugugauguaugc

SEQ ID NO: 1335917 - RNA, 19 nt, Homo sapiens
  misc_RNA (1)...(19): siRNA sense strand
gaaggucuauccucacagu

SEQ ID NO: 1335918 - RNA, 19 nt, Homo sapiens
  misc_RNA (1)...(19): siRNA sense strand
gcacaagagcguuaucaug

SEQ ID NO: 1335919 - RNA, 19 nt, Homo sapiens
  misc_RNA (1)...(19): siRNA sense strand
gauggagaaugcuggguuu

SEQ ID NO: 1335920 - RNA, 19 nt, Homo sapiens
  misc_RNA (1)...(19): siRNA sense strand
gaugucacuuucaacuuaa

SEQ ID NO: 1335921 - RNA, 19 nt, Homo sapiens
  misc_RNA (1)...(19): siRNA sense strand
gaacagagaaagaaaauug

SEQ ID NO: 1335922 - RNA, 19 nt, Homo sapiens
  misc_RNA (1)...(19): siRNA sense strand
ucaaagagacaacaaauag

SEQ ID NO: 1335923 - RNA, 19 nt, Homo sapiens
  misc_RNA (1)...(19): siRNA sense strand
accaagaaguugccuauaa

SEQ ID NO: 1335924 - RNA, 19 nt, Homo sapiens
  misc_RNA (1)...(19): siRNA sense strand
gaagagaacacagaacuag

SEQ ID NO: 1335925 - RNA, 19 nt, Homo sapiens
  misc_RNA (1)...(19): siRNA sense strand
agacaagguuauuucauga

SEQ ID NO: 1335926 - RNA, 19 nt, Homo sapiens
  misc_RNA (1)...(19): siRNA sense strand
gugaacuugucuccaaaua

SEQ ID NO: 1335927 - RNA, 19 nt, Homo sapiens
  misc_RNA (1)...(19): siRNA sense strand
aauaucaucuuccacacua

SEQ ID NO: 1335928 - RNA, 19 nt, Homo sapiens
  misc_RNA (1)...(19): siRNA sense strand
gaggagaaugcaauauuaa

SEQ ID NO: 1335929 - RNA, 19 nt, Homo sapiens
  misc_RNA (1)...(19): siRNA sense strand
gaugcaauauaucaaccua

SEQ ID NO: 1335930 - RNA, 19 nt, Homo sapiens
  misc_RNA (1)...(19): siRNA sense strand
gaaaggaaggagaaggaaa

SEQ ID NO: 1335931 - RNA, 19 nt, Homo sapiens
  misc_RNA (1)...(19): siRNA sense strand
ucccguagaugcaauauau

SEQ ID NO: 1335932 - RNA, 19 nt, Homo sapiens
  misc_RNA (1)...(19): siRNA sense strand
gaucagaacgaguaugaau

SEQ ID NO: 1335933 - RNA, 19 nt, Homo sapiens
  misc_RNA (1)...(19): siRNA sense strand
caacaaauagcaugguaga

SEQ ID NO: 1335934 - RNA, 19 nt, Homo sapiens
  misc_RNA (1)...(19): siRNA sense strand
gcagggcugugucucaugu

SEQ ID NO: 1335935 - RNA, 19 nt, Homo sapiens
  misc_RNA (1)...(19): siRNA sense strand
ugaggaaguuggaagauca

SEQ ID NO: 1335936 - RNA, 19 nt, Homo sapiens
  misc_RNA (1)...(19): siRNA sense strand
ggaauuaggaggagaaugc

SEQ ID NO: 1335937 - RNA, 19 nt, Homo sapiens
  misc_RNA (1)...(19): siRNA sense strand
caacguuuauucuugaaag

SEQ ID NO: 1335938 - RNA, 19 nt, Homo sapiens
  misc_RNA (1)...(19): siRNA sense strand
gagaaaggaaggagaagga

SEQ ID NO: 1335939 - RNA, 19 nt, Homo sapiens
  misc_RNA (1)...(19): siRNA sense strand
agaagaaagugaggaaguu

SEQ ID NO: 1335940 - RNA, 19 nt, Homo sapiens
  misc_RNA (1)...(19): siRNA sense strand
gcaagaagcacagaauuac

SEQ ID NO: 1335941 - RNA, 19 nt, Homo sapiens
  misc_RNA (1)...(19): siRNA sense strand
gagaacacagaacuaguuu

SEQ ID NO: 1335942 - RNA, 19 nt, Homo sapiens
  misc_RNA (1)...(19): siRNA sense strand
agaacuaguuucagaagga

SEQ ID NO: 1335943 - RNA, 19 nt, Homo sapiens
  misc_RNA (1)...(19): siRNA sense strand
gaugaaccauuacugaaac

SEQ ID NO: 1335944 - RNA, 19 nt, Homo sapiens
  misc_RNA (1)...(19): siRNA sense strand
gagaaugcuggguuuauga

SEQ ID NO: 1335945 - RNA, 19 nt, Homo sapiens
  misc_RNA (1)...(19): siRNA sense strand
gaacauuacauucucacau

SEQ ID NO: 1335946 - RNA, 19 nt, Homo sapiens
  misc_RNA (1)...(19): siRNA sense strand
gaugaacauuacauucuca

SEQ ID NO: 1335947 - RNA, 19 nt, Homo sapiens
  misc_RNA (1)...(19): siRNA sense strand
gagcagguuucccaucauc

SEQ ID NO: 1335948 - RNA, 19 nt, Homo sapiens
  misc_RNA (1)...(19): siRNA sense strand
ucacuuaauucuuccuugu

SEQ ID NO: 1335949 - RNA, 19 nt, Homo sapiens
  misc_RNA (1)...(19): siRNA sense strand
gaggagcacaagagcguua

SEQ ID NO: 1335950 - RNA, 19 nt, Homo sapiens
  misc_RNA (1)...(19): siRNA sense strand
cagcagugaagaugaauuu

SEQ ID NO: 1335951 - RNA, 19 nt, Homo sapiens
  misc_RNA (1)...(19): siRNA sense strand
gaagaaagugaggaaguug

SEQ ID NO: 1335952 - RNA, 19 nt, Homo sapiens
  misc_RNA (1)...(19): siRNA sense strand
gcagugaagaugaauuuua

SEQ ID NO: 1335953 - RNA, 19 nt, Homo sapiens
  misc_RNA (1)...(19): siRNA sense strand
gagcauuagugaccagaag

SEQ ID NO: 1335954 - RNA, 19 nt, Homo sapiens
  misc_RNA (1)...(19): siRNA sense strand
guaguucuuccaacguuua

SEQ ID NO: 1335955 - RNA, 19 nt, Homo sapiens
  misc_RNA (1)...(19): siRNA sense strand
uggaagaucagaacgagua

SEQ ID NO: 1335956 - RNA, 19 nt, Homo sapiens
  misc_RNA (1)...(19): siRNA sense strand
ggacaucaucagacuccua

SEQ ID NO: 1335957 - RNA, 19 nt, Homo sapiens
  misc_RNA (1)...(19): siRNA sense strand
caagguuauuucaugaaga

SEQ ID NO: 1335958 - RNA, 19 nt, Homo sapiens
  misc_RNA (1)...(19): siRNA sense strand
acacuaaacccuucuaugg

SEQ ID NO: 1335959 - RNA, 19 nt, Homo sapiens
  misc_RNA (1)...(19): siRNA sense strand
gauaccacagaaucacuua

SEQ ID NO: 1335960 - RNA, 19 nt, Homo sapiens
  misc_RNA (1)...(19): siRNA sense strand
gcagaagcccgagaaagga

SEQ ID NO: 1335961 - RNA, 19 nt, Homo sapiens
  misc_RNA (1)...(19): siRNA sense strand
acaaauagcaugguagaau

SEQ ID NO: 1335962 - RNA, 19 nt, Homo sapiens
  misc_RNA (1)...(19): siRNA sense strand
gugcaaauaucaucuucca

SEQ ID NO: 1335963 - RNA, 19 nt, Homo sapiens
  misc_RNA (1)...(19): siRNA sense strand
acaauucaaugcucauauc

SEQ ID NO: 1335964 - RNA, 19 nt, Homo sapiens
  misc_RNA (1)...(19): siRNA sense strand
gaagauacaauucaaugcu

SEQ ID NO: 1335965 - RNA, 19 nt, Homo sapiens
  misc_RNA (1)...(19): siRNA sense strand
gaugcugaccuguuugauu

SEQ ID NO: 1335966 - RNA, 19 nt, Homo sapiens
  misc_RNA (1)...(19): siRNA sense strand
cacgugaacuugucuccaa

SEQ ID NO: 1335967 - RNA, 19 nt, Homo sapiens
  misc_RNA (1)...(19): siRNA sense strand
ucaugaagauggagaaugc

SEQ ID NO: 1335968 - RNA, 19 nt, Homo sapiens
  misc_RNA (1)...(19): siRNA sense strand
uuaugaugcugaugaauuc

SEQ ID NO: 1335969 - RNA, 19 nt, Homo sapiens
  misc_RNA (1)...(19): siRNA sense strand
caucucuugucgcagguua

SEQ ID NO: 1335970 - RNA, 19 nt, Homo sapiens
  misc_RNA (1)...(19): siRNA sense strand
gguaguucuuccaacguuu

SEQ ID NO: 1335971 - RNA, 19 nt, Homo sapiens
  misc_RNA (1)...(19): siRNA sense strand
caaagcgcuuaauagauuc

SEQ ID NO: 1335972 - RNA, 19 nt, Homo sapiens
  misc_RNA (1)...(19): siRNA sense strand
caagugaugcugaccuguu

SEQ ID NO: 1335973 - RNA, 19 nt, Homo sapiens
  misc_RNA (1)...(19): siRNA sense strand
ugaugaaccauuacugaaa

SEQ ID NO: 1335974 - RNA, 19 nt, Homo sapiens
  misc_RNA (1)...(19): siRNA sense strand
gggcaagaagcacagaauu

SEQ ID NO: 1335975 - RNA, 19 nt, Homo sapiens
  misc_RNA (1)...(19): siRNA sense strand
cuuccaacguuuauucuug

SEQ ID NO: 1335976 - RNA, 19 nt, Homo sapiens
  misc_RNA (1)...(19): siRNA sense strand
agacuuggaauggaucuua

SEQ ID NO: 1335977 - RNA, 19 nt, Homo sapiens
  misc_RNA (1)...(19): siRNA sense strand
caagagcguuaucaugcau

SEQ ID NO: 1335978 - RNA, 19 nt, Homo sapiens
  misc_RNA (1)...(19): siRNA sense strand
aagugaugcugaccuguuu

SEQ ID NO: 1335979 - RNA, 19 nt, Homo sapiens
  misc_RNA (1)...(19): siRNA sense strand
augcugaccuguuugauuc

SEQ ID NO: 1335980 - RNA, 19 nt, Homo sapiens
  misc_RNA (1)...(19): siRNA sense strand
aaugcuggguuuaugauga

SEQ ID NO: 1335981 - RNA, 19 nt, Homo sapiens
  misc_RNA (1)...(19): siRNA sense strand
gaaguuggaagaucagaac

SEQ ID NO: 1335982 - RNA, 19 nt, Homo sapiens
  misc_RNA (1)...(19): siRNA sense strand
agacuaugaugaacauuac

SEQ ID NO: 1335983 - RNA, 19 nt, Homo sapiens
  misc_RNA (1)...(19): siRNA sense strand
agagaacacagaacuaguu

SEQ ID NO: 1335984 - RNA, 19 nt, Homo sapiens
  misc_RNA (1)...(19): siRNA sense strand
ucccaaggaucgaaugguu

SEQ ID NO: 1335985 - RNA, 19 nt, Homo sapiens
  misc_RNA (1)...(19): siRNA sense strand
ggaccuguuugugagcauu

SEQ ID NO: 1335986 - RNA, 19 nt, Homo sapiens
  misc_RNA (1)...(19): siRNA sense strand
ugauucacaugaugacaga

SEQ ID NO: 1335987 - RNA, 19 nt, Homo sapiens
  misc_RNA (1)...(19): siRNA sense strand
uaugaugaaccauuacuga

SEQ ID NO: 1335988 - RNA, 19 nt, Homo sapiens
  misc_RNA (1)...(19): siRNA sense strand
ggaggagaaugcaauauua

SEQ ID NO: 1335989 - RNA, 19 nt, Homo sapiens
  misc_RNA (1)...(19): siRNA sense strand
ccaaagcgcuuaauagauu

SEQ ID NO: 1335990 - RNA, 19 nt, Homo sapiens
  misc_RNA (1)...(19): siRNA sense strand
ggaugucacuuucaacuua

SEQ ID NO: 1335991 - RNA, 19 nt, Homo sapiens
  misc_RNA (1)...(19): siRNA sense strand
caaagaagaugaacagaga

SEQ ID NO: 1335992 - RNA, 19 nt, Homo sapiens
  misc_RNA (1)...(19): siRNA sense strand
gaacuugucuccaaauaca

SEQ ID NO: 1335993 - RNA, 19 nt, Homo sapiens
  misc_RNA (1)...(19): siRNA sense strand
gcucauaucuggaccaaau

SEQ ID NO: 1335994 - RNA, 19 nt, Homo sapiens
  misc_RNA (1)...(19): siRNA sense strand
ggaaggaugucacuuucaa

SEQ ID NO: 1335995 - RNA, 19 nt, Homo sapiens
  misc_RNA (1)...(19): siRNA sense strand
gcacaggcuugaagaaaga

SEQ ID NO: 1335996 - RNA, 19 nt, Homo sapiens
  misc_RNA (1)...(19): siRNA sense strand
gaaaggaucaguugccaaa

SEQ ID NO: 1335997 - RNA, 19 nt, Homo sapiens
  misc_RNA (1)...(19): siRNA sense strand
gagacaagguuauuucaug

SEQ ID NO: 1335998 - RNA, 19 nt, Homo sapiens
  misc_RNA (1)...(19): siRNA sense strand
agaaauguaugcagacuuu

SEQ ID NO: 1335999 - RNA, 19 nt, Homo sapiens
  misc_RNA (1)...(19): siRNA sense strand
gaacacagaacuaguuuca

SEQ ID NO: 1336000 - RNA, 19 nt, Homo sapiens
  misc_RNA (1)...(19): siRNA sense strand
ggaauggaauggugugaug

SEQ ID NO: 1336001 - RNA, 19 nt, Homo sapiens
  misc_RNA (1)...(19): siRNA sense strand
acacagaacuaguuucaga

SEQ ID NO: 1336002 - RNA, 19 nt, Homo sapiens
  misc_RNA (1)...(19): siRNA sense strand
gaaguugccuauaaucaag

SEQ ID NO: 1336003 - RNA, 19 nt, Homo sapiens
  misc_RNA (1)...(19): siRNA sense strand
caaauacagucccagaguu

SEQ ID NO: 1336004 - RNA, 19 nt, Homo sapiens
  misc_RNA (1)...(19): siRNA sense strand
ccaagaaguugccuauaau

SEQ ID NO: 1336005 - RNA, 19 nt, Homo sapiens
  misc_RNA (1)...(19): siRNA sense strand
gacaacaaauagcauggua

SEQ ID NO: 1336006 - RNA, 19 nt, Homo sapiens
  misc_RNA (1)...(19): siRNA sense strand
caaaugauacugaagagaa

SEQ ID NO: 1336007 - RNA, 19 nt, Homo sapiens
  misc_RNA (1)...(19): siRNA sense strand
ggcaagaagcacagaauua

SEQ ID NO: 1336008 - RNA, 19 nt, Homo sapiens
  misc_RNA (1)...(19): siRNA sense strand
ggagaaugcuggguuuaug

SEQ ID NO: 1336009 - RNA, 19 nt, Homo sapiens
  misc_RNA (1)...(19): siRNA sense strand
caaauagcaugguagaauc

SEQ ID NO: 1336010 - RNA, 19 nt, Homo sapiens
  misc_RNA (1)...(19): siRNA sense strand
ggaaggagaaggaaauuca

SEQ ID NO: 1336011 - RNA, 19 nt, Homo sapiens
  misc_RNA (1)...(19): siRNA sense strand
gaagaugaacagagaaaga

SEQ ID NO: 1336012 - RNA, 19 nt, Homo sapiens
  misc_RNA (1)...(19): siRNA sense strand
cacagcagcucgggaaaua

SEQ ID NO: 1336013 - RNA, 19 nt, Homo sapiens
  misc_RNA (1)...(19): siRNA sense strand
gaaauucagugggagacaa

SEQ ID NO: 1336014 - RNA, 19 nt, Homo sapiens
  misc_RNA (1)...(19): siRNA sense strand
cagaauuacugccgagauu

SEQ ID NO: 1336015 - RNA, 19 nt, Homo sapiens
  misc_RNA (1)...(19): siRNA sense strand
ggaaggaaaggaucaguug

SEQ ID NO: 1336016 - RNA, 19 nt, Homo sapiens
  misc_RNA (1)...(19): siRNA sense strand
ggaauggugugauguaugc

SEQ ID NO: 1336017 - RNA, 19 nt, Homo sapiens
  misc_RNA (1)...(19): siRNA sense strand
gaaggucuauccucacagu

SEQ ID NO: 1336018 - RNA, 19 nt, Homo sapiens
  misc_RNA (1)...(19): siRNA sense strand
gcacaagagcguuaucaug

SEQ ID NO: 1336019 - RNA, 19 nt, Homo sapiens
  misc_RNA (1)...(19): siRNA sense strand
gauggagaaugcuggguuu

SEQ ID NO: 1336020 - RNA, 19 nt, Homo sapiens
  misc_RNA (1)...(19): siRNA sense strand
gaugucacuuucaacuuaa

SEQ ID NO: 1336021 - RNA, 19 nt, Homo sapiens
  misc_RNA (1)...(19): siRNA sense strand
gaacagagaaagaaaauug

SEQ ID NO: 1336022 - RNA, 19 nt, Homo sapiens
  misc_RNA (1)...(19): siRNA sense strand
ucaaagagacaacaaauag

SEQ ID NO: 1336023 - RNA, 19 nt, Homo sapiens
  misc_RNA (1)...(19): siRNA sense strand
accaagaaguugccuauaa

SEQ ID NO: 1336024 - RNA, 19 nt, Homo sapiens
  misc_RNA (1)...(19): siRNA sense strand
gaagagaacacagaacuag

SEQ ID NO: 1336025 - RNA, 19 nt, Homo sapiens
  misc_RNA (1)...(19): siRNA sense strand
agacaagguuauuucauga

SEQ ID NO: 1336026 - RNA, 19 nt, Homo sapiens
  misc_RNA (1)...(19): siRNA sense strand
gugaacuugucuccaaaua

SEQ ID NO: 1336027 - RNA, 19 nt, Homo sapiens
  misc_RNA (1)...(19): siRNA sense strand
aauaucaucuuccacacua

SEQ ID NO: 1336028 - RNA, 19 nt, Homo sapiens
  misc_RNA (1)...(19): siRNA sense strand
gaggagaaugcaauauuaa

SEQ ID NO: 1336029 - RNA, 19 nt, Homo sapiens
  misc_RNA (1)...(19): siRNA sense strand
gaugcaauauaucaaccua

SEQ ID NO: 1336030 - RNA, 19 nt, Homo sapiens
  misc_RNA (1)...(19): siRNA sense strand
gaaaggaaggagaaggaaa

SEQ ID NO: 1336031 - RNA, 19 nt, Homo sapiens
  misc_RNA (1)...(19): siRNA sense strand
ucccguagaugcaauauau

SEQ ID NO: 1336032 - RNA, 19 nt, Homo sapiens
  misc_RNA (1)...(19): siRNA sense strand
gaucagaacgaguaugaau

SEQ ID NO: 1336033 - RNA, 19 nt, Homo sapiens
  misc_RNA (1)...(19): siRNA sense strand
caacaaauagcaugguaga

SEQ ID NO: 1336034 - RNA, 19 nt, Homo sapiens
  misc_RNA (1)...(19): siRNA sense strand
gcagggcugugucucaugu

SEQ ID NO: 1336035 - RNA, 19 nt, Homo sapiens
  misc_RNA (1)...(19): siRNA sense strand
ugaggaaguuggaagauca

SEQ ID NO: 1336036 - RNA, 19 nt, Homo sapiens
  misc_RNA (1)...(19): siRNA sense strand
ggaauuaggaggagaaugc

SEQ ID NO: 1336037 - RNA, 19 nt, Homo sapiens
  misc_RNA (1)...(19): siRNA sense strand
caacguuuauucuugaaag

SEQ ID NO: 1336038 - RNA, 19 nt, Homo sapiens
  misc_RNA (1)...(19): siRNA sense strand
gagaaaggaaggagaagga

SEQ ID NO: 1336039 - RNA, 19 nt, Homo sapiens
  misc_RNA (1)...(19): siRNA sense strand
agaagaaagugaggaaguu

SEQ ID NO: 1336040 - RNA, 19 nt, Homo sapiens
  misc_RNA (1)...(19): siRNA sense strand
gcaagaagcacagaauuac

SEQ ID NO: 1336041 - RNA, 19 nt, Homo sapiens
  misc_RNA (1)...(19): siRNA sense strand
gagaacacagaacuaguuu

SEQ ID NO: 1336042 - RNA, 19 nt, Homo sapiens
  misc_RNA (1)...(19): siRNA sense strand
agaacuaguuucagaagga

SEQ ID NO: 1336043 - RNA, 19 nt, Homo sapiens
  misc_RNA (1)...(19): siRNA sense strand
gaugaaccauuacugaaac

SEQ ID NO: 1336044 - RNA, 19 nt, Homo sapiens
  misc_RNA (1)...(19): siRNA sense strand
gagaaugcuggguuuauga

SEQ ID NO: 1336045 - RNA, 19 nt, Homo sapiens
  misc_RNA (1)...(19): siRNA sense strand
gaacauuacauucucacau

SEQ ID NO: 1336046 - RNA, 19 nt, Homo sapiens
  misc_RNA (1)...(19): siRNA sense strand
gaugaacauuacauucuca

SEQ ID NO: 1336047 - RNA, 19 nt, Homo sapiens
  misc_RNA (1)...(19): siRNA sense strand
gagcagguuucccaucauc

SEQ ID NO: 1336048 - RNA, 19 nt, Homo sapiens
  misc_RNA (1)...(19): siRNA sense strand
ucacuuaauucuuccuugu

SEQ ID NO: 1336049 - RNA, 19 nt, Homo sapiens
  misc_RNA (1)...(19): siRNA sense strand
gaggagcacaagagcguua

SEQ ID NO: 1336050 - RNA, 19 nt, Homo sapiens
  misc_RNA (1)...(19): siRNA sense strand
cagcagugaagaugaauuu

SEQ ID NO: 1336051 - RNA, 19 nt, Homo sapiens
  misc_RNA (1)...(19): siRNA sense strand
gaagaaagugaggaaguug

SEQ ID NO: 1336052 - RNA, 19 nt, Homo sapiens
  misc_RNA (1)...(19): siRNA sense strand
gcagugaagaugaauuuua

SEQ ID NO: 1336053 - RNA, 19 nt, Homo sapiens
  misc_RNA (1)...(19): siRNA sense strand
gagcauuagugaccagaag

SEQ ID NO: 1336054 - RNA, 19 nt, Homo sapiens
  misc_RNA (1)...(19): siRNA sense strand
guaguucuuccaacguuua

SEQ ID NO: 1336055 - RNA, 19 nt, Homo sapiens
  misc_RNA (1)...(19): siRNA sense strand
uggaagaucagaacgagua

SEQ ID NO: 1336056 - RNA, 19 nt, Homo sapiens
  misc_RNA (1)...(19): siRNA sense strand
ggacaucaucagacuccua

SEQ ID NO: 1336057 - RNA, 19 nt, Homo sapiens
  misc_RNA (1)...(19): siRNA sense strand
caagguuauuucaugaaga

SEQ ID NO: 1336058 - RNA, 19 nt, Homo sapiens
  misc_RNA (1)...(19): siRNA sense strand
acacuaaacccuucuaugg

SEQ ID NO: 1336059 - RNA, 19 nt, Homo sapiens
  misc_RNA (1)...(19): siRNA sense strand
gauaccacagaaucacuua

SEQ ID NO: 1336060 - RNA, 19 nt, Homo sapiens
  misc_RNA (1)...(19): siRNA sense strand
gcagaagcccgagaaagga

SEQ ID NO: 1336061 - RNA, 19 nt, Homo sapiens
  misc_RNA (1)...(19): siRNA sense strand
acaaauagcaugguagaau

SEQ ID NO: 1336062 - RNA, 19 nt, Homo sapiens
  misc_RNA (1)...(19): siRNA sense strand
gugcaaauaucaucuucca

SEQ ID NO: 1336063 - RNA, 19 nt, Homo sapiens
  misc_RNA (1)...(19): siRNA sense strand
acaauucaaugcucauauc

SEQ ID NO: 1336064 - RNA, 19 nt, Homo sapiens
  misc_RNA (1)...(19): siRNA sense strand
gaagauacaauucaaugcu

SEQ ID NO: 1336065 - RNA, 19 nt, Homo sapiens
  misc_RNA (1)...(19): siRNA sense strand
gaugcugaccuguuugauu

SEQ ID NO: 1336066 - RNA, 19 nt, Homo sapiens
  misc_RNA (1)...(19): siRNA sense strand
cacgugaacuugucuccaa

SEQ ID NO: 1336067 - RNA, 19 nt, Homo sapiens
  misc_RNA (1)...(19): siRNA sense strand
ucaugaagauggagaaugc

SEQ ID NO: 1336068 - RNA, 19 nt, Homo sapiens
  misc_RNA (1)...(19): siRNA sense strand
uuaugaugcugaugaauuc

SEQ ID NO: 1336069 - RNA, 19 nt, Homo sapiens
  misc_RNA (1)...(19): siRNA sense strand
caucucuugucgcagguua

SEQ ID NO: 1336070 - RNA, 19 nt, Homo sapiens
  misc_RNA (1)...(19): siRNA sense strand
gguaguucuuccaacguuu

SEQ ID NO: 1336071 - RNA, 19 nt, Homo sapiens
  misc_RNA (1)...(19): siRNA sense strand
caaagcgcuuaauagauuc

SEQ ID NO: 1336072 - RNA, 19 nt, Homo sapiens
  misc_RNA (1)...(19): siRNA sense strand
caagugaugcugaccuguu

SEQ ID NO: 1336073 - RNA, 19 nt, Homo sapiens
  misc_RNA (1)...(19): siRNA sense strand
ugaugaaccauuacugaaa

SEQ ID NO: 1336074 - RNA, 19 nt, Homo sapiens
  misc_RNA (1)...(19): siRNA sense strand
gggcaagaagcacagaauu

SEQ ID NO: 1336075 - RNA, 19 nt, Homo sapiens
  misc_RNA (1)...(19): siRNA sense strand
cuuccaacguuuauucuug

SEQ ID NO: 1336076 - RNA, 19 nt, Homo sapiens
  misc_RNA (1)...(19): siRNA sense strand
agacuuggaauggaucuua

SEQ ID NO: 1336077 - RNA, 19 nt, Homo sapiens
  misc_RNA (1)...(19): siRNA sense strand
caagagcguuaucaugcau

SEQ ID NO: 1336078 - RNA, 19 nt, Homo sapiens
  misc_RNA (1)...(19): siRNA sense strand
aagugaugcugaccuguuu

SEQ ID NO: 1336079 - RNA, 19 nt, Homo sapiens
  misc_RNA (1)...(19): siRNA sense strand
augcugaccuguuugauuc

SEQ ID NO: 1336080 - RNA, 19 nt, Homo sapiens
  misc_RNA (1)...(19): siRNA sense strand
aaugcuggguuuaugauga

SEQ ID NO: 1336081 - RNA, 19 nt, Homo sapiens
  misc_RNA (1)...(19): siRNA sense strand
gaaguuggaagaucagaac

SEQ ID NO: 1336082 - RNA, 19 nt, Homo sapiens
  misc_RNA (1)...(19): siRNA sense strand
agacuaugaugaacauuac

SEQ ID NO: 1336083 - RNA, 19 nt, Homo sapiens
  misc_RNA (1)...(19): siRNA sense strand
agagaacacagaacuaguu

SEQ ID NO: 1336084 - RNA, 19 nt, Homo sapiens
  misc_RNA (1)...(19): siRNA sense strand
ucccaaggaucgaaugguu

SEQ ID NO: 1336085 - RNA, 19 nt, Homo sapiens
  misc_RNA (1)...(19): siRNA sense strand
ggaccuguuugugagcauu

SEQ ID NO: 1336086 - RNA, 19 nt, Homo sapiens
  misc_RNA (1)...(19): siRNA sense strand
ugauucacaugaugacaga

SEQ ID NO: 1336087 - RNA, 19 nt, Homo sapiens
  misc_RNA (1)...(19): siRNA sense strand
uaugaugaaccauuacuga

SEQ ID NO: 1336088 - RNA, 19 nt, Homo sapiens
  misc_RNA (1)...(19): siRNA sense strand
ggaggagaaugcaauauua

SEQ ID NO: 1336089 - RNA, 19 nt, Homo sapiens
  misc_RNA (1)...(19): siRNA sense strand
ccaaagcgcuuaauagauu

SEQ ID NO: 1336090 - RNA, 19 nt, Homo sapiens
  misc_RNA (1)...(19): siRNA sense strand
ggaugucacuuucaacuua

SEQ ID NO: 1336091 - RNA, 19 nt, Homo sapiens
  misc_RNA (1)...(19): siRNA sense strand
caaagaagaugaacagaga

SEQ ID NO: 1336092 - RNA, 19 nt, Homo sapiens
  misc_RNA (1)...(19): siRNA sense strand
gaacuugucuccaaauaca

SEQ ID NO: 1336093 - RNA, 19 nt, Homo sapiens
  misc_RNA (1)...(19): siRNA sense strand
gcucauaucuggaccaaau

SEQ ID NO: 1336094 - RNA, 19 nt, Homo sapiens
  misc_RNA (1)...(19): siRNA sense strand
ggaaggaugucacuuucaa

SEQ ID NO: 1336095 - RNA, 19 nt, Homo sapiens
  misc_RNA (1)...(19): siRNA sense strand
gcacaggcuugaagaaaga

SEQ ID NO: 1336096 - RNA, 19 nt, Homo sapiens
  misc_RNA (1)...(19): siRNA sense strand
gaaaggaucaguugccaaa

SEQ ID NO: 1336097 - RNA, 19 nt, Homo sapiens
  misc_RNA (1)...(19): siRNA sense strand
gagacaagguuauuucaug

SEQ ID NO: 1336098 - RNA, 19 nt, Homo sapiens
  misc_RNA (1)...(19): siRNA sense strand
agaaauguaugcagacuuu

SEQ ID NO: 1336099 - RNA, 19 nt, Homo sapiens
  misc_RNA (1)...(19): siRNA sense strand
gaacacagaacuaguuuca

SEQ ID NO: 1336100 - RNA, 19 nt, Homo sapiens
  misc_RNA (1)...(19): siRNA sense strand
ggaauggaauggugugaug

SEQ ID NO: 1336101 - RNA, 19 nt, Homo sapiens
  misc_RNA (1)...(19): siRNA sense strand
acacagaacuaguuucaga

SEQ ID NO: 1336102 - RNA, 19 nt, Homo sapiens
  misc_RNA (1)...(19): siRNA sense strand
gaaguugccuauaaucaag

SEQ ID NO: 1336103 - RNA, 19 nt, Homo sapiens
  misc_RNA (1)...(19): siRNA sense strand
caaauacagucccagaguu

SEQ ID NO: 1336104 - RNA, 19 nt, Homo sapiens
  misc_RNA (1)...(19): siRNA sense strand
ccaagaaguugccuauaau

SEQ ID NO: 1336105 - RNA, 19 nt, Homo sapiens
  misc_RNA (1)...(19): siRNA sense strand
gacaacaaauagcauggua

SEQ ID NO: 1336106 - RNA, 19 nt, Homo sapiens
  misc_RNA (1)...(19): siRNA sense strand
caaaugauacugaagagaa

SEQ ID NO: 1336107 - RNA, 19 nt, Homo sapiens
  misc_RNA (1)...(19): siRNA sense strand
ggcaagaagcacagaauua

SEQ ID NO: 1336108 - RNA, 19 nt, Homo sapiens
  misc_RNA (1)...(19): siRNA sense strand
ggagaaugcuggguuuaug

SEQ ID NO: 1336109 - RNA, 19 nt, Homo sapiens
  misc_RNA (1)...(19): siRNA sense strand
caaauagcaugguagaauc

SEQ ID NO: 1336110 - RNA, 19 nt, Homo sapiens
  misc_RNA (1)...(19): siRNA sense strand
ggaaggagaaggaaauuca

SEQ ID NO: 1336111 - RNA, 19 nt, Homo sapiens
  misc_RNA (1)...(19): siRNA sense strand
gaagaugaacagagaaaga

SEQ ID NO: 1336112 - RNA, 19 nt, Homo sapiens
  misc_RNA (1)...(19): siRNA sense strand
cacagcagcucgggaaaua

SEQ ID NO: 1336113 - RNA, 19 nt, Homo sapiens
  misc_RNA (1)...(19): siRNA sense strand
gaaauucagugggagacaa

SEQ ID NO: 1336114 - RNA, 19 nt, Homo sapiens
  misc_RNA (1)...(19): siRNA sense strand
cagaauuacugccgagauu

SEQ ID NO: 1336115 - RNA, 19 nt, Homo sapiens
  misc_RNA (1)...(19): siRNA sense strand
ggaaggaaaggaucaguug

SEQ ID NO: 1336116 - RNA, 19 nt, Homo sapiens
  misc_RNA (1)...(19): siRNA sense strand
ggaauggugugauguaugc

SEQ ID NO: 1336117 - RNA, 19 nt, Homo sapiens
  misc_RNA (1)...(19): siRNA sense strand
gaaggucuauccucacagu

SEQ ID NO: 1336118 - RNA, 19 nt, Homo sapiens
  misc_RNA (1)...(19): siRNA sense strand
gcacaagagcguuaucaug

SEQ ID NO: 1336119 - RNA, 19 nt, Homo sapiens
  misc_RNA (1)...(19): siRNA sense strand
gauggagaaugcuggguuu

SEQ ID NO: 1336120 - RNA, 19 nt, Homo sapiens
  misc_RNA (1)...(19): siRNA sense strand
gaugucacuuucaacuuaa

SEQ ID NO: 1336121 - RNA, 19 nt, Homo sapiens
  misc_RNA (1)...(19): siRNA sense strand
gaacagagaaagaaaauug

SEQ ID NO: 1336122 - RNA, 19 nt, Homo sapiens
  misc_RNA (1)...(19): siRNA sense strand
ucaaagagacaacaaauag

SEQ ID NO: 1336123 - RNA, 19 nt, Homo sapiens
  misc_RNA (1)...(19): siRNA sense strand
accaagaaguugccuauaa

SEQ ID NO: 1336124 - RNA, 19 nt, Homo sapiens
  misc_RNA (1)...(19): siRNA sense strand
gaagagaacacagaacuag

SEQ ID NO: 1336125 - RNA, 19 nt, Homo sapiens
  misc_RNA (1)...(19): siRNA sense strand
agacaagguuauuucauga

SEQ ID NO: 1336126 - RNA, 19 nt, Homo sapiens
  misc_RNA (1)...(19): siRNA sense strand
gugaacuugucuccaaaua

SEQ ID NO: 1336127 - RNA, 19 nt, Homo sapiens
  misc_RNA (1)...(19): siRNA sense strand
aauaucaucuuccacacua

SEQ ID NO: 1336128 - RNA, 19 nt, Homo sapiens
  misc_RNA (1)...(19): siRNA sense strand
gaggagaaugcaauauuaa

SEQ ID NO: 1336129 - RNA, 19 nt, Homo sapiens
  misc_RNA (1)...(19): siRNA sense strand
gaugcaauauaucaaccua

SEQ ID NO: 1336130 - RNA, 19 nt, Homo sapiens
  misc_RNA (1)...(19): siRNA sense strand
gaaaggaaggagaaggaaa

SEQ ID NO: 1336131 - RNA, 19 nt, Homo sapiens
  misc_RNA (1)...(19): siRNA sense strand
ucccguagaugcaauauau

SEQ ID NO: 1336132 - RNA, 19 nt, Homo sapiens
  misc_RNA (1)...(19): siRNA sense strand
gaucagaacgaguaugaau

SEQ ID NO: 1336133 - RNA, 19 nt, Homo sapiens
  misc_RNA (1)...(19): siRNA sense strand
caacaaauagcaugguaga

SEQ ID NO: 1336134 - RNA, 19 nt, Homo sapiens
  misc_RNA (1)...(19): siRNA sense strand
gcagggcugugucucaugu

SEQ ID NO: 1336135 - RNA, 19 nt, Homo sapiens
  misc_RNA (1)...(19): siRNA sense strand
ugaggaaguuggaagauca

SEQ ID NO: 1336136 - RNA, 19 nt, Homo sapiens
  misc_RNA (1)...(19): siRNA sense strand
ggaauuaggaggagaaugc

SEQ ID NO: 1336137 - RNA, 19 nt, Homo sapiens
  misc_RNA (1)...(19): siRNA sense strand
caacguuuauucuugaaag

SEQ ID NO: 1336138 - RNA, 19 nt, Homo sapiens
  misc_RNA (1)...(19): siRNA sense strand
gagaaaggaaggagaagga

SEQ ID NO: 1336139 - RNA, 19 nt, Homo sapiens
  misc_RNA (1)...(19): siRNA sense strand
agaagaaagugaggaaguu

SEQ ID NO: 1336140 - RNA, 19 nt, Homo sapiens
  misc_RNA (1)...(19): siRNA sense strand
gcaagaagcacagaauuac

SEQ ID NO: 1336141 - RNA, 19 nt, Homo sapiens
  misc_RNA (1)...(19): siRNA sense strand
gagaacacagaacuaguuu

SEQ ID NO: 1336142 - RNA, 19 nt, Homo sapiens
  misc_RNA (1)...(19): siRNA sense strand
agaacuaguuucagaagga

SEQ ID NO: 1336143 - RNA, 19 nt, Homo sapiens
  misc_RNA (1)...(19): siRNA sense strand
gaugaaccauuacugaaac

SEQ ID NO: 1336144 - RNA, 19 nt, Homo sapiens
  misc_RNA (1)...(19): siRNA sense strand
gagaaugcuggguuuauga

SEQ ID NO: 1336145 - RNA, 19 nt, Homo sapiens
  misc_RNA (1)...(19): siRNA sense strand
gaacauuacauucucacau

SEQ ID NO: 1336146 - RNA, 19 nt, Homo sapiens
  misc_RNA (1)...(19): siRNA sense strand
gaugaacauuacauucuca

SEQ ID NO: 1336147 - RNA, 19 nt, Homo sapiens
  misc_RNA (1)...(19): siRNA sense strand
gagcagguuucccaucauc

SEQ ID NO: 1336148 - RNA, 19 nt, Homo sapiens
  misc_RNA (1)...(19): siRNA sense strand
ucacuuaauucuuccuugu

SEQ ID NO: 1336149 - RNA, 19 nt, Homo sapiens
  misc_RNA (1)...(19): siRNA sense strand
gaggagcacaagagcguua

SEQ ID NO: 1336150 - RNA, 19 nt, Homo sapiens
  misc_RNA (1)...(19): siRNA sense strand
cagcagugaagaugaauuu

SEQ ID NO: 1336151 - RNA, 19 nt, Homo sapiens
  misc_RNA (1)...(19): siRNA sense strand
gaagaaagugaggaaguug

SEQ ID NO: 1336152 - RNA, 19 nt, Homo sapiens
  misc_RNA (1)...(19): siRNA sense strand
gcagugaagaugaauuuua

SEQ ID NO: 1336153 - RNA, 19 nt, Homo sapiens
  misc_RNA (1)...(19): siRNA sense strand
gagcauuagugaccagaag

SEQ ID NO: 1336154 - RNA, 19 nt, Homo sapiens
  misc_RNA (1)...(19): siRNA sense strand
guaguucuuccaacguuua

SEQ ID NO: 1336155 - RNA, 19 nt, Homo sapiens
  misc_RNA (1)...(19): siRNA sense strand
uggaagaucagaacgagua

SEQ ID NO: 1336156 - RNA, 19 nt, Homo sapiens
  misc_RNA (1)...(19): siRNA sense strand
ggacaucaucagacuccua

SEQ ID NO: 1336157 - RNA, 19 nt, Homo sapiens
  misc_RNA (1)...(19): siRNA sense strand
caagguuauuucaugaaga

SEQ ID NO: 1336158 - RNA, 19 nt, Homo sapiens
  misc_RNA (1)...(19): siRNA sense strand
acacuaaacccuucuaugg

SEQ ID NO: 1336159 - RNA, 19 nt, Homo sapiens
  misc_RNA (1)...(19): siRNA sense strand
gauaccacagaaucacuua

SEQ ID NO: 1336160 - RNA, 19 nt, Homo sapiens
  misc_RNA (1)...(19): siRNA sense strand
gcagaagcccgagaaagga

SEQ ID NO: 1336161 - RNA, 19 nt, Homo sapiens
  misc_RNA (1)...(19): siRNA sense strand
acaaauagcaugguagaau

SEQ ID NO: 1336162 - RNA, 19 nt, Homo sapiens
  misc_RNA (1)...(19): siRNA sense strand
gugcaaauaucaucuucca

SEQ ID NO: 1336163 - RNA, 19 nt, Homo sapiens
  misc_RNA (1)...(19): siRNA sense strand
acaauucaaugcucauauc

SEQ ID NO: 1336164 - RNA, 19 nt, Homo sapiens
  misc_RNA (1)...(19): siRNA sense strand
gaagauacaauucaaugcu

SEQ ID NO: 1336165 - RNA, 19 nt, Homo sapiens
  misc_RNA (1)...(19): siRNA sense strand
gaugcugaccuguuugauu

SEQ ID NO: 1336166 - RNA, 19 nt, Homo sapiens
  misc_RNA (1)...(19): siRNA sense strand
cacgugaacuugucuccaa

SEQ ID NO: 1336167 - RNA, 19 nt, Homo sapiens
  misc_RNA (1)...(19): siRNA sense strand
ucaugaagauggagaaugc

SEQ ID NO: 1336168 - RNA, 19 nt, Homo sapiens
  misc_RNA (1)...(19): siRNA sense strand
uuaugaugcugaugaauuc

SEQ ID NO: 1336169 - RNA, 19 nt, Homo sapiens
  misc_RNA (1)...(19): siRNA sense strand
caucucuugucgcagguua

SEQ ID NO: 1336170 - RNA, 19 nt, Homo sapiens
  misc_RNA (1)...(19): siRNA sense strand
gguaguucuuccaacguuu

SEQ ID NO: 1336171 - RNA, 19 nt, Homo sapiens
  misc_RNA (1)...(19): siRNA sense strand
caaagcgcuuaauagauuc

SEQ ID NO: 1336172 - RNA, 19 nt, Homo sapiens
  misc_RNA (1)...(19): siRNA sense strand
caagugaugcugaccuguu

SEQ ID NO: 1336173 - RNA, 19 nt, Homo sapiens
  misc_RNA (1)...(19): siRNA sense strand
ugaugaaccauuacugaaa

SEQ ID NO: 1336174 - RNA, 19 nt, Homo sapiens
  misc_RNA (1)...(19): siRNA sense strand
gggcaagaagcacagaauu

SEQ ID NO: 1336175 - RNA, 19 nt, Homo sapiens
  misc_RNA (1)...(19): siRNA sense strand
cuuccaacguuuauucuug

SEQ ID NO: 1336176 - RNA, 19 nt, Homo sapiens
  misc_RNA (1)...(19): siRNA sense strand
agacuuggaauggaucuua

SEQ ID NO: 1336177 - RNA, 19 nt, Homo sapiens
  misc_RNA (1)...(19): siRNA sense strand
caagagcguuaucaugcau

SEQ ID NO: 1336178 - RNA, 19 nt, Homo sapiens
  misc_RNA (1)...(19): siRNA sense strand
aagugaugcugaccuguuu

SEQ ID NO: 1336179 - RNA, 19 nt, Homo sapiens
  misc_RNA (1)...(19): siRNA sense strand
augcugaccuguuugauuc

SEQ ID NO: 1336180 - RNA, 19 nt, Homo sapiens
  misc_RNA (1)...(19): siRNA sense strand
aaugcuggguuuaugauga

SEQ ID NO: 1336181 - RNA, 19 nt, Homo sapiens
  misc_RNA (1)...(19): siRNA sense strand
gaaguuggaagaucagaac

SEQ ID NO: 1336182 - RNA, 19 nt, Homo sapiens
  misc_RNA (1)...(19): siRNA sense strand
agacuaugaugaacauuac

SEQ ID NO: 1336183 - RNA, 19 nt, Homo sapiens
  misc_RNA (1)...(19): siRNA sense strand
agagaacacagaacuaguu

SEQ ID NO: 1336184 - RNA, 19 nt, Homo sapiens
  misc_RNA (1)...(19): siRNA sense strand
ucccaaggaucgaaugguu

SEQ ID NO: 1336185 - RNA, 19 nt, Homo sapiens
  misc_RNA (1)...(19): siRNA sense strand
ggaccuguuugugagcauu

SEQ ID NO: 1336186 - RNA, 19 nt, Homo sapiens
  misc_RNA (1)...(19): siRNA sense strand
ugauucacaugaugacaga

SEQ ID NO: 1336187 - RNA, 19 nt, Homo sapiens
  misc_RNA (1)...(19): siRNA sense strand
uaugaugaaccauuacuga

SEQ ID NO: 1336188 - RNA, 19 nt, Homo sapiens
  misc_RNA (1)...(19): siRNA sense strand
ggaggagaaugcaauauua

SEQ ID NO: 1336189 - RNA, 19 nt, Homo sapiens
  misc_RNA (1)...(19): siRNA sense strand
ccaaagcgcuuaauagauu

SEQ ID NO: 1336190 - RNA, 19 nt, Homo sapiens
  misc_RNA (1)...(19): siRNA sense strand
ggaugucacuuucaacuua

SEQ ID NO: 1336191 - RNA, 19 nt, Homo sapiens
  misc_RNA (1)...(19): siRNA sense strand
gaacuugucuccaaauaca

SEQ ID NO: 1336192 - RNA, 19 nt, Homo sapiens
  misc_RNA (1)...(19): siRNA sense strand
gcucauaucuggaccaaau

SEQ ID NO: 1336193 - RNA, 19 nt, Homo sapiens
  misc_RNA (1)...(19): siRNA sense strand
ggaaggaugucacuuucaa

SEQ ID NO: 1336194 - RNA, 19 nt, Homo sapiens
  misc_RNA (1)...(19): siRNA sense strand
gcacaggcuugaagaaaga

SEQ ID NO: 1336195 - RNA, 19 nt, Homo sapiens
  misc_RNA (1)...(19): siRNA sense strand
gaaaggaucaguugccaaa

SEQ ID NO: 1336196 - RNA, 19 nt, Homo sapiens
  misc_RNA (1)...(19): siRNA sense strand
gagacaagguuauuucaug

SEQ ID NO: 1336197 - RNA, 19 nt, Homo sapiens
  misc_RNA (1)...(19): siRNA sense strand
agaaauguaugcagacuuu

SEQ ID NO: 1336198 - RNA, 19 nt, Homo sapiens
  misc_RNA (1)...(19): siRNA sense strand
gaacacagaacuaguuuca

SEQ ID NO: 1336199 - RNA, 19 nt, Homo sapiens
  misc_RNA (1)...(19): siRNA sense strand
ggaauggaauggugugaug

SEQ ID NO: 1336200 - RNA, 19 nt, Homo sapiens
  misc_RNA (1)...(19): siRNA sense strand
acacagaacuaguuucaga

SEQ ID NO: 1336201 - RNA, 19 nt, Homo sapiens
  misc_RNA (1)...(19): siRNA sense strand
gaaguugccuauaaucaag

SEQ ID NO: 1336202 - RNA, 19 nt, Homo sapiens
  misc_RNA (1)...(19): siRNA sense strand
caaauacagucccagaguu

SEQ ID NO: 1336203 - RNA, 19 nt, Homo sapiens
  misc_RNA (1)...(19): siRNA sense strand
ccaagaaguugccuauaau

SEQ ID NO: 1336204 - RNA, 19 nt, Homo sapiens
  misc_RNA (1)...(19): siRNA sense strand
caaaugauacugaagagaa

SEQ ID NO: 1336205 - RNA, 19 nt, Homo sapiens
  misc_RNA (1)...(19): siRNA sense strand
ggcaagaagcacagaauua

SEQ ID NO: 1336206 - RNA, 19 nt, Homo sapiens
  misc_RNA (1)...(19): siRNA sense strand
ggagaaugcuggguuuaug

SEQ ID NO: 1336207 - RNA, 19 nt, Homo sapiens
  misc_RNA (1)...(19): siRNA sense strand
ggaaggagaaggaaauuca

SEQ ID NO: 1336208 - RNA, 19 nt, Homo sapiens
  misc_RNA (1)...(19): siRNA sense strand
cacagcagcucgggaaaua

SEQ ID NO: 1336209 - RNA, 19 nt, Homo sapiens
  misc_RNA (1)...(19): siRNA sense strand
gaaauucagugggagacaa

SEQ ID NO: 1336210 - RNA, 19 nt, Homo sapiens
  misc_RNA (1)...(19): siRNA sense strand
cagaauuacugccgagauu

SEQ ID NO: 1336211 - RNA, 19 nt, Homo sapiens
  misc_RNA (1)...(19): siRNA sense strand
ggaaggaaaggaucaguug

SEQ ID NO: 1336212 - RNA, 19 nt, Homo sapiens
  misc_RNA (1)...(19): siRNA sense strand
ggaauggugugauguaugc

SEQ ID NO: 1336213 - RNA, 19 nt, Homo sapiens
  misc_RNA (1)...(19): siRNA sense strand
gaaggucuauccucacagu

SEQ ID NO: 1336214 - RNA, 19 nt, Homo sapiens
  misc_RNA (1)...(19): siRNA sense strand
gcacaagagcguuaucaug

SEQ ID NO: 1336215 - RNA, 19 nt, Homo sapiens
  misc_RNA (1)...(19): siRNA sense strand
gauggagaaugcuggguuu

SEQ ID NO: 1336216 - RNA, 19 nt, Homo sapiens
  misc_RNA (1)...(19): siRNA sense strand
gaugucacuuucaacuuaa

SEQ ID NO: 1336217 - RNA, 19 nt, Homo sapiens
  misc_RNA (1)...(19): siRNA sense strand
accaagaaguugccuauaa

SEQ ID NO: 1336218 - RNA, 19 nt, Homo sapiens
  misc_RNA (1)...(19): siRNA sense strand
gaagagaacacagaacuag

SEQ ID NO: 1336219 - RNA, 19 nt, Homo sapiens
  misc_RNA (1)...(19): siRNA sense strand
agacaagguuauuucauga

SEQ ID NO: 1336220 - RNA, 19 nt, Homo sapiens
  misc_RNA (1)...(19): siRNA sense strand
gugaacuugucuccaaaua

SEQ ID NO: 1336221 - RNA, 19 nt, Homo sapiens
  misc_RNA (1)...(19): siRNA sense strand
aauaucaucuuccacacua

SEQ ID NO: 1336222 - RNA, 19 nt, Homo sapiens
  misc_RNA (1)...(19): siRNA sense strand
gaggagaaugcaauauuaa

SEQ ID NO: 1336223 - RNA, 19 nt, Homo sapiens
  misc_RNA (1)...(19): siRNA sense strand
gaugcaauauaucaaccua

SEQ ID NO: 1336224 - RNA, 19 nt, Homo sapiens
  misc_RNA (1)...(19): siRNA sense strand
gaaaggaaggagaaggaaa

SEQ ID NO: 1336225 - RNA, 19 nt, Homo sapiens
  misc_RNA (1)...(19): siRNA sense strand
ucccguagaugcaauauau

SEQ ID NO: 1336226 - RNA, 19 nt, Homo sapiens
  misc_RNA (1)...(19): siRNA sense strand
gaucagaacgaguaugaau

SEQ ID NO: 1336227 - RNA, 19 nt, Homo sapiens
  misc_RNA (1)...(19): siRNA sense strand
gcagggcugugucucaugu

SEQ ID NO: 1336228 - RNA, 19 nt, Homo sapiens
  misc_RNA (1)...(19): siRNA sense strand
ugaggaaguuggaagauca

SEQ ID NO: 1336229 - RNA, 19 nt, Homo sapiens
  misc_RNA (1)...(19): siRNA sense strand
ggaauuaggaggagaaugc

SEQ ID NO: 1336230 - RNA, 19 nt, Homo sapiens
  misc_RNA (1)...(19): siRNA sense strand
caacguuuauucuugaaag

SEQ ID NO: 1336231 - RNA, 19 nt, Homo sapiens
  misc_RNA (1)...(19): siRNA sense strand
gagaaaggaaggagaagga

SEQ ID NO: 1336232 - RNA, 19 nt, Homo sapiens
  misc_RNA (1)...(19): siRNA sense strand
agaagaaagugaggaaguu

SEQ ID NO: 1336233 - RNA, 19 nt, Homo sapiens
  misc_RNA (1)...(19): siRNA sense strand
gcaagaagcacagaauuac

SEQ ID NO: 1336234 - RNA, 19 nt, Homo sapiens
  misc_RNA (1)...(19): siRNA sense strand
gagaacacagaacuaguuu

SEQ ID NO: 1336235 - RNA, 19 nt, Homo sapiens
  misc_RNA (1)...(19): siRNA sense strand
agaacuaguuucagaagga

SEQ ID NO: 1336236 - RNA, 19 nt, Homo sapiens
  misc_RNA (1)...(19): siRNA sense strand
gaugaaccauuacugaaac

SEQ ID NO: 1336237 - RNA, 19 nt, Homo sapiens
  misc_RNA (1)...(19): siRNA sense strand
gagaaugcuggguuuauga

SEQ ID NO: 1336238 - RNA, 19 nt, Homo sapiens
  misc_RNA (1)...(19): siRNA sense strand
gaacauuacauucucacau

SEQ ID NO: 1336239 - RNA, 19 nt, Homo sapiens
  misc_RNA (1)...(19): siRNA sense strand
gaugaacauuacauucuca

SEQ ID NO: 1336240 - RNA, 19 nt, Homo sapiens
  misc_RNA (1)...(19): siRNA sense strand
gagcagguuucccaucauc

SEQ ID NO: 1336241 - RNA, 19 nt, Homo sapiens
  misc_RNA (1)...(19): siRNA sense strand
ucacuuaauucuuccuugu

SEQ ID NO: 1336242 - RNA, 19 nt, Homo sapiens
  misc_RNA (1)...(19): siRNA sense strand
gaggagcacaagagcguua

SEQ ID NO: 1336243 - RNA, 19 nt, Homo sapiens
  misc_RNA (1)...(19): siRNA sense strand
cagcagugaagaugaauuu

SEQ ID NO: 1336244 - RNA, 19 nt, Homo sapiens
  misc_RNA (1)...(19): siRNA sense strand
gaagaaagugaggaaguug

SEQ ID NO: 1336245 - RNA, 19 nt, Homo sapiens
  misc_RNA (1)...(19): siRNA sense strand
gcagugaagaugaauuuua

SEQ ID NO: 1336246 - RNA, 19 nt, Homo sapiens
  misc_RNA (1)...(19): siRNA sense strand
gagcauuagugaccagaag

SEQ ID NO: 1336247 - RNA, 19 nt, Homo sapiens
  misc_RNA (1)...(19): siRNA sense strand
guaguucuuccaacguuua

SEQ ID NO: 1336248 - RNA, 19 nt, Homo sapiens
  misc_RNA (1)...(19): siRNA sense strand
uggaagaucagaacgagua

SEQ ID NO: 1336249 - RNA, 19 nt, Homo sapiens
  misc_RNA (1)...(19): siRNA sense strand
ggacaucaucagacuccua

SEQ ID NO: 1336250 - RNA, 19 nt, Homo sapiens
  misc_RNA (1)...(19): siRNA sense strand
caagguuauuucaugaaga

SEQ ID NO: 1336251 - RNA, 19 nt, Homo sapiens
  misc_RNA (1)...(19): siRNA sense strand
acacuaaacccuucuaugg

SEQ ID NO: 1336252 - RNA, 19 nt, Homo sapiens
  misc_RNA (1)...(19): siRNA sense strand
gauaccacagaaucacuua

SEQ ID NO: 1336253 - RNA, 19 nt, Homo sapiens
  misc_RNA (1)...(19): siRNA sense strand
gcagaagcccgagaaagga

SEQ ID NO: 1336254 - RNA, 19 nt, Homo sapiens
  misc_RNA (1)...(19): siRNA sense strand
gugcaaauaucaucuucca

SEQ ID NO: 1336255 - RNA, 19 nt, Homo sapiens
  misc_RNA (1)...(19): siRNA sense strand
acaauucaaugcucauauc

SEQ ID NO: 1336256 - RNA, 19 nt, Homo sapiens
  misc_RNA (1)...(19): siRNA sense strand
gaagauacaauucaaugcu

SEQ ID NO: 1336257 - RNA, 19 nt, Homo sapiens
  misc_RNA (1)...(19): siRNA sense strand
gaugcugaccuguuugauu

SEQ ID NO: 1336258 - RNA, 19 nt, Homo sapiens
  misc_RNA (1)...(19): siRNA sense strand
cacgugaacuugucuccaa

SEQ ID NO: 1336259 - RNA, 19 nt, Homo sapiens
  misc_RNA (1)...(19): siRNA sense strand
ucaugaagauggagaaugc

SEQ ID NO: 1336260 - RNA, 19 nt, Homo sapiens
  misc_RNA (1)...(19): siRNA sense strand
uuaugaugcugaugaauuc

SEQ ID NO: 1336261 - RNA, 19 nt, Homo sapiens
  misc_RNA (1)...(19): siRNA sense strand
caucucuugucgcagguua

SEQ ID NO: 1336262 - RNA, 19 nt, Homo sapiens
  misc_RNA (1)...(19): siRNA sense strand
gguaguucuuccaacguuu

SEQ ID NO: 1336263 - RNA, 19 nt, Homo sapiens
  misc_RNA (1)...(19): siRNA sense strand
caaagcgcuuaauagauuc

SEQ ID NO: 1336264 - RNA, 19 nt, Homo sapiens
  misc_RNA (1)...(19): siRNA sense strand
caagugaugcugaccuguu

SEQ ID NO: 1336265 - RNA, 19 nt, Homo sapiens
  misc_RNA (1)...(19): siRNA sense strand
ugaugaaccauuacugaaa

SEQ ID NO: 1336266 - RNA, 19 nt, Homo sapiens
  misc_RNA (1)...(19): siRNA sense strand
gggcaagaagcacagaauu

SEQ ID NO: 1336267 - RNA, 19 nt, Homo sapiens
  misc_RNA (1)...(19): siRNA sense strand
cuuccaacguuuauucuug

SEQ ID NO: 1336268 - RNA, 19 nt, Homo sapiens
  misc_RNA (1)...(19): siRNA sense strand
agacuuggaauggaucuua

SEQ ID NO: 1336269 - RNA, 19 nt, Homo sapiens
  misc_RNA (1)...(19): siRNA sense strand
caagagcguuaucaugcau

SEQ ID NO: 1336270 - RNA, 19 nt, Homo sapiens
  misc_RNA (1)...(19): siRNA sense strand
aagugaugcugaccuguuu

SEQ ID NO: 1336271 - RNA, 19 nt, Homo sapiens
  misc_RNA (1)...(19): siRNA sense strand
augcugaccuguuugauuc

SEQ ID NO: 1336272 - RNA, 19 nt, Homo sapiens
  misc_RNA (1)...(19): siRNA sense strand
aaugcuggguuuaugauga

SEQ ID NO: 1336273 - RNA, 19 nt, Homo sapiens
  misc_RNA (1)...(19): siRNA sense strand
gaaguuggaagaucagaac

SEQ ID NO: 1336274 - RNA, 19 nt, Homo sapiens
  misc_RNA (1)...(19): siRNA sense strand
agacuaugaugaacauuac

SEQ ID NO: 1336275 - RNA, 19 nt, Homo sapiens
  misc_RNA (1)...(19): siRNA sense strand
agagaacacagaacuaguu

SEQ ID NO: 1336276 - RNA, 19 nt, Homo sapiens
  misc_RNA (1)...(19): siRNA sense strand
ucccaaggaucgaaugguu

SEQ ID NO: 1336277 - RNA, 19 nt, Homo sapiens
  misc_RNA (1)...(19): siRNA sense strand
ggaccuguuugugagcauu

SEQ ID NO: 1336278 - RNA, 19 nt, Homo sapiens
  misc_RNA (1)...(19): siRNA sense strand
ugauucacaugaugacaga

SEQ ID NO: 1336279 - RNA, 19 nt, Homo sapiens
  misc_RNA (1)...(19): siRNA sense strand
ccaaauacagucccagagu

SEQ ID NO: 1336280 - RNA, 19 nt, Homo sapiens
  misc_RNA (1)...(19): siRNA sense strand
uaugaugaaccauuacuga

SEQ ID NO: 1336281 - RNA, 19 nt, Homo sapiens
  misc_RNA (1)...(19): siRNA sense strand
ucaagaagaaagugaggaa

SEQ ID NO: 1336282 - RNA, 19 nt, Homo sapiens
  misc_RNA (1)...(19): siRNA sense strand
gguuagacuuggaauggau

SEQ ID NO: 1336283 - RNA, 19 nt, Homo sapiens
  misc_RNA (1)...(19): siRNA sense strand
gcacauccggaccuguuug

SEQ ID NO: 1336284 - RNA, 19 nt, Homo sapiens
  misc_RNA (1)...(19): siRNA sense strand
aaaggaaggagaaggaaau

SEQ ID NO: 1336285 - RNA, 19 nt, Homo sapiens
  misc_RNA (1)...(19): siRNA sense strand
ugaagagaacacagaacua

SEQ ID NO: 1336286 - RNA, 19 nt, Homo sapiens
  misc_RNA (1)...(19): siRNA sense strand
ggaaguuggaagaucagaa

SEQ ID NO: 1336287 - RNA, 19 nt, Homo sapiens
  misc_RNA (1)...(19): siRNA sense strand
aagaucagaacgaguauga

SEQ ID NO: 1336288 - RNA, 19 nt, Homo sapiens
  misc_RNA (1)...(19): siRNA sense strand
ggaggagaaugcaauauua

SEQ ID NO: 1336289 - RNA, 19 nt, Homo sapiens
  misc_RNA (1)...(19): siRNA sense strand
ccaaagcgcuuaauagauu

SEQ ID NO: 1336290 - RNA, 19 nt, Homo sapiens
  misc_RNA (1)...(19): siRNA sense strand
ggaugucacuuucaacuua

SEQ ID NO: 1336291 - RNA, 19 nt, Homo sapiens
  misc_RNA (1)...(19): siRNA sense strand
gaacuugucuccaaauaca

SEQ ID NO: 1336292 - RNA, 19 nt, Homo sapiens
  misc_RNA (1)...(19): siRNA sense strand
gcucauaucuggaccaaau

SEQ ID NO: 1336293 - RNA, 19 nt, Homo sapiens
  misc_RNA (1)...(19): siRNA sense strand
ggaaggaugucacuuucaa

SEQ ID NO: 1336294 - RNA, 19 nt, Homo sapiens
  misc_RNA (1)...(19): siRNA sense strand
gcacaggcuugaagaaaga

SEQ ID NO: 1336295 - RNA, 19 nt, Homo sapiens
  misc_RNA (1)...(19): siRNA sense strand
gaaaggaucaguugccaaa

SEQ ID NO: 1336296 - RNA, 19 nt, Homo sapiens
  misc_RNA (1)...(19): siRNA sense strand
gagacaagguuauuucaug

SEQ ID NO: 1336297 - RNA, 19 nt, Homo sapiens
  misc_RNA (1)...(19): siRNA sense strand
agaaauguaugcagacuuu

SEQ ID NO: 1336298 - RNA, 19 nt, Homo sapiens
  misc_RNA (1)...(19): siRNA sense strand
gaacacagaacuaguuuca

SEQ ID NO: 1336299 - RNA, 19 nt, Homo sapiens
  misc_RNA (1)...(19): siRNA sense strand
ggaauggaauggugugaug

SEQ ID NO: 1336300 - RNA, 19 nt, Homo sapiens
  misc_RNA (1)...(19): siRNA sense strand
acacagaacuaguuucaga

SEQ ID NO: 1336301 - RNA, 19 nt, Homo sapiens
  misc_RNA (1)...(19): siRNA sense strand
gaaguugccuauaaucaag

SEQ ID NO: 1336302 - RNA, 19 nt, Homo sapiens
  misc_RNA (1)...(19): siRNA sense strand
caaauacagucccagaguu

SEQ ID NO: 1336303 - RNA, 19 nt, Homo sapiens
  misc_RNA (1)...(19): siRNA sense strand
ccaagaaguugccuauaau

SEQ ID NO: 1336304 - RNA, 19 nt, Homo sapiens
  misc_RNA (1)...(19): siRNA sense strand
caaaugauacugaagagaa

SEQ ID NO: 1336305 - RNA, 19 nt, Homo sapiens
  misc_RNA (1)...(19): siRNA sense strand
ggcaagaagcacagaauua

SEQ ID NO: 1336306 - RNA, 19 nt, Homo sapiens
  misc_RNA (1)...(19): siRNA sense strand
ggagaaugcuggguuuaug

SEQ ID NO: 1336307 - RNA, 19 nt, Homo sapiens
  misc_RNA (1)...(19): siRNA sense strand
ggaaggagaaggaaauuca

SEQ ID NO: 1336308 - RNA, 19 nt, Homo sapiens
  misc_RNA (1)...(19): siRNA sense strand
cacagcagcucgggaaaua

SEQ ID NO: 1336309 - RNA, 19 nt, Homo sapiens
  misc_RNA (1)...(19): siRNA sense strand
gaaauucagugggagacaa

SEQ ID NO: 1336310 - RNA, 19 nt, Homo sapiens
  misc_RNA (1)...(19): siRNA sense strand
cagaauuacugccgagauu

SEQ ID NO: 1336311 - RNA, 19 nt, Homo sapiens
  misc_RNA (1)...(19): siRNA sense strand
ggaaggaaaggaucaguug

SEQ ID NO: 1336312 - RNA, 19 nt, Homo sapiens
  misc_RNA (1)...(19): siRNA sense strand
ggaauggugugauguaugc

SEQ ID NO: 1336313 - RNA, 19 nt, Homo sapiens
  misc_RNA (1)...(19): siRNA sense strand
gaaggucuauccucacagu

SEQ ID NO: 1336314 - RNA, 19 nt, Homo sapiens
  misc_RNA (1)...(19): siRNA sense strand
gcacaagagcguuaucaug

SEQ ID NO: 1336315 - RNA, 19 nt, Homo sapiens
  misc_RNA (1)...(19): siRNA sense strand
gauggagaaugcuggguuu

SEQ ID NO: 1336316 - RNA, 19 nt, Homo sapiens
  misc_RNA (1)...(19): siRNA sense strand
gaugucacuuucaacuuaa

SEQ ID NO: 1336317 - RNA, 19 nt, Homo sapiens
  misc_RNA (1)...(19): siRNA sense strand
accaagaaguugccuauaa

SEQ ID NO: 1336318 - RNA, 19 nt, Homo sapiens
  misc_RNA (1)...(19): siRNA sense strand
gaagagaacacagaacuag

SEQ ID NO: 1336319 - RNA, 19 nt, Homo sapiens
  misc_RNA (1)...(19): siRNA sense strand
agacaagguuauuucauga

SEQ ID NO: 1336320 - RNA, 19 nt, Homo sapiens
  misc_RNA (1)...(19): siRNA sense strand
gugaacuugucuccaaaua

SEQ ID NO: 1336321 - RNA, 19 nt, Homo sapiens
  misc_RNA (1)...(19): siRNA sense strand
aauaucaucuuccacacua

SEQ ID NO: 1336322 - RNA, 19 nt, Homo sapiens
  misc_RNA (1)...(19): siRNA sense strand
gaggagaaugcaauauuaa

SEQ ID NO: 1336323 - RNA, 19 nt, Homo sapiens
  misc_RNA (1)...(19): siRNA sense strand
gaugcaauauaucaaccua

SEQ ID NO: 1336324 - RNA, 19 nt, Homo sapiens
  misc_RNA (1)...(19): siRNA sense strand
gaaaggaaggagaaggaaa

SEQ ID NO: 1336325 - RNA, 19 nt, Homo sapiens
  misc_RNA (1)...(19): siRNA sense strand
ucccguagaugcaauauau

SEQ ID NO: 1336326 - RNA, 19 nt, Homo sapiens
  misc_RNA (1)...(19): siRNA sense strand
gaucagaacgaguaugaau

SEQ ID NO: 1336327 - RNA, 19 nt, Homo sapiens
  misc_RNA (1)...(19): siRNA sense strand
gcagggcugugucucaugu

SEQ ID NO: 1336328 - RNA, 19 nt, Homo sapiens
  misc_RNA (1)...(19): siRNA sense strand
ugaggaaguuggaagauca

SEQ ID NO: 1336329 - RNA, 19 nt, Homo sapiens
  misc_RNA (1)...(19): siRNA sense strand
ggaauuaggaggagaaugc

SEQ ID NO: 1336330 - RNA, 19 nt, Homo sapiens
  misc_RNA (1)...(19): siRNA sense strand
caacguuuauucuugaaag

SEQ ID NO: 1336331 - RNA, 19 nt, Homo sapiens
  misc_RNA (1)...(19): siRNA sense strand
gagaaaggaaggagaagga

SEQ ID NO: 1336332 - RNA, 19 nt, Homo sapiens
  misc_RNA (1)...(19): siRNA sense strand
agaagaaagugaggaaguu

SEQ ID NO: 1336333 - RNA, 19 nt, Homo sapiens
  misc_RNA (1)...(19): siRNA sense strand
gcaagaagcacagaauuac

SEQ ID NO: 1336334 - RNA, 19 nt, Homo sapiens
  misc_RNA (1)...(19): siRNA sense strand
gagaacacagaacuaguuu

SEQ ID NO: 1336335 - RNA, 19 nt, Homo sapiens
  misc_RNA (1)...(19): siRNA sense strand
agaacuaguuucagaagga

SEQ ID NO: 1336336 - RNA, 19 nt, Homo sapiens
  misc_RNA (1)...(19): siRNA sense strand
gaugaaccauuacugaaac

SEQ ID NO: 1336337 - RNA, 19 nt, Homo sapiens
  misc_RNA (1)...(19): siRNA sense strand
gagaaugcuggguuuauga

SEQ ID NO: 1336338 - RNA, 19 nt, Homo sapiens
  misc_RNA (1)...(19): siRNA sense strand
gaacauuacauucucacau

SEQ ID NO: 1336339 - RNA, 19 nt, Homo sapiens
  misc_RNA (1)...(19): siRNA sense strand
gaugaacauuacauucuca

SEQ ID NO: 1336340 - RNA, 19 nt, Homo sapiens
  misc_RNA (1)...(19): siRNA sense strand
gagcagguuucccaucauc

SEQ ID NO: 1336341 - RNA, 19 nt, Homo sapiens
  misc_RNA (1)...(19): siRNA sense strand
ucacuuaauucuuccuugu

SEQ ID NO: 1336342 - RNA, 19 nt, Homo sapiens
  misc_RNA (1)...(19): siRNA sense strand
gaggagcacaagagcguua

SEQ ID NO: 1336343 - RNA, 19 nt, Homo sapiens
  misc_RNA (1)...(19): siRNA sense strand
cagcagugaagaugaauuu

SEQ ID NO: 1336344 - RNA, 19 nt, Homo sapiens
  misc_RNA (1)...(19): siRNA sense strand
gaagaaagugaggaaguug

SEQ ID NO: 1336345 - RNA, 19 nt, Homo sapiens
  misc_RNA (1)...(19): siRNA sense strand
gcagugaagaugaauuuua

SEQ ID NO: 1336346 - RNA, 19 nt, Homo sapiens
  misc_RNA (1)...(19): siRNA sense strand
gagcauuagugaccagaag

SEQ ID NO: 1336347 - RNA, 19 nt, Homo sapiens
  misc_RNA (1)...(19): siRNA sense strand
guaguucuuccaacguuua

SEQ ID NO: 1336348 - RNA, 19 nt, Homo sapiens
  misc_RNA (1)...(19): siRNA sense strand
uggaagaucagaacgagua

SEQ ID NO: 1336349 - RNA, 19 nt, Homo sapiens
  misc_RNA (1)...(19): siRNA sense strand
ggacaucaucagacuccua

SEQ ID NO: 1336350 - RNA, 19 nt, Homo sapiens
  misc_RNA (1)...(19): siRNA sense strand
caagguuauuucaugaaga

SEQ ID NO: 1336351 - RNA, 19 nt, Homo sapiens
  misc_RNA (1)...(19): siRNA sense strand
acacuaaacccuucuaugg

SEQ ID NO: 1336352 - RNA, 19 nt, Homo sapiens
  misc_RNA (1)...(19): siRNA sense strand
gauaccacagaaucacuua

SEQ ID NO: 1336353 - RNA, 19 nt, Homo sapiens
  misc_RNA (1)...(19): siRNA sense strand
gcagaagcccgagaaagga

SEQ ID NO: 1336354 - RNA, 19 nt, Homo sapiens
  misc_RNA (1)...(19): siRNA sense strand
gugcaaauaucaucuucca

SEQ ID NO: 1336355 - RNA, 19 nt, Homo sapiens
  misc_RNA (1)...(19): siRNA sense strand
acaauucaaugcucauauc

SEQ ID NO: 1336356 - RNA, 19 nt, Homo sapiens
  misc_RNA (1)...(19): siRNA sense strand
gaagauacaauucaaugcu

SEQ ID NO: 1336357 - RNA, 19 nt, Homo sapiens
  misc_RNA (1)...(19): siRNA sense strand
gaugcugaccuguuugauu

SEQ ID NO: 1336358 - RNA, 19 nt, Homo sapiens
  misc_RNA (1)...(19): siRNA sense strand
cacgugaacuugucuccaa

SEQ ID NO: 1336359 - RNA, 19 nt, Homo sapiens
  misc_RNA (1)...(19): siRNA sense strand
ucaugaagauggagaaugc

SEQ ID NO: 1336360 - RNA, 19 nt, Homo sapiens
  misc_RNA (1)...(19): siRNA sense strand
uuaugaugcugaugaauuc

SEQ ID NO: 1336361 - RNA, 19 nt, Homo sapiens
  misc_RNA (1)...(19): siRNA sense strand
caucucuugucgcagguua

SEQ ID NO: 1336362 - RNA, 19 nt, Homo sapiens
  misc_RNA (1)...(19): siRNA sense strand
gguaguucuuccaacguuu

SEQ ID NO: 1336363 - RNA, 19 nt, Homo sapiens
  misc_RNA (1)...(19): siRNA sense strand
caaagcgcuuaauagauuc

SEQ ID NO: 1336364 - RNA, 19 nt, Homo sapiens
  misc_RNA (1)...(19): siRNA sense strand
caagugaugcugaccuguu

SEQ ID NO: 1336365 - RNA, 19 nt, Homo sapiens
  misc_RNA (1)...(19): siRNA sense strand
ugaugaaccauuacugaaa

SEQ ID NO: 1336366 - RNA, 19 nt, Homo sapiens
  misc_RNA (1)...(19): siRNA sense strand
gggcaagaagcacagaauu

SEQ ID NO: 1336367 - RNA, 19 nt, Homo sapiens
  misc_RNA (1)...(19): siRNA sense strand
cuuccaacguuuauucuug

SEQ ID NO: 1336368 - RNA, 19 nt, Homo sapiens
  misc_RNA (1)...(19): siRNA sense strand
agacuuggaauggaucuua

SEQ ID NO: 1336369 - RNA, 19 nt, Homo sapiens
  misc_RNA (1)...(19): siRNA sense strand
caagagcguuaucaugcau

SEQ ID NO: 1336370 - RNA, 19 nt, Homo sapiens
  misc_RNA (1)...(19): siRNA sense strand
aagugaugcugaccuguuu

SEQ ID NO: 1336371 - RNA, 19 nt, Homo sapiens
  misc_RNA (1)...(19): siRNA sense strand
augcugaccuguuugauuc

SEQ ID NO: 1336372 - RNA, 19 nt, Homo sapiens
  misc_RNA (1)...(19): siRNA sense strand
aaugcuggguuuaugauga

SEQ ID NO: 1336373 - RNA, 19 nt, Homo sapiens
  misc_RNA (1)...(19): siRNA sense strand
gaaguuggaagaucagaac

SEQ ID NO: 1336374 - RNA, 19 nt, Homo sapiens
  misc_RNA (1)...(19): siRNA sense strand
agacuaugaugaacauuac

SEQ ID NO: 1336375 - RNA, 19 nt, Homo sapiens
  misc_RNA (1)...(19): siRNA sense strand
agagaacacagaacuaguu

SEQ ID NO: 1336376 - RNA, 19 nt, Homo sapiens
  misc_RNA (1)...(19): siRNA sense strand
ucccaaggaucgaaugguu

SEQ ID NO: 1336377 - RNA, 19 nt, Homo sapiens
  misc_RNA (1)...(19): siRNA sense strand
ggaccuguuugugagcauu

SEQ ID NO: 1336378 - RNA, 19 nt, Homo sapiens
  misc_RNA (1)...(19): siRNA sense strand
ugauucacaugaugacaga

SEQ ID NO: 1336379 - RNA, 19 nt, Homo sapiens
  misc_RNA (1)...(19): siRNA sense strand
ccaaauacagucccagagu

SEQ ID NO: 1336380 - RNA, 19 nt, Homo sapiens
  misc_RNA (1)...(19): siRNA sense strand
uaugaugaaccauuacuga

SEQ ID NO: 1336381 - RNA, 19 nt, Homo sapiens
  misc_RNA (1)...(19): siRNA sense strand
ucaagaagaaagugaggaa

SEQ ID NO: 1336382 - RNA, 19 nt, Homo sapiens
  misc_RNA (1)...(19): siRNA sense strand
gguuagacuuggaauggau

SEQ ID NO: 1336383 - RNA, 19 nt, Homo sapiens
  misc_RNA (1)...(19): siRNA sense strand
gcacauccggaccuguuug

SEQ ID NO: 1336384 - RNA, 19 nt, Homo sapiens
  misc_RNA (1)...(19): siRNA sense strand
aaaggaaggagaaggaaau

SEQ ID NO: 1336385 - RNA, 19 nt, Homo sapiens
  misc_RNA (1)...(19): siRNA sense strand
ugaagagaacacagaacua

SEQ ID NO: 1336386 - RNA, 19 nt, Homo sapiens
  misc_RNA (1)...(19): siRNA sense strand
ggaaguuggaagaucagaa

SEQ ID NO: 1336387 - RNA, 19 nt, Homo sapiens
  misc_RNA (1)...(19): siRNA sense strand
aagaucagaacgaguauga

SEQ ID NO: 1336388 - RNA, 19 nt, Homo sapiens
  misc_RNA (1)...(19): siRNA sense strand
ggaggagaaugcaauauua

SEQ ID NO: 1336389 - RNA, 19 nt, Homo sapiens
  misc_RNA (1)...(19): siRNA sense strand
ccaaagcgcuuaauagauu

SEQ ID NO: 1336390 - RNA, 19 nt, Homo sapiens
  misc_RNA (1)...(19): siRNA sense strand
ggaugucacuuucaacuua

SEQ ID NO: 1336391 - RNA, 19 nt, Homo sapiens
  misc_RNA (1)...(19): siRNA sense strand
gaacuugucuccaaauaca

SEQ ID NO: 1336392 - RNA, 19 nt, Homo sapiens
  misc_RNA (1)...(19): siRNA sense strand
gcucauaucuggaccaaau

SEQ ID NO: 1336393 - RNA, 19 nt, Homo sapiens
  misc_RNA (1)...(19): siRNA sense strand
ggaaggaugucacuuucaa

SEQ ID NO: 1336394 - RNA, 19 nt, Homo sapiens
  misc_RNA (1)...(19): siRNA sense strand
gcacaggcuugaagaaaga

SEQ ID NO: 1336395 - RNA, 19 nt, Homo sapiens
  misc_RNA (1)...(19): siRNA sense strand
gaaaggaucaguugccaaa

SEQ ID NO: 1336396 - RNA, 19 nt, Homo sapiens
  misc_RNA (1)...(19): siRNA sense strand
gagacaagguuauuucaug

SEQ ID NO: 1336397 - RNA, 19 nt, Homo sapiens
  misc_RNA (1)...(19): siRNA sense strand
agaaauguaugcagacuuu

SEQ ID NO: 1336398 - RNA, 19 nt, Homo sapiens
  misc_RNA (1)...(19): siRNA sense strand
gaacacagaacuaguuuca

SEQ ID NO: 1336399 - RNA, 19 nt, Homo sapiens
  misc_RNA (1)...(19): siRNA sense strand
ggaauggaauggugugaug

SEQ ID NO: 1336400 - RNA, 19 nt, Homo sapiens
  misc_RNA (1)...(19): siRNA sense strand
acacagaacuaguuucaga

SEQ ID NO: 1336401 - RNA, 19 nt, Homo sapiens
  misc_RNA (1)...(19): siRNA sense strand
gaaguugccuauaaucaag

SEQ ID NO: 1336402 - RNA, 19 nt, Homo sapiens
  misc_RNA (1)...(19): siRNA sense strand
caaauacagucccagaguu

SEQ ID NO: 1336403 - RNA, 19 nt, Homo sapiens
  misc_RNA (1)...(19): siRNA sense strand
ccaagaaguugccuauaau

SEQ ID NO: 1336404 - RNA, 19 nt, Homo sapiens
  misc_RNA (1)...(19): siRNA sense strand
caaaugauacugaagagaa

SEQ ID NO: 1336405 - RNA, 19 nt, Homo sapiens
  misc_RNA (1)...(19): siRNA sense strand
ggcaagaagcacagaauua

SEQ ID NO: 1336406 - RNA, 19 nt, Homo sapiens
  misc_RNA (1)...(19): siRNA sense strand
ggagaaugcuggguuuaug

SEQ ID NO: 1336407 - RNA, 19 nt, Homo sapiens
  misc_RNA (1)...(19): siRNA sense strand
ggaaggagaaggaaauuca

SEQ ID NO: 1336408 - RNA, 19 nt, Homo sapiens
  misc_RNA (1)...(19): siRNA sense strand
cacagcagcucgggaaaua

SEQ ID NO: 1336409 - RNA, 19 nt, Homo sapiens
  misc_RNA (1)...(19): siRNA sense strand
gaaauucagugggagacaa

SEQ ID NO: 1336410 - RNA, 19 nt, Homo sapiens
  misc_RNA (1)...(19): siRNA sense strand
cagaauuacugccgagauu

SEQ ID NO: 1336411 - RNA, 19 nt, Homo sapiens
  misc_RNA (1)...(19): siRNA sense strand
ggaaggaaaggaucaguug

SEQ ID NO: 1336412 - RNA, 19 nt, Homo sapiens
  misc_RNA (1)...(19): siRNA sense strand
ggaauggugugauguaugc

SEQ ID NO: 1336413 - RNA, 19 nt, Homo sapiens
  misc_RNA (1)...(19): siRNA sense strand
gaaggucuauccucacagu

SEQ ID NO: 1336414 - RNA, 19 nt, Homo sapiens
  misc_RNA (1)...(19): siRNA sense strand
gcacaagagcguuaucaug

SEQ ID NO: 1336415 - RNA, 19 nt, Homo sapiens
  misc_RNA (1)...(19): siRNA sense strand
gauggagaaugcuggguuu

SEQ ID NO: 1336416 - RNA, 19 nt, Homo sapiens
  misc_RNA (1)...(19): siRNA sense strand
gaugucacuuucaacuuaa

SEQ ID NO: 1336417 - RNA, 19 nt, Homo sapiens
  misc_RNA (1)...(19): siRNA sense strand
accaagaaguugccuauaa

SEQ ID NO: 1336418 - RNA, 19 nt, Homo sapiens
  misc_RNA (1)...(19): siRNA sense strand
gaagagaacacagaacuag

SEQ ID NO: 1336419 - RNA, 19 nt, Homo sapiens
  misc_RNA (1)...(19): siRNA sense strand
agacaagguuauuucauga

SEQ ID NO: 1336420 - RNA, 19 nt, Homo sapiens
  misc_RNA (1)...(19): siRNA sense strand
gugaacuugucuccaaaua

SEQ ID NO: 1336421 - RNA, 19 nt, Homo sapiens
  misc_RNA (1)...(19): siRNA sense strand
aauaucaucuuccacacua

SEQ ID NO: 1336422 - RNA, 19 nt, Homo sapiens
  misc_RNA (1)...(19): siRNA sense strand
gaggagaaugcaauauuaa

SEQ ID NO: 1336423 - RNA, 19 nt, Homo sapiens
  misc_RNA (1)...(19): siRNA sense strand
gaugcaauauaucaaccua

SEQ ID NO: 1336424 - RNA, 19 nt, Homo sapiens
  misc_RNA (1)...(19): siRNA sense strand
gaaaggaaggagaaggaaa

SEQ ID NO: 1336425 - RNA, 19 nt, Homo sapiens
  misc_RNA (1)...(19): siRNA sense strand
ucccguagaugcaauauau

SEQ ID NO: 1336426 - RNA, 19 nt, Homo sapiens
  misc_RNA (1)...(19): siRNA sense strand
gaucagaacgaguaugaau

SEQ ID NO: 1336427 - RNA, 19 nt, Homo sapiens
  misc_RNA (1)...(19): siRNA sense strand
gcagggcugugucucaugu

SEQ ID NO: 1336428 - RNA, 19 nt, Homo sapiens
  misc_RNA (1)...(19): siRNA sense strand
ugaggaaguuggaagauca

SEQ ID NO: 1336429 - RNA, 19 nt, Homo sapiens
  misc_RNA (1)...(19): siRNA sense strand
ggaauuaggaggagaaugc

SEQ ID NO: 1336430 - RNA, 19 nt, Homo sapiens
  misc_RNA (1)...(19): siRNA sense strand
caacguuuauucuugaaag

SEQ ID NO: 1336431 - RNA, 19 nt, Homo sapiens
  misc_RNA (1)...(19): siRNA sense strand
gagaaaggaaggagaagga

SEQ ID NO: 1336432 - RNA, 19 nt, Homo sapiens
  misc_RNA (1)...(19): siRNA sense strand
agaagaaagugaggaaguu

SEQ ID NO: 1336433 - RNA, 19 nt, Homo sapiens
  misc_RNA (1)...(19): siRNA sense strand
gcaagaagcacagaauuac

SEQ ID NO: 1336434 - RNA, 19 nt, Homo sapiens
  misc_RNA (1)...(19): siRNA sense strand
gagaacacagaacuaguuu

SEQ ID NO: 1336435 - RNA, 19 nt, Homo sapiens
  misc_RNA (1)...(19): siRNA sense strand
agaacuaguuucagaagga

SEQ ID NO: 1336436 - RNA, 19 nt, Homo sapiens
  misc_RNA (1)...(19): siRNA sense strand
gaugaaccauuacugaaac

SEQ ID NO: 1336437 - RNA, 19 nt, Homo sapiens
  misc_RNA (1)...(19): siRNA sense strand
gagaaugcuggguuuauga

SEQ ID NO: 1336438 - RNA, 19 nt, Homo sapiens
  misc_RNA (1)...(19): siRNA sense strand
gaacauuacauucucacau

SEQ ID NO: 1336439 - RNA, 19 nt, Homo sapiens
  misc_RNA (1)...(19): siRNA sense strand
gaugaacauuacauucuca

SEQ ID NO: 1336440 - RNA, 19 nt, Homo sapiens
  misc_RNA (1)...(19): siRNA sense strand
gagcagguuucccaucauc

SEQ ID NO: 1336441 - RNA, 19 nt, Homo sapiens
  misc_RNA (1)...(19): siRNA sense strand
ucacuuaauucuuccuugu

SEQ ID NO: 1336442 - RNA, 19 nt, Homo sapiens
  misc_RNA (1)...(19): siRNA sense strand
gaggagcacaagagcguua

SEQ ID NO: 1336443 - RNA, 19 nt, Homo sapiens
  misc_RNA (1)...(19): siRNA sense strand
cagcagugaagaugaauuu

SEQ ID NO: 1336444 - RNA, 19 nt, Homo sapiens
  misc_RNA (1)...(19): siRNA sense strand
gaagaaagugaggaaguug

SEQ ID NO: 1336445 - RNA, 19 nt, Homo sapiens
  misc_RNA (1)...(19): siRNA sense strand
gcagugaagaugaauuuua

SEQ ID NO: 1336446 - RNA, 19 nt, Homo sapiens
  misc_RNA (1)...(19): siRNA sense strand
gagcauuagugaccagaag

SEQ ID NO: 1336447 - RNA, 19 nt, Homo sapiens
  misc_RNA (1)...(19): siRNA sense strand
guaguucuuccaacguuua

SEQ ID NO: 1336448 - RNA, 19 nt, Homo sapiens
  misc_RNA (1)...(19): siRNA sense strand
uggaagaucagaacgagua

SEQ ID NO: 1336449 - RNA, 19 nt, Homo sapiens
  misc_RNA (1)...(19): siRNA sense strand
ggacaucaucagacuccua

SEQ ID NO: 1336450 - RNA, 19 nt, Homo sapiens
  misc_RNA (1)...(19): siRNA sense strand
caagguuauuucaugaaga

SEQ ID NO: 1336451 - RNA, 19 nt, Homo sapiens
  misc_RNA (1)...(19): siRNA sense strand
acacuaaacccuucuaugg

SEQ ID NO: 1336452 - RNA, 19 nt, Homo sapiens
  misc_RNA (1)...(19): siRNA sense strand
gauaccacagaaucacuua

SEQ ID NO: 1336453 - RNA, 19 nt, Homo sapiens
  misc_RNA (1)...(19): siRNA sense strand
gcagaagcccgagaaagga

SEQ ID NO: 1336454 - RNA, 19 nt, Homo sapiens
  misc_RNA (1)...(19): siRNA sense strand
gugcaaauaucaucuucca

SEQ ID NO: 1336455 - RNA, 19 nt, Homo sapiens
  misc_RNA (1)...(19): siRNA sense strand
acaauucaaugcucauauc

SEQ ID NO: 1336456 - RNA, 19 nt, Homo sapiens
  misc_RNA (1)...(19): siRNA sense strand
gaagauacaauucaaugcu

SEQ ID NO: 1336457 - RNA, 19 nt, Homo sapiens
  misc_RNA (1)...(19): siRNA sense strand
gaugcugaccuguuugauu

SEQ ID NO: 1336458 - RNA, 19 nt, Homo sapiens
  misc_RNA (1)...(19): siRNA sense strand
cacgugaacuugucuccaa

SEQ ID NO: 1336459 - RNA, 19 nt, Homo sapiens
  misc_RNA (1)...(19): siRNA sense strand
ucaugaagauggagaaugc

SEQ ID NO: 1336460 - RNA, 19 nt, Homo sapiens
  misc_RNA (1)...(19): siRNA sense strand
uuaugaugcugaugaauuc

SEQ ID NO: 1336461 - RNA, 19 nt, Homo sapiens
  misc_RNA (1)...(19): siRNA sense strand
caucucuugucgcagguua

SEQ ID NO: 1336462 - RNA, 19 nt, Homo sapiens
  misc_RNA (1)...(19): siRNA sense strand
gguaguucuuccaacguuu

SEQ ID NO: 1336463 - RNA, 19 nt, Homo sapiens
  misc_RNA (1)...(19): siRNA sense strand
caaagcgcuuaauagauuc

SEQ ID NO: 1336464 - RNA, 19 nt, Homo sapiens
  misc_RNA (1)...(19): siRNA sense strand
caagugaugcugaccuguu

SEQ ID NO: 1336465 - RNA, 19 nt, Homo sapiens
  misc_RNA (1)...(19): siRNA sense strand
ugaugaaccauuacugaaa

SEQ ID NO: 1336466 - RNA, 19 nt, Homo sapiens
  misc_RNA (1)...(19): siRNA sense strand
gggcaagaagcacagaauu

SEQ ID NO: 1336467 - RNA, 19 nt, Homo sapiens
  misc_RNA (1)...(19): siRNA sense strand
cuuccaacguuuauucuug

SEQ ID NO: 1336468 - RNA, 19 nt, Homo sapiens
  misc_RNA (1)...(19): siRNA sense strand
agacuuggaauggaucuua

SEQ ID NO: 1336469 - RNA, 19 nt, Homo sapiens
  misc_RNA (1)...(19): siRNA sense strand
caagagcguuaucaugcau

SEQ ID NO: 1336470 - RNA, 19 nt, Homo sapiens
  misc_RNA (1)...(19): siRNA sense strand
aagugaugcugaccuguuu

SEQ ID NO: 1336471 - RNA, 19 nt, Homo sapiens
  misc_RNA (1)...(19): siRNA sense strand
augcugaccuguuugauuc

SEQ ID NO: 1336472 - RNA, 19 nt, Homo sapiens
  misc_RNA (1)...(19): siRNA sense strand
aaugcuggguuuaugauga

SEQ ID NO: 1336473 - RNA, 19 nt, Homo sapiens
  misc_RNA (1)...(19): siRNA sense strand
gaaguuggaagaucagaac

SEQ ID NO: 1336474 - RNA, 19 nt, Homo sapiens
  misc_RNA (1)...(19): siRNA sense strand
agacuaugaugaacauuac

SEQ ID NO: 1336475 - RNA, 19 nt, Homo sapiens
  misc_RNA (1)...(19): siRNA sense strand
agagaacacagaacuaguu

SEQ ID NO: 1336476 - RNA, 19 nt, Homo sapiens
  misc_RNA (1)...(19): siRNA sense strand
ucccaaggaucgaaugguu

SEQ ID NO: 1336477 - RNA, 19 nt, Homo sapiens
  misc_RNA (1)...(19): siRNA sense strand
ggaccuguuugugagcauu

SEQ ID NO: 1336478 - RNA, 19 nt, Homo sapiens
  misc_RNA (1)...(19): siRNA sense strand
ugauucacaugaugacaga

SEQ ID NO: 1336479 - RNA, 19 nt, Homo sapiens
  misc_RNA (1)...(19): siRNA sense strand
ccaaauacagucccagagu

SEQ ID NO: 1336480 - RNA, 19 nt, Homo sapiens
  misc_RNA (1)...(19): siRNA sense strand
uaugaugaaccauuacuga

SEQ ID NO: 1336481 - RNA, 19 nt, Homo sapiens
  misc_RNA (1)...(19): siRNA sense strand
ucaagaagaaagugaggaa

SEQ ID NO: 1336482 - RNA, 19 nt, Homo sapiens
  misc_RNA (1)...(19): siRNA sense strand
gguuagacuuggaauggau

SEQ ID NO: 1336483 - RNA, 19 nt, Homo sapiens
  misc_RNA (1)...(19): siRNA sense strand
gcacauccggaccuguuug

SEQ ID NO: 1336484 - RNA, 19 nt, Homo sapiens
  misc_RNA (1)...(19): siRNA sense strand
aaaggaaggagaaggaaau

SEQ ID NO: 1336485 - RNA, 19 nt, Homo sapiens
  misc_RNA (1)...(19): siRNA sense strand
ugaagagaacacagaacua

SEQ ID NO: 1336486 - RNA, 19 nt, Homo sapiens
  misc_RNA (1)...(19): siRNA sense strand
ggaaguuggaagaucagaa

SEQ ID NO: 1336487 - RNA, 19 nt, Homo sapiens
  misc_RNA (1)...(19): siRNA sense strand
aagaucagaacgaguauga

SEQ ID NO: 1336488 - RNA, 19 nt, Homo sapiens
  misc_RNA (1)...(19): siRNA sense strand
ggaggagaaugcaauauua

SEQ ID NO: 1336489 - RNA, 19 nt, Homo sapiens
  misc_RNA (1)...(19): siRNA sense strand
ccaaagcgcuuaauagauu

SEQ ID NO: 1336490 - RNA, 19 nt, Homo sapiens
  misc_RNA (1)...(19): siRNA sense strand
ggaugucacuuucaacuua

SEQ ID NO: 1336491 - RNA, 19 nt, Homo sapiens
  misc_RNA (1)...(19): siRNA sense strand
caaagaagaugaacagaga

SEQ ID NO: 1336492 - RNA, 19 nt, Homo sapiens
  misc_RNA (1)...(19): siRNA sense strand
gaacuugucuccaaauaca

SEQ ID NO: 1336493 - RNA, 19 nt, Homo sapiens
  misc_RNA (1)...(19): siRNA sense strand
gcucauaucuggaccaaau

SEQ ID NO: 1336494 - RNA, 19 nt, Homo sapiens
  misc_RNA (1)...(19): siRNA sense strand
ggaaggaugucacuuucaa

SEQ ID NO: 1336495 - RNA, 19 nt, Homo sapiens
  misc_RNA (1)...(19): siRNA sense strand
gcacaggcuugaagaaaga

SEQ ID NO: 1336496 - RNA, 19 nt, Homo sapiens
  misc_RNA (1)...(19): siRNA sense strand
gaaaggaucaguugccaaa

SEQ ID NO: 1336497 - RNA, 19 nt, Homo sapiens
  misc_RNA (1)...(19): siRNA sense strand
gagacaagguuauuucaug

SEQ ID NO: 1336498 - RNA, 19 nt, Homo sapiens
  misc_RNA (1)...(19): siRNA sense strand
agaaauguaugcagacuuu

SEQ ID NO: 1336499 - RNA, 19 nt, Homo sapiens
  misc_RNA (1)...(19): siRNA sense strand
gaacacagaacuaguuuca

SEQ ID NO: 1336500 - RNA, 19 nt, Homo sapiens
  misc_RNA (1)...(19): siRNA sense strand
ggaauggaauggugugaug

SEQ ID NO: 1336501 - RNA, 19 nt, Homo sapiens
  misc_RNA (1)...(19): siRNA sense strand
acacagaacuaguuucaga

SEQ ID NO: 1336502 - RNA, 19 nt, Homo sapiens
  misc_RNA (1)...(19): siRNA sense strand
gaaguugccuauaaucaag

SEQ ID NO: 1336503 - RNA, 19 nt, Homo sapiens
  misc_RNA (1)...(19): siRNA sense strand
caaauacagucccagaguu

SEQ ID NO: 1336504 - RNA, 19 nt, Homo sapiens
  misc_RNA (1)...(19): siRNA sense strand
ccaagaaguugccuauaau

SEQ ID NO: 1336505 - RNA, 19 nt, Homo sapiens
  misc_RNA (1)...(19): siRNA sense strand
gacaacaaauagcauggua

SEQ ID NO: 1336506 - RNA, 19 nt, Homo sapiens
  misc_RNA (1)...(19): siRNA sense strand
caaaugauacugaagagaa

SEQ ID NO: 1336507 - RNA, 19 nt, Homo sapiens
  misc_RNA (1)...(19): siRNA sense strand
ggcaagaagcacagaauua

SEQ ID NO: 1336508 - RNA, 19 nt, Homo sapiens
  misc_RNA (1)...(19): siRNA sense strand
ggagaaugcuggguuuaug

SEQ ID NO: 1336509 - RNA, 19 nt, Homo sapiens
  misc_RNA (1)...(19): siRNA sense strand
caaauagcaugguagaauc

SEQ ID NO: 1336510 - RNA, 19 nt, Homo sapiens
  misc_RNA (1)...(19): siRNA sense strand
ggaaggagaaggaaauuca

SEQ ID NO: 1336511 - RNA, 19 nt, Homo sapiens
  misc_RNA (1)...(19): siRNA sense strand
gaagaugaacagagaaaga

SEQ ID NO: 1336512 - RNA, 19 nt, Homo sapiens
  misc_RNA (1)...(19): siRNA sense strand
cacagcagcucgggaaaua

SEQ ID NO: 1336513 - RNA, 19 nt, Homo sapiens
  misc_RNA (1)...(19): siRNA sense strand
gaaauucagugggagacaa

SEQ ID NO: 1336514 - RNA, 19 nt, Homo sapiens
  misc_RNA (1)...(19): siRNA sense strand
cagaauuacugccgagauu

SEQ ID NO: 1336515 - RNA, 19 nt, Homo sapiens
  misc_RNA (1)...(19): siRNA sense strand
ggaaggaaaggaucaguug

SEQ ID NO: 1336516 - RNA, 19 nt, Homo sapiens
  misc_RNA (1)...(19): siRNA sense strand
ggaauggugugauguaugc

SEQ ID NO: 1336517 - RNA, 19 nt, Homo sapiens
  misc_RNA (1)...(19): siRNA sense strand
gaaggucuauccucacagu

SEQ ID NO: 1336518 - RNA, 19 nt, Homo sapiens
  misc_RNA (1)...(19): siRNA sense strand
gcacaagagcguuaucaug

SEQ ID NO: 1336519 - RNA, 19 nt, Homo sapiens
  misc_RNA (1)...(19): siRNA sense strand
gauggagaaugcuggguuu

SEQ ID NO: 1336520 - RNA, 19 nt, Homo sapiens
  misc_RNA (1)...(19): siRNA sense strand
gaugucacuuucaacuuaa

SEQ ID NO: 1336521 - RNA, 19 nt, Homo sapiens
  misc_RNA (1)...(19): siRNA sense strand
gaacagagaaagaaaauug

SEQ ID NO: 1336522 - RNA, 19 nt, Homo sapiens
  misc_RNA (1)...(19): siRNA sense strand
ucaaagagacaacaaauag

SEQ ID NO: 1336523 - RNA, 19 nt, Homo sapiens
  misc_RNA (1)...(19): siRNA sense strand
accaagaaguugccuauaa

SEQ ID NO: 1336524 - RNA, 19 nt, Homo sapiens
  misc_RNA (1)...(19): siRNA sense strand
gaagagaacacagaacuag

SEQ ID NO: 1336525 - RNA, 19 nt, Homo sapiens
  misc_RNA (1)...(19): siRNA sense strand
agacaagguuauuucauga

SEQ ID NO: 1336526 - RNA, 19 nt, Homo sapiens
  misc_RNA (1)...(19): siRNA sense strand
gugaacuugucuccaaaua

SEQ ID NO: 1336527 - RNA, 19 nt, Homo sapiens
  misc_RNA (1)...(19): siRNA sense strand
aauaucaucuuccacacua

SEQ ID NO: 1336528 - RNA, 19 nt, Homo sapiens
  misc_RNA (1)...(19): siRNA sense strand
gaggagaaugcaauauuaa

SEQ ID NO: 1336529 - RNA, 19 nt, Homo sapiens
  misc_RNA (1)...(19): siRNA sense strand
gaugcaauauaucaaccua

SEQ ID NO: 1336530 - RNA, 19 nt, Homo sapiens
  misc_RNA (1)...(19): siRNA sense strand
gaaaggaaggagaaggaaa

SEQ ID NO: 1336531 - RNA, 19 nt, Homo sapiens
  misc_RNA (1)...(19): siRNA sense strand
ucccguagaugcaauauau

SEQ ID NO: 1336532 - RNA, 19 nt, Homo sapiens
  misc_RNA (1)...(19): siRNA sense strand
gaucagaacgaguaugaau

SEQ ID NO: 1336533 - RNA, 19 nt, Homo sapiens
  misc_RNA (1)...(19): siRNA sense strand
caacaaauagcaugguaga

SEQ ID NO: 1336534 - RNA, 19 nt, Homo sapiens
  misc_RNA (1)...(19): siRNA sense strand
gcagggcugugucucaugu

SEQ ID NO: 1336535 - RNA, 19 nt, Homo sapiens
  misc_RNA (1)...(19): siRNA sense strand
ugaggaaguuggaagauca

SEQ ID NO: 1336536 - RNA, 19 nt, Homo sapiens
  misc_RNA (1)...(19): siRNA sense strand
ggaauuaggaggagaaugc

SEQ ID NO: 1336537 - RNA, 19 nt, Homo sapiens
  misc_RNA (1)...(19): siRNA sense strand
caacguuuauucuugaaag

SEQ ID NO: 1336538 - RNA, 19 nt, Homo sapiens
  misc_RNA (1)...(19): siRNA sense strand
gagaaaggaaggagaagga

SEQ ID NO: 1336539 - RNA, 19 nt, Homo sapiens
  misc_RNA (1)...(19): siRNA sense strand
agaagaaagugaggaaguu

SEQ ID NO: 1336540 - RNA, 19 nt, Homo sapiens
  misc_RNA (1)...(19): siRNA sense strand
gcaagaagcacagaauuac

SEQ ID NO: 1336541 - RNA, 19 nt, Homo sapiens
  misc_RNA (1)...(19): siRNA sense strand
gagaacacagaacuaguuu

SEQ ID NO: 1336542 - RNA, 19 nt, Homo sapiens
  misc_RNA (1)...(19): siRNA sense strand
agaacuaguuucagaagga

SEQ ID NO: 1336543 - RNA, 19 nt, Homo sapiens
  misc_RNA (1)...(19): siRNA sense strand
gaugaaccauuacugaaac

SEQ ID NO: 1336544 - RNA, 19 nt, Homo sapiens
  misc_RNA (1)...(19): siRNA sense strand
gagaaugcuggguuuauga

SEQ ID NO: 1336545 - RNA, 19 nt, Homo sapiens
  misc_RNA (1)...(19): siRNA sense strand
gaacauuacauucucacau

SEQ ID NO: 1336546 - RNA, 19 nt, Homo sapiens
  misc_RNA (1)...(19): siRNA sense strand
gaugaacauuacauucuca

SEQ ID NO: 1336547 - RNA, 19 nt, Homo sapiens
  misc_RNA (1)...(19): siRNA sense strand
gagcagguuucccaucauc

SEQ ID NO: 1336548 - RNA, 19 nt, Homo sapiens
  misc_RNA (1)...(19): siRNA sense strand
ucacuuaauucuuccuugu

SEQ ID NO: 1336549 - RNA, 19 nt, Homo sapiens
  misc_RNA (1)...(19): siRNA sense strand
gaggagcacaagagcguua

SEQ ID NO: 1336550 - RNA, 19 nt, Homo sapiens
  misc_RNA (1)...(19): siRNA sense strand
cagcagugaagaugaauuu

SEQ ID NO: 1336551 - RNA, 19 nt, Homo sapiens
  misc_RNA (1)...(19): siRNA sense strand
gaagaaagugaggaaguug

SEQ ID NO: 1336552 - RNA, 19 nt, Homo sapiens
  misc_RNA (1)...(19): siRNA sense strand
gcagugaagaugaauuuua

SEQ ID NO: 1336553 - RNA, 19 nt, Homo sapiens
  misc_RNA (1)...(19): siRNA sense strand
gagcauuagugaccagaag

SEQ ID NO: 1336554 - RNA, 19 nt, Homo sapiens
  misc_RNA (1)...(19): siRNA sense strand
guaguucuuccaacguuua

SEQ ID NO: 1336555 - RNA, 19 nt, Homo sapiens
  misc_RNA (1)...(19): siRNA sense strand
uggaagaucagaacgagua

SEQ ID NO: 1336556 - RNA, 19 nt, Homo sapiens
  misc_RNA (1)...(19): siRNA sense strand
ggacaucaucagacuccua

SEQ ID NO: 1336557 - RNA, 19 nt, Homo sapiens
  misc_RNA (1)...(19): siRNA sense strand
caagguuauuucaugaaga

SEQ ID NO: 1336558 - RNA, 19 nt, Homo sapiens
  misc_RNA (1)...(19): siRNA sense strand
acacuaaacccuucuaugg

SEQ ID NO: 1336559 - RNA, 19 nt, Homo sapiens
  misc_RNA (1)...(19): siRNA sense strand
gauaccacagaaucacuua

SEQ ID NO: 1336560 - RNA, 19 nt, Homo sapiens
  misc_RNA (1)...(19): siRNA sense strand
gcagaagcccgagaaagga

SEQ ID NO: 1336561 - RNA, 19 nt, Homo sapiens
  misc_RNA (1)...(19): siRNA sense strand
acaaauagcaugguagaau

SEQ ID NO: 1336562 - RNA, 19 nt, Homo sapiens
  misc_RNA (1)...(19): siRNA sense strand
gugcaaauaucaucuucca

SEQ ID NO: 1336563 - RNA, 19 nt, Homo sapiens
  misc_RNA (1)...(19): siRNA sense strand
acaauucaaugcucauauc

SEQ ID NO: 1336564 - RNA, 19 nt, Homo sapiens
  misc_RNA (1)...(19): siRNA sense strand
gaagauacaauucaaugcu

SEQ ID NO: 1336565 - RNA, 19 nt, Homo sapiens
  misc_RNA (1)...(19): siRNA sense strand
gaugcugaccuguuugauu

SEQ ID NO: 1336566 - RNA, 19 nt, Homo sapiens
  misc_RNA (1)...(19): siRNA sense strand
cacgugaacuugucuccaa

SEQ ID NO: 1336567 - RNA, 19 nt, Homo sapiens
  misc_RNA (1)...(19): siRNA sense strand
ucaugaagauggagaaugc

SEQ ID NO: 1336568 - RNA, 19 nt, Homo sapiens
  misc_RNA (1)...(19): siRNA sense strand
uuaugaugcugaugaauuc

SEQ ID NO: 1336569 - RNA, 19 nt, Homo sapiens
  misc_RNA (1)...(19): siRNA sense strand
caucucuugucgcagguua

SEQ ID NO: 1336570 - RNA, 19 nt, Homo sapiens
  misc_RNA (1)...(19): siRNA sense strand
gguaguucuuccaacguuu

SEQ ID NO: 1336571 - RNA, 19 nt, Homo sapiens
  misc_RNA (1)...(19): siRNA sense strand
caaagcgcuuaauagauuc

SEQ ID NO: 1336572 - RNA, 19 nt, Homo sapiens
  misc_RNA (1)...(19): siRNA sense strand
caagugaugcugaccuguu

SEQ ID NO: 1336573 - RNA, 19 nt, Homo sapiens
  misc_RNA (1)...(19): siRNA sense strand
ugaugaaccauuacugaaa

SEQ ID NO: 1336574 - RNA, 19 nt, Homo sapiens
  misc_RNA (1)...(19): siRNA sense strand
gggcaagaagcacagaauu

SEQ ID NO: 1336575 - RNA, 19 nt, Homo sapiens
  misc_RNA (1)...(19): siRNA sense strand
cuuccaacguuuauucuug

SEQ ID NO: 1336576 - RNA, 19 nt, Homo sapiens
  misc_RNA (1)...(19): siRNA sense strand
agacuuggaauggaucuua

SEQ ID NO: 1336577 - RNA, 19 nt, Homo sapiens
  misc_RNA (1)...(19): siRNA sense strand
caagagcguuaucaugcau

SEQ ID NO: 1336578 - RNA, 19 nt, Homo sapiens
  misc_RNA (1)...(19): siRNA sense strand
aagugaugcugaccuguuu

SEQ ID NO: 1336579 - RNA, 19 nt, Homo sapiens
  misc_RNA (1)...(19): siRNA sense strand
augcugaccuguuugauuc

SEQ ID NO: 1336580 - RNA, 19 nt, Homo sapiens
  misc_RNA (1)...(19): siRNA sense strand
aaugcuggguuuaugauga

SEQ ID NO: 1336581 - RNA, 19 nt, Homo sapiens
  misc_RNA (1)...(19): siRNA sense strand
gaaguuggaagaucagaac

SEQ ID NO: 1336582 - RNA, 19 nt, Homo sapiens
  misc_RNA (1)...(19): siRNA sense strand
agacuaugaugaacauuac

SEQ ID NO: 1336583 - RNA, 19 nt, Homo sapiens
  misc_RNA (1)...(19): siRNA sense strand
agagaacacagaacuaguu

SEQ ID NO: 1336584 - RNA, 19 nt, Homo sapiens
  misc_RNA (1)...(19): siRNA sense strand
ucccaaggaucgaaugguu

SEQ ID NO: 1336585 - RNA, 19 nt, Homo sapiens
  misc_RNA (1)...(19): siRNA sense strand
ggaccuguuugugagcauu

SEQ ID NO: 1336586 - RNA, 19 nt, Homo sapiens
  misc_RNA (1)...(19): siRNA sense strand
ugauucacaugaugacaga

SEQ ID NO: 1336587 - RNA, 19 nt, Homo sapiens
  misc_RNA (1)...(19): siRNA sense strand
uaugaugaaccauuacuga

SEQ ID NO: 1336588 - RNA, 19 nt, Homo sapiens
  misc_RNA (1)...(19): siRNA sense strand
ggaggagaaugcaauauua

SEQ ID NO: 1336589 - RNA, 19 nt, Homo sapiens
  misc_RNA (1)...(19): siRNA sense strand
ccaaagcgcuuaauagauu

SEQ ID NO: 1336590 - RNA, 19 nt, Homo sapiens
  misc_RNA (1)...(19): siRNA sense strand
ggaugucacuuucaacuua

SEQ ID NO: 1336591 - RNA, 19 nt, Homo sapiens
  misc_RNA (1)...(19): siRNA sense strand
caaagaagaugaacagaga

SEQ ID NO: 1336592 - RNA, 19 nt, Homo sapiens
  misc_RNA (1)...(19): siRNA sense strand
gaacuugucuccaaauaca

SEQ ID NO: 1336593 - RNA, 19 nt, Homo sapiens
  misc_RNA (1)...(19): siRNA sense strand
gcucauaucuggaccaaau

SEQ ID NO: 1336594 - RNA, 19 nt, Homo sapiens
  misc_RNA (1)...(19): siRNA sense strand
ggaaggaugucacuuucaa

SEQ ID NO: 1336595 - RNA, 19 nt, Homo sapiens
  misc_RNA (1)...(19): siRNA sense strand
gcacaggcuugaagaaaga

SEQ ID NO: 1336596 - RNA, 19 nt, Homo sapiens
  misc_RNA (1)...(19): siRNA sense strand
gaaaggaucaguugccaaa

SEQ ID NO: 1336597 - RNA, 19 nt, Homo sapiens
  misc_RNA (1)...(19): siRNA sense strand
gagacaagguuauuucaug

SEQ ID NO: 1336598 - RNA, 19 nt, Homo sapiens
  misc_RNA (1)...(19): siRNA sense strand
agaaauguaugcagacuuu

SEQ ID NO: 1336599 - RNA, 19 nt, Homo sapiens
  misc_RNA (1)...(19): siRNA sense strand
gaacacagaacuaguuuca

SEQ ID NO: 1336600 - RNA, 19 nt, Homo sapiens
  misc_RNA (1)...(19): siRNA sense strand
ggaauggaauggugugaug

SEQ ID NO: 1336601 - RNA, 19 nt, Homo sapiens
  misc_RNA (1)...(19): siRNA sense strand
acacagaacuaguuucaga

SEQ ID NO: 1336602 - RNA, 19 nt, Homo sapiens
  misc_RNA (1)...(19): siRNA sense strand
gaaguugccuauaaucaag

SEQ ID NO: 1336603 - RNA, 19 nt, Homo sapiens
  misc_RNA (1)...(19): siRNA sense strand
caaauacagucccagaguu

SEQ ID NO: 1336604 - RNA, 19 nt, Homo sapiens
  misc_RNA (1)...(19): siRNA sense strand
ccaagaaguugccuauaau

SEQ ID NO: 1336605 - RNA, 19 nt, Homo sapiens
  misc_RNA (1)...(19): siRNA sense strand
gacaacaaauagcauggua

SEQ ID NO: 1336606 - RNA, 19 nt, Homo sapiens
  misc_RNA (1)...(19): siRNA sense strand
caaaugauacugaagagaa

SEQ ID NO: 1336607 - RNA, 19 nt, Homo sapiens
  misc_RNA (1)...(19): siRNA sense strand
ggcaagaagcacagaauua

SEQ ID NO: 1336608 - RNA, 19 nt, Homo sapiens
  misc_RNA (1)...(19): siRNA sense strand
ggagaaugcuggguuuaug

SEQ ID NO: 1336609 - RNA, 19 nt, Homo sapiens
  misc_RNA (1)...(19): siRNA sense strand
caaauagcaugguagaauc

SEQ ID NO: 1336610 - RNA, 19 nt, Homo sapiens
  misc_RNA (1)...(19): siRNA sense strand
ggaaggagaaggaaauuca

SEQ ID NO: 1336611 - RNA, 19 nt, Homo sapiens
  misc_RNA (1)...(19): siRNA sense strand
gaagaugaacagagaaaga

SEQ ID NO: 1336612 - RNA, 19 nt, Homo sapiens
  misc_RNA (1)...(19): siRNA sense strand
cacagcagcucgggaaaua

SEQ ID NO: 1336613 - RNA, 19 nt, Homo sapiens
  misc_RNA (1)...(19): siRNA sense strand
gaaauucagugggagacaa

SEQ ID NO: 1336614 - RNA, 19 nt, Homo sapiens
  misc_RNA (1)...(19): siRNA sense strand
cagaauuacugccgagauu

SEQ ID NO: 1336615 - RNA, 19 nt, Homo sapiens
  misc_RNA (1)...(19): siRNA sense strand
ggaaggaaaggaucaguug

SEQ ID NO: 1336616 - RNA, 19 nt, Homo sapiens
  misc_RNA (1)...(19): siRNA sense strand
ggaauggugugauguaugc

SEQ ID NO: 1336617 - RNA, 19 nt, Homo sapiens
  misc_RNA (1)...(19): siRNA sense strand
gaaggucuauccucacagu

SEQ ID NO: 1336618 - RNA, 19 nt, Homo sapiens
  misc_RNA (1)...(19): siRNA sense strand
gcacaagagcguuaucaug

SEQ ID NO: 1336619 - RNA, 19 nt, Homo sapiens
  misc_RNA (1)...(19): siRNA sense strand
gauggagaaugcuggguuu

SEQ ID NO: 1336620 - RNA, 19 nt, Homo sapiens
  misc_RNA (1)...(19): siRNA sense strand
gaugucacuuucaacuuaa

SEQ ID NO: 1336621 - RNA, 19 nt, Homo sapiens
  misc_RNA (1)...(19): siRNA sense strand
gaacagagaaagaaaauug

SEQ ID NO: 1336622 - RNA, 19 nt, Homo sapiens
  misc_RNA (1)...(19): siRNA sense strand
ucaaagagacaacaaauag

SEQ ID NO: 1336623 - RNA, 19 nt, Homo sapiens
  misc_RNA (1)...(19): siRNA sense strand
accaagaaguugccuauaa

SEQ ID NO: 1336624 - RNA, 19 nt, Homo sapiens
  misc_RNA (1)...(19): siRNA sense strand
gaagagaacacagaacuag

SEQ ID NO: 1336625 - RNA, 19 nt, Homo sapiens
  misc_RNA (1)...(19): siRNA sense strand
agacaagguuauuucauga

SEQ ID NO: 1336626 - RNA, 19 nt, Homo sapiens
  misc_RNA (1)...(19): siRNA sense strand
gugaacuugucuccaaaua

SEQ ID NO: 1336627 - RNA, 19 nt, Homo sapiens
  misc_RNA (1)...(19): siRNA sense strand
aauaucaucuuccacacua

SEQ ID NO: 1336628 - RNA, 19 nt, Homo sapiens
  misc_RNA (1)...(19): siRNA sense strand
gaggagaaugcaauauuaa

SEQ ID NO: 1336629 - RNA, 19 nt, Homo sapiens
  misc_RNA (1)...(19): siRNA sense strand
gaugcaauauaucaaccua

SEQ ID NO: 1336630 - RNA, 19 nt, Homo sapiens
  misc_RNA (1)...(19): siRNA sense strand
gaaaggaaggagaaggaaa

SEQ ID NO: 1336631 - RNA, 19 nt, Homo sapiens
  misc_RNA (1)...(19): siRNA sense strand
ucccguagaugcaauauau

SEQ ID NO: 1336632 - RNA, 19 nt, Homo sapiens
  misc_RNA (1)...(19): siRNA sense strand
gaucagaacgaguaugaau

SEQ ID NO: 1336633 - RNA, 19 nt, Homo sapiens
  misc_RNA (1)...(19): siRNA sense strand
caacaaauagcaugguaga

SEQ ID NO: 1336634 - RNA, 19 nt, Homo sapiens
  misc_RNA (1)...(19): siRNA sense strand
gcagggcugugucucaugu

SEQ ID NO: 1336635 - RNA, 19 nt, Homo sapiens
  misc_RNA (1)...(19): siRNA sense strand
ugaggaaguuggaagauca

SEQ ID NO: 1336636 - RNA, 19 nt, Homo sapiens
  misc_RNA (1)...(19): siRNA sense strand
ggaauuaggaggagaaugc

SEQ ID NO: 1336637 - RNA, 19 nt, Homo sapiens
  misc_RNA (1)...(19): siRNA sense strand
caacguuuauucuugaaag

SEQ ID NO: 1336638 - RNA, 19 nt, Homo sapiens
  misc_RNA (1)...(19): siRNA sense strand
gagaaaggaaggagaagga

SEQ ID NO: 1336639 - RNA, 19 nt, Homo sapiens
  misc_RNA (1)...(19): siRNA sense strand
agaagaaagugaggaaguu

SEQ ID NO: 1336640 - RNA, 19 nt, Homo sapiens
  misc_RNA (1)...(19): siRNA sense strand
gcaagaagcacagaauuac

SEQ ID NO: 1336641 - RNA, 19 nt, Homo sapiens
  misc_RNA (1)...(19): siRNA sense strand
gagaacacagaacuaguuu

SEQ ID NO: 1336642 - RNA, 19 nt, Homo sapiens
  misc_RNA (1)...(19): siRNA sense strand
agaacuaguuucagaagga

SEQ ID NO: 1336643 - RNA, 19 nt, Homo sapiens
  misc_RNA (1)...(19): siRNA sense strand
gaugaaccauuacugaaac

SEQ ID NO: 1336644 - RNA, 19 nt, Homo sapiens
  misc_RNA (1)...(19): siRNA sense strand
gagaaugcuggguuuauga

SEQ ID NO: 1336645 - RNA, 19 nt, Homo sapiens
  misc_RNA (1)...(19): siRNA sense strand
gaacauuacauucucacau

SEQ ID NO: 1336646 - RNA, 19 nt, Homo sapiens
  misc_RNA (1)...(19): siRNA sense strand
gaugaacauuacauucuca

SEQ ID NO: 1336647 - RNA, 19 nt, Homo sapiens
  misc_RNA (1)...(19): siRNA sense strand
gagcagguuucccaucauc

SEQ ID NO: 1336648 - RNA, 19 nt, Homo sapiens
  misc_RNA (1)...(19): siRNA sense strand
ucacuuaauucuuccuugu

SEQ ID NO: 1336649 - RNA, 19 nt, Homo sapiens
  misc_RNA (1)...(19): siRNA sense strand
gaggagcacaagagcguua

SEQ ID NO: 1336650 - RNA, 19 nt, Homo sapiens
  misc_RNA (1)...(19): siRNA sense strand
cagcagugaagaugaauuu

SEQ ID NO: 1336651 - RNA, 19 nt, Homo sapiens
  misc_RNA (1)...(19): siRNA sense strand
gaagaaagugaggaaguug

SEQ ID NO: 1336652 - RNA, 19 nt, Homo sapiens
  misc_RNA (1)...(19): siRNA sense strand
gcagugaagaugaauuuua

SEQ ID NO: 1336653 - RNA, 19 nt, Homo sapiens
  misc_RNA (1)...(19): siRNA sense strand
gagcauuagugaccagaag

SEQ ID NO: 1336654 - RNA, 19 nt, Homo sapiens
  misc_RNA (1)...(19): siRNA sense strand
guaguucuuccaacguuua

SEQ ID NO: 1336655 - RNA, 19 nt, Homo sapiens
  misc_RNA (1)...(19): siRNA sense strand
uggaagaucagaacgagua

SEQ ID NO: 1336656 - RNA, 19 nt, Homo sapiens
  misc_RNA (1)...(19): siRNA sense strand
ggacaucaucagacuccua

SEQ ID NO: 1336657 - RNA, 19 nt, Homo sapiens
  misc_RNA (1)...(19): siRNA sense strand
caagguuauuucaugaaga

SEQ ID NO: 1336658 - RNA, 19 nt, Homo sapiens
  misc_RNA (1)...(19): siRNA sense strand
acacuaaacccuucuaugg

SEQ ID NO: 1336659 - RNA, 19 nt, Homo sapiens
  misc_RNA (1)...(19): siRNA sense strand
gauaccacagaaucacuua

SEQ ID NO: 1336660 - RNA, 19 nt, Homo sapiens
  misc_RNA (1)...(19): siRNA sense strand
gcagaagcccgagaaagga

SEQ ID NO: 1336661 - RNA, 19 nt, Homo sapiens
  misc_RNA (1)...(19): siRNA sense strand
acaaauagcaugguagaau

SEQ ID NO: 1336662 - RNA, 19 nt, Homo sapiens
  misc_RNA (1)...(19): siRNA sense strand
gugcaaauaucaucuucca

SEQ ID NO: 1336663 - RNA, 19 nt, Homo sapiens
  misc_RNA (1)...(19): siRNA sense strand
acaauucaaugcucauauc

SEQ ID NO: 1336664 - RNA, 19 nt, Homo sapiens
  misc_RNA (1)...(19): siRNA sense strand
gaagauacaauucaaugcu

SEQ ID NO: 1336665 - RNA, 19 nt, Homo sapiens
  misc_RNA (1)...(19): siRNA sense strand
gaugcugaccuguuugauu

SEQ ID NO: 1336666 - RNA, 19 nt, Homo sapiens
  misc_RNA (1)...(19): siRNA sense strand
cacgugaacuugucuccaa

SEQ ID NO: 1336667 - RNA, 19 nt, Homo sapiens
  misc_RNA (1)...(19): siRNA sense strand
ucaugaagauggagaaugc

SEQ ID NO: 1336668 - RNA, 19 nt, Homo sapiens
  misc_RNA (1)...(19): siRNA sense strand
uuaugaugcugaugaauuc

SEQ ID NO: 1336669 - RNA, 19 nt, Homo sapiens
  misc_RNA (1)...(19): siRNA sense strand
caucucuugucgcagguua

SEQ ID NO: 1336670 - RNA, 19 nt, Homo sapiens
  misc_RNA (1)...(19): siRNA sense strand
gguaguucuuccaacguuu

SEQ ID NO: 1336671 - RNA, 19 nt, Homo sapiens
  misc_RNA (1)...(19): siRNA sense strand
caaagcgcuuaauagauuc

SEQ ID NO: 1336672 - RNA, 19 nt, Homo sapiens
  misc_RNA (1)...(19): siRNA sense strand
caagugaugcugaccuguu

SEQ ID NO: 1336673 - RNA, 19 nt, Homo sapiens
  misc_RNA (1)...(19): siRNA sense strand
ugaugaaccauuacugaaa

SEQ ID NO: 1336674 - RNA, 19 nt, Homo sapiens
  misc_RNA (1)...(19): siRNA sense strand
gggcaagaagcacagaauu

SEQ ID NO: 1336675 - RNA, 19 nt, Homo sapiens
  misc_RNA (1)...(19): siRNA sense strand
cuuccaacguuuauucuug

SEQ ID NO: 1336676 - RNA, 19 nt, Homo sapiens
  misc_RNA (1)...(19): siRNA sense strand
agacuuggaauggaucuua

SEQ ID NO: 1336677 - RNA, 19 nt, Homo sapiens
  misc_RNA (1)...(19): siRNA sense strand
caagagcguuaucaugcau

SEQ ID NO: 1336678 - RNA, 19 nt, Homo sapiens
  misc_RNA (1)...(19): siRNA sense strand
aagugaugcugaccuguuu

SEQ ID NO: 1336679 - RNA, 19 nt, Homo sapiens
  misc_RNA (1)...(19): siRNA sense strand
augcugaccuguuugauuc

SEQ ID NO: 1336680 - RNA, 19 nt, Homo sapiens
  misc_RNA (1)...(19): siRNA sense strand
aaugcuggguuuaugauga

SEQ ID NO: 1336681 - RNA, 19 nt, Homo sapiens
  misc_RNA (1)...(19): siRNA sense strand
gaaguuggaagaucagaac

SEQ ID NO: 1336682 - RNA, 19 nt, Homo sapiens
  misc_RNA (1)...(19): siRNA sense strand
agacuaugaugaacauuac

SEQ ID NO: 1336683 - RNA, 19 nt, Homo sapiens
  misc_RNA (1)...(19): siRNA sense strand
agagaacacagaacuaguu

SEQ ID NO: 1336684 - RNA, 19 nt, Homo sapiens
  misc_RNA (1)...(19): siRNA sense strand
ucccaaggaucgaaugguu

SEQ ID NO: 1336685 - RNA, 19 nt, Homo sapiens
  misc_RNA (1)...(19): siRNA sense strand
ggaccuguuugugagcauu

SEQ ID NO: 1336686 - RNA, 19 nt, Homo sapiens
  misc_RNA (1)...(19): siRNA sense strand
ugauucacaugaugacaga

SEQ ID NO: 1336687 - RNA, 19 nt, Homo sapiens
  misc_RNA (1)...(19): siRNA sense strand
uaugaugaaccauuacuga

SEQ ID NO: 1336688 - RNA, 19 nt, Homo sapiens
  misc_RNA (1)...(19): siRNA sense strand
ggaggagaaugcaauauua

SEQ ID NO: 1336689 - RNA, 19 nt, Homo sapiens
  misc_RNA (1)...(19): siRNA sense strand
ccaaagcgcuuaauagauu

SEQ ID NO: 1336690 - RNA, 19 nt, Homo sapiens
  misc_RNA (1)...(19): siRNA sense strand
ggaugucacuuucaacuua

SEQ ID NO: 1336691 - RNA, 19 nt, Homo sapiens
  misc_RNA (1)...(19): siRNA sense strand
caaagaagaugaacagaga

SEQ ID NO: 1336692 - RNA, 19 nt, Homo sapiens
  misc_RNA (1)...(19): siRNA sense strand
gaacuugucuccaaauaca

SEQ ID NO: 1336693 - RNA, 19 nt, Homo sapiens
  misc_RNA (1)...(19): siRNA sense strand
gcucauaucuggaccaaau

SEQ ID NO: 1336694 - RNA, 19 nt, Homo sapiens
  misc_RNA (1)...(19): siRNA sense strand
ggaaggaugucacuuucaa

SEQ ID NO: 1336695 - RNA, 19 nt, Homo sapiens
  misc_RNA (1)...(19): siRNA sense strand
gcacaggcuugaagaaaga

SEQ ID NO: 1336696 - RNA, 19 nt, Homo sapiens
  misc_RNA (1)...(19): siRNA sense strand
gaaaggaucaguugccaaa

SEQ ID NO: 1336697 - RNA, 19 nt, Homo sapiens
  misc_RNA (1)...(19): siRNA sense strand
gagacaagguuauuucaug

SEQ ID NO: 1336698 - RNA, 19 nt, Homo sapiens
  misc_RNA (1)...(19): siRNA sense strand
agaaauguaugcagacuuu

SEQ ID NO: 1336699 - RNA, 19 nt, Homo sapiens
  misc_RNA (1)...(19): siRNA sense strand
gaacacagaacuaguuuca

SEQ ID NO: 1336700 - RNA, 19 nt, Homo sapiens
  misc_RNA (1)...(19): siRNA sense strand
ggaauggaauggugugaug

SEQ ID NO: 1336701 - RNA, 19 nt, Homo sapiens
  misc_RNA (1)...(19): siRNA sense strand
acacagaacuaguuucaga

SEQ ID NO: 1336702 - RNA, 19 nt, Homo sapiens
  misc_RNA (1)...(19): siRNA sense strand
gaaguugccuauaaucaag

SEQ ID NO: 1336703 - RNA, 19 nt, Homo sapiens
  misc_RNA (1)...(19): siRNA sense strand
caaauacagucccagaguu

SEQ ID NO: 1336704 - RNA, 19 nt, Homo sapiens
  misc_RNA (1)...(19): siRNA sense strand
ccaagaaguugccuauaau

SEQ ID NO: 1336705 - RNA, 19 nt, Homo sapiens
  misc_RNA (1)...(19): siRNA sense strand
gacaacaaauagcauggua

SEQ ID NO: 1336706 - RNA, 19 nt, Homo sapiens
  misc_RNA (1)...(19): siRNA sense strand
caaaugauacugaagagaa

SEQ ID NO: 1336707 - RNA, 19 nt, Homo sapiens
  misc_RNA (1)...(19): siRNA sense strand
ggcaagaagcacagaauua

SEQ ID NO: 1336708 - RNA, 19 nt, Homo sapiens
  misc_RNA (1)...(19): siRNA sense strand
ggagaaugcuggguuuaug

SEQ ID NO: 1336709 - RNA, 19 nt, Homo sapiens
  misc_RNA (1)...(19): siRNA sense strand
caaauagcaugguagaauc

SEQ ID NO: 1336710 - RNA, 19 nt, Homo sapiens
  misc_RNA (1)...(19): siRNA sense strand
ggaaggagaaggaaauuca

SEQ ID NO: 1336711 - RNA, 19 nt, Homo sapiens
  misc_RNA (1)...(19): siRNA sense strand
gaagaugaacagagaaaga

SEQ ID NO: 1336712 - RNA, 19 nt, Homo sapiens
  misc_RNA (1)...(19): siRNA sense strand
cacagcagcucgggaaaua

SEQ ID NO: 1336713 - RNA, 19 nt, Homo sapiens
  misc_RNA (1)...(19): siRNA sense strand
gaaauucagugggagacaa

SEQ ID NO: 1336714 - RNA, 19 nt, Homo sapiens
  misc_RNA (1)...(19): siRNA sense strand
cagaauuacugccgagauu

SEQ ID NO: 1336715 - RNA, 19 nt, Homo sapiens
  misc_RNA (1)...(19): siRNA sense strand
ggaaggaaaggaucaguug

SEQ ID NO: 1336716 - RNA, 19 nt, Homo sapiens
  misc_RNA (1)...(19): siRNA sense strand
ggaauggugugauguaugc

SEQ ID NO: 1336717 - RNA, 19 nt, Homo sapiens
  misc_RNA (1)...(19): siRNA sense strand
gaaggucuauccucacagu

SEQ ID NO: 1336718 - RNA, 19 nt, Homo sapiens
  misc_RNA (1)...(19): siRNA sense strand
gcacaagagcguuaucaug

SEQ ID NO: 1336719 - RNA, 19 nt, Homo sapiens
  misc_RNA (1)...(19): siRNA sense strand
gauggagaaugcuggguuu

SEQ ID NO: 1336720 - RNA, 19 nt, Homo sapiens
  misc_RNA (1)...(19): siRNA sense strand
gaugucacuuucaacuuaa

SEQ ID NO: 1336721 - RNA, 19 nt, Homo sapiens
  misc_RNA (1)...(19): siRNA sense strand
gaacagagaaagaaaauug

SEQ ID NO: 1336722 - RNA, 19 nt, Homo sapiens
  misc_RNA (1)...(19): siRNA sense strand
ucaaagagacaacaaauag

SEQ ID NO: 1336723 - RNA, 19 nt, Homo sapiens
  misc_RNA (1)...(19): siRNA sense strand
accaagaaguugccuauaa

SEQ ID NO: 1336724 - RNA, 19 nt, Homo sapiens
  misc_RNA (1)...(19): siRNA sense strand
gaagagaacacagaacuag

SEQ ID NO: 1336725 - RNA, 19 nt, Homo sapiens
  misc_RNA (1)...(19): siRNA sense strand
agacaagguuauuucauga

SEQ ID NO: 1336726 - RNA, 19 nt, Homo sapiens
  misc_RNA (1)...(19): siRNA sense strand
gugaacuugucuccaaaua

SEQ ID NO: 1336727 - RNA, 19 nt, Homo sapiens
  misc_RNA (1)...(19): siRNA sense strand
aauaucaucuuccacacua

SEQ ID NO: 1336728 - RNA, 19 nt, Homo sapiens
  misc_RNA (1)...(19): siRNA sense strand
gaggagaaugcaauauuaa

SEQ ID NO: 1336729 - RNA, 19 nt, Homo sapiens
  misc_RNA (1)...(19): siRNA sense strand
gaugcaauauaucaaccua

SEQ ID NO: 1336730 - RNA, 19 nt, Homo sapiens
  misc_RNA (1)...(19): siRNA sense strand
gaaaggaaggagaaggaaa

SEQ ID NO: 1336731 - RNA, 19 nt, Homo sapiens
  misc_RNA (1)...(19): siRNA sense strand
ucccguagaugcaauauau

SEQ ID NO: 1336732 - RNA, 19 nt, Homo sapiens
  misc_RNA (1)...(19): siRNA sense strand
gaucagaacgaguaugaau

SEQ ID NO: 1336733 - RNA, 19 nt, Homo sapiens
  misc_RNA (1)...(19): siRNA sense strand
caacaaauagcaugguaga

SEQ ID NO: 1336734 - RNA, 19 nt, Homo sapiens
  misc_RNA (1)...(19): siRNA sense strand
gcagggcugugucucaugu

SEQ ID NO: 1336735 - RNA, 19 nt, Homo sapiens
  misc_RNA (1)...(19): siRNA sense strand
ugaggaaguuggaagauca

SEQ ID NO: 1336736 - RNA, 19 nt, Homo sapiens
  misc_RNA (1)...(19): siRNA sense strand
ggaauuaggaggagaaugc

SEQ ID NO: 1336737 - RNA, 19 nt, Homo sapiens
  misc_RNA (1)...(19): siRNA sense strand
caacguuuauucuugaaag

SEQ ID NO: 1336738 - RNA, 19 nt, Homo sapiens
  misc_RNA (1)...(19): siRNA sense strand
gagaaaggaaggagaagga

SEQ ID NO: 1336739 - RNA, 19 nt, Homo sapiens
  misc_RNA (1)...(19): siRNA sense strand
agaagaaagugaggaaguu

SEQ ID NO: 1336740 - RNA, 19 nt, Homo sapiens
  misc_RNA (1)...(19): siRNA sense strand
gcaagaagcacagaauuac

SEQ ID NO: 1336741 - RNA, 19 nt, Homo sapiens
  misc_RNA (1)...(19): siRNA sense strand
gagaacacagaacuaguuu

SEQ ID NO: 1336742 - RNA, 19 nt, Homo sapiens
  misc_RNA (1)...(19): siRNA sense strand
agaacuaguuucagaagga

SEQ ID NO: 1336743 - RNA, 19 nt, Homo sapiens
  misc_RNA (1)...(19): siRNA sense strand
gaugaaccauuacugaaac

SEQ ID NO: 1336744 - RNA, 19 nt, Homo sapiens
  misc_RNA (1)...(19): siRNA sense strand
gagaaugcuggguuuauga

SEQ ID NO: 1336745 - RNA, 19 nt, Homo sapiens
  misc_RNA (1)...(19): siRNA sense strand
gaacauuacauucucacau

SEQ ID NO: 1336746 - RNA, 19 nt, Homo sapiens
  misc_RNA (1)...(19): siRNA sense strand
gaugaacauuacauucuca

SEQ ID NO: 1336747 - RNA, 19 nt, Homo sapiens
  misc_RNA (1)...(19): siRNA sense strand
gagcagguuucccaucauc

SEQ ID NO: 1336748 - RNA, 19 nt, Homo sapiens
  misc_RNA (1)...(19): siRNA sense strand
ucacuuaauucuuccuugu

SEQ ID NO: 1336749 - RNA, 19 nt, Homo sapiens
  misc_RNA (1)...(19): siRNA sense strand
gaggagcacaagagcguua

SEQ ID NO: 1336750 - RNA, 19 nt, Homo sapiens
  misc_RNA (1)...(19): siRNA sense strand
cagcagugaagaugaauuu

SEQ ID NO: 1336751 - RNA, 19 nt, Homo sapiens
  misc_RNA (1)...(19): siRNA sense strand
gaagaaagugaggaaguug

SEQ ID NO: 1336752 - RNA, 19 nt, Homo sapiens
  misc_RNA (1)...(19): siRNA sense strand
gcagugaagaugaauuuua

SEQ ID NO: 1336753 - RNA, 19 nt, Homo sapiens
  misc_RNA (1)...(19): siRNA sense strand
gagcauuagugaccagaag

SEQ ID NO: 1336754 - RNA, 19 nt, Homo sapiens
  misc_RNA (1)...(19): siRNA sense strand
guaguucuuccaacguuua

SEQ ID NO: 1336755 - RNA, 19 nt, Homo sapiens
  misc_RNA (1)...(19): siRNA sense strand
uggaagaucagaacgagua

SEQ ID NO: 1336756 - RNA, 19 nt, Homo sapiens
  misc_RNA (1)...(19): siRNA sense strand
ggacaucaucagacuccua

SEQ ID NO: 1336757 - RNA, 19 nt, Homo sapiens
  misc_RNA (1)...(19): siRNA sense strand
caagguuauuucaugaaga

SEQ ID NO: 1336758 - RNA, 19 nt, Homo sapiens
  misc_RNA (1)...(19): siRNA sense strand
acacuaaacccuucuaugg

SEQ ID NO: 1336759 - RNA, 19 nt, Homo sapiens
  misc_RNA (1)...(19): siRNA sense strand
gauaccacagaaucacuua

SEQ ID NO: 1336760 - RNA, 19 nt, Homo sapiens
  misc_RNA (1)...(19): siRNA sense strand
gcagaagcccgagaaagga

SEQ ID NO: 1336761 - RNA, 19 nt, Homo sapiens
  misc_RNA (1)...(19): siRNA sense strand
acaaauagcaugguagaau

SEQ ID NO: 1336762 - RNA, 19 nt, Homo sapiens
  misc_RNA (1)...(19): siRNA sense strand
gugcaaauaucaucuucca

SEQ ID NO: 1336763 - RNA, 19 nt, Homo sapiens
  misc_RNA (1)...(19): siRNA sense strand
acaauucaaugcucauauc

SEQ ID NO: 1336764 - RNA, 19 nt, Homo sapiens
  misc_RNA (1)...(19): siRNA sense strand
gaagauacaauucaaugcu

SEQ ID NO: 1336765 - RNA, 19 nt, Homo sapiens
  misc_RNA (1)...(19): siRNA sense strand
gaugcugaccuguuugauu

SEQ ID NO: 1336766 - RNA, 19 nt, Homo sapiens
  misc_RNA (1)...(19): siRNA sense strand
cacgugaacuugucuccaa

SEQ ID NO: 1336767 - RNA, 19 nt, Homo sapiens
  misc_RNA (1)...(19): siRNA sense strand
ucaugaagauggagaaugc

SEQ ID NO: 1336768 - RNA, 19 nt, Homo sapiens
  misc_RNA (1)...(19): siRNA sense strand
uuaugaugcugaugaauuc

SEQ ID NO: 1336769 - RNA, 19 nt, Homo sapiens
  misc_RNA (1)...(19): siRNA sense strand
caucucuugucgcagguua

SEQ ID NO: 1336770 - RNA, 19 nt, Homo sapiens
  misc_RNA (1)...(19): siRNA sense strand
gguaguucuuccaacguuu

SEQ ID NO: 1336771 - RNA, 19 nt, Homo sapiens
  misc_RNA (1)...(19): siRNA sense strand
caaagcgcuuaauagauuc

SEQ ID NO: 1336772 - RNA, 19 nt, Homo sapiens
  misc_RNA (1)...(19): siRNA sense strand
caagugaugcugaccuguu

SEQ ID NO: 1336773 - RNA, 19 nt, Homo sapiens
  misc_RNA (1)...(19): siRNA sense strand
ugaugaaccauuacugaaa

SEQ ID NO: 1336774 - RNA, 19 nt, Homo sapiens
  misc_RNA (1)...(19): siRNA sense strand
gggcaagaagcacagaauu

SEQ ID NO: 1336775 - RNA, 19 nt, Homo sapiens
  misc_RNA (1)...(19): siRNA sense strand
cuuccaacguuuauucuug

SEQ ID NO: 1336776 - RNA, 19 nt, Homo sapiens
  misc_RNA (1)...(19): siRNA sense strand
agacuuggaauggaucuua

SEQ ID NO: 1336777 - RNA, 19 nt, Homo sapiens
  misc_RNA (1)...(19): siRNA sense strand
caagagcguuaucaugcau

SEQ ID NO: 1336778 - RNA, 19 nt, Homo sapiens
  misc_RNA (1)...(19): siRNA sense strand
aagugaugcugaccuguuu

SEQ ID NO: 1336779 - RNA, 19 nt, Homo sapiens
  misc_RNA (1)...(19): siRNA sense strand
augcugaccuguuugauuc

SEQ ID NO: 1336780 - RNA, 19 nt, Homo sapiens
  misc_RNA (1)...(19): siRNA sense strand
aaugcuggguuuaugauga

SEQ ID NO: 1336781 - RNA, 19 nt, Homo sapiens
  misc_RNA (1)...(19): siRNA sense strand
gaaguuggaagaucagaac

SEQ ID NO: 1336782 - RNA, 19 nt, Homo sapiens
  misc_RNA (1)...(19): siRNA sense strand
agacuaugaugaacauuac

SEQ ID NO: 1336783 - RNA, 19 nt, Homo sapiens
  misc_RNA (1)...(19): siRNA sense strand
agagaacacagaacuaguu

SEQ ID NO: 1336784 - RNA, 19 nt, Homo sapiens
  misc_RNA (1)...(19): siRNA sense strand
ucccaaggaucgaaugguu

SEQ ID NO: 1336785 - RNA, 19 nt, Homo sapiens
  misc_RNA (1)...(19): siRNA sense strand
ggaccuguuugugagcauu

SEQ ID NO: 1336786 - RNA, 19 nt, Homo sapiens
  misc_RNA (1)...(19): siRNA sense strand
ugauucacaugaugacaga

SEQ ID NO: 1336787 - RNA, 19 nt, Homo sapiens
  misc_RNA (1)...(19): siRNA sense strand
uaugaugaaccauuacuga

SEQ ID NO: 1336788 - RNA, 19 nt, Homo sapiens
  misc_RNA (1)...(19): siRNA sense strand
gacaaggacuggaauauuu

SEQ ID NO: 1336789 - RNA, 19 nt, Homo sapiens
  misc_RNA (1)...(19): siRNA sense strand
caaagaaucuccuugacaa

SEQ ID NO: 1336790 - RNA, 19 nt, Homo sapiens
  misc_RNA (1)...(19): siRNA sense strand
gaaggcauuucuccuggua

SEQ ID NO: 1336791 - RNA, 19 nt, Homo sapiens
  misc_RNA (1)...(19): siRNA sense strand
gauccagugugcuaccuua

SEQ ID NO: 1336792 - RNA, 19 nt, Homo sapiens
  misc_RNA (1)...(19): siRNA sense strand
aaacaaagaaucuccuuga

SEQ ID NO: 1336793 - RNA, 19 nt, Homo sapiens
  misc_RNA (1)...(19): siRNA sense strand
gaacugcaacaacagcuuu

SEQ ID NO: 1336794 - RNA, 19 nt, Homo sapiens
  misc_RNA (1)...(19): siRNA sense strand
gagaccucgugccaaauua

SEQ ID NO: 1336795 - RNA, 19 nt, Homo sapiens
  misc_RNA (1)...(19): siRNA sense strand
ugaaagauccagugugcua

SEQ ID NO: 1336796 - RNA, 19 nt, Homo sapiens
  misc_RNA (1)...(19): siRNA sense strand
uggagaaggucaagaaugu

SEQ ID NO: 1336797 - RNA, 19 nt, Homo sapiens
  misc_RNA (1)...(19): siRNA sense strand
ggagaccucgugccaaauu

SEQ ID NO: 1336798 - RNA, 19 nt, Homo sapiens
  misc_RNA (1)...(19): siRNA sense strand
ccagugugcuaccuuaaga

SEQ ID NO: 1336799 - RNA, 19 nt, Homo sapiens
  misc_RNA (1)...(19): siRNA sense strand
accaugcgcuucagagaua

SEQ ID NO: 1336800 - RNA, 19 nt, Homo sapiens
  misc_RNA (1)...(19): siRNA sense strand
ggaguacuguagccacaug

SEQ ID NO: 1336801 - RNA, 19 nt, Homo sapiens
  misc_RNA (1)...(19): siRNA sense strand
caccaaggauuaugaagag

SEQ ID NO: 1336802 - RNA, 19 nt, Homo sapiens
  misc_RNA (1)...(19): siRNA sense strand
ggaggccucuuguucuaca

SEQ ID NO: 1336803 - RNA, 19 nt, Homo sapiens
  misc_RNA (1)...(19): siRNA sense strand
ugacaaggacuggaauauu

SEQ ID NO: 1336804 - RNA, 19 nt, Homo sapiens
  misc_RNA (1)...(19): siRNA sense strand
caggaacaguugaaagauc

SEQ ID NO: 1336805 - RNA, 19 nt, Homo sapiens
  misc_RNA (1)...(19): siRNA sense strand
ucggaggccucuuguucua

SEQ ID NO: 1336806 - RNA, 19 nt, Homo sapiens
  misc_RNA (1)...(19): siRNA sense strand
agcaagaacugcaacaaca

SEQ ID NO: 1336807 - RNA, 19 nt, Homo sapiens
  misc_RNA (1)...(19): siRNA sense strand
guacuguagccacaugauu

SEQ ID NO: 1336808 - RNA, 19 nt, Homo sapiens
  misc_RNA (1)...(19): siRNA sense strand
ucaccaaggauuaugaaga

SEQ ID NO: 1336809 - RNA, 19 nt, Homo sapiens
  misc_RNA (1)...(19): siRNA sense strand
guccgaacuuucuaugaga

SEQ ID NO: 1336810 - RNA, 19 nt, Homo sapiens
  misc_RNA (1)...(19): siRNA sense strand
guggacaccugcagucucu

SEQ ID NO: 1336811 - RNA, 19 nt, Homo sapiens
  misc_RNA (1)...(19): siRNA sense strand
caaggauuaugaagagcau

SEQ ID NO: 1336812 - RNA, 19 nt, Homo sapiens
  misc_RNA (1)...(19): siRNA sense strand
gagaaggucaagaaugucu

SEQ ID NO: 1336813 - RNA, 19 nt, Homo sapiens
  misc_RNA (1)...(19): siRNA sense strand
auggagaccucgugccaaa

SEQ ID NO: 1336814 - RNA, 19 nt, Homo sapiens
  misc_RNA (1)...(19): siRNA sense strand
cguccgaacuuucuaugag

SEQ ID NO: 1336815 - RNA, 19 nt, Homo sapiens
  misc_RNA (1)...(19): siRNA sense strand
acaaagaaucuccuugaca

SEQ ID NO: 1336816 - RNA, 19 nt, Homo sapiens
  misc_RNA (1)...(19): siRNA sense strand
gaggacaccaugcgcuuca

SEQ ID NO: 1336817 - RNA, 19 nt, Homo sapiens
  misc_RNA (1)...(19): siRNA sense strand
ggacaccaugcgcuucaga

SEQ ID NO: 1336818 - RNA, 19 nt, Homo sapiens
  misc_RNA (1)...(19): siRNA sense strand
gcaagaacugcaacaacag

SEQ ID NO: 1336819 - RNA, 19 nt, Homo sapiens
  misc_RNA (1)...(19): siRNA sense strand
gcugcuucaccaaggauua

SEQ ID NO: 1336820 - RNA, 19 nt, Homo sapiens
  misc_RNA (1)...(19): siRNA sense strand
ugcaggaacucucuuugag

SEQ ID NO: 1336821 - RNA, 19 nt, Homo sapiens
  misc_RNA (1)...(19): siRNA sense strand
ggaggugucggaguacugu

SEQ ID NO: 1336822 - RNA, 19 nt, Homo sapiens
  misc_RNA (1)...(19): siRNA sense strand
cugcaggaacucucuuuga

SEQ ID NO: 1336823 - RNA, 19 nt, Homo sapiens
  misc_RNA (1)...(19): siRNA sense strand
agacaccucuccaguugcu

SEQ ID NO: 1336824 - RNA, 19 nt, Homo sapiens
  misc_RNA (1)...(19): siRNA sense strand
ugaaacaaagaaucuccuu

SEQ ID NO: 1336825 - RNA, 19 nt, Homo sapiens
  misc_RNA (1)...(19): siRNA sense strand
uacuguagccacaugauug

SEQ ID NO: 1336826 - RNA, 19 nt, Homo sapiens
  misc_RNA (1)...(19): siRNA sense strand
ggaauauuuucagcaagaa

SEQ ID NO: 1336827 - RNA, 19 nt, Homo sapiens
  misc_RNA (1)...(19): siRNA sense strand
gaccaggaacaguugaaag

SEQ ID NO: 1336828 - RNA, 19 nt, Homo sapiens
  misc_RNA (1)...(19): siRNA sense strand
uggaauauuuucagcaaga

SEQ ID NO: 1336829 - RNA, 19 nt, Homo sapiens
  misc_RNA (1)...(19): siRNA sense strand
ccucgugccaaauuacauu

SEQ ID NO: 1336830 - RNA, 19 nt, Homo sapiens
  misc_RNA (1)...(19): siRNA sense strand
gacaaggacuggaauauuu

SEQ ID NO: 1336831 - RNA, 19 nt, Homo sapiens
  misc_RNA (1)...(19): siRNA sense strand
caaagaaucuccuugacaa

SEQ ID NO: 1336832 - RNA, 19 nt, Homo sapiens
  misc_RNA (1)...(19): siRNA sense strand
gaaggcauuucuccuggua

SEQ ID NO: 1336833 - RNA, 19 nt, Homo sapiens
  misc_RNA (1)...(19): siRNA sense strand
gauccagugugcuaccuua

SEQ ID NO: 1336834 - RNA, 19 nt, Homo sapiens
  misc_RNA (1)...(19): siRNA sense strand
aaacaaagaaucuccuuga

SEQ ID NO: 1336835 - RNA, 19 nt, Homo sapiens
  misc_RNA (1)...(19): siRNA sense strand
gaacugcaacaacagcuuu

SEQ ID NO: 1336836 - RNA, 19 nt, Homo sapiens
  misc_RNA (1)...(19): siRNA sense strand
gagaccucgugccaaauua

SEQ ID NO: 1336837 - RNA, 19 nt, Homo sapiens
  misc_RNA (1)...(19): siRNA sense strand
ugaaagauccagugugcua

SEQ ID NO: 1336838 - RNA, 19 nt, Homo sapiens
  misc_RNA (1)...(19): siRNA sense strand
uggagaaggucaagaaugu

SEQ ID NO: 1336839 - RNA, 19 nt, Homo sapiens
  misc_RNA (1)...(19): siRNA sense strand
ggagaccucgugccaaauu

SEQ ID NO: 1336840 - RNA, 19 nt, Homo sapiens
  misc_RNA (1)...(19): siRNA sense strand
ccagugugcuaccuuaaga

SEQ ID NO: 1336841 - RNA, 19 nt, Homo sapiens
  misc_RNA (1)...(19): siRNA sense strand
accaugcgcuucagagaua

SEQ ID NO: 1336842 - RNA, 19 nt, Homo sapiens
  misc_RNA (1)...(19): siRNA sense strand
ggaguacuguagccacaug

SEQ ID NO: 1336843 - RNA, 19 nt, Homo sapiens
  misc_RNA (1)...(19): siRNA sense strand
caccaaggauuaugaagag

SEQ ID NO: 1336844 - RNA, 19 nt, Homo sapiens
  misc_RNA (1)...(19): siRNA sense strand
ggaggccucuuguucuaca

SEQ ID NO: 1336845 - RNA, 19 nt, Homo sapiens
  misc_RNA (1)...(19): siRNA sense strand
ugacaaggacuggaauauu

SEQ ID NO: 1336846 - RNA, 19 nt, Homo sapiens
  misc_RNA (1)...(19): siRNA sense strand
caggaacaguugaaagauc

SEQ ID NO: 1336847 - RNA, 19 nt, Homo sapiens
  misc_RNA (1)...(19): siRNA sense strand
ucggaggccucuuguucua

SEQ ID NO: 1336848 - RNA, 19 nt, Homo sapiens
  misc_RNA (1)...(19): siRNA sense strand
agcaagaacugcaacaaca

SEQ ID NO: 1336849 - RNA, 19 nt, Homo sapiens
  misc_RNA (1)...(19): siRNA sense strand
guacuguagccacaugauu

SEQ ID NO: 1336850 - RNA, 19 nt, Homo sapiens
  misc_RNA (1)...(19): siRNA sense strand
ucaccaaggauuaugaaga

SEQ ID NO: 1336851 - RNA, 19 nt, Homo sapiens
  misc_RNA (1)...(19): siRNA sense strand
guccgaacuuucuaugaga

SEQ ID NO: 1336852 - RNA, 19 nt, Homo sapiens
  misc_RNA (1)...(19): siRNA sense strand
guggacaccugcagucucu

SEQ ID NO: 1336853 - RNA, 19 nt, Homo sapiens
  misc_RNA (1)...(19): siRNA sense strand
caaggauuaugaagagcau

SEQ ID NO: 1336854 - RNA, 19 nt, Homo sapiens
  misc_RNA (1)...(19): siRNA sense strand
gagaaggucaagaaugucu

SEQ ID NO: 1336855 - RNA, 19 nt, Homo sapiens
  misc_RNA (1)...(19): siRNA sense strand
auggagaccucgugccaaa

SEQ ID NO: 1336856 - RNA, 19 nt, Homo sapiens
  misc_RNA (1)...(19): siRNA sense strand
cguccgaacuuucuaugag

SEQ ID NO: 1336857 - RNA, 19 nt, Homo sapiens
  misc_RNA (1)...(19): siRNA sense strand
acaaagaaucuccuugaca

SEQ ID NO: 1336858 - RNA, 19 nt, Homo sapiens
  misc_RNA (1)...(19): siRNA sense strand
gaggacaccaugcgcuuca

SEQ ID NO: 1336859 - RNA, 19 nt, Homo sapiens
  misc_RNA (1)...(19): siRNA sense strand
ggacaccaugcgcuucaga

SEQ ID NO: 1336860 - RNA, 19 nt, Homo sapiens
  misc_RNA (1)...(19): siRNA sense strand
gcaagaacugcaacaacag

SEQ ID NO: 1336861 - RNA, 19 nt, Homo sapiens
  misc_RNA (1)...(19): siRNA sense strand
gcugcuucaccaaggauua

SEQ ID NO: 1336862 - RNA, 19 nt, Homo sapiens
  misc_RNA (1)...(19): siRNA sense strand
ugcaggaacucucuuugag

SEQ ID NO: 1336863 - RNA, 19 nt, Homo sapiens
  misc_RNA (1)...(19): siRNA sense strand
ggaggugucggaguacugu

SEQ ID NO: 1336864 - RNA, 19 nt, Homo sapiens
  misc_RNA (1)...(19): siRNA sense strand
cugcaggaacucucuuuga

SEQ ID NO: 1336865 - RNA, 19 nt, Homo sapiens
  misc_RNA (1)...(19): siRNA sense strand
agacaccucuccaguugcu

SEQ ID NO: 1336866 - RNA, 19 nt, Homo sapiens
  misc_RNA (1)...(19): siRNA sense strand
ugaaacaaagaaucuccuu

SEQ ID NO: 1336867 - RNA, 19 nt, Homo sapiens
  misc_RNA (1)...(19): siRNA sense strand
uacuguagccacaugauug

SEQ ID NO: 1336868 - RNA, 19 nt, Homo sapiens
  misc_RNA (1)...(19): siRNA sense strand
ggaauauuuucagcaagaa

SEQ ID NO: 1336869 - RNA, 19 nt, Homo sapiens
  misc_RNA (1)...(19): siRNA sense strand
gaccaggaacaguugaaag

SEQ ID NO: 1336870 - RNA, 19 nt, Homo sapiens
  misc_RNA (1)...(19): siRNA sense strand
uggaauauuuucagcaaga

SEQ ID NO: 1336871 - RNA, 19 nt, Homo sapiens
  misc_RNA (1)...(19): siRNA sense strand
ccucgugccaaauuacauu

SEQ ID NO: 1336872 - RNA, 19 nt, Homo sapiens
  misc_RNA (1)...(19): siRNA sense strand
gacaaggacuggaauauuu

SEQ ID NO: 1336873 - RNA, 19 nt, Homo sapiens
  misc_RNA (1)...(19): siRNA sense strand
caaagaaucuccuugacaa

SEQ ID NO: 1336874 - RNA, 19 nt, Homo sapiens
  misc_RNA (1)...(19): siRNA sense strand
gaaggcauuucuccuggua

SEQ ID NO: 1336875 - RNA, 19 nt, Homo sapiens
  misc_RNA (1)...(19): siRNA sense strand
gauccagugugcuaccuua

SEQ ID NO: 1336876 - RNA, 19 nt, Homo sapiens
  misc_RNA (1)...(19): siRNA sense strand
aaacaaagaaucuccuuga

SEQ ID NO: 1336877 - RNA, 19 nt, Homo sapiens
  misc_RNA (1)...(19): siRNA sense strand
gaacugcaacaacagcuuu

SEQ ID NO: 1336878 - RNA, 19 nt, Homo sapiens
  misc_RNA (1)...(19): siRNA sense strand
gagaccucgugccaaauua

SEQ ID NO: 1336879 - RNA, 19 nt, Homo sapiens
  misc_RNA (1)...(19): siRNA sense strand
ugaaagauccagugugcua

SEQ ID NO: 1336880 - RNA, 19 nt, Homo sapiens
  misc_RNA (1)...(19): siRNA sense strand
uggagaaggucaagaaugu

SEQ ID NO: 1336881 - RNA, 19 nt, Homo sapiens
  misc_RNA (1)...(19): siRNA sense strand
ggagaccucgugccaaauu

SEQ ID NO: 1336882 - RNA, 19 nt, Homo sapiens
  misc_RNA (1)...(19): siRNA sense strand
ccagugugcuaccuuaaga

SEQ ID NO: 1336883 - RNA, 19 nt, Homo sapiens
  misc_RNA (1)...(19): siRNA sense strand
accaugcgcuucagagaua

SEQ ID NO: 1336884 - RNA, 19 nt, Homo sapiens
  misc_RNA (1)...(19): siRNA sense strand
ggaguacuguagccacaug

SEQ ID NO: 1336885 - RNA, 19 nt, Homo sapiens
  misc_RNA (1)...(19): siRNA sense strand
caccaaggauuaugaagag

SEQ ID NO: 1336886 - RNA, 19 nt, Homo sapiens
  misc_RNA (1)...(19): siRNA sense strand
ggaggccucuuguucuaca

SEQ ID NO: 1336887 - RNA, 19 nt, Homo sapiens
  misc_RNA (1)...(19): siRNA sense strand
ugacaaggacuggaauauu

SEQ ID NO: 1336888 - RNA, 19 nt, Homo sapiens
  misc_RNA (1)...(19): siRNA sense strand
caggaacaguugaaagauc

SEQ ID NO: 1336889 - RNA, 19 nt, Homo sapiens
  misc_RNA (1)...(19): siRNA sense strand
ucggaggccucuuguucua

SEQ ID NO: 1336890 - RNA, 19 nt, Homo sapiens
  misc_RNA (1)...(19): siRNA sense strand
agcaagaacugcaacaaca

SEQ ID NO: 1336891 - RNA, 19 nt, Homo sapiens
  misc_RNA (1)...(19): siRNA sense strand
guacuguagccacaugauu

SEQ ID NO: 1336892 - RNA, 19 nt, Homo sapiens
  misc_RNA (1)...(19): siRNA sense strand
ucaccaaggauuaugaaga

SEQ ID NO: 1336893 - RNA, 19 nt, Homo sapiens
  misc_RNA (1)...(19): siRNA sense strand
guccgaacuuucuaugaga

SEQ ID NO: 1336894 - RNA, 19 nt, Homo sapiens
  misc_RNA (1)...(19): siRNA sense strand
guggacaccugcagucucu

SEQ ID NO: 1336895 - RNA, 19 nt, Homo sapiens
  misc_RNA (1)...(19): siRNA sense strand
caaggauuaugaagagcau

SEQ ID NO: 1336896 - RNA, 19 nt, Homo sapiens
  misc_RNA (1)...(19): siRNA sense strand
gagaaggucaagaaugucu

SEQ ID NO: 1336897 - RNA, 19 nt, Homo sapiens
  misc_RNA (1)...(19): siRNA sense strand
auggagaccucgugccaaa

SEQ ID NO: 1336898 - RNA, 19 nt, Homo sapiens
  misc_RNA (1)...(19): siRNA sense strand
cguccgaacuuucuaugag

SEQ ID NO: 1336899 - RNA, 19 nt, Homo sapiens
  misc_RNA (1)...(19): siRNA sense strand
acaaagaaucuccuugaca

SEQ ID NO: 1336900 - RNA, 19 nt, Homo sapiens
  misc_RNA (1)...(19): siRNA sense strand
gaggacaccaugcgcuuca

SEQ ID NO: 1336901 - RNA, 19 nt, Homo sapiens
  misc_RNA (1)...(19): siRNA sense strand
ggacaccaugcgcuucaga

SEQ ID NO: 1336902 - RNA, 19 nt, Homo sapiens
  misc_RNA (1)...(19): siRNA sense strand
gcaagaacugcaacaacag

SEQ ID NO: 1336903 - RNA, 19 nt, Homo sapiens
  misc_RNA (1)...(19): siRNA sense strand
gcugcuucaccaaggauua

SEQ ID NO: 1336904 - RNA, 19 nt, Homo sapiens
  misc_RNA (1)...(19): siRNA sense strand
ugcaggaacucucuuugag

SEQ ID NO: 1336905 - RNA, 19 nt, Homo sapiens
  misc_RNA (1)...(19): siRNA sense strand
ggaggugucggaguacugu

SEQ ID NO: 1336906 - RNA, 19 nt, Homo sapiens
  misc_RNA (1)...(19): siRNA sense strand
cugcaggaacucucuuuga

SEQ ID NO: 1336907 - RNA, 19 nt, Homo sapiens
  misc_RNA (1)...(19): siRNA sense strand
agacaccucuccaguugcu

SEQ ID NO: 1336908 - RNA, 19 nt, Homo sapiens
  misc_RNA (1)...(19): siRNA sense strand
ugaaacaaagaaucuccuu

SEQ ID NO: 1336909 - RNA, 19 nt, Homo sapiens
  misc_RNA (1)...(19): siRNA sense strand
uacuguagccacaugauug

SEQ ID NO: 1336910 - RNA, 19 nt, Homo sapiens
  misc_RNA (1)...(19): siRNA sense strand
ggaauauuuucagcaagaa

SEQ ID NO: 1336911 - RNA, 19 nt, Homo sapiens
  misc_RNA (1)...(19): siRNA sense strand
gaccaggaacaguugaaag

SEQ ID NO: 1336912 - RNA, 19 nt, Homo sapiens
  misc_RNA (1)...(19): siRNA sense strand
uggaauauuuucagcaaga

SEQ ID NO: 1336913 - RNA, 19 nt, Homo sapiens
  misc_RNA (1)...(19): siRNA sense strand
ccucgugccaaauuacauu

SEQ ID NO: 1336914 - RNA, 19 nt, Homo sapiens
  misc_RNA (1)...(19): siRNA sense strand
gacaaggacuggaauauuu

SEQ ID NO: 1336915 - RNA, 19 nt, Homo sapiens
  misc_RNA (1)...(19): siRNA sense strand
caaagaaucuccuugacaa

SEQ ID NO: 1336916 - RNA, 19 nt, Homo sapiens
  misc_RNA (1)...(19): siRNA sense strand
gaaggcauuucuccuggua

SEQ ID NO: 1336917 - RNA, 19 nt, Homo sapiens
  misc_RNA (1)...(19): siRNA sense strand
gauccagugugcuaccuua

SEQ ID NO: 1336918 - RNA, 19 nt, Homo sapiens
  misc_RNA (1)...(19): siRNA sense strand
aaacaaagaaucuccuuga

SEQ ID NO: 1336919 - RNA, 19 nt, Homo sapiens
  misc_RNA (1)...(19): siRNA sense strand
gaacugcaacaacagcuuu

SEQ ID NO: 1336920 - RNA, 19 nt, Homo sapiens
  misc_RNA (1)...(19): siRNA sense strand
gagaccucgugccaaauua

SEQ ID NO: 1336921 - RNA, 19 nt, Homo sapiens
  misc_RNA (1)...(19): siRNA sense strand
ugaaagauccagugugcua

SEQ ID NO: 1336922 - RNA, 19 nt, Homo sapiens
  misc_RNA (1)...(19): siRNA sense strand
uggagaaggucaagaaugu

SEQ ID NO: 1336923 - RNA, 19 nt, Homo sapiens
  misc_RNA (1)...(19): siRNA sense strand
ggagaccucgugccaaauu

SEQ ID NO: 1336924 - RNA, 19 nt, Homo sapiens
  misc_RNA (1)...(19): siRNA sense strand
ccagugugcuaccuuaaga

SEQ ID NO: 1336925 - RNA, 19 nt, Homo sapiens
  misc_RNA (1)...(19): siRNA sense strand
accaugcgcuucagagaua

SEQ ID NO: 1336926 - RNA, 19 nt, Homo sapiens
  misc_RNA (1)...(19): siRNA sense strand
ggaguacuguagccacaug

SEQ ID NO: 1336927 - RNA, 19 nt, Homo sapiens
  misc_RNA (1)...(19): siRNA sense strand
caccaaggauuaugaagag

SEQ ID NO: 1336928 - RNA, 19 nt, Homo sapiens
  misc_RNA (1)...(19): siRNA sense strand
ggaggccucuuguucuaca

SEQ ID NO: 1336929 - RNA, 19 nt, Homo sapiens
  misc_RNA (1)...(19): siRNA sense strand
ugacaaggacuggaauauu

SEQ ID NO: 1336930 - RNA, 19 nt, Homo sapiens
  misc_RNA (1)...(19): siRNA sense strand
caggaacaguugaaagauc

SEQ ID NO: 1336931 - RNA, 19 nt, Homo sapiens
  misc_RNA (1)...(19): siRNA sense strand
ucggaggccucuuguucua

SEQ ID NO: 1336932 - RNA, 19 nt, Homo sapiens
  misc_RNA (1)...(19): siRNA sense strand
agcaagaacugcaacaaca

SEQ ID NO: 1336933 - RNA, 19 nt, Homo sapiens
  misc_RNA (1)...(19): siRNA sense strand
guacuguagccacaugauu

SEQ ID NO: 1336934 - RNA, 19 nt, Homo sapiens
  misc_RNA (1)...(19): siRNA sense strand
ucaccaaggauuaugaaga

SEQ ID NO: 1336935 - RNA, 19 nt, Homo sapiens
  misc_RNA (1)...(19): siRNA sense strand
guccgaacuuucuaugaga

SEQ ID NO: 1336936 - RNA, 19 nt, Homo sapiens
  misc_RNA (1)...(19): siRNA sense strand
guggacaccugcagucucu

SEQ ID NO: 1336937 - RNA, 19 nt, Homo sapiens
  misc_RNA (1)...(19): siRNA sense strand
caaggauuaugaagagcau

SEQ ID NO: 1336938 - RNA, 19 nt, Homo sapiens
  misc_RNA (1)...(19): siRNA sense strand
gagaaggucaagaaugucu

SEQ ID NO: 1336939 - RNA, 19 nt, Homo sapiens
  misc_RNA (1)...(19): siRNA sense strand
auggagaccucgugccaaa

SEQ ID NO: 1336940 - RNA, 19 nt, Homo sapiens
  misc_RNA (1)...(19): siRNA sense strand
cguccgaacuuucuaugag

SEQ ID NO: 1336941 - RNA, 19 nt, Homo sapiens
  misc_RNA (1)...(19): siRNA sense strand
acaaagaaucuccuugaca

SEQ ID NO: 1336942 - RNA, 19 nt, Homo sapiens
  misc_RNA (1)...(19): siRNA sense strand
gaggacaccaugcgcuuca

SEQ ID NO: 1336943 - RNA, 19 nt, Homo sapiens
  misc_RNA (1)...(19): siRNA sense strand
ggacaccaugcgcuucaga

SEQ ID NO: 1336944 - RNA, 19 nt, Homo sapiens
  misc_RNA (1)...(19): siRNA sense strand
gcaagaacugcaacaacag

SEQ ID NO: 1336945 - RNA, 19 nt, Homo sapiens
  misc_RNA (1)...(19): siRNA sense strand
gcugcuucaccaaggauua

SEQ ID NO: 1336946 - RNA, 19 nt, Homo sapiens
  misc_RNA (1)...(19): siRNA sense strand
ugcaggaacucucuuugag

SEQ ID NO: 1336947 - RNA, 19 nt, Homo sapiens
  misc_RNA (1)...(19): siRNA sense strand
ggaggugucggaguacugu

SEQ ID NO: 1336948 - RNA, 19 nt, Homo sapiens
  misc_RNA (1)...(19): siRNA sense strand
cugcaggaacucucuuuga

SEQ ID NO: 1336949 - RNA, 19 nt, Homo sapiens
  misc_RNA (1)...(19): siRNA sense strand
agacaccucuccaguugcu

SEQ ID NO: 1336950 - RNA, 19 nt, Homo sapiens
  misc_RNA (1)...(19): siRNA sense strand
ugaaacaaagaaucuccuu

SEQ ID NO: 1336951 - RNA, 19 nt, Homo sapiens
  misc_RNA (1)...(19): siRNA sense strand
uacuguagccacaugauug

SEQ ID NO: 1336952 - RNA, 19 nt, Homo sapiens
  misc_RNA (1)...(19): siRNA sense strand
ggaauauuuucagcaagaa

SEQ ID NO: 1336953 - RNA, 19 nt, Homo sapiens
  misc_RNA (1)...(19): siRNA sense strand
gaccaggaacaguugaaag

SEQ ID NO: 1336954 - RNA, 19 nt, Homo sapiens
  misc_RNA (1)...(19): siRNA sense strand
uggaauauuuucagcaaga

SEQ ID NO: 1336955 - RNA, 19 nt, Homo sapiens
  misc_RNA (1)...(19): siRNA sense strand
ccucgugccaaauuacauu

SEQ ID NO: 1336956 - RNA, 19 nt, Homo sapiens
  misc_RNA (1)...(19): siRNA sense strand
gaagagagugugccgguua

SEQ ID NO: 1336957 - RNA, 19 nt, Homo sapiens
  misc_RNA (1)...(19): siRNA sense strand
gcuaaaaucucccucagua

SEQ ID NO: 1336958 - RNA, 19 nt, Homo sapiens
  misc_RNA (1)...(19): siRNA sense strand
gcaagccgguucauucuca

SEQ ID NO: 1336959 - RNA, 19 nt, Homo sapiens
  misc_RNA (1)...(19): siRNA sense strand
acauaaaggugcaaaccaa

SEQ ID NO: 1336960 - RNA, 19 nt, Homo sapiens
  misc_RNA (1)...(19): siRNA sense strand
gaugcaagccgguucauuc

SEQ ID NO: 1336961 - RNA, 19 nt, Homo sapiens
  misc_RNA (1)...(19): siRNA sense strand
ggagaagauagcuguguuu

SEQ ID NO: 1336962 - RNA, 19 nt, Homo sapiens
  misc_RNA (1)...(19): siRNA sense strand
ucaguaacaugcgcaucua

SEQ ID NO: 1336963 - RNA, 19 nt, Homo sapiens
  misc_RNA (1)...(19): siRNA sense strand
ggcaucuacuucugcauga

SEQ ID NO: 1336964 - RNA, 19 nt, Homo sapiens
  misc_RNA (1)...(19): siRNA sense strand
gaaguccacccucaagaag

SEQ ID NO: 1336965 - RNA, 19 nt, Homo sapiens
  misc_RNA (1)...(19): siRNA sense strand
ccaacaagauggugaugcu

SEQ ID NO: 1336966 - RNA, 19 nt, Homo sapiens
  misc_RNA (1)...(19): siRNA sense strand
gagugugguugauuuccuu

SEQ ID NO: 1336967 - RNA, 19 nt, Homo sapiens
  misc_RNA (1)...(19): siRNA sense strand
gagaagauagcuguguuuc

SEQ ID NO: 1336968 - RNA, 19 nt, Homo sapiens
  misc_RNA (1)...(19): siRNA sense strand
uaaaggugcaaaccaacaa

SEQ ID NO: 1336969 - RNA, 19 nt, Homo sapiens
  misc_RNA (1)...(19): siRNA sense strand
caagaaguccacccucaag

SEQ ID NO: 1336970 - RNA, 19 nt, Homo sapiens
  misc_RNA (1)...(19): siRNA sense strand
gguggaacaggagaagaua

SEQ ID NO: 1336971 - RNA, 19 nt, Homo sapiens
  misc_RNA (1)...(19): siRNA sense strand
agaaguccacccucaagaa

SEQ ID NO: 1336972 - RNA, 19 nt, Homo sapiens
  misc_RNA (1)...(19): siRNA sense strand
ccaagaaguccacccucaa

SEQ ID NO: 1336973 - RNA, 19 nt, Homo sapiens
  misc_RNA (1)...(19): siRNA sense strand
aggagaagauagcuguguu

SEQ ID NO: 1336974 - RNA, 19 nt, Homo sapiens
  misc_RNA (1)...(19): siRNA sense strand
ccgcgcagcugacaguucu

SEQ ID NO: 1336975 - RNA, 19 nt, Homo sapiens
  misc_RNA (1)...(19): siRNA sense strand
ggugcaaaccaacaagaug

SEQ ID NO: 1336976 - RNA, 19 nt, Homo sapiens
  misc_RNA (1)...(19): siRNA sense strand
ggacuauccacggugaaga

SEQ ID NO: 1336977 - RNA, 19 nt, Homo sapiens
  misc_RNA (1)...(19): siRNA sense strand
guaacaugcgcaucuacug

SEQ ID NO: 1336978 - RNA, 19 nt, Homo sapiens
  misc_RNA (1)...(19): siRNA sense strand
gacaguggcaucuacuucu

SEQ ID NO: 1336979 - RNA, 19 nt, Homo sapiens
  misc_RNA (1)...(19): siRNA sense strand
gcgcaucuacuggcugaga

SEQ ID NO: 1336980 - RNA, 19 nt, Homo sapiens
  misc_RNA (1)...(19): siRNA sense strand
caagccgguucauucucaa

SEQ ID NO: 1336981 - RNA, 19 nt, Homo sapiens
  misc_RNA (1)...(19): siRNA sense strand
ggaugcaagccgguucauu

SEQ ID NO: 1336982 - RNA, 19 nt, Homo sapiens
  misc_RNA (1)...(19): siRNA sense strand
gcaucuacuucugcaugau

SEQ ID NO: 1336983 - RNA, 19 nt, Homo sapiens
  misc_RNA (1)...(19): siRNA sense strand
ccucugggauuccgcaaaa

SEQ ID NO: 1336984 - RNA, 19 nt, Homo sapiens
  misc_RNA (1)...(19): siRNA sense strand
cagcugagugugguugauu

SEQ ID NO: 1336985 - RNA, 19 nt, Homo sapiens
  misc_RNA (1)...(19): siRNA sense strand
acaguggcaucuacuucug

SEQ ID NO: 1336986 - RNA, 19 nt, Homo sapiens
  misc_RNA (1)...(19): siRNA sense strand
gaagagagugugccgguua

SEQ ID NO: 1336987 - RNA, 19 nt, Homo sapiens
  misc_RNA (1)...(19): siRNA sense strand
gcuaaaaucucccucagua

SEQ ID NO: 1336988 - RNA, 19 nt, Homo sapiens
  misc_RNA (1)...(19): siRNA sense strand
gcaagccgguucauucuca

SEQ ID NO: 1336989 - RNA, 19 nt, Homo sapiens
  misc_RNA (1)...(19): siRNA sense strand
acauaaaggugcaaaccaa

SEQ ID NO: 1336990 - RNA, 19 nt, Homo sapiens
  misc_RNA (1)...(19): siRNA sense strand
gaugcaagccgguucauuc

SEQ ID NO: 1336991 - RNA, 19 nt, Homo sapiens
  misc_RNA (1)...(19): siRNA sense strand
ggagaagauagcuguguuu

SEQ ID NO: 1336992 - RNA, 19 nt, Homo sapiens
  misc_RNA (1)...(19): siRNA sense strand
ucaguaacaugcgcaucua

SEQ ID NO: 1336993 - RNA, 19 nt, Homo sapiens
  misc_RNA (1)...(19): siRNA sense strand
ggcaucuacuucugcauga

SEQ ID NO: 1336994 - RNA, 19 nt, Homo sapiens
  misc_RNA (1)...(19): siRNA sense strand
gaaguccacccucaagaag

SEQ ID NO: 1336995 - RNA, 19 nt, Homo sapiens
  misc_RNA (1)...(19): siRNA sense strand
ccaacaagauggugaugcu

SEQ ID NO: 1336996 - RNA, 19 nt, Homo sapiens
  misc_RNA (1)...(19): siRNA sense strand
gagugugguugauuuccuu

SEQ ID NO: 1336997 - RNA, 19 nt, Homo sapiens
  misc_RNA (1)...(19): siRNA sense strand
gagaagauagcuguguuuc

SEQ ID NO: 1336998 - RNA, 19 nt, Homo sapiens
  misc_RNA (1)...(19): siRNA sense strand
uaaaggugcaaaccaacaa

SEQ ID NO: 1336999 - RNA, 19 nt, Homo sapiens
  misc_RNA (1)...(19): siRNA sense strand
caagaaguccacccucaag

SEQ ID NO: 1337000 - RNA, 19 nt, Homo sapiens
  misc_RNA (1)...(19): siRNA sense strand
gguggaacaggagaagaua

SEQ ID NO: 1337001 - RNA, 19 nt, Homo sapiens
  misc_RNA (1)...(19): siRNA sense strand
agaaguccacccucaagaa

SEQ ID NO: 1337002 - RNA, 19 nt, Homo sapiens
  misc_RNA (1)...(19): siRNA sense strand
ccaagaaguccacccucaa

SEQ ID NO: 1337003 - RNA, 19 nt, Homo sapiens
  misc_RNA (1)...(19): siRNA sense strand
aggagaagauagcuguguu

SEQ ID NO: 1337004 - RNA, 19 nt, Homo sapiens
  misc_RNA (1)...(19): siRNA sense strand
ccgcgcagcugacaguucu

SEQ ID NO: 1337005 - RNA, 19 nt, Homo sapiens
  misc_RNA (1)...(19): siRNA sense strand
ggugcaaaccaacaagaug

SEQ ID NO: 1337006 - RNA, 19 nt, Homo sapiens
  misc_RNA (1)...(19): siRNA sense strand
ggacuauccacggugaaga

SEQ ID NO: 1337007 - RNA, 19 nt, Homo sapiens
  misc_RNA (1)...(19): siRNA sense strand
guaacaugcgcaucuacug

SEQ ID NO: 1337008 - RNA, 19 nt, Homo sapiens
  misc_RNA (1)...(19): siRNA sense strand
gacaguggcaucuacuucu

SEQ ID NO: 1337009 - RNA, 19 nt, Homo sapiens
  misc_RNA (1)...(19): siRNA sense strand
gcgcaucuacuggcugaga

SEQ ID NO: 1337010 - RNA, 19 nt, Homo sapiens
  misc_RNA (1)...(19): siRNA sense strand
caagccgguucauucucaa

SEQ ID NO: 1337011 - RNA, 19 nt, Homo sapiens
  misc_RNA (1)...(19): siRNA sense strand
ggaugcaagccgguucauu

SEQ ID NO: 1337012 - RNA, 19 nt, Homo sapiens
  misc_RNA (1)...(19): siRNA sense strand
gcaucuacuucugcaugau

SEQ ID NO: 1337013 - RNA, 19 nt, Homo sapiens
  misc_RNA (1)...(19): siRNA sense strand
ccucugggauuccgcaaaa

SEQ ID NO: 1337014 - RNA, 19 nt, Homo sapiens
  misc_RNA (1)...(19): siRNA sense strand
cagcugagugugguugauu

SEQ ID NO: 1337015 - RNA, 19 nt, Homo sapiens
  misc_RNA (1)...(19): siRNA sense strand
acaguggcaucuacuucug

SEQ ID NO: 1337016 - RNA, 19 nt, Homo sapiens
  misc_RNA (1)...(19): siRNA sense strand
gaagagagugugccgguua

SEQ ID NO: 1337017 - RNA, 19 nt, Homo sapiens
  misc_RNA (1)...(19): siRNA sense strand
gcuaaaaucucccucagua

SEQ ID NO: 1337018 - RNA, 19 nt, Homo sapiens
  misc_RNA (1)...(19): siRNA sense strand
gcaagccgguucauucuca

SEQ ID NO: 1337019 - RNA, 19 nt, Homo sapiens
  misc_RNA (1)...(19): siRNA sense strand
acauaaaggugcaaaccaa

SEQ ID NO: 1337020 - RNA, 19 nt, Homo sapiens
  misc_RNA (1)...(19): siRNA sense strand
gaugcaagccgguucauuc

SEQ ID NO: 1337021 - RNA, 19 nt, Homo sapiens
  misc_RNA (1)...(19): siRNA sense strand
ggagaagauagcuguguuu

SEQ ID NO: 1337022 - RNA, 19 nt, Homo sapiens
  misc_RNA (1)...(19): siRNA sense strand
ucaguaacaugcgcaucua

SEQ ID NO: 1337023 - RNA, 19 nt, Homo sapiens
  misc_RNA (1)...(19): siRNA sense strand
ggcaucuacuucugcauga

SEQ ID NO: 1337024 - RNA, 19 nt, Homo sapiens
  misc_RNA (1)...(19): siRNA sense strand
gaaguccacccucaagaag

SEQ ID NO: 1337025 - RNA, 19 nt, Homo sapiens
  misc_RNA (1)...(19): siRNA sense strand
ccaacaagauggugaugcu

SEQ ID NO: 1337026 - RNA, 19 nt, Homo sapiens
  misc_RNA (1)...(19): siRNA sense strand
gagugugguugauuuccuu

SEQ ID NO: 1337027 - RNA, 19 nt, Homo sapiens
  misc_RNA (1)...(19): siRNA sense strand
gagaagauagcuguguuuc

SEQ ID NO: 1337028 - RNA, 19 nt, Homo sapiens
  misc_RNA (1)...(19): siRNA sense strand
uaaaggugcaaaccaacaa

SEQ ID NO: 1337029 - RNA, 19 nt, Homo sapiens
  misc_RNA (1)...(19): siRNA sense strand
caagaaguccacccucaag

SEQ ID NO: 1337030 - RNA, 19 nt, Homo sapiens
  misc_RNA (1)...(19): siRNA sense strand
gguggaacaggagaagaua

SEQ ID NO: 1337031 - RNA, 19 nt, Homo sapiens
  misc_RNA (1)...(19): siRNA sense strand
agaaguccacccucaagaa

SEQ ID NO: 1337032 - RNA, 19 nt, Homo sapiens
  misc_RNA (1)...(19): siRNA sense strand
ccaagaaguccacccucaa

SEQ ID NO: 1337033 - RNA, 19 nt, Homo sapiens
  misc_RNA (1)...(19): siRNA sense strand
aggagaagauagcuguguu

SEQ ID NO: 1337034 - RNA, 19 nt, Homo sapiens
  misc_RNA (1)...(19): siRNA sense strand
ccgcgcagcugacaguucu

SEQ ID NO: 1337035 - RNA, 19 nt, Homo sapiens
  misc_RNA (1)...(19): siRNA sense strand
ggugcaaaccaacaagaug

SEQ ID NO: 1337036 - RNA, 19 nt, Homo sapiens
  misc_RNA (1)...(19): siRNA sense strand
ggacuauccacggugaaga

SEQ ID NO: 1337037 - RNA, 19 nt, Homo sapiens
  misc_RNA (1)...(19): siRNA sense strand
guaacaugcgcaucuacug

SEQ ID NO: 1337038 - RNA, 19 nt, Homo sapiens
  misc_RNA (1)...(19): siRNA sense strand
gacaguggcaucuacuucu

SEQ ID NO: 1337039 - RNA, 19 nt, Homo sapiens
  misc_RNA (1)...(19): siRNA sense strand
gcgcaucuacuggcugaga

SEQ ID NO: 1337040 - RNA, 19 nt, Homo sapiens
  misc_RNA (1)...(19): siRNA sense strand
caagccgguucauucucaa

SEQ ID NO: 1337041 - RNA, 19 nt, Homo sapiens
  misc_RNA (1)...(19): siRNA sense strand
ggaugcaagccgguucauu

SEQ ID NO: 1337042 - RNA, 19 nt, Homo sapiens
  misc_RNA (1)...(19): siRNA sense strand
gcaucuacuucugcaugau

SEQ ID NO: 1337043 - RNA, 19 nt, Homo sapiens
  misc_RNA (1)...(19): siRNA sense strand
ccucugggauuccgcaaaa

SEQ ID NO: 1337044 - RNA, 19 nt, Homo sapiens
  misc_RNA (1)...(19): siRNA sense strand
cagcugagugugguugauu

SEQ ID NO: 1337045 - RNA, 19 nt, Homo sapiens
  misc_RNA (1)...(19): siRNA sense strand
acaguggcaucuacuucug

SEQ ID NO: 1337046 - RNA, 19 nt, Homo sapiens
  misc_RNA (1)...(19): siRNA sense strand
gaagagagugugccgguua

SEQ ID NO: 1337047 - RNA, 19 nt, Homo sapiens
  misc_RNA (1)...(19): siRNA sense strand
gcuaaaaucucccucagua

SEQ ID NO: 1337048 - RNA, 19 nt, Homo sapiens
  misc_RNA (1)...(19): siRNA sense strand
gcaagccgguucauucuca

SEQ ID NO: 1337049 - RNA, 19 nt, Homo sapiens
  misc_RNA (1)...(19): siRNA sense strand
acauaaaggugcaaaccaa

SEQ ID NO: 1337050 - RNA, 19 nt, Homo sapiens
  misc_RNA (1)...(19): siRNA sense strand
gaugcaagccgguucauuc

SEQ ID NO: 1337051 - RNA, 19 nt, Homo sapiens
  misc_RNA (1)...(19): siRNA sense strand
ggagaagauagcuguguuu

SEQ ID NO: 1337052 - RNA, 19 nt, Homo sapiens
  misc_RNA (1)...(19): siRNA sense strand
ucaguaacaugcgcaucua

SEQ ID NO: 1337053 - RNA, 19 nt, Homo sapiens
  misc_RNA (1)...(19): siRNA sense strand
ggcaucuacuucugcauga

SEQ ID NO: 1337054 - RNA, 19 nt, Homo sapiens
  misc_RNA (1)...(19): siRNA sense strand
gaaguccacccucaagaag

SEQ ID NO: 1337055 - RNA, 19 nt, Homo sapiens
  misc_RNA (1)...(19): siRNA sense strand
ccaacaagauggugaugcu

SEQ ID NO: 1337056 - RNA, 19 nt, Homo sapiens
  misc_RNA (1)...(19): siRNA sense strand
gagugugguugauuuccuu

SEQ ID NO: 1337057 - RNA, 19 nt, Homo sapiens
  misc_RNA (1)...(19): siRNA sense strand
gagaagauagcuguguuuc

SEQ ID NO: 1337058 - RNA, 19 nt, Homo sapiens
  misc_RNA (1)...(19): siRNA sense strand
uaaaggugcaaaccaacaa

SEQ ID NO: 1337059 - RNA, 19 nt, Homo sapiens
  misc_RNA (1)...(19): siRNA sense strand
caagaaguccacccucaag

SEQ ID NO: 1337060 - RNA, 19 nt, Homo sapiens
  misc_RNA (1)...(19): siRNA sense strand
gguggaacaggagaagaua

SEQ ID NO: 1337061 - RNA, 19 nt, Homo sapiens
  misc_RNA (1)...(19): siRNA sense strand
agaaguccacccucaagaa

SEQ ID NO: 1337062 - RNA, 19 nt, Homo sapiens
  misc_RNA (1)...(19): siRNA sense strand
ccaagaaguccacccucaa

SEQ ID NO: 1337063 - RNA, 19 nt, Homo sapiens
  misc_RNA (1)...(19): siRNA sense strand
aggagaagauagcuguguu

SEQ ID NO: 1337064 - RNA, 19 nt, Homo sapiens
  misc_RNA (1)...(19): siRNA sense strand
ccgcgcagcugacaguucu

SEQ ID NO: 1337065 - RNA, 19 nt, Homo sapiens
  misc_RNA (1)...(19): siRNA sense strand
ggugcaaaccaacaagaug

SEQ ID NO: 1337066 - RNA, 19 nt, Homo sapiens
  misc_RNA (1)...(19): siRNA sense strand
ggacuauccacggugaaga

SEQ ID NO: 1337067 - RNA, 19 nt, Homo sapiens
  misc_RNA (1)...(19): siRNA sense strand
guaacaugcgcaucuacug

SEQ ID NO: 1337068 - RNA, 19 nt, Homo sapiens
  misc_RNA (1)...(19): siRNA sense strand
gacaguggcaucuacuucu

SEQ ID NO: 1337069 - RNA, 19 nt, Homo sapiens
  misc_RNA (1)...(19): siRNA sense strand
gcgcaucuacuggcugaga

SEQ ID NO: 1337070 - RNA, 19 nt, Homo sapiens
  misc_RNA (1)...(19): siRNA sense strand
caagccgguucauucucaa

SEQ ID NO: 1337071 - RNA, 19 nt, Homo sapiens
  misc_RNA (1)...(19): siRNA sense strand
ggaugcaagccgguucauu

SEQ ID NO: 1337072 - RNA, 19 nt, Homo sapiens
  misc_RNA (1)...(19): siRNA sense strand
gcaucuacuucugcaugau

SEQ ID NO: 1337073 - RNA, 19 nt, Homo sapiens
  misc_RNA (1)...(19): siRNA sense strand
ccucugggauuccgcaaaa

SEQ ID NO: 1337074 - RNA, 19 nt, Homo sapiens
  misc_RNA (1)...(19): siRNA sense strand
cagcugagugugguugauu

SEQ ID NO: 1337075 - RNA, 19 nt, Homo sapiens
  misc_RNA (1)...(19): siRNA sense strand
acaguggcaucuacuucug

SEQ ID NO: 1337076 - RNA, 19 nt, Homo sapiens
  misc_RNA (1)...(19): siRNA sense strand
gaagagagugugccgguua

SEQ ID NO: 1337077 - RNA, 19 nt, Homo sapiens
  misc_RNA (1)...(19): siRNA sense strand
gcuaaaaucucccucagua

SEQ ID NO: 1337078 - RNA, 19 nt, Homo sapiens
  misc_RNA (1)...(19): siRNA sense strand
gcaagccgguucauucuca

SEQ ID NO: 1337079 - RNA, 19 nt, Homo sapiens
  misc_RNA (1)...(19): siRNA sense strand
acauaaaggugcaaaccaa

SEQ ID NO: 1337080 - RNA, 19 nt, Homo sapiens
  misc_RNA (1)...(19): siRNA sense strand
gaugcaagccgguucauuc

SEQ ID NO: 1337081 - RNA, 19 nt, Homo sapiens
  misc_RNA (1)...(19): siRNA sense strand
ggagaagauagcuguguuu

SEQ ID NO: 1337082 - RNA, 19 nt, Homo sapiens
  misc_RNA (1)...(19): siRNA sense strand
ucaguaacaugcgcaucua

SEQ ID NO: 1337083 - RNA, 19 nt, Homo sapiens
  misc_RNA (1)...(19): siRNA sense strand
ggcaucuacuucugcauga

SEQ ID NO: 1337084 - RNA, 19 nt, Homo sapiens
  misc_RNA (1)...(19): siRNA sense strand
gaaguccacccucaagaag

SEQ ID NO: 1337085 - RNA, 19 nt, Homo sapiens
  misc_RNA (1)...(19): siRNA sense strand
ccaacaagauggugaugcu

SEQ ID NO: 1337086 - RNA, 19 nt, Homo sapiens
  misc_RNA (1)...(19): siRNA sense strand
gagugugguugauuuccuu

SEQ ID NO: 1337087 - RNA, 19 nt, Homo sapiens
  misc_RNA (1)...(19): siRNA sense strand
gagaagauagcuguguuuc

SEQ ID NO: 1337088 - RNA, 19 nt, Homo sapiens
  misc_RNA (1)...(19): siRNA sense strand
uaaaggugcaaaccaacaa

SEQ ID NO: 1337089 - RNA, 19 nt, Homo sapiens
  misc_RNA (1)...(19): siRNA sense strand
caagaaguccacccucaag

SEQ ID NO: 1337090 - RNA, 19 nt, Homo sapiens
  misc_RNA (1)...(19): siRNA sense strand
gguggaacaggagaagaua

SEQ ID NO: 1337091 - RNA, 19 nt, Homo sapiens
  misc_RNA (1)...(19): siRNA sense strand
agaaguccacccucaagaa

SEQ ID NO: 1337092 - RNA, 19 nt, Homo sapiens
  misc_RNA (1)...(19): siRNA sense strand
ccaagaaguccacccucaa

SEQ ID NO: 1337093 - RNA, 19 nt, Homo sapiens
  misc_RNA (1)...(19): siRNA sense strand
aggagaagauagcuguguu

SEQ ID NO: 1337094 - RNA, 19 nt, Homo sapiens
  misc_RNA (1)...(19): siRNA sense strand
ccgcgcagcugacaguucu

SEQ ID NO: 1337095 - RNA, 19 nt, Homo sapiens
  misc_RNA (1)...(19): siRNA sense strand
ggugcaaaccaacaagaug

SEQ ID NO: 1337096 - RNA, 19 nt, Homo sapiens
  misc_RNA (1)...(19): siRNA sense strand
ggacuauccacggugaaga

SEQ ID NO: 1337097 - RNA, 19 nt, Homo sapiens
  misc_RNA (1)...(19): siRNA sense strand
guaacaugcgcaucuacug

SEQ ID NO: 1337098 - RNA, 19 nt, Homo sapiens
  misc_RNA (1)...(19): siRNA sense strand
gacaguggcaucuacuucu

SEQ ID NO: 1337099 - RNA, 19 nt, Homo sapiens
  misc_RNA (1)...(19): siRNA sense strand
gcgcaucuacuggcugaga

SEQ ID NO: 1337100 - RNA, 19 nt, Homo sapiens
  misc_RNA (1)...(19): siRNA sense strand
caagccgguucauucucaa

SEQ ID NO: 1337101 - RNA, 19 nt, Homo sapiens
  misc_RNA (1)...(19): siRNA sense strand
ggaugcaagccgguucauu

SEQ ID NO: 1337102 - RNA, 19 nt, Homo sapiens
  misc_RNA (1)...(19): siRNA sense strand
gcaucuacuucugcaugau

SEQ ID NO: 1337103 - RNA, 19 nt, Homo sapiens
  misc_RNA (1)...(19): siRNA sense strand
ccucugggauuccgcaaaa

SEQ ID NO: 1337104 - RNA, 19 nt, Homo sapiens
  misc_RNA (1)...(19): siRNA sense strand
cagcugagugugguugauu

SEQ ID NO: 1337105 - RNA, 19 nt, Homo sapiens
  misc_RNA (1)...(19): siRNA sense strand
acaguggcaucuacuucug

SEQ ID NO: 1337106 - RNA, 19 nt, Homo sapiens
  misc_RNA (1)...(19): siRNA sense strand
gaagagagugugccgguua

SEQ ID NO: 1337107 - RNA, 19 nt, Homo sapiens
  misc_RNA (1)...(19): siRNA sense strand
gcuaaaaucucccucagua

SEQ ID NO: 1337108 - RNA, 19 nt, Homo sapiens
  misc_RNA (1)...(19): siRNA sense strand
gcaagccgguucauucuca

SEQ ID NO: 1337109 - RNA, 19 nt, Homo sapiens
  misc_RNA (1)...(19): siRNA sense strand
acauaaaggugcaaaccaa

SEQ ID NO: 1337110 - RNA, 19 nt, Homo sapiens
  misc_RNA (1)...(19): siRNA sense strand
gaugcaagccgguucauuc

SEQ ID NO: 1337111 - RNA, 19 nt, Homo sapiens
  misc_RNA (1)...(19): siRNA sense strand
ggagaagauagcuguguuu

SEQ ID NO: 1337112 - RNA, 19 nt, Homo sapiens
  misc_RNA (1)...(19): siRNA sense strand
ucaguaacaugcgcaucua

SEQ ID NO: 1337113 - RNA, 19 nt, Homo sapiens
  misc_RNA (1)...(19): siRNA sense strand
ggcaucuacuucugcauga

SEQ ID NO: 1337114 - RNA, 19 nt, Homo sapiens
  misc_RNA (1)...(19): siRNA sense strand
gaaguccacccucaagaag

SEQ ID NO: 1337115 - RNA, 19 nt, Homo sapiens
  misc_RNA (1)...(19): siRNA sense strand
ccaacaagauggugaugcu

SEQ ID NO: 1337116 - RNA, 19 nt, Homo sapiens
  misc_RNA (1)...(19): siRNA sense strand
gagugugguugauuuccuu

SEQ ID NO: 1337117 - RNA, 19 nt, Homo sapiens
  misc_RNA (1)...(19): siRNA sense strand
gagaagauagcuguguuuc

SEQ ID NO: 1337118 - RNA, 19 nt, Homo sapiens
  misc_RNA (1)...(19): siRNA sense strand
uaaaggugcaaaccaacaa

SEQ ID NO: 1337119 - RNA, 19 nt, Homo sapiens
  misc_RNA (1)...(19): siRNA sense strand
caagaaguccacccucaag

SEQ ID NO: 1337120 - RNA, 19 nt, Homo sapiens
  misc_RNA (1)...(19): siRNA sense strand
gguggaacaggagaagaua

SEQ ID NO: 1337121 - RNA, 19 nt, Homo sapiens
  misc_RNA (1)...(19): siRNA sense strand
agaaguccacccucaagaa

SEQ ID NO: 1337122 - RNA, 19 nt, Homo sapiens
  misc_RNA (1)...(19): siRNA sense strand
ccaagaaguccacccucaa

SEQ ID NO: 1337123 - RNA, 19 nt, Homo sapiens
  misc_RNA (1)...(19): siRNA sense strand
aggagaagauagcuguguu

SEQ ID NO: 1337124 - RNA, 19 nt, Homo sapiens
  misc_RNA (1)...(19): siRNA sense strand
ccgcgcagcugacaguucu

SEQ ID NO: 1337125 - RNA, 19 nt, Homo sapiens
  misc_RNA (1)...(19): siRNA sense strand
ggugcaaaccaacaagaug

SEQ ID NO: 1337126 - RNA, 19 nt, Homo sapiens
  misc_RNA (1)...(19): siRNA sense strand
ggacuauccacggugaaga

SEQ ID NO: 1337127 - RNA, 19 nt, Homo sapiens
  misc_RNA (1)...(19): siRNA sense strand
guaacaugcgcaucuacug

SEQ ID NO: 1337128 - RNA, 19 nt, Homo sapiens
  misc_RNA (1)...(19): siRNA sense strand
gacaguggcaucuacuucu

SEQ ID NO: 1337129 - RNA, 19 nt, Homo sapiens
  misc_RNA (1)...(19): siRNA sense strand
gcgcaucuacuggcugaga

SEQ ID NO: 1337130 - RNA, 19 nt, Homo sapiens
  misc_RNA (1)...(19): siRNA sense strand
caagccgguucauucucaa

SEQ ID NO: 1337131 - RNA, 19 nt, Homo sapiens
  misc_RNA (1)...(19): siRNA sense strand
ggaugcaagccgguucauu

SEQ ID NO: 1337132 - RNA, 19 nt, Homo sapiens
  misc_RNA (1)...(19): siRNA sense strand
gcaucuacuucugcaugau

SEQ ID NO: 1337133 - RNA, 19 nt, Homo sapiens
  misc_RNA (1)...(19): siRNA sense strand
ccucugggauuccgcaaaa

SEQ ID NO: 1337134 - RNA, 19 nt, Homo sapiens
  misc_RNA (1)...(19): siRNA sense strand
cagcugagugugguugauu

SEQ ID NO: 1337135 - RNA, 19 nt, Homo sapiens
  misc_RNA (1)...(19): siRNA sense strand
acaguggcaucuacuucug

SEQ ID NO: 1337136 - RNA, 19 nt, Homo sapiens
  misc_RNA (1)...(19): siRNA sense strand
cgacauagcugaggacuug

SEQ ID NO: 1337137 - RNA, 19 nt, Homo sapiens
  misc_RNA (1)...(19): siRNA sense strand
gacaauaccuacuaugcaa

SEQ ID NO: 1337138 - RNA, 19 nt, Homo sapiens
  misc_RNA (1)...(19): siRNA sense strand
gggaaggccuuggauguuu

SEQ ID NO: 1337139 - RNA, 19 nt, Homo sapiens
  misc_RNA (1)...(19): siRNA sense strand
caagaucgcugacuuuggu

SEQ ID NO: 1337140 - RNA, 19 nt, Homo sapiens
  misc_RNA (1)...(19): siRNA sense strand
gaaauugccauccucaaga

SEQ ID NO: 1337141 - RNA, 19 nt, Homo sapiens
  misc_RNA (1)...(19): siRNA sense strand
ugaagaccaugauacguaa

SEQ ID NO: 1337142 - RNA, 19 nt, Homo sapiens
  misc_RNA (1)...(19): siRNA sense strand
ucaaaccacucucugaaga

SEQ ID NO: 1337143 - RNA, 19 nt, Homo sapiens
  misc_RNA (1)...(19): siRNA sense strand
caaguuggccuacaaugaa

SEQ ID NO: 1337144 - RNA, 19 nt, Homo sapiens
  misc_RNA (1)...(19): siRNA sense strand
caaugaaggugcuguccaa

SEQ ID NO: 1337145 - RNA, 19 nt, Homo sapiens
  misc_RNA (1)...(19): siRNA sense strand
acaguaagaucaagaguca

SEQ ID NO: 1337146 - RNA, 19 nt, Homo sapiens
  misc_RNA (1)...(19): siRNA sense strand
ggaaggccuuggauguuug

SEQ ID NO: 1337147 - RNA, 19 nt, Homo sapiens
  misc_RNA (1)...(19): siRNA sense strand
ucaaaggcaucgaguacuu

SEQ ID NO: 1337148 - RNA, 19 nt, Homo sapiens
  misc_RNA (1)...(19): siRNA sense strand
gagcagguguaccaggaaa

SEQ ID NO: 1337149 - RNA, 19 nt, Homo sapiens
  misc_RNA (1)...(19): siRNA sense strand
gugaagaccaugauacgua

SEQ ID NO: 1337150 - RNA, 19 nt, Homo sapiens
  misc_RNA (1)...(19): siRNA sense strand
ggaagugcccacccucaaa

SEQ ID NO: 1337151 - RNA, 19 nt, Homo sapiens
  misc_RNA (1)...(19): siRNA sense strand
ccaaugaggaccaucugua

SEQ ID NO: 1337152 - RNA, 19 nt, Homo sapiens
  misc_RNA (1)...(19): siRNA sense strand
gaucaaaggcaucgaguac

SEQ ID NO: 1337153 - RNA, 19 nt, Homo sapiens
  misc_RNA (1)...(19): siRNA sense strand
caaaggcaucgaguacuua

SEQ ID NO: 1337154 - RNA, 19 nt, Homo sapiens
  misc_RNA (1)...(19): siRNA sense strand
ggaaauugccauccucaag

SEQ ID NO: 1337155 - RNA, 19 nt, Homo sapiens
  misc_RNA (1)...(19): siRNA sense strand
aguauacccugaaggauga

SEQ ID NO: 1337156 - RNA, 19 nt, Homo sapiens
  misc_RNA (1)...(19): siRNA sense strand
ggaggaacgcucacuguca

SEQ ID NO: 1337157 - RNA, 19 nt, Homo sapiens
  misc_RNA (1)...(19): siRNA sense strand
ggcauggaguccuucauug

SEQ ID NO: 1337158 - RNA, 19 nt, Homo sapiens
  misc_RNA (1)...(19): siRNA sense strand
aaauugccauccucaagaa

SEQ ID NO: 1337159 - RNA, 19 nt, Homo sapiens
  misc_RNA (1)...(19): siRNA sense strand
gggcauggaguccuucauu

SEQ ID NO: 1337160 - RNA, 19 nt, Homo sapiens
  misc_RNA (1)...(19): siRNA sense strand
ccugaaggaugaaauugga

SEQ ID NO: 1337161 - RNA, 19 nt, Homo sapiens
  misc_RNA (1)...(19): siRNA sense strand
guacuuacacuaccagaag

SEQ ID NO: 1337162 - RNA, 19 nt, Homo sapiens
  misc_RNA (1)...(19): siRNA sense strand
ucaaguuggccuacaauga

SEQ ID NO: 1337163 - RNA, 19 nt, Homo sapiens
  misc_RNA (1)...(19): siRNA sense strand
ccuauggugucgucaaguu

SEQ ID NO: 1337164 - RNA, 19 nt, Homo sapiens
  misc_RNA (1)...(19): siRNA sense strand
cauccaccgugacaucaaa

SEQ ID NO: 1337165 - RNA, 19 nt, Homo sapiens
  misc_RNA (1)...(19): siRNA sense strand
gagcggaucauguguuuac

SEQ ID NO: 1337166 - RNA, 19 nt, Homo sapiens
  misc_RNA (1)...(19): siRNA sense strand
gcagguguaccaggaaauu

SEQ ID NO: 1337167 - RNA, 19 nt, Homo sapiens
  misc_RNA (1)...(19): siRNA sense strand
caucaagaucgcugacuuu

SEQ ID NO: 1337168 - RNA, 19 nt, Homo sapiens
  misc_RNA (1)...(19): siRNA sense strand
gaucauccaccgugacauc

SEQ ID NO: 1337169 - RNA, 19 nt, Homo sapiens
  misc_RNA (1)...(19): siRNA sense strand
gcauggaguccuucauugu

SEQ ID NO: 1337170 - RNA, 19 nt, Homo sapiens
  misc_RNA (1)...(19): siRNA sense strand
gugacgcgcuccucuccaa

SEQ ID NO: 1337171 - RNA, 19 nt, Homo sapiens
  misc_RNA (1)...(19): siRNA sense strand
acgagcggaucauguguuu

SEQ ID NO: 1337172 - RNA, 19 nt, Homo sapiens
  misc_RNA (1)...(19): siRNA sense strand
acacuauacugcuuugucu

SEQ ID NO: 1337173 - RNA, 19 nt, Homo sapiens
  misc_RNA (1)...(19): siRNA sense strand
ugguggagguccuggauga

SEQ ID NO: 1337174 - RNA, 19 nt, Homo sapiens
  misc_RNA (1)...(19): siRNA sense strand
gucagcgccuggaaacuug

SEQ ID NO: 1337175 - RNA, 19 nt, Homo sapiens
  misc_RNA (1)...(19): siRNA sense strand
ggacuugaaggaccugauc

SEQ ID NO: 1337176 - RNA, 19 nt, Homo sapiens
  misc_RNA (1)...(19): siRNA sense strand
guacaugguguucgaacug

SEQ ID NO: 1337177 - RNA, 19 nt, Homo sapiens
  misc_RNA (1)...(19): siRNA sense strand
ggccgacaguggagucuca

SEQ ID NO: 1337178 - RNA, 19 nt, Homo sapiens
  misc_RNA (1)...(19): siRNA sense strand
ccucaaaccacucucugaa

SEQ ID NO: 1337179 - RNA, 19 nt, Homo sapiens
  misc_RNA (1)...(19): siRNA sense strand
ccaggcccguuucuacuuc

SEQ ID NO: 1337180 - RNA, 19 nt, Homo sapiens
  misc_RNA (1)...(19): siRNA sense strand
cccguaugcuggacaagaa

SEQ ID NO: 1337181 - RNA, 19 nt, Homo sapiens
  misc_RNA (1)...(19): siRNA sense strand
gcaucgaguacuuacacua

SEQ ID NO: 1337182 - RNA, 19 nt, Homo sapiens
  misc_RNA (1)...(19): siRNA sense strand
ugaaggaugaaauuggaaa

SEQ ID NO: 1337183 - RNA, 19 nt, Homo sapiens
  misc_RNA (1)...(19): siRNA sense strand
uagcugaggacuugaagga

SEQ ID NO: 1337184 - RNA, 19 nt, Homo sapiens
  misc_RNA (1)...(19): siRNA sense strand
gaagugcccacccucaaac

SEQ ID NO: 1337185 - RNA, 19 nt, Homo sapiens
  misc_RNA (1)...(19): siRNA sense strand
gguggcagccuggacauga

SEQ ID NO: 1337186 - RNA, 19 nt, Homo sapiens
  misc_RNA (1)...(19): siRNA sense strand
caauaccuacuaugcaaug

SEQ ID NO: 1337187 - RNA, 19 nt, Homo sapiens
  misc_RNA (1)...(19): siRNA sense strand
acaucaagaucgcugacuu

SEQ ID NO: 1337188 - RNA, 19 nt, Homo sapiens
  misc_RNA (1)...(19): siRNA sense strand
ggaucguggugccggaaau

SEQ ID NO: 1337189 - RNA, 19 nt, Homo sapiens
  misc_RNA (1)...(19): siRNA sense strand
aaguuggccuacaaugaaa

SEQ ID NO: 1337190 - RNA, 19 nt, Homo sapiens
  misc_RNA (1)...(19): siRNA sense strand
gaagaccaugauacguaaa

SEQ ID NO: 1337191 - RNA, 19 nt, Homo sapiens
  misc_RNA (1)...(19): siRNA sense strand
cugaagaccaggcccguuu

SEQ ID NO: 1337192 - RNA, 19 nt, Homo sapiens
  misc_RNA (1)...(19): siRNA sense strand
guggcagccuggacaugaa

SEQ ID NO: 1337193 - RNA, 19 nt, Homo sapiens
  misc_RNA (1)...(19): siRNA sense strand
ugacaauaccuacuaugca

SEQ ID NO: 1337194 - RNA, 19 nt, Homo sapiens
  misc_RNA (1)...(19): siRNA sense strand
gcaagcugucucugcaaga

SEQ ID NO: 1337195 - RNA, 19 nt, Homo sapiens
  misc_RNA (1)...(19): siRNA sense strand
gaccugaucacccguaugc

SEQ ID NO: 1337196 - RNA, 19 nt, Homo sapiens
  misc_RNA (1)...(19): siRNA sense strand
acuauacugcuuugucuuu

SEQ ID NO: 1337197 - RNA, 19 nt, Homo sapiens
  misc_RNA (1)...(19): siRNA sense strand
ggcagcagcagcagcgaaa

SEQ ID NO: 1337198 - RNA, 19 nt, Homo sapiens
  misc_RNA (1)...(19): siRNA sense strand
ugugagcaaugaauucaag

SEQ ID NO: 1337199 - RNA, 19 nt, Homo sapiens
  misc_RNA (1)...(19): siRNA sense strand
ugaggaccaucuguacaug

SEQ ID NO: 1337200 - RNA, 19 nt, Homo sapiens
  misc_RNA (1)...(19): siRNA sense strand
gaaggaugaaauuggaaag

SEQ ID NO: 1337201 - RNA, 19 nt, Homo sapiens
  misc_RNA (1)...(19): siRNA sense strand
auacguaaacgcuccuuug

SEQ ID NO: 1337202 - RNA, 19 nt, Homo sapiens
  misc_RNA (1)...(19): siRNA sense strand
caaugaggaccaucuguac

SEQ ID NO: 1337203 - RNA, 19 nt, Homo sapiens
  misc_RNA (1)...(19): siRNA sense strand
uaccuacuaugcaaugaag

SEQ ID NO: 1337204 - RNA, 19 nt, Homo sapiens
  misc_RNA (1)...(19): siRNA sense strand
ggacgagcggaucaugugu

SEQ ID NO: 1337205 - RNA, 19 nt, Homo sapiens
  misc_RNA (1)...(19): siRNA sense strand
cuauacugcuuugucuuug

SEQ ID NO: 1337206 - RNA, 19 nt, Homo sapiens
  misc_RNA (1)...(19): siRNA sense strand
gugacacuauacugcuuug

SEQ ID NO: 1337207 - RNA, 19 nt, Homo sapiens
  misc_RNA (1)...(19): siRNA sense strand
ugacuuuggugugagcaau

SEQ ID NO: 1337208 - RNA, 19 nt, Homo sapiens
  misc_RNA (1)...(19): siRNA sense strand
ggugugagcaaugaauuca

SEQ ID NO: 1337209 - RNA, 19 nt, Homo sapiens
  misc_RNA (1)...(19): siRNA sense strand
cauggaguccuucauugug

SEQ ID NO: 1337210 - RNA, 19 nt, Homo sapiens
  misc_RNA (1)...(19): siRNA sense strand
gaagaccaggcccguuucu

SEQ ID NO: 1337211 - RNA, 19 nt, Homo sapiens
  misc_RNA (1)...(19): siRNA sense strand
gacgagcggaucauguguu

SEQ ID NO: 1337212 - RNA, 19 nt, Homo sapiens
  misc_RNA (1)...(19): siRNA sense strand
ugucagcgccuggaaacuu

SEQ ID NO: 1337213 - RNA, 19 nt, Homo sapiens
  misc_RNA (1)...(19): siRNA sense strand
gauacguaaacgcuccuuu

SEQ ID NO: 1337214 - RNA, 19 nt, Homo sapiens
  misc_RNA (1)...(19): siRNA sense strand
caucgaguacuuacacuac

SEQ ID NO: 1337215 - RNA, 19 nt, Homo sapiens
  misc_RNA (1)...(19): siRNA sense strand
ucacccguaugcuggacaa

SEQ ID NO: 1337216 - RNA, 19 nt, Homo sapiens
  misc_RNA (1)...(19): siRNA sense strand
cgacauagcugaggacuug

SEQ ID NO: 1337217 - RNA, 19 nt, Homo sapiens
  misc_RNA (1)...(19): siRNA sense strand
gacaauaccuacuaugcaa

SEQ ID NO: 1337218 - RNA, 19 nt, Homo sapiens
  misc_RNA (1)...(19): siRNA sense strand
gggaaggccuuggauguuu

SEQ ID NO: 1337219 - RNA, 19 nt, Homo sapiens
  misc_RNA (1)...(19): siRNA sense strand
caagaucgcugacuuuggu

SEQ ID NO: 1337220 - RNA, 19 nt, Homo sapiens
  misc_RNA (1)...(19): siRNA sense strand
gaaauugccauccucaaga

SEQ ID NO: 1337221 - RNA, 19 nt, Homo sapiens
  misc_RNA (1)...(19): siRNA sense strand
ugaagaccaugauacguaa

SEQ ID NO: 1337222 - RNA, 19 nt, Homo sapiens
  misc_RNA (1)...(19): siRNA sense strand
ucaaaccacucucugaaga

SEQ ID NO: 1337223 - RNA, 19 nt, Homo sapiens
  misc_RNA (1)...(19): siRNA sense strand
caaguuggccuacaaugaa

SEQ ID NO: 1337224 - RNA, 19 nt, Homo sapiens
  misc_RNA (1)...(19): siRNA sense strand
caaugaaggugcuguccaa

SEQ ID NO: 1337225 - RNA, 19 nt, Homo sapiens
  misc_RNA (1)...(19): siRNA sense strand
acaguaagaucaagaguca

SEQ ID NO: 1337226 - RNA, 19 nt, Homo sapiens
  misc_RNA (1)...(19): siRNA sense strand
ggaaggccuuggauguuug

SEQ ID NO: 1337227 - RNA, 19 nt, Homo sapiens
  misc_RNA (1)...(19): siRNA sense strand
ucaaaggcaucgaguacuu

SEQ ID NO: 1337228 - RNA, 19 nt, Homo sapiens
  misc_RNA (1)...(19): siRNA sense strand
gagcagguguaccaggaaa

SEQ ID NO: 1337229 - RNA, 19 nt, Homo sapiens
  misc_RNA (1)...(19): siRNA sense strand
gugaagaccaugauacgua

SEQ ID NO: 1337230 - RNA, 19 nt, Homo sapiens
  misc_RNA (1)...(19): siRNA sense strand
ggaagugcccacccucaaa

SEQ ID NO: 1337231 - RNA, 19 nt, Homo sapiens
  misc_RNA (1)...(19): siRNA sense strand
ccaaugaggaccaucugua

SEQ ID NO: 1337232 - RNA, 19 nt, Homo sapiens
  misc_RNA (1)...(19): siRNA sense strand
gaucaaaggcaucgaguac

SEQ ID NO: 1337233 - RNA, 19 nt, Homo sapiens
  misc_RNA (1)...(19): siRNA sense strand
caaaggcaucgaguacuua

SEQ ID NO: 1337234 - RNA, 19 nt, Homo sapiens
  misc_RNA (1)...(19): siRNA sense strand
ggaaauugccauccucaag

SEQ ID NO: 1337235 - RNA, 19 nt, Homo sapiens
  misc_RNA (1)...(19): siRNA sense strand
aguauacccugaaggauga

SEQ ID NO: 1337236 - RNA, 19 nt, Homo sapiens
  misc_RNA (1)...(19): siRNA sense strand
ggaggaacgcucacuguca

SEQ ID NO: 1337237 - RNA, 19 nt, Homo sapiens
  misc_RNA (1)...(19): siRNA sense strand
ggcauggaguccuucauug

SEQ ID NO: 1337238 - RNA, 19 nt, Homo sapiens
  misc_RNA (1)...(19): siRNA sense strand
aaauugccauccucaagaa

SEQ ID NO: 1337239 - RNA, 19 nt, Homo sapiens
  misc_RNA (1)...(19): siRNA sense strand
gggcauggaguccuucauu

SEQ ID NO: 1337240 - RNA, 19 nt, Homo sapiens
  misc_RNA (1)...(19): siRNA sense strand
ccugaaggaugaaauugga

SEQ ID NO: 1337241 - RNA, 19 nt, Homo sapiens
  misc_RNA (1)...(19): siRNA sense strand
guacuuacacuaccagaag

SEQ ID NO: 1337242 - RNA, 19 nt, Homo sapiens
  misc_RNA (1)...(19): siRNA sense strand
ucaaguuggccuacaauga

SEQ ID NO: 1337243 - RNA, 19 nt, Homo sapiens
  misc_RNA (1)...(19): siRNA sense strand
ccuauggugucgucaaguu

SEQ ID NO: 1337244 - RNA, 19 nt, Homo sapiens
  misc_RNA (1)...(19): siRNA sense strand
cauccaccgugacaucaaa

SEQ ID NO: 1337245 - RNA, 19 nt, Homo sapiens
  misc_RNA (1)...(19): siRNA sense strand
gagcggaucauguguuuac

SEQ ID NO: 1337246 - RNA, 19 nt, Homo sapiens
  misc_RNA (1)...(19): siRNA sense strand
gcagguguaccaggaaauu

SEQ ID NO: 1337247 - RNA, 19 nt, Homo sapiens
  misc_RNA (1)...(19): siRNA sense strand
caucaagaucgcugacuuu

SEQ ID NO: 1337248 - RNA, 19 nt, Homo sapiens
  misc_RNA (1)...(19): siRNA sense strand
gaucauccaccgugacauc

SEQ ID NO: 1337249 - RNA, 19 nt, Homo sapiens
  misc_RNA (1)...(19): siRNA sense strand
gcauggaguccuucauugu

SEQ ID NO: 1337250 - RNA, 19 nt, Homo sapiens
  misc_RNA (1)...(19): siRNA sense strand
gugacgcgcuccucuccaa

SEQ ID NO: 1337251 - RNA, 19 nt, Homo sapiens
  misc_RNA (1)...(19): siRNA sense strand
acgagcggaucauguguuu

SEQ ID NO: 1337252 - RNA, 19 nt, Homo sapiens
  misc_RNA (1)...(19): siRNA sense strand
acacuauacugcuuugucu

SEQ ID NO: 1337253 - RNA, 19 nt, Homo sapiens
  misc_RNA (1)...(19): siRNA sense strand
ugguggagguccuggauga

SEQ ID NO: 1337254 - RNA, 19 nt, Homo sapiens
  misc_RNA (1)...(19): siRNA sense strand
gucagcgccuggaaacuug

SEQ ID NO: 1337255 - RNA, 19 nt, Homo sapiens
  misc_RNA (1)...(19): siRNA sense strand
ggacuugaaggaccugauc

SEQ ID NO: 1337256 - RNA, 19 nt, Homo sapiens
  misc_RNA (1)...(19): siRNA sense strand
guacaugguguucgaacug

SEQ ID NO: 1337257 - RNA, 19 nt, Homo sapiens
  misc_RNA (1)...(19): siRNA sense strand
ggccgacaguggagucuca

SEQ ID NO: 1337258 - RNA, 19 nt, Homo sapiens
  misc_RNA (1)...(19): siRNA sense strand
ccucaaaccacucucugaa

SEQ ID NO: 1337259 - RNA, 19 nt, Homo sapiens
  misc_RNA (1)...(19): siRNA sense strand
ccaggcccguuucuacuuc

SEQ ID NO: 1337260 - RNA, 19 nt, Homo sapiens
  misc_RNA (1)...(19): siRNA sense strand
cccguaugcuggacaagaa

SEQ ID NO: 1337261 - RNA, 19 nt, Homo sapiens
  misc_RNA (1)...(19): siRNA sense strand
gcaucgaguacuuacacua

SEQ ID NO: 1337262 - RNA, 19 nt, Homo sapiens
  misc_RNA (1)...(19): siRNA sense strand
ugaaggaugaaauuggaaa

SEQ ID NO: 1337263 - RNA, 19 nt, Homo sapiens
  misc_RNA (1)...(19): siRNA sense strand
uagcugaggacuugaagga

SEQ ID NO: 1337264 - RNA, 19 nt, Homo sapiens
  misc_RNA (1)...(19): siRNA sense strand
gaagugcccacccucaaac

SEQ ID NO: 1337265 - RNA, 19 nt, Homo sapiens
  misc_RNA (1)...(19): siRNA sense strand
gguggcagccuggacauga

SEQ ID NO: 1337266 - RNA, 19 nt, Homo sapiens
  misc_RNA (1)...(19): siRNA sense strand
caauaccuacuaugcaaug

SEQ ID NO: 1337267 - RNA, 19 nt, Homo sapiens
  misc_RNA (1)...(19): siRNA sense strand
acaucaagaucgcugacuu

SEQ ID NO: 1337268 - RNA, 19 nt, Homo sapiens
  misc_RNA (1)...(19): siRNA sense strand
ggaucguggugccggaaau

SEQ ID NO: 1337269 - RNA, 19 nt, Homo sapiens
  misc_RNA (1)...(19): siRNA sense strand
aaguuggccuacaaugaaa

SEQ ID NO: 1337270 - RNA, 19 nt, Homo sapiens
  misc_RNA (1)...(19): siRNA sense strand
gaagaccaugauacguaaa

SEQ ID NO: 1337271 - RNA, 19 nt, Homo sapiens
  misc_RNA (1)...(19): siRNA sense strand
cugaagaccaggcccguuu

SEQ ID NO: 1337272 - RNA, 19 nt, Homo sapiens
  misc_RNA (1)...(19): siRNA sense strand
guggcagccuggacaugaa

SEQ ID NO: 1337273 - RNA, 19 nt, Homo sapiens
  misc_RNA (1)...(19): siRNA sense strand
ugacaauaccuacuaugca

SEQ ID NO: 1337274 - RNA, 19 nt, Homo sapiens
  misc_RNA (1)...(19): siRNA sense strand
gcaagcugucucugcaaga

SEQ ID NO: 1337275 - RNA, 19 nt, Homo sapiens
  misc_RNA (1)...(19): siRNA sense strand
gaccugaucacccguaugc

SEQ ID NO: 1337276 - RNA, 19 nt, Homo sapiens
  misc_RNA (1)...(19): siRNA sense strand
acuauacugcuuugucuuu

SEQ ID NO: 1337277 - RNA, 19 nt, Homo sapiens
  misc_RNA (1)...(19): siRNA sense strand
ggcagcagcagcagcgaaa

SEQ ID NO: 1337278 - RNA, 19 nt, Homo sapiens
  misc_RNA (1)...(19): siRNA sense strand
ugugagcaaugaauucaag

SEQ ID NO: 1337279 - RNA, 19 nt, Homo sapiens
  misc_RNA (1)...(19): siRNA sense strand
ugaggaccaucuguacaug

SEQ ID NO: 1337280 - RNA, 19 nt, Homo sapiens
  misc_RNA (1)...(19): siRNA sense strand
gaaggaugaaauuggaaag

SEQ ID NO: 1337281 - RNA, 19 nt, Homo sapiens
  misc_RNA (1)...(19): siRNA sense strand
auacguaaacgcuccuuug

SEQ ID NO: 1337282 - RNA, 19 nt, Homo sapiens
  misc_RNA (1)...(19): siRNA sense strand
caaugaggaccaucuguac

SEQ ID NO: 1337283 - RNA, 19 nt, Homo sapiens
  misc_RNA (1)...(19): siRNA sense strand
uaccuacuaugcaaugaag

SEQ ID NO: 1337284 - RNA, 19 nt, Homo sapiens
  misc_RNA (1)...(19): siRNA sense strand
ggacgagcggaucaugugu

SEQ ID NO: 1337285 - RNA, 19 nt, Homo sapiens
  misc_RNA (1)...(19): siRNA sense strand
cuauacugcuuugucuuug

SEQ ID NO: 1337286 - RNA, 19 nt, Homo sapiens
  misc_RNA (1)...(19): siRNA sense strand
gugacacuauacugcuuug

SEQ ID NO: 1337287 - RNA, 19 nt, Homo sapiens
  misc_RNA (1)...(19): siRNA sense strand
ugacuuuggugugagcaau

SEQ ID NO: 1337288 - RNA, 19 nt, Homo sapiens
  misc_RNA (1)...(19): siRNA sense strand
ggugugagcaaugaauuca

SEQ ID NO: 1337289 - RNA, 19 nt, Homo sapiens
  misc_RNA (1)...(19): siRNA sense strand
cauggaguccuucauugug

SEQ ID NO: 1337290 - RNA, 19 nt, Homo sapiens
  misc_RNA (1)...(19): siRNA sense strand
gaagaccaggcccguuucu

SEQ ID NO: 1337291 - RNA, 19 nt, Homo sapiens
  misc_RNA (1)...(19): siRNA sense strand
gacgagcggaucauguguu

SEQ ID NO: 1337292 - RNA, 19 nt, Homo sapiens
  misc_RNA (1)...(19): siRNA sense strand
ugucagcgccuggaaacuu

SEQ ID NO: 1337293 - RNA, 19 nt, Homo sapiens
  misc_RNA (1)...(19): siRNA sense strand
gauacguaaacgcuccuuu

SEQ ID NO: 1337294 - RNA, 19 nt, Homo sapiens
  misc_RNA (1)...(19): siRNA sense strand
caucgaguacuuacacuac

SEQ ID NO: 1337295 - RNA, 19 nt, Homo sapiens
  misc_RNA (1)...(19): siRNA sense strand
ucacccguaugcuggacaa

SEQ ID NO: 1337296 - RNA, 19 nt, Homo sapiens
  misc_RNA (1)...(19): siRNA sense strand
cgacauagcugaggacuug

SEQ ID NO: 1337297 - RNA, 19 nt, Homo sapiens
  misc_RNA (1)...(19): siRNA sense strand
gacaauaccuacuaugcaa

SEQ ID NO: 1337298 - RNA, 19 nt, Homo sapiens
  misc_RNA (1)...(19): siRNA sense strand
gggaaggccuuggauguuu

SEQ ID NO: 1337299 - RNA, 19 nt, Homo sapiens
  misc_RNA (1)...(19): siRNA sense strand
caagaucgcugacuuuggu

SEQ ID NO: 1337300 - RNA, 19 nt, Homo sapiens
  misc_RNA (1)...(19): siRNA sense strand
gaaauugccauccucaaga

SEQ ID NO: 1337301 - RNA, 19 nt, Homo sapiens
  misc_RNA (1)...(19): siRNA sense strand
ugaagaccaugauacguaa

SEQ ID NO: 1337302 - RNA, 19 nt, Homo sapiens
  misc_RNA (1)...(19): siRNA sense strand
ucaaaccacucucugaaga

SEQ ID NO: 1337303 - RNA, 19 nt, Homo sapiens
  misc_RNA (1)...(19): siRNA sense strand
caaguuggccuacaaugaa

SEQ ID NO: 1337304 - RNA, 19 nt, Homo sapiens
  misc_RNA (1)...(19): siRNA sense strand
caaugaaggugcuguccaa

SEQ ID NO: 1337305 - RNA, 19 nt, Homo sapiens
  misc_RNA (1)...(19): siRNA sense strand
acaguaagaucaagaguca

SEQ ID NO: 1337306 - RNA, 19 nt, Homo sapiens
  misc_RNA (1)...(19): siRNA sense strand
ggaaggccuuggauguuug

SEQ ID NO: 1337307 - RNA, 19 nt, Homo sapiens
  misc_RNA (1)...(19): siRNA sense strand
ucaaaggcaucgaguacuu

SEQ ID NO: 1337308 - RNA, 19 nt, Homo sapiens
  misc_RNA (1)...(19): siRNA sense strand
gagcagguguaccaggaaa

SEQ ID NO: 1337309 - RNA, 19 nt, Homo sapiens
  misc_RNA (1)...(19): siRNA sense strand
gugaagaccaugauacgua

SEQ ID NO: 1337310 - RNA, 19 nt, Homo sapiens
  misc_RNA (1)...(19): siRNA sense strand
ggaagugcccacccucaaa

SEQ ID NO: 1337311 - RNA, 19 nt, Homo sapiens
  misc_RNA (1)...(19): siRNA sense strand
ccaaugaggaccaucugua

SEQ ID NO: 1337312 - RNA, 19 nt, Homo sapiens
  misc_RNA (1)...(19): siRNA sense strand
gaucaaaggcaucgaguac

SEQ ID NO: 1337313 - RNA, 19 nt, Homo sapiens
  misc_RNA (1)...(19): siRNA sense strand
caaaggcaucgaguacuua

SEQ ID NO: 1337314 - RNA, 19 nt, Homo sapiens
  misc_RNA (1)...(19): siRNA sense strand
ggaaauugccauccucaag

SEQ ID NO: 1337315 - RNA, 19 nt, Homo sapiens
  misc_RNA (1)...(19): siRNA sense strand
aguauacccugaaggauga

SEQ ID NO: 1337316 - RNA, 19 nt, Homo sapiens
  misc_RNA (1)...(19): siRNA sense strand
ggaggaacgcucacuguca

SEQ ID NO: 1337317 - RNA, 19 nt, Homo sapiens
  misc_RNA (1)...(19): siRNA sense strand
ggcauggaguccuucauug

SEQ ID NO: 1337318 - RNA, 19 nt, Homo sapiens
  misc_RNA (1)...(19): siRNA sense strand
aaauugccauccucaagaa

SEQ ID NO: 1337319 - RNA, 19 nt, Homo sapiens
  misc_RNA (1)...(19): siRNA sense strand
gggcauggaguccuucauu

SEQ ID NO: 1337320 - RNA, 19 nt, Homo sapiens
  misc_RNA (1)...(19): siRNA sense strand
ccugaaggaugaaauugga

SEQ ID NO: 1337321 - RNA, 19 nt, Homo sapiens
  misc_RNA (1)...(19): siRNA sense strand
guacuuacacuaccagaag

SEQ ID NO: 1337322 - RNA, 19 nt, Homo sapiens
  misc_RNA (1)...(19): siRNA sense strand
ucaaguuggccuacaauga

SEQ ID NO: 1337323 - RNA, 19 nt, Homo sapiens
  misc_RNA (1)...(19): siRNA sense strand
ccuauggugucgucaaguu

SEQ ID NO: 1337324 - RNA, 19 nt, Homo sapiens
  misc_RNA (1)...(19): siRNA sense strand
cauccaccgugacaucaaa

SEQ ID NO: 1337325 - RNA, 19 nt, Homo sapiens
  misc_RNA (1)...(19): siRNA sense strand
gagcggaucauguguuuac

SEQ ID NO: 1337326 - RNA, 19 nt, Homo sapiens
  misc_RNA (1)...(19): siRNA sense strand
gcagguguaccaggaaauu

SEQ ID NO: 1337327 - RNA, 19 nt, Homo sapiens
  misc_RNA (1)...(19): siRNA sense strand
caucaagaucgcugacuuu

SEQ ID NO: 1337328 - RNA, 19 nt, Homo sapiens
  misc_RNA (1)...(19): siRNA sense strand
gaucauccaccgugacauc

SEQ ID NO: 1337329 - RNA, 19 nt, Homo sapiens
  misc_RNA (1)...(19): siRNA sense strand
gcauggaguccuucauugu

SEQ ID NO: 1337330 - RNA, 19 nt, Homo sapiens
  misc_RNA (1)...(19): siRNA sense strand
gugacgcgcuccucuccaa

SEQ ID NO: 1337331 - RNA, 19 nt, Homo sapiens
  misc_RNA (1)...(19): siRNA sense strand
acgagcggaucauguguuu

SEQ ID NO: 1337332 - RNA, 19 nt, Homo sapiens
  misc_RNA (1)...(19): siRNA sense strand
acacuauacugcuuugucu

SEQ ID NO: 1337333 - RNA, 19 nt, Homo sapiens
  misc_RNA (1)...(19): siRNA sense strand
ugguggagguccuggauga

SEQ ID NO: 1337334 - RNA, 19 nt, Homo sapiens
  misc_RNA (1)...(19): siRNA sense strand
gucagcgccuggaaacuug

SEQ ID NO: 1337335 - RNA, 19 nt, Homo sapiens
  misc_RNA (1)...(19): siRNA sense strand
ggacuugaaggaccugauc

SEQ ID NO: 1337336 - RNA, 19 nt, Homo sapiens
  misc_RNA (1)...(19): siRNA sense strand
guacaugguguucgaacug

SEQ ID NO: 1337337 - RNA, 19 nt, Homo sapiens
  misc_RNA (1)...(19): siRNA sense strand
ggccgacaguggagucuca

SEQ ID NO: 1337338 - RNA, 19 nt, Homo sapiens
  misc_RNA (1)...(19): siRNA sense strand
ccucaaaccacucucugaa

SEQ ID NO: 1337339 - RNA, 19 nt, Homo sapiens
  misc_RNA (1)...(19): siRNA sense strand
ccaggcccguuucuacuuc

SEQ ID NO: 1337340 - RNA, 19 nt, Homo sapiens
  misc_RNA (1)...(19): siRNA sense strand
cccguaugcuggacaagaa

SEQ ID NO: 1337341 - RNA, 19 nt, Homo sapiens
  misc_RNA (1)...(19): siRNA sense strand
gcaucgaguacuuacacua

SEQ ID NO: 1337342 - RNA, 19 nt, Homo sapiens
  misc_RNA (1)...(19): siRNA sense strand
ugaaggaugaaauuggaaa

SEQ ID NO: 1337343 - RNA, 19 nt, Homo sapiens
  misc_RNA (1)...(19): siRNA sense strand
uagcugaggacuugaagga

SEQ ID NO: 1337344 - RNA, 19 nt, Homo sapiens
  misc_RNA (1)...(19): siRNA sense strand
gaagugcccacccucaaac

SEQ ID NO: 1337345 - RNA, 19 nt, Homo sapiens
  misc_RNA (1)...(19): siRNA sense strand
gguggcagccuggacauga

SEQ ID NO: 1337346 - RNA, 19 nt, Homo sapiens
  misc_RNA (1)...(19): siRNA sense strand
caauaccuacuaugcaaug

SEQ ID NO: 1337347 - RNA, 19 nt, Homo sapiens
  misc_RNA (1)...(19): siRNA sense strand
acaucaagaucgcugacuu

SEQ ID NO: 1337348 - RNA, 19 nt, Homo sapiens
  misc_RNA (1)...(19): siRNA sense strand
ggaucguggugccggaaau

SEQ ID NO: 1337349 - RNA, 19 nt, Homo sapiens
  misc_RNA (1)...(19): siRNA sense strand
aaguuggccuacaaugaaa

SEQ ID NO: 1337350 - RNA, 19 nt, Homo sapiens
  misc_RNA (1)...(19): siRNA sense strand
gaagaccaugauacguaaa

SEQ ID NO: 1337351 - RNA, 19 nt, Homo sapiens
  misc_RNA (1)...(19): siRNA sense strand
cugaagaccaggcccguuu

SEQ ID NO: 1337352 - RNA, 19 nt, Homo sapiens
  misc_RNA (1)...(19): siRNA sense strand
guggcagccuggacaugaa

SEQ ID NO: 1337353 - RNA, 19 nt, Homo sapiens
  misc_RNA (1)...(19): siRNA sense strand
ugacaauaccuacuaugca

SEQ ID NO: 1337354 - RNA, 19 nt, Homo sapiens
  misc_RNA (1)...(19): siRNA sense strand
gcaagcugucucugcaaga

SEQ ID NO: 1337355 - RNA, 19 nt, Homo sapiens
  misc_RNA (1)...(19): siRNA sense strand
gaccugaucacccguaugc

SEQ ID NO: 1337356 - RNA, 19 nt, Homo sapiens
  misc_RNA (1)...(19): siRNA sense strand
acuauacugcuuugucuuu

SEQ ID NO: 1337357 - RNA, 19 nt, Homo sapiens
  misc_RNA (1)...(19): siRNA sense strand
ggcagcagcagcagcgaaa

SEQ ID NO: 1337358 - RNA, 19 nt, Homo sapiens
  misc_RNA (1)...(19): siRNA sense strand
ugugagcaaugaauucaag

SEQ ID NO: 1337359 - RNA, 19 nt, Homo sapiens
  misc_RNA (1)...(19): siRNA sense strand
ugaggaccaucuguacaug

SEQ ID NO: 1337360 - RNA, 19 nt, Homo sapiens
  misc_RNA (1)...(19): siRNA sense strand
gaaggaugaaauuggaaag

SEQ ID NO: 1337361 - RNA, 19 nt, Homo sapiens
  misc_RNA (1)...(19): siRNA sense strand
auacguaaacgcuccuuug

SEQ ID NO: 1337362 - RNA, 19 nt, Homo sapiens
  misc_RNA (1)...(19): siRNA sense strand
caaugaggaccaucuguac

SEQ ID NO: 1337363 - RNA, 19 nt, Homo sapiens
  misc_RNA (1)...(19): siRNA sense strand
uaccuacuaugcaaugaag

SEQ ID NO: 1337364 - RNA, 19 nt, Homo sapiens
  misc_RNA (1)...(19): siRNA sense strand
ggacgagcggaucaugugu

SEQ ID NO: 1337365 - RNA, 19 nt, Homo sapiens
  misc_RNA (1)...(19): siRNA sense strand
cuauacugcuuugucuuug

SEQ ID NO: 1337366 - RNA, 19 nt, Homo sapiens
  misc_RNA (1)...(19): siRNA sense strand
gugacacuauacugcuuug

SEQ ID NO: 1337367 - RNA, 19 nt, Homo sapiens
  misc_RNA (1)...(19): siRNA sense strand
ugacuuuggugugagcaau

SEQ ID NO: 1337368 - RNA, 19 nt, Homo sapiens
  misc_RNA (1)...(19): siRNA sense strand
ggugugagcaaugaauuca

SEQ ID NO: 1337369 - RNA, 19 nt, Homo sapiens
  misc_RNA (1)...(19): siRNA sense strand
cauggaguccuucauugug

SEQ ID NO: 1337370 - RNA, 19 nt, Homo sapiens
  misc_RNA (1)...(19): siRNA sense strand
gaagaccaggcccguuucu

SEQ ID NO: 1337371 - RNA, 19 nt, Homo sapiens
  misc_RNA (1)...(19): siRNA sense strand
gacgagcggaucauguguu

SEQ ID NO: 1337372 - RNA, 19 nt, Homo sapiens
  misc_RNA (1)...(19): siRNA sense strand
ugucagcgccuggaaacuu

SEQ ID NO: 1337373 - RNA, 19 nt, Homo sapiens
  misc_RNA (1)...(19): siRNA sense strand
gauacguaaacgcuccuuu

SEQ ID NO: 1337374 - RNA, 19 nt, Homo sapiens
  misc_RNA (1)...(19): siRNA sense strand
caucgaguacuuacacuac

SEQ ID NO: 1337375 - RNA, 19 nt, Homo sapiens
  misc_RNA (1)...(19): siRNA sense strand
ucacccguaugcuggacaa

SEQ ID NO: 1337376 - RNA, 19 nt, Homo sapiens
  misc_RNA (1)...(19): siRNA sense strand
cgacauagcugaggacuug

SEQ ID NO: 1337377 - RNA, 19 nt, Homo sapiens
  misc_RNA (1)...(19): siRNA sense strand
gacaauaccuacuaugcaa

SEQ ID NO: 1337378 - RNA, 19 nt, Homo sapiens
  misc_RNA (1)...(19): siRNA sense strand
gggaaggccuuggauguuu

SEQ ID NO: 1337379 - RNA, 19 nt, Homo sapiens
  misc_RNA (1)...(19): siRNA sense strand
caagaucgcugacuuuggu

SEQ ID NO: 1337380 - RNA, 19 nt, Homo sapiens
  misc_RNA (1)...(19): siRNA sense strand
gaaauugccauccucaaga

SEQ ID NO: 1337381 - RNA, 19 nt, Homo sapiens
  misc_RNA (1)...(19): siRNA sense strand
ugaagaccaugauacguaa

SEQ ID NO: 1337382 - RNA, 19 nt, Homo sapiens
  misc_RNA (1)...(19): siRNA sense strand
ucaaaccacucucugaaga

SEQ ID NO: 1337383 - RNA, 19 nt, Homo sapiens
  misc_RNA (1)...(19): siRNA sense strand
caaguuggccuacaaugaa

SEQ ID NO: 1337384 - RNA, 19 nt, Homo sapiens
  misc_RNA (1)...(19): siRNA sense strand
caaugaaggugcuguccaa

SEQ ID NO: 1337385 - RNA, 19 nt, Homo sapiens
  misc_RNA (1)...(19): siRNA sense strand
acaguaagaucaagaguca

SEQ ID NO: 1337386 - RNA, 19 nt, Homo sapiens
  misc_RNA (1)...(19): siRNA sense strand
ggaaggccuuggauguuug

SEQ ID NO: 1337387 - RNA, 19 nt, Homo sapiens
  misc_RNA (1)...(19): siRNA sense strand
ucaaaggcaucgaguacuu

SEQ ID NO: 1337388 - RNA, 19 nt, Homo sapiens
  misc_RNA (1)...(19): siRNA sense strand
gagcagguguaccaggaaa

SEQ ID NO: 1337389 - RNA, 19 nt, Homo sapiens
  misc_RNA (1)...(19): siRNA sense strand
gugaagaccaugauacgua

SEQ ID NO: 1337390 - RNA, 19 nt, Homo sapiens
  misc_RNA (1)...(19): siRNA sense strand
ggaagugcccacccucaaa

SEQ ID NO: 1337391 - RNA, 19 nt, Homo sapiens
  misc_RNA (1)...(19): siRNA sense strand
ccaaugaggaccaucugua

SEQ ID NO: 1337392 - RNA, 19 nt, Homo sapiens
  misc_RNA (1)...(19): siRNA sense strand
gaucaaaggcaucgaguac

SEQ ID NO: 1337393 - RNA, 19 nt, Homo sapiens
  misc_RNA (1)...(19): siRNA sense strand
caaaggcaucgaguacuua

SEQ ID NO: 1337394 - RNA, 19 nt, Homo sapiens
  misc_RNA (1)...(19): siRNA sense strand
ggaaauugccauccucaag

SEQ ID NO: 1337395 - RNA, 19 nt, Homo sapiens
  misc_RNA (1)...(19): siRNA sense strand
aguauacccugaaggauga

SEQ ID NO: 1337396 - RNA, 19 nt, Homo sapiens
  misc_RNA (1)...(19): siRNA sense strand
ggaggaacgcucacuguca

SEQ ID NO: 1337397 - RNA, 19 nt, Homo sapiens
  misc_RNA (1)...(19): siRNA sense strand
ggcauggaguccuucauug

SEQ ID NO: 1337398 - RNA, 19 nt, Homo sapiens
  misc_RNA (1)...(19): siRNA sense strand
aaauugccauccucaagaa

SEQ ID NO: 1337399 - RNA, 19 nt, Homo sapiens
  misc_RNA (1)...(19): siRNA sense strand
gggcauggaguccuucauu

SEQ ID NO: 1337400 - RNA, 19 nt, Homo sapiens
  misc_RNA (1)...(19): siRNA sense strand
ccugaaggaugaaauugga

SEQ ID NO: 1337401 - RNA, 19 nt, Homo sapiens
  misc_RNA (1)...(19): siRNA sense strand
guacuuacacuaccagaag

SEQ ID NO: 1337402 - RNA, 19 nt, Homo sapiens
  misc_RNA (1)...(19): siRNA sense strand
ucaaguuggccuacaauga

SEQ ID NO: 1337403 - RNA, 19 nt, Homo sapiens
  misc_RNA (1)...(19): siRNA sense strand
ccuauggugucgucaaguu

SEQ ID NO: 1337404 - RNA, 19 nt, Homo sapiens
  misc_RNA (1)...(19): siRNA sense strand
cauccaccgugacaucaaa

SEQ ID NO: 1337405 - RNA, 19 nt, Homo sapiens
  misc_RNA (1)...(19): siRNA sense strand
gagcggaucauguguuuac

SEQ ID NO: 1337406 - RNA, 19 nt, Homo sapiens
  misc_RNA (1)...(19): siRNA sense strand
gcagguguaccaggaaauu

SEQ ID NO: 1337407 - RNA, 19 nt, Homo sapiens
  misc_RNA (1)...(19): siRNA sense strand
caucaagaucgcugacuuu

SEQ ID NO: 1337408 - RNA, 19 nt, Homo sapiens
  misc_RNA (1)...(19): siRNA sense strand
gaucauccaccgugacauc

SEQ ID NO: 1337409 - RNA, 19 nt, Homo sapiens
  misc_RNA (1)...(19): siRNA sense strand
gcauggaguccuucauugu

SEQ ID NO: 1337410 - RNA, 19 nt, Homo sapiens
  misc_RNA (1)...(19): siRNA sense strand
gugacgcgcuccucuccaa

SEQ ID NO: 1337411 - RNA, 19 nt, Homo sapiens
  misc_RNA (1)...(19): siRNA sense strand
acgagcggaucauguguuu

SEQ ID NO: 1337412 - RNA, 19 nt, Homo sapiens
  misc_RNA (1)...(19): siRNA sense strand
acacuauacugcuuugucu

SEQ ID NO: 1337413 - RNA, 19 nt, Homo sapiens
  misc_RNA (1)...(19): siRNA sense strand
ugguggagguccuggauga

SEQ ID NO: 1337414 - RNA, 19 nt, Homo sapiens
  misc_RNA (1)...(19): siRNA sense strand
gucagcgccuggaaacuug

SEQ ID NO: 1337415 - RNA, 19 nt, Homo sapiens
  misc_RNA (1)...(19): siRNA sense strand
ggacuugaaggaccugauc

SEQ ID NO: 1337416 - RNA, 19 nt, Homo sapiens
  misc_RNA (1)...(19): siRNA sense strand
guacaugguguucgaacug

SEQ ID NO: 1337417 - RNA, 19 nt, Homo sapiens
  misc_RNA (1)...(19): siRNA sense strand
ggccgacaguggagucuca

SEQ ID NO: 1337418 - RNA, 19 nt, Homo sapiens
  misc_RNA (1)...(19): siRNA sense strand
ccucaaaccacucucugaa

SEQ ID NO: 1337419 - RNA, 19 nt, Homo sapiens
  misc_RNA (1)...(19): siRNA sense strand
ccaggcccguuucuacuuc

SEQ ID NO: 1337420 - RNA, 19 nt, Homo sapiens
  misc_RNA (1)...(19): siRNA sense strand
cccguaugcuggacaagaa

SEQ ID NO: 1337421 - RNA, 19 nt, Homo sapiens
  misc_RNA (1)...(19): siRNA sense strand
gcaucgaguacuuacacua

SEQ ID NO: 1337422 - RNA, 19 nt, Homo sapiens
  misc_RNA (1)...(19): siRNA sense strand
ugaaggaugaaauuggaaa

SEQ ID NO: 1337423 - RNA, 19 nt, Homo sapiens
  misc_RNA (1)...(19): siRNA sense strand
uagcugaggacuugaagga

SEQ ID NO: 1337424 - RNA, 19 nt, Homo sapiens
  misc_RNA (1)...(19): siRNA sense strand
gaagugcccacccucaaac

SEQ ID NO: 1337425 - RNA, 19 nt, Homo sapiens
  misc_RNA (1)...(19): siRNA sense strand
gguggcagccuggacauga

SEQ ID NO: 1337426 - RNA, 19 nt, Homo sapiens
  misc_RNA (1)...(19): siRNA sense strand
caauaccuacuaugcaaug

SEQ ID NO: 1337427 - RNA, 19 nt, Homo sapiens
  misc_RNA (1)...(19): siRNA sense strand
acaucaagaucgcugacuu

SEQ ID NO: 1337428 - RNA, 19 nt, Homo sapiens
  misc_RNA (1)...(19): siRNA sense strand
ggaucguggugccggaaau

SEQ ID NO: 1337429 - RNA, 19 nt, Homo sapiens
  misc_RNA (1)...(19): siRNA sense strand
aaguuggccuacaaugaaa

SEQ ID NO: 1337430 - RNA, 19 nt, Homo sapiens
  misc_RNA (1)...(19): siRNA sense strand
gaagaccaugauacguaaa

SEQ ID NO: 1337431 - RNA, 19 nt, Homo sapiens
  misc_RNA (1)...(19): siRNA sense strand
cugaagaccaggcccguuu

SEQ ID NO: 1337432 - RNA, 19 nt, Homo sapiens
  misc_RNA (1)...(19): siRNA sense strand
guggcagccuggacaugaa

SEQ ID NO: 1337433 - RNA, 19 nt, Homo sapiens
  misc_RNA (1)...(19): siRNA sense strand
ugacaauaccuacuaugca

SEQ ID NO: 1337434 - RNA, 19 nt, Homo sapiens
  misc_RNA (1)...(19): siRNA sense strand
gcaagcugucucugcaaga

SEQ ID NO: 1337435 - RNA, 19 nt, Homo sapiens
  misc_RNA (1)...(19): siRNA sense strand
gaccugaucacccguaugc

SEQ ID NO: 1337436 - RNA, 19 nt, Homo sapiens
  misc_RNA (1)...(19): siRNA sense strand
acuauacugcuuugucuuu

SEQ ID NO: 1337437 - RNA, 19 nt, Homo sapiens
  misc_RNA (1)...(19): siRNA sense strand
ggcagcagcagcagcgaaa

SEQ ID NO: 1337438 - RNA, 19 nt, Homo sapiens
  misc_RNA (1)...(19): siRNA sense strand
ugugagcaaugaauucaag

SEQ ID NO: 1337439 - RNA, 19 nt, Homo sapiens
  misc_RNA (1)...(19): siRNA sense strand
ugaggaccaucuguacaug

SEQ ID NO: 1337440 - RNA, 19 nt, Homo sapiens
  misc_RNA (1)...(19): siRNA sense strand
gaaggaugaaauuggaaag

SEQ ID NO: 1337441 - RNA, 19 nt, Homo sapiens
  misc_RNA (1)...(19): siRNA sense strand
auacguaaacgcuccuuug

SEQ ID NO: 1337442 - RNA, 19 nt, Homo sapiens
  misc_RNA (1)...(19): siRNA sense strand
caaugaggaccaucuguac

SEQ ID NO: 1337443 - RNA, 19 nt, Homo sapiens
  misc_RNA (1)...(19): siRNA sense strand
uaccuacuaugcaaugaag

SEQ ID NO: 1337444 - RNA, 19 nt, Homo sapiens
  misc_RNA (1)...(19): siRNA sense strand
ggacgagcggaucaugugu

SEQ ID NO: 1337445 - RNA, 19 nt, Homo sapiens
  misc_RNA (1)...(19): siRNA sense strand
cuauacugcuuugucuuug

SEQ ID NO: 1337446 - RNA, 19 nt, Homo sapiens
  misc_RNA (1)...(19): siRNA sense strand
gugacacuauacugcuuug

SEQ ID NO: 1337447 - RNA, 19 nt, Homo sapiens
  misc_RNA (1)...(19): siRNA sense strand
ugacuuuggugugagcaau

SEQ ID NO: 1337448 - RNA, 19 nt, Homo sapiens
  misc_RNA (1)...(19): siRNA sense strand
ggugugagcaaugaauuca

SEQ ID NO: 1337449 - RNA, 19 nt, Homo sapiens
  misc_RNA (1)...(19): siRNA sense strand
cauggaguccuucauugug

SEQ ID NO: 1337450 - RNA, 19 nt, Homo sapiens
  misc_RNA (1)...(19): siRNA sense strand
gaagaccaggcccguuucu

SEQ ID NO: 1337451 - RNA, 19 nt, Homo sapiens
  misc_RNA (1)...(19): siRNA sense strand
gacgagcggaucauguguu

SEQ ID NO: 1337452 - RNA, 19 nt, Homo sapiens
  misc_RNA (1)...(19): siRNA sense strand
ugucagcgccuggaaacuu

SEQ ID NO: 1337453 - RNA, 19 nt, Homo sapiens
  misc_RNA (1)...(19): siRNA sense strand
gauacguaaacgcuccuuu

SEQ ID NO: 1337454 - RNA, 19 nt, Homo sapiens
  misc_RNA (1)...(19): siRNA sense strand
caucgaguacuuacacuac

SEQ ID NO: 1337455 - RNA, 19 nt, Homo sapiens
  misc_RNA (1)...(19): siRNA sense strand
ucacccguaugcuggacaa

SEQ ID NO: 1337456 - RNA, 19 nt, Homo sapiens
  misc_RNA (1)...(19): siRNA sense strand
cgacauagcugaggacuug

SEQ ID NO: 1337457 - RNA, 19 nt, Homo sapiens
  misc_RNA (1)...(19): siRNA sense strand
gacaauaccuacuaugcaa

SEQ ID NO: 1337458 - RNA, 19 nt, Homo sapiens
  misc_RNA (1)...(19): siRNA sense strand
gggaaggccuuggauguuu

SEQ ID NO: 1337459 - RNA, 19 nt, Homo sapiens
  misc_RNA (1)...(19): siRNA sense strand
caagaucgcugacuuuggu

SEQ ID NO: 1337460 - RNA, 19 nt, Homo sapiens
  misc_RNA (1)...(19): siRNA sense strand
gaaauugccauccucaaga

SEQ ID NO: 1337461 - RNA, 19 nt, Homo sapiens
  misc_RNA (1)...(19): siRNA sense strand
ugaagaccaugauacguaa

SEQ ID NO: 1337462 - RNA, 19 nt, Homo sapiens
  misc_RNA (1)...(19): siRNA sense strand
ucaaaccacucucugaaga

SEQ ID NO: 1337463 - RNA, 19 nt, Homo sapiens
  misc_RNA (1)...(19): siRNA sense strand
caaguuggccuacaaugaa

SEQ ID NO: 1337464 - RNA, 19 nt, Homo sapiens
  misc_RNA (1)...(19): siRNA sense strand
caaugaaggugcuguccaa

SEQ ID NO: 1337465 - RNA, 19 nt, Homo sapiens
  misc_RNA (1)...(19): siRNA sense strand
acaguaagaucaagaguca

SEQ ID NO: 1337466 - RNA, 19 nt, Homo sapiens
  misc_RNA (1)...(19): siRNA sense strand
ggaaggccuuggauguuug

SEQ ID NO: 1337467 - RNA, 19 nt, Homo sapiens
  misc_RNA (1)...(19): siRNA sense strand
ucaaaggcaucgaguacuu

SEQ ID NO: 1337468 - RNA, 19 nt, Homo sapiens
  misc_RNA (1)...(19): siRNA sense strand
gagcagguguaccaggaaa

SEQ ID NO: 1337469 - RNA, 19 nt, Homo sapiens
  misc_RNA (1)...(19): siRNA sense strand
gugaagaccaugauacgua

SEQ ID NO: 1337470 - RNA, 19 nt, Homo sapiens
  misc_RNA (1)...(19): siRNA sense strand
ggaagugcccacccucaaa

SEQ ID NO: 1337471 - RNA, 19 nt, Homo sapiens
  misc_RNA (1)...(19): siRNA sense strand
ccaaugaggaccaucugua

SEQ ID NO: 1337472 - RNA, 19 nt, Homo sapiens
  misc_RNA (1)...(19): siRNA sense strand
gaucaaaggcaucgaguac

SEQ ID NO: 1337473 - RNA, 19 nt, Homo sapiens
  misc_RNA (1)...(19): siRNA sense strand
caaaggcaucgaguacuua

SEQ ID NO: 1337474 - RNA, 19 nt, Homo sapiens
  misc_RNA (1)...(19): siRNA sense strand
ggaaauugccauccucaag

SEQ ID NO: 1337475 - RNA, 19 nt, Homo sapiens
  misc_RNA (1)...(19): siRNA sense strand
aguauacccugaaggauga

SEQ ID NO: 1337476 - RNA, 19 nt, Homo sapiens
  misc_RNA (1)...(19): siRNA sense strand
ggaggaacgcucacuguca

SEQ ID NO: 1337477 - RNA, 19 nt, Homo sapiens
  misc_RNA (1)...(19): siRNA sense strand
ggcauggaguccuucauug

SEQ ID NO: 1337478 - RNA, 19 nt, Homo sapiens
  misc_RNA (1)...(19): siRNA sense strand
aaauugccauccucaagaa

SEQ ID NO: 1337479 - RNA, 19 nt, Homo sapiens
  misc_RNA (1)...(19): siRNA sense strand
gggcauggaguccuucauu

SEQ ID NO: 1337480 - RNA, 19 nt, Homo sapiens
  misc_RNA (1)...(19): siRNA sense strand
ccugaaggaugaaauugga

SEQ ID NO: 1337481 - RNA, 19 nt, Homo sapiens
  misc_RNA (1)...(19): siRNA sense strand
guacuuacacuaccagaag

SEQ ID NO: 1337482 - RNA, 19 nt, Homo sapiens
  misc_RNA (1)...(19): siRNA sense strand
ucaaguuggccuacaauga

SEQ ID NO: 1337483 - RNA, 19 nt, Homo sapiens
  misc_RNA (1)...(19): siRNA sense strand
ccuauggugucgucaaguu

SEQ ID NO: 1337484 - RNA, 19 nt, Homo sapiens
  misc_RNA (1)...(19): siRNA sense strand
cauccaccgugacaucaaa

SEQ ID NO: 1337485 - RNA, 19 nt, Homo sapiens
  misc_RNA (1)...(19): siRNA sense strand
gagcggaucauguguuuac

SEQ ID NO: 1337486 - RNA, 19 nt, Homo sapiens
  misc_RNA (1)...(19): siRNA sense strand
gcagguguaccaggaaauu

SEQ ID NO: 1337487 - RNA, 19 nt, Homo sapiens
  misc_RNA (1)...(19): siRNA sense strand
caucaagaucgcugacuuu

SEQ ID NO: 1337488 - RNA, 19 nt, Homo sapiens
  misc_RNA (1)...(19): siRNA sense strand
gaucauccaccgugacauc

SEQ ID NO: 1337489 - RNA, 19 nt, Homo sapiens
  misc_RNA (1)...(19): siRNA sense strand
gcauggaguccuucauugu

SEQ ID NO: 1337490 - RNA, 19 nt, Homo sapiens
  misc_RNA (1)...(19): siRNA sense strand
gugacgcgcuccucuccaa

SEQ ID NO: 1337491 - RNA, 19 nt, Homo sapiens
  misc_RNA (1)...(19): siRNA sense strand
acgagcggaucauguguuu

SEQ ID NO: 1337492 - RNA, 19 nt, Homo sapiens
  misc_RNA (1)...(19): siRNA sense strand
acacuauacugcuuugucu

SEQ ID NO: 1337493 - RNA, 19 nt, Homo sapiens
  misc_RNA (1)...(19): siRNA sense strand
ugguggagguccuggauga

SEQ ID NO: 1337494 - RNA, 19 nt, Homo sapiens
  misc_RNA (1)...(19): siRNA sense strand
gucagcgccuggaaacuug

SEQ ID NO: 1337495 - RNA, 19 nt, Homo sapiens
  misc_RNA (1)...(19): siRNA sense strand
ggacuugaaggaccugauc

SEQ ID NO: 1337496 - RNA, 19 nt, Homo sapiens
  misc_RNA (1)...(19): siRNA sense strand
guacaugguguucgaacug

SEQ ID NO: 1337497 - RNA, 19 nt, Homo sapiens
  misc_RNA (1)...(19): siRNA sense strand
ggccgacaguggagucuca

SEQ ID NO: 1337498 - RNA, 19 nt, Homo sapiens
  misc_RNA (1)...(19): siRNA sense strand
ccucaaaccacucucugaa

SEQ ID NO: 1337499 - RNA, 19 nt, Homo sapiens
  misc_RNA (1)...(19): siRNA sense strand
ccaggcccguuucuacuuc

SEQ ID NO: 1337500 - RNA, 19 nt, Homo sapiens
  misc_RNA (1)...(19): siRNA sense strand
cccguaugcuggacaagaa

SEQ ID NO: 1337501 - RNA, 19 nt, Homo sapiens
  misc_RNA (1)...(19): siRNA sense strand
gcaucgaguacuuacacua

SEQ ID NO: 1337502 - RNA, 19 nt, Homo sapiens
  misc_RNA (1)...(19): siRNA sense strand
ugaaggaugaaauuggaaa

SEQ ID NO: 1337503 - RNA, 19 nt, Homo sapiens
  misc_RNA (1)...(19): siRNA sense strand
uagcugaggacuugaagga

SEQ ID NO: 1337504 - RNA, 19 nt, Homo sapiens
  misc_RNA (1)...(19): siRNA sense strand
gaagugcccacccucaaac

SEQ ID NO: 1337505 - RNA, 19 nt, Homo sapiens
  misc_RNA (1)...(19): siRNA sense strand
gguggcagccuggacauga

SEQ ID NO: 1337506 - RNA, 19 nt, Homo sapiens
  misc_RNA (1)...(19): siRNA sense strand
caauaccuacuaugcaaug

SEQ ID NO: 1337507 - RNA, 19 nt, Homo sapiens
  misc_RNA (1)...(19): siRNA sense strand
acaucaagaucgcugacuu

SEQ ID NO: 1337508 - RNA, 19 nt, Homo sapiens
  misc_RNA (1)...(19): siRNA sense strand
ggaucguggugccggaaau

SEQ ID NO: 1337509 - RNA, 19 nt, Homo sapiens
  misc_RNA (1)...(19): siRNA sense strand
aaguuggccuacaaugaaa

SEQ ID NO: 1337510 - RNA, 19 nt, Homo sapiens
  misc_RNA (1)...(19): siRNA sense strand
gaagaccaugauacguaaa

SEQ ID NO: 1337511 - RNA, 19 nt, Homo sapiens
  misc_RNA (1)...(19): siRNA sense strand
cugaagaccaggcccguuu

SEQ ID NO: 1337512 - RNA, 19 nt, Homo sapiens
  misc_RNA (1)...(19): siRNA sense strand
guggcagccuggacaugaa

SEQ ID NO: 1337513 - RNA, 19 nt, Homo sapiens
  misc_RNA (1)...(19): siRNA sense strand
ugacaauaccuacuaugca

SEQ ID NO: 1337514 - RNA, 19 nt, Homo sapiens
  misc_RNA (1)...(19): siRNA sense strand
gcaagcugucucugcaaga

SEQ ID NO: 1337515 - RNA, 19 nt, Homo sapiens
  misc_RNA (1)...(19): siRNA sense strand
gaccugaucacccguaugc

SEQ ID NO: 1337516 - RNA, 19 nt, Homo sapiens
  misc_RNA (1)...(19): siRNA sense strand
acuauacugcuuugucuuu

SEQ ID NO: 1337517 - RNA, 19 nt, Homo sapiens
  misc_RNA (1)...(19): siRNA sense strand
ggcagcagcagcagcgaaa

SEQ ID NO: 1337518 - RNA, 19 nt, Homo sapiens
  misc_RNA (1)...(19): siRNA sense strand
ugugagcaaugaauucaag

SEQ ID NO: 1337519 - RNA, 19 nt, Homo sapiens
  misc_RNA (1)...(19): siRNA sense strand
ugaggaccaucuguacaug

SEQ ID NO: 1337520 - RNA, 19 nt, Homo sapiens
  misc_RNA (1)...(19): siRNA sense strand
gaaggaugaaauuggaaag

SEQ ID NO: 1337521 - RNA, 19 nt, Homo sapiens
  misc_RNA (1)...(19): siRNA sense strand
auacguaaacgcuccuuug

SEQ ID NO: 1337522 - RNA, 19 nt, Homo sapiens
  misc_RNA (1)...(19): siRNA sense strand
caaugaggaccaucuguac

SEQ ID NO: 1337523 - RNA, 19 nt, Homo sapiens
  misc_RNA (1)...(19): siRNA sense strand
uaccuacuaugcaaugaag

SEQ ID NO: 1337524 - RNA, 19 nt, Homo sapiens
  misc_RNA (1)...(19): siRNA sense strand
ggacgagcggaucaugugu

SEQ ID NO: 1337525 - RNA, 19 nt, Homo sapiens
  misc_RNA (1)...(19): siRNA sense strand
cuauacugcuuugucuuug

SEQ ID NO: 1337526 - RNA, 19 nt, Homo sapiens
  misc_RNA (1)...(19): siRNA sense strand
gugacacuauacugcuuug

SEQ ID NO: 1337527 - RNA, 19 nt, Homo sapiens
  misc_RNA (1)...(19): siRNA sense strand
ugacuuuggugugagcaau

SEQ ID NO: 1337528 - RNA, 19 nt, Homo sapiens
  misc_RNA (1)...(19): siRNA sense strand
ggugugagcaaugaauuca

SEQ ID NO: 1337529 - RNA, 19 nt, Homo sapiens
  misc_RNA (1)...(19): siRNA sense strand
cauggaguccuucauugug

SEQ ID NO: 1337530 - RNA, 19 nt, Homo sapiens
  misc_RNA (1)...(19): siRNA sense strand
gaagaccaggcccguuucu

SEQ ID NO: 1337531 - RNA, 19 nt, Homo sapiens
  misc_RNA (1)...(19): siRNA sense strand
gacgagcggaucauguguu

SEQ ID NO: 1337532 - RNA, 19 nt, Homo sapiens
  misc_RNA (1)...(19): siRNA sense strand
ugucagcgccuggaaacuu

SEQ ID NO: 1337533 - RNA, 19 nt, Homo sapiens
  misc_RNA (1)...(19): siRNA sense strand
gauacguaaacgcuccuuu

SEQ ID NO: 1337534 - RNA, 19 nt, Homo sapiens
  misc_RNA (1)...(19): siRNA sense strand
caucgaguacuuacacuac

SEQ ID NO: 1337535 - RNA, 19 nt, Homo sapiens
  misc_RNA (1)...(19): siRNA sense strand
ucacccguaugcuggacaa

SEQ ID NO: 1337536 - RNA, 19 nt, Homo sapiens
  misc_RNA (1)...(19): siRNA sense strand
cgacauagcugaggacuug

SEQ ID NO: 1337537 - RNA, 19 nt, Homo sapiens
  misc_RNA (1)...(19): siRNA sense strand
gacaauaccuacuaugcaa

SEQ ID NO: 1337538 - RNA, 19 nt, Homo sapiens
  misc_RNA (1)...(19): siRNA sense strand
gggaaggccuuggauguuu

SEQ ID NO: 1337539 - RNA, 19 nt, Homo sapiens
  misc_RNA (1)...(19): siRNA sense strand
caagaucgcugacuuuggu

SEQ ID NO: 1337540 - RNA, 19 nt, Homo sapiens
  misc_RNA (1)...(19): siRNA sense strand
gaaauugccauccucaaga

SEQ ID NO: 1337541 - RNA, 19 nt, Homo sapiens
  misc_RNA (1)...(19): siRNA sense strand
ugaagaccaugauacguaa

SEQ ID NO: 1337542 - RNA, 19 nt, Homo sapiens
  misc_RNA (1)...(19): siRNA sense strand
ucaaaccacucucugaaga

SEQ ID NO: 1337543 - RNA, 19 nt, Homo sapiens
  misc_RNA (1)...(19): siRNA sense strand
caaguuggccuacaaugaa

SEQ ID NO: 1337544 - RNA, 19 nt, Homo sapiens
  misc_RNA (1)...(19): siRNA sense strand
caaugaaggugcuguccaa

SEQ ID NO: 1337545 - RNA, 19 nt, Homo sapiens
  misc_RNA (1)...(19): siRNA sense strand
acaguaagaucaagaguca

SEQ ID NO: 1337546 - RNA, 19 nt, Homo sapiens
  misc_RNA (1)...(19): siRNA sense strand
ggaaggccuuggauguuug

SEQ ID NO: 1337547 - RNA, 19 nt, Homo sapiens
  misc_RNA (1)...(19): siRNA sense strand
ucaaaggcaucgaguacuu

SEQ ID NO: 1337548 - RNA, 19 nt, Homo sapiens
  misc_RNA (1)...(19): siRNA sense strand
gagcagguguaccaggaaa

SEQ ID NO: 1337549 - RNA, 19 nt, Homo sapiens
  misc_RNA (1)...(19): siRNA sense strand
gugaagaccaugauacgua

SEQ ID NO: 1337550 - RNA, 19 nt, Homo sapiens
  misc_RNA (1)...(19): siRNA sense strand
ggaagugcccacccucaaa

SEQ ID NO: 1337551 - RNA, 19 nt, Homo sapiens
  misc_RNA (1)...(19): siRNA sense strand
ccaaugaggaccaucugua

SEQ ID NO: 1337552 - RNA, 19 nt, Homo sapiens
  misc_RNA (1)...(19): siRNA sense strand
gaucaaaggcaucgaguac

SEQ ID NO: 1337553 - RNA, 19 nt, Homo sapiens
  misc_RNA (1)...(19): siRNA sense strand
caaaggcaucgaguacuua

SEQ ID NO: 1337554 - RNA, 19 nt, Homo sapiens
  misc_RNA (1)...(19): siRNA sense strand
ggaaauugccauccucaag

SEQ ID NO: 1337555 - RNA, 19 nt, Homo sapiens
  misc_RNA (1)...(19): siRNA sense strand
aguauacccugaaggauga

SEQ ID NO: 1337556 - RNA, 19 nt, Homo sapiens
  misc_RNA (1)...(19): siRNA sense strand
ggaggaacgcucacuguca

SEQ ID NO: 1337557 - RNA, 19 nt, Homo sapiens
  misc_RNA (1)...(19): siRNA sense strand
ggcauggaguccuucauug

SEQ ID NO: 1337558 - RNA, 19 nt, Homo sapiens
  misc_RNA (1)...(19): siRNA sense strand
aaauugccauccucaagaa

SEQ ID NO: 1337559 - RNA, 19 nt, Homo sapiens
  misc_RNA (1)...(19): siRNA sense strand
gggcauggaguccuucauu

SEQ ID NO: 1337560 - RNA, 19 nt, Homo sapiens
  misc_RNA (1)...(19): siRNA sense strand
ccugaaggaugaaauugga

SEQ ID NO: 1337561 - RNA, 19 nt, Homo sapiens
  misc_RNA (1)...(19): siRNA sense strand
guacuuacacuaccagaag

SEQ ID NO: 1337562 - RNA, 19 nt, Homo sapiens
  misc_RNA (1)...(19): siRNA sense strand
ucaaguuggccuacaauga

SEQ ID NO: 1337563 - RNA, 19 nt, Homo sapiens
  misc_RNA (1)...(19): siRNA sense strand
ccuauggugucgucaaguu

SEQ ID NO: 1337564 - RNA, 19 nt, Homo sapiens
  misc_RNA (1)...(19): siRNA sense strand
cauccaccgugacaucaaa

SEQ ID NO: 1337565 - RNA, 19 nt, Homo sapiens
  misc_RNA (1)...(19): siRNA sense strand
gagcggaucauguguuuac

SEQ ID NO: 1337566 - RNA, 19 nt, Homo sapiens
  misc_RNA (1)...(19): siRNA sense strand
gcagguguaccaggaaauu

SEQ ID NO: 1337567 - RNA, 19 nt, Homo sapiens
  misc_RNA (1)...(19): siRNA sense strand
caucaagaucgcugacuuu

SEQ ID NO: 1337568 - RNA, 19 nt, Homo sapiens
  misc_RNA (1)...(19): siRNA sense strand
gaucauccaccgugacauc

SEQ ID NO: 1337569 - RNA, 19 nt, Homo sapiens
  misc_RNA (1)...(19): siRNA sense strand
gcauggaguccuucauugu

SEQ ID NO: 1337570 - RNA, 19 nt, Homo sapiens
  misc_RNA (1)...(19): siRNA sense strand
gugacgcgcuccucuccaa

SEQ ID NO: 1337571 - RNA, 19 nt, Homo sapiens
  misc_RNA (1)...(19): siRNA sense strand
acgagcggaucauguguuu

SEQ ID NO: 1337572 - RNA, 19 nt, Homo sapiens
  misc_RNA (1)...(19): siRNA sense strand
acacuauacugcuuugucu

SEQ ID NO: 1337573 - RNA, 19 nt, Homo sapiens
  misc_RNA (1)...(19): siRNA sense strand
ugguggagguccuggauga

SEQ ID NO: 1337574 - RNA, 19 nt, Homo sapiens
  misc_RNA (1)...(19): siRNA sense strand
gucagcgccuggaaacuug

SEQ ID NO: 1337575 - RNA, 19 nt, Homo sapiens
  misc_RNA (1)...(19): siRNA sense strand
ggacuugaaggaccugauc

SEQ ID NO: 1337576 - RNA, 19 nt, Homo sapiens
  misc_RNA (1)...(19): siRNA sense strand
guacaugguguucgaacug

SEQ ID NO: 1337577 - RNA, 19 nt, Homo sapiens
  misc_RNA (1)...(19): siRNA sense strand
ggccgacaguggagucuca

SEQ ID NO: 1337578 - RNA, 19 nt, Homo sapiens
  misc_RNA (1)...(19): siRNA sense strand
ccucaaaccacucucugaa

SEQ ID NO: 1337579 - RNA, 19 nt, Homo sapiens
  misc_RNA (1)...(19): siRNA sense strand
ccaggcccguuucuacuuc

SEQ ID NO: 1337580 - RNA, 19 nt, Homo sapiens
  misc_RNA (1)...(19): siRNA sense strand
cccguaugcuggacaagaa

SEQ ID NO: 1337581 - RNA, 19 nt, Homo sapiens
  misc_RNA (1)...(19): siRNA sense strand
gcaucgaguacuuacacua

SEQ ID NO: 1337582 - RNA, 19 nt, Homo sapiens
  misc_RNA (1)...(19): siRNA sense strand
ugaaggaugaaauuggaaa

SEQ ID NO: 1337583 - RNA, 19 nt, Homo sapiens
  misc_RNA (1)...(19): siRNA sense strand
uagcugaggacuugaagga

SEQ ID NO: 1337584 - RNA, 19 nt, Homo sapiens
  misc_RNA (1)...(19): siRNA sense strand
gaagugcccacccucaaac

SEQ ID NO: 1337585 - RNA, 19 nt, Homo sapiens
  misc_RNA (1)...(19): siRNA sense strand
gguggcagccuggacauga

SEQ ID NO: 1337586 - RNA, 19 nt, Homo sapiens
  misc_RNA (1)...(19): siRNA sense strand
caauaccuacuaugcaaug

SEQ ID NO: 1337587 - RNA, 19 nt, Homo sapiens
  misc_RNA (1)...(19): siRNA sense strand
acaucaagaucgcugacuu

SEQ ID NO: 1337588 - RNA, 19 nt, Homo sapiens
  misc_RNA (1)...(19): siRNA sense strand
ggaucguggugccggaaau

SEQ ID NO: 1337589 - RNA, 19 nt, Homo sapiens
  misc_RNA (1)...(19): siRNA sense strand
aaguuggccuacaaugaaa

SEQ ID NO: 1337590 - RNA, 19 nt, Homo sapiens
  misc_RNA (1)...(19): siRNA sense strand
gaagaccaugauacguaaa

SEQ ID NO: 1337591 - RNA, 19 nt, Homo sapiens
  misc_RNA (1)...(19): siRNA sense strand
cugaagaccaggcccguuu

SEQ ID NO: 1337592 - RNA, 19 nt, Homo sapiens
  misc_RNA (1)...(19): siRNA sense strand
guggcagccuggacaugaa

SEQ ID NO: 1337593 - RNA, 19 nt, Homo sapiens
  misc_RNA (1)...(19): siRNA sense strand
ugacaauaccuacuaugca

SEQ ID NO: 1337594 - RNA, 19 nt, Homo sapiens
  misc_RNA (1)...(19): siRNA sense strand
gcaagcugucucugcaaga

SEQ ID NO: 1337595 - RNA, 19 nt, Homo sapiens
  misc_RNA (1)...(19): siRNA sense strand
gaccugaucacccguaugc

SEQ ID NO: 1337596 - RNA, 19 nt, Homo sapiens
  misc_RNA (1)...(19): siRNA sense strand
acuauacugcuuugucuuu

SEQ ID NO: 1337597 - RNA, 19 nt, Homo sapiens
  misc_RNA (1)...(19): siRNA sense strand
ggcagcagcagcagcgaaa

SEQ ID NO: 1337598 - RNA, 19 nt, Homo sapiens
  misc_RNA (1)...(19): siRNA sense strand
ugugagcaaugaauucaag

SEQ ID NO: 1337599 - RNA, 19 nt, Homo sapiens
  misc_RNA (1)...(19): siRNA sense strand
ugaggaccaucuguacaug

SEQ ID NO: 1337600 - RNA, 19 nt, Homo sapiens
  misc_RNA (1)...(19): siRNA sense strand
gaaggaugaaauuggaaag

SEQ ID NO: 1337601 - RNA, 19 nt, Homo sapiens
  misc_RNA (1)...(19): siRNA sense strand
auacguaaacgcuccuuug

SEQ ID NO: 1337602 - RNA, 19 nt, Homo sapiens
  misc_RNA (1)...(19): siRNA sense strand
caaugaggaccaucuguac

SEQ ID NO: 1337603 - RNA, 19 nt, Homo sapiens
  misc_RNA (1)...(19): siRNA sense strand
uaccuacuaugcaaugaag

SEQ ID NO: 1337604 - RNA, 19 nt, Homo sapiens
  misc_RNA (1)...(19): siRNA sense strand
ggacgagcggaucaugugu

SEQ ID NO: 1337605 - RNA, 19 nt, Homo sapiens
  misc_RNA (1)...(19): siRNA sense strand
cuauacugcuuugucuuug

SEQ ID NO: 1337606 - RNA, 19 nt, Homo sapiens
  misc_RNA (1)...(19): siRNA sense strand
gugacacuauacugcuuug

SEQ ID NO: 1337607 - RNA, 19 nt, Homo sapiens
  misc_RNA (1)...(19): siRNA sense strand
ugacuuuggugugagcaau

SEQ ID NO: 1337608 - RNA, 19 nt, Homo sapiens
  misc_RNA (1)...(19): siRNA sense strand
ggugugagcaaugaauuca

SEQ ID NO: 1337609 - RNA, 19 nt, Homo sapiens
  misc_RNA (1)...(19): siRNA sense strand
cauggaguccuucauugug

SEQ ID NO: 1337610 - RNA, 19 nt, Homo sapiens
  misc_RNA (1)...(19): siRNA sense strand
gaagaccaggcccguuucu

SEQ ID NO: 1337611 - RNA, 19 nt, Homo sapiens
  misc_RNA (1)...(19): siRNA sense strand
gacgagcggaucauguguu

SEQ ID NO: 1337612 - RNA, 19 nt, Homo sapiens
  misc_RNA (1)...(19): siRNA sense strand
ugucagcgccuggaaacuu

SEQ ID NO: 1337613 - RNA, 19 nt, Homo sapiens
  misc_RNA (1)...(19): siRNA sense strand
gauacguaaacgcuccuuu

SEQ ID NO: 1337614 - RNA, 19 nt, Homo sapiens
  misc_RNA (1)...(19): siRNA sense strand
caucgaguacuuacacuac

SEQ ID NO: 1337615 - RNA, 19 nt, Homo sapiens
  misc_RNA (1)...(19): siRNA sense strand
ucacccguaugcuggacaa

SEQ ID NO: 1337616 - RNA, 19 nt, Homo sapiens
  misc_RNA (1)...(19): siRNA sense strand
cgacauagcugaggacuug

SEQ ID NO: 1337617 - RNA, 19 nt, Homo sapiens
  misc_RNA (1)...(19): siRNA sense strand
gacaauaccuacuaugcaa

SEQ ID NO: 1337618 - RNA, 19 nt, Homo sapiens
  misc_RNA (1)...(19): siRNA sense strand
gggaaggccuuggauguuu

SEQ ID NO: 1337619 - RNA, 19 nt, Homo sapiens
  misc_RNA (1)...(19): siRNA sense strand
caagaucgcugacuuuggu

SEQ ID NO: 1337620 - RNA, 19 nt, Homo sapiens
  misc_RNA (1)...(19): siRNA sense strand
gaaauugccauccucaaga

SEQ ID NO: 1337621 - RNA, 19 nt, Homo sapiens
  misc_RNA (1)...(19): siRNA sense strand
ugaagaccaugauacguaa

SEQ ID NO: 1337622 - RNA, 19 nt, Homo sapiens
  misc_RNA (1)...(19): siRNA sense strand
ucaaaccacucucugaaga

SEQ ID NO: 1337623 - RNA, 19 nt, Homo sapiens
  misc_RNA (1)...(19): siRNA sense strand
caaguuggccuacaaugaa

SEQ ID NO: 1337624 - RNA, 19 nt, Homo sapiens
  misc_RNA (1)...(19): siRNA sense strand
caaugaaggugcuguccaa

SEQ ID NO: 1337625 - RNA, 19 nt, Homo sapiens
  misc_RNA (1)...(19): siRNA sense strand
acaguaagaucaagaguca

SEQ ID NO: 1337626 - RNA, 19 nt, Homo sapiens
  misc_RNA (1)...(19): siRNA sense strand
ggaaggccuuggauguuug

SEQ ID NO: 1337627 - RNA, 19 nt, Homo sapiens
  misc_RNA (1)...(19): siRNA sense strand
ucaaaggcaucgaguacuu

SEQ ID NO: 1337628 - RNA, 19 nt, Homo sapiens
  misc_RNA (1)...(19): siRNA sense strand
gagcagguguaccaggaaa

SEQ ID NO: 1337629 - RNA, 19 nt, Homo sapiens
  misc_RNA (1)...(19): siRNA sense strand
gugaagaccaugauacgua

SEQ ID NO: 1337630 - RNA, 19 nt, Homo sapiens
  misc_RNA (1)...(19): siRNA sense strand
ggaagugcccacccucaaa

SEQ ID NO: 1337631 - RNA, 19 nt, Homo sapiens
  misc_RNA (1)...(19): siRNA sense strand
ccaaugaggaccaucugua

SEQ ID NO: 1337632 - RNA, 19 nt, Homo sapiens
  misc_RNA (1)...(19): siRNA sense strand
gaucaaaggcaucgaguac

SEQ ID NO: 1337633 - RNA, 19 nt, Homo sapiens
  misc_RNA (1)...(19): siRNA sense strand
caaaggcaucgaguacuua

SEQ ID NO: 1337634 - RNA, 19 nt, Homo sapiens
  misc_RNA (1)...(19): siRNA sense strand
ggaaauugccauccucaag

SEQ ID NO: 1337635 - RNA, 19 nt, Homo sapiens
  misc_RNA (1)...(19): siRNA sense strand
aguauacccugaaggauga

SEQ ID NO: 1337636 - RNA, 19 nt, Homo sapiens
  misc_RNA (1)...(19): siRNA sense strand
ggaggaacgcucacuguca

SEQ ID NO: 1337637 - RNA, 19 nt, Homo sapiens
  misc_RNA (1)...(19): siRNA sense strand
ggcauggaguccuucauug

SEQ ID NO: 1337638 - RNA, 19 nt, Homo sapiens
  misc_RNA (1)...(19): siRNA sense strand
aaauugccauccucaagaa

SEQ ID NO: 1337639 - RNA, 19 nt, Homo sapiens
  misc_RNA (1)...(19): siRNA sense strand
gggcauggaguccuucauu

SEQ ID NO: 1337640 - RNA, 19 nt, Homo sapiens
  misc_RNA (1)...(19): siRNA sense strand
ccugaaggaugaaauugga

SEQ ID NO: 1337641 - RNA, 19 nt, Homo sapiens
  misc_RNA (1)...(19): siRNA sense strand
guacuuacacuaccagaag

SEQ ID NO: 1337642 - RNA, 19 nt, Homo sapiens
  misc_RNA (1)...(19): siRNA sense strand
ucaaguuggccuacaauga

SEQ ID NO: 1337643 - RNA, 19 nt, Homo sapiens
  misc_RNA (1)...(19): siRNA sense strand
ccuauggugucgucaaguu

SEQ ID NO: 1337644 - RNA, 19 nt, Homo sapiens
  misc_RNA (1)...(19): siRNA sense strand
cauccaccgugacaucaaa

SEQ ID NO: 1337645 - RNA, 19 nt, Homo sapiens
  misc_RNA (1)...(19): siRNA sense strand
gagcggaucauguguuuac

SEQ ID NO: 1337646 - RNA, 19 nt, Homo sapiens
  misc_RNA (1)...(19): siRNA sense strand
gcagguguaccaggaaauu

SEQ ID NO: 1337647 - RNA, 19 nt, Homo sapiens
  misc_RNA (1)...(19): siRNA sense strand
caucaagaucgcugacuuu

SEQ ID NO: 1337648 - RNA, 19 nt, Homo sapiens
  misc_RNA (1)...(19): siRNA sense strand
gaucauccaccgugacauc

SEQ ID NO: 1337649 - RNA, 19 nt, Homo sapiens
  misc_RNA (1)...(19): siRNA sense strand
gcauggaguccuucauugu

SEQ ID NO: 1337650 - RNA, 19 nt, Homo sapiens
  misc_RNA (1)...(19): siRNA sense strand
gugacgcgcuccucuccaa

SEQ ID NO: 1337651 - RNA, 19 nt, Homo sapiens
  misc_RNA (1)...(19): siRNA sense strand
acgagcggaucauguguuu

SEQ ID NO: 1337652 - RNA, 19 nt, Homo sapiens
  misc_RNA (1)...(19): siRNA sense strand
acacuauacugcuuugucu

SEQ ID NO: 1337653 - RNA, 19 nt, Homo sapiens
  misc_RNA (1)...(19): siRNA sense strand
ugguggagguccuggauga

SEQ ID NO: 1337654 - RNA, 19 nt, Homo sapiens
  misc_RNA (1)...(19): siRNA sense strand
gucagcgccuggaaacuug

SEQ ID NO: 1337655 - RNA, 19 nt, Homo sapiens
  misc_RNA (1)...(19): siRNA sense strand
ggacuugaaggaccugauc

SEQ ID NO: 1337656 - RNA, 19 nt, Homo sapiens
  misc_RNA (1)...(19): siRNA sense strand
guacaugguguucgaacug

SEQ ID NO: 1337657 - RNA, 19 nt, Homo sapiens
  misc_RNA (1)...(19): siRNA sense strand
ggccgacaguggagucuca

SEQ ID NO: 1337658 - RNA, 19 nt, Homo sapiens
  misc_RNA (1)...(19): siRNA sense strand
ccucaaaccacucucugaa

SEQ ID NO: 1337659 - RNA, 19 nt, Homo sapiens
  misc_RNA (1)...(19): siRNA sense strand
ccaggcccguuucuacuuc

SEQ ID NO: 1337660 - RNA, 19 nt, Homo sapiens
  misc_RNA (1)...(19): siRNA sense strand
cccguaugcuggacaagaa

SEQ ID NO: 1337661 - RNA, 19 nt, Homo sapiens
  misc_RNA (1)...(19): siRNA sense strand
gcaucgaguacuuacacua

SEQ ID NO: 1337662 - RNA, 19 nt, Homo sapiens
  misc_RNA (1)...(19): siRNA sense strand
ugaaggaugaaauuggaaa

SEQ ID NO: 1337663 - RNA, 19 nt, Homo sapiens
  misc_RNA (1)...(19): siRNA sense strand
uagcugaggacuugaagga

SEQ ID NO: 1337664 - RNA, 19 nt, Homo sapiens
  misc_RNA (1)...(19): siRNA sense strand
gaagugcccacccucaaac

SEQ ID NO: 1337665 - RNA, 19 nt, Homo sapiens
  misc_RNA (1)...(19): siRNA sense strand
gguggcagccuggacauga

SEQ ID NO: 1337666 - RNA, 19 nt, Homo sapiens
  misc_RNA (1)...(19): siRNA sense strand
caauaccuacuaugcaaug

SEQ ID NO: 1337667 - RNA, 19 nt, Homo sapiens
  misc_RNA (1)...(19): siRNA sense strand
acaucaagaucgcugacuu

SEQ ID NO: 1337668 - RNA, 19 nt, Homo sapiens
  misc_RNA (1)...(19): siRNA sense strand
ggaucguggugccggaaau

SEQ ID NO: 1337669 - RNA, 19 nt, Homo sapiens
  misc_RNA (1)...(19): siRNA sense strand
aaguuggccuacaaugaaa

SEQ ID NO: 1337670 - RNA, 19 nt, Homo sapiens
  misc_RNA (1)...(19): siRNA sense strand
gaagaccaugauacguaaa

SEQ ID NO: 1337671 - RNA, 19 nt, Homo sapiens
  misc_RNA (1)...(19): siRNA sense strand
cugaagaccaggcccguuu

SEQ ID NO: 1337672 - RNA, 19 nt, Homo sapiens
  misc_RNA (1)...(19): siRNA sense strand
guggcagccuggacaugaa

SEQ ID NO: 1337673 - RNA, 19 nt, Homo sapiens
  misc_RNA (1)...(19): siRNA sense strand
ugacaauaccuacuaugca

SEQ ID NO: 1337674 - RNA, 19 nt, Homo sapiens
  misc_RNA (1)...(19): siRNA sense strand
gcaagcugucucugcaaga

SEQ ID NO: 1337675 - RNA, 19 nt, Homo sapiens
  misc_RNA (1)...(19): siRNA sense strand
gaccugaucacccguaugc

SEQ ID NO: 1337676 - RNA, 19 nt, Homo sapiens
  misc_RNA (1)...(19): siRNA sense strand
acuauacugcuuugucuuu

SEQ ID NO: 1337677 - RNA, 19 nt, Homo sapiens
  misc_RNA (1)...(19): siRNA sense strand
ggcagcagcagcagcgaaa

SEQ ID NO: 1337678 - RNA, 19 nt, Homo sapiens
  misc_RNA (1)...(19): siRNA sense strand
ugugagcaaugaauucaag

SEQ ID NO: 1337679 - RNA, 19 nt, Homo sapiens
  misc_RNA (1)...(19): siRNA sense strand
ugaggaccaucuguacaug

SEQ ID NO: 1337680 - RNA, 19 nt, Homo sapiens
  misc_RNA (1)...(19): siRNA sense strand
gaaggaugaaauuggaaag

SEQ ID NO: 1337681 - RNA, 19 nt, Homo sapiens
  misc_RNA (1)...(19): siRNA sense strand
auacguaaacgcuccuuug

SEQ ID NO: 1337682 - RNA, 19 nt, Homo sapiens
  misc_RNA (1)...(19): siRNA sense strand
caaugaggaccaucuguac

SEQ ID NO: 1337683 - RNA, 19 nt, Homo sapiens
  misc_RNA (1)...(19): siRNA sense strand
uaccuacuaugcaaugaag

SEQ ID NO: 1337684 - RNA, 19 nt, Homo sapiens
  misc_RNA (1)...(19): siRNA sense strand
ggacgagcggaucaugugu

SEQ ID NO: 1337685 - RNA, 19 nt, Homo sapiens
  misc_RNA (1)...(19): siRNA sense strand
cuauacugcuuugucuuug

SEQ ID NO: 1337686 - RNA, 19 nt, Homo sapiens
  misc_RNA (1)...(19): siRNA sense strand
gugacacuauacugcuuug

SEQ ID NO: 1337687 - RNA, 19 nt, Homo sapiens
  misc_RNA (1)...(19): siRNA sense strand
ugacuuuggugugagcaau

SEQ ID NO: 1337688 - RNA, 19 nt, Homo sapiens
  misc_RNA (1)...(19): siRNA sense strand
ggugugagcaaugaauuca

SEQ ID NO: 1337689 - RNA, 19 nt, Homo sapiens
  misc_RNA (1)...(19): siRNA sense strand
cauggaguccuucauugug

SEQ ID NO: 1337690 - RNA, 19 nt, Homo sapiens
  misc_RNA (1)...(19): siRNA sense strand
gaagaccaggcccguuucu

SEQ ID NO: 1337691 - RNA, 19 nt, Homo sapiens
  misc_RNA (1)...(19): siRNA sense strand
gacgagcggaucauguguu

SEQ ID NO: 1337692 - RNA, 19 nt, Homo sapiens
  misc_RNA (1)...(19): siRNA sense strand
ugucagcgccuggaaacuu

SEQ ID NO: 1337693 - RNA, 19 nt, Homo sapiens
  misc_RNA (1)...(19): siRNA sense strand
gauacguaaacgcuccuuu

SEQ ID NO: 1337694 - RNA, 19 nt, Homo sapiens
  misc_RNA (1)...(19): siRNA sense strand
caucgaguacuuacacuac

SEQ ID NO: 1337695 - RNA, 19 nt, Homo sapiens
  misc_RNA (1)...(19): siRNA sense strand
ucacccguaugcuggacaa

SEQ ID NO: 1337696 - RNA, 19 nt, Homo sapiens
  misc_RNA (1)...(19): siRNA sense strand
cgacauagcugaggacuug

SEQ ID NO: 1337697 - RNA, 19 nt, Homo sapiens
  misc_RNA (1)...(19): siRNA sense strand
gacaauaccuacuaugcaa

SEQ ID NO: 1337698 - RNA, 19 nt, Homo sapiens
  misc_RNA (1)...(19): siRNA sense strand
gggaaggccuuggauguuu

SEQ ID NO: 1337699 - RNA, 19 nt, Homo sapiens
  misc_RNA (1)...(19): siRNA sense strand
caagaucgcugacuuuggu

SEQ ID NO: 1337700 - RNA, 19 nt, Homo sapiens
  misc_RNA (1)...(19): siRNA sense strand
gaaauugccauccucaaga

SEQ ID NO: 1337701 - RNA, 19 nt, Homo sapiens
  misc_RNA (1)...(19): siRNA sense strand
ugaagaccaugauacguaa

SEQ ID NO: 1337702 - RNA, 19 nt, Homo sapiens
  misc_RNA (1)...(19): siRNA sense strand
ucaaaccacucucugaaga

SEQ ID NO: 1337703 - RNA, 19 nt, Homo sapiens
  misc_RNA (1)...(19): siRNA sense strand
caaguuggccuacaaugaa

SEQ ID NO: 1337704 - RNA, 19 nt, Homo sapiens
  misc_RNA (1)...(19): siRNA sense strand
caaugaaggugcuguccaa

SEQ ID NO: 1337705 - RNA, 19 nt, Homo sapiens
  misc_RNA (1)...(19): siRNA sense strand
acaguaagaucaagaguca

SEQ ID NO: 1337706 - RNA, 19 nt, Homo sapiens
  misc_RNA (1)...(19): siRNA sense strand
ggaaggccuuggauguuug

SEQ ID NO: 1337707 - RNA, 19 nt, Homo sapiens
  misc_RNA (1)...(19): siRNA sense strand
ucaaaggcaucgaguacuu

SEQ ID NO: 1337708 - RNA, 19 nt, Homo sapiens
  misc_RNA (1)...(19): siRNA sense strand
gagcagguguaccaggaaa

SEQ ID NO: 1337709 - RNA, 19 nt, Homo sapiens
  misc_RNA (1)...(19): siRNA sense strand
gugaagaccaugauacgua

SEQ ID NO: 1337710 - RNA, 19 nt, Homo sapiens
  misc_RNA (1)...(19): siRNA sense strand
ggaagugcccacccucaaa

SEQ ID NO: 1337711 - RNA, 19 nt, Homo sapiens
  misc_RNA (1)...(19): siRNA sense strand
ccaaugaggaccaucugua

SEQ ID NO: 1337712 - RNA, 19 nt, Homo sapiens
  misc_RNA (1)...(19): siRNA sense strand
gaucaaaggcaucgaguac

SEQ ID NO: 1337713 - RNA, 19 nt, Homo sapiens
  misc_RNA (1)...(19): siRNA sense strand
caaaggcaucgaguacuua

SEQ ID NO: 1337714 - RNA, 19 nt, Homo sapiens
  misc_RNA (1)...(19): siRNA sense strand
ggaaauugccauccucaag

SEQ ID NO: 1337715 - RNA, 19 nt, Homo sapiens
  misc_RNA (1)...(19): siRNA sense strand
aguauacccugaaggauga

SEQ ID NO: 1337716 - RNA, 19 nt, Homo sapiens
  misc_RNA (1)...(19): siRNA sense strand
ggaggaacgcucacuguca

SEQ ID NO: 1337717 - RNA, 19 nt, Homo sapiens
  misc_RNA (1)...(19): siRNA sense strand
ggcauggaguccuucauug

SEQ ID NO: 1337718 - RNA, 19 nt, Homo sapiens
  misc_RNA (1)...(19): siRNA sense strand
aaauugccauccucaagaa

SEQ ID NO: 1337719 - RNA, 19 nt, Homo sapiens
  misc_RNA (1)...(19): siRNA sense strand
gggcauggaguccuucauu

SEQ ID NO: 1337720 - RNA, 19 nt, Homo sapiens
  misc_RNA (1)...(19): siRNA sense strand
ccugaaggaugaaauugga

SEQ ID NO: 1337721 - RNA, 19 nt, Homo sapiens
  misc_RNA (1)...(19): siRNA sense strand
guacuuacacuaccagaag

SEQ ID NO: 1337722 - RNA, 19 nt, Homo sapiens
  misc_RNA (1)...(19): siRNA sense strand
ucaaguuggccuacaauga

SEQ ID NO: 1337723 - RNA, 19 nt, Homo sapiens
  misc_RNA (1)...(19): siRNA sense strand
ccuauggugucgucaaguu

SEQ ID NO: 1337724 - RNA, 19 nt, Homo sapiens
  misc_RNA (1)...(19): siRNA sense strand
cauccaccgugacaucaaa

SEQ ID NO: 1337725 - RNA, 19 nt, Homo sapiens
  misc_RNA (1)...(19): siRNA sense strand
gagcggaucauguguuuac

SEQ ID NO: 1337726 - RNA, 19 nt, Homo sapiens
  misc_RNA (1)...(19): siRNA sense strand
gcagguguaccaggaaauu

SEQ ID NO: 1337727 - RNA, 19 nt, Homo sapiens
  misc_RNA (1)...(19): siRNA sense strand
caucaagaucgcugacuuu

SEQ ID NO: 1337728 - RNA, 19 nt, Homo sapiens
  misc_RNA (1)...(19): siRNA sense strand
gaucauccaccgugacauc

SEQ ID NO: 1337729 - RNA, 19 nt, Homo sapiens
  misc_RNA (1)...(19): siRNA sense strand
gcauggaguccuucauugu

SEQ ID NO: 1337730 - RNA, 19 nt, Homo sapiens
  misc_RNA (1)...(19): siRNA sense strand
gugacgcgcuccucuccaa

SEQ ID NO: 1337731 - RNA, 19 nt, Homo sapiens
  misc_RNA (1)...(19): siRNA sense strand
acgagcggaucauguguuu

SEQ ID NO: 1337732 - RNA, 19 nt, Homo sapiens
  misc_RNA (1)...(19): siRNA sense strand
acacuauacugcuuugucu

SEQ ID NO: 1337733 - RNA, 19 nt, Homo sapiens
  misc_RNA (1)...(19): siRNA sense strand
ugguggagguccuggauga

SEQ ID NO: 1337734 - RNA, 19 nt, Homo sapiens
  misc_RNA (1)...(19): siRNA sense strand
gucagcgccuggaaacuug

SEQ ID NO: 1337735 - RNA, 19 nt, Homo sapiens
  misc_RNA (1)...(19): siRNA sense strand
ggacuugaaggaccugauc

SEQ ID NO: 1337736 - RNA, 19 nt, Homo sapiens
  misc_RNA (1)...(19): siRNA sense strand
guacaugguguucgaacug

SEQ ID NO: 1337737 - RNA, 19 nt, Homo sapiens
  misc_RNA (1)...(19): siRNA sense strand
ggccgacaguggagucuca

SEQ ID NO: 1337738 - RNA, 19 nt, Homo sapiens
  misc_RNA (1)...(19): siRNA sense strand
ccucaaaccacucucugaa

SEQ ID NO: 1337739 - RNA, 19 nt, Homo sapiens
  misc_RNA (1)...(19): siRNA sense strand
ccaggcccguuucuacuuc

SEQ ID NO: 1337740 - RNA, 19 nt, Homo sapiens
  misc_RNA (1)...(19): siRNA sense strand
cccguaugcuggacaagaa

SEQ ID NO: 1337741 - RNA, 19 nt, Homo sapiens
  misc_RNA (1)...(19): siRNA sense strand
gcaucgaguacuuacacua

SEQ ID NO: 1337742 - RNA, 19 nt, Homo sapiens
  misc_RNA (1)...(19): siRNA sense strand
ugaaggaugaaauuggaaa

SEQ ID NO: 1337743 - RNA, 19 nt, Homo sapiens
  misc_RNA (1)...(19): siRNA sense strand
uagcugaggacuugaagga

SEQ ID NO: 1337744 - RNA, 19 nt, Homo sapiens
  misc_RNA (1)...(19): siRNA sense strand
gaagugcccacccucaaac

SEQ ID NO: 1337745 - RNA, 19 nt, Homo sapiens
  misc_RNA (1)...(19): siRNA sense strand
gguggcagccuggacauga

SEQ ID NO: 1337746 - RNA, 19 nt, Homo sapiens
  misc_RNA (1)...(19): siRNA sense strand
caauaccuacuaugcaaug

SEQ ID NO: 1337747 - RNA, 19 nt, Homo sapiens
  misc_RNA (1)...(19): siRNA sense strand
acaucaagaucgcugacuu

SEQ ID NO: 1337748 - RNA, 19 nt, Homo sapiens
  misc_RNA (1)...(19): siRNA sense strand
ggaucguggugccggaaau

SEQ ID NO: 1337749 - RNA, 19 nt, Homo sapiens
  misc_RNA (1)...(19): siRNA sense strand
aaguuggccuacaaugaaa

SEQ ID NO: 1337750 - RNA, 19 nt, Homo sapiens
  misc_RNA (1)...(19): siRNA sense strand
gaagaccaugauacguaaa

SEQ ID NO: 1337751 - RNA, 19 nt, Homo sapiens
  misc_RNA (1)...(19): siRNA sense strand
cugaagaccaggcccguuu

SEQ ID NO: 1337752 - RNA, 19 nt, Homo sapiens
  misc_RNA (1)...(19): siRNA sense strand
guggcagccuggacaugaa

SEQ ID NO: 1337753 - RNA, 19 nt, Homo sapiens
  misc_RNA (1)...(19): siRNA sense strand
ugacaauaccuacuaugca

SEQ ID NO: 1337754 - RNA, 19 nt, Homo sapiens
  misc_RNA (1)...(19): siRNA sense strand
gcaagcugucucugcaaga

SEQ ID NO: 1337755 - RNA, 19 nt, Homo sapiens
  misc_RNA (1)...(19): siRNA sense strand
gaccugaucacccguaugc

SEQ ID NO: 1337756 - RNA, 19 nt, Homo sapiens
  misc_RNA (1)...(19): siRNA sense strand
acuauacugcuuugucuuu

SEQ ID NO: 1337757 - RNA, 19 nt, Homo sapiens
  misc_RNA (1)...(19): siRNA sense strand
ggcagcagcagcagcgaaa

SEQ ID NO: 1337758 - RNA, 19 nt, Homo sapiens
  misc_RNA (1)...(19): siRNA sense strand
ugugagcaaugaauucaag

SEQ ID NO: 1337759 - RNA, 19 nt, Homo sapiens
  misc_RNA (1)...(19): siRNA sense strand
ugaggaccaucuguacaug

SEQ ID NO: 1337760 - RNA, 19 nt, Homo sapiens
  misc_RNA (1)...(19): siRNA sense strand
gaaggaugaaauuggaaag

SEQ ID NO: 1337761 - RNA, 19 nt, Homo sapiens
  misc_RNA (1)...(19): siRNA sense strand
auacguaaacgcuccuuug

SEQ ID NO: 1337762 - RNA, 19 nt, Homo sapiens
  misc_RNA (1)...(19): siRNA sense strand
caaugaggaccaucuguac

SEQ ID NO: 1337763 - RNA, 19 nt, Homo sapiens
  misc_RNA (1)...(19): siRNA sense strand
uaccuacuaugcaaugaag

SEQ ID NO: 1337764 - RNA, 19 nt, Homo sapiens
  misc_RNA (1)...(19): siRNA sense strand
ggacgagcggaucaugugu

SEQ ID NO: 1337765 - RNA, 19 nt, Homo sapiens
  misc_RNA (1)...(19): siRNA sense strand
cuauacugcuuugucuuug

SEQ ID NO: 1337766 - RNA, 19 nt, Homo sapiens
  misc_RNA (1)...(19): siRNA sense strand
gugacacuauacugcuuug

SEQ ID NO: 1337767 - RNA, 19 nt, Homo sapiens
  misc_RNA (1)...(19): siRNA sense strand
ugacuuuggugugagcaau

SEQ ID NO: 1337768 - RNA, 19 nt, Homo sapiens
  misc_RNA (1)...(19): siRNA sense strand
ggugugagcaaugaauuca

SEQ ID NO: 1337769 - RNA, 19 nt, Homo sapiens
  misc_RNA (1)...(19): siRNA sense strand
cauggaguccuucauugug

SEQ ID NO: 1337770 - RNA, 19 nt, Homo sapiens
  misc_RNA (1)...(19): siRNA sense strand
gaagaccaggcccguuucu

SEQ ID NO: 1337771 - RNA, 19 nt, Homo sapiens
  misc_RNA (1)...(19): siRNA sense strand
gacgagcggaucauguguu

SEQ ID NO: 1337772 - RNA, 19 nt, Homo sapiens
  misc_RNA (1)...(19): siRNA sense strand
ugucagcgccuggaaacuu

SEQ ID NO: 1337773 - RNA, 19 nt, Homo sapiens
  misc_RNA (1)...(19): siRNA sense strand
gauacguaaacgcuccuuu

SEQ ID NO: 1337774 - RNA, 19 nt, Homo sapiens
  misc_RNA (1)...(19): siRNA sense strand
caucgaguacuuacacuac

SEQ ID NO: 1337775 - RNA, 19 nt, Homo sapiens
  misc_RNA (1)...(19): siRNA sense strand
ucacccguaugcuggacaa

SEQ ID NO: 1337776 - RNA, 19 nt, Homo sapiens
  misc_RNA (1)...(19): siRNA sense strand
cgacauagcugaggacuug

SEQ ID NO: 1337777 - RNA, 19 nt, Homo sapiens
  misc_RNA (1)...(19): siRNA sense strand
gacaauaccuacuaugcaa

SEQ ID NO: 1337778 - RNA, 19 nt, Homo sapiens
  misc_RNA (1)...(19): siRNA sense strand
gggaaggccuuggauguuu

SEQ ID NO: 1337779 - RNA, 19 nt, Homo sapiens
  misc_RNA (1)...(19): siRNA sense strand
caagaucgcugacuuuggu

SEQ ID NO: 1337780 - RNA, 19 nt, Homo sapiens
  misc_RNA (1)...(19): siRNA sense strand
gaaauugccauccucaaga

SEQ ID NO: 1337781 - RNA, 19 nt, Homo sapiens
  misc_RNA (1)...(19): siRNA sense strand
ugaagaccaugauacguaa

SEQ ID NO: 1337782 - RNA, 19 nt, Homo sapiens
  misc_RNA (1)...(19): siRNA sense strand
ucaaaccacucucugaaga

SEQ ID NO: 1337783 - RNA, 19 nt, Homo sapiens
  misc_RNA (1)...(19): siRNA sense strand
caaguuggccuacaaugaa

SEQ ID NO: 1337784 - RNA, 19 nt, Homo sapiens
  misc_RNA (1)...(19): siRNA sense strand
caaugaaggugcuguccaa

SEQ ID NO: 1337785 - RNA, 19 nt, Homo sapiens
  misc_RNA (1)...(19): siRNA sense strand
acaguaagaucaagaguca

SEQ ID NO: 1337786 - RNA, 19 nt, Homo sapiens
  misc_RNA (1)...(19): siRNA sense strand
ggaaggccuuggauguuug

SEQ ID NO: 1337787 - RNA, 19 nt, Homo sapiens
  misc_RNA (1)...(19): siRNA sense strand
ucaaaggcaucgaguacuu

SEQ ID NO: 1337788 - RNA, 19 nt, Homo sapiens
  misc_RNA (1)...(19): siRNA sense strand
gagcagguguaccaggaaa

SEQ ID NO: 1337789 - RNA, 19 nt, Homo sapiens
  misc_RNA (1)...(19): siRNA sense strand
gugaagaccaugauacgua

SEQ ID NO: 1337790 - RNA, 19 nt, Homo sapiens
  misc_RNA (1)...(19): siRNA sense strand
ggaagugcccacccucaaa

SEQ ID NO: 1337791 - RNA, 19 nt, Homo sapiens
  misc_RNA (1)...(19): siRNA sense strand
ccaaugaggaccaucugua

SEQ ID NO: 1337792 - RNA, 19 nt, Homo sapiens
  misc_RNA (1)...(19): siRNA sense strand
gaucaaaggcaucgaguac

SEQ ID NO: 1337793 - RNA, 19 nt, Homo sapiens
  misc_RNA (1)...(19): siRNA sense strand
caaaggcaucgaguacuua

SEQ ID NO: 1337794 - RNA, 19 nt, Homo sapiens
  misc_RNA (1)...(19): siRNA sense strand
ggaaauugccauccucaag

SEQ ID NO: 1337795 - RNA, 19 nt, Homo sapiens
  misc_RNA (1)...(19): siRNA sense strand
aguauacccugaaggauga

SEQ ID NO: 1337796 - RNA, 19 nt, Homo sapiens
  misc_RNA (1)...(19): siRNA sense strand
ggaggaacgcucacuguca

SEQ ID NO: 1337797 - RNA, 19 nt, Homo sapiens
  misc_RNA (1)...(19): siRNA sense strand
ggcauggaguccuucauug

SEQ ID NO: 1337798 - RNA, 19 nt, Homo sapiens
  misc_RNA (1)...(19): siRNA sense strand
aaauugccauccucaagaa

SEQ ID NO: 1337799 - RNA, 19 nt, Homo sapiens
  misc_RNA (1)...(19): siRNA sense strand
gggcauggaguccuucauu

SEQ ID NO: 1337800 - RNA, 19 nt, Homo sapiens
  misc_RNA (1)...(19): siRNA sense strand
ccugaaggaugaaauugga

SEQ ID NO: 1337801 - RNA, 19 nt, Homo sapiens
  misc_RNA (1)...(19): siRNA sense strand
guacuuacacuaccagaag

SEQ ID NO: 1337802 - RNA, 19 nt, Homo sapiens
  misc_RNA (1)...(19): siRNA sense strand
ucaaguuggccuacaauga

SEQ ID NO: 1337803 - RNA, 19 nt, Homo sapiens
  misc_RNA (1)...(19): siRNA sense strand
ccuauggugucgucaaguu

SEQ ID NO: 1337804 - RNA, 19 nt, Homo sapiens
  misc_RNA (1)...(19): siRNA sense strand
cauccaccgugacaucaaa

SEQ ID NO: 1337805 - RNA, 19 nt, Homo sapiens
  misc_RNA (1)...(19): siRNA sense strand
gagcggaucauguguuuac

SEQ ID NO: 1337806 - RNA, 19 nt, Homo sapiens
  misc_RNA (1)...(19): siRNA sense strand
gcagguguaccaggaaauu

SEQ ID NO: 1337807 - RNA, 19 nt, Homo sapiens
  misc_RNA (1)...(19): siRNA sense strand
caucaagaucgcugacuuu

SEQ ID NO: 1337808 - RNA, 19 nt, Homo sapiens
  misc_RNA (1)...(19): siRNA sense strand
gaucauccaccgugacauc

SEQ ID NO: 1337809 - RNA, 19 nt, Homo sapiens
  misc_RNA (1)...(19): siRNA sense strand
gcauggaguccuucauugu

SEQ ID NO: 1337810 - RNA, 19 nt, Homo sapiens
  misc_RNA (1)...(19): siRNA sense strand
gugacgcgcuccucuccaa

SEQ ID NO: 1337811 - RNA, 19 nt, Homo sapiens
  misc_RNA (1)...(19): siRNA sense strand
acgagcggaucauguguuu

SEQ ID NO: 1337812 - RNA, 19 nt, Homo sapiens
  misc_RNA (1)...(19): siRNA sense strand
acacuauacugcuuugucu

SEQ ID NO: 1337813 - RNA, 19 nt, Homo sapiens
  misc_RNA (1)...(19): siRNA sense strand
ugguggagguccuggauga

SEQ ID NO: 1337814 - RNA, 19 nt, Homo sapiens
  misc_RNA (1)...(19): siRNA sense strand
gucagcgccuggaaacuug

SEQ ID NO: 1337815 - RNA, 19 nt, Homo sapiens
  misc_RNA (1)...(19): siRNA sense strand
ggacuugaaggaccugauc

SEQ ID NO: 1337816 - RNA, 19 nt, Homo sapiens
  misc_RNA (1)...(19): siRNA sense strand
guacaugguguucgaacug

SEQ ID NO: 1337817 - RNA, 19 nt, Homo sapiens
  misc_RNA (1)...(19): siRNA sense strand
ggccgacaguggagucuca

SEQ ID NO: 1337818 - RNA, 19 nt, Homo sapiens
  misc_RNA (1)...(19): siRNA sense strand
ccucaaaccacucucugaa

SEQ ID NO: 1337819 - RNA, 19 nt, Homo sapiens
  misc_RNA (1)...(19): siRNA sense strand
ccaggcccguuucuacuuc

SEQ ID NO: 1337820 - RNA, 19 nt, Homo sapiens
  misc_RNA (1)...(19): siRNA sense strand
cccguaugcuggacaagaa

SEQ ID NO: 1337821 - RNA, 19 nt, Homo sapiens
  misc_RNA (1)...(19): siRNA sense strand
gcaucgaguacuuacacua

SEQ ID NO: 1337822 - RNA, 19 nt, Homo sapiens
  misc_RNA (1)...(19): siRNA sense strand
ugaaggaugaaauuggaaa

SEQ ID NO: 1337823 - RNA, 19 nt, Homo sapiens
  misc_RNA (1)...(19): siRNA sense strand
uagcugaggacuugaagga

SEQ ID NO: 1337824 - RNA, 19 nt, Homo sapiens
  misc_RNA (1)...(19): siRNA sense strand
gaagugcccacccucaaac

SEQ ID NO: 1337825 - RNA, 19 nt, Homo sapiens
  misc_RNA (1)...(19): siRNA sense strand
gguggcagccuggacauga

SEQ ID NO: 1337826 - RNA, 19 nt, Homo sapiens
  misc_RNA (1)...(19): siRNA sense strand
caauaccuacuaugcaaug

SEQ ID NO: 1337827 - RNA, 19 nt, Homo sapiens
  misc_RNA (1)...(19): siRNA sense strand
acaucaagaucgcugacuu

SEQ ID NO: 1337828 - RNA, 19 nt, Homo sapiens
  misc_RNA (1)...(19): siRNA sense strand
ggaucguggugccggaaau

SEQ ID NO: 1337829 - RNA, 19 nt, Homo sapiens
  misc_RNA (1)...(19): siRNA sense strand
aaguuggccuacaaugaaa

SEQ ID NO: 1337830 - RNA, 19 nt, Homo sapiens
  misc_RNA (1)...(19): siRNA sense strand
gaagaccaugauacguaaa

SEQ ID NO: 1337831 - RNA, 19 nt, Homo sapiens
  misc_RNA (1)...(19): siRNA sense strand
cugaagaccaggcccguuu

SEQ ID NO: 1337832 - RNA, 19 nt, Homo sapiens
  misc_RNA (1)...(19): siRNA sense strand
guggcagccuggacaugaa

SEQ ID NO: 1337833 - RNA, 19 nt, Homo sapiens
  misc_RNA (1)...(19): siRNA sense strand
ugacaauaccuacuaugca

SEQ ID NO: 1337834 - RNA, 19 nt, Homo sapiens
  misc_RNA (1)...(19): siRNA sense strand
gcaagcugucucugcaaga

SEQ ID NO: 1337835 - RNA, 19 nt, Homo sapiens
  misc_RNA (1)...(19): siRNA sense strand
gaccugaucacccguaugc

SEQ ID NO: 1337836 - RNA, 19 nt, Homo sapiens
  misc_RNA (1)...(19): siRNA sense strand
acuauacugcuuugucuuu

SEQ ID NO: 1337837 - RNA, 19 nt, Homo sapiens
  misc_RNA (1)...(19): siRNA sense strand
ggcagcagcagcagcgaaa

SEQ ID NO: 1337838 - RNA, 19 nt, Homo sapiens
  misc_RNA (1)...(19): siRNA sense strand
ugugagcaaugaauucaag

SEQ ID NO: 1337839 - RNA, 19 nt, Homo sapiens
  misc_RNA (1)...(19): siRNA sense strand
ugaggaccaucuguacaug

SEQ ID NO: 1337840 - RNA, 19 nt, Homo sapiens
  misc_RNA (1)...(19): siRNA sense strand
gaaggaugaaauuggaaag

SEQ ID NO: 1337841 - RNA, 19 nt, Homo sapiens
  misc_RNA (1)...(19): siRNA sense strand
auacguaaacgcuccuuug

SEQ ID NO: 1337842 - RNA, 19 nt, Homo sapiens
  misc_RNA (1)...(19): siRNA sense strand
caaugaggaccaucuguac

SEQ ID NO: 1337843 - RNA, 19 nt, Homo sapiens
  misc_RNA (1)...(19): siRNA sense strand
uaccuacuaugcaaugaag

SEQ ID NO: 1337844 - RNA, 19 nt, Homo sapiens
  misc_RNA (1)...(19): siRNA sense strand
ggacgagcggaucaugugu

SEQ ID NO: 1337845 - RNA, 19 nt, Homo sapiens
  misc_RNA (1)...(19): siRNA sense strand
cuauacugcuuugucuuug

SEQ ID NO: 1337846 - RNA, 19 nt, Homo sapiens
  misc_RNA (1)...(19): siRNA sense strand
gugacacuauacugcuuug

SEQ ID NO: 1337847 - RNA, 19 nt, Homo sapiens
  misc_RNA (1)...(19): siRNA sense strand
ugacuuuggugugagcaau

SEQ ID NO: 1337848 - RNA, 19 nt, Homo sapiens
  misc_RNA (1)...(19): siRNA sense strand
ggugugagcaaugaauuca

SEQ ID NO: 1337849 - RNA, 19 nt, Homo sapiens
  misc_RNA (1)...(19): siRNA sense strand
cauggaguccuucauugug

SEQ ID NO: 1337850 - RNA, 19 nt, Homo sapiens
  misc_RNA (1)...(19): siRNA sense strand
gaagaccaggcccguuucu

SEQ ID NO: 1337851 - RNA, 19 nt, Homo sapiens
  misc_RNA (1)...(19): siRNA sense strand
gacgagcggaucauguguu

SEQ ID NO: 1337852 - RNA, 19 nt, Homo sapiens
  misc_RNA (1)...(19): siRNA sense strand
ugucagcgccuggaaacuu

SEQ ID NO: 1337853 - RNA, 19 nt, Homo sapiens
  misc_RNA (1)...(19): siRNA sense strand
gauacguaaacgcuccuuu

SEQ ID NO: 1337854 - RNA, 19 nt, Homo sapiens
  misc_RNA (1)...(19): siRNA sense strand
caucgaguacuuacacuac

SEQ ID NO: 1337855 - RNA, 19 nt, Homo sapiens
  misc_RNA (1)...(19): siRNA sense strand
ucacccguaugcuggacaa

SEQ ID NO: 1337856 - RNA, 19 nt, Homo sapiens
  misc_RNA (1)...(19): siRNA sense strand
cgacauagcugaggacuug

SEQ ID NO: 1337857 - RNA, 19 nt, Homo sapiens
  misc_RNA (1)...(19): siRNA sense strand
gacaauaccuacuaugcaa

SEQ ID NO: 1337858 - RNA, 19 nt, Homo sapiens
  misc_RNA (1)...(19): siRNA sense strand
gggaaggccuuggauguuu

SEQ ID NO: 1337859 - RNA, 19 nt, Homo sapiens
  misc_RNA (1)...(19): siRNA sense strand
caagaucgcugacuuuggu

SEQ ID NO: 1337860 - RNA, 19 nt, Homo sapiens
  misc_RNA (1)...(19): siRNA sense strand
gaaauugccauccucaaga

SEQ ID NO: 1337861 - RNA, 19 nt, Homo sapiens
  misc_RNA (1)...(19): siRNA sense strand
ugaagaccaugauacguaa

SEQ ID NO: 1337862 - RNA, 19 nt, Homo sapiens
  misc_RNA (1)...(19): siRNA sense strand
ucaaaccacucucugaaga

SEQ ID NO: 1337863 - RNA, 19 nt, Homo sapiens
  misc_RNA (1)...(19): siRNA sense strand
caaguuggccuacaaugaa

SEQ ID NO: 1337864 - RNA, 19 nt, Homo sapiens
  misc_RNA (1)...(19): siRNA sense strand
caaugaaggugcuguccaa

SEQ ID NO: 1337865 - RNA, 19 nt, Homo sapiens
  misc_RNA (1)...(19): siRNA sense strand
acaguaagaucaagaguca

SEQ ID NO: 1337866 - RNA, 19 nt, Homo sapiens
  misc_RNA (1)...(19): siRNA sense strand
ggaaggccuuggauguuug

SEQ ID NO: 1337867 - RNA, 19 nt, Homo sapiens
  misc_RNA (1)...(19): siRNA sense strand
ucaaaggcaucgaguacuu

SEQ ID NO: 1337868 - RNA, 19 nt, Homo sapiens
  misc_RNA (1)...(19): siRNA sense strand
gagcagguguaccaggaaa

SEQ ID NO: 1337869 - RNA, 19 nt, Homo sapiens
  misc_RNA (1)...(19): siRNA sense strand
gugaagaccaugauacgua

SEQ ID NO: 1337870 - RNA, 19 nt, Homo sapiens
  misc_RNA (1)...(19): siRNA sense strand
ggaagugcccacccucaaa

SEQ ID NO: 1337871 - RNA, 19 nt, Homo sapiens
  misc_RNA (1)...(19): siRNA sense strand
ccaaugaggaccaucugua

SEQ ID NO: 1337872 - RNA, 19 nt, Homo sapiens
  misc_RNA (1)...(19): siRNA sense strand
gaucaaaggcaucgaguac

SEQ ID NO: 1337873 - RNA, 19 nt, Homo sapiens
  misc_RNA (1)...(19): siRNA sense strand
caaaggcaucgaguacuua

SEQ ID NO: 1337874 - RNA, 19 nt, Homo sapiens
  misc_RNA (1)...(19): siRNA sense strand
ggaaauugccauccucaag

SEQ ID NO: 1337875 - RNA, 19 nt, Homo sapiens
  misc_RNA (1)...(19): siRNA sense strand
aguauacccugaaggauga

SEQ ID NO: 1337876 - RNA, 19 nt, Homo sapiens
  misc_RNA (1)...(19): siRNA sense strand
ggaggaacgcucacuguca

SEQ ID NO: 1337877 - RNA, 19 nt, Homo sapiens
  misc_RNA (1)...(19): siRNA sense strand
ggcauggaguccuucauug

SEQ ID NO: 1337878 - RNA, 19 nt, Homo sapiens
  misc_RNA (1)...(19): siRNA sense strand
aaauugccauccucaagaa

SEQ ID NO: 1337879 - RNA, 19 nt, Homo sapiens
  misc_RNA (1)...(19): siRNA sense strand
gggcauggaguccuucauu

SEQ ID NO: 1337880 - RNA, 19 nt, Homo sapiens
  misc_RNA (1)...(19): siRNA sense strand
ccugaaggaugaaauugga

SEQ ID NO: 1337881 - RNA, 19 nt, Homo sapiens
  misc_RNA (1)...(19): siRNA sense strand
guacuuacacuaccagaag

SEQ ID NO: 1337882 - RNA, 19 nt, Homo sapiens
  misc_RNA (1)...(19): siRNA sense strand
ucaaguuggccuacaauga

SEQ ID NO: 1337883 - RNA, 19 nt, Homo sapiens
  misc_RNA (1)...(19): siRNA sense strand
ccuauggugucgucaaguu

SEQ ID NO: 1337884 - RNA, 19 nt, Homo sapiens
  misc_RNA (1)...(19): siRNA sense strand
cauccaccgugacaucaaa

SEQ ID NO: 1337885 - RNA, 19 nt, Homo sapiens
  misc_RNA (1)...(19): siRNA sense strand
gagcggaucauguguuuac

SEQ ID NO: 1337886 - RNA, 19 nt, Homo sapiens
  misc_RNA (1)...(19): siRNA sense strand
gcagguguaccaggaaauu

SEQ ID NO: 1337887 - RNA, 19 nt, Homo sapiens
  misc_RNA (1)...(19): siRNA sense strand
caucaagaucgcugacuuu

SEQ ID NO: 1337888 - RNA, 19 nt, Homo sapiens
  misc_RNA (1)...(19): siRNA sense strand
gaucauccaccgugacauc

SEQ ID NO: 1337889 - RNA, 19 nt, Homo sapiens
  misc_RNA (1)...(19): siRNA sense strand
gcauggaguccuucauugu

SEQ ID NO: 1337890 - RNA, 19 nt, Homo sapiens
  misc_RNA (1)...(19): siRNA sense strand
gugacgcgcuccucuccaa

SEQ ID NO: 1337891 - RNA, 19 nt, Homo sapiens
  misc_RNA (1)...(19): siRNA sense strand
acgagcggaucauguguuu

SEQ ID NO: 1337892 - RNA, 19 nt, Homo sapiens
  misc_RNA (1)...(19): siRNA sense strand
acacuauacugcuuugucu

SEQ ID NO: 1337893 - RNA, 19 nt, Homo sapiens
  misc_RNA (1)...(19): siRNA sense strand
ugguggagguccuggauga

SEQ ID NO: 1337894 - RNA, 19 nt, Homo sapiens
  misc_RNA (1)...(19): siRNA sense strand
gucagcgccuggaaacuug

SEQ ID NO: 1337895 - RNA, 19 nt, Homo sapiens
  misc_RNA (1)...(19): siRNA sense strand
ggacuugaaggaccugauc

SEQ ID NO: 1337896 - RNA, 19 nt, Homo sapiens
  misc_RNA (1)...(19): siRNA sense strand
guacaugguguucgaacug

SEQ ID NO: 1337897 - RNA, 19 nt, Homo sapiens
  misc_RNA (1)...(19): siRNA sense strand
ggccgacaguggagucuca

SEQ ID NO: 1337898 - RNA, 19 nt, Homo sapiens
  misc_RNA (1)...(19): siRNA sense strand
ccucaaaccacucucugaa

SEQ ID NO: 1337899 - RNA, 19 nt, Homo sapiens
  misc_RNA (1)...(19): siRNA sense strand
ccaggcccguuucuacuuc

SEQ ID NO: 1337900 - RNA, 19 nt, Homo sapiens
  misc_RNA (1)...(19): siRNA sense strand
cccguaugcuggacaagaa

SEQ ID NO: 1337901 - RNA, 19 nt, Homo sapiens
  misc_RNA (1)...(19): siRNA sense strand
gcaucgaguacuuacacua

SEQ ID NO: 1337902 - RNA, 19 nt, Homo sapiens
  misc_RNA (1)...(19): siRNA sense strand
ugaaggaugaaauuggaaa

SEQ ID NO: 1337903 - RNA, 19 nt, Homo sapiens
  misc_RNA (1)...(19): siRNA sense strand
uagcugaggacuugaagga

SEQ ID NO: 1337904 - RNA, 19 nt, Homo sapiens
  misc_RNA (1)...(19): siRNA sense strand
gaagugcccacccucaaac

SEQ ID NO: 1337905 - RNA, 19 nt, Homo sapiens
  misc_RNA (1)...(19): siRNA sense strand
gguggcagccuggacauga

SEQ ID NO: 1337906 - RNA, 19 nt, Homo sapiens
  misc_RNA (1)...(19): siRNA sense strand
caauaccuacuaugcaaug

SEQ ID NO: 1337907 - RNA, 19 nt, Homo sapiens
  misc_RNA (1)...(19): siRNA sense strand
acaucaagaucgcugacuu

SEQ ID NO: 1337908 - RNA, 19 nt, Homo sapiens
  misc_RNA (1)...(19): siRNA sense strand
ggaucguggugccggaaau

SEQ ID NO: 1337909 - RNA, 19 nt, Homo sapiens
  misc_RNA (1)...(19): siRNA sense strand
aaguuggccuacaaugaaa

SEQ ID NO: 1337910 - RNA, 19 nt, Homo sapiens
  misc_RNA (1)...(19): siRNA sense strand
gaagaccaugauacguaaa

SEQ ID NO: 1337911 - RNA, 19 nt, Homo sapiens
  misc_RNA (1)...(19): siRNA sense strand
cugaagaccaggcccguuu

SEQ ID NO: 1337912 - RNA, 19 nt, Homo sapiens
  misc_RNA (1)...(19): siRNA sense strand
guggcagccuggacaugaa

SEQ ID NO: 1337913 - RNA, 19 nt, Homo sapiens
  misc_RNA (1)...(19): siRNA sense strand
ugacaauaccuacuaugca

SEQ ID NO: 1337914 - RNA, 19 nt, Homo sapiens
  misc_RNA (1)...(19): siRNA sense strand
gcaagcugucucugcaaga

SEQ ID NO: 1337915 - RNA, 19 nt, Homo sapiens
  misc_RNA (1)...(19): siRNA sense strand
gaccugaucacccguaugc

SEQ ID NO: 1337916 - RNA, 19 nt, Homo sapiens
  misc_RNA (1)...(19): siRNA sense strand
acuauacugcuuugucuuu

SEQ ID NO: 1337917 - RNA, 19 nt, Homo sapiens
  misc_RNA (1)...(19): siRNA sense strand
ggcagcagcagcagcgaaa

SEQ ID NO: 1337918 - RNA, 19 nt, Homo sapiens
  misc_RNA (1)...(19): siRNA sense strand
ugugagcaaugaauucaag

SEQ ID NO: 1337919 - RNA, 19 nt, Homo sapiens
  misc_RNA (1)...(19): siRNA sense strand
ugaggaccaucuguacaug

SEQ ID NO: 1337920 - RNA, 19 nt, Homo sapiens
  misc_RNA (1)...(19): siRNA sense strand
gaaggaugaaauuggaaag

SEQ ID NO: 1337921 - RNA, 19 nt, Homo sapiens
  misc_RNA (1)...(19): siRNA sense strand
auacguaaacgcuccuuug

SEQ ID NO: 1337922 - RNA, 19 nt, Homo sapiens
  misc_RNA (1)...(19): siRNA sense strand
caaugaggaccaucuguac

SEQ ID NO: 1337923 - RNA, 19 nt, Homo sapiens
  misc_RNA (1)...(19): siRNA sense strand
uaccuacuaugcaaugaag

SEQ ID NO: 1337924 - RNA, 19 nt, Homo sapiens
  misc_RNA (1)...(19): siRNA sense strand
ggacgagcggaucaugugu

SEQ ID NO: 1337925 - RNA, 19 nt, Homo sapiens
  misc_RNA (1)...(19): siRNA sense strand
cuauacugcuuugucuuug

SEQ ID NO: 1337926 - RNA, 19 nt, Homo sapiens
  misc_RNA (1)...(19): siRNA sense strand
gugacacuauacugcuuug

SEQ ID NO: 1337927 - RNA, 19 nt, Homo sapiens
  misc_RNA (1)...(19): siRNA sense strand
ugacuuuggugugagcaau

SEQ ID NO: 1337928 - RNA, 19 nt, Homo sapiens
  misc_RNA (1)...(19): siRNA sense strand
ggugugagcaaugaauuca

SEQ ID NO: 1337929 - RNA, 19 nt, Homo sapiens
  misc_RNA (1)...(19): siRNA sense strand
cauggaguccuucauugug

SEQ ID NO: 1337930 - RNA, 19 nt, Homo sapiens
  misc_RNA (1)...(19): siRNA sense strand
gaagaccaggcccguuucu

SEQ ID NO: 1337931 - RNA, 19 nt, Homo sapiens
  misc_RNA (1)...(19): siRNA sense strand
gacgagcggaucauguguu

SEQ ID NO: 1337932 - RNA, 19 nt, Homo sapiens
  misc_RNA (1)...(19): siRNA sense strand
ugucagcgccuggaaacuu

SEQ ID NO: 1337933 - RNA, 19 nt, Homo sapiens
  misc_RNA (1)...(19): siRNA sense strand
gauacguaaacgcuccuuu

SEQ ID NO: 1337934 - RNA, 19 nt, Homo sapiens
  misc_RNA (1)...(19): siRNA sense strand
caucgaguacuuacacuac

SEQ ID NO: 1337935 - RNA, 19 nt, Homo sapiens
  misc_RNA (1)...(19): siRNA sense strand
ucacccguaugcuggacaa

SEQ ID NO: 1337936 - RNA, 19 nt, Homo sapiens
  misc_RNA (1)...(19): siRNA sense strand
cgacauagcugaggacuug

SEQ ID NO: 1337937 - RNA, 19 nt, Homo sapiens
  misc_RNA (1)...(19): siRNA sense strand
gacaauaccuacuaugcaa

SEQ ID NO: 1337938 - RNA, 19 nt, Homo sapiens
  misc_RNA (1)...(19): siRNA sense strand
gggaaggccuuggauguuu

SEQ ID NO: 1337939 - RNA, 19 nt, Homo sapiens
  misc_RNA (1)...(19): siRNA sense strand
caagaucgcugacuuuggu

SEQ ID NO: 1337940 - RNA, 19 nt, Homo sapiens
  misc_RNA (1)...(19): siRNA sense strand
gaaauugccauccucaaga

SEQ ID NO: 1337941 - RNA, 19 nt, Homo sapiens
  misc_RNA (1)...(19): siRNA sense strand
ugaagaccaugauacguaa

SEQ ID NO: 1337942 - RNA, 19 nt, Homo sapiens
  misc_RNA (1)...(19): siRNA sense strand
ucaaaccacucucugaaga

SEQ ID NO: 1337943 - RNA, 19 nt, Homo sapiens
  misc_RNA (1)...(19): siRNA sense strand
caaguuggccuacaaugaa

SEQ ID NO: 1337944 - RNA, 19 nt, Homo sapiens
  misc_RNA (1)...(19): siRNA sense strand
caaugaaggugcuguccaa

SEQ ID NO: 1337945 - RNA, 19 nt, Homo sapiens
  misc_RNA (1)...(19): siRNA sense strand
acaguaagaucaagaguca

SEQ ID NO: 1337946 - RNA, 19 nt, Homo sapiens
  misc_RNA (1)...(19): siRNA sense strand
ggaaggccuuggauguuug

SEQ ID NO: 1337947 - RNA, 19 nt, Homo sapiens
  misc_RNA (1)...(19): siRNA sense strand
ucaaaggcaucgaguacuu

SEQ ID NO: 1337948 - RNA, 19 nt, Homo sapiens
  misc_RNA (1)...(19): siRNA sense strand
gagcagguguaccaggaaa

SEQ ID NO: 1337949 - RNA, 19 nt, Homo sapiens
  misc_RNA (1)...(19): siRNA sense strand
gugaagaccaugauacgua

SEQ ID NO: 1337950 - RNA, 19 nt, Homo sapiens
  misc_RNA (1)...(19): siRNA sense strand
ggaagugcccacccucaaa

SEQ ID NO: 1337951 - RNA, 19 nt, Homo sapiens
  misc_RNA (1)...(19): siRNA sense strand
ccaaugaggaccaucugua

SEQ ID NO: 1337952 - RNA, 19 nt, Homo sapiens
  misc_RNA (1)...(19): siRNA sense strand
gaucaaaggcaucgaguac

SEQ ID NO: 1337953 - RNA, 19 nt, Homo sapiens
  misc_RNA (1)...(19): siRNA sense strand
caaaggcaucgaguacuua

SEQ ID NO: 1337954 - RNA, 19 nt, Homo sapiens
  misc_RNA (1)...(19): siRNA sense strand
ggaaauugccauccucaag

SEQ ID NO: 1337955 - RNA, 19 nt, Homo sapiens
  misc_RNA (1)...(19): siRNA sense strand
aguauacccugaaggauga

SEQ ID NO: 1337956 - RNA, 19 nt, Homo sapiens
  misc_RNA (1)...(19): siRNA sense strand
ggaggaacgcucacuguca

SEQ ID NO: 1337957 - RNA, 19 nt, Homo sapiens
  misc_RNA (1)...(19): siRNA sense strand
ggcauggaguccuucauug

SEQ ID NO: 1337958 - RNA, 19 nt, Homo sapiens
  misc_RNA (1)...(19): siRNA sense strand
aaauugccauccucaagaa

SEQ ID NO: 1337959 - RNA, 19 nt, Homo sapiens
  misc_RNA (1)...(19): siRNA sense strand
gggcauggaguccuucauu

SEQ ID NO: 1337960 - RNA, 19 nt, Homo sapiens
  misc_RNA (1)...(19): siRNA sense strand
ccugaaggaugaaauugga

SEQ ID NO: 1337961 - RNA, 19 nt, Homo sapiens
  misc_RNA (1)...(19): siRNA sense strand
guacuuacacuaccagaag

SEQ ID NO: 1337962 - RNA, 19 nt, Homo sapiens
  misc_RNA (1)...(19): siRNA sense strand
ucaaguuggccuacaauga

SEQ ID NO: 1337963 - RNA, 19 nt, Homo sapiens
  misc_RNA (1)...(19): siRNA sense strand
ccuauggugucgucaaguu

SEQ ID NO: 1337964 - RNA, 19 nt, Homo sapiens
  misc_RNA (1)...(19): siRNA sense strand
cauccaccgugacaucaaa

SEQ ID NO: 1337965 - RNA, 19 nt, Homo sapiens
  misc_RNA (1)...(19): siRNA sense strand
gagcggaucauguguuuac

SEQ ID NO: 1337966 - RNA, 19 nt, Homo sapiens
  misc_RNA (1)...(19): siRNA sense strand
gcagguguaccaggaaauu

SEQ ID NO: 1337967 - RNA, 19 nt, Homo sapiens
  misc_RNA (1)...(19): siRNA sense strand
caucaagaucgcugacuuu

SEQ ID NO: 1337968 - RNA, 19 nt, Homo sapiens
  misc_RNA (1)...(19): siRNA sense strand
gaucauccaccgugacauc

SEQ ID NO: 1337969 - RNA, 19 nt, Homo sapiens
  misc_RNA (1)...(19): siRNA sense strand
gcauggaguccuucauugu

SEQ ID NO: 1337970 - RNA, 19 nt, Homo sapiens
  misc_RNA (1)...(19): siRNA sense strand
gugacgcgcuccucuccaa

SEQ ID NO: 1337971 - RNA, 19 nt, Homo sapiens
  misc_RNA (1)...(19): siRNA sense strand
acgagcggaucauguguuu

SEQ ID NO: 1337972 - RNA, 19 nt, Homo sapiens
  misc_RNA (1)...(19): siRNA sense strand
acacuauacugcuuugucu

SEQ ID NO: 1337973 - RNA, 19 nt, Homo sapiens
  misc_RNA (1)...(19): siRNA sense strand
ugguggagguccuggauga

SEQ ID NO: 1337974 - RNA, 19 nt, Homo sapiens
  misc_RNA (1)...(19): siRNA sense strand
gucagcgccuggaaacuug

SEQ ID NO: 1337975 - RNA, 19 nt, Homo sapiens
  misc_RNA (1)...(19): siRNA sense strand
ggacuugaaggaccugauc

SEQ ID NO: 1337976 - RNA, 19 nt, Homo sapiens
  misc_RNA (1)...(19): siRNA sense strand
guacaugguguucgaacug

SEQ ID NO: 1337977 - RNA, 19 nt, Homo sapiens
  misc_RNA (1)...(19): siRNA sense strand
ggccgacaguggagucuca

SEQ ID NO: 1337978 - RNA, 19 nt, Homo sapiens
  misc_RNA (1)...(19): siRNA sense strand
ccucaaaccacucucugaa

SEQ ID NO: 1337979 - RNA, 19 nt, Homo sapiens
  misc_RNA (1)...(19): siRNA sense strand
ccaggcccguuucuacuuc

SEQ ID NO: 1337980 - RNA, 19 nt, Homo sapiens
  misc_RNA (1)...(19): siRNA sense strand
cccguaugcuggacaagaa

SEQ ID NO: 1337981 - RNA, 19 nt, Homo sapiens
  misc_RNA (1)...(19): siRNA sense strand
gcaucgaguacuuacacua

SEQ ID NO: 1337982 - RNA, 19 nt, Homo sapiens
  misc_RNA (1)...(19): siRNA sense strand
ugaaggaugaaauuggaaa

SEQ ID NO: 1337983 - RNA, 19 nt, Homo sapiens
  misc_RNA (1)...(19): siRNA sense strand
uagcugaggacuugaagga

SEQ ID NO: 1337984 - RNA, 19 nt, Homo sapiens
  misc_RNA (1)...(19): siRNA sense strand
gaagugcccacccucaaac

SEQ ID NO: 1337985 - RNA, 19 nt, Homo sapiens
  misc_RNA (1)...(19): siRNA sense strand
gguggcagccuggacauga

SEQ ID NO: 1337986 - RNA, 19 nt, Homo sapiens
  misc_RNA (1)...(19): siRNA sense strand
caauaccuacuaugcaaug

SEQ ID NO: 1337987 - RNA, 19 nt, Homo sapiens
  misc_RNA (1)...(19): siRNA sense strand
acaucaagaucgcugacuu

SEQ ID NO: 1337988 - RNA, 19 nt, Homo sapiens
  misc_RNA (1)...(19): siRNA sense strand
ggaucguggugccggaaau

SEQ ID NO: 1337989 - RNA, 19 nt, Homo sapiens
  misc_RNA (1)...(19): siRNA sense strand
aaguuggccuacaaugaaa

SEQ ID NO: 1337990 - RNA, 19 nt, Homo sapiens
  misc_RNA (1)...(19): siRNA sense strand
gaagaccaugauacguaaa

SEQ ID NO: 1337991 - RNA, 19 nt, Homo sapiens
  misc_RNA (1)...(19): siRNA sense strand
cugaagaccaggcccguuu

SEQ ID NO: 1337992 - RNA, 19 nt, Homo sapiens
  misc_RNA (1)...(19): siRNA sense strand
guggcagccuggacaugaa

SEQ ID NO: 1337993 - RNA, 19 nt, Homo sapiens
  misc_RNA (1)...(19): siRNA sense strand
ugacaauaccuacuaugca

SEQ ID NO: 1337994 - RNA, 19 nt, Homo sapiens
  misc_RNA (1)...(19): siRNA sense strand
gcaagcugucucugcaaga

SEQ ID NO: 1337995 - RNA, 19 nt, Homo sapiens
  misc_RNA (1)...(19): siRNA sense strand
gaccugaucacccguaugc

SEQ ID NO: 1337996 - RNA, 19 nt, Homo sapiens
  misc_RNA (1)...(19): siRNA sense strand
acuauacugcuuugucuuu

SEQ ID NO: 1337997 - RNA, 19 nt, Homo sapiens
  misc_RNA (1)...(19): siRNA sense strand
ggcagcagcagcagcgaaa

SEQ ID NO: 1337998 - RNA, 19 nt, Homo sapiens
  misc_RNA (1)...(19): siRNA sense strand
ugugagcaaugaauucaag

SEQ ID NO: 1337999 - RNA, 19 nt, Homo sapiens
  misc_RNA (1)...(19): siRNA sense strand
ugaggaccaucuguacaug

SEQ ID NO: 1338000 - RNA, 19 nt, Homo sapiens
  misc_RNA (1)...(19): siRNA sense strand
gaaggaugaaauuggaaag

SEQ ID NO: 1338001 - RNA, 19 nt, Homo sapiens
  misc_RNA (1)...(19): siRNA sense strand
auacguaaacgcuccuuug

SEQ ID NO: 1338002 - RNA, 19 nt, Homo sapiens
  misc_RNA (1)...(19): siRNA sense strand
caaugaggaccaucuguac

SEQ ID NO: 1338003 - RNA, 19 nt, Homo sapiens
  misc_RNA (1)...(19): siRNA sense strand
uaccuacuaugcaaugaag

SEQ ID NO: 1338004 - RNA, 19 nt, Homo sapiens
  misc_RNA (1)...(19): siRNA sense strand
ggacgagcggaucaugugu

SEQ ID NO: 1338005 - RNA, 19 nt, Homo sapiens
  misc_RNA (1)...(19): siRNA sense strand
cuauacugcuuugucuuug

SEQ ID NO: 1338006 - RNA, 19 nt, Homo sapiens
  misc_RNA (1)...(19): siRNA sense strand
gugacacuauacugcuuug

SEQ ID NO: 1338007 - RNA, 19 nt, Homo sapiens
  misc_RNA (1)...(19): siRNA sense strand
ugacuuuggugugagcaau

SEQ ID NO: 1338008 - RNA, 19 nt, Homo sapiens
  misc_RNA (1)...(19): siRNA sense strand
ggugugagcaaugaauuca

SEQ ID NO: 1338009 - RNA, 19 nt, Homo sapiens
  misc_RNA (1)...(19): siRNA sense strand
cauggaguccuucauugug

SEQ ID NO: 1338010 - RNA, 19 nt, Homo sapiens
  misc_RNA (1)...(19): siRNA sense strand
gaagaccaggcccguuucu

SEQ ID NO: 1338011 - RNA, 19 nt, Homo sapiens
  misc_RNA (1)...(19): siRNA sense strand
gacgagcggaucauguguu

SEQ ID NO: 1338012 - RNA, 19 nt, Homo sapiens
  misc_RNA (1)...(19): siRNA sense strand
ugucagcgccuggaaacuu

SEQ ID NO: 1338013 - RNA, 19 nt, Homo sapiens
  misc_RNA (1)...(19): siRNA sense strand
gauacguaaacgcuccuuu

SEQ ID NO: 1338014 - RNA, 19 nt, Homo sapiens
  misc_RNA (1)...(19): siRNA sense strand
caucgaguacuuacacuac

SEQ ID NO: 1338015 - RNA, 19 nt, Homo sapiens
  misc_RNA (1)...(19): siRNA sense strand
ucacccguaugcuggacaa

SEQ ID NO: 1338016 - RNA, 19 nt, Homo sapiens
  misc_RNA (1)...(19): siRNA sense strand
cgacauagcugaggacuug

SEQ ID NO: 1338017 - RNA, 19 nt, Homo sapiens
  misc_RNA (1)...(19): siRNA sense strand
gacaauaccuacuaugcaa

SEQ ID NO: 1338018 - RNA, 19 nt, Homo sapiens
  misc_RNA (1)...(19): siRNA sense strand
gggaaggccuuggauguuu

SEQ ID NO: 1338019 - RNA, 19 nt, Homo sapiens
  misc_RNA (1)...(19): siRNA sense strand
caagaucgcugacuuuggu

SEQ ID NO: 1338020 - RNA, 19 nt, Homo sapiens
  misc_RNA (1)...(19): siRNA sense strand
gaaauugccauccucaaga

SEQ ID NO: 1338021 - RNA, 19 nt, Homo sapiens
  misc_RNA (1)...(19): siRNA sense strand
ugaagaccaugauacguaa

SEQ ID NO: 1338022 - RNA, 19 nt, Homo sapiens
  misc_RNA (1)...(19): siRNA sense strand
ucaaaccacucucugaaga

SEQ ID NO: 1338023 - RNA, 19 nt, Homo sapiens
  misc_RNA (1)...(19): siRNA sense strand
caaguuggccuacaaugaa

SEQ ID NO: 1338024 - RNA, 19 nt, Homo sapiens
  misc_RNA (1)...(19): siRNA sense strand
caaugaaggugcuguccaa

SEQ ID NO: 1338025 - RNA, 19 nt, Homo sapiens
  misc_RNA (1)...(19): siRNA sense strand
acaguaagaucaagaguca

SEQ ID NO: 1338026 - RNA, 19 nt, Homo sapiens
  misc_RNA (1)...(19): siRNA sense strand
ggaaggccuuggauguuug

SEQ ID NO: 1338027 - RNA, 19 nt, Homo sapiens
  misc_RNA (1)...(19): siRNA sense strand
ucaaaggcaucgaguacuu

SEQ ID NO: 1338028 - RNA, 19 nt, Homo sapiens
  misc_RNA (1)...(19): siRNA sense strand
gagcagguguaccaggaaa

SEQ ID NO: 1338029 - RNA, 19 nt, Homo sapiens
  misc_RNA (1)...(19): siRNA sense strand
gugaagaccaugauacgua

SEQ ID NO: 1338030 - RNA, 19 nt, Homo sapiens
  misc_RNA (1)...(19): siRNA sense strand
ggaagugcccacccucaaa

SEQ ID NO: 1338031 - RNA, 19 nt, Homo sapiens
  misc_RNA (1)...(19): siRNA sense strand
ccaaugaggaccaucugua

SEQ ID NO: 1338032 - RNA, 19 nt, Homo sapiens
  misc_RNA (1)...(19): siRNA sense strand
gaucaaaggcaucgaguac

SEQ ID NO: 1338033 - RNA, 19 nt, Homo sapiens
  misc_RNA (1)...(19): siRNA sense strand
caaaggcaucgaguacuua

SEQ ID NO: 1338034 - RNA, 19 nt, Homo sapiens
  misc_RNA (1)...(19): siRNA sense strand
ggaaauugccauccucaag

SEQ ID NO: 1338035 - RNA, 19 nt, Homo sapiens
  misc_RNA (1)...(19): siRNA sense strand
aguauacccugaaggauga

SEQ ID NO: 1338036 - RNA, 19 nt, Homo sapiens
  misc_RNA (1)...(19): siRNA sense strand
ggaggaacgcucacuguca

SEQ ID NO: 1338037 - RNA, 19 nt, Homo sapiens
  misc_RNA (1)...(19): siRNA sense strand
ggcauggaguccuucauug

SEQ ID NO: 1338038 - RNA, 19 nt, Homo sapiens
  misc_RNA (1)...(19): siRNA sense strand
aaauugccauccucaagaa

SEQ ID NO: 1338039 - RNA, 19 nt, Homo sapiens
  misc_RNA (1)...(19): siRNA sense strand
gggcauggaguccuucauu

SEQ ID NO: 1338040 - RNA, 19 nt, Homo sapiens
  misc_RNA (1)...(19): siRNA sense strand
ccugaaggaugaaauugga

SEQ ID NO: 1338041 - RNA, 19 nt, Homo sapiens
  misc_RNA (1)...(19): siRNA sense strand
guacuuacacuaccagaag

SEQ ID NO: 1338042 - RNA, 19 nt, Homo sapiens
  misc_RNA (1)...(19): siRNA sense strand
ucaaguuggccuacaauga

SEQ ID NO: 1338043 - RNA, 19 nt, Homo sapiens
  misc_RNA (1)...(19): siRNA sense strand
ccuauggugucgucaaguu

SEQ ID NO: 1338044 - RNA, 19 nt, Homo sapiens
  misc_RNA (1)...(19): siRNA sense strand
cauccaccgugacaucaaa

SEQ ID NO: 1338045 - RNA, 19 nt, Homo sapiens
  misc_RNA (1)...(19): siRNA sense strand
gagcggaucauguguuuac

SEQ ID NO: 1338046 - RNA, 19 nt, Homo sapiens
  misc_RNA (1)...(19): siRNA sense strand
gcagguguaccaggaaauu

SEQ ID NO: 1338047 - RNA, 19 nt, Homo sapiens
  misc_RNA (1)...(19): siRNA sense strand
caucaagaucgcugacuuu

SEQ ID NO: 1338048 - RNA, 19 nt, Homo sapiens
  misc_RNA (1)...(19): siRNA sense strand
gaucauccaccgugacauc

SEQ ID NO: 1338049 - RNA, 19 nt, Homo sapiens
  misc_RNA (1)...(19): siRNA sense strand
gcauggaguccuucauugu

SEQ ID NO: 1338050 - RNA, 19 nt, Homo sapiens
  misc_RNA (1)...(19): siRNA sense strand
gugacgcgcuccucuccaa

SEQ ID NO: 1338051 - RNA, 19 nt, Homo sapiens
  misc_RNA (1)...(19): siRNA sense strand
acgagcggaucauguguuu

SEQ ID NO: 1338052 - RNA, 19 nt, Homo sapiens
  misc_RNA (1)...(19): siRNA sense strand
acacuauacugcuuugucu

SEQ ID NO: 1338053 - RNA, 19 nt, Homo sapiens
  misc_RNA (1)...(19): siRNA sense strand
ugguggagguccuggauga

SEQ ID NO: 1338054 - RNA, 19 nt, Homo sapiens
  misc_RNA (1)...(19): siRNA sense strand
gucagcgccuggaaacuug

SEQ ID NO: 1338055 - RNA, 19 nt, Homo sapiens
  misc_RNA (1)...(19): siRNA sense strand
ggacuugaaggaccugauc

SEQ ID NO: 1338056 - RNA, 19 nt, Homo sapiens
  misc_RNA (1)...(19): siRNA sense strand
guacaugguguucgaacug

SEQ ID NO: 1338057 - RNA, 19 nt, Homo sapiens
  misc_RNA (1)...(19): siRNA sense strand
ggccgacaguggagucuca

SEQ ID NO: 1338058 - RNA, 19 nt, Homo sapiens
  misc_RNA (1)...(19): siRNA sense strand
ccucaaaccacucucugaa

SEQ ID NO: 1338059 - RNA, 19 nt, Homo sapiens
  misc_RNA (1)...(19): siRNA sense strand
ccaggcccguuucuacuuc

SEQ ID NO: 1338060 - RNA, 19 nt, Homo sapiens
  misc_RNA (1)...(19): siRNA sense strand
cccguaugcuggacaagaa

SEQ ID NO: 1338061 - RNA, 19 nt, Homo sapiens
  misc_RNA (1)...(19): siRNA sense strand
gcaucgaguacuuacacua

SEQ ID NO: 1338062 - RNA, 19 nt, Homo sapiens
  misc_RNA (1)...(19): siRNA sense strand
ugaaggaugaaauuggaaa

SEQ ID NO: 1338063 - RNA, 19 nt, Homo sapiens
  misc_RNA (1)...(19): siRNA sense strand
uagcugaggacuugaagga

SEQ ID NO: 1338064 - RNA, 19 nt, Homo sapiens
  misc_RNA (1)...(19): siRNA sense strand
gaagugcccacccucaaac

SEQ ID NO: 1338065 - RNA, 19 nt, Homo sapiens
  misc_RNA (1)...(19): siRNA sense strand
gguggcagccuggacauga

SEQ ID NO: 1338066 - RNA, 19 nt, Homo sapiens
  misc_RNA (1)...(19): siRNA sense strand
caauaccuacuaugcaaug

SEQ ID NO: 1338067 - RNA, 19 nt, Homo sapiens
  misc_RNA (1)...(19): siRNA sense strand
acaucaagaucgcugacuu

SEQ ID NO: 1338068 - RNA, 19 nt, Homo sapiens
  misc_RNA (1)...(19): siRNA sense strand
ggaucguggugccggaaau

SEQ ID NO: 1338069 - RNA, 19 nt, Homo sapiens
  misc_RNA (1)...(19): siRNA sense strand
aaguuggccuacaaugaaa

SEQ ID NO: 1338070 - RNA, 19 nt, Homo sapiens
  misc_RNA (1)...(19): siRNA sense strand
gaagaccaugauacguaaa

SEQ ID NO: 1338071 - RNA, 19 nt, Homo sapiens
  misc_RNA (1)...(19): siRNA sense strand
cugaagaccaggcccguuu

SEQ ID NO: 1338072 - RNA, 19 nt, Homo sapiens
  misc_RNA (1)...(19): siRNA sense strand
guggcagccuggacaugaa

SEQ ID NO: 1338073 - RNA, 19 nt, Homo sapiens
  misc_RNA (1)...(19): siRNA sense strand
ugacaauaccuacuaugca

SEQ ID NO: 1338074 - RNA, 19 nt, Homo sapiens
  misc_RNA (1)...(19): siRNA sense strand
gcaagcugucucugcaaga

SEQ ID NO: 1338075 - RNA, 19 nt, Homo sapiens
  misc_RNA (1)...(19): siRNA sense strand
gaccugaucacccguaugc

SEQ ID NO: 1338076 - RNA, 19 nt, Homo sapiens
  misc_RNA (1)...(19): siRNA sense strand
acuauacugcuuugucuuu

SEQ ID NO: 1338077 - RNA, 19 nt, Homo sapiens
  misc_RNA (1)...(19): siRNA sense strand
ggcagcagcagcagcgaaa

SEQ ID NO: 1338078 - RNA, 19 nt, Homo sapiens
  misc_RNA (1)...(19): siRNA sense strand
ugugagcaaugaauucaag

SEQ ID NO: 1338079 - RNA, 19 nt, Homo sapiens
  misc_RNA (1)...(19): siRNA sense strand
ugaggaccaucuguacaug

SEQ ID NO: 1338080 - RNA, 19 nt, Homo sapiens
  misc_RNA (1)...(19): siRNA sense strand
gaaggaugaaauuggaaag

SEQ ID NO: 1338081 - RNA, 19 nt, Homo sapiens
  misc_RNA (1)...(19): siRNA sense strand
auacguaaacgcuccuuug

SEQ ID NO: 1338082 - RNA, 19 nt, Homo sapiens
  misc_RNA (1)...(19): siRNA sense strand
caaugaggaccaucuguac

SEQ ID NO: 1338083 - RNA, 19 nt, Homo sapiens
  misc_RNA (1)...(19): siRNA sense strand
uaccuacuaugcaaugaag

SEQ ID NO: 1338084 - RNA, 19 nt, Homo sapiens
  misc_RNA (1)...(19): siRNA sense strand
ggacgagcggaucaugugu

SEQ ID NO: 1338085 - RNA, 19 nt, Homo sapiens
  misc_RNA (1)...(19): siRNA sense strand
cuauacugcuuugucuuug

SEQ ID NO: 1338086 - RNA, 19 nt, Homo sapiens
  misc_RNA (1)...(19): siRNA sense strand
gugacacuauacugcuuug

SEQ ID NO: 1338087 - RNA, 19 nt, Homo sapiens
  misc_RNA (1)...(19): siRNA sense strand
ugacuuuggugugagcaau

SEQ ID NO: 1338088 - RNA, 19 nt, Homo sapiens
  misc_RNA (1)...(19): siRNA sense strand
ggugugagcaaugaauuca

SEQ ID NO: 1338089 - RNA, 19 nt, Homo sapiens
  misc_RNA (1)...(19): siRNA sense strand
cauggaguccuucauugug

SEQ ID NO: 1338090 - RNA, 19 nt, Homo sapiens
  misc_RNA (1)...(19): siRNA sense strand
gaagaccaggcccguuucu

SEQ ID NO: 1338091 - RNA, 19 nt, Homo sapiens
  misc_RNA (1)...(19): siRNA sense strand
gacgagcggaucauguguu

SEQ ID NO: 1338092 - RNA, 19 nt, Homo sapiens
  misc_RNA (1)...(19): siRNA sense strand
ugucagcgccuggaaacuu

SEQ ID NO: 1338093 - RNA, 19 nt, Homo sapiens
  misc_RNA (1)...(19): siRNA sense strand
gauacguaaacgcuccuuu

SEQ ID NO: 1338094 - RNA, 19 nt, Homo sapiens
  misc_RNA (1)...(19): siRNA sense strand
caucgaguacuuacacuac

SEQ ID NO: 1338095 - RNA, 19 nt, Homo sapiens
  misc_RNA (1)...(19): siRNA sense strand
ucacccguaugcuggacaa

SEQ ID NO: 1338096 - RNA, 19 nt, Homo sapiens
  misc_RNA (1)...(19): siRNA sense strand
cgacauagcugaggacuug

SEQ ID NO: 1338097 - RNA, 19 nt, Homo sapiens
  misc_RNA (1)...(19): siRNA sense strand
gacaauaccuacuaugcaa

SEQ ID NO: 1338098 - RNA, 19 nt, Homo sapiens
  misc_RNA (1)...(19): siRNA sense strand
gggaaggccuuggauguuu

SEQ ID NO: 1338099 - RNA, 19 nt, Homo sapiens
  misc_RNA (1)...(19): siRNA sense strand
caagaucgcugacuuuggu

SEQ ID NO: 1338100 - RNA, 19 nt, Homo sapiens
  misc_RNA (1)...(19): siRNA sense strand
gaaauugccauccucaaga

SEQ ID NO: 1338101 - RNA, 19 nt, Homo sapiens
  misc_RNA (1)...(19): siRNA sense strand
ugaagaccaugauacguaa

SEQ ID NO: 1338102 - RNA, 19 nt, Homo sapiens
  misc_RNA (1)...(19): siRNA sense strand
ucaaaccacucucugaaga

SEQ ID NO: 1338103 - RNA, 19 nt, Homo sapiens
  misc_RNA (1)...(19): siRNA sense strand
caaguuggccuacaaugaa

SEQ ID NO: 1338104 - RNA, 19 nt, Homo sapiens
  misc_RNA (1)...(19): siRNA sense strand
caaugaaggugcuguccaa

SEQ ID NO: 1338105 - RNA, 19 nt, Homo sapiens
  misc_RNA (1)...(19): siRNA sense strand
acaguaagaucaagaguca

SEQ ID NO: 1338106 - RNA, 19 nt, Homo sapiens
  misc_RNA (1)...(19): siRNA sense strand
ggaaggccuuggauguuug

SEQ ID NO: 1338107 - RNA, 19 nt, Homo sapiens
  misc_RNA (1)...(19): siRNA sense strand
ucaaaggcaucgaguacuu

SEQ ID NO: 1338108 - RNA, 19 nt, Homo sapiens
  misc_RNA (1)...(19): siRNA sense strand
gagcagguguaccaggaaa

SEQ ID NO: 1338109 - RNA, 19 nt, Homo sapiens
  misc_RNA (1)...(19): siRNA sense strand
gugaagaccaugauacgua

SEQ ID NO: 1338110 - RNA, 19 nt, Homo sapiens
  misc_RNA (1)...(19): siRNA sense strand
ggaagugcccacccucaaa

SEQ ID NO: 1338111 - RNA, 19 nt, Homo sapiens
  misc_RNA (1)...(19): siRNA sense strand
ccaaugaggaccaucugua

SEQ ID NO: 1338112 - RNA, 19 nt, Homo sapiens
  misc_RNA (1)...(19): siRNA sense strand
gaucaaaggcaucgaguac

SEQ ID NO: 1338113 - RNA, 19 nt, Homo sapiens
  misc_RNA (1)...(19): siRNA sense strand
caaaggcaucgaguacuua

SEQ ID NO: 1338114 - RNA, 19 nt, Homo sapiens
  misc_RNA (1)...(19): siRNA sense strand
ggaaauugccauccucaag

SEQ ID NO: 1338115 - RNA, 19 nt, Homo sapiens
  misc_RNA (1)...(19): siRNA sense strand
aguauacccugaaggauga

SEQ ID NO: 1338116 - RNA, 19 nt, Homo sapiens
  misc_RNA (1)...(19): siRNA sense strand
ggaggaacgcucacuguca

SEQ ID NO: 1338117 - RNA, 19 nt, Homo sapiens
  misc_RNA (1)...(19): siRNA sense strand
ggcauggaguccuucauug

SEQ ID NO: 1338118 - RNA, 19 nt, Homo sapiens
  misc_RNA (1)...(19): siRNA sense strand
aaauugccauccucaagaa

SEQ ID NO: 1338119 - RNA, 19 nt, Homo sapiens
  misc_RNA (1)...(19): siRNA sense strand
gggcauggaguccuucauu

SEQ ID NO: 1338120 - RNA, 19 nt, Homo sapiens
  misc_RNA (1)...(19): siRNA sense strand
ccugaaggaugaaauugga

SEQ ID NO: 1338121 - RNA, 19 nt, Homo sapiens
  misc_RNA (1)...(19): siRNA sense strand
guacuuacacuaccagaag

SEQ ID NO: 1338122 - RNA, 19 nt, Homo sapiens
  misc_RNA (1)...(19): siRNA sense strand
ucaaguuggccuacaauga

SEQ ID NO: 1338123 - RNA, 19 nt, Homo sapiens
  misc_RNA (1)...(19): siRNA sense strand
ccuauggugucgucaaguu

SEQ ID NO: 1338124 - RNA, 19 nt, Homo sapiens
  misc_RNA (1)...(19): siRNA sense strand
cauccaccgugacaucaaa

SEQ ID NO: 1338125 - RNA, 19 nt, Homo sapiens
  misc_RNA (1)...(19): siRNA sense strand
gagcggaucauguguuuac

SEQ ID NO: 1338126 - RNA, 19 nt, Homo sapiens
  misc_RNA (1)...(19): siRNA sense strand
gcagguguaccaggaaauu

SEQ ID NO: 1338127 - RNA, 19 nt, Homo sapiens
  misc_RNA (1)...(19): siRNA sense strand
caucaagaucgcugacuuu

SEQ ID NO: 1338128 - RNA, 19 nt, Homo sapiens
  misc_RNA (1)...(19): siRNA sense strand
gaucauccaccgugacauc

SEQ ID NO: 1338129 - RNA, 19 nt, Homo sapiens
  misc_RNA (1)...(19): siRNA sense strand
gcauggaguccuucauugu

SEQ ID NO: 1338130 - RNA, 19 nt, Homo sapiens
  misc_RNA (1)...(19): siRNA sense strand
gugacgcgcuccucuccaa

SEQ ID NO: 1338131 - RNA, 19 nt, Homo sapiens
  misc_RNA (1)...(19): siRNA sense strand
acgagcggaucauguguuu

SEQ ID NO: 1338132 - RNA, 19 nt, Homo sapiens
  misc_RNA (1)...(19): siRNA sense strand
acacuauacugcuuugucu

SEQ ID NO: 1338133 - RNA, 19 nt, Homo sapiens
  misc_RNA (1)...(19): siRNA sense strand
ugguggagguccuggauga

SEQ ID NO: 1338134 - RNA, 19 nt, Homo sapiens
  misc_RNA (1)...(19): siRNA sense strand
gucagcgccuggaaacuug

SEQ ID NO: 1338135 - RNA, 19 nt, Homo sapiens
  misc_RNA (1)...(19): siRNA sense strand
ggacuugaaggaccugauc

SEQ ID NO: 1338136 - RNA, 19 nt, Homo sapiens
  misc_RNA (1)...(19): siRNA sense strand
guacaugguguucgaacug

SEQ ID NO: 1338137 - RNA, 19 nt, Homo sapiens
  misc_RNA (1)...(19): siRNA sense strand
ggccgacaguggagucuca

SEQ ID NO: 1338138 - RNA, 19 nt, Homo sapiens
  misc_RNA (1)...(19): siRNA sense strand
ccucaaaccacucucugaa

SEQ ID NO: 1338139 - RNA, 19 nt, Homo sapiens
  misc_RNA (1)...(19): siRNA sense strand
ccaggcccguuucuacuuc

SEQ ID NO: 1338140 - RNA, 19 nt, Homo sapiens
  misc_RNA (1)...(19): siRNA sense strand
cccguaugcuggacaagaa

SEQ ID NO: 1338141 - RNA, 19 nt, Homo sapiens
  misc_RNA (1)...(19): siRNA sense strand
gcaucgaguacuuacacua

SEQ ID NO: 1338142 - RNA, 19 nt, Homo sapiens
  misc_RNA (1)...(19): siRNA sense strand
ugaaggaugaaauuggaaa

SEQ ID NO: 1338143 - RNA, 19 nt, Homo sapiens
  misc_RNA (1)...(19): siRNA sense strand
uagcugaggacuugaagga

SEQ ID NO: 1338144 - RNA, 19 nt, Homo sapiens
  misc_RNA (1)...(19): siRNA sense strand
gaagugcccacccucaaac

SEQ ID NO: 1338145 - RNA, 19 nt, Homo sapiens
  misc_RNA (1)...(19): siRNA sense strand
gguggcagccuggacauga

SEQ ID NO: 1338146 - RNA, 19 nt, Homo sapiens
  misc_RNA (1)...(19): siRNA sense strand
caauaccuacuaugcaaug

SEQ ID NO: 1338147 - RNA, 19 nt, Homo sapiens
  misc_RNA (1)...(19): siRNA sense strand
acaucaagaucgcugacuu

SEQ ID NO: 1338148 - RNA, 19 nt, Homo sapiens
  misc_RNA (1)...(19): siRNA sense strand
ggaucguggugccggaaau

SEQ ID NO: 1338149 - RNA, 19 nt, Homo sapiens
  misc_RNA (1)...(19): siRNA sense strand
aaguuggccuacaaugaaa

SEQ ID NO: 1338150 - RNA, 19 nt, Homo sapiens
  misc_RNA (1)...(19): siRNA sense strand
gaagaccaugauacguaaa

SEQ ID NO: 1338151 - RNA, 19 nt, Homo sapiens
  misc_RNA (1)...(19): siRNA sense strand
cugaagaccaggcccguuu

SEQ ID NO: 1338152 - RNA, 19 nt, Homo sapiens
  misc_RNA (1)...(19): siRNA sense strand
guggcagccuggacaugaa

SEQ ID NO: 1338153 - RNA, 19 nt, Homo sapiens
  misc_RNA (1)...(19): siRNA sense strand
ugacaauaccuacuaugca

SEQ ID NO: 1338154 - RNA, 19 nt, Homo sapiens
  misc_RNA (1)...(19): siRNA sense strand
gcaagcugucucugcaaga

SEQ ID NO: 1338155 - RNA, 19 nt, Homo sapiens
  misc_RNA (1)...(19): siRNA sense strand
gaccugaucacccguaugc

SEQ ID NO: 1338156 - RNA, 19 nt, Homo sapiens
  misc_RNA (1)...(19): siRNA sense strand
acuauacugcuuugucuuu

SEQ ID NO: 1338157 - RNA, 19 nt, Homo sapiens
  misc_RNA (1)...(19): siRNA sense strand
ggcagcagcagcagcgaaa

SEQ ID NO: 1338158 - RNA, 19 nt, Homo sapiens
  misc_RNA (1)...(19): siRNA sense strand
ugugagcaaugaauucaag

SEQ ID NO: 1338159 - RNA, 19 nt, Homo sapiens
  misc_RNA (1)...(19): siRNA sense strand
ugaggaccaucuguacaug

SEQ ID NO: 1338160 - RNA, 19 nt, Homo sapiens
  misc_RNA (1)...(19): siRNA sense strand
gaaggaugaaauuggaaag

SEQ ID NO: 1338161 - RNA, 19 nt, Homo sapiens
  misc_RNA (1)...(19): siRNA sense strand
auacguaaacgcuccuuug

SEQ ID NO: 1338162 - RNA, 19 nt, Homo sapiens
  misc_RNA (1)...(19): siRNA sense strand
caaugaggaccaucuguac

SEQ ID NO: 1338163 - RNA, 19 nt, Homo sapiens
  misc_RNA (1)...(19): siRNA sense strand
uaccuacuaugcaaugaag

SEQ ID NO: 1338164 - RNA, 19 nt, Homo sapiens
  misc_RNA (1)...(19): siRNA sense strand
ggacgagcggaucaugugu

SEQ ID NO: 1338165 - RNA, 19 nt, Homo sapiens
  misc_RNA (1)...(19): siRNA sense strand
cuauacugcuuugucuuug

SEQ ID NO: 1338166 - RNA, 19 nt, Homo sapiens
  misc_RNA (1)...(19): siRNA sense strand
gugacacuauacugcuuug

SEQ ID NO: 1338167 - RNA, 19 nt, Homo sapiens
  misc_RNA (1)...(19): siRNA sense strand
ugacuuuggugugagcaau

SEQ ID NO: 1338168 - RNA, 19 nt, Homo sapiens
  misc_RNA (1)...(19): siRNA sense strand
ggugugagcaaugaauuca

SEQ ID NO: 1338169 - RNA, 19 nt, Homo sapiens
  misc_RNA (1)...(19): siRNA sense strand
cauggaguccuucauugug

SEQ ID NO: 1338170 - RNA, 19 nt, Homo sapiens
  misc_RNA (1)...(19): siRNA sense strand
gaagaccaggcccguuucu

SEQ ID NO: 1338171 - RNA, 19 nt, Homo sapiens
  misc_RNA (1)...(19): siRNA sense strand
gacgagcggaucauguguu

SEQ ID NO: 1338172 - RNA, 19 nt, Homo sapiens
  misc_RNA (1)...(19): siRNA sense strand
ugucagcgccuggaaacuu

SEQ ID NO: 1338173 - RNA, 19 nt, Homo sapiens
  misc_RNA (1)...(19): siRNA sense strand
gauacguaaacgcuccuuu

SEQ ID NO: 1338174 - RNA, 19 nt, Homo sapiens
  misc_RNA (1)...(19): siRNA sense strand
caucgaguacuuacacuac

SEQ ID NO: 1338175 - RNA, 19 nt, Homo sapiens
  misc_RNA (1)...(19): siRNA sense strand
ucacccguaugcuggacaa

SEQ ID NO: 1338176 - RNA, 19 nt, Homo sapiens
  misc_RNA (1)...(19): siRNA sense strand
cgacauagcugaggacuug

SEQ ID NO: 1338177 - RNA, 19 nt, Homo sapiens
  misc_RNA (1)...(19): siRNA sense strand
gacaauaccuacuaugcaa

SEQ ID NO: 1338178 - RNA, 19 nt, Homo sapiens
  misc_RNA (1)...(19): siRNA sense strand
gggaaggccuuggauguuu

SEQ ID NO: 1338179 - RNA, 19 nt, Homo sapiens
  misc_RNA (1)...(19): siRNA sense strand
caagaucgcugacuuuggu

SEQ ID NO: 1338180 - RNA, 19 nt, Homo sapiens
  misc_RNA (1)...(19): siRNA sense strand
gaaauugccauccucaaga

SEQ ID NO: 1338181 - RNA, 19 nt, Homo sapiens
  misc_RNA (1)...(19): siRNA sense strand
ugaagaccaugauacguaa

SEQ ID NO: 1338182 - RNA, 19 nt, Homo sapiens
  misc_RNA (1)...(19): siRNA sense strand
ucaaaccacucucugaaga

SEQ ID NO: 1338183 - RNA, 19 nt, Homo sapiens
  misc_RNA (1)...(19): siRNA sense strand
caaguuggccuacaaugaa

SEQ ID NO: 1338184 - RNA, 19 nt, Homo sapiens
  misc_RNA (1)...(19): siRNA sense strand
caaugaaggugcuguccaa

SEQ ID NO: 1338185 - RNA, 19 nt, Homo sapiens
  misc_RNA (1)...(19): siRNA sense strand
acaguaagaucaagaguca

SEQ ID NO: 1338186 - RNA, 19 nt, Homo sapiens
  misc_RNA (1)...(19): siRNA sense strand
ggaaggccuuggauguuug

SEQ ID NO: 1338187 - RNA, 19 nt, Homo sapiens
  misc_RNA (1)...(19): siRNA sense strand
ucaaaggcaucgaguacuu

SEQ ID NO: 1338188 - RNA, 19 nt, Homo sapiens
  misc_RNA (1)...(19): siRNA sense strand
gagcagguguaccaggaaa

SEQ ID NO: 1338189 - RNA, 19 nt, Homo sapiens
  misc_RNA (1)...(19): siRNA sense strand
gugaagaccaugauacgua

SEQ ID NO: 1338190 - RNA, 19 nt, Homo sapiens
  misc_RNA (1)...(19): siRNA sense strand
ggaagugcccacccucaaa

SEQ ID NO: 1338191 - RNA, 19 nt, Homo sapiens
  misc_RNA (1)...(19): siRNA sense strand
ccaaugaggaccaucugua

SEQ ID NO: 1338192 - RNA, 19 nt, Homo sapiens
  misc_RNA (1)...(19): siRNA sense strand
gaucaaaggcaucgaguac

SEQ ID NO: 1338193 - RNA, 19 nt, Homo sapiens
  misc_RNA (1)...(19): siRNA sense strand
caaaggcaucgaguacuua

SEQ ID NO: 1338194 - RNA, 19 nt, Homo sapiens
  misc_RNA (1)...(19): siRNA sense strand
ggaaauugccauccucaag

SEQ ID NO: 1338195 - RNA, 19 nt, Homo sapiens
  misc_RNA (1)...(19): siRNA sense strand
aguauacccugaaggauga

SEQ ID NO: 1338196 - RNA, 19 nt, Homo sapiens
  misc_RNA (1)...(19): siRNA sense strand
ggaggaacgcucacuguca

SEQ ID NO: 1338197 - RNA, 19 nt, Homo sapiens
  misc_RNA (1)...(19): siRNA sense strand
ggcauggaguccuucauug

SEQ ID NO: 1338198 - RNA, 19 nt, Homo sapiens
  misc_RNA (1)...(19): siRNA sense strand
aaauugccauccucaagaa

SEQ ID NO: 1338199 - RNA, 19 nt, Homo sapiens
  misc_RNA (1)...(19): siRNA sense strand
gggcauggaguccuucauu

SEQ ID NO: 1338200 - RNA, 19 nt, Homo sapiens
  misc_RNA (1)...(19): siRNA sense strand
ccugaaggaugaaauugga

SEQ ID NO: 1338201 - RNA, 19 nt, Homo sapiens
  misc_RNA (1)...(19): siRNA sense strand
guacuuacacuaccagaag

SEQ ID NO: 1338202 - RNA, 19 nt, Homo sapiens
  misc_RNA (1)...(19): siRNA sense strand
ucaaguuggccuacaauga

SEQ ID NO: 1338203 - RNA, 19 nt, Homo sapiens
  misc_RNA (1)...(19): siRNA sense strand
ccuauggugucgucaaguu

SEQ ID NO: 1338204 - RNA, 19 nt, Homo sapiens
  misc_RNA (1)...(19): siRNA sense strand
cauccaccgugacaucaaa

SEQ ID NO: 1338205 - RNA, 19 nt, Homo sapiens
  misc_RNA (1)...(19): siRNA sense strand
gagcggaucauguguuuac

SEQ ID NO: 1338206 - RNA, 19 nt, Homo sapiens
  misc_RNA (1)...(19): siRNA sense strand
gcagguguaccaggaaauu

SEQ ID NO: 1338207 - RNA, 19 nt, Homo sapiens
  misc_RNA (1)...(19): siRNA sense strand
caucaagaucgcugacuuu

SEQ ID NO: 1338208 - RNA, 19 nt, Homo sapiens
  misc_RNA (1)...(19): siRNA sense strand
gaucauccaccgugacauc

SEQ ID NO: 1338209 - RNA, 19 nt, Homo sapiens
  misc_RNA (1)...(19): siRNA sense strand
gcauggaguccuucauugu

SEQ ID NO: 1338210 - RNA, 19 nt, Homo sapiens
  misc_RNA (1)...(19): siRNA sense strand
gugacgcgcuccucuccaa

SEQ ID NO: 1338211 - RNA, 19 nt, Homo sapiens
  misc_RNA (1)...(19): siRNA sense strand
acgagcggaucauguguuu

SEQ ID NO: 1338212 - RNA, 19 nt, Homo sapiens
  misc_RNA (1)...(19): siRNA sense strand
acacuauacugcuuugucu

SEQ ID NO: 1338213 - RNA, 19 nt, Homo sapiens
  misc_RNA (1)...(19): siRNA sense strand
ugguggagguccuggauga

SEQ ID NO: 1338214 - RNA, 19 nt, Homo sapiens
  misc_RNA (1)...(19): siRNA sense strand
gucagcgccuggaaacuug

SEQ ID NO: 1338215 - RNA, 19 nt, Homo sapiens
  misc_RNA (1)...(19): siRNA sense strand
ggacuugaaggaccugauc

SEQ ID NO: 1338216 - RNA, 19 nt, Homo sapiens
  misc_RNA (1)...(19): siRNA sense strand
guacaugguguucgaacug

SEQ ID NO: 1338217 - RNA, 19 nt, Homo sapiens
  misc_RNA (1)...(19): siRNA sense strand
ggccgacaguggagucuca

SEQ ID NO: 1338218 - RNA, 19 nt, Homo sapiens
  misc_RNA (1)...(19): siRNA sense strand
ccucaaaccacucucugaa

SEQ ID NO: 1338219 - RNA, 19 nt, Homo sapiens
  misc_RNA (1)...(19): siRNA sense strand
ccaggcccguuucuacuuc

SEQ ID NO: 1338220 - RNA, 19 nt, Homo sapiens
  misc_RNA (1)...(19): siRNA sense strand
cccguaugcuggacaagaa

SEQ ID NO: 1338221 - RNA, 19 nt, Homo sapiens
  misc_RNA (1)...(19): siRNA sense strand
gcaucgaguacuuacacua

SEQ ID NO: 1338222 - RNA, 19 nt, Homo sapiens
  misc_RNA (1)...(19): siRNA sense strand
ugaaggaugaaauuggaaa

SEQ ID NO: 1338223 - RNA, 19 nt, Homo sapiens
  misc_RNA (1)...(19): siRNA sense strand
uagcugaggacuugaagga

SEQ ID NO: 1338224 - RNA, 19 nt, Homo sapiens
  misc_RNA (1)...(19): siRNA sense strand
gaagugcccacccucaaac

SEQ ID NO: 1338225 - RNA, 19 nt, Homo sapiens
  misc_RNA (1)...(19): siRNA sense strand
gguggcagccuggacauga

SEQ ID NO: 1338226 - RNA, 19 nt, Homo sapiens
  misc_RNA (1)...(19): siRNA sense strand
caauaccuacuaugcaaug

SEQ ID NO: 1338227 - RNA, 19 nt, Homo sapiens
  misc_RNA (1)...(19): siRNA sense strand
acaucaagaucgcugacuu

SEQ ID NO: 1338228 - RNA, 19 nt, Homo sapiens
  misc_RNA (1)...(19): siRNA sense strand
ggaucguggugccggaaau

SEQ ID NO: 1338229 - RNA, 19 nt, Homo sapiens
  misc_RNA (1)...(19): siRNA sense strand
aaguuggccuacaaugaaa

SEQ ID NO: 1338230 - RNA, 19 nt, Homo sapiens
  misc_RNA (1)...(19): siRNA sense strand
gaagaccaugauacguaaa

SEQ ID NO: 1338231 - RNA, 19 nt, Homo sapiens
  misc_RNA (1)...(19): siRNA sense strand
cugaagaccaggcccguuu

SEQ ID NO: 1338232 - RNA, 19 nt, Homo sapiens
  misc_RNA (1)...(19): siRNA sense strand
guggcagccuggacaugaa

SEQ ID NO: 1338233 - RNA, 19 nt, Homo sapiens
  misc_RNA (1)...(19): siRNA sense strand
ugacaauaccuacuaugca

SEQ ID NO: 1338234 - RNA, 19 nt, Homo sapiens
  misc_RNA (1)...(19): siRNA sense strand
gcaagcugucucugcaaga

SEQ ID NO: 1338235 - RNA, 19 nt, Homo sapiens
  misc_RNA (1)...(19): siRNA sense strand
gaccugaucacccguaugc

SEQ ID NO: 1338236 - RNA, 19 nt, Homo sapiens
  misc_RNA (1)...(19): siRNA sense strand
acuauacugcuuugucuuu

SEQ ID NO: 1338237 - RNA, 19 nt, Homo sapiens
  misc_RNA (1)...(19): siRNA sense strand
ggcagcagcagcagcgaaa

SEQ ID NO: 1338238 - RNA, 19 nt, Homo sapiens
  misc_RNA (1)...(19): siRNA sense strand
ugugagcaaugaauucaag

SEQ ID NO: 1338239 - RNA, 19 nt, Homo sapiens
  misc_RNA (1)...(19): siRNA sense strand
ugaggaccaucuguacaug

SEQ ID NO: 1338240 - RNA, 19 nt, Homo sapiens
  misc_RNA (1)...(19): siRNA sense strand
gaaggaugaaauuggaaag

SEQ ID NO: 1338241 - RNA, 19 nt, Homo sapiens
  misc_RNA (1)...(19): siRNA sense strand
auacguaaacgcuccuuug

SEQ ID NO: 1338242 - RNA, 19 nt, Homo sapiens
  misc_RNA (1)...(19): siRNA sense strand
caaugaggaccaucuguac

SEQ ID NO: 1338243 - RNA, 19 nt, Homo sapiens
  misc_RNA (1)...(19): siRNA sense strand
uaccuacuaugcaaugaag

SEQ ID NO: 1338244 - RNA, 19 nt, Homo sapiens
  misc_RNA (1)...(19): siRNA sense strand
ggacgagcggaucaugugu

SEQ ID NO: 1338245 - RNA, 19 nt, Homo sapiens
  misc_RNA (1)...(19): siRNA sense strand
cuauacugcuuugucuuug

SEQ ID NO: 1338246 - RNA, 19 nt, Homo sapiens
  misc_RNA (1)...(19): siRNA sense strand
gugacacuauacugcuuug

SEQ ID NO: 1338247 - RNA, 19 nt, Homo sapiens
  misc_RNA (1)...(19): siRNA sense strand
ugacuuuggugugagcaau

SEQ ID NO: 1338248 - RNA, 19 nt, Homo sapiens
  misc_RNA (1)...(19): siRNA sense strand
ggugugagcaaugaauuca

SEQ ID NO: 1338249 - RNA, 19 nt, Homo sapiens
  misc_RNA (1)...(19): siRNA sense strand
cauggaguccuucauugug

SEQ ID NO: 1338250 - RNA, 19 nt, Homo sapiens
  misc_RNA (1)...(19): siRNA sense strand
gaagaccaggcccguuucu

SEQ ID NO: 1338251 - RNA, 19 nt, Homo sapiens
  misc_RNA (1)...(19): siRNA sense strand
gacgagcggaucauguguu

SEQ ID NO: 1338252 - RNA, 19 nt, Homo sapiens
  misc_RNA (1)...(19): siRNA sense strand
ugucagcgccuggaaacuu

SEQ ID NO: 1338253 - RNA, 19 nt, Homo sapiens
  misc_RNA (1)...(19): siRNA sense strand
gauacguaaacgcuccuuu

SEQ ID NO: 1338254 - RNA, 19 nt, Homo sapiens
  misc_RNA (1)...(19): siRNA sense strand
caucgaguacuuacacuac

SEQ ID NO: 1338255 - RNA, 19 nt, Homo sapiens
  misc_RNA (1)...(19): siRNA sense strand
ucacccguaugcuggacaa

SEQ ID NO: 1338256 - RNA, 19 nt, Homo sapiens
  misc_RNA (1)...(19): siRNA sense strand
cgacauagcugaggacuug

SEQ ID NO: 1338257 - RNA, 19 nt, Homo sapiens
  misc_RNA (1)...(19): siRNA sense strand
gacaauaccuacuaugcaa

SEQ ID NO: 1338258 - RNA, 19 nt, Homo sapiens
  misc_RNA (1)...(19): siRNA sense strand
gggaaggccuuggauguuu

SEQ ID NO: 1338259 - RNA, 19 nt, Homo sapiens
  misc_RNA (1)...(19): siRNA sense strand
caagaucgcugacuuuggu

SEQ ID NO: 1338260 - RNA, 19 nt, Homo sapiens
  misc_RNA (1)...(19): siRNA sense strand
gaaauugccauccucaaga

SEQ ID NO: 1338261 - RNA, 19 nt, Homo sapiens
  misc_RNA (1)...(19): siRNA sense strand
ugaagaccaugauacguaa

SEQ ID NO: 1338262 - RNA, 19 nt, Homo sapiens
  misc_RNA (1)...(19): siRNA sense strand
ucaaaccacucucugaaga

SEQ ID NO: 1338263 - RNA, 19 nt, Homo sapiens
  misc_RNA (1)...(19): siRNA sense strand
caaguuggccuacaaugaa

SEQ ID NO: 1338264 - RNA, 19 nt, Homo sapiens
  misc_RNA (1)...(19): siRNA sense strand
caaugaaggugcuguccaa

SEQ ID NO: 1338265 - RNA, 19 nt, Homo sapiens
  misc_RNA (1)...(19): siRNA sense strand
acaguaagaucaagaguca

SEQ ID NO: 1338266 - RNA, 19 nt, Homo sapiens
  misc_RNA (1)...(19): siRNA sense strand
ggaaggccuuggauguuug

SEQ ID NO: 1338267 - RNA, 19 nt, Homo sapiens
  misc_RNA (1)...(19): siRNA sense strand
ucaaaggcaucgaguacuu

SEQ ID NO: 1338268 - RNA, 19 nt, Homo sapiens
  misc_RNA (1)...(19): siRNA sense strand
gagcagguguaccaggaaa

SEQ ID NO: 1338269 - RNA, 19 nt, Homo sapiens
  misc_RNA (1)...(19): siRNA sense strand
gugaagaccaugauacgua

SEQ ID NO: 1338270 - RNA, 19 nt, Homo sapiens
  misc_RNA (1)...(19): siRNA sense strand
ggaagugcccacccucaaa

SEQ ID NO: 1338271 - RNA, 19 nt, Homo sapiens
  misc_RNA (1)...(19): siRNA sense strand
ccaaugaggaccaucugua

SEQ ID NO: 1338272 - RNA, 19 nt, Homo sapiens
  misc_RNA (1)...(19): siRNA sense strand
gaucaaaggcaucgaguac

SEQ ID NO: 1338273 - RNA, 19 nt, Homo sapiens
  misc_RNA (1)...(19): siRNA sense strand
caaaggcaucgaguacuua

SEQ ID NO: 1338274 - RNA, 19 nt, Homo sapiens
  misc_RNA (1)...(19): siRNA sense strand
ggaaauugccauccucaag

SEQ ID NO: 1338275 - RNA, 19 nt, Homo sapiens
  misc_RNA (1)...(19): siRNA sense strand
aguauacccugaaggauga

SEQ ID NO: 1338276 - RNA, 19 nt, Homo sapiens
  misc_RNA (1)...(19): siRNA sense strand
ggaggaacgcucacuguca

SEQ ID NO: 1338277 - RNA, 19 nt, Homo sapiens
  misc_RNA (1)...(19): siRNA sense strand
ggcauggaguccuucauug

SEQ ID NO: 1338278 - RNA, 19 nt, Homo sapiens
  misc_RNA (1)...(19): siRNA sense strand
aaauugccauccucaagaa

SEQ ID NO: 1338279 - RNA, 19 nt, Homo sapiens
  misc_RNA (1)...(19): siRNA sense strand
gggcauggaguccuucauu

SEQ ID NO: 1338280 - RNA, 19 nt, Homo sapiens
  misc_RNA (1)...(19): siRNA sense strand
ccugaaggaugaaauugga

SEQ ID NO: 1338281 - RNA, 19 nt, Homo sapiens
  misc_RNA (1)...(19): siRNA sense strand
guacuuacacuaccagaag

SEQ ID NO: 1338282 - RNA, 19 nt, Homo sapiens
  misc_RNA (1)...(19): siRNA sense strand
ucaaguuggccuacaauga

SEQ ID NO: 1338283 - RNA, 19 nt, Homo sapiens
  misc_RNA (1)...(19): siRNA sense strand
ccuauggugucgucaaguu

SEQ ID NO: 1338284 - RNA, 19 nt, Homo sapiens
  misc_RNA (1)...(19): siRNA sense strand
cauccaccgugacaucaaa

SEQ ID NO: 1338285 - RNA, 19 nt, Homo sapiens
  misc_RNA (1)...(19): siRNA sense strand
gagcggaucauguguuuac

SEQ ID NO: 1338286 - RNA, 19 nt, Homo sapiens
  misc_RNA (1)...(19): siRNA sense strand
gcagguguaccaggaaauu

SEQ ID NO: 1338287 - RNA, 19 nt, Homo sapiens
  misc_RNA (1)...(19): siRNA sense strand
caucaagaucgcugacuuu

SEQ ID NO: 1338288 - RNA, 19 nt, Homo sapiens
  misc_RNA (1)...(19): siRNA sense strand
gaucauccaccgugacauc

SEQ ID NO: 1338289 - RNA, 19 nt, Homo sapiens
  misc_RNA (1)...(19): siRNA sense strand
gcauggaguccuucauugu

SEQ ID NO: 1338290 - RNA, 19 nt, Homo sapiens
  misc_RNA (1)...(19): siRNA sense strand
gugacgcgcuccucuccaa

SEQ ID NO: 1338291 - RNA, 19 nt, Homo sapiens
  misc_RNA (1)...(19): siRNA sense strand
acgagcggaucauguguuu

SEQ ID NO: 1338292 - RNA, 19 nt, Homo sapiens
  misc_RNA (1)...(19): siRNA sense strand
acacuauacugcuuugucu

SEQ ID NO: 1338293 - RNA, 19 nt, Homo sapiens
  misc_RNA (1)...(19): siRNA sense strand
ugguggagguccuggauga

SEQ ID NO: 1338294 - RNA, 19 nt, Homo sapiens
  misc_RNA (1)...(19): siRNA sense strand
gucagcgccuggaaacuug

SEQ ID NO: 1338295 - RNA, 19 nt, Homo sapiens
  misc_RNA (1)...(19): siRNA sense strand
ggacuugaaggaccugauc

SEQ ID NO: 1338296 - RNA, 19 nt, Homo sapiens
  misc_RNA (1)...(19): siRNA sense strand
guacaugguguucgaacug

SEQ ID NO: 1338297 - RNA, 19 nt, Homo sapiens
  misc_RNA (1)...(19): siRNA sense strand
ggccgacaguggagucuca

SEQ ID NO: 1338298 - RNA, 19 nt, Homo sapiens
  misc_RNA (1)...(19): siRNA sense strand
ccucaaaccacucucugaa

SEQ ID NO: 1338299 - RNA, 19 nt, Homo sapiens
  misc_RNA (1)...(19): siRNA sense strand
ccaggcccguuucuacuuc

SEQ ID NO: 1338300 - RNA, 19 nt, Homo sapiens
  misc_RNA (1)...(19): siRNA sense strand
cccguaugcuggacaagaa

SEQ ID NO: 1338301 - RNA, 19 nt, Homo sapiens
  misc_RNA (1)...(19): siRNA sense strand
gcaucgaguacuuacacua

SEQ ID NO: 1338302 - RNA, 19 nt, Homo sapiens
  misc_RNA (1)...(19): siRNA sense strand
ugaaggaugaaauuggaaa

SEQ ID NO: 1338303 - RNA, 19 nt, Homo sapiens
  misc_RNA (1)...(19): siRNA sense strand
uagcugaggacuugaagga

SEQ ID NO: 1338304 - RNA, 19 nt, Homo sapiens
  misc_RNA (1)...(19): siRNA sense strand
gaagugcccacccucaaac

SEQ ID NO: 1338305 - RNA, 19 nt, Homo sapiens
  misc_RNA (1)...(19): siRNA sense strand
gguggcagccuggacauga

SEQ ID NO: 1338306 - RNA, 19 nt, Homo sapiens
  misc_RNA (1)...(19): siRNA sense strand
caauaccuacuaugcaaug

SEQ ID NO: 1338307 - RNA, 19 nt, Homo sapiens
  misc_RNA (1)...(19): siRNA sense strand
acaucaagaucgcugacuu

SEQ ID NO: 1338308 - RNA, 19 nt, Homo sapiens
  misc_RNA (1)...(19): siRNA sense strand
ggaucguggugccggaaau

SEQ ID NO: 1338309 - RNA, 19 nt, Homo sapiens
  misc_RNA (1)...(19): siRNA sense strand
aaguuggccuacaaugaaa

SEQ ID NO: 1338310 - RNA, 19 nt, Homo sapiens
  misc_RNA (1)...(19): siRNA sense strand
gaagaccaugauacguaaa

SEQ ID NO: 1338311 - RNA, 19 nt, Homo sapiens
  misc_RNA (1)...(19): siRNA sense strand
cugaagaccaggcccguuu

SEQ ID NO: 1338312 - RNA, 19 nt, Homo sapiens
  misc_RNA (1)...(19): siRNA sense strand
guggcagccuggacaugaa

SEQ ID NO: 1338313 - RNA, 19 nt, Homo sapiens
  misc_RNA (1)...(19): siRNA sense strand
ugacaauaccuacuaugca

SEQ ID NO: 1338314 - RNA, 19 nt, Homo sapiens
  misc_RNA (1)...(19): siRNA sense strand
gcaagcugucucugcaaga

SEQ ID NO: 1338315 - RNA, 19 nt, Homo sapiens
  misc_RNA (1)...(19): siRNA sense strand
gaccugaucacccguaugc

SEQ ID NO: 1338316 - RNA, 19 nt, Homo sapiens
  misc_RNA (1)...(19): siRNA sense strand
acuauacugcuuugucuuu

SEQ ID NO: 1338317 - RNA, 19 nt, Homo sapiens
  misc_RNA (1)...(19): siRNA sense strand
ggcagcagcagcagcgaaa

SEQ ID NO: 1338318 - RNA, 19 nt, Homo sapiens
  misc_RNA (1)...(19): siRNA sense strand
ugugagcaaugaauucaag

SEQ ID NO: 1338319 - RNA, 19 nt, Homo sapiens
  misc_RNA (1)...(19): siRNA sense strand
ugaggaccaucuguacaug

SEQ ID NO: 1338320 - RNA, 19 nt, Homo sapiens
  misc_RNA (1)...(19): siRNA sense strand
gaaggaugaaauuggaaag

SEQ ID NO: 1338321 - RNA, 19 nt, Homo sapiens
  misc_RNA (1)...(19): siRNA sense strand
auacguaaacgcuccuuug

SEQ ID NO: 1338322 - RNA, 19 nt, Homo sapiens
  misc_RNA (1)...(19): siRNA sense strand
caaugaggaccaucuguac

SEQ ID NO: 1338323 - RNA, 19 nt, Homo sapiens
  misc_RNA (1)...(19): siRNA sense strand
uaccuacuaugcaaugaag

SEQ ID NO: 1338324 - RNA, 19 nt, Homo sapiens
  misc_RNA (1)...(19): siRNA sense strand
ggacgagcggaucaugugu

SEQ ID NO: 1338325 - RNA, 19 nt, Homo sapiens
  misc_RNA (1)...(19): siRNA sense strand
cuauacugcuuugucuuug

SEQ ID NO: 1338326 - RNA, 19 nt, Homo sapiens
  misc_RNA (1)...(19): siRNA sense strand
gugacacuauacugcuuug

SEQ ID NO: 1338327 - RNA, 19 nt, Homo sapiens
  misc_RNA (1)...(19): siRNA sense strand
ugacuuuggugugagcaau

SEQ ID NO: 1338328 - RNA, 19 nt, Homo sapiens
  misc_RNA (1)...(19): siRNA sense strand
ggugugagcaaugaauuca

SEQ ID NO: 1338329 - RNA, 19 nt, Homo sapiens
  misc_RNA (1)...(19): siRNA sense strand
cauggaguccuucauugug

SEQ ID NO: 1338330 - RNA, 19 nt, Homo sapiens
  misc_RNA (1)...(19): siRNA sense strand
gaagaccaggcccguuucu

SEQ ID NO: 1338331 - RNA, 19 nt, Homo sapiens
  misc_RNA (1)...(19): siRNA sense strand
gacgagcggaucauguguu

SEQ ID NO: 1338332 - RNA, 19 nt, Homo sapiens
  misc_RNA (1)...(19): siRNA sense strand
ugucagcgccuggaaacuu

SEQ ID NO: 1338333 - RNA, 19 nt, Homo sapiens
  misc_RNA (1)...(19): siRNA sense strand
gauacguaaacgcuccuuu

SEQ ID NO: 1338334 - RNA, 19 nt, Homo sapiens
  misc_RNA (1)...(19): siRNA sense strand
caucgaguacuuacacuac

SEQ ID NO: 1338335 - RNA, 19 nt, Homo sapiens
  misc_RNA (1)...(19): siRNA sense strand
ucacccguaugcuggacaa

SEQ ID NO: 1338336 - RNA, 19 nt, Homo sapiens
  misc_RNA (1)...(19): siRNA sense strand
cgacauagcugaggacuug

SEQ ID NO: 1338337 - RNA, 19 nt, Homo sapiens
  misc_RNA (1)...(19): siRNA sense strand
gacaauaccuacuaugcaa

SEQ ID NO: 1338338 - RNA, 19 nt, Homo sapiens
  misc_RNA (1)...(19): siRNA sense strand
gggaaggccuuggauguuu

SEQ ID NO: 1338339 - RNA, 19 nt, Homo sapiens
  misc_RNA (1)...(19): siRNA sense strand
caagaucgcugacuuuggu

SEQ ID NO: 1338340 - RNA, 19 nt, Homo sapiens
  misc_RNA (1)...(19): siRNA sense strand
gaaauugccauccucaaga

SEQ ID NO: 1338341 - RNA, 19 nt, Homo sapiens
  misc_RNA (1)...(19): siRNA sense strand
ugaagaccaugauacguaa

SEQ ID NO: 1338342 - RNA, 19 nt, Homo sapiens
  misc_RNA (1)...(19): siRNA sense strand
ucaaaccacucucugaaga

SEQ ID NO: 1338343 - RNA, 19 nt, Homo sapiens
  misc_RNA (1)...(19): siRNA sense strand
caaguuggccuacaaugaa

SEQ ID NO: 1338344 - RNA, 19 nt, Homo sapiens
  misc_RNA (1)...(19): siRNA sense strand
caaugaaggugcuguccaa

SEQ ID NO: 1338345 - RNA, 19 nt, Homo sapiens
  misc_RNA (1)...(19): siRNA sense strand
acaguaagaucaagaguca

SEQ ID NO: 1338346 - RNA, 19 nt, Homo sapiens
  misc_RNA (1)...(19): siRNA sense strand
ggaaggccuuggauguuug

SEQ ID NO: 1338347 - RNA, 19 nt, Homo sapiens
  misc_RNA (1)...(19): siRNA sense strand
ucaaaggcaucgaguacuu

SEQ ID NO: 1338348 - RNA, 19 nt, Homo sapiens
  misc_RNA (1)...(19): siRNA sense strand
gagcagguguaccaggaaa

SEQ ID NO: 1338349 - RNA, 19 nt, Homo sapiens
  misc_RNA (1)...(19): siRNA sense strand
gugaagaccaugauacgua

SEQ ID NO: 1338350 - RNA, 19 nt, Homo sapiens
  misc_RNA (1)...(19): siRNA sense strand
ggaagugcccacccucaaa

SEQ ID NO: 1338351 - RNA, 19 nt, Homo sapiens
  misc_RNA (1)...(19): siRNA sense strand
ccaaugaggaccaucugua

SEQ ID NO: 1338352 - RNA, 19 nt, Homo sapiens
  misc_RNA (1)...(19): siRNA sense strand
gaucaaaggcaucgaguac

SEQ ID NO: 1338353 - RNA, 19 nt, Homo sapiens
  misc_RNA (1)...(19): siRNA sense strand
caaaggcaucgaguacuua

SEQ ID NO: 1338354 - RNA, 19 nt, Homo sapiens
  misc_RNA (1)...(19): siRNA sense strand
ggaaauugccauccucaag

SEQ ID NO: 1338355 - RNA, 19 nt, Homo sapiens
  misc_RNA (1)...(19): siRNA sense strand
aguauacccugaaggauga

SEQ ID NO: 1338356 - RNA, 19 nt, Homo sapiens
  misc_RNA (1)...(19): siRNA sense strand
ggaggaacgcucacuguca

SEQ ID NO: 1338357 - RNA, 19 nt, Homo sapiens
  misc_RNA (1)...(19): siRNA sense strand
ggcauggaguccuucauug

SEQ ID NO: 1338358 - RNA, 19 nt, Homo sapiens
  misc_RNA (1)...(19): siRNA sense strand
aaauugccauccucaagaa

SEQ ID NO: 1338359 - RNA, 19 nt, Homo sapiens
  misc_RNA (1)...(19): siRNA sense strand
gggcauggaguccuucauu

SEQ ID NO: 1338360 - RNA, 19 nt, Homo sapiens
  misc_RNA (1)...(19): siRNA sense strand
ccugaaggaugaaauugga

SEQ ID NO: 1338361 - RNA, 19 nt, Homo sapiens
  misc_RNA (1)...(19): siRNA sense strand
guacuuacacuaccagaag

SEQ ID NO: 1338362 - RNA, 19 nt, Homo sapiens
  misc_RNA (1)...(19): siRNA sense strand
ucaaguuggccuacaauga

SEQ ID NO: 1338363 - RNA, 19 nt, Homo sapiens
  misc_RNA (1)...(19): siRNA sense strand
ccuauggugucgucaaguu

SEQ ID NO: 1338364 - RNA, 19 nt, Homo sapiens
  misc_RNA (1)...(19): siRNA sense strand
cauccaccgugacaucaaa

SEQ ID NO: 1338365 - RNA, 19 nt, Homo sapiens
  misc_RNA (1)...(19): siRNA sense strand
gagcggaucauguguuuac

SEQ ID NO: 1338366 - RNA, 19 nt, Homo sapiens
  misc_RNA (1)...(19): siRNA sense strand
gcagguguaccaggaaauu

SEQ ID NO: 1338367 - RNA, 19 nt, Homo sapiens
  misc_RNA (1)...(19): siRNA sense strand
caucaagaucgcugacuuu

SEQ ID NO: 1338368 - RNA, 19 nt, Homo sapiens
  misc_RNA (1)...(19): siRNA sense strand
gaucauccaccgugacauc

SEQ ID NO: 1338369 - RNA, 19 nt, Homo sapiens
  misc_RNA (1)...(19): siRNA sense strand
gcauggaguccuucauugu

SEQ ID NO: 1338370 - RNA, 19 nt, Homo sapiens
  misc_RNA (1)...(19): siRNA sense strand
gugacgcgcuccucuccaa

SEQ ID NO: 1338371 - RNA, 19 nt, Homo sapiens
  misc_RNA (1)...(19): siRNA sense strand
acgagcggaucauguguuu

SEQ ID NO: 1338372 - RNA, 19 nt, Homo sapiens
  misc_RNA (1)...(19): siRNA sense strand
acacuauacugcuuugucu

SEQ ID NO: 1338373 - RNA, 19 nt, Homo sapiens
  misc_RNA (1)...(19): siRNA sense strand
ugguggagguccuggauga

SEQ ID NO: 1338374 - RNA, 19 nt, Homo sapiens
  misc_RNA (1)...(19): siRNA sense strand
gucagcgccuggaaacuug

SEQ ID NO: 1338375 - RNA, 19 nt, Homo sapiens
  misc_RNA (1)...(19): siRNA sense strand
ggacuugaaggaccugauc

SEQ ID NO: 1338376 - RNA, 19 nt, Homo sapiens
  misc_RNA (1)...(19): siRNA sense strand
guacaugguguucgaacug

SEQ ID NO: 1338377 - RNA, 19 nt, Homo sapiens
  misc_RNA (1)...(19): siRNA sense strand
ggccgacaguggagucuca

SEQ ID NO: 1338378 - RNA, 19 nt, Homo sapiens
  misc_RNA (1)...(19): siRNA sense strand
ccucaaaccacucucugaa

SEQ ID NO: 1338379 - RNA, 19 nt, Homo sapiens
  misc_RNA (1)...(19): siRNA sense strand
ccaggcccguuucuacuuc

SEQ ID NO: 1338380 - RNA, 19 nt, Homo sapiens
  misc_RNA (1)...(19): siRNA sense strand
cccguaugcuggacaagaa

SEQ ID NO: 1338381 - RNA, 19 nt, Homo sapiens
  misc_RNA (1)...(19): siRNA sense strand
gcaucgaguacuuacacua

SEQ ID NO: 1338382 - RNA, 19 nt, Homo sapiens
  misc_RNA (1)...(19): siRNA sense strand
ugaaggaugaaauuggaaa

SEQ ID NO: 1338383 - RNA, 19 nt, Homo sapiens
  misc_RNA (1)...(19): siRNA sense strand
uagcugaggacuugaagga

SEQ ID NO: 1338384 - RNA, 19 nt, Homo sapiens
  misc_RNA (1)...(19): siRNA sense strand
gaagugcccacccucaaac

SEQ ID NO: 1338385 - RNA, 19 nt, Homo sapiens
  misc_RNA (1)...(19): siRNA sense strand
gguggcagccuggacauga

SEQ ID NO: 1338386 - RNA, 19 nt, Homo sapiens
  misc_RNA (1)...(19): siRNA sense strand
caauaccuacuaugcaaug

SEQ ID NO: 1338387 - RNA, 19 nt, Homo sapiens
  misc_RNA (1)...(19): siRNA sense strand
acaucaagaucgcugacuu

SEQ ID NO: 1338388 - RNA, 19 nt, Homo sapiens
  misc_RNA (1)...(19): siRNA sense strand
ggaucguggugccggaaau

SEQ ID NO: 1338389 - RNA, 19 nt, Homo sapiens
  misc_RNA (1)...(19): siRNA sense strand
aaguuggccuacaaugaaa

SEQ ID NO: 1338390 - RNA, 19 nt, Homo sapiens
  misc_RNA (1)...(19): siRNA sense strand
gaagaccaugauacguaaa

SEQ ID NO: 1338391 - RNA, 19 nt, Homo sapiens
  misc_RNA (1)...(19): siRNA sense strand
cugaagaccaggcccguuu

SEQ ID NO: 1338392 - RNA, 19 nt, Homo sapiens
  misc_RNA (1)...(19): siRNA sense strand
guggcagccuggacaugaa

SEQ ID NO: 1338393 - RNA, 19 nt, Homo sapiens
  misc_RNA (1)...(19): siRNA sense strand
ugacaauaccuacuaugca

SEQ ID NO: 1338394 - RNA, 19 nt, Homo sapiens
  misc_RNA (1)...(19): siRNA sense strand
gcaagcugucucugcaaga

SEQ ID NO: 1338395 - RNA, 19 nt, Homo sapiens
  misc_RNA (1)...(19): siRNA sense strand
gaccugaucacccguaugc

SEQ ID NO: 1338396 - RNA, 19 nt, Homo sapiens
  misc_RNA (1)...(19): siRNA sense strand
acuauacugcuuugucuuu

SEQ ID NO: 1338397 - RNA, 19 nt, Homo sapiens
  misc_RNA (1)...(19): siRNA sense strand
ggcagcagcagcagcgaaa

SEQ ID NO: 1338398 - RNA, 19 nt, Homo sapiens
  misc_RNA (1)...(19): siRNA sense strand
ugugagcaaugaauucaag

SEQ ID NO: 1338399 - RNA, 19 nt, Homo sapiens
  misc_RNA (1)...(19): siRNA sense strand
ugaggaccaucuguacaug

SEQ ID NO: 1338400 - RNA, 19 nt, Homo sapiens
  misc_RNA (1)...(19): siRNA sense strand
gaaggaugaaauuggaaag

SEQ ID NO: 1338401 - RNA, 19 nt, Homo sapiens
  misc_RNA (1)...(19): siRNA sense strand
auacguaaacgcuccuuug

SEQ ID NO: 1338402 - RNA, 19 nt, Homo sapiens
  misc_RNA (1)...(19): siRNA sense strand
caaugaggaccaucuguac

SEQ ID NO: 1338403 - RNA, 19 nt, Homo sapiens
  misc_RNA (1)...(19): siRNA sense strand
uaccuacuaugcaaugaag

SEQ ID NO: 1338404 - RNA, 19 nt, Homo sapiens
  misc_RNA (1)...(19): siRNA sense strand
ggacgagcggaucaugugu

SEQ ID NO: 1338405 - RNA, 19 nt, Homo sapiens
  misc_RNA (1)...(19): siRNA sense strand
cuauacugcuuugucuuug

SEQ ID NO: 1338406 - RNA, 19 nt, Homo sapiens
  misc_RNA (1)...(19): siRNA sense strand
gugacacuauacugcuuug

SEQ ID NO: 1338407 - RNA, 19 nt, Homo sapiens
  misc_RNA (1)...(19): siRNA sense strand
ugacuuuggugugagcaau

SEQ ID NO: 1338408 - RNA, 19 nt, Homo sapiens
  misc_RNA (1)...(19): siRNA sense strand
ggugugagcaaugaauuca

SEQ ID NO: 1338409 - RNA, 19 nt, Homo sapiens
  misc_RNA (1)...(19): siRNA sense strand
cauggaguccuucauugug

SEQ ID NO: 1338410 - RNA, 19 nt, Homo sapiens
  misc_RNA (1)...(19): siRNA sense strand
gaagaccaggcccguuucu

SEQ ID NO: 1338411 - RNA, 19 nt, Homo sapiens
  misc_RNA (1)...(19): siRNA sense strand
gacgagcggaucauguguu

SEQ ID NO: 1338412 - RNA, 19 nt, Homo sapiens
  misc_RNA (1)...(19): siRNA sense strand
ugucagcgccuggaaacuu

SEQ ID NO: 1338413 - RNA, 19 nt, Homo sapiens
  misc_RNA (1)...(19): siRNA sense strand
gauacguaaacgcuccuuu

SEQ ID NO: 1338414 - RNA, 19 nt, Homo sapiens
  misc_RNA (1)...(19): siRNA sense strand
caucgaguacuuacacuac

SEQ ID NO: 1338415 - RNA, 19 nt, Homo sapiens
  misc_RNA (1)...(19): siRNA sense strand
ucacccguaugcuggacaa

SEQ ID NO: 1338416 - RNA, 19 nt, Homo sapiens
  misc_RNA (1)...(19): siRNA sense strand
cgacauagcugaggacuug

SEQ ID NO: 1338417 - RNA, 19 nt, Homo sapiens
  misc_RNA (1)...(19): siRNA sense strand
gacaauaccuacuaugcaa

SEQ ID NO: 1338418 - RNA, 19 nt, Homo sapiens
  misc_RNA (1)...(19): siRNA sense strand
gggaaggccuuggauguuu

SEQ ID NO: 1338419 - RNA, 19 nt, Homo sapiens
  misc_RNA (1)...(19): siRNA sense strand
caagaucgcugacuuuggu

SEQ ID NO: 1338420 - RNA, 19 nt, Homo sapiens
  misc_RNA (1)...(19): siRNA sense strand
gaaauugccauccucaaga

SEQ ID NO: 1338421 - RNA, 19 nt, Homo sapiens
  misc_RNA (1)...(19): siRNA sense strand
ugaagaccaugauacguaa

SEQ ID NO: 1338422 - RNA, 19 nt, Homo sapiens
  misc_RNA (1)...(19): siRNA sense strand
ucaaaccacucucugaaga

SEQ ID NO: 1338423 - RNA, 19 nt, Homo sapiens
  misc_RNA (1)...(19): siRNA sense strand
caaguuggccuacaaugaa

SEQ ID NO: 1338424 - RNA, 19 nt, Homo sapiens
  misc_RNA (1)...(19): siRNA sense strand
caaugaaggugcuguccaa

SEQ ID NO: 1338425 - RNA, 19 nt, Homo sapiens
  misc_RNA (1)...(19): siRNA sense strand
acaguaagaucaagaguca

SEQ ID NO: 1338426 - RNA, 19 nt, Homo sapiens
  misc_RNA (1)...(19): siRNA sense strand
ggaaggccuuggauguuug

SEQ ID NO: 1338427 - RNA, 19 nt, Homo sapiens
  misc_RNA (1)...(19): siRNA sense strand
ucaaaggcaucgaguacuu

SEQ ID NO: 1338428 - RNA, 19 nt, Homo sapiens
  misc_RNA (1)...(19): siRNA sense strand
gagcagguguaccaggaaa

SEQ ID NO: 1338429 - RNA, 19 nt, Homo sapiens
  misc_RNA (1)...(19): siRNA sense strand
gugaagaccaugauacgua

SEQ ID NO: 1338430 - RNA, 19 nt, Homo sapiens
  misc_RNA (1)...(19): siRNA sense strand
ggaagugcccacccucaaa

SEQ ID NO: 1338431 - RNA, 19 nt, Homo sapiens
  misc_RNA (1)...(19): siRNA sense strand
ccaaugaggaccaucugua

SEQ ID NO: 1338432 - RNA, 19 nt, Homo sapiens
  misc_RNA (1)...(19): siRNA sense strand
gaucaaaggcaucgaguac

SEQ ID NO: 1338433 - RNA, 19 nt, Homo sapiens
  misc_RNA (1)...(19): siRNA sense strand
caaaggcaucgaguacuua

SEQ ID NO: 1338434 - RNA, 19 nt, Homo sapiens
  misc_RNA (1)...(19): siRNA sense strand
ggaaauugccauccucaag

SEQ ID NO: 1338435 - RNA, 19 nt, Homo sapiens
  misc_RNA (1)...(19): siRNA sense strand
aguauacccugaaggauga

SEQ ID NO: 1338436 - RNA, 19 nt, Homo sapiens
  misc_RNA (1)...(19): siRNA sense strand
ggaggaacgcucacuguca

SEQ ID NO: 1338437 - RNA, 19 nt, Homo sapiens
  misc_RNA (1)...(19): siRNA sense strand
ggcauggaguccuucauug

SEQ ID NO: 1338438 - RNA, 19 nt, Homo sapiens
  misc_RNA (1)...(19): siRNA sense strand
aaauugccauccucaagaa

SEQ ID NO: 1338439 - RNA, 19 nt, Homo sapiens
  misc_RNA (1)...(19): siRNA sense strand
gggcauggaguccuucauu

SEQ ID NO: 1338440 - RNA, 19 nt, Homo sapiens
  misc_RNA (1)...(19): siRNA sense strand
ccugaaggaugaaauugga

SEQ ID NO: 1338441 - RNA, 19 nt, Homo sapiens
  misc_RNA (1)...(19): siRNA sense strand
guacuuacacuaccagaag

SEQ ID NO: 1338442 - RNA, 19 nt, Homo sapiens
  misc_RNA (1)...(19): siRNA sense strand
ucaaguuggccuacaauga

SEQ ID NO: 1338443 - RNA, 19 nt, Homo sapiens
  misc_RNA (1)...(19): siRNA sense strand
ccuauggugucgucaaguu

SEQ ID NO: 1338444 - RNA, 19 nt, Homo sapiens
  misc_RNA (1)...(19): siRNA sense strand
cauccaccgugacaucaaa

SEQ ID NO: 1338445 - RNA, 19 nt, Homo sapiens
  misc_RNA (1)...(19): siRNA sense strand
gagcggaucauguguuuac

SEQ ID NO: 1338446 - RNA, 19 nt, Homo sapiens
  misc_RNA (1)...(19): siRNA sense strand
gcagguguaccaggaaauu

SEQ ID NO: 1338447 - RNA, 19 nt, Homo sapiens
  misc_RNA (1)...(19): siRNA sense strand
caucaagaucgcugacuuu

SEQ ID NO: 1338448 - RNA, 19 nt, Homo sapiens
  misc_RNA (1)...(19): siRNA sense strand
gaucauccaccgugacauc

SEQ ID NO: 1338449 - RNA, 19 nt, Homo sapiens
  misc_RNA (1)...(19): siRNA sense strand
gcauggaguccuucauugu

SEQ ID NO: 1338450 - RNA, 19 nt, Homo sapiens
  misc_RNA (1)...(19): siRNA sense strand
gugacgcgcuccucuccaa

SEQ ID NO: 1338451 - RNA, 19 nt, Homo sapiens
  misc_RNA (1)...(19): siRNA sense strand
acgagcggaucauguguuu

SEQ ID NO: 1338452 - RNA, 19 nt, Homo sapiens
  misc_RNA (1)...(19): siRNA sense strand
acacuauacugcuuugucu

SEQ ID NO: 1338453 - RNA, 19 nt, Homo sapiens
  misc_RNA (1)...(19): siRNA sense strand
ugguggagguccuggauga

SEQ ID NO: 1338454 - RNA, 19 nt, Homo sapiens
  misc_RNA (1)...(19): siRNA sense strand
gucagcgccuggaaacuug

SEQ ID NO: 1338455 - RNA, 19 nt, Homo sapiens
  misc_RNA (1)...(19): siRNA sense strand
ggacuugaaggaccugauc

SEQ ID NO: 1338456 - RNA, 19 nt, Homo sapiens
  misc_RNA (1)...(19): siRNA sense strand
guacaugguguucgaacug

SEQ ID NO: 1338457 - RNA, 19 nt, Homo sapiens
  misc_RNA (1)...(19): siRNA sense strand
ggccgacaguggagucuca

SEQ ID NO: 1338458 - RNA, 19 nt, Homo sapiens
  misc_RNA (1)...(19): siRNA sense strand
ccucaaaccacucucugaa

SEQ ID NO: 1338459 - RNA, 19 nt, Homo sapiens
  misc_RNA (1)...(19): siRNA sense strand
ccaggcccguuucuacuuc

SEQ ID NO: 1338460 - RNA, 19 nt, Homo sapiens
  misc_RNA (1)...(19): siRNA sense strand
cccguaugcuggacaagaa

SEQ ID NO: 1338461 - RNA, 19 nt, Homo sapiens
  misc_RNA (1)...(19): siRNA sense strand
gcaucgaguacuuacacua

SEQ ID NO: 1338462 - RNA, 19 nt, Homo sapiens
  misc_RNA (1)...(19): siRNA sense strand
ugaaggaugaaauuggaaa

SEQ ID NO: 1338463 - RNA, 19 nt, Homo sapiens
  misc_RNA (1)...(19): siRNA sense strand
uagcugaggacuugaagga

SEQ ID NO: 1338464 - RNA, 19 nt, Homo sapiens
  misc_RNA (1)...(19): siRNA sense strand
gaagugcccacccucaaac

SEQ ID NO: 1338465 - RNA, 19 nt, Homo sapiens
  misc_RNA (1)...(19): siRNA sense strand
gguggcagccuggacauga

SEQ ID NO: 1338466 - RNA, 19 nt, Homo sapiens
  misc_RNA (1)...(19): siRNA sense strand
caauaccuacuaugcaaug

SEQ ID NO: 1338467 - RNA, 19 nt, Homo sapiens
  misc_RNA (1)...(19): siRNA sense strand
acaucaagaucgcugacuu

SEQ ID NO: 1338468 - RNA, 19 nt, Homo sapiens
  misc_RNA (1)...(19): siRNA sense strand
ggaucguggugccggaaau

SEQ ID NO: 1338469 - RNA, 19 nt, Homo sapiens
  misc_RNA (1)...(19): siRNA sense strand
aaguuggccuacaaugaaa

SEQ ID NO: 1338470 - RNA, 19 nt, Homo sapiens
  misc_RNA (1)...(19): siRNA sense strand
gaagaccaugauacguaaa

SEQ ID NO: 1338471 - RNA, 19 nt, Homo sapiens
  misc_RNA (1)...(19): siRNA sense strand
cugaagaccaggcccguuu

SEQ ID NO: 1338472 - RNA, 19 nt, Homo sapiens
  misc_RNA (1)...(19): siRNA sense strand
guggcagccuggacaugaa

SEQ ID NO: 1338473 - RNA, 19 nt, Homo sapiens
  misc_RNA (1)...(19): siRNA sense strand
ugacaauaccuacuaugca

SEQ ID NO: 1338474 - RNA, 19 nt, Homo sapiens
  misc_RNA (1)...(19): siRNA sense strand
gcaagcugucucugcaaga

SEQ ID NO: 1338475 - RNA, 19 nt, Homo sapiens
  misc_RNA (1)...(19): siRNA sense strand
gaccugaucacccguaugc

SEQ ID NO: 1338476 - RNA, 19 nt, Homo sapiens
  misc_RNA (1)...(19): siRNA sense strand
acuauacugcuuugucuuu

SEQ ID NO: 1338477 - RNA, 19 nt, Homo sapiens
  misc_RNA (1)...(19): siRNA sense strand
ggcagcagcagcagcgaaa

SEQ ID NO: 1338478 - RNA, 19 nt, Homo sapiens
  misc_RNA (1)...(19): siRNA sense strand
ugugagcaaugaauucaag

SEQ ID NO: 1338479 - RNA, 19 nt, Homo sapiens
  misc_RNA (1)...(19): siRNA sense strand
ugaggaccaucuguacaug

SEQ ID NO: 1338480 - RNA, 19 nt, Homo sapiens
  misc_RNA (1)...(19): siRNA sense strand
gaaggaugaaauuggaaag

SEQ ID NO: 1338481 - RNA, 19 nt, Homo sapiens
  misc_RNA (1)...(19): siRNA sense strand
auacguaaacgcuccuuug

SEQ ID NO: 1338482 - RNA, 19 nt, Homo sapiens
  misc_RNA (1)...(19): siRNA sense strand
caaugaggaccaucuguac

SEQ ID NO: 1338483 - RNA, 19 nt, Homo sapiens
  misc_RNA (1)...(19): siRNA sense strand
uaccuacuaugcaaugaag

SEQ ID NO: 1338484 - RNA, 19 nt, Homo sapiens
  misc_RNA (1)...(19): siRNA sense strand
ggacgagcggaucaugugu

SEQ ID NO: 1338485 - RNA, 19 nt, Homo sapiens
  misc_RNA (1)...(19): siRNA sense strand
cuauacugcuuugucuuug

SEQ ID NO: 1338486 - RNA, 19 nt, Homo sapiens
  misc_RNA (1)...(19): siRNA sense strand
gugacacuauacugcuuug

SEQ ID NO: 1338487 - RNA, 19 nt, Homo sapiens
  misc_RNA (1)...(19): siRNA sense strand
ugacuuuggugugagcaau

SEQ ID NO: 1338488 - RNA, 19 nt, Homo sapiens
  misc_RNA (1)...(19): siRNA sense strand
ggugugagcaaugaauuca

SEQ ID NO: 1338489 - RNA, 19 nt, Homo sapiens
  misc_RNA (1)...(19): siRNA sense strand
cauggaguccuucauugug

SEQ ID NO: 1338490 - RNA, 19 nt, Homo sapiens
  misc_RNA (1)...(19): siRNA sense strand
gaagaccaggcccguuucu

SEQ ID NO: 1338491 - RNA, 19 nt, Homo sapiens
  misc_RNA (1)...(19): siRNA sense strand
gacgagcggaucauguguu

SEQ ID NO: 1338492 - RNA, 19 nt, Homo sapiens
  misc_RNA (1)...(19): siRNA sense strand
ugucagcgccuggaaacuu

SEQ ID NO: 1338493 - RNA, 19 nt, Homo sapiens
  misc_RNA (1)...(19): siRNA sense strand
gauacguaaacgcuccuuu

SEQ ID NO: 1338494 - RNA, 19 nt, Homo sapiens
  misc_RNA (1)...(19): siRNA sense strand
caucgaguacuuacacuac

SEQ ID NO: 1338495 - RNA, 19 nt, Homo sapiens
  misc_RNA (1)...(19): siRNA sense strand
ucacccguaugcuggacaa

SEQ ID NO: 1338496 - RNA, 19 nt, Homo sapiens
  misc_RNA (1)...(19): siRNA sense strand
cgacauagcugaggacuug

SEQ ID NO: 1338497 - RNA, 19 nt, Homo sapiens
  misc_RNA (1)...(19): siRNA sense strand
gacaauaccuacuaugcaa

SEQ ID NO: 1338498 - RNA, 19 nt, Homo sapiens
  misc_RNA (1)...(19): siRNA sense strand
gggaaggccuuggauguuu

SEQ ID NO: 1338499 - RNA, 19 nt, Homo sapiens
  misc_RNA (1)...(19): siRNA sense strand
caagaucgcugacuuuggu

SEQ ID NO: 1338500 - RNA, 19 nt, Homo sapiens
  misc_RNA (1)...(19): siRNA sense strand
gaaauugccauccucaaga

SEQ ID NO: 1338501 - RNA, 19 nt, Homo sapiens
  misc_RNA (1)...(19): siRNA sense strand
ugaagaccaugauacguaa

SEQ ID NO: 1338502 - RNA, 19 nt, Homo sapiens
  misc_RNA (1)...(19): siRNA sense strand
ucaaaccacucucugaaga

SEQ ID NO: 1338503 - RNA, 19 nt, Homo sapiens
  misc_RNA (1)...(19): siRNA sense strand
caaguuggccuacaaugaa

SEQ ID NO: 1338504 - RNA, 19 nt, Homo sapiens
  misc_RNA (1)...(19): siRNA sense strand
caaugaaggugcuguccaa

SEQ ID NO: 1338505 - RNA, 19 nt, Homo sapiens
  misc_RNA (1)...(19): siRNA sense strand
acaguaagaucaagaguca

SEQ ID NO: 1338506 - RNA, 19 nt, Homo sapiens
  misc_RNA (1)...(19): siRNA sense strand
ggaaggccuuggauguuug

SEQ ID NO: 1338507 - RNA, 19 nt, Homo sapiens
  misc_RNA (1)...(19): siRNA sense strand
ucaaaggcaucgaguacuu

SEQ ID NO: 1338508 - RNA, 19 nt, Homo sapiens
  misc_RNA (1)...(19): siRNA sense strand
gagcagguguaccaggaaa

SEQ ID NO: 1338509 - RNA, 19 nt, Homo sapiens
  misc_RNA (1)...(19): siRNA sense strand
gugaagaccaugauacgua

SEQ ID NO: 1338510 - RNA, 19 nt, Homo sapiens
  misc_RNA (1)...(19): siRNA sense strand
ggaagugcccacccucaaa

SEQ ID NO: 1338511 - RNA, 19 nt, Homo sapiens
  misc_RNA (1)...(19): siRNA sense strand
ccaaugaggaccaucugua

SEQ ID NO: 1338512 - RNA, 19 nt, Homo sapiens
  misc_RNA (1)...(19): siRNA sense strand
gaucaaaggcaucgaguac

SEQ ID NO: 1338513 - RNA, 19 nt, Homo sapiens
  misc_RNA (1)...(19): siRNA sense strand
caaaggcaucgaguacuua

SEQ ID NO: 1338514 - RNA, 19 nt, Homo sapiens
  misc_RNA (1)...(19): siRNA sense strand
ggaaauugccauccucaag

SEQ ID NO: 1338515 - RNA, 19 nt, Homo sapiens
  misc_RNA (1)...(19): siRNA sense strand
aguauacccugaaggauga

SEQ ID NO: 1338516 - RNA, 19 nt, Homo sapiens
  misc_RNA (1)...(19): siRNA sense strand
ggaggaacgcucacuguca

SEQ ID NO: 1338517 - RNA, 19 nt, Homo sapiens
  misc_RNA (1)...(19): siRNA sense strand
ggcauggaguccuucauug

SEQ ID NO: 1338518 - RNA, 19 nt, Homo sapiens
  misc_RNA (1)...(19): siRNA sense strand
aaauugccauccucaagaa

SEQ ID NO: 1338519 - RNA, 19 nt, Homo sapiens
  misc_RNA (1)...(19): siRNA sense strand
gggcauggaguccuucauu

SEQ ID NO: 1338520 - RNA, 19 nt, Homo sapiens
  misc_RNA (1)...(19): siRNA sense strand
ccugaaggaugaaauugga

SEQ ID NO: 1338521 - RNA, 19 nt, Homo sapiens
  misc_RNA (1)...(19): siRNA sense strand
guacuuacacuaccagaag

SEQ ID NO: 1338522 - RNA, 19 nt, Homo sapiens
  misc_RNA (1)...(19): siRNA sense strand
ucaaguuggccuacaauga

SEQ ID NO: 1338523 - RNA, 19 nt, Homo sapiens
  misc_RNA (1)...(19): siRNA sense strand
ccuauggugucgucaaguu

SEQ ID NO: 1338524 - RNA, 19 nt, Homo sapiens
  misc_RNA (1)...(19): siRNA sense strand
cauccaccgugacaucaaa

SEQ ID NO: 1338525 - RNA, 19 nt, Homo sapiens
  misc_RNA (1)...(19): siRNA sense strand
gagcggaucauguguuuac

SEQ ID NO: 1338526 - RNA, 19 nt, Homo sapiens
  misc_RNA (1)...(19): siRNA sense strand
gcagguguaccaggaaauu

SEQ ID NO: 1338527 - RNA, 19 nt, Homo sapiens
  misc_RNA (1)...(19): siRNA sense strand
caucaagaucgcugacuuu

SEQ ID NO: 1338528 - RNA, 19 nt, Homo sapiens
  misc_RNA (1)...(19): siRNA sense strand
gaucauccaccgugacauc

SEQ ID NO: 1338529 - RNA, 19 nt, Homo sapiens
  misc_RNA (1)...(19): siRNA sense strand
gcauggaguccuucauugu

SEQ ID NO: 1338530 - RNA, 19 nt, Homo sapiens
  misc_RNA (1)...(19): siRNA sense strand
gugacgcgcuccucuccaa

SEQ ID NO: 1338531 - RNA, 19 nt, Homo sapiens
  misc_RNA (1)...(19): siRNA sense strand
acgagcggaucauguguuu

SEQ ID NO: 1338532 - RNA, 19 nt, Homo sapiens
  misc_RNA (1)...(19): siRNA sense strand
acacuauacugcuuugucu

SEQ ID NO: 1338533 - RNA, 19 nt, Homo sapiens
  misc_RNA (1)...(19): siRNA sense strand
ugguggagguccuggauga

SEQ ID NO: 1338534 - RNA, 19 nt, Homo sapiens
  misc_RNA (1)...(19): siRNA sense strand
gucagcgccuggaaacuug

SEQ ID NO: 1338535 - RNA, 19 nt, Homo sapiens
  misc_RNA (1)...(19): siRNA sense strand
ggacuugaaggaccugauc

SEQ ID NO: 1338536 - RNA, 19 nt, Homo sapiens
  misc_RNA (1)...(19): siRNA sense strand
guacaugguguucgaacug

SEQ ID NO: 1338537 - RNA, 19 nt, Homo sapiens
  misc_RNA (1)...(19): siRNA sense strand
ggccgacaguggagucuca

SEQ ID NO: 1338538 - RNA, 19 nt, Homo sapiens
  misc_RNA (1)...(19): siRNA sense strand
ccucaaaccacucucugaa

SEQ ID NO: 1338539 - RNA, 19 nt, Homo sapiens
  misc_RNA (1)...(19): siRNA sense strand
ccaggcccguuucuacuuc

SEQ ID NO: 1338540 - RNA, 19 nt, Homo sapiens
  misc_RNA (1)...(19): siRNA sense strand
cccguaugcuggacaagaa

SEQ ID NO: 1338541 - RNA, 19 nt, Homo sapiens
  misc_RNA (1)...(19): siRNA sense strand
gcaucgaguacuuacacua

SEQ ID NO: 1338542 - RNA, 19 nt, Homo sapiens
  misc_RNA (1)...(19): siRNA sense strand
ugaaggaugaaauuggaaa

SEQ ID NO: 1338543 - RNA, 19 nt, Homo sapiens
  misc_RNA (1)...(19): siRNA sense strand
uagcugaggacuugaagga

SEQ ID NO: 1338544 - RNA, 19 nt, Homo sapiens
  misc_RNA (1)...(19): siRNA sense strand
gaagugcccacccucaaac

SEQ ID NO: 1338545 - RNA, 19 nt, Homo sapiens
  misc_RNA (1)...(19): siRNA sense strand
gguggcagccuggacauga

SEQ ID NO: 1338546 - RNA, 19 nt, Homo sapiens
  misc_RNA (1)...(19): siRNA sense strand
caauaccuacuaugcaaug

SEQ ID NO: 1338547 - RNA, 19 nt, Homo sapiens
  misc_RNA (1)...(19): siRNA sense strand
acaucaagaucgcugacuu

SEQ ID NO: 1338548 - RNA, 19 nt, Homo sapiens
  misc_RNA (1)...(19): siRNA sense strand
ggaucguggugccggaaau

SEQ ID NO: 1338549 - RNA, 19 nt, Homo sapiens
  misc_RNA (1)...(19): siRNA sense strand
aaguuggccuacaaugaaa

SEQ ID NO: 1338550 - RNA, 19 nt, Homo sapiens
  misc_RNA (1)...(19): siRNA sense strand
gaagaccaugauacguaaa

SEQ ID NO: 1338551 - RNA, 19 nt, Homo sapiens
  misc_RNA (1)...(19): siRNA sense strand
cugaagaccaggcccguuu

SEQ ID NO: 1338552 - RNA, 19 nt, Homo sapiens
  misc_RNA (1)...(19): siRNA sense strand
guggcagccuggacaugaa

SEQ ID NO: 1338553 - RNA, 19 nt, Homo sapiens
  misc_RNA (1)...(19): siRNA sense strand
ugacaauaccuacuaugca

SEQ ID NO: 1338554 - RNA, 19 nt, Homo sapiens
  misc_RNA (1)...(19): siRNA sense strand
gcaagcugucucugcaaga

SEQ ID NO: 1338555 - RNA, 19 nt, Homo sapiens
  misc_RNA (1)...(19): siRNA sense strand
gaccugaucacccguaugc

SEQ ID NO: 1338556 - RNA, 19 nt, Homo sapiens
  misc_RNA (1)...(19): siRNA sense strand
acuauacugcuuugucuuu

SEQ ID NO: 1338557 - RNA, 19 nt, Homo sapiens
  misc_RNA (1)...(19): siRNA sense strand
ggcagcagcagcagcgaaa

SEQ ID NO: 1338558 - RNA, 19 nt, Homo sapiens
  misc_RNA (1)...(19): siRNA sense strand
ugugagcaaugaauucaag

SEQ ID NO: 1338559 - RNA, 19 nt, Homo sapiens
  misc_RNA (1)...(19): siRNA sense strand
ugaggaccaucuguacaug

SEQ ID NO: 1338560 - RNA, 19 nt, Homo sapiens
  misc_RNA (1)...(19): siRNA sense strand
gaaggaugaaauuggaaag

SEQ ID NO: 1338561 - RNA, 19 nt, Homo sapiens
  misc_RNA (1)...(19): siRNA sense strand
auacguaaacgcuccuuug

SEQ ID NO: 1338562 - RNA, 19 nt, Homo sapiens
  misc_RNA (1)...(19): siRNA sense strand
caaugaggaccaucuguac

SEQ ID NO: 1338563 - RNA, 19 nt, Homo sapiens
  misc_RNA (1)...(19): siRNA sense strand
uaccuacuaugcaaugaag

SEQ ID NO: 1338564 - RNA, 19 nt, Homo sapiens
  misc_RNA (1)...(19): siRNA sense strand
ggacgagcggaucaugugu

SEQ ID NO: 1338565 - RNA, 19 nt, Homo sapiens
  misc_RNA (1)...(19): siRNA sense strand
cuauacugcuuugucuuug

SEQ ID NO: 1338566 - RNA, 19 nt, Homo sapiens
  misc_RNA (1)...(19): siRNA sense strand
gugacacuauacugcuuug

SEQ ID NO: 1338567 - RNA, 19 nt, Homo sapiens
  misc_RNA (1)...(19): siRNA sense strand
ugacuuuggugugagcaau

SEQ ID NO: 1338568 - RNA, 19 nt, Homo sapiens
  misc_RNA (1)...(19): siRNA sense strand
ggugugagcaaugaauuca

SEQ ID NO: 1338569 - RNA, 19 nt, Homo sapiens
  misc_RNA (1)...(19): siRNA sense strand
cauggaguccuucauugug

SEQ ID NO: 1338570 - RNA, 19 nt, Homo sapiens
  misc_RNA (1)...(19): siRNA sense strand
gaagaccaggcccguuucu

SEQ ID NO: 1338571 - RNA, 19 nt, Homo sapiens
  misc_RNA (1)...(19): siRNA sense strand
gacgagcggaucauguguu

SEQ ID NO: 1338572 - RNA, 19 nt, Homo sapiens
  misc_RNA (1)...(19): siRNA sense strand
ugucagcgccuggaaacuu

SEQ ID NO: 1338573 - RNA, 19 nt, Homo sapiens
  misc_RNA (1)...(19): siRNA sense strand
gauacguaaacgcuccuuu

SEQ ID NO: 1338574 - RNA, 19 nt, Homo sapiens
  misc_RNA (1)...(19): siRNA sense strand
caucgaguacuuacacuac

SEQ ID NO: 1338575 - RNA, 19 nt, Homo sapiens
  misc_RNA (1)...(19): siRNA sense strand
ucacccguaugcuggacaa

SEQ ID NO: 1338576 - RNA, 19 nt, Homo sapiens
  misc_RNA (1)...(19): siRNA sense strand
cgacauagcugaggacuug

SEQ ID NO: 1338577 - RNA, 19 nt, Homo sapiens
  misc_RNA (1)...(19): siRNA sense strand
gacaauaccuacuaugcaa

SEQ ID NO: 1338578 - RNA, 19 nt, Homo sapiens
  misc_RNA (1)...(19): siRNA sense strand
gggaaggccuuggauguuu

SEQ ID NO: 1338579 - RNA, 19 nt, Homo sapiens
  misc_RNA (1)...(19): siRNA sense strand
caagaucgcugacuuuggu

SEQ ID NO: 1338580 - RNA, 19 nt, Homo sapiens
  misc_RNA (1)...(19): siRNA sense strand
gaaauugccauccucaaga

SEQ ID NO: 1338581 - RNA, 19 nt, Homo sapiens
  misc_RNA (1)...(19): siRNA sense strand
ugaagaccaugauacguaa

SEQ ID NO: 1338582 - RNA, 19 nt, Homo sapiens
  misc_RNA (1)...(19): siRNA sense strand
ucaaaccacucucugaaga

SEQ ID NO: 1338583 - RNA, 19 nt, Homo sapiens
  misc_RNA (1)...(19): siRNA sense strand
caaguuggccuacaaugaa

SEQ ID NO: 1338584 - RNA, 19 nt, Homo sapiens
  misc_RNA (1)...(19): siRNA sense strand
caaugaaggugcuguccaa

SEQ ID NO: 1338585 - RNA, 19 nt, Homo sapiens
  misc_RNA (1)...(19): siRNA sense strand
acaguaagaucaagaguca

SEQ ID NO: 1338586 - RNA, 19 nt, Homo sapiens
  misc_RNA (1)...(19): siRNA sense strand
ggaaggccuuggauguuug

SEQ ID NO: 1338587 - RNA, 19 nt, Homo sapiens
  misc_RNA (1)...(19): siRNA sense strand
ucaaaggcaucgaguacuu

SEQ ID NO: 1338588 - RNA, 19 nt, Homo sapiens
  misc_RNA (1)...(19): siRNA sense strand
gagcagguguaccaggaaa

SEQ ID NO: 1338589 - RNA, 19 nt, Homo sapiens
  misc_RNA (1)...(19): siRNA sense strand
gugaagaccaugauacgua

SEQ ID NO: 1338590 - RNA, 19 nt, Homo sapiens
  misc_RNA (1)...(19): siRNA sense strand
ggaagugcccacccucaaa

SEQ ID NO: 1338591 - RNA, 19 nt, Homo sapiens
  misc_RNA (1)...(19): siRNA sense strand
ccaaugaggaccaucugua

SEQ ID NO: 1338592 - RNA, 19 nt, Homo sapiens
  misc_RNA (1)...(19): siRNA sense strand
gaucaaaggcaucgaguac

SEQ ID NO: 1338593 - RNA, 19 nt, Homo sapiens
  misc_RNA (1)...(19): siRNA sense strand
caaaggcaucgaguacuua

SEQ ID NO: 1338594 - RNA, 19 nt, Homo sapiens
  misc_RNA (1)...(19): siRNA sense strand
ggaaauugccauccucaag

SEQ ID NO: 1338595 - RNA, 19 nt, Homo sapiens
  misc_RNA (1)...(19): siRNA sense strand
aguauacccugaaggauga

SEQ ID NO: 1338596 - RNA, 19 nt, Homo sapiens
  misc_RNA (1)...(19): siRNA sense strand
ggaggaacgcucacuguca

SEQ ID NO: 1338597 - RNA, 19 nt, Homo sapiens
  misc_RNA (1)...(19): siRNA sense strand
ggcauggaguccuucauug

SEQ ID NO: 1338598 - RNA, 19 nt, Homo sapiens
  misc_RNA (1)...(19): siRNA sense strand
aaauugccauccucaagaa

SEQ ID NO: 1338599 - RNA, 19 nt, Homo sapiens
  misc_RNA (1)...(19): siRNA sense strand
gggcauggaguccuucauu

SEQ ID NO: 1338600 - RNA, 19 nt, Homo sapiens
  misc_RNA (1)...(19): siRNA sense strand
ccugaaggaugaaauugga

SEQ ID NO: 1338601 - RNA, 19 nt, Homo sapiens
  misc_RNA (1)...(19): siRNA sense strand
guacuuacacuaccagaag

SEQ ID NO: 1338602 - RNA, 19 nt, Homo sapiens
  misc_RNA (1)...(19): siRNA sense strand
ucaaguuggccuacaauga

SEQ ID NO: 1338603 - RNA, 19 nt, Homo sapiens
  misc_RNA (1)...(19): siRNA sense strand
ccuauggugucgucaaguu

SEQ ID NO: 1338604 - RNA, 19 nt, Homo sapiens
  misc_RNA (1)...(19): siRNA sense strand
cauccaccgugacaucaaa

SEQ ID NO: 1338605 - RNA, 19 nt, Homo sapiens
  misc_RNA (1)...(19): siRNA sense strand
gagcggaucauguguuuac

SEQ ID NO: 1338606 - RNA, 19 nt, Homo sapiens
  misc_RNA (1)...(19): siRNA sense strand
gcagguguaccaggaaauu

SEQ ID NO: 1338607 - RNA, 19 nt, Homo sapiens
  misc_RNA (1)...(19): siRNA sense strand
caucaagaucgcugacuuu

SEQ ID NO: 1338608 - RNA, 19 nt, Homo sapiens
  misc_RNA (1)...(19): siRNA sense strand
gaucauccaccgugacauc

SEQ ID NO: 1338609 - RNA, 19 nt, Homo sapiens
  misc_RNA (1)...(19): siRNA sense strand
gcauggaguccuucauugu

SEQ ID NO: 1338610 - RNA, 19 nt, Homo sapiens
  misc_RNA (1)...(19): siRNA sense strand
gugacgcgcuccucuccaa

SEQ ID NO: 1338611 - RNA, 19 nt, Homo sapiens
  misc_RNA (1)...(19): siRNA sense strand
acgagcggaucauguguuu

SEQ ID NO: 1338612 - RNA, 19 nt, Homo sapiens
  misc_RNA (1)...(19): siRNA sense strand
acacuauacugcuuugucu

SEQ ID NO: 1338613 - RNA, 19 nt, Homo sapiens
  misc_RNA (1)...(19): siRNA sense strand
ugguggagguccuggauga

SEQ ID NO: 1338614 - RNA, 19 nt, Homo sapiens
  misc_RNA (1)...(19): siRNA sense strand
gucagcgccuggaaacuug

SEQ ID NO: 1338615 - RNA, 19 nt, Homo sapiens
  misc_RNA (1)...(19): siRNA sense strand
ggacuugaaggaccugauc

SEQ ID NO: 1338616 - RNA, 19 nt, Homo sapiens
  misc_RNA (1)...(19): siRNA sense strand
guacaugguguucgaacug

SEQ ID NO: 1338617 - RNA, 19 nt, Homo sapiens
  misc_RNA (1)...(19): siRNA sense strand
ggccgacaguggagucuca

SEQ ID NO: 1338618 - RNA, 19 nt, Homo sapiens
  misc_RNA (1)...(19): siRNA sense strand
ccucaaaccacucucugaa

SEQ ID NO: 1338619 - RNA, 19 nt, Homo sapiens
  misc_RNA (1)...(19): siRNA sense strand
ccaggcccguuucuacuuc

SEQ ID NO: 1338620 - RNA, 19 nt, Homo sapiens
  misc_RNA (1)...(19): siRNA sense strand
cccguaugcuggacaagaa

SEQ ID NO: 1338621 - RNA, 19 nt, Homo sapiens
  misc_RNA (1)...(19): siRNA sense strand
gcaucgaguacuuacacua

SEQ ID NO: 1338622 - RNA, 19 nt, Homo sapiens
  misc_RNA (1)...(19): siRNA sense strand
ugaaggaugaaauuggaaa

SEQ ID NO: 1338623 - RNA, 19 nt, Homo sapiens
  misc_RNA (1)...(19): siRNA sense strand
uagcugaggacuugaagga

SEQ ID NO: 1338624 - RNA, 19 nt, Homo sapiens
  misc_RNA (1)...(19): siRNA sense strand
gaagugcccacccucaaac

SEQ ID NO: 1338625 - RNA, 19 nt, Homo sapiens
  misc_RNA (1)...(19): siRNA sense strand
gguggcagccuggacauga

SEQ ID NO: 1338626 - RNA, 19 nt, Homo sapiens
  misc_RNA (1)...(19): siRNA sense strand
caauaccuacuaugcaaug

SEQ ID NO: 1338627 - RNA, 19 nt, Homo sapiens
  misc_RNA (1)...(19): siRNA sense strand
acaucaagaucgcugacuu

SEQ ID NO: 1338628 - RNA, 19 nt, Homo sapiens
  misc_RNA (1)...(19): siRNA sense strand
ggaucguggugccggaaau

SEQ ID NO: 1338629 - RNA, 19 nt, Homo sapiens
  misc_RNA (1)...(19): siRNA sense strand
aaguuggccuacaaugaaa

SEQ ID NO: 1338630 - RNA, 19 nt, Homo sapiens
  misc_RNA (1)...(19): siRNA sense strand
gaagaccaugauacguaaa

SEQ ID NO: 1338631 - RNA, 19 nt, Homo sapiens
  misc_RNA (1)...(19): siRNA sense strand
cugaagaccaggcccguuu

SEQ ID NO: 1338632 - RNA, 19 nt, Homo sapiens
  misc_RNA (1)...(19): siRNA sense strand
guggcagccuggacaugaa

SEQ ID NO: 1338633 - RNA, 19 nt, Homo sapiens
  misc_RNA (1)...(19): siRNA sense strand
ugacaauaccuacuaugca

SEQ ID NO: 1338634 - RNA, 19 nt, Homo sapiens
  misc_RNA (1)...(19): siRNA sense strand
gcaagcugucucugcaaga

SEQ ID NO: 1338635 - RNA, 19 nt, Homo sapiens
  misc_RNA (1)...(19): siRNA sense strand
gaccugaucacccguaugc

SEQ ID NO: 1338636 - RNA, 19 nt, Homo sapiens
  misc_RNA (1)...(19): siRNA sense strand
acuauacugcuuugucuuu

SEQ ID NO: 1338637 - RNA, 19 nt, Homo sapiens
  misc_RNA (1)...(19): siRNA sense strand
ggcagcagcagcagcgaaa

SEQ ID NO: 1338638 - RNA, 19 nt, Homo sapiens
  misc_RNA (1)...(19): siRNA sense strand
ugugagcaaugaauucaag

SEQ ID NO: 1338639 - RNA, 19 nt, Homo sapiens
  misc_RNA (1)...(19): siRNA sense strand
ugaggaccaucuguacaug

SEQ ID NO: 1338640 - RNA, 19 nt, Homo sapiens
  misc_RNA (1)...(19): siRNA sense strand
gaaggaugaaauuggaaag

SEQ ID NO: 1338641 - RNA, 19 nt, Homo sapiens
  misc_RNA (1)...(19): siRNA sense strand
auacguaaacgcuccuuug

SEQ ID NO: 1338642 - RNA, 19 nt, Homo sapiens
  misc_RNA (1)...(19): siRNA sense strand
caaugaggaccaucuguac

SEQ ID NO: 1338643 - RNA, 19 nt, Homo sapiens
  misc_RNA (1)...(19): siRNA sense strand
uaccuacuaugcaaugaag

SEQ ID NO: 1338644 - RNA, 19 nt, Homo sapiens
  misc_RNA (1)...(19): siRNA sense strand
ggacgagcggaucaugugu

SEQ ID NO: 1338645 - RNA, 19 nt, Homo sapiens
  misc_RNA (1)...(19): siRNA sense strand
cuauacugcuuugucuuug

SEQ ID NO: 1338646 - RNA, 19 nt, Homo sapiens
  misc_RNA (1)...(19): siRNA sense strand
gugacacuauacugcuuug

SEQ ID NO: 1338647 - RNA, 19 nt, Homo sapiens
  misc_RNA (1)...(19): siRNA sense strand
ugacuuuggugugagcaau

SEQ ID NO: 1338648 - RNA, 19 nt, Homo sapiens
  misc_RNA (1)...(19): siRNA sense strand
ggugugagcaaugaauuca

SEQ ID NO: 1338649 - RNA, 19 nt, Homo sapiens
  misc_RNA (1)...(19): siRNA sense strand
cauggaguccuucauugug

SEQ ID NO: 1338650 - RNA, 19 nt, Homo sapiens
  misc_RNA (1)...(19): siRNA sense strand
gaagaccaggcccguuucu

SEQ ID NO: 1338651 - RNA, 19 nt, Homo sapiens
  misc_RNA (1)...(19): siRNA sense strand
gacgagcggaucauguguu

SEQ ID NO: 1338652 - RNA, 19 nt, Homo sapiens
  misc_RNA (1)...(19): siRNA sense strand
ugucagcgccuggaaacuu

SEQ ID NO: 1338653 - RNA, 19 nt, Homo sapiens
  misc_RNA (1)...(19): siRNA sense strand
gauacguaaacgcuccuuu

SEQ ID NO: 1338654 - RNA, 19 nt, Homo sapiens
  misc_RNA (1)...(19): siRNA sense strand
caucgaguacuuacacuac

SEQ ID NO: 1338655 - RNA, 19 nt, Homo sapiens
  misc_RNA (1)...(19): siRNA sense strand
ucacccguaugcuggacaa

SEQ ID NO: 1338656 - RNA, 19 nt, Homo sapiens
  misc_RNA (1)...(19): siRNA sense strand
cgacauagcugaggacuug

SEQ ID NO: 1338657 - RNA, 19 nt, Homo sapiens
  misc_RNA (1)...(19): siRNA sense strand
gacaauaccuacuaugcaa

SEQ ID NO: 1338658 - RNA, 19 nt, Homo sapiens
  misc_RNA (1)...(19): siRNA sense strand
gggaaggccuuggauguuu

SEQ ID NO: 1338659 - RNA, 19 nt, Homo sapiens
  misc_RNA (1)...(19): siRNA sense strand
caagaucgcugacuuuggu

SEQ ID NO: 1338660 - RNA, 19 nt, Homo sapiens
  misc_RNA (1)...(19): siRNA sense strand
gaaauugccauccucaaga

SEQ ID NO: 1338661 - RNA, 19 nt, Homo sapiens
  misc_RNA (1)...(19): siRNA sense strand
ugaagaccaugauacguaa

SEQ ID NO: 1338662 - RNA, 19 nt, Homo sapiens
  misc_RNA (1)...(19): siRNA sense strand
ucaaaccacucucugaaga

SEQ ID NO: 1338663 - RNA, 19 nt, Homo sapiens
  misc_RNA (1)...(19): siRNA sense strand
caaguuggccuacaaugaa

SEQ ID NO: 1338664 - RNA, 19 nt, Homo sapiens
  misc_RNA (1)...(19): siRNA sense strand
caaugaaggugcuguccaa

SEQ ID NO: 1338665 - RNA, 19 nt, Homo sapiens
  misc_RNA (1)...(19): siRNA sense strand
acaguaagaucaagaguca

SEQ ID NO: 1338666 - RNA, 19 nt, Homo sapiens
  misc_RNA (1)...(19): siRNA sense strand
ggaaggccuuggauguuug

SEQ ID NO: 1338667 - RNA, 19 nt, Homo sapiens
  misc_RNA (1)...(19): siRNA sense strand
ucaaaggcaucgaguacuu

SEQ ID NO: 1338668 - RNA, 19 nt, Homo sapiens
  misc_RNA (1)...(19): siRNA sense strand
gagcagguguaccaggaaa

SEQ ID NO: 1338669 - RNA, 19 nt, Homo sapiens
  misc_RNA (1)...(19): siRNA sense strand
gugaagaccaugauacgua

SEQ ID NO: 1338670 - RNA, 19 nt, Homo sapiens
  misc_RNA (1)...(19): siRNA sense strand
ggaagugcccacccucaaa

SEQ ID NO: 1338671 - RNA, 19 nt, Homo sapiens
  misc_RNA (1)...(19): siRNA sense strand
ccaaugaggaccaucugua

SEQ ID NO: 1338672 - RNA, 19 nt, Homo sapiens
  misc_RNA (1)...(19): siRNA sense strand
gaucaaaggcaucgaguac

SEQ ID NO: 1338673 - RNA, 19 nt, Homo sapiens
  misc_RNA (1)...(19): siRNA sense strand
caaaggcaucgaguacuua

SEQ ID NO: 1338674 - RNA, 19 nt, Homo sapiens
  misc_RNA (1)...(19): siRNA sense strand
ggaaauugccauccucaag

SEQ ID NO: 1338675 - RNA, 19 nt, Homo sapiens
  misc_RNA (1)...(19): siRNA sense strand
aguauacccugaaggauga

SEQ ID NO: 1338676 - RNA, 19 nt, Homo sapiens
  misc_RNA (1)...(19): siRNA sense strand
ggaggaacgcucacuguca

SEQ ID NO: 1338677 - RNA, 19 nt, Homo sapiens
  misc_RNA (1)...(19): siRNA sense strand
ggcauggaguccuucauug

SEQ ID NO: 1338678 - RNA, 19 nt, Homo sapiens
  misc_RNA (1)...(19): siRNA sense strand
aaauugccauccucaagaa

SEQ ID NO: 1338679 - RNA, 19 nt, Homo sapiens
  misc_RNA (1)...(19): siRNA sense strand
gggcauggaguccuucauu

SEQ ID NO: 1338680 - RNA, 19 nt, Homo sapiens
  misc_RNA (1)...(19): siRNA sense strand
ccugaaggaugaaauugga

SEQ ID NO: 1338681 - RNA, 19 nt, Homo sapiens
  misc_RNA (1)...(19): siRNA sense strand
guacuuacacuaccagaag

SEQ ID NO: 1338682 - RNA, 19 nt, Homo sapiens
  misc_RNA (1)...(19): siRNA sense strand
ucaaguuggccuacaauga

SEQ ID NO: 1338683 - RNA, 19 nt, Homo sapiens
  misc_RNA (1)...(19): siRNA sense strand
ccuauggugucgucaaguu

SEQ ID NO: 1338684 - RNA, 19 nt, Homo sapiens
  misc_RNA (1)...(19): siRNA sense strand
cauccaccgugacaucaaa

SEQ ID NO: 1338685 - RNA, 19 nt, Homo sapiens
  misc_RNA (1)...(19): siRNA sense strand
gagcggaucauguguuuac

SEQ ID NO: 1338686 - RNA, 19 nt, Homo sapiens
  misc_RNA (1)...(19): siRNA sense strand
gcagguguaccaggaaauu

SEQ ID NO: 1338687 - RNA, 19 nt, Homo sapiens
  misc_RNA (1)...(19): siRNA sense strand
caucaagaucgcugacuuu

SEQ ID NO: 1338688 - RNA, 19 nt, Homo sapiens
  misc_RNA (1)...(19): siRNA sense strand
gaucauccaccgugacauc

SEQ ID NO: 1338689 - RNA, 19 nt, Homo sapiens
  misc_RNA (1)...(19): siRNA sense strand
gcauggaguccuucauugu

SEQ ID NO: 1338690 - RNA, 19 nt, Homo sapiens
  misc_RNA (1)...(19): siRNA sense strand
gugacgcgcuccucuccaa

SEQ ID NO: 1338691 - RNA, 19 nt, Homo sapiens
  misc_RNA (1)...(19): siRNA sense strand
acgagcggaucauguguuu

SEQ ID NO: 1338692 - RNA, 19 nt, Homo sapiens
  misc_RNA (1)...(19): siRNA sense strand
acacuauacugcuuugucu

SEQ ID NO: 1338693 - RNA, 19 nt, Homo sapiens
  misc_RNA (1)...(19): siRNA sense strand
ugguggagguccuggauga

SEQ ID NO: 1338694 - RNA, 19 nt, Homo sapiens
  misc_RNA (1)...(19): siRNA sense strand
gucagcgccuggaaacuug

SEQ ID NO: 1338695 - RNA, 19 nt, Homo sapiens
  misc_RNA (1)...(19): siRNA sense strand
ggacuugaaggaccugauc

SEQ ID NO: 1338696 - RNA, 19 nt, Homo sapiens
  misc_RNA (1)...(19): siRNA sense strand
guacaugguguucgaacug

SEQ ID NO: 1338697 - RNA, 19 nt, Homo sapiens
  misc_RNA (1)...(19): siRNA sense strand
ggccgacaguggagucuca

SEQ ID NO: 1338698 - RNA, 19 nt, Homo sapiens
  misc_RNA (1)...(19): siRNA sense strand
ccucaaaccacucucugaa

SEQ ID NO: 1338699 - RNA, 19 nt, Homo sapiens
  misc_RNA (1)...(19): siRNA sense strand
ccaggcccguuucuacuuc

SEQ ID NO: 1338700 - RNA, 19 nt, Homo sapiens
  misc_RNA (1)...(19): siRNA sense strand
cccguaugcuggacaagaa

SEQ ID NO: 1338701 - RNA, 19 nt, Homo sapiens
  misc_RNA (1)...(19): siRNA sense strand
gcaucgaguacuuacacua

SEQ ID NO: 1338702 - RNA, 19 nt, Homo sapiens
  misc_RNA (1)...(19): siRNA sense strand
ugaaggaugaaauuggaaa

SEQ ID NO: 1338703 - RNA, 19 nt, Homo sapiens
  misc_RNA (1)...(19): siRNA sense strand
uagcugaggacuugaagga

SEQ ID NO: 1338704 - RNA, 19 nt, Homo sapiens
  misc_RNA (1)...(19): siRNA sense strand
gaagugcccacccucaaac

SEQ ID NO: 1338705 - RNA, 19 nt, Homo sapiens
  misc_RNA (1)...(19): siRNA sense strand
gguggcagccuggacauga

SEQ ID NO: 1338706 - RNA, 19 nt, Homo sapiens
  misc_RNA (1)...(19): siRNA sense strand
caauaccuacuaugcaaug

SEQ ID NO: 1338707 - RNA, 19 nt, Homo sapiens
  misc_RNA (1)...(19): siRNA sense strand
acaucaagaucgcugacuu

SEQ ID NO: 1338708 - RNA, 19 nt, Homo sapiens
  misc_RNA (1)...(19): siRNA sense strand
ggaucguggugccggaaau

SEQ ID NO: 1338709 - RNA, 19 nt, Homo sapiens
  misc_RNA (1)...(19): siRNA sense strand
aaguuggccuacaaugaaa

SEQ ID NO: 1338710 - RNA, 19 nt, Homo sapiens
  misc_RNA (1)...(19): siRNA sense strand
gaagaccaugauacguaaa

SEQ ID NO: 1338711 - RNA, 19 nt, Homo sapiens
  misc_RNA (1)...(19): siRNA sense strand
cugaagaccaggcccguuu

SEQ ID NO: 1338712 - RNA, 19 nt, Homo sapiens
  misc_RNA (1)...(19): siRNA sense strand
guggcagccuggacaugaa

SEQ ID NO: 1338713 - RNA, 19 nt, Homo sapiens
  misc_RNA (1)...(19): siRNA sense strand
ugacaauaccuacuaugca

SEQ ID NO: 1338714 - RNA, 19 nt, Homo sapiens
  misc_RNA (1)...(19): siRNA sense strand
gcaagcugucucugcaaga

SEQ ID NO: 1338715 - RNA, 19 nt, Homo sapiens
  misc_RNA (1)...(19): siRNA sense strand
gaccugaucacccguaugc

SEQ ID NO: 1338716 - RNA, 19 nt, Homo sapiens
  misc_RNA (1)...(19): siRNA sense strand
acuauacugcuuugucuuu

SEQ ID NO: 1338717 - RNA, 19 nt, Homo sapiens
  misc_RNA (1)...(19): siRNA sense strand
ggcagcagcagcagcgaaa

SEQ ID NO: 1338718 - RNA, 19 nt, Homo sapiens
  misc_RNA (1)...(19): siRNA sense strand
ugugagcaaugaauucaag

SEQ ID NO: 1338719 - RNA, 19 nt, Homo sapiens
  misc_RNA (1)...(19): siRNA sense strand
ugaggaccaucuguacaug

SEQ ID NO: 1338720 - RNA, 19 nt, Homo sapiens
  misc_RNA (1)...(19): siRNA sense strand
gaaggaugaaauuggaaag

SEQ ID NO: 1338721 - RNA, 19 nt, Homo sapiens
  misc_RNA (1)...(19): siRNA sense strand
auacguaaacgcuccuuug

SEQ ID NO: 1338722 - RNA, 19 nt, Homo sapiens
  misc_RNA (1)...(19): siRNA sense strand
caaugaggaccaucuguac

SEQ ID NO: 1338723 - RNA, 19 nt, Homo sapiens
  misc_RNA (1)...(19): siRNA sense strand
uaccuacuaugcaaugaag

SEQ ID NO: 1338724 - RNA, 19 nt, Homo sapiens
  misc_RNA (1)...(19): siRNA sense strand
ggacgagcggaucaugugu

SEQ ID NO: 1338725 - RNA, 19 nt, Homo sapiens
  misc_RNA (1)...(19): siRNA sense strand
cuauacugcuuugucuuug

SEQ ID NO: 1338726 - RNA, 19 nt, Homo sapiens
  misc_RNA (1)...(19): siRNA sense strand
gugacacuauacugcuuug

SEQ ID NO: 1338727 - RNA, 19 nt, Homo sapiens
  misc_RNA (1)...(19): siRNA sense strand
ugacuuuggugugagcaau

SEQ ID NO: 1338728 - RNA, 19 nt, Homo sapiens
  misc_RNA (1)...(19): siRNA sense strand
ggugugagcaaugaauuca

SEQ ID NO: 1338729 - RNA, 19 nt, Homo sapiens
  misc_RNA (1)...(19): siRNA sense strand
cauggaguccuucauugug

SEQ ID NO: 1338730 - RNA, 19 nt, Homo sapiens
  misc_RNA (1)...(19): siRNA sense strand
gaagaccaggcccguuucu

SEQ ID NO: 1338731 - RNA, 19 nt, Homo sapiens
  misc_RNA (1)...(19): siRNA sense strand
gacgagcggaucauguguu

SEQ ID NO: 1338732 - RNA, 19 nt, Homo sapiens
  misc_RNA (1)...(19): siRNA sense strand
ugucagcgccuggaaacuu

SEQ ID NO: 1338733 - RNA, 19 nt, Homo sapiens
  misc_RNA (1)...(19): siRNA sense strand
gauacguaaacgcuccuuu

SEQ ID NO: 1338734 - RNA, 19 nt, Homo sapiens
  misc_RNA (1)...(19): siRNA sense strand
caucgaguacuuacacuac

SEQ ID NO: 1338735 - RNA, 19 nt, Homo sapiens
  misc_RNA (1)...(19): siRNA sense strand
ucacccguaugcuggacaa

SEQ ID NO: 1338736 - RNA, 19 nt, Homo sapiens
  misc_RNA (1)...(19): siRNA sense strand
cgacauagcugaggacuug

SEQ ID NO: 1338737 - RNA, 19 nt, Homo sapiens
  misc_RNA (1)...(19): siRNA sense strand
gacaauaccuacuaugcaa

SEQ ID NO: 1338738 - RNA, 19 nt, Homo sapiens
  misc_RNA (1)...(19): siRNA sense strand
gggaaggccuuggauguuu

SEQ ID NO: 1338739 - RNA, 19 nt, Homo sapiens
  misc_RNA (1)...(19): siRNA sense strand
caagaucgcugacuuuggu

SEQ ID NO: 1338740 - RNA, 19 nt, Homo sapiens
  misc_RNA (1)...(19): siRNA sense strand
gaaauugccauccucaaga

SEQ ID NO: 1338741 - RNA, 19 nt, Homo sapiens
  misc_RNA (1)...(19): siRNA sense strand
ugaagaccaugauacguaa

SEQ ID NO: 1338742 - RNA, 19 nt, Homo sapiens
  misc_RNA (1)...(19): siRNA sense strand
ucaaaccacucucugaaga

SEQ ID NO: 1338743 - RNA, 19 nt, Homo sapiens
  misc_RNA (1)...(19): siRNA sense strand
caaguuggccuacaaugaa

SEQ ID NO: 1338744 - RNA, 19 nt, Homo sapiens
  misc_RNA (1)...(19): siRNA sense strand
caaugaaggugcuguccaa

SEQ ID NO: 1338745 - RNA, 19 nt, Homo sapiens
  misc_RNA (1)...(19): siRNA sense strand
acaguaagaucaagaguca

SEQ ID NO: 1338746 - RNA, 19 nt, Homo sapiens
  misc_RNA (1)...(19): siRNA sense strand
ggaaggccuuggauguuug

SEQ ID NO: 1338747 - RNA, 19 nt, Homo sapiens
  misc_RNA (1)...(19): siRNA sense strand
ucaaaggcaucgaguacuu

SEQ ID NO: 1338748 - RNA, 19 nt, Homo sapiens
  misc_RNA (1)...(19): siRNA sense strand
gagcagguguaccaggaaa

SEQ ID NO: 1338749 - RNA, 19 nt, Homo sapiens
  misc_RNA (1)...(19): siRNA sense strand
gugaagaccaugauacgua

SEQ ID NO: 1338750 - RNA, 19 nt, Homo sapiens
  misc_RNA (1)...(19): siRNA sense strand
ggaagugcccacccucaaa

SEQ ID NO: 1338751 - RNA, 19 nt, Homo sapiens
  misc_RNA (1)...(19): siRNA sense strand
ccaaugaggaccaucugua

SEQ ID NO: 1338752 - RNA, 19 nt, Homo sapiens
  misc_RNA (1)...(19): siRNA sense strand
gaucaaaggcaucgaguac

SEQ ID NO: 1338753 - RNA, 19 nt, Homo sapiens
  misc_RNA (1)...(19): siRNA sense strand
caaaggcaucgaguacuua

SEQ ID NO: 1338754 - RNA, 19 nt, Homo sapiens
  misc_RNA (1)...(19): siRNA sense strand
ggaaauugccauccucaag

SEQ ID NO: 1338755 - RNA, 19 nt, Homo sapiens
  misc_RNA (1)...(19): siRNA sense strand
aguauacccugaaggauga

SEQ ID NO: 1338756 - RNA, 19 nt, Homo sapiens
  misc_RNA (1)...(19): siRNA sense strand
ggaggaacgcucacuguca

SEQ ID NO: 1338757 - RNA, 19 nt, Homo sapiens
  misc_RNA (1)...(19): siRNA sense strand
ggcauggaguccuucauug

SEQ ID NO: 1338758 - RNA, 19 nt, Homo sapiens
  misc_RNA (1)...(19): siRNA sense strand
aaauugccauccucaagaa

SEQ ID NO: 1338759 - RNA, 19 nt, Homo sapiens
  misc_RNA (1)...(19): siRNA sense strand
gggcauggaguccuucauu

SEQ ID NO: 1338760 - RNA, 19 nt, Homo sapiens
  misc_RNA (1)...(19): siRNA sense strand
ccugaaggaugaaauugga

SEQ ID NO: 1338761 - RNA, 19 nt, Homo sapiens
  misc_RNA (1)...(19): siRNA sense strand
guacuuacacuaccagaag

SEQ ID NO: 1338762 - RNA, 19 nt, Homo sapiens
  misc_RNA (1)...(19): siRNA sense strand
ucaaguuggccuacaauga

SEQ ID NO: 1338763 - RNA, 19 nt, Homo sapiens
  misc_RNA (1)...(19): siRNA sense strand
ccuauggugucgucaaguu

SEQ ID NO: 1338764 - RNA, 19 nt, Homo sapiens
  misc_RNA (1)...(19): siRNA sense strand
cauccaccgugacaucaaa

SEQ ID NO: 1338765 - RNA, 19 nt, Homo sapiens
  misc_RNA (1)...(19): siRNA sense strand
gagcggaucauguguuuac

SEQ ID NO: 1338766 - RNA, 19 nt, Homo sapiens
  misc_RNA (1)...(19): siRNA sense strand
gcagguguaccaggaaauu

SEQ ID NO: 1338767 - RNA, 19 nt, Homo sapiens
  misc_RNA (1)...(19): siRNA sense strand
caucaagaucgcugacuuu

SEQ ID NO: 1338768 - RNA, 19 nt, Homo sapiens
  misc_RNA (1)...(19): siRNA sense strand
gaucauccaccgugacauc

SEQ ID NO: 1338769 - RNA, 19 nt, Homo sapiens
  misc_RNA (1)...(19): siRNA sense strand
gcauggaguccuucauugu

SEQ ID NO: 1338770 - RNA, 19 nt, Homo sapiens
  misc_RNA (1)...(19): siRNA sense strand
gugacgcgcuccucuccaa

SEQ ID NO: 1338771 - RNA, 19 nt, Homo sapiens
  misc_RNA (1)...(19): siRNA sense strand
acgagcggaucauguguuu

SEQ ID NO: 1338772 - RNA, 19 nt, Homo sapiens
  misc_RNA (1)...(19): siRNA sense strand
acacuauacugcuuugucu

SEQ ID NO: 1338773 - RNA, 19 nt, Homo sapiens
  misc_RNA (1)...(19): siRNA sense strand
ugguggagguccuggauga

SEQ ID NO: 1338774 - RNA, 19 nt, Homo sapiens
  misc_RNA (1)...(19): siRNA sense strand
gucagcgccuggaaacuug

SEQ ID NO: 1338775 - RNA, 19 nt, Homo sapiens
  misc_RNA (1)...(19): siRNA sense strand
ggacuugaaggaccugauc

SEQ ID NO: 1338776 - RNA, 19 nt, Homo sapiens
  misc_RNA (1)...(19): siRNA sense strand
guacaugguguucgaacug

SEQ ID NO: 1338777 - RNA, 19 nt, Homo sapiens
  misc_RNA (1)...(19): siRNA sense strand
ggccgacaguggagucuca

SEQ ID NO: 1338778 - RNA, 19 nt, Homo sapiens
  misc_RNA (1)...(19): siRNA sense strand
ccucaaaccacucucugaa

SEQ ID NO: 1338779 - RNA, 19 nt, Homo sapiens
  misc_RNA (1)...(19): siRNA sense strand
ccaggcccguuucuacuuc

SEQ ID NO: 1338780 - RNA, 19 nt, Homo sapiens
  misc_RNA (1)...(19): siRNA sense strand
cccguaugcuggacaagaa

SEQ ID NO: 1338781 - RNA, 19 nt, Homo sapiens
  misc_RNA (1)...(19): siRNA sense strand
gcaucgaguacuuacacua

SEQ ID NO: 1338782 - RNA, 19 nt, Homo sapiens
  misc_RNA (1)...(19): siRNA sense strand
ugaaggaugaaauuggaaa

SEQ ID NO: 1338783 - RNA, 19 nt, Homo sapiens
  misc_RNA (1)...(19): siRNA sense strand
uagcugaggacuugaagga

SEQ ID NO: 1338784 - RNA, 19 nt, Homo sapiens
  misc_RNA (1)...(19): siRNA sense strand
gaagugcccacccucaaac

SEQ ID NO: 1338785 - RNA, 19 nt, Homo sapiens
  misc_RNA (1)...(19): siRNA sense strand
gguggcagccuggacauga

SEQ ID NO: 1338786 - RNA, 19 nt, Homo sapiens
  misc_RNA (1)...(19): siRNA sense strand
caauaccuacuaugcaaug

SEQ ID NO: 1338787 - RNA, 19 nt, Homo sapiens
  misc_RNA (1)...(19): siRNA sense strand
acaucaagaucgcugacuu

SEQ ID NO: 1338788 - RNA, 19 nt, Homo sapiens
  misc_RNA (1)...(19): siRNA sense strand
ggaucguggugccggaaau

SEQ ID NO: 1338789 - RNA, 19 nt, Homo sapiens
  misc_RNA (1)...(19): siRNA sense strand
aaguuggccuacaaugaaa

SEQ ID NO: 1338790 - RNA, 19 nt, Homo sapiens
  misc_RNA (1)...(19): siRNA sense strand
gaagaccaugauacguaaa

SEQ ID NO: 1338791 - RNA, 19 nt, Homo sapiens
  misc_RNA (1)...(19): siRNA sense strand
cugaagaccaggcccguuu

SEQ ID NO: 1338792 - RNA, 19 nt, Homo sapiens
  misc_RNA (1)...(19): siRNA sense strand
guggcagccuggacaugaa

SEQ ID NO: 1338793 - RNA, 19 nt, Homo sapiens
  misc_RNA (1)...(19): siRNA sense strand
ugacaauaccuacuaugca

SEQ ID NO: 1338794 - RNA, 19 nt, Homo sapiens
  misc_RNA (1)...(19): siRNA sense strand
gcaagcugucucugcaaga

SEQ ID NO: 1338795 - RNA, 19 nt, Homo sapiens
  misc_RNA (1)...(19): siRNA sense strand
gaccugaucacccguaugc

SEQ ID NO: 1338796 - RNA, 19 nt, Homo sapiens
  misc_RNA (1)...(19): siRNA sense strand
acuauacugcuuugucuuu

SEQ ID NO: 1338797 - RNA, 19 nt, Homo sapiens
  misc_RNA (1)...(19): siRNA sense strand
ggcagcagcagcagcgaaa

SEQ ID NO: 1338798 - RNA, 19 nt, Homo sapiens
  misc_RNA (1)...(19): siRNA sense strand
ugugagcaaugaauucaag

SEQ ID NO: 1338799 - RNA, 19 nt, Homo sapiens
  misc_RNA (1)...(19): siRNA sense strand
ugaggaccaucuguacaug

SEQ ID NO: 1338800 - RNA, 19 nt, Homo sapiens
  misc_RNA (1)...(19): siRNA sense strand
gaaggaugaaauuggaaag

SEQ ID NO: 1338801 - RNA, 19 nt, Homo sapiens
  misc_RNA (1)...(19): siRNA sense strand
auacguaaacgcuccuuug

SEQ ID NO: 1338802 - RNA, 19 nt, Homo sapiens
  misc_RNA (1)...(19): siRNA sense strand
caaugaggaccaucuguac

SEQ ID NO: 1338803 - RNA, 19 nt, Homo sapiens
  misc_RNA (1)...(19): siRNA sense strand
uaccuacuaugcaaugaag

SEQ ID NO: 1338804 - RNA, 19 nt, Homo sapiens
  misc_RNA (1)...(19): siRNA sense strand
ggacgagcggaucaugugu

SEQ ID NO: 1338805 - RNA, 19 nt, Homo sapiens
  misc_RNA (1)...(19): siRNA sense strand
cuauacugcuuugucuuug

SEQ ID NO: 1338806 - RNA, 19 nt, Homo sapiens
  misc_RNA (1)...(19): siRNA sense strand
gugacacuauacugcuuug

SEQ ID NO: 1338807 - RNA, 19 nt, Homo sapiens
  misc_RNA (1)...(19): siRNA sense strand
ugacuuuggugugagcaau

SEQ ID NO: 1338808 - RNA, 19 nt, Homo sapiens
  misc_RNA (1)...(19): siRNA sense strand
ggugugagcaaugaauuca

SEQ ID NO: 1338809 - RNA, 19 nt, Homo sapiens
  misc_RNA (1)...(19): siRNA sense strand
cauggaguccuucauugug

SEQ ID NO: 1338810 - RNA, 19 nt, Homo sapiens
  misc_RNA (1)...(19): siRNA sense strand
gaagaccaggcccguuucu

SEQ ID NO: 1338811 - RNA, 19 nt, Homo sapiens
  misc_RNA (1)...(19): siRNA sense strand
gacgagcggaucauguguu

SEQ ID NO: 1338812 - RNA, 19 nt, Homo sapiens
  misc_RNA (1)...(19): siRNA sense strand
ugucagcgccuggaaacuu

SEQ ID NO: 1338813 - RNA, 19 nt, Homo sapiens
  misc_RNA (1)...(19): siRNA sense strand
gauacguaaacgcuccuuu

SEQ ID NO: 1338814 - RNA, 19 nt, Homo sapiens
  misc_RNA (1)...(19): siRNA sense strand
caucgaguacuuacacuac

SEQ ID NO: 1338815 - RNA, 19 nt, Homo sapiens
  misc_RNA (1)...(19): siRNA sense strand
ucacccguaugcuggacaa

SEQ ID NO: 1338816 - RNA, 19 nt, Homo sapiens
  misc_RNA (1)...(19): siRNA sense strand
gagaggagguggcacugaa

SEQ ID NO: 1338817 - RNA, 19 nt, Homo sapiens
  misc_RNA (1)...(19): siRNA sense strand
gaauggaggucaaaacaaa

SEQ ID NO: 1338818 - RNA, 19 nt, Homo sapiens
  misc_RNA (1)...(19): siRNA sense strand
ggaagugaguucagagagu

SEQ ID NO: 1338819 - RNA, 19 nt, Homo sapiens
  misc_RNA (1)...(19): siRNA sense strand
gugcagguaugguuuaaga

SEQ ID NO: 1338820 - RNA, 19 nt, Homo sapiens
  misc_RNA (1)...(19): siRNA sense strand
uggcucaacuuccuacuuu

SEQ ID NO: 1338821 - RNA, 19 nt, Homo sapiens
  misc_RNA (1)...(19): siRNA sense strand
ccacugauugcuuggauua

SEQ ID NO: 1338822 - RNA, 19 nt, Homo sapiens
  misc_RNA (1)...(19): siRNA sense strand
gcugacugcuuggauuaua

SEQ ID NO: 1338823 - RNA, 19 nt, Homo sapiens
  misc_RNA (1)...(19): siRNA sense strand
gcagugcuccugugucuau

SEQ ID NO: 1338824 - RNA, 19 nt, Homo sapiens
  misc_RNA (1)...(19): siRNA sense strand
gacuguggaucauauuuga

SEQ ID NO: 1338825 - RNA, 19 nt, Homo sapiens
  misc_RNA (1)...(19): siRNA sense strand
ggacuguggaucauauuug

SEQ ID NO: 1338826 - RNA, 19 nt, Homo sapiens
  misc_RNA (1)...(19): siRNA sense strand
gaagcacuguuugccaaga

SEQ ID NO: 1338827 - RNA, 19 nt, Homo sapiens
  misc_RNA (1)...(19): siRNA sense strand
gcagguaugguuuaagaau

SEQ ID NO: 1338828 - RNA, 19 nt, Homo sapiens
  misc_RNA (1)...(19): siRNA sense strand
ccagggauauggagcuuca

SEQ ID NO: 1338829 - RNA, 19 nt, Homo sapiens
  misc_RNA (1)...(19): siRNA sense strand
cugauugcuuggauuauaa

SEQ ID NO: 1338830 - RNA, 19 nt, Homo sapiens
  misc_RNA (1)...(19): siRNA sense strand
uggaacaaguggccaauuc

SEQ ID NO: 1338831 - RNA, 19 nt, Homo sapiens
  misc_RNA (1)...(19): siRNA sense strand
gggcauggacuguggauca

SEQ ID NO: 1338832 - RNA, 19 nt, Homo sapiens
  misc_RNA (1)...(19): siRNA sense strand
acugauugcuuggauuaua

SEQ ID NO: 1338833 - RNA, 19 nt, Homo sapiens
  misc_RNA (1)...(19): siRNA sense strand
cauggacuguggaucauau

SEQ ID NO: 1338834 - RNA, 19 nt, Homo sapiens
  misc_RNA (1)...(19): siRNA sense strand
auacucaggcuucagguua

SEQ ID NO: 1338835 - RNA, 19 nt, Homo sapiens
  misc_RNA (1)...(19): siRNA sense strand
gaucauauuugaccccuau

SEQ ID NO: 1338836 - RNA, 19 nt, Homo sapiens
  misc_RNA (1)...(19): siRNA sense strand
ggaacaaguggccaauuca

SEQ ID NO: 1338837 - RNA, 19 nt, Homo sapiens
  misc_RNA (1)...(19): siRNA sense strand
cugcuuggauuauaaagau

SEQ ID NO: 1338838 - RNA, 19 nt, Homo sapiens
  misc_RNA (1)...(19): siRNA sense strand
cagagguccuaucccauga

SEQ ID NO: 1338839 - RNA, 19 nt, Homo sapiens
  misc_RNA (1)...(19): siRNA sense strand
gcagucaccagccaucuca

SEQ ID NO: 1338840 - RNA, 19 nt, Homo sapiens
  misc_RNA (1)...(19): siRNA sense strand
cagguuauagucaaggaua

SEQ ID NO: 1338841 - RNA, 19 nt, Homo sapiens
  misc_RNA (1)...(19): siRNA sense strand
caaagugagaccugccaaa

SEQ ID NO: 1338842 - RNA, 19 nt, Homo sapiens
  misc_RNA (1)...(19): siRNA sense strand
gaaauuccagguuuuguga

SEQ ID NO: 1338843 - RNA, 19 nt, Homo sapiens
  misc_RNA (1)...(19): siRNA sense strand
gcaccucagucccgaccau

SEQ ID NO: 1338844 - RNA, 19 nt, Homo sapiens
  misc_RNA (1)...(19): siRNA sense strand
gucaaugggcugagucuga

SEQ ID NO: 1338845 - RNA, 19 nt, Homo sapiens
  misc_RNA (1)...(19): siRNA sense strand
cagguaugguuuaagaauc

SEQ ID NO: 1338846 - RNA, 19 nt, Homo sapiens
  misc_RNA (1)...(19): siRNA sense strand
cugacugcuuggauuauaa

SEQ ID NO: 1338847 - RNA, 19 nt, Homo sapiens
  misc_RNA (1)...(19): siRNA sense strand
gauaugcuggcucaacuuc

SEQ ID NO: 1338848 - RNA, 19 nt, Homo sapiens
  misc_RNA (1)...(19): siRNA sense strand
gggugcagguaugguuuaa

SEQ ID NO: 1338849 - RNA, 19 nt, Homo sapiens
  misc_RNA (1)...(19): siRNA sense strand
ucagagaguggaacaagug

SEQ ID NO: 1338850 - RNA, 19 nt, Homo sapiens
  misc_RNA (1)...(19): siRNA sense strand
gggcugagucugaccacuu

SEQ ID NO: 1338851 - RNA, 19 nt, Homo sapiens
  misc_RNA (1)...(19): siRNA sense strand
cagacauccucguggaaau

SEQ ID NO: 1338852 - RNA, 19 nt, Homo sapiens
  misc_RNA (1)...(19): siRNA sense strand
gagggugcagguaugguuu

SEQ ID NO: 1338853 - RNA, 19 nt, Homo sapiens
  misc_RNA (1)...(19): siRNA sense strand
ggcugagucugaccacuuc

SEQ ID NO: 1338854 - RNA, 19 nt, Homo sapiens
  misc_RNA (1)...(19): siRNA sense strand
gcauggacuguggaucaua

SEQ ID NO: 1338855 - RNA, 19 nt, Homo sapiens
  misc_RNA (1)...(19): siRNA sense strand
guacccagacaucuucaug

SEQ ID NO: 1338856 - RNA, 19 nt, Homo sapiens
  misc_RNA (1)...(19): siRNA sense strand
gaacaaguggccaauucac

SEQ ID NO: 1338857 - RNA, 19 nt, Homo sapiens
  misc_RNA (1)...(19): siRNA sense strand
aaugcugacugcuuggauu

SEQ ID NO: 1338858 - RNA, 19 nt, Homo sapiens
  misc_RNA (1)...(19): siRNA sense strand
acucaggcuucagguuaua

SEQ ID NO: 1338859 - RNA, 19 nt, Homo sapiens
  misc_RNA (1)...(19): siRNA sense strand
ccacuucggguauggacuu

SEQ ID NO: 1338860 - RNA, 19 nt, Homo sapiens
  misc_RNA (1)...(19): siRNA sense strand
ucagacauccucguggaaa

SEQ ID NO: 1338861 - RNA, 19 nt, Homo sapiens
  misc_RNA (1)...(19): siRNA sense strand
ugacugcuuggauuauaaa

SEQ ID NO: 1338862 - RNA, 19 nt, Homo sapiens
  misc_RNA (1)...(19): siRNA sense strand
gaccuauacucaggcuuca

SEQ ID NO: 1338863 - RNA, 19 nt, Homo sapiens
  misc_RNA (1)...(19): siRNA sense strand
gcuaagugccgccaacaac

SEQ ID NO: 1338864 - RNA, 19 nt, Homo sapiens
  misc_RNA (1)...(19): siRNA sense strand
ucaccagccaucucaauca

SEQ ID NO: 1338865 - RNA, 19 nt, Homo sapiens
  misc_RNA (1)...(19): siRNA sense strand
gccaacaacagcaacaaca

SEQ ID NO: 1338866 - RNA, 19 nt, Homo sapiens
  misc_RNA (1)...(19): siRNA sense strand
uuaagaaucgaagagcuaa

SEQ ID NO: 1338867 - RNA, 19 nt, Homo sapiens
  misc_RNA (1)...(19): siRNA sense strand
uaacucaaccacugauugc

SEQ ID NO: 1338868 - RNA, 19 nt, Homo sapiens
  misc_RNA (1)...(19): siRNA sense strand
cagcaacaacagcagaaug

SEQ ID NO: 1338869 - RNA, 19 nt, Homo sapiens
  misc_RNA (1)...(19): siRNA sense strand
gcaacaacagcagaaugga

SEQ ID NO: 1338870 - RNA, 19 nt, Homo sapiens
  misc_RNA (1)...(19): siRNA sense strand
agacauccucguggaaauu

SEQ ID NO: 1338871 - RNA, 19 nt, Homo sapiens
  misc_RNA (1)...(19): siRNA sense strand
ggauaugcuggcucaacuu

SEQ ID NO: 1338872 - RNA, 19 nt, Homo sapiens
  misc_RNA (1)...(19): siRNA sense strand
ggcuucagguuauagucaa

SEQ ID NO: 1338873 - RNA, 19 nt, Homo sapiens
  misc_RNA (1)...(19): siRNA sense strand
ccuaucccaugaccuauac

SEQ ID NO: 1338874 - RNA, 19 nt, Homo sapiens
  misc_RNA (1)...(19): siRNA sense strand
uuuaagaaucgaagagcua

SEQ ID NO: 1338875 - RNA, 19 nt, Homo sapiens
  misc_RNA (1)...(19): siRNA sense strand
gauuauaaggaccaaacug

SEQ ID NO: 1338876 - RNA, 19 nt, Homo sapiens
  misc_RNA (1)...(19): siRNA sense strand
gcucaacuuccuacuuugg

SEQ ID NO: 1338877 - RNA, 19 nt, Homo sapiens
  misc_RNA (1)...(19): siRNA sense strand
cgagggugcagguaugguu

SEQ ID NO: 1338878 - RNA, 19 nt, Homo sapiens
  misc_RNA (1)...(19): siRNA sense strand
uuaacucaaccacugauug

SEQ ID NO: 1338879 - RNA, 19 nt, Homo sapiens
  misc_RNA (1)...(19): siRNA sense strand
cagcagaauggaggucaaa

SEQ ID NO: 1338880 - RNA, 19 nt, Homo sapiens
  misc_RNA (1)...(19): siRNA sense strand
agucgagggugcagguaug

SEQ ID NO: 1338881 - RNA, 19 nt, Homo sapiens
  misc_RNA (1)...(19): siRNA sense strand
uacucaggcuucagguuau

SEQ ID NO: 1338882 - RNA, 19 nt, Homo sapiens
  misc_RNA (1)...(19): siRNA sense strand
gagaggagguggcacugaa

SEQ ID NO: 1338883 - RNA, 19 nt, Homo sapiens
  misc_RNA (1)...(19): siRNA sense strand
gaauggaggucaaaacaaa

SEQ ID NO: 1338884 - RNA, 19 nt, Homo sapiens
  misc_RNA (1)...(19): siRNA sense strand
ggaagugaguucagagagu

SEQ ID NO: 1338885 - RNA, 19 nt, Homo sapiens
  misc_RNA (1)...(19): siRNA sense strand
gugcagguaugguuuaaga

SEQ ID NO: 1338886 - RNA, 19 nt, Homo sapiens
  misc_RNA (1)...(19): siRNA sense strand
uggcucaacuuccuacuuu

SEQ ID NO: 1338887 - RNA, 19 nt, Homo sapiens
  misc_RNA (1)...(19): siRNA sense strand
ccacugauugcuuggauua

SEQ ID NO: 1338888 - RNA, 19 nt, Homo sapiens
  misc_RNA (1)...(19): siRNA sense strand
gcugacugcuuggauuaua

SEQ ID NO: 1338889 - RNA, 19 nt, Homo sapiens
  misc_RNA (1)...(19): siRNA sense strand
gcagugcuccugugucuau

SEQ ID NO: 1338890 - RNA, 19 nt, Homo sapiens
  misc_RNA (1)...(19): siRNA sense strand
gacuguggaucauauuuga

SEQ ID NO: 1338891 - RNA, 19 nt, Homo sapiens
  misc_RNA (1)...(19): siRNA sense strand
ggacuguggaucauauuug

SEQ ID NO: 1338892 - RNA, 19 nt, Homo sapiens
  misc_RNA (1)...(19): siRNA sense strand
gaagcacuguuugccaaga

SEQ ID NO: 1338893 - RNA, 19 nt, Homo sapiens
  misc_RNA (1)...(19): siRNA sense strand
gcagguaugguuuaagaau

SEQ ID NO: 1338894 - RNA, 19 nt, Homo sapiens
  misc_RNA (1)...(19): siRNA sense strand
ccagggauauggagcuuca

SEQ ID NO: 1338895 - RNA, 19 nt, Homo sapiens
  misc_RNA (1)...(19): siRNA sense strand
cugauugcuuggauuauaa

SEQ ID NO: 1338896 - RNA, 19 nt, Homo sapiens
  misc_RNA (1)...(19): siRNA sense strand
uggaacaaguggccaauuc

SEQ ID NO: 1338897 - RNA, 19 nt, Homo sapiens
  misc_RNA (1)...(19): siRNA sense strand
gggcauggacuguggauca

SEQ ID NO: 1338898 - RNA, 19 nt, Homo sapiens
  misc_RNA (1)...(19): siRNA sense strand
acugauugcuuggauuaua

SEQ ID NO: 1338899 - RNA, 19 nt, Homo sapiens
  misc_RNA (1)...(19): siRNA sense strand
cauggacuguggaucauau

SEQ ID NO: 1338900 - RNA, 19 nt, Homo sapiens
  misc_RNA (1)...(19): siRNA sense strand
auacucaggcuucagguua

SEQ ID NO: 1338901 - RNA, 19 nt, Homo sapiens
  misc_RNA (1)...(19): siRNA sense strand
gaucauauuugaccccuau

SEQ ID NO: 1338902 - RNA, 19 nt, Homo sapiens
  misc_RNA (1)...(19): siRNA sense strand
ggaacaaguggccaauuca

SEQ ID NO: 1338903 - RNA, 19 nt, Homo sapiens
  misc_RNA (1)...(19): siRNA sense strand
cugcuuggauuauaaagau

SEQ ID NO: 1338904 - RNA, 19 nt, Homo sapiens
  misc_RNA (1)...(19): siRNA sense strand
cagagguccuaucccauga

SEQ ID NO: 1338905 - RNA, 19 nt, Homo sapiens
  misc_RNA (1)...(19): siRNA sense strand
gcagucaccagccaucuca

SEQ ID NO: 1338906 - RNA, 19 nt, Homo sapiens
  misc_RNA (1)...(19): siRNA sense strand
cagguuauagucaaggaua

SEQ ID NO: 1338907 - RNA, 19 nt, Homo sapiens
  misc_RNA (1)...(19): siRNA sense strand
caaagugagaccugccaaa

SEQ ID NO: 1338908 - RNA, 19 nt, Homo sapiens
  misc_RNA (1)...(19): siRNA sense strand
gaaauuccagguuuuguga

SEQ ID NO: 1338909 - RNA, 19 nt, Homo sapiens
  misc_RNA (1)...(19): siRNA sense strand
gcaccucagucccgaccau

SEQ ID NO: 1338910 - RNA, 19 nt, Homo sapiens
  misc_RNA (1)...(19): siRNA sense strand
gucaaugggcugagucuga

SEQ ID NO: 1338911 - RNA, 19 nt, Homo sapiens
  misc_RNA (1)...(19): siRNA sense strand
cagguaugguuuaagaauc

SEQ ID NO: 1338912 - RNA, 19 nt, Homo sapiens
  misc_RNA (1)...(19): siRNA sense strand
cugacugcuuggauuauaa

SEQ ID NO: 1338913 - RNA, 19 nt, Homo sapiens
  misc_RNA (1)...(19): siRNA sense strand
gauaugcuggcucaacuuc

SEQ ID NO: 1338914 - RNA, 19 nt, Homo sapiens
  misc_RNA (1)...(19): siRNA sense strand
gggugcagguaugguuuaa

SEQ ID NO: 1338915 - RNA, 19 nt, Homo sapiens
  misc_RNA (1)...(19): siRNA sense strand
ucagagaguggaacaagug

SEQ ID NO: 1338916 - RNA, 19 nt, Homo sapiens
  misc_RNA (1)...(19): siRNA sense strand
gggcugagucugaccacuu

SEQ ID NO: 1338917 - RNA, 19 nt, Homo sapiens
  misc_RNA (1)...(19): siRNA sense strand
cagacauccucguggaaau

SEQ ID NO: 1338918 - RNA, 19 nt, Homo sapiens
  misc_RNA (1)...(19): siRNA sense strand
gagggugcagguaugguuu

SEQ ID NO: 1338919 - RNA, 19 nt, Homo sapiens
  misc_RNA (1)...(19): siRNA sense strand
ggcugagucugaccacuuc

SEQ ID NO: 1338920 - RNA, 19 nt, Homo sapiens
  misc_RNA (1)...(19): siRNA sense strand
gcauggacuguggaucaua

SEQ ID NO: 1338921 - RNA, 19 nt, Homo sapiens
  misc_RNA (1)...(19): siRNA sense strand
guacccagacaucuucaug

SEQ ID NO: 1338922 - RNA, 19 nt, Homo sapiens
  misc_RNA (1)...(19): siRNA sense strand
gaacaaguggccaauucac

SEQ ID NO: 1338923 - RNA, 19 nt, Homo sapiens
  misc_RNA (1)...(19): siRNA sense strand
aaugcugacugcuuggauu

SEQ ID NO: 1338924 - RNA, 19 nt, Homo sapiens
  misc_RNA (1)...(19): siRNA sense strand
acucaggcuucagguuaua

SEQ ID NO: 1338925 - RNA, 19 nt, Homo sapiens
  misc_RNA (1)...(19): siRNA sense strand
ccacuucggguauggacuu

SEQ ID NO: 1338926 - RNA, 19 nt, Homo sapiens
  misc_RNA (1)...(19): siRNA sense strand
ucagacauccucguggaaa

SEQ ID NO: 1338927 - RNA, 19 nt, Homo sapiens
  misc_RNA (1)...(19): siRNA sense strand
ugacugcuuggauuauaaa

SEQ ID NO: 1338928 - RNA, 19 nt, Homo sapiens
  misc_RNA (1)...(19): siRNA sense strand
gaccuauacucaggcuuca

SEQ ID NO: 1338929 - RNA, 19 nt, Homo sapiens
  misc_RNA (1)...(19): siRNA sense strand
gcuaagugccgccaacaac

SEQ ID NO: 1338930 - RNA, 19 nt, Homo sapiens
  misc_RNA (1)...(19): siRNA sense strand
ucaccagccaucucaauca

SEQ ID NO: 1338931 - RNA, 19 nt, Homo sapiens
  misc_RNA (1)...(19): siRNA sense strand
gccaacaacagcaacaaca

SEQ ID NO: 1338932 - RNA, 19 nt, Homo sapiens
  misc_RNA (1)...(19): siRNA sense strand
uuaagaaucgaagagcuaa

SEQ ID NO: 1338933 - RNA, 19 nt, Homo sapiens
  misc_RNA (1)...(19): siRNA sense strand
uaacucaaccacugauugc

SEQ ID NO: 1338934 - RNA, 19 nt, Homo sapiens
  misc_RNA (1)...(19): siRNA sense strand
cagcaacaacagcagaaug

SEQ ID NO: 1338935 - RNA, 19 nt, Homo sapiens
  misc_RNA (1)...(19): siRNA sense strand
gcaacaacagcagaaugga

SEQ ID NO: 1338936 - RNA, 19 nt, Homo sapiens
  misc_RNA (1)...(19): siRNA sense strand
agacauccucguggaaauu

SEQ ID NO: 1338937 - RNA, 19 nt, Homo sapiens
  misc_RNA (1)...(19): siRNA sense strand
ggauaugcuggcucaacuu

SEQ ID NO: 1338938 - RNA, 19 nt, Homo sapiens
  misc_RNA (1)...(19): siRNA sense strand
ggcuucagguuauagucaa

SEQ ID NO: 1338939 - RNA, 19 nt, Homo sapiens
  misc_RNA (1)...(19): siRNA sense strand
ccuaucccaugaccuauac

SEQ ID NO: 1338940 - RNA, 19 nt, Homo sapiens
  misc_RNA (1)...(19): siRNA sense strand
uuuaagaaucgaagagcua

SEQ ID NO: 1338941 - RNA, 19 nt, Homo sapiens
  misc_RNA (1)...(19): siRNA sense strand
gauuauaaggaccaaacug

SEQ ID NO: 1338942 - RNA, 19 nt, Homo sapiens
  misc_RNA (1)...(19): siRNA sense strand
gcucaacuuccuacuuugg

SEQ ID NO: 1338943 - RNA, 19 nt, Homo sapiens
  misc_RNA (1)...(19): siRNA sense strand
cgagggugcagguaugguu

SEQ ID NO: 1338944 - RNA, 19 nt, Homo sapiens
  misc_RNA (1)...(19): siRNA sense strand
uuaacucaaccacugauug

SEQ ID NO: 1338945 - RNA, 19 nt, Homo sapiens
  misc_RNA (1)...(19): siRNA sense strand
cagcagaauggaggucaaa

SEQ ID NO: 1338946 - RNA, 19 nt, Homo sapiens
  misc_RNA (1)...(19): siRNA sense strand
agucgagggugcagguaug

SEQ ID NO: 1338947 - RNA, 19 nt, Homo sapiens
  misc_RNA (1)...(19): siRNA sense strand
uacucaggcuucagguuau

SEQ ID NO: 1338948 - RNA, 19 nt, Homo sapiens
  misc_RNA (1)...(19): siRNA sense strand
agaaucagcuccuuugaaa

SEQ ID NO: 1338949 - RNA, 19 nt, Homo sapiens
  misc_RNA (1)...(19): siRNA sense strand
gcaaugagguucuuuccau

SEQ ID NO: 1338950 - RNA, 19 nt, Homo sapiens
  misc_RNA (1)...(19): siRNA sense strand
gcaaaugguucugcugaaa

SEQ ID NO: 1338951 - RNA, 19 nt, Homo sapiens
  misc_RNA (1)...(19): siRNA sense strand
gaagcaacauuaaagcaau

SEQ ID NO: 1338952 - RNA, 19 nt, Homo sapiens
  misc_RNA (1)...(19): siRNA sense strand
ccagcaaacucuauucuau

SEQ ID NO: 1338953 - RNA, 19 nt, Homo sapiens
  misc_RNA (1)...(19): siRNA sense strand
cgccaaagcuugaaagguu

SEQ ID NO: 1338954 - RNA, 19 nt, Homo sapiens
  misc_RNA (1)...(19): siRNA sense strand
caauggcacucccaaaguu

SEQ ID NO: 1338955 - RNA, 19 nt, Homo sapiens
  misc_RNA (1)...(19): siRNA sense strand
ggaggaaggugcuggucuu

SEQ ID NO: 1338956 - RNA, 19 nt, Homo sapiens
  misc_RNA (1)...(19): siRNA sense strand
agacaagccucucaccauu

SEQ ID NO: 1338957 - RNA, 19 nt, Homo sapiens
  misc_RNA (1)...(19): siRNA sense strand
ggaagggacuauucagaag

SEQ ID NO: 1338958 - RNA, 19 nt, Homo sapiens
  misc_RNA (1)...(19): siRNA sense strand
acaagccucucaccauuaa

SEQ ID NO: 1338959 - RNA, 19 nt, Homo sapiens
  misc_RNA (1)...(19): siRNA sense strand
cagcagcacugugaagaaa

SEQ ID NO: 1338960 - RNA, 19 nt, Homo sapiens
  misc_RNA (1)...(19): siRNA sense strand
gagcagaucuagaaaacaa

SEQ ID NO: 1338961 - RNA, 19 nt, Homo sapiens
  misc_RNA (1)...(19): siRNA sense strand
ccagugauguuucuguaga

SEQ ID NO: 1338962 - RNA, 19 nt, Homo sapiens
  misc_RNA (1)...(19): siRNA sense strand
gacaagccucucaccauua

SEQ ID NO: 1338963 - RNA, 19 nt, Homo sapiens
  misc_RNA (1)...(19): siRNA sense strand
gcaauuagacggcauccau

SEQ ID NO: 1338964 - RNA, 19 nt, Homo sapiens
  misc_RNA (1)...(19): siRNA sense strand
ggagcagccucagaacaaa

SEQ ID NO: 1338965 - RNA, 19 nt, Homo sapiens
  misc_RNA (1)...(19): siRNA sense strand
gagaaucagcuccuuugaa

SEQ ID NO: 1338966 - RNA, 19 nt, Homo sapiens
  misc_RNA (1)...(19): siRNA sense strand
gccaaagcuugaaagguuu

SEQ ID NO: 1338967 - RNA, 19 nt, Homo sapiens
  misc_RNA (1)...(19): siRNA sense strand
ugauggaccugucacgauu

SEQ ID NO: 1338968 - RNA, 19 nt, Homo sapiens
  misc_RNA (1)...(19): siRNA sense strand
caacacaggcugaggaauc

SEQ ID NO: 1338969 - RNA, 19 nt, Homo sapiens
  misc_RNA (1)...(19): siRNA sense strand
ucaacugccugacaaagga

SEQ ID NO: 1338970 - RNA, 19 nt, Homo sapiens
  misc_RNA (1)...(19): siRNA sense strand
gcagagaaucagcuccuuu

SEQ ID NO: 1338971 - RNA, 19 nt, Homo sapiens
  misc_RNA (1)...(19): siRNA sense strand
gaagggcaaugagguucuu

SEQ ID NO: 1338972 - RNA, 19 nt, Homo sapiens
  misc_RNA (1)...(19): siRNA sense strand
gacuauagcuuugauacca

SEQ ID NO: 1338973 - RNA, 19 nt, Homo sapiens
  misc_RNA (1)...(19): siRNA sense strand
ggaugaagcaacauuaaag

SEQ ID NO: 1338974 - RNA, 19 nt, Homo sapiens
  misc_RNA (1)...(19): siRNA sense strand
cagccugaaugaagaagaa

SEQ ID NO: 1338975 - RNA, 19 nt, Homo sapiens
  misc_RNA (1)...(19): siRNA sense strand
gaccacaguucccuucagu

SEQ ID NO: 1338976 - RNA, 19 nt, Homo sapiens
  misc_RNA (1)...(19): siRNA sense strand
agacucagcugcaaauggu

SEQ ID NO: 1338977 - RNA, 19 nt, Homo sapiens
  misc_RNA (1)...(19): siRNA sense strand
ccagcagccugagcaagua

SEQ ID NO: 1338978 - RNA, 19 nt, Homo sapiens
  misc_RNA (1)...(19): siRNA sense strand
ugacaaaggagcccagaga

SEQ ID NO: 1338979 - RNA, 19 nt, Homo sapiens
  misc_RNA (1)...(19): siRNA sense strand
caucggcugucaugaaauc

SEQ ID NO: 1338980 - RNA, 19 nt, Homo sapiens
  misc_RNA (1)...(19): siRNA sense strand
cacagaguguuuccaaaug

SEQ ID NO: 1338981 - RNA, 19 nt, Homo sapiens
  misc_RNA (1)...(19): siRNA sense strand
ucccaaaguuuacaaguca

SEQ ID NO: 1338982 - RNA, 19 nt, Homo sapiens
  misc_RNA (1)...(19): siRNA sense strand
gcaccuaggaucacacauc

SEQ ID NO: 1338983 - RNA, 19 nt, Homo sapiens
  misc_RNA (1)...(19): siRNA sense strand
ucacagaguguuuccaaau

SEQ ID NO: 1338984 - RNA, 19 nt, Homo sapiens
  misc_RNA (1)...(19): siRNA sense strand
gaaaagaccagcaaacucu

SEQ ID NO: 1338985 - RNA, 19 nt, Homo sapiens
  misc_RNA (1)...(19): siRNA sense strand
gcagcacugugaagaaagg

SEQ ID NO: 1338986 - RNA, 19 nt, Homo sapiens
  misc_RNA (1)...(19): siRNA sense strand
ggaccugucacgauuguca

SEQ ID NO: 1338987 - RNA, 19 nt, Homo sapiens
  misc_RNA (1)...(19): siRNA sense strand
ccaaugccagccugaauga

SEQ ID NO: 1338988 - RNA, 19 nt, Homo sapiens
  misc_RNA (1)...(19): siRNA sense strand
ccucucaacugccugacaa

SEQ ID NO: 1338989 - RNA, 19 nt, Homo sapiens
  misc_RNA (1)...(19): siRNA sense strand
cagagaaucagcuccuuug

SEQ ID NO: 1338990 - RNA, 19 nt, Homo sapiens
  misc_RNA (1)...(19): siRNA sense strand
ggugaagguucuggaugaa

SEQ ID NO: 1338991 - RNA, 19 nt, Homo sapiens
  misc_RNA (1)...(19): siRNA sense strand
uaaggcugcugucaacaca

SEQ ID NO: 1338992 - RNA, 19 nt, Homo sapiens
  misc_RNA (1)...(19): siRNA sense strand
gcaugaggaaggacgguuu

SEQ ID NO: 1338993 - RNA, 19 nt, Homo sapiens
  misc_RNA (1)...(19): siRNA sense strand
ucacggaagccaaggaaga

SEQ ID NO: 1338994 - RNA, 19 nt, Homo sapiens
  misc_RNA (1)...(19): siRNA sense strand
agcaaacucuauucuauca

SEQ ID NO: 1338995 - RNA, 19 nt, Homo sapiens
  misc_RNA (1)...(19): siRNA sense strand
cagcuccuuugaaaccuuu

SEQ ID NO: 1338996 - RNA, 19 nt, Homo sapiens
  misc_RNA (1)...(19): siRNA sense strand
ugaggaaucgugcuucaga

SEQ ID NO: 1338997 - RNA, 19 nt, Homo sapiens
  misc_RNA (1)...(19): siRNA sense strand
aaaugguucugcugaaaca

SEQ ID NO: 1338998 - RNA, 19 nt, Homo sapiens
  misc_RNA (1)...(19): siRNA sense strand
cgaagacucagcugcaaau

SEQ ID NO: 1338999 - RNA, 19 nt, Homo sapiens
  misc_RNA (1)...(19): siRNA sense strand
acaaggugauuacgguuca

SEQ ID NO: 1339000 - RNA, 19 nt, Homo sapiens
  misc_RNA (1)...(19): siRNA sense strand
gcauccaugucaccaucuu

SEQ ID NO: 1339001 - RNA, 19 nt, Homo sapiens
  misc_RNA (1)...(19): siRNA sense strand
ugaagcaacauuaaagcaa

SEQ ID NO: 1339002 - RNA, 19 nt, Homo sapiens
  misc_RNA (1)...(19): siRNA sense strand
gagcucagaagaauuaaaa

SEQ ID NO: 1339003 - RNA, 19 nt, Homo sapiens
  misc_RNA (1)...(19): siRNA sense strand
gcacggugacacuggagaa

SEQ ID NO: 1339004 - RNA, 19 nt, Homo sapiens
  misc_RNA (1)...(19): siRNA sense strand
aggaggagcagaucuagaa

SEQ ID NO: 1339005 - RNA, 19 nt, Homo sapiens
  misc_RNA (1)...(19): siRNA sense strand
aggugaagguucuggauga

SEQ ID NO: 1339006 - RNA, 19 nt, Homo sapiens
  misc_RNA (1)...(19): siRNA sense strand
acacagggccacccagaug

SEQ ID NO: 1339007 - RNA, 19 nt, Homo sapiens
  misc_RNA (1)...(19): siRNA sense strand
uuugaagccuggaacauca

SEQ ID NO: 1339008 - RNA, 19 nt, Homo sapiens
  misc_RNA (1)...(19): siRNA sense strand
ugauuacgguucacagagu

SEQ ID NO: 1339009 - RNA, 19 nt, Homo sapiens
  misc_RNA (1)...(19): siRNA sense strand
ggaggagcagaucuagaaa

SEQ ID NO: 1339010 - RNA, 19 nt, Homo sapiens
  misc_RNA (1)...(19): siRNA sense strand
gggcaucuccaacaucauc

SEQ ID NO: 1339011 - RNA, 19 nt, Homo sapiens
  misc_RNA (1)...(19): siRNA sense strand
gaagcuacuugacgaaaag

SEQ ID NO: 1339012 - RNA, 19 nt, Homo sapiens
  misc_RNA (1)...(19): siRNA sense strand
acagaguguuuccaaaugg

SEQ ID NO: 1339013 - RNA, 19 nt, Homo sapiens
  misc_RNA (1)...(19): siRNA sense strand
ggcaggaggagcagaucua

SEQ ID NO: 1339014 - RNA, 19 nt, Homo sapiens
  misc_RNA (1)...(19): siRNA sense strand
ggaccacaguucccuucag

SEQ ID NO: 1339015 - RNA, 19 nt, Homo sapiens
  misc_RNA (1)...(19): siRNA sense strand
caacaucaucauccaacga

SEQ ID NO: 1339016 - RNA, 19 nt, Homo sapiens
  misc_RNA (1)...(19): siRNA sense strand
ccaauggcacucccaaagu

SEQ ID NO: 1339017 - RNA, 19 nt, Homo sapiens
  misc_RNA (1)...(19): siRNA sense strand
gaauauacagagggucuca

SEQ ID NO: 1339018 - RNA, 19 nt, Homo sapiens
  misc_RNA (1)...(19): siRNA sense strand
caucaucauccaacgaaga

SEQ ID NO: 1339019 - RNA, 19 nt, Homo sapiens
  misc_RNA (1)...(19): siRNA sense strand
aaaggagcccagagacuga

SEQ ID NO: 1339020 - RNA, 19 nt, Homo sapiens
  misc_RNA (1)...(19): siRNA sense strand
gagcugagagaauauacag

SEQ ID NO: 1339021 - RNA, 19 nt, Homo sapiens
  misc_RNA (1)...(19): siRNA sense strand
ucagaagggcaaugagguu

SEQ ID NO: 1339022 - RNA, 19 nt, Homo sapiens
  misc_RNA (1)...(19): siRNA sense strand
guucacagaguguuuccaa

SEQ ID NO: 1339023 - RNA, 19 nt, Homo sapiens
  misc_RNA (1)...(19): siRNA sense strand
ccacaguucccuucagucu

SEQ ID NO: 1339024 - RNA, 19 nt, Homo sapiens
  misc_RNA (1)...(19): siRNA sense strand
ggcggcagcccaaucagaa

SEQ ID NO: 1339025 - RNA, 19 nt, Homo sapiens
  misc_RNA (1)...(19): siRNA sense strand
caggaagggacuauucaga

SEQ ID NO: 1339026 - RNA, 19 nt, Homo sapiens
  misc_RNA (1)...(19): siRNA sense strand
ucgaggaggugaagguucu

SEQ ID NO: 1339027 - RNA, 19 nt, Homo sapiens
  misc_RNA (1)...(19): siRNA sense strand
cuugaaagguuugaggaau

SEQ ID NO: 1339028 - RNA, 19 nt, Homo sapiens
  misc_RNA (1)...(19): siRNA sense strand
cagcaaacucuauucuauc

SEQ ID NO: 1339029 - RNA, 19 nt, Homo sapiens
  misc_RNA (1)...(19): siRNA sense strand
uaucagcagccaaguguca

SEQ ID NO: 1339030 - RNA, 19 nt, Homo sapiens
  misc_RNA (1)...(19): siRNA sense strand
agccagugauguuucugua

SEQ ID NO: 1339031 - RNA, 19 nt, Homo sapiens
  misc_RNA (1)...(19): siRNA sense strand
caggcaagcugugauuguc

SEQ ID NO: 1339032 - RNA, 19 nt, Homo sapiens
  misc_RNA (1)...(19): siRNA sense strand
aggaagggacuauucagaa

SEQ ID NO: 1339033 - RNA, 19 nt, Homo sapiens
  misc_RNA (1)...(19): siRNA sense strand
uggaugaagcaacauuaaa

SEQ ID NO: 1339034 - RNA, 19 nt, Homo sapiens
  misc_RNA (1)...(19): siRNA sense strand
uugaaagguuugaggaauc

SEQ ID NO: 1339035 - RNA, 19 nt, Homo sapiens
  misc_RNA (1)...(19): siRNA sense strand
gaaggggcaucuccaacau

SEQ ID NO: 1339036 - RNA, 19 nt, Homo sapiens
  misc_RNA (1)...(19): siRNA sense strand
gggagcaccuaggaucaca

SEQ ID NO: 1339037 - RNA, 19 nt, Homo sapiens
  misc_RNA (1)...(19): siRNA sense strand
gcacucccaaaguuuacaa

SEQ ID NO: 1339038 - RNA, 19 nt, Homo sapiens
  misc_RNA (1)...(19): siRNA sense strand
gguucuggaugaagcaaca

SEQ ID NO: 1339039 - RNA, 19 nt, Homo sapiens
  misc_RNA (1)...(19): siRNA sense strand
caagugucaucggcuguca

SEQ ID NO: 1339040 - RNA, 19 nt, Homo sapiens
  misc_RNA (1)...(19): siRNA sense strand
gggcugcacccacucuugu

SEQ ID NO: 1339041 - RNA, 19 nt, Homo sapiens
  misc_RNA (1)...(19): siRNA sense strand
caucaugagugagaaccau

SEQ ID NO: 1339042 - RNA, 19 nt, Homo sapiens
  misc_RNA (1)...(19): siRNA sense strand
cgaagcuacuugacgaaaa

SEQ ID NO: 1339043 - RNA, 19 nt, Homo sapiens
  misc_RNA (1)...(19): siRNA sense strand
ugaaagguuugaggaaucg

SEQ ID NO: 1339044 - RNA, 19 nt, Homo sapiens
  misc_RNA (1)...(19): siRNA sense strand
gugagacgaagcuacuuga

SEQ ID NO: 1339045 - RNA, 19 nt, Homo sapiens
  misc_RNA (1)...(19): siRNA sense strand
cggugacacuggagaagau

SEQ ID NO: 1339046 - RNA, 19 nt, Homo sapiens
  misc_RNA (1)...(19): siRNA sense strand
caacggcaagucucucaag

SEQ ID NO: 1339047 - RNA, 19 nt, Homo sapiens
  misc_RNA (1)...(19): siRNA sense strand
gauuucugacugcaucaaa

SEQ ID NO: 1339048 - RNA, 19 nt, Homo sapiens
  misc_RNA (1)...(19): siRNA sense strand
agaaucagcuccuuugaaa

SEQ ID NO: 1339049 - RNA, 19 nt, Homo sapiens
  misc_RNA (1)...(19): siRNA sense strand
gcaaugagguucuuuccau

SEQ ID NO: 1339050 - RNA, 19 nt, Homo sapiens
  misc_RNA (1)...(19): siRNA sense strand
gcaaaugguucugcugaaa

SEQ ID NO: 1339051 - RNA, 19 nt, Homo sapiens
  misc_RNA (1)...(19): siRNA sense strand
gaagcaacauuaaagcaau

SEQ ID NO: 1339052 - RNA, 19 nt, Homo sapiens
  misc_RNA (1)...(19): siRNA sense strand
ccagcaaacucuauucuau

SEQ ID NO: 1339053 - RNA, 19 nt, Homo sapiens
  misc_RNA (1)...(19): siRNA sense strand
cgccaaagcuugaaagguu

SEQ ID NO: 1339054 - RNA, 19 nt, Homo sapiens
  misc_RNA (1)...(19): siRNA sense strand
caauggcacucccaaaguu

SEQ ID NO: 1339055 - RNA, 19 nt, Homo sapiens
  misc_RNA (1)...(19): siRNA sense strand
ggaggaaggugcuggucuu

SEQ ID NO: 1339056 - RNA, 19 nt, Homo sapiens
  misc_RNA (1)...(19): siRNA sense strand
agacaagccucucaccauu

SEQ ID NO: 1339057 - RNA, 19 nt, Homo sapiens
  misc_RNA (1)...(19): siRNA sense strand
ggaagggacuauucagaag

SEQ ID NO: 1339058 - RNA, 19 nt, Homo sapiens
  misc_RNA (1)...(19): siRNA sense strand
acaagccucucaccauuaa

SEQ ID NO: 1339059 - RNA, 19 nt, Homo sapiens
  misc_RNA (1)...(19): siRNA sense strand
cagcagcacugugaagaaa

SEQ ID NO: 1339060 - RNA, 19 nt, Homo sapiens
  misc_RNA (1)...(19): siRNA sense strand
gagcagaucuagaaaacaa

SEQ ID NO: 1339061 - RNA, 19 nt, Homo sapiens
  misc_RNA (1)...(19): siRNA sense strand
ccagugauguuucuguaga

SEQ ID NO: 1339062 - RNA, 19 nt, Homo sapiens
  misc_RNA (1)...(19): siRNA sense strand
gacaagccucucaccauua

SEQ ID NO: 1339063 - RNA, 19 nt, Homo sapiens
  misc_RNA (1)...(19): siRNA sense strand
gcaauuagacggcauccau

SEQ ID NO: 1339064 - RNA, 19 nt, Homo sapiens
  misc_RNA (1)...(19): siRNA sense strand
gagaaucagcuccuuugaa

SEQ ID NO: 1339065 - RNA, 19 nt, Homo sapiens
  misc_RNA (1)...(19): siRNA sense strand
gccaaagcuugaaagguuu

SEQ ID NO: 1339066 - RNA, 19 nt, Homo sapiens
  misc_RNA (1)...(19): siRNA sense strand
caacacaggcugaggaauc

SEQ ID NO: 1339067 - RNA, 19 nt, Homo sapiens
  misc_RNA (1)...(19): siRNA sense strand
ucaacugccugacaaagga

SEQ ID NO: 1339068 - RNA, 19 nt, Homo sapiens
  misc_RNA (1)...(19): siRNA sense strand
gcagagaaucagcuccuuu

SEQ ID NO: 1339069 - RNA, 19 nt, Homo sapiens
  misc_RNA (1)...(19): siRNA sense strand
gaagggcaaugagguucuu

SEQ ID NO: 1339070 - RNA, 19 nt, Homo sapiens
  misc_RNA (1)...(19): siRNA sense strand
gacuauagcuuugauacca

SEQ ID NO: 1339071 - RNA, 19 nt, Homo sapiens
  misc_RNA (1)...(19): siRNA sense strand
ggaugaagcaacauuaaag

SEQ ID NO: 1339072 - RNA, 19 nt, Homo sapiens
  misc_RNA (1)...(19): siRNA sense strand
cagccugaaugaagaagaa

SEQ ID NO: 1339073 - RNA, 19 nt, Homo sapiens
  misc_RNA (1)...(19): siRNA sense strand
gaccacaguucccuucagu

SEQ ID NO: 1339074 - RNA, 19 nt, Homo sapiens
  misc_RNA (1)...(19): siRNA sense strand
agacucagcugcaaauggu

SEQ ID NO: 1339075 - RNA, 19 nt, Homo sapiens
  misc_RNA (1)...(19): siRNA sense strand
ccagcagccugagcaagua

SEQ ID NO: 1339076 - RNA, 19 nt, Homo sapiens
  misc_RNA (1)...(19): siRNA sense strand
ugacaaaggagcccagaga

SEQ ID NO: 1339077 - RNA, 19 nt, Homo sapiens
  misc_RNA (1)...(19): siRNA sense strand
caucggcugucaugaaauc

SEQ ID NO: 1339078 - RNA, 19 nt, Homo sapiens
  misc_RNA (1)...(19): siRNA sense strand
cacagaguguuuccaaaug

SEQ ID NO: 1339079 - RNA, 19 nt, Homo sapiens
  misc_RNA (1)...(19): siRNA sense strand
ucccaaaguuuacaaguca

SEQ ID NO: 1339080 - RNA, 19 nt, Homo sapiens
  misc_RNA (1)...(19): siRNA sense strand
gcaccuaggaucacacauc

SEQ ID NO: 1339081 - RNA, 19 nt, Homo sapiens
  misc_RNA (1)...(19): siRNA sense strand
ucacagaguguuuccaaau

SEQ ID NO: 1339082 - RNA, 19 nt, Homo sapiens
  misc_RNA (1)...(19): siRNA sense strand
gaaaagaccagcaaacucu

SEQ ID NO: 1339083 - RNA, 19 nt, Homo sapiens
  misc_RNA (1)...(19): siRNA sense strand
gagccaggguggagaagag

SEQ ID NO: 1339084 - RNA, 19 nt, Homo sapiens
  misc_RNA (1)...(19): siRNA sense strand
ccaaugccagccugaauga

SEQ ID NO: 1339085 - RNA, 19 nt, Homo sapiens
  misc_RNA (1)...(19): siRNA sense strand
ccucucaacugccugacaa

SEQ ID NO: 1339086 - RNA, 19 nt, Homo sapiens
  misc_RNA (1)...(19): siRNA sense strand
aaacacccacugcuuaaga

SEQ ID NO: 1339087 - RNA, 19 nt, Homo sapiens
  misc_RNA (1)...(19): siRNA sense strand
gcagcacugugaagaaagg

SEQ ID NO: 1339088 - RNA, 19 nt, Homo sapiens
  misc_RNA (1)...(19): siRNA sense strand
cggauggacuauagcuuug

SEQ ID NO: 1339089 - RNA, 19 nt, Homo sapiens
  misc_RNA (1)...(19): siRNA sense strand
ggugaagguucuggaugaa

SEQ ID NO: 1339090 - RNA, 19 nt, Homo sapiens
  misc_RNA (1)...(19): siRNA sense strand
uaaggcugcugucaacaca

SEQ ID NO: 1339091 - RNA, 19 nt, Homo sapiens
  misc_RNA (1)...(19): siRNA sense strand
cagagaaucagcuccuuug

SEQ ID NO: 1339092 - RNA, 19 nt, Homo sapiens
  misc_RNA (1)...(19): siRNA sense strand
gauggacuauagcuuugau

SEQ ID NO: 1339093 - RNA, 19 nt, Homo sapiens
  misc_RNA (1)...(19): siRNA sense strand
ucacggaagccaaggaaga

SEQ ID NO: 1339094 - RNA, 19 nt, Homo sapiens
  misc_RNA (1)...(19): siRNA sense strand
agcaaacucuauucuauca

SEQ ID NO: 1339095 - RNA, 19 nt, Homo sapiens
  misc_RNA (1)...(19): siRNA sense strand
gcaugaggaaggacgguuu

SEQ ID NO: 1339096 - RNA, 19 nt, Homo sapiens
  misc_RNA (1)...(19): siRNA sense strand
cagcuccuuugaaaccuuu

SEQ ID NO: 1339097 - RNA, 19 nt, Homo sapiens
  misc_RNA (1)...(19): siRNA sense strand
ugaggaaucgugcuucaga

SEQ ID NO: 1339098 - RNA, 19 nt, Homo sapiens
  misc_RNA (1)...(19): siRNA sense strand
gaagacacagcagggagaa

SEQ ID NO: 1339099 - RNA, 19 nt, Homo sapiens
  misc_RNA (1)...(19): siRNA sense strand
aaaugguucugcugaaaca

SEQ ID NO: 1339100 - RNA, 19 nt, Homo sapiens
  misc_RNA (1)...(19): siRNA sense strand
cgaagacucagcugcaaau

SEQ ID NO: 1339101 - RNA, 19 nt, Homo sapiens
  misc_RNA (1)...(19): siRNA sense strand
acaaggugauuacgguuca

SEQ ID NO: 1339102 - RNA, 19 nt, Homo sapiens
  misc_RNA (1)...(19): siRNA sense strand
gcauccaugucaccaucuu

SEQ ID NO: 1339103 - RNA, 19 nt, Homo sapiens
  misc_RNA (1)...(19): siRNA sense strand
ugaagcaacauuaaagcaa

SEQ ID NO: 1339104 - RNA, 19 nt, Homo sapiens
  misc_RNA (1)...(19): siRNA sense strand
gagcucagaagaauuaaaa

SEQ ID NO: 1339105 - RNA, 19 nt, Homo sapiens
  misc_RNA (1)...(19): siRNA sense strand
gcacggugacacuggagaa

SEQ ID NO: 1339106 - RNA, 19 nt, Homo sapiens
  misc_RNA (1)...(19): siRNA sense strand
aggaggagcagaucuagaa

SEQ ID NO: 1339107 - RNA, 19 nt, Homo sapiens
  misc_RNA (1)...(19): siRNA sense strand
aggugaagguucuggauga

SEQ ID NO: 1339108 - RNA, 19 nt, Homo sapiens
  misc_RNA (1)...(19): siRNA sense strand
acacagggccacccagaug

SEQ ID NO: 1339109 - RNA, 19 nt, Homo sapiens
  misc_RNA (1)...(19): siRNA sense strand
ugauuacgguucacagagu

SEQ ID NO: 1339110 - RNA, 19 nt, Homo sapiens
  misc_RNA (1)...(19): siRNA sense strand
ggaggagcagaucuagaaa

SEQ ID NO: 1339111 - RNA, 19 nt, Homo sapiens
  misc_RNA (1)...(19): siRNA sense strand
gggcaucuccaacaucauc

SEQ ID NO: 1339112 - RNA, 19 nt, Homo sapiens
  misc_RNA (1)...(19): siRNA sense strand
gaagcuacuugacgaaaag

SEQ ID NO: 1339113 - RNA, 19 nt, Homo sapiens
  misc_RNA (1)...(19): siRNA sense strand
acagaguguuuccaaaugg

SEQ ID NO: 1339114 - RNA, 19 nt, Homo sapiens
  misc_RNA (1)...(19): siRNA sense strand
ggcaggaggagcagaucua

SEQ ID NO: 1339115 - RNA, 19 nt, Homo sapiens
  misc_RNA (1)...(19): siRNA sense strand
ggaccacaguucccuucag

SEQ ID NO: 1339116 - RNA, 19 nt, Homo sapiens
  misc_RNA (1)...(19): siRNA sense strand
ucggauggacuauagcuuu

SEQ ID NO: 1339117 - RNA, 19 nt, Homo sapiens
  misc_RNA (1)...(19): siRNA sense strand
caacaucaucauccaacga

SEQ ID NO: 1339118 - RNA, 19 nt, Homo sapiens
  misc_RNA (1)...(19): siRNA sense strand
ccaauggcacucccaaagu

SEQ ID NO: 1339119 - RNA, 19 nt, Homo sapiens
  misc_RNA (1)...(19): siRNA sense strand
gaauauacagagggucuca

SEQ ID NO: 1339120 - RNA, 19 nt, Homo sapiens
  misc_RNA (1)...(19): siRNA sense strand
caucaucauccaacgaaga

SEQ ID NO: 1339121 - RNA, 19 nt, Homo sapiens
  misc_RNA (1)...(19): siRNA sense strand
aaaggagcccagagacuga

SEQ ID NO: 1339122 - RNA, 19 nt, Homo sapiens
  misc_RNA (1)...(19): siRNA sense strand
uaaaacacccacugcuuaa

SEQ ID NO: 1339123 - RNA, 19 nt, Homo sapiens
  misc_RNA (1)...(19): siRNA sense strand
gagcugagagaauauacag

SEQ ID NO: 1339124 - RNA, 19 nt, Homo sapiens
  misc_RNA (1)...(19): siRNA sense strand
ucagaagggcaaugagguu

SEQ ID NO: 1339125 - RNA, 19 nt, Homo sapiens
  misc_RNA (1)...(19): siRNA sense strand
guucacagaguguuuccaa

SEQ ID NO: 1339126 - RNA, 19 nt, Homo sapiens
  misc_RNA (1)...(19): siRNA sense strand
ccacaguucccuucagucu

SEQ ID NO: 1339127 - RNA, 19 nt, Homo sapiens
  misc_RNA (1)...(19): siRNA sense strand
cuugaaagguuugaggaau

SEQ ID NO: 1339128 - RNA, 19 nt, Homo sapiens
  misc_RNA (1)...(19): siRNA sense strand
caggaagggacuauucaga

SEQ ID NO: 1339129 - RNA, 19 nt, Homo sapiens
  misc_RNA (1)...(19): siRNA sense strand
ucgaggaggugaagguucu

SEQ ID NO: 1339130 - RNA, 19 nt, Homo sapiens
  misc_RNA (1)...(19): siRNA sense strand
ccaaacauccccgauaaaa

SEQ ID NO: 1339131 - RNA, 19 nt, Homo sapiens
  misc_RNA (1)...(19): siRNA sense strand
cagcaaacucuauucuauc

SEQ ID NO: 1339132 - RNA, 19 nt, Homo sapiens
  misc_RNA (1)...(19): siRNA sense strand
ggcggcagcccaaucagaa

SEQ ID NO: 1339133 - RNA, 19 nt, Homo sapiens
  misc_RNA (1)...(19): siRNA sense strand
agaagagccagcccaguga

SEQ ID NO: 1339134 - RNA, 19 nt, Homo sapiens
  misc_RNA (1)...(19): siRNA sense strand
uugaaagguuugaggaauc

SEQ ID NO: 1339135 - RNA, 19 nt, Homo sapiens
  misc_RNA (1)...(19): siRNA sense strand
agccagugauguuucugua

SEQ ID NO: 1339136 - RNA, 19 nt, Homo sapiens
  misc_RNA (1)...(19): siRNA sense strand
caggcaagcugugauuguc

SEQ ID NO: 1339137 - RNA, 19 nt, Homo sapiens
  misc_RNA (1)...(19): siRNA sense strand
aggaagggacuauucagaa

SEQ ID NO: 1339138 - RNA, 19 nt, Homo sapiens
  misc_RNA (1)...(19): siRNA sense strand
uggaugaagcaacauuaaa

SEQ ID NO: 1339139 - RNA, 19 nt, Homo sapiens
  misc_RNA (1)...(19): siRNA sense strand
gaaggggcaucuccaacau

SEQ ID NO: 1339140 - RNA, 19 nt, Homo sapiens
  misc_RNA (1)...(19): siRNA sense strand
uaucagcagccaaguguca

SEQ ID NO: 1339141 - RNA, 19 nt, Homo sapiens
  misc_RNA (1)...(19): siRNA sense strand
caucaugagugagaaccau

SEQ ID NO: 1339142 - RNA, 19 nt, Homo sapiens
  misc_RNA (1)...(19): siRNA sense strand
gauaaaacacccacugcuu

SEQ ID NO: 1339143 - RNA, 19 nt, Homo sapiens
  misc_RNA (1)...(19): siRNA sense strand
gguucuggaugaagcaaca

SEQ ID NO: 1339144 - RNA, 19 nt, Homo sapiens
  misc_RNA (1)...(19): siRNA sense strand
auaaaacacccacugcuua

SEQ ID NO: 1339145 - RNA, 19 nt, Homo sapiens
  misc_RNA (1)...(19): siRNA sense strand
caagugucaucggcuguca

SEQ ID NO: 1339146 - RNA, 19 nt, Homo sapiens
  misc_RNA (1)...(19): siRNA sense strand
gggcugcacccacucuugu

SEQ ID NO: 1339147 - RNA, 19 nt, Homo sapiens
  misc_RNA (1)...(19): siRNA sense strand
gggagcaccuaggaucaca

SEQ ID NO: 1339148 - RNA, 19 nt, Homo sapiens
  misc_RNA (1)...(19): siRNA sense strand
gcagaaagguuuaagauga

SEQ ID NO: 1339149 - RNA, 19 nt, Homo sapiens
  misc_RNA (1)...(19): siRNA sense strand
gaagugaaauugcagauga

SEQ ID NO: 1339150 - RNA, 19 nt, Homo sapiens
  misc_RNA (1)...(19): siRNA sense strand
ucaaacagcugucuucaug

SEQ ID NO: 1339151 - RNA, 19 nt, Homo sapiens
  misc_RNA (1)...(19): siRNA sense strand
ggaaaucaauguguaaaug

SEQ ID NO: 1339152 - RNA, 19 nt, Homo sapiens
  misc_RNA (1)...(19): siRNA sense strand
aagaagcagugauguauua

SEQ ID NO: 1339153 - RNA, 19 nt, Homo sapiens
  misc_RNA (1)...(19): siRNA sense strand
guuagaaccuggaaacgua

SEQ ID NO: 1339154 - RNA, 19 nt, Homo sapiens
  misc_RNA (1)...(19): siRNA sense strand
uaaggaaugugccauauau

SEQ ID NO: 1339155 - RNA, 19 nt, Homo sapiens
  misc_RNA (1)...(19): siRNA sense strand
gggagaagcugucaccuau

SEQ ID NO: 1339156 - RNA, 19 nt, Homo sapiens
  misc_RNA (1)...(19): siRNA sense strand
aaacagcugucuucaugua

SEQ ID NO: 1339157 - RNA, 19 nt, Homo sapiens
  misc_RNA (1)...(19): siRNA sense strand
gagaagcugucaccuauuc

SEQ ID NO: 1339158 - RNA, 19 nt, Homo sapiens
  misc_RNA (1)...(19): siRNA sense strand
uuacagaacuggaauagug

SEQ ID NO: 1339159 - RNA, 19 nt, Homo sapiens
  misc_RNA (1)...(19): siRNA sense strand
gaagauggcgguggagaua

SEQ ID NO: 1339160 - RNA, 19 nt, Homo sapiens
  misc_RNA (1)...(19): siRNA sense strand
ggaaagcuuauguggauua

SEQ ID NO: 1339161 - RNA, 19 nt, Homo sapiens
  misc_RNA (1)...(19): siRNA sense strand
uaacuagacuccuuaaucu

SEQ ID NO: 1339162 - RNA, 19 nt, Homo sapiens
  misc_RNA (1)...(19): siRNA sense strand
uaacagggcucuggaacuu

SEQ ID NO: 1339163 - RNA, 19 nt, Homo sapiens
  misc_RNA (1)...(19): siRNA sense strand
caccaaagauuauccauca

SEQ ID NO: 1339164 - RNA, 19 nt, Homo sapiens
  misc_RNA (1)...(19): siRNA sense strand
caaagauuauccaucauug

SEQ ID NO: 1339165 - RNA, 19 nt, Homo sapiens
  misc_RNA (1)...(19): siRNA sense strand
ccacuguaguugccuauaa

SEQ ID NO: 1339166 - RNA, 19 nt, Homo sapiens
  misc_RNA (1)...(19): siRNA sense strand
guaaaguacuagauguuga

SEQ ID NO: 1339167 - RNA, 19 nt, Homo sapiens
  misc_RNA (1)...(19): siRNA sense strand
caaucgagcucaagcagaa

SEQ ID NO: 1339168 - RNA, 19 nt, Homo sapiens
  misc_RNA (1)...(19): siRNA sense strand
agaaggaaaucaaugugua

SEQ ID NO: 1339169 - RNA, 19 nt, Homo sapiens
  misc_RNA (1)...(19): siRNA sense strand
aagaugauguugacacuaa

SEQ ID NO: 1339170 - RNA, 19 nt, Homo sapiens
  misc_RNA (1)...(19): siRNA sense strand
gaguaaagcagaaagguuu

SEQ ID NO: 1339171 - RNA, 19 nt, Homo sapiens
  misc_RNA (1)...(19): siRNA sense strand
gaaggaaaucaauguguaa

SEQ ID NO: 1339172 - RNA, 19 nt, Homo sapiens
  misc_RNA (1)...(19): siRNA sense strand
caaauagagcagcauguua

SEQ ID NO: 1339173 - RNA, 19 nt, Homo sapiens
  misc_RNA (1)...(19): siRNA sense strand
uaaauacagcgaaugcuua

SEQ ID NO: 1339174 - RNA, 19 nt, Homo sapiens
  misc_RNA (1)...(19): siRNA sense strand
gcagaaaucaaauuacaga

SEQ ID NO: 1339175 - RNA, 19 nt, Homo sapiens
  misc_RNA (1)...(19): siRNA sense strand
ugucagagguugaaagaga

SEQ ID NO: 1339176 - RNA, 19 nt, Homo sapiens
  misc_RNA (1)...(19): siRNA sense strand
ggaaaaggaugguuauuca

SEQ ID NO: 1339177 - RNA, 19 nt, Homo sapiens
  misc_RNA (1)...(19): siRNA sense strand
uaucagcgcuucccacugu

SEQ ID NO: 1339178 - RNA, 19 nt, Homo sapiens
  misc_RNA (1)...(19): siRNA sense strand
uaaagacgcccucaguaaa

SEQ ID NO: 1339179 - RNA, 19 nt, Homo sapiens
  misc_RNA (1)...(19): siRNA sense strand
ggaagaaggaaaucaaugu

SEQ ID NO: 1339180 - RNA, 19 nt, Homo sapiens
  misc_RNA (1)...(19): siRNA sense strand
ucaugaaacugagacauuu

SEQ ID NO: 1339181 - RNA, 19 nt, Homo sapiens
  misc_RNA (1)...(19): siRNA sense strand
cauaaaggacucaagaauu

SEQ ID NO: 1339182 - RNA, 19 nt, Homo sapiens
  misc_RNA (1)...(19): siRNA sense strand
gaagcagugauguauuaua

SEQ ID NO: 1339183 - RNA, 19 nt, Homo sapiens
  misc_RNA (1)...(19): siRNA sense strand
gaaggaaaauugagauuca

SEQ ID NO: 1339184 - RNA, 19 nt, Homo sapiens
  misc_RNA (1)...(19): siRNA sense strand
cuacagaagauuugaguaa

SEQ ID NO: 1339185 - RNA, 19 nt, Homo sapiens
  misc_RNA (1)...(19): siRNA sense strand
gaagaagcagugauguauu

SEQ ID NO: 1339186 - RNA, 19 nt, Homo sapiens
  misc_RNA (1)...(19): siRNA sense strand
gaagauauacaggcccuaa

SEQ ID NO: 1339187 - RNA, 19 nt, Homo sapiens
  misc_RNA (1)...(19): siRNA sense strand
gaacgugaaagccuucuau

SEQ ID NO: 1339188 - RNA, 19 nt, Homo sapiens
  misc_RNA (1)...(19): siRNA sense strand
cagcaggucuaacugagaa

SEQ ID NO: 1339189 - RNA, 19 nt, Homo sapiens
  misc_RNA (1)...(19): siRNA sense strand
cagaaaagcuuaauugauc

SEQ ID NO: 1339190 - RNA, 19 nt, Homo sapiens
  misc_RNA (1)...(19): siRNA sense strand
agcgaaugcuuaaagauua

SEQ ID NO: 1339191 - RNA, 19 nt, Homo sapiens
  misc_RNA (1)...(19): siRNA sense strand
ggagcuggauggaccaaau

SEQ ID NO: 1339192 - RNA, 19 nt, Homo sapiens
  misc_RNA (1)...(19): siRNA sense strand
guaacuagacuccuuaauc

SEQ ID NO: 1339193 - RNA, 19 nt, Homo sapiens
  misc_RNA (1)...(19): siRNA sense strand
gaacuucauccauucucua

SEQ ID NO: 1339194 - RNA, 19 nt, Homo sapiens
  misc_RNA (1)...(19): siRNA sense strand
caaguauuauugaggcaaa

SEQ ID NO: 1339195 - RNA, 19 nt, Homo sapiens
  misc_RNA (1)...(19): siRNA sense strand
gaaagcuuauguggauuau

SEQ ID NO: 1339196 - RNA, 19 nt, Homo sapiens
  misc_RNA (1)...(19): siRNA sense strand
ugggaaagcuuauguggau

SEQ ID NO: 1339197 - RNA, 19 nt, Homo sapiens
  misc_RNA (1)...(19): siRNA sense strand
gauaaugauuuggccaaga

SEQ ID NO: 1339198 - RNA, 19 nt, Homo sapiens
  misc_RNA (1)...(19): siRNA sense strand
gauaagacagcaccauuca

SEQ ID NO: 1339199 - RNA, 19 nt, Homo sapiens
  misc_RNA (1)...(19): siRNA sense strand
gaaugugccauauauacaa

SEQ ID NO: 1339200 - RNA, 19 nt, Homo sapiens
  misc_RNA (1)...(19): siRNA sense strand
guuaacaggcuaucaagaa

SEQ ID NO: 1339201 - RNA, 19 nt, Homo sapiens
  misc_RNA (1)...(19): siRNA sense strand
ccauugaacaucuagauuu

SEQ ID NO: 1339202 - RNA, 19 nt, Homo sapiens
  misc_RNA (1)...(19): siRNA sense strand
ccaaagauuauccaucauu

SEQ ID NO: 1339203 - RNA, 19 nt, Homo sapiens
  misc_RNA (1)...(19): siRNA sense strand
cagaaagguuuaagaugau

SEQ ID NO: 1339204 - RNA, 19 nt, Homo sapiens
  misc_RNA (1)...(19): siRNA sense strand
cgugaaagccuucuauaga

SEQ ID NO: 1339205 - RNA, 19 nt, Homo sapiens
  misc_RNA (1)...(19): siRNA sense strand
caauaaggaaugugccaua

SEQ ID NO: 1339206 - RNA, 19 nt, Homo sapiens
  misc_RNA (1)...(19): siRNA sense strand
gcaaaugacaguguuaaca

SEQ ID NO: 1339207 - RNA, 19 nt, Homo sapiens
  misc_RNA (1)...(19): siRNA sense strand
guaguugccuauaacaauc

SEQ ID NO: 1339208 - RNA, 19 nt, Homo sapiens
  misc_RNA (1)...(19): siRNA sense strand
ggaaugggauaaauuugac

SEQ ID NO: 1339209 - RNA, 19 nt, Homo sapiens
  misc_RNA (1)...(19): siRNA sense strand
caacucaggagauuaugaa

SEQ ID NO: 1339210 - RNA, 19 nt, Homo sapiens
  misc_RNA (1)...(19): siRNA sense strand
aagcaaagcaggacuguga

SEQ ID NO: 1339211 - RNA, 19 nt, Homo sapiens
  misc_RNA (1)...(19): siRNA sense strand
aacaggcuaucaagaauuu

SEQ ID NO: 1339212 - RNA, 19 nt, Homo sapiens
  misc_RNA (1)...(19): siRNA sense strand
gaacuggaauagugcuuuu

SEQ ID NO: 1339213 - RNA, 19 nt, Homo sapiens
  misc_RNA (1)...(19): siRNA sense strand
guaaauacagcgaaugcuu

SEQ ID NO: 1339214 - RNA, 19 nt, Homo sapiens
  misc_RNA (1)...(19): siRNA sense strand
acuagacuccuuaaucuua

SEQ ID NO: 1339215 - RNA, 19 nt, Homo sapiens
  misc_RNA (1)...(19): siRNA sense strand
gauauaaagaguuggguau

SEQ ID NO: 1339216 - RNA, 19 nt, Homo sapiens
  misc_RNA (1)...(19): siRNA sense strand
cagcgaaugcuuaaagauu

SEQ ID NO: 1339217 - RNA, 19 nt, Homo sapiens
  misc_RNA (1)...(19): siRNA sense strand
gaagaaggaaaucaaugug

SEQ ID NO: 1339218 - RNA, 19 nt, Homo sapiens
  misc_RNA (1)...(19): siRNA sense strand
gcuagcaaaugacaguguu

SEQ ID NO: 1339219 - RNA, 19 nt, Homo sapiens
  misc_RNA (1)...(19): siRNA sense strand
auaaugauuuggccaagaa

SEQ ID NO: 1339220 - RNA, 19 nt, Homo sapiens
  misc_RNA (1)...(19): siRNA sense strand
cucaggagauuaugaagaa

SEQ ID NO: 1339221 - RNA, 19 nt, Homo sapiens
  misc_RNA (1)...(19): siRNA sense strand
gggaagcuacagaagauuu

SEQ ID NO: 1339222 - RNA, 19 nt, Homo sapiens
  misc_RNA (1)...(19): siRNA sense strand
gcucauaaaggacucaaga

SEQ ID NO: 1339223 - RNA, 19 nt, Homo sapiens
  misc_RNA (1)...(19): siRNA sense strand
auaaagacgcccucaguaa

SEQ ID NO: 1339224 - RNA, 19 nt, Homo sapiens
  misc_RNA (1)...(19): siRNA sense strand
gaaaaggucuuggaguuag

SEQ ID NO: 1339225 - RNA, 19 nt, Homo sapiens
  misc_RNA (1)...(19): siRNA sense strand
gagguaacuagacuccuua

SEQ ID NO: 1339226 - RNA, 19 nt, Homo sapiens
  misc_RNA (1)...(19): siRNA sense strand
aaaguuauccuacuagauc

SEQ ID NO: 1339227 - RNA, 19 nt, Homo sapiens
  misc_RNA (1)...(19): siRNA sense strand
uauaaagaguuggguauca

SEQ ID NO: 1339228 - RNA, 19 nt, Homo sapiens
  misc_RNA (1)...(19): siRNA sense strand
gugaaagccuucuauagac

SEQ ID NO: 1339229 - RNA, 19 nt, Homo sapiens
  misc_RNA (1)...(19): siRNA sense strand
ggaaugugccauauauaca

SEQ ID NO: 1339230 - RNA, 19 nt, Homo sapiens
  misc_RNA (1)...(19): siRNA sense strand
gacuccagcuagcaaauga

SEQ ID NO: 1339231 - RNA, 19 nt, Homo sapiens
  misc_RNA (1)...(19): siRNA sense strand
ugaagaagcagugauguau

SEQ ID NO: 1339232 - RNA, 19 nt, Homo sapiens
  misc_RNA (1)...(19): siRNA sense strand
aagacgcccucaguaaaua

SEQ ID NO: 1339233 - RNA, 19 nt, Homo sapiens
  misc_RNA (1)...(19): siRNA sense strand
cagaagauuugaguaaagu

SEQ ID NO: 1339234 - RNA, 19 nt, Homo sapiens
  misc_RNA (1)...(19): siRNA sense strand
cauugaacaucuagauuuc

SEQ ID NO: 1339235 - RNA, 19 nt, Homo sapiens
  misc_RNA (1)...(19): siRNA sense strand
gcuacuacauauaaacauc

SEQ ID NO: 1339236 - RNA, 19 nt, Homo sapiens
  misc_RNA (1)...(19): siRNA sense strand
cagcaccauucaacaaaga

SEQ ID NO: 1339237 - RNA, 19 nt, Homo sapiens
  misc_RNA (1)...(19): siRNA sense strand
uauaaagacgcccucagua

SEQ ID NO: 1339238 - RNA, 19 nt, Homo sapiens
  misc_RNA (1)...(19): siRNA sense strand
ggagaaggaauguuuaaaa

SEQ ID NO: 1339239 - RNA, 19 nt, Homo sapiens
  misc_RNA (1)...(19): siRNA sense strand
gaucuggugaggaaggaua

SEQ ID NO: 1339240 - RNA, 19 nt, Homo sapiens
  misc_RNA (1)...(19): siRNA sense strand
gacagcaccauucaacaaa

SEQ ID NO: 1339241 - RNA, 19 nt, Homo sapiens
  misc_RNA (1)...(19): siRNA sense strand
ggauaagacagcaccauuc

SEQ ID NO: 1339242 - RNA, 19 nt, Homo sapiens
  misc_RNA (1)...(19): siRNA sense strand
ggacugugaucaggcacuu

SEQ ID NO: 1339243 - RNA, 19 nt, Homo sapiens
  misc_RNA (1)...(19): siRNA sense strand
gauggccuaugaaacucua

SEQ ID NO: 1339244 - RNA, 19 nt, Homo sapiens
  misc_RNA (1)...(19): siRNA sense strand
cuaugaauuuggucagauu

SEQ ID NO: 1339245 - RNA, 19 nt, Homo sapiens
  misc_RNA (1)...(19): siRNA sense strand
cagaagacccugagaaacu

SEQ ID NO: 1339246 - RNA, 19 nt, Homo sapiens
  misc_RNA (1)...(19): siRNA sense strand
uaacaggcuaucaagaauu

SEQ ID NO: 1339247 - RNA, 19 nt, Homo sapiens
  misc_RNA (1)...(19): siRNA sense strand
uuaacaggcuaucaagaau

SEQ ID NO: 1339248 - RNA, 19 nt, Homo sapiens
  misc_RNA (1)...(19): siRNA sense strand
gcagaaagguuuaagauga

SEQ ID NO: 1339249 - RNA, 19 nt, Homo sapiens
  misc_RNA (1)...(19): siRNA sense strand
gaagugaaauugcagauga

SEQ ID NO: 1339250 - RNA, 19 nt, Homo sapiens
  misc_RNA (1)...(19): siRNA sense strand
ucaaacagcugucuucaug

SEQ ID NO: 1339251 - RNA, 19 nt, Homo sapiens
  misc_RNA (1)...(19): siRNA sense strand
ggaaaucaauguguaaaug

SEQ ID NO: 1339252 - RNA, 19 nt, Homo sapiens
  misc_RNA (1)...(19): siRNA sense strand
aagaagcagugauguauua

SEQ ID NO: 1339253 - RNA, 19 nt, Homo sapiens
  misc_RNA (1)...(19): siRNA sense strand
guuagaaccuggaaacgua

SEQ ID NO: 1339254 - RNA, 19 nt, Homo sapiens
  misc_RNA (1)...(19): siRNA sense strand
uaaggaaugugccauauau

SEQ ID NO: 1339255 - RNA, 19 nt, Homo sapiens
  misc_RNA (1)...(19): siRNA sense strand
gggagaagcugucaccuau

SEQ ID NO: 1339256 - RNA, 19 nt, Homo sapiens
  misc_RNA (1)...(19): siRNA sense strand
aaacagcugucuucaugua

SEQ ID NO: 1339257 - RNA, 19 nt, Homo sapiens
  misc_RNA (1)...(19): siRNA sense strand
gagaagcugucaccuauuc

SEQ ID NO: 1339258 - RNA, 19 nt, Homo sapiens
  misc_RNA (1)...(19): siRNA sense strand
uuacagaacuggaauagug

SEQ ID NO: 1339259 - RNA, 19 nt, Homo sapiens
  misc_RNA (1)...(19): siRNA sense strand
gaagauggcgguggagaua

SEQ ID NO: 1339260 - RNA, 19 nt, Homo sapiens
  misc_RNA (1)...(19): siRNA sense strand
ggaaagcuuauguggauua

SEQ ID NO: 1339261 - RNA, 19 nt, Homo sapiens
  misc_RNA (1)...(19): siRNA sense strand
uaacuagacuccuuaaucu

SEQ ID NO: 1339262 - RNA, 19 nt, Homo sapiens
  misc_RNA (1)...(19): siRNA sense strand
uaacagggcucuggaacuu

SEQ ID NO: 1339263 - RNA, 19 nt, Homo sapiens
  misc_RNA (1)...(19): siRNA sense strand
caccaaagauuauccauca

SEQ ID NO: 1339264 - RNA, 19 nt, Homo sapiens
  misc_RNA (1)...(19): siRNA sense strand
caaagauuauccaucauug

SEQ ID NO: 1339265 - RNA, 19 nt, Homo sapiens
  misc_RNA (1)...(19): siRNA sense strand
ccacuguaguugccuauaa

SEQ ID NO: 1339266 - RNA, 19 nt, Homo sapiens
  misc_RNA (1)...(19): siRNA sense strand
guaaaguacuagauguuga

SEQ ID NO: 1339267 - RNA, 19 nt, Homo sapiens
  misc_RNA (1)...(19): siRNA sense strand
caaucgagcucaagcagaa

SEQ ID NO: 1339268 - RNA, 19 nt, Homo sapiens
  misc_RNA (1)...(19): siRNA sense strand
agaaggaaaucaaugugua

SEQ ID NO: 1339269 - RNA, 19 nt, Homo sapiens
  misc_RNA (1)...(19): siRNA sense strand
aagaugauguugacacuaa

SEQ ID NO: 1339270 - RNA, 19 nt, Homo sapiens
  misc_RNA (1)...(19): siRNA sense strand
gaguaaagcagaaagguuu

SEQ ID NO: 1339271 - RNA, 19 nt, Homo sapiens
  misc_RNA (1)...(19): siRNA sense strand
gaaggaaaucaauguguaa

SEQ ID NO: 1339272 - RNA, 19 nt, Homo sapiens
  misc_RNA (1)...(19): siRNA sense strand
caaauagagcagcauguua

SEQ ID NO: 1339273 - RNA, 19 nt, Homo sapiens
  misc_RNA (1)...(19): siRNA sense strand
uaaauacagcgaaugcuua

SEQ ID NO: 1339274 - RNA, 19 nt, Homo sapiens
  misc_RNA (1)...(19): siRNA sense strand
gcagaaaucaaauuacaga

SEQ ID NO: 1339275 - RNA, 19 nt, Homo sapiens
  misc_RNA (1)...(19): siRNA sense strand
ugucagagguugaaagaga

SEQ ID NO: 1339276 - RNA, 19 nt, Homo sapiens
  misc_RNA (1)...(19): siRNA sense strand
ggaaaaggaugguuauuca

SEQ ID NO: 1339277 - RNA, 19 nt, Homo sapiens
  misc_RNA (1)...(19): siRNA sense strand
uaucagcgcuucccacugu

SEQ ID NO: 1339278 - RNA, 19 nt, Homo sapiens
  misc_RNA (1)...(19): siRNA sense strand
uaaagacgcccucaguaaa

SEQ ID NO: 1339279 - RNA, 19 nt, Homo sapiens
  misc_RNA (1)...(19): siRNA sense strand
ggaagaaggaaaucaaugu

SEQ ID NO: 1339280 - RNA, 19 nt, Homo sapiens
  misc_RNA (1)...(19): siRNA sense strand
ucaugaaacugagacauuu

SEQ ID NO: 1339281 - RNA, 19 nt, Homo sapiens
  misc_RNA (1)...(19): siRNA sense strand
cauaaaggacucaagaauu

SEQ ID NO: 1339282 - RNA, 19 nt, Homo sapiens
  misc_RNA (1)...(19): siRNA sense strand
gaagcagugauguauuaua

SEQ ID NO: 1339283 - RNA, 19 nt, Homo sapiens
  misc_RNA (1)...(19): siRNA sense strand
gaaggaaaauugagauuca

SEQ ID NO: 1339284 - RNA, 19 nt, Homo sapiens
  misc_RNA (1)...(19): siRNA sense strand
cuacagaagauuugaguaa

SEQ ID NO: 1339285 - RNA, 19 nt, Homo sapiens
  misc_RNA (1)...(19): siRNA sense strand
gaagaagcagugauguauu

SEQ ID NO: 1339286 - RNA, 19 nt, Homo sapiens
  misc_RNA (1)...(19): siRNA sense strand
gaagauauacaggcccuaa

SEQ ID NO: 1339287 - RNA, 19 nt, Homo sapiens
  misc_RNA (1)...(19): siRNA sense strand
gaacgugaaagccuucuau

SEQ ID NO: 1339288 - RNA, 19 nt, Homo sapiens
  misc_RNA (1)...(19): siRNA sense strand
cagcaggucuaacugagaa

SEQ ID NO: 1339289 - RNA, 19 nt, Homo sapiens
  misc_RNA (1)...(19): siRNA sense strand
cagaaaagcuuaauugauc

SEQ ID NO: 1339290 - RNA, 19 nt, Homo sapiens
  misc_RNA (1)...(19): siRNA sense strand
agcgaaugcuuaaagauua

SEQ ID NO: 1339291 - RNA, 19 nt, Homo sapiens
  misc_RNA (1)...(19): siRNA sense strand
ggagcuggauggaccaaau

SEQ ID NO: 1339292 - RNA, 19 nt, Homo sapiens
  misc_RNA (1)...(19): siRNA sense strand
guaacuagacuccuuaauc

SEQ ID NO: 1339293 - RNA, 19 nt, Homo sapiens
  misc_RNA (1)...(19): siRNA sense strand
gaacuucauccauucucua

SEQ ID NO: 1339294 - RNA, 19 nt, Homo sapiens
  misc_RNA (1)...(19): siRNA sense strand
caaguauuauugaggcaaa

SEQ ID NO: 1339295 - RNA, 19 nt, Homo sapiens
  misc_RNA (1)...(19): siRNA sense strand
gaaagcuuauguggauuau

SEQ ID NO: 1339296 - RNA, 19 nt, Homo sapiens
  misc_RNA (1)...(19): siRNA sense strand
ugggaaagcuuauguggau

SEQ ID NO: 1339297 - RNA, 19 nt, Homo sapiens
  misc_RNA (1)...(19): siRNA sense strand
gauaaugauuuggccaaga

SEQ ID NO: 1339298 - RNA, 19 nt, Homo sapiens
  misc_RNA (1)...(19): siRNA sense strand
gauaagacagcaccauuca

SEQ ID NO: 1339299 - RNA, 19 nt, Homo sapiens
  misc_RNA (1)...(19): siRNA sense strand
gaaugugccauauauacaa

SEQ ID NO: 1339300 - RNA, 19 nt, Homo sapiens
  misc_RNA (1)...(19): siRNA sense strand
guuaacaggcuaucaagaa

SEQ ID NO: 1339301 - RNA, 19 nt, Homo sapiens
  misc_RNA (1)...(19): siRNA sense strand
ccauugaacaucuagauuu

SEQ ID NO: 1339302 - RNA, 19 nt, Homo sapiens
  misc_RNA (1)...(19): siRNA sense strand
ccaaagauuauccaucauu

SEQ ID NO: 1339303 - RNA, 19 nt, Homo sapiens
  misc_RNA (1)...(19): siRNA sense strand
cagaaagguuuaagaugau

SEQ ID NO: 1339304 - RNA, 19 nt, Homo sapiens
  misc_RNA (1)...(19): siRNA sense strand
cgugaaagccuucuauaga

SEQ ID NO: 1339305 - RNA, 19 nt, Homo sapiens
  misc_RNA (1)...(19): siRNA sense strand
caauaaggaaugugccaua

SEQ ID NO: 1339306 - RNA, 19 nt, Homo sapiens
  misc_RNA (1)...(19): siRNA sense strand
gcaaaugacaguguuaaca

SEQ ID NO: 1339307 - RNA, 19 nt, Homo sapiens
  misc_RNA (1)...(19): siRNA sense strand
guaguugccuauaacaauc

SEQ ID NO: 1339308 - RNA, 19 nt, Homo sapiens
  misc_RNA (1)...(19): siRNA sense strand
ggaaugggauaaauuugac

SEQ ID NO: 1339309 - RNA, 19 nt, Homo sapiens
  misc_RNA (1)...(19): siRNA sense strand
caacucaggagauuaugaa

SEQ ID NO: 1339310 - RNA, 19 nt, Homo sapiens
  misc_RNA (1)...(19): siRNA sense strand
aagcaaagcaggacuguga

SEQ ID NO: 1339311 - RNA, 19 nt, Homo sapiens
  misc_RNA (1)...(19): siRNA sense strand
aacaggcuaucaagaauuu

SEQ ID NO: 1339312 - RNA, 19 nt, Homo sapiens
  misc_RNA (1)...(19): siRNA sense strand
gaacuggaauagugcuuuu

SEQ ID NO: 1339313 - RNA, 19 nt, Homo sapiens
  misc_RNA (1)...(19): siRNA sense strand
guaaauacagcgaaugcuu

SEQ ID NO: 1339314 - RNA, 19 nt, Homo sapiens
  misc_RNA (1)...(19): siRNA sense strand
acuagacuccuuaaucuua

SEQ ID NO: 1339315 - RNA, 19 nt, Homo sapiens
  misc_RNA (1)...(19): siRNA sense strand
gauauaaagaguuggguau

SEQ ID NO: 1339316 - RNA, 19 nt, Homo sapiens
  misc_RNA (1)...(19): siRNA sense strand
cagcgaaugcuuaaagauu

SEQ ID NO: 1339317 - RNA, 19 nt, Homo sapiens
  misc_RNA (1)...(19): siRNA sense strand
gaagaaggaaaucaaugug

SEQ ID NO: 1339318 - RNA, 19 nt, Homo sapiens
  misc_RNA (1)...(19): siRNA sense strand
gcuagcaaaugacaguguu

SEQ ID NO: 1339319 - RNA, 19 nt, Homo sapiens
  misc_RNA (1)...(19): siRNA sense strand
auaaugauuuggccaagaa

SEQ ID NO: 1339320 - RNA, 19 nt, Homo sapiens
  misc_RNA (1)...(19): siRNA sense strand
cucaggagauuaugaagaa

SEQ ID NO: 1339321 - RNA, 19 nt, Homo sapiens
  misc_RNA (1)...(19): siRNA sense strand
gggaagcuacagaagauuu

SEQ ID NO: 1339322 - RNA, 19 nt, Homo sapiens
  misc_RNA (1)...(19): siRNA sense strand
gcucauaaaggacucaaga

SEQ ID NO: 1339323 - RNA, 19 nt, Homo sapiens
  misc_RNA (1)...(19): siRNA sense strand
auaaagacgcccucaguaa

SEQ ID NO: 1339324 - RNA, 19 nt, Homo sapiens
  misc_RNA (1)...(19): siRNA sense strand
gaaaaggucuuggaguuag

SEQ ID NO: 1339325 - RNA, 19 nt, Homo sapiens
  misc_RNA (1)...(19): siRNA sense strand
gagguaacuagacuccuua

SEQ ID NO: 1339326 - RNA, 19 nt, Homo sapiens
  misc_RNA (1)...(19): siRNA sense strand
aaaguuauccuacuagauc

SEQ ID NO: 1339327 - RNA, 19 nt, Homo sapiens
  misc_RNA (1)...(19): siRNA sense strand
uauaaagaguuggguauca

SEQ ID NO: 1339328 - RNA, 19 nt, Homo sapiens
  misc_RNA (1)...(19): siRNA sense strand
gugaaagccuucuauagac

SEQ ID NO: 1339329 - RNA, 19 nt, Homo sapiens
  misc_RNA (1)...(19): siRNA sense strand
ggaaugugccauauauaca

SEQ ID NO: 1339330 - RNA, 19 nt, Homo sapiens
  misc_RNA (1)...(19): siRNA sense strand
gacuccagcuagcaaauga

SEQ ID NO: 1339331 - RNA, 19 nt, Homo sapiens
  misc_RNA (1)...(19): siRNA sense strand
ugaagaagcagugauguau

SEQ ID NO: 1339332 - RNA, 19 nt, Homo sapiens
  misc_RNA (1)...(19): siRNA sense strand
aagacgcccucaguaaaua

SEQ ID NO: 1339333 - RNA, 19 nt, Homo sapiens
  misc_RNA (1)...(19): siRNA sense strand
cagaagauuugaguaaagu

SEQ ID NO: 1339334 - RNA, 19 nt, Homo sapiens
  misc_RNA (1)...(19): siRNA sense strand
cauugaacaucuagauuuc

SEQ ID NO: 1339335 - RNA, 19 nt, Homo sapiens
  misc_RNA (1)...(19): siRNA sense strand
gcuacuacauauaaacauc

SEQ ID NO: 1339336 - RNA, 19 nt, Homo sapiens
  misc_RNA (1)...(19): siRNA sense strand
cagcaccauucaacaaaga

SEQ ID NO: 1339337 - RNA, 19 nt, Homo sapiens
  misc_RNA (1)...(19): siRNA sense strand
uauaaagacgcccucagua

SEQ ID NO: 1339338 - RNA, 19 nt, Homo sapiens
  misc_RNA (1)...(19): siRNA sense strand
ggagaaggaauguuuaaaa

SEQ ID NO: 1339339 - RNA, 19 nt, Homo sapiens
  misc_RNA (1)...(19): siRNA sense strand
gaucuggugaggaaggaua

SEQ ID NO: 1339340 - RNA, 19 nt, Homo sapiens
  misc_RNA (1)...(19): siRNA sense strand
gacagcaccauucaacaaa

SEQ ID NO: 1339341 - RNA, 19 nt, Homo sapiens
  misc_RNA (1)...(19): siRNA sense strand
ggauaagacagcaccauuc

SEQ ID NO: 1339342 - RNA, 19 nt, Homo sapiens
  misc_RNA (1)...(19): siRNA sense strand
ggacugugaucaggcacuu

SEQ ID NO: 1339343 - RNA, 19 nt, Homo sapiens
  misc_RNA (1)...(19): siRNA sense strand
gauggccuaugaaacucua

SEQ ID NO: 1339344 - RNA, 19 nt, Homo sapiens
  misc_RNA (1)...(19): siRNA sense strand
cuaugaauuuggucagauu

SEQ ID NO: 1339345 - RNA, 19 nt, Homo sapiens
  misc_RNA (1)...(19): siRNA sense strand
cagaagacccugagaaacu

SEQ ID NO: 1339346 - RNA, 19 nt, Homo sapiens
  misc_RNA (1)...(19): siRNA sense strand
uaacaggcuaucaagaauu

SEQ ID NO: 1339347 - RNA, 19 nt, Homo sapiens
  misc_RNA (1)...(19): siRNA sense strand
uuaacaggcuaucaagaau

SEQ ID NO: 1339348 - RNA, 19 nt, Homo sapiens
  misc_RNA (1)...(19): siRNA sense strand
gcuuagagcaagugaggaa

SEQ ID NO: 1339349 - RNA, 19 nt, Homo sapiens
  misc_RNA (1)...(19): siRNA sense strand
ggcagcagauggaagaacu

SEQ ID NO: 1339350 - RNA, 19 nt, Homo sapiens
  misc_RNA (1)...(19): siRNA sense strand
gauggaagaacugggaaug

SEQ ID NO: 1339351 - RNA, 19 nt, Homo sapiens
  misc_RNA (1)...(19): siRNA sense strand
ggccuucgccucugcuuuc

SEQ ID NO: 1339352 - RNA, 19 nt, Homo sapiens
  misc_RNA (1)...(19): siRNA sense strand
ccucccaucugcagagcuu

SEQ ID NO: 1339353 - RNA, 19 nt, Homo sapiens
  misc_RNA (1)...(19): siRNA sense strand
uagagcaagugaggaagau

SEQ ID NO: 1339354 - RNA, 19 nt, Homo sapiens
  misc_RNA (1)...(19): siRNA sense strand
gcuuagagcaagugaggaa

SEQ ID NO: 1339355 - RNA, 19 nt, Homo sapiens
  misc_RNA (1)...(19): siRNA sense strand
ggcagcagauggaagaacu

SEQ ID NO: 1339356 - RNA, 19 nt, Homo sapiens
  misc_RNA (1)...(19): siRNA sense strand
gauggaagaacugggaaug

SEQ ID NO: 1339357 - RNA, 19 nt, Homo sapiens
  misc_RNA (1)...(19): siRNA sense strand
ggccuucgccucugcuuuc

SEQ ID NO: 1339358 - RNA, 19 nt, Homo sapiens
  misc_RNA (1)...(19): siRNA sense strand
ccucccaucugcagagcuu

SEQ ID NO: 1339359 - RNA, 19 nt, Homo sapiens
  misc_RNA (1)...(19): siRNA sense strand
uagagcaagugaggaagau

SEQ ID NO: 1339360 - RNA, 19 nt, Homo sapiens
  misc_RNA (1)...(19): siRNA sense strand
gcuuagagcaagugaggaa

SEQ ID NO: 1339361 - RNA, 19 nt, Homo sapiens
  misc_RNA (1)...(19): siRNA sense strand
ggcagcagauggaagaacu

SEQ ID NO: 1339362 - RNA, 19 nt, Homo sapiens
  misc_RNA (1)...(19): siRNA sense strand
gauggaagaacugggaaug

SEQ ID NO: 1339363 - RNA, 19 nt, Homo sapiens
  misc_RNA (1)...(19): siRNA sense strand
ggccuucgccucugcuuuc

SEQ ID NO: 1339364 - RNA, 19 nt, Homo sapiens
  misc_RNA (1)...(19): siRNA sense strand
ccucccaucugcagagcuu

SEQ ID NO: 1339365 - RNA, 19 nt, Homo sapiens
  misc_RNA (1)...(19): siRNA sense strand
uagagcaagugaggaagau

SEQ ID NO: 1339366 - RNA, 19 nt, Homo sapiens
  misc_RNA (1)...(19): siRNA sense strand
gcacauccguauacacuca

SEQ ID NO: 1339367 - RNA, 19 nt, Homo sapiens
  misc_RNA (1)...(19): siRNA sense strand
gaucagcuguugccagaga

SEQ ID NO: 1339368 - RNA, 19 nt, Homo sapiens
  misc_RNA (1)...(19): siRNA sense strand
ucacacaacucuccaaucu

SEQ ID NO: 1339369 - RNA, 19 nt, Homo sapiens
  misc_RNA (1)...(19): siRNA sense strand
ucaacaagaugaaggauca

SEQ ID NO: 1339370 - RNA, 19 nt, Homo sapiens
  misc_RNA (1)...(19): siRNA sense strand
gagaaagccuucacacaac

SEQ ID NO: 1339371 - RNA, 19 nt, Homo sapiens
  misc_RNA (1)...(19): siRNA sense strand
gaugaaggaucagcuguug

SEQ ID NO: 1339372 - RNA, 19 nt, Homo sapiens
  misc_RNA (1)...(19): siRNA sense strand
gcucagaccuuccccauuu

SEQ ID NO: 1339373 - RNA, 19 nt, Homo sapiens
  misc_RNA (1)...(19): siRNA sense strand
ugagaaagccuucacacaa

SEQ ID NO: 1339374 - RNA, 19 nt, Homo sapiens
  misc_RNA (1)...(19): siRNA sense strand
cgagaugaaugacccuuau

SEQ ID NO: 1339375 - RNA, 19 nt, Homo sapiens
  misc_RNA (1)...(19): siRNA sense strand
ggugauagaccauacaaau

SEQ ID NO: 1339376 - RNA, 19 nt, Homo sapiens
  misc_RNA (1)...(19): siRNA sense strand
gauagaccauacaaaugug

SEQ ID NO: 1339377 - RNA, 19 nt, Homo sapiens
  misc_RNA (1)...(19): siRNA sense strand
gcagauccacuccaaguca

SEQ ID NO: 1339378 - RNA, 19 nt, Homo sapiens
  misc_RNA (1)...(19): siRNA sense strand
aaacauaugcgcaaacaca

SEQ ID NO: 1339379 - RNA, 19 nt, Homo sapiens
  misc_RNA (1)...(19): siRNA sense strand
gcaacacaacaaagauaaa

SEQ ID NO: 1339380 - RNA, 19 nt, Homo sapiens
  misc_RNA (1)...(19): siRNA sense strand
ugaaacauaugcgcaaaca

SEQ ID NO: 1339381 - RNA, 19 nt, Homo sapiens
  misc_RNA (1)...(19): siRNA sense strand
ucccugaccucuccaagaa

SEQ ID NO: 1339382 - RNA, 19 nt, Homo sapiens
  misc_RNA (1)...(19): siRNA sense strand
gcaucaguauggacacaga

SEQ ID NO: 1339383 - RNA, 19 nt, Homo sapiens
  misc_RNA (1)...(19): siRNA sense strand
ugauagaccauacaaaugu

SEQ ID NO: 1339384 - RNA, 19 nt, Homo sapiens
  misc_RNA (1)...(19): siRNA sense strand
cauuucggcucccaugauu

SEQ ID NO: 1339385 - RNA, 19 nt, Homo sapiens
  misc_RNA (1)...(19): siRNA sense strand
acacagaguccaagucaga

SEQ ID NO: 1339386 - RNA, 19 nt, Homo sapiens
  misc_RNA (1)...(19): siRNA sense strand
ggcaacacaacaaagauaa

SEQ ID NO: 1339387 - RNA, 19 nt, Homo sapiens
  misc_RNA (1)...(19): siRNA sense strand
gcauacacaucagaaacau

SEQ ID NO: 1339388 - RNA, 19 nt, Homo sapiens
  misc_RNA (1)...(19): siRNA sense strand
gaagagaagggagucaauc

SEQ ID NO: 1339389 - RNA, 19 nt, Homo sapiens
  misc_RNA (1)...(19): siRNA sense strand
aaacacaacccgccugauc

SEQ ID NO: 1339390 - RNA, 19 nt, Homo sapiens
  misc_RNA (1)...(19): siRNA sense strand
aagauaaacccuucaagug

SEQ ID NO: 1339391 - RNA, 19 nt, Homo sapiens
  misc_RNA (1)...(19): siRNA sense strand
aaagauaaacccuucaagu

SEQ ID NO: 1339392 - RNA, 19 nt, Homo sapiens
  misc_RNA (1)...(19): siRNA sense strand
gagaagggagucaaucaag

SEQ ID NO: 1339393 - RNA, 19 nt, Homo sapiens
  misc_RNA (1)...(19): siRNA sense strand
caucagaaacauaccuuau

SEQ ID NO: 1339394 - RNA, 19 nt, Homo sapiens
  misc_RNA (1)...(19): siRNA sense strand
cggcaacacaacaaagaua

SEQ ID NO: 1339395 - RNA, 19 nt, Homo sapiens
  misc_RNA (1)...(19): siRNA sense strand
ggucagaucgagaacacaa

SEQ ID NO: 1339396 - RNA, 19 nt, Homo sapiens
  misc_RNA (1)...(19): siRNA sense strand
agaaagacggcaagaccua

SEQ ID NO: 1339397 - RNA, 19 nt, Homo sapiens
  misc_RNA (1)...(19): siRNA sense strand
ggaugcagccucacuagag

SEQ ID NO: 1339398 - RNA, 19 nt, Homo sapiens
  misc_RNA (1)...(19): siRNA sense strand
aauccacacuggugauaga

SEQ ID NO: 1339399 - RNA, 19 nt, Homo sapiens
  misc_RNA (1)...(19): siRNA sense strand
guguacaccugcacuaucu

SEQ ID NO: 1339400 - RNA, 19 nt, Homo sapiens
  misc_RNA (1)...(19): siRNA sense strand
gugauagaccauacaaaug

SEQ ID NO: 1339401 - RNA, 19 nt, Homo sapiens
  misc_RNA (1)...(19): siRNA sense strand
agacggcggagcaucauaa

SEQ ID NO: 1339402 - RNA, 19 nt, Homo sapiens
  misc_RNA (1)...(19): siRNA sense strand
cggcggagcaucauaagga

SEQ ID NO: 1339403 - RNA, 19 nt, Homo sapiens
  misc_RNA (1)...(19): siRNA sense strand
gcaccugucuacgcacaca

SEQ ID NO: 1339404 - RNA, 19 nt, Homo sapiens
  misc_RNA (1)...(19): siRNA sense strand
ugaagcaugccaaggugua

SEQ ID NO: 1339405 - RNA, 19 nt, Homo sapiens
  misc_RNA (1)...(19): siRNA sense strand
gagaagagaagggagucaa

SEQ ID NO: 1339406 - RNA, 19 nt, Homo sapiens
  misc_RNA (1)...(19): siRNA sense strand
gcaccuggccagcucuuag

SEQ ID NO: 1339407 - RNA, 19 nt, Homo sapiens
  misc_RNA (1)...(19): siRNA sense strand
gacggcaacacaacaaaga

SEQ ID NO: 1339408 - RNA, 19 nt, Homo sapiens
  misc_RNA (1)...(19): siRNA sense strand
ugccggaugugcucacuga

SEQ ID NO: 1339409 - RNA, 19 nt, Homo sapiens
  misc_RNA (1)...(19): siRNA sense strand
aagguagcaucgacccuaa

SEQ ID NO: 1339410 - RNA, 19 nt, Homo sapiens
  misc_RNA (1)...(19): siRNA sense strand
agaagcggaugcuggaauc

SEQ ID NO: 1339411 - RNA, 19 nt, Homo sapiens
  misc_RNA (1)...(19): siRNA sense strand
cgaauccacacuggugaua

SEQ ID NO: 1339412 - RNA, 19 nt, Homo sapiens
  misc_RNA (1)...(19): siRNA sense strand
aagcguccguuacccagaa

SEQ ID NO: 1339413 - RNA, 19 nt, Homo sapiens
  misc_RNA (1)...(19): siRNA sense strand
ggcccaggcucaagcucaa

SEQ ID NO: 1339414 - RNA, 19 nt, Homo sapiens
  misc_RNA (1)...(19): siRNA sense strand
ucaagugccacaacuguca

SEQ ID NO: 1339415 - RNA, 19 nt, Homo sapiens
  misc_RNA (1)...(19): siRNA sense strand
gguccggguuugguaauca

SEQ ID NO: 1339416 - RNA, 19 nt, Homo sapiens
  misc_RNA (1)...(19): siRNA sense strand
ugugcucacugacauucua

SEQ ID NO: 1339417 - RNA, 19 nt, Homo sapiens
  misc_RNA (1)...(19): siRNA sense strand
ugacagugccugccucagu

SEQ ID NO: 1339418 - RNA, 19 nt, Homo sapiens
  misc_RNA (1)...(19): siRNA sense strand
caacacaacaaagauaaac

SEQ ID NO: 1339419 - RNA, 19 nt, Homo sapiens
  misc_RNA (1)...(19): siRNA sense strand
caucaucagcucagaccuu

SEQ ID NO: 1339420 - RNA, 19 nt, Homo sapiens
  misc_RNA (1)...(19): siRNA sense strand
agaugcagauccacuccaa

SEQ ID NO: 1339421 - RNA, 19 nt, Homo sapiens
  misc_RNA (1)...(19): siRNA sense strand
gaugaaugacccuuauguc

SEQ ID NO: 1339422 - RNA, 19 nt, Homo sapiens
  misc_RNA (1)...(19): siRNA sense strand
gagaugaaugacccuuaug

SEQ ID NO: 1339423 - RNA, 19 nt, Homo sapiens
  misc_RNA (1)...(19): siRNA sense strand
gaccugaccccguauaaga

SEQ ID NO: 1339424 - RNA, 19 nt, Homo sapiens
  misc_RNA (1)...(19): siRNA sense strand
ggcauacacaucagaaaca

SEQ ID NO: 1339425 - RNA, 19 nt, Homo sapiens
  misc_RNA (1)...(19): siRNA sense strand
acacccaggcugugagaaa

SEQ ID NO: 1339426 - RNA, 19 nt, Homo sapiens
  misc_RNA (1)...(19): siRNA sense strand
cagcacauccguauacacu

SEQ ID NO: 1339427 - RNA, 19 nt, Homo sapiens
  misc_RNA (1)...(19): siRNA sense strand
guggcaguguggcuccuaa

SEQ ID NO: 1339428 - RNA, 19 nt, Homo sapiens
  misc_RNA (1)...(19): siRNA sense strand
agaaagccuucacacaacu

SEQ ID NO: 1339429 - RNA, 19 nt, Homo sapiens
  misc_RNA (1)...(19): siRNA sense strand
ucaauucuaacccguacuu

SEQ ID NO: 1339430 - RNA, 19 nt, Homo sapiens
  misc_RNA (1)...(19): siRNA sense strand
gaagaagcggaugcuggaa

SEQ ID NO: 1339431 - RNA, 19 nt, Homo sapiens
  misc_RNA (1)...(19): siRNA sense strand
ccgagaugaaugacccuua

SEQ ID NO: 1339432 - RNA, 19 nt, Homo sapiens
  misc_RNA (1)...(19): siRNA sense strand
gggcauacacaucagaaac

SEQ ID NO: 1339433 - RNA, 19 nt, Homo sapiens
  misc_RNA (1)...(19): siRNA sense strand
acaaagauaaacccuucaa

SEQ ID NO: 1339434 - RNA, 19 nt, Homo sapiens
  misc_RNA (1)...(19): siRNA sense strand
uccaagaccuucgccaaca

SEQ ID NO: 1339435 - RNA, 19 nt, Homo sapiens
  misc_RNA (1)...(19): siRNA sense strand
ucagaucgagaacacaaug

SEQ ID NO: 1339436 - RNA, 19 nt, Homo sapiens
  misc_RNA (1)...(19): siRNA sense strand
acacaacccgccugaucuu

SEQ ID NO: 1339437 - RNA, 19 nt, Homo sapiens
  misc_RNA (1)...(19): siRNA sense strand
cauacacaucagaaacaua

SEQ ID NO: 1339438 - RNA, 19 nt, Homo sapiens
  misc_RNA (1)...(19): siRNA sense strand
ccacagacggcaacacaac

SEQ ID NO: 1339439 - RNA, 19 nt, Homo sapiens
  misc_RNA (1)...(19): siRNA sense strand
gcccagcacauccguauac

SEQ ID NO: 1339440 - RNA, 19 nt, Homo sapiens
  misc_RNA (1)...(19): siRNA sense strand
ccaagaccuucgccaacag

SEQ ID NO: 1339441 - RNA, 19 nt, Homo sapiens
  misc_RNA (1)...(19): siRNA sense strand
ccaagucggagaugcagau

SEQ ID NO: 1339442 - RNA, 19 nt, Homo sapiens
  misc_RNA (1)...(19): siRNA sense strand
ugaggaugaugaugaccau

SEQ ID NO: 1339443 - RNA, 19 nt, Homo sapiens
  misc_RNA (1)...(19): siRNA sense strand
gacccuaaccgaggaagga

SEQ ID NO: 1339444 - RNA, 19 nt, Homo sapiens
  misc_RNA (1)...(19): siRNA sense strand
aagagaagggagucaauca

SEQ ID NO: 1339445 - RNA, 19 nt, Homo sapiens
  misc_RNA (1)...(19): siRNA sense strand
ccucaggcaucaguaugga

SEQ ID NO: 1339446 - RNA, 19 nt, Homo sapiens
  misc_RNA (1)...(19): siRNA sense strand
cccucaggcucucuuguga

SEQ ID NO: 1339447 - RNA, 19 nt, Homo sapiens
  misc_RNA (1)...(19): siRNA sense strand
auacacaucagaaacauac

SEQ ID NO: 1339448 - RNA, 19 nt, Homo sapiens
  misc_RNA (1)...(19): siRNA sense strand
ccacaagugcccacauugc

SEQ ID NO: 1339449 - RNA, 19 nt, Homo sapiens
  misc_RNA (1)...(19): siRNA sense strand
agagaagggagucaaucaa

SEQ ID NO: 1339450 - RNA, 19 nt, Homo sapiens
  misc_RNA (1)...(19): siRNA sense strand
caggucagaucgagaacac

SEQ ID NO: 1339451 - RNA, 19 nt, Homo sapiens
  misc_RNA (1)...(19): siRNA sense strand
gcagucgggcauacacauc

SEQ ID NO: 1339452 - RNA, 19 nt, Homo sapiens
  misc_RNA (1)...(19): siRNA sense strand
caaagauaaacccuucaag

SEQ ID NO: 1339453 - RNA, 19 nt, Homo sapiens
  misc_RNA (1)...(19): siRNA sense strand
gaacuuaucuggacaggaa

SEQ ID NO: 1339454 - RNA, 19 nt, Homo sapiens
  misc_RNA (1)...(19): siRNA sense strand
ggacggugcugcuggauuu

SEQ ID NO: 1339455 - RNA, 19 nt, Homo sapiens
  misc_RNA (1)...(19): siRNA sense strand
gggaauuccugcaaguuua

SEQ ID NO: 1339456 - RNA, 19 nt, Homo sapiens
  misc_RNA (1)...(19): siRNA sense strand
ccacuuacccucaaagaaa

SEQ ID NO: 1339457 - RNA, 19 nt, Homo sapiens
  misc_RNA (1)...(19): siRNA sense strand
gcaauggccuggacuacau

SEQ ID NO: 1339458 - RNA, 19 nt, Homo sapiens
  misc_RNA (1)...(19): siRNA sense strand
guacuacccuaucaauaug

SEQ ID NO: 1339459 - RNA, 19 nt, Homo sapiens
  misc_RNA (1)...(19): siRNA sense strand
uaugauggcuuccacauuc

SEQ ID NO: 1339460 - RNA, 19 nt, Homo sapiens
  misc_RNA (1)...(19): siRNA sense strand
gggaugccaccgacaauua

SEQ ID NO: 1339461 - RNA, 19 nt, Homo sapiens
  misc_RNA (1)...(19): siRNA sense strand
ggccacagaugccagcuuu

SEQ ID NO: 1339462 - RNA, 19 nt, Homo sapiens
  misc_RNA (1)...(19): siRNA sense strand
ggaaggagaacaaacugaa

SEQ ID NO: 1339463 - RNA, 19 nt, Homo sapiens
  misc_RNA (1)...(19): siRNA sense strand
cagaaagaaugcccuccua

SEQ ID NO: 1339464 - RNA, 19 nt, Homo sapiens
  misc_RNA (1)...(19): siRNA sense strand
ccagcuuuaucaucaaaua

SEQ ID NO: 1339465 - RNA, 19 nt, Homo sapiens
  misc_RNA (1)...(19): siRNA sense strand
gagaccagauggaguggaa

SEQ ID NO: 1339466 - RNA, 19 nt, Homo sapiens
  misc_RNA (1)...(19): siRNA sense strand
ccagguggauaaaguuuga

SEQ ID NO: 1339467 - RNA, 19 nt, Homo sapiens
  misc_RNA (1)...(19): siRNA sense strand
gaaaguguccaaucagauc

SEQ ID NO: 1339468 - RNA, 19 nt, Homo sapiens
  misc_RNA (1)...(19): siRNA sense strand
gaugaucggugccuucaag

SEQ ID NO: 1339469 - RNA, 19 nt, Homo sapiens
  misc_RNA (1)...(19): siRNA sense strand
gggacagccucucaucauu

SEQ ID NO: 1339470 - RNA, 19 nt, Homo sapiens
  misc_RNA (1)...(19): siRNA sense strand
gcagaagcaugaaugacau

SEQ ID NO: 1339471 - RNA, 19 nt, Homo sapiens
  misc_RNA (1)...(19): siRNA sense strand
gaaagaaugcccuccuauc

SEQ ID NO: 1339472 - RNA, 19 nt, Homo sapiens
  misc_RNA (1)...(19): siRNA sense strand
gaccagaagggacaucuuu

SEQ ID NO: 1339473 - RNA, 19 nt, Homo sapiens
  misc_RNA (1)...(19): siRNA sense strand
gcccagagcagaagcauga

SEQ ID NO: 1339474 - RNA, 19 nt, Homo sapiens
  misc_RNA (1)...(19): siRNA sense strand
gcaaaauccuacaaugaaa

SEQ ID NO: 1339475 - RNA, 19 nt, Homo sapiens
  misc_RNA (1)...(19): siRNA sense strand
aagccaaacuucaucacua

SEQ ID NO: 1339476 - RNA, 19 nt, Homo sapiens
  misc_RNA (1)...(19): siRNA sense strand
gacagcagcauggaucuua

SEQ ID NO: 1339477 - RNA, 19 nt, Homo sapiens
  misc_RNA (1)...(19): siRNA sense strand
gcuucuggauuucaucuuu

SEQ ID NO: 1339478 - RNA, 19 nt, Homo sapiens
  misc_RNA (1)...(19): siRNA sense strand
gagaguaaccggcaucauc

SEQ ID NO: 1339479 - RNA, 19 nt, Homo sapiens
  misc_RNA (1)...(19): siRNA sense strand
guccaucucugccauccua

SEQ ID NO: 1339480 - RNA, 19 nt, Homo sapiens
  misc_RNA (1)...(19): siRNA sense strand
gaaagcuggaccacacuaa

SEQ ID NO: 1339481 - RNA, 19 nt, Homo sapiens
  misc_RNA (1)...(19): siRNA sense strand
caaacuucaucacuaccua

SEQ ID NO: 1339482 - RNA, 19 nt, Homo sapiens
  misc_RNA (1)...(19): siRNA sense strand
ggagauuuccggaucagaa

SEQ ID NO: 1339483 - RNA, 19 nt, Homo sapiens
  misc_RNA (1)...(19): siRNA sense strand
ggacccaaauauccggauu

SEQ ID NO: 1339484 - RNA, 19 nt, Homo sapiens
  misc_RNA (1)...(19): siRNA sense strand
caccaacgcuucucuguac

SEQ ID NO: 1339485 - RNA, 19 nt, Homo sapiens
  misc_RNA (1)...(19): siRNA sense strand
uggauacucugcagcauga

SEQ ID NO: 1339486 - RNA, 19 nt, Homo sapiens
  misc_RNA (1)...(19): siRNA sense strand
uuauaaagauucccaugga

SEQ ID NO: 1339487 - RNA, 19 nt, Homo sapiens
  misc_RNA (1)...(19): siRNA sense strand
ggaggagauuuccggauca

SEQ ID NO: 1339488 - RNA, 19 nt, Homo sapiens
  misc_RNA (1)...(19): siRNA sense strand
gaauacaaccguguucaau

SEQ ID NO: 1339489 - RNA, 19 nt, Homo sapiens
  misc_RNA (1)...(19): siRNA sense strand
gacaacauccucccagaga

SEQ ID NO: 1339490 - RNA, 19 nt, Homo sapiens
  misc_RNA (1)...(19): siRNA sense strand
gcaaauuacggacgucugu

SEQ ID NO: 1339491 - RNA, 19 nt, Homo sapiens
  misc_RNA (1)...(19): siRNA sense strand
acaagaagaggaagagaaa

SEQ ID NO: 1339492 - RNA, 19 nt, Homo sapiens
  misc_RNA (1)...(19): siRNA sense strand
gaccuggccuggauugaca

SEQ ID NO: 1339493 - RNA, 19 nt, Homo sapiens
  misc_RNA (1)...(19): siRNA sense strand
ggacagccucucaucauuc

SEQ ID NO: 1339494 - RNA, 19 nt, Homo sapiens
  misc_RNA (1)...(19): siRNA sense strand
ucagugacguggccuacaa

SEQ ID NO: 1339495 - RNA, 19 nt, Homo sapiens
  misc_RNA (1)...(19): siRNA sense strand
gcucauguccuucauccuu

SEQ ID NO: 1339496 - RNA, 19 nt, Homo sapiens
  misc_RNA (1)...(19): siRNA sense strand
gauguucuguggaaucgau

SEQ ID NO: 1339497 - RNA, 19 nt, Homo sapiens
  misc_RNA (1)...(19): siRNA sense strand
ggagucagccagguggaua

SEQ ID NO: 1339498 - RNA, 19 nt, Homo sapiens
  misc_RNA (1)...(19): siRNA sense strand
gacaagaagaggaagagaa

SEQ ID NO: 1339499 - RNA, 19 nt, Homo sapiens
  misc_RNA (1)...(19): siRNA sense strand
cuuaucagcuucaucuuca

SEQ ID NO: 1339500 - RNA, 19 nt, Homo sapiens
  misc_RNA (1)...(19): siRNA sense strand
ggacuucaagccaaacuuc

SEQ ID NO: 1339501 - RNA, 19 nt, Homo sapiens
  misc_RNA (1)...(19): siRNA sense strand
gcuaccaucuggaccuguu

SEQ ID NO: 1339502 - RNA, 19 nt, Homo sapiens
  misc_RNA (1)...(19): siRNA sense strand
ggaaagcuggaccacacua

SEQ ID NO: 1339503 - RNA, 19 nt, Homo sapiens
  misc_RNA (1)...(19): siRNA sense strand
ggaauuccugcaaguuuau

SEQ ID NO: 1339504 - RNA, 19 nt, Homo sapiens
  misc_RNA (1)...(19): siRNA sense strand
ccacagaugccagcuuuau

SEQ ID NO: 1339505 - RNA, 19 nt, Homo sapiens
  misc_RNA (1)...(19): siRNA sense strand
ccacauugggcuuccagua

SEQ ID NO: 1339506 - RNA, 19 nt, Homo sapiens
  misc_RNA (1)...(19): siRNA sense strand
ccuccucccucgguuauaa

SEQ ID NO: 1339507 - RNA, 19 nt, Homo sapiens
  misc_RNA (1)...(19): siRNA sense strand
agaggaaguugcccugguu

SEQ ID NO: 1339508 - RNA, 19 nt, Homo sapiens
  misc_RNA (1)...(19): siRNA sense strand
guucuucgguggccugugu

SEQ ID NO: 1339509 - RNA, 19 nt, Homo sapiens
  misc_RNA (1)...(19): siRNA sense strand
guggauaaaguuugaagaa

SEQ ID NO: 1339510 - RNA, 19 nt, Homo sapiens
  misc_RNA (1)...(19): siRNA sense strand
ggaaaguguccaaucagau

SEQ ID NO: 1339511 - RNA, 19 nt, Homo sapiens
  misc_RNA (1)...(19): siRNA sense strand
gagcaaaauccuacaauga

SEQ ID NO: 1339512 - RNA, 19 nt, Homo sapiens
  misc_RNA (1)...(19): siRNA sense strand
gcccauccaccgcuccuua

SEQ ID NO: 1339513 - RNA, 19 nt, Homo sapiens
  misc_RNA (1)...(19): siRNA sense strand
gacaagaggaaaucugugu

SEQ ID NO: 1339514 - RNA, 19 nt, Homo sapiens
  misc_RNA (1)...(19): siRNA sense strand
gcuuugugcuccuuuaugg

SEQ ID NO: 1339515 - RNA, 19 nt, Homo sapiens
  misc_RNA (1)...(19): siRNA sense strand
gguggccugugucuggaua

SEQ ID NO: 1339516 - RNA, 19 nt, Homo sapiens
  misc_RNA (1)...(19): siRNA sense strand
ggagaaggcugggguagga

SEQ ID NO: 1339517 - RNA, 19 nt, Homo sapiens
  misc_RNA (1)...(19): siRNA sense strand
caaguacuacccuaucaau

SEQ ID NO: 1339518 - RNA, 19 nt, Homo sapiens
  misc_RNA (1)...(19): siRNA sense strand
gacagccucucaucauucu

SEQ ID NO: 1339519 - RNA, 19 nt, Homo sapiens
  misc_RNA (1)...(19): siRNA sense strand
caagaggaaaucuguguuc

SEQ ID NO: 1339520 - RNA, 19 nt, Homo sapiens
  misc_RNA (1)...(19): siRNA sense strand
ugaagaagauccccaagga

SEQ ID NO: 1339521 - RNA, 19 nt, Homo sapiens
  misc_RNA (1)...(19): siRNA sense strand
guacccacuuacccucaaa

SEQ ID NO: 1339522 - RNA, 19 nt, Homo sapiens
  misc_RNA (1)...(19): siRNA sense strand
ggaguuccgccucuggauu

SEQ ID NO: 1339523 - RNA, 19 nt, Homo sapiens
  misc_RNA (1)...(19): siRNA sense strand
uugaugaauuucuggauga

SEQ ID NO: 1339524 - RNA, 19 nt, Homo sapiens
  misc_RNA (1)...(19): siRNA sense strand
ggaugccaccgacaauuau

SEQ ID NO: 1339525 - RNA, 19 nt, Homo sapiens
  misc_RNA (1)...(19): siRNA sense strand
agacagacaagaagaggaa

SEQ ID NO: 1339526 - RNA, 19 nt, Homo sapiens
  misc_RNA (1)...(19): siRNA sense strand
ccaugacccugacccugaa

SEQ ID NO: 1339527 - RNA, 19 nt, Homo sapiens
  misc_RNA (1)...(19): siRNA sense strand
gaucggugccuucaaguac

SEQ ID NO: 1339528 - RNA, 19 nt, Homo sapiens
  misc_RNA (1)...(19): siRNA sense strand
ucagccagguggauaaagu

SEQ ID NO: 1339529 - RNA, 19 nt, Homo sapiens
  misc_RNA (1)...(19): siRNA sense strand
ucacugccgucauugucaa

SEQ ID NO: 1339530 - RNA, 19 nt, Homo sapiens
  misc_RNA (1)...(19): siRNA sense strand
ggcccauccucaucuuuga

SEQ ID NO: 1339531 - RNA, 19 nt, Homo sapiens
  misc_RNA (1)...(19): siRNA sense strand
aaacacagaccagcggaaa

SEQ ID NO: 1339532 - RNA, 19 nt, Homo sapiens
  misc_RNA (1)...(19): siRNA sense strand
ggacaguggcuccuuacca

SEQ ID NO: 1339533 - RNA, 19 nt, Homo sapiens
  misc_RNA (1)...(19): siRNA sense strand
ucauugagaagcagauuga

SEQ ID NO: 1339534 - RNA, 19 nt, Homo sapiens
  misc_RNA (1)...(19): siRNA sense strand
cuuccuggcucccauccua

SEQ ID NO: 1339535 - RNA, 19 nt, Homo sapiens
  misc_RNA (1)...(19): siRNA sense strand
ugacgggaaucucugucuu

SEQ ID NO: 1339536 - RNA, 19 nt, Homo sapiens
  misc_RNA (1)...(19): siRNA sense strand
gaaggagaacaaacugaag

SEQ ID NO: 1339537 - RNA, 19 nt, Homo sapiens
  misc_RNA (1)...(19): siRNA sense strand
aguacuacccuaucaauau

SEQ ID NO: 1339538 - RNA, 19 nt, Homo sapiens
  misc_RNA (1)...(19): siRNA sense strand
gaguuccgccucuggauug

SEQ ID NO: 1339539 - RNA, 19 nt, Homo sapiens
  misc_RNA (1)...(19): siRNA sense strand
ccagaagggacaucuuuca

SEQ ID NO: 1339540 - RNA, 19 nt, Homo sapiens
  misc_RNA (1)...(19): siRNA sense strand
gaucgcaggaauugaugaa

SEQ ID NO: 1339541 - RNA, 19 nt, Homo sapiens
  misc_RNA (1)...(19): siRNA sense strand
acagaugccagcuuuauca

SEQ ID NO: 1339542 - RNA, 19 nt, Homo sapiens
  misc_RNA (1)...(19): siRNA sense strand
uugcaacccucaugguaga

SEQ ID NO: 1339543 - RNA, 19 nt, Homo sapiens
  misc_RNA (1)...(19): siRNA sense strand
acaacauccucccagagaa

SEQ ID NO: 1339544 - RNA, 19 nt, Homo sapiens
  misc_RNA (1)...(19): siRNA sense strand
uaaccggcaucaucgucuu

SEQ ID NO: 1339545 - RNA, 19 nt, Homo sapiens
  misc_RNA (1)...(19): siRNA sense strand
auacaaccguguucaaugc

SEQ ID NO: 1339546 - RNA, 19 nt, Homo sapiens
  misc_RNA (1)...(19): siRNA sense strand
aaauauaucacccgcuuca

SEQ ID NO: 1339547 - RNA, 19 nt, Homo sapiens
  misc_RNA (1)...(19): siRNA sense strand
gccucaagauggagacaga

SEQ ID NO: 1339548 - RNA, 19 nt, Homo sapiens
  misc_RNA (1)...(19): siRNA sense strand
cauugcaacccucauggua

SEQ ID NO: 1339549 - RNA, 19 nt, Homo sapiens
  misc_RNA (1)...(19): siRNA sense strand
caacauccucccagagaag

SEQ ID NO: 1339550 - RNA, 19 nt, Homo sapiens
  misc_RNA (1)...(19): siRNA sense strand
gaucacugccgucauuguc

SEQ ID NO: 1339551 - RNA, 19 nt, Homo sapiens
  misc_RNA (1)...(19): siRNA sense strand
caccaacgcgaucaccuuu

SEQ ID NO: 1339552 - RNA, 19 nt, Homo sapiens
  misc_RNA (1)...(19): siRNA sense strand
ucaucuaccucggcuguau

SEQ ID NO: 1339553 - RNA, 19 nt, Homo sapiens
  misc_RNA (1)...(19): siRNA sense strand
gaacuuaucuggacaggaa

SEQ ID NO: 1339554 - RNA, 19 nt, Homo sapiens
  misc_RNA (1)...(19): siRNA sense strand
ggacggugcugcuggauuu

SEQ ID NO: 1339555 - RNA, 19 nt, Homo sapiens
  misc_RNA (1)...(19): siRNA sense strand
gggaauuccugcaaguuua

SEQ ID NO: 1339556 - RNA, 19 nt, Homo sapiens
  misc_RNA (1)...(19): siRNA sense strand
ccacuuacccucaaagaaa

SEQ ID NO: 1339557 - RNA, 19 nt, Homo sapiens
  misc_RNA (1)...(19): siRNA sense strand
gcaauggccuggacuacau

SEQ ID NO: 1339558 - RNA, 19 nt, Homo sapiens
  misc_RNA (1)...(19): siRNA sense strand
guacuacccuaucaauaug

SEQ ID NO: 1339559 - RNA, 19 nt, Homo sapiens
  misc_RNA (1)...(19): siRNA sense strand
uaugauggcuuccacauuc

SEQ ID NO: 1339560 - RNA, 19 nt, Homo sapiens
  misc_RNA (1)...(19): siRNA sense strand
gggaugccaccgacaauua

SEQ ID NO: 1339561 - RNA, 19 nt, Homo sapiens
  misc_RNA (1)...(19): siRNA sense strand
ggccacagaugccagcuuu

SEQ ID NO: 1339562 - RNA, 19 nt, Homo sapiens
  misc_RNA (1)...(19): siRNA sense strand
ggaaggagaacaaacugaa

SEQ ID NO: 1339563 - RNA, 19 nt, Homo sapiens
  misc_RNA (1)...(19): siRNA sense strand
cagaaagaaugcccuccua

SEQ ID NO: 1339564 - RNA, 19 nt, Homo sapiens
  misc_RNA (1)...(19): siRNA sense strand
ccagcuuuaucaucaaaua

SEQ ID NO: 1339565 - RNA, 19 nt, Homo sapiens
  misc_RNA (1)...(19): siRNA sense strand
gagaccagauggaguggaa

SEQ ID NO: 1339566 - RNA, 19 nt, Homo sapiens
  misc_RNA (1)...(19): siRNA sense strand
ccagguggauaaaguuuga

SEQ ID NO: 1339567 - RNA, 19 nt, Homo sapiens
  misc_RNA (1)...(19): siRNA sense strand
gaugaucggugccuucaag

SEQ ID NO: 1339568 - RNA, 19 nt, Homo sapiens
  misc_RNA (1)...(19): siRNA sense strand
gggacagccucucaucauu

SEQ ID NO: 1339569 - RNA, 19 nt, Homo sapiens
  misc_RNA (1)...(19): siRNA sense strand
gcagaagcaugaaugacau

SEQ ID NO: 1339570 - RNA, 19 nt, Homo sapiens
  misc_RNA (1)...(19): siRNA sense strand
gaaagaaugcccuccuauc

SEQ ID NO: 1339571 - RNA, 19 nt, Homo sapiens
  misc_RNA (1)...(19): siRNA sense strand
gaccagaagggacaucuuu

SEQ ID NO: 1339572 - RNA, 19 nt, Homo sapiens
  misc_RNA (1)...(19): siRNA sense strand
gcccagagcagaagcauga

SEQ ID NO: 1339573 - RNA, 19 nt, Homo sapiens
  misc_RNA (1)...(19): siRNA sense strand
gcaaaauccuacaaugaaa

SEQ ID NO: 1339574 - RNA, 19 nt, Homo sapiens
  misc_RNA (1)...(19): siRNA sense strand
aagccaaacuucaucacua

SEQ ID NO: 1339575 - RNA, 19 nt, Homo sapiens
  misc_RNA (1)...(19): siRNA sense strand
gacagcagcauggaucuua

SEQ ID NO: 1339576 - RNA, 19 nt, Homo sapiens
  misc_RNA (1)...(19): siRNA sense strand
gcuucuggauuucaucuuu

SEQ ID NO: 1339577 - RNA, 19 nt, Homo sapiens
  misc_RNA (1)...(19): siRNA sense strand
gagaguaaccggcaucauc

SEQ ID NO: 1339578 - RNA, 19 nt, Homo sapiens
  misc_RNA (1)...(19): siRNA sense strand
ggagauuuccggaucagaa

SEQ ID NO: 1339579 - RNA, 19 nt, Homo sapiens
  misc_RNA (1)...(19): siRNA sense strand
gaaagcuggaccacacuaa

SEQ ID NO: 1339580 - RNA, 19 nt, Homo sapiens
  misc_RNA (1)...(19): siRNA sense strand
caaacuucaucacuaccua

SEQ ID NO: 1339581 - RNA, 19 nt, Homo sapiens
  misc_RNA (1)...(19): siRNA sense strand
guccaucucugccauccua

SEQ ID NO: 1339582 - RNA, 19 nt, Homo sapiens
  misc_RNA (1)...(19): siRNA sense strand
ggacccaaauauccggauu

SEQ ID NO: 1339583 - RNA, 19 nt, Homo sapiens
  misc_RNA (1)...(19): siRNA sense strand
caccaacgcuucucuguac

SEQ ID NO: 1339584 - RNA, 19 nt, Homo sapiens
  misc_RNA (1)...(19): siRNA sense strand
uggauacucugcagcauga

SEQ ID NO: 1339585 - RNA, 19 nt, Homo sapiens
  misc_RNA (1)...(19): siRNA sense strand
ggaggagauuuccggauca

SEQ ID NO: 1339586 - RNA, 19 nt, Homo sapiens
  misc_RNA (1)...(19): siRNA sense strand
gaauacaaccguguucaau

SEQ ID NO: 1339587 - RNA, 19 nt, Homo sapiens
  misc_RNA (1)...(19): siRNA sense strand
gcaaauuacggacgucugu

SEQ ID NO: 1339588 - RNA, 19 nt, Homo sapiens
  misc_RNA (1)...(19): siRNA sense strand
ggacagccucucaucauuc

SEQ ID NO: 1339589 - RNA, 19 nt, Homo sapiens
  misc_RNA (1)...(19): siRNA sense strand
ucagugacguggccuacaa

SEQ ID NO: 1339590 - RNA, 19 nt, Homo sapiens
  misc_RNA (1)...(19): siRNA sense strand
gcucauguccuucauccuu

SEQ ID NO: 1339591 - RNA, 19 nt, Homo sapiens
  misc_RNA (1)...(19): siRNA sense strand
gauguucuguggaaucgau

SEQ ID NO: 1339592 - RNA, 19 nt, Homo sapiens
  misc_RNA (1)...(19): siRNA sense strand
ggagucagccagguggaua

SEQ ID NO: 1339593 - RNA, 19 nt, Homo sapiens
  misc_RNA (1)...(19): siRNA sense strand
cuuaucagcuucaucuuca

SEQ ID NO: 1339594 - RNA, 19 nt, Homo sapiens
  misc_RNA (1)...(19): siRNA sense strand
ggacuucaagccaaacuuc

SEQ ID NO: 1339595 - RNA, 19 nt, Homo sapiens
  misc_RNA (1)...(19): siRNA sense strand
gcuaccaucuggaccuguu

SEQ ID NO: 1339596 - RNA, 19 nt, Homo sapiens
  misc_RNA (1)...(19): siRNA sense strand
ggaaagcuggaccacacua

SEQ ID NO: 1339597 - RNA, 19 nt, Homo sapiens
  misc_RNA (1)...(19): siRNA sense strand
ggaauuccugcaaguuuau

SEQ ID NO: 1339598 - RNA, 19 nt, Homo sapiens
  misc_RNA (1)...(19): siRNA sense strand
ccacagaugccagcuuuau

SEQ ID NO: 1339599 - RNA, 19 nt, Homo sapiens
  misc_RNA (1)...(19): siRNA sense strand
guucuucgguggccugugu

SEQ ID NO: 1339600 - RNA, 19 nt, Homo sapiens
  misc_RNA (1)...(19): siRNA sense strand
ccacauugggcuuccagua

SEQ ID NO: 1339601 - RNA, 19 nt, Homo sapiens
  misc_RNA (1)...(19): siRNA sense strand
agaggaaguugcccugguu

SEQ ID NO: 1339602 - RNA, 19 nt, Homo sapiens
  misc_RNA (1)...(19): siRNA sense strand
guggauaaaguuugaagaa

SEQ ID NO: 1339603 - RNA, 19 nt, Homo sapiens
  misc_RNA (1)...(19): siRNA sense strand
gagcaaaauccuacaauga

SEQ ID NO: 1339604 - RNA, 19 nt, Homo sapiens
  misc_RNA (1)...(19): siRNA sense strand
gcccauccaccgcuccuua

SEQ ID NO: 1339605 - RNA, 19 nt, Homo sapiens
  misc_RNA (1)...(19): siRNA sense strand
gacaagaggaaaucugugu

SEQ ID NO: 1339606 - RNA, 19 nt, Homo sapiens
  misc_RNA (1)...(19): siRNA sense strand
gcuuugugcuccuuuaugg

SEQ ID NO: 1339607 - RNA, 19 nt, Homo sapiens
  misc_RNA (1)...(19): siRNA sense strand
gguggccugugucuggaua

SEQ ID NO: 1339608 - RNA, 19 nt, Homo sapiens
  misc_RNA (1)...(19): siRNA sense strand
ggagaaggcugggguagga

SEQ ID NO: 1339609 - RNA, 19 nt, Homo sapiens
  misc_RNA (1)...(19): siRNA sense strand
caaguacuacccuaucaau

SEQ ID NO: 1339610 - RNA, 19 nt, Homo sapiens
  misc_RNA (1)...(19): siRNA sense strand
gacagccucucaucauucu

SEQ ID NO: 1339611 - RNA, 19 nt, Homo sapiens
  misc_RNA (1)...(19): siRNA sense strand
caagaggaaaucuguguuc

SEQ ID NO: 1339612 - RNA, 19 nt, Homo sapiens
  misc_RNA (1)...(19): siRNA sense strand
ugaagaagauccccaagga

SEQ ID NO: 1339613 - RNA, 19 nt, Homo sapiens
  misc_RNA (1)...(19): siRNA sense strand
uugaugaauuucuggauga

SEQ ID NO: 1339614 - RNA, 19 nt, Homo sapiens
  misc_RNA (1)...(19): siRNA sense strand
guacccacuuacccucaaa

SEQ ID NO: 1339615 - RNA, 19 nt, Homo sapiens
  misc_RNA (1)...(19): siRNA sense strand
ggaguuccgccucuggauu

SEQ ID NO: 1339616 - RNA, 19 nt, Homo sapiens
  misc_RNA (1)...(19): siRNA sense strand
ggaugccaccgacaauuau

SEQ ID NO: 1339617 - RNA, 19 nt, Homo sapiens
  misc_RNA (1)...(19): siRNA sense strand
ccaugacccugacccugaa

SEQ ID NO: 1339618 - RNA, 19 nt, Homo sapiens
  misc_RNA (1)...(19): siRNA sense strand
gaucggugccuucaaguac

SEQ ID NO: 1339619 - RNA, 19 nt, Homo sapiens
  misc_RNA (1)...(19): siRNA sense strand
ucagccagguggauaaagu

SEQ ID NO: 1339620 - RNA, 19 nt, Homo sapiens
  misc_RNA (1)...(19): siRNA sense strand
ucacugccgucauugucaa

SEQ ID NO: 1339621 - RNA, 19 nt, Homo sapiens
  misc_RNA (1)...(19): siRNA sense strand
ggcccauccucaucuuuga

SEQ ID NO: 1339622 - RNA, 19 nt, Homo sapiens
  misc_RNA (1)...(19): siRNA sense strand
aaacacagaccagcggaaa

SEQ ID NO: 1339623 - RNA, 19 nt, Homo sapiens
  misc_RNA (1)...(19): siRNA sense strand
ggacaguggcuccuuacca

SEQ ID NO: 1339624 - RNA, 19 nt, Homo sapiens
  misc_RNA (1)...(19): siRNA sense strand
ucauugagaagcagauuga

SEQ ID NO: 1339625 - RNA, 19 nt, Homo sapiens
  misc_RNA (1)...(19): siRNA sense strand
cuuccuggcucccauccua

SEQ ID NO: 1339626 - RNA, 19 nt, Homo sapiens
  misc_RNA (1)...(19): siRNA sense strand
ugacgggaaucucugucuu

SEQ ID NO: 1339627 - RNA, 19 nt, Homo sapiens
  misc_RNA (1)...(19): siRNA sense strand
gaaggagaacaaacugaag

SEQ ID NO: 1339628 - RNA, 19 nt, Homo sapiens
  misc_RNA (1)...(19): siRNA sense strand
aguacuacccuaucaauau

SEQ ID NO: 1339629 - RNA, 19 nt, Homo sapiens
  misc_RNA (1)...(19): siRNA sense strand
gaguuccgccucuggauug

SEQ ID NO: 1339630 - RNA, 19 nt, Homo sapiens
  misc_RNA (1)...(19): siRNA sense strand
ccagaagggacaucuuuca

SEQ ID NO: 1339631 - RNA, 19 nt, Homo sapiens
  misc_RNA (1)...(19): siRNA sense strand
gaucgcaggaauugaugaa

SEQ ID NO: 1339632 - RNA, 19 nt, Homo sapiens
  misc_RNA (1)...(19): siRNA sense strand
acagaugccagcuuuauca

SEQ ID NO: 1339633 - RNA, 19 nt, Homo sapiens
  misc_RNA (1)...(19): siRNA sense strand
uugcaacccucaugguaga

SEQ ID NO: 1339634 - RNA, 19 nt, Homo sapiens
  misc_RNA (1)...(19): siRNA sense strand
uaaccggcaucaucgucuu

SEQ ID NO: 1339635 - RNA, 19 nt, Homo sapiens
  misc_RNA (1)...(19): siRNA sense strand
auacaaccguguucaaugc

SEQ ID NO: 1339636 - RNA, 19 nt, Homo sapiens
  misc_RNA (1)...(19): siRNA sense strand
aaauauaucacccgcuuca

SEQ ID NO: 1339637 - RNA, 19 nt, Homo sapiens
  misc_RNA (1)...(19): siRNA sense strand
gccucaagauggagacaga

SEQ ID NO: 1339638 - RNA, 19 nt, Homo sapiens
  misc_RNA (1)...(19): siRNA sense strand
cauugcaacccucauggua

SEQ ID NO: 1339639 - RNA, 19 nt, Homo sapiens
  misc_RNA (1)...(19): siRNA sense strand
gaucacugccgucauuguc

SEQ ID NO: 1339640 - RNA, 19 nt, Homo sapiens
  misc_RNA (1)...(19): siRNA sense strand
caccaacgcgaucaccuuu

SEQ ID NO: 1339641 - RNA, 19 nt, Homo sapiens
  misc_RNA (1)...(19): siRNA sense strand
ucaucuaccucggcuguau

SEQ ID NO: 1339642 - RNA, 19 nt, Homo sapiens
  misc_RNA (1)...(19): siRNA sense strand
uuuggacaguggcuccuua

SEQ ID NO: 1339643 - RNA, 19 nt, Homo sapiens
  misc_RNA (1)...(19): siRNA sense strand
agaaggagugucugagcua

SEQ ID NO: 1339644 - RNA, 19 nt, Homo sapiens
  misc_RNA (1)...(19): siRNA sense strand
acccaaauauccggauuga

SEQ ID NO: 1339645 - RNA, 19 nt, Homo sapiens
  misc_RNA (1)...(19): siRNA sense strand
cuucaucacuaccuacaag

SEQ ID NO: 1339646 - RNA, 19 nt, Homo sapiens
  misc_RNA (1)...(19): siRNA sense strand
cuaucaauauggacuucaa

SEQ ID NO: 1339647 - RNA, 19 nt, Homo sapiens
  misc_RNA (1)...(19): siRNA sense strand
ccucuucgacuucagcaaa

SEQ ID NO: 1339648 - RNA, 19 nt, Homo sapiens
  misc_RNA (1)...(19): siRNA sense strand
gggcccauccucaucuuug

SEQ ID NO: 1339649 - RNA, 19 nt, Homo sapiens
  misc_RNA (1)...(19): siRNA sense strand
gccugugucuggauaucaa

SEQ ID NO: 1339650 - RNA, 19 nt, Homo sapiens
  misc_RNA (1)...(19): siRNA sense strand
acaccaacgcuucucugua

SEQ ID NO: 1339651 - RNA, 19 nt, Homo sapiens
  misc_RNA (1)...(19): siRNA sense strand
gauccugggccucaucauc

SEQ ID NO: 1339652 - RNA, 19 nt, Homo sapiens
  misc_RNA (1)...(19): siRNA sense strand
ccacaucgacagccucaag

SEQ ID NO: 1339653 - RNA, 19 nt, Homo sapiens
  misc_RNA (1)...(19): siRNA sense strand
gaacuuaucuggacaggaa

SEQ ID NO: 1339654 - RNA, 19 nt, Homo sapiens
  misc_RNA (1)...(19): siRNA sense strand
ggacggugcugcuggauuu

SEQ ID NO: 1339655 - RNA, 19 nt, Homo sapiens
  misc_RNA (1)...(19): siRNA sense strand
gggaauuccugcaaguuua

SEQ ID NO: 1339656 - RNA, 19 nt, Homo sapiens
  misc_RNA (1)...(19): siRNA sense strand
ccacuuacccucaaagaaa

SEQ ID NO: 1339657 - RNA, 19 nt, Homo sapiens
  misc_RNA (1)...(19): siRNA sense strand
gcaauggccuggacuacau

SEQ ID NO: 1339658 - RNA, 19 nt, Homo sapiens
  misc_RNA (1)...(19): siRNA sense strand
guacuacccuaucaauaug

SEQ ID NO: 1339659 - RNA, 19 nt, Homo sapiens
  misc_RNA (1)...(19): siRNA sense strand
uaugauggcuuccacauuc

SEQ ID NO: 1339660 - RNA, 19 nt, Homo sapiens
  misc_RNA (1)...(19): siRNA sense strand
gggaugccaccgacaauua

SEQ ID NO: 1339661 - RNA, 19 nt, Homo sapiens
  misc_RNA (1)...(19): siRNA sense strand
ggccacagaugccagcuuu

SEQ ID NO: 1339662 - RNA, 19 nt, Homo sapiens
  misc_RNA (1)...(19): siRNA sense strand
ggaaggagaacaaacugaa

SEQ ID NO: 1339663 - RNA, 19 nt, Homo sapiens
  misc_RNA (1)...(19): siRNA sense strand
cagaaagaaugcccuccua

SEQ ID NO: 1339664 - RNA, 19 nt, Homo sapiens
  misc_RNA (1)...(19): siRNA sense strand
ccagcuuuaucaucaaaua

SEQ ID NO: 1339665 - RNA, 19 nt, Homo sapiens
  misc_RNA (1)...(19): siRNA sense strand
gagaccagauggaguggaa

SEQ ID NO: 1339666 - RNA, 19 nt, Homo sapiens
  misc_RNA (1)...(19): siRNA sense strand
ccagguggauaaaguuuga

SEQ ID NO: 1339667 - RNA, 19 nt, Homo sapiens
  misc_RNA (1)...(19): siRNA sense strand
gaaaguguccaaucagauc

SEQ ID NO: 1339668 - RNA, 19 nt, Homo sapiens
  misc_RNA (1)...(19): siRNA sense strand
gaugaucggugccuucaag

SEQ ID NO: 1339669 - RNA, 19 nt, Homo sapiens
  misc_RNA (1)...(19): siRNA sense strand
gggacagccucucaucauu

SEQ ID NO: 1339670 - RNA, 19 nt, Homo sapiens
  misc_RNA (1)...(19): siRNA sense strand
gcagaagcaugaaugacau

SEQ ID NO: 1339671 - RNA, 19 nt, Homo sapiens
  misc_RNA (1)...(19): siRNA sense strand
gaaagaaugcccuccuauc

SEQ ID NO: 1339672 - RNA, 19 nt, Homo sapiens
  misc_RNA (1)...(19): siRNA sense strand
gaccagaagggacaucuuu

SEQ ID NO: 1339673 - RNA, 19 nt, Homo sapiens
  misc_RNA (1)...(19): siRNA sense strand
gcccagagcagaagcauga

SEQ ID NO: 1339674 - RNA, 19 nt, Homo sapiens
  misc_RNA (1)...(19): siRNA sense strand
gcaaaauccuacaaugaaa

SEQ ID NO: 1339675 - RNA, 19 nt, Homo sapiens
  misc_RNA (1)...(19): siRNA sense strand
aagccaaacuucaucacua

SEQ ID NO: 1339676 - RNA, 19 nt, Homo sapiens
  misc_RNA (1)...(19): siRNA sense strand
gacagcagcauggaucuua

SEQ ID NO: 1339677 - RNA, 19 nt, Homo sapiens
  misc_RNA (1)...(19): siRNA sense strand
gcuucuggauuucaucuuu

SEQ ID NO: 1339678 - RNA, 19 nt, Homo sapiens
  misc_RNA (1)...(19): siRNA sense strand
gagaguaaccggcaucauc

SEQ ID NO: 1339679 - RNA, 19 nt, Homo sapiens
  misc_RNA (1)...(19): siRNA sense strand
guccaucucugccauccua

SEQ ID NO: 1339680 - RNA, 19 nt, Homo sapiens
  misc_RNA (1)...(19): siRNA sense strand
gaaagcuggaccacacuaa

SEQ ID NO: 1339681 - RNA, 19 nt, Homo sapiens
  misc_RNA (1)...(19): siRNA sense strand
caaacuucaucacuaccua

SEQ ID NO: 1339682 - RNA, 19 nt, Homo sapiens
  misc_RNA (1)...(19): siRNA sense strand
ggagauuuccggaucagaa

SEQ ID NO: 1339683 - RNA, 19 nt, Homo sapiens
  misc_RNA (1)...(19): siRNA sense strand
ggacccaaauauccggauu

SEQ ID NO: 1339684 - RNA, 19 nt, Homo sapiens
  misc_RNA (1)...(19): siRNA sense strand
caccaacgcuucucuguac

SEQ ID NO: 1339685 - RNA, 19 nt, Homo sapiens
  misc_RNA (1)...(19): siRNA sense strand
uggauacucugcagcauga

SEQ ID NO: 1339686 - RNA, 19 nt, Homo sapiens
  misc_RNA (1)...(19): siRNA sense strand
uuauaaagauucccaugga

SEQ ID NO: 1339687 - RNA, 19 nt, Homo sapiens
  misc_RNA (1)...(19): siRNA sense strand
ggaggagauuuccggauca

SEQ ID NO: 1339688 - RNA, 19 nt, Homo sapiens
  misc_RNA (1)...(19): siRNA sense strand
gaauacaaccguguucaau

SEQ ID NO: 1339689 - RNA, 19 nt, Homo sapiens
  misc_RNA (1)...(19): siRNA sense strand
gacaacauccucccagaga

SEQ ID NO: 1339690 - RNA, 19 nt, Homo sapiens
  misc_RNA (1)...(19): siRNA sense strand
gcaaauuacggacgucugu

SEQ ID NO: 1339691 - RNA, 19 nt, Homo sapiens
  misc_RNA (1)...(19): siRNA sense strand
acaagaagaggaagagaaa

SEQ ID NO: 1339692 - RNA, 19 nt, Homo sapiens
  misc_RNA (1)...(19): siRNA sense strand
gaccuggccuggauugaca

SEQ ID NO: 1339693 - RNA, 19 nt, Homo sapiens
  misc_RNA (1)...(19): siRNA sense strand
ggacagccucucaucauuc

SEQ ID NO: 1339694 - RNA, 19 nt, Homo sapiens
  misc_RNA (1)...(19): siRNA sense strand
ucagugacguggccuacaa

SEQ ID NO: 1339695 - RNA, 19 nt, Homo sapiens
  misc_RNA (1)...(19): siRNA sense strand
gcucauguccuucauccuu

SEQ ID NO: 1339696 - RNA, 19 nt, Homo sapiens
  misc_RNA (1)...(19): siRNA sense strand
gauguucuguggaaucgau

SEQ ID NO: 1339697 - RNA, 19 nt, Homo sapiens
  misc_RNA (1)...(19): siRNA sense strand
ggagucagccagguggaua

SEQ ID NO: 1339698 - RNA, 19 nt, Homo sapiens
  misc_RNA (1)...(19): siRNA sense strand
gacaagaagaggaagagaa

SEQ ID NO: 1339699 - RNA, 19 nt, Homo sapiens
  misc_RNA (1)...(19): siRNA sense strand
cuuaucagcuucaucuuca

SEQ ID NO: 1339700 - RNA, 19 nt, Homo sapiens
  misc_RNA (1)...(19): siRNA sense strand
ggacuucaagccaaacuuc

SEQ ID NO: 1339701 - RNA, 19 nt, Homo sapiens
  misc_RNA (1)...(19): siRNA sense strand
gcuaccaucuggaccuguu

SEQ ID NO: 1339702 - RNA, 19 nt, Homo sapiens
  misc_RNA (1)...(19): siRNA sense strand
ggaaagcuggaccacacua

SEQ ID NO: 1339703 - RNA, 19 nt, Homo sapiens
  misc_RNA (1)...(19): siRNA sense strand
ggaauuccugcaaguuuau

SEQ ID NO: 1339704 - RNA, 19 nt, Homo sapiens
  misc_RNA (1)...(19): siRNA sense strand
ccacagaugccagcuuuau

SEQ ID NO: 1339705 - RNA, 19 nt, Homo sapiens
  misc_RNA (1)...(19): siRNA sense strand
ccacauugggcuuccagua

SEQ ID NO: 1339706 - RNA, 19 nt, Homo sapiens
  misc_RNA (1)...(19): siRNA sense strand
ccuccucccucgguuauaa

SEQ ID NO: 1339707 - RNA, 19 nt, Homo sapiens
  misc_RNA (1)...(19): siRNA sense strand
agaggaaguugcccugguu

SEQ ID NO: 1339708 - RNA, 19 nt, Homo sapiens
  misc_RNA (1)...(19): siRNA sense strand
guucuucgguggccugugu

SEQ ID NO: 1339709 - RNA, 19 nt, Homo sapiens
  misc_RNA (1)...(19): siRNA sense strand
guggauaaaguuugaagaa

SEQ ID NO: 1339710 - RNA, 19 nt, Homo sapiens
  misc_RNA (1)...(19): siRNA sense strand
ggaaaguguccaaucagau

SEQ ID NO: 1339711 - RNA, 19 nt, Homo sapiens
  misc_RNA (1)...(19): siRNA sense strand
gagcaaaauccuacaauga

SEQ ID NO: 1339712 - RNA, 19 nt, Homo sapiens
  misc_RNA (1)...(19): siRNA sense strand
gcccauccaccgcuccuua

SEQ ID NO: 1339713 - RNA, 19 nt, Homo sapiens
  misc_RNA (1)...(19): siRNA sense strand
gacaagaggaaaucugugu

SEQ ID NO: 1339714 - RNA, 19 nt, Homo sapiens
  misc_RNA (1)...(19): siRNA sense strand
gcuuugugcuccuuuaugg

SEQ ID NO: 1339715 - RNA, 19 nt, Homo sapiens
  misc_RNA (1)...(19): siRNA sense strand
gguggccugugucuggaua

SEQ ID NO: 1339716 - RNA, 19 nt, Homo sapiens
  misc_RNA (1)...(19): siRNA sense strand
ggagaaggcugggguagga

SEQ ID NO: 1339717 - RNA, 19 nt, Homo sapiens
  misc_RNA (1)...(19): siRNA sense strand
caaguacuacccuaucaau

SEQ ID NO: 1339718 - RNA, 19 nt, Homo sapiens
  misc_RNA (1)...(19): siRNA sense strand
gacagccucucaucauucu

SEQ ID NO: 1339719 - RNA, 19 nt, Homo sapiens
  misc_RNA (1)...(19): siRNA sense strand
caagaggaaaucuguguuc

SEQ ID NO: 1339720 - RNA, 19 nt, Homo sapiens
  misc_RNA (1)...(19): siRNA sense strand
ugaagaagauccccaagga

SEQ ID NO: 1339721 - RNA, 19 nt, Homo sapiens
  misc_RNA (1)...(19): siRNA sense strand
guacccacuuacccucaaa

SEQ ID NO: 1339722 - RNA, 19 nt, Homo sapiens
  misc_RNA (1)...(19): siRNA sense strand
ggaguuccgccucuggauu

SEQ ID NO: 1339723 - RNA, 19 nt, Homo sapiens
  misc_RNA (1)...(19): siRNA sense strand
uugaugaauuucuggauga

SEQ ID NO: 1339724 - RNA, 19 nt, Homo sapiens
  misc_RNA (1)...(19): siRNA sense strand
ggaugccaccgacaauuau

SEQ ID NO: 1339725 - RNA, 19 nt, Homo sapiens
  misc_RNA (1)...(19): siRNA sense strand
agacagacaagaagaggaa

SEQ ID NO: 1339726 - RNA, 19 nt, Homo sapiens
  misc_RNA (1)...(19): siRNA sense strand
ccaugacccugacccugaa

SEQ ID NO: 1339727 - RNA, 19 nt, Homo sapiens
  misc_RNA (1)...(19): siRNA sense strand
gaucggugccuucaaguac

SEQ ID NO: 1339728 - RNA, 19 nt, Homo sapiens
  misc_RNA (1)...(19): siRNA sense strand
ucagccagguggauaaagu

SEQ ID NO: 1339729 - RNA, 19 nt, Homo sapiens
  misc_RNA (1)...(19): siRNA sense strand
ucacugccgucauugucaa

SEQ ID NO: 1339730 - RNA, 19 nt, Homo sapiens
  misc_RNA (1)...(19): siRNA sense strand
ggcccauccucaucuuuga

SEQ ID NO: 1339731 - RNA, 19 nt, Homo sapiens
  misc_RNA (1)...(19): siRNA sense strand
aaacacagaccagcggaaa

SEQ ID NO: 1339732 - RNA, 19 nt, Homo sapiens
  misc_RNA (1)...(19): siRNA sense strand
ggacaguggcuccuuacca

SEQ ID NO: 1339733 - RNA, 19 nt, Homo sapiens
  misc_RNA (1)...(19): siRNA sense strand
ucauugagaagcagauuga

SEQ ID NO: 1339734 - RNA, 19 nt, Homo sapiens
  misc_RNA (1)...(19): siRNA sense strand
cuuccuggcucccauccua

SEQ ID NO: 1339735 - RNA, 19 nt, Homo sapiens
  misc_RNA (1)...(19): siRNA sense strand
ugacgggaaucucugucuu

SEQ ID NO: 1339736 - RNA, 19 nt, Homo sapiens
  misc_RNA (1)...(19): siRNA sense strand
gaaggagaacaaacugaag

SEQ ID NO: 1339737 - RNA, 19 nt, Homo sapiens
  misc_RNA (1)...(19): siRNA sense strand
aguacuacccuaucaauau

SEQ ID NO: 1339738 - RNA, 19 nt, Homo sapiens
  misc_RNA (1)...(19): siRNA sense strand
gaguuccgccucuggauug

SEQ ID NO: 1339739 - RNA, 19 nt, Homo sapiens
  misc_RNA (1)...(19): siRNA sense strand
ccagaagggacaucuuuca

SEQ ID NO: 1339740 - RNA, 19 nt, Homo sapiens
  misc_RNA (1)...(19): siRNA sense strand
gaucgcaggaauugaugaa

SEQ ID NO: 1339741 - RNA, 19 nt, Homo sapiens
  misc_RNA (1)...(19): siRNA sense strand
acagaugccagcuuuauca

SEQ ID NO: 1339742 - RNA, 19 nt, Homo sapiens
  misc_RNA (1)...(19): siRNA sense strand
uugcaacccucaugguaga

SEQ ID NO: 1339743 - RNA, 19 nt, Homo sapiens
  misc_RNA (1)...(19): siRNA sense strand
acaacauccucccagagaa

SEQ ID NO: 1339744 - RNA, 19 nt, Homo sapiens
  misc_RNA (1)...(19): siRNA sense strand
uaaccggcaucaucgucuu

SEQ ID NO: 1339745 - RNA, 19 nt, Homo sapiens
  misc_RNA (1)...(19): siRNA sense strand
auacaaccguguucaaugc

SEQ ID NO: 1339746 - RNA, 19 nt, Homo sapiens
  misc_RNA (1)...(19): siRNA sense strand
aaauauaucacccgcuuca

SEQ ID NO: 1339747 - RNA, 19 nt, Homo sapiens
  misc_RNA (1)...(19): siRNA sense strand
gccucaagauggagacaga

SEQ ID NO: 1339748 - RNA, 19 nt, Homo sapiens
  misc_RNA (1)...(19): siRNA sense strand
cauugcaacccucauggua

SEQ ID NO: 1339749 - RNA, 19 nt, Homo sapiens
  misc_RNA (1)...(19): siRNA sense strand
caacauccucccagagaag

SEQ ID NO: 1339750 - RNA, 19 nt, Homo sapiens
  misc_RNA (1)...(19): siRNA sense strand
gaucacugccgucauuguc

SEQ ID NO: 1339751 - RNA, 19 nt, Homo sapiens
  misc_RNA (1)...(19): siRNA sense strand
caccaacgcgaucaccuuu

SEQ ID NO: 1339752 - RNA, 19 nt, Homo sapiens
  misc_RNA (1)...(19): siRNA sense strand
ucaucuaccucggcuguau

SEQ ID NO: 1339753 - RNA, 19 nt, Homo sapiens
  misc_RNA (1)...(19): siRNA sense strand
gaacuuaucuggacaggaa

SEQ ID NO: 1339754 - RNA, 19 nt, Homo sapiens
  misc_RNA (1)...(19): siRNA sense strand
ggacggugcugcuggauuu

SEQ ID NO: 1339755 - RNA, 19 nt, Homo sapiens
  misc_RNA (1)...(19): siRNA sense strand
gggaauuccugcaaguuua

SEQ ID NO: 1339756 - RNA, 19 nt, Homo sapiens
  misc_RNA (1)...(19): siRNA sense strand
ccacuuacccucaaagaaa

SEQ ID NO: 1339757 - RNA, 19 nt, Homo sapiens
  misc_RNA (1)...(19): siRNA sense strand
gcaauggccuggacuacau

SEQ ID NO: 1339758 - RNA, 19 nt, Homo sapiens
  misc_RNA (1)...(19): siRNA sense strand
guacuacccuaucaauaug

SEQ ID NO: 1339759 - RNA, 19 nt, Homo sapiens
  misc_RNA (1)...(19): siRNA sense strand
uaugauggcuuccacauuc

SEQ ID NO: 1339760 - RNA, 19 nt, Homo sapiens
  misc_RNA (1)...(19): siRNA sense strand
gggaugccaccgacaauua

SEQ ID NO: 1339761 - RNA, 19 nt, Homo sapiens
  misc_RNA (1)...(19): siRNA sense strand
ggccacagaugccagcuuu

SEQ ID NO: 1339762 - RNA, 19 nt, Homo sapiens
  misc_RNA (1)...(19): siRNA sense strand
ggaaggagaacaaacugaa

SEQ ID NO: 1339763 - RNA, 19 nt, Homo sapiens
  misc_RNA (1)...(19): siRNA sense strand
cagaaagaaugcccuccua

SEQ ID NO: 1339764 - RNA, 19 nt, Homo sapiens
  misc_RNA (1)...(19): siRNA sense strand
ccagcuuuaucaucaaaua

SEQ ID NO: 1339765 - RNA, 19 nt, Homo sapiens
  misc_RNA (1)...(19): siRNA sense strand
gagaccagauggaguggaa

SEQ ID NO: 1339766 - RNA, 19 nt, Homo sapiens
  misc_RNA (1)...(19): siRNA sense strand
ccagguggauaaaguuuga

SEQ ID NO: 1339767 - RNA, 19 nt, Homo sapiens
  misc_RNA (1)...(19): siRNA sense strand
gaaaguguccaaucagauc

SEQ ID NO: 1339768 - RNA, 19 nt, Homo sapiens
  misc_RNA (1)...(19): siRNA sense strand
gaugaucggugccuucaag

SEQ ID NO: 1339769 - RNA, 19 nt, Homo sapiens
  misc_RNA (1)...(19): siRNA sense strand
gggacagccucucaucauu

SEQ ID NO: 1339770 - RNA, 19 nt, Homo sapiens
  misc_RNA (1)...(19): siRNA sense strand
gcagaagcaugaaugacau

SEQ ID NO: 1339771 - RNA, 19 nt, Homo sapiens
  misc_RNA (1)...(19): siRNA sense strand
gaaagaaugcccuccuauc

SEQ ID NO: 1339772 - RNA, 19 nt, Homo sapiens
  misc_RNA (1)...(19): siRNA sense strand
gaccagaagggacaucuuu

SEQ ID NO: 1339773 - RNA, 19 nt, Homo sapiens
  misc_RNA (1)...(19): siRNA sense strand
gcccagagcagaagcauga

SEQ ID NO: 1339774 - RNA, 19 nt, Homo sapiens
  misc_RNA (1)...(19): siRNA sense strand
gcaaaauccuacaaugaaa

SEQ ID NO: 1339775 - RNA, 19 nt, Homo sapiens
  misc_RNA (1)...(19): siRNA sense strand
aagccaaacuucaucacua

SEQ ID NO: 1339776 - RNA, 19 nt, Homo sapiens
  misc_RNA (1)...(19): siRNA sense strand
gacagcagcauggaucuua

SEQ ID NO: 1339777 - RNA, 19 nt, Homo sapiens
  misc_RNA (1)...(19): siRNA sense strand
gcuucuggauuucaucuuu

SEQ ID NO: 1339778 - RNA, 19 nt, Homo sapiens
  misc_RNA (1)...(19): siRNA sense strand
gagaguaaccggcaucauc

SEQ ID NO: 1339779 - RNA, 19 nt, Homo sapiens
  misc_RNA (1)...(19): siRNA sense strand
guccaucucugccauccua

SEQ ID NO: 1339780 - RNA, 19 nt, Homo sapiens
  misc_RNA (1)...(19): siRNA sense strand
gaaagcuggaccacacuaa

SEQ ID NO: 1339781 - RNA, 19 nt, Homo sapiens
  misc_RNA (1)...(19): siRNA sense strand
caaacuucaucacuaccua

SEQ ID NO: 1339782 - RNA, 19 nt, Homo sapiens
  misc_RNA (1)...(19): siRNA sense strand
ggagauuuccggaucagaa

SEQ ID NO: 1339783 - RNA, 19 nt, Homo sapiens
  misc_RNA (1)...(19): siRNA sense strand
ggacccaaauauccggauu

SEQ ID NO: 1339784 - RNA, 19 nt, Homo sapiens
  misc_RNA (1)...(19): siRNA sense strand
caccaacgcuucucuguac

SEQ ID NO: 1339785 - RNA, 19 nt, Homo sapiens
  misc_RNA (1)...(19): siRNA sense strand
uggauacucugcagcauga

SEQ ID NO: 1339786 - RNA, 19 nt, Homo sapiens
  misc_RNA (1)...(19): siRNA sense strand
uuauaaagauucccaugga

SEQ ID NO: 1339787 - RNA, 19 nt, Homo sapiens
  misc_RNA (1)...(19): siRNA sense strand
ggaggagauuuccggauca

SEQ ID NO: 1339788 - RNA, 19 nt, Homo sapiens
  misc_RNA (1)...(19): siRNA sense strand
gaauacaaccguguucaau

SEQ ID NO: 1339789 - RNA, 19 nt, Homo sapiens
  misc_RNA (1)...(19): siRNA sense strand
gacaacauccucccagaga

SEQ ID NO: 1339790 - RNA, 19 nt, Homo sapiens
  misc_RNA (1)...(19): siRNA sense strand
gcaaauuacggacgucugu

SEQ ID NO: 1339791 - RNA, 19 nt, Homo sapiens
  misc_RNA (1)...(19): siRNA sense strand
acaagaagaggaagagaaa

SEQ ID NO: 1339792 - RNA, 19 nt, Homo sapiens
  misc_RNA (1)...(19): siRNA sense strand
gaccuggccuggauugaca

SEQ ID NO: 1339793 - RNA, 19 nt, Homo sapiens
  misc_RNA (1)...(19): siRNA sense strand
ggacagccucucaucauuc

SEQ ID NO: 1339794 - RNA, 19 nt, Homo sapiens
  misc_RNA (1)...(19): siRNA sense strand
ucagugacguggccuacaa

SEQ ID NO: 1339795 - RNA, 19 nt, Homo sapiens
  misc_RNA (1)...(19): siRNA sense strand
gcucauguccuucauccuu

SEQ ID NO: 1339796 - RNA, 19 nt, Homo sapiens
  misc_RNA (1)...(19): siRNA sense strand
gauguucuguggaaucgau

SEQ ID NO: 1339797 - RNA, 19 nt, Homo sapiens
  misc_RNA (1)...(19): siRNA sense strand
ggagucagccagguggaua

SEQ ID NO: 1339798 - RNA, 19 nt, Homo sapiens
  misc_RNA (1)...(19): siRNA sense strand
gacaagaagaggaagagaa

SEQ ID NO: 1339799 - RNA, 19 nt, Homo sapiens
  misc_RNA (1)...(19): siRNA sense strand
cuuaucagcuucaucuuca

SEQ ID NO: 1339800 - RNA, 19 nt, Homo sapiens
  misc_RNA (1)...(19): siRNA sense strand
ggacuucaagccaaacuuc

SEQ ID NO: 1339801 - RNA, 19 nt, Homo sapiens
  misc_RNA (1)...(19): siRNA sense strand
gcuaccaucuggaccuguu

SEQ ID NO: 1339802 - RNA, 19 nt, Homo sapiens
  misc_RNA (1)...(19): siRNA sense strand
ggaaagcuggaccacacua

SEQ ID NO: 1339803 - RNA, 19 nt, Homo sapiens
  misc_RNA (1)...(19): siRNA sense strand
ggaauuccugcaaguuuau

SEQ ID NO: 1339804 - RNA, 19 nt, Homo sapiens
  misc_RNA (1)...(19): siRNA sense strand
ccacagaugccagcuuuau

SEQ ID NO: 1339805 - RNA, 19 nt, Homo sapiens
  misc_RNA (1)...(19): siRNA sense strand
ccacauugggcuuccagua

SEQ ID NO: 1339806 - RNA, 19 nt, Homo sapiens
  misc_RNA (1)...(19): siRNA sense strand
ccuccucccucgguuauaa

SEQ ID NO: 1339807 - RNA, 19 nt, Homo sapiens
  misc_RNA (1)...(19): siRNA sense strand
agaggaaguugcccugguu

SEQ ID NO: 1339808 - RNA, 19 nt, Homo sapiens
  misc_RNA (1)...(19): siRNA sense strand
guucuucgguggccugugu

SEQ ID NO: 1339809 - RNA, 19 nt, Homo sapiens
  misc_RNA (1)...(19): siRNA sense strand
guggauaaaguuugaagaa

SEQ ID NO: 1339810 - RNA, 19 nt, Homo sapiens
  misc_RNA (1)...(19): siRNA sense strand
ggaaaguguccaaucagau

SEQ ID NO: 1339811 - RNA, 19 nt, Homo sapiens
  misc_RNA (1)...(19): siRNA sense strand
gagcaaaauccuacaauga

SEQ ID NO: 1339812 - RNA, 19 nt, Homo sapiens
  misc_RNA (1)...(19): siRNA sense strand
gcccauccaccgcuccuua

SEQ ID NO: 1339813 - RNA, 19 nt, Homo sapiens
  misc_RNA (1)...(19): siRNA sense strand
gacaagaggaaaucugugu

SEQ ID NO: 1339814 - RNA, 19 nt, Homo sapiens
  misc_RNA (1)...(19): siRNA sense strand
gcuuugugcuccuuuaugg

SEQ ID NO: 1339815 - RNA, 19 nt, Homo sapiens
  misc_RNA (1)...(19): siRNA sense strand
gguggccugugucuggaua

SEQ ID NO: 1339816 - RNA, 19 nt, Homo sapiens
  misc_RNA (1)...(19): siRNA sense strand
ggagaaggcugggguagga

SEQ ID NO: 1339817 - RNA, 19 nt, Homo sapiens
  misc_RNA (1)...(19): siRNA sense strand
caaguacuacccuaucaau

SEQ ID NO: 1339818 - RNA, 19 nt, Homo sapiens
  misc_RNA (1)...(19): siRNA sense strand
gacagccucucaucauucu

SEQ ID NO: 1339819 - RNA, 19 nt, Homo sapiens
  misc_RNA (1)...(19): siRNA sense strand
caagaggaaaucuguguuc

SEQ ID NO: 1339820 - RNA, 19 nt, Homo sapiens
  misc_RNA (1)...(19): siRNA sense strand
ugaagaagauccccaagga

SEQ ID NO: 1339821 - RNA, 19 nt, Homo sapiens
  misc_RNA (1)...(19): siRNA sense strand
guacccacuuacccucaaa

SEQ ID NO: 1339822 - RNA, 19 nt, Homo sapiens
  misc_RNA (1)...(19): siRNA sense strand
ggaguuccgccucuggauu

SEQ ID NO: 1339823 - RNA, 19 nt, Homo sapiens
  misc_RNA (1)...(19): siRNA sense strand
uugaugaauuucuggauga

SEQ ID NO: 1339824 - RNA, 19 nt, Homo sapiens
  misc_RNA (1)...(19): siRNA sense strand
ggaugccaccgacaauuau

SEQ ID NO: 1339825 - RNA, 19 nt, Homo sapiens
  misc_RNA (1)...(19): siRNA sense strand
agacagacaagaagaggaa

SEQ ID NO: 1339826 - RNA, 19 nt, Homo sapiens
  misc_RNA (1)...(19): siRNA sense strand
ccaugacccugacccugaa

SEQ ID NO: 1339827 - RNA, 19 nt, Homo sapiens
  misc_RNA (1)...(19): siRNA sense strand
gaucggugccuucaaguac

SEQ ID NO: 1339828 - RNA, 19 nt, Homo sapiens
  misc_RNA (1)...(19): siRNA sense strand
ucagccagguggauaaagu

SEQ ID NO: 1339829 - RNA, 19 nt, Homo sapiens
  misc_RNA (1)...(19): siRNA sense strand
ucacugccgucauugucaa

SEQ ID NO: 1339830 - RNA, 19 nt, Homo sapiens
  misc_RNA (1)...(19): siRNA sense strand
ggcccauccucaucuuuga

SEQ ID NO: 1339831 - RNA, 19 nt, Homo sapiens
  misc_RNA (1)...(19): siRNA sense strand
aaacacagaccagcggaaa

SEQ ID NO: 1339832 - RNA, 19 nt, Homo sapiens
  misc_RNA (1)...(19): siRNA sense strand
ggacaguggcuccuuacca

SEQ ID NO: 1339833 - RNA, 19 nt, Homo sapiens
  misc_RNA (1)...(19): siRNA sense strand
ucauugagaagcagauuga

SEQ ID NO: 1339834 - RNA, 19 nt, Homo sapiens
  misc_RNA (1)...(19): siRNA sense strand
cuuccuggcucccauccua

SEQ ID NO: 1339835 - RNA, 19 nt, Homo sapiens
  misc_RNA (1)...(19): siRNA sense strand
ugacgggaaucucugucuu

SEQ ID NO: 1339836 - RNA, 19 nt, Homo sapiens
  misc_RNA (1)...(19): siRNA sense strand
gaaggagaacaaacugaag

SEQ ID NO: 1339837 - RNA, 19 nt, Homo sapiens
  misc_RNA (1)...(19): siRNA sense strand
aguacuacccuaucaauau

SEQ ID NO: 1339838 - RNA, 19 nt, Homo sapiens
  misc_RNA (1)...(19): siRNA sense strand
gaguuccgccucuggauug

SEQ ID NO: 1339839 - RNA, 19 nt, Homo sapiens
  misc_RNA (1)...(19): siRNA sense strand
ccagaagggacaucuuuca

SEQ ID NO: 1339840 - RNA, 19 nt, Homo sapiens
  misc_RNA (1)...(19): siRNA sense strand
gaucgcaggaauugaugaa

SEQ ID NO: 1339841 - RNA, 19 nt, Homo sapiens
  misc_RNA (1)...(19): siRNA sense strand
acagaugccagcuuuauca

SEQ ID NO: 1339842 - RNA, 19 nt, Homo sapiens
  misc_RNA (1)...(19): siRNA sense strand
uugcaacccucaugguaga

SEQ ID NO: 1339843 - RNA, 19 nt, Homo sapiens
  misc_RNA (1)...(19): siRNA sense strand
acaacauccucccagagaa

SEQ ID NO: 1339844 - RNA, 19 nt, Homo sapiens
  misc_RNA (1)...(19): siRNA sense strand
uaaccggcaucaucgucuu

SEQ ID NO: 1339845 - RNA, 19 nt, Homo sapiens
  misc_RNA (1)...(19): siRNA sense strand
auacaaccguguucaaugc

SEQ ID NO: 1339846 - RNA, 19 nt, Homo sapiens
  misc_RNA (1)...(19): siRNA sense strand
aaauauaucacccgcuuca

SEQ ID NO: 1339847 - RNA, 19 nt, Homo sapiens
  misc_RNA (1)...(19): siRNA sense strand
gccucaagauggagacaga

SEQ ID NO: 1339848 - RNA, 19 nt, Homo sapiens
  misc_RNA (1)...(19): siRNA sense strand
cauugcaacccucauggua

SEQ ID NO: 1339849 - RNA, 19 nt, Homo sapiens
  misc_RNA (1)...(19): siRNA sense strand
caacauccucccagagaag

SEQ ID NO: 1339850 - RNA, 19 nt, Homo sapiens
  misc_RNA (1)...(19): siRNA sense strand
gaucacugccgucauuguc

SEQ ID NO: 1339851 - RNA, 19 nt, Homo sapiens
  misc_RNA (1)...(19): siRNA sense strand
caccaacgcgaucaccuuu

SEQ ID NO: 1339852 - RNA, 19 nt, Homo sapiens
  misc_RNA (1)...(19): siRNA sense strand
ucaucuaccucggcuguau

SEQ ID NO: 1339853 - RNA, 19 nt, Homo sapiens
  misc_RNA (1)...(19): siRNA sense strand
ggaggagaaugcaauauua

SEQ ID NO: 1339854 - RNA, 19 nt, Homo sapiens
  misc_RNA (1)...(19): siRNA sense strand
ccaaagcgcuuaauagauu

SEQ ID NO: 1339855 - RNA, 19 nt, Homo sapiens
  misc_RNA (1)...(19): siRNA sense strand
ggaugucacuuucaacuua

SEQ ID NO: 1339856 - RNA, 19 nt, Homo sapiens
  misc_RNA (1)...(19): siRNA sense strand
caaagaagaugaacagaga

SEQ ID NO: 1339857 - RNA, 19 nt, Homo sapiens
  misc_RNA (1)...(19): siRNA sense strand
gaacuugucuccaaauaca

SEQ ID NO: 1339858 - RNA, 19 nt, Homo sapiens
  misc_RNA (1)...(19): siRNA sense strand
gcucauaucuggaccaaau

SEQ ID NO: 1339859 - RNA, 19 nt, Homo sapiens
  misc_RNA (1)...(19): siRNA sense strand
ggaaggaugucacuuucaa

SEQ ID NO: 1339860 - RNA, 19 nt, Homo sapiens
  misc_RNA (1)...(19): siRNA sense strand
gcacaggcuugaagaaaga

SEQ ID NO: 1339861 - RNA, 19 nt, Homo sapiens
  misc_RNA (1)...(19): siRNA sense strand
gaaaggaucaguugccaaa

SEQ ID NO: 1339862 - RNA, 19 nt, Homo sapiens
  misc_RNA (1)...(19): siRNA sense strand
gagacaagguuauuucaug

SEQ ID NO: 1339863 - RNA, 19 nt, Homo sapiens
  misc_RNA (1)...(19): siRNA sense strand
agaaauguaugcagacuuu

SEQ ID NO: 1339864 - RNA, 19 nt, Homo sapiens
  misc_RNA (1)...(19): siRNA sense strand
gaacacagaacuaguuuca

SEQ ID NO: 1339865 - RNA, 19 nt, Homo sapiens
  misc_RNA (1)...(19): siRNA sense strand
ggaauggaauggugugaug

SEQ ID NO: 1339866 - RNA, 19 nt, Homo sapiens
  misc_RNA (1)...(19): siRNA sense strand
acacagaacuaguuucaga

SEQ ID NO: 1339867 - RNA, 19 nt, Homo sapiens
  misc_RNA (1)...(19): siRNA sense strand
gaaguugccuauaaucaag

SEQ ID NO: 1339868 - RNA, 19 nt, Homo sapiens
  misc_RNA (1)...(19): siRNA sense strand
caaauacagucccagaguu

SEQ ID NO: 1339869 - RNA, 19 nt, Homo sapiens
  misc_RNA (1)...(19): siRNA sense strand
ccaagaaguugccuauaau

SEQ ID NO: 1339870 - RNA, 19 nt, Homo sapiens
  misc_RNA (1)...(19): siRNA sense strand
gacaacaaauagcauggua

SEQ ID NO: 1339871 - RNA, 19 nt, Homo sapiens
  misc_RNA (1)...(19): siRNA sense strand
caaaugauacugaagagaa

SEQ ID NO: 1339872 - RNA, 19 nt, Homo sapiens
  misc_RNA (1)...(19): siRNA sense strand
ggcaagaagcacagaauua

SEQ ID NO: 1339873 - RNA, 19 nt, Homo sapiens
  misc_RNA (1)...(19): siRNA sense strand
ggagaaugcuggguuuaug

SEQ ID NO: 1339874 - RNA, 19 nt, Homo sapiens
  misc_RNA (1)...(19): siRNA sense strand
caaauagcaugguagaauc

SEQ ID NO: 1339875 - RNA, 19 nt, Homo sapiens
  misc_RNA (1)...(19): siRNA sense strand
ggaaggagaaggaaauuca

SEQ ID NO: 1339876 - RNA, 19 nt, Homo sapiens
  misc_RNA (1)...(19): siRNA sense strand
gaagaugaacagagaaaga

SEQ ID NO: 1339877 - RNA, 19 nt, Homo sapiens
  misc_RNA (1)...(19): siRNA sense strand
cacagcagcucgggaaaua

SEQ ID NO: 1339878 - RNA, 19 nt, Homo sapiens
  misc_RNA (1)...(19): siRNA sense strand
gaaauucagugggagacaa

SEQ ID NO: 1339879 - RNA, 19 nt, Homo sapiens
  misc_RNA (1)...(19): siRNA sense strand
cagaauuacugccgagauu

SEQ ID NO: 1339880 - RNA, 19 nt, Homo sapiens
  misc_RNA (1)...(19): siRNA sense strand
ggaaggaaaggaucaguug

SEQ ID NO: 1339881 - RNA, 19 nt, Homo sapiens
  misc_RNA (1)...(19): siRNA sense strand
ggaauggugugauguaugc

SEQ ID NO: 1339882 - RNA, 19 nt, Homo sapiens
  misc_RNA (1)...(19): siRNA sense strand
gaaggucuauccucacagu

SEQ ID NO: 1339883 - RNA, 19 nt, Homo sapiens
  misc_RNA (1)...(19): siRNA sense strand
gcacaagagcguuaucaug

SEQ ID NO: 1339884 - RNA, 19 nt, Homo sapiens
  misc_RNA (1)...(19): siRNA sense strand
gauggagaaugcuggguuu

SEQ ID NO: 1339885 - RNA, 19 nt, Homo sapiens
  misc_RNA (1)...(19): siRNA sense strand
gaugucacuuucaacuuaa

SEQ ID NO: 1339886 - RNA, 19 nt, Homo sapiens
  misc_RNA (1)...(19): siRNA sense strand
gaacagagaaagaaaauug

SEQ ID NO: 1339887 - RNA, 19 nt, Homo sapiens
  misc_RNA (1)...(19): siRNA sense strand
ucaaagagacaacaaauag

SEQ ID NO: 1339888 - RNA, 19 nt, Homo sapiens
  misc_RNA (1)...(19): siRNA sense strand
accaagaaguugccuauaa

SEQ ID NO: 1339889 - RNA, 19 nt, Homo sapiens
  misc_RNA (1)...(19): siRNA sense strand
gaagagaacacagaacuag

SEQ ID NO: 1339890 - RNA, 19 nt, Homo sapiens
  misc_RNA (1)...(19): siRNA sense strand
agacaagguuauuucauga

SEQ ID NO: 1339891 - RNA, 19 nt, Homo sapiens
  misc_RNA (1)...(19): siRNA sense strand
gugaacuugucuccaaaua

SEQ ID NO: 1339892 - RNA, 19 nt, Homo sapiens
  misc_RNA (1)...(19): siRNA sense strand
aauaucaucuuccacacua

SEQ ID NO: 1339893 - RNA, 19 nt, Homo sapiens
  misc_RNA (1)...(19): siRNA sense strand
gaggagaaugcaauauuaa

SEQ ID NO: 1339894 - RNA, 19 nt, Homo sapiens
  misc_RNA (1)...(19): siRNA sense strand
gaugcaauauaucaaccua

SEQ ID NO: 1339895 - RNA, 19 nt, Homo sapiens
  misc_RNA (1)...(19): siRNA sense strand
gaaaggaaggagaaggaaa

SEQ ID NO: 1339896 - RNA, 19 nt, Homo sapiens
  misc_RNA (1)...(19): siRNA sense strand
ucccguagaugcaauauau

SEQ ID NO: 1339897 - RNA, 19 nt, Homo sapiens
  misc_RNA (1)...(19): siRNA sense strand
gaucagaacgaguaugaau

SEQ ID NO: 1339898 - RNA, 19 nt, Homo sapiens
  misc_RNA (1)...(19): siRNA sense strand
caacaaauagcaugguaga

SEQ ID NO: 1339899 - RNA, 19 nt, Homo sapiens
  misc_RNA (1)...(19): siRNA sense strand
gcagggcugugucucaugu

SEQ ID NO: 1339900 - RNA, 19 nt, Homo sapiens
  misc_RNA (1)...(19): siRNA sense strand
ugaggaaguuggaagauca

SEQ ID NO: 1339901 - RNA, 19 nt, Homo sapiens
  misc_RNA (1)...(19): siRNA sense strand
ggaauuaggaggagaaugc

SEQ ID NO: 1339902 - RNA, 19 nt, Homo sapiens
  misc_RNA (1)...(19): siRNA sense strand
caacguuuauucuugaaag

SEQ ID NO: 1339903 - RNA, 19 nt, Homo sapiens
  misc_RNA (1)...(19): siRNA sense strand
gagaaaggaaggagaagga

SEQ ID NO: 1339904 - RNA, 19 nt, Homo sapiens
  misc_RNA (1)...(19): siRNA sense strand
agaagaaagugaggaaguu

SEQ ID NO: 1339905 - RNA, 19 nt, Homo sapiens
  misc_RNA (1)...(19): siRNA sense strand
gcaagaagcacagaauuac

SEQ ID NO: 1339906 - RNA, 19 nt, Homo sapiens
  misc_RNA (1)...(19): siRNA sense strand
gagaacacagaacuaguuu

SEQ ID NO: 1339907 - RNA, 19 nt, Homo sapiens
  misc_RNA (1)...(19): siRNA sense strand
agaacuaguuucagaagga

SEQ ID NO: 1339908 - RNA, 19 nt, Homo sapiens
  misc_RNA (1)...(19): siRNA sense strand
gaugaaccauuacugaaac

SEQ ID NO: 1339909 - RNA, 19 nt, Homo sapiens
  misc_RNA (1)...(19): siRNA sense strand
gagaaugcuggguuuauga

SEQ ID NO: 1339910 - RNA, 19 nt, Homo sapiens
  misc_RNA (1)...(19): siRNA sense strand
gaacauuacauucucacau

SEQ ID NO: 1339911 - RNA, 19 nt, Homo sapiens
  misc_RNA (1)...(19): siRNA sense strand
gaugaacauuacauucuca

SEQ ID NO: 1339912 - RNA, 19 nt, Homo sapiens
  misc_RNA (1)...(19): siRNA sense strand
gagcagguuucccaucauc

SEQ ID NO: 1339913 - RNA, 19 nt, Homo sapiens
  misc_RNA (1)...(19): siRNA sense strand
ucacuuaauucuuccuugu

SEQ ID NO: 1339914 - RNA, 19 nt, Homo sapiens
  misc_RNA (1)...(19): siRNA sense strand
gaggagcacaagagcguua

SEQ ID NO: 1339915 - RNA, 19 nt, Homo sapiens
  misc_RNA (1)...(19): siRNA sense strand
cagcagugaagaugaauuu

SEQ ID NO: 1339916 - RNA, 19 nt, Homo sapiens
  misc_RNA (1)...(19): siRNA sense strand
gaagaaagugaggaaguug

SEQ ID NO: 1339917 - RNA, 19 nt, Homo sapiens
  misc_RNA (1)...(19): siRNA sense strand
gcagugaagaugaauuuua

SEQ ID NO: 1339918 - RNA, 19 nt, Homo sapiens
  misc_RNA (1)...(19): siRNA sense strand
gagcauuagugaccagaag

SEQ ID NO: 1339919 - RNA, 19 nt, Homo sapiens
  misc_RNA (1)...(19): siRNA sense strand
guaguucuuccaacguuua

SEQ ID NO: 1339920 - RNA, 19 nt, Homo sapiens
  misc_RNA (1)...(19): siRNA sense strand
uggaagaucagaacgagua

SEQ ID NO: 1339921 - RNA, 19 nt, Homo sapiens
  misc_RNA (1)...(19): siRNA sense strand
ggacaucaucagacuccua

SEQ ID NO: 1339922 - RNA, 19 nt, Homo sapiens
  misc_RNA (1)...(19): siRNA sense strand
caagguuauuucaugaaga

SEQ ID NO: 1339923 - RNA, 19 nt, Homo sapiens
  misc_RNA (1)...(19): siRNA sense strand
acacuaaacccuucuaugg

SEQ ID NO: 1339924 - RNA, 19 nt, Homo sapiens
  misc_RNA (1)...(19): siRNA sense strand
gauaccacagaaucacuua

SEQ ID NO: 1339925 - RNA, 19 nt, Homo sapiens
  misc_RNA (1)...(19): siRNA sense strand
gcagaagcccgagaaagga

SEQ ID NO: 1339926 - RNA, 19 nt, Homo sapiens
  misc_RNA (1)...(19): siRNA sense strand
acaaauagcaugguagaau

SEQ ID NO: 1339927 - RNA, 19 nt, Homo sapiens
  misc_RNA (1)...(19): siRNA sense strand
gugcaaauaucaucuucca

SEQ ID NO: 1339928 - RNA, 19 nt, Homo sapiens
  misc_RNA (1)...(19): siRNA sense strand
acaauucaaugcucauauc

SEQ ID NO: 1339929 - RNA, 19 nt, Homo sapiens
  misc_RNA (1)...(19): siRNA sense strand
gaagauacaauucaaugcu

SEQ ID NO: 1339930 - RNA, 19 nt, Homo sapiens
  misc_RNA (1)...(19): siRNA sense strand
gaugcugaccuguuugauu

SEQ ID NO: 1339931 - RNA, 19 nt, Homo sapiens
  misc_RNA (1)...(19): siRNA sense strand
cacgugaacuugucuccaa

SEQ ID NO: 1339932 - RNA, 19 nt, Homo sapiens
  misc_RNA (1)...(19): siRNA sense strand
ucaugaagauggagaaugc

SEQ ID NO: 1339933 - RNA, 19 nt, Homo sapiens
  misc_RNA (1)...(19): siRNA sense strand
uuaugaugcugaugaauuc

SEQ ID NO: 1339934 - RNA, 19 nt, Homo sapiens
  misc_RNA (1)...(19): siRNA sense strand
caucucuugucgcagguua

SEQ ID NO: 1339935 - RNA, 19 nt, Homo sapiens
  misc_RNA (1)...(19): siRNA sense strand
gguaguucuuccaacguuu

SEQ ID NO: 1339936 - RNA, 19 nt, Homo sapiens
  misc_RNA (1)...(19): siRNA sense strand
caaagcgcuuaauagauuc

SEQ ID NO: 1339937 - RNA, 19 nt, Homo sapiens
  misc_RNA (1)...(19): siRNA sense strand
caagugaugcugaccuguu

SEQ ID NO: 1339938 - RNA, 19 nt, Homo sapiens
  misc_RNA (1)...(19): siRNA sense strand
ugaugaaccauuacugaaa

SEQ ID NO: 1339939 - RNA, 19 nt, Homo sapiens
  misc_RNA (1)...(19): siRNA sense strand
gggcaagaagcacagaauu

SEQ ID NO: 1339940 - RNA, 19 nt, Homo sapiens
  misc_RNA (1)...(19): siRNA sense strand
cuuccaacguuuauucuug

SEQ ID NO: 1339941 - RNA, 19 nt, Homo sapiens
  misc_RNA (1)...(19): siRNA sense strand
agacuuggaauggaucuua

SEQ ID NO: 1339942 - RNA, 19 nt, Homo sapiens
  misc_RNA (1)...(19): siRNA sense strand
caagagcguuaucaugcau

SEQ ID NO: 1339943 - RNA, 19 nt, Homo sapiens
  misc_RNA (1)...(19): siRNA sense strand
aagugaugcugaccuguuu

SEQ ID NO: 1339944 - RNA, 19 nt, Homo sapiens
  misc_RNA (1)...(19): siRNA sense strand
augcugaccuguuugauuc

SEQ ID NO: 1339945 - RNA, 19 nt, Homo sapiens
  misc_RNA (1)...(19): siRNA sense strand
aaugcuggguuuaugauga

SEQ ID NO: 1339946 - RNA, 19 nt, Homo sapiens
  misc_RNA (1)...(19): siRNA sense strand
gaaguuggaagaucagaac

SEQ ID NO: 1339947 - RNA, 19 nt, Homo sapiens
  misc_RNA (1)...(19): siRNA sense strand
agacuaugaugaacauuac

SEQ ID NO: 1339948 - RNA, 19 nt, Homo sapiens
  misc_RNA (1)...(19): siRNA sense strand
agagaacacagaacuaguu

SEQ ID NO: 1339949 - RNA, 19 nt, Homo sapiens
  misc_RNA (1)...(19): siRNA sense strand
ucccaaggaucgaaugguu

SEQ ID NO: 1339950 - RNA, 19 nt, Homo sapiens
  misc_RNA (1)...(19): siRNA sense strand
ggaccuguuugugagcauu

SEQ ID NO: 1339951 - RNA, 19 nt, Homo sapiens
  misc_RNA (1)...(19): siRNA sense strand
ugauucacaugaugacaga

SEQ ID NO: 1339952 - RNA, 19 nt, Homo sapiens
  misc_RNA (1)...(19): siRNA sense strand
uaugaugaaccauuacuga

SEQ ID NO: 1339953 - RNA, 19 nt, Homo sapiens
  misc_RNA (1)...(19): siRNA sense strand
ggaggagaaugcaauauua

SEQ ID NO: 1339954 - RNA, 19 nt, Homo sapiens
  misc_RNA (1)...(19): siRNA sense strand
ccaaagcgcuuaauagauu

SEQ ID NO: 1339955 - RNA, 19 nt, Homo sapiens
  misc_RNA (1)...(19): siRNA sense strand
ggaugucacuuucaacuua

SEQ ID NO: 1339956 - RNA, 19 nt, Homo sapiens
  misc_RNA (1)...(19): siRNA sense strand
gaacuugucuccaaauaca

SEQ ID NO: 1339957 - RNA, 19 nt, Homo sapiens
  misc_RNA (1)...(19): siRNA sense strand
gcucauaucuggaccaaau

SEQ ID NO: 1339958 - RNA, 19 nt, Homo sapiens
  misc_RNA (1)...(19): siRNA sense strand
ggaaggaugucacuuucaa

SEQ ID NO: 1339959 - RNA, 19 nt, Homo sapiens
  misc_RNA (1)...(19): siRNA sense strand
gcacaggcuugaagaaaga

SEQ ID NO: 1339960 - RNA, 19 nt, Homo sapiens
  misc_RNA (1)...(19): siRNA sense strand
gaaaggaucaguugccaaa

SEQ ID NO: 1339961 - RNA, 19 nt, Homo sapiens
  misc_RNA (1)...(19): siRNA sense strand
gagacaagguuauuucaug

SEQ ID NO: 1339962 - RNA, 19 nt, Homo sapiens
  misc_RNA (1)...(19): siRNA sense strand
agaaauguaugcagacuuu

SEQ ID NO: 1339963 - RNA, 19 nt, Homo sapiens
  misc_RNA (1)...(19): siRNA sense strand
gaacacagaacuaguuuca

SEQ ID NO: 1339964 - RNA, 19 nt, Homo sapiens
  misc_RNA (1)...(19): siRNA sense strand
ggaauggaauggugugaug

SEQ ID NO: 1339965 - RNA, 19 nt, Homo sapiens
  misc_RNA (1)...(19): siRNA sense strand
acacagaacuaguuucaga

SEQ ID NO: 1339966 - RNA, 19 nt, Homo sapiens
  misc_RNA (1)...(19): siRNA sense strand
gaaguugccuauaaucaag

SEQ ID NO: 1339967 - RNA, 19 nt, Homo sapiens
  misc_RNA (1)...(19): siRNA sense strand
caaauacagucccagaguu

SEQ ID NO: 1339968 - RNA, 19 nt, Homo sapiens
  misc_RNA (1)...(19): siRNA sense strand
ccaagaaguugccuauaau

SEQ ID NO: 1339969 - RNA, 19 nt, Homo sapiens
  misc_RNA (1)...(19): siRNA sense strand
caaaugauacugaagagaa

SEQ ID NO: 1339970 - RNA, 19 nt, Homo sapiens
  misc_RNA (1)...(19): siRNA sense strand
ggcaagaagcacagaauua

SEQ ID NO: 1339971 - RNA, 19 nt, Homo sapiens
  misc_RNA (1)...(19): siRNA sense strand
ggagaaugcuggguuuaug

SEQ ID NO: 1339972 - RNA, 19 nt, Homo sapiens
  misc_RNA (1)...(19): siRNA sense strand
ggaaggagaaggaaauuca

SEQ ID NO: 1339973 - RNA, 19 nt, Homo sapiens
  misc_RNA (1)...(19): siRNA sense strand
cacagcagcucgggaaaua

SEQ ID NO: 1339974 - RNA, 19 nt, Homo sapiens
  misc_RNA (1)...(19): siRNA sense strand
gaaauucagugggagacaa

SEQ ID NO: 1339975 - RNA, 19 nt, Homo sapiens
  misc_RNA (1)...(19): siRNA sense strand
cagaauuacugccgagauu

SEQ ID NO: 1339976 - RNA, 19 nt, Homo sapiens
  misc_RNA (1)...(19): siRNA sense strand
ggaaggaaaggaucaguug

SEQ ID NO: 1339977 - RNA, 19 nt, Homo sapiens
  misc_RNA (1)...(19): siRNA sense strand
ggaauggugugauguaugc

SEQ ID NO: 1339978 - RNA, 19 nt, Homo sapiens
  misc_RNA (1)...(19): siRNA sense strand
gaaggucuauccucacagu

SEQ ID NO: 1339979 - RNA, 19 nt, Homo sapiens
  misc_RNA (1)...(19): siRNA sense strand
gcacaagagcguuaucaug

SEQ ID NO: 1339980 - RNA, 19 nt, Homo sapiens
  misc_RNA (1)...(19): siRNA sense strand
gauggagaaugcuggguuu

SEQ ID NO: 1339981 - RNA, 19 nt, Homo sapiens
  misc_RNA (1)...(19): siRNA sense strand
gaugucacuuucaacuuaa

SEQ ID NO: 1339982 - RNA, 19 nt, Homo sapiens
  misc_RNA (1)...(19): siRNA sense strand
accaagaaguugccuauaa

SEQ ID NO: 1339983 - RNA, 19 nt, Homo sapiens
  misc_RNA (1)...(19): siRNA sense strand
gaagagaacacagaacuag

SEQ ID NO: 1339984 - RNA, 19 nt, Homo sapiens
  misc_RNA (1)...(19): siRNA sense strand
agacaagguuauuucauga

SEQ ID NO: 1339985 - RNA, 19 nt, Homo sapiens
  misc_RNA (1)...(19): siRNA sense strand
gugaacuugucuccaaaua

SEQ ID NO: 1339986 - RNA, 19 nt, Homo sapiens
  misc_RNA (1)...(19): siRNA sense strand
aauaucaucuuccacacua

SEQ ID NO: 1339987 - RNA, 19 nt, Homo sapiens
  misc_RNA (1)...(19): siRNA sense strand
gaggagaaugcaauauuaa

SEQ ID NO: 1339988 - RNA, 19 nt, Homo sapiens
  misc_RNA (1)...(19): siRNA sense strand
gaugcaauauaucaaccua

SEQ ID NO: 1339989 - RNA, 19 nt, Homo sapiens
  misc_RNA (1)...(19): siRNA sense strand
gaaaggaaggagaaggaaa

SEQ ID NO: 1339990 - RNA, 19 nt, Homo sapiens
  misc_RNA (1)...(19): siRNA sense strand
ucccguagaugcaauauau

SEQ ID NO: 1339991 - RNA, 19 nt, Homo sapiens
  misc_RNA (1)...(19): siRNA sense strand
gaucagaacgaguaugaau

SEQ ID NO: 1339992 - RNA, 19 nt, Homo sapiens
  misc_RNA (1)...(19): siRNA sense strand
gcagggcugugucucaugu

SEQ ID NO: 1339993 - RNA, 19 nt, Homo sapiens
  misc_RNA (1)...(19): siRNA sense strand
ugaggaaguuggaagauca

SEQ ID NO: 1339994 - RNA, 19 nt, Homo sapiens
  misc_RNA (1)...(19): siRNA sense strand
ggaauuaggaggagaaugc

SEQ ID NO: 1339995 - RNA, 19 nt, Homo sapiens
  misc_RNA (1)...(19): siRNA sense strand
caacguuuauucuugaaag

SEQ ID NO: 1339996 - RNA, 19 nt, Homo sapiens
  misc_RNA (1)...(19): siRNA sense strand
gagaaaggaaggagaagga

SEQ ID NO: 1339997 - RNA, 19 nt, Homo sapiens
  misc_RNA (1)...(19): siRNA sense strand
agaagaaagugaggaaguu

SEQ ID NO: 1339998 - RNA, 19 nt, Homo sapiens
  misc_RNA (1)...(19): siRNA sense strand
gcaagaagcacagaauuac

SEQ ID NO: 1339999 - RNA, 19 nt, Homo sapiens
  misc_RNA (1)...(19): siRNA sense strand
gagaacacagaacuaguuu

SEQ ID NO: 1340000 - RNA, 19 nt, Homo sapiens
  misc_RNA (1)...(19): siRNA sense strand
agaacuaguuucagaagga

SEQ ID NO: 1340001 - RNA, 19 nt, Homo sapiens
  misc_RNA (1)...(19): siRNA sense strand
gaugaaccauuacugaaac

SEQ ID NO: 1340002 - RNA, 19 nt, Homo sapiens
  misc_RNA (1)...(19): siRNA sense strand
gagaaugcuggguuuauga

SEQ ID NO: 1340003 - RNA, 19 nt, Homo sapiens
  misc_RNA (1)...(19): siRNA sense strand
gaacauuacauucucacau

SEQ ID NO: 1340004 - RNA, 19 nt, Homo sapiens
  misc_RNA (1)...(19): siRNA sense strand
gaugaacauuacauucuca

SEQ ID NO: 1340005 - RNA, 19 nt, Homo sapiens
  misc_RNA (1)...(19): siRNA sense strand
gagcagguuucccaucauc

SEQ ID NO: 1340006 - RNA, 19 nt, Homo sapiens
  misc_RNA (1)...(19): siRNA sense strand
ucacuuaauucuuccuugu

SEQ ID NO: 1340007 - RNA, 19 nt, Homo sapiens
  misc_RNA (1)...(19): siRNA sense strand
gaggagcacaagagcguua

SEQ ID NO: 1340008 - RNA, 19 nt, Homo sapiens
  misc_RNA (1)...(19): siRNA sense strand
cagcagugaagaugaauuu

SEQ ID NO: 1340009 - RNA, 19 nt, Homo sapiens
  misc_RNA (1)...(19): siRNA sense strand
gaagaaagugaggaaguug

SEQ ID NO: 1340010 - RNA, 19 nt, Homo sapiens
  misc_RNA (1)...(19): siRNA sense strand
gcagugaagaugaauuuua

SEQ ID NO: 1340011 - RNA, 19 nt, Homo sapiens
  misc_RNA (1)...(19): siRNA sense strand
gagcauuagugaccagaag

SEQ ID NO: 1340012 - RNA, 19 nt, Homo sapiens
  misc_RNA (1)...(19): siRNA sense strand
guaguucuuccaacguuua

SEQ ID NO: 1340013 - RNA, 19 nt, Homo sapiens
  misc_RNA (1)...(19): siRNA sense strand
uggaagaucagaacgagua

SEQ ID NO: 1340014 - RNA, 19 nt, Homo sapiens
  misc_RNA (1)...(19): siRNA sense strand
ggacaucaucagacuccua

SEQ ID NO: 1340015 - RNA, 19 nt, Homo sapiens
  misc_RNA (1)...(19): siRNA sense strand
caagguuauuucaugaaga

SEQ ID NO: 1340016 - RNA, 19 nt, Homo sapiens
  misc_RNA (1)...(19): siRNA sense strand
acacuaaacccuucuaugg

SEQ ID NO: 1340017 - RNA, 19 nt, Homo sapiens
  misc_RNA (1)...(19): siRNA sense strand
gauaccacagaaucacuua

SEQ ID NO: 1340018 - RNA, 19 nt, Homo sapiens
  misc_RNA (1)...(19): siRNA sense strand
gcagaagcccgagaaagga

SEQ ID NO: 1340019 - RNA, 19 nt, Homo sapiens
  misc_RNA (1)...(19): siRNA sense strand
gugcaaauaucaucuucca

SEQ ID NO: 1340020 - RNA, 19 nt, Homo sapiens
  misc_RNA (1)...(19): siRNA sense strand
acaauucaaugcucauauc

SEQ ID NO: 1340021 - RNA, 19 nt, Homo sapiens
  misc_RNA (1)...(19): siRNA sense strand
gaagauacaauucaaugcu

SEQ ID NO: 1340022 - RNA, 19 nt, Homo sapiens
  misc_RNA (1)...(19): siRNA sense strand
gaugcugaccuguuugauu

SEQ ID NO: 1340023 - RNA, 19 nt, Homo sapiens
  misc_RNA (1)...(19): siRNA sense strand
cacgugaacuugucuccaa

SEQ ID NO: 1340024 - RNA, 19 nt, Homo sapiens
  misc_RNA (1)...(19): siRNA sense strand
ucaugaagauggagaaugc

SEQ ID NO: 1340025 - RNA, 19 nt, Homo sapiens
  misc_RNA (1)...(19): siRNA sense strand
uuaugaugcugaugaauuc

SEQ ID NO: 1340026 - RNA, 19 nt, Homo sapiens
  misc_RNA (1)...(19): siRNA sense strand
caucucuugucgcagguua

SEQ ID NO: 1340027 - RNA, 19 nt, Homo sapiens
  misc_RNA (1)...(19): siRNA sense strand
gguaguucuuccaacguuu

SEQ ID NO: 1340028 - RNA, 19 nt, Homo sapiens
  misc_RNA (1)...(19): siRNA sense strand
caaagcgcuuaauagauuc

SEQ ID NO: 1340029 - RNA, 19 nt, Homo sapiens
  misc_RNA (1)...(19): siRNA sense strand
caagugaugcugaccuguu

SEQ ID NO: 1340030 - RNA, 19 nt, Homo sapiens
  misc_RNA (1)...(19): siRNA sense strand
ugaugaaccauuacugaaa

SEQ ID NO: 1340031 - RNA, 19 nt, Homo sapiens
  misc_RNA (1)...(19): siRNA sense strand
gggcaagaagcacagaauu

SEQ ID NO: 1340032 - RNA, 19 nt, Homo sapiens
  misc_RNA (1)...(19): siRNA sense strand
cuuccaacguuuauucuug

SEQ ID NO: 1340033 - RNA, 19 nt, Homo sapiens
  misc_RNA (1)...(19): siRNA sense strand
agacuuggaauggaucuua

SEQ ID NO: 1340034 - RNA, 19 nt, Homo sapiens
  misc_RNA (1)...(19): siRNA sense strand
caagagcguuaucaugcau

SEQ ID NO: 1340035 - RNA, 19 nt, Homo sapiens
  misc_RNA (1)...(19): siRNA sense strand
aagugaugcugaccuguuu

SEQ ID NO: 1340036 - RNA, 19 nt, Homo sapiens
  misc_RNA (1)...(19): siRNA sense strand
augcugaccuguuugauuc

SEQ ID NO: 1340037 - RNA, 19 nt, Homo sapiens
  misc_RNA (1)...(19): siRNA sense strand
aaugcuggguuuaugauga

SEQ ID NO: 1340038 - RNA, 19 nt, Homo sapiens
  misc_RNA (1)...(19): siRNA sense strand
gaaguuggaagaucagaac

SEQ ID NO: 1340039 - RNA, 19 nt, Homo sapiens
  misc_RNA (1)...(19): siRNA sense strand
agacuaugaugaacauuac

SEQ ID NO: 1340040 - RNA, 19 nt, Homo sapiens
  misc_RNA (1)...(19): siRNA sense strand
agagaacacagaacuaguu

SEQ ID NO: 1340041 - RNA, 19 nt, Homo sapiens
  misc_RNA (1)...(19): siRNA sense strand
ucccaaggaucgaaugguu

SEQ ID NO: 1340042 - RNA, 19 nt, Homo sapiens
  misc_RNA (1)...(19): siRNA sense strand
ggaccuguuugugagcauu

SEQ ID NO: 1340043 - RNA, 19 nt, Homo sapiens
  misc_RNA (1)...(19): siRNA sense strand
ugauucacaugaugacaga

SEQ ID NO: 1340044 - RNA, 19 nt, Homo sapiens
  misc_RNA (1)...(19): siRNA sense strand
ccaaauacagucccagagu

SEQ ID NO: 1340045 - RNA, 19 nt, Homo sapiens
  misc_RNA (1)...(19): siRNA sense strand
uaugaugaaccauuacuga

SEQ ID NO: 1340046 - RNA, 19 nt, Homo sapiens
  misc_RNA (1)...(19): siRNA sense strand
ucaagaagaaagugaggaa

SEQ ID NO: 1340047 - RNA, 19 nt, Homo sapiens
  misc_RNA (1)...(19): siRNA sense strand
gguuagacuuggaauggau

SEQ ID NO: 1340048 - RNA, 19 nt, Homo sapiens
  misc_RNA (1)...(19): siRNA sense strand
gcacauccggaccuguuug

SEQ ID NO: 1340049 - RNA, 19 nt, Homo sapiens
  misc_RNA (1)...(19): siRNA sense strand
aaaggaaggagaaggaaau

SEQ ID NO: 1340050 - RNA, 19 nt, Homo sapiens
  misc_RNA (1)...(19): siRNA sense strand
ugaagagaacacagaacua

SEQ ID NO: 1340051 - RNA, 19 nt, Homo sapiens
  misc_RNA (1)...(19): siRNA sense strand
ggaaguuggaagaucagaa

SEQ ID NO: 1340052 - RNA, 19 nt, Homo sapiens
  misc_RNA (1)...(19): siRNA sense strand
aagaucagaacgaguauga

SEQ ID NO: 1340053 - RNA, 19 nt, Homo sapiens
  misc_RNA (1)...(19): siRNA sense strand
ggaggagaaugcaauauua

SEQ ID NO: 1340054 - RNA, 19 nt, Homo sapiens
  misc_RNA (1)...(19): siRNA sense strand
ccaaagcgcuuaauagauu

SEQ ID NO: 1340055 - RNA, 19 nt, Homo sapiens
  misc_RNA (1)...(19): siRNA sense strand
ggaugucacuuucaacuua

SEQ ID NO: 1340056 - RNA, 19 nt, Homo sapiens
  misc_RNA (1)...(19): siRNA sense strand
gaacuugucuccaaauaca

SEQ ID NO: 1340057 - RNA, 19 nt, Homo sapiens
  misc_RNA (1)...(19): siRNA sense strand
gcucauaucuggaccaaau

SEQ ID NO: 1340058 - RNA, 19 nt, Homo sapiens
  misc_RNA (1)...(19): siRNA sense strand
ggaaggaugucacuuucaa

SEQ ID NO: 1340059 - RNA, 19 nt, Homo sapiens
  misc_RNA (1)...(19): siRNA sense strand
gcacaggcuugaagaaaga

SEQ ID NO: 1340060 - RNA, 19 nt, Homo sapiens
  misc_RNA (1)...(19): siRNA sense strand
gaaaggaucaguugccaaa

SEQ ID NO: 1340061 - RNA, 19 nt, Homo sapiens
  misc_RNA (1)...(19): siRNA sense strand
gagacaagguuauuucaug

SEQ ID NO: 1340062 - RNA, 19 nt, Homo sapiens
  misc_RNA (1)...(19): siRNA sense strand
agaaauguaugcagacuuu

SEQ ID NO: 1340063 - RNA, 19 nt, Homo sapiens
  misc_RNA (1)...(19): siRNA sense strand
gaacacagaacuaguuuca

SEQ ID NO: 1340064 - RNA, 19 nt, Homo sapiens
  misc_RNA (1)...(19): siRNA sense strand
ggaauggaauggugugaug

SEQ ID NO: 1340065 - RNA, 19 nt, Homo sapiens
  misc_RNA (1)...(19): siRNA sense strand
acacagaacuaguuucaga

SEQ ID NO: 1340066 - RNA, 19 nt, Homo sapiens
  misc_RNA (1)...(19): siRNA sense strand
gaaguugccuauaaucaag

SEQ ID NO: 1340067 - RNA, 19 nt, Homo sapiens
  misc_RNA (1)...(19): siRNA sense strand
caaauacagucccagaguu

SEQ ID NO: 1340068 - RNA, 19 nt, Homo sapiens
  misc_RNA (1)...(19): siRNA sense strand
ccaagaaguugccuauaau

SEQ ID NO: 1340069 - RNA, 19 nt, Homo sapiens
  misc_RNA (1)...(19): siRNA sense strand
caaaugauacugaagagaa

SEQ ID NO: 1340070 - RNA, 19 nt, Homo sapiens
  misc_RNA (1)...(19): siRNA sense strand
ggcaagaagcacagaauua

SEQ ID NO: 1340071 - RNA, 19 nt, Homo sapiens
  misc_RNA (1)...(19): siRNA sense strand
ggagaaugcuggguuuaug

SEQ ID NO: 1340072 - RNA, 19 nt, Homo sapiens
  misc_RNA (1)...(19): siRNA sense strand
ggaaggagaaggaaauuca

SEQ ID NO: 1340073 - RNA, 19 nt, Homo sapiens
  misc_RNA (1)...(19): siRNA sense strand
cacagcagcucgggaaaua

SEQ ID NO: 1340074 - RNA, 19 nt, Homo sapiens
  misc_RNA (1)...(19): siRNA sense strand
gaaauucagugggagacaa

SEQ ID NO: 1340075 - RNA, 19 nt, Homo sapiens
  misc_RNA (1)...(19): siRNA sense strand
cagaauuacugccgagauu

SEQ ID NO: 1340076 - RNA, 19 nt, Homo sapiens
  misc_RNA (1)...(19): siRNA sense strand
ggaaggaaaggaucaguug

SEQ ID NO: 1340077 - RNA, 19 nt, Homo sapiens
  misc_RNA (1)...(19): siRNA sense strand
ggaauggugugauguaugc

SEQ ID NO: 1340078 - RNA, 19 nt, Homo sapiens
  misc_RNA (1)...(19): siRNA sense strand
gaaggucuauccucacagu

SEQ ID NO: 1340079 - RNA, 19 nt, Homo sapiens
  misc_RNA (1)...(19): siRNA sense strand
gcacaagagcguuaucaug

SEQ ID NO: 1340080 - RNA, 19 nt, Homo sapiens
  misc_RNA (1)...(19): siRNA sense strand
gauggagaaugcuggguuu

SEQ ID NO: 1340081 - RNA, 19 nt, Homo sapiens
  misc_RNA (1)...(19): siRNA sense strand
gaugucacuuucaacuuaa

SEQ ID NO: 1340082 - RNA, 19 nt, Homo sapiens
  misc_RNA (1)...(19): siRNA sense strand
accaagaaguugccuauaa

SEQ ID NO: 1340083 - RNA, 19 nt, Homo sapiens
  misc_RNA (1)...(19): siRNA sense strand
gaagagaacacagaacuag

SEQ ID NO: 1340084 - RNA, 19 nt, Homo sapiens
  misc_RNA (1)...(19): siRNA sense strand
agacaagguuauuucauga

SEQ ID NO: 1340085 - RNA, 19 nt, Homo sapiens
  misc_RNA (1)...(19): siRNA sense strand
gugaacuugucuccaaaua

SEQ ID NO: 1340086 - RNA, 19 nt, Homo sapiens
  misc_RNA (1)...(19): siRNA sense strand
aauaucaucuuccacacua

SEQ ID NO: 1340087 - RNA, 19 nt, Homo sapiens
  misc_RNA (1)...(19): siRNA sense strand
gaggagaaugcaauauuaa

SEQ ID NO: 1340088 - RNA, 19 nt, Homo sapiens
  misc_RNA (1)...(19): siRNA sense strand
gaugcaauauaucaaccua

SEQ ID NO: 1340089 - RNA, 19 nt, Homo sapiens
  misc_RNA (1)...(19): siRNA sense strand
gaaaggaaggagaaggaaa

SEQ ID NO: 1340090 - RNA, 19 nt, Homo sapiens
  misc_RNA (1)...(19): siRNA sense strand
ucccguagaugcaauauau

SEQ ID NO: 1340091 - RNA, 19 nt, Homo sapiens
  misc_RNA (1)...(19): siRNA sense strand
gaucagaacgaguaugaau

SEQ ID NO: 1340092 - RNA, 19 nt, Homo sapiens
  misc_RNA (1)...(19): siRNA sense strand
gcagggcugugucucaugu

SEQ ID NO: 1340093 - RNA, 19 nt, Homo sapiens
  misc_RNA (1)...(19): siRNA sense strand
ugaggaaguuggaagauca

SEQ ID NO: 1340094 - RNA, 19 nt, Homo sapiens
  misc_RNA (1)...(19): siRNA sense strand
ggaauuaggaggagaaugc

SEQ ID NO: 1340095 - RNA, 19 nt, Homo sapiens
  misc_RNA (1)...(19): siRNA sense strand
caacguuuauucuugaaag

SEQ ID NO: 1340096 - RNA, 19 nt, Homo sapiens
  misc_RNA (1)...(19): siRNA sense strand
gagaaaggaaggagaagga

SEQ ID NO: 1340097 - RNA, 19 nt, Homo sapiens
  misc_RNA (1)...(19): siRNA sense strand
agaagaaagugaggaaguu

SEQ ID NO: 1340098 - RNA, 19 nt, Homo sapiens
  misc_RNA (1)...(19): siRNA sense strand
gcaagaagcacagaauuac

SEQ ID NO: 1340099 - RNA, 19 nt, Homo sapiens
  misc_RNA (1)...(19): siRNA sense strand
gagaacacagaacuaguuu

SEQ ID NO: 1340100 - RNA, 19 nt, Homo sapiens
  misc_RNA (1)...(19): siRNA sense strand
agaacuaguuucagaagga

SEQ ID NO: 1340101 - RNA, 19 nt, Homo sapiens
  misc_RNA (1)...(19): siRNA sense strand
gaugaaccauuacugaaac

SEQ ID NO: 1340102 - RNA, 19 nt, Homo sapiens
  misc_RNA (1)...(19): siRNA sense strand
gagaaugcuggguuuauga

SEQ ID NO: 1340103 - RNA, 19 nt, Homo sapiens
  misc_RNA (1)...(19): siRNA sense strand
gaacauuacauucucacau

SEQ ID NO: 1340104 - RNA, 19 nt, Homo sapiens
  misc_RNA (1)...(19): siRNA sense strand
gaugaacauuacauucuca

SEQ ID NO: 1340105 - RNA, 19 nt, Homo sapiens
  misc_RNA (1)...(19): siRNA sense strand
gagcagguuucccaucauc

SEQ ID NO: 1340106 - RNA, 19 nt, Homo sapiens
  misc_RNA (1)...(19): siRNA sense strand
ucacuuaauucuuccuugu

SEQ ID NO: 1340107 - RNA, 19 nt, Homo sapiens
  misc_RNA (1)...(19): siRNA sense strand
gaggagcacaagagcguua

SEQ ID NO: 1340108 - RNA, 19 nt, Homo sapiens
  misc_RNA (1)...(19): siRNA sense strand
cagcagugaagaugaauuu

SEQ ID NO: 1340109 - RNA, 19 nt, Homo sapiens
  misc_RNA (1)...(19): siRNA sense strand
gaagaaagugaggaaguug

SEQ ID NO: 1340110 - RNA, 19 nt, Homo sapiens
  misc_RNA (1)...(19): siRNA sense strand
gcagugaagaugaauuuua

SEQ ID NO: 1340111 - RNA, 19 nt, Homo sapiens
  misc_RNA (1)...(19): siRNA sense strand
gagcauuagugaccagaag

SEQ ID NO: 1340112 - RNA, 19 nt, Homo sapiens
  misc_RNA (1)...(19): siRNA sense strand
guaguucuuccaacguuua

SEQ ID NO: 1340113 - RNA, 19 nt, Homo sapiens
  misc_RNA (1)...(19): siRNA sense strand
uggaagaucagaacgagua

SEQ ID NO: 1340114 - RNA, 19 nt, Homo sapiens
  misc_RNA (1)...(19): siRNA sense strand
ggacaucaucagacuccua

SEQ ID NO: 1340115 - RNA, 19 nt, Homo sapiens
  misc_RNA (1)...(19): siRNA sense strand
caagguuauuucaugaaga

SEQ ID NO: 1340116 - RNA, 19 nt, Homo sapiens
  misc_RNA (1)...(19): siRNA sense strand
acacuaaacccuucuaugg

SEQ ID NO: 1340117 - RNA, 19 nt, Homo sapiens
  misc_RNA (1)...(19): siRNA sense strand
gauaccacagaaucacuua

SEQ ID NO: 1340118 - RNA, 19 nt, Homo sapiens
  misc_RNA (1)...(19): siRNA sense strand
gcagaagcccgagaaagga

SEQ ID NO: 1340119 - RNA, 19 nt, Homo sapiens
  misc_RNA (1)...(19): siRNA sense strand
gugcaaauaucaucuucca

SEQ ID NO: 1340120 - RNA, 19 nt, Homo sapiens
  misc_RNA (1)...(19): siRNA sense strand
acaauucaaugcucauauc

SEQ ID NO: 1340121 - RNA, 19 nt, Homo sapiens
  misc_RNA (1)...(19): siRNA sense strand
gaagauacaauucaaugcu

SEQ ID NO: 1340122 - RNA, 19 nt, Homo sapiens
  misc_RNA (1)...(19): siRNA sense strand
gaugcugaccuguuugauu

SEQ ID NO: 1340123 - RNA, 19 nt, Homo sapiens
  misc_RNA (1)...(19): siRNA sense strand
cacgugaacuugucuccaa

SEQ ID NO: 1340124 - RNA, 19 nt, Homo sapiens
  misc_RNA (1)...(19): siRNA sense strand
ucaugaagauggagaaugc

SEQ ID NO: 1340125 - RNA, 19 nt, Homo sapiens
  misc_RNA (1)...(19): siRNA sense strand
uuaugaugcugaugaauuc

SEQ ID NO: 1340126 - RNA, 19 nt, Homo sapiens
  misc_RNA (1)...(19): siRNA sense strand
caucucuugucgcagguua

SEQ ID NO: 1340127 - RNA, 19 nt, Homo sapiens
  misc_RNA (1)...(19): siRNA sense strand
gguaguucuuccaacguuu

SEQ ID NO: 1340128 - RNA, 19 nt, Homo sapiens
  misc_RNA (1)...(19): siRNA sense strand
caaagcgcuuaauagauuc

SEQ ID NO: 1340129 - RNA, 19 nt, Homo sapiens
  misc_RNA (1)...(19): siRNA sense strand
caagugaugcugaccuguu

SEQ ID NO: 1340130 - RNA, 19 nt, Homo sapiens
  misc_RNA (1)...(19): siRNA sense strand
ugaugaaccauuacugaaa

SEQ ID NO: 1340131 - RNA, 19 nt, Homo sapiens
  misc_RNA (1)...(19): siRNA sense strand
gggcaagaagcacagaauu

SEQ ID NO: 1340132 - RNA, 19 nt, Homo sapiens
  misc_RNA (1)...(19): siRNA sense strand
cuuccaacguuuauucuug

SEQ ID NO: 1340133 - RNA, 19 nt, Homo sapiens
  misc_RNA (1)...(19): siRNA sense strand
agacuuggaauggaucuua

SEQ ID NO: 1340134 - RNA, 19 nt, Homo sapiens
  misc_RNA (1)...(19): siRNA sense strand
caagagcguuaucaugcau

SEQ ID NO: 1340135 - RNA, 19 nt, Homo sapiens
  misc_RNA (1)...(19): siRNA sense strand
aagugaugcugaccuguuu

SEQ ID NO: 1340136 - RNA, 19 nt, Homo sapiens
  misc_RNA (1)...(19): siRNA sense strand
augcugaccuguuugauuc

SEQ ID NO: 1340137 - RNA, 19 nt, Homo sapiens
  misc_RNA (1)...(19): siRNA sense strand
aaugcuggguuuaugauga

SEQ ID NO: 1340138 - RNA, 19 nt, Homo sapiens
  misc_RNA (1)...(19): siRNA sense strand
gaaguuggaagaucagaac

SEQ ID NO: 1340139 - RNA, 19 nt, Homo sapiens
  misc_RNA (1)...(19): siRNA sense strand
agacuaugaugaacauuac

SEQ ID NO: 1340140 - RNA, 19 nt, Homo sapiens
  misc_RNA (1)...(19): siRNA sense strand
agagaacacagaacuaguu

SEQ ID NO: 1340141 - RNA, 19 nt, Homo sapiens
  misc_RNA (1)...(19): siRNA sense strand
ucccaaggaucgaaugguu

SEQ ID NO: 1340142 - RNA, 19 nt, Homo sapiens
  misc_RNA (1)...(19): siRNA sense strand
ggaccuguuugugagcauu

SEQ ID NO: 1340143 - RNA, 19 nt, Homo sapiens
  misc_RNA (1)...(19): siRNA sense strand
ugauucacaugaugacaga

SEQ ID NO: 1340144 - RNA, 19 nt, Homo sapiens
  misc_RNA (1)...(19): siRNA sense strand
ccaaauacagucccagagu

SEQ ID NO: 1340145 - RNA, 19 nt, Homo sapiens
  misc_RNA (1)...(19): siRNA sense strand
uaugaugaaccauuacuga

SEQ ID NO: 1340146 - RNA, 19 nt, Homo sapiens
  misc_RNA (1)...(19): siRNA sense strand
ucaagaagaaagugaggaa

SEQ ID NO: 1340147 - RNA, 19 nt, Homo sapiens
  misc_RNA (1)...(19): siRNA sense strand
gguuagacuuggaauggau

SEQ ID NO: 1340148 - RNA, 19 nt, Homo sapiens
  misc_RNA (1)...(19): siRNA sense strand
gcacauccggaccuguuug

SEQ ID NO: 1340149 - RNA, 19 nt, Homo sapiens
  misc_RNA (1)...(19): siRNA sense strand
aaaggaaggagaaggaaau

SEQ ID NO: 1340150 - RNA, 19 nt, Homo sapiens
  misc_RNA (1)...(19): siRNA sense strand
ugaagagaacacagaacua

SEQ ID NO: 1340151 - RNA, 19 nt, Homo sapiens
  misc_RNA (1)...(19): siRNA sense strand
ggaaguuggaagaucagaa

SEQ ID NO: 1340152 - RNA, 19 nt, Homo sapiens
  misc_RNA (1)...(19): siRNA sense strand
aagaucagaacgaguauga

SEQ ID NO: 1340153 - RNA, 19 nt, Homo sapiens
  misc_RNA (1)...(19): siRNA sense strand
ggaggagaaugcaauauua

SEQ ID NO: 1340154 - RNA, 19 nt, Homo sapiens
  misc_RNA (1)...(19): siRNA sense strand
ccaaagcgcuuaauagauu

SEQ ID NO: 1340155 - RNA, 19 nt, Homo sapiens
  misc_RNA (1)...(19): siRNA sense strand
ggaugucacuuucaacuua

SEQ ID NO: 1340156 - RNA, 19 nt, Homo sapiens
  misc_RNA (1)...(19): siRNA sense strand
gaacuugucuccaaauaca

SEQ ID NO: 1340157 - RNA, 19 nt, Homo sapiens
  misc_RNA (1)...(19): siRNA sense strand
gcucauaucuggaccaaau

SEQ ID NO: 1340158 - RNA, 19 nt, Homo sapiens
  misc_RNA (1)...(19): siRNA sense strand
ggaaggaugucacuuucaa

SEQ ID NO: 1340159 - RNA, 19 nt, Homo sapiens
  misc_RNA (1)...(19): siRNA sense strand
gcacaggcuugaagaaaga

SEQ ID NO: 1340160 - RNA, 19 nt, Homo sapiens
  misc_RNA (1)...(19): siRNA sense strand
gaaaggaucaguugccaaa

SEQ ID NO: 1340161 - RNA, 19 nt, Homo sapiens
  misc_RNA (1)...(19): siRNA sense strand
gagacaagguuauuucaug

SEQ ID NO: 1340162 - RNA, 19 nt, Homo sapiens
  misc_RNA (1)...(19): siRNA sense strand
agaaauguaugcagacuuu

SEQ ID NO: 1340163 - RNA, 19 nt, Homo sapiens
  misc_RNA (1)...(19): siRNA sense strand
gaacacagaacuaguuuca

SEQ ID NO: 1340164 - RNA, 19 nt, Homo sapiens
  misc_RNA (1)...(19): siRNA sense strand
ggaauggaauggugugaug

SEQ ID NO: 1340165 - RNA, 19 nt, Homo sapiens
  misc_RNA (1)...(19): siRNA sense strand
acacagaacuaguuucaga

SEQ ID NO: 1340166 - RNA, 19 nt, Homo sapiens
  misc_RNA (1)...(19): siRNA sense strand
gaaguugccuauaaucaag

SEQ ID NO: 1340167 - RNA, 19 nt, Homo sapiens
  misc_RNA (1)...(19): siRNA sense strand
caaauacagucccagaguu

SEQ ID NO: 1340168 - RNA, 19 nt, Homo sapiens
  misc_RNA (1)...(19): siRNA sense strand
ccaagaaguugccuauaau

SEQ ID NO: 1340169 - RNA, 19 nt, Homo sapiens
  misc_RNA (1)...(19): siRNA sense strand
caaaugauacugaagagaa

SEQ ID NO: 1340170 - RNA, 19 nt, Homo sapiens
  misc_RNA (1)...(19): siRNA sense strand
ggcaagaagcacagaauua

SEQ ID NO: 1340171 - RNA, 19 nt, Homo sapiens
  misc_RNA (1)...(19): siRNA sense strand
ggagaaugcuggguuuaug

SEQ ID NO: 1340172 - RNA, 19 nt, Homo sapiens
  misc_RNA (1)...(19): siRNA sense strand
ggaaggagaaggaaauuca

SEQ ID NO: 1340173 - RNA, 19 nt, Homo sapiens
  misc_RNA (1)...(19): siRNA sense strand
cacagcagcucgggaaaua

SEQ ID NO: 1340174 - RNA, 19 nt, Homo sapiens
  misc_RNA (1)...(19): siRNA sense strand
gaaauucagugggagacaa

SEQ ID NO: 1340175 - RNA, 19 nt, Homo sapiens
  misc_RNA (1)...(19): siRNA sense strand
cagaauuacugccgagauu

SEQ ID NO: 1340176 - RNA, 19 nt, Homo sapiens
  misc_RNA (1)...(19): siRNA sense strand
ggaaggaaaggaucaguug

SEQ ID NO: 1340177 - RNA, 19 nt, Homo sapiens
  misc_RNA (1)...(19): siRNA sense strand
ggaauggugugauguaugc

SEQ ID NO: 1340178 - RNA, 19 nt, Homo sapiens
  misc_RNA (1)...(19): siRNA sense strand
gaaggucuauccucacagu

SEQ ID NO: 1340179 - RNA, 19 nt, Homo sapiens
  misc_RNA (1)...(19): siRNA sense strand
gcacaagagcguuaucaug

SEQ ID NO: 1340180 - RNA, 19 nt, Homo sapiens
  misc_RNA (1)...(19): siRNA sense strand
gauggagaaugcuggguuu

SEQ ID NO: 1340181 - RNA, 19 nt, Homo sapiens
  misc_RNA (1)...(19): siRNA sense strand
gaugucacuuucaacuuaa

SEQ ID NO: 1340182 - RNA, 19 nt, Homo sapiens
  misc_RNA (1)...(19): siRNA sense strand
accaagaaguugccuauaa

SEQ ID NO: 1340183 - RNA, 19 nt, Homo sapiens
  misc_RNA (1)...(19): siRNA sense strand
gaagagaacacagaacuag

SEQ ID NO: 1340184 - RNA, 19 nt, Homo sapiens
  misc_RNA (1)...(19): siRNA sense strand
agacaagguuauuucauga

SEQ ID NO: 1340185 - RNA, 19 nt, Homo sapiens
  misc_RNA (1)...(19): siRNA sense strand
gugaacuugucuccaaaua

SEQ ID NO: 1340186 - RNA, 19 nt, Homo sapiens
  misc_RNA (1)...(19): siRNA sense strand
aauaucaucuuccacacua

SEQ ID NO: 1340187 - RNA, 19 nt, Homo sapiens
  misc_RNA (1)...(19): siRNA sense strand
gaggagaaugcaauauuaa

SEQ ID NO: 1340188 - RNA, 19 nt, Homo sapiens
  misc_RNA (1)...(19): siRNA sense strand
gaugcaauauaucaaccua

SEQ ID NO: 1340189 - RNA, 19 nt, Homo sapiens
  misc_RNA (1)...(19): siRNA sense strand
gaaaggaaggagaaggaaa

SEQ ID NO: 1340190 - RNA, 19 nt, Homo sapiens
  misc_RNA (1)...(19): siRNA sense strand
ucccguagaugcaauauau

SEQ ID NO: 1340191 - RNA, 19 nt, Homo sapiens
  misc_RNA (1)...(19): siRNA sense strand
gaucagaacgaguaugaau

SEQ ID NO: 1340192 - RNA, 19 nt, Homo sapiens
  misc_RNA (1)...(19): siRNA sense strand
gcagggcugugucucaugu

SEQ ID NO: 1340193 - RNA, 19 nt, Homo sapiens
  misc_RNA (1)...(19): siRNA sense strand
ugaggaaguuggaagauca

SEQ ID NO: 1340194 - RNA, 19 nt, Homo sapiens
  misc_RNA (1)...(19): siRNA sense strand
ggaauuaggaggagaaugc

SEQ ID NO: 1340195 - RNA, 19 nt, Homo sapiens
  misc_RNA (1)...(19): siRNA sense strand
caacguuuauucuugaaag

SEQ ID NO: 1340196 - RNA, 19 nt, Homo sapiens
  misc_RNA (1)...(19): siRNA sense strand
gagaaaggaaggagaagga

SEQ ID NO: 1340197 - RNA, 19 nt, Homo sapiens
  misc_RNA (1)...(19): siRNA sense strand
agaagaaagugaggaaguu

SEQ ID NO: 1340198 - RNA, 19 nt, Homo sapiens
  misc_RNA (1)...(19): siRNA sense strand
gcaagaagcacagaauuac

SEQ ID NO: 1340199 - RNA, 19 nt, Homo sapiens
  misc_RNA (1)...(19): siRNA sense strand
gagaacacagaacuaguuu

SEQ ID NO: 1340200 - RNA, 19 nt, Homo sapiens
  misc_RNA (1)...(19): siRNA sense strand
agaacuaguuucagaagga

SEQ ID NO: 1340201 - RNA, 19 nt, Homo sapiens
  misc_RNA (1)...(19): siRNA sense strand
gaugaaccauuacugaaac

SEQ ID NO: 1340202 - RNA, 19 nt, Homo sapiens
  misc_RNA (1)...(19): siRNA sense strand
gagaaugcuggguuuauga

SEQ ID NO: 1340203 - RNA, 19 nt, Homo sapiens
  misc_RNA (1)...(19): siRNA sense strand
gaacauuacauucucacau

SEQ ID NO: 1340204 - RNA, 19 nt, Homo sapiens
  misc_RNA (1)...(19): siRNA sense strand
gaugaacauuacauucuca

SEQ ID NO: 1340205 - RNA, 19 nt, Homo sapiens
  misc_RNA (1)...(19): siRNA sense strand
gagcagguuucccaucauc

SEQ ID NO: 1340206 - RNA, 19 nt, Homo sapiens
  misc_RNA (1)...(19): siRNA sense strand
ucacuuaauucuuccuugu

SEQ ID NO: 1340207 - RNA, 19 nt, Homo sapiens
  misc_RNA (1)...(19): siRNA sense strand
gaggagcacaagagcguua

SEQ ID NO: 1340208 - RNA, 19 nt, Homo sapiens
  misc_RNA (1)...(19): siRNA sense strand
cagcagugaagaugaauuu

SEQ ID NO: 1340209 - RNA, 19 nt, Homo sapiens
  misc_RNA (1)...(19): siRNA sense strand
gaagaaagugaggaaguug

SEQ ID NO: 1340210 - RNA, 19 nt, Homo sapiens
  misc_RNA (1)...(19): siRNA sense strand
gcagugaagaugaauuuua

SEQ ID NO: 1340211 - RNA, 19 nt, Homo sapiens
  misc_RNA (1)...(19): siRNA sense strand
gagcauuagugaccagaag

SEQ ID NO: 1340212 - RNA, 19 nt, Homo sapiens
  misc_RNA (1)...(19): siRNA sense strand
guaguucuuccaacguuua

SEQ ID NO: 1340213 - RNA, 19 nt, Homo sapiens
  misc_RNA (1)...(19): siRNA sense strand
uggaagaucagaacgagua

SEQ ID NO: 1340214 - RNA, 19 nt, Homo sapiens
  misc_RNA (1)...(19): siRNA sense strand
ggacaucaucagacuccua

SEQ ID NO: 1340215 - RNA, 19 nt, Homo sapiens
  misc_RNA (1)...(19): siRNA sense strand
caagguuauuucaugaaga

SEQ ID NO: 1340216 - RNA, 19 nt, Homo sapiens
  misc_RNA (1)...(19): siRNA sense strand
acacuaaacccuucuaugg

SEQ ID NO: 1340217 - RNA, 19 nt, Homo sapiens
  misc_RNA (1)...(19): siRNA sense strand
gauaccacagaaucacuua

SEQ ID NO: 1340218 - RNA, 19 nt, Homo sapiens
  misc_RNA (1)...(19): siRNA sense strand
gcagaagcccgagaaagga

SEQ ID NO: 1340219 - RNA, 19 nt, Homo sapiens
  misc_RNA (1)...(19): siRNA sense strand
gugcaaauaucaucuucca

SEQ ID NO: 1340220 - RNA, 19 nt, Homo sapiens
  misc_RNA (1)...(19): siRNA sense strand
acaauucaaugcucauauc

SEQ ID NO: 1340221 - RNA, 19 nt, Homo sapiens
  misc_RNA (1)...(19): siRNA sense strand
gaagauacaauucaaugcu

SEQ ID NO: 1340222 - RNA, 19 nt, Homo sapiens
  misc_RNA (1)...(19): siRNA sense strand
gaugcugaccuguuugauu

SEQ ID NO: 1340223 - RNA, 19 nt, Homo sapiens
  misc_RNA (1)...(19): siRNA sense strand
cacgugaacuugucuccaa

SEQ ID NO: 1340224 - RNA, 19 nt, Homo sapiens
  misc_RNA (1)...(19): siRNA sense strand
ucaugaagauggagaaugc

SEQ ID NO: 1340225 - RNA, 19 nt, Homo sapiens
  misc_RNA (1)...(19): siRNA sense strand
uuaugaugcugaugaauuc

SEQ ID NO: 1340226 - RNA, 19 nt, Homo sapiens
  misc_RNA (1)...(19): siRNA sense strand
caucucuugucgcagguua

SEQ ID NO: 1340227 - RNA, 19 nt, Homo sapiens
  misc_RNA (1)...(19): siRNA sense strand
gguaguucuuccaacguuu

SEQ ID NO: 1340228 - RNA, 19 nt, Homo sapiens
  misc_RNA (1)...(19): siRNA sense strand
caaagcgcuuaauagauuc

SEQ ID NO: 1340229 - RNA, 19 nt, Homo sapiens
  misc_RNA (1)...(19): siRNA sense strand
caagugaugcugaccuguu

SEQ ID NO: 1340230 - RNA, 19 nt, Homo sapiens
  misc_RNA (1)...(19): siRNA sense strand
ugaugaaccauuacugaaa

SEQ ID NO: 1340231 - RNA, 19 nt, Homo sapiens
  misc_RNA (1)...(19): siRNA sense strand
gggcaagaagcacagaauu

SEQ ID NO: 1340232 - RNA, 19 nt, Homo sapiens
  misc_RNA (1)...(19): siRNA sense strand
cuuccaacguuuauucuug

SEQ ID NO: 1340233 - RNA, 19 nt, Homo sapiens
  misc_RNA (1)...(19): siRNA sense strand
agacuuggaauggaucuua

SEQ ID NO: 1340234 - RNA, 19 nt, Homo sapiens
  misc_RNA (1)...(19): siRNA sense strand
caagagcguuaucaugcau

SEQ ID NO: 1340235 - RNA, 19 nt, Homo sapiens
  misc_RNA (1)...(19): siRNA sense strand
aagugaugcugaccuguuu

SEQ ID NO: 1340236 - RNA, 19 nt, Homo sapiens
  misc_RNA (1)...(19): siRNA sense strand
augcugaccuguuugauuc

SEQ ID NO: 1340237 - RNA, 19 nt, Homo sapiens
  misc_RNA (1)...(19): siRNA sense strand
aaugcuggguuuaugauga

SEQ ID NO: 1340238 - RNA, 19 nt, Homo sapiens
  misc_RNA (1)...(19): siRNA sense strand
gaaguuggaagaucagaac

SEQ ID NO: 1340239 - RNA, 19 nt, Homo sapiens
  misc_RNA (1)...(19): siRNA sense strand
agacuaugaugaacauuac

SEQ ID NO: 1340240 - RNA, 19 nt, Homo sapiens
  misc_RNA (1)...(19): siRNA sense strand
agagaacacagaacuaguu

SEQ ID NO: 1340241 - RNA, 19 nt, Homo sapiens
  misc_RNA (1)...(19): siRNA sense strand
ucccaaggaucgaaugguu

SEQ ID NO: 1340242 - RNA, 19 nt, Homo sapiens
  misc_RNA (1)...(19): siRNA sense strand
ggaccuguuugugagcauu

SEQ ID NO: 1340243 - RNA, 19 nt, Homo sapiens
  misc_RNA (1)...(19): siRNA sense strand
ugauucacaugaugacaga

SEQ ID NO: 1340244 - RNA, 19 nt, Homo sapiens
  misc_RNA (1)...(19): siRNA sense strand
ccaaauacagucccagagu

SEQ ID NO: 1340245 - RNA, 19 nt, Homo sapiens
  misc_RNA (1)...(19): siRNA sense strand
uaugaugaaccauuacuga

SEQ ID NO: 1340246 - RNA, 19 nt, Homo sapiens
  misc_RNA (1)...(19): siRNA sense strand
ucaagaagaaagugaggaa

SEQ ID NO: 1340247 - RNA, 19 nt, Homo sapiens
  misc_RNA (1)...(19): siRNA sense strand
gguuagacuuggaauggau

SEQ ID NO: 1340248 - RNA, 19 nt, Homo sapiens
  misc_RNA (1)...(19): siRNA sense strand
gcacauccggaccuguuug

SEQ ID NO: 1340249 - RNA, 19 nt, Homo sapiens
  misc_RNA (1)...(19): siRNA sense strand
aaaggaaggagaaggaaau

SEQ ID NO: 1340250 - RNA, 19 nt, Homo sapiens
  misc_RNA (1)...(19): siRNA sense strand
ugaagagaacacagaacua

SEQ ID NO: 1340251 - RNA, 19 nt, Homo sapiens
  misc_RNA (1)...(19): siRNA sense strand
ggaaguuggaagaucagaa

SEQ ID NO: 1340252 - RNA, 19 nt, Homo sapiens
  misc_RNA (1)...(19): siRNA sense strand
aagaucagaacgaguauga

SEQ ID NO: 1340253 - RNA, 19 nt, Homo sapiens
  misc_RNA (1)...(19): siRNA sense strand
ggaggagaaugcaauauua

SEQ ID NO: 1340254 - RNA, 19 nt, Homo sapiens
  misc_RNA (1)...(19): siRNA sense strand
ccaaagcgcuuaauagauu

SEQ ID NO: 1340255 - RNA, 19 nt, Homo sapiens
  misc_RNA (1)...(19): siRNA sense strand
ggaugucacuuucaacuua

SEQ ID NO: 1340256 - RNA, 19 nt, Homo sapiens
  misc_RNA (1)...(19): siRNA sense strand
caaagaagaugaacagaga

SEQ ID NO: 1340257 - RNA, 19 nt, Homo sapiens
  misc_RNA (1)...(19): siRNA sense strand
gaacuugucuccaaauaca

SEQ ID NO: 1340258 - RNA, 19 nt, Homo sapiens
  misc_RNA (1)...(19): siRNA sense strand
gcucauaucuggaccaaau

SEQ ID NO: 1340259 - RNA, 19 nt, Homo sapiens
  misc_RNA (1)...(19): siRNA sense strand
ggaaggaugucacuuucaa

SEQ ID NO: 1340260 - RNA, 19 nt, Homo sapiens
  misc_RNA (1)...(19): siRNA sense strand
gcacaggcuugaagaaaga

SEQ ID NO: 1340261 - RNA, 19 nt, Homo sapiens
  misc_RNA (1)...(19): siRNA sense strand
gaaaggaucaguugccaaa

SEQ ID NO: 1340262 - RNA, 19 nt, Homo sapiens
  misc_RNA (1)...(19): siRNA sense strand
gagacaagguuauuucaug

SEQ ID NO: 1340263 - RNA, 19 nt, Homo sapiens
  misc_RNA (1)...(19): siRNA sense strand
agaaauguaugcagacuuu

SEQ ID NO: 1340264 - RNA, 19 nt, Homo sapiens
  misc_RNA (1)...(19): siRNA sense strand
gaacacagaacuaguuuca

SEQ ID NO: 1340265 - RNA, 19 nt, Homo sapiens
  misc_RNA (1)...(19): siRNA sense strand
ggaauggaauggugugaug

SEQ ID NO: 1340266 - RNA, 19 nt, Homo sapiens
  misc_RNA (1)...(19): siRNA sense strand
acacagaacuaguuucaga

SEQ ID NO: 1340267 - RNA, 19 nt, Homo sapiens
  misc_RNA (1)...(19): siRNA sense strand
gaaguugccuauaaucaag

SEQ ID NO: 1340268 - RNA, 19 nt, Homo sapiens
  misc_RNA (1)...(19): siRNA sense strand
caaauacagucccagaguu

SEQ ID NO: 1340269 - RNA, 19 nt, Homo sapiens
  misc_RNA (1)...(19): siRNA sense strand
ccaagaaguugccuauaau

SEQ ID NO: 1340270 - RNA, 19 nt, Homo sapiens
  misc_RNA (1)...(19): siRNA sense strand
gacaacaaauagcauggua

SEQ ID NO: 1340271 - RNA, 19 nt, Homo sapiens
  misc_RNA (1)...(19): siRNA sense strand
caaaugauacugaagagaa

SEQ ID NO: 1340272 - RNA, 19 nt, Homo sapiens
  misc_RNA (1)...(19): siRNA sense strand
ggcaagaagcacagaauua

SEQ ID NO: 1340273 - RNA, 19 nt, Homo sapiens
  misc_RNA (1)...(19): siRNA sense strand
ggagaaugcuggguuuaug

SEQ ID NO: 1340274 - RNA, 19 nt, Homo sapiens
  misc_RNA (1)...(19): siRNA sense strand
caaauagcaugguagaauc

SEQ ID NO: 1340275 - RNA, 19 nt, Homo sapiens
  misc_RNA (1)...(19): siRNA sense strand
ggaaggagaaggaaauuca

SEQ ID NO: 1340276 - RNA, 19 nt, Homo sapiens
  misc_RNA (1)...(19): siRNA sense strand
gaagaugaacagagaaaga

SEQ ID NO: 1340277 - RNA, 19 nt, Homo sapiens
  misc_RNA (1)...(19): siRNA sense strand
cacagcagcucgggaaaua

SEQ ID NO: 1340278 - RNA, 19 nt, Homo sapiens
  misc_RNA (1)...(19): siRNA sense strand
gaaauucagugggagacaa

SEQ ID NO: 1340279 - RNA, 19 nt, Homo sapiens
  misc_RNA (1)...(19): siRNA sense strand
cagaauuacugccgagauu

SEQ ID NO: 1340280 - RNA, 19 nt, Homo sapiens
  misc_RNA (1)...(19): siRNA sense strand
ggaaggaaaggaucaguug

SEQ ID NO: 1340281 - RNA, 19 nt, Homo sapiens
  misc_RNA (1)...(19): siRNA sense strand
ggaauggugugauguaugc

SEQ ID NO: 1340282 - RNA, 19 nt, Homo sapiens
  misc_RNA (1)...(19): siRNA sense strand
gaaggucuauccucacagu

SEQ ID NO: 1340283 - RNA, 19 nt, Homo sapiens
  misc_RNA (1)...(19): siRNA sense strand
gcacaagagcguuaucaug

SEQ ID NO: 1340284 - RNA, 19 nt, Homo sapiens
  misc_RNA (1)...(19): siRNA sense strand
gauggagaaugcuggguuu

SEQ ID NO: 1340285 - RNA, 19 nt, Homo sapiens
  misc_RNA (1)...(19): siRNA sense strand
gaugucacuuucaacuuaa

SEQ ID NO: 1340286 - RNA, 19 nt, Homo sapiens
  misc_RNA (1)...(19): siRNA sense strand
gaacagagaaagaaaauug

SEQ ID NO: 1340287 - RNA, 19 nt, Homo sapiens
  misc_RNA (1)...(19): siRNA sense strand
ucaaagagacaacaaauag

SEQ ID NO: 1340288 - RNA, 19 nt, Homo sapiens
  misc_RNA (1)...(19): siRNA sense strand
accaagaaguugccuauaa

SEQ ID NO: 1340289 - RNA, 19 nt, Homo sapiens
  misc_RNA (1)...(19): siRNA sense strand
gaagagaacacagaacuag

SEQ ID NO: 1340290 - RNA, 19 nt, Homo sapiens
  misc_RNA (1)...(19): siRNA sense strand
agacaagguuauuucauga

SEQ ID NO: 1340291 - RNA, 19 nt, Homo sapiens
  misc_RNA (1)...(19): siRNA sense strand
gugaacuugucuccaaaua

SEQ ID NO: 1340292 - RNA, 19 nt, Homo sapiens
  misc_RNA (1)...(19): siRNA sense strand
aauaucaucuuccacacua

SEQ ID NO: 1340293 - RNA, 19 nt, Homo sapiens
  misc_RNA (1)...(19): siRNA sense strand
gaggagaaugcaauauuaa

SEQ ID NO: 1340294 - RNA, 19 nt, Homo sapiens
  misc_RNA (1)...(19): siRNA sense strand
gaugcaauauaucaaccua

SEQ ID NO: 1340295 - RNA, 19 nt, Homo sapiens
  misc_RNA (1)...(19): siRNA sense strand
gaaaggaaggagaaggaaa

SEQ ID NO: 1340296 - RNA, 19 nt, Homo sapiens
  misc_RNA (1)...(19): siRNA sense strand
ucccguagaugcaauauau

SEQ ID NO: 1340297 - RNA, 19 nt, Homo sapiens
  misc_RNA (1)...(19): siRNA sense strand
gaucagaacgaguaugaau

SEQ ID NO: 1340298 - RNA, 19 nt, Homo sapiens
  misc_RNA (1)...(19): siRNA sense strand
caacaaauagcaugguaga

SEQ ID NO: 1340299 - RNA, 19 nt, Homo sapiens
  misc_RNA (1)...(19): siRNA sense strand
gcagggcugugucucaugu

SEQ ID NO: 1340300 - RNA, 19 nt, Homo sapiens
  misc_RNA (1)...(19): siRNA sense strand
ugaggaaguuggaagauca

SEQ ID NO: 1340301 - RNA, 19 nt, Homo sapiens
  misc_RNA (1)...(19): siRNA sense strand
ggaauuaggaggagaaugc

SEQ ID NO: 1340302 - RNA, 19 nt, Homo sapiens
  misc_RNA (1)...(19): siRNA sense strand
caacguuuauucuugaaag

SEQ ID NO: 1340303 - RNA, 19 nt, Homo sapiens
  misc_RNA (1)...(19): siRNA sense strand
gagaaaggaaggagaagga

SEQ ID NO: 1340304 - RNA, 19 nt, Homo sapiens
  misc_RNA (1)...(19): siRNA sense strand
agaagaaagugaggaaguu

SEQ ID NO: 1340305 - RNA, 19 nt, Homo sapiens
  misc_RNA (1)...(19): siRNA sense strand
gcaagaagcacagaauuac

SEQ ID NO: 1340306 - RNA, 19 nt, Homo sapiens
  misc_RNA (1)...(19): siRNA sense strand
gagaacacagaacuaguuu

SEQ ID NO: 1340307 - RNA, 19 nt, Homo sapiens
  misc_RNA (1)...(19): siRNA sense strand
agaacuaguuucagaagga

SEQ ID NO: 1340308 - RNA, 19 nt, Homo sapiens
  misc_RNA (1)...(19): siRNA sense strand
gaugaaccauuacugaaac

SEQ ID NO: 1340309 - RNA, 19 nt, Homo sapiens
  misc_RNA (1)...(19): siRNA sense strand
gagaaugcuggguuuauga

SEQ ID NO: 1340310 - RNA, 19 nt, Homo sapiens
  misc_RNA (1)...(19): siRNA sense strand
gaacauuacauucucacau

SEQ ID NO: 1340311 - RNA, 19 nt, Homo sapiens
  misc_RNA (1)...(19): siRNA sense strand
gaugaacauuacauucuca

SEQ ID NO: 1340312 - RNA, 19 nt, Homo sapiens
  misc_RNA (1)...(19): siRNA sense strand
gagcagguuucccaucauc

SEQ ID NO: 1340313 - RNA, 19 nt, Homo sapiens
  misc_RNA (1)...(19): siRNA sense strand
ucacuuaauucuuccuugu

SEQ ID NO: 1340314 - RNA, 19 nt, Homo sapiens
  misc_RNA (1)...(19): siRNA sense strand
gaggagcacaagagcguua

SEQ ID NO: 1340315 - RNA, 19 nt, Homo sapiens
  misc_RNA (1)...(19): siRNA sense strand
cagcagugaagaugaauuu

SEQ ID NO: 1340316 - RNA, 19 nt, Homo sapiens
  misc_RNA (1)...(19): siRNA sense strand
gaagaaagugaggaaguug

SEQ ID NO: 1340317 - RNA, 19 nt, Homo sapiens
  misc_RNA (1)...(19): siRNA sense strand
gcagugaagaugaauuuua

SEQ ID NO: 1340318 - RNA, 19 nt, Homo sapiens
  misc_RNA (1)...(19): siRNA sense strand
gagcauuagugaccagaag

SEQ ID NO: 1340319 - RNA, 19 nt, Homo sapiens
  misc_RNA (1)...(19): siRNA sense strand
guaguucuuccaacguuua

SEQ ID NO: 1340320 - RNA, 19 nt, Homo sapiens
  misc_RNA (1)...(19): siRNA sense strand
uggaagaucagaacgagua

SEQ ID NO: 1340321 - RNA, 19 nt, Homo sapiens
  misc_RNA (1)...(19): siRNA sense strand
ggacaucaucagacuccua

SEQ ID NO: 1340322 - RNA, 19 nt, Homo sapiens
  misc_RNA (1)...(19): siRNA sense strand
caagguuauuucaugaaga

SEQ ID NO: 1340323 - RNA, 19 nt, Homo sapiens
  misc_RNA (1)...(19): siRNA sense strand
acacuaaacccuucuaugg

SEQ ID NO: 1340324 - RNA, 19 nt, Homo sapiens
  misc_RNA (1)...(19): siRNA sense strand
gauaccacagaaucacuua

SEQ ID NO: 1340325 - RNA, 19 nt, Homo sapiens
  misc_RNA (1)...(19): siRNA sense strand
gcagaagcccgagaaagga

SEQ ID NO: 1340326 - RNA, 19 nt, Homo sapiens
  misc_RNA (1)...(19): siRNA sense strand
acaaauagcaugguagaau

SEQ ID NO: 1340327 - RNA, 19 nt, Homo sapiens
  misc_RNA (1)...(19): siRNA sense strand
gugcaaauaucaucuucca

SEQ ID NO: 1340328 - RNA, 19 nt, Homo sapiens
  misc_RNA (1)...(19): siRNA sense strand
acaauucaaugcucauauc

SEQ ID NO: 1340329 - RNA, 19 nt, Homo sapiens
  misc_RNA (1)...(19): siRNA sense strand
gaagauacaauucaaugcu

SEQ ID NO: 1340330 - RNA, 19 nt, Homo sapiens
  misc_RNA (1)...(19): siRNA sense strand
gaugcugaccuguuugauu

SEQ ID NO: 1340331 - RNA, 19 nt, Homo sapiens
  misc_RNA (1)...(19): siRNA sense strand
cacgugaacuugucuccaa

SEQ ID NO: 1340332 - RNA, 19 nt, Homo sapiens
  misc_RNA (1)...(19): siRNA sense strand
ucaugaagauggagaaugc

SEQ ID NO: 1340333 - RNA, 19 nt, Homo sapiens
  misc_RNA (1)...(19): siRNA sense strand
uuaugaugcugaugaauuc

SEQ ID NO: 1340334 - RNA, 19 nt, Homo sapiens
  misc_RNA (1)...(19): siRNA sense strand
caucucuugucgcagguua

SEQ ID NO: 1340335 - RNA, 19 nt, Homo sapiens
  misc_RNA (1)...(19): siRNA sense strand
gguaguucuuccaacguuu

SEQ ID NO: 1340336 - RNA, 19 nt, Homo sapiens
  misc_RNA (1)...(19): siRNA sense strand
caaagcgcuuaauagauuc

SEQ ID NO: 1340337 - RNA, 19 nt, Homo sapiens
  misc_RNA (1)...(19): siRNA sense strand
caagugaugcugaccuguu

SEQ ID NO: 1340338 - RNA, 19 nt, Homo sapiens
  misc_RNA (1)...(19): siRNA sense strand
ugaugaaccauuacugaaa

SEQ ID NO: 1340339 - RNA, 19 nt, Homo sapiens
  misc_RNA (1)...(19): siRNA sense strand
gggcaagaagcacagaauu

SEQ ID NO: 1340340 - RNA, 19 nt, Homo sapiens
  misc_RNA (1)...(19): siRNA sense strand
cuuccaacguuuauucuug

SEQ ID NO: 1340341 - RNA, 19 nt, Homo sapiens
  misc_RNA (1)...(19): siRNA sense strand
agacuuggaauggaucuua

SEQ ID NO: 1340342 - RNA, 19 nt, Homo sapiens
  misc_RNA (1)...(19): siRNA sense strand
caagagcguuaucaugcau

SEQ ID NO: 1340343 - RNA, 19 nt, Homo sapiens
  misc_RNA (1)...(19): siRNA sense strand
aagugaugcugaccuguuu

SEQ ID NO: 1340344 - RNA, 19 nt, Homo sapiens
  misc_RNA (1)...(19): siRNA sense strand
augcugaccuguuugauuc

SEQ ID NO: 1340345 - RNA, 19 nt, Homo sapiens
  misc_RNA (1)...(19): siRNA sense strand
aaugcuggguuuaugauga

SEQ ID NO: 1340346 - RNA, 19 nt, Homo sapiens
  misc_RNA (1)...(19): siRNA sense strand
gaaguuggaagaucagaac

SEQ ID NO: 1340347 - RNA, 19 nt, Homo sapiens
  misc_RNA (1)...(19): siRNA sense strand
agacuaugaugaacauuac

SEQ ID NO: 1340348 - RNA, 19 nt, Homo sapiens
  misc_RNA (1)...(19): siRNA sense strand
agagaacacagaacuaguu

SEQ ID NO: 1340349 - RNA, 19 nt, Homo sapiens
  misc_RNA (1)...(19): siRNA sense strand
ucccaaggaucgaaugguu

SEQ ID NO: 1340350 - RNA, 19 nt, Homo sapiens
  misc_RNA (1)...(19): siRNA sense strand
ggaccuguuugugagcauu

SEQ ID NO: 1340351 - RNA, 19 nt, Homo sapiens
  misc_RNA (1)...(19): siRNA sense strand
ugauucacaugaugacaga

SEQ ID NO: 1340352 - RNA, 19 nt, Homo sapiens
  misc_RNA (1)...(19): siRNA sense strand
uaugaugaaccauuacuga

SEQ ID NO: 1340353 - RNA, 19 nt, Homo sapiens
  misc_RNA (1)...(19): siRNA sense strand
ggaggagaaugcaauauua

SEQ ID NO: 1340354 - RNA, 19 nt, Homo sapiens
  misc_RNA (1)...(19): siRNA sense strand
ccaaagcgcuuaauagauu

SEQ ID NO: 1340355 - RNA, 19 nt, Homo sapiens
  misc_RNA (1)...(19): siRNA sense strand
ggaugucacuuucaacuua

SEQ ID NO: 1340356 - RNA, 19 nt, Homo sapiens
  misc_RNA (1)...(19): siRNA sense strand
caaagaagaugaacagaga

SEQ ID NO: 1340357 - RNA, 19 nt, Homo sapiens
  misc_RNA (1)...(19): siRNA sense strand
gaacuugucuccaaauaca

SEQ ID NO: 1340358 - RNA, 19 nt, Homo sapiens
  misc_RNA (1)...(19): siRNA sense strand
gcucauaucuggaccaaau

SEQ ID NO: 1340359 - RNA, 19 nt, Homo sapiens
  misc_RNA (1)...(19): siRNA sense strand
ggaaggaugucacuuucaa

SEQ ID NO: 1340360 - RNA, 19 nt, Homo sapiens
  misc_RNA (1)...(19): siRNA sense strand
gcacaggcuugaagaaaga

SEQ ID NO: 1340361 - RNA, 19 nt, Homo sapiens
  misc_RNA (1)...(19): siRNA sense strand
gaaaggaucaguugccaaa

SEQ ID NO: 1340362 - RNA, 19 nt, Homo sapiens
  misc_RNA (1)...(19): siRNA sense strand
gagacaagguuauuucaug

SEQ ID NO: 1340363 - RNA, 19 nt, Homo sapiens
  misc_RNA (1)...(19): siRNA sense strand
agaaauguaugcagacuuu

SEQ ID NO: 1340364 - RNA, 19 nt, Homo sapiens
  misc_RNA (1)...(19): siRNA sense strand
gaacacagaacuaguuuca

SEQ ID NO: 1340365 - RNA, 19 nt, Homo sapiens
  misc_RNA (1)...(19): siRNA sense strand
ggaauggaauggugugaug

SEQ ID NO: 1340366 - RNA, 19 nt, Homo sapiens
  misc_RNA (1)...(19): siRNA sense strand
acacagaacuaguuucaga

SEQ ID NO: 1340367 - RNA, 19 nt, Homo sapiens
  misc_RNA (1)...(19): siRNA sense strand
gaaguugccuauaaucaag

SEQ ID NO: 1340368 - RNA, 19 nt, Homo sapiens
  misc_RNA (1)...(19): siRNA sense strand
caaauacagucccagaguu

SEQ ID NO: 1340369 - RNA, 19 nt, Homo sapiens
  misc_RNA (1)...(19): siRNA sense strand
ccaagaaguugccuauaau

SEQ ID NO: 1340370 - RNA, 19 nt, Homo sapiens
  misc_RNA (1)...(19): siRNA sense strand
gacaacaaauagcauggua

SEQ ID NO: 1340371 - RNA, 19 nt, Homo sapiens
  misc_RNA (1)...(19): siRNA sense strand
caaaugauacugaagagaa

SEQ ID NO: 1340372 - RNA, 19 nt, Homo sapiens
  misc_RNA (1)...(19): siRNA sense strand
ggcaagaagcacagaauua

SEQ ID NO: 1340373 - RNA, 19 nt, Homo sapiens
  misc_RNA (1)...(19): siRNA sense strand
ggagaaugcuggguuuaug

SEQ ID NO: 1340374 - RNA, 19 nt, Homo sapiens
  misc_RNA (1)...(19): siRNA sense strand
caaauagcaugguagaauc

SEQ ID NO: 1340375 - RNA, 19 nt, Homo sapiens
  misc_RNA (1)...(19): siRNA sense strand
ggaaggagaaggaaauuca

SEQ ID NO: 1340376 - RNA, 19 nt, Homo sapiens
  misc_RNA (1)...(19): siRNA sense strand
gaagaugaacagagaaaga

SEQ ID NO: 1340377 - RNA, 19 nt, Homo sapiens
  misc_RNA (1)...(19): siRNA sense strand
cacagcagcucgggaaaua

SEQ ID NO: 1340378 - RNA, 19 nt, Homo sapiens
  misc_RNA (1)...(19): siRNA sense strand
gaaauucagugggagacaa

SEQ ID NO: 1340379 - RNA, 19 nt, Homo sapiens
  misc_RNA (1)...(19): siRNA sense strand
cagaauuacugccgagauu

SEQ ID NO: 1340380 - RNA, 19 nt, Homo sapiens
  misc_RNA (1)...(19): siRNA sense strand
ggaaggaaaggaucaguug

SEQ ID NO: 1340381 - RNA, 19 nt, Homo sapiens
  misc_RNA (1)...(19): siRNA sense strand
ggaauggugugauguaugc

SEQ ID NO: 1340382 - RNA, 19 nt, Homo sapiens
  misc_RNA (1)...(19): siRNA sense strand
gaaggucuauccucacagu

SEQ ID NO: 1340383 - RNA, 19 nt, Homo sapiens
  misc_RNA (1)...(19): siRNA sense strand
gcacaagagcguuaucaug

SEQ ID NO: 1340384 - RNA, 19 nt, Homo sapiens
  misc_RNA (1)...(19): siRNA sense strand
gauggagaaugcuggguuu

SEQ ID NO: 1340385 - RNA, 19 nt, Homo sapiens
  misc_RNA (1)...(19): siRNA sense strand
gaugucacuuucaacuuaa

SEQ ID NO: 1340386 - RNA, 19 nt, Homo sapiens
  misc_RNA (1)...(19): siRNA sense strand
gaacagagaaagaaaauug

SEQ ID NO: 1340387 - RNA, 19 nt, Homo sapiens
  misc_RNA (1)...(19): siRNA sense strand
ucaaagagacaacaaauag

SEQ ID NO: 1340388 - RNA, 19 nt, Homo sapiens
  misc_RNA (1)...(19): siRNA sense strand
accaagaaguugccuauaa

SEQ ID NO: 1340389 - RNA, 19 nt, Homo sapiens
  misc_RNA (1)...(19): siRNA sense strand
gaagagaacacagaacuag

SEQ ID NO: 1340390 - RNA, 19 nt, Homo sapiens
  misc_RNA (1)...(19): siRNA sense strand
agacaagguuauuucauga

SEQ ID NO: 1340391 - RNA, 19 nt, Homo sapiens
  misc_RNA (1)...(19): siRNA sense strand
gugaacuugucuccaaaua

SEQ ID NO: 1340392 - RNA, 19 nt, Homo sapiens
  misc_RNA (1)...(19): siRNA sense strand
aauaucaucuuccacacua

SEQ ID NO: 1340393 - RNA, 19 nt, Homo sapiens
  misc_RNA (1)...(19): siRNA sense strand
gaggagaaugcaauauuaa

SEQ ID NO: 1340394 - RNA, 19 nt, Homo sapiens
  misc_RNA (1)...(19): siRNA sense strand
gaugcaauauaucaaccua

SEQ ID NO: 1340395 - RNA, 19 nt, Homo sapiens
  misc_RNA (1)...(19): siRNA sense strand
gaaaggaaggagaaggaaa

SEQ ID NO: 1340396 - RNA, 19 nt, Homo sapiens
  misc_RNA (1)...(19): siRNA sense strand
ucccguagaugcaauauau

SEQ ID NO: 1340397 - RNA, 19 nt, Homo sapiens
  misc_RNA (1)...(19): siRNA sense strand
gaucagaacgaguaugaau

SEQ ID NO: 1340398 - RNA, 19 nt, Homo sapiens
  misc_RNA (1)...(19): siRNA sense strand
caacaaauagcaugguaga

SEQ ID NO: 1340399 - RNA, 19 nt, Homo sapiens
  misc_RNA (1)...(19): siRNA sense strand
gcagggcugugucucaugu

SEQ ID NO: 1340400 - RNA, 19 nt, Homo sapiens
  misc_RNA (1)...(19): siRNA sense strand
ugaggaaguuggaagauca

SEQ ID NO: 1340401 - RNA, 19 nt, Homo sapiens
  misc_RNA (1)...(19): siRNA sense strand
ggaauuaggaggagaaugc

SEQ ID NO: 1340402 - RNA, 19 nt, Homo sapiens
  misc_RNA (1)...(19): siRNA sense strand
caacguuuauucuugaaag

SEQ ID NO: 1340403 - RNA, 19 nt, Homo sapiens
  misc_RNA (1)...(19): siRNA sense strand
gagaaaggaaggagaagga

SEQ ID NO: 1340404 - RNA, 19 nt, Homo sapiens
  misc_RNA (1)...(19): siRNA sense strand
agaagaaagugaggaaguu

SEQ ID NO: 1340405 - RNA, 19 nt, Homo sapiens
  misc_RNA (1)...(19): siRNA sense strand
gcaagaagcacagaauuac

SEQ ID NO: 1340406 - RNA, 19 nt, Homo sapiens
  misc_RNA (1)...(19): siRNA sense strand
gagaacacagaacuaguuu

SEQ ID NO: 1340407 - RNA, 19 nt, Homo sapiens
  misc_RNA (1)...(19): siRNA sense strand
agaacuaguuucagaagga

SEQ ID NO: 1340408 - RNA, 19 nt, Homo sapiens
  misc_RNA (1)...(19): siRNA sense strand
gaugaaccauuacugaaac

SEQ ID NO: 1340409 - RNA, 19 nt, Homo sapiens
  misc_RNA (1)...(19): siRNA sense strand
gagaaugcuggguuuauga

SEQ ID NO: 1340410 - RNA, 19 nt, Homo sapiens
  misc_RNA (1)...(19): siRNA sense strand
gaacauuacauucucacau

SEQ ID NO: 1340411 - RNA, 19 nt, Homo sapiens
  misc_RNA (1)...(19): siRNA sense strand
gaugaacauuacauucuca

SEQ ID NO: 1340412 - RNA, 19 nt, Homo sapiens
  misc_RNA (1)...(19): siRNA sense strand
gagcagguuucccaucauc

SEQ ID NO: 1340413 - RNA, 19 nt, Homo sapiens
  misc_RNA (1)...(19): siRNA sense strand
ucacuuaauucuuccuugu

SEQ ID NO: 1340414 - RNA, 19 nt, Homo sapiens
  misc_RNA (1)...(19): siRNA sense strand
gaggagcacaagagcguua

SEQ ID NO: 1340415 - RNA, 19 nt, Homo sapiens
  misc_RNA (1)...(19): siRNA sense strand
cagcagugaagaugaauuu

SEQ ID NO: 1340416 - RNA, 19 nt, Homo sapiens
  misc_RNA (1)...(19): siRNA sense strand
gaagaaagugaggaaguug

SEQ ID NO: 1340417 - RNA, 19 nt, Homo sapiens
  misc_RNA (1)...(19): siRNA sense strand
gcagugaagaugaauuuua

SEQ ID NO: 1340418 - RNA, 19 nt, Homo sapiens
  misc_RNA (1)...(19): siRNA sense strand
gagcauuagugaccagaag

SEQ ID NO: 1340419 - RNA, 19 nt, Homo sapiens
  misc_RNA (1)...(19): siRNA sense strand
guaguucuuccaacguuua

SEQ ID NO: 1340420 - RNA, 19 nt, Homo sapiens
  misc_RNA (1)...(19): siRNA sense strand
uggaagaucagaacgagua

SEQ ID NO: 1340421 - RNA, 19 nt, Homo sapiens
  misc_RNA (1)...(19): siRNA sense strand
ggacaucaucagacuccua

SEQ ID NO: 1340422 - RNA, 19 nt, Homo sapiens
  misc_RNA (1)...(19): siRNA sense strand
caagguuauuucaugaaga

SEQ ID NO: 1340423 - RNA, 19 nt, Homo sapiens
  misc_RNA (1)...(19): siRNA sense strand
acacuaaacccuucuaugg

SEQ ID NO: 1340424 - RNA, 19 nt, Homo sapiens
  misc_RNA (1)...(19): siRNA sense strand
gauaccacagaaucacuua

SEQ ID NO: 1340425 - RNA, 19 nt, Homo sapiens
  misc_RNA (1)...(19): siRNA sense strand
gcagaagcccgagaaagga

SEQ ID NO: 1340426 - RNA, 19 nt, Homo sapiens
  misc_RNA (1)...(19): siRNA sense strand
acaaauagcaugguagaau

SEQ ID NO: 1340427 - RNA, 19 nt, Homo sapiens
  misc_RNA (1)...(19): siRNA sense strand
gugcaaauaucaucuucca

SEQ ID NO: 1340428 - RNA, 19 nt, Homo sapiens
  misc_RNA (1)...(19): siRNA sense strand
acaauucaaugcucauauc

SEQ ID NO: 1340429 - RNA, 19 nt, Homo sapiens
  misc_RNA (1)...(19): siRNA sense strand
gaagauacaauucaaugcu

SEQ ID NO: 1340430 - RNA, 19 nt, Homo sapiens
  misc_RNA (1)...(19): siRNA sense strand
gaugcugaccuguuugauu

SEQ ID NO: 1340431 - RNA, 19 nt, Homo sapiens
  misc_RNA (1)...(19): siRNA sense strand
cacgugaacuugucuccaa

SEQ ID NO: 1340432 - RNA, 19 nt, Homo sapiens
  misc_RNA (1)...(19): siRNA sense strand
ucaugaagauggagaaugc

SEQ ID NO: 1340433 - RNA, 19 nt, Homo sapiens
  misc_RNA (1)...(19): siRNA sense strand
uuaugaugcugaugaauuc

SEQ ID NO: 1340434 - RNA, 19 nt, Homo sapiens
  misc_RNA (1)...(19): siRNA sense strand
caucucuugucgcagguua

SEQ ID NO: 1340435 - RNA, 19 nt, Homo sapiens
  misc_RNA (1)...(19): siRNA sense strand
gguaguucuuccaacguuu

SEQ ID NO: 1340436 - RNA, 19 nt, Homo sapiens
  misc_RNA (1)...(19): siRNA sense strand
caaagcgcuuaauagauuc

SEQ ID NO: 1340437 - RNA, 19 nt, Homo sapiens
  misc_RNA (1)...(19): siRNA sense strand
caagugaugcugaccuguu

SEQ ID NO: 1340438 - RNA, 19 nt, Homo sapiens
  misc_RNA (1)...(19): siRNA sense strand
ugaugaaccauuacugaaa

SEQ ID NO: 1340439 - RNA, 19 nt, Homo sapiens
  misc_RNA (1)...(19): siRNA sense strand
gggcaagaagcacagaauu

SEQ ID NO: 1340440 - RNA, 19 nt, Homo sapiens
  misc_RNA (1)...(19): siRNA sense strand
cuuccaacguuuauucuug

SEQ ID NO: 1340441 - RNA, 19 nt, Homo sapiens
  misc_RNA (1)...(19): siRNA sense strand
agacuuggaauggaucuua

SEQ ID NO: 1340442 - RNA, 19 nt, Homo sapiens
  misc_RNA (1)...(19): siRNA sense strand
caagagcguuaucaugcau

SEQ ID NO: 1340443 - RNA, 19 nt, Homo sapiens
  misc_RNA (1)...(19): siRNA sense strand
aagugaugcugaccuguuu

SEQ ID NO: 1340444 - RNA, 19 nt, Homo sapiens
  misc_RNA (1)...(19): siRNA sense strand
augcugaccuguuugauuc

SEQ ID NO: 1340445 - RNA, 19 nt, Homo sapiens
  misc_RNA (1)...(19): siRNA sense strand
aaugcuggguuuaugauga

SEQ ID NO: 1340446 - RNA, 19 nt, Homo sapiens
  misc_RNA (1)...(19): siRNA sense strand
gaaguuggaagaucagaac

SEQ ID NO: 1340447 - RNA, 19 nt, Homo sapiens
  misc_RNA (1)...(19): siRNA sense strand
agacuaugaugaacauuac

SEQ ID NO: 1340448 - RNA, 19 nt, Homo sapiens
  misc_RNA (1)...(19): siRNA sense strand
agagaacacagaacuaguu

SEQ ID NO: 1340449 - RNA, 19 nt, Homo sapiens
  misc_RNA (1)...(19): siRNA sense strand
ucccaaggaucgaaugguu

SEQ ID NO: 1340450 - RNA, 19 nt, Homo sapiens
  misc_RNA (1)...(19): siRNA sense strand
ggaccuguuugugagcauu

SEQ ID NO: 1340451 - RNA, 19 nt, Homo sapiens
  misc_RNA (1)...(19): siRNA sense strand
ugauucacaugaugacaga

SEQ ID NO: 1340452 - RNA, 19 nt, Homo sapiens
  misc_RNA (1)...(19): siRNA sense strand
uaugaugaaccauuacuga

SEQ ID NO: 1340453 - RNA, 19 nt, Homo sapiens
  misc_RNA (1)...(19): siRNA sense strand
ggaggagaaugcaauauua

SEQ ID NO: 1340454 - RNA, 19 nt, Homo sapiens
  misc_RNA (1)...(19): siRNA sense strand
ccaaagcgcuuaauagauu

SEQ ID NO: 1340455 - RNA, 19 nt, Homo sapiens
  misc_RNA (1)...(19): siRNA sense strand
ggaugucacuuucaacuua

SEQ ID NO: 1340456 - RNA, 19 nt, Homo sapiens
  misc_RNA (1)...(19): siRNA sense strand
caaagaagaugaacagaga

SEQ ID NO: 1340457 - RNA, 19 nt, Homo sapiens
  misc_RNA (1)...(19): siRNA sense strand
gaacuugucuccaaauaca

SEQ ID NO: 1340458 - RNA, 19 nt, Homo sapiens
  misc_RNA (1)...(19): siRNA sense strand
gcucauaucuggaccaaau

SEQ ID NO: 1340459 - RNA, 19 nt, Homo sapiens
  misc_RNA (1)...(19): siRNA sense strand
ggaaggaugucacuuucaa

SEQ ID NO: 1340460 - RNA, 19 nt, Homo sapiens
  misc_RNA (1)...(19): siRNA sense strand
gcacaggcuugaagaaaga

SEQ ID NO: 1340461 - RNA, 19 nt, Homo sapiens
  misc_RNA (1)...(19): siRNA sense strand
gaaaggaucaguugccaaa

SEQ ID NO: 1340462 - RNA, 19 nt, Homo sapiens
  misc_RNA (1)...(19): siRNA sense strand
gagacaagguuauuucaug

SEQ ID NO: 1340463 - RNA, 19 nt, Homo sapiens
  misc_RNA (1)...(19): siRNA sense strand
agaaauguaugcagacuuu

SEQ ID NO: 1340464 - RNA, 19 nt, Homo sapiens
  misc_RNA (1)...(19): siRNA sense strand
gaacacagaacuaguuuca

SEQ ID NO: 1340465 - RNA, 19 nt, Homo sapiens
  misc_RNA (1)...(19): siRNA sense strand
ggaauggaauggugugaug

SEQ ID NO: 1340466 - RNA, 19 nt, Homo sapiens
  misc_RNA (1)...(19): siRNA sense strand
acacagaacuaguuucaga

SEQ ID NO: 1340467 - RNA, 19 nt, Homo sapiens
  misc_RNA (1)...(19): siRNA sense strand
gaaguugccuauaaucaag

SEQ ID NO: 1340468 - RNA, 19 nt, Homo sapiens
  misc_RNA (1)...(19): siRNA sense strand
caaauacagucccagaguu

SEQ ID NO: 1340469 - RNA, 19 nt, Homo sapiens
  misc_RNA (1)...(19): siRNA sense strand
ccaagaaguugccuauaau

SEQ ID NO: 1340470 - RNA, 19 nt, Homo sapiens
  misc_RNA (1)...(19): siRNA sense strand
gacaacaaauagcauggua

SEQ ID NO: 1340471 - RNA, 19 nt, Homo sapiens
  misc_RNA (1)...(19): siRNA sense strand
caaaugauacugaagagaa

SEQ ID NO: 1340472 - RNA, 19 nt, Homo sapiens
  misc_RNA (1)...(19): siRNA sense strand
ggcaagaagcacagaauua

SEQ ID NO: 1340473 - RNA, 19 nt, Homo sapiens
  misc_RNA (1)...(19): siRNA sense strand
ggagaaugcuggguuuaug

SEQ ID NO: 1340474 - RNA, 19 nt, Homo sapiens
  misc_RNA (1)...(19): siRNA sense strand
caaauagcaugguagaauc

SEQ ID NO: 1340475 - RNA, 19 nt, Homo sapiens
  misc_RNA (1)...(19): siRNA sense strand
ggaaggagaaggaaauuca

SEQ ID NO: 1340476 - RNA, 19 nt, Homo sapiens
  misc_RNA (1)...(19): siRNA sense strand
gaagaugaacagagaaaga

SEQ ID NO: 1340477 - RNA, 19 nt, Homo sapiens
  misc_RNA (1)...(19): siRNA sense strand
cacagcagcucgggaaaua

SEQ ID NO: 1340478 - RNA, 19 nt, Homo sapiens
  misc_RNA (1)...(19): siRNA sense strand
gaaauucagugggagacaa

SEQ ID NO: 1340479 - RNA, 19 nt, Homo sapiens
  misc_RNA (1)...(19): siRNA sense strand
cagaauuacugccgagauu

SEQ ID NO: 1340480 - RNA, 19 nt, Homo sapiens
  misc_RNA (1)...(19): siRNA sense strand
ggaaggaaaggaucaguug
